United States Patent Application Publication US 2018/0305689 A1 - sequence listing, part 116

SEQ ID NO: 1652841 - RNA, 19 nt, Artificial Sequence
  Description of Artificial Sequence: Synthetic oligonucleotide
  Sense strand starting at position 804 of SEQ ID NO: 1561184
gccaucuccuaccgaguau

SEQ ID NO: 1652842 - RNA, 19 nt, Artificial Sequence
  Description of Artificial Sequence: Synthetic oligonucleotide
  Antisense strand to SEQ ID NO: 1652841
auacucgguaggagauggc

SEQ ID NO: 1652843 - RNA, 19 nt, Artificial Sequence
  Description of Artificial Sequence: Synthetic oligonucleotide
  Sense strand starting at position 853 of SEQ ID NO: 1561184
gaguauggccugggccaau

SEQ ID NO: 1652844 - RNA, 19 nt, Artificial Sequence
  Description of Artificial Sequence: Synthetic oligonucleotide
  Antisense strand to SEQ ID NO: 1652843
auuggcccaggccauacuc

SEQ ID NO: 1652845 - RNA, 19 nt, Artificial Sequence
  Description of Artificial Sequence: Synthetic oligonucleotide
  Sense strand starting at position 1207 of SEQ ID NO: 1561184
gcaagacaccgucauuaaa

SEQ ID NO: 1652846 - RNA, 19 nt, Artificial Sequence
  Description of Artificial Sequence: Synthetic oligonucleotide
  Antisense strand to SEQ ID NO: 1652845
uuuaaugacggugucuugc

SEQ ID NO: 1652847 - RNA, 19 nt, Artificial Sequence
  Description of Artificial Sequence: Synthetic oligonucleotide
  Sense strand starting at position 1335 of SEQ ID NO: 1561184
cagagagcuuucucccgau

SEQ ID NO: 1652848 - RNA, 19 nt, Artificial Sequence
  Description of Artificial Sequence: Synthetic oligonucleotide
  Antisense strand to SEQ ID NO: 1652847
aucgggagaaagcucucug

SEQ ID NO: 1652849 - RNA, 19 nt, Artificial Sequence
  Description of Artificial Sequence: Synthetic oligonucleotide
  Sense strand starting at position 1339 of SEQ ID NO: 1561184
gagcuuucucccgauuggu

SEQ ID NO: 1652850 - RNA, 19 nt, Artificial Sequence
  Description of Artificial Sequence: Synthetic oligonucleotide
  Antisense strand to SEQ ID NO: 1652849
accaaucgggagaaagcuc

SEQ ID NO: 1652851 - RNA, 19 nt, Artificial Sequence
  Description of Artificial Sequence: Synthetic oligonucleotide
  Sense strand starting at position 1447 of SEQ ID NO: 1561184
ggacccaucuuguacccaa

SEQ ID NO: 1652852 - RNA, 19 nt, Artificial Sequence
  Description of Artificial Sequence: Synthetic oligonucleotide
  Antisense strand to SEQ ID NO: 1652851
uuggguacaagaugggucc

SEQ ID NO: 1652853 - RNA, 19 nt, Artificial Sequence
  Description of Artificial Sequence: Synthetic oligonucleotide
  Sense strand starting at position 2050 of SEQ ID NO: 1561184
ccaugucacucaggaugaa

SEQ ID NO: 1652854 - RNA, 19 nt, Artificial Sequence
  Description of Artificial Sequence: Synthetic oligonucleotide
  Antisense strand to SEQ ID NO: 1652853
uucauccugagugacaugg

SEQ ID NO: 1652855 - RNA, 19 nt, Artificial Sequence
  Description of Artificial Sequence: Synthetic oligonucleotide
  Sense strand starting at position 2108 of SEQ ID NO: 1561184
gcgugaacuguccauuggu

SEQ ID NO: 1652856 - RNA, 19 nt, Artificial Sequence
  Description of Artificial Sequence: Synthetic oligonucleotide
  Antisense strand to SEQ ID NO: 1652855
accaauggacaguucacgc

SEQ ID NO: 1652857 - RNA, 19 nt, Artificial Sequence
  Description of Artificial Sequence: Synthetic oligonucleotide
  Sense strand starting at position 2133 of SEQ ID NO: 1561184
ggcagugauucccuccucu

SEQ ID NO: 1652858 - RNA, 19 nt, Artificial Sequence
  Description of Artificial Sequence: Synthetic oligonucleotide
  Antisense strand to SEQ ID NO: 1652857
agaggagggaaucacugcc

SEQ ID NO: 1652859 - RNA, 19 nt, Artificial Sequence
  Description of Artificial Sequence: Synthetic oligonucleotide
  Sense strand starting at position 2137 of SEQ ID NO: 1561184
gugauucccuccucuguca

SEQ ID NO: 1652860 - RNA, 19 nt, Artificial Sequence
  Description of Artificial Sequence: Synthetic oligonucleotide
  Antisense strand to SEQ ID NO: 1652859
ugacagaggagggaaucac

SEQ ID NO: 1652861 - RNA, 19 nt, Artificial Sequence
  Description of Artificial Sequence: Synthetic oligonucleotide
  Sense strand starting at position 2170 of SEQ ID NO: 1561184
gcccgucccuccuugauuu

SEQ ID NO: 1652862 - RNA, 19 nt, Artificial Sequence
  Description of Artificial Sequence: Synthetic oligonucleotide
  Antisense strand to SEQ ID NO: 1652861
aaaucaaggagggacgggc

SEQ ID NO: 1652863 - RNA, 19 nt, Artificial Sequence
  Description of Artificial Sequence: Synthetic oligonucleotide
  Sense strand starting at position 2199 of SEQ ID NO: 1561184
uacgaaucccagcgaucau

SEQ ID NO: 1652864 - RNA, 19 nt, Artificial Sequence
  Description of Artificial Sequence: Synthetic oligonucleotide
  Antisense strand to SEQ ID NO: 1652863
augaucgcugggauucgua

SEQ ID NO: 1652865 - RNA, 19 nt, Artificial Sequence
  Description of Artificial Sequence: Synthetic oligonucleotide
  Sense strand starting at position 2200 of SEQ ID NO: 1561184
acgaaucccagcgaucauu

SEQ ID NO: 1652866 - RNA, 19 nt, Artificial Sequence
  Description of Artificial Sequence: Synthetic oligonucleotide
  Antisense strand to SEQ ID NO: 1652865
aaugaucgcugggauucgu

SEQ ID NO: 1652867 - RNA, 19 nt, Artificial Sequence
  Description of Artificial Sequence: Synthetic oligonucleotide
  Sense strand starting at position 2252 of SEQ ID NO: 1561184
ggcgagaugucugcuggga

SEQ ID NO: 1652868 - RNA, 19 nt, Artificial Sequence
  Description of Artificial Sequence: Synthetic oligonucleotide
  Antisense strand to SEQ ID NO: 1652867
ucccagcagacaucucgcc

SEQ ID NO: 1652869 - RNA, 19 nt, Artificial Sequence
  Description of Artificial Sequence: Synthetic oligonucleotide
  Sense strand starting at position 2254 of SEQ ID NO: 1561184
cgagaugucugcugggaau

SEQ ID NO: 1652870 - RNA, 19 nt, Artificial Sequence
  Description of Artificial Sequence: Synthetic oligonucleotide
  Antisense strand to SEQ ID NO: 1652869
auucccagcagacaucucg

SEQ ID NO: 1652871 - RNA, 19 nt, Artificial Sequence
  Description of Artificial Sequence: Synthetic oligonucleotide
  Sense strand starting at position 2256 of SEQ ID NO: 1561184
agaugucugcugggaauug

SEQ ID NO: 1652872 - RNA, 19 nt, Artificial Sequence
  Description of Artificial Sequence: Synthetic oligonucleotide
  Antisense strand to SEQ ID NO: 1652871
caauucccagcagacaucu

SEQ ID NO: 1652873 - RNA, 19 nt, Artificial Sequence
  Description of Artificial Sequence: Synthetic oligonucleotide
  Sense strand starting at position 2257 of SEQ ID NO: 1561184
gaugucugcugggaauugu

SEQ ID NO: 1652874 - RNA, 19 nt, Artificial Sequence
  Description of Artificial Sequence: Synthetic oligonucleotide
  Antisense strand to SEQ ID NO: 1652873
acaauucccagcagacauc

SEQ ID NO: 1652875 - RNA, 19 nt, Artificial Sequence
  Description of Artificial Sequence: Synthetic oligonucleotide
  Sense strand starting at position 2323 of SEQ ID NO: 1561184
guaguuguuucuugguugu

SEQ ID NO: 1652876 - RNA, 19 nt, Artificial Sequence
  Description of Artificial Sequence: Synthetic oligonucleotide
  Antisense strand to SEQ ID NO: 1652875
acaaccaagaaacaacuac

SEQ ID NO: 1652877 - RNA, 19 nt, Artificial Sequence
  Description of Artificial Sequence: Synthetic oligonucleotide
  Sense strand starting at position 2779 of SEQ ID NO: 1561184
ccaggucugucucuuuaag

SEQ ID NO: 1652878 - RNA, 19 nt, Artificial Sequence
  Description of Artificial Sequence: Synthetic oligonucleotide
  Antisense strand to SEQ ID NO: 1652877
cuuaaagagacagaccugg

SEQ ID NO: 1652879 - RNA, 19 nt, Artificial Sequence
  Description of Artificial Sequence: Synthetic oligonucleotide
  Sense strand starting at position 2781 of SEQ ID NO: 1561184
aggucugucucuuuaagac

SEQ ID NO: 1652880 - RNA, 19 nt, Artificial Sequence
  Description of Artificial Sequence: Synthetic oligonucleotide
  Antisense strand to SEQ ID NO: 1652879
gucuuaaagagacagaccu

SEQ ID NO: 1652881 - RNA, 19 nt, Artificial Sequence
  Description of Artificial Sequence: Synthetic oligonucleotide
  Sense strand starting at position 2785 of SEQ ID NO: 1561184
cugucucuuuaagacagau

SEQ ID NO: 1652882 - RNA, 19 nt, Artificial Sequence
  Description of Artificial Sequence: Synthetic oligonucleotide
  Antisense strand to SEQ ID NO: 1652881
aucugucuuaaagagacag

SEQ ID NO: 1652883 - RNA, 19 nt, Artificial Sequence
  Description of Artificial Sequence: Synthetic oligonucleotide
  Sense strand starting at position 3230 of SEQ ID NO: 1561184
gcaggagaaucguuucaug

SEQ ID NO: 1652884 - RNA, 19 nt, Artificial Sequence
  Description of Artificial Sequence: Synthetic oligonucleotide
  Antisense strand to SEQ ID NO: 1652883
caugaaacgauucuccugc

SEQ ID NO: 1652885 - RNA, 19 nt, Artificial Sequence
  Description of Artificial Sequence: Synthetic oligonucleotide
  Sense strand starting at position 3882 of SEQ ID NO: 1561184
uguagaaguauuggugaug

SEQ ID NO: 1652886 - RNA, 19 nt, Artificial Sequence
  Description of Artificial Sequence: Synthetic oligonucleotide
  Antisense strand to SEQ ID NO: 1652885
caucaccaauacuucuaca

SEQ ID NO: 1652887 - RNA, 19 nt, Artificial Sequence
  Description of Artificial Sequence: Synthetic oligonucleotide
  Sense strand starting at position 222 of SEQ ID NO: 1561185
guaccugugacuuguaaac

SEQ ID NO: 1652888 - RNA, 19 nt, Artificial Sequence
  Description of Artificial Sequence: Synthetic oligonucleotide
  Antisense strand to SEQ ID NO: 1652887
guuuacaagucacagguac

SEQ ID NO: 1652889 - RNA, 19 nt, Artificial Sequence
  Description of Artificial Sequence: Synthetic oligonucleotide
  Sense strand starting at position 349 of SEQ ID NO: 1561185
gcacuuagggaccaugagu

SEQ ID NO: 1652890 - RNA, 19 nt, Artificial Sequence
  Description of Artificial Sequence: Synthetic oligonucleotide
  Antisense strand to SEQ ID NO: 1652889
acucauggucccuaagugc

SEQ ID NO: 1652891 - RNA, 19 nt, Artificial Sequence
  Description of Artificial Sequence: Synthetic oligonucleotide
  Sense strand starting at position 787 of SEQ ID NO: 1561185
agaggucuuccuggaccuu

SEQ ID NO: 1652892 - RNA, 19 nt, Artificial Sequence
  Description of Artificial Sequence: Synthetic oligonucleotide
  Antisense strand to SEQ ID NO: 1652891
aagguccaggaagaccucu

SEQ ID NO: 1652893 - RNA, 19 nt, Artificial Sequence
  Description of Artificial Sequence: Synthetic oligonucleotide
  Sense strand starting at position 788 of SEQ ID NO: 1561185
gaggucuuccuggaccuuu

SEQ ID NO: 1652894 - RNA, 19 nt, Artificial Sequence
  Description of Artificial Sequence: Synthetic oligonucleotide
  Antisense strand to SEQ ID NO: 1652893
aaagguccaggaagaccuc

SEQ ID NO: 1652895 - RNA, 19 nt, Artificial Sequence
  Description of Artificial Sequence: Synthetic oligonucleotide
  Sense strand starting at position 867 of SEQ ID NO: 1561185
gggugcaucucuccaccua

SEQ ID NO: 1652896 - RNA, 19 nt, Artificial Sequence
  Description of Artificial Sequence: Synthetic oligonucleotide
  Antisense strand to SEQ ID NO: 1652895
uagguggagagaugcaccc

SEQ ID NO: 1652897 - RNA, 19 nt, Artificial Sequence
  Description of Artificial Sequence: Synthetic oligonucleotide
  Sense strand starting at position 868 of SEQ ID NO: 1561185
ggugcaucucuccaccuaa

SEQ ID NO: 1652898 - RNA, 19 nt, Artificial Sequence
  Description of Artificial Sequence: Synthetic oligonucleotide
  Antisense strand to SEQ ID NO: 1652897
uuagguggagagaugcacc

SEQ ID NO: 1652899 - RNA, 19 nt, Artificial Sequence
  Description of Artificial Sequence: Synthetic oligonucleotide
  Sense strand starting at position 894 of SEQ ID NO: 1561185
agaggucuguccagggaug

SEQ ID NO: 1652900 - RNA, 19 nt, Artificial Sequence
  Description of Artificial Sequence: Synthetic oligonucleotide
  Antisense strand to SEQ ID NO: 1652899
caucccuggacagaccucu

SEQ ID NO: 1652901 - RNA, 19 nt, Artificial Sequence
  Description of Artificial Sequence: Synthetic oligonucleotide
  Sense strand starting at position 895 of SEQ ID NO: 1561185
gaggucuguccagggaugu

SEQ ID NO: 1652902 - RNA, 19 nt, Artificial Sequence
  Description of Artificial Sequence: Synthetic oligonucleotide
  Antisense strand to SEQ ID NO: 1652901
acaucccuggacagaccuc

SEQ ID NO: 1652903 - RNA, 19 nt, Artificial Sequence
  Description of Artificial Sequence: Synthetic oligonucleotide
  Sense strand starting at position 896 of SEQ ID NO: 1561185
aggucuguccagggauguu

SEQ ID NO: 1652904 - RNA, 19 nt, Artificial Sequence
  Description of Artificial Sequence: Synthetic oligonucleotide
  Antisense strand to SEQ ID NO: 1652903
aacaucccuggacagaccu

SEQ ID NO: 1652905 - RNA, 19 nt, Artificial Sequence
  Description of Artificial Sequence: Synthetic oligonucleotide
  Sense strand starting at position 963 of SEQ ID NO: 1561185
ugcagacaucugcaagaau

SEQ ID NO: 1652906 - RNA, 19 nt, Artificial Sequence
  Description of Artificial Sequence: Synthetic oligonucleotide
  Antisense strand to SEQ ID NO: 1652905
auucuugcagaugucugca

SEQ ID NO: 1652907 - RNA, 19 nt, Artificial Sequence
  Description of Artificial Sequence: Synthetic oligonucleotide
  Sense strand starting at position 1149 of SEQ ID NO: 1561185
aauaauuccggccaucagu

SEQ ID NO: 1652908 - RNA, 19 nt, Artificial Sequence
  Description of Artificial Sequence: Synthetic oligonucleotide
  Antisense strand to SEQ ID NO: 1652907
acugauggccggaauuauu

SEQ ID NO: 1652909 - RNA, 19 nt, Artificial Sequence
  Description of Artificial Sequence: Synthetic oligonucleotide
  Sense strand starting at position 1664 of SEQ ID NO: 1561185
aaaggucucgagggcagaa

SEQ ID NO: 1652910 - RNA, 19 nt, Artificial Sequence
  Description of Artificial Sequence: Synthetic oligonucleotide
  Antisense strand to SEQ ID NO: 1652909
uucugcccucgagaccuuu

SEQ ID NO: 1652911 - RNA, 19 nt, Artificial Sequence
  Description of Artificial Sequence: Synthetic oligonucleotide
  Sense strand starting at position 2035 of SEQ ID NO: 1561185
gaccaaucagugugucuug

SEQ ID NO: 1652912 - RNA, 19 nt, Artificial Sequence
  Description of Artificial Sequence: Synthetic oligonucleotide
  Antisense strand to SEQ ID NO: 1652911
caagacacacugauugguc

SEQ ID NO: 1652913 - RNA, 19 nt, Artificial Sequence
  Description of Artificial Sequence: Synthetic oligonucleotide
  Sense strand starting at position 2086 of SEQ ID NO: 1561185
ucgcguugcaugccggaaa

SEQ ID NO: 1652914 - RNA, 19 nt, Artificial Sequence
  Description of Artificial Sequence: Synthetic oligonucleotide
  Antisense strand to SEQ ID NO: 1652913
uuuccggcaugcaacgcga

SEQ ID NO: 1652915 - RNA, 19 nt, Artificial Sequence
  Description of Artificial Sequence: Synthetic oligonucleotide
  Sense strand starting at position 2099 of SEQ ID NO: 1561185
cggaaauuguaguucagau

SEQ ID NO: 1652916 - RNA, 19 nt, Artificial Sequence
  Description of Artificial Sequence: Synthetic oligonucleotide
  Antisense strand to SEQ ID NO: 1652915
aucugaacuacaauuuccg

SEQ ID NO: 1652917 - RNA, 19 nt, Artificial Sequence
  Description of Artificial Sequence: Synthetic oligonucleotide
  Sense strand starting at position 2121 of SEQ ID NO: 1561185
cugguucggaucgaucaaa

SEQ ID NO: 1652918 - RNA, 19 nt, Artificial Sequence
  Description of Artificial Sequence: Synthetic oligonucleotide
  Antisense strand to SEQ ID NO: 1652917
uuugaucgauccgaaccag

SEQ ID NO: 1652919 - RNA, 19 nt, Artificial Sequence
  Description of Artificial Sequence: Synthetic oligonucleotide
  Sense strand starting at position 2141 of SEQ ID NO: 1561185
ugaagauugugucugggag

SEQ ID NO: 1652920 - RNA, 19 nt, Artificial Sequence
  Description of Artificial Sequence: Synthetic oligonucleotide
  Antisense strand to SEQ ID NO: 1652919
cucccagacacaaucuuca

SEQ ID NO: 1652921 - RNA, 19 nt, Artificial Sequence
  Description of Artificial Sequence: Synthetic oligonucleotide
  Sense strand starting at position 2216 of SEQ ID NO: 1561185
aagguuugcagcgaaagca

SEQ ID NO: 1652922 - RNA, 19 nt, Artificial Sequence
  Description of Artificial Sequence: Synthetic oligonucleotide
  Antisense strand to SEQ ID NO: 1652921
ugcuuucgcugcaaaccuu

SEQ ID NO: 1652923 - RNA, 19 nt, Artificial Sequence
  Description of Artificial Sequence: Synthetic oligonucleotide
  Sense strand starting at position 2248 of SEQ ID NO: 1561185
aagggacauuucugagagu

SEQ ID NO: 1652924 - RNA, 19 nt, Artificial Sequence
  Description of Artificial Sequence: Synthetic oligonucleotide
  Antisense strand to SEQ ID NO: 1652923
acucucagaaaugucccuu

SEQ ID NO: 1652925 - RNA, 19 nt, Artificial Sequence
  Description of Artificial Sequence: Synthetic oligonucleotide
  Sense strand starting at position 2249 of SEQ ID NO: 1561185
agggacauuucugagagua

SEQ ID NO: 1652926 - RNA, 19 nt, Artificial Sequence
  Description of Artificial Sequence: Synthetic oligonucleotide
  Antisense strand to SEQ ID NO: 1652925
uacucucagaaaugucccu

SEQ ID NO: 1652927 - RNA, 19 nt, Artificial Sequence
  Description of Artificial Sequence: Synthetic oligonucleotide
  Sense strand starting at position 2251 of SEQ ID NO: 1561185
ggacauuucugagaguaga

SEQ ID NO: 1652928 - RNA, 19 nt, Artificial Sequence
  Description of Artificial Sequence: Synthetic oligonucleotide
  Antisense strand to SEQ ID NO: 1652927
ucuacucucagaaaugucc

SEQ ID NO: 1652929 - RNA, 19 nt, Artificial Sequence
  Description of Artificial Sequence: Synthetic oligonucleotide
  Sense strand starting at position 2304 of SEQ ID NO: 1561185
ccacuuaguagacgaagua

SEQ ID NO: 1652930 - RNA, 19 nt, Artificial Sequence
  Description of Artificial Sequence: Synthetic oligonucleotide
  Antisense strand to SEQ ID NO: 1652929
uacuucgucuacuaagugg

SEQ ID NO: 1652931 - RNA, 19 nt, Artificial Sequence
  Description of Artificial Sequence: Synthetic oligonucleotide
  Sense strand starting at position 2313 of SEQ ID NO: 1561185
agacgaaguacuuaguacu

SEQ ID NO: 1652932 - RNA, 19 nt, Artificial Sequence
  Description of Artificial Sequence: Synthetic oligonucleotide
  Antisense strand to SEQ ID NO: 1652931
aguacuaaguacuucgucu

SEQ ID NO: 1652933 - RNA, 19 nt, Artificial Sequence
  Description of Artificial Sequence: Synthetic oligonucleotide
  Sense strand starting at position 2383 of SEQ ID NO: 1561185
ugacuuaaaucugcugcua

SEQ ID NO: 1652934 - RNA, 19 nt, Artificial Sequence
  Description of Artificial Sequence: Synthetic oligonucleotide
  Antisense strand to SEQ ID NO: 1652933
uagcagcagauuuaaguca

SEQ ID NO: 1652935 - RNA, 19 nt, Artificial Sequence
  Description of Artificial Sequence: Synthetic oligonucleotide
  Sense strand starting at position 2733 of SEQ ID NO: 1561185
gggaucugauguucuuuau

SEQ ID NO: 1652936 - RNA, 19 nt, Artificial Sequence
  Description of Artificial Sequence: Synthetic oligonucleotide
  Antisense strand to SEQ ID NO: 1652935
auaaagaacaucagauccc

SEQ ID NO: 1652937 - RNA, 19 nt, Artificial Sequence
  Description of Artificial Sequence: Synthetic oligonucleotide
  Sense strand starting at position 2799 of SEQ ID NO: 1561185
ccauuugucuuucugugga

SEQ ID NO: 1652938 - RNA, 19 nt, Artificial Sequence
  Description of Artificial Sequence: Synthetic oligonucleotide
  Antisense strand to SEQ ID NO: 1652937
uccacagaaagacaaaugg

SEQ ID NO: 1652939 - RNA, 19 nt, Artificial Sequence
  Description of Artificial Sequence: Synthetic oligonucleotide
  Sense strand starting at position 2802 of SEQ ID NO: 1561185
uuugucuuucuguggauga

SEQ ID NO: 1652940 - RNA, 19 nt, Artificial Sequence
  Description of Artificial Sequence: Synthetic oligonucleotide
  Antisense strand to SEQ ID NO: 1652939
ucauccacagaaagacaaa

SEQ ID NO: 1652941 - RNA, 19 nt, Artificial Sequence
  Description of Artificial Sequence: Synthetic oligonucleotide
  Sense strand starting at position 2804 of SEQ ID NO: 1561185
ugucuuucuguggaugagu

SEQ ID NO: 1652942 - RNA, 19 nt, Artificial Sequence
  Description of Artificial Sequence: Synthetic oligonucleotide
  Antisense strand to SEQ ID NO: 1652941
acucauccacagaaagaca

SEQ ID NO: 1652943 - RNA, 19 nt, Artificial Sequence
  Description of Artificial Sequence: Synthetic oligonucleotide
  Sense strand starting at position 2840 of SEQ ID NO: 1561185
gacauauauuggguaugac

SEQ ID NO: 1652944 - RNA, 19 nt, Artificial Sequence
  Description of Artificial Sequence: Synthetic oligonucleotide
  Antisense strand to SEQ ID NO: 1652943
gucauacccaauauauguc

SEQ ID NO: 1652945 - RNA, 19 nt, Artificial Sequence
  Description of Artificial Sequence: Synthetic oligonucleotide
  Sense strand starting at position 2843 of SEQ ID NO: 1561185
auauauuggguaugacuga

SEQ ID NO: 1652946 - RNA, 19 nt, Artificial Sequence
  Description of Artificial Sequence: Synthetic oligonucleotide
  Antisense strand to SEQ ID NO: 1652945
ucagucauacccaauauau

SEQ ID NO: 1652947 - RNA, 19 nt, Artificial Sequence
  Description of Artificial Sequence: Synthetic oligonucleotide
  Sense strand starting at position 2901 of SEQ ID NO: 1561185
gggccugaguaauuaccuu

SEQ ID NO: 1652948 - RNA, 19 nt, Artificial Sequence
  Description of Artificial Sequence: Synthetic oligonucleotide
  Antisense strand to SEQ ID NO: 1652947
aagguaauuacucaggccc

SEQ ID NO: 1652949 - RNA, 19 nt, Artificial Sequence
  Description of Artificial Sequence: Synthetic oligonucleotide
  Sense strand starting at position 3401 of SEQ ID NO: 1561185
uagaaagcggcccauaguu

SEQ ID NO: 1652950 - RNA, 19 nt, Artificial Sequence
  Description of Artificial Sequence: Synthetic oligonucleotide
  Antisense strand to SEQ ID NO: 1652949
aacuaugggccgcuuucua

SEQ ID NO: 1652951 - RNA, 19 nt, Artificial Sequence
  Description of Artificial Sequence: Synthetic oligonucleotide
  Sense strand starting at position 3704 of SEQ ID NO: 1561185
guggguaacuggcugaaga

SEQ ID NO: 1652952 - RNA, 19 nt, Artificial Sequence
  Description of Artificial Sequence: Synthetic oligonucleotide
  Antisense strand to SEQ ID NO: 1652951
ucuucagccaguuacccac

SEQ ID NO: 1652953 - RNA, 19 nt, Artificial Sequence
  Description of Artificial Sequence: Synthetic oligonucleotide
  Sense strand starting at position 3706 of SEQ ID NO: 1561185
ggguaacuggcugaagagu

SEQ ID NO: 1652954 - RNA, 19 nt, Artificial Sequence
  Description of Artificial Sequence: Synthetic oligonucleotide
  Antisense strand to SEQ ID NO: 1652953
acucuucagccaguuaccc

SEQ ID NO: 1652955 - RNA, 19 nt, Artificial Sequence
  Description of Artificial Sequence: Synthetic oligonucleotide
  Sense strand starting at position 3714 of SEQ ID NO: 1561185
ggcugaagaguuugcauca

SEQ ID NO: 1652956 - RNA, 19 nt, Artificial Sequence
  Description of Artificial Sequence: Synthetic oligonucleotide
  Antisense strand to SEQ ID NO: 1652955
ugaugcaaacucuucagcc

SEQ ID NO: 1652957 - RNA, 19 nt, Artificial Sequence
  Description of Artificial Sequence: Synthetic oligonucleotide
  Sense strand starting at position 3715 of SEQ ID NO: 1561185
gcugaagaguuugcaucau

SEQ ID NO: 1652958 - RNA, 19 nt, Artificial Sequence
  Description of Artificial Sequence: Synthetic oligonucleotide
  Antisense strand to SEQ ID NO: 1652957
augaugcaaacucuucagc

SEQ ID NO: 1652959 - RNA, 19 nt, Artificial Sequence
  Description of Artificial Sequence: Synthetic oligonucleotide
  Sense strand starting at position 3719 of SEQ ID NO: 1561185
aagaguuugcaucaucugu

SEQ ID NO: 1652960 - RNA, 19 nt, Artificial Sequence
  Description of Artificial Sequence: Synthetic oligonucleotide
  Antisense strand to SEQ ID NO: 1652959
acagaugaugcaaacucuu

SEQ ID NO: 1652961 - RNA, 19 nt, Artificial Sequence
  Description of Artificial Sequence: Synthetic oligonucleotide
  Sense strand starting at position 3797 of SEQ ID NO: 1561185
agccauugaucacugccau

SEQ ID NO: 1652962 - RNA, 19 nt, Artificial Sequence
  Description of Artificial Sequence: Synthetic oligonucleotide
  Antisense strand to SEQ ID NO: 1652961
auggcagugaucaauggcu

SEQ ID NO: 1652963 - RNA, 19 nt, Artificial Sequence
  Description of Artificial Sequence: Synthetic oligonucleotide
  Sense strand starting at position 3862 of SEQ ID NO: 1561185
ccaggugggaaguguugaa

SEQ ID NO: 1652964 - RNA, 19 nt, Artificial Sequence
  Description of Artificial Sequence: Synthetic oligonucleotide
  Antisense strand to SEQ ID NO: 1652963
uucaacacuucccaccugg

SEQ ID NO: 1652965 - RNA, 19 nt, Artificial Sequence
  Description of Artificial Sequence: Synthetic oligonucleotide
  Sense strand starting at position 3866 of SEQ ID NO: 1561185
gugggaaguguugaagacu

SEQ ID NO: 1652966 - RNA, 19 nt, Artificial Sequence
  Description of Artificial Sequence: Synthetic oligonucleotide
  Antisense strand to SEQ ID NO: 1652965
agucuucaacacuucccac

SEQ ID NO: 1652967 - RNA, 19 nt, Artificial Sequence
  Description of Artificial Sequence: Synthetic oligonucleotide
  Sense strand starting at position 23 of SEQ ID NO: 1561186
agcugaagucaucguccau

SEQ ID NO: 1652968 - RNA, 19 nt, Artificial Sequence
  Description of Artificial Sequence: Synthetic oligonucleotide
  Antisense strand to SEQ ID NO: 1652967
auggacgaugacuucagcu

SEQ ID NO: 1652969 - RNA, 19 nt, Artificial Sequence
  Description of Artificial Sequence: Synthetic oligonucleotide
  Sense strand starting at position 29 of SEQ ID NO: 1561186
agucaucguccaugaggga

SEQ ID NO: 1652970 - RNA, 19 nt, Artificial Sequence
  Description of Artificial Sequence: Synthetic oligonucleotide
  Antisense strand to SEQ ID NO: 1652969
ucccucauggacgaugacu

SEQ ID NO: 1652971 - RNA, 19 nt, Artificial Sequence
  Description of Artificial Sequence: Synthetic oligonucleotide
  Sense strand starting at position 99 of SEQ ID NO: 1561186
ucgccaugcucaguuauug

SEQ ID NO: 1652972 - RNA, 19 nt, Artificial Sequence
  Description of Artificial Sequence: Synthetic oligonucleotide
  Antisense strand to SEQ ID NO: 1652971
caauaacugagcauggcga

SEQ ID NO: 1652973 - RNA, 19 nt, Artificial Sequence
  Description of Artificial Sequence: Synthetic oligonucleotide
  Sense strand starting at position 107 of SEQ ID NO: 1561186
cucaguuauugguggagag

SEQ ID NO: 1652974 - RNA, 19 nt, Artificial Sequence
  Description of Artificial Sequence: Synthetic oligonucleotide
  Antisense strand to SEQ ID NO: 1652973
cucuccaccaauaacugag

SEQ ID NO: 1652975 - RNA, 19 nt, Artificial Sequence
  Description of Artificial Sequence: Synthetic oligonucleotide
  Sense strand starting at position 109 of SEQ ID NO: 1561186
caguuauugguggagagca

SEQ ID NO: 1652976 - RNA, 19 nt, Artificial Sequence
  Description of Artificial Sequence: Synthetic oligonucleotide
  Antisense strand to SEQ ID NO: 1652975
ugcucuccaccaauaacug

SEQ ID NO: 1652977 - RNA, 19 nt, Artificial Sequence
  Description of Artificial Sequence: Synthetic oligonucleotide
  Sense strand starting at position 121 of SEQ ID NO: 1561186
gagagcaacccaugguaau

SEQ ID NO: 1652978 - RNA, 19 nt, Artificial Sequence
  Description of Artificial Sequence: Synthetic oligonucleotide
  Antisense strand to SEQ ID NO: 1652977
auuaccauggguugcucuc

SEQ ID NO: 1652979 - RNA, 19 nt, Artificial Sequence
  Description of Artificial Sequence: Synthetic oligonucleotide
  Sense strand starting at position 131 of SEQ ID NO: 1561186
caugguaaucuaggugcau

SEQ ID NO: 1652980 - RNA, 19 nt, Artificial Sequence
  Description of Artificial Sequence: Synthetic oligonucleotide
  Antisense strand to SEQ ID NO: 1652979
augcaccuagauuaccaug

SEQ ID NO: 1652981 - RNA, 19 nt, Artificial Sequence
  Description of Artificial Sequence: Synthetic oligonucleotide
  Sense strand starting at position 133 of SEQ ID NO: 1561186
ugguaaucuaggugcaucu

SEQ ID NO: 1652982 - RNA, 19 nt, Artificial Sequence
  Description of Artificial Sequence: Synthetic oligonucleotide
  Antisense strand to SEQ ID NO: 1652981
agaugcaccuagauuacca

SEQ ID NO: 1652983 - RNA, 19 nt, Artificial Sequence
  Description of Artificial Sequence: Synthetic oligonucleotide
  Sense strand starting at position 1294 of SEQ ID NO: 1561186
aggccucauacacgagauu

SEQ ID NO: 1652984 - RNA, 19 nt, Artificial Sequence
  Description of Artificial Sequence: Synthetic oligonucleotide
  Antisense strand to SEQ ID NO: 1652983
aaucucguguaugaggccu

SEQ ID NO: 1652985 - RNA, 19 nt, Artificial Sequence
  Description of Artificial Sequence: Synthetic oligonucleotide
  Sense strand starting at position 1805 of SEQ ID NO: 1561186
gcucacuccauggguagaa

SEQ ID NO: 1652986 - RNA, 19 nt, Artificial Sequence
  Description of Artificial Sequence: Synthetic oligonucleotide
  Antisense strand to SEQ ID NO: 1652985
uucuacccauggagugagc

SEQ ID NO: 1652987 - RNA, 19 nt, Artificial Sequence
  Description of Artificial Sequence: Synthetic oligonucleotide
  Sense strand starting at position 1836 of SEQ ID NO: 1561186
uccauuuccgucugcgaga

SEQ ID NO: 1652988 - RNA, 19 nt, Artificial Sequence
  Description of Artificial Sequence: Synthetic oligonucleotide
  Antisense strand to SEQ ID NO: 1652987
ucucgcagacggaaaugga

SEQ ID NO: 1652989 - RNA, 19 nt, Artificial Sequence
  Description of Artificial Sequence: Synthetic oligonucleotide
  Sense strand starting at position 1838 of SEQ ID NO: 1561186
cauuuccgucugcgagaga

SEQ ID NO: 1652990 - RNA, 19 nt, Artificial Sequence
  Description of Artificial Sequence: Synthetic oligonucleotide
  Antisense strand to SEQ ID NO: 1652989
ucucucgcagacggaaaug

SEQ ID NO: 1652991 - RNA, 19 nt, Artificial Sequence
  Description of Artificial Sequence: Synthetic oligonucleotide
  Sense strand starting at position 1839 of SEQ ID NO: 1561186
auuuccgucugcgagagaa

SEQ ID NO: 1652992 - RNA, 19 nt, Artificial Sequence
  Description of Artificial Sequence: Synthetic oligonucleotide
  Antisense strand to SEQ ID NO: 1652991
uucucucgcagacggaaau

SEQ ID NO: 1652993 - RNA, 19 nt, Artificial Sequence
  Description of Artificial Sequence: Synthetic oligonucleotide
  Sense strand starting at position 2075 of SEQ ID NO: 1561186
ccaggauugugaguucugu

SEQ ID NO: 1652994 - RNA, 19 nt, Artificial Sequence
  Description of Artificial Sequence: Synthetic oligonucleotide
  Antisense strand to SEQ ID NO: 1652993
acagaacucacaauccugg

SEQ ID NO: 1652995 - RNA, 19 nt, Artificial Sequence
  Description of Artificial Sequence: Synthetic oligonucleotide
  Sense strand starting at position 2079 of SEQ ID NO: 1561186
gauugugaguucuguugcu

SEQ ID NO: 1652996 - RNA, 19 nt, Artificial Sequence
  Description of Artificial Sequence: Synthetic oligonucleotide
  Antisense strand to SEQ ID NO: 1652995
agcaacagaacucacaauc

SEQ ID NO: 1652997 - RNA, 19 nt, Artificial Sequence
  Description of Artificial Sequence: Synthetic oligonucleotide
  Sense strand starting at position 2084 of SEQ ID NO: 1561186
ugaguucuguugcuaggga

SEQ ID NO: 1652998 - RNA, 19 nt, Artificial Sequence
  Description of Artificial Sequence: Synthetic oligonucleotide
  Antisense strand to SEQ ID NO: 1652997
ucccuagcaacagaacuca

SEQ ID NO: 1652999 - RNA, 19 nt, Artificial Sequence
  Description of Artificial Sequence: Synthetic oligonucleotide
  Sense strand starting at position 2163 of SEQ ID NO: 1561186
gguguugauucuuuaggga

SEQ ID NO: 1653000 - RNA, 19 nt, Artificial Sequence
  Description of Artificial Sequence: Synthetic oligonucleotide
  Antisense strand to SEQ ID NO: 1652999
ucccuaaagaaucaacacc

SEQ ID NO: 1653001 - RNA, 19 nt, Artificial Sequence
  Description of Artificial Sequence: Synthetic oligonucleotide
  Sense strand starting at position 2200 of SEQ ID NO: 1561186
gcgucucagguuuagaaga

SEQ ID NO: 1653002 - RNA, 19 nt, Artificial Sequence
  Description of Artificial Sequence: Synthetic oligonucleotide
  Antisense strand to SEQ ID NO: 1653001
ucuucuaaaccugagacgc

SEQ ID NO: 1653003 - RNA, 19 nt, Artificial Sequence
  Description of Artificial Sequence: Synthetic oligonucleotide
  Sense strand starting at position 2227 of SEQ ID NO: 1561186
ggccacuuauggugggaaa

SEQ ID NO: 1653004 - RNA, 19 nt, Artificial Sequence
  Description of Artificial Sequence: Synthetic oligonucleotide
  Antisense strand to SEQ ID NO: 1653003
uuucccaccauaaguggcc

SEQ ID NO: 1653005 - RNA, 19 nt, Artificial Sequence
  Description of Artificial Sequence: Synthetic oligonucleotide
  Sense strand starting at position 2228 of SEQ ID NO: 1561186
gccacuuauggugggaaag

SEQ ID NO: 1653006 - RNA, 19 nt, Artificial Sequence
  Description of Artificial Sequence: Synthetic oligonucleotide
  Antisense strand to SEQ ID NO: 1653005
cuuucccaccauaaguggc

SEQ ID NO: 1653007 - RNA, 19 nt, Artificial Sequence
  Description of Artificial Sequence: Synthetic oligonucleotide
  Sense strand starting at position 2322 of SEQ ID NO: 1561186
gaggcuuugcuagggaguu

SEQ ID NO: 1653008 - RNA, 19 nt, Artificial Sequence
  Description of Artificial Sequence: Synthetic oligonucleotide
  Antisense strand to SEQ ID NO: 1653007
aacucccuagcaaagccuc

SEQ ID NO: 1653009 - RNA, 19 nt, Artificial Sequence
  Description of Artificial Sequence: Synthetic oligonucleotide
  Sense strand starting at position 2323 of SEQ ID NO: 1561186
aggcuuugcuagggaguuu

SEQ ID NO: 1653010 - RNA, 19 nt, Artificial Sequence
  Description of Artificial Sequence: Synthetic oligonucleotide
  Antisense strand to SEQ ID NO: 1653009
aaacucccuagcaaagccu

SEQ ID NO: 1653011 - RNA, 19 nt, Artificial Sequence
  Description of Artificial Sequence: Synthetic oligonucleotide
  Sense strand starting at position 2332 of SEQ ID NO: 1561186
uagggaguuucuuuccuaa

SEQ ID NO: 1653012 - RNA, 19 nt, Artificial Sequence
  Description of Artificial Sequence: Synthetic oligonucleotide
  Antisense strand to SEQ ID NO: 1653011
uuaggaaagaaacucccua

SEQ ID NO: 1653013 - RNA, 19 nt, Artificial Sequence
  Description of Artificial Sequence: Synthetic oligonucleotide
  Sense strand starting at position 2334 of SEQ ID NO: 1561186
gggaguuucuuuccuaagg

SEQ ID NO: 1653014 - RNA, 19 nt, Artificial Sequence
  Description of Artificial Sequence: Synthetic oligonucleotide
  Antisense strand to SEQ ID NO: 1653013
ccuuaggaaagaaacuccc

SEQ ID NO: 1653015 - RNA, 19 nt, Artificial Sequence
  Description of Artificial Sequence: Synthetic oligonucleotide
  Sense strand starting at position 2335 of SEQ ID NO: 1561186
ggaguuucuuuccuaagga

SEQ ID NO: 1653016 - RNA, 19 nt, Artificial Sequence
  Description of Artificial Sequence: Synthetic oligonucleotide
  Antisense strand to SEQ ID NO: 1653015
uccuuaggaaagaaacucc

SEQ ID NO: 1653017 - RNA, 19 nt, Artificial Sequence
  Description of Artificial Sequence: Synthetic oligonucleotide
  Sense strand starting at position 2336 of SEQ ID NO: 1561186
gaguuucuuuccuaaggaa

SEQ ID NO: 1653018 - RNA, 19 nt, Artificial Sequence
  Description of Artificial Sequence: Synthetic oligonucleotide
  Antisense strand to SEQ ID NO: 1653017
uuccuuaggaaagaaacuc

SEQ ID NO: 1653019 - RNA, 19 nt, Artificial Sequence
  Description of Artificial Sequence: Synthetic oligonucleotide
  Sense strand starting at position 2606 of SEQ ID NO: 1561186
aggccugcugucuagggaa

SEQ ID NO: 1653020 - RNA, 19 nt, Artificial Sequence
  Description of Artificial Sequence: Synthetic oligonucleotide
  Antisense strand to SEQ ID NO: 1653019
uucccuagacagcaggccu

SEQ ID NO: 1653021 - RNA, 19 nt, Artificial Sequence
  Description of Artificial Sequence: Synthetic oligonucleotide
  Sense strand starting at position 2620 of SEQ ID NO: 1561186
gggaauguuuagcagggaa

SEQ ID NO: 1653022 - RNA, 19 nt, Artificial Sequence
  Description of Artificial Sequence: Synthetic oligonucleotide
  Antisense strand to SEQ ID NO: 1653021
uucccugcuaaacauuccc

SEQ ID NO: 1653023 - RNA, 19 nt, Artificial Sequence
  Description of Artificial Sequence: Synthetic oligonucleotide
  Sense strand starting at position 2792 of SEQ ID NO: 1561186
ggugauuacuugccuguaa

SEQ ID NO: 1653024 - RNA, 19 nt, Artificial Sequence
  Description of Artificial Sequence: Synthetic oligonucleotide
  Antisense strand to SEQ ID NO: 1653023
uuacaggcaaguaaucacc

SEQ ID NO: 1653025 - RNA, 19 nt, Artificial Sequence
  Description of Artificial Sequence: Synthetic oligonucleotide
  Sense strand starting at position 2793 of SEQ ID NO: 1561186
gugauuacuugccuguaau

SEQ ID NO: 1653026 - RNA, 19 nt, Artificial Sequence
  Description of Artificial Sequence: Synthetic oligonucleotide
  Antisense strand to SEQ ID NO: 1653025
auuacaggcaaguaaucac

SEQ ID NO: 1653027 - RNA, 19 nt, Artificial Sequence
  Description of Artificial Sequence: Synthetic oligonucleotide
  Sense strand starting at position 2794 of SEQ ID NO: 1561186
ugauuacuugccuguaauc

SEQ ID NO: 1653028 - RNA, 19 nt, Artificial Sequence
  Description of Artificial Sequence: Synthetic oligonucleotide
  Antisense strand to SEQ ID NO: 1653027
gauuacaggcaaguaauca

SEQ ID NO: 1653029 - RNA, 19 nt, Artificial Sequence
  Description of Artificial Sequence: Synthetic oligonucleotide
  Sense strand starting at position 3158 of SEQ ID NO: 1561186
aacggagauccugaagcuu

SEQ ID NO: 1653030 - RNA, 19 nt, Artificial Sequence
  Description of Artificial Sequence: Synthetic oligonucleotide
  Antisense strand to SEQ ID NO: 1653029
aagcuucaggaucuccguu

SEQ ID NO: 1653031 - RNA, 19 nt, Artificial Sequence
  Description of Artificial Sequence: Synthetic oligonucleotide
  Sense strand starting at position 3325 of SEQ ID NO: 1561186
gucuuagcucccugggaca

SEQ ID NO: 1653032 - RNA, 19 nt, Artificial Sequence
  Description of Artificial Sequence: Synthetic oligonucleotide
  Antisense strand to SEQ ID NO: 1653031
ugucccagggagcuaagac

SEQ ID NO: 1653033 - RNA, 19 nt, Artificial Sequence
  Description of Artificial Sequence: Synthetic oligonucleotide
  Sense strand starting at position 3342 of SEQ ID NO: 1561186
cagucucugggcuagaagu

SEQ ID NO: 1653034 - RNA, 19 nt, Artificial Sequence
  Description of Artificial Sequence: Synthetic oligonucleotide
  Antisense strand to SEQ ID NO: 1653033
acuucuagcccagagacug

SEQ ID NO: 1653035 - RNA, 19 nt, Artificial Sequence
  Description of Artificial Sequence: Synthetic oligonucleotide
  Sense strand starting at position 3353 of SEQ ID NO: 1561186
cuagaaguccugcaucuga

SEQ ID NO: 1653036 - RNA, 19 nt, Artificial Sequence
  Description of Artificial Sequence: Synthetic oligonucleotide
  Antisense strand to SEQ ID NO: 1653035
ucagaugcaggacuucuag

SEQ ID NO: 1653037 - RNA, 19 nt, Artificial Sequence
  Description of Artificial Sequence: Synthetic oligonucleotide
  Sense strand starting at position 3358 of SEQ ID NO: 1561186
aguccugcaucugaaggaa

SEQ ID NO: 1653038 - RNA, 19 nt, Artificial Sequence
  Description of Artificial Sequence: Synthetic oligonucleotide
  Antisense strand to SEQ ID NO: 1653037
uuccuucagaugcaggacu

SEQ ID NO: 1653039 - RNA, 19 nt, Artificial Sequence
  Description of Artificial Sequence: Synthetic oligonucleotide
  Sense strand starting at position 3383 of SEQ ID NO: 1561186
guuguaaacucagacaccu

SEQ ID NO: 1653040 - RNA, 19 nt, Artificial Sequence
  Description of Artificial Sequence: Synthetic oligonucleotide
  Antisense strand to SEQ ID NO: 1653039
aggugucugaguuuacaac

SEQ ID NO: 1653041 - RNA, 19 nt, Artificial Sequence
  Description of Artificial Sequence: Synthetic oligonucleotide
  Sense strand starting at position 3391 of SEQ ID NO: 1561186
cucagacaccugcauuaga

SEQ ID NO: 1653042 - RNA, 19 nt, Artificial Sequence
  Description of Artificial Sequence: Synthetic oligonucleotide
  Antisense strand to SEQ ID NO: 1653041
ucuaaugcaggugucugag

SEQ ID NO: 1653043 - RNA, 19 nt, Artificial Sequence
  Description of Artificial Sequence: Synthetic oligonucleotide
  Sense strand starting at position 78 of SEQ ID NO: 1561187
aguucuaguuacccauaau

SEQ ID NO: 1653044 - RNA, 19 nt, Artificial Sequence
  Description of Artificial Sequence: Synthetic oligonucleotide
  Antisense strand to SEQ ID NO: 1653043
auuauggguaacuagaacu

SEQ ID NO: 1653045 - RNA, 19 nt, Artificial Sequence
  Description of Artificial Sequence: Synthetic oligonucleotide
  Sense strand starting at position 98 of SEQ ID NO: 1561187
cccuccugucugugagauu

SEQ ID NO: 1653046 - RNA, 19 nt, Artificial Sequence
  Description of Artificial Sequence: Synthetic oligonucleotide
  Antisense strand to SEQ ID NO: 1653045
aaucucacagacaggaggg

SEQ ID NO: 1653047 - RNA, 19 nt, Artificial Sequence
  Description of Artificial Sequence: Synthetic oligonucleotide
  Sense strand starting at position 107 of SEQ ID NO: 1561187
cugugagauuauucuugaa

SEQ ID NO: 1653048 - RNA, 19 nt, Artificial Sequence
  Description of Artificial Sequence: Synthetic oligonucleotide
  Antisense strand to SEQ ID NO: 1653047
uucaagaauaaucucacag

SEQ ID NO: 1653049 - RNA, 19 nt, Artificial Sequence
  Description of Artificial Sequence: Synthetic oligonucleotide
  Sense strand starting at position 109 of SEQ ID NO: 1561187
gugagauuauucuugaaac

SEQ ID NO: 1653050 - RNA, 19 nt, Artificial Sequence
  Description of Artificial Sequence: Synthetic oligonucleotide
  Antisense strand to SEQ ID NO: 1653049
guuucaagaauaaucucac

SEQ ID NO: 1653051 - RNA, 19 nt, Artificial Sequence
  Description of Artificial Sequence: Synthetic oligonucleotide
  Sense strand starting at position 143 of SEQ ID NO: 1561187
cuuacccacgucuaugaaa

SEQ ID NO: 1653052 - RNA, 19 nt, Artificial Sequence
  Description of Artificial Sequence: Synthetic oligonucleotide
  Antisense strand to SEQ ID NO: 1653051
uuucauagacguggguaag

SEQ ID NO: 1653053 - RNA, 19 nt, Artificial Sequence
  Description of Artificial Sequence: Synthetic oligonucleotide
  Sense strand starting at position 210 of SEQ ID NO: 1561187
cagagauaguuucuugccu

SEQ ID NO: 1653054 - RNA, 19 nt, Artificial Sequence
  Description of Artificial Sequence: Synthetic oligonucleotide
  Antisense strand to SEQ ID NO: 1653053
aggcaagaaacuaucucug

SEQ ID NO: 1653055 - RNA, 19 nt, Artificial Sequence
  Description of Artificial Sequence: Synthetic oligonucleotide
  Sense strand starting at position 211 of SEQ ID NO: 1561187
agagauaguuucuugccuu

SEQ ID NO: 1653056 - RNA, 19 nt, Artificial Sequence
  Description of Artificial Sequence: Synthetic oligonucleotide
  Antisense strand to SEQ ID NO: 1653055
aaggcaagaaacuaucucu

SEQ ID NO: 1653057 - RNA, 19 nt, Artificial Sequence
  Description of Artificial Sequence: Synthetic oligonucleotide
  Sense strand starting at position 222 of SEQ ID NO: 1561187
cuugccuuguggccagaaa

SEQ ID NO: 1653058 - RNA, 19 nt, Artificial Sequence
  Description of Artificial Sequence: Synthetic oligonucleotide
  Antisense strand to SEQ ID NO: 1653057
uuucuggccacaaggcaag

SEQ ID NO: 1653059 - RNA, 19 nt, Artificial Sequence
  Description of Artificial Sequence: Synthetic oligonucleotide
  Sense strand starting at position 468 of SEQ ID NO: 1561187
uuguaucuaccaggaagaa

SEQ ID NO: 1653060 - RNA, 19 nt, Artificial Sequence
  Description of Artificial Sequence: Synthetic oligonucleotide
  Antisense strand to SEQ ID NO: 1653059
uucuuccugguagauacaa

SEQ ID NO: 1653061 - RNA, 19 nt, Artificial Sequence
  Description of Artificial Sequence: Synthetic oligonucleotide
  Sense strand starting at position 892 of SEQ ID NO: 1561187
gacugagguccugggaaca

SEQ ID NO: 1653062 - RNA, 19 nt, Artificial Sequence
  Description of Artificial Sequence: Synthetic oligonucleotide
  Antisense strand to SEQ ID NO: 1653061
uguucccaggaccucaguc

SEQ ID NO: 1653063 - RNA, 19 nt, Artificial Sequence
  Description of Artificial Sequence: Synthetic oligonucleotide
  Sense strand starting at position 994 of SEQ ID NO: 1561187
ccaagaugcagagguugau

SEQ ID NO: 1653064 - RNA, 19 nt, Artificial Sequence
  Description of Artificial Sequence: Synthetic oligonucleotide
  Antisense strand to SEQ ID NO: 1653063
aucaaccucugcaucuugg

SEQ ID NO: 1653065 - RNA, 19 nt, Artificial Sequence
  Description of Artificial Sequence: Synthetic oligonucleotide
  Sense strand starting at position 1048 of SEQ ID NO: 1561187
ggaagaguuugcucugcac

SEQ ID NO: 1653066 - RNA, 19 nt, Artificial Sequence
  Description of Artificial Sequence: Synthetic oligonucleotide
  Antisense strand to SEQ ID NO: 1653065
gugcagagcaaacucuucc

SEQ ID NO: 1653067 - RNA, 19 nt, Artificial Sequence
  Description of Artificial Sequence: Synthetic oligonucleotide
  Sense strand starting at position 1050 of SEQ ID NO: 1561187
aagaguuugcucugcacua

SEQ ID NO: 1653068 - RNA, 19 nt, Artificial Sequence
  Description of Artificial Sequence: Synthetic oligonucleotide
  Antisense strand to SEQ ID NO: 1653067
uagugcagagcaaacucuu

SEQ ID NO: 1653069 - RNA, 19 nt, Artificial Sequence
  Description of Artificial Sequence: Synthetic oligonucleotide
  Sense strand starting at position 1344 of SEQ ID NO: 1561187
ggcucagaacuuuaccuuu

SEQ ID NO: 1653070 - RNA, 19 nt, Artificial Sequence
  Description of Artificial Sequence: Synthetic oligonucleotide
  Antisense strand to SEQ ID NO: 1653069
aaagguaaaguucugagcc

SEQ ID NO: 1653071 - RNA, 19 nt, Artificial Sequence
  Description of Artificial Sequence: Synthetic oligonucleotide
  Sense strand starting at position 1589 of SEQ ID NO: 1561187
acagcagcuccagaucaua

SEQ ID NO: 1653072 - RNA, 19 nt, Artificial Sequence
  Description of Artificial Sequence: Synthetic oligonucleotide
  Antisense strand to SEQ ID NO: 1653071
uaugaucuggagcugcugu

SEQ ID NO: 1653073 - RNA, 19 nt, Artificial Sequence
  Description of Artificial Sequence: Synthetic oligonucleotide
  Sense strand starting at position 1600 of SEQ ID NO: 1561187
agaucauagcccuaggucu

SEQ ID NO: 1653074 - RNA, 19 nt, Artificial Sequence
  Description of Artificial Sequence: Synthetic oligonucleotide
  Antisense strand to SEQ ID NO: 1653073
agaccuagggcuaugaucu

SEQ ID NO: 1653075 - RNA, 19 nt, Artificial Sequence
  Description of Artificial Sequence: Synthetic oligonucleotide
  Sense strand starting at position 1701 of SEQ ID NO: 1561187
accggauauuaggugaaga

SEQ ID NO: 1653076 - RNA, 19 nt, Artificial Sequence
  Description of Artificial Sequence: Synthetic oligonucleotide
  Antisense strand to SEQ ID NO: 1653075
ucuucaccuaauauccggu

SEQ ID NO: 1653077 - RNA, 19 nt, Artificial Sequence
  Description of Artificial Sequence: Synthetic oligonucleotide
  Sense strand starting at position 1702 of SEQ ID NO: 1561187
ccggauauuaggugaagau

SEQ ID NO: 1653078 - RNA, 19 nt, Artificial Sequence
  Description of Artificial Sequence: Synthetic oligonucleotide
  Antisense strand to SEQ ID NO: 1653077
aucuucaccuaauauccgg

SEQ ID NO: 1653079 - RNA, 19 nt, Artificial Sequence
  Description of Artificial Sequence: Synthetic oligonucleotide
  Sense strand starting at position 2046 of SEQ ID NO: 1561187
cuggguauugacuaaucgu

SEQ ID NO: 1653080 - RNA, 19 nt, Artificial Sequence
  Description of Artificial Sequence: Synthetic oligonucleotide
  Antisense strand to SEQ ID NO: 1653079
acgauuagucaauacccag

SEQ ID NO: 1653081 - RNA, 19 nt, Artificial Sequence
  Description of Artificial Sequence: Synthetic oligonucleotide
  Sense strand starting at position 2049 of SEQ ID NO: 1561187
gguauugacuaaucguaga

SEQ ID NO: 1653082 - RNA, 19 nt, Artificial Sequence
  Description of Artificial Sequence: Synthetic oligonucleotide
  Antisense strand to SEQ ID NO: 1653081
ucuacgauuagucaauacc

SEQ ID NO: 1653083 - RNA, 19 nt, Artificial Sequence
  Description of Artificial Sequence: Synthetic oligonucleotide
  Sense strand starting at position 2410 of SEQ ID NO: 1561187
cuaaauaauucucccggga

SEQ ID NO: 1653084 - RNA, 19 nt, Artificial Sequence
  Description of Artificial Sequence: Synthetic oligonucleotide
  Antisense strand to SEQ ID NO: 1653083
ucccgggagaauuauuuag

SEQ ID NO: 1653085 - RNA, 19 nt, Artificial Sequence
  Description of Artificial Sequence: Synthetic oligonucleotide
  Sense strand starting at position 2414 of SEQ ID NO: 1561187
auaauucucccgggaggga

SEQ ID NO: 1653086 - RNA, 19 nt, Artificial Sequence
  Description of Artificial Sequence: Synthetic oligonucleotide
  Antisense strand to SEQ ID NO: 1653085
ucccucccgggagaauuau

SEQ ID NO: 1653087 - RNA, 19 nt, Artificial Sequence
  Description of Artificial Sequence: Synthetic oligonucleotide
  Sense strand starting at position 2483 of SEQ ID NO: 1561187
gaccuaagcugguucucaa

SEQ ID NO: 1653088 - RNA, 19 nt, Artificial Sequence
  Description of Artificial Sequence: Synthetic oligonucleotide
  Antisense strand to SEQ ID NO: 1653087
uugagaaccagcuuagguc

SEQ ID NO: 1653089 - RNA, 19 nt, Artificial Sequence
  Description of Artificial Sequence: Synthetic oligonucleotide
  Sense strand starting at position 2567 of SEQ ID NO: 1561187
cgugacauuccagagcaaa

SEQ ID NO: 1653090 - RNA, 19 nt, Artificial Sequence
  Description of Artificial Sequence: Synthetic oligonucleotide
  Antisense strand to SEQ ID NO: 1653089
uuugcucuggaaugucacg

SEQ ID NO: 1653091 - RNA, 19 nt, Artificial Sequence
  Description of Artificial Sequence: Synthetic oligonucleotide
  Sense strand starting at position 2611 of SEQ ID NO: 1561187
ggcacuggcauggauuaau

SEQ ID NO: 1653092 - RNA, 19 nt, Artificial Sequence
  Description of Artificial Sequence: Synthetic oligonucleotide
  Antisense strand to SEQ ID NO: 1653091
auuaauccaugccagugcc

SEQ ID NO: 1653093 - RNA, 19 nt, Artificial Sequence
  Description of Artificial Sequence: Synthetic oligonucleotide
  Sense strand starting at position 2648 of SEQ ID NO: 1561187
ccaguaaggugacuauuau

SEQ ID NO: 1653094 - RNA, 19 nt, Artificial Sequence
  Description of Artificial Sequence: Synthetic oligonucleotide
  Antisense strand to SEQ ID NO: 1653093
auaauagucaccuuacugg

SEQ ID NO: 1653095 - RNA, 19 nt, Artificial Sequence
  Description of Artificial Sequence: Synthetic oligonucleotide
  Sense strand starting at position 2712 of SEQ ID NO: 1561187
caguaacgcgaccaguauu

SEQ ID NO: 1653096 - RNA, 19 nt, Artificial Sequence
  Description of Artificial Sequence: Synthetic oligonucleotide
  Antisense strand to SEQ ID NO: 1653095
aauacuggucgcguuacug

SEQ ID NO: 1653097 - RNA, 19 nt, Artificial Sequence
  Description of Artificial Sequence: Synthetic oligonucleotide
  Sense strand starting at position 2715 of SEQ ID NO: 1561187
uaacgcgaccaguauuaca

SEQ ID NO: 1653098 - RNA, 19 nt, Artificial Sequence
  Description of Artificial Sequence: Synthetic oligonucleotide
  Antisense strand to SEQ ID NO: 1653097
uguaauacuggucgcguua

SEQ ID NO: 1653099 - RNA, 19 nt, Artificial Sequence
  Description of Artificial Sequence: Synthetic oligonucleotide
  Sense strand starting at position 2769 of SEQ ID NO: 1561187
gccaucuagcuggagaguu

SEQ ID NO: 1653100 - RNA, 19 nt, Artificial Sequence
  Description of Artificial Sequence: Synthetic oligonucleotide
  Antisense strand to SEQ ID NO: 1653099
aacucuccagcuagauggc

SEQ ID NO: 1653101 - RNA, 19 nt, Artificial Sequence
  Description of Artificial Sequence: Synthetic oligonucleotide
  Sense strand starting at position 2779 of SEQ ID NO: 1561187
uggagaguuucccugcuua

SEQ ID NO: 1653102 - RNA, 19 nt, Artificial Sequence
  Description of Artificial Sequence: Synthetic oligonucleotide
  Antisense strand to SEQ ID NO: 1653101
uaagcagggaaacucucca

SEQ ID NO: 1653103 - RNA, 19 nt, Artificial Sequence
  Description of Artificial Sequence: Synthetic oligonucleotide
  Sense strand starting at position 2912 of SEQ ID NO: 1561187
ugaagauccagugaaugcu

SEQ ID NO: 1653104 - RNA, 19 nt, Artificial Sequence
  Description of Artificial Sequence: Synthetic oligonucleotide
  Antisense strand to SEQ ID NO: 1653103
agcauucacuggaucuuca

SEQ ID NO: 1653105 - RNA, 19 nt, Artificial Sequence
  Description of Artificial Sequence: Synthetic oligonucleotide
  Sense strand starting at position 2948 of SEQ ID NO: 1561187
ucaauuaggugcucagaaa

SEQ ID NO: 1653106 - RNA, 19 nt, Artificial Sequence
  Description of Artificial Sequence: Synthetic oligonucleotide
  Antisense strand to SEQ ID NO: 1653105
uuucugagcaccuaauuga

SEQ ID NO: 1653107 - RNA, 19 nt, Artificial Sequence
  Description of Artificial Sequence: Synthetic oligonucleotide
  Sense strand starting at position 3320 of SEQ ID NO: 1561187
cagccugaguaguucugaa

SEQ ID NO: 1653108 - RNA, 19 nt, Artificial Sequence
  Description of Artificial Sequence: Synthetic oligonucleotide
  Antisense strand to SEQ ID NO: 1653107
uucagaacuacucaggcug

SEQ ID NO: 1653109 - RNA, 19 nt, Artificial Sequence
  Description of Artificial Sequence: Synthetic oligonucleotide
  Sense strand starting at position 3463 of SEQ ID NO: 1561187
cuagaaguuucuccaggca

SEQ ID NO: 1653110 - RNA, 19 nt, Artificial Sequence
  Description of Artificial Sequence: Synthetic oligonucleotide
  Antisense strand to SEQ ID NO: 1653109
ugccuggagaaacuucuag

SEQ ID NO: 1653111 - RNA, 19 nt, Artificial Sequence
  Description of Artificial Sequence: Synthetic oligonucleotide
  Sense strand starting at position 3466 of SEQ ID NO: 1561187
gaaguuucuccaggcagac

SEQ ID NO: 1653112 - RNA, 19 nt, Artificial Sequence
  Description of Artificial Sequence: Synthetic oligonucleotide
  Antisense strand to SEQ ID NO: 1653111
gucugccuggagaaacuuc

SEQ ID NO: 1653113 - RNA, 19 nt, Artificial Sequence
  Description of Artificial Sequence: Synthetic oligonucleotide
  Sense strand starting at position 3489 of SEQ ID NO: 1561187
cccagauaucuccaucugu

SEQ ID NO: 1653114 - RNA, 19 nt, Artificial Sequence
  Description of Artificial Sequence: Synthetic oligonucleotide
  Antisense strand to SEQ ID NO: 1653113
acagauggagauaucuggg

SEQ ID NO: 1653115 - RNA, 19 nt, Artificial Sequence
  Description of Artificial Sequence: Synthetic oligonucleotide
  Sense strand starting at position 3708 of SEQ ID NO: 1561187
ccgucaaugccuuacugga

SEQ ID NO: 1653116 - RNA, 19 nt, Artificial Sequence
  Description of Artificial Sequence: Synthetic oligonucleotide
  Antisense strand to SEQ ID NO: 1653115
uccaguaaggcauugacgg

SEQ ID NO: 1653117 - RNA, 19 nt, Artificial Sequence
  Description of Artificial Sequence: Synthetic oligonucleotide
  Sense strand starting at position 3788 of SEQ ID NO: 1561187
cagcauagagcaugugauu

SEQ ID NO: 1653118 - RNA, 19 nt, Artificial Sequence
  Description of Artificial Sequence: Synthetic oligonucleotide
  Antisense strand to SEQ ID NO: 1653117
aaucacaugcucuaugcug

SEQ ID NO: 1653119 - RNA, 19 nt, Artificial Sequence
  Description of Artificial Sequence: Synthetic oligonucleotide
  Sense strand starting at position 3793 of SEQ ID NO: 1561187
uagagcaugugauuccaca

SEQ ID NO: 1653120 - RNA, 19 nt, Artificial Sequence
  Description of Artificial Sequence: Synthetic oligonucleotide
  Antisense strand to SEQ ID NO: 1653119
uguggaaucacaugcucua

SEQ ID NO: 1653121 - RNA, 19 nt, Artificial Sequence
  Description of Artificial Sequence: Synthetic oligonucleotide
  Sense strand starting at position 3856 of SEQ ID NO: 1561187
ccuuuaagccaaugucaag

SEQ ID NO: 1653122 - RNA, 19 nt, Artificial Sequence
  Description of Artificial Sequence: Synthetic oligonucleotide
  Antisense strand to SEQ ID NO: 1653121
cuugacauuggcuuaaagg

SEQ ID NO: 1653123 - RNA, 19 nt, Artificial Sequence
  Description of Artificial Sequence: Synthetic oligonucleotide
  Sense strand starting at position 8 of SEQ ID NO: 1561188
guggcuagagguggucauu

SEQ ID NO: 1653124 - RNA, 19 nt, Artificial Sequence
  Description of Artificial Sequence: Synthetic oligonucleotide
  Antisense strand to SEQ ID NO: 1653123
aaugaccaccucuagccac

SEQ ID NO: 1653125 - RNA, 19 nt, Artificial Sequence
  Description of Artificial Sequence: Synthetic oligonucleotide
  Sense strand starting at position 11 of SEQ ID NO: 1561188
gcuagagguggucauucaa

SEQ ID NO: 1653126 - RNA, 19 nt, Artificial Sequence
  Description of Artificial Sequence: Synthetic oligonucleotide
  Antisense strand to SEQ ID NO: 1653125
uugaaugaccaccucuagc

SEQ ID NO: 1653127 - RNA, 19 nt, Artificial Sequence
  Description of Artificial Sequence: Synthetic oligonucleotide
  Sense strand starting at position 199 of SEQ ID NO: 1561188
acuagagugcagugguuau

SEQ ID NO: 1653128 - RNA, 19 nt, Artificial Sequence
  Description of Artificial Sequence: Synthetic oligonucleotide
  Antisense strand to SEQ ID NO: 1653127
auaaccacugcacucuagu

SEQ ID NO: 1653129 - RNA, 19 nt, Artificial Sequence
  Description of Artificial Sequence: Synthetic oligonucleotide
  Sense strand starting at position 283 of SEQ ID NO: 1561188
gccucuuaaguguauggga

SEQ ID NO: 1653130 - RNA, 19 nt, Artificial Sequence
  Description of Artificial Sequence: Synthetic oligonucleotide
  Antisense strand to SEQ ID NO: 1653129
ucccauacacuuaagaggc

SEQ ID NO: 1653131 - RNA, 19 nt, Artificial Sequence
  Description of Artificial Sequence: Synthetic oligonucleotide
  Sense strand starting at position 285 of SEQ ID NO: 1561188
cucuuaaguguaugggacu

SEQ ID NO: 1653132 - RNA, 19 nt, Artificial Sequence
  Description of Artificial Sequence: Synthetic oligonucleotide
  Antisense strand to SEQ ID NO: 1653131
agucccauacacuuaagag

SEQ ID NO: 1653133 - RNA, 19 nt, Artificial Sequence
  Description of Artificial Sequence: Synthetic oligonucleotide
  Sense strand starting at position 286 of SEQ ID NO: 1561188
ucuuaaguguaugggacua

SEQ ID NO: 1653134 - RNA, 19 nt, Artificial Sequence
  Description of Artificial Sequence: Synthetic oligonucleotide
  Antisense strand to SEQ ID NO: 1653133
uagucccauacacuuaaga

SEQ ID NO: 1653135 - RNA, 19 nt, Artificial Sequence
  Description of Artificial Sequence: Synthetic oligonucleotide
  Sense strand starting at position 745 of SEQ ID NO: 1561188
augccuuguccuuguuaug

SEQ ID NO: 1653136 - RNA, 19 nt, Artificial Sequence
  Description of Artificial Sequence: Synthetic oligonucleotide
  Antisense strand to SEQ ID NO: 1653135
cauaacaaggacaaggcau

SEQ ID NO: 1653137 - RNA, 19 nt, Artificial Sequence
  Description of Artificial Sequence: Synthetic oligonucleotide
  Sense strand starting at position 746 of SEQ ID NO: 1561188
ugccuuguccuuguuaugu

SEQ ID NO: 1653138 - RNA, 19 nt, Artificial Sequence
  Description of Artificial Sequence: Synthetic oligonucleotide
  Antisense strand to SEQ ID NO: 1653137
acauaacaaggacaaggca

SEQ ID NO: 1653139 - RNA, 19 nt, Artificial Sequence
  Description of Artificial Sequence: Synthetic oligonucleotide
  Sense strand starting at position 755 of SEQ ID NO: 1561188
cuuguuauguuuccuuauu

SEQ ID NO: 1653140 - RNA, 19 nt, Artificial Sequence
  Description of Artificial Sequence: Synthetic oligonucleotide
  Antisense strand to SEQ ID NO: 1653139
aauaaggaaacauaacaag

SEQ ID NO: 1653141 - RNA, 19 nt, Artificial Sequence
  Description of Artificial Sequence: Synthetic oligonucleotide
  Sense strand starting at position 923 of SEQ ID NO: 1561188
gugcauggucuggauagga

SEQ ID NO: 1653142 - RNA, 19 nt, Artificial Sequence
  Description of Artificial Sequence: Synthetic oligonucleotide
  Antisense strand to SEQ ID NO: 1653141
uccuauccagaccaugcac

SEQ ID NO: 1653143 - RNA, 19 nt, Artificial Sequence
  Description of Artificial Sequence: Synthetic oligonucleotide
  Sense strand starting at position 1070 of SEQ ID NO: 1561188
gaggguuccuccuuccaca

SEQ ID NO: 1653144 - RNA, 19 nt, Artificial Sequence
  Description of Artificial Sequence: Synthetic oligonucleotide
  Antisense strand to SEQ ID NO: 1653143
uguggaaggaggaacccuc

SEQ ID NO: 1653145 - RNA, 19 nt, Artificial Sequence
  Description of Artificial Sequence: Synthetic oligonucleotide
  Sense strand starting at position 1135 of SEQ ID NO: 1561188
aguucaggucccugaggaa

SEQ ID NO: 1653146 - RNA, 19 nt, Artificial Sequence
  Description of Artificial Sequence: Synthetic oligonucleotide
  Antisense strand to SEQ ID NO: 1653145
uuccucagggaccugaacu

SEQ ID NO: 1653147 - RNA, 19 nt, Artificial Sequence
  Description of Artificial Sequence: Synthetic oligonucleotide
  Sense strand starting at position 1276 of SEQ ID NO: 1561188
cuguuugagauccaggcaa

SEQ ID NO: 1653148 - RNA, 19 nt, Artificial Sequence
  Description of Artificial Sequence: Synthetic oligonucleotide
  Antisense strand to SEQ ID NO: 1653147
uugccuggaucucaaacag

SEQ ID NO: 1653149 - RNA, 19 nt, Artificial Sequence
  Description of Artificial Sequence: Synthetic oligonucleotide
  Sense strand starting at position 2010 of SEQ ID NO: 1561188
cagggagugucugaaaguu

SEQ ID NO: 1653150 - RNA, 19 nt, Artificial Sequence
  Description of Artificial Sequence: Synthetic oligonucleotide
  Antisense strand to SEQ ID NO: 1653149
aacuuucagacacucccug

SEQ ID NO: 1653151 - RNA, 19 nt, Artificial Sequence
  Description of Artificial Sequence: Synthetic oligonucleotide
  Sense strand starting at position 2291 of SEQ ID NO: 1561188
gcccuaagcaucgauugua

SEQ ID NO: 1653152 - RNA, 19 nt, Artificial Sequence
  Description of Artificial Sequence: Synthetic oligonucleotide
  Antisense strand to SEQ ID NO: 1653151
uacaaucgaugcuuagggc

SEQ ID NO: 1653153 - RNA, 19 nt, Artificial Sequence
  Description of Artificial Sequence: Synthetic oligonucleotide
  Sense strand starting at position 3161 of SEQ ID NO: 1561188
cagcuacuuucgggacuga

SEQ ID NO: 1653154 - RNA, 19 nt, Artificial Sequence
  Description of Artificial Sequence: Synthetic oligonucleotide
  Antisense strand to SEQ ID NO: 1653153
ucagucccgaaaguagcug

SEQ ID NO: 1653155 - RNA, 19 nt, Artificial Sequence
  Description of Artificial Sequence: Synthetic oligonucleotide
  Sense strand starting at position 3165 of SEQ ID NO: 1561188
uacuuucgggacugagaca

SEQ ID NO: 1653156 - RNA, 19 nt, Artificial Sequence
  Description of Artificial Sequence: Synthetic oligonucleotide
  Antisense strand to SEQ ID NO: 1653155
ugucucagucccgaaagua

SEQ ID NO: 1653157 - RNA, 19 nt, Artificial Sequence
  Description of Artificial Sequence: Synthetic oligonucleotide
  Sense strand starting at position 3333 of SEQ ID NO: 1561188
cucugucauuggcugugau

SEQ ID NO: 1653158 - RNA, 19 nt, Artificial Sequence
  Description of Artificial Sequence: Synthetic oligonucleotide
  Antisense strand to SEQ ID NO: 1653157
aucacagccaaugacagag

SEQ ID NO: 1653159 - RNA, 19 nt, Artificial Sequence
  Description of Artificial Sequence: Synthetic oligonucleotide
  Sense strand starting at position 3336 of SEQ ID NO: 1561188
ugucauuggcugugauuuc

SEQ ID NO: 1653160 - RNA, 19 nt, Artificial Sequence
  Description of Artificial Sequence: Synthetic oligonucleotide
  Antisense strand to SEQ ID NO: 1653159
gaaaucacagccaaugaca

SEQ ID NO: 1653161 - RNA, 19 nt, Artificial Sequence
  Description of Artificial Sequence: Synthetic oligonucleotide
  Sense strand starting at position 3445 of SEQ ID NO: 1561188
ccaaauuauucgcacagca

SEQ ID NO: 1653162 - RNA, 19 nt, Artificial Sequence
  Description of Artificial Sequence: Synthetic oligonucleotide
  Antisense strand to SEQ ID NO: 1653161
ugcugugcgaauaauuugg

SEQ ID NO: 1653163 - RNA, 19 nt, Artificial Sequence
  Description of Artificial Sequence: Synthetic oligonucleotide
  Sense strand starting at position 3517 of SEQ ID NO: 1561188
aguggcauuuaguguugua

SEQ ID NO: 1653164 - RNA, 19 nt, Artificial Sequence
  Description of Artificial Sequence: Synthetic oligonucleotide
  Antisense strand to SEQ ID NO: 1653163
uacaacacuaaaugccacu

SEQ ID NO: 1653165 - RNA, 19 nt, Artificial Sequence
  Description of Artificial Sequence: Synthetic oligonucleotide
  Sense strand starting at position 3520 of SEQ ID NO: 1561188
ggcauuuaguguuguacaa

SEQ ID NO: 1653166 - RNA, 19 nt, Artificial Sequence
  Description of Artificial Sequence: Synthetic oligonucleotide
  Antisense strand to SEQ ID NO: 1653165
uuguacaacacuaaaugcc

SEQ ID NO: 1653167 - RNA, 19 nt, Artificial Sequence
  Description of Artificial Sequence: Synthetic oligonucleotide
  Sense strand starting at position 3547 of SEQ ID NO: 1561188
ucugucuagcuccagaaga

SEQ ID NO: 1653168 - RNA, 19 nt, Artificial Sequence
  Description of Artificial Sequence: Synthetic oligonucleotide
  Antisense strand to SEQ ID NO: 1653167
ucuucuggagcuagacaga

SEQ ID NO: 1653169 - RNA, 19 nt, Artificial Sequence
  Description of Artificial Sequence: Synthetic oligonucleotide
  Sense strand starting at position 3549 of SEQ ID NO: 1561188
ugucuagcuccagaagauu

SEQ ID NO: 1653170 - RNA, 19 nt, Artificial Sequence
  Description of Artificial Sequence: Synthetic oligonucleotide
  Antisense strand to SEQ ID NO: 1653169
aaucuucuggagcuagaca

SEQ ID NO: 1653171 - RNA, 19 nt, Artificial Sequence
  Description of Artificial Sequence: Synthetic oligonucleotide
  Sense strand starting at position 3651 of SEQ ID NO: 1561188
acuucuugucucugucgau

SEQ ID NO: 1653172 - RNA, 19 nt, Artificial Sequence
  Description of Artificial Sequence: Synthetic oligonucleotide
  Antisense strand to SEQ ID NO: 1653171
aucgacagagacaagaagu

SEQ ID NO: 1653173 - RNA, 19 nt, Artificial Sequence
  Description of Artificial Sequence: Synthetic oligonucleotide
  Sense strand starting at position 3652 of SEQ ID NO: 1561188
cuucuugucucugucgauu

SEQ ID NO: 1653174 - RNA, 19 nt, Artificial Sequence
  Description of Artificial Sequence: Synthetic oligonucleotide
  Antisense strand to SEQ ID NO: 1653173
aaucgacagagacaagaag

SEQ ID NO: 1653175 - RNA, 19 nt, Artificial Sequence
  Description of Artificial Sequence: Synthetic oligonucleotide
  Sense strand starting at position 3729 of SEQ ID NO: 1561188
ucucacucugcaugaugua

SEQ ID NO: 1653176 - RNA, 19 nt, Artificial Sequence
  Description of Artificial Sequence: Synthetic oligonucleotide
  Antisense strand to SEQ ID NO: 1653175
uacaucaugcagagugaga

SEQ ID NO: 1653177 - RNA, 19 nt, Artificial Sequence
  Description of Artificial Sequence: Synthetic oligonucleotide
  Sense strand starting at position 3738 of SEQ ID NO: 1561188
gcaugauguacucaagguu

SEQ ID NO: 1653178 - RNA, 19 nt, Artificial Sequence
  Description of Artificial Sequence: Synthetic oligonucleotide
  Antisense strand to SEQ ID NO: 1653177
aaccuugaguacaucaugc

SEQ ID NO: 1653179 - RNA, 19 nt, Artificial Sequence
  Description of Artificial Sequence: Synthetic oligonucleotide
  Sense strand starting at position 3751 of SEQ ID NO: 1561188
aagguucaucgagguugua

SEQ ID NO: 1653180 - RNA, 19 nt, Artificial Sequence
  Description of Artificial Sequence: Synthetic oligonucleotide
  Antisense strand to SEQ ID NO: 1653179
uacaaccucgaugaaccuu

SEQ ID NO: 1653181 - RNA, 19 nt, Artificial Sequence
  Description of Artificial Sequence: Synthetic oligonucleotide
  Sense strand starting at position 3761 of SEQ ID NO: 1561188
gagguuguagcauggauca

SEQ ID NO: 1653182 - RNA, 19 nt, Artificial Sequence
  Description of Artificial Sequence: Synthetic oligonucleotide
  Antisense strand to SEQ ID NO: 1653181
ugauccaugcuacaaccuc

SEQ ID NO: 1653183 - RNA, 19 nt, Artificial Sequence
  Description of Artificial Sequence: Synthetic oligonucleotide
  Sense strand starting at position 3774 of SEQ ID NO: 1561188
ggaucagugccucauuccu

SEQ ID NO: 1653184 - RNA, 19 nt, Artificial Sequence
  Description of Artificial Sequence: Synthetic oligonucleotide
  Antisense strand to SEQ ID NO: 1653183
aggaaugaggcacugaucc

SEQ ID NO: 1653185 - RNA, 19 nt, Artificial Sequence
  Description of Artificial Sequence: Synthetic oligonucleotide
  Sense strand starting at position 3804 of SEQ ID NO: 1561188
cguaauauuccauagcgug

SEQ ID NO: 1653186 - RNA, 19 nt, Artificial Sequence
  Description of Artificial Sequence: Synthetic oligonucleotide
  Antisense strand to SEQ ID NO: 1653185
cacgcuauggaauauuacg

SEQ ID NO: 1653187 - RNA, 19 nt, Artificial Sequence
  Description of Artificial Sequence: Synthetic oligonucleotide
  Sense strand starting at position 3860 of SEQ ID NO: 1561188
ggguauuuguguuguuggu

SEQ ID NO: 1653188 - RNA, 19 nt, Artificial Sequence
  Description of Artificial Sequence: Synthetic oligonucleotide
  Antisense strand to SEQ ID NO: 1653187
accaacaacacaaauaccc

SEQ ID NO: 1653189 - RNA, 19 nt, Artificial Sequence
  Description of Artificial Sequence: Synthetic oligonucleotide
  Sense strand starting at position 3883 of SEQ ID NO: 1561188
uuuggugaaggugacuaau

SEQ ID NO: 1653190 - RNA, 19 nt, Artificial Sequence
  Description of Artificial Sequence: Synthetic oligonucleotide
  Antisense strand to SEQ ID NO: 1653189
auuagucaccuucaccaaa

SEQ ID NO: 1653191 - RNA, 19 nt, Artificial Sequence
  Description of Artificial Sequence: Synthetic oligonucleotide
  Sense strand starting at position 3892 of SEQ ID NO: 1561188
ggugacuaaugcugcuaua

SEQ ID NO: 1653192 - RNA, 19 nt, Artificial Sequence
  Description of Artificial Sequence: Synthetic oligonucleotide
  Antisense strand to SEQ ID NO: 1653191
uauagcagcauuagucacc

SEQ ID NO: 1653193 - RNA, 19 nt, Artificial Sequence
  Description of Artificial Sequence: Synthetic oligonucleotide
  Sense strand starting at position 3923 of SEQ ID NO: 1561188
cagguaucuucuugaguca

SEQ ID NO: 1653194 - RNA, 19 nt, Artificial Sequence
  Description of Artificial Sequence: Synthetic oligonucleotide
  Antisense strand to SEQ ID NO: 1653193
ugacucaagaagauaccug

SEQ ID NO: 1653195 - RNA, 19 nt, Artificial Sequence
  Description of Artificial Sequence: Synthetic oligonucleotide
  Sense strand starting at position 3934 of SEQ ID NO: 1561188
uugagucacugcugucaau

SEQ ID NO: 1653196 - RNA, 19 nt, Artificial Sequence
  Description of Artificial Sequence: Synthetic oligonucleotide
  Antisense strand to SEQ ID NO: 1653195
auugacagcagugacucaa

SEQ ID NO: 1653197 - RNA, 19 nt, Artificial Sequence
  Description of Artificial Sequence: Synthetic oligonucleotide
  Sense strand starting at position 3961 of SEQ ID NO: 1561188
ggcguggacuccuaggagu

SEQ ID NO: 1653198 - RNA, 19 nt, Artificial Sequence
  Description of Artificial Sequence: Synthetic oligonucleotide
  Antisense strand to SEQ ID NO: 1653197
acuccuaggaguccacgcc

SEQ ID NO: 1653199 - RNA, 19 nt, Artificial Sequence
  Description of Artificial Sequence: Synthetic oligonucleotide
  Sense strand starting at position 3979 of SEQ ID NO: 1561188
uggaguugcugagucacau

SEQ ID NO: 1653200 - RNA, 19 nt, Artificial Sequence
  Description of Artificial Sequence: Synthetic oligonucleotide
  Antisense strand to SEQ ID NO: 1653199
augugacucagcaacucca

SEQ ID NO: 1653201 - RNA, 19 nt, Artificial Sequence
  Description of Artificial Sequence: Synthetic oligonucleotide
  Sense strand starting at position 3983 of SEQ ID NO: 1561188
guugcugagucacauaguu

SEQ ID NO: 1653202 - RNA, 19 nt, Artificial Sequence
  Description of Artificial Sequence: Synthetic oligonucleotide
  Antisense strand to SEQ ID NO: 1653201
aacuaugugacucagcaac

SEQ ID NO: 1653203 - RNA, 19 nt, Artificial Sequence
  Description of Artificial Sequence: Synthetic oligonucleotide
  Sense strand starting at position 113 of SEQ ID NO: 1561189
aggucuuacccucaaggca

SEQ ID NO: 1653204 - RNA, 19 nt, Artificial Sequence
  Description of Artificial Sequence: Synthetic oligonucleotide
  Antisense strand to SEQ ID NO: 1653203
ugccuugaggguaagaccu

SEQ ID NO: 1653205 - RNA, 19 nt, Artificial Sequence
  Description of Artificial Sequence: Synthetic oligonucleotide
  Sense strand starting at position 252 of SEQ ID NO: 1561189
ucuuaaacaugugagaagu

SEQ ID NO: 1653206 - RNA, 19 nt, Artificial Sequence
  Description of Artificial Sequence: Synthetic oligonucleotide
  Antisense strand to SEQ ID NO: 1653205
acuucucacauguuuaaga

SEQ ID NO: 1653207 - RNA, 19 nt, Artificial Sequence
  Description of Artificial Sequence: Synthetic oligonucleotide
  Sense strand starting at position 254 of SEQ ID NO: 1561189
uuaaacaugugagaaguuu

SEQ ID NO: 1653208 - RNA, 19 nt, Artificial Sequence
  Description of Artificial Sequence: Synthetic oligonucleotide
  Antisense strand to SEQ ID NO: 1653207
aaacuucucacauguuuaa

SEQ ID NO: 1653209 - RNA, 19 nt, Artificial Sequence
  Description of Artificial Sequence: Synthetic oligonucleotide
  Sense strand starting at position 299 of SEQ ID NO: 1561189
gcacuccugguguagagaa

SEQ ID NO: 1653210 - RNA, 19 nt, Artificial Sequence
  Description of Artificial Sequence: Synthetic oligonucleotide
  Antisense strand to SEQ ID NO: 1653209
uucucuacaccaggagugc

SEQ ID NO: 1653211 - RNA, 19 nt, Artificial Sequence
  Description of Artificial Sequence: Synthetic oligonucleotide
  Sense strand starting at position 336 of SEQ ID NO: 1561189
acuggcuaucuguggacua

SEQ ID NO: 1653212 - RNA, 19 nt, Artificial Sequence
  Description of Artificial Sequence: Synthetic oligonucleotide
  Antisense strand to SEQ ID NO: 1653211
uaguccacagauagccagu

SEQ ID NO: 1653213 - RNA, 19 nt, Artificial Sequence
  Description of Artificial Sequence: Synthetic oligonucleotide
  Sense strand starting at position 338 of SEQ ID NO: 1561189
uggcuaucuguggacuaag

SEQ ID NO: 1653214 - RNA, 19 nt, Artificial Sequence
  Description of Artificial Sequence: Synthetic oligonucleotide
  Antisense strand to SEQ ID NO: 1653213
cuuaguccacagauagcca

SEQ ID NO: 1653215 - RNA, 19 nt, Artificial Sequence
  Description of Artificial Sequence: Synthetic oligonucleotide
  Sense strand starting at position 430 of SEQ ID NO: 1561189
aguuuaaccaaaggugaag

SEQ ID NO: 1653216 - RNA, 19 nt, Artificial Sequence
  Description of Artificial Sequence: Synthetic oligonucleotide
  Antisense strand to SEQ ID NO: 1653215
cuucaccuuugguuaaacu

SEQ ID NO: 1653217 - RNA, 19 nt, Artificial Sequence
  Description of Artificial Sequence: Synthetic oligonucleotide
  Sense strand starting at position 486 of SEQ ID NO: 1561189
gcuggaaagguguguuuag

SEQ ID NO: 1653218 - RNA, 19 nt, Artificial Sequence
  Description of Artificial Sequence: Synthetic oligonucleotide
  Antisense strand to SEQ ID NO: 1653217
cuaaacacaccuuuccagc

SEQ ID NO: 1653219 - RNA, 19 nt, Artificial Sequence
  Description of Artificial Sequence: Synthetic oligonucleotide
  Sense strand starting at position 493 of SEQ ID NO: 1561189
agguguguuuaggaaagag

SEQ ID NO: 1653220 - RNA, 19 nt, Artificial Sequence
  Description of Artificial Sequence: Synthetic oligonucleotide
  Antisense strand to SEQ ID NO: 1653219
cucuuuccuaaacacaccu

SEQ ID NO: 1653221 - RNA, 19 nt, Artificial Sequence
  Description of Artificial Sequence: Synthetic oligonucleotide
  Sense strand starting at position 754 of SEQ ID NO: 1561189
aguuuccuccacugcagaa

SEQ ID NO: 1653222 - RNA, 19 nt, Artificial Sequence
  Description of Artificial Sequence: Synthetic oligonucleotide
  Antisense strand to SEQ ID NO: 1653221
uucugcaguggaggaaacu

SEQ ID NO: 1653223 - RNA, 19 nt, Artificial Sequence
  Description of Artificial Sequence: Synthetic oligonucleotide
  Sense strand starting at position 988 of SEQ ID NO: 1561189
gcacauguauucucagcua

SEQ ID NO: 1653224 - RNA, 19 nt, Artificial Sequence
  Description of Artificial Sequence: Synthetic oligonucleotide
  Antisense strand to SEQ ID NO: 1653223
uagcugagaauacaugugc

SEQ ID NO: 1653225 - RNA, 19 nt, Artificial Sequence
  Description of Artificial Sequence: Synthetic oligonucleotide
  Sense strand starting at position 1707 of SEQ ID NO: 1561189
gcgcgagaucucgauguug

SEQ ID NO: 1653226 - RNA, 19 nt, Artificial Sequence
  Description of Artificial Sequence: Synthetic oligonucleotide
  Antisense strand to SEQ ID NO: 1653225
caacaucgagaucucgcgc

SEQ ID NO: 1653227 - RNA, 19 nt, Artificial Sequence
  Description of Artificial Sequence: Synthetic oligonucleotide
  Sense strand starting at position 2500 of SEQ ID NO: 1561189
gucuccuguguucagcgaa

SEQ ID NO: 1653228 - RNA, 19 nt, Artificial Sequence
  Description of Artificial Sequence: Synthetic oligonucleotide
  Antisense strand to SEQ ID NO: 1653227
uucgcugaacacaggagac

SEQ ID NO: 1653229 - RNA, 19 nt, Artificial Sequence
  Description of Artificial Sequence: Synthetic oligonucleotide
  Sense strand starting at position 2503 of SEQ ID NO: 1561189
uccuguguucagcgaauga

SEQ ID NO: 1653230 - RNA, 19 nt, Artificial Sequence
  Description of Artificial Sequence: Synthetic oligonucleotide
  Antisense strand to SEQ ID NO: 1653229
ucauucgcugaacacagga

SEQ ID NO: 1653231 - RNA, 19 nt, Artificial Sequence
  Description of Artificial Sequence: Synthetic oligonucleotide
  Sense strand starting at position 2605 of SEQ ID NO: 1561189
ggaggauaguccuauggac

SEQ ID NO: 1653232 - RNA, 19 nt, Artificial Sequence
  Description of Artificial Sequence: Synthetic oligonucleotide
  Antisense strand to SEQ ID NO: 1653231
guccauaggacuauccucc

SEQ ID NO: 1653233 - RNA, 19 nt, Artificial Sequence
  Description of Artificial Sequence: Synthetic oligonucleotide
  Sense strand starting at position 2607 of SEQ ID NO: 1561189
aggauaguccuauggacca

SEQ ID NO: 1653234 - RNA, 19 nt, Artificial Sequence
  Description of Artificial Sequence: Synthetic oligonucleotide
  Antisense strand to SEQ ID NO: 1653233
ugguccauaggacuauccu

SEQ ID NO: 1653235 - RNA, 19 nt, Artificial Sequence
  Description of Artificial Sequence: Synthetic oligonucleotide
  Sense strand starting at position 2905 of SEQ ID NO: 1561189
ccggcaaaucuauagaauc

SEQ ID NO: 1653236 - RNA, 19 nt, Artificial Sequence
  Description of Artificial Sequence: Synthetic oligonucleotide
  Antisense strand to SEQ ID NO: 1653235
gauucuauagauuugccgg

SEQ ID NO: 1653237 - RNA, 19 nt, Artificial Sequence
  Description of Artificial Sequence: Synthetic oligonucleotide
  Sense strand starting at position 3007 of SEQ ID NO: 1561189
guggcagucagcgagaagu

SEQ ID NO: 1653238 - RNA, 19 nt, Artificial Sequence
  Description of Artificial Sequence: Synthetic oligonucleotide
  Antisense strand to SEQ ID NO: 1653237
acuucucgcugacugccac

SEQ ID NO: 1653239 - RNA, 19 nt, Artificial Sequence
  Description of Artificial Sequence: Synthetic oligonucleotide
  Sense strand starting at position 3009 of SEQ ID NO: 1561189
ggcagucagcgagaaguuu

SEQ ID NO: 1653240 - RNA, 19 nt, Artificial Sequence
  Description of Artificial Sequence: Synthetic oligonucleotide
  Antisense strand to SEQ ID NO: 1653239
aaacuucucgcugacugcc

SEQ ID NO: 1653241 - RNA, 19 nt, Artificial Sequence
  Description of Artificial Sequence: Synthetic oligonucleotide
  Sense strand starting at position 3018 of SEQ ID NO: 1561189
cgagaaguuuccguguagg

SEQ ID NO: 1653242 - RNA, 19 nt, Artificial Sequence
  Description of Artificial Sequence: Synthetic oligonucleotide
  Antisense strand to SEQ ID NO: 1653241
ccuacacggaaacuucucg

SEQ ID NO: 1653243 - RNA, 19 nt, Artificial Sequence
  Description of Artificial Sequence: Synthetic oligonucleotide
  Sense strand starting at position 3021 of SEQ ID NO: 1561189
gaaguuuccguguagguuc

SEQ ID NO: 1653244 - RNA, 19 nt, Artificial Sequence
  Description of Artificial Sequence: Synthetic oligonucleotide
  Antisense strand to SEQ ID NO: 1653243
gaaccuacacggaaacuuc

SEQ ID NO: 1653245 - RNA, 19 nt, Artificial Sequence
  Description of Artificial Sequence: Synthetic oligonucleotide
  Sense strand starting at position 3047 of SEQ ID NO: 1561189
gcuuaaacaguuuaagagu

SEQ ID NO: 1653246 - RNA, 19 nt, Artificial Sequence
  Description of Artificial Sequence: Synthetic oligonucleotide
  Antisense strand to SEQ ID NO: 1653245
acucuuaaacuguuuaagc

SEQ ID NO: 1653247 - RNA, 19 nt, Artificial Sequence
  Description of Artificial Sequence: Synthetic oligonucleotide
  Sense strand starting at position 3111 of SEQ ID NO: 1561189
ccaggauuagccgagggau

SEQ ID NO: 1653248 - RNA, 19 nt, Artificial Sequence
  Description of Artificial Sequence: Synthetic oligonucleotide
  Antisense strand to SEQ ID NO: 1653247
aucccucggcuaauccugg

SEQ ID NO: 1653249 - RNA, 19 nt, Artificial Sequence
  Description of Artificial Sequence: Synthetic oligonucleotide
  Sense strand starting at position 3113 of SEQ ID NO: 1561189
aggauuagccgagggauuc

SEQ ID NO: 1653250 - RNA, 19 nt, Artificial Sequence
  Description of Artificial Sequence: Synthetic oligonucleotide
  Antisense strand to SEQ ID NO: 1653249
gaaucccucggcuaauccu

SEQ ID NO: 1653251 - RNA, 19 nt, Artificial Sequence
  Description of Artificial Sequence: Synthetic oligonucleotide
  Sense strand starting at position 3142 of SEQ ID NO: 1561189
cggaguauuuccgaacaua

SEQ ID NO: 1653252 - RNA, 19 nt, Artificial Sequence
  Description of Artificial Sequence: Synthetic oligonucleotide
  Antisense strand to SEQ ID NO: 1653251
uauguucggaaauacuccg

SEQ ID NO: 1653253 - RNA, 19 nt, Artificial Sequence
  Description of Artificial Sequence: Synthetic oligonucleotide
  Sense strand starting at position 3374 of SEQ ID NO: 1561189
gugagcaauacuggagaga

SEQ ID NO: 1653254 - RNA, 19 nt, Artificial Sequence
  Description of Artificial Sequence: Synthetic oligonucleotide
  Antisense strand to SEQ ID NO: 1653253
ucucuccaguauugcucac

SEQ ID NO: 1653255 - RNA, 19 nt, Artificial Sequence
  Description of Artificial Sequence: Synthetic oligonucleotide
  Sense strand starting at position 3387 of SEQ ID NO: 1561189
gagagauaacgcugaggua

SEQ ID NO: 1653256 - RNA, 19 nt, Artificial Sequence
  Description of Artificial Sequence: Synthetic oligonucleotide
  Antisense strand to SEQ ID NO: 1653255
uaccucagcguuaucucuc

SEQ ID NO: 1653257 - RNA, 19 nt, Artificial Sequence
  Description of Artificial Sequence: Synthetic oligonucleotide
  Sense strand starting at position 3388 of SEQ ID NO: 1561189
agagauaacgcugagguau

SEQ ID NO: 1653258 - RNA, 19 nt, Artificial Sequence
  Description of Artificial Sequence: Synthetic oligonucleotide
  Antisense strand to SEQ ID NO: 1653257
auaccucagcguuaucucu

SEQ ID NO: 1653259 - RNA, 19 nt, Artificial Sequence
  Description of Artificial Sequence: Synthetic oligonucleotide
  Sense strand starting at position 3426 of SEQ ID NO: 1561189
auuggagccacucggaaau

SEQ ID NO: 1653260 - RNA, 19 nt, Artificial Sequence
  Description of Artificial Sequence: Synthetic oligonucleotide
  Antisense strand to SEQ ID NO: 1653259
auuuccgaguggcuccaau

SEQ ID NO: 1653261 - RNA, 19 nt, Artificial Sequence
  Description of Artificial Sequence: Synthetic oligonucleotide
  Sense strand starting at position 3437 of SEQ ID NO: 1561189
ucggaaauccagcgguaga

SEQ ID NO: 1653262 - RNA, 19 nt, Artificial Sequence
  Description of Artificial Sequence: Synthetic oligonucleotide
  Antisense strand to SEQ ID NO: 1653261
ucuaccgcuggauuuccga

SEQ ID NO: 1653263 - RNA, 19 nt, Artificial Sequence
  Description of Artificial Sequence: Synthetic oligonucleotide
  Sense strand starting at position 3440 of SEQ ID NO: 1561189
gaaauccagcgguagaguu

SEQ ID NO: 1653264 - RNA, 19 nt, Artificial Sequence
  Description of Artificial Sequence: Synthetic oligonucleotide
  Antisense strand to SEQ ID NO: 1653263
aacucuaccgcuggauuuc

SEQ ID NO: 1653265 - RNA, 19 nt, Artificial Sequence
  Description of Artificial Sequence: Synthetic oligonucleotide
  Sense strand starting at position 3495 of SEQ ID NO: 1561189
ggcccucuaaccgaagagu

SEQ ID NO: 1653266 - RNA, 19 nt, Artificial Sequence
  Description of Artificial Sequence: Synthetic oligonucleotide
  Antisense strand to SEQ ID NO: 1653265
acucuucgguuagagggcc

SEQ ID NO: 1653267 - RNA, 19 nt, Artificial Sequence
  Description of Artificial Sequence: Synthetic oligonucleotide
  Sense strand starting at position 3515 of SEQ ID NO: 1561189
ccgaauauucccgagcguu

SEQ ID NO: 1653268 - RNA, 19 nt, Artificial Sequence
  Description of Artificial Sequence: Synthetic oligonucleotide
  Antisense strand to SEQ ID NO: 1653267
aacgcucgggaauauucgg

SEQ ID NO: 1653269 - RNA, 19 nt, Artificial Sequence
  Description of Artificial Sequence: Synthetic oligonucleotide
  Sense strand starting at position 3516 of SEQ ID NO: 1561189
cgaauauucccgagcguug

SEQ ID NO: 1653270 - RNA, 19 nt, Artificial Sequence
  Description of Artificial Sequence: Synthetic oligonucleotide
  Antisense strand to SEQ ID NO: 1653269
caacgcucgggaauauucg

SEQ ID NO: 1653271 - RNA, 19 nt, Artificial Sequence
  Description of Artificial Sequence: Synthetic oligonucleotide
  Sense strand starting at position 3625 of SEQ ID NO: 1561189
cggaaaugcguguacggua

SEQ ID NO: 1653272 - RNA, 19 nt, Artificial Sequence
  Description of Artificial Sequence: Synthetic oligonucleotide
  Antisense strand to SEQ ID NO: 1653271
uaccguacacgcauuuccg

SEQ ID NO: 1653273 - RNA, 19 nt, Artificial Sequence
  Description of Artificial Sequence: Synthetic oligonucleotide
  Sense strand starting at position 3626 of SEQ ID NO: 1561189
ggaaaugcguguacgguau

SEQ ID NO: 1653274 - RNA, 19 nt, Artificial Sequence
  Description of Artificial Sequence: Synthetic oligonucleotide
  Antisense strand to SEQ ID NO: 1653273
auaccguacacgcauuucc

SEQ ID NO: 1653275 - RNA, 19 nt, Artificial Sequence
  Description of Artificial Sequence: Synthetic oligonucleotide
  Sense strand starting at position 3630 of SEQ ID NO: 1561189
augcguguacgguauuaaa

SEQ ID NO: 1653276 - RNA, 19 nt, Artificial Sequence
  Description of Artificial Sequence: Synthetic oligonucleotide
  Antisense strand to SEQ ID NO: 1653275
uuuaauaccguacacgcau

SEQ ID NO: 1653277 - RNA, 19 nt, Artificial Sequence
  Description of Artificial Sequence: Synthetic oligonucleotide
  Sense strand starting at position 3703 of SEQ ID NO: 1561189
ggaggugagcguucgucuu

SEQ ID NO: 1653278 - RNA, 19 nt, Artificial Sequence
  Description of Artificial Sequence: Synthetic oligonucleotide
  Antisense strand to SEQ ID NO: 1653277
aagacgaacgcucaccucc

SEQ ID NO: 1653279 - RNA, 19 nt, Artificial Sequence
  Description of Artificial Sequence: Synthetic oligonucleotide
  Sense strand starting at position 3826 of SEQ ID NO: 1561189
ccgugaagucguugugaau

SEQ ID NO: 1653280 - RNA, 19 nt, Artificial Sequence
  Description of Artificial Sequence: Synthetic oligonucleotide
  Antisense strand to SEQ ID NO: 1653279
auucacaacgacuucacgg

SEQ ID NO: 1653281 - RNA, 19 nt, Artificial Sequence
  Description of Artificial Sequence: Synthetic oligonucleotide
  Sense strand starting at position 3938 of SEQ ID NO: 1561189
acaagaguucuaggucgcu

SEQ ID NO: 1653282 - RNA, 19 nt, Artificial Sequence
  Description of Artificial Sequence: Synthetic oligonucleotide
  Antisense strand to SEQ ID NO: 1653281
agcgaccuagaacucuugu

SEQ ID NO: 1653283 - RNA, 19 nt, Artificial Sequence
  Description of Artificial Sequence: Synthetic oligonucleotide
  Sense strand starting at position 8 of SEQ ID NO: 1561190
gugguauuggccuggagau

SEQ ID NO: 1653284 - RNA, 19 nt, Artificial Sequence
  Description of Artificial Sequence: Synthetic oligonucleotide
  Antisense strand to SEQ ID NO: 1653283
aucuccaggccaauaccac

SEQ ID NO: 1653285 - RNA, 19 nt, Artificial Sequence
  Description of Artificial Sequence: Synthetic oligonucleotide
  Sense strand starting at position 9 of SEQ ID NO: 1561190
ugguauuggccuggagaug

SEQ ID NO: 1653286 - RNA, 19 nt, Artificial Sequence
  Description of Artificial Sequence: Synthetic oligonucleotide
  Antisense strand to SEQ ID NO: 1653285
caucuccaggccaauacca

SEQ ID NO: 1653287 - RNA, 19 nt, Artificial Sequence
  Description of Artificial Sequence: Synthetic oligonucleotide
  Sense strand starting at position 661 of SEQ ID NO: 1561190
uguucugaugcagaacgaa

SEQ ID NO: 1653288 - RNA, 19 nt, Artificial Sequence
  Description of Artificial Sequence: Synthetic oligonucleotide
  Antisense strand to SEQ ID NO: 1653287
uucguucugcaucagaaca

SEQ ID NO: 1653289 - RNA, 19 nt, Artificial Sequence
  Description of Artificial Sequence: Synthetic oligonucleotide
  Sense strand starting at position 822 of SEQ ID NO: 1561190
ggcugagaccucugccauc

SEQ ID NO: 1653290 - RNA, 19 nt, Artificial Sequence
  Description of Artificial Sequence: Synthetic oligonucleotide
  Antisense strand to SEQ ID NO: 1653289
gauggcagaggucucagcc

SEQ ID NO: 1653291 - RNA, 19 nt, Artificial Sequence
  Description of Artificial Sequence: Synthetic oligonucleotide
  Sense strand starting at position 1344 of SEQ ID NO: 1561190
cagugagguuuccagagua

SEQ ID NO: 1653292 - RNA, 19 nt, Artificial Sequence
  Description of Artificial Sequence: Synthetic oligonucleotide
  Antisense strand to SEQ ID NO: 1653291
uacucuggaaaccucacug

SEQ ID NO: 1653293 - RNA, 19 nt, Artificial Sequence
  Description of Artificial Sequence: Synthetic oligonucleotide
  Sense strand starting at position 1448 of SEQ ID NO: 1561190
ggccaaucccagggucaga

SEQ ID NO: 1653294 - RNA, 19 nt, Artificial Sequence
  Description of Artificial Sequence: Synthetic oligonucleotide
  Antisense strand to SEQ ID NO: 1653293
ucugacccugggauuggcc

SEQ ID NO: 1653295 - RNA, 19 nt, Artificial Sequence
  Description of Artificial Sequence: Synthetic oligonucleotide
  Sense strand starting at position 2168 of SEQ ID NO: 1561190
cggcuaugaggccaguaua

SEQ ID NO: 1653296 - RNA, 19 nt, Artificial Sequence
  Description of Artificial Sequence: Synthetic oligonucleotide
  Antisense strand to SEQ ID NO: 1653295
uauacuggccucauagccg

SEQ ID NO: 1653297 - RNA, 19 nt, Artificial Sequence
  Description of Artificial Sequence: Synthetic oligonucleotide
  Sense strand starting at position 2178 of SEQ ID NO: 1561190
gccaguauaaggcgguaaa

SEQ ID NO: 1653298 - RNA, 19 nt, Artificial Sequence
  Description of Artificial Sequence: Synthetic oligonucleotide
  Antisense strand to SEQ ID NO: 1653297
uuuaccgccuuauacuggc

SEQ ID NO: 1653299 - RNA, 19 nt, Artificial Sequence
  Description of Artificial Sequence: Synthetic oligonucleotide
  Sense strand starting at position 2200 of SEQ ID NO: 1561190
acgauaagauaugggauuu

SEQ ID NO: 1653300 - RNA, 19 nt, Artificial Sequence
  Description of Artificial Sequence: Synthetic oligonucleotide
  Antisense strand to SEQ ID NO: 1653299
aaaucccauaucuuaucgu

SEQ ID NO: 1653301 - RNA, 19 nt, Artificial Sequence
  Description of Artificial Sequence: Synthetic oligonucleotide
  Sense strand starting at position 2221 of SEQ ID NO: 1561190
cgugaucgaagacaucaaa

SEQ ID NO: 1653302 - RNA, 19 nt, Artificial Sequence
  Description of Artificial Sequence: Synthetic oligonucleotide
  Antisense strand to SEQ ID NO: 1653301
uuugaugucuucgaucacg

SEQ ID NO: 1653303 - RNA, 19 nt, Artificial Sequence
  Description of Artificial Sequence: Synthetic oligonucleotide
  Sense strand starting at position 2242 of SEQ ID NO: 1561190
aagcguaagcacgaaaguu

SEQ ID NO: 1653304 - RNA, 19 nt, Artificial Sequence
  Description of Artificial Sequence: Synthetic oligonucleotide
  Antisense strand to SEQ ID NO: 1653303
aacuuucgugcuuacgcuu

SEQ ID NO: 1653305 - RNA, 19 nt, Artificial Sequence
  Description of Artificial Sequence: Synthetic oligonucleotide
  Sense strand starting at position 2250 of SEQ ID NO: 1561190
gcacgaaaguuguucugca

SEQ ID NO: 1653306 - RNA, 19 nt, Artificial Sequence
  Description of Artificial Sequence: Synthetic oligonucleotide
  Antisense strand to SEQ ID NO: 1653305
ugcagaacaacuuucgugc

SEQ ID NO: 1653307 - RNA, 19 nt, Artificial Sequence
  Description of Artificial Sequence: Synthetic oligonucleotide
  Sense strand starting at position 2251 of SEQ ID NO: 1561190
cacgaaaguuguucugcaa

SEQ ID NO: 1653308 - RNA, 19 nt, Artificial Sequence
  Description of Artificial Sequence: Synthetic oligonucleotide
  Antisense strand to SEQ ID NO: 1653307
uugcagaacaacuuucgug

SEQ ID NO: 1653309 - RNA, 19 nt, Artificial Sequence
  Description of Artificial Sequence: Synthetic oligonucleotide
  Sense strand starting at position 2254 of SEQ ID NO: 1561190
gaaaguuguucugcaacau

SEQ ID NO: 1653310 - RNA, 19 nt, Artificial Sequence
  Description of Artificial Sequence: Synthetic oligonucleotide
  Antisense strand to SEQ ID NO: 1653309
auguugcagaacaacuuuc

SEQ ID NO: 1653311 - RNA, 19 nt, Artificial Sequence
  Description of Artificial Sequence: Synthetic oligonucleotide
  Sense strand starting at position 2266 of SEQ ID NO: 1561190
gcaacauaccacuguagga

SEQ ID NO: 1653312 - RNA, 19 nt, Artificial Sequence
  Description of Artificial Sequence: Synthetic oligonucleotide
  Antisense strand to SEQ ID NO: 1653311
uccuacagugguauguugc

SEQ ID NO: 1653313 - RNA, 19 nt, Artificial Sequence
  Description of Artificial Sequence: Synthetic oligonucleotide
  Sense strand starting at position 2271 of SEQ ID NO: 1561190
auaccacuguaggaaauua

SEQ ID NO: 1653314 - RNA, 19 nt, Artificial Sequence
  Description of Artificial Sequence: Synthetic oligonucleotide
  Antisense strand to SEQ ID NO: 1653313
uaauuuccuacagugguau

SEQ ID NO: 1653315 - RNA, 19 nt, Artificial Sequence
  Description of Artificial Sequence: Synthetic oligonucleotide
  Sense strand starting at position 2371 of SEQ ID NO: 1561190
ccuugagucgugcucgcuu

SEQ ID NO: 1653316 - RNA, 19 nt, Artificial Sequence
  Description of Artificial Sequence: Synthetic oligonucleotide
  Antisense strand to SEQ ID NO: 1653315
aagcgagcacgacucaagg

SEQ ID NO: 1653317 - RNA, 19 nt, Artificial Sequence
  Description of Artificial Sequence: Synthetic oligonucleotide
  Sense strand starting at position 2554 of SEQ ID NO: 1561190
ccaguaacgucauagucuu

SEQ ID NO: 1653318 - RNA, 19 nt, Artificial Sequence
  Description of Artificial Sequence: Synthetic oligonucleotide
  Antisense strand to SEQ ID NO: 1653317
aagacuaugacguuacugg

SEQ ID NO: 1653319 - RNA, 19 nt, Artificial Sequence
  Description of Artificial Sequence: Synthetic oligonucleotide
  Sense strand starting at position 2565 of SEQ ID NO: 1561190
auagucuucccguguccau

SEQ ID NO: 1653320 - RNA, 19 nt, Artificial Sequence
  Description of Artificial Sequence: Synthetic oligonucleotide
  Antisense strand to SEQ ID NO: 1653319
auggacacgggaagacuau

SEQ ID NO: 1653321 - RNA, 19 nt, Artificial Sequence
  Description of Artificial Sequence: Synthetic oligonucleotide
  Sense strand starting at position 2599 of SEQ ID NO: 1561190
uaagguuggcgguagaaca

SEQ ID NO: 1653322 - RNA, 19 nt, Artificial Sequence
  Description of Artificial Sequence: Synthetic oligonucleotide
  Antisense strand to SEQ ID NO: 1653321
uguucuaccgccaaccuua

SEQ ID NO: 1653323 - RNA, 19 nt, Artificial Sequence
  Description of Artificial Sequence: Synthetic oligonucleotide
  Sense strand starting at position 2609 of SEQ ID NO: 1561190
gguagaacaaucuggcagu

SEQ ID NO: 1653324 - RNA, 19 nt, Artificial Sequence
  Description of Artificial Sequence: Synthetic oligonucleotide
  Antisense strand to SEQ ID NO: 1653323
acugccagauuguucuacc

SEQ ID NO: 1653325 - RNA, 19 nt, Artificial Sequence
  Description of Artificial Sequence: Synthetic oligonucleotide
  Sense strand starting at position 2662 of SEQ ID NO: 1561190
cguagcuucgcgcagcaau

SEQ ID NO: 1653326 - RNA, 19 nt, Artificial Sequence
  Description of Artificial Sequence: Synthetic oligonucleotide
  Antisense strand to SEQ ID NO: 1653325
auugcugcgcgaagcuacg

SEQ ID NO: 1653327 - RNA, 19 nt, Artificial Sequence
  Description of Artificial Sequence: Synthetic oligonucleotide
  Sense strand starting at position 2672 of SEQ ID NO: 1561190
cgcagcaaugaauaaauaa

SEQ ID NO: 1653328 - RNA, 19 nt, Artificial Sequence
  Description of Artificial Sequence: Synthetic oligonucleotide
  Antisense strand to SEQ ID NO: 1653327
uuauuuauucauugcugcg

SEQ ID NO: 1653329 - RNA, 19 nt, Artificial Sequence
  Description of Artificial Sequence: Synthetic oligonucleotide
  Sense strand starting at position 2975 of SEQ ID NO: 1561190
cuccuaacuuuaggugauu

SEQ ID NO: 1653330 - RNA, 19 nt, Artificial Sequence
  Description of Artificial Sequence: Synthetic oligonucleotide
  Antisense strand to SEQ ID NO: 1653329
aaucaccuaaaguuaggag

SEQ ID NO: 1653331 - RNA, 19 nt, Artificial Sequence
  Description of Artificial Sequence: Synthetic oligonucleotide
  Sense strand starting at position 3248 of SEQ ID NO: 1561190
ggagaccagguuugaucau

SEQ ID NO: 1653332 - RNA, 19 nt, Artificial Sequence
  Description of Artificial Sequence: Synthetic oligonucleotide
  Antisense strand to SEQ ID NO: 1653331
augaucaaaccuggucucc

SEQ ID NO: 1653333 - RNA, 19 nt, Artificial Sequence
  Description of Artificial Sequence: Synthetic oligonucleotide
  Sense strand starting at position 3260 of SEQ ID NO: 1561190
ugaucaucuuggccagguu

SEQ ID NO: 1653334 - RNA, 19 nt, Artificial Sequence
  Description of Artificial Sequence: Synthetic oligonucleotide
  Antisense strand to SEQ ID NO: 1653333
aaccuggccaagaugauca

SEQ ID NO: 1653335 - RNA, 19 nt, Artificial Sequence
  Description of Artificial Sequence: Synthetic oligonucleotide
  Sense strand starting at position 3383 of SEQ ID NO: 1561190
aaaguuaacugaggacguu

SEQ ID NO: 1653336 - RNA, 19 nt, Artificial Sequence
  Description of Artificial Sequence: Synthetic oligonucleotide
  Antisense strand to SEQ ID NO: 1653335
aacguccucaguuaacuuu

SEQ ID NO: 1653337 - RNA, 19 nt, Artificial Sequence
  Description of Artificial Sequence: Synthetic oligonucleotide
  Sense strand starting at position 3480 of SEQ ID NO: 1561190
gagccaugaucguaucccu

SEQ ID NO: 1653338 - RNA, 19 nt, Artificial Sequence
  Description of Artificial Sequence: Synthetic oligonucleotide
  Antisense strand to SEQ ID NO: 1653337
agggauacgaucauggcuc

SEQ ID NO: 1653339 - RNA, 19 nt, Artificial Sequence
  Description of Artificial Sequence: Synthetic oligonucleotide
  Sense strand starting at position 3627 of SEQ ID NO: 1561190
agccguaaaugauacauaa

SEQ ID NO: 1653340 - RNA, 19 nt, Artificial Sequence
  Description of Artificial Sequence: Synthetic oligonucleotide
  Antisense strand to SEQ ID NO: 1653339
uuauguaucauuuacggcu

SEQ ID NO: 1653341 - RNA, 19 nt, Artificial Sequence
  Description of Artificial Sequence: Synthetic oligonucleotide
  Sense strand starting at position 3653 of SEQ ID NO: 1561190
ggcacagcugugugccaau

SEQ ID NO: 1653342 - RNA, 19 nt, Artificial Sequence
  Description of Artificial Sequence: Synthetic oligonucleotide
  Antisense strand to SEQ ID NO: 1653341
auuggcacacagcugugcc

SEQ ID NO: 1653343 - RNA, 19 nt, Artificial Sequence
  Description of Artificial Sequence: Synthetic oligonucleotide
  Sense strand starting at position 3656 of SEQ ID NO: 1561190
acagcugugugccaauaaa

SEQ ID NO: 1653344 - RNA, 19 nt, Artificial Sequence
  Description of Artificial Sequence: Synthetic oligonucleotide
  Antisense strand to SEQ ID NO: 1653343
uuuauuggcacacagcugu

SEQ ID NO: 1653345 - RNA, 19 nt, Artificial Sequence
  Description of Artificial Sequence: Synthetic oligonucleotide
  Sense strand starting at position 3672 of SEQ ID NO: 1561190
aaagcuuugucugcagaca

SEQ ID NO: 1653346 - RNA, 19 nt, Artificial Sequence
  Description of Artificial Sequence: Synthetic oligonucleotide
  Antisense strand to SEQ ID NO: 1653345
ugucugcagacaaagcuuu

SEQ ID NO: 1653347 - RNA, 19 nt, Artificial Sequence
  Description of Artificial Sequence: Synthetic oligonucleotide
  Sense strand starting at position 3705 of SEQ ID NO: 1561190
uuauguaauuuccacguuu

SEQ ID NO: 1653348 - RNA, 19 nt, Artificial Sequence
  Description of Artificial Sequence: Synthetic oligonucleotide
  Antisense strand to SEQ ID NO: 1653347
aaacguggaaauuacauaa

SEQ ID NO: 1653349 - RNA, 19 nt, Artificial Sequence
  Description of Artificial Sequence: Synthetic oligonucleotide
  Sense strand starting at position 3707 of SEQ ID NO: 1561190
auguaauuuccacguuuga

SEQ ID NO: 1653350 - RNA, 19 nt, Artificial Sequence
  Description of Artificial Sequence: Synthetic oligonucleotide
  Antisense strand to SEQ ID NO: 1653349
ucaaacguggaaauuacau

SEQ ID NO: 1653351 - RNA, 19 nt, Artificial Sequence
  Description of Artificial Sequence: Synthetic oligonucleotide
  Sense strand starting at position 3712 of SEQ ID NO: 1561190
auuuccacguuugauagaa

SEQ ID NO: 1653352 - RNA, 19 nt, Artificial Sequence
  Description of Artificial Sequence: Synthetic oligonucleotide
  Antisense strand to SEQ ID NO: 1653351
uucuaucaaacguggaaau

SEQ ID NO: 1653353 - RNA, 19 nt, Artificial Sequence
  Description of Artificial Sequence: Synthetic oligonucleotide
  Sense strand starting at position 3716 of SEQ ID NO: 1561190
ccacguuugauagaauggu

SEQ ID NO: 1653354 - RNA, 19 nt, Artificial Sequence
  Description of Artificial Sequence: Synthetic oligonucleotide
  Antisense strand to SEQ ID NO: 1653353
accauucuaucaaacgugg

SEQ ID NO: 1653355 - RNA, 19 nt, Artificial Sequence
  Description of Artificial Sequence: Synthetic oligonucleotide
  Sense strand starting at position 3883 of SEQ ID NO: 1561190
aacuuuaaguguucuggua

SEQ ID NO: 1653356 - RNA, 19 nt, Artificial Sequence
  Description of Artificial Sequence: Synthetic oligonucleotide
  Antisense strand to SEQ ID NO: 1653355
uaccagaacacuuaaaguu

SEQ ID NO: 1653357 - RNA, 19 nt, Artificial Sequence
  Description of Artificial Sequence: Synthetic oligonucleotide
  Sense strand starting at position 258 of SEQ ID NO: 1561191
aaaguaauguucuccagga

SEQ ID NO: 1653358 - RNA, 19 nt, Artificial Sequence
  Description of Artificial Sequence: Synthetic oligonucleotide
  Antisense strand to SEQ ID NO: 1653357
uccuggagaacauuacuuu

SEQ ID NO: 1653359 - RNA, 19 nt, Artificial Sequence
  Description of Artificial Sequence: Synthetic oligonucleotide
  Sense strand starting at position 262 of SEQ ID NO: 1561191
uaauguucuccaggauagc

SEQ ID NO: 1653360 - RNA, 19 nt, Artificial Sequence
  Description of Artificial Sequence: Synthetic oligonucleotide
  Antisense strand to SEQ ID NO: 1653359
gcuauccuggagaacauua

SEQ ID NO: 1653361 - RNA, 19 nt, Artificial Sequence
  Description of Artificial Sequence: Synthetic oligonucleotide
  Sense strand starting at position 263 of SEQ ID NO: 1561191
aauguucuccaggauagcu

SEQ ID NO: 1653362 - RNA, 19 nt, Artificial Sequence
  Description of Artificial Sequence: Synthetic oligonucleotide
  Antisense strand to SEQ ID NO: 1653361
agcuauccuggagaacauu

SEQ ID NO: 1653363 - RNA, 19 nt, Artificial Sequence
  Description of Artificial Sequence: Synthetic oligonucleotide
  Sense strand starting at position 335 of SEQ ID NO: 1561191
uagcaaauagaguguaauc

SEQ ID NO: 1653364 - RNA, 19 nt, Artificial Sequence
  Description of Artificial Sequence: Synthetic oligonucleotide
  Antisense strand to SEQ ID NO: 1653363
gauuacacucuauuugcua

SEQ ID NO: 1653365 - RNA, 19 nt, Artificial Sequence
  Description of Artificial Sequence: Synthetic oligonucleotide
  Sense strand starting at position 337 of SEQ ID NO: 1561191
gcaaauagaguguaauccu

SEQ ID NO: 1653366 - RNA, 19 nt, Artificial Sequence
  Description of Artificial Sequence: Synthetic oligonucleotide
  Antisense strand to SEQ ID NO: 1653365
aggauuacacucuauuugc

SEQ ID NO: 1653367 - RNA, 19 nt, Artificial Sequence
  Description of Artificial Sequence: Synthetic oligonucleotide
  Sense strand starting at position 340 of SEQ ID NO: 1561191
aauagaguguaauccuguu

SEQ ID NO: 1653368 - RNA, 19 nt, Artificial Sequence
  Description of Artificial Sequence: Synthetic oligonucleotide
  Antisense strand to SEQ ID NO: 1653367
aacaggauuacacucuauu

SEQ ID NO: 1653369 - RNA, 19 nt, Artificial Sequence
  Description of Artificial Sequence: Synthetic oligonucleotide
  Sense strand starting at position 475 of SEQ ID NO: 1561191
ggugaaggcuugucucuac

SEQ ID NO: 1653370 - RNA, 19 nt, Artificial Sequence
  Description of Artificial Sequence: Synthetic oligonucleotide
  Antisense strand to SEQ ID NO: 1653369
guagagacaagccuucacc

SEQ ID NO: 1653371 - RNA, 19 nt, Artificial Sequence
  Description of Artificial Sequence: Synthetic oligonucleotide
  Sense strand starting at position 478 of SEQ ID NO: 1561191
gaaggcuugucucuacuaa

SEQ ID NO: 1653372 - RNA, 19 nt, Artificial Sequence
  Description of Artificial Sequence: Synthetic oligonucleotide
  Antisense strand to SEQ ID NO: 1653371
uuaguagagacaagccuuc

SEQ ID NO: 1653373 - RNA, 19 nt, Artificial Sequence
  Description of Artificial Sequence: Synthetic oligonucleotide
  Sense strand starting at position 692 of SEQ ID NO: 1561191
gcgugcauuuacguuuaua

SEQ ID NO: 1653374 - RNA, 19 nt, Artificial Sequence
  Description of Artificial Sequence: Synthetic oligonucleotide
  Antisense strand to SEQ ID NO: 1653373
uauaaacguaaaugcacgc

SEQ ID NO: 1653375 - RNA, 19 nt, Artificial Sequence
  Description of Artificial Sequence: Synthetic oligonucleotide
  Sense strand starting at position 708 of SEQ ID NO: 1561191
auaacuauauagccguaaa

SEQ ID NO: 1653376 - RNA, 19 nt, Artificial Sequence
  Description of Artificial Sequence: Synthetic oligonucleotide
  Antisense strand to SEQ ID NO: 1653375
uuuacggcuauauaguuau

SEQ ID NO: 1653377 - RNA, 19 nt, Artificial Sequence
  Description of Artificial Sequence: Synthetic oligonucleotide
  Sense strand starting at position 711 of SEQ ID NO: 1561191
acuauauagccguaaauga

SEQ ID NO: 1653378 - RNA, 19 nt, Artificial Sequence
  Description of Artificial Sequence: Synthetic oligonucleotide
  Antisense strand to SEQ ID NO: 1653377
ucauuuacggcuauauagu

SEQ ID NO: 1653379 - RNA, 19 nt, Artificial Sequence
  Description of Artificial Sequence: Synthetic oligonucleotide
  Sense strand starting at position 765 of SEQ ID NO: 1561191
guauguugacaguaauucu

SEQ ID NO: 1653380 - RNA, 19 nt, Artificial Sequence
  Description of Artificial Sequence: Synthetic oligonucleotide
  Antisense strand to SEQ ID NO: 1653379
agaauuacugucaacauac

SEQ ID NO: 1653381 - RNA, 19 nt, Artificial Sequence
  Description of Artificial Sequence: Synthetic oligonucleotide
  Sense strand starting at position 858 of SEQ ID NO: 1561191
gcuauuuccuuucugagcu

SEQ ID NO: 1653382 - RNA, 19 nt, Artificial Sequence
  Description of Artificial Sequence: Synthetic oligonucleotide
  Antisense strand to SEQ ID NO: 1653381
agcucagaaaggaaauagc

SEQ ID NO: 1653383 - RNA, 19 nt, Artificial Sequence
  Description of Artificial Sequence: Synthetic oligonucleotide
  Sense strand starting at position 862 of SEQ ID NO: 1561191
uuuccuuucugagcuauag

SEQ ID NO: 1653384 - RNA, 19 nt, Artificial Sequence
  Description of Artificial Sequence: Synthetic oligonucleotide
  Antisense strand to SEQ ID NO: 1653383
cuauagcucagaaaggaaa

SEQ ID NO: 1653385 - RNA, 19 nt, Artificial Sequence
  Description of Artificial Sequence: Synthetic oligonucleotide
  Sense strand starting at position 870 of SEQ ID NO: 1561191
cugagcuauagugguaauu

SEQ ID NO: 1653386 - RNA, 19 nt, Artificial Sequence
  Description of Artificial Sequence: Synthetic oligonucleotide
  Antisense strand to SEQ ID NO: 1653385
aauuaccacuauagcucag

SEQ ID NO: 1653387 - RNA, 19 nt, Artificial Sequence
  Description of Artificial Sequence: Synthetic oligonucleotide
  Sense strand starting at position 872 of SEQ ID NO: 1561191
gagcuauagugguaauuua

SEQ ID NO: 1653388 - RNA, 19 nt, Artificial Sequence
  Description of Artificial Sequence: Synthetic oligonucleotide
  Antisense strand to SEQ ID NO: 1653387
uaaauuaccacuauagcuc

SEQ ID NO: 1653389 - RNA, 19 nt, Artificial Sequence
  Description of Artificial Sequence: Synthetic oligonucleotide
  Sense strand starting at position 879 of SEQ ID NO: 1561191
agugguaauuuacaucuaa

SEQ ID NO: 1653390 - RNA, 19 nt, Artificial Sequence
  Description of Artificial Sequence: Synthetic oligonucleotide
  Antisense strand to SEQ ID NO: 1653389
uuagauguaaauuaccacu

SEQ ID NO: 1653391 - RNA, 19 nt, Artificial Sequence
  Description of Artificial Sequence: Synthetic oligonucleotide
  Sense strand starting at position 887 of SEQ ID NO: 1561191
uuuacaucuaagugggaga

SEQ ID NO: 1653392 - RNA, 19 nt, Artificial Sequence
  Description of Artificial Sequence: Synthetic oligonucleotide
  Antisense strand to SEQ ID NO: 1653391
ucucccacuuagauguaaa

SEQ ID NO: 1653393 - RNA, 19 nt, Artificial Sequence
  Description of Artificial Sequence: Synthetic oligonucleotide
  Sense strand starting at position 965 of SEQ ID NO: 1561191
aguugcugguguucuagaa

SEQ ID NO: 1653394 - RNA, 19 nt, Artificial Sequence
  Description of Artificial Sequence: Synthetic oligonucleotide
  Antisense strand to SEQ ID NO: 1653393
uucuagaacaccagcaacu

SEQ ID NO: 1653395 - RNA, 19 nt, Artificial Sequence
  Description of Artificial Sequence: Synthetic oligonucleotide
  Sense strand starting at position 969 of SEQ ID NO: 1561191
gcugguguucuagaauaac

SEQ ID NO: 1653396 - RNA, 19 nt, Artificial Sequence
  Description of Artificial Sequence: Synthetic oligonucleotide
  Antisense strand to SEQ ID NO: 1653395
guuauucuagaacaccagc

SEQ ID NO: 1653397 - RNA, 19 nt, Artificial Sequence
  Description of Artificial Sequence: Synthetic oligonucleotide
  Sense strand starting at position 972 of SEQ ID NO: 1561191
gguguucuagaauaacggu

SEQ ID NO: 1653398 - RNA, 19 nt, Artificial Sequence
  Description of Artificial Sequence: Synthetic oligonucleotide
  Antisense strand to SEQ ID NO: 1653397
accguuauucuagaacacc

SEQ ID NO: 1653399 - RNA, 19 nt, Artificial Sequence
  Description of Artificial Sequence: Synthetic oligonucleotide
  Sense strand starting at position 978 of SEQ ID NO: 1561191
cuagaauaacggugaacaa

SEQ ID NO: 1653400 - RNA, 19 nt, Artificial Sequence
  Description of Artificial Sequence: Synthetic oligonucleotide
  Antisense strand to SEQ ID NO: 1653399
uuguucaccguuauucuag

SEQ ID NO: 1653401 - RNA, 19 nt, Artificial Sequence
  Description of Artificial Sequence: Synthetic oligonucleotide
  Sense strand starting at position 1039 of SEQ ID NO: 1561191
uagaacacguucuaaggaa

SEQ ID NO: 1653402 - RNA, 19 nt, Artificial Sequence
  Description of Artificial Sequence: Synthetic oligonucleotide
  Antisense strand to SEQ ID NO: 1653401
uuccuuagaacguguucua

SEQ ID NO: 1653403 - RNA, 19 nt, Artificial Sequence
  Description of Artificial Sequence: Synthetic oligonucleotide
  Sense strand starting at position 1659 of SEQ ID NO: 1561191
cgaugcaauccuugaaccu

SEQ ID NO: 1653404 - RNA, 19 nt, Artificial Sequence
  Description of Artificial Sequence: Synthetic oligonucleotide
  Antisense strand to SEQ ID NO: 1653403
agguucaaggauugcaucg

SEQ ID NO: 1653405 - RNA, 19 nt, Artificial Sequence
  Description of Artificial Sequence: Synthetic oligonucleotide
  Sense strand starting at position 2705 of SEQ ID NO: 1561191
aggaauugcugcccagcua

SEQ ID NO: 1653406 - RNA, 19 nt, Artificial Sequence
  Description of Artificial Sequence: Synthetic oligonucleotide
  Antisense strand to SEQ ID NO: 1653405
uagcugggcagcaauuccu

SEQ ID NO: 1653407 - RNA, 19 nt, Artificial Sequence
  Description of Artificial Sequence: Synthetic oligonucleotide
  Sense strand starting at position 2706 of SEQ ID NO: 1561191
ggaauugcugcccagcuaa

SEQ ID NO: 1653408 - RNA, 19 nt, Artificial Sequence
  Description of Artificial Sequence: Synthetic oligonucleotide
  Antisense strand to SEQ ID NO: 1653407
uuagcugggcagcaauucc

SEQ ID NO: 1653409 - RNA, 19 nt, Artificial Sequence
  Description of Artificial Sequence: Synthetic oligonucleotide
  Sense strand starting at position 3013 of SEQ ID NO: 1561191
uaacgaugaucggagacau

SEQ ID NO: 1653410 - RNA, 19 nt, Artificial Sequence
  Description of Artificial Sequence: Synthetic oligonucleotide
  Antisense strand to SEQ ID NO: 1653409
augucuccgaucaucguua

SEQ ID NO: 1653411 - RNA, 19 nt, Artificial Sequence
  Description of Artificial Sequence: Synthetic oligonucleotide
  Sense strand starting at position 3125 of SEQ ID NO: 1561191
caggacguugcugaugaau

SEQ ID NO: 1653412 - RNA, 19 nt, Artificial Sequence
  Description of Artificial Sequence: Synthetic oligonucleotide
  Antisense strand to SEQ ID NO: 1653411
auucaucagcaacguccug

SEQ ID NO: 1653413 - RNA, 19 nt, Artificial Sequence
  Description of Artificial Sequence: Synthetic oligonucleotide
  Sense strand starting at position 3157 of SEQ ID NO: 1561191
ugaacuuuaagcugugagu

SEQ ID NO: 1653414 - RNA, 19 nt, Artificial Sequence
  Description of Artificial Sequence: Synthetic oligonucleotide
  Antisense strand to SEQ ID NO: 1653413
acucacagcuuaaaguuca

SEQ ID NO: 1653415 - RNA, 19 nt, Artificial Sequence
  Description of Artificial Sequence: Synthetic oligonucleotide
  Sense strand starting at position 3159 of SEQ ID NO: 1561191
aacuuuaagcugugaguag

SEQ ID NO: 1653416 - RNA, 19 nt, Artificial Sequence
  Description of Artificial Sequence: Synthetic oligonucleotide
  Antisense strand to SEQ ID NO: 1653415
cuacucacagcuuaaaguu

SEQ ID NO: 1653417 - RNA, 19 nt, Artificial Sequence
  Description of Artificial Sequence: Synthetic oligonucleotide
  Sense strand starting at position 3222 of SEQ ID NO: 1561191
cccucauaagcgugaucuc

SEQ ID NO: 1653418 - RNA, 19 nt, Artificial Sequence
  Description of Artificial Sequence: Synthetic oligonucleotide
  Antisense strand to SEQ ID NO: 1653417
gagaucacgcuuaugaggg

SEQ ID NO: 1653419 - RNA, 19 nt, Artificial Sequence
  Description of Artificial Sequence: Synthetic oligonucleotide
  Sense strand starting at position 3492 of SEQ ID NO: 1561191
ugcugaccuggcugugauu

SEQ ID NO: 1653420 - RNA, 19 nt, Artificial Sequence
  Description of Artificial Sequence: Synthetic oligonucleotide
  Antisense strand to SEQ ID NO: 1653419
aaucacagccaggucagca

SEQ ID NO: 1653421 - RNA, 19 nt, Artificial Sequence
  Description of Artificial Sequence: Synthetic oligonucleotide
  Sense strand starting at position 3534 of SEQ ID NO: 1561191
aaggguauugaacgucaga

SEQ ID NO: 1653422 - RNA, 19 nt, Artificial Sequence
  Description of Artificial Sequence: Synthetic oligonucleotide
  Antisense strand to SEQ ID NO: 1653421
ucugacguucaauacccuu

SEQ ID NO: 1653423 - RNA, 19 nt, Artificial Sequence
  Description of Artificial Sequence: Synthetic oligonucleotide
  Sense strand starting at position 3537 of SEQ ID NO: 1561191
gguauugaacgucagaggu

SEQ ID NO: 1653424 - RNA, 19 nt, Artificial Sequence
  Description of Artificial Sequence: Synthetic oligonucleotide
  Antisense strand to SEQ ID NO: 1653423
accucugacguucaauacc

SEQ ID NO: 1653425 - RNA, 19 nt, Artificial Sequence
  Description of Artificial Sequence: Synthetic oligonucleotide
  Sense strand starting at position 3583 of SEQ ID NO: 1561191
ggcugaaacuuaguguuug

SEQ ID NO: 1653426 - RNA, 19 nt, Artificial Sequence
  Description of Artificial Sequence: Synthetic oligonucleotide
  Antisense strand to SEQ ID NO: 1653425
caaacacuaaguuucagcc

SEQ ID NO: 1653427 - RNA, 19 nt, Artificial Sequence
  Description of Artificial Sequence: Synthetic oligonucleotide
  Sense strand starting at position 3630 of SEQ ID NO: 1561191
ugaggacucuaugucccau

SEQ ID NO: 1653428 - RNA, 19 nt, Artificial Sequence
  Description of Artificial Sequence: Synthetic oligonucleotide
  Antisense strand to SEQ ID NO: 1653427
augggacauagaguccuca

SEQ ID NO: 1653429 - RNA, 19 nt, Artificial Sequence
  Description of Artificial Sequence: Synthetic oligonucleotide
  Sense strand starting at position 3661 of SEQ ID NO: 1561191
cugucugcuccucuuugua

SEQ ID NO: 1653430 - RNA, 19 nt, Artificial Sequence
  Description of Artificial Sequence: Synthetic oligonucleotide
  Antisense strand to SEQ ID NO: 1653429
uacaaagaggagcagacag

SEQ ID NO: 1653431 - RNA, 19 nt, Artificial Sequence
  Description of Artificial Sequence: Synthetic oligonucleotide
  Sense strand starting at position 3741 of SEQ ID NO: 1561191
cuaauuggauccuggaauu

SEQ ID NO: 1653432 - RNA, 19 nt, Artificial Sequence
  Description of Artificial Sequence: Synthetic oligonucleotide
  Antisense strand to SEQ ID NO: 1653431
aauuccaggauccaauuag

SEQ ID NO: 1653433 - RNA, 19 nt, Artificial Sequence
  Description of Artificial Sequence: Synthetic oligonucleotide
  Sense strand starting at position 3754 of SEQ ID NO: 1561191
ggaauugcaugguccacuu

SEQ ID NO: 1653434 - RNA, 19 nt, Artificial Sequence
  Description of Artificial Sequence: Synthetic oligonucleotide
  Antisense strand to SEQ ID NO: 1653433
aaguggaccaugcaauucc

SEQ ID NO: 1653435 - RNA, 19 nt, Artificial Sequence
  Description of Artificial Sequence: Synthetic oligonucleotide
  Sense strand starting at position 3909 of SEQ ID NO: 1561191
acucgaccuccugagcuaa

SEQ ID NO: 1653436 - RNA, 19 nt, Artificial Sequence
  Description of Artificial Sequence: Synthetic oligonucleotide
  Antisense strand to SEQ ID NO: 1653435
uuagcucaggaggucgagu

SEQ ID NO: 1653437 - RNA, 19 nt, Artificial Sequence
  Description of Artificial Sequence: Synthetic oligonucleotide
  Sense strand starting at position 25 of SEQ ID NO: 1561192
cuggcuaugcuacaugauu

SEQ ID NO: 1653438 - RNA, 19 nt, Artificial Sequence
  Description of Artificial Sequence: Synthetic oligonucleotide
  Antisense strand to SEQ ID NO: 1653437
aaucauguagcauagccag

SEQ ID NO: 1653439 - RNA, 19 nt, Artificial Sequence
  Description of Artificial Sequence: Synthetic oligonucleotide
  Sense strand starting at position 68 of SEQ ID NO: 1561192
ugcagcauugcuuggacua

SEQ ID NO: 1653440 - RNA, 19 nt, Artificial Sequence
  Description of Artificial Sequence: Synthetic oligonucleotide
  Antisense strand to SEQ ID NO: 1653439
uaguccaagcaaugcugca

SEQ ID NO: 1653441 - RNA, 19 nt, Artificial Sequence
  Description of Artificial Sequence: Synthetic oligonucleotide
  Sense strand starting at position 98 of SEQ ID NO: 1561192
ccguuauuauuucucccau

SEQ ID NO: 1653442 - RNA, 19 nt, Artificial Sequence
  Description of Artificial Sequence: Synthetic oligonucleotide
  Antisense strand to SEQ ID NO: 1653441
augggagaaauaauaacgg

SEQ ID NO: 1653443 - RNA, 19 nt, Artificial Sequence
  Description of Artificial Sequence: Synthetic oligonucleotide
  Sense strand starting at position 99 of SEQ ID NO: 1561192
cguuauuauuucucccaua

SEQ ID NO: 1653444 - RNA, 19 nt, Artificial Sequence
  Description of Artificial Sequence: Synthetic oligonucleotide
  Antisense strand to SEQ ID NO: 1653443
uaugggagaaauaauaacg

SEQ ID NO: 1653445 - RNA, 19 nt, Artificial Sequence
  Description of Artificial Sequence: Synthetic oligonucleotide
  Sense strand starting at position 320 of SEQ ID NO: 1561192
guguaugaccugggagguu

SEQ ID NO: 1653446 - RNA, 19 nt, Artificial Sequence
  Description of Artificial Sequence: Synthetic oligonucleotide
  Antisense strand to SEQ ID NO: 1653445
aaccucccaggucauacac

SEQ ID NO: 1653447 - RNA, 19 nt, Artificial Sequence
  Description of Artificial Sequence: Synthetic oligonucleotide
  Sense strand starting at position 369 of SEQ ID NO: 1561192
guccuuugugccuccaagu

SEQ ID NO: 1653448 - RNA, 19 nt, Artificial Sequence
  Description of Artificial Sequence: Synthetic oligonucleotide
  Antisense strand to SEQ ID NO: 1653447
acuuggaggcacaaaggac

SEQ ID NO: 1653449 - RNA, 19 nt, Artificial Sequence
  Description of Artificial Sequence: Synthetic oligonucleotide
  Sense strand starting at position 433 of SEQ ID NO: 1561192
acagauguuugauaaauga

SEQ ID NO: 1653450 - RNA, 19 nt, Artificial Sequence
  Description of Artificial Sequence: Synthetic oligonucleotide
  Antisense strand to SEQ ID NO: 1653449
ucauuuaucaaacaucugu

SEQ ID NO: 1653451 - RNA, 19 nt, Artificial Sequence
  Description of Artificial Sequence: Synthetic oligonucleotide
  Sense strand starting at position 498 of SEQ ID NO: 1561192
gggcguuguugcauguaac

SEQ ID NO: 1653452 - RNA, 19 nt, Artificial Sequence
  Description of Artificial Sequence: Synthetic oligonucleotide
  Antisense strand to SEQ ID NO: 1653451
guuacaugcaacaacgccc

SEQ ID NO: 1653453 - RNA, 19 nt, Artificial Sequence
  Description of Artificial Sequence: Synthetic oligonucleotide
  Sense strand starting at position 501 of SEQ ID NO: 1561192
cguuguugcauguaacuaa

SEQ ID NO: 1653454 - RNA, 19 nt, Artificial Sequence
  Description of Artificial Sequence: Synthetic oligonucleotide
  Antisense strand to SEQ ID NO: 1653453
uuaguuacaugcaacaacg

SEQ ID NO: 1653455 - RNA, 19 nt, Artificial Sequence
  Description of Artificial Sequence: Synthetic oligonucleotide
  Sense strand starting at position 587 of SEQ ID NO: 1561192
agagccucugcacgugaau

SEQ ID NO: 1653456 - RNA, 19 nt, Artificial Sequence
  Description of Artificial Sequence: Synthetic oligonucleotide
  Antisense strand to SEQ ID NO: 1653455
auucacgugcagaggcucu

SEQ ID NO: 1653457 - RNA, 19 nt, Artificial Sequence
  Description of Artificial Sequence: Synthetic oligonucleotide
  Sense strand starting at position 589 of SEQ ID NO: 1561192
agccucugcacgugaauga

SEQ ID NO: 1653458 - RNA, 19 nt, Artificial Sequence
  Description of Artificial Sequence: Synthetic oligonucleotide
  Antisense strand to SEQ ID NO: 1653457
ucauucacgugcagaggcu

SEQ ID NO: 1653459 - RNA, 19 nt, Artificial Sequence
  Description of Artificial Sequence: Synthetic oligonucleotide
  Sense strand starting at position 590 of SEQ ID NO: 1561192
gccucugcacgugaaugaa

SEQ ID NO: 1653460 - RNA, 19 nt, Artificial Sequence
  Description of Artificial Sequence: Synthetic oligonucleotide
  Antisense strand to SEQ ID NO: 1653459
uucauucacgugcagaggc

SEQ ID NO: 1653461 - RNA, 19 nt, Artificial Sequence
  Description of Artificial Sequence: Synthetic oligonucleotide
  Sense strand starting at position 594 of SEQ ID NO: 1561192
cugcacgugaaugaagauu

SEQ ID NO: 1653462 - RNA, 19 nt, Artificial Sequence
  Description of Artificial Sequence: Synthetic oligonucleotide
  Antisense strand to SEQ ID NO: 1653461
aaucuucauucacgugcag

SEQ ID NO: 1653463 - RNA, 19 nt, Artificial Sequence
  Description of Artificial Sequence: Synthetic oligonucleotide
  Sense strand starting at position 1116 of SEQ ID NO: 1561192
gccagauggagaugaaguu

SEQ ID NO: 1653464 - RNA, 19 nt, Artificial Sequence
  Description of Artificial Sequence: Synthetic oligonucleotide
  Antisense strand to SEQ ID NO: 1653463
aacuucaucuccaucuggc

SEQ ID NO: 1653465 - RNA, 19 nt, Artificial Sequence
  Description of Artificial Sequence: Synthetic oligonucleotide
  Sense strand starting at position 1160 of SEQ ID NO: 1561192
ggcucuuagcucugaggag

SEQ ID NO: 1653466 - RNA, 19 nt, Artificial Sequence
  Description of Artificial Sequence: Synthetic oligonucleotide
  Antisense strand to SEQ ID NO: 1653465
cuccucagagcuaagagcc

SEQ ID NO: 1653467 - RNA, 19 nt, Artificial Sequence
  Description of Artificial Sequence: Synthetic oligonucleotide
  Sense strand starting at position 1582 of SEQ ID NO: 1561192
ccgucaacuacuggagaga

SEQ ID NO: 1653468 - RNA, 19 nt, Artificial Sequence
  Description of Artificial Sequence: Synthetic oligonucleotide
  Antisense strand to SEQ ID NO: 1653467
ucucuccaguaguugacgg

SEQ ID NO: 1653469 - RNA, 19 nt, Artificial Sequence
  Description of Artificial Sequence: Synthetic oligonucleotide
  Sense strand starting at position 2345 of SEQ ID NO: 1561192
cgaggauccugagagaaag

SEQ ID NO: 1653470 - RNA, 19 nt, Artificial Sequence
  Description of Artificial Sequence: Synthetic oligonucleotide
  Antisense strand to SEQ ID NO: 1653469
cuuucucucaggauccucg

SEQ ID NO: 1653471 - RNA, 19 nt, Artificial Sequence
  Description of Artificial Sequence: Synthetic oligonucleotide
  Sense strand starting at position 2356 of SEQ ID NO: 1561192
agagaaagagcuuguugca

SEQ ID NO: 1653472 - RNA, 19 nt, Artificial Sequence
  Description of Artificial Sequence: Synthetic oligonucleotide
  Antisense strand to SEQ ID NO: 1653471
ugcaacaagcucuuucucu

SEQ ID NO: 1653473 - RNA, 19 nt, Artificial Sequence
  Description of Artificial Sequence: Synthetic oligonucleotide
  Sense strand starting at position 2697 of SEQ ID NO: 1561192
ugcugacaugucuaauucu

SEQ ID NO: 1653474 - RNA, 19 nt, Artificial Sequence
  Description of Artificial Sequence: Synthetic oligonucleotide
  Antisense strand to SEQ ID NO: 1653473
agaauuagacaugucagca

SEQ ID NO: 1653475 - RNA, 19 nt, Artificial Sequence
  Description of Artificial Sequence: Synthetic oligonucleotide
  Sense strand starting at position 2704 of SEQ ID NO: 1561192
augucuaauucucauggga

SEQ ID NO: 1653476 - RNA, 19 nt, Artificial Sequence
  Description of Artificial Sequence: Synthetic oligonucleotide
  Antisense strand to SEQ ID NO: 1653475
ucccaugagaauuagacau

SEQ ID NO: 1653477 - RNA, 19 nt, Artificial Sequence
  Description of Artificial Sequence: Synthetic oligonucleotide
  Sense strand starting at position 2706 of SEQ ID NO: 1561192
gucuaauucucaugggaaa

SEQ ID NO: 1653478 - RNA, 19 nt, Artificial Sequence
  Description of Artificial Sequence: Synthetic oligonucleotide
  Antisense strand to SEQ ID NO: 1653477
uuucccaugagaauuagac

SEQ ID NO: 1653479 - RNA, 19 nt, Artificial Sequence
  Description of Artificial Sequence: Synthetic oligonucleotide
  Sense strand starting at position 2738 of SEQ ID NO: 1561192
cgacacuucugacuuccau

SEQ ID NO: 1653480 - RNA, 19 nt, Artificial Sequence
  Description of Artificial Sequence: Synthetic oligonucleotide
  Antisense strand to SEQ ID NO: 1653479
auggaagucagaagugucg

SEQ ID NO: 1653481 - RNA, 19 nt, Artificial Sequence
  Description of Artificial Sequence: Synthetic oligonucleotide
  Sense strand starting at position 2795 of SEQ ID NO: 1561192
agccgaaucucgguuagag

SEQ ID NO: 1653482 - RNA, 19 nt, Artificial Sequence
  Description of Artificial Sequence: Synthetic oligonucleotide
  Antisense strand to SEQ ID NO: 1653481
cucuaaccgagauucggcu

SEQ ID NO: 1653483 - RNA, 19 nt, Artificial Sequence
  Description of Artificial Sequence: Synthetic oligonucleotide
  Sense strand starting at position 2825 of SEQ ID NO: 1561192
cuuccucuccgccagauaa

SEQ ID NO: 1653484 - RNA, 19 nt, Artificial Sequence
  Description of Artificial Sequence: Synthetic oligonucleotide
  Antisense strand to SEQ ID NO: 1653483
uuaucuggcggagaggaag

SEQ ID NO: 1653485 - RNA, 19 nt, Artificial Sequence
  Description of Artificial Sequence: Synthetic oligonucleotide
  Sense strand starting at position 2867 of SEQ ID NO: 1561192
cccggauccucugcaaaga

SEQ ID NO: 1653486 - RNA, 19 nt, Artificial Sequence
  Description of Artificial Sequence: Synthetic oligonucleotide
  Antisense strand to SEQ ID NO: 1653485
ucuuugcagaggauccggg

SEQ ID NO: 1653487 - RNA, 19 nt, Artificial Sequence
  Description of Artificial Sequence: Synthetic oligonucleotide
  Sense strand starting at position 2868 of SEQ ID NO: 1561192
ccggauccucugcaaagau

SEQ ID NO: 1653488 - RNA, 19 nt, Artificial Sequence
  Description of Artificial Sequence: Synthetic oligonucleotide
  Antisense strand to SEQ ID NO: 1653487
aucuuugcagaggauccgg

SEQ ID NO: 1653489 - RNA, 19 nt, Artificial Sequence
  Description of Artificial Sequence: Synthetic oligonucleotide
  Sense strand starting at position 2992 of SEQ ID NO: 1561192
gcagggucugcggguuaga

SEQ ID NO: 1653490 - RNA, 19 nt, Artificial Sequence
  Description of Artificial Sequence: Synthetic oligonucleotide
  Antisense strand to SEQ ID NO: 1653489
ucuaacccgcagacccugc

SEQ ID NO: 1653491 - RNA, 19 nt, Artificial Sequence
  Description of Artificial Sequence: Synthetic oligonucleotide
  Sense strand starting at position 3019 of SEQ ID NO: 1561192
cagguuucggccugggaag

SEQ ID NO: 1653492 - RNA, 19 nt, Artificial Sequence
  Description of Artificial Sequence: Synthetic oligonucleotide
  Antisense strand to SEQ ID NO: 1653491
cuucccaggccgaaaccug

SEQ ID NO: 1653493 - RNA, 19 nt, Artificial Sequence
  Description of Artificial Sequence: Synthetic oligonucleotide
  Sense strand starting at position 3020 of SEQ ID NO: 1561192
agguuucggccugggaaga

SEQ ID NO: 1653494 - RNA, 19 nt, Artificial Sequence
  Description of Artificial Sequence: Synthetic oligonucleotide
  Antisense strand to SEQ ID NO: 1653493
ucuucccaggccgaaaccu

SEQ ID NO: 1653495 - RNA, 19 nt, Artificial Sequence
  Description of Artificial Sequence: Synthetic oligonucleotide
  Sense strand starting at position 3262 of SEQ ID NO: 1561192
cgcaguuugcgccagaauc

SEQ ID NO: 1653496 - RNA, 19 nt, Artificial Sequence
  Description of Artificial Sequence: Synthetic oligonucleotide
  Antisense strand to SEQ ID NO: 1653495
gauucuggcgcaaacugcg

SEQ ID NO: 1653497 - RNA, 19 nt, Artificial Sequence
  Description of Artificial Sequence: Synthetic oligonucleotide
  Sense strand starting at position 3333 of SEQ ID NO: 1561192
gaaacagcccugugcguua

SEQ ID NO: 1653498 - RNA, 19 nt, Artificial Sequence
  Description of Artificial Sequence: Synthetic oligonucleotide
  Antisense strand to SEQ ID NO: 1653497
uaacgcacagggcuguuuc

SEQ ID NO: 1653499 - RNA, 19 nt, Artificial Sequence
  Description of Artificial Sequence: Synthetic oligonucleotide
  Sense strand starting at position 3344 of SEQ ID NO: 1561192
gugcguuaugaccaauacu

SEQ ID NO: 1653500 - RNA, 19 nt, Artificial Sequence
  Description of Artificial Sequence: Synthetic oligonucleotide
  Antisense strand to SEQ ID NO: 1653499
aguauuggucauaacgcac

SEQ ID NO: 1653501 - RNA, 19 nt, Artificial Sequence
  Description of Artificial Sequence: Synthetic oligonucleotide
  Sense strand starting at position 3512 of SEQ ID NO: 1561192
uugcaacaaccguauaaga

SEQ ID NO: 1653502 - RNA, 19 nt, Artificial Sequence
  Description of Artificial Sequence: Synthetic oligonucleotide
  Antisense strand to SEQ ID NO: 1653501
ucuuauacgguuguugcaa

SEQ ID NO: 1653503 - RNA, 19 nt, Artificial Sequence
  Description of Artificial Sequence: Synthetic oligonucleotide
  Sense strand starting at position 3514 of SEQ ID NO: 1561192
gcaacaaccguauaagaca

SEQ ID NO: 1653504 - RNA, 19 nt, Artificial Sequence
  Description of Artificial Sequence: Synthetic oligonucleotide
  Antisense strand to SEQ ID NO: 1653503
ugucuuauacgguuguugc

SEQ ID NO: 1653505 - RNA, 19 nt, Artificial Sequence
  Description of Artificial Sequence: Synthetic oligonucleotide
  Sense strand starting at position 3554 of SEQ ID NO: 1561192
uuauaugggugaggaaacu

SEQ ID NO: 1653506 - RNA, 19 nt, Artificial Sequence
  Description of Artificial Sequence: Synthetic oligonucleotide
  Antisense strand to SEQ ID NO: 1653505
aguuuccucacccauauaa

SEQ ID NO: 1653507 - RNA, 19 nt, Artificial Sequence
  Description of Artificial Sequence: Synthetic oligonucleotide
  Sense strand starting at position 3566 of SEQ ID NO: 1561192
ggaaacugaugcucagacu

SEQ ID NO: 1653508 - RNA, 19 nt, Artificial Sequence
  Description of Artificial Sequence: Synthetic oligonucleotide
  Antisense strand to SEQ ID NO: 1653507
agucugagcaucaguuucc

SEQ ID NO: 1653509 - RNA, 19 nt, Artificial Sequence
  Description of Artificial Sequence: Synthetic oligonucleotide
  Sense strand starting at position 3589 of SEQ ID NO: 1561192
agugguucuguccagguga

SEQ ID NO: 1653510 - RNA, 19 nt, Artificial Sequence
  Description of Artificial Sequence: Synthetic oligonucleotide
  Antisense strand to SEQ ID NO: 1653509
ucaccuggacagaaccacu

SEQ ID NO: 1653511 - RNA, 19 nt, Artificial Sequence
  Description of Artificial Sequence: Synthetic oligonucleotide
  Sense strand starting at position 3591 of SEQ ID NO: 1561192
ugguucuguccaggugaca

SEQ ID NO: 1653512 - RNA, 19 nt, Artificial Sequence
  Description of Artificial Sequence: Synthetic oligonucleotide
  Antisense strand to SEQ ID NO: 1653511
ugucaccuggacagaacca

SEQ ID NO: 1653513 - RNA, 19 nt, Artificial Sequence
  Description of Artificial Sequence: Synthetic oligonucleotide
  Sense strand starting at position 3653 of SEQ ID NO: 1561192
ggaggugaccuuugggcau

SEQ ID NO: 1653514 - RNA, 19 nt, Artificial Sequence
  Description of Artificial Sequence: Synthetic oligonucleotide
  Antisense strand to SEQ ID NO: 1653513
augcccaaaggucaccucc

SEQ ID NO: 1653515 - RNA, 19 nt, Artificial Sequence
  Description of Artificial Sequence: Synthetic oligonucleotide
  Sense strand starting at position 3959 of SEQ ID NO: 1561192
caggaaauccgccgacauu

SEQ ID NO: 1653516 - RNA, 19 nt, Artificial Sequence
  Description of Artificial Sequence: Synthetic oligonucleotide
  Antisense strand to SEQ ID NO: 1653515
aaugucggcggauuuccug

SEQ ID NO: 1653517 - RNA, 19 nt, Artificial Sequence
  Description of Artificial Sequence: Synthetic oligonucleotide
  Sense strand starting at position 647 of SEQ ID NO: 1561193
augugacuuccucagugag

SEQ ID NO: 1653518 - RNA, 19 nt, Artificial Sequence
  Description of Artificial Sequence: Synthetic oligonucleotide
  Antisense strand to SEQ ID NO: 1653517
cucacugaggaagucacau

SEQ ID NO: 1653519 - RNA, 19 nt, Artificial Sequence
  Description of Artificial Sequence: Synthetic oligonucleotide
  Sense strand starting at position 1089 of SEQ ID NO: 1561193
acagcugguccucgggaau

SEQ ID NO: 1653520 - RNA, 19 nt, Artificial Sequence
  Description of Artificial Sequence: Synthetic oligonucleotide
  Antisense strand to SEQ ID NO: 1653519
auucccgaggaccagcugu

SEQ ID NO: 1653521 - RNA, 19 nt, Artificial Sequence
  Description of Artificial Sequence: Synthetic oligonucleotide
  Sense strand starting at position 1159 of SEQ ID NO: 1561193
gcagacaucugggcgcuuu

SEQ ID NO: 1653522 - RNA, 19 nt, Artificial Sequence
  Description of Artificial Sequence: Synthetic oligonucleotide
  Antisense strand to SEQ ID NO: 1653521
aaagcgcccagaugucugc

SEQ ID NO: 1653523 - RNA, 19 nt, Artificial Sequence
  Description of Artificial Sequence: Synthetic oligonucleotide
  Sense strand starting at position 1435 of SEQ ID NO: 1561193
agcagugagucuucagggu

SEQ ID NO: 1653524 - RNA, 19 nt, Artificial Sequence
  Description of Artificial Sequence: Synthetic oligonucleotide
  Antisense strand to SEQ ID NO: 1653523
acccugaagacucacugcu

SEQ ID NO: 1653525 - RNA, 19 nt, Artificial Sequence
  Description of Artificial Sequence: Synthetic oligonucleotide
  Sense strand starting at position 1471 of SEQ ID NO: 1561193
cguccaugcuggccugaua

SEQ ID NO: 1653526 - RNA, 19 nt, Artificial Sequence
  Description of Artificial Sequence: Synthetic oligonucleotide
  Antisense strand to SEQ ID NO: 1653525
uaucaggccagcauggacg

SEQ ID NO: 1653527 - RNA, 19 nt, Artificial Sequence
  Description of Artificial Sequence: Synthetic oligonucleotide
  Sense strand starting at position 1499 of SEQ ID NO: 1561193
cgaccuaaucugggagcga

SEQ ID NO: 1653528 - RNA, 19 nt, Artificial Sequence
  Description of Artificial Sequence: Synthetic oligonucleotide
  Antisense strand to SEQ ID NO: 1653527
ucgcucccagauuaggucg

SEQ ID NO: 1653529 - RNA, 19 nt, Artificial Sequence
  Description of Artificial Sequence: Synthetic oligonucleotide
  Sense strand starting at position 1542 of SEQ ID NO: 1561193
ggcucaugguuacacguua

SEQ ID NO: 1653530 - RNA, 19 nt, Artificial Sequence
  Description of Artificial Sequence: Synthetic oligonucleotide
  Antisense strand to SEQ ID NO: 1653529
uaacguguaaccaugagcc

SEQ ID NO: 1653531 - RNA, 19 nt, Artificial Sequence
  Description of Artificial Sequence: Synthetic oligonucleotide
  Sense strand starting at position 1576 of SEQ ID NO: 1561193
uguggacucugugacugau

SEQ ID NO: 1653532 - RNA, 19 nt, Artificial Sequence
  Description of Artificial Sequence: Synthetic oligonucleotide
  Antisense strand to SEQ ID NO: 1653531
aucagucacagaguccaca

SEQ ID NO: 1653533 - RNA, 19 nt, Artificial Sequence
  Description of Artificial Sequence: Synthetic oligonucleotide
  Sense strand starting at position 1578 of SEQ ID NO: 1561193
uggacucugugacugauaa

SEQ ID NO: 1653534 - RNA, 19 nt, Artificial Sequence
  Description of Artificial Sequence: Synthetic oligonucleotide
  Antisense strand to SEQ ID NO: 1653533
uuaucagucacagagucca

SEQ ID NO: 1653535 - RNA, 19 nt, Artificial Sequence
  Description of Artificial Sequence: Synthetic oligonucleotide
  Sense strand starting at position 1579 of SEQ ID NO: 1561193
ggacucugugacugauaac

SEQ ID NO: 1653536 - RNA, 19 nt, Artificial Sequence
  Description of Artificial Sequence: Synthetic oligonucleotide
  Antisense strand to SEQ ID NO: 1653535
guuaucagucacagagucc

SEQ ID NO: 1653537 - RNA, 19 nt, Artificial Sequence
  Description of Artificial Sequence: Synthetic oligonucleotide
  Sense strand starting at position 2272 of SEQ ID NO: 1561193
gggauuugagccugucggu

SEQ ID NO: 1653538 - RNA, 19 nt, Artificial Sequence
  Description of Artificial Sequence: Synthetic oligonucleotide
  Antisense strand to SEQ ID NO: 1653537
accgacaggcucaaauccc

SEQ ID NO: 1653539 - RNA, 19 nt, Artificial Sequence
  Description of Artificial Sequence: Synthetic oligonucleotide
  Sense strand starting at position 2553 of SEQ ID NO: 1561193
aauagaagcucggcacaaa

SEQ ID NO: 1653540 - RNA, 19 nt, Artificial Sequence
  Description of Artificial Sequence: Synthetic oligonucleotide
  Antisense strand to SEQ ID NO: 1653539
uuugugccgagcuucuauu

SEQ ID NO: 1653541 - RNA, 19 nt, Artificial Sequence
  Description of Artificial Sequence: Synthetic oligonucleotide
  Sense strand starting at position 3036 of SEQ ID NO: 1561193
cuguaucuuuauucuagga

SEQ ID NO: 1653542 - RNA, 19 nt, Artificial Sequence
  Description of Artificial Sequence: Synthetic oligonucleotide
  Antisense strand to SEQ ID NO: 1653541
uccuagaauaaagauacag

SEQ ID NO: 1653543 - RNA, 19 nt, Artificial Sequence
  Description of Artificial Sequence: Synthetic oligonucleotide
  Sense strand starting at position 3040 of SEQ ID NO: 1561193
aucuuuauucuaggaggca

SEQ ID NO: 1653544 - RNA, 19 nt, Artificial Sequence
  Description of Artificial Sequence: Synthetic oligonucleotide
  Antisense strand to SEQ ID NO: 1653543
ugccuccuagaauaaagau

SEQ ID NO: 1653545 - RNA, 19 nt, Artificial Sequence
  Description of Artificial Sequence: Synthetic oligonucleotide
  Sense strand starting at position 3041 of SEQ ID NO: 1561193
ucuuuauucuaggaggcaa

SEQ ID NO: 1653546 - RNA, 19 nt, Artificial Sequence
  Description of Artificial Sequence: Synthetic oligonucleotide
  Antisense strand to SEQ ID NO: 1653545
uugccuccuagaauaaaga

SEQ ID NO: 1653547 - RNA, 19 nt, Artificial Sequence
  Description of Artificial Sequence: Synthetic oligonucleotide
  Sense strand starting at position 3256 of SEQ ID NO: 1561193
ccaggcagcuaucuggaaa

SEQ ID NO: 1653548 - RNA, 19 nt, Artificial Sequence
  Description of Artificial Sequence: Synthetic oligonucleotide
  Antisense strand to SEQ ID NO: 1653547
uuuccagauagcugccugg

SEQ ID NO: 1653549 - RNA, 19 nt, Artificial Sequence
  Description of Artificial Sequence: Synthetic oligonucleotide
  Sense strand starting at position 3280 of SEQ ID NO: 1561193
ggagaugucgugugagggu

SEQ ID NO: 1653550 - RNA, 19 nt, Artificial Sequence
  Description of Artificial Sequence: Synthetic oligonucleotide
  Antisense strand to SEQ ID NO: 1653549
acccucacacgacaucucc

SEQ ID NO: 1653551 - RNA, 19 nt, Artificial Sequence
  Description of Artificial Sequence: Synthetic oligonucleotide
  Sense strand starting at position 3868 of SEQ ID NO: 1561193
cccaaagggucuucugcau

SEQ ID NO: 1653552 - RNA, 19 nt, Artificial Sequence
  Description of Artificial Sequence: Synthetic oligonucleotide
  Antisense strand to SEQ ID NO: 1653551
augcagaagacccuuuggg

SEQ ID NO: 1653553 - RNA, 19 nt, Artificial Sequence
  Description of Artificial Sequence: Synthetic oligonucleotide
  Sense strand starting at position 355 of SEQ ID NO: 1561194
gcaguaaacuaugaucgcu

SEQ ID NO: 1653554 - RNA, 19 nt, Artificial Sequence
  Description of Artificial Sequence: Synthetic oligonucleotide
  Antisense strand to SEQ ID NO: 1653553
agcgaucauaguuuacugc

SEQ ID NO: 1653555 - RNA, 19 nt, Artificial Sequence
  Description of Artificial Sequence: Synthetic oligonucleotide
  Sense strand starting at position 515 of SEQ ID NO: 1561194
agcggagucugagaucaga

SEQ ID NO: 1653556 - RNA, 19 nt, Artificial Sequence
  Description of Artificial Sequence: Synthetic oligonucleotide
  Antisense strand to SEQ ID NO: 1653555
ucugaucucagacuccgcu

SEQ ID NO: 1653557 - RNA, 19 nt, Artificial Sequence
  Description of Artificial Sequence: Synthetic oligonucleotide
  Sense strand starting at position 673 of SEQ ID NO: 1561194
gccagaugcuggccuuagu

SEQ ID NO: 1653558 - RNA, 19 nt, Artificial Sequence
  Description of Artificial Sequence: Synthetic oligonucleotide
  Antisense strand to SEQ ID NO: 1653557
acuaaggccagcaucuggc

SEQ ID NO: 1653559 - RNA, 19 nt, Artificial Sequence
  Description of Artificial Sequence: Synthetic oligonucleotide
  Sense strand starting at position 1138 of SEQ ID NO: 1561194
aaagauuggccucagguua

SEQ ID NO: 1653560 - RNA, 19 nt, Artificial Sequence
  Description of Artificial Sequence: Synthetic oligonucleotide
  Antisense strand to SEQ ID NO: 1653559
uaaccugaggccaaucuuu

SEQ ID NO: 1653561 - RNA, 19 nt, Artificial Sequence
  Description of Artificial Sequence: Synthetic oligonucleotide
  Sense strand starting at position 1146 of SEQ ID NO: 1561194
gccucagguuaugaagaga

SEQ ID NO: 1653562 - RNA, 19 nt, Artificial Sequence
  Description of Artificial Sequence: Synthetic oligonucleotide
  Antisense strand to SEQ ID NO: 1653561
ucucuucauaaccugaggc

SEQ ID NO: 1653563 - RNA, 19 nt, Artificial Sequence
  Description of Artificial Sequence: Synthetic oligonucleotide
  Sense strand starting at position 1244 of SEQ ID NO: 1561194
aucuguugcccaggcagau

SEQ ID NO: 1653564 - RNA, 19 nt, Artificial Sequence
  Description of Artificial Sequence: Synthetic oligonucleotide
  Antisense strand to SEQ ID NO: 1653563
aucugccugggcaacagau

SEQ ID NO: 1653565 - RNA, 19 nt, Artificial Sequence
  Description of Artificial Sequence: Synthetic oligonucleotide
  Sense strand starting at position 1534 of SEQ ID NO: 1561194
gccaaauucugggcauuuc

SEQ ID NO: 1653566 - RNA, 19 nt, Artificial Sequence
  Description of Artificial Sequence: Synthetic oligonucleotide
  Antisense strand to SEQ ID NO: 1653565
gaaaugcccagaauuuggc

SEQ ID NO: 1653567 - RNA, 19 nt, Artificial Sequence
  Description of Artificial Sequence: Synthetic oligonucleotide
  Sense strand starting at position 1544 of SEQ ID NO: 1561194
gggcauuucucucaggcaa

SEQ ID NO: 1653568 - RNA, 19 nt, Artificial Sequence
  Description of Artificial Sequence: Synthetic oligonucleotide
  Antisense strand to SEQ ID NO: 1653567
uugccugagagaaaugccc

SEQ ID NO: 1653569 - RNA, 19 nt, Artificial Sequence
  Description of Artificial Sequence: Synthetic oligonucleotide
  Sense strand starting at position 2143 of SEQ ID NO: 1561194
ugcaccagcucuccagaau

SEQ ID NO: 1653570 - RNA, 19 nt, Artificial Sequence
  Description of Artificial Sequence: Synthetic oligonucleotide
  Antisense strand to SEQ ID NO: 1653569
auucuggagagcuggugca

SEQ ID NO: 1653571 - RNA, 19 nt, Artificial Sequence
  Description of Artificial Sequence: Synthetic oligonucleotide
  Sense strand starting at position 2238 of SEQ ID NO: 1561194
agaauauucuucuucucgu

SEQ ID NO: 1653572 - RNA, 19 nt, Artificial Sequence
  Description of Artificial Sequence: Synthetic oligonucleotide
  Antisense strand to SEQ ID NO: 1653571
acgagaagaagaauauucu

SEQ ID NO: 1653573 - RNA, 19 nt, Artificial Sequence
  Description of Artificial Sequence: Synthetic oligonucleotide
  Sense strand starting at position 2316 of SEQ ID NO: 1561194
agccgauuuccucgccaaa

SEQ ID NO: 1653574 - RNA, 19 nt, Artificial Sequence
  Description of Artificial Sequence: Synthetic oligonucleotide
  Antisense strand to SEQ ID NO: 1653573
uuuggcgaggaaaucggcu

SEQ ID NO: 1653575 - RNA, 19 nt, Artificial Sequence
  Description of Artificial Sequence: Synthetic oligonucleotide
  Sense strand starting at position 2319 of SEQ ID NO: 1561194
cgauuuccucgccaaagcu

SEQ ID NO: 1653576 - RNA, 19 nt, Artificial Sequence
  Description of Artificial Sequence: Synthetic oligonucleotide
  Antisense strand to SEQ ID NO: 1653575
agcuuuggcgaggaaaucg

SEQ ID NO: 1653577 - RNA, 19 nt, Artificial Sequence
  Description of Artificial Sequence: Synthetic oligonucleotide
  Sense strand starting at position 2800 of SEQ ID NO: 1561194
gcgcaauaauagccaauaa

SEQ ID NO: 1653578 - RNA, 19 nt, Artificial Sequence
  Description of Artificial Sequence: Synthetic oligonucleotide
  Antisense strand to SEQ ID NO: 1653577
uuauuggcuauuauugcgc

SEQ ID NO: 1653579 - RNA, 19 nt, Artificial Sequence
  Description of Artificial Sequence: Synthetic oligonucleotide
  Sense strand starting at position 2851 of SEQ ID NO: 1561194
cuaagugcuuugcaaauaa

SEQ ID NO: 1653580 - RNA, 19 nt, Artificial Sequence
  Description of Artificial Sequence: Synthetic oligonucleotide
  Antisense strand to SEQ ID NO: 1653579
uuauuugcaaagcacuuag

SEQ ID NO: 1653581 - RNA, 19 nt, Artificial Sequence
  Description of Artificial Sequence: Synthetic oligonucleotide
  Sense strand starting at position 2880 of SEQ ID NO: 1561194
acauguauuccucagcaca

SEQ ID NO: 1653582 - RNA, 19 nt, Artificial Sequence
  Description of Artificial Sequence: Synthetic oligonucleotide
  Antisense strand to SEQ ID NO: 1653581
ugugcugaggaauacaugu

SEQ ID NO: 1653583 - RNA, 19 nt, Artificial Sequence
  Description of Artificial Sequence: Synthetic oligonucleotide
  Sense strand starting at position 2900 of SEQ ID NO: 1561194
cccuaagaggcauaaucgu

SEQ ID NO: 1653584 - RNA, 19 nt, Artificial Sequence
  Description of Artificial Sequence: Synthetic oligonucleotide
  Antisense strand to SEQ ID NO: 1653583
acgauuaugccucuuaggg

SEQ ID NO: 1653585 - RNA, 19 nt, Artificial Sequence
  Description of Artificial Sequence: Synthetic oligonucleotide
  Sense strand starting at position 2906 of SEQ ID NO: 1561194
gaggcauaaucguuuauug

SEQ ID NO: 1653586 - RNA, 19 nt, Artificial Sequence
  Description of Artificial Sequence: Synthetic oligonucleotide
  Antisense strand to SEQ ID NO: 1653585
caauaaacgauuaugccuc

SEQ ID NO: 1653587 - RNA, 19 nt, Artificial Sequence
  Description of Artificial Sequence: Synthetic oligonucleotide
  Sense strand starting at position 2908 of SEQ ID NO: 1561194
ggcauaaucguuuauuguc

SEQ ID NO: 1653588 - RNA, 19 nt, Artificial Sequence
  Description of Artificial Sequence: Synthetic oligonucleotide
  Antisense strand to SEQ ID NO: 1653587
gacaauaaacgauuaugcc

SEQ ID NO: 1653589 - RNA, 19 nt, Artificial Sequence
  Description of Artificial Sequence: Synthetic oligonucleotide
  Sense strand starting at position 2927 of SEQ ID NO: 1561194
cuguuucacgcgggaggaa

SEQ ID NO: 1653590 - RNA, 19 nt, Artificial Sequence
  Description of Artificial Sequence: Synthetic oligonucleotide
  Antisense strand to SEQ ID NO: 1653589
uuccucccgcgugaaacag

SEQ ID NO: 1653591 - RNA, 19 nt, Artificial Sequence
  Description of Artificial Sequence: Synthetic oligonucleotide
  Sense strand starting at position 2953 of SEQ ID NO: 1561194
agccgagguuagguaaauu

SEQ ID NO: 1653592 - RNA, 19 nt, Artificial Sequence
  Description of Artificial Sequence: Synthetic oligonucleotide
  Antisense strand to SEQ ID NO: 1653591
aauuuaccuaaccucggcu

SEQ ID NO: 1653593 - RNA, 19 nt, Artificial Sequence
  Description of Artificial Sequence: Synthetic oligonucleotide
  Sense strand starting at position 3009 of SEQ ID NO: 1561194
guacccaagcccuguguua

SEQ ID NO: 1653594 - RNA, 19 nt, Artificial Sequence
  Description of Artificial Sequence: Synthetic oligonucleotide
  Antisense strand to SEQ ID NO: 1653593
uaacacagggcuuggguac

SEQ ID NO: 1653595 - RNA, 19 nt, Artificial Sequence
  Description of Artificial Sequence: Synthetic oligonucleotide
  Sense strand starting at position 3011 of SEQ ID NO: 1561194
acccaagcccuguguuaaa

SEQ ID NO: 1653596 - RNA, 19 nt, Artificial Sequence
  Description of Artificial Sequence: Synthetic oligonucleotide
  Antisense strand to SEQ ID NO: 1653595
uuuaacacagggcuugggu

SEQ ID NO: 1653597 - RNA, 19 nt, Artificial Sequence
  Description of Artificial Sequence: Synthetic oligonucleotide
  Sense strand starting at position 3023 of SEQ ID NO: 1561194
uguuaaacgcuuuacauuc

SEQ ID NO: 1653598 - RNA, 19 nt, Artificial Sequence
  Description of Artificial Sequence: Synthetic oligonucleotide
  Antisense strand to SEQ ID NO: 1653597
gaauguaaagcguuuaaca

SEQ ID NO: 1653599 - RNA, 19 nt, Artificial Sequence
  Description of Artificial Sequence: Synthetic oligonucleotide
  Sense strand starting at position 3311 of SEQ ID NO: 1561194
agaugagauuucgcugugu

SEQ ID NO: 1653600 - RNA, 19 nt, Artificial Sequence
  Description of Artificial Sequence: Synthetic oligonucleotide
  Antisense strand to SEQ ID NO: 1653599
acacagcgaaaucucaucu

SEQ ID NO: 1653601 - RNA, 19 nt, Artificial Sequence
  Description of Artificial Sequence: Synthetic oligonucleotide
  Sense strand starting at position 3313 of SEQ ID NO: 1561194
augagauuucgcuguguug

SEQ ID NO: 1653602 - RNA, 19 nt, Artificial Sequence
  Description of Artificial Sequence: Synthetic oligonucleotide
  Antisense strand to SEQ ID NO: 1653601
caacacagcgaaaucucau

SEQ ID NO: 1653603 - RNA, 19 nt, Artificial Sequence
  Description of Artificial Sequence: Synthetic oligonucleotide
  Sense strand starting at position 3315 of SEQ ID NO: 1561194
gagauuucgcuguguuggu

SEQ ID NO: 1653604 - RNA, 19 nt, Artificial Sequence
  Description of Artificial Sequence: Synthetic oligonucleotide
  Antisense strand to SEQ ID NO: 1653603
accaacacagcgaaaucuc

SEQ ID NO: 1653605 - RNA, 19 nt, Artificial Sequence
  Description of Artificial Sequence: Synthetic oligonucleotide
  Sense strand starting at position 407 of SEQ ID NO: 1561195
aaagauuggccucagguua

SEQ ID NO: 1653606 - RNA, 19 nt, Artificial Sequence
  Description of Artificial Sequence: Synthetic oligonucleotide
  Antisense strand to SEQ ID NO: 1653605
uaaccugaggccaaucuuu

SEQ ID NO: 1653607 - RNA, 19 nt, Artificial Sequence
  Description of Artificial Sequence: Synthetic oligonucleotide
  Sense strand starting at position 415 of SEQ ID NO: 1561195
gccucagguuaugaagaga

SEQ ID NO: 1653608 - RNA, 19 nt, Artificial Sequence
  Description of Artificial Sequence: Synthetic oligonucleotide
  Antisense strand to SEQ ID NO: 1653607
ucucuucauaaccugaggc

SEQ ID NO: 1653609 - RNA, 19 nt, Artificial Sequence
  Description of Artificial Sequence: Synthetic oligonucleotide
  Sense strand starting at position 513 of SEQ ID NO: 1561195
aucuguugcccaggcagau

SEQ ID NO: 1653610 - RNA, 19 nt, Artificial Sequence
  Description of Artificial Sequence: Synthetic oligonucleotide
  Antisense strand to SEQ ID NO: 1653609
aucugccugggcaacagau

SEQ ID NO: 1653611 - RNA, 19 nt, Artificial Sequence
  Description of Artificial Sequence: Synthetic oligonucleotide
  Sense strand starting at position 803 of SEQ ID NO: 1561195
gccaaauucugggcauuuc

SEQ ID NO: 1653612 - RNA, 19 nt, Artificial Sequence
  Description of Artificial Sequence: Synthetic oligonucleotide
  Antisense strand to SEQ ID NO: 1653611
gaaaugcccagaauuuggc

SEQ ID NO: 1653613 - RNA, 19 nt, Artificial Sequence
  Description of Artificial Sequence: Synthetic oligonucleotide
  Sense strand starting at position 813 of SEQ ID NO: 1561195
gggcauuucucucaggcaa

SEQ ID NO: 1653614 - RNA, 19 nt, Artificial Sequence
  Description of Artificial Sequence: Synthetic oligonucleotide
  Antisense strand to SEQ ID NO: 1653613
uugccugagagaaaugccc

SEQ ID NO: 1653615 - RNA, 19 nt, Artificial Sequence
  Description of Artificial Sequence: Synthetic oligonucleotide
  Sense strand starting at position 1412 of SEQ ID NO: 1561195
ugcaccagcucuccagaau

SEQ ID NO: 1653616 - RNA, 19 nt, Artificial Sequence
  Description of Artificial Sequence: Synthetic oligonucleotide
  Antisense strand to SEQ ID NO: 1653615
auucuggagagcuggugca

SEQ ID NO: 1653617 - RNA, 19 nt, Artificial Sequence
  Description of Artificial Sequence: Synthetic oligonucleotide
  Sense strand starting at position 1507 of SEQ ID NO: 1561195
agaauauucuucuucucgu

SEQ ID NO: 1653618 - RNA, 19 nt, Artificial Sequence
  Description of Artificial Sequence: Synthetic oligonucleotide
  Antisense strand to SEQ ID NO: 1653617
acgagaagaagaauauucu

SEQ ID NO: 1653619 - RNA, 19 nt, Artificial Sequence
  Description of Artificial Sequence: Synthetic oligonucleotide
  Sense strand starting at position 1585 of SEQ ID NO: 1561195
agccgauuuccucgccaaa

SEQ ID NO: 1653620 - RNA, 19 nt, Artificial Sequence
  Description of Artificial Sequence: Synthetic oligonucleotide
  Antisense strand to SEQ ID NO: 1653619
uuuggcgaggaaaucggcu

SEQ ID NO: 1653621 - RNA, 19 nt, Artificial Sequence
  Description of Artificial Sequence: Synthetic oligonucleotide
  Sense strand starting at position 1588 of SEQ ID NO: 1561195
cgauuuccucgccaaagcu

SEQ ID NO: 1653622 - RNA, 19 nt, Artificial Sequence
  Description of Artificial Sequence: Synthetic oligonucleotide
  Antisense strand to SEQ ID NO: 1653621
agcuuuggcgaggaaaucg

SEQ ID NO: 1653623 - RNA, 19 nt, Artificial Sequence
  Description of Artificial Sequence: Synthetic oligonucleotide
  Sense strand starting at position 2069 of SEQ ID NO: 1561195
gcgcaauaauagccaauaa

SEQ ID NO: 1653624 - RNA, 19 nt, Artificial Sequence
  Description of Artificial Sequence: Synthetic oligonucleotide
  Antisense strand to SEQ ID NO: 1653623
uuauuggcuauuauugcgc

SEQ ID NO: 1653625 - RNA, 19 nt, Artificial Sequence
  Description of Artificial Sequence: Synthetic oligonucleotide
  Sense strand starting at position 2120 of SEQ ID NO: 1561195
cuaagugcuuugcaaauaa

SEQ ID NO: 1653626 - RNA, 19 nt, Artificial Sequence
  Description of Artificial Sequence: Synthetic oligonucleotide
  Antisense strand to SEQ ID NO: 1653625
uuauuugcaaagcacuuag

SEQ ID NO: 1653627 - RNA, 19 nt, Artificial Sequence
  Description of Artificial Sequence: Synthetic oligonucleotide
  Sense strand starting at position 2149 of SEQ ID NO: 1561195
acauguauuccucagcaca

SEQ ID NO: 1653628 - RNA, 19 nt, Artificial Sequence
  Description of Artificial Sequence: Synthetic oligonucleotide
  Antisense strand to SEQ ID NO: 1653627
ugugcugaggaauacaugu

SEQ ID NO: 1653629 - RNA, 19 nt, Artificial Sequence
  Description of Artificial Sequence: Synthetic oligonucleotide
  Sense strand starting at position 2169 of SEQ ID NO: 1561195
cccuaagaggcauaaucgu

SEQ ID NO: 1653630 - RNA, 19 nt, Artificial Sequence
  Description of Artificial Sequence: Synthetic oligonucleotide
  Antisense strand to SEQ ID NO: 1653629
acgauuaugccucuuaggg

SEQ ID NO: 1653631 - RNA, 19 nt, Artificial Sequence
  Description of Artificial Sequence: Synthetic oligonucleotide
  Sense strand starting at position 2175 of SEQ ID NO: 1561195
gaggcauaaucguuuauug

SEQ ID NO: 1653632 - RNA, 19 nt, Artificial Sequence
  Description of Artificial Sequence: Synthetic oligonucleotide
  Antisense strand to SEQ ID NO: 1653631
caauaaacgauuaugccuc

SEQ ID NO: 1653633 - RNA, 19 nt, Artificial Sequence
  Description of Artificial Sequence: Synthetic oligonucleotide
  Sense strand starting at position 2177 of SEQ ID NO: 1561195
ggcauaaucguuuauuguc

SEQ ID NO: 1653634 - RNA, 19 nt, Artificial Sequence
  Description of Artificial Sequence: Synthetic oligonucleotide
  Antisense strand to SEQ ID NO: 1653633
gacaauaaacgauuaugcc

SEQ ID NO: 1653635 - RNA, 19 nt, Artificial Sequence
  Description of Artificial Sequence: Synthetic oligonucleotide
  Sense strand starting at position 2196 of SEQ ID NO: 1561195
cuguuucacgcgggaggaa

SEQ ID NO: 1653636 - RNA, 19 nt, Artificial Sequence
  Description of Artificial Sequence: Synthetic oligonucleotide
  Antisense strand to SEQ ID NO: 1653635
uuccucccgcgugaaacag

SEQ ID NO: 1653637 - RNA, 19 nt, Artificial Sequence
  Description of Artificial Sequence: Synthetic oligonucleotide
  Sense strand starting at position 2222 of SEQ ID NO: 1561195
agccgagguuagguaaauu

SEQ ID NO: 1653638 - RNA, 19 nt, Artificial Sequence
  Description of Artificial Sequence: Synthetic oligonucleotide
  Antisense strand to SEQ ID NO: 1653637
aauuuaccuaaccucggcu

SEQ ID NO: 1653639 - RNA, 19 nt, Artificial Sequence
  Description of Artificial Sequence: Synthetic oligonucleotide
  Sense strand starting at position 2278 of SEQ ID NO: 1561195
guacccaagcccuguguua

SEQ ID NO: 1653640 - RNA, 19 nt, Artificial Sequence
  Description of Artificial Sequence: Synthetic oligonucleotide
  Antisense strand to SEQ ID NO: 1653639
uaacacagggcuuggguac

SEQ ID NO: 1653641 - RNA, 19 nt, Artificial Sequence
  Description of Artificial Sequence: Synthetic oligonucleotide
  Sense strand starting at position 2280 of SEQ ID NO: 1561195
acccaagcccuguguuaaa

SEQ ID NO: 1653642 - RNA, 19 nt, Artificial Sequence
  Description of Artificial Sequence: Synthetic oligonucleotide
  Antisense strand to SEQ ID NO: 1653641
uuuaacacagggcuugggu

SEQ ID NO: 1653643 - RNA, 19 nt, Artificial Sequence
  Description of Artificial Sequence: Synthetic oligonucleotide
  Sense strand starting at position 2292 of SEQ ID NO: 1561195
uguuaaacgcuuuacauuc

SEQ ID NO: 1653644 - RNA, 19 nt, Artificial Sequence
  Description of Artificial Sequence: Synthetic oligonucleotide
  Antisense strand to SEQ ID NO: 1653643
gaauguaaagcguuuaaca

SEQ ID NO: 1653645 - RNA, 19 nt, Artificial Sequence
  Description of Artificial Sequence: Synthetic oligonucleotide
  Sense strand starting at position 2580 of SEQ ID NO: 1561195
agaugagauuucgcugugu

SEQ ID NO: 1653646 - RNA, 19 nt, Artificial Sequence
  Description of Artificial Sequence: Synthetic oligonucleotide
  Antisense strand to SEQ ID NO: 1653645
acacagcgaaaucucaucu

SEQ ID NO: 1653647 - RNA, 19 nt, Artificial Sequence
  Description of Artificial Sequence: Synthetic oligonucleotide
  Sense strand starting at position 2582 of SEQ ID NO: 1561195
augagauuucgcuguguug

SEQ ID NO: 1653648 - RNA, 19 nt, Artificial Sequence
  Description of Artificial Sequence: Synthetic oligonucleotide
  Antisense strand to SEQ ID NO: 1653647
caacacagcgaaaucucau

SEQ ID NO: 1653649 - RNA, 19 nt, Artificial Sequence
  Description of Artificial Sequence: Synthetic oligonucleotide
  Sense strand starting at position 2584 of SEQ ID NO: 1561195
gagauuucgcuguguuggu

SEQ ID NO: 1653650 - RNA, 19 nt, Artificial Sequence
  Description of Artificial Sequence: Synthetic oligonucleotide
  Antisense strand to SEQ ID NO: 1653649
accaacacagcgaaaucuc

SEQ ID NO: 1653651 - RNA, 19 nt, Artificial Sequence
  Description of Artificial Sequence: Synthetic oligonucleotide
  Sense strand starting at position 3291 of SEQ ID NO: 1561195
cucacuuggccacaguaaa

SEQ ID NO: 1653652 - RNA, 19 nt, Artificial Sequence
  Description of Artificial Sequence: Synthetic oligonucleotide
  Antisense strand to SEQ ID NO: 1653651
uuuacuguggccaagugag

SEQ ID NO: 1653653 - RNA, 19 nt, Artificial Sequence
  Description of Artificial Sequence: Synthetic oligonucleotide
  Sense strand starting at position 3406 of SEQ ID NO: 1561195
aggaguuucuagggaaaga

SEQ ID NO: 1653654 - RNA, 19 nt, Artificial Sequence
  Description of Artificial Sequence: Synthetic oligonucleotide
  Antisense strand to SEQ ID NO: 1653653
ucuuucccuagaaacuccu

SEQ ID NO: 1653655 - RNA, 19 nt, Artificial Sequence
  Description of Artificial Sequence: Synthetic oligonucleotide
  Sense strand starting at position 3450 of SEQ ID NO: 1561195
gggugaugcucugauuguc

SEQ ID NO: 1653656 - RNA, 19 nt, Artificial Sequence
  Description of Artificial Sequence: Synthetic oligonucleotide
  Antisense strand to SEQ ID NO: 1653655
gacaaucagagcaucaccc

SEQ ID NO: 1653657 - RNA, 19 nt, Artificial Sequence
  Description of Artificial Sequence: Synthetic oligonucleotide
  Sense strand starting at position 3458 of SEQ ID NO: 1561195
cucugauugucacguggua

SEQ ID NO: 1653658 - RNA, 19 nt, Artificial Sequence
  Description of Artificial Sequence: Synthetic oligonucleotide
  Antisense strand to SEQ ID NO: 1653657
uaccacgugacaaucagag

SEQ ID NO: 1653659 - RNA, 19 nt, Artificial Sequence
  Description of Artificial Sequence: Synthetic oligonucleotide
  Sense strand starting at position 3460 of SEQ ID NO: 1561195
cugauugucacgugguaca

SEQ ID NO: 1653660 - RNA, 19 nt, Artificial Sequence
  Description of Artificial Sequence: Synthetic oligonucleotide
  Antisense strand to SEQ ID NO: 1653659
uguaccacgugacaaucag

SEQ ID NO: 1653661 - RNA, 19 nt, Artificial Sequence
  Description of Artificial Sequence: Synthetic oligonucleotide
  Sense strand starting at position 3471 of SEQ ID NO: 1561195
gugguacagugauguucau

SEQ ID NO: 1653662 - RNA, 19 nt, Artificial Sequence
  Description of Artificial Sequence: Synthetic oligonucleotide
  Antisense strand to SEQ ID NO: 1653661
augaacaucacuguaccac

SEQ ID NO: 1653663 - RNA, 19 nt, Artificial Sequence
  Description of Artificial Sequence: Synthetic oligonucleotide
  Sense strand starting at position 3844 of SEQ ID NO: 1561195
ucuuuaagucacugagugu

SEQ ID NO: 1653664 - RNA, 19 nt, Artificial Sequence
  Description of Artificial Sequence: Synthetic oligonucleotide
  Antisense strand to SEQ ID NO: 1653663
acacucagugacuuaaaga

SEQ ID NO: 1653665 - RNA, 19 nt, Artificial Sequence
  Description of Artificial Sequence: Synthetic oligonucleotide
  Sense strand starting at position 3859 of SEQ ID NO: 1561195
guguguggccucuagacaa

SEQ ID NO: 1653666 - RNA, 19 nt, Artificial Sequence
  Description of Artificial Sequence: Synthetic oligonucleotide
  Antisense strand to SEQ ID NO: 1653665
uugucuagaggccacacac

SEQ ID NO: 1653667 - RNA, 19 nt, Artificial Sequence
  Description of Artificial Sequence: Synthetic oligonucleotide
  Sense strand starting at position 3930 of SEQ ID NO: 1561195
cuccuugccucuuauguga

SEQ ID NO: 1653668 - RNA, 19 nt, Artificial Sequence
  Description of Artificial Sequence: Synthetic oligonucleotide
  Antisense strand to SEQ ID NO: 1653667
ucacauaagaggcaaggag

SEQ ID NO: 1653669 - RNA, 19 nt, Artificial Sequence
  Description of Artificial Sequence: Synthetic oligonucleotide
  Sense strand starting at position 3932 of SEQ ID NO: 1561195
ccuugccucuuaugugaua

SEQ ID NO: 1653670 - RNA, 19 nt, Artificial Sequence
  Description of Artificial Sequence: Synthetic oligonucleotide
  Antisense strand to SEQ ID NO: 1653669
uaucacauaagaggcaagg

SEQ ID NO: 1653671 - RNA, 19 nt, Artificial Sequence
  Description of Artificial Sequence: Synthetic oligonucleotide
  Sense strand starting at position 3933 of SEQ ID NO: 1561195
cuugccucuuaugugauaa

SEQ ID NO: 1653672 - RNA, 19 nt, Artificial Sequence
  Description of Artificial Sequence: Synthetic oligonucleotide
  Antisense strand to SEQ ID NO: 1653671
uuaucacauaagaggcaag

SEQ ID NO: 1653673 - RNA, 19 nt, Artificial Sequence
  Description of Artificial Sequence: Synthetic oligonucleotide
  Sense strand starting at position 3935 of SEQ ID NO: 1561195
ugccucuuaugugauaaca

SEQ ID NO: 1653674 - RNA, 19 nt, Artificial Sequence
  Description of Artificial Sequence: Synthetic oligonucleotide
  Antisense strand to SEQ ID NO: 1653673
uguuaucacauaagaggca

SEQ ID NO: 1653675 - RNA, 19 nt, Artificial Sequence
  Description of Artificial Sequence: Synthetic oligonucleotide
  Sense strand starting at position 3944 of SEQ ID NO: 1561195
ugugauaacauauguagag

SEQ ID NO: 1653676 - RNA, 19 nt, Artificial Sequence
  Description of Artificial Sequence: Synthetic oligonucleotide
  Antisense strand to SEQ ID NO: 1653675
cucuacauauguuaucaca

SEQ ID NO: 1653677 - RNA, 19 nt, Artificial Sequence
  Description of Artificial Sequence: Synthetic oligonucleotide
  Sense strand starting at position 3945 of SEQ ID NO: 1561195
gugauaacauauguagagu

SEQ ID NO: 1653678 - RNA, 19 nt, Artificial Sequence
  Description of Artificial Sequence: Synthetic oligonucleotide
  Antisense strand to SEQ ID NO: 1653677
acucuacauauguuaucac

SEQ ID NO: 1653679 - RNA, 19 nt, Artificial Sequence
  Description of Artificial Sequence: Synthetic oligonucleotide
  Sense strand starting at position 3954 of SEQ ID NO: 1561195
uauguagaguacuuagagu

SEQ ID NO: 1653680 - RNA, 19 nt, Artificial Sequence
  Description of Artificial Sequence: Synthetic oligonucleotide
  Antisense strand to SEQ ID NO: 1653679
acucuaaguacucuacaua

SEQ ID NO: 1653681 - RNA, 19 nt, Artificial Sequence
  Description of Artificial Sequence: Synthetic oligonucleotide
  Sense strand starting at position 81 of SEQ ID NO: 1561196
gcacaaacauuagcuagau

SEQ ID NO: 1653682 - RNA, 19 nt, Artificial Sequence
  Description of Artificial Sequence: Synthetic oligonucleotide
  Antisense strand to SEQ ID NO: 1653681
aucuagcuaauguuugugc

SEQ ID NO: 1653683 - RNA, 19 nt, Artificial Sequence
  Description of Artificial Sequence: Synthetic oligonucleotide
  Sense strand starting at position 93 of SEQ ID NO: 1561196
gcuagauauaguggugggu

SEQ ID NO: 1653684 - RNA, 19 nt, Artificial Sequence
  Description of Artificial Sequence: Synthetic oligonucleotide
  Antisense strand to SEQ ID NO: 1653683
acccaccacuauaucuagc

SEQ ID NO: 1653685 - RNA, 19 nt, Artificial Sequence
  Description of Artificial Sequence: Synthetic oligonucleotide
  Sense strand starting at position 561 of SEQ ID NO: 1561196
aaauuauaacgaggguaca

SEQ ID NO: 1653686 - RNA, 19 nt, Artificial Sequence
  Description of Artificial Sequence: Synthetic oligonucleotide
  Antisense strand to SEQ ID NO: 1653685
uguacccucguuauaauuu

SEQ ID NO: 1653687 - RNA, 19 nt, Artificial Sequence
  Description of Artificial Sequence: Synthetic oligonucleotide
  Sense strand starting at position 562 of SEQ ID NO: 1561196
aauuauaacgaggguacaa

SEQ ID NO: 1653688 - RNA, 19 nt, Artificial Sequence
  Description of Artificial Sequence: Synthetic oligonucleotide
  Antisense strand to SEQ ID NO: 1653687
uuguacccucguuauaauu

SEQ ID NO: 1653689 - RNA, 19 nt, Artificial Sequence
  Description of Artificial Sequence: Synthetic oligonucleotide
  Sense strand starting at position 747 of SEQ ID NO: 1561196
agccaaugguagcuuguaa

SEQ ID NO: 1653690 - RNA, 19 nt, Artificial Sequence
  Description of Artificial Sequence: Synthetic oligonucleotide
  Antisense strand to SEQ ID NO: 1653689
uuacaagcuaccauuggcu

SEQ ID NO: 1653691 - RNA, 19 nt, Artificial Sequence
  Description of Artificial Sequence: Synthetic oligonucleotide
  Sense strand starting at position 758 of SEQ ID NO: 1561196
gcuuguaaauacuuuguau

SEQ ID NO: 1653692 - RNA, 19 nt, Artificial Sequence
  Description of Artificial Sequence: Synthetic oligonucleotide
  Antisense strand to SEQ ID NO: 1653691
auacaaaguauuuacaagc

SEQ ID NO: 1653693 - RNA, 19 nt, Artificial Sequence
  Description of Artificial Sequence: Synthetic oligonucleotide
  Sense strand starting at position 814 of SEQ ID NO: 1561196
ggcaguuugggagggagaa

SEQ ID NO: 1653694 - RNA, 19 nt, Artificial Sequence
  Description of Artificial Sequence: Synthetic oligonucleotide
  Antisense strand to SEQ ID NO: 1653693
uucucccucccaaacugcc

SEQ ID NO: 1653695 - RNA, 19 nt, Artificial Sequence
  Description of Artificial Sequence: Synthetic oligonucleotide
  Sense strand starting at position 1022 of SEQ ID NO: 1561196
cugugaucgagccaccgua

SEQ ID NO: 1653696 - RNA, 19 nt, Artificial Sequence
  Description of Artificial Sequence: Synthetic oligonucleotide
  Antisense strand to SEQ ID NO: 1653695
uacgguggcucgaucacag

SEQ ID NO: 1653697 - RNA, 19 nt, Artificial Sequence
  Description of Artificial Sequence: Synthetic oligonucleotide
  Sense strand starting at position 1097 of SEQ ID NO: 1561196
acuggcuugaugugggaaa

SEQ ID NO: 1653698 - RNA, 19 nt, Artificial Sequence
  Description of Artificial Sequence: Synthetic oligonucleotide
  Antisense strand to SEQ ID NO: 1653697
uuucccacaucaagccagu

SEQ ID NO: 1653699 - RNA, 19 nt, Artificial Sequence
  Description of Artificial Sequence: Synthetic oligonucleotide
  Sense strand starting at position 1099 of SEQ ID NO: 1561196
uggcuugaugugggaaaug

SEQ ID NO: 1653700 - RNA, 19 nt, Artificial Sequence
  Description of Artificial Sequence: Synthetic oligonucleotide
  Antisense strand to SEQ ID NO: 1653699
cauuucccacaucaagcca

SEQ ID NO: 1653701 - RNA, 19 nt, Artificial Sequence
  Description of Artificial Sequence: Synthetic oligonucleotide
  Sense strand starting at position 1204 of SEQ ID NO: 1561196
agggaaucuuaguuccuca

SEQ ID NO: 1653702 - RNA, 19 nt, Artificial Sequence
  Description of Artificial Sequence: Synthetic oligonucleotide
  Antisense strand to SEQ ID NO: 1653701
ugaggaacuaagauucccu

SEQ ID NO: 1653703 - RNA, 19 nt, Artificial Sequence
  Description of Artificial Sequence: Synthetic oligonucleotide
  Sense strand starting at position 1255 of SEQ ID NO: 1561196
agaaucaagcaguaacagu

SEQ ID NO: 1653704 - RNA, 19 nt, Artificial Sequence
  Description of Artificial Sequence: Synthetic oligonucleotide
  Antisense strand to SEQ ID NO: 1653703
acuguuacugcuugauucu

SEQ ID NO: 1653705 - RNA, 19 nt, Artificial Sequence
  Description of Artificial Sequence: Synthetic oligonucleotide
  Sense strand starting at position 1268 of SEQ ID NO: 1561196
aacagugaacuugguagua

SEQ ID NO: 1653706 - RNA, 19 nt, Artificial Sequence
  Description of Artificial Sequence: Synthetic oligonucleotide
  Antisense strand to SEQ ID NO: 1653705
uacuaccaaguucacuguu

SEQ ID NO: 1653707 - RNA, 19 nt, Artificial Sequence
  Description of Artificial Sequence: Synthetic oligonucleotide
  Sense strand starting at position 1323 of SEQ ID NO: 1561196
ccuuccuuguccuugagaa

SEQ ID NO: 1653708 - RNA, 19 nt, Artificial Sequence
  Description of Artificial Sequence: Synthetic oligonucleotide
  Antisense strand to SEQ ID NO: 1653707
uucucaaggacaaggaagg

SEQ ID NO: 1653709 - RNA, 19 nt, Artificial Sequence
  Description of Artificial Sequence: Synthetic oligonucleotide
  Sense strand starting at position 1579 of SEQ ID NO: 1561196
gaagguaucugggagaaac

SEQ ID NO: 1653710 - RNA, 19 nt, Artificial Sequence
  Description of Artificial Sequence: Synthetic oligonucleotide
  Antisense strand to SEQ ID NO: 1653709
guuucucccagauaccuuc

SEQ ID NO: 1653711 - RNA, 19 nt, Artificial Sequence
  Description of Artificial Sequence: Synthetic oligonucleotide
  Sense strand starting at position 1993 of SEQ ID NO: 1561196
ccguuaagugcgcuaaggu

SEQ ID NO: 1653712 - RNA, 19 nt, Artificial Sequence
  Description of Artificial Sequence: Synthetic oligonucleotide
  Antisense strand to SEQ ID NO: 1653711
accuuagcgcacuuaacgg

SEQ ID NO: 1653713 - RNA, 19 nt, Artificial Sequence
  Description of Artificial Sequence: Synthetic oligonucleotide
  Sense strand starting at position 2288 of SEQ ID NO: 1561196
uaggaucuguggucaagac

SEQ ID NO: 1653714 - RNA, 19 nt, Artificial Sequence
  Description of Artificial Sequence: Synthetic oligonucleotide
  Antisense strand to SEQ ID NO: 1653713
gucuugaccacagauccua

SEQ ID NO: 1653715 - RNA, 19 nt, Artificial Sequence
  Description of Artificial Sequence: Synthetic oligonucleotide
  Sense strand starting at position 2407 of SEQ ID NO: 1561196
accucacaggguugugauu

SEQ ID NO: 1653716 - RNA, 19 nt, Artificial Sequence
  Description of Artificial Sequence: Synthetic oligonucleotide
  Antisense strand to SEQ ID NO: 1653715
aaucacaacccugugaggu

SEQ ID NO: 1653717 - RNA, 19 nt, Artificial Sequence
  Description of Artificial Sequence: Synthetic oligonucleotide
  Sense strand starting at position 2462 of SEQ ID NO: 1561196
cgugaucgggcagaucaua

SEQ ID NO: 1653718 - RNA, 19 nt, Artificial Sequence
  Description of Artificial Sequence: Synthetic oligonucleotide
  Antisense strand to SEQ ID NO: 1653717
uaugaucugcccgaucacg

SEQ ID NO: 1653719 - RNA, 19 nt, Artificial Sequence
  Description of Artificial Sequence: Synthetic oligonucleotide
  Sense strand starting at position 3037 of SEQ ID NO: 1561196
gcccuauagagucauggua

SEQ ID NO: 1653720 - RNA, 19 nt, Artificial Sequence
  Description of Artificial Sequence: Synthetic oligonucleotide
  Antisense strand to SEQ ID NO: 1653719
uaccaugacucuauagggc

SEQ ID NO: 1653721 - RNA, 19 nt, Artificial Sequence
  Description of Artificial Sequence: Synthetic oligonucleotide
  Sense strand starting at position 3044 of SEQ ID NO: 1561196
agagucaugguauagugua

SEQ ID NO: 1653722 - RNA, 19 nt, Artificial Sequence
  Description of Artificial Sequence: Synthetic oligonucleotide
  Antisense strand to SEQ ID NO: 1653721
uacacuauaccaugacucu

SEQ ID NO: 1653723 - RNA, 19 nt, Artificial Sequence
  Description of Artificial Sequence: Synthetic oligonucleotide
  Sense strand starting at position 3079 of SEQ ID NO: 1561196
gcugccagaucugcauuua

SEQ ID NO: 1653724 - RNA, 19 nt, Artificial Sequence
  Description of Artificial Sequence: Synthetic oligonucleotide
  Antisense strand to SEQ ID NO: 1653723
uaaaugcagaucuggcagc

SEQ ID NO: 1653725 - RNA, 19 nt, Artificial Sequence
  Description of Artificial Sequence: Synthetic oligonucleotide
  Sense strand starting at position 3177 of SEQ ID NO: 1561196
agcuaauaguagcuaagaa

SEQ ID NO: 1653726 - RNA, 19 nt, Artificial Sequence
  Description of Artificial Sequence: Synthetic oligonucleotide
  Antisense strand to SEQ ID NO: 1653725
uucuuagcuacuauuagcu

SEQ ID NO: 1653727 - RNA, 19 nt, Artificial Sequence
  Description of Artificial Sequence: Synthetic oligonucleotide
  Sense strand starting at position 3178 of SEQ ID NO: 1561196
gcuaauaguagcuaagaag

SEQ ID NO: 1653728 - RNA, 19 nt, Artificial Sequence
  Description of Artificial Sequence: Synthetic oligonucleotide
  Antisense strand to SEQ ID NO: 1653727
cuucuuagcuacuauuagc

SEQ ID NO: 1653729 - RNA, 19 nt, Artificial Sequence
  Description of Artificial Sequence: Synthetic oligonucleotide
  Sense strand starting at position 3241 of SEQ ID NO: 1561196
accaguuauugcuuguuaa

SEQ ID NO: 1653730 - RNA, 19 nt, Artificial Sequence
  Description of Artificial Sequence: Synthetic oligonucleotide
  Antisense strand to SEQ ID NO: 1653729
uuaacaagcaauaacuggu

SEQ ID NO: 1653731 - RNA, 19 nt, Artificial Sequence
  Description of Artificial Sequence: Synthetic oligonucleotide
  Sense strand starting at position 3242 of SEQ ID NO: 1561196
ccaguuauugcuuguuaag

SEQ ID NO: 1653732 - RNA, 19 nt, Artificial Sequence
  Description of Artificial Sequence: Synthetic oligonucleotide
  Antisense strand to SEQ ID NO: 1653731
cuuaacaagcaauaacugg

SEQ ID NO: 1653733 - RNA, 19 nt, Artificial Sequence
  Description of Artificial Sequence: Synthetic oligonucleotide
  Sense strand starting at position 3261 of SEQ ID NO: 1561196
gcacccuugggcugauuau

SEQ ID NO: 1653734 - RNA, 19 nt, Artificial Sequence
  Description of Artificial Sequence: Synthetic oligonucleotide
  Antisense strand to SEQ ID NO: 1653733
auaaucagcccaagggugc

SEQ ID NO: 1653735 - RNA, 19 nt, Artificial Sequence
  Description of Artificial Sequence: Synthetic oligonucleotide
  Sense strand starting at position 3306 of SEQ ID NO: 1561196
cgacuuccuuguuuguaca

SEQ ID NO: 1653736 - RNA, 19 nt, Artificial Sequence
  Description of Artificial Sequence: Synthetic oligonucleotide
  Antisense strand to SEQ ID NO: 1653735
uguacaaacaaggaagucg

SEQ ID NO: 1653737 - RNA, 19 nt, Artificial Sequence
  Description of Artificial Sequence: Synthetic oligonucleotide
  Sense strand starting at position 3308 of SEQ ID NO: 1561196
acuuccuuguuuguacaau

SEQ ID NO: 1653738 - RNA, 19 nt, Artificial Sequence
  Description of Artificial Sequence: Synthetic oligonucleotide
  Antisense strand to SEQ ID NO: 1653737
auuguacaaacaaggaagu

SEQ ID NO: 1653739 - RNA, 19 nt, Artificial Sequence
  Description of Artificial Sequence: Synthetic oligonucleotide
  Sense strand starting at position 3314 of SEQ ID NO: 1561196
uuguuuguacaaugagagu

SEQ ID NO: 1653740 - RNA, 19 nt, Artificial Sequence
  Description of Artificial Sequence: Synthetic oligonucleotide
  Antisense strand to SEQ ID NO: 1653739
acucucauuguacaaacaa

SEQ ID NO: 1653741 - RNA, 19 nt, Artificial Sequence
  Description of Artificial Sequence: Synthetic oligonucleotide
  Sense strand starting at position 3323 of SEQ ID NO: 1561196
caaugagagucauagaaau

SEQ ID NO: 1653742 - RNA, 19 nt, Artificial Sequence
  Description of Artificial Sequence: Synthetic oligonucleotide
  Antisense strand to SEQ ID NO: 1653741
auuucuaugacucucauug

SEQ ID NO: 1653743 - RNA, 19 nt, Artificial Sequence
  Description of Artificial Sequence: Synthetic oligonucleotide
  Sense strand starting at position 3352 of SEQ ID NO: 1561196
ugaaguugucaugaguacu

SEQ ID NO: 1653744 - RNA, 19 nt, Artificial Sequence
  Description of Artificial Sequence: Synthetic oligonucleotide
  Antisense strand to SEQ ID NO: 1653743
aguacucaugacaacuuca

SEQ ID NO: 1653745 - RNA, 19 nt, Artificial Sequence
  Description of Artificial Sequence: Synthetic oligonucleotide
  Sense strand starting at position 3355 of SEQ ID NO: 1561196
aguugucaugaguacuaaa

SEQ ID NO: 1653746 - RNA, 19 nt, Artificial Sequence
  Description of Artificial Sequence: Synthetic oligonucleotide
  Antisense strand to SEQ ID NO: 1653745
uuuaguacucaugacaacu

SEQ ID NO: 1653747 - RNA, 19 nt, Artificial Sequence
  Description of Artificial Sequence: Synthetic oligonucleotide
  Sense strand starting at position 3362 of SEQ ID NO: 1561196
augaguacuaaacgaguau

SEQ ID NO: 1653748 - RNA, 19 nt, Artificial Sequence
  Description of Artificial Sequence: Synthetic oligonucleotide
  Antisense strand to SEQ ID NO: 1653747
auacucguuuaguacucau

SEQ ID NO: 1653749 - RNA, 19 nt, Artificial Sequence
  Description of Artificial Sequence: Synthetic oligonucleotide
  Sense strand starting at position 3366 of SEQ ID NO: 1561196
guacuaaacgaguaucaac

SEQ ID NO: 1653750 - RNA, 19 nt, Artificial Sequence
  Description of Artificial Sequence: Synthetic oligonucleotide
  Antisense strand to SEQ ID NO: 1653749
guugauacucguuuaguac

SEQ ID NO: 1653751 - RNA, 19 nt, Artificial Sequence
  Description of Artificial Sequence: Synthetic oligonucleotide
  Sense strand starting at position 3432 of SEQ ID NO: 1561196
guuugccuggcuuauacaa

SEQ ID NO: 1653752 - RNA, 19 nt, Artificial Sequence
  Description of Artificial Sequence: Synthetic oligonucleotide
  Antisense strand to SEQ ID NO: 1653751
uuguauaagccaggcaaac

SEQ ID NO: 1653753 - RNA, 19 nt, Artificial Sequence
  Description of Artificial Sequence: Synthetic oligonucleotide
  Sense strand starting at position 3487 of SEQ ID NO: 1561196
uguuguugcguggcacaga

SEQ ID NO: 1653754 - RNA, 19 nt, Artificial Sequence
  Description of Artificial Sequence: Synthetic oligonucleotide
  Antisense strand to SEQ ID NO: 1653753
ucugugccacgcaacaaca

SEQ ID NO: 1653755 - RNA, 19 nt, Artificial Sequence
  Description of Artificial Sequence: Synthetic oligonucleotide
  Sense strand starting at position 3492 of SEQ ID NO: 1561196
uugcguggcacagaugaau

SEQ ID NO: 1653756 - RNA, 19 nt, Artificial Sequence
  Description of Artificial Sequence: Synthetic oligonucleotide
  Antisense strand to SEQ ID NO: 1653755
auucaucugugccacgcaa

SEQ ID NO: 1653757 - RNA, 19 nt, Artificial Sequence
  Description of Artificial Sequence: Synthetic oligonucleotide
  Sense strand starting at position 3498 of SEQ ID NO: 1561196
ggcacagaugaaugucuau

SEQ ID NO: 1653758 - RNA, 19 nt, Artificial Sequence
  Description of Artificial Sequence: Synthetic oligonucleotide
  Antisense strand to SEQ ID NO: 1653757
auagacauucaucugugcc

SEQ ID NO: 1653759 - RNA, 19 nt, Artificial Sequence
  Description of Artificial Sequence: Synthetic oligonucleotide
  Sense strand starting at position 3505 of SEQ ID NO: 1561196
augaaugucuaugaaacag

SEQ ID NO: 1653760 - RNA, 19 nt, Artificial Sequence
  Description of Artificial Sequence: Synthetic oligonucleotide
  Antisense strand to SEQ ID NO: 1653759
cuguuucauagacauucau

SEQ ID NO: 1653761 - RNA, 19 nt, Artificial Sequence
  Description of Artificial Sequence: Synthetic oligonucleotide
  Sense strand starting at position 183 of SEQ ID NO: 1561197
ccaaauuacugguguuaca

SEQ ID NO: 1653762 - RNA, 19 nt, Artificial Sequence
  Description of Artificial Sequence: Synthetic oligonucleotide
  Antisense strand to SEQ ID NO: 1653761
uguaacaccaguaauuugg

SEQ ID NO: 1653763 - RNA, 19 nt, Artificial Sequence
  Description of Artificial Sequence: Synthetic oligonucleotide
  Sense strand starting at position 186 of SEQ ID NO: 1561197
aauuacugguguuacaagu

SEQ ID NO: 1653764 - RNA, 19 nt, Artificial Sequence
  Description of Artificial Sequence: Synthetic oligonucleotide
  Antisense strand to SEQ ID NO: 1653763
acuuguaacaccaguaauu

SEQ ID NO: 1653765 - RNA, 19 nt, Artificial Sequence
  Description of Artificial Sequence: Synthetic oligonucleotide
  Sense strand starting at position 229 of SEQ ID NO: 1561197
cagggaucuuaauggaaag

SEQ ID NO: 1653766 - RNA, 19 nt, Artificial Sequence
  Description of Artificial Sequence: Synthetic oligonucleotide
  Antisense strand to SEQ ID NO: 1653765
cuuuccauuaagaucccug

SEQ ID NO: 1653767 - RNA, 19 nt, Artificial Sequence
  Description of Artificial Sequence: Synthetic oligonucleotide
  Sense strand starting at position 246 of SEQ ID NO: 1561197
agguauaaccagugugaga

SEQ ID NO: 1653768 - RNA, 19 nt, Artificial Sequence
  Description of Artificial Sequence: Synthetic oligonucleotide
  Antisense strand to SEQ ID NO: 1653767
ucucacacugguuauaccu

SEQ ID NO: 1653769 - RNA, 19 nt, Artificial Sequence
  Description of Artificial Sequence: Synthetic oligonucleotide
  Sense strand starting at position 248 of SEQ ID NO: 1561197
guauaaccagugugagaag

SEQ ID NO: 1653770 - RNA, 19 nt, Artificial Sequence
  Description of Artificial Sequence: Synthetic oligonucleotide
  Antisense strand to SEQ ID NO: 1653769
cuucucacacugguuauac

SEQ ID NO: 1653771 - RNA, 19 nt, Artificial Sequence
  Description of Artificial Sequence: Synthetic oligonucleotide
  Sense strand starting at position 453 of SEQ ID NO: 1561197
gaaggaaguuaagcaguuu

SEQ ID NO: 1653772 - RNA, 19 nt, Artificial Sequence
  Description of Artificial Sequence: Synthetic oligonucleotide
  Antisense strand to SEQ ID NO: 1653771
aaacugcuuaacuuccuuc

SEQ ID NO: 1653773 - RNA, 19 nt, Artificial Sequence
  Description of Artificial Sequence: Synthetic oligonucleotide
  Sense strand starting at position 478 of SEQ ID NO: 1561197
uaauguaagugugauggaa

SEQ ID NO: 1653774 - RNA, 19 nt, Artificial Sequence
  Description of Artificial Sequence: Synthetic oligonucleotide
  Antisense strand to SEQ ID NO: 1653773
uuccaucacacuuacauua

SEQ ID NO: 1653775 - RNA, 19 nt, Artificial Sequence
  Description of Artificial Sequence: Synthetic oligonucleotide
  Sense strand starting at position 1367 of SEQ ID NO: 1561197
cuuuguccuuaauuggaaa

SEQ ID NO: 1653776 - RNA, 19 nt, Artificial Sequence
  Description of Artificial Sequence: Synthetic oligonucleotide
  Antisense strand to SEQ ID NO: 1653775
uuuccaauuaaggacaaag

SEQ ID NO: 1653777 - RNA, 19 nt, Artificial Sequence
  Description of Artificial Sequence: Synthetic oligonucleotide
  Sense strand starting at position 1432 of SEQ ID NO: 1561197
agaagucugacgugucugu

SEQ ID NO: 1653778 - RNA, 19 nt, Artificial Sequence
  Description of Artificial Sequence: Synthetic oligonucleotide
  Antisense strand to SEQ ID NO: 1653777
acagacacgucagacuucu

SEQ ID NO: 1653779 - RNA, 19 nt, Artificial Sequence
  Description of Artificial Sequence: Synthetic oligonucleotide
  Sense strand starting at position 1436 of SEQ ID NO: 1561197
gucugacgugucuguuaga

SEQ ID NO: 1653780 - RNA, 19 nt, Artificial Sequence
  Description of Artificial Sequence: Synthetic oligonucleotide
  Antisense strand to SEQ ID NO: 1653779
ucuaacagacacgucagac

SEQ ID NO: 1653781 - RNA, 19 nt, Artificial Sequence
  Description of Artificial Sequence: Synthetic oligonucleotide
  Sense strand starting at position 1459 of SEQ ID NO: 1561197
cggagaaguugagguuaug

SEQ ID NO: 1653782 - RNA, 19 nt, Artificial Sequence
  Description of Artificial Sequence: Synthetic oligonucleotide
  Antisense strand to SEQ ID NO: 1653781
cauaaccucaacuucuccg

SEQ ID NO: 1653783 - RNA, 19 nt, Artificial Sequence
  Description of Artificial Sequence: Synthetic oligonucleotide
  Sense strand starting at position 1462 of SEQ ID NO: 1561197
agaaguugagguuauguga

SEQ ID NO: 1653784 - RNA, 19 nt, Artificial Sequence
  Description of Artificial Sequence: Synthetic oligonucleotide
  Antisense strand to SEQ ID NO: 1653783
ucacauaaccucaacuucu

SEQ ID NO: 1653785 - RNA, 19 nt, Artificial Sequence
  Description of Artificial Sequence: Synthetic oligonucleotide
  Sense strand starting at position 1465 of SEQ ID NO: 1561197
aguugagguuaugugaagu

SEQ ID NO: 1653786 - RNA, 19 nt, Artificial Sequence
  Description of Artificial Sequence: Synthetic oligonucleotide
  Antisense strand to SEQ ID NO: 1653785
acuucacauaaccucaacu

SEQ ID NO: 1653787 - RNA, 19 nt, Artificial Sequence
  Description of Artificial Sequence: Synthetic oligonucleotide
  Sense strand starting at position 1475 of SEQ ID NO: 1561197
augugaaguuccuggcauu

SEQ ID NO: 1653788 - RNA, 19 nt, Artificial Sequence
  Description of Artificial Sequence: Synthetic oligonucleotide
  Antisense strand to SEQ ID NO: 1653787
aaugccaggaacuucacau

SEQ ID NO: 1653789 - RNA, 19 nt, Artificial Sequence
  Description of Artificial Sequence: Synthetic oligonucleotide
  Sense strand starting at position 1476 of SEQ ID NO: 1561197
ugugaaguuccuggcauuu

SEQ ID NO: 1653790 - RNA, 19 nt, Artificial Sequence
  Description of Artificial Sequence: Synthetic oligonucleotide
  Antisense strand to SEQ ID NO: 1653789
aaaugccaggaacuucaca

SEQ ID NO: 1653791 - RNA, 19 nt, Artificial Sequence
  Description of Artificial Sequence: Synthetic oligonucleotide
  Sense strand starting at position 1478 of SEQ ID NO: 1561197
ugaaguuccuggcauuuga

SEQ ID NO: 1653792 - RNA, 19 nt, Artificial Sequence
  Description of Artificial Sequence: Synthetic oligonucleotide
  Antisense strand to SEQ ID NO: 1653791
ucaaaugccaggaacuuca

SEQ ID NO: 1653793 - RNA, 19 nt, Artificial Sequence
  Description of Artificial Sequence: Synthetic oligonucleotide
  Sense strand starting at position 1485 of SEQ ID NO: 1561197
ccuggcauuugagaugcaa

SEQ ID NO: 1653794 - RNA, 19 nt, Artificial Sequence
  Description of Artificial Sequence: Synthetic oligonucleotide
  Antisense strand to SEQ ID NO: 1653793
uugcaucucaaaugccagg

SEQ ID NO: 1653795 - RNA, 19 nt, Artificial Sequence
  Description of Artificial Sequence: Synthetic oligonucleotide
  Sense strand starting at position 1708 of SEQ ID NO: 1561197
agguuuagauuguauccua

SEQ ID NO: 1653796 - RNA, 19 nt, Artificial Sequence
  Description of Artificial Sequence: Synthetic oligonucleotide
  Antisense strand to SEQ ID NO: 1653795
uaggauacaaucuaaaccu

SEQ ID NO: 1653797 - RNA, 19 nt, Artificial Sequence
  Description of Artificial Sequence: Synthetic oligonucleotide
  Sense strand starting at position 1733 of SEQ ID NO: 1561197
cucagaggauccuuccuua

SEQ ID NO: 1653798 - RNA, 19 nt, Artificial Sequence
  Description of Artificial Sequence: Synthetic oligonucleotide
  Antisense strand to SEQ ID NO: 1653797
uaaggaaggauccucugag

SEQ ID NO: 1653799 - RNA, 19 nt, Artificial Sequence
  Description of Artificial Sequence: Synthetic oligonucleotide
  Sense strand starting at position 1736 of SEQ ID NO: 1561197
agaggauccuuccuuaauc

SEQ ID NO: 1653800 - RNA, 19 nt, Artificial Sequence
  Description of Artificial Sequence: Synthetic oligonucleotide
  Antisense strand to SEQ ID NO: 1653799
gauuaaggaaggauccucu

SEQ ID NO: 1653801 - RNA, 19 nt, Artificial Sequence
  Description of Artificial Sequence: Synthetic oligonucleotide
  Sense strand starting at position 1774 of SEQ ID NO: 1561197
cugagucucggagggagau

SEQ ID NO: 1653802 - RNA, 19 nt, Artificial Sequence
  Description of Artificial Sequence: Synthetic oligonucleotide
  Antisense strand to SEQ ID NO: 1653801
aucucccuccgagacucag

SEQ ID NO: 1653803 - RNA, 19 nt, Artificial Sequence
  Description of Artificial Sequence: Synthetic oligonucleotide
  Sense strand starting at position 1792 of SEQ ID NO: 1561197
ugggccuuaucugacagua

SEQ ID NO: 1653804 - RNA, 19 nt, Artificial Sequence
  Description of Artificial Sequence: Synthetic oligonucleotide
  Antisense strand to SEQ ID NO: 1653803
uacugucagauaaggccca

SEQ ID NO: 1653805 - RNA, 19 nt, Artificial Sequence
  Description of Artificial Sequence: Synthetic oligonucleotide
  Sense strand starting at position 1794 of SEQ ID NO: 1561197
ggccuuaucugacaguaga

SEQ ID NO: 1653806 - RNA, 19 nt, Artificial Sequence
  Description of Artificial Sequence: Synthetic oligonucleotide
  Antisense strand to SEQ ID NO: 1653805
ucuacugucagauaaggcc

SEQ ID NO: 1653807 - RNA, 19 nt, Artificial Sequence
  Description of Artificial Sequence: Synthetic oligonucleotide
  Sense strand starting at position 2469 of SEQ ID NO: 1561197
gcaagugagugggaggaau

SEQ ID NO: 1653808 - RNA, 19 nt, Artificial Sequence
  Description of Artificial Sequence: Synthetic oligonucleotide
  Antisense strand to SEQ ID NO: 1653807
auuccucccacucacuugc

SEQ ID NO: 1653809 - RNA, 19 nt, Artificial Sequence
  Description of Artificial Sequence: Synthetic oligonucleotide
  Sense strand starting at position 2496 of SEQ ID NO: 1561197
gugagcuuucuggaaggcu

SEQ ID NO: 1653810 - RNA, 19 nt, Artificial Sequence
  Description of Artificial Sequence: Synthetic oligonucleotide
  Antisense strand to SEQ ID NO: 1653809
agccuuccagaaagcucac

SEQ ID NO: 1653811 - RNA, 19 nt, Artificial Sequence
  Description of Artificial Sequence: Synthetic oligonucleotide
  Sense strand starting at position 2590 of SEQ ID NO: 1561197
aggccugagcagugaguua

SEQ ID NO: 1653812 - RNA, 19 nt, Artificial Sequence
  Description of Artificial Sequence: Synthetic oligonucleotide
  Antisense strand to SEQ ID NO: 1653811
uaacucacugcucaggccu

SEQ ID NO: 1653813 - RNA, 19 nt, Artificial Sequence
  Description of Artificial Sequence: Synthetic oligonucleotide
  Sense strand starting at position 2595 of SEQ ID NO: 1561197
ugagcagugaguuaaauga

SEQ ID NO: 1653814 - RNA, 19 nt, Artificial Sequence
  Description of Artificial Sequence: Synthetic oligonucleotide
  Antisense strand to SEQ ID NO: 1653813
ucauuuaacucacugcuca

SEQ ID NO: 1653815 - RNA, 19 nt, Artificial Sequence
  Description of Artificial Sequence: Synthetic oligonucleotide
  Sense strand starting at position 2616 of SEQ ID NO: 1561197
gggucccugccucaauuau

SEQ ID NO: 1653816 - RNA, 19 nt, Artificial Sequence
  Description of Artificial Sequence: Synthetic oligonucleotide
  Antisense strand to SEQ ID NO: 1653815
auaauugaggcagggaccc

SEQ ID NO: 1653817 - RNA, 19 nt, Artificial Sequence
  Description of Artificial Sequence: Synthetic oligonucleotide
  Sense strand starting at position 2718 of SEQ ID NO: 1561197
aucacuugagccgaguuua

SEQ ID NO: 1653818 - RNA, 19 nt, Artificial Sequence
  Description of Artificial Sequence: Synthetic oligonucleotide
  Antisense strand to SEQ ID NO: 1653817
uaaacucggcucaagugau

SEQ ID NO: 1653819 - RNA, 19 nt, Artificial Sequence
  Description of Artificial Sequence: Synthetic oligonucleotide
  Sense strand starting at position 2726 of SEQ ID NO: 1561197
agccgaguuuaagaucaac

SEQ ID NO: 1653820 - RNA, 19 nt, Artificial Sequence
  Description of Artificial Sequence: Synthetic oligonucleotide
  Antisense strand to SEQ ID NO: 1653819
guugaucuuaaacucggcu

SEQ ID NO: 1653821 - RNA, 19 nt, Artificial Sequence
  Description of Artificial Sequence: Synthetic oligonucleotide
  Sense strand starting at position 3243 of SEQ ID NO: 1561197
cagagugaguccgucucua

SEQ ID NO: 1653822 - RNA, 19 nt, Artificial Sequence
  Description of Artificial Sequence: Synthetic oligonucleotide
  Antisense strand to SEQ ID NO: 1653821
uagagacggacucacucug

SEQ ID NO: 1653823 - RNA, 19 nt, Artificial Sequence
  Description of Artificial Sequence: Synthetic oligonucleotide
  Sense strand starting at position 3313 of SEQ ID NO: 1561197
auagauuucuguugauaac

SEQ ID NO: 1653824 - RNA, 19 nt, Artificial Sequence
  Description of Artificial Sequence: Synthetic oligonucleotide
  Antisense strand to SEQ ID NO: 1653823
guuaucaacagaaaucuau

SEQ ID NO: 1653825 - RNA, 19 nt, Artificial Sequence
  Description of Artificial Sequence: Synthetic oligonucleotide
  Sense strand starting at position 3324 of SEQ ID NO: 1561197
uugauaacuuuggguccua

SEQ ID NO: 1653826 - RNA, 19 nt, Artificial Sequence
  Description of Artificial Sequence: Synthetic oligonucleotide
  Antisense strand to SEQ ID NO: 1653825
uaggacccaaaguuaucaa

SEQ ID NO: 1653827 - RNA, 19 nt, Artificial Sequence
  Description of Artificial Sequence: Synthetic oligonucleotide
  Sense strand starting at position 3811 of SEQ ID NO: 1561197
ggaguucaguugugacaua

SEQ ID NO: 1653828 - RNA, 19 nt, Artificial Sequence
  Description of Artificial Sequence: Synthetic oligonucleotide
  Antisense strand to SEQ ID NO: 1653827
uaugucacaacugaacucc

SEQ ID NO: 1653829 - RNA, 19 nt, Artificial Sequence
  Description of Artificial Sequence: Synthetic oligonucleotide
  Sense strand starting at position 3818 of SEQ ID NO: 1561197
aguugugacauagggacaa

SEQ ID NO: 1653830 - RNA, 19 nt, Artificial Sequence
  Description of Artificial Sequence: Synthetic oligonucleotide
  Antisense strand to SEQ ID NO: 1653829
uugucccuaugucacaacu

SEQ ID NO: 1653831 - RNA, 19 nt, Artificial Sequence
  Description of Artificial Sequence: Synthetic oligonucleotide
  Sense strand starting at position 3929 of SEQ ID NO: 1561197
acggauaaccugugugagu

SEQ ID NO: 1653832 - RNA, 19 nt, Artificial Sequence
  Description of Artificial Sequence: Synthetic oligonucleotide
  Antisense strand to SEQ ID NO: 1653831
acucacacagguuauccgu

SEQ ID NO: 1653833 - RNA, 19 nt, Artificial Sequence
  Description of Artificial Sequence: Synthetic oligonucleotide
  Sense strand starting at position 3931 of SEQ ID NO: 1561197
ggauaaccugugugaguga

SEQ ID NO: 1653834 - RNA, 19 nt, Artificial Sequence
  Description of Artificial Sequence: Synthetic oligonucleotide
  Antisense strand to SEQ ID NO: 1653833
ucacucacacagguuaucc

SEQ ID NO: 1653835 - RNA, 19 nt, Artificial Sequence
  Description of Artificial Sequence: Synthetic oligonucleotide
  Sense strand starting at position 3932 of SEQ ID NO: 1561197
gauaaccugugugagugaa

SEQ ID NO: 1653836 - RNA, 19 nt, Artificial Sequence
  Description of Artificial Sequence: Synthetic oligonucleotide
  Antisense strand to SEQ ID NO: 1653835
uucacucacacagguuauc

SEQ ID NO: 1653837 - RNA, 19 nt, Artificial Sequence
  Description of Artificial Sequence: Synthetic oligonucleotide
  Sense strand starting at position 3934 of SEQ ID NO: 1561197
uaaccugugugagugaaca

SEQ ID NO: 1653838 - RNA, 19 nt, Artificial Sequence
  Description of Artificial Sequence: Synthetic oligonucleotide
  Antisense strand to SEQ ID NO: 1653837
uguucacucacacagguua

SEQ ID NO: 1653839 - RNA, 19 nt, Artificial Sequence
  Description of Artificial Sequence: Synthetic oligonucleotide
  Sense strand starting at position 3983 of SEQ ID NO: 1561197
agaugauucugagguccca

SEQ ID NO: 1653840 - RNA, 19 nt, Artificial Sequence
  Description of Artificial Sequence: Synthetic oligonucleotide
  Antisense strand to SEQ ID NO: 1653839
ugggaccucagaaucaucu

SEQ ID NO: 1653841 - RNA, 19 nt, Artificial Sequence
  Description of Artificial Sequence: Synthetic oligonucleotide
  Sense strand starting at position 67 of SEQ ID NO: 1561198
ggguccugaugggaauuau

SEQ ID NO: 1653842 - RNA, 19 nt, Artificial Sequence
  Description of Artificial Sequence: Synthetic oligonucleotide
  Antisense strand to SEQ ID NO: 1653841
auaauucccaucaggaccc

SEQ ID NO: 1653843 - RNA, 19 nt, Artificial Sequence
  Description of Artificial Sequence: Synthetic oligonucleotide
  Sense strand starting at position 106 of SEQ ID NO: 1561198
auguauuuguuacaaugca

SEQ ID NO: 1653844 - RNA, 19 nt, Artificial Sequence
  Description of Artificial Sequence: Synthetic oligonucleotide
  Antisense strand to SEQ ID NO: 1653843
ugcauuguaacaaauacau

SEQ ID NO: 1653845 - RNA, 19 nt, Artificial Sequence
  Description of Artificial Sequence: Synthetic oligonucleotide
  Sense strand starting at position 301 of SEQ ID NO: 1561198
cccaaauuguauuguacuu

SEQ ID NO: 1653846 - RNA, 19 nt, Artificial Sequence
  Description of Artificial Sequence: Synthetic oligonucleotide
  Antisense strand to SEQ ID NO: 1653845
aaguacaauacaauuuggg

SEQ ID NO: 1653847 - RNA, 19 nt, Artificial Sequence
  Description of Artificial Sequence: Synthetic oligonucleotide
  Sense strand starting at position 333 of SEQ ID NO: 1561198
acuagagggccucagucaa

SEQ ID NO: 1653848 - RNA, 19 nt, Artificial Sequence
  Description of Artificial Sequence: Synthetic oligonucleotide
  Antisense strand to SEQ ID NO: 1653847
uugacugaggcccucuagu

SEQ ID NO: 1653849 - RNA, 19 nt, Artificial Sequence
  Description of Artificial Sequence: Synthetic oligonucleotide
  Sense strand starting at position 429 of SEQ ID NO: 1561198
ggaggauucucauaggauc

SEQ ID NO: 1653850 - RNA, 19 nt, Artificial Sequence
  Description of Artificial Sequence: Synthetic oligonucleotide
  Antisense strand to SEQ ID NO: 1653849
gauccuaugagaauccucc

SEQ ID NO: 1653851 - RNA, 19 nt, Artificial Sequence
  Description of Artificial Sequence: Synthetic oligonucleotide
  Sense strand starting at position 437 of SEQ ID NO: 1561198
cucauaggaucgcgaacuu

SEQ ID NO: 1653852 - RNA, 19 nt, Artificial Sequence
  Description of Artificial Sequence: Synthetic oligonucleotide
  Antisense strand to SEQ ID NO: 1653851
aaguucgcgauccuaugag

SEQ ID NO: 1653853 - RNA, 19 nt, Artificial Sequence
  Description of Artificial Sequence: Synthetic oligonucleotide
  Sense strand starting at position 491 of SEQ ID NO: 1561198
ugcuguuuauuaucaucau

SEQ ID NO: 1653854 - RNA, 19 nt, Artificial Sequence
  Description of Artificial Sequence: Synthetic oligonucleotide
  Antisense strand to SEQ ID NO: 1653853
augaugauaauaaacagca

SEQ ID NO: 1653855 - RNA, 19 nt, Artificial Sequence
  Description of Artificial Sequence: Synthetic oligonucleotide
  Sense strand starting at position 492 of SEQ ID NO: 1561198
gcuguuuauuaucaucauu

SEQ ID NO: 1653856 - RNA, 19 nt, Artificial Sequence
  Description of Artificial Sequence: Synthetic oligonucleotide
  Antisense strand to SEQ ID NO: 1653855
aaugaugauaauaaacagc

SEQ ID NO: 1653857 - RNA, 19 nt, Artificial Sequence
  Description of Artificial Sequence: Synthetic oligonucleotide
  Sense strand starting at position 1652 of SEQ ID NO: 1561198
gagcuucuuuagucgggaa

SEQ ID NO: 1653858 - RNA, 19 nt, Artificial Sequence
  Description of Artificial Sequence: Synthetic oligonucleotide
  Antisense strand to SEQ ID NO: 1653857
uucccgacuaaagaagcuc

SEQ ID NO: 1653859 - RNA, 19 nt, Artificial Sequence
  Description of Artificial Sequence: Synthetic oligonucleotide
  Sense strand starting at position 1653 of SEQ ID NO: 1561198
agcuucuuuagucgggaaa

SEQ ID NO: 1653860 - RNA, 19 nt, Artificial Sequence
  Description of Artificial Sequence: Synthetic oligonucleotide
  Antisense strand to SEQ ID NO: 1653859
uuucccgacuaaagaagcu

SEQ ID NO: 1653861 - RNA, 19 nt, Artificial Sequence
  Description of Artificial Sequence: Synthetic oligonucleotide
  Sense strand starting at position 1793 of SEQ ID NO: 1561198
gucacuucccggugacuuu

SEQ ID NO: 1653862 - RNA, 19 nt, Artificial Sequence
  Description of Artificial Sequence: Synthetic oligonucleotide
  Antisense strand to SEQ ID NO: 1653861
aaagucaccgggaagugac

SEQ ID NO: 1653863 - RNA, 19 nt, Artificial Sequence
  Description of Artificial Sequence: Synthetic oligonucleotide
  Sense strand starting at position 1810 of SEQ ID NO: 1561198
uugcacaugucccuuguau

SEQ ID NO: 1653864 - RNA, 19 nt, Artificial Sequence
  Description of Artificial Sequence: Synthetic oligonucleotide
  Antisense strand to SEQ ID NO: 1653863
auacaagggacaugugcaa

SEQ ID NO: 1653865 - RNA, 19 nt, Artificial Sequence
  Description of Artificial Sequence: Synthetic oligonucleotide
  Sense strand starting at position 1812 of SEQ ID NO: 1561198
gcacaugucccuuguauug

SEQ ID NO: 1653866 - RNA, 19 nt, Artificial Sequence
  Description of Artificial Sequence: Synthetic oligonucleotide
  Antisense strand to SEQ ID NO: 1653865
caauacaagggacaugugc

SEQ ID NO: 1653867 - RNA, 19 nt, Artificial Sequence
  Description of Artificial Sequence: Synthetic oligonucleotide
  Sense strand starting at position 2071 of SEQ ID NO: 1561198
aggugcuucucuucccaua

SEQ ID NO: 1653868 - RNA, 19 nt, Artificial Sequence
  Description of Artificial Sequence: Synthetic oligonucleotide
  Antisense strand to SEQ ID NO: 1653867
uaugggaagagaagcaccu

SEQ ID NO: 1653869 - RNA, 19 nt, Artificial Sequence
  Description of Artificial Sequence: Synthetic oligonucleotide
  Sense strand starting at position 2073 of SEQ ID NO: 1561198
gugcuucucuucccauaag

SEQ ID NO: 1653870 - RNA, 19 nt, Artificial Sequence
  Description of Artificial Sequence: Synthetic oligonucleotide
  Antisense strand to SEQ ID NO: 1653869
cuuaugggaagagaagcac

SEQ ID NO: 1653871 - RNA, 19 nt, Artificial Sequence
  Description of Artificial Sequence: Synthetic oligonucleotide
  Sense strand starting at position 2769 of SEQ ID NO: 1561198
ugcgguccauugcuagaaa

SEQ ID NO: 1653872 - RNA, 19 nt, Artificial Sequence
  Description of Artificial Sequence: Synthetic oligonucleotide
  Antisense strand to SEQ ID NO: 1653871
uuucuagcaauggaccgca

SEQ ID NO: 1653873 - RNA, 19 nt, Artificial Sequence
  Description of Artificial Sequence: Synthetic oligonucleotide
  Sense strand starting at position 2770 of SEQ ID NO: 1561198
gcgguccauugcuagaaag

SEQ ID NO: 1653874 - RNA, 19 nt, Artificial Sequence
  Description of Artificial Sequence: Synthetic oligonucleotide
  Antisense strand to SEQ ID NO: 1653873
cuuucuagcaauggaccgc

SEQ ID NO: 1653875 - RNA, 19 nt, Artificial Sequence
  Description of Artificial Sequence: Synthetic oligonucleotide
  Sense strand starting at position 2786 of SEQ ID NO: 1561198
aagaguaagucugaaguuc

SEQ ID NO: 1653876 - RNA, 19 nt, Artificial Sequence
  Description of Artificial Sequence: Synthetic oligonucleotide
  Antisense strand to SEQ ID NO: 1653875
gaacuucagacuuacucuu

SEQ ID NO: 1653877 - RNA, 19 nt, Artificial Sequence
  Description of Artificial Sequence: Synthetic oligonucleotide
  Sense strand starting at position 3198 of SEQ ID NO: 1561198
ucagaagucugagauccau

SEQ ID NO: 1653878 - RNA, 19 nt, Artificial Sequence
  Description of Artificial Sequence: Synthetic oligonucleotide
  Antisense strand to SEQ ID NO: 1653877
auggaucucagacuucuga

SEQ ID NO: 1653879 - RNA, 19 nt, Artificial Sequence
  Description of Artificial Sequence: Synthetic oligonucleotide
  Sense strand starting at position 3275 of SEQ ID NO: 1561198
gagaauacguuucccaucu

SEQ ID NO: 1653880 - RNA, 19 nt, Artificial Sequence
  Description of Artificial Sequence: Synthetic oligonucleotide
  Antisense strand to SEQ ID NO: 1653879
agaugggaaacguauucuc

SEQ ID NO: 1653881 - RNA, 19 nt, Artificial Sequence
  Description of Artificial Sequence: Synthetic oligonucleotide
  Sense strand starting at position 3276 of SEQ ID NO: 1561198
agaauacguuucccaucuu

SEQ ID NO: 1653882 - RNA, 19 nt, Artificial Sequence
  Description of Artificial Sequence: Synthetic oligonucleotide
  Antisense strand to SEQ ID NO: 1653881
aagaugggaaacguauucu

SEQ ID NO: 1653883 - RNA, 19 nt, Artificial Sequence
  Description of Artificial Sequence: Synthetic oligonucleotide
  Sense strand starting at position 3564 of SEQ ID NO: 1561198
gagggagucuuccuaugcu

SEQ ID NO: 1653884 - RNA, 19 nt, Artificial Sequence
  Description of Artificial Sequence: Synthetic oligonucleotide
  Antisense strand to SEQ ID NO: 1653883
agcauaggaagacucccuc

SEQ ID NO: 1653885 - RNA, 19 nt, Artificial Sequence
  Description of Artificial Sequence: Synthetic oligonucleotide
  Sense strand starting at position 3777 of SEQ ID NO: 1561198
agagauuccuaauccaguc

SEQ ID NO: 1653886 - RNA, 19 nt, Artificial Sequence
  Description of Artificial Sequence: Synthetic oligonucleotide
  Antisense strand to SEQ ID NO: 1653885
gacuggauuaggaaucucu

SEQ ID NO: 1653887 - RNA, 19 nt, Artificial Sequence
  Description of Artificial Sequence: Synthetic oligonucleotide
  Sense strand starting at position 3904 of SEQ ID NO: 1561198
cguuaagggugccuuugaa

SEQ ID NO: 1653888 - RNA, 19 nt, Artificial Sequence
  Description of Artificial Sequence: Synthetic oligonucleotide
  Antisense strand to SEQ ID NO: 1653887
uucaaaggcacccuuaacg

SEQ ID NO: 1653889 - RNA, 19 nt, Artificial Sequence
  Description of Artificial Sequence: Synthetic oligonucleotide
  Sense strand starting at position 3912 of SEQ ID NO: 1561198
gugccuuugaaguguccau

SEQ ID NO: 1653890 - RNA, 19 nt, Artificial Sequence
  Description of Artificial Sequence: Synthetic oligonucleotide
  Antisense strand to SEQ ID NO: 1653889
auggacacuucaaaggcac

SEQ ID NO: 1653891 - RNA, 19 nt, Artificial Sequence
  Description of Artificial Sequence: Synthetic oligonucleotide
  Sense strand starting at position 3916 of SEQ ID NO: 1561198
cuuugaaguguccaucaga

SEQ ID NO: 1653892 - RNA, 19 nt, Artificial Sequence
  Description of Artificial Sequence: Synthetic oligonucleotide
  Antisense strand to SEQ ID NO: 1653891
ucugauggacacuucaaag

SEQ ID NO: 1653893 - RNA, 19 nt, Artificial Sequence
  Description of Artificial Sequence: Synthetic oligonucleotide
  Sense strand starting at position 3919 of SEQ ID NO: 1561198
ugaaguguccaucagauua

SEQ ID NO: 1653894 - RNA, 19 nt, Artificial Sequence
  Description of Artificial Sequence: Synthetic oligonucleotide
  Antisense strand to SEQ ID NO: 1653893
uaaucugauggacacuuca

SEQ ID NO: 1653895 - RNA, 19 nt, Artificial Sequence
  Description of Artificial Sequence: Synthetic oligonucleotide
  Sense strand starting at position 3935 of SEQ ID NO: 1561198
uuacaucaucccugcgaca

SEQ ID NO: 1653896 - RNA, 19 nt, Artificial Sequence
  Description of Artificial Sequence: Synthetic oligonucleotide
  Antisense strand to SEQ ID NO: 1653895
ugucgcagggaugauguaa

SEQ ID NO: 1653897 - RNA, 19 nt, Artificial Sequence
  Description of Artificial Sequence: Synthetic oligonucleotide
  Sense strand starting at position 3937 of SEQ ID NO: 1561198
acaucaucccugcgacaca

SEQ ID NO: 1653898 - RNA, 19 nt, Artificial Sequence
  Description of Artificial Sequence: Synthetic oligonucleotide
  Antisense strand to SEQ ID NO: 1653897
ugugucgcagggaugaugu

SEQ ID NO: 1653899 - RNA, 19 nt, Artificial Sequence
  Description of Artificial Sequence: Synthetic oligonucleotide
  Sense strand starting at position 52 of SEQ ID NO: 1561199
ucuagauggaccugcaagu

SEQ ID NO: 1653900 - RNA, 19 nt, Artificial Sequence
  Description of Artificial Sequence: Synthetic oligonucleotide
  Antisense strand to SEQ ID NO: 1653899
acuugcagguccaucuaga

SEQ ID NO: 1653901 - RNA, 19 nt, Artificial Sequence
  Description of Artificial Sequence: Synthetic oligonucleotide
  Sense strand starting at position 103 of SEQ ID NO: 1561199
ucaggagcuugccuguuua

SEQ ID NO: 1653902 - RNA, 19 nt, Artificial Sequence
  Description of Artificial Sequence: Synthetic oligonucleotide
  Antisense strand to SEQ ID NO: 1653901
uaaacaggcaagcuccuga

SEQ ID NO: 1653903 - RNA, 19 nt, Artificial Sequence
  Description of Artificial Sequence: Synthetic oligonucleotide
  Sense strand starting at position 107 of SEQ ID NO: 1561199
gagcuugccuguuuauaaa

SEQ ID NO: 1653904 - RNA, 19 nt, Artificial Sequence
  Description of Artificial Sequence: Synthetic oligonucleotide
  Antisense strand to SEQ ID NO: 1653903
uuuauaaacaggcaagcuc

SEQ ID NO: 1653905 - RNA, 19 nt, Artificial Sequence
  Description of Artificial Sequence: Synthetic oligonucleotide
  Sense strand starting at position 263 of SEQ ID NO: 1561199
uuaggaagcuucuagaagu

SEQ ID NO: 1653906 - RNA, 19 nt, Artificial Sequence
  Description of Artificial Sequence: Synthetic oligonucleotide
  Antisense strand to SEQ ID NO: 1653905
acuucuagaagcuuccuaa

SEQ ID NO: 1653907 - RNA, 19 nt, Artificial Sequence
  Description of Artificial Sequence: Synthetic oligonucleotide
  Sense strand starting at position 277 of SEQ ID NO: 1561199
gaaguacuguguccuguaa

SEQ ID NO: 1653908 - RNA, 19 nt, Artificial Sequence
  Description of Artificial Sequence: Synthetic oligonucleotide
  Antisense strand to SEQ ID NO: 1653907
uuacaggacacaguacuuc

SEQ ID NO: 1653909 - RNA, 19 nt, Artificial Sequence
  Description of Artificial Sequence: Synthetic oligonucleotide
  Sense strand starting at position 455 of SEQ ID NO: 1561199
ucccaagaacucugccaga

SEQ ID NO: 1653910 - RNA, 19 nt, Artificial Sequence
  Description of Artificial Sequence: Synthetic oligonucleotide
  Antisense strand to SEQ ID NO: 1653909
ucuggcagaguucuuggga

SEQ ID NO: 1653911 - RNA, 19 nt, Artificial Sequence
  Description of Artificial Sequence: Synthetic oligonucleotide
  Sense strand starting at position 468 of SEQ ID NO: 1561199
gccagaggucccugcguca

SEQ ID NO: 1653912 - RNA, 19 nt, Artificial Sequence
  Description of Artificial Sequence: Synthetic oligonucleotide
  Antisense strand to SEQ ID NO: 1653911
ugacgcagggaccucuggc

SEQ ID NO: 1653913 - RNA, 19 nt, Artificial Sequence
  Description of Artificial Sequence: Synthetic oligonucleotide
  Sense strand starting at position 498 of SEQ ID NO: 1561199
ggugugauuccagggaggu

SEQ ID NO: 1653914 - RNA, 19 nt, Artificial Sequence
  Description of Artificial Sequence: Synthetic oligonucleotide
  Antisense strand to SEQ ID NO: 1653913
accucccuggaaucacacc

SEQ ID NO: 1653915 - RNA, 19 nt, Artificial Sequence
  Description of Artificial Sequence: Synthetic oligonucleotide
  Sense strand starting at position 499 of SEQ ID NO: 1561199
gugugauuccagggagguc

SEQ ID NO: 1653916 - RNA, 19 nt, Artificial Sequence
  Description of Artificial Sequence: Synthetic oligonucleotide
  Antisense strand to SEQ ID NO: 1653915
gaccucccuggaaucacac

SEQ ID NO: 1653917 - RNA, 19 nt, Artificial Sequence
  Description of Artificial Sequence: Synthetic oligonucleotide
  Sense strand starting at position 500 of SEQ ID NO: 1561199
ugugauuccagggagguca

SEQ ID NO: 1653918 - RNA, 19 nt, Artificial Sequence
  Description of Artificial Sequence: Synthetic oligonucleotide
  Antisense strand to SEQ ID NO: 1653917
ugaccucccuggaaucaca

SEQ ID NO: 1653919 - RNA, 19 nt, Artificial Sequence
  Description of Artificial Sequence: Synthetic oligonucleotide
  Sense strand starting at position 639 of SEQ ID NO: 1561199
gggcaagugugagucauuu

SEQ ID NO: 1653920 - RNA, 19 nt, Artificial Sequence
  Description of Artificial Sequence: Synthetic oligonucleotide
  Antisense strand to SEQ ID NO: 1653919
aaaugacucacacuugccc

SEQ ID NO: 1653921 - RNA, 19 nt, Artificial Sequence
  Description of Artificial Sequence: Synthetic oligonucleotide
  Sense strand starting at position 666 of SEQ ID NO: 1561199
ugacgucucucugggagga

SEQ ID NO: 1653922 - RNA, 19 nt, Artificial Sequence
  Description of Artificial Sequence: Synthetic oligonucleotide
  Antisense strand to SEQ ID NO: 1653921
uccucccagagagacguca

SEQ ID NO: 1653923 - RNA, 19 nt, Artificial Sequence
  Description of Artificial Sequence: Synthetic oligonucleotide
  Sense strand starting at position 1073 of SEQ ID NO: 1561199
guguuuguguggcuggaga

SEQ ID NO: 1653924 - RNA, 19 nt, Artificial Sequence
  Description of Artificial Sequence: Synthetic oligonucleotide
  Antisense strand to SEQ ID NO: 1653923
ucuccagccacacaaacac

SEQ ID NO: 1653925 - RNA, 19 nt, Artificial Sequence
  Description of Artificial Sequence: Synthetic oligonucleotide
  Sense strand starting at position 1075 of SEQ ID NO: 1561199
guuuguguggcuggagaca

SEQ ID NO: 1653926 - RNA, 19 nt, Artificial Sequence
  Description of Artificial Sequence: Synthetic oligonucleotide
  Antisense strand to SEQ ID NO: 1653925
ugucuccagccacacaaac

SEQ ID NO: 1653927 - RNA, 19 nt, Artificial Sequence
  Description of Artificial Sequence: Synthetic oligonucleotide
  Sense strand starting at position 1192 of SEQ ID NO: 1561199
cagggagcuuguuauguuu

SEQ ID NO: 1653928 - RNA, 19 nt, Artificial Sequence
  Description of Artificial Sequence: Synthetic oligonucleotide
  Antisense strand to SEQ ID NO: 1653927
aaacauaacaagcucccug

SEQ ID NO: 1653929 - RNA, 19 nt, Artificial Sequence
  Description of Artificial Sequence: Synthetic oligonucleotide
  Sense strand starting at position 1194 of SEQ ID NO: 1561199
gggagcuuguuauguuuca

SEQ ID NO: 1653930 - RNA, 19 nt, Artificial Sequence
  Description of Artificial Sequence: Synthetic oligonucleotide
  Antisense strand to SEQ ID NO: 1653929
ugaaacauaacaagcuccc

SEQ ID NO: 1653931 - RNA, 19 nt, Artificial Sequence
  Description of Artificial Sequence: Synthetic oligonucleotide
  Sense strand starting at position 1338 of SEQ ID NO: 1561199
gcgagagucaggcagguua

SEQ ID NO: 1653932 - RNA, 19 nt, Artificial Sequence
  Description of Artificial Sequence: Synthetic oligonucleotide
  Antisense strand to SEQ ID NO: 1653931
uaaccugccugacucucgc

SEQ ID NO: 1653933 - RNA, 19 nt, Artificial Sequence
  Description of Artificial Sequence: Synthetic oligonucleotide
  Sense strand starting at position 1366 of SEQ ID NO: 1561199
ccuguauuccugcaucuga

SEQ ID NO: 1653934 - RNA, 19 nt, Artificial Sequence
  Description of Artificial Sequence: Synthetic oligonucleotide
  Antisense strand to SEQ ID NO: 1653933
ucagaugcaggaauacagg

SEQ ID NO: 1653935 - RNA, 19 nt, Artificial Sequence
  Description of Artificial Sequence: Synthetic oligonucleotide
  Sense strand starting at position 1443 of SEQ ID NO: 1561199
aacugaggcuccgcagaau

SEQ ID NO: 1653936 - RNA, 19 nt, Artificial Sequence
  Description of Artificial Sequence: Synthetic oligonucleotide
  Antisense strand to SEQ ID NO: 1653935
auucugcggagccucaguu

SEQ ID NO: 1653937 - RNA, 19 nt, Artificial Sequence
  Description of Artificial Sequence: Synthetic oligonucleotide
  Sense strand starting at position 1446 of SEQ ID NO: 1561199
ugaggcuccgcagaauuga

SEQ ID NO: 1653938 - RNA, 19 nt, Artificial Sequence
  Description of Artificial Sequence: Synthetic oligonucleotide
  Antisense strand to SEQ ID NO: 1653937
ucaauucugcggagccuca

SEQ ID NO: 1653939 - RNA, 19 nt, Artificial Sequence
  Description of Artificial Sequence: Synthetic oligonucleotide
  Sense strand starting at position 1505 of SEQ ID NO: 1561199
ccuagauugguccaagcuc

SEQ ID NO: 1653940 - RNA, 19 nt, Artificial Sequence
  Description of Artificial Sequence: Synthetic oligonucleotide
  Antisense strand to SEQ ID NO: 1653939
gagcuuggaccaaucuagg

SEQ ID NO: 1653941 - RNA, 19 nt, Artificial Sequence
  Description of Artificial Sequence: Synthetic oligonucleotide
  Sense strand starting at position 1585 of SEQ ID NO: 1561199
gggacuggcucaggaaaua

SEQ ID NO: 1653942 - RNA, 19 nt, Artificial Sequence
  Description of Artificial Sequence: Synthetic oligonucleotide
  Antisense strand to SEQ ID NO: 1653941
uauuuccugagccaguccc

SEQ ID NO: 1653943 - RNA, 19 nt, Artificial Sequence
  Description of Artificial Sequence: Synthetic oligonucleotide
  Sense strand starting at position 1663 of SEQ ID NO: 1561199
agagaaggugcugggaaau

SEQ ID NO: 1653944 - RNA, 19 nt, Artificial Sequence
  Description of Artificial Sequence: Synthetic oligonucleotide
  Antisense strand to SEQ ID NO: 1653943
auuucccagcaccuucucu

SEQ ID NO: 1653945 - RNA, 19 nt, Artificial Sequence
  Description of Artificial Sequence: Synthetic oligonucleotide
  Sense strand starting at position 1733 of SEQ ID NO: 1561199
ggacaaacauuggaagcau

SEQ ID NO: 1653946 - RNA, 19 nt, Artificial Sequence
  Description of Artificial Sequence: Synthetic oligonucleotide
  Antisense strand to SEQ ID NO: 1653945
augcuuccaauguuugucc

SEQ ID NO: 1653947 - RNA, 19 nt, Artificial Sequence
  Description of Artificial Sequence: Synthetic oligonucleotide
  Sense strand starting at position 1766 of SEQ ID NO: 1561199
gccuuaguuucccauccca

SEQ ID NO: 1653948 - RNA, 19 nt, Artificial Sequence
  Description of Artificial Sequence: Synthetic oligonucleotide
  Antisense strand to SEQ ID NO: 1653947
ugggaugggaaacuaaggc

SEQ ID NO: 1653949 - RNA, 19 nt, Artificial Sequence
  Description of Artificial Sequence: Synthetic oligonucleotide
  Sense strand starting at position 1998 of SEQ ID NO: 1561199
augccugguuuagcuagaa

SEQ ID NO: 1653950 - RNA, 19 nt, Artificial Sequence
  Description of Artificial Sequence: Synthetic oligonucleotide
  Antisense strand to SEQ ID NO: 1653949
uucuagcuaaaccaggcau

SEQ ID NO: 1653951 - RNA, 19 nt, Artificial Sequence
  Description of Artificial Sequence: Synthetic oligonucleotide
  Sense strand starting at position 2223 of SEQ ID NO: 1561199
uaaccuauacagcgagagu

SEQ ID NO: 1653952 - RNA, 19 nt, Artificial Sequence
  Description of Artificial Sequence: Synthetic oligonucleotide
  Antisense strand to SEQ ID NO: 1653951
acucucgcuguauagguua

SEQ ID NO: 1653953 - RNA, 19 nt, Artificial Sequence
  Description of Artificial Sequence: Synthetic oligonucleotide
  Sense strand starting at position 2620 of SEQ ID NO: 1561199
ggccgagcgcuccggauua

SEQ ID NO: 1653954 - RNA, 19 nt, Artificial Sequence
  Description of Artificial Sequence: Synthetic oligonucleotide
  Antisense strand to SEQ ID NO: 1653953
uaauccggagcgcucggcc

SEQ ID NO: 1653955 - RNA, 19 nt, Artificial Sequence
  Description of Artificial Sequence: Synthetic oligonucleotide
  Sense strand starting at position 2984 of SEQ ID NO: 1561199
ggaauuucggcagaagcgu

SEQ ID NO: 1653956 - RNA, 19 nt, Artificial Sequence
  Description of Artificial Sequence: Synthetic oligonucleotide
  Antisense strand to SEQ ID NO: 1653955
acgcuucugccgaaauucc

SEQ ID NO: 1653957 - RNA, 19 nt, Artificial Sequence
  Description of Artificial Sequence: Synthetic oligonucleotide
  Sense strand starting at position 2993 of SEQ ID NO: 1561199
gcagaagcguguuucucaa

SEQ ID NO: 1653958 - RNA, 19 nt, Artificial Sequence
  Description of Artificial Sequence: Synthetic oligonucleotide
  Antisense strand to SEQ ID NO: 1653957
uugagaaacacgcuucugc

SEQ ID NO: 1653959 - RNA, 19 nt, Artificial Sequence
  Description of Artificial Sequence: Synthetic oligonucleotide
  Sense strand starting at position 2997 of SEQ ID NO: 1561199
aagcguguuucucaaagua

SEQ ID NO: 1653960 - RNA, 19 nt, Artificial Sequence
  Description of Artificial Sequence: Synthetic oligonucleotide
  Antisense strand to SEQ ID NO: 1653959
uacuuugagaaacacgcuu

SEQ ID NO: 1653961 - RNA, 19 nt, Artificial Sequence
  Description of Artificial Sequence: Synthetic oligonucleotide
  Sense strand starting at position 3029 of SEQ ID NO: 1561199
cccuucgcgucagaaagau

SEQ ID NO: 1653962 - RNA, 19 nt, Artificial Sequence
  Description of Artificial Sequence: Synthetic oligonucleotide
  Antisense strand to SEQ ID NO: 1653961
aucuuucugacgcgaaggg

SEQ ID NO: 1653963 - RNA, 19 nt, Artificial Sequence
  Description of Artificial Sequence: Synthetic oligonucleotide
  Sense strand starting at position 3037 of SEQ ID NO: 1561199
gucagaaagaucugagagu

SEQ ID NO: 1653964 - RNA, 19 nt, Artificial Sequence
  Description of Artificial Sequence: Synthetic oligonucleotide
  Antisense strand to SEQ ID NO: 1653963
acucucagaucuuucugac

SEQ ID NO: 1653965 - RNA, 19 nt, Artificial Sequence
  Description of Artificial Sequence: Synthetic oligonucleotide
  Sense strand starting at position 3038 of SEQ ID NO: 1561199
ucagaaagaucugagaguc

SEQ ID NO: 1653966 - RNA, 19 nt, Artificial Sequence
  Description of Artificial Sequence: Synthetic oligonucleotide
  Antisense strand to SEQ ID NO: 1653965
gacucucagaucuuucuga

SEQ ID NO: 1653967 - RNA, 19 nt, Artificial Sequence
  Description of Artificial Sequence: Synthetic oligonucleotide
  Sense strand starting at position 3068 of SEQ ID NO: 1561199
gcagauuccaacuaggugu

SEQ ID NO: 1653968 - RNA, 19 nt, Artificial Sequence
  Description of Artificial Sequence: Synthetic oligonucleotide
  Antisense strand to SEQ ID NO: 1653967
acaccuaguuggaaucugc

SEQ ID NO: 1653969 - RNA, 19 nt, Artificial Sequence
  Description of Artificial Sequence: Synthetic oligonucleotide
  Sense strand starting at position 3260 of SEQ ID NO: 1561199
uacagaguucugugccaca

SEQ ID NO: 1653970 - RNA, 19 nt, Artificial Sequence
  Description of Artificial Sequence: Synthetic oligonucleotide
  Antisense strand to SEQ ID NO: 1653969
uguggcacagaacucugua

SEQ ID NO: 1653971 - RNA, 19 nt, Artificial Sequence
  Description of Artificial Sequence: Synthetic oligonucleotide
  Sense strand starting at position 3263 of SEQ ID NO: 1561199
agaguucugugccacaaga

SEQ ID NO: 1653972 - RNA, 19 nt, Artificial Sequence
  Description of Artificial Sequence: Synthetic oligonucleotide
  Antisense strand to SEQ ID NO: 1653971
ucuuguggcacagaacucu

SEQ ID NO: 1653973 - RNA, 19 nt, Artificial Sequence
  Description of Artificial Sequence: Synthetic oligonucleotide
  Sense strand starting at position 3265 of SEQ ID NO: 1561199
aguucugugccacaagaag

SEQ ID NO: 1653974 - RNA, 19 nt, Artificial Sequence
  Description of Artificial Sequence: Synthetic oligonucleotide
  Antisense strand to SEQ ID NO: 1653973
cuucuuguggcacagaacu

SEQ ID NO: 1653975 - RNA, 19 nt, Artificial Sequence
  Description of Artificial Sequence: Synthetic oligonucleotide
  Sense strand starting at position 3456 of SEQ ID NO: 1561199
ggaggaugcagcugugagu

SEQ ID NO: 1653976 - RNA, 19 nt, Artificial Sequence
  Description of Artificial Sequence: Synthetic oligonucleotide
  Antisense strand to SEQ ID NO: 1653975
acucacagcugcauccucc

SEQ ID NO: 1653977 - RNA, 19 nt, Artificial Sequence
  Description of Artificial Sequence: Synthetic oligonucleotide
  Sense strand starting at position 3465 of SEQ ID NO: 1561199
agcugugaguccugggaac

SEQ ID NO: 1653978 - RNA, 19 nt, Artificial Sequence
  Description of Artificial Sequence: Synthetic oligonucleotide
  Antisense strand to SEQ ID NO: 1653977
guucccaggacucacagcu

SEQ ID NO: 1653979 - RNA, 19 nt, Artificial Sequence
  Description of Artificial Sequence: Synthetic oligonucleotide
  Sense strand starting at position 137 of SEQ ID NO: 1561200
gggcaagugugagucauuu

SEQ ID NO: 1653980 - RNA, 19 nt, Artificial Sequence
  Description of Artificial Sequence: Synthetic oligonucleotide
  Antisense strand to SEQ ID NO: 1653979
aaaugacucacacuugccc

SEQ ID NO: 1653981 - RNA, 19 nt, Artificial Sequence
  Description of Artificial Sequence: Synthetic oligonucleotide
  Sense strand starting at position 164 of SEQ ID NO: 1561200
ugacgucucucugggagga

SEQ ID NO: 1653982 - RNA, 19 nt, Artificial Sequence
  Description of Artificial Sequence: Synthetic oligonucleotide
  Antisense strand to SEQ ID NO: 1653981
uccucccagagagacguca

SEQ ID NO: 1653983 - RNA, 19 nt, Artificial Sequence
  Description of Artificial Sequence: Synthetic oligonucleotide
  Sense strand starting at position 571 of SEQ ID NO: 1561200
guguuuguguggcuggaga

SEQ ID NO: 1653984 - RNA, 19 nt, Artificial Sequence
  Description of Artificial Sequence: Synthetic oligonucleotide
  Antisense strand to SEQ ID NO: 1653983
ucuccagccacacaaacac

SEQ ID NO: 1653985 - RNA, 19 nt, Artificial Sequence
  Description of Artificial Sequence: Synthetic oligonucleotide
  Sense strand starting at position 573 of SEQ ID NO: 1561200
guuuguguggcuggagaca

SEQ ID NO: 1653986 - RNA, 19 nt, Artificial Sequence
  Description of Artificial Sequence: Synthetic oligonucleotide
  Antisense strand to SEQ ID NO: 1653985
ugucuccagccacacaaac

SEQ ID NO: 1653987 - RNA, 19 nt, Artificial Sequence
  Description of Artificial Sequence: Synthetic oligonucleotide
  Sense strand starting at position 690 of SEQ ID NO: 1561200
cagggagcuuguuauguuu

SEQ ID NO: 1653988 - RNA, 19 nt, Artificial Sequence
  Description of Artificial Sequence: Synthetic oligonucleotide
  Antisense strand to SEQ ID NO: 1653987
aaacauaacaagcucccug

SEQ ID NO: 1653989 - RNA, 19 nt, Artificial Sequence
  Description of Artificial Sequence: Synthetic oligonucleotide
  Sense strand starting at position 692 of SEQ ID NO: 1561200
gggagcuuguuauguuuca

SEQ ID NO: 1653990 - RNA, 19 nt, Artificial Sequence
  Description of Artificial Sequence: Synthetic oligonucleotide
  Antisense strand to SEQ ID NO: 1653989
ugaaacauaacaagcuccc

SEQ ID NO: 1653991 - RNA, 19 nt, Artificial Sequence
  Description of Artificial Sequence: Synthetic oligonucleotide
  Sense strand starting at position 836 of SEQ ID NO: 1561200
gcgagagucaggcagguua

SEQ ID NO: 1653992 - RNA, 19 nt, Artificial Sequence
  Description of Artificial Sequence: Synthetic oligonucleotide
  Antisense strand to SEQ ID NO: 1653991
uaaccugccugacucucgc

SEQ ID NO: 1653993 - RNA, 19 nt, Artificial Sequence
  Description of Artificial Sequence: Synthetic oligonucleotide
  Sense strand starting at position 864 of SEQ ID NO: 1561200
ccuguauuccugcaucuga

SEQ ID NO: 1653994 - RNA, 19 nt, Artificial Sequence
  Description of Artificial Sequence: Synthetic oligonucleotide
  Antisense strand to SEQ ID NO: 1653993
ucagaugcaggaauacagg

SEQ ID NO: 1653995 - RNA, 19 nt, Artificial Sequence
  Description of Artificial Sequence: Synthetic oligonucleotide
  Sense strand starting at position 941 of SEQ ID NO: 1561200
aacugaggcuccgcagaau

SEQ ID NO: 1653996 - RNA, 19 nt, Artificial Sequence
  Description of Artificial Sequence: Synthetic oligonucleotide
  Antisense strand to SEQ ID NO: 1653995
auucugcggagccucaguu

SEQ ID NO: 1653997 - RNA, 19 nt, Artificial Sequence
  Description of Artificial Sequence: Synthetic oligonucleotide
  Sense strand starting at position 944 of SEQ ID NO: 1561200
ugaggcuccgcagaauuga

SEQ ID NO: 1653998 - RNA, 19 nt, Artificial Sequence
  Description of Artificial Sequence: Synthetic oligonucleotide
  Antisense strand to SEQ ID NO: 1653997
ucaauucugcggagccuca

SEQ ID NO: 1653999 - RNA, 19 nt, Artificial Sequence
  Description of Artificial Sequence: Synthetic oligonucleotide
  Sense strand starting at position 1003 of SEQ ID NO: 1561200
ccuagauugguccaagcuc

SEQ ID NO: 1654000 - RNA, 19 nt, Artificial Sequence
  Description of Artificial Sequence: Synthetic oligonucleotide
  Antisense strand to SEQ ID NO: 1653999
gagcuuggaccaaucuagg

SEQ ID NO: 1654001 - RNA, 19 nt, Artificial Sequence
  Description of Artificial Sequence: Synthetic oligonucleotide
  Sense strand starting at position 1083 of SEQ ID NO: 1561200
gggacuggcucaggaaaua

SEQ ID NO: 1654002 - RNA, 19 nt, Artificial Sequence
  Description of Artificial Sequence: Synthetic oligonucleotide
  Antisense strand to SEQ ID NO: 1654001
uauuuccugagccaguccc

SEQ ID NO: 1654003 - RNA, 19 nt, Artificial Sequence
  Description of Artificial Sequence: Synthetic oligonucleotide
  Sense strand starting at position 1161 of SEQ ID NO: 1561200
agagaaggugcugggaaau

SEQ ID NO: 1654004 - RNA, 19 nt, Artificial Sequence
  Description of Artificial Sequence: Synthetic oligonucleotide
  Antisense strand to SEQ ID NO: 1654003
auuucccagcaccuucucu

SEQ ID NO: 1654005 - RNA, 19 nt, Artificial Sequence
  Description of Artificial Sequence: Synthetic oligonucleotide
  Sense strand starting at position 1231 of SEQ ID NO: 1561200
ggacaaacauuggaagcau

SEQ ID NO: 1654006 - RNA, 19 nt, Artificial Sequence
  Description of Artificial Sequence: Synthetic oligonucleotide
  Antisense strand to SEQ ID NO: 1654005
augcuuccaauguuugucc

SEQ ID NO: 1654007 - RNA, 19 nt, Artificial Sequence
  Description of Artificial Sequence: Synthetic oligonucleotide
  Sense strand starting at position 1264 of SEQ ID NO: 1561200
gccuuaguuucccauccca

SEQ ID NO: 1654008 - RNA, 19 nt, Artificial Sequence
  Description of Artificial Sequence: Synthetic oligonucleotide
  Antisense strand to SEQ ID NO: 1654007
ugggaugggaaacuaaggc

SEQ ID NO: 1654009 - RNA, 19 nt, Artificial Sequence
  Description of Artificial Sequence: Synthetic oligonucleotide
  Sense strand starting at position 1496 of SEQ ID NO: 1561200
augccugguuuagcuagaa

SEQ ID NO: 1654010 - RNA, 19 nt, Artificial Sequence
  Description of Artificial Sequence: Synthetic oligonucleotide
  Antisense strand to SEQ ID NO: 1654009
uucuagcuaaaccaggcau

SEQ ID NO: 1654011 - RNA, 19 nt, Artificial Sequence
  Description of Artificial Sequence: Synthetic oligonucleotide
  Sense strand starting at position 1721 of SEQ ID NO: 1561200
uaaccuauacagcgagagu

SEQ ID NO: 1654012 - RNA, 19 nt, Artificial Sequence
  Description of Artificial Sequence: Synthetic oligonucleotide
  Antisense strand to SEQ ID NO: 1654011
acucucgcuguauagguua

SEQ ID NO: 1654013 - RNA, 19 nt, Artificial Sequence
  Description of Artificial Sequence: Synthetic oligonucleotide
  Sense strand starting at position 2118 of SEQ ID NO: 1561200
ggccgagcgcuccggauua

SEQ ID NO: 1654014 - RNA, 19 nt, Artificial Sequence
  Description of Artificial Sequence: Synthetic oligonucleotide
  Antisense strand to SEQ ID NO: 1654013
uaauccggagcgcucggcc

SEQ ID NO: 1654015 - RNA, 19 nt, Artificial Sequence
  Description of Artificial Sequence: Synthetic oligonucleotide
  Sense strand starting at position 2482 of SEQ ID NO: 1561200
ggaauuucggcagaagcgu

SEQ ID NO: 1654016 - RNA, 19 nt, Artificial Sequence
  Description of Artificial Sequence: Synthetic oligonucleotide
  Antisense strand to SEQ ID NO: 1654015
acgcuucugccgaaauucc

SEQ ID NO: 1654017 - RNA, 19 nt, Artificial Sequence
  Description of Artificial Sequence: Synthetic oligonucleotide
  Sense strand starting at position 2491 of SEQ ID NO: 1561200
gcagaagcguguuucucaa

SEQ ID NO: 1654018 - RNA, 19 nt, Artificial Sequence
  Description of Artificial Sequence: Synthetic oligonucleotide
  Antisense strand to SEQ ID NO: 1654017
uugagaaacacgcuucugc

SEQ ID NO: 1654019 - RNA, 19 nt, Artificial Sequence
  Description of Artificial Sequence: Synthetic oligonucleotide
  Sense strand starting at position 2495 of SEQ ID NO: 1561200
aagcguguuucucaaagua

SEQ ID NO: 1654020 - RNA, 19 nt, Artificial Sequence
  Description of Artificial Sequence: Synthetic oligonucleotide
  Antisense strand to SEQ ID NO: 1654019
uacuuugagaaacacgcuu

SEQ ID NO: 1654021 - RNA, 19 nt, Artificial Sequence
  Description of Artificial Sequence: Synthetic oligonucleotide
  Sense strand starting at position 2527 of SEQ ID NO: 1561200
cccuucgcgucagaaagau

SEQ ID NO: 1654022 - RNA, 19 nt, Artificial Sequence
  Description of Artificial Sequence: Synthetic oligonucleotide
  Antisense strand to SEQ ID NO: 1654021
aucuuucugacgcgaaggg

SEQ ID NO: 1654023 - RNA, 19 nt, Artificial Sequence
  Description of Artificial Sequence: Synthetic oligonucleotide
  Sense strand starting at position 2535 of SEQ ID NO: 1561200
gucagaaagaucugagagu

SEQ ID NO: 1654024 - RNA, 19 nt, Artificial Sequence
  Description of Artificial Sequence: Synthetic oligonucleotide
  Antisense strand to SEQ ID NO: 1654023
acucucagaucuuucugac

SEQ ID NO: 1654025 - RNA, 19 nt, Artificial Sequence
  Description of Artificial Sequence: Synthetic oligonucleotide
  Sense strand starting at position 2536 of SEQ ID NO: 1561200
ucagaaagaucugagaguc

SEQ ID NO: 1654026 - RNA, 19 nt, Artificial Sequence
  Description of Artificial Sequence: Synthetic oligonucleotide
  Antisense strand to SEQ ID NO: 1654025
gacucucagaucuuucuga

SEQ ID NO: 1654027 - RNA, 19 nt, Artificial Sequence
  Description of Artificial Sequence: Synthetic oligonucleotide
  Sense strand starting at position 2566 of SEQ ID NO: 1561200
gcagauuccaacuaggugu

SEQ ID NO: 1654028 - RNA, 19 nt, Artificial Sequence
  Description of Artificial Sequence: Synthetic oligonucleotide
  Antisense strand to SEQ ID NO: 1654027
acaccuaguuggaaucugc

SEQ ID NO: 1654029 - RNA, 19 nt, Artificial Sequence
  Description of Artificial Sequence: Synthetic oligonucleotide
  Sense strand starting at position 2758 of SEQ ID NO: 1561200
uacagaguucugugccaca

SEQ ID NO: 1654030 - RNA, 19 nt, Artificial Sequence
  Description of Artificial Sequence: Synthetic oligonucleotide
  Antisense strand to SEQ ID NO: 1654029
uguggcacagaacucugua

SEQ ID NO: 1654031 - RNA, 19 nt, Artificial Sequence
  Description of Artificial Sequence: Synthetic oligonucleotide
  Sense strand starting at position 2761 of SEQ ID NO: 1561200
agaguucugugccacaaga

SEQ ID NO: 1654032 - RNA, 19 nt, Artificial Sequence
  Description of Artificial Sequence: Synthetic oligonucleotide
  Antisense strand to SEQ ID NO: 1654031
ucuuguggcacagaacucu

SEQ ID NO: 1654033 - RNA, 19 nt, Artificial Sequence
  Description of Artificial Sequence: Synthetic oligonucleotide
  Sense strand starting at position 2763 of SEQ ID NO: 1561200
aguucugugccacaagaag

SEQ ID NO: 1654034 - RNA, 19 nt, Artificial Sequence
  Description of Artificial Sequence: Synthetic oligonucleotide
  Antisense strand to SEQ ID NO: 1654033
cuucuuguggcacagaacu

SEQ ID NO: 1654035 - RNA, 19 nt, Artificial Sequence
  Description of Artificial Sequence: Synthetic oligonucleotide
  Sense strand starting at position 2954 of SEQ ID NO: 1561200
ggaggaugcagcugugagu

SEQ ID NO: 1654036 - RNA, 19 nt, Artificial Sequence
  Description of Artificial Sequence: Synthetic oligonucleotide
  Antisense strand to SEQ ID NO: 1654035
acucacagcugcauccucc

SEQ ID NO: 1654037 - RNA, 19 nt, Artificial Sequence
  Description of Artificial Sequence: Synthetic oligonucleotide
  Sense strand starting at position 2963 of SEQ ID NO: 1561200
agcugugaguccugggaac

SEQ ID NO: 1654038 - RNA, 19 nt, Artificial Sequence
  Description of Artificial Sequence: Synthetic oligonucleotide
  Antisense strand to SEQ ID NO: 1654037
guucccaggacucacagcu

SEQ ID NO: 1654039 - RNA, 19 nt, Artificial Sequence
  Description of Artificial Sequence: Synthetic oligonucleotide
  Sense strand starting at position 3579 of SEQ ID NO: 1561200
gugcuagaauugcuugaac

SEQ ID NO: 1654040 - RNA, 19 nt, Artificial Sequence
  Description of Artificial Sequence: Synthetic oligonucleotide
  Antisense strand to SEQ ID NO: 1654039
guucaagcaauucuagcac

SEQ ID NO: 1654041 - RNA, 19 nt, Artificial Sequence
  Description of Artificial Sequence: Synthetic oligonucleotide
  Sense strand starting at position 142 of SEQ ID NO: 1561201
gcgagauggcuggacacau

SEQ ID NO: 1654042 - RNA, 19 nt, Artificial Sequence
  Description of Artificial Sequence: Synthetic oligonucleotide
  Antisense strand to SEQ ID NO: 1654041
auguguccagccaucucgc

SEQ ID NO: 1654043 - RNA, 19 nt, Artificial Sequence
  Description of Artificial Sequence: Synthetic oligonucleotide
  Sense strand starting at position 211 of SEQ ID NO: 1561201
ucaucaugacgcugagaag

SEQ ID NO: 1654044 - RNA, 19 nt, Artificial Sequence
  Description of Artificial Sequence: Synthetic oligonucleotide
  Antisense strand to SEQ ID NO: 1654043
cuucucagcgucaugauga

SEQ ID NO: 1654045 - RNA, 19 nt, Artificial Sequence
  Description of Artificial Sequence: Synthetic oligonucleotide
  Sense strand starting at position 239 of SEQ ID NO: 1561201
ggcucagaugcguggacau

SEQ ID NO: 1654046 - RNA, 19 nt, Artificial Sequence
  Description of Artificial Sequence: Synthetic oligonucleotide
  Antisense strand to SEQ ID NO: 1654045
auguccacgcaucugagcc

SEQ ID NO: 1654047 - RNA, 19 nt, Artificial Sequence
  Description of Artificial Sequence: Synthetic oligonucleotide
  Sense strand starting at position 252 of SEQ ID NO: 1561201
ggacaugugguuugugguu

SEQ ID NO: 1654048 - RNA, 19 nt, Artificial Sequence
  Description of Artificial Sequence: Synthetic oligonucleotide
  Antisense strand to SEQ ID NO: 1654047
aaccacaaaccacaugucc

SEQ ID NO: 1654049 - RNA, 19 nt, Artificial Sequence
  Description of Artificial Sequence: Synthetic oligonucleotide
  Sense strand starting at position 259 of SEQ ID NO: 1561201
ugguuugugguuuauggau

SEQ ID NO: 1654050 - RNA, 19 nt, Artificial Sequence
  Description of Artificial Sequence: Synthetic oligonucleotide
  Antisense strand to SEQ ID NO: 1654049
auccauaaaccacaaacca

SEQ ID NO: 1654051 - RNA, 19 nt, Artificial Sequence
  Description of Artificial Sequence: Synthetic oligonucleotide
  Sense strand starting at position 391 of SEQ ID NO: 1561201
gguauauggacacgaaugu

SEQ ID NO: 1654052 - RNA, 19 nt, Artificial Sequence
  Description of Artificial Sequence: Synthetic oligonucleotide
  Antisense strand to SEQ ID NO: 1654051
acauucguguccauauacc

SEQ ID NO: 1654053 - RNA, 19 nt, Artificial Sequence
  Description of Artificial Sequence: Synthetic oligonucleotide
  Sense strand starting at position 538 of SEQ ID NO: 1561201
ccgagaaauuuccacagau

SEQ ID NO: 1654054 - RNA, 19 nt, Artificial Sequence
  Description of Artificial Sequence: Synthetic oligonucleotide
  Antisense strand to SEQ ID NO: 1654053
aucuguggaaauuucucgg

SEQ ID NO: 1654055 - RNA, 19 nt, Artificial Sequence
  Description of Artificial Sequence: Synthetic oligonucleotide
  Sense strand starting at position 556 of SEQ ID NO: 1561201
uggaaauggucagagaauu

SEQ ID NO: 1654056 - RNA, 19 nt, Artificial Sequence
  Description of Artificial Sequence: Synthetic oligonucleotide
  Antisense strand to SEQ ID NO: 1654055
aauucucugaccauuucca

SEQ ID NO: 1654057 - RNA, 19 nt, Artificial Sequence
  Description of Artificial Sequence: Synthetic oligonucleotide
  Sense strand starting at position 577 of SEQ ID NO: 1561201
ugacaaucgcaguaacagu

SEQ ID NO: 1654058 - RNA, 19 nt, Artificial Sequence
  Description of Artificial Sequence: Synthetic oligonucleotide
  Antisense strand to SEQ ID NO: 1654057
acuguuacugcgauuguca

SEQ ID NO: 1654059 - RNA, 19 nt, Artificial Sequence
  Description of Artificial Sequence: Synthetic oligonucleotide
  Sense strand starting at position 586 of SEQ ID NO: 1561201
caguaacaguaauaagagu

SEQ ID NO: 1654060 - RNA, 19 nt, Artificial Sequence
  Description of Artificial Sequence: Synthetic oligonucleotide
  Antisense strand to SEQ ID NO: 1654059
acucuuauuacuguuacug

SEQ ID NO: 1654061 - RNA, 19 nt, Artificial Sequence
  Description of Artificial Sequence: Synthetic oligonucleotide
  Sense strand starting at position 1030 of SEQ ID NO: 1561201
ugaagagacugcccuuauu

SEQ ID NO: 1654062 - RNA, 19 nt, Artificial Sequence
  Description of Artificial Sequence: Synthetic oligonucleotide
  Antisense strand to SEQ ID NO: 1654061
aauaagggcagucucuuca

SEQ ID NO: 1654063 - RNA, 19 nt, Artificial Sequence
  Description of Artificial Sequence: Synthetic oligonucleotide
  Sense strand starting at position 1537 of SEQ ID NO: 1561201
accgaaauugcucaacacu

SEQ ID NO: 1654064 - RNA, 19 nt, Artificial Sequence
  Description of Artificial Sequence: Synthetic oligonucleotide
  Antisense strand to SEQ ID NO: 1654063
aguguugagcaauuucggu

SEQ ID NO: 1654065 - RNA, 19 nt, Artificial Sequence
  Description of Artificial Sequence: Synthetic oligonucleotide
  Sense strand starting at position 1803 of SEQ ID NO: 1561201
ccaaauaucgacugaggac

SEQ ID NO: 1654066 - RNA, 19 nt, Artificial Sequence
  Description of Artificial Sequence: Synthetic oligonucleotide
  Antisense strand to SEQ ID NO: 1654065
guccucagucgauauuugg

SEQ ID NO: 1654067 - RNA, 19 nt, Artificial Sequence
  Description of Artificial Sequence: Synthetic oligonucleotide
  Sense strand starting at position 2374 of SEQ ID NO: 1561201
ugcagugugugcaugugaa

SEQ ID NO: 1654068 - RNA, 19 nt, Artificial Sequence
  Description of Artificial Sequence: Synthetic oligonucleotide
  Antisense strand to SEQ ID NO: 1654067
uucacaugcacacacugca

SEQ ID NO: 1654069 - RNA, 19 nt, Artificial Sequence
  Description of Artificial Sequence: Synthetic oligonucleotide
  Sense strand starting at position 2384 of SEQ ID NO: 1561201
gcaugugaauguguguauu

SEQ ID NO: 1654070 - RNA, 19 nt, Artificial Sequence
  Description of Artificial Sequence: Synthetic oligonucleotide
  Antisense strand to SEQ ID NO: 1654069
aauacacacauucacaugc

SEQ ID NO: 1654071 - RNA, 19 nt, Artificial Sequence
  Description of Artificial Sequence: Synthetic oligonucleotide
  Sense strand starting at position 2386 of SEQ ID NO: 1561201
augugaauguguguauuca

SEQ ID NO: 1654072 - RNA, 19 nt, Artificial Sequence
  Description of Artificial Sequence: Synthetic oligonucleotide
  Antisense strand to SEQ ID NO: 1654071
ugaauacacacauucacau

SEQ ID NO: 1654073 - RNA, 19 nt, Artificial Sequence
  Description of Artificial Sequence: Synthetic oligonucleotide
  Sense strand starting at position 2394 of SEQ ID NO: 1561201
guguguauucaguugugug

SEQ ID NO: 1654074 - RNA, 19 nt, Artificial Sequence
  Description of Artificial Sequence: Synthetic oligonucleotide
  Antisense strand to SEQ ID NO: 1654073
cacacaacugaauacacac

SEQ ID NO: 1654075 - RNA, 19 nt, Artificial Sequence
  Description of Artificial Sequence: Synthetic oligonucleotide
  Sense strand starting at position 2396 of SEQ ID NO: 1561201
guguauucaguugugugca

SEQ ID NO: 1654076 - RNA, 19 nt, Artificial Sequence
  Description of Artificial Sequence: Synthetic oligonucleotide
  Antisense strand to SEQ ID NO: 1654075
ugcacacaacugaauacac

SEQ ID NO: 1654077 - RNA, 19 nt, Artificial Sequence
  Description of Artificial Sequence: Synthetic oligonucleotide
  Sense strand starting at position 2412 of SEQ ID NO: 1561201
gcaugcaaguguguaucau

SEQ ID NO: 1654078 - RNA, 19 nt, Artificial Sequence
  Description of Artificial Sequence: Synthetic oligonucleotide
  Antisense strand to SEQ ID NO: 1654077
augauacacacuugcaugc

SEQ ID NO: 1654079 - RNA, 19 nt, Artificial Sequence
  Description of Artificial Sequence: Synthetic oligonucleotide
  Sense strand starting at position 2420 of SEQ ID NO: 1561201
guguguaucauguacacau

SEQ ID NO: 1654080 - RNA, 19 nt, Artificial Sequence
  Description of Artificial Sequence: Synthetic oligonucleotide
  Antisense strand to SEQ ID NO: 1654079
auguguacaugauacacac

SEQ ID NO: 1654081 - RNA, 19 nt, Artificial Sequence
  Description of Artificial Sequence: Synthetic oligonucleotide
  Sense strand starting at position 2478 of SEQ ID NO: 1561201
guaaaugugcgugcauaug

SEQ ID NO: 1654082 - RNA, 19 nt, Artificial Sequence
  Description of Artificial Sequence: Synthetic oligonucleotide
  Antisense strand to SEQ ID NO: 1654081
cauaugcacgcacauuuac

SEQ ID NO: 1654083 - RNA, 19 nt, Artificial Sequence
  Description of Artificial Sequence: Synthetic oligonucleotide
  Sense strand starting at position 2503 of SEQ ID NO: 1561201
ggugcaugcauauguguau

SEQ ID NO: 1654084 - RNA, 19 nt, Artificial Sequence
  Description of Artificial Sequence: Synthetic oligonucleotide
  Antisense strand to SEQ ID NO: 1654083
auacacauaugcaugcacc

SEQ ID NO: 1654085 - RNA, 19 nt, Artificial Sequence
  Description of Artificial Sequence: Synthetic oligonucleotide
  Sense strand starting at position 2509 of SEQ ID NO: 1561201
ugcauauguguauggucau

SEQ ID NO: 1654086 - RNA, 19 nt, Artificial Sequence
  Description of Artificial Sequence: Synthetic oligonucleotide
  Antisense strand to SEQ ID NO: 1654085
augaccauacacauaugca

SEQ ID NO: 1654087 - RNA, 19 nt, Artificial Sequence
  Description of Artificial Sequence: Synthetic oligonucleotide
  Sense strand starting at position 2519 of SEQ ID NO: 1561201
uauggucaucugugugcau

SEQ ID NO: 1654088 - RNA, 19 nt, Artificial Sequence
  Description of Artificial Sequence: Synthetic oligonucleotide
  Antisense strand to SEQ ID NO: 1654087
augcacacagaugaccaua

SEQ ID NO: 1654089 - RNA, 19 nt, Artificial Sequence
  Description of Artificial Sequence: Synthetic oligonucleotide
  Sense strand starting at position 2540 of SEQ ID NO: 1561201
gcaugugguccauguacau

SEQ ID NO: 1654090 - RNA, 19 nt, Artificial Sequence
  Description of Artificial Sequence: Synthetic oligonucleotide
  Antisense strand to SEQ ID NO: 1654089
auguacauggaccacaugc

SEQ ID NO: 1654091 - RNA, 19 nt, Artificial Sequence
  Description of Artificial Sequence: Synthetic oligonucleotide
  Sense strand starting at position 2604 of SEQ ID NO: 1561201
gcaagugggugugcauaua

SEQ ID NO: 1654092 - RNA, 19 nt, Artificial Sequence
  Description of Artificial Sequence: Synthetic oligonucleotide
  Antisense strand to SEQ ID NO: 1654091
uauaugcacacccacuugc

SEQ ID NO: 1654093 - RNA, 19 nt, Artificial Sequence
  Description of Artificial Sequence: Synthetic oligonucleotide
  Sense strand starting at position 2740 of SEQ ID NO: 1561201
ugcauucaagcguggauuu

SEQ ID NO: 1654094 - RNA, 19 nt, Artificial Sequence
  Description of Artificial Sequence: Synthetic oligonucleotide
  Antisense strand to SEQ ID NO: 1654093
aaauccacgcuugaaugca

SEQ ID NO: 1654095 - RNA, 19 nt, Artificial Sequence
  Description of Artificial Sequence: Synthetic oligonucleotide
  Sense strand starting at position 3226 of SEQ ID NO: 1561201
guauuauauguuggccauu

SEQ ID NO: 1654096 - RNA, 19 nt, Artificial Sequence
  Description of Artificial Sequence: Synthetic oligonucleotide
  Antisense strand to SEQ ID NO: 1654095
aauggccaacauauaauac

SEQ ID NO: 1654097 - RNA, 19 nt, Artificial Sequence
  Description of Artificial Sequence: Synthetic oligonucleotide
  Sense strand starting at position 3228 of SEQ ID NO: 1561201
auuauauguuggccauuau

SEQ ID NO: 1654098 - RNA, 19 nt, Artificial Sequence
  Description of Artificial Sequence: Synthetic oligonucleotide
  Antisense strand to SEQ ID NO: 1654097
auaauggccaacauauaau

SEQ ID NO: 1654099 - RNA, 19 nt, Artificial Sequence
  Description of Artificial Sequence: Synthetic oligonucleotide
  Sense strand starting at position 3229 of SEQ ID NO: 1561201
uuauauguuggccauuaua

SEQ ID NO: 1654100 - RNA, 19 nt, Artificial Sequence
  Description of Artificial Sequence: Synthetic oligonucleotide
  Antisense strand to SEQ ID NO: 1654099
uauaauggccaacauauaa

SEQ ID NO: 1654101 - RNA, 19 nt, Artificial Sequence
  Description of Artificial Sequence: Synthetic oligonucleotide
  Sense strand starting at position 3239 of SEQ ID NO: 1561201
gccauuauauauguuguaa

SEQ ID NO: 1654102 - RNA, 19 nt, Artificial Sequence
  Description of Artificial Sequence: Synthetic oligonucleotide
  Antisense strand to SEQ ID NO: 1654101
uuacaacauauauaauggc

SEQ ID NO: 1654103 - RNA, 19 nt, Artificial Sequence
  Description of Artificial Sequence: Synthetic oligonucleotide
  Sense strand starting at position 3261 of SEQ ID NO: 1561201
auauguugucuauauguug

SEQ ID NO: 1654104 - RNA, 19 nt, Artificial Sequence
  Description of Artificial Sequence: Synthetic oligonucleotide
  Antisense strand to SEQ ID NO: 1654103
caacauauagacaacauau

SEQ ID NO: 1654105 - RNA, 19 nt, Artificial Sequence
  Description of Artificial Sequence: Synthetic oligonucleotide
  Sense strand starting at position 3440 of SEQ ID NO: 1561201
acacuuauguggcccuuua

SEQ ID NO: 1654106 - RNA, 19 nt, Artificial Sequence
  Description of Artificial Sequence: Synthetic oligonucleotide
  Antisense strand to SEQ ID NO: 1654105
uaaagggccacauaagugu

SEQ ID NO: 1654107 - RNA, 19 nt, Artificial Sequence
  Description of Artificial Sequence: Synthetic oligonucleotide
  Sense strand starting at position 3486 of SEQ ID NO: 1561201
cugagcuuaggcuaagaca

SEQ ID NO: 1654108 - RNA, 19 nt, Artificial Sequence
  Description of Artificial Sequence: Synthetic oligonucleotide
  Antisense strand to SEQ ID NO: 1654107
ugucuuagccuaagcucag

SEQ ID NO: 1654109 - RNA, 19 nt, Artificial Sequence
  Description of Artificial Sequence: Synthetic oligonucleotide
  Sense strand starting at position 3567 of SEQ ID NO: 1561201
gacagauauccugggucuu

SEQ ID NO: 1654110 - RNA, 19 nt, Artificial Sequence
  Description of Artificial Sequence: Synthetic oligonucleotide
  Antisense strand to SEQ ID NO: 1654109
aagacccaggauaucuguc

SEQ ID NO: 1654111 - RNA, 19 nt, Artificial Sequence
  Description of Artificial Sequence: Synthetic oligonucleotide
  Sense strand starting at position 3568 of SEQ ID NO: 1561201
acagauauccugggucuuu

SEQ ID NO: 1654112 - RNA, 19 nt, Artificial Sequence
  Description of Artificial Sequence: Synthetic oligonucleotide
  Antisense strand to SEQ ID NO: 1654111
aaagacccaggauaucugu

SEQ ID NO: 1654113 - RNA, 19 nt, Artificial Sequence
  Description of Artificial Sequence: Synthetic oligonucleotide
  Sense strand starting at position 3569 of SEQ ID NO: 1561201
cagauauccugggucuuug

SEQ ID NO: 1654114 - RNA, 19 nt, Artificial Sequence
  Description of Artificial Sequence: Synthetic oligonucleotide
  Antisense strand to SEQ ID NO: 1654113
caaagacccaggauaucug

SEQ ID NO: 1654115 - RNA, 19 nt, Artificial Sequence
  Description of Artificial Sequence: Synthetic oligonucleotide
  Sense strand starting at position 3609 of SEQ ID NO: 1561201
ggaaccaucuucccuagau

SEQ ID NO: 1654116 - RNA, 19 nt, Artificial Sequence
  Description of Artificial Sequence: Synthetic oligonucleotide
  Antisense strand to SEQ ID NO: 1654115
aucuagggaagaugguucc

SEQ ID NO: 1654117 - RNA, 19 nt, Artificial Sequence
  Description of Artificial Sequence: Synthetic oligonucleotide
  Sense strand starting at position 3655 of SEQ ID NO: 1561201
ugcgucuugacucaagaaa

SEQ ID NO: 1654118 - RNA, 19 nt, Artificial Sequence
  Description of Artificial Sequence: Synthetic oligonucleotide
  Antisense strand to SEQ ID NO: 1654117
uuucuugagucaagacgca

SEQ ID NO: 1654119 - RNA, 19 nt, Artificial Sequence
  Description of Artificial Sequence: Synthetic oligonucleotide
  Sense strand starting at position 3691 of SEQ ID NO: 1561201
cccugaauuggucaggugu

SEQ ID NO: 1654120 - RNA, 19 nt, Artificial Sequence
  Description of Artificial Sequence: Synthetic oligonucleotide
  Antisense strand to SEQ ID NO: 1654119
acaccugaccaauucaggg

SEQ ID NO: 1654121 - RNA, 19 nt, Artificial Sequence
  Description of Artificial Sequence: Synthetic oligonucleotide
  Sense strand starting at position 202 of SEQ ID NO: 1561202
gcgcaaacaugcccuguua

SEQ ID NO: 1654122 - RNA, 19 nt, Artificial Sequence
  Description of Artificial Sequence: Synthetic oligonucleotide
  Antisense strand to SEQ ID NO: 1654121
uaacagggcauguuugcgc

SEQ ID NO: 1654123 - RNA, 19 nt, Artificial Sequence
  Description of Artificial Sequence: Synthetic oligonucleotide
  Sense strand starting at position 204 of SEQ ID NO: 1561202
gcaaacaugcccuguuaaa

SEQ ID NO: 1654124 - RNA, 19 nt, Artificial Sequence
  Description of Artificial Sequence: Synthetic oligonucleotide
  Antisense strand to SEQ ID NO: 1654123
uuuaacagggcauguuugc

SEQ ID NO: 1654125 - RNA, 19 nt, Artificial Sequence
  Description of Artificial Sequence: Synthetic oligonucleotide
  Sense strand starting at position 870 of SEQ ID NO: 1561202
ggauaaggcucuuugggag

SEQ ID NO: 1654126 - RNA, 19 nt, Artificial Sequence
  Description of Artificial Sequence: Synthetic oligonucleotide
  Antisense strand to SEQ ID NO: 1654125
cucccaaagagccuuaucc

SEQ ID NO: 1654127 - RNA, 19 nt, Artificial Sequence
  Description of Artificial Sequence: Synthetic oligonucleotide
  Sense strand starting at position 873 of SEQ ID NO: 1561202
uaaggcucuuugggaguua

SEQ ID NO: 1654128 - RNA, 19 nt, Artificial Sequence
  Description of Artificial Sequence: Synthetic oligonucleotide
  Antisense strand to SEQ ID NO: 1654127
uaacucccaaagagccuua

SEQ ID NO: 1654129 - RNA, 19 nt, Artificial Sequence
  Description of Artificial Sequence: Synthetic oligonucleotide
  Sense strand starting at position 878 of SEQ ID NO: 1561202
cucuuugggaguuagcaaa

SEQ ID NO: 1654130 - RNA, 19 nt, Artificial Sequence
  Description of Artificial Sequence: Synthetic oligonucleotide
  Antisense strand to SEQ ID NO: 1654129
uuugcuaacucccaaagag

SEQ ID NO: 1654131 - RNA, 19 nt, Artificial Sequence
  Description of Artificial Sequence: Synthetic oligonucleotide
  Sense strand starting at position 2105 of SEQ ID NO: 1561202
ccgugacucugcggaauuu

SEQ ID NO: 1654132 - RNA, 19 nt, Artificial Sequence
  Description of Artificial Sequence: Synthetic oligonucleotide
  Antisense strand to SEQ ID NO: 1654131
aaauuccgcagagucacgg

SEQ ID NO: 1654133 - RNA, 19 nt, Artificial Sequence
  Description of Artificial Sequence: Synthetic oligonucleotide
  Sense strand starting at position 2317 of SEQ ID NO: 1561202
uucucugucucuguugauu

SEQ ID NO: 1654134 - RNA, 19 nt, Artificial Sequence
  Description of Artificial Sequence: Synthetic oligonucleotide
  Antisense strand to SEQ ID NO: 1654133
aaucaacagagacagagaa

SEQ ID NO: 1654135 - RNA, 19 nt, Artificial Sequence
  Description of Artificial Sequence: Synthetic oligonucleotide
  Sense strand starting at position 2328 of SEQ ID NO: 1561202
uguugauugccucugcagu

SEQ ID NO: 1654136 - RNA, 19 nt, Artificial Sequence
  Description of Artificial Sequence: Synthetic oligonucleotide
  Antisense strand to SEQ ID NO: 1654135
acugcagaggcaaucaaca

SEQ ID NO: 1654137 - RNA, 19 nt, Artificial Sequence
  Description of Artificial Sequence: Synthetic oligonucleotide
  Sense strand starting at position 2376 of SEQ ID NO: 1561202
ccaauuuaugucuaugcgu

SEQ ID NO: 1654138 - RNA, 19 nt, Artificial Sequence
  Description of Artificial Sequence: Synthetic oligonucleotide
  Antisense strand to SEQ ID NO: 1654137
acgcauagacauaaauugg

SEQ ID NO: 1654139 - RNA, 19 nt, Artificial Sequence
  Description of Artificial Sequence: Synthetic oligonucleotide
  Sense strand starting at position 2394 of SEQ ID NO: 1561202
ugccucugugccuguauua

SEQ ID NO: 1654140 - RNA, 19 nt, Artificial Sequence
  Description of Artificial Sequence: Synthetic oligonucleotide
  Antisense strand to SEQ ID NO: 1654139
uaauacaggcacagaggca

SEQ ID NO: 1654141 - RNA, 19 nt, Artificial Sequence
  Description of Artificial Sequence: Synthetic oligonucleotide
  Sense strand starting at position 2395 of SEQ ID NO: 1561202
gccucugugccuguauuau

SEQ ID NO: 1654142 - RNA, 19 nt, Artificial Sequence
  Description of Artificial Sequence: Synthetic oligonucleotide
  Antisense strand to SEQ ID NO: 1654141
auaauacaggcacagaggc

SEQ ID NO: 1654143 - RNA, 19 nt, Artificial Sequence
  Description of Artificial Sequence: Synthetic oligonucleotide
  Sense strand starting at position 2405 of SEQ ID NO: 1561202
cuguauuaucucugucucu

SEQ ID NO: 1654144 - RNA, 19 nt, Artificial Sequence
  Description of Artificial Sequence: Synthetic oligonucleotide
  Antisense strand to SEQ ID NO: 1654143
agagacagagauaauacag

SEQ ID NO: 1654145 - RNA, 19 nt, Artificial Sequence
  Description of Artificial Sequence: Synthetic oligonucleotide
  Sense strand starting at position 2468 of SEQ ID NO: 1561202
cucuguuaucucugucucu

SEQ ID NO: 1654146 - RNA, 19 nt, Artificial Sequence
  Description of Artificial Sequence: Synthetic oligonucleotide
  Antisense strand to SEQ ID NO: 1654145
agagacagagauaacagag

SEQ ID NO: 1654147 - RNA, 19 nt, Artificial Sequence
  Description of Artificial Sequence: Synthetic oligonucleotide
  Sense strand starting at position 2471 of SEQ ID NO: 1561202
uguuaucucugucucugua

SEQ ID NO: 1654148 - RNA, 19 nt, Artificial Sequence
  Description of Artificial Sequence: Synthetic oligonucleotide
  Antisense strand to SEQ ID NO: 1654147
uacagagacagagauaaca

SEQ ID NO: 1654149 - RNA, 19 nt, Artificial Sequence
  Description of Artificial Sequence: Synthetic oligonucleotide
  Sense strand starting at position 2483 of SEQ ID NO: 1561202
cucuguaucucucugucua

SEQ ID NO: 1654150 - RNA, 19 nt, Artificial Sequence
  Description of Artificial Sequence: Synthetic oligonucleotide
  Antisense strand to SEQ ID NO: 1654149
uagacagagagauacagag

SEQ ID NO: 1654151 - RNA, 19 nt, Artificial Sequence
  Description of Artificial Sequence: Synthetic oligonucleotide
  Sense strand starting at position 2484 of SEQ ID NO: 1561202
ucuguaucucucugucuaa

SEQ ID NO: 1654152 - RNA, 19 nt, Artificial Sequence
  Description of Artificial Sequence: Synthetic oligonucleotide
  Antisense strand to SEQ ID NO: 1654151
uuagacagagagauacaga

SEQ ID NO: 1654153 - RNA, 19 nt, Artificial Sequence
  Description of Artificial Sequence: Synthetic oligonucleotide
  Sense strand starting at position 2513 of SEQ ID NO: 1561202
ggcuguuaucucugucucu

SEQ ID NO: 1654154 - RNA, 19 nt, Artificial Sequence
  Description of Artificial Sequence: Synthetic oligonucleotide
  Antisense strand to SEQ ID NO: 1654153
agagacagagauaacagcc

SEQ ID NO: 1654155 - RNA, 19 nt, Artificial Sequence
  Description of Artificial Sequence: Synthetic oligonucleotide
  Sense strand starting at position 2516 of SEQ ID NO: 1561202
uguuaucucugucucucau

SEQ ID NO: 1654156 - RNA, 19 nt, Artificial Sequence
  Description of Artificial Sequence: Synthetic oligonucleotide
  Antisense strand to SEQ ID NO: 1654155
augagagacagagauaaca

SEQ ID NO: 1654157 - RNA, 19 nt, Artificial Sequence
  Description of Artificial Sequence: Synthetic oligonucleotide
  Sense strand starting at position 2520 of SEQ ID NO: 1561202
aucucugucucucauugua

SEQ ID NO: 1654158 - RNA, 19 nt, Artificial Sequence
  Description of Artificial Sequence: Synthetic oligonucleotide
  Antisense strand to SEQ ID NO: 1654157
uacaaugagagacagagau

SEQ ID NO: 1654159 - RNA, 19 nt, Artificial Sequence
  Description of Artificial Sequence: Synthetic oligonucleotide
  Sense strand starting at position 2644 of SEQ ID NO: 1561202
cucuguuaucucugucuau

SEQ ID NO: 1654160 - RNA, 19 nt, Artificial Sequence
  Description of Artificial Sequence: Synthetic oligonucleotide
  Antisense strand to SEQ ID NO: 1654159
auagacagagauaacagag

SEQ ID NO: 1654161 - RNA, 19 nt, Artificial Sequence
  Description of Artificial Sequence: Synthetic oligonucleotide
  Sense strand starting at position 2645 of SEQ ID NO: 1561202
ucuguuaucucugucuaua

SEQ ID NO: 1654162 - RNA, 19 nt, Artificial Sequence
  Description of Artificial Sequence: Synthetic oligonucleotide
  Antisense strand to SEQ ID NO: 1654161
uauagacagagauaacaga

SEQ ID NO: 1654163 - RNA, 19 nt, Artificial Sequence
  Description of Artificial Sequence: Synthetic oligonucleotide
  Sense strand starting at position 2647 of SEQ ID NO: 1561202
uguuaucucugucuauaua

SEQ ID NO: 1654164 - RNA, 19 nt, Artificial Sequence
  Description of Artificial Sequence: Synthetic oligonucleotide
  Antisense strand to SEQ ID NO: 1654163
uauauagacagagauaaca

SEQ ID NO: 1654165 - RNA, 19 nt, Artificial Sequence
  Description of Artificial Sequence: Synthetic oligonucleotide
  Sense strand starting at position 2648 of SEQ ID NO: 1561202
guuaucucugucuauauau

SEQ ID NO: 1654166 - RNA, 19 nt, Artificial Sequence
  Description of Artificial Sequence: Synthetic oligonucleotide
  Antisense strand to SEQ ID NO: 1654165
auauauagacagagauaac

SEQ ID NO: 1654167 - RNA, 19 nt, Artificial Sequence
  Description of Artificial Sequence: Synthetic oligonucleotide
  Sense strand starting at position 2705 of SEQ ID NO: 1561202
ccguuaucucugucucugu

SEQ ID NO: 1654168 - RNA, 19 nt, Artificial Sequence
  Description of Artificial Sequence: Synthetic oligonucleotide
  Antisense strand to SEQ ID NO: 1654167
acagagacagagauaacgg

SEQ ID NO: 1654169 - RNA, 19 nt, Artificial Sequence
  Description of Artificial Sequence: Synthetic oligonucleotide
  Sense strand starting at position 2706 of SEQ ID NO: 1561202
cguuaucucugucucugua

SEQ ID NO: 1654170 - RNA, 19 nt, Artificial Sequence
  Description of Artificial Sequence: Synthetic oligonucleotide
  Antisense strand to SEQ ID NO: 1654169
uacagagacagagauaacg

SEQ ID NO: 1654171 - RNA, 19 nt, Artificial Sequence
  Description of Artificial Sequence: Synthetic oligonucleotide
  Sense strand starting at position 2739 of SEQ ID NO: 1561202
uguuaucucugucucucua

SEQ ID NO: 1654172 - RNA, 19 nt, Artificial Sequence
  Description of Artificial Sequence: Synthetic oligonucleotide
  Antisense strand to SEQ ID NO: 1654171
uagagagacagagauaaca

SEQ ID NO: 1654173 - RNA, 19 nt, Artificial Sequence
  Description of Artificial Sequence: Synthetic oligonucleotide
  Sense strand starting at position 2902 of SEQ ID NO: 1561202
ucuguuaucucugucucua

SEQ ID NO: 1654174 - RNA, 19 nt, Artificial Sequence
  Description of Artificial Sequence: Synthetic oligonucleotide
  Antisense strand to SEQ ID NO: 1654173
uagagacagagauaacaga

SEQ ID NO: 1654175 - RNA, 19 nt, Artificial Sequence
  Description of Artificial Sequence: Synthetic oligonucleotide
  Sense strand starting at position 3017 of SEQ ID NO: 1561202
cuguuaucucugugucugu

SEQ ID NO: 1654176 - RNA, 19 nt, Artificial Sequence
  Description of Artificial Sequence: Synthetic oligonucleotide
  Antisense strand to SEQ ID NO: 1654175
acagacacagagauaacag

SEQ ID NO: 1654177 - RNA, 19 nt, Artificial Sequence
  Description of Artificial Sequence: Synthetic oligonucleotide
  Sense strand starting at position 3340 of SEQ ID NO: 1561202
ugugucagucuguguguuu

SEQ ID NO: 1654178 - RNA, 19 nt, Artificial Sequence
  Description of Artificial Sequence: Synthetic oligonucleotide
  Antisense strand to SEQ ID NO: 1654177
aaacacacagacugacaca

SEQ ID NO: 1654179 - RNA, 19 nt, Artificial Sequence
  Description of Artificial Sequence: Synthetic oligonucleotide
  Sense strand starting at position 3745 of SEQ ID NO: 1561202
guggaacccugagugucau

SEQ ID NO: 1654180 - RNA, 19 nt, Artificial Sequence
  Description of Artificial Sequence: Synthetic oligonucleotide
  Antisense strand to SEQ ID NO: 1654179
augacacucaggguuccac

SEQ ID NO: 1654181 - RNA, 19 nt, Artificial Sequence
  Description of Artificial Sequence: Synthetic oligonucleotide
  Sense strand starting at position 3916 of SEQ ID NO: 1561202
ggacaguguugagcgaguu

SEQ ID NO: 1654182 - RNA, 19 nt, Artificial Sequence
  Description of Artificial Sequence: Synthetic oligonucleotide
  Antisense strand to SEQ ID NO: 1654181
aacucgcucaacacugucc

SEQ ID NO: 1654183 - RNA, 19 nt, Artificial Sequence
  Description of Artificial Sequence: Synthetic oligonucleotide
  Sense strand starting at position 241 of SEQ ID NO: 1561203
ugggcuucugucugggaua

SEQ ID NO: 1654184 - RNA, 19 nt, Artificial Sequence
  Description of Artificial Sequence: Synthetic oligonucleotide
  Antisense strand to SEQ ID NO: 1654183
uaucccagacagaagccca

SEQ ID NO: 1654185 - RNA, 19 nt, Artificial Sequence
  Description of Artificial Sequence: Synthetic oligonucleotide
  Sense strand starting at position 242 of SEQ ID NO: 1561203
gggcuucugucugggauag

SEQ ID NO: 1654186 - RNA, 19 nt, Artificial Sequence
  Description of Artificial Sequence: Synthetic oligonucleotide
  Antisense strand to SEQ ID NO: 1654185
cuaucccagacagaagccc

SEQ ID NO: 1654187 - RNA, 19 nt, Artificial Sequence
  Description of Artificial Sequence: Synthetic oligonucleotide
  Sense strand starting at position 244 of SEQ ID NO: 1561203
gcuucugucugggauagga

SEQ ID NO: 1654188 - RNA, 19 nt, Artificial Sequence
  Description of Artificial Sequence: Synthetic oligonucleotide
  Antisense strand to SEQ ID NO: 1654187
uccuaucccagacagaagc

SEQ ID NO: 1654189 - RNA, 19 nt, Artificial Sequence
  Description of Artificial Sequence: Synthetic oligonucleotide
  Sense strand starting at position 265 of SEQ ID NO: 1561203
gccacaugguccugaagga

SEQ ID NO: 1654190 - RNA, 19 nt, Artificial Sequence
  Description of Artificial Sequence: Synthetic oligonucleotide
  Antisense strand to SEQ ID NO: 1654189
uccuucaggaccauguggc

SEQ ID NO: 1654191 - RNA, 19 nt, Artificial Sequence
  Description of Artificial Sequence: Synthetic oligonucleotide
  Sense strand starting at position 284 of SEQ ID NO: 1561203
guagguuggagccaagacu

SEQ ID NO: 1654192 - RNA, 19 nt, Artificial Sequence
  Description of Artificial Sequence: Synthetic oligonucleotide
  Antisense strand to SEQ ID NO: 1654191
agucuuggcuccaaccuac

SEQ ID NO: 1654193 - RNA, 19 nt, Artificial Sequence
  Description of Artificial Sequence: Synthetic oligonucleotide
  Sense strand starting at position 423 of SEQ ID NO: 1561203
ugcugaauuccgggacuag

SEQ ID NO: 1654194 - RNA, 19 nt, Artificial Sequence
  Description of Artificial Sequence: Synthetic oligonucleotide
  Antisense strand to SEQ ID NO: 1654193
cuagucccggaauucagca

SEQ ID NO: 1654195 - RNA, 19 nt, Artificial Sequence
  Description of Artificial Sequence: Synthetic oligonucleotide
  Sense strand starting at position 424 of SEQ ID NO: 1561203
gcugaauuccgggacuaga

SEQ ID NO: 1654196 - RNA, 19 nt, Artificial Sequence
  Description of Artificial Sequence: Synthetic oligonucleotide
  Antisense strand to SEQ ID NO: 1654195
ucuagucccggaauucagc

SEQ ID NO: 1654197 - RNA, 19 nt, Artificial Sequence
  Description of Artificial Sequence: Synthetic oligonucleotide
  Sense strand starting at position 438 of SEQ ID NO: 1561203
cuagaaaccucgcauccuu

SEQ ID NO: 1654198 - RNA, 19 nt, Artificial Sequence
  Description of Artificial Sequence: Synthetic oligonucleotide
  Antisense strand to SEQ ID NO: 1654197
aaggaugcgagguuucuag

SEQ ID NO: 1654199 - RNA, 19 nt, Artificial Sequence
  Description of Artificial Sequence: Synthetic oligonucleotide
  Sense strand starting at position 886 of SEQ ID NO: 1561203
ucucgaggcggagaucuua

SEQ ID NO: 1654200 - RNA, 19 nt, Artificial Sequence
  Description of Artificial Sequence: Synthetic oligonucleotide
  Antisense strand to SEQ ID NO: 1654199
uaagaucuccgccucgaga

SEQ ID NO: 1654201 - RNA, 19 nt, Artificial Sequence
  Description of Artificial Sequence: Synthetic oligonucleotide
  Sense strand starting at position 1083 of SEQ ID NO: 1561203
ugggucucuuccuuuggau

SEQ ID NO: 1654202 - RNA, 19 nt, Artificial Sequence
  Description of Artificial Sequence: Synthetic oligonucleotide
  Antisense strand to SEQ ID NO: 1654201
auccaaaggaagagaccca

SEQ ID NO: 1654203 - RNA, 19 nt, Artificial Sequence
  Description of Artificial Sequence: Synthetic oligonucleotide
  Sense strand starting at position 1085 of SEQ ID NO: 1561203
ggucucuuccuuuggauag

SEQ ID NO: 1654204 - RNA, 19 nt, Artificial Sequence
  Description of Artificial Sequence: Synthetic oligonucleotide
  Antisense strand to SEQ ID NO: 1654203
cuauccaaaggaagagacc

SEQ ID NO: 1654205 - RNA, 19 nt, Artificial Sequence
  Description of Artificial Sequence: Synthetic oligonucleotide
  Sense strand starting at position 1154 of SEQ ID NO: 1561203
gcaggcugcugucaccaau

SEQ ID NO: 1654206 - RNA, 19 nt, Artificial Sequence
  Description of Artificial Sequence: Synthetic oligonucleotide
  Antisense strand to SEQ ID NO: 1654205
auuggugacagcagccugc

SEQ ID NO: 1654207 - RNA, 19 nt, Artificial Sequence
  Description of Artificial Sequence: Synthetic oligonucleotide
  Sense strand starting at position 1614 of SEQ ID NO: 1561203
ggcuguguccugucuccua

SEQ ID NO: 1654208 - RNA, 19 nt, Artificial Sequence
  Description of Artificial Sequence: Synthetic oligonucleotide
  Antisense strand to SEQ ID NO: 1654207
uaggagacaggacacagcc

SEQ ID NO: 1654209 - RNA, 19 nt, Artificial Sequence
  Description of Artificial Sequence: Synthetic oligonucleotide
  Sense strand starting at position 1619 of SEQ ID NO: 1561203
uguccugucuccuaaggga

SEQ ID NO: 1654210 - RNA, 19 nt, Artificial Sequence
  Description of Artificial Sequence: Synthetic oligonucleotide
  Antisense strand to SEQ ID NO: 1654209
ucccuuaggagacaggaca

SEQ ID NO: 1654211 - RNA, 19 nt, Artificial Sequence
  Description of Artificial Sequence: Synthetic oligonucleotide
  Sense strand starting at position 1696 of SEQ ID NO: 1561203
ccaggagucugacucgcaa

SEQ ID NO: 1654212 - RNA, 19 nt, Artificial Sequence
  Description of Artificial Sequence: Synthetic oligonucleotide
  Antisense strand to SEQ ID NO: 1654211
uugcgagucagacuccugg

SEQ ID NO: 1654213 - RNA, 19 nt, Artificial Sequence
  Description of Artificial Sequence: Synthetic oligonucleotide
  Sense strand starting at position 2053 of SEQ ID NO: 1561203
ugcccacuaugccagauaa

SEQ ID NO: 1654214 - RNA, 19 nt, Artificial Sequence
  Description of Artificial Sequence: Synthetic oligonucleotide
  Antisense strand to SEQ ID NO: 1654213
uuaucuggcauagugggca

SEQ ID NO: 1654215 - RNA, 19 nt, Artificial Sequence
  Description of Artificial Sequence: Synthetic oligonucleotide
  Sense strand starting at position 2743 of SEQ ID NO: 1561203
guugauuaauuugaggaug

SEQ ID NO: 1654216 - RNA, 19 nt, Artificial Sequence
  Description of Artificial Sequence: Synthetic oligonucleotide
  Antisense strand to SEQ ID NO: 1654215
cauccucaaauuaaucaac

SEQ ID NO: 1654217 - RNA, 19 nt, Artificial Sequence
  Description of Artificial Sequence: Synthetic oligonucleotide
  Sense strand starting at position 2745 of SEQ ID NO: 1561203
ugauuaauuugaggaugca

SEQ ID NO: 1654218 - RNA, 19 nt, Artificial Sequence
  Description of Artificial Sequence: Synthetic oligonucleotide
  Antisense strand to SEQ ID NO: 1654217
ugcauccucaaauuaauca

SEQ ID NO: 1654219 - RNA, 19 nt, Artificial Sequence
  Description of Artificial Sequence: Synthetic oligonucleotide
  Sense strand starting at position 2786 of SEQ ID NO: 1561203
agucaauagcacugggaaa

SEQ ID NO: 1654220 - RNA, 19 nt, Artificial Sequence
  Description of Artificial Sequence: Synthetic oligonucleotide
  Antisense strand to SEQ ID NO: 1654219
uuucccagugcuauugacu

SEQ ID NO: 1654221 - RNA, 19 nt, Artificial Sequence
  Description of Artificial Sequence: Synthetic oligonucleotide
  Sense strand starting at position 2787 of SEQ ID NO: 1561203
gucaauagcacugggaaau

SEQ ID NO: 1654222 - RNA, 19 nt, Artificial Sequence
  Description of Artificial Sequence: Synthetic oligonucleotide
  Antisense strand to SEQ ID NO: 1654221
auuucccagugcuauugac

SEQ ID NO: 1654223 - RNA, 19 nt, Artificial Sequence
  Description of Artificial Sequence: Synthetic oligonucleotide
  Sense strand starting at position 2936 of SEQ ID NO: 1561203
ggacacaacuugcuuuacu

SEQ ID NO: 1654224 - RNA, 19 nt, Artificial Sequence
  Description of Artificial Sequence: Synthetic oligonucleotide
  Antisense strand to SEQ ID NO: 1654223
aguaaagcaaguugugucc

SEQ ID NO: 1654225 - RNA, 19 nt, Artificial Sequence
  Description of Artificial Sequence: Synthetic oligonucleotide
  Sense strand starting at position 3056 of SEQ ID NO: 1561203
gacucagugucagauccua

SEQ ID NO: 1654226 - RNA, 19 nt, Artificial Sequence
  Description of Artificial Sequence: Synthetic oligonucleotide
  Antisense strand to SEQ ID NO: 1654225
uaggaucugacacugaguc

SEQ ID NO: 1654227 - RNA, 19 nt, Artificial Sequence
  Description of Artificial Sequence: Synthetic oligonucleotide
  Sense strand starting at position 3080 of SEQ ID NO: 1561203
ggcuuagagccucagaagu

SEQ ID NO: 1654228 - RNA, 19 nt, Artificial Sequence
  Description of Artificial Sequence: Synthetic oligonucleotide
  Antisense strand to SEQ ID NO: 1654227
acuucugaggcucuaagcc

SEQ ID NO: 1654229 - RNA, 19 nt, Artificial Sequence
  Description of Artificial Sequence: Synthetic oligonucleotide
  Sense strand starting at position 3104 of SEQ ID NO: 1561203
uuggaauucugagagaaca

SEQ ID NO: 1654230 - RNA, 19 nt, Artificial Sequence
  Description of Artificial Sequence: Synthetic oligonucleotide
  Antisense strand to SEQ ID NO: 1654229
uguucucucagaauuccaa

SEQ ID NO: 1654231 - RNA, 19 nt, Artificial Sequence
  Description of Artificial Sequence: Synthetic oligonucleotide
  Sense strand starting at position 3125 of SEQ ID NO: 1561203
cuagaauucuaggaauaga

SEQ ID NO: 1654232 - RNA, 19 nt, Artificial Sequence
  Description of Artificial Sequence: Synthetic oligonucleotide
  Antisense strand to SEQ ID NO: 1654231
ucuauuccuagaauucuag

SEQ ID NO: 1654233 - RNA, 19 nt, Artificial Sequence
  Description of Artificial Sequence: Synthetic oligonucleotide
  Sense strand starting at position 3201 of SEQ ID NO: 1561203
gcggguacugagugggaau

SEQ ID NO: 1654234 - RNA, 19 nt, Artificial Sequence
  Description of Artificial Sequence: Synthetic oligonucleotide
  Antisense strand to SEQ ID NO: 1654233
auucccacucaguacccgc

SEQ ID NO: 1654235 - RNA, 19 nt, Artificial Sequence
  Description of Artificial Sequence: Synthetic oligonucleotide
  Sense strand starting at position 3204 of SEQ ID NO: 1561203
gguacugagugggaaugau

SEQ ID NO: 1654236 - RNA, 19 nt, Artificial Sequence
  Description of Artificial Sequence: Synthetic oligonucleotide
  Antisense strand to SEQ ID NO: 1654235
aucauucccacucaguacc

SEQ ID NO: 1654237 - RNA, 19 nt, Artificial Sequence
  Description of Artificial Sequence: Synthetic oligonucleotide
  Sense strand starting at position 3213 of SEQ ID NO: 1561203
ugggaaugauuagaauaaa

SEQ ID NO: 1654238 - RNA, 19 nt, Artificial Sequence
  Description of Artificial Sequence: Synthetic oligonucleotide
  Antisense strand to SEQ ID NO: 1654237
uuuauucuaaucauuccca

SEQ ID NO: 1654239 - RNA, 19 nt, Artificial Sequence
  Description of Artificial Sequence: Synthetic oligonucleotide
  Sense strand starting at position 3249 of SEQ ID NO: 1561203
cggacuuagaaugguauca

SEQ ID NO: 1654240 - RNA, 19 nt, Artificial Sequence
  Description of Artificial Sequence: Synthetic oligonucleotide
  Antisense strand to SEQ ID NO: 1654239
ugauaccauucuaaguccg

SEQ ID NO: 1654241 - RNA, 19 nt, Artificial Sequence
  Description of Artificial Sequence: Synthetic oligonucleotide
  Sense strand starting at position 3284 of SEQ ID NO: 1561203
caaccugacuuuggaaguu

SEQ ID NO: 1654242 - RNA, 19 nt, Artificial Sequence
  Description of Artificial Sequence: Synthetic oligonucleotide
  Antisense strand to SEQ ID NO: 1654241
aacuuccaaagucagguug

SEQ ID NO: 1654243 - RNA, 19 nt, Artificial Sequence
  Description of Artificial Sequence: Synthetic oligonucleotide
  Sense strand starting at position 3290 of SEQ ID NO: 1561203
gacuuuggaaguuggagau

SEQ ID NO: 1654244 - RNA, 19 nt, Artificial Sequence
  Description of Artificial Sequence: Synthetic oligonucleotide
  Antisense strand to SEQ ID NO: 1654243
aucuccaacuuccaaaguc

SEQ ID NO: 1654245 - RNA, 19 nt, Artificial Sequence
  Description of Artificial Sequence: Synthetic oligonucleotide
  Sense strand starting at position 3344 of SEQ ID NO: 1561203
uggagucugacucacaguu

SEQ ID NO: 1654246 - RNA, 19 nt, Artificial Sequence
  Description of Artificial Sequence: Synthetic oligonucleotide
  Antisense strand to SEQ ID NO: 1654245
aacugugagucagacucca

SEQ ID NO: 1654247 - RNA, 19 nt, Artificial Sequence
  Description of Artificial Sequence: Synthetic oligonucleotide
  Sense strand starting at position 3560 of SEQ ID NO: 1561203
caguguugcccagagcuga

SEQ ID NO: 1654248 - RNA, 19 nt, Artificial Sequence
  Description of Artificial Sequence: Synthetic oligonucleotide
  Antisense strand to SEQ ID NO: 1654247
ucagcucugggcaacacug

SEQ ID NO: 1654249 - RNA, 19 nt, Artificial Sequence
  Description of Artificial Sequence: Synthetic oligonucleotide
  Sense strand starting at position 3573 of SEQ ID NO: 1561203
agcugauuccugggacuug

SEQ ID NO: 1654250 - RNA, 19 nt, Artificial Sequence
  Description of Artificial Sequence: Synthetic oligonucleotide
  Antisense strand to SEQ ID NO: 1654249
caagucccaggaaucagcu

SEQ ID NO: 1654251 - RNA, 19 nt, Artificial Sequence
  Description of Artificial Sequence: Synthetic oligonucleotide
  Sense strand starting at position 3578 of SEQ ID NO: 1561203
auuccugggacuugcagaa

SEQ ID NO: 1654252 - RNA, 19 nt, Artificial Sequence
  Description of Artificial Sequence: Synthetic oligonucleotide
  Antisense strand to SEQ ID NO: 1654251
uucugcaagucccaggaau

SEQ ID NO: 1654253 - RNA, 19 nt, Artificial Sequence
  Description of Artificial Sequence: Synthetic oligonucleotide
  Sense strand starting at position 209 of SEQ ID NO: 1561204
gccggauuccugggucuga

SEQ ID NO: 1654254 - RNA, 19 nt, Artificial Sequence
  Description of Artificial Sequence: Synthetic oligonucleotide
  Antisense strand to SEQ ID NO: 1654253
ucagacccaggaauccggc

SEQ ID NO: 1654255 - RNA, 19 nt, Artificial Sequence
  Description of Artificial Sequence: Synthetic oligonucleotide
  Sense strand starting at position 618 of SEQ ID NO: 1561204
uguccuaaagcaugcauga

SEQ ID NO: 1654256 - RNA, 19 nt, Artificial Sequence
  Description of Artificial Sequence: Synthetic oligonucleotide
  Antisense strand to SEQ ID NO: 1654255
ucaugcaugcuuuaggaca

SEQ ID NO: 1654257 - RNA, 19 nt, Artificial Sequence
  Description of Artificial Sequence: Synthetic oligonucleotide
  Sense strand starting at position 732 of SEQ ID NO: 1561204
augggaaccugauccaguu

SEQ ID NO: 1654258 - RNA, 19 nt, Artificial Sequence
  Description of Artificial Sequence: Synthetic oligonucleotide
  Antisense strand to SEQ ID NO: 1654257
aacuggaucagguucccau

SEQ ID NO: 1654259 - RNA, 19 nt, Artificial Sequence
  Description of Artificial Sequence: Synthetic oligonucleotide
  Sense strand starting at position 738 of SEQ ID NO: 1561204
accugauccaguugggauu

SEQ ID NO: 1654260 - RNA, 19 nt, Artificial Sequence
  Description of Artificial Sequence: Synthetic oligonucleotide
  Antisense strand to SEQ ID NO: 1654259
aaucccaacuggaucaggu

SEQ ID NO: 1654261 - RNA, 19 nt, Artificial Sequence
  Description of Artificial Sequence: Synthetic oligonucleotide
  Sense strand starting at position 761 of SEQ ID NO: 1561204
agaggcauuugagaaggga

SEQ ID NO: 1654262 - RNA, 19 nt, Artificial Sequence
  Description of Artificial Sequence: Synthetic oligonucleotide
  Antisense strand to SEQ ID NO: 1654261
ucccuucucaaaugccucu

SEQ ID NO: 1654263 - RNA, 19 nt, Artificial Sequence
  Description of Artificial Sequence: Synthetic oligonucleotide
  Sense strand starting at position 829 of SEQ ID NO: 1561204
ggaugucauagauggugaa

SEQ ID NO: 1654264 - RNA, 19 nt, Artificial Sequence
  Description of Artificial Sequence: Synthetic oligonucleotide
  Antisense strand to SEQ ID NO: 1654263
uucaccaucuaugacaucc

SEQ ID NO: 1654265 - RNA, 19 nt, Artificial Sequence
  Description of Artificial Sequence: Synthetic oligonucleotide
  Sense strand starting at position 830 of SEQ ID NO: 1561204
gaugucauagauggugaaa

SEQ ID NO: 1654266 - RNA, 19 nt, Artificial Sequence
  Description of Artificial Sequence: Synthetic oligonucleotide
  Antisense strand to SEQ ID NO: 1654265
uuucaccaucuaugacauc

SEQ ID NO: 1654267 - RNA, 19 nt, Artificial Sequence
  Description of Artificial Sequence: Synthetic oligonucleotide
  Sense strand starting at position 841 of SEQ ID NO: 1561204
uggugaaaccgaggacauu

SEQ ID NO: 1654268 - RNA, 19 nt, Artificial Sequence
  Description of Artificial Sequence: Synthetic oligonucleotide
  Antisense strand to SEQ ID NO: 1654267
aauguccucgguuucacca

SEQ ID NO: 1654269 - RNA, 19 nt, Artificial Sequence
  Description of Artificial Sequence: Synthetic oligonucleotide
  Sense strand starting at position 895 of SEQ ID NO: 1561204
gagaauuagucacccgcau

SEQ ID NO: 1654270 - RNA, 19 nt, Artificial Sequence
  Description of Artificial Sequence: Synthetic oligonucleotide
  Antisense strand to SEQ ID NO: 1654269
augcgggugacuaauucuc

SEQ ID NO: 1654271 - RNA, 19 nt, Artificial Sequence
  Description of Artificial Sequence: Synthetic oligonucleotide
  Sense strand starting at position 1058 of SEQ ID NO: 1561204
cucaaagucuuugagacac

SEQ ID NO: 1654272 - RNA, 19 nt, Artificial Sequence
  Description of Artificial Sequence: Synthetic oligonucleotide
  Antisense strand to SEQ ID NO: 1654271
gugucucaaagacuuugag

SEQ ID NO: 1654273 - RNA, 19 nt, Artificial Sequence
  Description of Artificial Sequence: Synthetic oligonucleotide
  Sense strand starting at position 1133 of SEQ ID NO: 1561204
gauuuaugaugcccguguu

SEQ ID NO: 1654274 - RNA, 19 nt, Artificial Sequence
  Description of Artificial Sequence: Synthetic oligonucleotide
  Antisense strand to SEQ ID NO: 1654273
aacacgggcaucauaaauc

SEQ ID NO: 1654275 - RNA, 19 nt, Artificial Sequence
  Description of Artificial Sequence: Synthetic oligonucleotide
  Sense strand starting at position 1134 of SEQ ID NO: 1561204
auuuaugaugcccguguuu

SEQ ID NO: 1654276 - RNA, 19 nt, Artificial Sequence
  Description of Artificial Sequence: Synthetic oligonucleotide
  Antisense strand to SEQ ID NO: 1654275
aaacacgggcaucauaaau

SEQ ID NO: 1654277 - RNA, 19 nt, Artificial Sequence
  Description of Artificial Sequence: Synthetic oligonucleotide
  Sense strand starting at position 1136 of SEQ ID NO: 1561204
uuaugaugcccguguuucu

SEQ ID NO: 1654278 - RNA, 19 nt, Artificial Sequence
  Description of Artificial Sequence: Synthetic oligonucleotide
  Antisense strand to SEQ ID NO: 1654277
agaaacacgggcaucauaa

SEQ ID NO: 1654279 - RNA, 19 nt, Artificial Sequence
  Description of Artificial Sequence: Synthetic oligonucleotide
  Sense strand starting at position 1195 of SEQ ID NO: 1561204
aguucuugauaguccagau

SEQ ID NO: 1654280 - RNA, 19 nt, Artificial Sequence
  Description of Artificial Sequence: Synthetic oligonucleotide
  Antisense strand to SEQ ID NO: 1654279
aucuggacuaucaagaacu

SEQ ID NO: 1654281 - RNA, 19 nt, Artificial Sequence
  Description of Artificial Sequence: Synthetic oligonucleotide
  Sense strand starting at position 1209 of SEQ ID NO: 1561204
cagauaugggccgggacau

SEQ ID NO: 1654282 - RNA, 19 nt, Artificial Sequence
  Description of Artificial Sequence: Synthetic oligonucleotide
  Antisense strand to SEQ ID NO: 1654281
augucccggcccauaucug

SEQ ID NO: 1654283 - RNA, 19 nt, Artificial Sequence
  Description of Artificial Sequence: Synthetic oligonucleotide
  Sense strand starting at position 1466 of SEQ ID NO: 1561204
uccugacacccagauuguu

SEQ ID NO: 1654284 - RNA, 19 nt, Artificial Sequence
  Description of Artificial Sequence: Synthetic oligonucleotide
  Antisense strand to SEQ ID NO: 1654283
aacaaucugggugucagga

SEQ ID NO: 1654285 - RNA, 19 nt, Artificial Sequence
  Description of Artificial Sequence: Synthetic oligonucleotide
  Sense strand starting at position 1497 of SEQ ID NO: 1561204
ccagauaucccugacugcu

SEQ ID NO: 1654286 - RNA, 19 nt, Artificial Sequence
  Description of Artificial Sequence: Synthetic oligonucleotide
  Antisense strand to SEQ ID NO: 1654285
agcagucagggauaucugg

SEQ ID NO: 1654287 - RNA, 19 nt, Artificial Sequence
  Description of Artificial Sequence: Synthetic oligonucleotide
  Sense strand starting at position 1542 of SEQ ID NO: 1561204
ccaagauccuaggagguuu

SEQ ID NO: 1654288 - RNA, 19 nt, Artificial Sequence
  Description of Artificial Sequence: Synthetic oligonucleotide
  Antisense strand to SEQ ID NO: 1654287
aaaccuccuaggaucuugg

SEQ ID NO: 1654289 - RNA, 19 nt, Artificial Sequence
  Description of Artificial Sequence: Synthetic oligonucleotide
  Sense strand starting at position 1591 of SEQ ID NO: 1561204
cggguuaggauuuguguaa

SEQ ID NO: 1654290 - RNA, 19 nt, Artificial Sequence
  Description of Artificial Sequence: Synthetic oligonucleotide
  Antisense strand to SEQ ID NO: 1654289
uuacacaaauccuaacccg

SEQ ID NO: 1654291 - RNA, 19 nt, Artificial Sequence
  Description of Artificial Sequence: Synthetic oligonucleotide
  Sense strand starting at position 1818 of SEQ ID NO: 1561204
cugagaugcugugaaucuu

SEQ ID NO: 1654292 - RNA, 19 nt, Artificial Sequence
  Description of Artificial Sequence: Synthetic oligonucleotide
  Antisense strand to SEQ ID NO: 1654291
aagauucacagcaucucag

SEQ ID NO: 1654293 - RNA, 19 nt, Artificial Sequence
  Description of Artificial Sequence: Synthetic oligonucleotide
  Sense strand starting at position 1873 of SEQ ID NO: 1561204
gaguuuauagcuggaggcu

SEQ ID NO: 1654294 - RNA, 19 nt, Artificial Sequence
  Description of Artificial Sequence: Synthetic oligonucleotide
  Antisense strand to SEQ ID NO: 1654293
agccuccagcuauaaacuc

SEQ ID NO: 1654295 - RNA, 19 nt, Artificial Sequence
  Description of Artificial Sequence: Synthetic oligonucleotide
  Sense strand starting at position 1919 of SEQ ID NO: 1561204
gggagagaauuccuuugcu

SEQ ID NO: 1654296 - RNA, 19 nt, Artificial Sequence
  Description of Artificial Sequence: Synthetic oligonucleotide
  Antisense strand to SEQ ID NO: 1654295
agcaaaggaauucucuccc

SEQ ID NO: 1654297 - RNA, 19 nt, Artificial Sequence
  Description of Artificial Sequence: Synthetic oligonucleotide
  Sense strand starting at position 1922 of SEQ ID NO: 1561204
agagaauuccuuugcucaa

SEQ ID NO: 1654298 - RNA, 19 nt, Artificial Sequence
  Description of Artificial Sequence: Synthetic oligonucleotide
  Antisense strand to SEQ ID NO: 1654297
uugagcaaaggaauucucu

SEQ ID NO: 1654299 - RNA, 19 nt, Artificial Sequence
  Description of Artificial Sequence: Synthetic oligonucleotide
  Sense strand starting at position 2195 of SEQ ID NO: 1561204
uaaggaauguuuccuguuu

SEQ ID NO: 1654300 - RNA, 19 nt, Artificial Sequence
  Description of Artificial Sequence: Synthetic oligonucleotide
  Antisense strand to SEQ ID NO: 1654299
aaacaggaaacauuccuua

SEQ ID NO: 1654301 - RNA, 19 nt, Artificial Sequence
  Description of Artificial Sequence: Synthetic oligonucleotide
  Sense strand starting at position 2390 of SEQ ID NO: 1561204
ggauuccauccuggugaca

SEQ ID NO: 1654302 - RNA, 19 nt, Artificial Sequence
  Description of Artificial Sequence: Synthetic oligonucleotide
  Antisense strand to SEQ ID NO: 1654301
ugucaccaggauggaaucc

SEQ ID NO: 1654303 - RNA, 19 nt, Artificial Sequence
  Description of Artificial Sequence: Synthetic oligonucleotide
  Sense strand starting at position 2392 of SEQ ID NO: 1561204
auuccauccuggugacaac

SEQ ID NO: 1654304 - RNA, 19 nt, Artificial Sequence
  Description of Artificial Sequence: Synthetic oligonucleotide
  Antisense strand to SEQ ID NO: 1654303
guugucaccaggauggaau

SEQ ID NO: 1654305 - RNA, 19 nt, Artificial Sequence
  Description of Artificial Sequence: Synthetic oligonucleotide
  Sense strand starting at position 2499 of SEQ ID NO: 1561204
ccaucuaacgcugaucuuu

SEQ ID NO: 1654306 - RNA, 19 nt, Artificial Sequence
  Description of Artificial Sequence: Synthetic oligonucleotide
  Antisense strand to SEQ ID NO: 1654305
aaagaucagcguuagaugg

SEQ ID NO: 1654307 - RNA, 19 nt, Artificial Sequence
  Description of Artificial Sequence: Synthetic oligonucleotide
  Sense strand starting at position 2546 of SEQ ID NO: 1561204
aagccaugaccuugaguuc

SEQ ID NO: 1654308 - RNA, 19 nt, Artificial Sequence
  Description of Artificial Sequence: Synthetic oligonucleotide
  Antisense strand to SEQ ID NO: 1654307
gaacucaaggucauggcuu

SEQ ID NO: 1654309 - RNA, 19 nt, Artificial Sequence
  Description of Artificial Sequence: Synthetic oligonucleotide
  Sense strand starting at position 2700 of SEQ ID NO: 1561204
ugcaucugucgcuuucuga

SEQ ID NO: 1654310 - RNA, 19 nt, Artificial Sequence
  Description of Artificial Sequence: Synthetic oligonucleotide
  Antisense strand to SEQ ID NO: 1654309
ucagaaagcgacagaugca

SEQ ID NO: 1654311 - RNA, 19 nt, Artificial Sequence
  Description of Artificial Sequence: Synthetic oligonucleotide
  Sense strand starting at position 2727 of SEQ ID NO: 1561204
guguguuucucggcaugug

SEQ ID NO: 1654312 - RNA, 19 nt, Artificial Sequence
  Description of Artificial Sequence: Synthetic oligonucleotide
  Antisense strand to SEQ ID NO: 1654311
cacaugccgagaaacacac

SEQ ID NO: 1654313 - RNA, 19 nt, Artificial Sequence
  Description of Artificial Sequence: Synthetic oligonucleotide
  Sense strand starting at position 2728 of SEQ ID NO: 1561204
uguguuucucggcaugugu

SEQ ID NO: 1654314 - RNA, 19 nt, Artificial Sequence
  Description of Artificial Sequence: Synthetic oligonucleotide
  Antisense strand to SEQ ID NO: 1654313
acacaugccgagaaacaca

SEQ ID NO: 1654315 - RNA, 19 nt, Artificial Sequence
  Description of Artificial Sequence: Synthetic oligonucleotide
  Sense strand starting at position 2838 of SEQ ID NO: 1561204
gugcauuucuguccaccua

SEQ ID NO: 1654316 - RNA, 19 nt, Artificial Sequence
  Description of Artificial Sequence: Synthetic oligonucleotide
  Antisense strand to SEQ ID NO: 1654315
uagguggacagaaaugcac

SEQ ID NO: 1654317 - RNA, 19 nt, Artificial Sequence
  Description of Artificial Sequence: Synthetic oligonucleotide
  Sense strand starting at position 2896 of SEQ ID NO: 1561204
gucuguguucacgucucua

SEQ ID NO: 1654318 - RNA, 19 nt, Artificial Sequence
  Description of Artificial Sequence: Synthetic oligonucleotide
  Antisense strand to SEQ ID NO: 1654317
uagagacgugaacacagac

SEQ ID NO: 1654319 - RNA, 19 nt, Artificial Sequence
  Description of Artificial Sequence: Synthetic oligonucleotide
  Sense strand starting at position 2904 of SEQ ID NO: 1561204
ucacgucucuaucuuucua

SEQ ID NO: 1654320 - RNA, 19 nt, Artificial Sequence
  Description of Artificial Sequence: Synthetic oligonucleotide
  Antisense strand to SEQ ID NO: 1654319
uagaaagauagagacguga

SEQ ID NO: 1654321 - RNA, 19 nt, Artificial Sequence
  Description of Artificial Sequence: Synthetic oligonucleotide
  Sense strand starting at position 3005 of SEQ ID NO: 1561204
ugcaccuugcugugaguau

SEQ ID NO: 1654322 - RNA, 19 nt, Artificial Sequence
  Description of Artificial Sequence: Synthetic oligonucleotide
  Antisense strand to SEQ ID NO: 1654321
auacucacagcaaggugca

SEQ ID NO: 1654323 - RNA, 19 nt, Artificial Sequence
  Description of Artificial Sequence: Synthetic oligonucleotide
  Sense strand starting at position 3017 of SEQ ID NO: 1561204
ugaguauaucucugucucu

SEQ ID NO: 1654324 - RNA, 19 nt, Artificial Sequence
  Description of Artificial Sequence: Synthetic oligonucleotide
  Antisense strand to SEQ ID NO: 1654323
agagacagagauauacuca

SEQ ID NO: 1654325 - RNA, 19 nt, Artificial Sequence
  Description of Artificial Sequence: Synthetic oligonucleotide
  Sense strand starting at position 3063 of SEQ ID NO: 1561204
uaugcaucuugugguauuu

SEQ ID NO: 1654326 - RNA, 19 nt, Artificial Sequence
  Description of Artificial Sequence: Synthetic oligonucleotide
  Antisense strand to SEQ ID NO: 1654325
aaauaccacaagaugcaua

SEQ ID NO: 1654327 - RNA, 19 nt, Artificial Sequence
  Description of Artificial Sequence: Synthetic oligonucleotide
  Sense strand starting at position 3278 of SEQ ID NO: 1561204
aacuguuuguggcaauaag

SEQ ID NO: 1654328 - RNA, 19 nt, Artificial Sequence
  Description of Artificial Sequence: Synthetic oligonucleotide
  Antisense strand to SEQ ID NO: 1654327
cuuauugccacaaacaguu

SEQ ID NO: 1654329 - RNA, 19 nt, Artificial Sequence
  Description of Artificial Sequence: Synthetic oligonucleotide
  Sense strand starting at position 3628 of SEQ ID NO: 1561204
cccugcuucguguuucgau

SEQ ID NO: 1654330 - RNA, 19 nt, Artificial Sequence
  Description of Artificial Sequence: Synthetic oligonucleotide
  Antisense strand to SEQ ID NO: 1654329
aucgaaacacgaagcaggg

SEQ ID NO: 1654331 - RNA, 19 nt, Artificial Sequence
  Description of Artificial Sequence: Synthetic oligonucleotide
  Sense strand starting at position 3629 of SEQ ID NO: 1561204
ccugcuucguguuucgaua

SEQ ID NO: 1654332 - RNA, 19 nt, Artificial Sequence
  Description of Artificial Sequence: Synthetic oligonucleotide
  Antisense strand to SEQ ID NO: 1654331
uaucgaaacacgaagcagg

SEQ ID NO: 1654333 - RNA, 19 nt, Artificial Sequence
  Description of Artificial Sequence: Synthetic oligonucleotide
  Sense strand starting at position 952 of SEQ ID NO: 1561205
auugaaaugugccucccuu

SEQ ID NO: 1654334 - RNA, 19 nt, Artificial Sequence
  Description of Artificial Sequence: Synthetic oligonucleotide
  Antisense strand to SEQ ID NO: 1654333
aagggaggcacauuucaau

SEQ ID NO: 1654335 - RNA, 19 nt, Artificial Sequence
  Description of Artificial Sequence: Synthetic oligonucleotide
  Sense strand starting at position 991 of SEQ ID NO: 1561205
ggaggaguacgcugugugu

SEQ ID NO: 1654336 - RNA, 19 nt, Artificial Sequence
  Description of Artificial Sequence: Synthetic oligonucleotide
  Antisense strand to SEQ ID NO: 1654335
acacacagcguacuccucc

SEQ ID NO: 1654337 - RNA, 19 nt, Artificial Sequence
  Description of Artificial Sequence: Synthetic oligonucleotide
  Sense strand starting at position 1022 of SEQ ID NO: 1561205
agcugagcgugcucuuuau

SEQ ID NO: 1654338 - RNA, 19 nt, Artificial Sequence
  Description of Artificial Sequence: Synthetic oligonucleotide
  Antisense strand to SEQ ID NO: 1654337
auaaagagcacgcucagcu

SEQ ID NO: 1654339 - RNA, 19 nt, Artificial Sequence
  Description of Artificial Sequence: Synthetic oligonucleotide
  Sense strand starting at position 1071 of SEQ ID NO: 1561205
aaaguaagugccugagaca

SEQ ID NO: 1654340 - RNA, 19 nt, Artificial Sequence
  Description of Artificial Sequence: Synthetic oligonucleotide
  Antisense strand to SEQ ID NO: 1654339
ugucucaggcacuuacuuu

SEQ ID NO: 1654341 - RNA, 19 nt, Artificial Sequence
  Description of Artificial Sequence: Synthetic oligonucleotide
  Sense strand starting at position 1072 of SEQ ID NO: 1561205
aaguaagugccugagacaa

SEQ ID NO: 1654342 - RNA, 19 nt, Artificial Sequence
  Description of Artificial Sequence: Synthetic oligonucleotide
  Antisense strand to SEQ ID NO: 1654341
uugucucaggcacuuacuu

SEQ ID NO: 1654343 - RNA, 19 nt, Artificial Sequence
  Description of Artificial Sequence: Synthetic oligonucleotide
  Sense strand starting at position 1133 of SEQ ID NO: 1561205
uccaguacuguuugauagu

SEQ ID NO: 1654344 - RNA, 19 nt, Artificial Sequence
  Description of Artificial Sequence: Synthetic oligonucleotide
  Antisense strand to SEQ ID NO: 1654343
acuaucaaacaguacugga

SEQ ID NO: 1654345 - RNA, 19 nt, Artificial Sequence
  Description of Artificial Sequence: Synthetic oligonucleotide
  Sense strand starting at position 1257 of SEQ ID NO: 1561205
aguugaaugagguggaaca

SEQ ID NO: 1654346 - RNA, 19 nt, Artificial Sequence
  Description of Artificial Sequence: Synthetic oligonucleotide
  Antisense strand to SEQ ID NO: 1654345
uguuccaccucauucaacu

SEQ ID NO: 1654347 - RNA, 19 nt, Artificial Sequence
  Description of Artificial Sequence: Synthetic oligonucleotide
  Sense strand starting at position 1294 of SEQ ID NO: 1561205
agggcagggucaugaagaa

SEQ ID NO: 1654348 - RNA, 19 nt, Artificial Sequence
  Description of Artificial Sequence: Synthetic oligonucleotide
  Antisense strand to SEQ ID NO: 1654347
uucuucaugacccugcccu

SEQ ID NO: 1654349 - RNA, 19 nt, Artificial Sequence
  Description of Artificial Sequence: Synthetic oligonucleotide
  Sense strand starting at position 1505 of SEQ ID NO: 1561205
agagcaguucgcgcgauua

SEQ ID NO: 1654350 - RNA, 19 nt, Artificial Sequence
  Description of Artificial Sequence: Synthetic oligonucleotide
  Antisense strand to SEQ ID NO: 1654349
uaaucgcgcgaacugcucu

SEQ ID NO: 1654351 - RNA, 19 nt, Artificial Sequence
  Description of Artificial Sequence: Synthetic oligonucleotide
  Sense strand starting at position 1507 of SEQ ID NO: 1561205
agcaguucgcgcgauuaga

SEQ ID NO: 1654352 - RNA, 19 nt, Artificial Sequence
  Description of Artificial Sequence: Synthetic oligonucleotide
  Antisense strand to SEQ ID NO: 1654351
ucuaaucgcgcgaacugcu

SEQ ID NO: 1654353 - RNA, 19 nt, Artificial Sequence
  Description of Artificial Sequence: Synthetic oligonucleotide
  Sense strand starting at position 1509 of SEQ ID NO: 1561205
caguucgcgcgauuagaga

SEQ ID NO: 1654354 - RNA, 19 nt, Artificial Sequence
  Description of Artificial Sequence: Synthetic oligonucleotide
  Antisense strand to SEQ ID NO: 1654353
ucucuaaucgcgcgaacug

SEQ ID NO: 1654355 - RNA, 19 nt, Artificial Sequence
  Description of Artificial Sequence: Synthetic oligonucleotide
  Sense strand starting at position 1517 of SEQ ID NO: 1561205
gcgauuagagaucauccaa

SEQ ID NO: 1654356 - RNA, 19 nt, Artificial Sequence
  Description of Artificial Sequence: Synthetic oligonucleotide
  Antisense strand to SEQ ID NO: 1654355
uuggaugaucucuaaucgc

SEQ ID NO: 1654357 - RNA, 19 nt, Artificial Sequence
  Description of Artificial Sequence: Synthetic oligonucleotide
  Sense strand starting at position 1554 of SEQ ID NO: 1561205
agcucugaauuguuccuua

SEQ ID NO: 1654358 - RNA, 19 nt, Artificial Sequence
  Description of Artificial Sequence: Synthetic oligonucleotide
  Antisense strand to SEQ ID NO: 1654357
uaaggaacaauucagagcu

SEQ ID NO: 1654359 - RNA, 19 nt, Artificial Sequence
  Description of Artificial Sequence: Synthetic oligonucleotide
  Sense strand starting at position 1636 of SEQ ID NO: 1561205
gccgauauuuaaugaauuc

SEQ ID NO: 1654360 - RNA, 19 nt, Artificial Sequence
  Description of Artificial Sequence: Synthetic oligonucleotide
  Antisense strand to SEQ ID NO: 1654359
gaauucauuaaauaucggc

SEQ ID NO: 1654361 - RNA, 19 nt, Artificial Sequence
  Description of Artificial Sequence: Synthetic oligonucleotide
  Sense strand starting at position 1711 of SEQ ID NO: 1561205
gagagaggcagaggucaau

SEQ ID NO: 1654362 - RNA, 19 nt, Artificial Sequence
  Description of Artificial Sequence: Synthetic oligonucleotide
  Antisense strand to SEQ ID NO: 1654361
auugaccucugccucucuc

SEQ ID NO: 1654363 - RNA, 19 nt, Artificial Sequence
  Description of Artificial Sequence: Synthetic oligonucleotide
  Sense strand starting at position 1860 of SEQ ID NO: 1561205
cuaacuccacucggagaau

SEQ ID NO: 1654364 - RNA, 19 nt, Artificial Sequence
  Description of Artificial Sequence: Synthetic oligonucleotide
  Antisense strand to SEQ ID NO: 1654363
auucuccgaguggaguuag

SEQ ID NO: 1654365 - RNA, 19 nt, Artificial Sequence
  Description of Artificial Sequence: Synthetic oligonucleotide
  Sense strand starting at position 1871 of SEQ ID NO: 1561205
cggagaaucgcggaagaca

SEQ ID NO: 1654366 - RNA, 19 nt, Artificial Sequence
  Description of Artificial Sequence: Synthetic oligonucleotide
  Antisense strand to SEQ ID NO: 1654365
ugucuuccgcgauucuccg

SEQ ID NO: 1654367 - RNA, 19 nt, Artificial Sequence
  Description of Artificial Sequence: Synthetic oligonucleotide
  Sense strand starting at position 1947 of SEQ ID NO: 1561205
cugagaaacacgugcagaa

SEQ ID NO: 1654368 - RNA, 19 nt, Artificial Sequence
  Description of Artificial Sequence: Synthetic oligonucleotide
  Antisense strand to SEQ ID NO: 1654367
uucugcacguguuucucag

SEQ ID NO: 1654369 - RNA, 19 nt, Artificial Sequence
  Description of Artificial Sequence: Synthetic oligonucleotide
  Sense strand starting at position 2010 of SEQ ID NO: 1561205
uccgauaagcccuggaacu

SEQ ID NO: 1654370 - RNA, 19 nt, Artificial Sequence
  Description of Artificial Sequence: Synthetic oligonucleotide
  Antisense strand to SEQ ID NO: 1654369
aguuccagggcuuaucgga

SEQ ID NO: 1654371 - RNA, 19 nt, Artificial Sequence
  Description of Artificial Sequence: Synthetic oligonucleotide
  Sense strand starting at position 2011 of SEQ ID NO: 1561205
ccgauaagcccuggaacua

SEQ ID NO: 1654372 - RNA, 19 nt, Artificial Sequence
  Description of Artificial Sequence: Synthetic oligonucleotide
  Antisense strand to SEQ ID NO: 1654371
uaguuccagggcuuaucgg

SEQ ID NO: 1654373 - RNA, 19 nt, Artificial Sequence
  Description of Artificial Sequence: Synthetic oligonucleotide
  Sense strand starting at position 2180 of SEQ ID NO: 1561205
gcgagugugaacgauaaga

SEQ ID NO: 1654374 - RNA, 19 nt, Artificial Sequence
  Description of Artificial Sequence: Synthetic oligonucleotide
  Antisense strand to SEQ ID NO: 1654373
ucuuaucguucacacucgc

SEQ ID NO: 1654375 - RNA, 19 nt, Artificial Sequence
  Description of Artificial Sequence: Synthetic oligonucleotide
  Sense strand starting at position 2196 of SEQ ID NO: 1561205
agagcuuucuggucaaauu

SEQ ID NO: 1654376 - RNA, 19 nt, Artificial Sequence
  Description of Artificial Sequence: Synthetic oligonucleotide
  Antisense strand to SEQ ID NO: 1654375
aauuugaccagaaagcucu

SEQ ID NO: 1654377 - RNA, 19 nt, Artificial Sequence
  Description of Artificial Sequence: Synthetic oligonucleotide
  Sense strand starting at position 2248 of SEQ ID NO: 1561205
gcgaguuugggaugcagga

SEQ ID NO: 1654378 - RNA, 19 nt, Artificial Sequence
  Description of Artificial Sequence: Synthetic oligonucleotide
  Antisense strand to SEQ ID NO: 1654377
uccugcaucccaaacucgc

SEQ ID NO: 1654379 - RNA, 19 nt, Artificial Sequence
  Description of Artificial Sequence: Synthetic oligonucleotide
  Sense strand starting at position 2265 of SEQ ID NO: 1561205
gagacaauuuguuaagguu

SEQ ID NO: 1654380 - RNA, 19 nt, Artificial Sequence
  Description of Artificial Sequence: Synthetic oligonucleotide
  Antisense strand to SEQ ID NO: 1654379
aaccuuaacaaauugucuc

SEQ ID NO: 1654381 - RNA, 19 nt, Artificial Sequence
  Description of Artificial Sequence: Synthetic oligonucleotide
  Sense strand starting at position 2356 of SEQ ID NO: 1561205
gcugcaugugugguccaca

SEQ ID NO: 1654382 - RNA, 19 nt, Artificial Sequence
  Description of Artificial Sequence: Synthetic oligonucleotide
  Antisense strand to SEQ ID NO: 1654381
uguggaccacacaugcagc

SEQ ID NO: 1654383 - RNA, 19 nt, Artificial Sequence
  Description of Artificial Sequence: Synthetic oligonucleotide
  Sense strand starting at position 2357 of SEQ ID NO: 1561205
cugcaugugugguccacau

SEQ ID NO: 1654384 - RNA, 19 nt, Artificial Sequence
  Description of Artificial Sequence: Synthetic oligonucleotide
  Antisense strand to SEQ ID NO: 1654383
auguggaccacacaugcag

SEQ ID NO: 1654385 - RNA, 19 nt, Artificial Sequence
  Description of Artificial Sequence: Synthetic oligonucleotide
  Sense strand starting at position 2359 of SEQ ID NO: 1561205
gcaugugugguccacauug

SEQ ID NO: 1654386 - RNA, 19 nt, Artificial Sequence
  Description of Artificial Sequence: Synthetic oligonucleotide
  Antisense strand to SEQ ID NO: 1654385
caauguggaccacacaugc

SEQ ID NO: 1654387 - RNA, 19 nt, Artificial Sequence
  Description of Artificial Sequence: Synthetic oligonucleotide
  Sense strand starting at position 2361 of SEQ ID NO: 1561205
augugugguccacauuguu

SEQ ID NO: 1654388 - RNA, 19 nt, Artificial Sequence
  Description of Artificial Sequence: Synthetic oligonucleotide
  Antisense strand to SEQ ID NO: 1654387
aacaauguggaccacacau

SEQ ID NO: 1654389 - RNA, 19 nt, Artificial Sequence
  Description of Artificial Sequence: Synthetic oligonucleotide
  Sense strand starting at position 2381 of SEQ ID NO: 1561205
gcccuuguguggucacgga

SEQ ID NO: 1654390 - RNA, 19 nt, Artificial Sequence
  Description of Artificial Sequence: Synthetic oligonucleotide
  Antisense strand to SEQ ID NO: 1654389
uccgugaccacacaagggc

SEQ ID NO: 1654391 - RNA, 19 nt, Artificial Sequence
  Description of Artificial Sequence: Synthetic oligonucleotide
  Sense strand starting at position 2385 of SEQ ID NO: 1561205
uuguguggucacggaauuu

SEQ ID NO: 1654392 - RNA, 19 nt, Artificial Sequence
  Description of Artificial Sequence: Synthetic oligonucleotide
  Antisense strand to SEQ ID NO: 1654391
aaauuccgugaccacacaa

SEQ ID NO: 1654393 - RNA, 19 nt, Artificial Sequence
  Description of Artificial Sequence: Synthetic oligonucleotide
  Sense strand starting at position 2411 of SEQ ID NO: 1561205
cucuccagcuggugaauuu

SEQ ID NO: 1654394 - RNA, 19 nt, Artificial Sequence
  Description of Artificial Sequence: Synthetic oligonucleotide
  Antisense strand to SEQ ID NO: 1654393
aaauucaccagcuggagag

SEQ ID NO: 1654395 - RNA, 19 nt, Artificial Sequence
  Description of Artificial Sequence: Synthetic oligonucleotide
  Sense strand starting at position 2418 of SEQ ID NO: 1561205
gcuggugaauuugaguguu

SEQ ID NO: 1654396 - RNA, 19 nt, Artificial Sequence
  Description of Artificial Sequence: Synthetic oligonucleotide
  Antisense strand to SEQ ID NO: 1654395
aacacucaaauucaccagc

SEQ ID NO: 1654397 - RNA, 19 nt, Artificial Sequence
  Description of Artificial Sequence: Synthetic oligonucleotide
  Sense strand starting at position 2424 of SEQ ID NO: 1561205
gaauuugaguguugaauca

SEQ ID NO: 1654398 - RNA, 19 nt, Artificial Sequence
  Description of Artificial Sequence: Synthetic oligonucleotide
  Antisense strand to SEQ ID NO: 1654397
ugauucaacacucaaauuc

SEQ ID NO: 1654399 - RNA, 19 nt, Artificial Sequence
  Description of Artificial Sequence: Synthetic oligonucleotide
  Sense strand starting at position 2431 of SEQ ID NO: 1561205
aguguugaaucaggacaag

SEQ ID NO: 1654400 - RNA, 19 nt, Artificial Sequence
  Description of Artificial Sequence: Synthetic oligonucleotide
  Antisense strand to SEQ ID NO: 1654399
cuuguccugauucaacacu

SEQ ID NO: 1654401 - RNA, 19 nt, Artificial Sequence
  Description of Artificial Sequence: Synthetic oligonucleotide
  Sense strand starting at position 2523 of SEQ ID NO: 1561205
gagucucgcucuguuacaa

SEQ ID NO: 1654402 - RNA, 19 nt, Artificial Sequence
  Description of Artificial Sequence: Synthetic oligonucleotide
  Antisense strand to SEQ ID NO: 1654401
uuguaacagagcgagacuc

SEQ ID NO: 1654403 - RNA, 19 nt, Artificial Sequence
  Description of Artificial Sequence: Synthetic oligonucleotide
  Sense strand starting at position 2814 of SEQ ID NO: 1561205
gauggugucuugcucucau

SEQ ID NO: 1654404 - RNA, 19 nt, Artificial Sequence
  Description of Artificial Sequence: Synthetic oligonucleotide
  Antisense strand to SEQ ID NO: 1654403
augagagcaagacaccauc

SEQ ID NO: 1654405 - RNA, 19 nt, Artificial Sequence
  Description of Artificial Sequence: Synthetic oligonucleotide
  Sense strand starting at position 2817 of SEQ ID NO: 1561205
ggugucuugcucucauugu

SEQ ID NO: 1654406 - RNA, 19 nt, Artificial Sequence
  Description of Artificial Sequence: Synthetic oligonucleotide
  Antisense strand to SEQ ID NO: 1654405
acaaugagagcaagacacc

SEQ ID NO: 1654407 - RNA, 19 nt, Artificial Sequence
  Description of Artificial Sequence: Synthetic oligonucleotide
  Sense strand starting at position 2827 of SEQ ID NO: 1561205
ucucauugucccggcugaa

SEQ ID NO: 1654408 - RNA, 19 nt, Artificial Sequence
  Description of Artificial Sequence: Synthetic oligonucleotide
  Antisense strand to SEQ ID NO: 1654407
uucagccgggacaaugaga

SEQ ID NO: 1654409 - RNA, 19 nt, Artificial Sequence
  Description of Artificial Sequence: Synthetic oligonucleotide
  Sense strand starting at position 3774 of SEQ ID NO: 1561205
gugguuuccaaauguuauc

SEQ ID NO: 1654410 - RNA, 19 nt, Artificial Sequence
  Description of Artificial Sequence: Synthetic oligonucleotide
  Antisense strand to SEQ ID NO: 1654409
gauaacauuuggaaaccac

SEQ ID NO: 1654411 - RNA, 19 nt, Artificial Sequence
  Description of Artificial Sequence: Synthetic oligonucleotide
  Sense strand starting at position 3944 of SEQ ID NO: 1561205
gguggccugcgcuuauaau

SEQ ID NO: 1654412 - RNA, 19 nt, Artificial Sequence
  Description of Artificial Sequence: Synthetic oligonucleotide
  Antisense strand to SEQ ID NO: 1654411
auuauaagcgcaggccacc

SEQ ID NO: 1654413 - RNA, 19 nt, Artificial Sequence
  Description of Artificial Sequence: Synthetic oligonucleotide
  Sense strand starting at position 1 of SEQ ID NO: 1561206
gaugcuagcguucgaugaa

SEQ ID NO: 1654414 - RNA, 19 nt, Artificial Sequence
  Description of Artificial Sequence: Synthetic oligonucleotide
  Antisense strand to SEQ ID NO: 1654413
uucaucgaacgcuagcauc

SEQ ID NO: 1654415 - RNA, 19 nt, Artificial Sequence
  Description of Artificial Sequence: Synthetic oligonucleotide
  Sense strand starting at position 4 of SEQ ID NO: 1561206
gcuagcguucgaugaacau

SEQ ID NO: 1654416 - RNA, 19 nt, Artificial Sequence
  Description of Artificial Sequence: Synthetic oligonucleotide
  Antisense strand to SEQ ID NO: 1654415
auguucaucgaacgcuagc

SEQ ID NO: 1654417 - RNA, 19 nt, Artificial Sequence
  Description of Artificial Sequence: Synthetic oligonucleotide
  Sense strand starting at position 13 of SEQ ID NO: 1561206
cgaugaacauuaggaauuu

SEQ ID NO: 1654418 - RNA, 19 nt, Artificial Sequence
  Description of Artificial Sequence: Synthetic oligonucleotide
  Antisense strand to SEQ ID NO: 1654417
aaauuccuaauguucaucg

SEQ ID NO: 1654419 - RNA, 19 nt, Artificial Sequence
  Description of Artificial Sequence: Synthetic oligonucleotide
  Sense strand starting at position 265 of SEQ ID NO: 1561206
gacugugagucuuugagca

SEQ ID NO: 1654420 - RNA, 19 nt, Artificial Sequence
  Description of Artificial Sequence: Synthetic oligonucleotide
  Antisense strand to SEQ ID NO: 1654419
ugcucaaagacucacaguc

SEQ ID NO: 1654421 - RNA, 19 nt, Artificial Sequence
  Description of Artificial Sequence: Synthetic oligonucleotide
  Sense strand starting at position 891 of SEQ ID NO: 1561206
ccaagacgaucguccugau

SEQ ID NO: 1654422 - RNA, 19 nt, Artificial Sequence
  Description of Artificial Sequence: Synthetic oligonucleotide
  Antisense strand to SEQ ID NO: 1654421
aucaggacgaucgucuugg

SEQ ID NO: 1654423 - RNA, 19 nt, Artificial Sequence
  Description of Artificial Sequence: Synthetic oligonucleotide
  Sense strand starting at position 972 of SEQ ID NO: 1561206
cuagccaaauucuaaggau

SEQ ID NO: 1654424 - RNA, 19 nt, Artificial Sequence
  Description of Artificial Sequence: Synthetic oligonucleotide
  Antisense strand to SEQ ID NO: 1654423
auccuuagaauuuggcuag

SEQ ID NO: 1654425 - RNA, 19 nt, Artificial Sequence
  Description of Artificial Sequence: Synthetic oligonucleotide
  Sense strand starting at position 1267 of SEQ ID NO: 1561206
cccaguucggccuggguaa

SEQ ID NO: 1654426 - RNA, 19 nt, Artificial Sequence
  Description of Artificial Sequence: Synthetic oligonucleotide
  Antisense strand to SEQ ID NO: 1654425
uuacccaggccgaacuggg

SEQ ID NO: 1654427 - RNA, 19 nt, Artificial Sequence
  Description of Artificial Sequence: Synthetic oligonucleotide
  Sense strand starting at position 2300 of SEQ ID NO: 1561206
auugaaaugugccucccuu

SEQ ID NO: 1654428 - RNA, 19 nt, Artificial Sequence
  Description of Artificial Sequence: Synthetic oligonucleotide
  Antisense strand to SEQ ID NO: 1654427
aagggaggcacauuucaau

SEQ ID NO: 1654429 - RNA, 19 nt, Artificial Sequence
  Description of Artificial Sequence: Synthetic oligonucleotide
  Sense strand starting at position 2339 of SEQ ID NO: 1561206
ggaggaguacgcugugugu

SEQ ID NO: 1654430 - RNA, 19 nt, Artificial Sequence
  Description of Artificial Sequence: Synthetic oligonucleotide
  Antisense strand to SEQ ID NO: 1654429
acacacagcguacuccucc

SEQ ID NO: 1654431 - RNA, 19 nt, Artificial Sequence
  Description of Artificial Sequence: Synthetic oligonucleotide
  Sense strand starting at position 2419 of SEQ ID NO: 1561206
aaaguaagugccugagaca

SEQ ID NO: 1654432 - RNA, 19 nt, Artificial Sequence
  Description of Artificial Sequence: Synthetic oligonucleotide
  Antisense strand to SEQ ID NO: 1654431
ugucucaggcacuuacuuu

SEQ ID NO: 1654433 - RNA, 19 nt, Artificial Sequence
  Description of Artificial Sequence: Synthetic oligonucleotide
  Sense strand starting at position 2420 of SEQ ID NO: 1561206
aaguaagugccugagacaa

SEQ ID NO: 1654434 - RNA, 19 nt, Artificial Sequence
  Description of Artificial Sequence: Synthetic oligonucleotide
  Antisense strand to SEQ ID NO: 1654433
uugucucaggcacuuacuu

SEQ ID NO: 1654435 - RNA, 19 nt, Artificial Sequence
  Description of Artificial Sequence: Synthetic oligonucleotide
  Sense strand starting at position 2481 of SEQ ID NO: 1561206
uccaguacuguuugauagu

SEQ ID NO: 1654436 - RNA, 19 nt, Artificial Sequence
  Description of Artificial Sequence: Synthetic oligonucleotide
  Antisense strand to SEQ ID NO: 1654435
acuaucaaacaguacugga

SEQ ID NO: 1654437 - RNA, 19 nt, Artificial Sequence
  Description of Artificial Sequence: Synthetic oligonucleotide
  Sense strand starting at position 2605 of SEQ ID NO: 1561206
aguugaaugagguggaaca

SEQ ID NO: 1654438 - RNA, 19 nt, Artificial Sequence
  Description of Artificial Sequence: Synthetic oligonucleotide
  Antisense strand to SEQ ID NO: 1654437
uguuccaccucauucaacu

SEQ ID NO: 1654439 - RNA, 19 nt, Artificial Sequence
  Description of Artificial Sequence: Synthetic oligonucleotide
  Sense strand starting at position 2642 of SEQ ID NO: 1561206
agggcagggucaugaagaa

SEQ ID NO: 1654440 - RNA, 19 nt, Artificial Sequence
  Description of Artificial Sequence: Synthetic oligonucleotide
  Antisense strand to SEQ ID NO: 1654439
uucuucaugacccugcccu

SEQ ID NO: 1654441 - RNA, 19 nt, Artificial Sequence
  Description of Artificial Sequence: Synthetic oligonucleotide
  Sense strand starting at position 2853 of SEQ ID NO: 1561206
agagcaguucgcgcgauua

SEQ ID NO: 1654442 - RNA, 19 nt, Artificial Sequence
  Description of Artificial Sequence: Synthetic oligonucleotide
  Antisense strand to SEQ ID NO: 1654441
uaaucgcgcgaacugcucu

SEQ ID NO: 1654443 - RNA, 19 nt, Artificial Sequence
  Description of Artificial Sequence: Synthetic oligonucleotide
  Sense strand starting at position 2857 of SEQ ID NO: 1561206
caguucgcgcgauuagaga

SEQ ID NO: 1654444 - RNA, 19 nt, Artificial Sequence
  Description of Artificial Sequence: Synthetic oligonucleotide
  Antisense strand to SEQ ID NO: 1654443
ucucuaaucgcgcgaacug

SEQ ID NO: 1654445 - RNA, 19 nt, Artificial Sequence
  Description of Artificial Sequence: Synthetic oligonucleotide
  Sense strand starting at position 2865 of SEQ ID NO: 1561206
gcgauuagagaucauccaa

SEQ ID NO: 1654446 - RNA, 19 nt, Artificial Sequence
  Description of Artificial Sequence: Synthetic oligonucleotide
  Antisense strand to SEQ ID NO: 1654445
uuggaugaucucuaaucgc

SEQ ID NO: 1654447 - RNA, 19 nt, Artificial Sequence
  Description of Artificial Sequence: Synthetic oligonucleotide
  Sense strand starting at position 2902 of SEQ ID NO: 1561206
agcucugaauuguuccuua

SEQ ID NO: 1654448 - RNA, 19 nt, Artificial Sequence
  Description of Artificial Sequence: Synthetic oligonucleotide
  Antisense strand to SEQ ID NO: 1654447
uaaggaacaauucagagcu

SEQ ID NO: 1654449 - RNA, 19 nt, Artificial Sequence
  Description of Artificial Sequence: Synthetic oligonucleotide
  Sense strand starting at position 2984 of SEQ ID NO: 1561206
gccgauauuuaaugaauuc

SEQ ID NO: 1654450 - RNA, 19 nt, Artificial Sequence
  Description of Artificial Sequence: Synthetic oligonucleotide
  Antisense strand to SEQ ID NO: 1654449
gaauucauuaaauaucggc

SEQ ID NO: 1654451 - RNA, 19 nt, Artificial Sequence
  Description of Artificial Sequence: Synthetic oligonucleotide
  Sense strand starting at position 3059 of SEQ ID NO: 1561206
gagagaggcagaggucaau

SEQ ID NO: 1654452 - RNA, 19 nt, Artificial Sequence
  Description of Artificial Sequence: Synthetic oligonucleotide
  Antisense strand to SEQ ID NO: 1654451
auugaccucugccucucuc

SEQ ID NO: 1654453 - RNA, 19 nt, Artificial Sequence
  Description of Artificial Sequence: Synthetic oligonucleotide
  Sense strand starting at position 3208 of SEQ ID NO: 1561206
cuaacuccacucggagaau

SEQ ID NO: 1654454 - RNA, 19 nt, Artificial Sequence
  Description of Artificial Sequence: Synthetic oligonucleotide
  Antisense strand to SEQ ID NO: 1654453
auucuccgaguggaguuag

SEQ ID NO: 1654455 - RNA, 19 nt, Artificial Sequence
  Description of Artificial Sequence: Synthetic oligonucleotide
  Sense strand starting at position 3219 of SEQ ID NO: 1561206
cggagaaucgcggaagaca

SEQ ID NO: 1654456 - RNA, 19 nt, Artificial Sequence
  Description of Artificial Sequence: Synthetic oligonucleotide
  Antisense strand to SEQ ID NO: 1654455
ugucuuccgcgauucuccg

SEQ ID NO: 1654457 - RNA, 19 nt, Artificial Sequence
  Description of Artificial Sequence: Synthetic oligonucleotide
  Sense strand starting at position 3295 of SEQ ID NO: 1561206
cugagaaacacgugcagaa

SEQ ID NO: 1654458 - RNA, 19 nt, Artificial Sequence
  Description of Artificial Sequence: Synthetic oligonucleotide
  Antisense strand to SEQ ID NO: 1654457
uucugcacguguuucucag

SEQ ID NO: 1654459 - RNA, 19 nt, Artificial Sequence
  Description of Artificial Sequence: Synthetic oligonucleotide
  Sense strand starting at position 3358 of SEQ ID NO: 1561206
uccgauaagcccuggaacu

SEQ ID NO: 1654460 - RNA, 19 nt, Artificial Sequence
  Description of Artificial Sequence: Synthetic oligonucleotide
  Antisense strand to SEQ ID NO: 1654459
aguuccagggcuuaucgga

SEQ ID NO: 1654461 - RNA, 19 nt, Artificial Sequence
  Description of Artificial Sequence: Synthetic oligonucleotide
  Sense strand starting at position 3359 of SEQ ID NO: 1561206
ccgauaagcccuggaacua

SEQ ID NO: 1654462 - RNA, 19 nt, Artificial Sequence
  Description of Artificial Sequence: Synthetic oligonucleotide
  Antisense strand to SEQ ID NO: 1654461
uaguuccagggcuuaucgg

SEQ ID NO: 1654463 - RNA, 19 nt, Artificial Sequence
  Description of Artificial Sequence: Synthetic oligonucleotide
  Sense strand starting at position 3528 of SEQ ID NO: 1561206
gcgagugugaacgauaaga

SEQ ID NO: 1654464 - RNA, 19 nt, Artificial Sequence
  Description of Artificial Sequence: Synthetic oligonucleotide
  Antisense strand to SEQ ID NO: 1654463
ucuuaucguucacacucgc

SEQ ID NO: 1654465 - RNA, 19 nt, Artificial Sequence
  Description of Artificial Sequence: Synthetic oligonucleotide
  Sense strand starting at position 3544 of SEQ ID NO: 1561206
agagcuuucuggucaaauu

SEQ ID NO: 1654466 - RNA, 19 nt, Artificial Sequence
  Description of Artificial Sequence: Synthetic oligonucleotide
  Antisense strand to SEQ ID NO: 1654465
aauuugaccagaaagcucu

SEQ ID NO: 1654467 - RNA, 19 nt, Artificial Sequence
  Description of Artificial Sequence: Synthetic oligonucleotide
  Sense strand starting at position 3596 of SEQ ID NO: 1561206
gcgaguuugggaugcagga

SEQ ID NO: 1654468 - RNA, 19 nt, Artificial Sequence
  Description of Artificial Sequence: Synthetic oligonucleotide
  Antisense strand to SEQ ID NO: 1654467
uccugcaucccaaacucgc

SEQ ID NO: 1654469 - RNA, 19 nt, Artificial Sequence
  Description of Artificial Sequence: Synthetic oligonucleotide
  Sense strand starting at position 3613 of SEQ ID NO: 1561206
gagacaauuuguuaagguu

SEQ ID NO: 1654470 - RNA, 19 nt, Artificial Sequence
  Description of Artificial Sequence: Synthetic oligonucleotide
  Antisense strand to SEQ ID NO: 1654469
aaccuuaacaaauugucuc

SEQ ID NO: 1654471 - RNA, 19 nt, Artificial Sequence
  Description of Artificial Sequence: Synthetic oligonucleotide
  Sense strand starting at position 3704 of SEQ ID NO: 1561206
gcugcaugugugguccaca

SEQ ID NO: 1654472 - RNA, 19 nt, Artificial Sequence
  Description of Artificial Sequence: Synthetic oligonucleotide
  Antisense strand to SEQ ID NO: 1654471
uguggaccacacaugcagc

SEQ ID NO: 1654473 - RNA, 19 nt, Artificial Sequence
  Description of Artificial Sequence: Synthetic oligonucleotide
  Sense strand starting at position 3705 of SEQ ID NO: 1561206
cugcaugugugguccacau

SEQ ID NO: 1654474 - RNA, 19 nt, Artificial Sequence
  Description of Artificial Sequence: Synthetic oligonucleotide
  Antisense strand to SEQ ID NO: 1654473
auguggaccacacaugcag

SEQ ID NO: 1654475 - RNA, 19 nt, Artificial Sequence
  Description of Artificial Sequence: Synthetic oligonucleotide
  Sense strand starting at position 3707 of SEQ ID NO: 1561206
gcaugugugguccacauug

SEQ ID NO: 1654476 - RNA, 19 nt, Artificial Sequence
  Description of Artificial Sequence: Synthetic oligonucleotide
  Antisense strand to SEQ ID NO: 1654475
caauguggaccacacaugc

SEQ ID NO: 1654477 - RNA, 19 nt, Artificial Sequence
  Description of Artificial Sequence: Synthetic oligonucleotide
  Sense strand starting at position 3709 of SEQ ID NO: 1561206
augugugguccacauuguu

SEQ ID NO: 1654478 - RNA, 19 nt, Artificial Sequence
  Description of Artificial Sequence: Synthetic oligonucleotide
  Antisense strand to SEQ ID NO: 1654477
aacaauguggaccacacau

SEQ ID NO: 1654479 - RNA, 19 nt, Artificial Sequence
  Description of Artificial Sequence: Synthetic oligonucleotide
  Sense strand starting at position 3729 of SEQ ID NO: 1561206
gcccuuguguggucacgga

SEQ ID NO: 1654480 - RNA, 19 nt, Artificial Sequence
  Description of Artificial Sequence: Synthetic oligonucleotide
  Antisense strand to SEQ ID NO: 1654479
uccgugaccacacaagggc

SEQ ID NO: 1654481 - RNA, 19 nt, Artificial Sequence
  Description of Artificial Sequence: Synthetic oligonucleotide
  Sense strand starting at position 3733 of SEQ ID NO: 1561206
uuguguggucacggaauuu

SEQ ID NO: 1654482 - RNA, 19 nt, Artificial Sequence
  Description of Artificial Sequence: Synthetic oligonucleotide
  Antisense strand to SEQ ID NO: 1654481
aaauuccgugaccacacaa

SEQ ID NO: 1654483 - RNA, 19 nt, Artificial Sequence
  Description of Artificial Sequence: Synthetic oligonucleotide
  Sense strand starting at position 3759 of SEQ ID NO: 1561206
cucuccagcuggugaauuu

SEQ ID NO: 1654484 - RNA, 19 nt, Artificial Sequence
  Description of Artificial Sequence: Synthetic oligonucleotide
  Antisense strand to SEQ ID NO: 1654483
aaauucaccagcuggagag

SEQ ID NO: 1654485 - RNA, 19 nt, Artificial Sequence
  Description of Artificial Sequence: Synthetic oligonucleotide
  Sense strand starting at position 3766 of SEQ ID NO: 1561206
gcuggugaauuugaguguu

SEQ ID NO: 1654486 - RNA, 19 nt, Artificial Sequence
  Description of Artificial Sequence: Synthetic oligonucleotide
  Antisense strand to SEQ ID NO: 1654485
aacacucaaauucaccagc

SEQ ID NO: 1654487 - RNA, 19 nt, Artificial Sequence
  Description of Artificial Sequence: Synthetic oligonucleotide
  Sense strand starting at position 3772 of SEQ ID NO: 1561206
gaauuugaguguugaauca

SEQ ID NO: 1654488 - RNA, 19 nt, Artificial Sequence
  Description of Artificial Sequence: Synthetic oligonucleotide
  Antisense strand to SEQ ID NO: 1654487
ugauucaacacucaaauuc

SEQ ID NO: 1654489 - RNA, 19 nt, Artificial Sequence
  Description of Artificial Sequence: Synthetic oligonucleotide
  Sense strand starting at position 3779 of SEQ ID NO: 1561206
aguguugaaucaggacaag

SEQ ID NO: 1654490 - RNA, 19 nt, Artificial Sequence
  Description of Artificial Sequence: Synthetic oligonucleotide
  Antisense strand to SEQ ID NO: 1654489
cuuguccugauucaacacu

SEQ ID NO: 1654491 - RNA, 19 nt, Artificial Sequence
  Description of Artificial Sequence: Synthetic oligonucleotide
  Sense strand starting at position 3871 of SEQ ID NO: 1561206
gagucucgcucuguuacaa

SEQ ID NO: 1654492 - RNA, 19 nt, Artificial Sequence
  Description of Artificial Sequence: Synthetic oligonucleotide
  Antisense strand to SEQ ID NO: 1654491
uuguaacagagcgagacuc

SEQ ID NO: 1654493 - RNA, 19 nt, Artificial Sequence
  Description of Artificial Sequence: Synthetic oligonucleotide
  Sense strand starting at position 332 of SEQ ID NO: 1561207
ggccuacuuuaauaguuaa

SEQ ID NO: 1654494 - RNA, 19 nt, Artificial Sequence
  Description of Artificial Sequence: Synthetic oligonucleotide
  Antisense strand to SEQ ID NO: 1654493
uuaacuauuaaaguaggcc

SEQ ID NO: 1654495 - RNA, 19 nt, Artificial Sequence
  Description of Artificial Sequence: Synthetic oligonucleotide
  Sense strand starting at position 355 of SEQ ID NO: 1561207
guagaugcuagcguucgau

SEQ ID NO: 1654496 - RNA, 19 nt, Artificial Sequence
  Description of Artificial Sequence: Synthetic oligonucleotide
  Antisense strand to SEQ ID NO: 1654495
aucgaacgcuagcaucuac

SEQ ID NO: 1654497 - RNA, 19 nt, Artificial Sequence
  Description of Artificial Sequence: Synthetic oligonucleotide
  Sense strand starting at position 358 of SEQ ID NO: 1561207
gaugcuagcguucgaugaa

SEQ ID NO: 1654498 - RNA, 19 nt, Artificial Sequence
  Description of Artificial Sequence: Synthetic oligonucleotide
  Antisense strand to SEQ ID NO: 1654497
uucaucgaacgcuagcauc

SEQ ID NO: 1654499 - RNA, 19 nt, Artificial Sequence
  Description of Artificial Sequence: Synthetic oligonucleotide
  Sense strand starting at position 359 of SEQ ID NO: 1561207
augcuagcguucgaugaac

SEQ ID NO: 1654500 - RNA, 19 nt, Artificial Sequence
  Description of Artificial Sequence: Synthetic oligonucleotide
  Antisense strand to SEQ ID NO: 1654499
guucaucgaacgcuagcau

SEQ ID NO: 1654501 - RNA, 19 nt, Artificial Sequence
  Description of Artificial Sequence: Synthetic oligonucleotide
  Sense strand starting at position 361 of SEQ ID NO: 1561207
gcuagcguucgaugaacau

SEQ ID NO: 1654502 - RNA, 19 nt, Artificial Sequence
  Description of Artificial Sequence: Synthetic oligonucleotide
  Antisense strand to SEQ ID NO: 1654501
auguucaucgaacgcuagc

SEQ ID NO: 1654503 - RNA, 19 nt, Artificial Sequence
  Description of Artificial Sequence: Synthetic oligonucleotide
  Sense strand starting at position 370 of SEQ ID NO: 1561207
cgaugaacauuaggaauuu

SEQ ID NO: 1654504 - RNA, 19 nt, Artificial Sequence
  Description of Artificial Sequence: Synthetic oligonucleotide
  Antisense strand to SEQ ID NO: 1654503
aaauuccuaauguucaucg

SEQ ID NO: 1654505 - RNA, 19 nt, Artificial Sequence
  Description of Artificial Sequence: Synthetic oligonucleotide
  Sense strand starting at position 580 of SEQ ID NO: 1561207
aaggauacauccugcacga

SEQ ID NO: 1654506 - RNA, 19 nt, Artificial Sequence
  Description of Artificial Sequence: Synthetic oligonucleotide
  Antisense strand to SEQ ID NO: 1654505
ucgugcaggauguauccuu

SEQ ID NO: 1654507 - RNA, 19 nt, Artificial Sequence
  Description of Artificial Sequence: Synthetic oligonucleotide
  Sense strand starting at position 622 of SEQ ID NO: 1561207
gacugugagucuuugagca

SEQ ID NO: 1654508 - RNA, 19 nt, Artificial Sequence
  Description of Artificial Sequence: Synthetic oligonucleotide
  Antisense strand to SEQ ID NO: 1654507
ugcucaaagacucacaguc

SEQ ID NO: 1654509 - RNA, 19 nt, Artificial Sequence
  Description of Artificial Sequence: Synthetic oligonucleotide
  Sense strand starting at position 1175 of SEQ ID NO: 1561207
gcccuuaacuucugccaga

SEQ ID NO: 1654510 - RNA, 19 nt, Artificial Sequence
  Description of Artificial Sequence: Synthetic oligonucleotide
  Antisense strand to SEQ ID NO: 1654509
ucuggcagaaguuaagggc

SEQ ID NO: 1654511 - RNA, 19 nt, Artificial Sequence
  Description of Artificial Sequence: Synthetic oligonucleotide
  Sense strand starting at position 1248 of SEQ ID NO: 1561207
ccaagacgaucguccugau

SEQ ID NO: 1654512 - RNA, 19 nt, Artificial Sequence
  Description of Artificial Sequence: Synthetic oligonucleotide
  Antisense strand to SEQ ID NO: 1654511
aucaggacgaucgucuugg

SEQ ID NO: 1654513 - RNA, 19 nt, Artificial Sequence
  Description of Artificial Sequence: Synthetic oligonucleotide
  Sense strand starting at position 1297 of SEQ ID NO: 1561207
cucaguggaugccagauau

SEQ ID NO: 1654514 - RNA, 19 nt, Artificial Sequence
  Description of Artificial Sequence: Synthetic oligonucleotide
  Antisense strand to SEQ ID NO: 1654513
auaucuggcauccacugag

SEQ ID NO: 1654515 - RNA, 19 nt, Artificial Sequence
  Description of Artificial Sequence: Synthetic oligonucleotide
  Sense strand starting at position 1329 of SEQ ID NO: 1561207
cuagccaaauucuaaggau

SEQ ID NO: 1654516 - RNA, 19 nt, Artificial Sequence
  Description of Artificial Sequence: Synthetic oligonucleotide
  Antisense strand to SEQ ID NO: 1654515
auccuuagaauuuggcuag

SEQ ID NO: 1654517 - RNA, 19 nt, Artificial Sequence
  Description of Artificial Sequence: Synthetic oligonucleotide
  Sense strand starting at position 1624 of SEQ ID NO: 1561207
cccaguucggccuggguaa

SEQ ID NO: 1654518 - RNA, 19 nt, Artificial Sequence
  Description of Artificial Sequence: Synthetic oligonucleotide
  Antisense strand to SEQ ID NO: 1654517
uuacccaggccgaacuggg

SEQ ID NO: 1654519 - RNA, 19 nt, Artificial Sequence
  Description of Artificial Sequence: Synthetic oligonucleotide
  Sense strand starting at position 2657 of SEQ ID NO: 1561207
auugaaaugugccucccuu

SEQ ID NO: 1654520 - RNA, 19 nt, Artificial Sequence
  Description of Artificial Sequence: Synthetic oligonucleotide
  Antisense strand to SEQ ID NO: 1654519
aagggaggcacauuucaau

SEQ ID NO: 1654521 - RNA, 19 nt, Artificial Sequence
  Description of Artificial Sequence: Synthetic oligonucleotide
  Sense strand starting at position 2696 of SEQ ID NO: 1561207
ggaggaguacgcugugugu

SEQ ID NO: 1654522 - RNA, 19 nt, Artificial Sequence
  Description of Artificial Sequence: Synthetic oligonucleotide
  Antisense strand to SEQ ID NO: 1654521
acacacagcguacuccucc

SEQ ID NO: 1654523 - RNA, 19 nt, Artificial Sequence
  Description of Artificial Sequence: Synthetic oligonucleotide
  Sense strand starting at position 2727 of SEQ ID NO: 1561207
agcugagcgugcucuuuau

SEQ ID NO: 1654524 - RNA, 19 nt, Artificial Sequence
  Description of Artificial Sequence: Synthetic oligonucleotide
  Antisense strand to SEQ ID NO: 1654523
auaaagagcacgcucagcu

SEQ ID NO: 1654525 - RNA, 19 nt, Artificial Sequence
  Description of Artificial Sequence: Synthetic oligonucleotide
  Sense strand starting at position 2776 of SEQ ID NO: 1561207
aaaguaagugccugagaca

SEQ ID NO: 1654526 - RNA, 19 nt, Artificial Sequence
  Description of Artificial Sequence: Synthetic oligonucleotide
  Antisense strand to SEQ ID NO: 1654525
ugucucaggcacuuacuuu

SEQ ID NO: 1654527 - RNA, 19 nt, Artificial Sequence
  Description of Artificial Sequence: Synthetic oligonucleotide
  Sense strand starting at position 2777 of SEQ ID NO: 1561207
aaguaagugccugagacaa

SEQ ID NO: 1654528 - RNA, 19 nt, Artificial Sequence
  Description of Artificial Sequence: Synthetic oligonucleotide
  Antisense strand to SEQ ID NO: 1654527
uugucucaggcacuuacuu

SEQ ID NO: 1654529 - RNA, 19 nt, Artificial Sequence
  Description of Artificial Sequence: Synthetic oligonucleotide
  Sense strand starting at position 2838 of SEQ ID NO: 1561207
uccaguacuguuugauagu

SEQ ID NO: 1654530 - RNA, 19 nt, Artificial Sequence
  Description of Artificial Sequence: Synthetic oligonucleotide
  Antisense strand to SEQ ID NO: 1654529
acuaucaaacaguacugga

SEQ ID NO: 1654531 - RNA, 19 nt, Artificial Sequence
  Description of Artificial Sequence: Synthetic oligonucleotide
  Sense strand starting at position 2839 of SEQ ID NO: 1561207
ccaguacuguuugauaguu

SEQ ID NO: 1654532 - RNA, 19 nt, Artificial Sequence
  Description of Artificial Sequence: Synthetic oligonucleotide
  Antisense strand to SEQ ID NO: 1654531
aacuaucaaacaguacugg

SEQ ID NO: 1654533 - RNA, 19 nt, Artificial Sequence
  Description of Artificial Sequence: Synthetic oligonucleotide
  Sense strand starting at position 2962 of SEQ ID NO: 1561207
aguugaaugagguggaaca

SEQ ID NO: 1654534 - RNA, 19 nt, Artificial Sequence
  Description of Artificial Sequence: Synthetic oligonucleotide
  Antisense strand to SEQ ID NO: 1654533
uguuccaccucauucaacu

SEQ ID NO: 1654535 - RNA, 19 nt, Artificial Sequence
  Description of Artificial Sequence: Synthetic oligonucleotide
  Sense strand starting at position 2999 of SEQ ID NO: 1561207
agggcagggucaugaagaa

SEQ ID NO: 1654536 - RNA, 19 nt, Artificial Sequence
  Description of Artificial Sequence: Synthetic oligonucleotide
  Antisense strand to SEQ ID NO: 1654535
uucuucaugacccugcccu

SEQ ID NO: 1654537 - RNA, 19 nt, Artificial Sequence
  Description of Artificial Sequence: Synthetic oligonucleotide
  Sense strand starting at position 3209 of SEQ ID NO: 1561207
aagagcaguucgcgcgauu

SEQ ID NO: 1654538 - RNA, 19 nt, Artificial Sequence
  Description of Artificial Sequence: Synthetic oligonucleotide
  Antisense strand to SEQ ID NO: 1654537
aaucgcgcgaacugcucuu

SEQ ID NO: 1654539 - RNA, 19 nt, Artificial Sequence
  Description of Artificial Sequence: Synthetic oligonucleotide
  Sense strand starting at position 3210 of SEQ ID NO: 1561207
agagcaguucgcgcgauua

SEQ ID NO: 1654540 - RNA, 19 nt, Artificial Sequence
  Description of Artificial Sequence: Synthetic oligonucleotide
  Antisense strand to SEQ ID NO: 1654539
uaaucgcgcgaacugcucu

SEQ ID NO: 1654541 - RNA, 19 nt, Artificial Sequence
  Description of Artificial Sequence: Synthetic oligonucleotide
  Sense strand starting at position 3212 of SEQ ID NO: 1561207
agcaguucgcgcgauuaga

SEQ ID NO: 1654542 - RNA, 19 nt, Artificial Sequence
  Description of Artificial Sequence: Synthetic oligonucleotide
  Antisense strand to SEQ ID NO: 1654541
ucuaaucgcgcgaacugcu

SEQ ID NO: 1654543 - RNA, 19 nt, Artificial Sequence
  Description of Artificial Sequence: Synthetic oligonucleotide
  Sense strand starting at position 3214 of SEQ ID NO: 1561207
caguucgcgcgauuagaga

SEQ ID NO: 1654544 - RNA, 19 nt, Artificial Sequence
  Description of Artificial Sequence: Synthetic oligonucleotide
  Antisense strand to SEQ ID NO: 1654543
ucucuaaucgcgcgaacug

SEQ ID NO: 1654545 - RNA, 19 nt, Artificial Sequence
  Description of Artificial Sequence: Synthetic oligonucleotide
  Sense strand starting at position 3222 of SEQ ID NO: 1561207
gcgauuagagaucauccaa

SEQ ID NO: 1654546 - RNA, 19 nt, Artificial Sequence
  Description of Artificial Sequence: Synthetic oligonucleotide
  Antisense strand to SEQ ID NO: 1654545
uuggaugaucucuaaucgc

SEQ ID NO: 1654547 - RNA, 19 nt, Artificial Sequence
  Description of Artificial Sequence: Synthetic oligonucleotide
  Sense strand starting at position 3259 of SEQ ID NO: 1561207
agcucugaauuguuccuua

SEQ ID NO: 1654548 - RNA, 19 nt, Artificial Sequence
  Description of Artificial Sequence: Synthetic oligonucleotide
  Antisense strand to SEQ ID NO: 1654547
uaaggaacaauucagagcu

SEQ ID NO: 1654549 - RNA, 19 nt, Artificial Sequence
  Description of Artificial Sequence: Synthetic oligonucleotide
  Sense strand starting at position 3341 of SEQ ID NO: 1561207
gccgauauuuaaugaauuc

SEQ ID NO: 1654550 - RNA, 19 nt, Artificial Sequence
  Description of Artificial Sequence: Synthetic oligonucleotide
  Antisense strand to SEQ ID NO: 1654549
gaauucauuaaauaucggc

SEQ ID NO: 1654551 - RNA, 19 nt, Artificial Sequence
  Description of Artificial Sequence: Synthetic oligonucleotide
  Sense strand starting at position 3416 of SEQ ID NO: 1561207
gagagaggcagaggucaau

SEQ ID NO: 1654552 - RNA, 19 nt, Artificial Sequence
  Description of Artificial Sequence: Synthetic oligonucleotide
  Antisense strand to SEQ ID NO: 1654551
auugaccucugccucucuc

SEQ ID NO: 1654553 - RNA, 19 nt, Artificial Sequence
  Description of Artificial Sequence: Synthetic oligonucleotide
  Sense strand starting at position 3565 of SEQ ID NO: 1561207
cuaacuccacucggagaau

SEQ ID NO: 1654554 - RNA, 19 nt, Artificial Sequence
  Description of Artificial Sequence: Synthetic oligonucleotide
  Antisense strand to SEQ ID NO: 1654553
auucuccgaguggaguuag

SEQ ID NO: 1654555 - RNA, 19 nt, Artificial Sequence
  Description of Artificial Sequence: Synthetic oligonucleotide
  Sense strand starting at position 3576 of SEQ ID NO: 1561207
cggagaaucgcggaagaca

SEQ ID NO: 1654556 - RNA, 19 nt, Artificial Sequence
  Description of Artificial Sequence: Synthetic oligonucleotide
  Antisense strand to SEQ ID NO: 1654555
ugucuuccgcgauucuccg

SEQ ID NO: 1654557 - RNA, 19 nt, Artificial Sequence
  Description of Artificial Sequence: Synthetic oligonucleotide
  Sense strand starting at position 3652 of SEQ ID NO: 1561207
cugagaaacacgugcagaa

SEQ ID NO: 1654558 - RNA, 19 nt, Artificial Sequence
  Description of Artificial Sequence: Synthetic oligonucleotide
  Antisense strand to SEQ ID NO: 1654557
uucugcacguguuucucag

SEQ ID NO: 1654559 - RNA, 19 nt, Artificial Sequence
  Description of Artificial Sequence: Synthetic oligonucleotide
  Sense strand starting at position 3715 of SEQ ID NO: 1561207
uccgauaagcccuggaacu

SEQ ID NO: 1654560 - RNA, 19 nt, Artificial Sequence
  Description of Artificial Sequence: Synthetic oligonucleotide
  Antisense strand to SEQ ID NO: 1654559
aguuccagggcuuaucgga

SEQ ID NO: 1654561 - RNA, 19 nt, Artificial Sequence
  Description of Artificial Sequence: Synthetic oligonucleotide
  Sense strand starting at position 3716 of SEQ ID NO: 1561207
ccgauaagcccuggaacua

SEQ ID NO: 1654562 - RNA, 19 nt, Artificial Sequence
  Description of Artificial Sequence: Synthetic oligonucleotide
  Antisense strand to SEQ ID NO: 1654561
uaguuccagggcuuaucgg

SEQ ID NO: 1654563 - RNA, 19 nt, Artificial Sequence
  Description of Artificial Sequence: Synthetic oligonucleotide
  Sense strand starting at position 3885 of SEQ ID NO: 1561207
gcgagugugaacgauaaga

SEQ ID NO: 1654564 - RNA, 19 nt, Artificial Sequence
  Description of Artificial Sequence: Synthetic oligonucleotide
  Antisense strand to SEQ ID NO: 1654563
ucuuaucguucacacucgc

SEQ ID NO: 1654565 - RNA, 19 nt, Artificial Sequence
  Description of Artificial Sequence: Synthetic oligonucleotide
  Sense strand starting at position 3898 of SEQ ID NO: 1561207
auaagagcuuucuggucaa

SEQ ID NO: 1654566 - RNA, 19 nt, Artificial Sequence
  Description of Artificial Sequence: Synthetic oligonucleotide
  Antisense strand to SEQ ID NO: 1654565
uugaccagaaagcucuuau

SEQ ID NO: 1654567 - RNA, 19 nt, Artificial Sequence
  Description of Artificial Sequence: Synthetic oligonucleotide
  Sense strand starting at position 3901 of SEQ ID NO: 1561207
agagcuuucuggucaaauu

SEQ ID NO: 1654568 - RNA, 19 nt, Artificial Sequence
  Description of Artificial Sequence: Synthetic oligonucleotide
  Antisense strand to SEQ ID NO: 1654567
aauuugaccagaaagcucu

SEQ ID NO: 1654569 - RNA, 19 nt, Artificial Sequence
  Description of Artificial Sequence: Synthetic oligonucleotide
  Sense strand starting at position 3953 of SEQ ID NO: 1561207
gcgaguuugggaugcagga

SEQ ID NO: 1654570 - RNA, 19 nt, Artificial Sequence
  Description of Artificial Sequence: Synthetic oligonucleotide
  Antisense strand to SEQ ID NO: 1654569
uccugcaucccaaacucgc

SEQ ID NO: 1654571 - RNA, 19 nt, Artificial Sequence
  Description of Artificial Sequence: Synthetic oligonucleotide
  Sense strand starting at position 3970 of SEQ ID NO: 1561207
gagacaauuuguuaagguu

SEQ ID NO: 1654572 - RNA, 19 nt, Artificial Sequence
  Description of Artificial Sequence: Synthetic oligonucleotide
  Antisense strand to SEQ ID NO: 1654571
aaccuuaacaaauugucuc

SEQ ID NO: 1654573 - RNA, 19 nt, Artificial Sequence
  Description of Artificial Sequence: Synthetic oligonucleotide
  Sense strand starting at position 115 of SEQ ID NO: 1561208
ggauguuugcuggaugaag

SEQ ID NO: 1654574 - RNA, 19 nt, Artificial Sequence
  Description of Artificial Sequence: Synthetic oligonucleotide
  Antisense strand to SEQ ID NO: 1654573
cuucauccagcaaacaucc

SEQ ID NO: 1654575 - RNA, 19 nt, Artificial Sequence
  Description of Artificial Sequence: Synthetic oligonucleotide
  Sense strand starting at position 132 of SEQ ID NO: 1561208
aggaauuauuuguguccca

SEQ ID NO: 1654576 - RNA, 19 nt, Artificial Sequence
  Description of Artificial Sequence: Synthetic oligonucleotide
  Antisense strand to SEQ ID NO: 1654575
ugggacacaaauaauuccu

SEQ ID NO: 1654577 - RNA, 19 nt, Artificial Sequence
  Description of Artificial Sequence: Synthetic oligonucleotide
  Sense strand starting at position 207 of SEQ ID NO: 1561208
uccugaugaggccgucuua

SEQ ID NO: 1654578 - RNA, 19 nt, Artificial Sequence
  Description of Artificial Sequence: Synthetic oligonucleotide
  Antisense strand to SEQ ID NO: 1654577
uaagacggccucaucagga

SEQ ID NO: 1654579 - RNA, 19 nt, Artificial Sequence
  Description of Artificial Sequence: Synthetic oligonucleotide
  Sense strand starting at position 218 of SEQ ID NO: 1561208
ccgucuuagcuugacauuu

SEQ ID NO: 1654580 - RNA, 19 nt, Artificial Sequence
  Description of Artificial Sequence: Synthetic oligonucleotide
  Antisense strand to SEQ ID NO: 1654579
aaaugucaagcuaagacgg

SEQ ID NO: 1654581 - RNA, 19 nt, Artificial Sequence
  Description of Artificial Sequence: Synthetic oligonucleotide
  Sense strand starting at position 247 of SEQ ID NO: 1561208
uuguuauuagaaggauaca

SEQ ID NO: 1654582 - RNA, 19 nt, Artificial Sequence
  Description of Artificial Sequence: Synthetic oligonucleotide
  Antisense strand to SEQ ID NO: 1654581
uguauccuucuaauaacaa

SEQ ID NO: 1654583 - RNA, 19 nt, Artificial Sequence
  Description of Artificial Sequence: Synthetic oligonucleotide
  Sense strand starting at position 375 of SEQ ID NO: 1561208
ugugguugaccuggaagga

SEQ ID NO: 1654584 - RNA, 19 nt, Artificial Sequence
  Description of Artificial Sequence: Synthetic oligonucleotide
  Antisense strand to SEQ ID NO: 1654583
uccuuccaggucaaccaca

SEQ ID NO: 1654585 - RNA, 19 nt, Artificial Sequence
  Description of Artificial Sequence: Synthetic oligonucleotide
  Sense strand starting at position 394 of SEQ ID NO: 1561208
aagcgagagcugugacgau

SEQ ID NO: 1654586 - RNA, 19 nt, Artificial Sequence
  Description of Artificial Sequence: Synthetic oligonucleotide
  Antisense strand to SEQ ID NO: 1654585
aucgucacagcucucgcuu

SEQ ID NO: 1654587 - RNA, 19 nt, Artificial Sequence
  Description of Artificial Sequence: Synthetic oligonucleotide
  Sense strand starting at position 580 of SEQ ID NO: 1561208
acaguaccucuggauucua

SEQ ID NO: 1654588 - RNA, 19 nt, Artificial Sequence
  Description of Artificial Sequence: Synthetic oligonucleotide
  Antisense strand to SEQ ID NO: 1654587
uagaauccagagguacugu

SEQ ID NO: 1654589 - RNA, 19 nt, Artificial Sequence
  Description of Artificial Sequence: Synthetic oligonucleotide
  Sense strand starting at position 625 of SEQ ID NO: 1561208
gcacuauaucuccgagucu

SEQ ID NO: 1654590 - RNA, 19 nt, Artificial Sequence
  Description of Artificial Sequence: Synthetic oligonucleotide
  Antisense strand to SEQ ID NO: 1654589
agacucggagauauagugc

SEQ ID NO: 1654591 - RNA, 19 nt, Artificial Sequence
  Description of Artificial Sequence: Synthetic oligonucleotide
  Sense strand starting at position 665 of SEQ ID NO: 1561208
gcucuugagggaggaguaa

SEQ ID NO: 1654592 - RNA, 19 nt, Artificial Sequence
  Description of Artificial Sequence: Synthetic oligonucleotide
  Antisense strand to SEQ ID NO: 1654591
uuacuccucccucaagagc

SEQ ID NO: 1654593 - RNA, 19 nt, Artificial Sequence
  Description of Artificial Sequence: Synthetic oligonucleotide
  Sense strand starting at position 676 of SEQ ID NO: 1561208
aggaguaauugggccgagu

SEQ ID NO: 1654594 - RNA, 19 nt, Artificial Sequence
  Description of Artificial Sequence: Synthetic oligonucleotide
  Antisense strand to SEQ ID NO: 1654593
acucggcccaauuacuccu

SEQ ID NO: 1654595 - RNA, 19 nt, Artificial Sequence
  Description of Artificial Sequence: Synthetic oligonucleotide
  Sense strand starting at position 678 of SEQ ID NO: 1561208
gaguaauugggccgagugu

SEQ ID NO: 1654596 - RNA, 19 nt, Artificial Sequence
  Description of Artificial Sequence: Synthetic oligonucleotide
  Antisense strand to SEQ ID NO: 1654595
acacucggcccaauuacuc

SEQ ID NO: 1654597 - RNA, 19 nt, Artificial Sequence
  Description of Artificial Sequence: Synthetic oligonucleotide
  Sense strand starting at position 748 of SEQ ID NO: 1561208
caggaaggcucaccugaaa

SEQ ID NO: 1654598 - RNA, 19 nt, Artificial Sequence
  Description of Artificial Sequence: Synthetic oligonucleotide
  Antisense strand to SEQ ID NO: 1654597
uuucaggugagccuuccug

SEQ ID NO: 1654599 - RNA, 19 nt, Artificial Sequence
  Description of Artificial Sequence: Synthetic oligonucleotide
  Sense strand starting at position 963 of SEQ ID NO: 1561208
aguacagccuaguuagaca

SEQ ID NO: 1654600 - RNA, 19 nt, Artificial Sequence
  Description of Artificial Sequence: Synthetic oligonucleotide
  Antisense strand to SEQ ID NO: 1654599
ugucuaacuaggcuguacu

SEQ ID NO: 1654601 - RNA, 19 nt, Artificial Sequence
  Description of Artificial Sequence: Synthetic oligonucleotide
  Sense strand starting at position 989 of SEQ ID NO: 1561208
ggccuuugcuugcucaaau

SEQ ID NO: 1654602 - RNA, 19 nt, Artificial Sequence
  Description of Artificial Sequence: Synthetic oligonucleotide
  Antisense strand to SEQ ID NO: 1654601
auuugagcaagcaaaggcc

SEQ ID NO: 1654603 - RNA, 19 nt, Artificial Sequence
  Description of Artificial Sequence: Synthetic oligonucleotide
  Sense strand starting at position 1074 of SEQ ID NO: 1561208
acagaauugucccaaggau

SEQ ID NO: 1654604 - RNA, 19 nt, Artificial Sequence
  Description of Artificial Sequence: Synthetic oligonucleotide
  Antisense strand to SEQ ID NO: 1654603
auccuugggacaauucugu

SEQ ID NO: 1654605 - RNA, 19 nt, Artificial Sequence
  Description of Artificial Sequence: Synthetic oligonucleotide
  Sense strand starting at position 1097 of SEQ ID NO: 1561208
ugaguuaacguauaaugaa

SEQ ID NO: 1654606 - RNA, 19 nt, Artificial Sequence
  Description of Artificial Sequence: Synthetic oligonucleotide
  Antisense strand to SEQ ID NO: 1654605
uucauuauacguuaacuca

SEQ ID NO: 1654607 - RNA, 19 nt, Artificial Sequence
  Description of Artificial Sequence: Synthetic oligonucleotide
  Sense strand starting at position 1267 of SEQ ID NO: 1561208
agagaagucuggcuuggcu

SEQ ID NO: 1654608 - RNA, 19 nt, Artificial Sequence
  Description of Artificial Sequence: Synthetic oligonucleotide
  Antisense strand to SEQ ID NO: 1654607
agccaagccagacuucucu

SEQ ID NO: 1654609 - RNA, 19 nt, Artificial Sequence
  Description of Artificial Sequence: Synthetic oligonucleotide
  Sense strand starting at position 1341 of SEQ ID NO: 1561208
ucccguuuccagcauuuga

SEQ ID NO: 1654610 - RNA, 19 nt, Artificial Sequence
  Description of Artificial Sequence: Synthetic oligonucleotide
  Antisense strand to SEQ ID NO: 1654609
ucaaaugcuggaaacggga

SEQ ID NO: 1654611 - RNA, 19 nt, Artificial Sequence
  Description of Artificial Sequence: Synthetic oligonucleotide
  Sense strand starting at position 2060 of SEQ ID NO: 1561208
cggucuucccauuggacuu

SEQ ID NO: 1654612 - RNA, 19 nt, Artificial Sequence
  Description of Artificial Sequence: Synthetic oligonucleotide
  Antisense strand to SEQ ID NO: 1654611
aaguccaaugggaagaccg

SEQ ID NO: 1654613 - RNA, 19 nt, Artificial Sequence
  Description of Artificial Sequence: Synthetic oligonucleotide
  Sense strand starting at position 2070 of SEQ ID NO: 1561208
auuggacuugugcauaaag

SEQ ID NO: 1654614 - RNA, 19 nt, Artificial Sequence
  Description of Artificial Sequence: Synthetic oligonucleotide
  Antisense strand to SEQ ID NO: 1654613
cuuuaugcacaaguccaau

SEQ ID NO: 1654615 - RNA, 19 nt, Artificial Sequence
  Description of Artificial Sequence: Synthetic oligonucleotide
  Sense strand starting at position 2072 of SEQ ID NO: 1561208
uggacuugugcauaaaguc

SEQ ID NO: 1654616 - RNA, 19 nt, Artificial Sequence
  Description of Artificial Sequence: Synthetic oligonucleotide
  Antisense strand to SEQ ID NO: 1654615
gacuuuaugcacaagucca

SEQ ID NO: 1654617 - RNA, 19 nt, Artificial Sequence
  Description of Artificial Sequence: Synthetic oligonucleotide
  Sense strand starting at position 2092 of SEQ ID NO: 1561208
cgcccacuuucccugaaau

SEQ ID NO: 1654618 - RNA, 19 nt, Artificial Sequence
  Description of Artificial Sequence: Synthetic oligonucleotide
  Antisense strand to SEQ ID NO: 1654617
auuucagggaaagugggcg

SEQ ID NO: 1654619 - RNA, 19 nt, Artificial Sequence
  Description of Artificial Sequence: Synthetic oligonucleotide
  Sense strand starting at position 2093 of SEQ ID NO: 1561208
gcccacuuucccugaaaug

SEQ ID NO: 1654620 - RNA, 19 nt, Artificial Sequence
  Description of Artificial Sequence: Synthetic oligonucleotide
  Antisense strand to SEQ ID NO: 1654619
cauuucagggaaagugggc

SEQ ID NO: 1654621 - RNA, 19 nt, Artificial Sequence
  Description of Artificial Sequence: Synthetic oligonucleotide
  Sense strand starting at position 2232 of SEQ ID NO: 1561208
uuggucugugcugagcauu

SEQ ID NO: 1654622 - RNA, 19 nt, Artificial Sequence
  Description of Artificial Sequence: Synthetic oligonucleotide
  Antisense strand to SEQ ID NO: 1654621
aaugcucagcacagaccaa

SEQ ID NO: 1654623 - RNA, 19 nt, Artificial Sequence
  Description of Artificial Sequence: Synthetic oligonucleotide
  Sense strand starting at position 2330 of SEQ ID NO: 1561208
ugugauaauuggucggcuu

SEQ ID NO: 1654624 - RNA, 19 nt, Artificial Sequence
  Description of Artificial Sequence: Synthetic oligonucleotide
  Antisense strand to SEQ ID NO: 1654623
aagccgaccaauuaucaca

SEQ ID NO: 1654625 - RNA, 19 nt, Artificial Sequence
  Description of Artificial Sequence: Synthetic oligonucleotide
  Sense strand starting at position 2331 of SEQ ID NO: 1561208
gugauaauuggucggcuuu

SEQ ID NO: 1654626 - RNA, 19 nt, Artificial Sequence
  Description of Artificial Sequence: Synthetic oligonucleotide
  Antisense strand to SEQ ID NO: 1654625
aaagccgaccaauuaucac

SEQ ID NO: 1654627 - RNA, 19 nt, Artificial Sequence
  Description of Artificial Sequence: Synthetic oligonucleotide
  Sense strand starting at position 2333 of SEQ ID NO: 1561208
gauaauuggucggcuuuga

SEQ ID NO: 1654628 - RNA, 19 nt, Artificial Sequence
  Description of Artificial Sequence: Synthetic oligonucleotide
  Antisense strand to SEQ ID NO: 1654627
ucaaagccgaccaauuauc

SEQ ID NO: 1654629 - RNA, 19 nt, Artificial Sequence
  Description of Artificial Sequence: Synthetic oligonucleotide
  Sense strand starting at position 2407 of SEQ ID NO: 1561208
ucagcuugguacucucauu

SEQ ID NO: 1654630 - RNA, 19 nt, Artificial Sequence
  Description of Artificial Sequence: Synthetic oligonucleotide
  Antisense strand to SEQ ID NO: 1654629
aaugagaguaccaagcuga

SEQ ID NO: 1654631 - RNA, 19 nt, Artificial Sequence
  Description of Artificial Sequence: Synthetic oligonucleotide
  Sense strand starting at position 2412 of SEQ ID NO: 1561208
uugguacucucauuggcua

SEQ ID NO: 1654632 - RNA, 19 nt, Artificial Sequence
  Description of Artificial Sequence: Synthetic oligonucleotide
  Antisense strand to SEQ ID NO: 1654631
uagccaaugagaguaccaa

SEQ ID NO: 1654633 - RNA, 19 nt, Artificial Sequence
  Description of Artificial Sequence: Synthetic oligonucleotide
  Sense strand starting at position 2413 of SEQ ID NO: 1561208
ugguacucucauuggcuaa

SEQ ID NO: 1654634 - RNA, 19 nt, Artificial Sequence
  Description of Artificial Sequence: Synthetic oligonucleotide
  Antisense strand to SEQ ID NO: 1654633
uuagccaaugagaguacca

SEQ ID NO: 1654635 - RNA, 19 nt, Artificial Sequence
  Description of Artificial Sequence: Synthetic oligonucleotide
  Sense strand starting at position 2600 of SEQ ID NO: 1561208
ucgggagaauucuaaucug

SEQ ID NO: 1654636 - RNA, 19 nt, Artificial Sequence
  Description of Artificial Sequence: Synthetic oligonucleotide
  Antisense strand to SEQ ID NO: 1654635
cagauuagaauucucccga

SEQ ID NO: 1654637 - RNA, 19 nt, Artificial Sequence
  Description of Artificial Sequence: Synthetic oligonucleotide
  Sense strand starting at position 2603 of SEQ ID NO: 1561208
ggagaauucuaaucuguuc

SEQ ID NO: 1654638 - RNA, 19 nt, Artificial Sequence
  Description of Artificial Sequence: Synthetic oligonucleotide
  Antisense strand to SEQ ID NO: 1654637
gaacagauuagaauucucc

SEQ ID NO: 1654639 - RNA, 19 nt, Artificial Sequence
  Description of Artificial Sequence: Synthetic oligonucleotide
  Sense strand starting at position 2608 of SEQ ID NO: 1561208
auucuaaucuguucugcga

SEQ ID NO: 1654640 - RNA, 19 nt, Artificial Sequence
  Description of Artificial Sequence: Synthetic oligonucleotide
  Antisense strand to SEQ ID NO: 1654639
ucgcagaacagauuagaau

SEQ ID NO: 1654641 - RNA, 19 nt, Artificial Sequence
  Description of Artificial Sequence: Synthetic oligonucleotide
  Sense strand starting at position 2673 of SEQ ID NO: 1561208
gcgaaacaguugccuuaga

SEQ ID NO: 1654642 - RNA, 19 nt, Artificial Sequence
  Description of Artificial Sequence: Synthetic oligonucleotide
  Antisense strand to SEQ ID NO: 1654641
ucuaaggcaacuguuucgc

SEQ ID NO: 1654643 - RNA, 19 nt, Artificial Sequence
  Description of Artificial Sequence: Synthetic oligonucleotide
  Sense strand starting at position 2979 of SEQ ID NO: 1561208
ucagguuuauuauccguca

SEQ ID NO: 1654644 - RNA, 19 nt, Artificial Sequence
  Description of Artificial Sequence: Synthetic oligonucleotide
  Antisense strand to SEQ ID NO: 1654643
ugacggauaauaaaccuga

SEQ ID NO: 1654645 - RNA, 19 nt, Artificial Sequence
  Description of Artificial Sequence: Synthetic oligonucleotide
  Sense strand starting at position 2980 of SEQ ID NO: 1561208
cagguuuauuauccgucau

SEQ ID NO: 1654646 - RNA, 19 nt, Artificial Sequence
  Description of Artificial Sequence: Synthetic oligonucleotide
  Antisense strand to SEQ ID NO: 1654645
augacggauaauaaaccug

SEQ ID NO: 1654647 - RNA, 19 nt, Artificial Sequence
  Description of Artificial Sequence: Synthetic oligonucleotide
  Sense strand starting at position 2981 of SEQ ID NO: 1561208
agguuuauuauccgucaug

SEQ ID NO: 1654648 - RNA, 19 nt, Artificial Sequence
  Description of Artificial Sequence: Synthetic oligonucleotide
  Antisense strand to SEQ ID NO: 1654647
caugacggauaauaaaccu

SEQ ID NO: 1654649 - RNA, 19 nt, Artificial Sequence
  Description of Artificial Sequence: Synthetic oligonucleotide
  Sense strand starting at position 2984 of SEQ ID NO: 1561208
uuuauuauccgucaugccu

SEQ ID NO: 1654650 - RNA, 19 nt, Artificial Sequence
  Description of Artificial Sequence: Synthetic oligonucleotide
  Antisense strand to SEQ ID NO: 1654649
aggcaugacggauaauaaa

SEQ ID NO: 1654651 - RNA, 19 nt, Artificial Sequence
  Description of Artificial Sequence: Synthetic oligonucleotide
  Sense strand starting at position 3699 of SEQ ID NO: 1561208
gaggaauggcguuaacuca

SEQ ID NO: 1654652 - RNA, 19 nt, Artificial Sequence
  Description of Artificial Sequence: Synthetic oligonucleotide
  Antisense strand to SEQ ID NO: 1654651
ugaguuaacgccauuccuc

SEQ ID NO: 1654653 - RNA, 19 nt, Artificial Sequence
  Description of Artificial Sequence: Synthetic oligonucleotide
  Sense strand starting at position 51 of SEQ ID NO: 1561209
gccacuaaguuggagguaa

SEQ ID NO: 1654654 - RNA, 19 nt, Artificial Sequence
  Description of Artificial Sequence: Synthetic oligonucleotide
  Antisense strand to SEQ ID NO: 1654653
uuaccuccaacuuaguggc

SEQ ID NO: 1654655 - RNA, 19 nt, Artificial Sequence
  Description of Artificial Sequence: Synthetic oligonucleotide
  Sense strand starting at position 53 of SEQ ID NO: 1561209
cacuaaguuggagguaauu

SEQ ID NO: 1654656 - RNA, 19 nt, Artificial Sequence
  Description of Artificial Sequence: Synthetic oligonucleotide
  Antisense strand to SEQ ID NO: 1654655
aauuaccuccaacuuagug

SEQ ID NO: 1654657 - RNA, 19 nt, Artificial Sequence
  Description of Artificial Sequence: Synthetic oligonucleotide
  Sense strand starting at position 76 of SEQ ID NO: 1561209
ccagcagcccucggaaauu

SEQ ID NO: 1654658 - RNA, 19 nt, Artificial Sequence
  Description of Artificial Sequence: Synthetic oligonucleotide
  Antisense strand to SEQ ID NO: 1654657
aauuuccgagggcugcugg

SEQ ID NO: 1654659 - RNA, 19 nt, Artificial Sequence
  Description of Artificial Sequence: Synthetic oligonucleotide
  Sense strand starting at position 139 of SEQ ID NO: 1561209
uggcuugugcagugcucaa

SEQ ID NO: 1654660 - RNA, 19 nt, Artificial Sequence
  Description of Artificial Sequence: Synthetic oligonucleotide
  Antisense strand to SEQ ID NO: 1654659
uugagcacugcacaagcca

SEQ ID NO: 1654661 - RNA, 19 nt, Artificial Sequence
  Description of Artificial Sequence: Synthetic oligonucleotide
  Sense strand starting at position 207 of SEQ ID NO: 1561209
gggagauucucuuccggau

SEQ ID NO: 1654662 - RNA, 19 nt, Artificial Sequence
  Description of Artificial Sequence: Synthetic oligonucleotide
  Antisense strand to SEQ ID NO: 1654661
auccggaagagaaucuccc

SEQ ID NO: 1654663 - RNA, 19 nt, Artificial Sequence
  Description of Artificial Sequence: Synthetic oligonucleotide
  Sense strand starting at position 209 of SEQ ID NO: 1561209
gagauucucuuccggaugu

SEQ ID NO: 1654664 - RNA, 19 nt, Artificial Sequence
  Description of Artificial Sequence: Synthetic oligonucleotide
  Antisense strand to SEQ ID NO: 1654663
acauccggaagagaaucuc

SEQ ID NO: 1654665 - RNA, 19 nt, Artificial Sequence
  Description of Artificial Sequence: Synthetic oligonucleotide
  Sense strand starting at position 609 of SEQ ID NO: 1561209
gagcaagucugcuccuugu

SEQ ID NO: 1654666 - RNA, 19 nt, Artificial Sequence
  Description of Artificial Sequence: Synthetic oligonucleotide
  Antisense strand to SEQ ID NO: 1654665
acaaggagcagacuugcuc

SEQ ID NO: 1654667 - RNA, 19 nt, Artificial Sequence
  Description of Artificial Sequence: Synthetic oligonucleotide
  Sense strand starting at position 649 of SEQ ID NO: 1561209
acccuuaucugaguaugau

SEQ ID NO: 1654668 - RNA, 19 nt, Artificial Sequence
  Description of Artificial Sequence: Synthetic oligonucleotide
  Antisense strand to SEQ ID NO: 1654667
aucauacucagauaagggu

SEQ ID NO: 1654669 - RNA, 19 nt, Artificial Sequence
  Description of Artificial Sequence: Synthetic oligonucleotide
  Sense strand starting at position 650 of SEQ ID NO: 1561209
cccuuaucugaguaugauc

SEQ ID NO: 1654670 - RNA, 19 nt, Artificial Sequence
  Description of Artificial Sequence: Synthetic oligonucleotide
  Antisense strand to SEQ ID NO: 1654669
gaucauacucagauaaggg

SEQ ID NO: 1654671 - RNA, 19 nt, Artificial Sequence
  Description of Artificial Sequence: Synthetic oligonucleotide
  Sense strand starting at position 652 of SEQ ID NO: 1561209
cuuaucugaguaugaucuu

SEQ ID NO: 1654672 - RNA, 19 nt, Artificial Sequence
  Description of Artificial Sequence: Synthetic oligonucleotide
  Antisense strand to SEQ ID NO: 1654671
aagaucauacucagauaag

SEQ ID NO: 1654673 - RNA, 19 nt, Artificial Sequence
  Description of Artificial Sequence: Synthetic oligonucleotide
  Sense strand starting at position 655 of SEQ ID NO: 1561209
aucugaguaugaucuugga

SEQ ID NO: 1654674 - RNA, 19 nt, Artificial Sequence
  Description of Artificial Sequence: Synthetic oligonucleotide
  Antisense strand to SEQ ID NO: 1654673
uccaagaucauacucagau

SEQ ID NO: 1654675 - RNA, 19 nt, Artificial Sequence
  Description of Artificial Sequence: Synthetic oligonucleotide
  Sense strand starting at position 658 of SEQ ID NO: 1561209
ugaguaugaucuuggacac

SEQ ID NO: 1654676 - RNA, 19 nt, Artificial Sequence
  Description of Artificial Sequence: Synthetic oligonucleotide
  Antisense strand to SEQ ID NO: 1654675
guguccaagaucauacuca

SEQ ID NO: 1654677 - RNA, 19 nt, Artificial Sequence
  Description of Artificial Sequence: Synthetic oligonucleotide
  Sense strand starting at position 727 of SEQ ID NO: 1561209
cccgaacuucucugggacu

SEQ ID NO: 1654678 - RNA, 19 nt, Artificial Sequence
  Description of Artificial Sequence: Synthetic oligonucleotide
  Antisense strand to SEQ ID NO: 1654677
agucccagagaaguucggg

SEQ ID NO: 1654679 - RNA, 19 nt, Artificial Sequence
  Description of Artificial Sequence: Synthetic oligonucleotide
  Sense strand starting at position 767 of SEQ ID NO: 1561209
ggcgcuuaugcccugguua

SEQ ID NO: 1654680 - RNA, 19 nt, Artificial Sequence
  Description of Artificial Sequence: Synthetic oligonucleotide
  Antisense strand to SEQ ID NO: 1654679
uaaccagggcauaagcgcc

SEQ ID NO: 1654681 - RNA, 19 nt, Artificial Sequence
  Description of Artificial Sequence: Synthetic oligonucleotide
  Sense strand starting at position 768 of SEQ ID NO: 1561209
gcgcuuaugcccugguuau

SEQ ID NO: 1654682 - RNA, 19 nt, Artificial Sequence
  Description of Artificial Sequence: Synthetic oligonucleotide
  Antisense strand to SEQ ID NO: 1654681
auaaccagggcauaagcgc

SEQ ID NO: 1654683 - RNA, 19 nt, Artificial Sequence
  Description of Artificial Sequence: Synthetic oligonucleotide
  Sense strand starting at position 769 of SEQ ID NO: 1561209
cgcuuaugcccugguuaug

SEQ ID NO: 1654684 - RNA, 19 nt, Artificial Sequence
  Description of Artificial Sequence: Synthetic oligonucleotide
  Antisense strand to SEQ ID NO: 1654683
cauaaccagggcauaagcg

SEQ ID NO: 1654685 - RNA, 19 nt, Artificial Sequence
  Description of Artificial Sequence: Synthetic oligonucleotide
  Sense strand starting at position 1056 of SEQ ID NO: 1561209
agccaaauuccguggcuuu

SEQ ID NO: 1654686 - RNA, 19 nt, Artificial Sequence
  Description of Artificial Sequence: Synthetic oligonucleotide
  Antisense strand to SEQ ID NO: 1654685
aaagccacggaauuuggcu

SEQ ID NO: 1654687 - RNA, 19 nt, Artificial Sequence
  Description of Artificial Sequence: Synthetic oligonucleotide
  Sense strand starting at position 1222 of SEQ ID NO: 1561209
cugcgcugcucucuguaaa

SEQ ID NO: 1654688 - RNA, 19 nt, Artificial Sequence
  Description of Artificial Sequence: Synthetic oligonucleotide
  Antisense strand to SEQ ID NO: 1654687
uuuacagagagcagcgcag

SEQ ID NO: 1654689 - RNA, 19 nt, Artificial Sequence
  Description of Artificial Sequence: Synthetic oligonucleotide
  Sense strand starting at position 1223 of SEQ ID NO: 1561209
ugcgcugcucucuguaaau

SEQ ID NO: 1654690 - RNA, 19 nt, Artificial Sequence
  Description of Artificial Sequence: Synthetic oligonucleotide
  Antisense strand to SEQ ID NO: 1654689
auuuacagagagcagcgca

SEQ ID NO: 1654691 - RNA, 19 nt, Artificial Sequence
  Description of Artificial Sequence: Synthetic oligonucleotide
  Sense strand starting at position 1225 of SEQ ID NO: 1561209
cgcugcucucuguaaauau

SEQ ID NO: 1654692 - RNA, 19 nt, Artificial Sequence
  Description of Artificial Sequence: Synthetic oligonucleotide
  Antisense strand to SEQ ID NO: 1654691
auauuuacagagagcagcg

SEQ ID NO: 1654693 - RNA, 19 nt, Artificial Sequence
  Description of Artificial Sequence: Synthetic oligonucleotide
  Sense strand starting at position 1342 of SEQ ID NO: 1561209
ccucuugagcugcacgauu

SEQ ID NO: 1654694 - RNA, 19 nt, Artificial Sequence
  Description of Artificial Sequence: Synthetic oligonucleotide
  Antisense strand to SEQ ID NO: 1654693
aaucgugcagcucaagagg

SEQ ID NO: 1654695 - RNA, 19 nt, Artificial Sequence
  Description of Artificial Sequence: Synthetic oligonucleotide
  Sense strand starting at position 1593 of SEQ ID NO: 1561209
cggcaugcugggaguugaa

SEQ ID NO: 1654696 - RNA, 19 nt, Artificial Sequence
  Description of Artificial Sequence: Synthetic oligonucleotide
  Antisense strand to SEQ ID NO: 1654695
uucaacucccagcaugccg

SEQ ID NO: 1654697 - RNA, 19 nt, Artificial Sequence
  Description of Artificial Sequence: Synthetic oligonucleotide
  Sense strand starting at position 2062 of SEQ ID NO: 1561209
caucuugauuaagggcaga

SEQ ID NO: 1654698 - RNA, 19 nt, Artificial Sequence
  Description of Artificial Sequence: Synthetic oligonucleotide
  Antisense strand to SEQ ID NO: 1654697
ucugcccuuaaucaagaug

SEQ ID NO: 1654699 - RNA, 19 nt, Artificial Sequence
  Description of Artificial Sequence: Synthetic oligonucleotide
  Sense strand starting at position 2086 of SEQ ID NO: 1561209
ccgguaucccgcugggaga

SEQ ID NO: 1654700 - RNA, 19 nt, Artificial Sequence
  Description of Artificial Sequence: Synthetic oligonucleotide
  Antisense strand to SEQ ID NO: 1654699
ucucccagcgggauaccgg

SEQ ID NO: 1654701 - RNA, 19 nt, Artificial Sequence
  Description of Artificial Sequence: Synthetic oligonucleotide
  Sense strand starting at position 2099 of SEQ ID NO: 1561209
gggagacuuugggaaguga

SEQ ID NO: 1654702 - RNA, 19 nt, Artificial Sequence
  Description of Artificial Sequence: Synthetic oligonucleotide
  Antisense strand to SEQ ID NO: 1654701
ucacuucccaaagucuccc

SEQ ID NO: 1654703 - RNA, 19 nt, Artificial Sequence
  Description of Artificial Sequence: Synthetic oligonucleotide
  Sense strand starting at position 2172 of SEQ ID NO: 1561209
ccucuuuguguauauugau

SEQ ID NO: 1654704 - RNA, 19 nt, Artificial Sequence
  Description of Artificial Sequence: Synthetic oligonucleotide
  Antisense strand to SEQ ID NO: 1654703
aucaauauacacaaagagg

SEQ ID NO: 1654705 - RNA, 19 nt, Artificial Sequence
  Description of Artificial Sequence: Synthetic oligonucleotide
  Sense strand starting at position 2206 of SEQ ID NO: 1561209
uggccucgguccugaauuu

SEQ ID NO: 1654706 - RNA, 19 nt, Artificial Sequence
  Description of Artificial Sequence: Synthetic oligonucleotide
  Antisense strand to SEQ ID NO: 1654705
aaauucaggaccgaggcca

SEQ ID NO: 1654707 - RNA, 19 nt, Artificial Sequence
  Description of Artificial Sequence: Synthetic oligonucleotide
  Sense strand starting at position 2257 of SEQ ID NO: 1561209
cuucguuucuggcacaaag

SEQ ID NO: 1654708 - RNA, 19 nt, Artificial Sequence
  Description of Artificial Sequence: Synthetic oligonucleotide
  Antisense strand to SEQ ID NO: 1654707
cuuugugccagaaacgaag

SEQ ID NO: 1654709 - RNA, 19 nt, Artificial Sequence
  Description of Artificial Sequence: Synthetic oligonucleotide
  Sense strand starting at position 2299 of SEQ ID NO: 1561209
gugagcgaguccuucauua

SEQ ID NO: 1654710 - RNA, 19 nt, Artificial Sequence
  Description of Artificial Sequence: Synthetic oligonucleotide
  Antisense strand to SEQ ID NO: 1654709
uaaugaaggacucgcucac

SEQ ID NO: 1654711 - RNA, 19 nt, Artificial Sequence
  Description of Artificial Sequence: Synthetic oligonucleotide
  Sense strand starting at position 2312 of SEQ ID NO: 1561209
ucauuagcauggucuccua

SEQ ID NO: 1654712 - RNA, 19 nt, Artificial Sequence
  Description of Artificial Sequence: Synthetic oligonucleotide
  Antisense strand to SEQ ID NO: 1654711
uaggagaccaugcuaauga

SEQ ID NO: 1654713 - RNA, 19 nt, Artificial Sequence
  Description of Artificial Sequence: Synthetic oligonucleotide
  Sense strand starting at position 2630 of SEQ ID NO: 1561209
ggagcuuucugacaccgca

SEQ ID NO: 1654714 - RNA, 19 nt, Artificial Sequence
  Description of Artificial Sequence: Synthetic oligonucleotide
  Antisense strand to SEQ ID NO: 1654713
ugcggugucagaaagcucc

SEQ ID NO: 1654715 - RNA, 19 nt, Artificial Sequence
  Description of Artificial Sequence: Synthetic oligonucleotide
  Sense strand starting at position 2863 of SEQ ID NO: 1561209
gggacuccugguuaagcuu

SEQ ID NO: 1654716 - RNA, 19 nt, Artificial Sequence
  Description of Artificial Sequence: Synthetic oligonucleotide
  Antisense strand to SEQ ID NO: 1654715
aagcuuaaccaggaguccc

SEQ ID NO: 1654717 - RNA, 19 nt, Artificial Sequence
  Description of Artificial Sequence: Synthetic oligonucleotide
  Sense strand starting at position 2871 of SEQ ID NO: 1561209
ugguuaagcuucucaccga

SEQ ID NO: 1654718 - RNA, 19 nt, Artificial Sequence
  Description of Artificial Sequence: Synthetic oligonucleotide
  Antisense strand to SEQ ID NO: 1654717
ucggugagaagcuuaacca

SEQ ID NO: 1654719 - RNA, 19 nt, Artificial Sequence
  Description of Artificial Sequence: Synthetic oligonucleotide
  Sense strand starting at position 2875 of SEQ ID NO: 1561209
uaagcuucucaccgaggaa

SEQ ID NO: 1654720 - RNA, 19 nt, Artificial Sequence
  Description of Artificial Sequence: Synthetic oligonucleotide
  Antisense strand to SEQ ID NO: 1654719
uuccucggugagaagcuua

SEQ ID NO: 1654721 - RNA, 19 nt, Artificial Sequence
  Description of Artificial Sequence: Synthetic oligonucleotide
  Sense strand starting at position 3476 of SEQ ID NO: 1561209
gugcuaacauucuuuguua

SEQ ID NO: 1654722 - RNA, 19 nt, Artificial Sequence
  Description of Artificial Sequence: Synthetic oligonucleotide
  Antisense strand to SEQ ID NO: 1654721
uaacaaagaauguuagcac

SEQ ID NO: 1654723 - RNA, 19 nt, Artificial Sequence
  Description of Artificial Sequence: Synthetic oligonucleotide
  Sense strand starting at position 3554 of SEQ ID NO: 1561209
uguucuuagugcccacaau

SEQ ID NO: 1654724 - RNA, 19 nt, Artificial Sequence
  Description of Artificial Sequence: Synthetic oligonucleotide
  Antisense strand to SEQ ID NO: 1654723
auugugggcacuaagaaca

SEQ ID NO: 1654725 - RNA, 19 nt, Artificial Sequence
  Description of Artificial Sequence: Synthetic oligonucleotide
  Sense strand starting at position 3625 of SEQ ID NO: 1561209
gucauaaccuguuccucuu

SEQ ID NO: 1654726 - RNA, 19 nt, Artificial Sequence
  Description of Artificial Sequence: Synthetic oligonucleotide
  Antisense strand to SEQ ID NO: 1654725
aagaggaacagguuaugac

SEQ ID NO: 1654727 - RNA, 19 nt, Artificial Sequence
  Description of Artificial Sequence: Synthetic oligonucleotide
  Sense strand starting at position 3745 of SEQ ID NO: 1561209
cuagccgaucgggauaaau

SEQ ID NO: 1654728 - RNA, 19 nt, Artificial Sequence
  Description of Artificial Sequence: Synthetic oligonucleotide
  Antisense strand to SEQ ID NO: 1654727
auuuaucccgaucggcuag

SEQ ID NO: 1654729 - RNA, 19 nt, Artificial Sequence
  Description of Artificial Sequence: Synthetic oligonucleotide
  Sense strand starting at position 3747 of SEQ ID NO: 1561209
agccgaucgggauaaauac

SEQ ID NO: 1654730 - RNA, 19 nt, Artificial Sequence
  Description of Artificial Sequence: Synthetic oligonucleotide
  Antisense strand to SEQ ID NO: 1654729
guauuuaucccgaucggcu

SEQ ID NO: 1654731 - RNA, 19 nt, Artificial Sequence
  Description of Artificial Sequence: Synthetic oligonucleotide
  Sense strand starting at position 3869 of SEQ ID NO: 1561209
cuccuuuguucuggauacu

SEQ ID NO: 1654732 - RNA, 19 nt, Artificial Sequence
  Description of Artificial Sequence: Synthetic oligonucleotide
  Antisense strand to SEQ ID NO: 1654731
aguauccagaacaaaggag

SEQ ID NO: 1654733 - RNA, 19 nt, Artificial Sequence
  Description of Artificial Sequence: Synthetic oligonucleotide
  Sense strand starting at position 454 of SEQ ID NO: 1561210
gcguuugcucaagcacaca

SEQ ID NO: 1654734 - RNA, 19 nt, Artificial Sequence
  Description of Artificial Sequence: Synthetic oligonucleotide
  Antisense strand to SEQ ID NO: 1654733
ugugugcuugagcaaacgc

SEQ ID NO: 1654735 - RNA, 19 nt, Artificial Sequence
  Description of Artificial Sequence: Synthetic oligonucleotide
  Sense strand starting at position 650 of SEQ ID NO: 1561210
ugaaacauaugugcaugua

SEQ ID NO: 1654736 - RNA, 19 nt, Artificial Sequence
  Description of Artificial Sequence: Synthetic oligonucleotide
  Antisense strand to SEQ ID NO: 1654735
uacaugcacauauguuuca

SEQ ID NO: 1654737 - RNA, 19 nt, Artificial Sequence
  Description of Artificial Sequence: Synthetic oligonucleotide
  Sense strand starting at position 793 of SEQ ID NO: 1561210
cgcagaaaugcuuaaacac

SEQ ID NO: 1654738 - RNA, 19 nt, Artificial Sequence
  Description of Artificial Sequence: Synthetic oligonucleotide
  Antisense strand to SEQ ID NO: 1654737
guguuuaagcauuucugcg

SEQ ID NO: 1654739 - RNA, 19 nt, Artificial Sequence
  Description of Artificial Sequence: Synthetic oligonucleotide
  Sense strand starting at position 873 of SEQ ID NO: 1561210
ugcagaaaugcuuaaacac

SEQ ID NO: 1654740 - RNA, 19 nt, Artificial Sequence
  Description of Artificial Sequence: Synthetic oligonucleotide
  Antisense strand to SEQ ID NO: 1654739
guguuuaagcauuucugca

SEQ ID NO: 1654741 - RNA, 19 nt, Artificial Sequence
  Description of Artificial Sequence: Synthetic oligonucleotide
  Sense strand starting at position 1448 of SEQ ID NO: 1561210
cgcccuaucuaguacacaa

SEQ ID NO: 1654742 - RNA, 19 nt, Artificial Sequence
  Description of Artificial Sequence: Synthetic oligonucleotide
  Antisense strand to SEQ ID NO: 1654741
uuguguacuagauagggcg

SEQ ID NO: 1654743 - RNA, 19 nt, Artificial Sequence
  Description of Artificial Sequence: Synthetic oligonucleotide
  Sense strand starting at position 1533 of SEQ ID NO: 1561210
cugucaaacucacuuuguu

SEQ ID NO: 1654744 - RNA, 19 nt, Artificial Sequence
  Description of Artificial Sequence: Synthetic oligonucleotide
  Antisense strand to SEQ ID NO: 1654743
aacaaagugaguuugacag

SEQ ID NO: 1654745 - RNA, 19 nt, Artificial Sequence
  Description of Artificial Sequence: Synthetic oligonucleotide
  Sense strand starting at position 2177 of SEQ ID NO: 1561210
gguccuagcuguuuccauu

SEQ ID NO: 1654746 - RNA, 19 nt, Artificial Sequence
  Description of Artificial Sequence: Synthetic oligonucleotide
  Antisense strand to SEQ ID NO: 1654745
aauggaaacagcuaggacc

SEQ ID NO: 1654747 - RNA, 19 nt, Artificial Sequence
  Description of Artificial Sequence: Synthetic oligonucleotide
  Sense strand starting at position 2280 of SEQ ID NO: 1561210
cauccaucguugggaggaa

SEQ ID NO: 1654748 - RNA, 19 nt, Artificial Sequence
  Description of Artificial Sequence: Synthetic oligonucleotide
  Antisense strand to SEQ ID NO: 1654747
uuccucccaacgauggaug

SEQ ID NO: 1654749 - RNA, 19 nt, Artificial Sequence
  Description of Artificial Sequence: Synthetic oligonucleotide
  Sense strand starting at position 2281 of SEQ ID NO: 1561210
auccaucguugggaggaau

SEQ ID NO: 1654750 - RNA, 19 nt, Artificial Sequence
  Description of Artificial Sequence: Synthetic oligonucleotide
  Antisense strand to SEQ ID NO: 1654749
auuccucccaacgauggau

SEQ ID NO: 1654751 - RNA, 19 nt, Artificial Sequence
  Description of Artificial Sequence: Synthetic oligonucleotide
  Sense strand starting at position 2409 of SEQ ID NO: 1561210
augggaaaguacuuguuaa

SEQ ID NO: 1654752 - RNA, 19 nt, Artificial Sequence
  Description of Artificial Sequence: Synthetic oligonucleotide
  Antisense strand to SEQ ID NO: 1654751
uuaacaaguacuuucccau

SEQ ID NO: 1654753 - RNA, 19 nt, Artificial Sequence
  Description of Artificial Sequence: Synthetic oligonucleotide
  Sense strand starting at position 2410 of SEQ ID NO: 1561210
ugggaaaguacuuguuaag

SEQ ID NO: 1654754 - RNA, 19 nt, Artificial Sequence
  Description of Artificial Sequence: Synthetic oligonucleotide
  Antisense strand to SEQ ID NO: 1654753
cuuaacaaguacuuuccca

SEQ ID NO: 1654755 - RNA, 19 nt, Artificial Sequence
  Description of Artificial Sequence: Synthetic oligonucleotide
  Sense strand starting at position 2413 of SEQ ID NO: 1561210
gaaaguacuuguuaaguaa

SEQ ID NO: 1654756 - RNA, 19 nt, Artificial Sequence
  Description of Artificial Sequence: Synthetic oligonucleotide
  Antisense strand to SEQ ID NO: 1654755
uuacuuaacaaguacuuuc

SEQ ID NO: 1654757 - RNA, 19 nt, Artificial Sequence
  Description of Artificial Sequence: Synthetic oligonucleotide
  Sense strand starting at position 2558 of SEQ ID NO: 1561210
cguccuggauuccuagaca

SEQ ID NO: 1654758 - RNA, 19 nt, Artificial Sequence
  Description of Artificial Sequence: Synthetic oligonucleotide
  Antisense strand to SEQ ID NO: 1654757
ugucuaggaauccaggacg

SEQ ID NO: 1654759 - RNA, 19 nt, Artificial Sequence
  Description of Artificial Sequence: Synthetic oligonucleotide
  Sense strand starting at position 2623 of SEQ ID NO: 1561210
gguccugccucucuaguau

SEQ ID NO: 1654760 - RNA, 19 nt, Artificial Sequence
  Description of Artificial Sequence: Synthetic oligonucleotide
  Antisense strand to SEQ ID NO: 1654759
auacuagagaggcaggacc

SEQ ID NO: 1654761 - RNA, 19 nt, Artificial Sequence
  Description of Artificial Sequence: Synthetic oligonucleotide
  Sense strand starting at position 2632 of SEQ ID NO: 1561210
ucucuaguaucagggauua

SEQ ID NO: 1654762 - RNA, 19 nt, Artificial Sequence
  Description of Artificial Sequence: Synthetic oligonucleotide
  Antisense strand to SEQ ID NO: 1654761
uaaucccugauacuagaga

SEQ ID NO: 1654763 - RNA, 19 nt, Artificial Sequence
  Description of Artificial Sequence: Synthetic oligonucleotide
  Sense strand starting at position 2645 of SEQ ID NO: 1561210
ggauuaggccuccacccua

SEQ ID NO: 1654764 - RNA, 19 nt, Artificial Sequence
  Description of Artificial Sequence: Synthetic oligonucleotide
  Antisense strand to SEQ ID NO: 1654763
uaggguggaggccuaaucc

SEQ ID NO: 1654765 - RNA, 19 nt, Artificial Sequence
  Description of Artificial Sequence: Synthetic oligonucleotide
  Sense strand starting at position 2681 of SEQ ID NO: 1561210
cagggagccuuccuggauu

SEQ ID NO: 1654766 - RNA, 19 nt, Artificial Sequence
  Description of Artificial Sequence: Synthetic oligonucleotide
  Antisense strand to SEQ ID NO: 1654765
aauccaggaaggcucccug

SEQ ID NO: 1654767 - RNA, 19 nt, Artificial Sequence
  Description of Artificial Sequence: Synthetic oligonucleotide
  Sense strand starting at position 2798 of SEQ ID NO: 1561210
cugcuuguggcucaugaca

SEQ ID NO: 1654768 - RNA, 19 nt, Artificial Sequence
  Description of Artificial Sequence: Synthetic oligonucleotide
  Antisense strand to SEQ ID NO: 1654767
ugucaugagccacaagcag

SEQ ID NO: 1654769 - RNA, 19 nt, Artificial Sequence
  Description of Artificial Sequence: Synthetic oligonucleotide
  Sense strand starting at position 2843 of SEQ ID NO: 1561210
cugggccaucucugaaacu

SEQ ID NO: 1654770 - RNA, 19 nt, Artificial Sequence
  Description of Artificial Sequence: Synthetic oligonucleotide
  Antisense strand to SEQ ID NO: 1654769
aguuucagagauggcccag

SEQ ID NO: 1654771 - RNA, 19 nt, Artificial Sequence
  Description of Artificial Sequence: Synthetic oligonucleotide
  Sense strand starting at position 3151 of SEQ ID NO: 1561210
uuuccuuccuuagauagua

SEQ ID NO: 1654772 - RNA, 19 nt, Artificial Sequence
  Description of Artificial Sequence: Synthetic oligonucleotide
  Antisense strand to SEQ ID NO: 1654771
uacuaucuaaggaaggaaa

SEQ ID NO: 1654773 - RNA, 19 nt, Artificial Sequence
  Description of Artificial Sequence: Synthetic oligonucleotide
  Sense strand starting at position 3215 of SEQ ID NO: 1561210
aguuuaauuuauuggcuca

SEQ ID NO: 1654774 - RNA, 19 nt, Artificial Sequence
  Description of Artificial Sequence: Synthetic oligonucleotide
  Antisense strand to SEQ ID NO: 1654773
ugagccaauaaauuaaacu

SEQ ID NO: 1654775 - RNA, 19 nt, Artificial Sequence
  Description of Artificial Sequence: Synthetic oligonucleotide
  Sense strand starting at position 3288 of SEQ ID NO: 1561210
gcaugugggagcuguuacu

SEQ ID NO: 1654776 - RNA, 19 nt, Artificial Sequence
  Description of Artificial Sequence: Synthetic oligonucleotide
  Antisense strand to SEQ ID NO: 1654775
aguaacagcucccacaugc

SEQ ID NO: 1654777 - RNA, 19 nt, Artificial Sequence
  Description of Artificial Sequence: Synthetic oligonucleotide
  Sense strand starting at position 3324 of SEQ ID NO: 1561210
agcaucauuuaugagaugu

SEQ ID NO: 1654778 - RNA, 19 nt, Artificial Sequence
  Description of Artificial Sequence: Synthetic oligonucleotide
  Antisense strand to SEQ ID NO: 1654777
acaucucauaaaugaugcu

SEQ ID NO: 1654779 - RNA, 19 nt, Artificial Sequence
  Description of Artificial Sequence: Synthetic oligonucleotide
  Sense strand starting at position 3326 of SEQ ID NO: 1561210
caucauuuaugagauguga

SEQ ID NO: 1654780 - RNA, 19 nt, Artificial Sequence
  Description of Artificial Sequence: Synthetic oligonucleotide
  Antisense strand to SEQ ID NO: 1654779
ucacaucucauaaaugaug

SEQ ID NO: 1654781 - RNA, 19 nt, Artificial Sequence
  Description of Artificial Sequence: Synthetic oligonucleotide
  Sense strand starting at position 3370 of SEQ ID NO: 1561210
gggucuugucuguggucuu

SEQ ID NO: 1654782 - RNA, 19 nt, Artificial Sequence
  Description of Artificial Sequence: Synthetic oligonucleotide
  Antisense strand to SEQ ID NO: 1654781
aagaccacagacaagaccc

SEQ ID NO: 1654783 - RNA, 19 nt, Artificial Sequence
  Description of Artificial Sequence: Synthetic oligonucleotide
  Sense strand starting at position 3411 of SEQ ID NO: 1561210
auaggaaaguguuuguuaa

SEQ ID NO: 1654784 - RNA, 19 nt, Artificial Sequence
  Description of Artificial Sequence: Synthetic oligonucleotide
  Antisense strand to SEQ ID NO: 1654783
uuaacaaacacuuuccuau

SEQ ID NO: 1654785 - RNA, 19 nt, Artificial Sequence
  Description of Artificial Sequence: Synthetic oligonucleotide
  Sense strand starting at position 3412 of SEQ ID NO: 1561210
uaggaaaguguuuguuaaa

SEQ ID NO: 1654786 - RNA, 19 nt, Artificial Sequence
  Description of Artificial Sequence: Synthetic oligonucleotide
  Antisense strand to SEQ ID NO: 1654785
uuuaacaaacacuuuccua

SEQ ID NO: 1654787 - RNA, 19 nt, Artificial Sequence
  Description of Artificial Sequence: Synthetic oligonucleotide
  Sense strand starting at position 3539 of SEQ ID NO: 1561210
cuuccuggauuccuagaca

SEQ ID NO: 1654788 - RNA, 19 nt, Artificial Sequence
  Description of Artificial Sequence: Synthetic oligonucleotide
  Antisense strand to SEQ ID NO: 1654787
ugucuaggaauccaggaag

SEQ ID NO: 1654789 - RNA, 19 nt, Artificial Sequence
  Description of Artificial Sequence: Synthetic oligonucleotide
  Sense strand starting at position 3581 of SEQ ID NO: 1561210
ucaagacuccuguguggga

SEQ ID NO: 1654790 - RNA, 19 nt, Artificial Sequence
  Description of Artificial Sequence: Synthetic oligonucleotide
  Antisense strand to SEQ ID NO: 1654789
ucccacacaggagucuuga

SEQ ID NO: 1654791 - RNA, 19 nt, Artificial Sequence
  Description of Artificial Sequence: Synthetic oligonucleotide
  Sense strand starting at position 3585 of SEQ ID NO: 1561210
gacuccugugugggaugaa

SEQ ID NO: 1654792 - RNA, 19 nt, Artificial Sequence
  Description of Artificial Sequence: Synthetic oligonucleotide
  Antisense strand to SEQ ID NO: 1654791
uucaucccacacaggaguc

SEQ ID NO: 1654793 - RNA, 19 nt, Artificial Sequence
  Description of Artificial Sequence: Synthetic oligonucleotide
  Sense strand starting at position 3652 of SEQ ID NO: 1561210
acaggaucguggaagagau

SEQ ID NO: 1654794 - RNA, 19 nt, Artificial Sequence
  Description of Artificial Sequence: Synthetic oligonucleotide
  Antisense strand to SEQ ID NO: 1654793
aucucuuccacgauccugu

SEQ ID NO: 1654795 - RNA, 19 nt, Artificial Sequence
  Description of Artificial Sequence: Synthetic oligonucleotide
  Sense strand starting at position 3698 of SEQ ID NO: 1561210
guagguucgggccaagagu

SEQ ID NO: 1654796 - RNA, 19 nt, Artificial Sequence
  Description of Artificial Sequence: Synthetic oligonucleotide
  Antisense strand to SEQ ID NO: 1654795
acucuuggcccgaaccuac

SEQ ID NO: 1654797 - RNA, 19 nt, Artificial Sequence
  Description of Artificial Sequence: Synthetic oligonucleotide
  Sense strand starting at position 3773 of SEQ ID NO: 1561210
uucucuuugucauggugaa

SEQ ID NO: 1654798 - RNA, 19 nt, Artificial Sequence
  Description of Artificial Sequence: Synthetic oligonucleotide
  Antisense strand to SEQ ID NO: 1654797
uucaccaugacaaagagaa

SEQ ID NO: 1654799 - RNA, 19 nt, Artificial Sequence
  Description of Artificial Sequence: Synthetic oligonucleotide
  Sense strand starting at position 3774 of SEQ ID NO: 1561210
ucucuuugucauggugaaa

SEQ ID NO: 1654800 - RNA, 19 nt, Artificial Sequence
  Description of Artificial Sequence: Synthetic oligonucleotide
  Antisense strand to SEQ ID NO: 1654799
uuucaccaugacaaagaga

SEQ ID NO: 1654801 - RNA, 19 nt, Artificial Sequence
  Description of Artificial Sequence: Synthetic oligonucleotide
  Sense strand starting at position 3869 of SEQ ID NO: 1561210
auugacuucucccuguguu

SEQ ID NO: 1654802 - RNA, 19 nt, Artificial Sequence
  Description of Artificial Sequence: Synthetic oligonucleotide
  Antisense strand to SEQ ID NO: 1654801
aacacagggagaagucaau

SEQ ID NO: 1654803 - RNA, 19 nt, Artificial Sequence
  Description of Artificial Sequence: Synthetic oligonucleotide
  Sense strand starting at position 3870 of SEQ ID NO: 1561210
uugacuucucccuguguuc

SEQ ID NO: 1654804 - RNA, 19 nt, Artificial Sequence
  Description of Artificial Sequence: Synthetic oligonucleotide
  Antisense strand to SEQ ID NO: 1654803
gaacacagggagaagucaa

SEQ ID NO: 1654805 - RNA, 19 nt, Artificial Sequence
  Description of Artificial Sequence: Synthetic oligonucleotide
  Sense strand starting at position 3879 of SEQ ID NO: 1561210
cccuguguuccggaguuaa

SEQ ID NO: 1654806 - RNA, 19 nt, Artificial Sequence
  Description of Artificial Sequence: Synthetic oligonucleotide
  Antisense strand to SEQ ID NO: 1654805
uuaacuccggaacacaggg

SEQ ID NO: 1654807 - RNA, 19 nt, Artificial Sequence
  Description of Artificial Sequence: Synthetic oligonucleotide
  Sense strand starting at position 3976 of SEQ ID NO: 1561210
acaguuucguccugugaca

SEQ ID NO: 1654808 - RNA, 19 nt, Artificial Sequence
  Description of Artificial Sequence: Synthetic oligonucleotide
  Antisense strand to SEQ ID NO: 1654807
ugucacaggacgaaacugu

SEQ ID NO: 1654809 - RNA, 19 nt, Artificial Sequence
  Description of Artificial Sequence: Synthetic oligonucleotide
  Sense strand starting at position 3978 of SEQ ID NO: 1561210
aguuucguccugugacaaa

SEQ ID NO: 1654810 - RNA, 19 nt, Artificial Sequence
  Description of Artificial Sequence: Synthetic oligonucleotide
  Antisense strand to SEQ ID NO: 1654809
uuugucacaggacgaaacu

SEQ ID NO: 1654811 - RNA, 19 nt, Artificial Sequence
  Description of Artificial Sequence: Synthetic oligonucleotide
  Sense strand starting at position 65 of SEQ ID NO: 1561211
ugucucuggucccagcaaa

SEQ ID NO: 1654812 - RNA, 19 nt, Artificial Sequence
  Description of Artificial Sequence: Synthetic oligonucleotide
  Antisense strand to SEQ ID NO: 1654811
uuugcugggaccagagaca

SEQ ID NO: 1654813 - RNA, 19 nt, Artificial Sequence
  Description of Artificial Sequence: Synthetic oligonucleotide
  Sense strand starting at position 208 of SEQ ID NO: 1561211
uccauuugucuaugagcuc

SEQ ID NO: 1654814 - RNA, 19 nt, Artificial Sequence
  Description of Artificial Sequence: Synthetic oligonucleotide
  Antisense strand to SEQ ID NO: 1654813
gagcucauagacaaaugga

SEQ ID NO: 1654815 - RNA, 19 nt, Artificial Sequence
  Description of Artificial Sequence: Synthetic oligonucleotide
  Sense strand starting at position 209 of SEQ ID NO: 1561211
ccauuugucuaugagcucu

SEQ ID NO: 1654816 - RNA, 19 nt, Artificial Sequence
  Description of Artificial Sequence: Synthetic oligonucleotide
  Antisense strand to SEQ ID NO: 1654815
agagcucauagacaaaugg

SEQ ID NO: 1654817 - RNA, 19 nt, Artificial Sequence
  Description of Artificial Sequence: Synthetic oligonucleotide
  Sense strand starting at position 596 of SEQ ID NO: 1561211
aggcuccacgccugagauu

SEQ ID NO: 1654818 - RNA, 19 nt, Artificial Sequence
  Description of Artificial Sequence: Synthetic oligonucleotide
  Antisense strand to SEQ ID NO: 1654817
aaucucaggcguggagccu

SEQ ID NO: 1654819 - RNA, 19 nt, Artificial Sequence
  Description of Artificial Sequence: Synthetic oligonucleotide
  Sense strand starting at position 609 of SEQ ID NO: 1561211
gagauuuacuccugggacc

SEQ ID NO: 1654820 - RNA, 19 nt, Artificial Sequence
  Description of Artificial Sequence: Synthetic oligonucleotide
  Antisense strand to SEQ ID NO: 1654819
ggucccaggaguaaaucuc

SEQ ID NO: 1654821 - RNA, 19 nt, Artificial Sequence
  Description of Artificial Sequence: Synthetic oligonucleotide
  Sense strand starting at position 717 of SEQ ID NO: 1561211
gccuguggguggcaugaua

SEQ ID NO: 1654822 - RNA, 19 nt, Artificial Sequence
  Description of Artificial Sequence: Synthetic oligonucleotide
  Antisense strand to SEQ ID NO: 1654821
uaucaugccacccacaggc

SEQ ID NO: 1654823 - RNA, 19 nt, Artificial Sequence
  Description of Artificial Sequence: Synthetic oligonucleotide
  Sense strand starting at position 822 of SEQ ID NO: 1561211
uggugaaacucccuccuuu

SEQ ID NO: 1654824 - RNA, 19 nt, Artificial Sequence
  Description of Artificial Sequence: Synthetic oligonucleotide
  Antisense strand to SEQ ID NO: 1654823
aaaggagggaguuucacca

SEQ ID NO: 1654825 - RNA, 19 nt, Artificial Sequence
  Description of Artificial Sequence: Synthetic oligonucleotide
  Sense strand starting at position 983 of SEQ ID NO: 1561211
gcaggaaucagcuggagaa

SEQ ID NO: 1654826 - RNA, 19 nt, Artificial Sequence
  Description of Artificial Sequence: Synthetic oligonucleotide
  Antisense strand to SEQ ID NO: 1654825
uucuccagcugauuccugc

SEQ ID NO: 1654827 - RNA, 19 nt, Artificial Sequence
  Description of Artificial Sequence: Synthetic oligonucleotide
  Sense strand starting at position 2013 of SEQ ID NO: 1561211
cgggacuuauuuggagaaa

SEQ ID NO: 1654828 - RNA, 19 nt, Artificial Sequence
  Description of Artificial Sequence: Synthetic oligonucleotide
  Antisense strand to SEQ ID NO: 1654827
uuucuccaaauaagucccg

SEQ ID NO: 1654829 - RNA, 19 nt, Artificial Sequence
  Description of Artificial Sequence: Synthetic oligonucleotide
  Sense strand starting at position 2363 of SEQ ID NO: 1561211
acaagaguccuccgucucu

SEQ ID NO: 1654830 - RNA, 19 nt, Artificial Sequence
  Description of Artificial Sequence: Synthetic oligonucleotide
  Antisense strand to SEQ ID NO: 1654829
agagacggaggacucuugu

SEQ ID NO: 1654831 - RNA, 19 nt, Artificial Sequence
  Description of Artificial Sequence: Synthetic oligonucleotide
  Sense strand starting at position 2446 of SEQ ID NO: 1561211
gcuaccugauagugggauu

SEQ ID NO: 1654832 - RNA, 19 nt, Artificial Sequence
  Description of Artificial Sequence: Synthetic oligonucleotide
  Antisense strand to SEQ ID NO: 1654831
aaucccacuaucagguagc

SEQ ID NO: 1654833 - RNA, 19 nt, Artificial Sequence
  Description of Artificial Sequence: Synthetic oligonucleotide
  Sense strand starting at position 2517 of SEQ ID NO: 1561211
cccaguacucuagggagau

SEQ ID NO: 1654834 - RNA, 19 nt, Artificial Sequence
  Description of Artificial Sequence: Synthetic oligonucleotide
  Antisense strand to SEQ ID NO: 1654833
aucucccuagaguacuggg

SEQ ID NO: 1654835 - RNA, 19 nt, Artificial Sequence
  Description of Artificial Sequence: Synthetic oligonucleotide
  Sense strand starting at position 2518 of SEQ ID NO: 1561211
ccaguacucuagggagauc

SEQ ID NO: 1654836 - RNA, 19 nt, Artificial Sequence
  Description of Artificial Sequence: Synthetic oligonucleotide
  Antisense strand to SEQ ID NO: 1654835
gaucucccuagaguacugg

SEQ ID NO: 1654837 - RNA, 19 nt, Artificial Sequence
  Description of Artificial Sequence: Synthetic oligonucleotide
  Sense strand starting at position 2613 of SEQ ID NO: 1561211
ucaccaugaucuggaguua

SEQ ID NO: 1654838 - RNA, 19 nt, Artificial Sequence
  Description of Artificial Sequence: Synthetic oligonucleotide
  Antisense strand to SEQ ID NO: 1654837
uaacuccagaucaugguga

SEQ ID NO: 1654839 - RNA, 19 nt, Artificial Sequence
  Description of Artificial Sequence: Synthetic oligonucleotide
  Sense strand starting at position 2788 of SEQ ID NO: 1561211
ggcagugguucuuagacug

SEQ ID NO: 1654840 - RNA, 19 nt, Artificial Sequence
  Description of Artificial Sequence: Synthetic oligonucleotide
  Antisense strand to SEQ ID NO: 1654839
cagucuaagaaccacugcc

SEQ ID NO: 1654841 - RNA, 19 nt, Artificial Sequence
  Description of Artificial Sequence: Synthetic oligonucleotide
  Sense strand starting at position 2793 of SEQ ID NO: 1561211
ugguucuuagacugucuua

SEQ ID NO: 1654842 - RNA, 19 nt, Artificial Sequence
  Description of Artificial Sequence: Synthetic oligonucleotide
  Antisense strand to SEQ ID NO: 1654841
uaagacagucuaagaacca

SEQ ID NO: 1654843 - RNA, 19 nt, Artificial Sequence
  Description of Artificial Sequence: Synthetic oligonucleotide
  Sense strand starting at position 2911 of SEQ ID NO: 1561211
cuuugaaggcucggguuaa

SEQ ID NO: 1654844 - RNA, 19 nt, Artificial Sequence
  Description of Artificial Sequence: Synthetic oligonucleotide
  Antisense strand to SEQ ID NO: 1654843
uuaacccgagccuucaaag

SEQ ID NO: 1654845 - RNA, 19 nt, Artificial Sequence
  Description of Artificial Sequence: Synthetic oligonucleotide
  Sense strand starting at position 2912 of SEQ ID NO: 1561211
uuugaaggcucggguuaaa

SEQ ID NO: 1654846 - RNA, 19 nt, Artificial Sequence
  Description of Artificial Sequence: Synthetic oligonucleotide
  Antisense strand to SEQ ID NO: 1654845
uuuaacccgagccuucaaa

SEQ ID NO: 1654847 - RNA, 19 nt, Artificial Sequence
  Description of Artificial Sequence: Synthetic oligonucleotide
  Sense strand starting at position 2915 of SEQ ID NO: 1561211
gaaggcucggguuaaaucu

SEQ ID NO: 1654848 - RNA, 19 nt, Artificial Sequence
  Description of Artificial Sequence: Synthetic oligonucleotide
  Antisense strand to SEQ ID NO: 1654847
agauuuaacccgagccuuc

SEQ ID NO: 1654849 - RNA, 19 nt, Artificial Sequence
  Description of Artificial Sequence: Synthetic oligonucleotide
  Sense strand starting at position 3004 of SEQ ID NO: 1561211
cucuguuuaucccaagagu

SEQ ID NO: 1654850 - RNA, 19 nt, Artificial Sequence
  Description of Artificial Sequence: Synthetic oligonucleotide
  Antisense strand to SEQ ID NO: 1654849
acucuugggauaaacagag

SEQ ID NO: 1654851 - RNA, 19 nt, Artificial Sequence
  Description of Artificial Sequence: Synthetic oligonucleotide
  Sense strand starting at position 3007 of SEQ ID NO: 1561211
uguuuaucccaagaguccu

SEQ ID NO: 1654852 - RNA, 19 nt, Artificial Sequence
  Description of Artificial Sequence: Synthetic oligonucleotide
  Antisense strand to SEQ ID NO: 1654851
aggacucuugggauaaaca

SEQ ID NO: 1654853 - RNA, 19 nt, Artificial Sequence
  Description of Artificial Sequence: Synthetic oligonucleotide
  Sense strand starting at position 3046 of SEQ ID NO: 1561211
uugagaagcucaggccuau

SEQ ID NO: 1654854 - RNA, 19 nt, Artificial Sequence
  Description of Artificial Sequence: Synthetic oligonucleotide
  Antisense strand to SEQ ID NO: 1654853
auaggccugagcuucucaa

SEQ ID NO: 1654855 - RNA, 19 nt, Artificial Sequence
  Description of Artificial Sequence: Synthetic oligonucleotide
  Sense strand starting at position 3050 of SEQ ID NO: 1561211
gaagcucaggccuauggau

SEQ ID NO: 1654856 - RNA, 19 nt, Artificial Sequence
  Description of Artificial Sequence: Synthetic oligonucleotide
  Antisense strand to SEQ ID NO: 1654855
auccauaggccugagcuuc

SEQ ID NO: 1654857 - RNA, 19 nt, Artificial Sequence
  Description of Artificial Sequence: Synthetic oligonucleotide
  Sense strand starting at position 3052 of SEQ ID NO: 1561211
agcucaggccuauggauua

SEQ ID NO: 1654858 - RNA, 19 nt, Artificial Sequence
  Description of Artificial Sequence: Synthetic oligonucleotide
  Antisense strand to SEQ ID NO: 1654857
uaauccauaggccugagcu

SEQ ID NO: 1654859 - RNA, 19 nt, Artificial Sequence
  Description of Artificial Sequence: Synthetic oligonucleotide
  Sense strand starting at position 3116 of SEQ ID NO: 1561211
cggucuagaguuggcucaa

SEQ ID NO: 1654860 - RNA, 19 nt, Artificial Sequence
  Description of Artificial Sequence: Synthetic oligonucleotide
  Antisense strand to SEQ ID NO: 1654859
uugagccaacucuagaccg

SEQ ID NO: 1654861 - RNA, 19 nt, Artificial Sequence
  Description of Artificial Sequence: Synthetic oligonucleotide
  Sense strand starting at position 3117 of SEQ ID NO: 1561211
ggucuagaguuggcucaag

SEQ ID NO: 1654862 - RNA, 19 nt, Artificial Sequence
  Description of Artificial Sequence: Synthetic oligonucleotide
  Antisense strand to SEQ ID NO: 1654861
cuugagccaacucuagacc

SEQ ID NO: 1654863 - RNA, 19 nt, Artificial Sequence
  Description of Artificial Sequence: Synthetic oligonucleotide
  Sense strand starting at position 3186 of SEQ ID NO: 1561211
ucuggauuagggugaucau

SEQ ID NO: 1654864 - RNA, 19 nt, Artificial Sequence
  Description of Artificial Sequence: Synthetic oligonucleotide
  Antisense strand to SEQ ID NO: 1654863
augaucacccuaauccaga

SEQ ID NO: 1654865 - RNA, 19 nt, Artificial Sequence
  Description of Artificial Sequence: Synthetic oligonucleotide
  Sense strand starting at position 3189 of SEQ ID NO: 1561211
ggauuagggugaucauauc

SEQ ID NO: 1654866 - RNA, 19 nt, Artificial Sequence
  Description of Artificial Sequence: Synthetic oligonucleotide
  Antisense strand to SEQ ID NO: 1654865
gauaugaucacccuaaucc

SEQ ID NO: 1654867 - RNA, 19 nt, Artificial Sequence
  Description of Artificial Sequence: Synthetic oligonucleotide
  Sense strand starting at position 3530 of SEQ ID NO: 1561211
ugccuuagaugguuugaca

SEQ ID NO: 1654868 - RNA, 19 nt, Artificial Sequence
  Description of Artificial Sequence: Synthetic oligonucleotide
  Antisense strand to SEQ ID NO: 1654867
ugucaaaccaucuaaggca

SEQ ID NO: 1654869 - RNA, 19 nt, Artificial Sequence
  Description of Artificial Sequence: Synthetic oligonucleotide
  Sense strand starting at position 3538 of SEQ ID NO: 1561211
augguuugacacugaucuu

SEQ ID NO: 1654870 - RNA, 19 nt, Artificial Sequence
  Description of Artificial Sequence: Synthetic oligonucleotide
  Antisense strand to SEQ ID NO: 1654869
aagaucagugucaaaccau

SEQ ID NO: 1654871 - RNA, 19 nt, Artificial Sequence
  Description of Artificial Sequence: Synthetic oligonucleotide
  Sense strand starting at position 3541 of SEQ ID NO: 1561211
guuugacacugaucuuguu

SEQ ID NO: 1654872 - RNA, 19 nt, Artificial Sequence
  Description of Artificial Sequence: Synthetic oligonucleotide
  Antisense strand to SEQ ID NO: 1654871
aacaagaucagugucaaac

SEQ ID NO: 1654873 - RNA, 19 nt, Artificial Sequence
  Description of Artificial Sequence: Synthetic oligonucleotide
  Sense strand starting at position 3760 of SEQ ID NO: 1561211
cccucaucuccaugugaug

SEQ ID NO: 1654874 - RNA, 19 nt, Artificial Sequence
  Description of Artificial Sequence: Synthetic oligonucleotide
  Antisense strand to SEQ ID NO: 1654873
caucacauggagaugaggg

SEQ ID NO: 1654875 - RNA, 19 nt, Artificial Sequence
  Description of Artificial Sequence: Synthetic oligonucleotide
  Sense strand starting at position 3763 of SEQ ID NO: 1561211
ucaucuccaugugauggua

SEQ ID NO: 1654876 - RNA, 19 nt, Artificial Sequence
  Description of Artificial Sequence: Synthetic oligonucleotide
  Antisense strand to SEQ ID NO: 1654875
uaccaucacauggagauga

SEQ ID NO: 1654877 - RNA, 19 nt, Artificial Sequence
  Description of Artificial Sequence: Synthetic oligonucleotide
  Sense strand starting at position 3765 of SEQ ID NO: 1561211
aucuccaugugaugguaau

SEQ ID NO: 1654878 - RNA, 19 nt, Artificial Sequence
  Description of Artificial Sequence: Synthetic oligonucleotide
  Antisense strand to SEQ ID NO: 1654877
auuaccaucacauggagau

SEQ ID NO: 1654879 - RNA, 19 nt, Artificial Sequence
  Description of Artificial Sequence: Synthetic oligonucleotide
  Sense strand starting at position 3766 of SEQ ID NO: 1561211
ucuccaugugaugguaauu

SEQ ID NO: 1654880 - RNA, 19 nt, Artificial Sequence
  Description of Artificial Sequence: Synthetic oligonucleotide
  Antisense strand to SEQ ID NO: 1654879
aauuaccaucacauggaga

SEQ ID NO: 1654881 - RNA, 19 nt, Artificial Sequence
  Description of Artificial Sequence: Synthetic oligonucleotide
  Sense strand starting at position 3771 of SEQ ID NO: 1561211
augugaugguaauugguga

SEQ ID NO: 1654882 - RNA, 19 nt, Artificial Sequence
  Description of Artificial Sequence: Synthetic oligonucleotide
  Antisense strand to SEQ ID NO: 1654881
ucaccaauuaccaucacau

SEQ ID NO: 1654883 - RNA, 19 nt, Artificial Sequence
  Description of Artificial Sequence: Synthetic oligonucleotide
  Sense strand starting at position 3804 of SEQ ID NO: 1561211
gaugaugagguuuggguga

SEQ ID NO: 1654884 - RNA, 19 nt, Artificial Sequence
  Description of Artificial Sequence: Synthetic oligonucleotide
  Antisense strand to SEQ ID NO: 1654883
ucacccaaaccucaucauc

SEQ ID NO: 1654885 - RNA, 19 nt, Artificial Sequence
  Description of Artificial Sequence: Synthetic oligonucleotide
  Sense strand starting at position 3817 of SEQ ID NO: 1561211
gggugaggucaugaggguu

SEQ ID NO: 1654886 - RNA, 19 nt, Artificial Sequence
  Description of Artificial Sequence: Synthetic oligonucleotide
  Antisense strand to SEQ ID NO: 1654885
aacccucaugaccucaccc

SEQ ID NO: 1654887 - RNA, 19 nt, Artificial Sequence
  Description of Artificial Sequence: Synthetic oligonucleotide
  Sense strand starting at position 3874 of SEQ ID NO: 1561211
gccagaacuugguuauccu

SEQ ID NO: 1654888 - RNA, 19 nt, Artificial Sequence
  Description of Artificial Sequence: Synthetic oligonucleotide
  Antisense strand to SEQ ID NO: 1654887
aggauaaccaaguucuggc

SEQ ID NO: 1654889 - RNA, 19 nt, Artificial Sequence
  Description of Artificial Sequence: Synthetic oligonucleotide
  Sense strand starting at position 3883 of SEQ ID NO: 1561211
ugguuauccucuuccaaug

SEQ ID NO: 1654890 - RNA, 19 nt, Artificial Sequence
  Description of Artificial Sequence: Synthetic oligonucleotide
  Antisense strand to SEQ ID NO: 1654889
cauuggaagaggauaacca

SEQ ID NO: 1654891 - RNA, 19 nt, Artificial Sequence
  Description of Artificial Sequence: Synthetic oligonucleotide
  Sense strand starting at position 12 of SEQ ID NO: 1561212
agcagagccaccugugaua

SEQ ID NO: 1654892 - RNA, 19 nt, Artificial Sequence
  Description of Artificial Sequence: Synthetic oligonucleotide
  Antisense strand to SEQ ID NO: 1654891
uaucacagguggcucugcu

SEQ ID NO: 1654893 - RNA, 19 nt, Artificial Sequence
  Description of Artificial Sequence: Synthetic oligonucleotide
  Sense strand starting at position 25 of SEQ ID NO: 1561212
gugauagcugcacagugaa

SEQ ID NO: 1654894 - RNA, 19 nt, Artificial Sequence
  Description of Artificial Sequence: Synthetic oligonucleotide
  Antisense strand to SEQ ID NO: 1654893
uucacugugcagcuaucac

SEQ ID NO: 1654895 - RNA, 19 nt, Artificial Sequence
  Description of Artificial Sequence: Synthetic oligonucleotide
  Sense strand starting at position 95 of SEQ ID NO: 1561212
gcagaaagucaccagcagu

SEQ ID NO: 1654896 - RNA, 19 nt, Artificial Sequence
  Description of Artificial Sequence: Synthetic oligonucleotide
  Antisense strand to SEQ ID NO: 1654895
acugcuggugacuuucugc

SEQ ID NO: 1654897 - RNA, 19 nt, Artificial Sequence
  Description of Artificial Sequence: Synthetic oligonucleotide
  Sense strand starting at position 98 of SEQ ID NO: 1561212
gaaagucaccagcagugua

SEQ ID NO: 1654898 - RNA, 19 nt, Artificial Sequence
  Description of Artificial Sequence: Synthetic oligonucleotide
  Antisense strand to SEQ ID NO: 1654897
uacacugcuggugacuuuc

SEQ ID NO: 1654899 - RNA, 19 nt, Artificial Sequence
  Description of Artificial Sequence: Synthetic oligonucleotide
  Sense strand starting at position 235 of SEQ ID NO: 1561212
ggcugagacccugaguguu

SEQ ID NO: 1654900 - RNA, 19 nt, Artificial Sequence
  Description of Artificial Sequence: Synthetic oligonucleotide
  Antisense strand to SEQ ID NO: 1654899
aacacucagggucucagcc

SEQ ID NO: 1654901 - RNA, 19 nt, Artificial Sequence
  Description of Artificial Sequence: Synthetic oligonucleotide
  Sense strand starting at position 334 of SEQ ID NO: 1561212
aggagcagcucugugaagu

SEQ ID NO: 1654902 - RNA, 19 nt, Artificial Sequence
  Description of Artificial Sequence: Synthetic oligonucleotide
  Antisense strand to SEQ ID NO: 1654901
acuucacagagcugcuccu

SEQ ID NO: 1654903 - RNA, 19 nt, Artificial Sequence
  Description of Artificial Sequence: Synthetic oligonucleotide
  Sense strand starting at position 597 of SEQ ID NO: 1561212
gggaaucgggccuauaauu

SEQ ID NO: 1654904 - RNA, 19 nt, Artificial Sequence
  Description of Artificial Sequence: Synthetic oligonucleotide
  Antisense strand to SEQ ID NO: 1654903
aauuauaggcccgauuccc

SEQ ID NO: 1654905 - RNA, 19 nt, Artificial Sequence
  Description of Artificial Sequence: Synthetic oligonucleotide
  Sense strand starting at position 640 of SEQ ID NO: 1561212
gggauugggccugggauca

SEQ ID NO: 1654906 - RNA, 19 nt, Artificial Sequence
  Description of Artificial Sequence: Synthetic oligonucleotide
  Antisense strand to SEQ ID NO: 1654905
ugaucccaggcccaauccc

SEQ ID NO: 1654907 - RNA, 19 nt, Artificial Sequence
  Description of Artificial Sequence: Synthetic oligonucleotide
  Sense strand starting at position 699 of SEQ ID NO: 1561212
uggguucgggccugagauu

SEQ ID NO: 1654908 - RNA, 19 nt, Artificial Sequence
  Description of Artificial Sequence: Synthetic oligonucleotide
  Antisense strand to SEQ ID NO: 1654907
aaucucaggcccgaaccca

SEQ ID NO: 1654909 - RNA, 19 nt, Artificial Sequence
  Description of Artificial Sequence: Synthetic oligonucleotide
  Sense strand starting at position 711 of SEQ ID NO: 1561212
ugagauugggccugggauu

SEQ ID NO: 1654910 - RNA, 19 nt, Artificial Sequence
  Description of Artificial Sequence: Synthetic oligonucleotide
  Antisense strand to SEQ ID NO: 1654909
aaucccaggcccaaucuca

SEQ ID NO: 1654911 - RNA, 19 nt, Artificial Sequence
  Description of Artificial Sequence: Synthetic oligonucleotide
  Sense strand starting at position 747 of SEQ ID NO: 1561212
uggguuugggccugagauu

SEQ ID NO: 1654912 - RNA, 19 nt, Artificial Sequence
  Description of Artificial Sequence: Synthetic oligonucleotide
  Antisense strand to SEQ ID NO: 1654911
aaucucaggcccaaaccca

SEQ ID NO: 1654913 - RNA, 19 nt, Artificial Sequence
  Description of Artificial Sequence: Synthetic oligonucleotide
  Sense strand starting at position 748 of SEQ ID NO: 1561212
ggguuugggccugagauug

SEQ ID NO: 1654914 - RNA, 19 nt, Artificial Sequence
  Description of Artificial Sequence: Synthetic oligonucleotide
  Antisense strand to SEQ ID NO: 1654913
caaucucaggcccaaaccc

SEQ ID NO: 1654915 - RNA, 19 nt, Artificial Sequence
  Description of Artificial Sequence: Synthetic oligonucleotide
  Sense strand starting at position 759 of SEQ ID NO: 1561212
ugagauugggccugagauu

SEQ ID NO: 1654916 - RNA, 19 nt, Artificial Sequence
  Description of Artificial Sequence: Synthetic oligonucleotide
  Antisense strand to SEQ ID NO: 1654915
aaucucaggcccaaucuca

SEQ ID NO: 1654917 - RNA, 19 nt, Artificial Sequence
  Description of Artificial Sequence: Synthetic oligonucleotide
  Sense strand starting at position 795 of SEQ ID NO: 1561212
ugggaucgggacugagauu

SEQ ID NO: 1654918 - RNA, 19 nt, Artificial Sequence
  Description of Artificial Sequence: Synthetic oligonucleotide
  Antisense strand to SEQ ID NO: 1654917
aaucucagucccgauccca

SEQ ID NO: 1654919 - RNA, 19 nt, Artificial Sequence
  Description of Artificial Sequence: Synthetic oligonucleotide
  Sense strand starting at position 879 of SEQ ID NO: 1561212
uggguuugggccugagaau

SEQ ID NO: 1654920 - RNA, 19 nt, Artificial Sequence
  Description of Artificial Sequence: Synthetic oligonucleotide
  Antisense strand to SEQ ID NO: 1654919
auucucaggcccaaaccca

SEQ ID NO: 1654921 - RNA, 19 nt, Artificial Sequence
  Description of Artificial Sequence: Synthetic oligonucleotide
  Sense strand starting at position 880 of SEQ ID NO: 1561212
ggguuugggccugagaaug

SEQ ID NO: 1654922 - RNA, 19 nt, Artificial Sequence
  Description of Artificial Sequence: Synthetic oligonucleotide
  Antisense strand to SEQ ID NO: 1654921
cauucucaggcccaaaccc

SEQ ID NO: 1654923 - RNA, 19 nt, Artificial Sequence
  Description of Artificial Sequence: Synthetic oligonucleotide
  Sense strand starting at position 891 of SEQ ID NO: 1561212
ugagaaugggccugagauu

SEQ ID NO: 1654924 - RNA, 19 nt, Artificial Sequence
  Description of Artificial Sequence: Synthetic oligonucleotide
  Antisense strand to SEQ ID NO: 1654923
aaucucaggcccauucuca

SEQ ID NO: 1654925 - RNA, 19 nt, Artificial Sequence
  Description of Artificial Sequence: Synthetic oligonucleotide
  Sense strand starting at position 975 of SEQ ID NO: 1561212
cuggacugggccugaaauu

SEQ ID NO: 1654926 - RNA, 19 nt, Artificial Sequence
  Description of Artificial Sequence: Synthetic oligonucleotide
  Antisense strand to SEQ ID NO: 1654925
aauuucaggcccaguccag

SEQ ID NO: 1654927 - RNA, 19 nt, Artificial Sequence
  Description of Artificial Sequence: Synthetic oligonucleotide
  Sense strand starting at position 987 of SEQ ID NO: 1561212
ugaaauugggccugggauu

SEQ ID NO: 1654928 - RNA, 19 nt, Artificial Sequence
  Description of Artificial Sequence: Synthetic oligonucleotide
  Antisense strand to SEQ ID NO: 1654927
aaucccaggcccaauuuca

SEQ ID NO: 1654929 - RNA, 19 nt, Artificial Sequence
  Description of Artificial Sequence: Synthetic oligonucleotide
  Sense strand starting at position 1041 of SEQ ID NO: 1561212
uggaauugggccuggaauu

SEQ ID NO: 1654930 - RNA, 19 nt, Artificial Sequence
  Description of Artificial Sequence: Synthetic oligonucleotide
  Antisense strand to SEQ ID NO: 1654929
aauuccaggcccaauucca

SEQ ID NO: 1654931 - RNA, 19 nt, Artificial Sequence
  Description of Artificial Sequence: Synthetic oligonucleotide
  Sense strand starting at position 1721 of SEQ ID NO: 1561212
cgaguuugggcuagcauag

SEQ ID NO: 1654932 - RNA, 19 nt, Artificial Sequence
  Description of Artificial Sequence: Synthetic oligonucleotide
  Antisense strand to SEQ ID NO: 1654931
cuaugcuagcccaaacucg

SEQ ID NO: 1654933 - RNA, 19 nt, Artificial Sequence
  Description of Artificial Sequence: Synthetic oligonucleotide
  Sense strand starting at position 1731 of SEQ ID NO: 1561212
cuagcauagaguuggaaca

SEQ ID NO: 1654934 - RNA, 19 nt, Artificial Sequence
  Description of Artificial Sequence: Synthetic oligonucleotide
  Antisense strand to SEQ ID NO: 1654933
uguuccaacucuaugcuag

SEQ ID NO: 1654935 - RNA, 19 nt, Artificial Sequence
  Description of Artificial Sequence: Synthetic oligonucleotide
  Sense strand starting at position 1961 of SEQ ID NO: 1561212
ggguacugguccuucugaa

SEQ ID NO: 1654936 - RNA, 19 nt, Artificial Sequence
  Description of Artificial Sequence: Synthetic oligonucleotide
  Antisense strand to SEQ ID NO: 1654935
uucagaaggaccaguaccc

SEQ ID NO: 1654937 - RNA, 19 nt, Artificial Sequence
  Description of Artificial Sequence: Synthetic oligonucleotide
  Sense strand starting at position 2237 of SEQ ID NO: 1561212
gguccacaucuaggaaaua

SEQ ID NO: 1654938 - RNA, 19 nt, Artificial Sequence
  Description of Artificial Sequence: Synthetic oligonucleotide
  Antisense strand to SEQ ID NO: 1654937
uauuuccuagauguggacc

SEQ ID NO: 1654939 - RNA, 19 nt, Artificial Sequence
  Description of Artificial Sequence: Synthetic oligonucleotide
  Sense strand starting at position 2246 of SEQ ID NO: 1561212
cuaggaaauaggcgcgaua

SEQ ID NO: 1654940 - RNA, 19 nt, Artificial Sequence
  Description of Artificial Sequence: Synthetic oligonucleotide
  Antisense strand to SEQ ID NO: 1654939
uaucgcgccuauuuccuag

SEQ ID NO: 1654941 - RNA, 19 nt, Artificial Sequence
  Description of Artificial Sequence: Synthetic oligonucleotide
  Sense strand starting at position 2249 of SEQ ID NO: 1561212
ggaaauaggcgcgauaaca

SEQ ID NO: 1654942 - RNA, 19 nt, Artificial Sequence
  Description of Artificial Sequence: Synthetic oligonucleotide
  Antisense strand to SEQ ID NO: 1654941
uguuaucgcgccuauuucc

SEQ ID NO: 1654943 - RNA, 19 nt, Artificial Sequence
  Description of Artificial Sequence: Synthetic oligonucleotide
  Sense strand starting at position 2428 of SEQ ID NO: 1561212
acucaacugcaugguuuaa

SEQ ID NO: 1654944 - RNA, 19 nt, Artificial Sequence
  Description of Artificial Sequence: Synthetic oligonucleotide
  Antisense strand to SEQ ID NO: 1654943
uuaaaccaugcaguugagu

SEQ ID NO: 1654945 - RNA, 19 nt, Artificial Sequence
  Description of Artificial Sequence: Synthetic oligonucleotide
  Sense strand starting at position 2430 of SEQ ID NO: 1561212
ucaacugcaugguuuaauu

SEQ ID NO: 1654946 - RNA, 19 nt, Artificial Sequence
  Description of Artificial Sequence: Synthetic oligonucleotide
  Antisense strand to SEQ ID NO: 1654945
aauuaaaccaugcaguuga

SEQ ID NO: 1654947 - RNA, 19 nt, Artificial Sequence
  Description of Artificial Sequence: Synthetic oligonucleotide
  Sense strand starting at position 2509 of SEQ ID NO: 1561212
ugaugugaucacggcucaa

SEQ ID NO: 1654948 - RNA, 19 nt, Artificial Sequence
  Description of Artificial Sequence: Synthetic oligonucleotide
  Antisense strand to SEQ ID NO: 1654947
uugagccgugaucacauca

SEQ ID NO: 1654949 - RNA, 19 nt, Artificial Sequence
  Description of Artificial Sequence: Synthetic oligonucleotide
  Sense strand starting at position 3297 of SEQ ID NO: 1561212
aggagucauccuuguuccu

SEQ ID NO: 1654950 - RNA, 19 nt, Artificial Sequence
  Description of Artificial Sequence: Synthetic oligonucleotide
  Antisense strand to SEQ ID NO: 1654949
aggaacaaggaugacuccu

SEQ ID NO: 1654951 - RNA, 19 nt, Artificial Sequence
  Description of Artificial Sequence: Synthetic oligonucleotide
  Sense strand starting at position 3505 of SEQ ID NO: 1561212
guaagcagagcuuaguaca

SEQ ID NO: 1654952 - RNA, 19 nt, Artificial Sequence
  Description of Artificial Sequence: Synthetic oligonucleotide
  Antisense strand to SEQ ID NO: 1654951
uguacuaagcucugcuuac

SEQ ID NO: 1654953 - RNA, 19 nt, Artificial Sequence
  Description of Artificial Sequence: Synthetic oligonucleotide
  Sense strand starting at position 3533 of SEQ ID NO: 1561212
ugcugauaaugguuugguu

SEQ ID NO: 1654954 - RNA, 19 nt, Artificial Sequence
  Description of Artificial Sequence: Synthetic oligonucleotide
  Antisense strand to SEQ ID NO: 1654953
aaccaaaccauuaucagca

SEQ ID NO: 1654955 - RNA, 19 nt, Artificial Sequence
  Description of Artificial Sequence: Synthetic oligonucleotide
  Sense strand starting at position 3609 of SEQ ID NO: 1561212
uugguuucuccuggagagu

SEQ ID NO: 1654956 - RNA, 19 nt, Artificial Sequence
  Description of Artificial Sequence: Synthetic oligonucleotide
  Antisense strand to SEQ ID NO: 1654955
acucuccaggagaaaccaa

SEQ ID NO: 1654957 - RNA, 19 nt, Artificial Sequence
  Description of Artificial Sequence: Synthetic oligonucleotide
  Sense strand starting at position 3610 of SEQ ID NO: 1561212
ugguuucuccuggagagua

SEQ ID NO: 1654958 - RNA, 19 nt, Artificial Sequence
  Description of Artificial Sequence: Synthetic oligonucleotide
  Antisense strand to SEQ ID NO: 1654957
uacucuccaggagaaacca

SEQ ID NO: 1654959 - RNA, 19 nt, Artificial Sequence
  Description of Artificial Sequence: Synthetic oligonucleotide
  Sense strand starting at position 3612 of SEQ ID NO: 1561212
guuucuccuggagaguaaa

SEQ ID NO: 1654960 - RNA, 19 nt, Artificial Sequence
  Description of Artificial Sequence: Synthetic oligonucleotide
  Antisense strand to SEQ ID NO: 1654959
uuuacucuccaggagaaac

SEQ ID NO: 1654961 - RNA, 19 nt, Artificial Sequence
  Description of Artificial Sequence: Synthetic oligonucleotide
  Sense strand starting at position 3622 of SEQ ID NO: 1561212
gagaguaaaugaccucagu

SEQ ID NO: 1654962 - RNA, 19 nt, Artificial Sequence
  Description of Artificial Sequence: Synthetic oligonucleotide
  Antisense strand to SEQ ID NO: 1654961
acugaggucauuuacucuc

SEQ ID NO: 1654963 - RNA, 19 nt, Artificial Sequence
  Description of Artificial Sequence: Synthetic oligonucleotide
  Sense strand starting at position 3772 of SEQ ID NO: 1561212
ugcccuugugagugaauga

SEQ ID NO: 1654964 - RNA, 19 nt, Artificial Sequence
  Description of Artificial Sequence: Synthetic oligonucleotide
  Antisense strand to SEQ ID NO: 1654963
ucauucacucacaagggca

SEQ ID NO: 1654965 - RNA, 19 nt, Artificial Sequence
  Description of Artificial Sequence: Synthetic oligonucleotide
  Sense strand starting at position 3773 of SEQ ID NO: 1561212
gcccuugugagugaaugaa

SEQ ID NO: 1654966 - RNA, 19 nt, Artificial Sequence
  Description of Artificial Sequence: Synthetic oligonucleotide
  Antisense strand to SEQ ID NO: 1654965
uucauucacucacaagggc

SEQ ID NO: 1654967 - RNA, 19 nt, Artificial Sequence
  Description of Artificial Sequence: Synthetic oligonucleotide
  Sense strand starting at position 3813 of SEQ ID NO: 1561212
gacccaugaccuuggucua

SEQ ID NO: 1654968 - RNA, 19 nt, Artificial Sequence
  Description of Artificial Sequence: Synthetic oligonucleotide
  Antisense strand to SEQ ID NO: 1654967
uagaccaaggucauggguc

SEQ ID NO: 1654969 - RNA, 19 nt, Artificial Sequence
  Description of Artificial Sequence: Synthetic oligonucleotide
  Sense strand starting at position 3926 of SEQ ID NO: 1561212
agagauugacaaggcucau

SEQ ID NO: 1654970 - RNA, 19 nt, Artificial Sequence
  Description of Artificial Sequence: Synthetic oligonucleotide
  Antisense strand to SEQ ID NO: 1654969
augagccuugucaaucucu

SEQ ID NO: 1654971 - RNA, 19 nt, Artificial Sequence
  Description of Artificial Sequence: Synthetic oligonucleotide
  Sense strand starting at position 751 of SEQ ID NO: 1561213
gauuacacguaaccagaua

SEQ ID NO: 1654972 - RNA, 19 nt, Artificial Sequence
  Description of Artificial Sequence: Synthetic oligonucleotide
  Antisense strand to SEQ ID NO: 1654971
uaucugguuacguguaauc

SEQ ID NO: 1654973 - RNA, 19 nt, Artificial Sequence
  Description of Artificial Sequence: Synthetic oligonucleotide
  Sense strand starting at position 1101 of SEQ ID NO: 1561213
ugcggaaagccagaguaaa

SEQ ID NO: 1654974 - RNA, 19 nt, Artificial Sequence
  Description of Artificial Sequence: Synthetic oligonucleotide
  Antisense strand to SEQ ID NO: 1654973
uuuacucuggcuuuccgca

SEQ ID NO: 1654975 - RNA, 19 nt, Artificial Sequence
  Description of Artificial Sequence: Synthetic oligonucleotide
  Sense strand starting at position 1259 of SEQ ID NO: 1561213
cgaugugucacgcaggaac

SEQ ID NO: 1654976 - RNA, 19 nt, Artificial Sequence
  Description of Artificial Sequence: Synthetic oligonucleotide
  Antisense strand to SEQ ID NO: 1654975
guuccugcgugacacaucg

SEQ ID NO: 1654977 - RNA, 19 nt, Artificial Sequence
  Description of Artificial Sequence: Synthetic oligonucleotide
  Sense strand starting at position 1275 of SEQ ID NO: 1561213
aacccuucguccuuugaga

SEQ ID NO: 1654978 - RNA, 19 nt, Artificial Sequence
  Description of Artificial Sequence: Synthetic oligonucleotide
  Antisense strand to SEQ ID NO: 1654977
ucucaaaggacgaaggguu

SEQ ID NO: 1654979 - RNA, 19 nt, Artificial Sequence
  Description of Artificial Sequence: Synthetic oligonucleotide
  Sense strand starting at position 1359 of SEQ ID NO: 1561213
ccgugcucuccagaaagga

SEQ ID NO: 1654980 - RNA, 19 nt, Artificial Sequence
  Description of Artificial Sequence: Synthetic oligonucleotide
  Antisense strand to SEQ ID NO: 1654979
uccuuucuggagagcacgg

SEQ ID NO: 1654981 - RNA, 19 nt, Artificial Sequence
  Description of Artificial Sequence: Synthetic oligonucleotide
  Sense strand starting at position 2641 of SEQ ID NO: 1561213
augcaugagcgguggacau

SEQ ID NO: 1654982 - RNA, 19 nt, Artificial Sequence
  Description of Artificial Sequence: Synthetic oligonucleotide
  Antisense strand to SEQ ID NO: 1654981
auguccaccgcucaugcau

SEQ ID NO: 1654983 - RNA, 19 nt, Artificial Sequence
  Description of Artificial Sequence: Synthetic oligonucleotide
  Sense strand starting at position 2688 of SEQ ID NO: 1561213
auacaugcucaauggcaua

SEQ ID NO: 1654984 - RNA, 19 nt, Artificial Sequence
  Description of Artificial Sequence: Synthetic oligonucleotide
  Antisense strand to SEQ ID NO: 1654983
uaugccauugagcauguau

SEQ ID NO: 1654985 - RNA, 19 nt, Artificial Sequence
  Description of Artificial Sequence: Synthetic oligonucleotide
  Sense strand starting at position 2693 of SEQ ID NO: 1561213
ugcucaauggcauagauac

SEQ ID NO: 1654986 - RNA, 19 nt, Artificial Sequence
  Description of Artificial Sequence: Synthetic oligonucleotide
  Antisense strand to SEQ ID NO: 1654985
guaucuaugccauugagca

SEQ ID NO: 1654987 - RNA, 19 nt, Artificial Sequence
  Description of Artificial Sequence: Synthetic oligonucleotide
  Sense strand starting at position 2742 of SEQ ID NO: 1561213
acgcuuagggcuuguauau

SEQ ID NO: 1654988 - RNA, 19 nt, Artificial Sequence
  Description of Artificial Sequence: Synthetic oligonucleotide
  Antisense strand to SEQ ID NO: 1654987
auauacaagcccuaagcgu

SEQ ID NO: 1654989 - RNA, 19 nt, Artificial Sequence
  Description of Artificial Sequence: Synthetic oligonucleotide
  Sense strand starting at position 2755 of SEQ ID NO: 1561213
guauauauccgugguccca

SEQ ID NO: 1654990 - RNA, 19 nt, Artificial Sequence
  Description of Artificial Sequence: Synthetic oligonucleotide
  Antisense strand to SEQ ID NO: 1654989
ugggaccacggauauauac

SEQ ID NO: 1654991 - RNA, 19 nt, Artificial Sequence
  Description of Artificial Sequence: Synthetic oligonucleotide
  Sense strand starting at position 2772 of SEQ ID NO: 1561213
cagguacacucagggagau

SEQ ID NO: 1654992 - RNA, 19 nt, Artificial Sequence
  Description of Artificial Sequence: Synthetic oligonucleotide
  Antisense strand to SEQ ID NO: 1654991
aucucccugaguguaccug

SEQ ID NO: 1654993 - RNA, 19 nt, Artificial Sequence
  Description of Artificial Sequence: Synthetic oligonucleotide
  Sense strand starting at position 2778 of SEQ ID NO: 1561213
cacucagggagauguugua

SEQ ID NO: 1654994 - RNA, 19 nt, Artificial Sequence
  Description of Artificial Sequence: Synthetic oligonucleotide
  Antisense strand to SEQ ID NO: 1654993
uacaacaucucccugagug

SEQ ID NO: 1654995 - RNA, 19 nt, Artificial Sequence
  Description of Artificial Sequence: Synthetic oligonucleotide
  Sense strand starting at position 2836 of SEQ ID NO: 1561213
gggaaugaguuacucauuc

SEQ ID NO: 1654996 - RNA, 19 nt, Artificial Sequence
  Description of Artificial Sequence: Synthetic oligonucleotide
  Antisense strand to SEQ ID NO: 1654995
gaaugaguaacucauuccc

SEQ ID NO: 1654997 - RNA, 19 nt, Artificial Sequence
  Description of Artificial Sequence: Synthetic oligonucleotide
  Sense strand starting at position 2912 of SEQ ID NO: 1561213
gucauugucacgugcagac

SEQ ID NO: 1654998 - RNA, 19 nt, Artificial Sequence
  Description of Artificial Sequence: Synthetic oligonucleotide
  Antisense strand to SEQ ID NO: 1654997
gucugcacgugacaaugac

SEQ ID NO: 1654999 - RNA, 19 nt, Artificial Sequence
  Description of Artificial Sequence: Synthetic oligonucleotide
  Sense strand starting at position 3828 of SEQ ID NO: 1561213
cgccaacuuacguggcauu

SEQ ID NO: 1655000 - RNA, 19 nt, Artificial Sequence
  Description of Artificial Sequence: Synthetic oligonucleotide
  Antisense strand to SEQ ID NO: 1654999
aaugccacguaaguuggcg

SEQ ID NO: 1655001 - RNA, 19 nt, Artificial Sequence
  Description of Artificial Sequence: Synthetic oligonucleotide
  Sense strand starting at position 406 of SEQ ID NO: 1561214
uuaugacagguuuguaucu

SEQ ID NO: 1655002 - RNA, 19 nt, Artificial Sequence
  Description of Artificial Sequence: Synthetic oligonucleotide
  Antisense strand to SEQ ID NO: 1655001
agauacaaaccugucauaa

SEQ ID NO: 1655003 - RNA, 19 nt, Artificial Sequence
  Description of Artificial Sequence: Synthetic oligonucleotide
  Sense strand starting at position 411 of SEQ ID NO: 1561214
acagguuuguaucuguaua

SEQ ID NO: 1655004 - RNA, 19 nt, Artificial Sequence
  Description of Artificial Sequence: Synthetic oligonucleotide
  Antisense strand to SEQ ID NO: 1655003
uauacagauacaaaccugu

SEQ ID NO: 1655005 - RNA, 19 nt, Artificial Sequence
  Description of Artificial Sequence: Synthetic oligonucleotide
  Sense strand starting at position 413 of SEQ ID NO: 1561214
agguuuguaucuguauauc

SEQ ID NO: 1655006 - RNA, 19 nt, Artificial Sequence
  Description of Artificial Sequence: Synthetic oligonucleotide
  Antisense strand to SEQ ID NO: 1655005
gauauacagauacaaaccu

SEQ ID NO: 1655007 - RNA, 19 nt, Artificial Sequence
  Description of Artificial Sequence: Synthetic oligonucleotide
  Sense strand starting at position 422 of SEQ ID NO: 1561214
ucuguauaucgagauggua

SEQ ID NO: 1655008 - RNA, 19 nt, Artificial Sequence
  Description of Artificial Sequence: Synthetic oligonucleotide
  Antisense strand to SEQ ID NO: 1655007
uaccaucucgauauacaga

SEQ ID NO: 1655009 - RNA, 19 nt, Artificial Sequence
  Description of Artificial Sequence: Synthetic oligonucleotide
  Sense strand starting at position 424 of SEQ ID NO: 1561214
uguauaucgagaugguaac

SEQ ID NO: 1655010 - RNA, 19 nt, Artificial Sequence
  Description of Artificial Sequence: Synthetic oligonucleotide
  Antisense strand to SEQ ID NO: 1655009
guuaccaucucgauauaca

SEQ ID NO: 1655011 - RNA, 19 nt, Artificial Sequence
  Description of Artificial Sequence: Synthetic oligonucleotide
  Sense strand starting at position 425 of SEQ ID NO: 1561214
guauaucgagaugguaaca

SEQ ID NO: 1655012 - RNA, 19 nt, Artificial Sequence
  Description of Artificial Sequence: Synthetic oligonucleotide
  Antisense strand to SEQ ID NO: 1655011
uguuaccaucucgauauac

SEQ ID NO: 1655013 - RNA, 19 nt, Artificial Sequence
  Description of Artificial Sequence: Synthetic oligonucleotide
  Sense strand starting at position 462 of SEQ ID NO: 1561214
gcuucuaacccuggaagga

SEQ ID NO: 1655014 - RNA, 19 nt, Artificial Sequence
  Description of Artificial Sequence: Synthetic oligonucleotide
  Antisense strand to SEQ ID NO: 1655013
uccuuccaggguuagaagc

SEQ ID NO: 1655015 - RNA, 19 nt, Artificial Sequence
  Description of Artificial Sequence: Synthetic oligonucleotide
  Sense strand starting at position 837 of SEQ ID NO: 1561214
ggcugagaagugggaugau

SEQ ID NO: 1655016 - RNA, 19 nt, Artificial Sequence
  Description of Artificial Sequence: Synthetic oligonucleotide
  Antisense strand to SEQ ID NO: 1655015
aucaucccacuucucagcc

SEQ ID NO: 1655017 - RNA, 19 nt, Artificial Sequence
  Description of Artificial Sequence: Synthetic oligonucleotide
  Sense strand starting at position 1430 of SEQ ID NO: 1561214
gggauucugucuuagaacg

SEQ ID NO: 1655018 - RNA, 19 nt, Artificial Sequence
  Description of Artificial Sequence: Synthetic oligonucleotide
  Antisense strand to SEQ ID NO: 1655017
cguucuaagacagaauccc

SEQ ID NO: 1655019 - RNA, 19 nt, Artificial Sequence
  Description of Artificial Sequence: Synthetic oligonucleotide
  Sense strand starting at position 1442 of SEQ ID NO: 1561214
uagaacggugccuggaaua

SEQ ID NO: 1655020 - RNA, 19 nt, Artificial Sequence
  Description of Artificial Sequence: Synthetic oligonucleotide
  Antisense strand to SEQ ID NO: 1655019
uauuccaggcaccguucua

SEQ ID NO: 1655021 - RNA, 19 nt, Artificial Sequence
  Description of Artificial Sequence: Synthetic oligonucleotide
  Sense strand starting at position 1471 of SEQ ID NO: 1561214
ucaauaagugggugucgaa

SEQ ID NO: 1655022 - RNA, 19 nt, Artificial Sequence
  Description of Artificial Sequence: Synthetic oligonucleotide
  Antisense strand to SEQ ID NO: 1655021
uucgacacccacuuauuga

SEQ ID NO: 1655023 - RNA, 19 nt, Artificial Sequence
  Description of Artificial Sequence: Synthetic oligonucleotide
  Sense strand starting at position 1478 of SEQ ID NO: 1561214
gugggugucgaauaaauaa

SEQ ID NO: 1655024 - RNA, 19 nt, Artificial Sequence
  Description of Artificial Sequence: Synthetic oligonucleotide
  Antisense strand to SEQ ID NO: 1655023
uuauuuauucgacacccac

SEQ ID NO: 1655025 - RNA, 19 nt, Artificial Sequence
  Description of Artificial Sequence: Synthetic oligonucleotide
  Sense strand starting at position 1510 of SEQ ID NO: 1561214
aggcuuagguacguuauga

SEQ ID NO: 1655026 - RNA, 19 nt, Artificial Sequence
  Description of Artificial Sequence: Synthetic oligonucleotide
  Antisense strand to SEQ ID NO: 1655025
ucauaacguaccuaagccu

SEQ ID NO: 1655027 - RNA, 19 nt, Artificial Sequence
  Description of Artificial Sequence: Synthetic oligonucleotide
  Sense strand starting at position 1633 of SEQ ID NO: 1561214
gcauuauuaugauuacuag

SEQ ID NO: 1655028 - RNA, 19 nt, Artificial Sequence
  Description of Artificial Sequence: Synthetic oligonucleotide
  Antisense strand to SEQ ID NO: 1655027
cuaguaaucauaauaaugc

SEQ ID NO: 1655029 - RNA, 19 nt, Artificial Sequence
  Description of Artificial Sequence: Synthetic oligonucleotide
  Sense strand starting at position 1640 of SEQ ID NO: 1561214
uaugauuacuagccgcuua

SEQ ID NO: 1655030 - RNA, 19 nt, Artificial Sequence
  Description of Artificial Sequence: Synthetic oligonucleotide
  Antisense strand to SEQ ID NO: 1655029
uaagcggcuaguaaucaua

SEQ ID NO: 1655031 - RNA, 19 nt, Artificial Sequence
  Description of Artificial Sequence: Synthetic oligonucleotide
  Sense strand starting at position 1656 of SEQ ID NO: 1561214
uuacucaggccuugagcua

SEQ ID NO: 1655032 - RNA, 19 nt, Artificial Sequence
  Description of Artificial Sequence: Synthetic oligonucleotide
  Antisense strand to SEQ ID NO: 1655031
uagcucaaggccugaguaa

SEQ ID NO: 1655033 - RNA, 19 nt, Artificial Sequence
  Description of Artificial Sequence: Synthetic oligonucleotide
  Sense strand starting at position 1672 of SEQ ID NO: 1561214
cuaagugcuuuacccugaa

SEQ ID NO: 1655034 - RNA, 19 nt, Artificial Sequence
  Description of Artificial Sequence: Synthetic oligonucleotide
  Antisense strand to SEQ ID NO: 1655033
uucaggguaaagcacuuag

SEQ ID NO: 1655035 - RNA, 19 nt, Artificial Sequence
  Description of Artificial Sequence: Synthetic oligonucleotide
  Sense strand starting at position 1675 of SEQ ID NO: 1561214
agugcuuuacccugaauca

SEQ ID NO: 1655036 - RNA, 19 nt, Artificial Sequence
  Description of Artificial Sequence: Synthetic oligonucleotide
  Antisense strand to SEQ ID NO: 1655035
ugauucaggguaaagcacu

SEQ ID NO: 1655037 - RNA, 19 nt, Artificial Sequence
  Description of Artificial Sequence: Synthetic oligonucleotide
  Sense strand starting at position 1676 of SEQ ID NO: 1561214
gugcuuuacccugaaucau

SEQ ID NO: 1655038 - RNA, 19 nt, Artificial Sequence
  Description of Artificial Sequence: Synthetic oligonucleotide
  Antisense strand to SEQ ID NO: 1655037
augauucaggguaaagcac

SEQ ID NO: 1655039 - RNA, 19 nt, Artificial Sequence
  Description of Artificial Sequence: Synthetic oligonucleotide
  Sense strand starting at position 1696 of SEQ ID NO: 1561214
gcgcucaauuuagcaauaa

SEQ ID NO: 1655040 - RNA, 19 nt, Artificial Sequence
  Description of Artificial Sequence: Synthetic oligonucleotide
  Antisense strand to SEQ ID NO: 1655039
uuauugcuaaauugagcgc

SEQ ID NO: 1655041 - RNA, 19 nt, Artificial Sequence
  Description of Artificial Sequence: Synthetic oligonucleotide
  Sense strand starting at position 1697 of SEQ ID NO: 1561214
cgcucaauuuagcaauaac

SEQ ID NO: 1655042 - RNA, 19 nt, Artificial Sequence
  Description of Artificial Sequence: Synthetic oligonucleotide
  Antisense strand to SEQ ID NO: 1655041
guuauugcuaaauugagcg

SEQ ID NO: 1655043 - RNA, 19 nt, Artificial Sequence
  Description of Artificial Sequence: Synthetic oligonucleotide
  Sense strand starting at position 1929 of SEQ ID NO: 1561214
gccaccaucuccgugugaa

SEQ ID NO: 1655044 - RNA, 19 nt, Artificial Sequence
  Description of Artificial Sequence: Synthetic oligonucleotide
  Antisense strand to SEQ ID NO: 1655043
uucacacggagaugguggc

SEQ ID NO: 1655045 - RNA, 19 nt, Artificial Sequence
  Description of Artificial Sequence: Synthetic oligonucleotide
  Sense strand starting at position 1930 of SEQ ID NO: 1561214
ccaccaucuccgugugaag

SEQ ID NO: 1655046 - RNA, 19 nt, Artificial Sequence
  Description of Artificial Sequence: Synthetic oligonucleotide
  Antisense strand to SEQ ID NO: 1655045
cuucacacggagauggugg

SEQ ID NO: 1655047 - RNA, 19 nt, Artificial Sequence
  Description of Artificial Sequence: Synthetic oligonucleotide
  Sense strand starting at position 1932 of SEQ ID NO: 1561214
accaucuccgugugaagaa

SEQ ID NO: 1655048 - RNA, 19 nt, Artificial Sequence
  Description of Artificial Sequence: Synthetic oligonucleotide
  Antisense strand to SEQ ID NO: 1655047
uucuucacacggagauggu

SEQ ID NO: 1655049 - RNA, 19 nt, Artificial Sequence
  Description of Artificial Sequence: Synthetic oligonucleotide
  Sense strand starting at position 1933 of SEQ ID NO: 1561214
ccaucuccgugugaagaaa

SEQ ID NO: 1655050 - RNA, 19 nt, Artificial Sequence
  Description of Artificial Sequence: Synthetic oligonucleotide
  Antisense strand to SEQ ID NO: 1655049
uuucuucacacggagaugg

SEQ ID NO: 1655051 - RNA, 19 nt, Artificial Sequence
  Description of Artificial Sequence: Synthetic oligonucleotide
  Sense strand starting at position 2243 of SEQ ID NO: 1561214
gcauuccuauuggccaaau

SEQ ID NO: 1655052 - RNA, 19 nt, Artificial Sequence
  Description of Artificial Sequence: Synthetic oligonucleotide
  Antisense strand to SEQ ID NO: 1655051
auuuggccaauaggaaugc

SEQ ID NO: 1655053 - RNA, 19 nt, Artificial Sequence
  Description of Artificial Sequence: Synthetic oligonucleotide
  Sense strand starting at position 2263 of SEQ ID NO: 1561214
acugguuacacgugacaua

SEQ ID NO: 1655054 - RNA, 19 nt, Artificial Sequence
  Description of Artificial Sequence: Synthetic oligonucleotide
  Antisense strand to SEQ ID NO: 1655053
uaugucacguguaaccagu

SEQ ID NO: 1655055 - RNA, 19 nt, Artificial Sequence
  Description of Artificial Sequence: Synthetic oligonucleotide
  Sense strand starting at position 2272 of SEQ ID NO: 1561214
acgugacauacucggcuuu

SEQ ID NO: 1655056 - RNA, 19 nt, Artificial Sequence
  Description of Artificial Sequence: Synthetic oligonucleotide
  Antisense strand to SEQ ID NO: 1655055
aaagccgaguaugucacgu

SEQ ID NO: 1655057 - RNA, 19 nt, Artificial Sequence
  Description of Artificial Sequence: Synthetic oligonucleotide
  Sense strand starting at position 2314 of SEQ ID NO: 1561214
agacuuuccucgucgcaca

SEQ ID NO: 1655058 - RNA, 19 nt, Artificial Sequence
  Description of Artificial Sequence: Synthetic oligonucleotide
  Antisense strand to SEQ ID NO: 1655057
ugugcgacgaggaaagucu

SEQ ID NO: 1655059 - RNA, 19 nt, Artificial Sequence
  Description of Artificial Sequence: Synthetic oligonucleotide
  Sense strand starting at position 2315 of SEQ ID NO: 1561214
gacuuuccucgucgcacaa

SEQ ID NO: 1655060 - RNA, 19 nt, Artificial Sequence
  Description of Artificial Sequence: Synthetic oligonucleotide
  Antisense strand to SEQ ID NO: 1655059
uugugcgacgaggaaaguc

SEQ ID NO: 1655061 - RNA, 19 nt, Artificial Sequence
  Description of Artificial Sequence: Synthetic oligonucleotide
  Sense strand starting at position 2446 of SEQ ID NO: 1561214
ggcgaauccacgugacuug

SEQ ID NO: 1655062 - RNA, 19 nt, Artificial Sequence
  Description of Artificial Sequence: Synthetic oligonucleotide
  Antisense strand to SEQ ID NO: 1655061
caagucacguggauucgcc

SEQ ID NO: 1655063 - RNA, 19 nt, Artificial Sequence
  Description of Artificial Sequence: Synthetic oligonucleotide
  Sense strand starting at position 2455 of SEQ ID NO: 1561214
acgugacuuggccgcuaau

SEQ ID NO: 1655064 - RNA, 19 nt, Artificial Sequence
  Description of Artificial Sequence: Synthetic oligonucleotide
  Antisense strand to SEQ ID NO: 1655063
auuagcggccaagucacgu

SEQ ID NO: 1655065 - RNA, 19 nt, Artificial Sequence
  Description of Artificial Sequence: Synthetic oligonucleotide
  Sense strand starting at position 2601 of SEQ ID NO: 1561214
gcguuagcgcuucucccau

SEQ ID NO: 1655066 - RNA, 19 nt, Artificial Sequence
  Description of Artificial Sequence: Synthetic oligonucleotide
  Antisense strand to SEQ ID NO: 1655065
augggagaagcgcuaacgc

SEQ ID NO: 1655067 - RNA, 19 nt, Artificial Sequence
  Description of Artificial Sequence: Synthetic oligonucleotide
  Sense strand starting at position 2706 of SEQ ID NO: 1561214
ugcuuccgggucugagauu

SEQ ID NO: 1655068 - RNA, 19 nt, Artificial Sequence
  Description of Artificial Sequence: Synthetic oligonucleotide
  Antisense strand to SEQ ID NO: 1655067
aaucucagacccggaagca

SEQ ID NO: 1655069 - RNA, 19 nt, Artificial Sequence
  Description of Artificial Sequence: Synthetic oligonucleotide
  Sense strand starting at position 2717 of SEQ ID NO: 1561214
cugagauuggcauggugga

SEQ ID NO: 1655070 - RNA, 19 nt, Artificial Sequence
  Description of Artificial Sequence: Synthetic oligonucleotide
  Antisense strand to SEQ ID NO: 1655069
uccaccaugccaaucucag

SEQ ID NO: 1655071 - RNA, 19 nt, Artificial Sequence
  Description of Artificial Sequence: Synthetic oligonucleotide
  Sense strand starting at position 2762 of SEQ ID NO: 1561214
ggaggcaaauucguaaaga

SEQ ID NO: 1655072 - RNA, 19 nt, Artificial Sequence
  Description of Artificial Sequence: Synthetic oligonucleotide
  Antisense strand to SEQ ID NO: 1655071
ucuuuacgaauuugccucc

SEQ ID NO: 1655073 - RNA, 19 nt, Artificial Sequence
  Description of Artificial Sequence: Synthetic oligonucleotide
  Sense strand starting at position 2763 of SEQ ID NO: 1561214
gaggcaaauucguaaagac

SEQ ID NO: 1655074 - RNA, 19 nt, Artificial Sequence
  Description of Artificial Sequence: Synthetic oligonucleotide
  Antisense strand to SEQ ID NO: 1655073
gucuuuacgaauuugccuc

SEQ ID NO: 1655075 - RNA, 19 nt, Artificial Sequence
  Description of Artificial Sequence: Synthetic oligonucleotide
  Sense strand starting at position 2821 of SEQ ID NO: 1561214
guucgagcuggucuucagu

SEQ ID NO: 1655076 - RNA, 19 nt, Artificial Sequence
  Description of Artificial Sequence: Synthetic oligonucleotide
  Antisense strand to SEQ ID NO: 1655075
acugaagaccagcucgaac

SEQ ID NO: 1655077 - RNA, 19 nt, Artificial Sequence
  Description of Artificial Sequence: Synthetic oligonucleotide
  Sense strand starting at position 2936 of SEQ ID NO: 1561214
acaccaagucguuaagaga

SEQ ID NO: 1655078 - RNA, 19 nt, Artificial Sequence
  Description of Artificial Sequence: Synthetic oligonucleotide
  Antisense strand to SEQ ID NO: 1655077
ucucuuaacgacuuggugu

SEQ ID NO: 1655079 - RNA, 19 nt, Artificial Sequence
  Description of Artificial Sequence: Synthetic oligonucleotide
  Sense strand starting at position 2939 of SEQ ID NO: 1561214
ccaagucguuaagagaauc

SEQ ID NO: 1655080 - RNA, 19 nt, Artificial Sequence
  Description of Artificial Sequence: Synthetic oligonucleotide
  Antisense strand to SEQ ID NO: 1655079
gauucucuuaacgacuugg

SEQ ID NO: 1655081 - RNA, 19 nt, Artificial Sequence
  Description of Artificial Sequence: Synthetic oligonucleotide
  Sense strand starting at position 62 of SEQ ID NO: 1561215
gcuagcugugucugugaaa

SEQ ID NO: 1655082 - RNA, 19 nt, Artificial Sequence
  Description of Artificial Sequence: Synthetic oligonucleotide
  Antisense strand to SEQ ID NO: 1655081
uuucacagacacagcuagc

SEQ ID NO: 1655083 - RNA, 19 nt, Artificial Sequence
  Description of Artificial Sequence: Synthetic oligonucleotide
  Sense strand starting at position 95 of SEQ ID NO: 1561215
aaccaaacuuuggguaagu

SEQ ID NO: 1655084 - RNA, 19 nt, Artificial Sequence
  Description of Artificial Sequence: Synthetic oligonucleotide
  Antisense strand to SEQ ID NO: 1655083
acuuacccaaaguuugguu

SEQ ID NO: 1655085 - RNA, 19 nt, Artificial Sequence
  Description of Artificial Sequence: Synthetic oligonucleotide
  Sense strand starting at position 105 of SEQ ID NO: 1561215
uggguaagucucugccaac

SEQ ID NO: 1655086 - RNA, 19 nt, Artificial Sequence
  Description of Artificial Sequence: Synthetic oligonucleotide
  Antisense strand to SEQ ID NO: 1655085
guuggcagagacuuaccca

SEQ ID NO: 1655087 - RNA, 19 nt, Artificial Sequence
  Description of Artificial Sequence: Synthetic oligonucleotide
  Sense strand starting at position 106 of SEQ ID NO: 1561215
ggguaagucucugccaacu

SEQ ID NO: 1655088 - RNA, 19 nt, Artificial Sequence
  Description of Artificial Sequence: Synthetic oligonucleotide
  Antisense strand to SEQ ID NO: 1655087
aguuggcagagacuuaccc

SEQ ID NO: 1655089 - RNA, 19 nt, Artificial Sequence
  Description of Artificial Sequence: Synthetic oligonucleotide
  Sense strand starting at position 192 of SEQ ID NO: 1561215
agcagcaucuuauaccaga

SEQ ID NO: 1655090 - RNA, 19 nt, Artificial Sequence
  Description of Artificial Sequence: Synthetic oligonucleotide
  Antisense strand to SEQ ID NO: 1655089
ucugguauaagaugcugcu

SEQ ID NO: 1655091 - RNA, 19 nt, Artificial Sequence
  Description of Artificial Sequence: Synthetic oligonucleotide
  Sense strand starting at position 206 of SEQ ID NO: 1561215
ccagaugugugccagggaa

SEQ ID NO: 1655092 - RNA, 19 nt, Artificial Sequence
  Description of Artificial Sequence: Synthetic oligonucleotide
  Antisense strand to SEQ ID NO: 1655091
uucccuggcacacaucugg

SEQ ID NO: 1655093 - RNA, 19 nt, Artificial Sequence
  Description of Artificial Sequence: Synthetic oligonucleotide
  Sense strand starting at position 254 of SEQ ID NO: 1561215
gccuuucccuguuugcaua

SEQ ID NO: 1655094 - RNA, 19 nt, Artificial Sequence
  Description of Artificial Sequence: Synthetic oligonucleotide
  Antisense strand to SEQ ID NO: 1655093
uaugcaaacagggaaaggc

SEQ ID NO: 1655095 - RNA, 19 nt, Artificial Sequence
  Description of Artificial Sequence: Synthetic oligonucleotide
  Sense strand starting at position 296 of SEQ ID NO: 1561215
cugacaacucccugauaag

SEQ ID NO: 1655096 - RNA, 19 nt, Artificial Sequence
  Description of Artificial Sequence: Synthetic oligonucleotide
  Antisense strand to SEQ ID NO: 1655095
cuuaucagggaguugucag

SEQ ID NO: 1655097 - RNA, 19 nt, Artificial Sequence
  Description of Artificial Sequence: Synthetic oligonucleotide
  Sense strand starting at position 471 of SEQ ID NO: 1561215
agagaacucuaggacccau

SEQ ID NO: 1655098 - RNA, 19 nt, Artificial Sequence
  Description of Artificial Sequence: Synthetic oligonucleotide
  Antisense strand to SEQ ID NO: 1655097
auggguccuagaguucucu

SEQ ID NO: 1655099 - RNA, 19 nt, Artificial Sequence
  Description of Artificial Sequence: Synthetic oligonucleotide
  Sense strand starting at position 745 of SEQ ID NO: 1561215
uugauagauccacguuuac

SEQ ID NO: 1655100 - RNA, 19 nt, Artificial Sequence
  Description of Artificial Sequence: Synthetic oligonucleotide
  Antisense strand to SEQ ID NO: 1655099
guaaacguggaucuaucaa

SEQ ID NO: 1655101 - RNA, 19 nt, Artificial Sequence
  Description of Artificial Sequence: Synthetic oligonucleotide
  Sense strand starting at position 822 of SEQ ID NO: 1561215
cacccagagccuugggaaa

SEQ ID NO: 1655102 - RNA, 19 nt, Artificial Sequence
  Description of Artificial Sequence: Synthetic oligonucleotide
  Antisense strand to SEQ ID NO: 1655101
uuucccaaggcucugggug

SEQ ID NO: 1655103 - RNA, 19 nt, Artificial Sequence
  Description of Artificial Sequence: Synthetic oligonucleotide
  Sense strand starting at position 824 of SEQ ID NO: 1561215
cccagagccuugggaaagu

SEQ ID NO: 1655104 - RNA, 19 nt, Artificial Sequence
  Description of Artificial Sequence: Synthetic oligonucleotide
  Antisense strand to SEQ ID NO: 1655103
acuuucccaaggcucuggg

SEQ ID NO: 1655105 - RNA, 19 nt, Artificial Sequence
  Description of Artificial Sequence: Synthetic oligonucleotide
  Sense strand starting at position 897 of SEQ ID NO: 1561215
cagaaaccuccuugugguu

SEQ ID NO: 1655106 - RNA, 19 nt, Artificial Sequence
  Description of Artificial Sequence: Synthetic oligonucleotide
  Antisense strand to SEQ ID NO: 1655105
aaccacaaggagguuucug

SEQ ID NO: 1655107 - RNA, 19 nt, Artificial Sequence
  Description of Artificial Sequence: Synthetic oligonucleotide
  Sense strand starting at position 906 of SEQ ID NO: 1561215
ccuugugguugcugagaua

SEQ ID NO: 1655108 - RNA, 19 nt, Artificial Sequence
  Description of Artificial Sequence: Synthetic oligonucleotide
  Antisense strand to SEQ ID NO: 1655107
uaucucagcaaccacaagg

SEQ ID NO: 1655109 - RNA, 19 nt, Artificial Sequence
  Description of Artificial Sequence: Synthetic oligonucleotide
  Sense strand starting at position 909 of SEQ ID NO: 1561215
ugugguugcugagauagga

SEQ ID NO: 1655110 - RNA, 19 nt, Artificial Sequence
  Description of Artificial Sequence: Synthetic oligonucleotide
  Antisense strand to SEQ ID NO: 1655109
uccuaucucagcaaccaca

SEQ ID NO: 1655111 - RNA, 19 nt, Artificial Sequence
  Description of Artificial Sequence: Synthetic oligonucleotide
  Sense strand starting at position 1063 of SEQ ID NO: 1561215
gugggagacuguuacaagu

SEQ ID NO: 1655112 - RNA, 19 nt, Artificial Sequence
  Description of Artificial Sequence: Synthetic oligonucleotide
  Antisense strand to SEQ ID NO: 1655111
acuuguaacagucucccac

SEQ ID NO: 1655113 - RNA, 19 nt, Artificial Sequence
  Description of Artificial Sequence: Synthetic oligonucleotide
  Sense strand starting at position 1065 of SEQ ID NO: 1561215
gggagacuguuacaaguuc

SEQ ID NO: 1655114 - RNA, 19 nt, Artificial Sequence
  Description of Artificial Sequence: Synthetic oligonucleotide
  Antisense strand to SEQ ID NO: 1655113
gaacuuguaacagucuccc

SEQ ID NO: 1655115 - RNA, 19 nt, Artificial Sequence
  Description of Artificial Sequence: Synthetic oligonucleotide
  Sense strand starting at position 1131 of SEQ ID NO: 1561215
accauuaucccgcagcgaa

SEQ ID NO: 1655116 - RNA, 19 nt, Artificial Sequence
  Description of Artificial Sequence: Synthetic oligonucleotide
  Antisense strand to SEQ ID NO: 1655115
uucgcugcgggauaauggu

SEQ ID NO: 1655117 - RNA, 19 nt, Artificial Sequence
  Description of Artificial Sequence: Synthetic oligonucleotide
  Sense strand starting at position 1180 of SEQ ID NO: 1561215
cuccaacuuuagucagaug

SEQ ID NO: 1655118 - RNA, 19 nt, Artificial Sequence
  Description of Artificial Sequence: Synthetic oligonucleotide
  Antisense strand to SEQ ID NO: 1655117
caucugacuaaaguuggag

SEQ ID NO: 1655119 - RNA, 19 nt, Artificial Sequence
  Description of Artificial Sequence: Synthetic oligonucleotide
  Sense strand starting at position 1352 of SEQ ID NO: 1561215
caccgaucacuucguacuu

SEQ ID NO: 1655120 - RNA, 19 nt, Artificial Sequence
  Description of Artificial Sequence: Synthetic oligonucleotide
  Antisense strand to SEQ ID NO: 1655119
aaguacgaagugaucggug

SEQ ID NO: 1655121 - RNA, 19 nt, Artificial Sequence
  Description of Artificial Sequence: Synthetic oligonucleotide
  Sense strand starting at position 1353 of SEQ ID NO: 1561215
accgaucacuucguacuua

SEQ ID NO: 1655122 - RNA, 19 nt, Artificial Sequence
  Description of Artificial Sequence: Synthetic oligonucleotide
  Antisense strand to SEQ ID NO: 1655121
uaaguacgaagugaucggu

SEQ ID NO: 1655123 - RNA, 19 nt, Artificial Sequence
  Description of Artificial Sequence: Synthetic oligonucleotide
  Sense strand starting at position 2257 of SEQ ID NO: 1561215
accuuuauagagugugauu

SEQ ID NO: 1655124 - RNA, 19 nt, Artificial Sequence
  Description of Artificial Sequence: Synthetic oligonucleotide
  Antisense strand to SEQ ID NO: 1655123
aaucacacucuauaaaggu

SEQ ID NO: 1655125 - RNA, 19 nt, Artificial Sequence
  Description of Artificial Sequence: Synthetic oligonucleotide
  Sense strand starting at position 2402 of SEQ ID NO: 1561215
ucacuaagaguucgggaua

SEQ ID NO: 1655126 - RNA, 19 nt, Artificial Sequence
  Description of Artificial Sequence: Synthetic oligonucleotide
  Antisense strand to SEQ ID NO: 1655125
uaucccgaacucuuaguga

SEQ ID NO: 1655127 - RNA, 19 nt, Artificial Sequence
  Description of Artificial Sequence: Synthetic oligonucleotide
  Sense strand starting at position 2403 of SEQ ID NO: 1561215
cacuaagaguucgggauag

SEQ ID NO: 1655128 - RNA, 19 nt, Artificial Sequence
  Description of Artificial Sequence: Synthetic oligonucleotide
  Antisense strand to SEQ ID NO: 1655127
cuaucccgaacucuuagug

SEQ ID NO: 1655129 - RNA, 19 nt, Artificial Sequence
  Description of Artificial Sequence: Synthetic oligonucleotide
  Sense strand starting at position 2466 of SEQ ID NO: 1561215
agggcuguguccagggaga

SEQ ID NO: 1655130 - RNA, 19 nt, Artificial Sequence
  Description of Artificial Sequence: Synthetic oligonucleotide
  Antisense strand to SEQ ID NO: 1655129
ucucccuggacacagcccu

SEQ ID NO: 1655131 - RNA, 19 nt, Artificial Sequence
  Description of Artificial Sequence: Synthetic oligonucleotide
  Sense strand starting at position 2511 of SEQ ID NO: 1561215
ggaggaagcuccuguguga

SEQ ID NO: 1655132 - RNA, 19 nt, Artificial Sequence
  Description of Artificial Sequence: Synthetic oligonucleotide
  Antisense strand to SEQ ID NO: 1655131
ucacacaggagcuuccucc

SEQ ID NO: 1655133 - RNA, 19 nt, Artificial Sequence
  Description of Artificial Sequence: Synthetic oligonucleotide
  Sense strand starting at position 2810 of SEQ ID NO: 1561215
gcgguuggaucuuaaguca

SEQ ID NO: 1655134 - RNA, 19 nt, Artificial Sequence
  Description of Artificial Sequence: Synthetic oligonucleotide
  Antisense strand to SEQ ID NO: 1655133
ugacuuaagauccaaccgc

SEQ ID NO: 1655135 - RNA, 19 nt, Artificial Sequence
  Description of Artificial Sequence: Synthetic oligonucleotide
  Sense strand starting at position 2813 of SEQ ID NO: 1561215
guuggaucuuaagucagga

SEQ ID NO: 1655136 - RNA, 19 nt, Artificial Sequence
  Description of Artificial Sequence: Synthetic oligonucleotide
  Antisense strand to SEQ ID NO: 1655135
uccugacuuaagauccaac

SEQ ID NO: 1655137 - RNA, 19 nt, Artificial Sequence
  Description of Artificial Sequence: Synthetic oligonucleotide
  Sense strand starting at position 2817 of SEQ ID NO: 1561215
gaucuuaagucaggaguuc

SEQ ID NO: 1655138 - RNA, 19 nt, Artificial Sequence
  Description of Artificial Sequence: Synthetic oligonucleotide
  Antisense strand to SEQ ID NO: 1655137
gaacuccugacuuaagauc

SEQ ID NO: 1655139 - RNA, 19 nt, Artificial Sequence
  Description of Artificial Sequence: Synthetic oligonucleotide
  Sense strand starting at position 3279 of SEQ ID NO: 1561215
cccgacgucagaugauaga

SEQ ID NO: 1655140 - RNA, 19 nt, Artificial Sequence
  Description of Artificial Sequence: Synthetic oligonucleotide
  Antisense strand to SEQ ID NO: 1655139
ucuaucaucugacgucggg

SEQ ID NO: 1655141 - RNA, 19 nt, Artificial Sequence
  Description of Artificial Sequence: Synthetic oligonucleotide
  Sense strand starting at position 3419 of SEQ ID NO: 1561215
gcuaaagagcaaugagucu

SEQ ID NO: 1655142 - RNA, 19 nt, Artificial Sequence
  Description of Artificial Sequence: Synthetic oligonucleotide
  Antisense strand to SEQ ID NO: 1655141
agacucauugcucuuuagc

SEQ ID NO: 1655143 - RNA, 19 nt, Artificial Sequence
  Description of Artificial Sequence: Synthetic oligonucleotide
  Sense strand starting at position 3425 of SEQ ID NO: 1561215
gagcaaugagucugugaaa

SEQ ID NO: 1655144 - RNA, 19 nt, Artificial Sequence
  Description of Artificial Sequence: Synthetic oligonucleotide
  Antisense strand to SEQ ID NO: 1655143
uuucacagacucauugcuc

SEQ ID NO: 1655145 - RNA, 19 nt, Artificial Sequence
  Description of Artificial Sequence: Synthetic oligonucleotide
  Sense strand starting at position 3426 of SEQ ID NO: 1561215
agcaaugagucugugaaau

SEQ ID NO: 1655146 - RNA, 19 nt, Artificial Sequence
  Description of Artificial Sequence: Synthetic oligonucleotide
  Antisense strand to SEQ ID NO: 1655145
auuucacagacucauugcu

SEQ ID NO: 1655147 - RNA, 19 nt, Artificial Sequence
  Description of Artificial Sequence: Synthetic oligonucleotide
  Sense strand starting at position 3428 of SEQ ID NO: 1561215
caaugagucugugaaaucc

SEQ ID NO: 1655148 - RNA, 19 nt, Artificial Sequence
  Description of Artificial Sequence: Synthetic oligonucleotide
  Antisense strand to SEQ ID NO: 1655147
ggauuucacagacucauug

SEQ ID NO: 1655149 - RNA, 19 nt, Artificial Sequence
  Description of Artificial Sequence: Synthetic oligonucleotide
  Sense strand starting at position 3584 of SEQ ID NO: 1561215
aauccugucugagguggaa

SEQ ID NO: 1655150 - RNA, 19 nt, Artificial Sequence
  Description of Artificial Sequence: Synthetic oligonucleotide
  Antisense strand to SEQ ID NO: 1655149
uuccaccucagacaggauu

SEQ ID NO: 1655151 - RNA, 19 nt, Artificial Sequence
  Description of Artificial Sequence: Synthetic oligonucleotide
  Sense strand starting at position 3588 of SEQ ID NO: 1561215
cugucugagguggaaagua

SEQ ID NO: 1655152 - RNA, 19 nt, Artificial Sequence
  Description of Artificial Sequence: Synthetic oligonucleotide
  Antisense strand to SEQ ID NO: 1655151
uacuuuccaccucagacag

SEQ ID NO: 1655153 - RNA, 19 nt, Artificial Sequence
  Description of Artificial Sequence: Synthetic oligonucleotide
  Sense strand starting at position 60 of SEQ ID NO: 1561216
gaggaaucgucaucauucc

SEQ ID NO: 1655154 - RNA, 19 nt, Artificial Sequence
  Description of Artificial Sequence: Synthetic oligonucleotide
  Antisense strand to SEQ ID NO: 1655153
ggaaugaugacgauuccuc

SEQ ID NO: 1655155 - RNA, 19 nt, Artificial Sequence
  Description of Artificial Sequence: Synthetic oligonucleotide
  Sense strand starting at position 61 of SEQ ID NO: 1561216
aggaaucgucaucauucca

SEQ ID NO: 1655156 - RNA, 19 nt, Artificial Sequence
  Description of Artificial Sequence: Synthetic oligonucleotide
  Antisense strand to SEQ ID NO: 1655155
uggaaugaugacgauuccu

SEQ ID NO: 1655157 - RNA, 19 nt, Artificial Sequence
  Description of Artificial Sequence: Synthetic oligonucleotide
  Sense strand starting at position 157 of SEQ ID NO: 1561216
cucuguauuuaacaguuaa

SEQ ID NO: 1655158 - RNA, 19 nt, Artificial Sequence
  Description of Artificial Sequence: Synthetic oligonucleotide
  Antisense strand to SEQ ID NO: 1655157
uuaacuguuaaauacagag

SEQ ID NO: 1655159 - RNA, 19 nt, Artificial Sequence
  Description of Artificial Sequence: Synthetic oligonucleotide
  Sense strand starting at position 666 of SEQ ID NO: 1561216
aacugauccugacauggga

SEQ ID NO: 1655160 - RNA, 19 nt, Artificial Sequence
  Description of Artificial Sequence: Synthetic oligonucleotide
  Antisense strand to SEQ ID NO: 1655159
ucccaugucaggaucaguu

SEQ ID NO: 1655161 - RNA, 19 nt, Artificial Sequence
  Description of Artificial Sequence: Synthetic oligonucleotide
  Sense strand starting at position 910 of SEQ ID NO: 1561216
gauggaggucuccgacaua

SEQ ID NO: 1655162 - RNA, 19 nt, Artificial Sequence
  Description of Artificial Sequence: Synthetic oligonucleotide
  Antisense strand to SEQ ID NO: 1655161
uaugucggagaccuccauc

SEQ ID NO: 1655163 - RNA, 19 nt, Artificial Sequence
  Description of Artificial Sequence: Synthetic oligonucleotide
  Sense strand starting at position 1127 of SEQ ID NO: 1561216
cccgaugggugacucaauu

SEQ ID NO: 1655164 - RNA, 19 nt, Artificial Sequence
  Description of Artificial Sequence: Synthetic oligonucleotide
  Antisense strand to SEQ ID NO: 1655163
aauugagucacccaucggg

SEQ ID NO: 1655165 - RNA, 19 nt, Artificial Sequence
  Description of Artificial Sequence: Synthetic oligonucleotide
  Sense strand starting at position 1741 of SEQ ID NO: 1561216
cagauaaacuucgagagag

SEQ ID NO: 1655166 - RNA, 19 nt, Artificial Sequence
  Description of Artificial Sequence: Synthetic oligonucleotide
  Antisense strand to SEQ ID NO: 1655165
cucucucgaaguuuaucug

SEQ ID NO: 1655167 - RNA, 19 nt, Artificial Sequence
  Description of Artificial Sequence: Synthetic oligonucleotide
  Sense strand starting at position 2305 of SEQ ID NO: 1561216
ccgcaauuauuccuuaaag

SEQ ID NO: 1655168 - RNA, 19 nt, Artificial Sequence
  Description of Artificial Sequence: Synthetic oligonucleotide
  Antisense strand to SEQ ID NO: 1655167
cuuuaaggaauaauugcgg

SEQ ID NO: 1655169 - RNA, 19 nt, Artificial Sequence
  Description of Artificial Sequence: Synthetic oligonucleotide
  Sense strand starting at position 2306 of SEQ ID NO: 1561216
cgcaauuauuccuuaaagg

SEQ ID NO: 1655170 - RNA, 19 nt, Artificial Sequence
  Description of Artificial Sequence: Synthetic oligonucleotide
  Antisense strand to SEQ ID NO: 1655169
ccuuuaaggaauaauugcg

SEQ ID NO: 1655171 - RNA, 19 nt, Artificial Sequence
  Description of Artificial Sequence: Synthetic oligonucleotide
  Sense strand starting at position 2560 of SEQ ID NO: 1561216
cagagucuccgcugggaaa

SEQ ID NO: 1655172 - RNA, 19 nt, Artificial Sequence
  Description of Artificial Sequence: Synthetic oligonucleotide
  Antisense strand to SEQ ID NO: 1655171
uuucccagcggagacucug

SEQ ID NO: 1655173 - RNA, 19 nt, Artificial Sequence
  Description of Artificial Sequence: Synthetic oligonucleotide
  Sense strand starting at position 2793 of SEQ ID NO: 1561216
uguaaaucccuuugaggug

SEQ ID NO: 1655174 - RNA, 19 nt, Artificial Sequence
  Description of Artificial Sequence: Synthetic oligonucleotide
  Antisense strand to SEQ ID NO: 1655173
caccucaaagggauuuaca

SEQ ID NO: 1655175 - RNA, 19 nt, Artificial Sequence
  Description of Artificial Sequence: Synthetic oligonucleotide
  Sense strand starting at position 3016 of SEQ ID NO: 1561216
gacugaugucucugcugag

SEQ ID NO: 1655176 - RNA, 19 nt, Artificial Sequence
  Description of Artificial Sequence: Synthetic oligonucleotide
  Antisense strand to SEQ ID NO: 1655175
cucagcagagacaucaguc

SEQ ID NO: 1655177 - RNA, 19 nt, Artificial Sequence
  Description of Artificial Sequence: Synthetic oligonucleotide
  Sense strand starting at position 3017 of SEQ ID NO: 1561216
acugaugucucugcugaga

SEQ ID NO: 1655178 - RNA, 19 nt, Artificial Sequence
  Description of Artificial Sequence: Synthetic oligonucleotide
  Antisense strand to SEQ ID NO: 1655177
ucucagcagagacaucagu

SEQ ID NO: 1655179 - RNA, 19 nt, Artificial Sequence
  Description of Artificial Sequence: Synthetic oligonucleotide
  Sense strand starting at position 3052 of SEQ ID NO: 1561216
gguggcuucugagcuagaa

SEQ ID NO: 1655180 - RNA, 19 nt, Artificial Sequence
  Description of Artificial Sequence: Synthetic oligonucleotide
  Antisense strand to SEQ ID NO: 1655179
uucuagcucagaagccacc

SEQ ID NO: 1655181 - RNA, 19 nt, Artificial Sequence
  Description of Artificial Sequence: Synthetic oligonucleotide
  Sense strand starting at position 3092 of SEQ ID NO: 1561216
aauugaacccagugaguuc

SEQ ID NO: 1655182 - RNA, 19 nt, Artificial Sequence
  Description of Artificial Sequence: Synthetic oligonucleotide
  Antisense strand to SEQ ID NO: 1655181
gaacucacuggguucaauu

SEQ ID NO: 1655183 - RNA, 19 nt, Artificial Sequence
  Description of Artificial Sequence: Synthetic oligonucleotide
  Sense strand starting at position 3101 of SEQ ID NO: 1561216
cagugaguucuguggcuag

SEQ ID NO: 1655184 - RNA, 19 nt, Artificial Sequence
  Description of Artificial Sequence: Synthetic oligonucleotide
  Antisense strand to SEQ ID NO: 1655183
cuagccacagaacucacug

SEQ ID NO: 1655185 - RNA, 19 nt, Artificial Sequence
  Description of Artificial Sequence: Synthetic oligonucleotide
  Sense strand starting at position 3103 of SEQ ID NO: 1561216
gugaguucuguggcuaguc

SEQ ID NO: 1655186 - RNA, 19 nt, Artificial Sequence
  Description of Artificial Sequence: Synthetic oligonucleotide
  Antisense strand to SEQ ID NO: 1655185
gacuagccacagaacucac

SEQ ID NO: 1655187 - RNA, 19 nt, Artificial Sequence
  Description of Artificial Sequence: Synthetic oligonucleotide
  Sense strand starting at position 3104 of SEQ ID NO: 1561216
ugaguucuguggcuagucu

SEQ ID NO: 1655188 - RNA, 19 nt, Artificial Sequence
  Description of Artificial Sequence: Synthetic oligonucleotide
  Antisense strand to SEQ ID NO: 1655187
agacuagccacagaacuca

SEQ ID NO: 1655189 - RNA, 19 nt, Artificial Sequence
  Description of Artificial Sequence: Synthetic oligonucleotide
  Sense strand starting at position 3108 of SEQ ID NO: 1561216
uucuguggcuagucucaaa

SEQ ID NO: 1655190 - RNA, 19 nt, Artificial Sequence
  Description of Artificial Sequence: Synthetic oligonucleotide
  Antisense strand to SEQ ID NO: 1655189
uuugagacuagccacagaa

SEQ ID NO: 1655191 - RNA, 19 nt, Artificial Sequence
  Description of Artificial Sequence: Synthetic oligonucleotide
  Sense strand starting at position 3322 of SEQ ID NO: 1561216
gagauuaagccucagugug

SEQ ID NO: 1655192 - RNA, 19 nt, Artificial Sequence
  Description of Artificial Sequence: Synthetic oligonucleotide
  Antisense strand to SEQ ID NO: 1655191
cacacugaggcuuaaucuc

SEQ ID NO: 1655193 - RNA, 19 nt, Artificial Sequence
  Description of Artificial Sequence: Synthetic oligonucleotide
  Sense strand starting at position 3365 of SEQ ID NO: 1561216
agaguuucaggcugaaguu

SEQ ID NO: 1655194 - RNA, 19 nt, Artificial Sequence
  Description of Artificial Sequence: Synthetic oligonucleotide
  Antisense strand to SEQ ID NO: 1655193
aacuucagccugaaacucu

SEQ ID NO: 1655195 - RNA, 19 nt, Artificial Sequence
  Description of Artificial Sequence: Synthetic oligonucleotide
  Sense strand starting at position 3472 of SEQ ID NO: 1561216
auugccucacucuggaaua

SEQ ID NO: 1655196 - RNA, 19 nt, Artificial Sequence
  Description of Artificial Sequence: Synthetic oligonucleotide
  Antisense strand to SEQ ID NO: 1655195
uauuccagagugaggcaau

SEQ ID NO: 1655197 - RNA, 19 nt, Artificial Sequence
  Description of Artificial Sequence: Synthetic oligonucleotide
  Sense strand starting at position 3474 of SEQ ID NO: 1561216
ugccucacucuggaauaaa

SEQ ID NO: 1655198 - RNA, 19 nt, Artificial Sequence
  Description of Artificial Sequence: Synthetic oligonucleotide
  Antisense strand to SEQ ID NO: 1655197
uuuauuccagagugaggca

SEQ ID NO: 1655199 - RNA, 19 nt, Artificial Sequence
  Description of Artificial Sequence: Synthetic oligonucleotide
  Sense strand starting at position 3617 of SEQ ID NO: 1561216
aacagaugcguguguuuac

SEQ ID NO: 1655200 - RNA, 19 nt, Artificial Sequence
  Description of Artificial Sequence: Synthetic oligonucleotide
  Antisense strand to SEQ ID NO: 1655199
guaaacacacgcaucuguu

SEQ ID NO: 1655201 - RNA, 19 nt, Artificial Sequence
  Description of Artificial Sequence: Synthetic oligonucleotide
  Sense strand starting at position 3620 of SEQ ID NO: 1561216
agaugcguguguuuaccaa

SEQ ID NO: 1655202 - RNA, 19 nt, Artificial Sequence
  Description of Artificial Sequence: Synthetic oligonucleotide
  Antisense strand to SEQ ID NO: 1655201
uugguaaacacacgcaucu

SEQ ID NO: 1655203 - RNA, 19 nt, Artificial Sequence
  Description of Artificial Sequence: Synthetic oligonucleotide
  Sense strand starting at position 3751 of SEQ ID NO: 1561216
gcugcauucuggguaaugu

SEQ ID NO: 1655204 - RNA, 19 nt, Artificial Sequence
  Description of Artificial Sequence: Synthetic oligonucleotide
  Antisense strand to SEQ ID NO: 1655203
acauuacccagaaugcagc

SEQ ID NO: 1655205 - RNA, 19 nt, Artificial Sequence
  Description of Artificial Sequence: Synthetic oligonucleotide
  Sense strand starting at position 3760 of SEQ ID NO: 1561216
uggguaauguagucccgga

SEQ ID NO: 1655206 - RNA, 19 nt, Artificial Sequence
  Description of Artificial Sequence: Synthetic oligonucleotide
  Antisense strand to SEQ ID NO: 1655205
uccgggacuacauuaccca

SEQ ID NO: 1655207 - RNA, 19 nt, Artificial Sequence
  Description of Artificial Sequence: Synthetic oligonucleotide
  Sense strand starting at position 3764 of SEQ ID NO: 1561216
uaauguagucccggacagu

SEQ ID NO: 1655208 - RNA, 19 nt, Artificial Sequence
  Description of Artificial Sequence: Synthetic oligonucleotide
  Antisense strand to SEQ ID NO: 1655207
acuguccgggacuacauua

SEQ ID NO: 1655209 - RNA, 19 nt, Artificial Sequence
  Description of Artificial Sequence: Synthetic oligonucleotide
  Sense strand starting at position 3765 of SEQ ID NO: 1561216
aauguagucccggacaguu

SEQ ID NO: 1655210 - RNA, 19 nt, Artificial Sequence
  Description of Artificial Sequence: Synthetic oligonucleotide
  Antisense strand to SEQ ID NO: 1655209
aacuguccgggacuacauu

SEQ ID NO: 1655211 - RNA, 19 nt, Artificial Sequence
  Description of Artificial Sequence: Synthetic oligonucleotide
  Sense strand starting at position 3767 of SEQ ID NO: 1561216
uguagucccggacaguuaa

SEQ ID NO: 1655212 - RNA, 19 nt, Artificial Sequence
  Description of Artificial Sequence: Synthetic oligonucleotide
  Antisense strand to SEQ ID NO: 1655211
uuaacuguccgggacuaca

SEQ ID NO: 1655213 - RNA, 19 nt, Artificial Sequence
  Description of Artificial Sequence: Synthetic oligonucleotide
  Sense strand starting at position 3781 of SEQ ID NO: 1561216
guuaagaguggguggagaa

SEQ ID NO: 1655214 - RNA, 19 nt, Artificial Sequence
  Description of Artificial Sequence: Synthetic oligonucleotide
  Antisense strand to SEQ ID NO: 1655213
uucuccacccacucuuaac

SEQ ID NO: 1655215 - RNA, 19 nt, Artificial Sequence
  Description of Artificial Sequence: Synthetic oligonucleotide
  Sense strand starting at position 3793 of SEQ ID NO: 1561216
uggagaaauuccgcuuuaa

SEQ ID NO: 1655216 - RNA, 19 nt, Artificial Sequence
  Description of Artificial Sequence: Synthetic oligonucleotide
  Antisense strand to SEQ ID NO: 1655215
uuaaagcggaauuucucca

SEQ ID NO: 1655217 - RNA, 19 nt, Artificial Sequence
  Description of Artificial Sequence: Synthetic oligonucleotide
  Sense strand starting at position 3804 of SEQ ID NO: 1561216
cgcuuuaagggccggauau

SEQ ID NO: 1655218 - RNA, 19 nt, Artificial Sequence
  Description of Artificial Sequence: Synthetic oligonucleotide
  Antisense strand to SEQ ID NO: 1655217
auauccggcccuuaaagcg

SEQ ID NO: 1655219 - RNA, 19 nt, Artificial Sequence
  Description of Artificial Sequence: Synthetic oligonucleotide
  Sense strand starting at position 3805 of SEQ ID NO: 1561216
gcuuuaagggccggauauc

SEQ ID NO: 1655220 - RNA, 19 nt, Artificial Sequence
  Description of Artificial Sequence: Synthetic oligonucleotide
  Antisense strand to SEQ ID NO: 1655219
gauauccggcccuuaaagc

SEQ ID NO: 1655221 - RNA, 19 nt, Artificial Sequence
  Description of Artificial Sequence: Synthetic oligonucleotide
  Sense strand starting at position 3828 of SEQ ID NO: 1561216
ccaugacaauugguuagau

SEQ ID NO: 1655222 - RNA, 19 nt, Artificial Sequence
  Description of Artificial Sequence: Synthetic oligonucleotide
  Antisense strand to SEQ ID NO: 1655221
aucuaaccaauugucaugg

SEQ ID NO: 1655223 - RNA, 19 nt, Artificial Sequence
  Description of Artificial Sequence: Synthetic oligonucleotide
  Sense strand starting at position 3829 of SEQ ID NO: 1561216
caugacaauugguuagaua

SEQ ID NO: 1655224 - RNA, 19 nt, Artificial Sequence
  Description of Artificial Sequence: Synthetic oligonucleotide
  Antisense strand to SEQ ID NO: 1655223
uaucuaaccaauugucaug

SEQ ID NO: 1655225 - RNA, 19 nt, Artificial Sequence
  Description of Artificial Sequence: Synthetic oligonucleotide
  Sense strand starting at position 3832 of SEQ ID NO: 1561216
gacaauugguuagauaaac

SEQ ID NO: 1655226 - RNA, 19 nt, Artificial Sequence
  Description of Artificial Sequence: Synthetic oligonucleotide
  Antisense strand to SEQ ID NO: 1655225
guuuaucuaaccaauuguc

SEQ ID NO: 1655227 - RNA, 19 nt, Artificial Sequence
  Description of Artificial Sequence: Synthetic oligonucleotide
  Sense strand starting at position 3878 of SEQ ID NO: 1561216
uuuauagcgauuggugaga

SEQ ID NO: 1655228 - RNA, 19 nt, Artificial Sequence
  Description of Artificial Sequence: Synthetic oligonucleotide
  Antisense strand to SEQ ID NO: 1655227
ucucaccaaucgcuauaaa

SEQ ID NO: 1655229 - RNA, 19 nt, Artificial Sequence
  Description of Artificial Sequence: Synthetic oligonucleotide
  Sense strand starting at position 3912 of SEQ ID NO: 1561216
agcguuaucggcucuccca

SEQ ID NO: 1655230 - RNA, 19 nt, Artificial Sequence
  Description of Artificial Sequence: Synthetic oligonucleotide
  Antisense strand to SEQ ID NO: 1655229
ugggagagccgauaacgcu

SEQ ID NO: 1655231 - RNA, 19 nt, Artificial Sequence
  Description of Artificial Sequence: Synthetic oligonucleotide
  Sense strand starting at position 3913 of SEQ ID NO: 1561216
gcguuaucggcucucccau

SEQ ID NO: 1655232 - RNA, 19 nt, Artificial Sequence
  Description of Artificial Sequence: Synthetic oligonucleotide
  Antisense strand to SEQ ID NO: 1655231
augggagagccgauaacgc

SEQ ID NO: 1655233 - RNA, 19 nt, Artificial Sequence
  Description of Artificial Sequence: Synthetic oligonucleotide
  Sense strand starting at position 162 of SEQ ID NO: 1561217
uugcgaaggucaccaauuu

SEQ ID NO: 1655234 - RNA, 19 nt, Artificial Sequence
  Description of Artificial Sequence: Synthetic oligonucleotide
  Antisense strand to SEQ ID NO: 1655233
aaauuggugaccuucgcaa

SEQ ID NO: 1655235 - RNA, 19 nt, Artificial Sequence
  Description of Artificial Sequence: Synthetic oligonucleotide
  Sense strand starting at position 244 of SEQ ID NO: 1561217
cuggauauacuauggcuca

SEQ ID NO: 1655236 - RNA, 19 nt, Artificial Sequence
  Description of Artificial Sequence: Synthetic oligonucleotide
  Antisense strand to SEQ ID NO: 1655235
ugagccauaguauauccag

SEQ ID NO: 1655237 - RNA, 19 nt, Artificial Sequence
  Description of Artificial Sequence: Synthetic oligonucleotide
  Sense strand starting at position 313 of SEQ ID NO: 1561217
acuuauuucuggcacagag

SEQ ID NO: 1655238 - RNA, 19 nt, Artificial Sequence
  Description of Artificial Sequence: Synthetic oligonucleotide
  Antisense strand to SEQ ID NO: 1655237
cucugugccagaaauaagu

SEQ ID NO: 1655239 - RNA, 19 nt, Artificial Sequence
  Description of Artificial Sequence: Synthetic oligonucleotide
  Sense strand starting at position 510 of SEQ ID NO: 1561217
cugugaugcccagaaccua

SEQ ID NO: 1655240 - RNA, 19 nt, Artificial Sequence
  Description of Artificial Sequence: Synthetic oligonucleotide
  Antisense strand to SEQ ID NO: 1655239
uagguucugggcaucacag

SEQ ID NO: 1655241 - RNA, 19 nt, Artificial Sequence
  Description of Artificial Sequence: Synthetic oligonucleotide
  Sense strand starting at position 566 of SEQ ID NO: 1561217
acgucauugagcuggacau

SEQ ID NO: 1655242 - RNA, 19 nt, Artificial Sequence
  Description of Artificial Sequence: Synthetic oligonucleotide
  Antisense strand to SEQ ID NO: 1655241
auguccagcucaaugacgu

SEQ ID NO: 1655243 - RNA, 19 nt, Artificial Sequence
  Description of Artificial Sequence: Synthetic oligonucleotide
  Sense strand starting at position 580 of SEQ ID NO: 1561217
gacauuccggcguaugaga

SEQ ID NO: 1655244 - RNA, 19 nt, Artificial Sequence
  Description of Artificial Sequence: Synthetic oligonucleotide
  Antisense strand to SEQ ID NO: 1655243
ucucauacgccggaauguc

SEQ ID NO: 1655245 - RNA, 19 nt, Artificial Sequence
  Description of Artificial Sequence: Synthetic oligonucleotide
  Sense strand starting at position 1099 of SEQ ID NO: 1561217
cccugaaaucccugcggaa

SEQ ID NO: 1655246 - RNA, 19 nt, Artificial Sequence
  Description of Artificial Sequence: Synthetic oligonucleotide
  Antisense strand to SEQ ID NO: 1655245
uuccgcagggauuucaggg

SEQ ID NO: 1655247 - RNA, 19 nt, Artificial Sequence
  Description of Artificial Sequence: Synthetic oligonucleotide
  Sense strand starting at position 1101 of SEQ ID NO: 1561217
cugaaaucccugcggaaag

SEQ ID NO: 1655248 - RNA, 19 nt, Artificial Sequence
  Description of Artificial Sequence: Synthetic oligonucleotide
  Antisense strand to SEQ ID NO: 1655247
cuuuccgcagggauuucag

SEQ ID NO: 1655249 - RNA, 19 nt, Artificial Sequence
  Description of Artificial Sequence: Synthetic oligonucleotide
  Sense strand starting at position 1164 of SEQ ID NO: 1561217
ucuggauuugggcggcaga

SEQ ID NO: 1655250 - RNA, 19 nt, Artificial Sequence
  Description of Artificial Sequence: Synthetic oligonucleotide
  Antisense strand to SEQ ID NO: 1655249
ucugccgcccaaauccaga

SEQ ID NO: 1655251 - RNA, 19 nt, Artificial Sequence
  Description of Artificial Sequence: Synthetic oligonucleotide
  Sense strand starting at position 1195 of SEQ ID NO: 1561217
gggagauaaacuuguguga

SEQ ID NO: 1655252 - RNA, 19 nt, Artificial Sequence
  Description of Artificial Sequence: Synthetic oligonucleotide
  Antisense strand to SEQ ID NO: 1655251
ucacacaaguuuaucuccc

SEQ ID NO: 1655253 - RNA, 19 nt, Artificial Sequence
  Description of Artificial Sequence: Synthetic oligonucleotide
  Sense strand starting at position 1277 of SEQ ID NO: 1561217
cgagcaaacucggugauca

SEQ ID NO: 1655254 - RNA, 19 nt, Artificial Sequence
  Description of Artificial Sequence: Synthetic oligonucleotide
  Antisense strand to SEQ ID NO: 1655253
ugaucaccgaguuugcucg

SEQ ID NO: 1655255 - RNA, 19 nt, Artificial Sequence
  Description of Artificial Sequence: Synthetic oligonucleotide
  Sense strand starting at position 1278 of SEQ ID NO: 1561217
gagcaaacucggugaucac

SEQ ID NO: 1655256 - RNA, 19 nt, Artificial Sequence
  Description of Artificial Sequence: Synthetic oligonucleotide
  Antisense strand to SEQ ID NO: 1655255
gugaucaccgaguuugcuc

SEQ ID NO: 1655257 - RNA, 19 nt, Artificial Sequence
  Description of Artificial Sequence: Synthetic oligonucleotide
  Sense strand starting at position 1279 of SEQ ID NO: 1561217
agcaaacucggugaucaca

SEQ ID NO: 1655258 - RNA, 19 nt, Artificial Sequence
  Description of Artificial Sequence: Synthetic oligonucleotide
  Antisense strand to SEQ ID NO: 1655257
ugugaucaccgaguuugcu

SEQ ID NO: 1655259 - RNA, 19 nt, Artificial Sequence
  Description of Artificial Sequence: Synthetic oligonucleotide
  Sense strand starting at position 1395 of SEQ ID NO: 1561217
acgucaggucccgauugaa

SEQ ID NO: 1655260 - RNA, 19 nt, Artificial Sequence
  Description of Artificial Sequence: Synthetic oligonucleotide
  Antisense strand to SEQ ID NO: 1655259
uucaaucgggaccugacgu

SEQ ID NO: 1655261 - RNA, 19 nt, Artificial Sequence
  Description of Artificial Sequence: Synthetic oligonucleotide
  Sense strand starting at position 1398 of SEQ ID NO: 1561217
ucaggucccgauugaauuc

SEQ ID NO: 1655262 - RNA, 19 nt, Artificial Sequence
  Description of Artificial Sequence: Synthetic oligonucleotide
  Antisense strand to SEQ ID NO: 1655261
gaauucaaucgggaccuga

SEQ ID NO: 1655263 - RNA, 19 nt, Artificial Sequence
  Description of Artificial Sequence: Synthetic oligonucleotide
  Sense strand starting at position 1437 of SEQ ID NO: 1561217
ccucguuggcacugggaaa

SEQ ID NO: 1655264 - RNA, 19 nt, Artificial Sequence
  Description of Artificial Sequence: Synthetic oligonucleotide
  Antisense strand to SEQ ID NO: 1655263
uuucccagugccaacgagg

SEQ ID NO: 1655265 - RNA, 19 nt, Artificial Sequence
  Description of Artificial Sequence: Synthetic oligonucleotide
  Sense strand starting at position 1634 of SEQ ID NO: 1561217
agagacgauccuugcauga

SEQ ID NO: 1655266 - RNA, 19 nt, Artificial Sequence
  Description of Artificial Sequence: Synthetic oligonucleotide
  Antisense strand to SEQ ID NO: 1655265
ucaugcaaggaucgucucu

SEQ ID NO: 1655267 - RNA, 19 nt, Artificial Sequence
  Description of Artificial Sequence: Synthetic oligonucleotide
  Sense strand starting at position 1638 of SEQ ID NO: 1561217
acgauccuugcaugagaca

SEQ ID NO: 1655268 - RNA, 19 nt, Artificial Sequence
  Description of Artificial Sequence: Synthetic oligonucleotide
  Antisense strand to SEQ ID NO: 1655267
ugucucaugcaaggaucgu

SEQ ID NO: 1655269 - RNA, 19 nt, Artificial Sequence
  Description of Artificial Sequence: Synthetic oligonucleotide
  Sense strand starting at position 1639 of SEQ ID NO: 1561217
cgauccuugcaugagacau

SEQ ID NO: 1655270 - RNA, 19 nt, Artificial Sequence
  Description of Artificial Sequence: Synthetic oligonucleotide
  Antisense strand to SEQ ID NO: 1655269
augucucaugcaaggaucg

SEQ ID NO: 1655271 - RNA, 19 nt, Artificial Sequence
  Description of Artificial Sequence: Synthetic oligonucleotide
  Sense strand starting at position 1748 of SEQ ID NO: 1561217
ccuacauaucuaugaggua

SEQ ID NO: 1655272 - RNA, 19 nt, Artificial Sequence
  Description of Artificial Sequence: Synthetic oligonucleotide
  Antisense strand to SEQ ID NO: 1655271
uaccucauagauauguagg

SEQ ID NO: 1655273 - RNA, 19 nt, Artificial Sequence
  Description of Artificial Sequence: Synthetic oligonucleotide
  Sense strand starting at position 1992 of SEQ ID NO: 1561217
gggcgaaucacaugauagu

SEQ ID NO: 1655274 - RNA, 19 nt, Artificial Sequence
  Description of Artificial Sequence: Synthetic oligonucleotide
  Antisense strand to SEQ ID NO: 1655273
acuaucaugugauucgccc

SEQ ID NO: 1655275 - RNA, 19 nt, Artificial Sequence
  Description of Artificial Sequence: Synthetic oligonucleotide
  Sense strand starting at position 1993 of SEQ ID NO: 1561217
ggcgaaucacaugauagug

SEQ ID NO: 1655276 - RNA, 19 nt, Artificial Sequence
  Description of Artificial Sequence: Synthetic oligonucleotide
  Antisense strand to SEQ ID NO: 1655275
cacuaucaugugauucgcc

SEQ ID NO: 1655277 - RNA, 19 nt, Artificial Sequence
  Description of Artificial Sequence: Synthetic oligonucleotide
  Sense strand starting at position 2301 of SEQ ID NO: 1561217
guuugaaucucagucccau

SEQ ID NO: 1655278 - RNA, 19 nt, Artificial Sequence
  Description of Artificial Sequence: Synthetic oligonucleotide
  Antisense strand to SEQ ID NO: 1655277
augggacugagauucaaac

SEQ ID NO: 1655279 - RNA, 19 nt, Artificial Sequence
  Description of Artificial Sequence: Synthetic oligonucleotide
  Sense strand starting at position 2367 of SEQ ID NO: 1561217
uuaaaugagaaucgugguu

SEQ ID NO: 1655280 - RNA, 19 nt, Artificial Sequence
  Description of Artificial Sequence: Synthetic oligonucleotide
  Antisense strand to SEQ ID NO: 1655279
aaccacgauucucauuuaa

SEQ ID NO: 1655281 - RNA, 19 nt, Artificial Sequence
  Description of Artificial Sequence: Synthetic oligonucleotide
  Sense strand starting at position 2372 of SEQ ID NO: 1561217
ugagaaucgugguuucuca

SEQ ID NO: 1655282 - RNA, 19 nt, Artificial Sequence
  Description of Artificial Sequence: Synthetic oligonucleotide
  Antisense strand to SEQ ID NO: 1655281
ugagaaaccacgauucuca

SEQ ID NO: 1655283 - RNA, 19 nt, Artificial Sequence
  Description of Artificial Sequence: Synthetic oligonucleotide
  Sense strand starting at position 2376 of SEQ ID NO: 1561217
aaucgugguuucucagaua

SEQ ID NO: 1655284 - RNA, 19 nt, Artificial Sequence
  Description of Artificial Sequence: Synthetic oligonucleotide
  Antisense strand to SEQ ID NO: 1655283
uaucugagaaaccacgauu

SEQ ID NO: 1655285 - RNA, 19 nt, Artificial Sequence
  Description of Artificial Sequence: Synthetic oligonucleotide
  Sense strand starting at position 2381 of SEQ ID NO: 1561217
ugguuucucagauagagca

SEQ ID NO: 1655286 - RNA, 19 nt, Artificial Sequence
  Description of Artificial Sequence: Synthetic oligonucleotide
  Antisense strand to SEQ ID NO: 1655285
ugcucuaucugagaaacca

SEQ ID NO: 1655287 - RNA, 19 nt, Artificial Sequence
  Description of Artificial Sequence: Synthetic oligonucleotide
  Sense strand starting at position 2418 of SEQ ID NO: 1561217
ccuggaaagugugcaaaga

SEQ ID NO: 1655288 - RNA, 19 nt, Artificial Sequence
  Description of Artificial Sequence: Synthetic oligonucleotide
  Antisense strand to SEQ ID NO: 1655287
ucuuugcacacuuuccagg

SEQ ID NO: 1655289 - RNA, 19 nt, Artificial Sequence
  Description of Artificial Sequence: Synthetic oligonucleotide
  Sense strand starting at position 2447 of SEQ ID NO: 1561217
cauuguaagcgcucgguaa

SEQ ID NO: 1655290 - RNA, 19 nt, Artificial Sequence
  Description of Artificial Sequence: Synthetic oligonucleotide
  Antisense strand to SEQ ID NO: 1655289
uuaccgagcgcuuacaaug

SEQ ID NO: 1655291 - RNA, 19 nt, Artificial Sequence
  Description of Artificial Sequence: Synthetic oligonucleotide
  Sense strand starting at position 2455 of SEQ ID NO: 1561217
gcgcucgguaaaguucuaa

SEQ ID NO: 1655292 - RNA, 19 nt, Artificial Sequence
  Description of Artificial Sequence: Synthetic oligonucleotide
  Antisense strand to SEQ ID NO: 1655291
uuagaacuuuaccgagcgc

SEQ ID NO: 1655293 - RNA, 19 nt, Artificial Sequence
  Description of Artificial Sequence: Synthetic oligonucleotide
  Sense strand starting at position 2466 of SEQ ID NO: 1561217
aguucuaaccaguguauga

SEQ ID NO: 1655294 - RNA, 19 nt, Artificial Sequence
  Description of Artificial Sequence: Synthetic oligonucleotide
  Antisense strand to SEQ ID NO: 1655293
ucauacacugguuagaacu

SEQ ID NO: 1655295 - RNA, 19 nt, Artificial Sequence
  Description of Artificial Sequence: Synthetic oligonucleotide
  Sense strand starting at position 2532 of SEQ ID NO: 1561217
ucgcccugcgacuuguuaa

SEQ ID NO: 1655296 - RNA, 19 nt, Artificial Sequence
  Description of Artificial Sequence: Synthetic oligonucleotide
  Antisense strand to SEQ ID NO: 1655295
uuaacaagucgcagggcga

SEQ ID NO: 1655297 - RNA, 19 nt, Artificial Sequence
  Description of Artificial Sequence: Synthetic oligonucleotide
  Sense strand starting at position 2539 of SEQ ID NO: 1561217
gcgacuuguuaacucugaa

SEQ ID NO: 1655298 - RNA, 19 nt, Artificial Sequence
  Description of Artificial Sequence: Synthetic oligonucleotide
  Antisense strand to SEQ ID NO: 1655297
uucagaguuaacaagucgc

SEQ ID NO: 1655299 - RNA, 19 nt, Artificial Sequence
  Description of Artificial Sequence: Synthetic oligonucleotide
  Sense strand starting at position 2610 of SEQ ID NO: 1561217
cuggguuguagugagaagu

SEQ ID NO: 1655300 - RNA, 19 nt, Artificial Sequence
  Description of Artificial Sequence: Synthetic oligonucleotide
  Antisense strand to SEQ ID NO: 1655299
acuucucacuacaacccag

SEQ ID NO: 1655301 - RNA, 19 nt, Artificial Sequence
  Description of Artificial Sequence: Synthetic oligonucleotide
  Sense strand starting at position 2616 of SEQ ID NO: 1561217
uguagugagaaguaaacga

SEQ ID NO: 1655302 - RNA, 19 nt, Artificial Sequence
  Description of Artificial Sequence: Synthetic oligonucleotide
  Antisense strand to SEQ ID NO: 1655301
ucguuuacuucucacuaca

SEQ ID NO: 1655303 - RNA, 19 nt, Artificial Sequence
  Description of Artificial Sequence: Synthetic oligonucleotide
  Sense strand starting at position 2620 of SEQ ID NO: 1561217
gugagaaguaaacgaguua

SEQ ID NO: 1655304 - RNA, 19 nt, Artificial Sequence
  Description of Artificial Sequence: Synthetic oligonucleotide
  Antisense strand to SEQ ID NO: 1655303
uaacucguuuacuucucac

SEQ ID NO: 1655305 - RNA, 19 nt, Artificial Sequence
  Description of Artificial Sequence: Synthetic oligonucleotide
  Sense strand starting at position 2758 of SEQ ID NO: 1561217
ugaugaucuugaccagcuu

SEQ ID NO: 1655306 - RNA, 19 nt, Artificial Sequence
  Description of Artificial Sequence: Synthetic oligonucleotide
  Antisense strand to SEQ ID NO: 1655305
aagcuggucaagaucauca

SEQ ID NO: 1655307 - RNA, 19 nt, Artificial Sequence
  Description of Artificial Sequence: Synthetic oligonucleotide
  Sense strand starting at position 3153 of SEQ ID NO: 1561217
uacuguguaguuuaaacga

SEQ ID NO: 1655308 - RNA, 19 nt, Artificial Sequence
  Description of Artificial Sequence: Synthetic oligonucleotide
  Antisense strand to SEQ ID NO: 1655307
ucguuuaaacuacacagua

SEQ ID NO: 1655309 - RNA, 19 nt, Artificial Sequence
  Description of Artificial Sequence: Synthetic oligonucleotide
  Sense strand starting at position 3158 of SEQ ID NO: 1561217
uguaguuuaaacgagcuaa

SEQ ID NO: 1655310 - RNA, 19 nt, Artificial Sequence
  Description of Artificial Sequence: Synthetic oligonucleotide
  Antisense strand to SEQ ID NO: 1655309
uuagcucguuuaaacuaca

SEQ ID NO: 1655311 - RNA, 19 nt, Artificial Sequence
  Description of Artificial Sequence: Synthetic oligonucleotide
  Sense strand starting at position 3168 of SEQ ID NO: 1561217
acgagcuaauucccauaaa

SEQ ID NO: 1655312 - RNA, 19 nt, Artificial Sequence
  Description of Artificial Sequence: Synthetic oligonucleotide
  Antisense strand to SEQ ID NO: 1655311
uuuaugggaauuagcucgu

SEQ ID NO: 1655313 - RNA, 19 nt, Artificial Sequence
  Description of Artificial Sequence: Synthetic oligonucleotide
  Sense strand starting at position 262 of SEQ ID NO: 1561218
uugcgaaggucaccaauuu

SEQ ID NO: 1655314 - RNA, 19 nt, Artificial Sequence
  Description of Artificial Sequence: Synthetic oligonucleotide
  Antisense strand to SEQ ID NO: 1655313
aaauuggugaccuucgcaa

SEQ ID NO: 1655315 - RNA, 19 nt, Artificial Sequence
  Description of Artificial Sequence: Synthetic oligonucleotide
  Sense strand starting at position 344 of SEQ ID NO: 1561218
cuggauauacuauggcuca

SEQ ID NO: 1655316 - RNA, 19 nt, Artificial Sequence
  Description of Artificial Sequence: Synthetic oligonucleotide
  Antisense strand to SEQ ID NO: 1655315
ugagccauaguauauccag

SEQ ID NO: 1655317 - RNA, 19 nt, Artificial Sequence
  Description of Artificial Sequence: Synthetic oligonucleotide
  Sense strand starting at position 413 of SEQ ID NO: 1561218
acuuauuucuggcacagag

SEQ ID NO: 1655318 - RNA, 19 nt, Artificial Sequence
  Description of Artificial Sequence: Synthetic oligonucleotide
  Antisense strand to SEQ ID NO: 1655317
cucugugccagaaauaagu

SEQ ID NO: 1655319 - RNA, 19 nt, Artificial Sequence
  Description of Artificial Sequence: Synthetic oligonucleotide
  Sense strand starting at position 610 of SEQ ID NO: 1561218
cugugaugcccagaaccua

SEQ ID NO: 1655320 - RNA, 19 nt, Artificial Sequence
  Description of Artificial Sequence: Synthetic oligonucleotide
  Antisense strand to SEQ ID NO: 1655319
uagguucugggcaucacag

SEQ ID NO: 1655321 - RNA, 19 nt, Artificial Sequence
  Description of Artificial Sequence: Synthetic oligonucleotide
  Sense strand starting at position 666 of SEQ ID NO: 1561218
acgucauugagcuggacau

SEQ ID NO: 1655322 - RNA, 19 nt, Artificial Sequence
  Description of Artificial Sequence: Synthetic oligonucleotide
  Antisense strand to SEQ ID NO: 1655321
auguccagcucaaugacgu

SEQ ID NO: 1655323 - RNA, 19 nt, Artificial Sequence
  Description of Artificial Sequence: Synthetic oligonucleotide
  Sense strand starting at position 680 of SEQ ID NO: 1561218
gacauuccggcguaugaga

SEQ ID NO: 1655324 - RNA, 19 nt, Artificial Sequence
  Description of Artificial Sequence: Synthetic oligonucleotide
  Antisense strand to SEQ ID NO: 1655323
ucucauacgccggaauguc

SEQ ID NO: 1655325 - RNA, 19 nt, Artificial Sequence
  Description of Artificial Sequence: Synthetic oligonucleotide
  Sense strand starting at position 1199 of SEQ ID NO: 1561218
cccugaaaucccugcggaa

SEQ ID NO: 1655326 - RNA, 19 nt, Artificial Sequence
  Description of Artificial Sequence: Synthetic oligonucleotide
  Antisense strand to SEQ ID NO: 1655325
uuccgcagggauuucaggg

SEQ ID NO: 1655327 - RNA, 19 nt, Artificial Sequence
  Description of Artificial Sequence: Synthetic oligonucleotide
  Sense strand starting at position 1201 of SEQ ID NO: 1561218
cugaaaucccugcggaaag

SEQ ID NO: 1655328 - RNA, 19 nt, Artificial Sequence
  Description of Artificial Sequence: Synthetic oligonucleotide
  Antisense strand to SEQ ID NO: 1655327
cuuuccgcagggauuucag

SEQ ID NO: 1655329 - RNA, 19 nt, Artificial Sequence
  Description of Artificial Sequence: Synthetic oligonucleotide
  Sense strand starting at position 1264 of SEQ ID NO: 1561218
ucuggauuugggcggcaga

SEQ ID NO: 1655330 - RNA, 19 nt, Artificial Sequence
  Description of Artificial Sequence: Synthetic oligonucleotide
  Antisense strand to SEQ ID NO: 1655329
ucugccgcccaaauccaga

SEQ ID NO: 1655331 - RNA, 19 nt, Artificial Sequence
  Description of Artificial Sequence: Synthetic oligonucleotide
  Sense strand starting at position 1295 of SEQ ID NO: 1561218
gggagauaaacuuguguga

SEQ ID NO: 1655332 - RNA, 19 nt, Artificial Sequence
  Description of Artificial Sequence: Synthetic oligonucleotide
  Antisense strand to SEQ ID NO: 1655331
ucacacaaguuuaucuccc

SEQ ID NO: 1655333 - RNA, 19 nt, Artificial Sequence
  Description of Artificial Sequence: Synthetic oligonucleotide
  Sense strand starting at position 1377 of SEQ ID NO: 1561218
cgagcaaacucggugauca

SEQ ID NO: 1655334 - RNA, 19 nt, Artificial Sequence
  Description of Artificial Sequence: Synthetic oligonucleotide
  Antisense strand to SEQ ID NO: 1655333
ugaucaccgaguuugcucg

SEQ ID NO: 1655335 - RNA, 19 nt, Artificial Sequence
  Description of Artificial Sequence: Synthetic oligonucleotide
  Sense strand starting at position 1378 of SEQ ID NO: 1561218
gagcaaacucggugaucac

SEQ ID NO: 1655336 - RNA, 19 nt, Artificial Sequence
  Description of Artificial Sequence: Synthetic oligonucleotide
  Antisense strand to SEQ ID NO: 1655335
gugaucaccgaguuugcuc

SEQ ID NO: 1655337 - RNA, 19 nt, Artificial Sequence
  Description of Artificial Sequence: Synthetic oligonucleotide
  Sense strand starting at position 1379 of SEQ ID NO: 1561218
agcaaacucggugaucaca

SEQ ID NO: 1655338 - RNA, 19 nt, Artificial Sequence
  Description of Artificial Sequence: Synthetic oligonucleotide
  Antisense strand to SEQ ID NO: 1655337
ugugaucaccgaguuugcu

SEQ ID NO: 1655339 - RNA, 19 nt, Artificial Sequence
  Description of Artificial Sequence: Synthetic oligonucleotide
  Sense strand starting at position 1495 of SEQ ID NO: 1561218
acgucaggucccgauugaa

SEQ ID NO: 1655340 - RNA, 19 nt, Artificial Sequence
  Description of Artificial Sequence: Synthetic oligonucleotide
  Antisense strand to SEQ ID NO: 1655339
uucaaucgggaccugacgu

SEQ ID NO: 1655341 - RNA, 19 nt, Artificial Sequence
  Description of Artificial Sequence: Synthetic oligonucleotide
  Sense strand starting at position 1498 of SEQ ID NO: 1561218
ucaggucccgauugaauuc

SEQ ID NO: 1655342 - RNA, 19 nt, Artificial Sequence
  Description of Artificial Sequence: Synthetic oligonucleotide
  Antisense strand to SEQ ID NO: 1655341
gaauucaaucgggaccuga

SEQ ID NO: 1655343 - RNA, 19 nt, Artificial Sequence
  Description of Artificial Sequence: Synthetic oligonucleotide
  Sense strand starting at position 1537 of SEQ ID NO: 1561218
ccucguuggcacugggaaa

SEQ ID NO: 1655344 - RNA, 19 nt, Artificial Sequence
  Description of Artificial Sequence: Synthetic oligonucleotide
  Antisense strand to SEQ ID NO: 1655343
uuucccagugccaacgagg

SEQ ID NO: 1655345 - RNA, 19 nt, Artificial Sequence
  Description of Artificial Sequence: Synthetic oligonucleotide
  Sense strand starting at position 1734 of SEQ ID NO: 1561218
agagacgauccuugcauga

SEQ ID NO: 1655346 - RNA, 19 nt, Artificial Sequence
  Description of Artificial Sequence: Synthetic oligonucleotide
  Antisense strand to SEQ ID NO: 1655345
ucaugcaaggaucgucucu

SEQ ID NO: 1655347 - RNA, 19 nt, Artificial Sequence
  Description of Artificial Sequence: Synthetic oligonucleotide
  Sense strand starting at position 1738 of SEQ ID NO: 1561218
acgauccuugcaugagaca

SEQ ID NO: 1655348 - RNA, 19 nt, Artificial Sequence
  Description of Artificial Sequence: Synthetic oligonucleotide
  Antisense strand to SEQ ID NO: 1655347
ugucucaugcaaggaucgu

SEQ ID NO: 1655349 - RNA, 19 nt, Artificial Sequence
  Description of Artificial Sequence: Synthetic oligonucleotide
  Sense strand starting at position 1739 of SEQ ID NO: 1561218
cgauccuugcaugagacau

SEQ ID NO: 1655350 - RNA, 19 nt, Artificial Sequence
  Description of Artificial Sequence: Synthetic oligonucleotide
  Antisense strand to SEQ ID NO: 1655349
augucucaugcaaggaucg

SEQ ID NO: 1655351 - RNA, 19 nt, Artificial Sequence
  Description of Artificial Sequence: Synthetic oligonucleotide
  Sense strand starting at position 1848 of SEQ ID NO: 1561218
ccuacauaucuaugaggua

SEQ ID NO: 1655352 - RNA, 19 nt, Artificial Sequence
  Description of Artificial Sequence: Synthetic oligonucleotide
  Antisense strand to SEQ ID NO: 1655351
uaccucauagauauguagg

SEQ ID NO: 1655353 - RNA, 19 nt, Artificial Sequence
  Description of Artificial Sequence: Synthetic oligonucleotide
  Sense strand starting at position 2092 of SEQ ID NO: 1561218
gggcgaaucacaugauagu

SEQ ID NO: 1655354 - RNA, 19 nt, Artificial Sequence
  Description of Artificial Sequence: Synthetic oligonucleotide
  Antisense strand to SEQ ID NO: 1655353
acuaucaugugauucgccc

SEQ ID NO: 1655355 - RNA, 19 nt, Artificial Sequence
  Description of Artificial Sequence: Synthetic oligonucleotide
  Sense strand starting at position 2093 of SEQ ID NO: 1561218
ggcgaaucacaugauagug

SEQ ID NO: 1655356 - RNA, 19 nt, Artificial Sequence
  Description of Artificial Sequence: Synthetic oligonucleotide
  Antisense strand to SEQ ID NO: 1655355
cacuaucaugugauucgcc

SEQ ID NO: 1655357 - RNA, 19 nt, Artificial Sequence
  Description of Artificial Sequence: Synthetic oligonucleotide
  Sense strand starting at position 2401 of SEQ ID NO: 1561218
guuugaaucucagucccau

SEQ ID NO: 1655358 - RNA, 19 nt, Artificial Sequence
  Description of Artificial Sequence: Synthetic oligonucleotide
  Antisense strand to SEQ ID NO: 1655357
augggacugagauucaaac

SEQ ID NO: 1655359 - RNA, 19 nt, Artificial Sequence
  Description of Artificial Sequence: Synthetic oligonucleotide
  Sense strand starting at position 2467 of SEQ ID NO: 1561218
uuaaaugagaaucgugguu

SEQ ID NO: 1655360 - RNA, 19 nt, Artificial Sequence
  Description of Artificial Sequence: Synthetic oligonucleotide
  Antisense strand to SEQ ID NO: 1655359
aaccacgauucucauuuaa

SEQ ID NO: 1655361 - RNA, 19 nt, Artificial Sequence
  Description of Artificial Sequence: Synthetic oligonucleotide
  Sense strand starting at position 2472 of SEQ ID NO: 1561218
ugagaaucgugguuucuca

SEQ ID NO: 1655362 - RNA, 19 nt, Artificial Sequence
  Description of Artificial Sequence: Synthetic oligonucleotide
  Antisense strand to SEQ ID NO: 1655361
ugagaaaccacgauucuca

SEQ ID NO: 1655363 - RNA, 19 nt, Artificial Sequence
  Description of Artificial Sequence: Synthetic oligonucleotide
  Sense strand starting at position 2476 of SEQ ID NO: 1561218
aaucgugguuucucagaua

SEQ ID NO: 1655364 - RNA, 19 nt, Artificial Sequence
  Description of Artificial Sequence: Synthetic oligonucleotide
  Antisense strand to SEQ ID NO: 1655363
uaucugagaaaccacgauu

SEQ ID NO: 1655365 - RNA, 19 nt, Artificial Sequence
  Description of Artificial Sequence: Synthetic oligonucleotide
  Sense strand starting at position 2481 of SEQ ID NO: 1561218
ugguuucucagauagagca

SEQ ID NO: 1655366 - RNA, 19 nt, Artificial Sequence
  Description of Artificial Sequence: Synthetic oligonucleotide
  Antisense strand to SEQ ID NO: 1655365
ugcucuaucugagaaacca

SEQ ID NO: 1655367 - RNA, 19 nt, Artificial Sequence
  Description of Artificial Sequence: Synthetic oligonucleotide
  Sense strand starting at position 2518 of SEQ ID NO: 1561218
ccuggaaagugugcaaaga

SEQ ID NO: 1655368 - RNA, 19 nt, Artificial Sequence
  Description of Artificial Sequence: Synthetic oligonucleotide
  Antisense strand to SEQ ID NO: 1655367
ucuuugcacacuuuccagg

SEQ ID NO: 1655369 - RNA, 19 nt, Artificial Sequence
  Description of Artificial Sequence: Synthetic oligonucleotide
  Sense strand starting at position 2547 of SEQ ID NO: 1561218
cauuguaagcgcucgguaa

SEQ ID NO: 1655370 - RNA, 19 nt, Artificial Sequence
  Description of Artificial Sequence: Synthetic oligonucleotide
  Antisense strand to SEQ ID NO: 1655369
uuaccgagcgcuuacaaug

SEQ ID NO: 1655371 - RNA, 19 nt, Artificial Sequence
  Description of Artificial Sequence: Synthetic oligonucleotide
  Sense strand starting at position 2555 of SEQ ID NO: 1561218
gcgcucgguaaaguucuaa

SEQ ID NO: 1655372 - RNA, 19 nt, Artificial Sequence
  Description of Artificial Sequence: Synthetic oligonucleotide
  Antisense strand to SEQ ID NO: 1655371
uuagaacuuuaccgagcgc

SEQ ID NO: 1655373 - RNA, 19 nt, Artificial Sequence
  Description of Artificial Sequence: Synthetic oligonucleotide
  Sense strand starting at position 2566 of SEQ ID NO: 1561218
aguucuaaccaguguauga

SEQ ID NO: 1655374 - RNA, 19 nt, Artificial Sequence
  Description of Artificial Sequence: Synthetic oligonucleotide
  Antisense strand to SEQ ID NO: 1655373
ucauacacugguuagaacu

SEQ ID NO: 1655375 - RNA, 19 nt, Artificial Sequence
  Description of Artificial Sequence: Synthetic oligonucleotide
  Sense strand starting at position 2632 of SEQ ID NO: 1561218
ucgcccugcgacuuguuaa

SEQ ID NO: 1655376 - RNA, 19 nt, Artificial Sequence
  Description of Artificial Sequence: Synthetic oligonucleotide
  Antisense strand to SEQ ID NO: 1655375
uuaacaagucgcagggcga

SEQ ID NO: 1655377 - RNA, 19 nt, Artificial Sequence
  Description of Artificial Sequence: Synthetic oligonucleotide
  Sense strand starting at position 2639 of SEQ ID NO: 1561218
gcgacuuguuaacucugaa

SEQ ID NO: 1655378 - RNA, 19 nt, Artificial Sequence
  Description of Artificial Sequence: Synthetic oligonucleotide
  Antisense strand to SEQ ID NO: 1655377
uucagaguuaacaagucgc

SEQ ID NO: 1655379 - RNA, 19 nt, Artificial Sequence
  Description of Artificial Sequence: Synthetic oligonucleotide
  Sense strand starting at position 2710 of SEQ ID NO: 1561218
cuggguuguagugagaagu

SEQ ID NO: 1655380 - RNA, 19 nt, Artificial Sequence
  Description of Artificial Sequence: Synthetic oligonucleotide
  Antisense strand to SEQ ID NO: 1655379
acuucucacuacaacccag

SEQ ID NO: 1655381 - RNA, 19 nt, Artificial Sequence
  Description of Artificial Sequence: Synthetic oligonucleotide
  Sense strand starting at position 2716 of SEQ ID NO: 1561218
uguagugagaaguaaacga

SEQ ID NO: 1655382 - RNA, 19 nt, Artificial Sequence
  Description of Artificial Sequence: Synthetic oligonucleotide
  Antisense strand to SEQ ID NO: 1655381
ucguuuacuucucacuaca

SEQ ID NO: 1655383 - RNA, 19 nt, Artificial Sequence
  Description of Artificial Sequence: Synthetic oligonucleotide
  Sense strand starting at position 2720 of SEQ ID NO: 1561218
gugagaaguaaacgaguua

SEQ ID NO: 1655384 - RNA, 19 nt, Artificial Sequence
  Description of Artificial Sequence: Synthetic oligonucleotide
  Antisense strand to SEQ ID NO: 1655383
uaacucguuuacuucucac

SEQ ID NO: 1655385 - RNA, 19 nt, Artificial Sequence
  Description of Artificial Sequence: Synthetic oligonucleotide
  Sense strand starting at position 2858 of SEQ ID NO: 1561218
ugaugaucuugaccagcuu

SEQ ID NO: 1655386 - RNA, 19 nt, Artificial Sequence
  Description of Artificial Sequence: Synthetic oligonucleotide
  Antisense strand to SEQ ID NO: 1655385
aagcuggucaagaucauca

SEQ ID NO: 1655387 - RNA, 19 nt, Artificial Sequence
  Description of Artificial Sequence: Synthetic oligonucleotide
  Sense strand starting at position 3253 of SEQ ID NO: 1561218
uacuguguaguuuaaacga

SEQ ID NO: 1655388 - RNA, 19 nt, Artificial Sequence
  Description of Artificial Sequence: Synthetic oligonucleotide
  Antisense strand to SEQ ID NO: 1655387
ucguuuaaacuacacagua

SEQ ID NO: 1655389 - RNA, 19 nt, Artificial Sequence
  Description of Artificial Sequence: Synthetic oligonucleotide
  Sense strand starting at position 3258 of SEQ ID NO: 1561218
uguaguuuaaacgagcuaa

SEQ ID NO: 1655390 - RNA, 19 nt, Artificial Sequence
  Description of Artificial Sequence: Synthetic oligonucleotide
  Antisense strand to SEQ ID NO: 1655389
uuagcucguuuaaacuaca

SEQ ID NO: 1655391 - RNA, 19 nt, Artificial Sequence
  Description of Artificial Sequence: Synthetic oligonucleotide
  Sense strand starting at position 3268 of SEQ ID NO: 1561218
acgagcuaauucccauaaa

SEQ ID NO: 1655392 - RNA, 19 nt, Artificial Sequence
  Description of Artificial Sequence: Synthetic oligonucleotide
  Antisense strand to SEQ ID NO: 1655391
uuuaugggaauuagcucgu

SEQ ID NO: 1655393 - RNA, 19 nt, Artificial Sequence
  Description of Artificial Sequence: Synthetic oligonucleotide
  Sense strand starting at position 31 of SEQ ID NO: 1561219
aggugcauugccugagauc

SEQ ID NO: 1655394 - RNA, 19 nt, Artificial Sequence
  Description of Artificial Sequence: Synthetic oligonucleotide
  Antisense strand to SEQ ID NO: 1655393
gaucucaggcaaugcaccu

SEQ ID NO: 1655395 - RNA, 19 nt, Artificial Sequence
  Description of Artificial Sequence: Synthetic oligonucleotide
  Sense strand starting at position 34 of SEQ ID NO: 1561219
ugcauugccugagaucaag

SEQ ID NO: 1655396 - RNA, 19 nt, Artificial Sequence
  Description of Artificial Sequence: Synthetic oligonucleotide
  Antisense strand to SEQ ID NO: 1655395
cuugaucucaggcaaugca

SEQ ID NO: 1655397 - RNA, 19 nt, Artificial Sequence
  Description of Artificial Sequence: Synthetic oligonucleotide
  Sense strand starting at position 755 of SEQ ID NO: 1561219
uugagaggccgucacugaa

SEQ ID NO: 1655398 - RNA, 19 nt, Artificial Sequence
  Description of Artificial Sequence: Synthetic oligonucleotide
  Antisense strand to SEQ ID NO: 1655397
uucagugacggccucucaa

SEQ ID NO: 1655399 - RNA, 19 nt, Artificial Sequence
  Description of Artificial Sequence: Synthetic oligonucleotide
  Sense strand starting at position 882 of SEQ ID NO: 1561219
ugcagauauuucccagcgu

SEQ ID NO: 1655400 - RNA, 19 nt, Artificial Sequence
  Description of Artificial Sequence: Synthetic oligonucleotide
  Antisense strand to SEQ ID NO: 1655399
acgcugggaaauaucugca

SEQ ID NO: 1655401 - RNA, 19 nt, Artificial Sequence
  Description of Artificial Sequence: Synthetic oligonucleotide
  Sense strand starting at position 883 of SEQ ID NO: 1561219
gcagauauuucccagcguc

SEQ ID NO: 1655402 - RNA, 19 nt, Artificial Sequence
  Description of Artificial Sequence: Synthetic oligonucleotide
  Antisense strand to SEQ ID NO: 1655401
gacgcugggaaauaucugc

SEQ ID NO: 1655403 - RNA, 19 nt, Artificial Sequence
  Description of Artificial Sequence: Synthetic oligonucleotide
  Sense strand starting at position 909 of SEQ ID NO: 1561219
gggcgcugugccaggaaua

SEQ ID NO: 1655404 - RNA, 19 nt, Artificial Sequence
  Description of Artificial Sequence: Synthetic oligonucleotide
  Antisense strand to SEQ ID NO: 1655403
uauuccuggcacagcgccc

SEQ ID NO: 1655405 - RNA, 19 nt, Artificial Sequence
  Description of Artificial Sequence: Synthetic oligonucleotide
  Sense strand starting at position 910 of SEQ ID NO: 1561219
ggcgcugugccaggaauau

SEQ ID NO: 1655406 - RNA, 19 nt, Artificial Sequence
  Description of Artificial Sequence: Synthetic oligonucleotide
  Antisense strand to SEQ ID NO: 1655405
auauuccuggcacagcgcc

SEQ ID NO: 1655407 - RNA, 19 nt, Artificial Sequence
  Description of Artificial Sequence: Synthetic oligonucleotide
  Sense strand starting at position 919 of SEQ ID NO: 1561219
ccaggaauaucacaagcau

SEQ ID NO: 1655408 - RNA, 19 nt, Artificial Sequence
  Description of Artificial Sequence: Synthetic oligonucleotide
  Antisense strand to SEQ ID NO: 1655407
augcuugugauauuccugg

SEQ ID NO: 1655409 - RNA, 19 nt, Artificial Sequence
  Description of Artificial Sequence: Synthetic oligonucleotide
  Sense strand starting at position 1078 of SEQ ID NO: 1561219
gccguugaauuaggcuaaa

SEQ ID NO: 1655410 - RNA, 19 nt, Artificial Sequence
  Description of Artificial Sequence: Synthetic oligonucleotide
  Antisense strand to SEQ ID NO: 1655409
uuuagccuaauucaacggc

SEQ ID NO: 1655411 - RNA, 19 nt, Artificial Sequence
  Description of Artificial Sequence: Synthetic oligonucleotide
  Sense strand starting at position 1114 of SEQ ID NO: 1561219
gagugaggguuucuugcau

SEQ ID NO: 1655412 - RNA, 19 nt, Artificial Sequence
  Description of Artificial Sequence: Synthetic oligonucleotide
  Antisense strand to SEQ ID NO: 1655411
augcaagaaacccucacuc

SEQ ID NO: 1655413 - RNA, 19 nt, Artificial Sequence
  Description of Artificial Sequence: Synthetic oligonucleotide
  Sense strand starting at position 1118 of SEQ ID NO: 1561219
gaggguuucuugcauggau

SEQ ID NO: 1655414 - RNA, 19 nt, Artificial Sequence
  Description of Artificial Sequence: Synthetic oligonucleotide
  Antisense strand to SEQ ID NO: 1655413
auccaugcaagaaacccuc

SEQ ID NO: 1655415 - RNA, 19 nt, Artificial Sequence
  Description of Artificial Sequence: Synthetic oligonucleotide
  Sense strand starting at position 1121 of SEQ ID NO: 1561219
gguuucuugcauggaugga

SEQ ID NO: 1655416 - RNA, 19 nt, Artificial Sequence
  Description of Artificial Sequence: Synthetic oligonucleotide
  Antisense strand to SEQ ID NO: 1655415
uccauccaugcaagaaacc

SEQ ID NO: 1655417 - RNA, 19 nt, Artificial Sequence
  Description of Artificial Sequence: Synthetic oligonucleotide
  Sense strand starting at position 1122 of SEQ ID NO: 1561219
guuucuugcauggauggau

SEQ ID NO: 1655418 - RNA, 19 nt, Artificial Sequence
  Description of Artificial Sequence: Synthetic oligonucleotide
  Antisense strand to SEQ ID NO: 1655417
auccauccaugcaagaaac

SEQ ID NO: 1655419 - RNA, 19 nt, Artificial Sequence
  Description of Artificial Sequence: Synthetic oligonucleotide
  Sense strand starting at position 1616 of SEQ ID NO: 1561219
ccaguucuguccuauggga

SEQ ID NO: 1655420 - RNA, 19 nt, Artificial Sequence
  Description of Artificial Sequence: Synthetic oligonucleotide
  Antisense strand to SEQ ID NO: 1655419
ucccauaggacagaacugg

SEQ ID NO: 1655421 - RNA, 19 nt, Artificial Sequence
  Description of Artificial Sequence: Synthetic oligonucleotide
  Sense strand starting at position 1618 of SEQ ID NO: 1561219
aguucuguccuaugggaca

SEQ ID NO: 1655422 - RNA, 19 nt, Artificial Sequence
  Description of Artificial Sequence: Synthetic oligonucleotide
  Antisense strand to SEQ ID NO: 1655421
ugucccauaggacagaacu

SEQ ID NO: 1655423 - RNA, 19 nt, Artificial Sequence
  Description of Artificial Sequence: Synthetic oligonucleotide
  Sense strand starting at position 1766 of SEQ ID NO: 1561219
cuccgucugacccaggaau

SEQ ID NO: 1655424 - RNA, 19 nt, Artificial Sequence
  Description of Artificial Sequence: Synthetic oligonucleotide
  Antisense strand to SEQ ID NO: 1655423
auuccugggucagacggag

SEQ ID NO: 1655425 - RNA, 19 nt, Artificial Sequence
  Description of Artificial Sequence: Synthetic oligonucleotide
  Sense strand starting at position 2034 of SEQ ID NO: 1561219
gagucuuggagacgccaaa

SEQ ID NO: 1655426 - RNA, 19 nt, Artificial Sequence
  Description of Artificial Sequence: Synthetic oligonucleotide
  Antisense strand to SEQ ID NO: 1655425
uuuggcgucuccaagacuc

SEQ ID NO: 1655427 - RNA, 19 nt, Artificial Sequence
  Description of Artificial Sequence: Synthetic oligonucleotide
  Sense strand starting at position 3573 of SEQ ID NO: 1561219
gaggcaaucccauggagga

SEQ ID NO: 1655428 - RNA, 19 nt, Artificial Sequence
  Description of Artificial Sequence: Synthetic oligonucleotide
  Antisense strand to SEQ ID NO: 1655427
uccuccaugggauugccuc

SEQ ID NO: 1655429 - RNA, 19 nt, Artificial Sequence
  Description of Artificial Sequence: Synthetic oligonucleotide
  Sense strand starting at position 3906 of SEQ ID NO: 1561219
auucuagggccucaauacu

SEQ ID NO: 1655430 - RNA, 19 nt, Artificial Sequence
  Description of Artificial Sequence: Synthetic oligonucleotide
  Antisense strand to SEQ ID NO: 1655429
aguauugaggcccuagaau

SEQ ID NO: 1655431 - RNA, 19 nt, Artificial Sequence
  Description of Artificial Sequence: Synthetic oligonucleotide
  Sense strand starting at position 3949 of SEQ ID NO: 1561219
aucauuccagcuggaaaca

SEQ ID NO: 1655432 - RNA, 19 nt, Artificial Sequence
  Description of Artificial Sequence: Synthetic oligonucleotide
  Antisense strand to SEQ ID NO: 1655431
uguuuccagcuggaaugau

SEQ ID NO: 1655433 - RNA, 19 nt, Artificial Sequence
  Description of Artificial Sequence: Synthetic oligonucleotide
  Sense strand starting at position 65 of SEQ ID NO: 1561220
agcagugaccaauggcaga

SEQ ID NO: 1655434 - RNA, 19 nt, Artificial Sequence
  Description of Artificial Sequence: Synthetic oligonucleotide
  Antisense strand to SEQ ID NO: 1655433
ucugccauuggucacugcu

SEQ ID NO: 1655435 - RNA, 19 nt, Artificial Sequence
  Description of Artificial Sequence: Synthetic oligonucleotide
  Sense strand starting at position 158 of SEQ ID NO: 1561220
acagaugcucuuggacaca

SEQ ID NO: 1655436 - RNA, 19 nt, Artificial Sequence
  Description of Artificial Sequence: Synthetic oligonucleotide
  Antisense strand to SEQ ID NO: 1655435
uguguccaagagcaucugu

SEQ ID NO: 1655437 - RNA, 19 nt, Artificial Sequence
  Description of Artificial Sequence: Synthetic oligonucleotide
  Sense strand starting at position 484 of SEQ ID NO: 1561220
cgcccagccugaugucuaa

SEQ ID NO: 1655438 - RNA, 19 nt, Artificial Sequence
  Description of Artificial Sequence: Synthetic oligonucleotide
  Antisense strand to SEQ ID NO: 1655437
uuagacaucaggcugggcg

SEQ ID NO: 1655439 - RNA, 19 nt, Artificial Sequence
  Description of Artificial Sequence: Synthetic oligonucleotide
  Sense strand starting at position 487 of SEQ ID NO: 1561220
ccagccugaugucuaacua

SEQ ID NO: 1655440 - RNA, 19 nt, Artificial Sequence
  Description of Artificial Sequence: Synthetic oligonucleotide
  Antisense strand to SEQ ID NO: 1655439
uaguuagacaucaggcugg

SEQ ID NO: 1655441 - RNA, 19 nt, Artificial Sequence
  Description of Artificial Sequence: Synthetic oligonucleotide
  Sense strand starting at position 509 of SEQ ID NO: 1561220
cuaagugaaucuucuggau

SEQ ID NO: 1655442 - RNA, 19 nt, Artificial Sequence
  Description of Artificial Sequence: Synthetic oligonucleotide
  Antisense strand to SEQ ID NO: 1655441
auccagaagauucacuuag

SEQ ID NO: 1655443 - RNA, 19 nt, Artificial Sequence
  Description of Artificial Sequence: Synthetic oligonucleotide
  Sense strand starting at position 512 of SEQ ID NO: 1561220
agugaaucuucuggaucac

SEQ ID NO: 1655444 - RNA, 19 nt, Artificial Sequence
  Description of Artificial Sequence: Synthetic oligonucleotide
  Antisense strand to SEQ ID NO: 1655443
gugauccagaagauucacu

SEQ ID NO: 1655445 - RNA, 19 nt, Artificial Sequence
  Description of Artificial Sequence: Synthetic oligonucleotide
  Sense strand starting at position 518 of SEQ ID NO: 1561220
ucuucuggaucacaguaau

SEQ ID NO: 1655446 - RNA, 19 nt, Artificial Sequence
  Description of Artificial Sequence: Synthetic oligonucleotide
  Antisense strand to SEQ ID NO: 1655445
auuacugugauccagaaga

SEQ ID NO: 1655447 - RNA, 19 nt, Artificial Sequence
  Description of Artificial Sequence: Synthetic oligonucleotide
  Sense strand starting at position 551 of SEQ ID NO: 1561220
cguuaaacugcuugcccaa

SEQ ID NO: 1655448 - RNA, 19 nt, Artificial Sequence
  Description of Artificial Sequence: Synthetic oligonucleotide
  Antisense strand to SEQ ID NO: 1655447
uugggcaagcaguuuaacg

SEQ ID NO: 1655449 - RNA, 19 nt, Artificial Sequence
  Description of Artificial Sequence: Synthetic oligonucleotide
  Sense strand starting at position 585 of SEQ ID NO: 1561220
ccaaauguuuccugucugu

SEQ ID NO: 1655450 - RNA, 19 nt, Artificial Sequence
  Description of Artificial Sequence: Synthetic oligonucleotide
  Antisense strand to SEQ ID NO: 1655449
acagacaggaaacauuugg

SEQ ID NO: 1655451 - RNA, 19 nt, Artificial Sequence
  Description of Artificial Sequence: Synthetic oligonucleotide
  Sense strand starting at position 592 of SEQ ID NO: 1561220
uuuccugucugucuaugaa

SEQ ID NO: 1655452 - RNA, 19 nt, Artificial Sequence
  Description of Artificial Sequence: Synthetic oligonucleotide
  Antisense strand to SEQ ID NO: 1655451
uucauagacagacaggaaa

SEQ ID NO: 1655453 - RNA, 19 nt, Artificial Sequence
  Description of Artificial Sequence: Synthetic oligonucleotide
  Sense strand starting at position 595 of SEQ ID NO: 1561220
ccugucugucuaugaauuu

SEQ ID NO: 1655454 - RNA, 19 nt, Artificial Sequence
  Description of Artificial Sequence: Synthetic oligonucleotide
  Antisense strand to SEQ ID NO: 1655453
aaauucauagacagacagg

SEQ ID NO: 1655455 - RNA, 19 nt, Artificial Sequence
  Description of Artificial Sequence: Synthetic oligonucleotide
  Sense strand starting at position 649 of SEQ ID NO: 1561220
ugcagcugggccuauaauu

SEQ ID NO: 1655456 - RNA, 19 nt, Artificial Sequence
  Description of Artificial Sequence: Synthetic oligonucleotide
  Antisense strand to SEQ ID NO: 1655455
aauuauaggcccagcugca

SEQ ID NO: 1655457 - RNA, 19 nt, Artificial Sequence
  Description of Artificial Sequence: Synthetic oligonucleotide
  Sense strand starting at position 780 of SEQ ID NO: 1561220
cgcagaauacauugggauc

SEQ ID NO: 1655458 - RNA, 19 nt, Artificial Sequence
  Description of Artificial Sequence: Synthetic oligonucleotide
  Antisense strand to SEQ ID NO: 1655457
gaucccaauguauucugcg

SEQ ID NO: 1655459 - RNA, 19 nt, Artificial Sequence
  Description of Artificial Sequence: Synthetic oligonucleotide
  Sense strand starting at position 783 of SEQ ID NO: 1561220
agaauacauugggaucgua

SEQ ID NO: 1655460 - RNA, 19 nt, Artificial Sequence
  Description of Artificial Sequence: Synthetic oligonucleotide
  Antisense strand to SEQ ID NO: 1655459
uacgaucccaauguauucu

SEQ ID NO: 1655461 - RNA, 19 nt, Artificial Sequence
  Description of Artificial Sequence: Synthetic oligonucleotide
  Sense strand starting at position 1114 of SEQ ID NO: 1561220
agagaagaguuugguaaau

SEQ ID NO: 1655462 - RNA, 19 nt, Artificial Sequence
  Description of Artificial Sequence: Synthetic oligonucleotide
  Antisense strand to SEQ ID NO: 1655461
auuuaccaaacucuucucu

SEQ ID NO: 1655463 - RNA, 19 nt, Artificial Sequence
  Description of Artificial Sequence: Synthetic oligonucleotide
  Sense strand starting at position 1139 of SEQ ID NO: 1561220
gguaaagucuucucacccu

SEQ ID NO: 1655464 - RNA, 19 nt, Artificial Sequence
  Description of Artificial Sequence: Synthetic oligonucleotide
  Antisense strand to SEQ ID NO: 1655463
agggugagaagacuuuacc

SEQ ID NO: 1655465 - RNA, 19 nt, Artificial Sequence
  Description of Artificial Sequence: Synthetic oligonucleotide
  Sense strand starting at position 1480 of SEQ ID NO: 1561220
gaaggaugucagggccuga

SEQ ID NO: 1655466 - RNA, 19 nt, Artificial Sequence
  Description of Artificial Sequence: Synthetic oligonucleotide
  Antisense strand to SEQ ID NO: 1655465
ucaggcccugacauccuuc

SEQ ID NO: 1655467 - RNA, 19 nt, Artificial Sequence
  Description of Artificial Sequence: Synthetic oligonucleotide
  Sense strand starting at position 3181 of SEQ ID NO: 1561220
uguaaauacucaugggugu

SEQ ID NO: 1655468 - RNA, 19 nt, Artificial Sequence
  Description of Artificial Sequence: Synthetic oligonucleotide
  Antisense strand to SEQ ID NO: 1655467
acacccaugaguauuuaca

SEQ ID NO: 1655469 - RNA, 19 nt, Artificial Sequence
  Description of Artificial Sequence: Synthetic oligonucleotide
  Sense strand starting at position 3234 of SEQ ID NO: 1561220
cgucacuuguacccaacua

SEQ ID NO: 1655470 - RNA, 19 nt, Artificial Sequence
  Description of Artificial Sequence: Synthetic oligonucleotide
  Antisense strand to SEQ ID NO: 1655469
uaguuggguacaagugacg

SEQ ID NO: 1655471 - RNA, 19 nt, Artificial Sequence
  Description of Artificial Sequence: Synthetic oligonucleotide
  Sense strand starting at position 3245 of SEQ ID NO: 1561220
cccaacuaucuacgaagua

SEQ ID NO: 1655472 - RNA, 19 nt, Artificial Sequence
  Description of Artificial Sequence: Synthetic oligonucleotide
  Antisense strand to SEQ ID NO: 1655471
uacuucguagauaguuggg

SEQ ID NO: 1655473 - RNA, 19 nt, Artificial Sequence
  Description of Artificial Sequence: Synthetic oligonucleotide
  Sense strand starting at position 3246 of SEQ ID NO: 1561220
ccaacuaucuacgaaguaa

SEQ ID NO: 1655474 - RNA, 19 nt, Artificial Sequence
  Description of Artificial Sequence: Synthetic oligonucleotide
  Antisense strand to SEQ ID NO: 1655473
uuacuucguagauaguugg

SEQ ID NO: 1655475 - RNA, 19 nt, Artificial Sequence
  Description of Artificial Sequence: Synthetic oligonucleotide
  Sense strand starting at position 3340 of SEQ ID NO: 1561220
ucgacuaccuccgaagaaa

SEQ ID NO: 1655476 - RNA, 19 nt, Artificial Sequence
  Description of Artificial Sequence: Synthetic oligonucleotide
  Antisense strand to SEQ ID NO: 1655475
uuucuucggagguagucga

SEQ ID NO: 1655477 - RNA, 19 nt, Artificial Sequence
  Description of Artificial Sequence: Synthetic oligonucleotide
  Sense strand starting at position 3394 of SEQ ID NO: 1561220
cucuccguucucgacuauu

SEQ ID NO: 1655478 - RNA, 19 nt, Artificial Sequence
  Description of Artificial Sequence: Synthetic oligonucleotide
  Antisense strand to SEQ ID NO: 1655477
aauagucgagaacggagag

SEQ ID NO: 1655479 - RNA, 19 nt, Artificial Sequence
  Description of Artificial Sequence: Synthetic oligonucleotide
  Sense strand starting at position 3404 of SEQ ID NO: 1561220
ucgacuauugccgaaguga

SEQ ID NO: 1655480 - RNA, 19 nt, Artificial Sequence
  Description of Artificial Sequence: Synthetic oligonucleotide
  Antisense strand to SEQ ID NO: 1655479
ucacuucggcaauagucga

SEQ ID NO: 1655481 - RNA, 19 nt, Artificial Sequence
  Description of Artificial Sequence: Synthetic oligonucleotide
  Sense strand starting at position 3461 of SEQ ID NO: 1561220
cccgauugugcccgaagga

SEQ ID NO: 1655482 - RNA, 19 nt, Artificial Sequence
  Description of Artificial Sequence: Synthetic oligonucleotide
  Antisense strand to SEQ ID NO: 1655481
uccuucgggcacaaucggg

SEQ ID NO: 1655483 - RNA, 19 nt, Artificial Sequence
  Description of Artificial Sequence: Synthetic oligonucleotide
  Sense strand starting at position 3462 of SEQ ID NO: 1561220
ccgauugugcccgaaggaa

SEQ ID NO: 1655484 - RNA, 19 nt, Artificial Sequence
  Description of Artificial Sequence: Synthetic oligonucleotide
  Antisense strand to SEQ ID NO: 1655483
uuccuucgggcacaaucgg

SEQ ID NO: 1655485 - RNA, 19 nt, Artificial Sequence
  Description of Artificial Sequence: Synthetic oligonucleotide
  Sense strand starting at position 1 of SEQ ID NO: 1561221
cgcccagccugaugucuaa

SEQ ID NO: 1655486 - RNA, 19 nt, Artificial Sequence
  Description of Artificial Sequence: Synthetic oligonucleotide
  Antisense strand to SEQ ID NO: 1655485
uuagacaucaggcugggcg

SEQ ID NO: 1655487 - RNA, 19 nt, Artificial Sequence
  Description of Artificial Sequence: Synthetic oligonucleotide
  Sense strand starting at position 4 of SEQ ID NO: 1561221
ccagccugaugucuaacua

SEQ ID NO: 1655488 - RNA, 19 nt, Artificial Sequence
  Description of Artificial Sequence: Synthetic oligonucleotide
  Antisense strand to SEQ ID NO: 1655487
uaguuagacaucaggcugg

SEQ ID NO: 1655489 - RNA, 19 nt, Artificial Sequence
  Description of Artificial Sequence: Synthetic oligonucleotide
  Sense strand starting at position 26 of SEQ ID NO: 1561221
cuaagugaaucuucuggau

SEQ ID NO: 1655490 - RNA, 19 nt, Artificial Sequence
  Description of Artificial Sequence: Synthetic oligonucleotide
  Antisense strand to SEQ ID NO: 1655489
auccagaagauucacuuag

SEQ ID NO: 1655491 - RNA, 19 nt, Artificial Sequence
  Description of Artificial Sequence: Synthetic oligonucleotide
  Sense strand starting at position 29 of SEQ ID NO: 1561221
agugaaucuucuggaucac

SEQ ID NO: 1655492 - RNA, 19 nt, Artificial Sequence
  Description of Artificial Sequence: Synthetic oligonucleotide
  Antisense strand to SEQ ID NO: 1655491
gugauccagaagauucacu

SEQ ID NO: 1655493 - RNA, 19 nt, Artificial Sequence
  Description of Artificial Sequence: Synthetic oligonucleotide
  Sense strand starting at position 35 of SEQ ID NO: 1561221
ucuucuggaucacaguaau

SEQ ID NO: 1655494 - RNA, 19 nt, Artificial Sequence
  Description of Artificial Sequence: Synthetic oligonucleotide
  Antisense strand to SEQ ID NO: 1655493
auuacugugauccagaaga

SEQ ID NO: 1655495 - RNA, 19 nt, Artificial Sequence
  Description of Artificial Sequence: Synthetic oligonucleotide
  Sense strand starting at position 68 of SEQ ID NO: 1561221
cguuaaacugcuugcccaa

SEQ ID NO: 1655496 - RNA, 19 nt, Artificial Sequence
  Description of Artificial Sequence: Synthetic oligonucleotide
  Antisense strand to SEQ ID NO: 1655495
uugggcaagcaguuuaacg

SEQ ID NO: 1655497 - RNA, 19 nt, Artificial Sequence
  Description of Artificial Sequence: Synthetic oligonucleotide
  Sense strand starting at position 102 of SEQ ID NO: 1561221
ccaaauguuuccugucugu

SEQ ID NO: 1655498 - RNA, 19 nt, Artificial Sequence
  Description of Artificial Sequence: Synthetic oligonucleotide
  Antisense strand to SEQ ID NO: 1655497
acagacaggaaacauuugg

SEQ ID NO: 1655499 - RNA, 19 nt, Artificial Sequence
  Description of Artificial Sequence: Synthetic oligonucleotide
  Sense strand starting at position 109 of SEQ ID NO: 1561221
uuuccugucugucuaugaa

SEQ ID NO: 1655500 - RNA, 19 nt, Artificial Sequence
  Description of Artificial Sequence: Synthetic oligonucleotide
  Antisense strand to SEQ ID NO: 1655499
uucauagacagacaggaaa

SEQ ID NO: 1655501 - RNA, 19 nt, Artificial Sequence
  Description of Artificial Sequence: Synthetic oligonucleotide
  Sense strand starting at position 112 of SEQ ID NO: 1561221
ccugucugucuaugaauuu

SEQ ID NO: 1655502 - RNA, 19 nt, Artificial Sequence
  Description of Artificial Sequence: Synthetic oligonucleotide
  Antisense strand to SEQ ID NO: 1655501
aaauucauagacagacagg

SEQ ID NO: 1655503 - RNA, 19 nt, Artificial Sequence
  Description of Artificial Sequence: Synthetic oligonucleotide
  Sense strand starting at position 166 of SEQ ID NO: 1561221
ugcagcugggccuauaauu

SEQ ID NO: 1655504 - RNA, 19 nt, Artificial Sequence
  Description of Artificial Sequence: Synthetic oligonucleotide
  Antisense strand to SEQ ID NO: 1655503
aauuauaggcccagcugca

SEQ ID NO: 1655505 - RNA, 19 nt, Artificial Sequence
  Description of Artificial Sequence: Synthetic oligonucleotide
  Sense strand starting at position 297 of SEQ ID NO: 1561221
cgcagaauacauugggauc

SEQ ID NO: 1655506 - RNA, 19 nt, Artificial Sequence
  Description of Artificial Sequence: Synthetic oligonucleotide
  Antisense strand to SEQ ID NO: 1655505
gaucccaauguauucugcg

SEQ ID NO: 1655507 - RNA, 19 nt, Artificial Sequence
  Description of Artificial Sequence: Synthetic oligonucleotide
  Sense strand starting at position 300 of SEQ ID NO: 1561221
agaauacauugggaucgua

SEQ ID NO: 1655508 - RNA, 19 nt, Artificial Sequence
  Description of Artificial Sequence: Synthetic oligonucleotide
  Antisense strand to SEQ ID NO: 1655507
uacgaucccaauguauucu

SEQ ID NO: 1655509 - RNA, 19 nt, Artificial Sequence
  Description of Artificial Sequence: Synthetic oligonucleotide
  Sense strand starting at position 631 of SEQ ID NO: 1561221
agagaagaguuugguaaau

SEQ ID NO: 1655510 - RNA, 19 nt, Artificial Sequence
  Description of Artificial Sequence: Synthetic oligonucleotide
  Antisense strand to SEQ ID NO: 1655509
auuuaccaaacucuucucu

SEQ ID NO: 1655511 - RNA, 19 nt, Artificial Sequence
  Description of Artificial Sequence: Synthetic oligonucleotide
  Sense strand starting at position 656 of SEQ ID NO: 1561221
gguaaagucuucucacccu

SEQ ID NO: 1655512 - RNA, 19 nt, Artificial Sequence
  Description of Artificial Sequence: Synthetic oligonucleotide
  Antisense strand to SEQ ID NO: 1655511
agggugagaagacuuuacc

SEQ ID NO: 1655513 - RNA, 19 nt, Artificial Sequence
  Description of Artificial Sequence: Synthetic oligonucleotide
  Sense strand starting at position 997 of SEQ ID NO: 1561221
gaaggaugucagggccuga

SEQ ID NO: 1655514 - RNA, 19 nt, Artificial Sequence
  Description of Artificial Sequence: Synthetic oligonucleotide
  Antisense strand to SEQ ID NO: 1655513
ucaggcccugacauccuuc

SEQ ID NO: 1655515 - RNA, 19 nt, Artificial Sequence
  Description of Artificial Sequence: Synthetic oligonucleotide
  Sense strand starting at position 2698 of SEQ ID NO: 1561221
uguaaauacucaugggugu

SEQ ID NO: 1655516 - RNA, 19 nt, Artificial Sequence
  Description of Artificial Sequence: Synthetic oligonucleotide
  Antisense strand to SEQ ID NO: 1655515
acacccaugaguauuuaca

SEQ ID NO: 1655517 - RNA, 19 nt, Artificial Sequence
  Description of Artificial Sequence: Synthetic oligonucleotide
  Sense strand starting at position 2751 of SEQ ID NO: 1561221
cgucacuuguacccaacua

SEQ ID NO: 1655518 - RNA, 19 nt, Artificial Sequence
  Description of Artificial Sequence: Synthetic oligonucleotide
  Antisense strand to SEQ ID NO: 1655517
uaguuggguacaagugacg

SEQ ID NO: 1655519 - RNA, 19 nt, Artificial Sequence
  Description of Artificial Sequence: Synthetic oligonucleotide
  Sense strand starting at position 2762 of SEQ ID NO: 1561221
cccaacuaucuacgaagua

SEQ ID NO: 1655520 - RNA, 19 nt, Artificial Sequence
  Description of Artificial Sequence: Synthetic oligonucleotide
  Antisense strand to SEQ ID NO: 1655519
uacuucguagauaguuggg

SEQ ID NO: 1655521 - RNA, 19 nt, Artificial Sequence
  Description of Artificial Sequence: Synthetic oligonucleotide
  Sense strand starting at position 2763 of SEQ ID NO: 1561221
ccaacuaucuacgaaguaa

SEQ ID NO: 1655522 - RNA, 19 nt, Artificial Sequence
  Description of Artificial Sequence: Synthetic oligonucleotide
  Antisense strand to SEQ ID NO: 1655521
uuacuucguagauaguugg

SEQ ID NO: 1655523 - RNA, 19 nt, Artificial Sequence
  Description of Artificial Sequence: Synthetic oligonucleotide
  Sense strand starting at position 2857 of SEQ ID NO: 1561221
ucgacuaccuccgaagaaa

SEQ ID NO: 1655524 - RNA, 19 nt, Artificial Sequence
  Description of Artificial Sequence: Synthetic oligonucleotide
  Antisense strand to SEQ ID NO: 1655523
uuucuucggagguagucga

SEQ ID NO: 1655525 - RNA, 19 nt, Artificial Sequence
  Description of Artificial Sequence: Synthetic oligonucleotide
  Sense strand starting at position 2911 of SEQ ID NO: 1561221
cucuccguucucgacuauu

SEQ ID NO: 1655526 - RNA, 19 nt, Artificial Sequence
  Description of Artificial Sequence: Synthetic oligonucleotide
  Antisense strand to SEQ ID NO: 1655525
aauagucgagaacggagag

SEQ ID NO: 1655527 - RNA, 19 nt, Artificial Sequence
  Description of Artificial Sequence: Synthetic oligonucleotide
  Sense strand starting at position 2921 of SEQ ID NO: 1561221
ucgacuauugccgaaguga

SEQ ID NO: 1655528 - RNA, 19 nt, Artificial Sequence
  Description of Artificial Sequence: Synthetic oligonucleotide
  Antisense strand to SEQ ID NO: 1655527
ucacuucggcaauagucga

SEQ ID NO: 1655529 - RNA, 19 nt, Artificial Sequence
  Description of Artificial Sequence: Synthetic oligonucleotide
  Sense strand starting at position 2978 of SEQ ID NO: 1561221
cccgauugugcccgaagga

SEQ ID NO: 1655530 - RNA, 19 nt, Artificial Sequence
  Description of Artificial Sequence: Synthetic oligonucleotide
  Antisense strand to SEQ ID NO: 1655529
uccuucgggcacaaucggg

SEQ ID NO: 1655531 - RNA, 19 nt, Artificial Sequence
  Description of Artificial Sequence: Synthetic oligonucleotide
  Sense strand starting at position 2979 of SEQ ID NO: 1561221
ccgauugugcccgaaggaa

SEQ ID NO: 1655532 - RNA, 19 nt, Artificial Sequence
  Description of Artificial Sequence: Synthetic oligonucleotide
  Antisense strand to SEQ ID NO: 1655531
uuccuucgggcacaaucgg

SEQ ID NO: 1655533 - RNA, 19 nt, Artificial Sequence
  Description of Artificial Sequence: Synthetic oligonucleotide
  Sense strand starting at position 3605 of SEQ ID NO: 1561221
ccggguucucaguaggaga

SEQ ID NO: 1655534 - RNA, 19 nt, Artificial Sequence
  Description of Artificial Sequence: Synthetic oligonucleotide
  Antisense strand to SEQ ID NO: 1655533
ucuccuacugagaacccgg

SEQ ID NO: 1655535 - RNA, 19 nt, Artificial Sequence
  Description of Artificial Sequence: Synthetic oligonucleotide
  Sense strand starting at position 3764 of SEQ ID NO: 1561221
cuggauccucgcuggaaga

SEQ ID NO: 1655536 - RNA, 19 nt, Artificial Sequence
  Description of Artificial Sequence: Synthetic oligonucleotide
  Antisense strand to SEQ ID NO: 1655535
ucuuccagcgaggauccag

SEQ ID NO: 1655537 - RNA, 19 nt, Artificial Sequence
  Description of Artificial Sequence: Synthetic oligonucleotide
  Sense strand starting at position 3799 of SEQ ID NO: 1561221
agauuccugggcugucgaa

SEQ ID NO: 1655538 - RNA, 19 nt, Artificial Sequence
  Description of Artificial Sequence: Synthetic oligonucleotide
  Antisense strand to SEQ ID NO: 1655537
uucgacagcccaggaaucu

SEQ ID NO: 1655539 - RNA, 19 nt, Artificial Sequence
  Description of Artificial Sequence: Synthetic oligonucleotide
  Sense strand starting at position 3899 of SEQ ID NO: 1561221
gggaguagcuuugauuucu

SEQ ID NO: 1655540 - RNA, 19 nt, Artificial Sequence
  Description of Artificial Sequence: Synthetic oligonucleotide
  Antisense strand to SEQ ID NO: 1655539
agaaaucaaagcuacuccc

SEQ ID NO: 1655541 - RNA, 19 nt, Artificial Sequence
  Description of Artificial Sequence: Synthetic oligonucleotide
  Sense strand starting at position 3908 of SEQ ID NO: 1561221
uuugauuucugcguucgca

SEQ ID NO: 1655542 - RNA, 19 nt, Artificial Sequence
  Description of Artificial Sequence: Synthetic oligonucleotide
  Antisense strand to SEQ ID NO: 1655541
ugcgaacgcagaaaucaaa

SEQ ID NO: 1655543 - RNA, 19 nt, Artificial Sequence
  Description of Artificial Sequence: Synthetic oligonucleotide
  Sense strand starting at position 3911 of SEQ ID NO: 1561221
gauuucugcguucgcaaag

SEQ ID NO: 1655544 - RNA, 19 nt, Artificial Sequence
  Description of Artificial Sequence: Synthetic oligonucleotide
  Antisense strand to SEQ ID NO: 1655543
cuuugcgaacgcagaaauc

SEQ ID NO: 1655545 - RNA, 19 nt, Artificial Sequence
  Description of Artificial Sequence: Synthetic oligonucleotide
  Sense strand starting at position 168 of SEQ ID NO: 1561222
agagaagaguuugguaaau

SEQ ID NO: 1655546 - RNA, 19 nt, Artificial Sequence
  Description of Artificial Sequence: Synthetic oligonucleotide
  Antisense strand to SEQ ID NO: 1655545
auuuaccaaacucuucucu

SEQ ID NO: 1655547 - RNA, 19 nt, Artificial Sequence
  Description of Artificial Sequence: Synthetic oligonucleotide
  Sense strand starting at position 193 of SEQ ID NO: 1561222
gguaaagucuucucacccu

SEQ ID NO: 1655548 - RNA, 19 nt, Artificial Sequence
  Description of Artificial Sequence: Synthetic oligonucleotide
  Antisense strand to SEQ ID NO: 1655547
agggugagaagacuuuacc

SEQ ID NO: 1655549 - RNA, 19 nt, Artificial Sequence
  Description of Artificial Sequence: Synthetic oligonucleotide
  Sense strand starting at position 534 of SEQ ID NO: 1561222
gaaggaugucagggccuga

SEQ ID NO: 1655550 - RNA, 19 nt, Artificial Sequence
  Description of Artificial Sequence: Synthetic oligonucleotide
  Antisense strand to SEQ ID NO: 1655549
ucaggcccugacauccuuc

SEQ ID NO: 1655551 - RNA, 19 nt, Artificial Sequence
  Description of Artificial Sequence: Synthetic oligonucleotide
  Sense strand starting at position 2235 of SEQ ID NO: 1561222
uguaaauacucaugggugu

SEQ ID NO: 1655552 - RNA, 19 nt, Artificial Sequence
  Description of Artificial Sequence: Synthetic oligonucleotide
  Antisense strand to SEQ ID NO: 1655551
acacccaugaguauuuaca

SEQ ID NO: 1655553 - RNA, 19 nt, Artificial Sequence
  Description of Artificial Sequence: Synthetic oligonucleotide
  Sense strand starting at position 2288 of SEQ ID NO: 1561222
cgucacuuguacccaacua

SEQ ID NO: 1655554 - RNA, 19 nt, Artificial Sequence
  Description of Artificial Sequence: Synthetic oligonucleotide
  Antisense strand to SEQ ID NO: 1655553
uaguuggguacaagugacg

SEQ ID NO: 1655555 - RNA, 19 nt, Artificial Sequence
  Description of Artificial Sequence: Synthetic oligonucleotide
  Sense strand starting at position 2299 of SEQ ID NO: 1561222
cccaacuaucuacgaagua

SEQ ID NO: 1655556 - RNA, 19 nt, Artificial Sequence
  Description of Artificial Sequence: Synthetic oligonucleotide
  Antisense strand to SEQ ID NO: 1655555
uacuucguagauaguuggg

SEQ ID NO: 1655557 - RNA, 19 nt, Artificial Sequence
  Description of Artificial Sequence: Synthetic oligonucleotide
  Sense strand starting at position 2300 of SEQ ID NO: 1561222
ccaacuaucuacgaaguaa

SEQ ID NO: 1655558 - RNA, 19 nt, Artificial Sequence
  Description of Artificial Sequence: Synthetic oligonucleotide
  Antisense strand to SEQ ID NO: 1655557
uuacuucguagauaguugg

SEQ ID NO: 1655559 - RNA, 19 nt, Artificial Sequence
  Description of Artificial Sequence: Synthetic oligonucleotide
  Sense strand starting at position 2394 of SEQ ID NO: 1561222
ucgacuaccuccgaagaaa

SEQ ID NO: 1655560 - RNA, 19 nt, Artificial Sequence
  Description of Artificial Sequence: Synthetic oligonucleotide
  Antisense strand to SEQ ID NO: 1655559
uuucuucggagguagucga

SEQ ID NO: 1655561 - RNA, 19 nt, Artificial Sequence
  Description of Artificial Sequence: Synthetic oligonucleotide
  Sense strand starting at position 2448 of SEQ ID NO: 1561222
cucuccguucucgacuauu

SEQ ID NO: 1655562 - RNA, 19 nt, Artificial Sequence
  Description of Artificial Sequence: Synthetic oligonucleotide
  Antisense strand to SEQ ID NO: 1655561
aauagucgagaacggagag

SEQ ID NO: 1655563 - RNA, 19 nt, Artificial Sequence
  Description of Artificial Sequence: Synthetic oligonucleotide
  Sense strand starting at position 2458 of SEQ ID NO: 1561222
ucgacuauugccgaaguga

SEQ ID NO: 1655564 - RNA, 19 nt, Artificial Sequence
  Description of Artificial Sequence: Synthetic oligonucleotide
  Antisense strand to SEQ ID NO: 1655563
ucacuucggcaauagucga

SEQ ID NO: 1655565 - RNA, 19 nt, Artificial Sequence
  Description of Artificial Sequence: Synthetic oligonucleotide
  Sense strand starting at position 2515 of SEQ ID NO: 1561222
cccgauugugcccgaagga

SEQ ID NO: 1655566 - RNA, 19 nt, Artificial Sequence
  Description of Artificial Sequence: Synthetic oligonucleotide
  Antisense strand to SEQ ID NO: 1655565
uccuucgggcacaaucggg

SEQ ID NO: 1655567 - RNA, 19 nt, Artificial Sequence
  Description of Artificial Sequence: Synthetic oligonucleotide
  Sense strand starting at position 2516 of SEQ ID NO: 1561222
ccgauugugcccgaaggaa

SEQ ID NO: 1655568 - RNA, 19 nt, Artificial Sequence
  Description of Artificial Sequence: Synthetic oligonucleotide
  Antisense strand to SEQ ID NO: 1655567
uuccuucgggcacaaucgg

SEQ ID NO: 1655569 - RNA, 19 nt, Artificial Sequence
  Description of Artificial Sequence: Synthetic oligonucleotide
  Sense strand starting at position 3142 of SEQ ID NO: 1561222
ccggguucucaguaggaga

SEQ ID NO: 1655570 - RNA, 19 nt, Artificial Sequence
  Description of Artificial Sequence: Synthetic oligonucleotide
  Antisense strand to SEQ ID NO: 1655569
ucuccuacugagaacccgg

SEQ ID NO: 1655571 - RNA, 19 nt, Artificial Sequence
  Description of Artificial Sequence: Synthetic oligonucleotide
  Sense strand starting at position 3301 of SEQ ID NO: 1561222
cuggauccucgcuggaaga

SEQ ID NO: 1655572 - RNA, 19 nt, Artificial Sequence
  Description of Artificial Sequence: Synthetic oligonucleotide
  Antisense strand to SEQ ID NO: 1655571
ucuuccagcgaggauccag

SEQ ID NO: 1655573 - RNA, 19 nt, Artificial Sequence
  Description of Artificial Sequence: Synthetic oligonucleotide
  Sense strand starting at position 3336 of SEQ ID NO: 1561222
agauuccugggcugucgaa

SEQ ID NO: 1655574 - RNA, 19 nt, Artificial Sequence
  Description of Artificial Sequence: Synthetic oligonucleotide
  Antisense strand to SEQ ID NO: 1655573
uucgacagcccaggaaucu

SEQ ID NO: 1655575 - RNA, 19 nt, Artificial Sequence
  Description of Artificial Sequence: Synthetic oligonucleotide
  Sense strand starting at position 3436 of SEQ ID NO: 1561222
gggaguagcuuugauuucu

SEQ ID NO: 1655576 - RNA, 19 nt, Artificial Sequence
  Description of Artificial Sequence: Synthetic oligonucleotide
  Antisense strand to SEQ ID NO: 1655575
agaaaucaaagcuacuccc

SEQ ID NO: 1655577 - RNA, 19 nt, Artificial Sequence
  Description of Artificial Sequence: Synthetic oligonucleotide
  Sense strand starting at position 3445 of SEQ ID NO: 1561222
uuugauuucugcguucgca

SEQ ID NO: 1655578 - RNA, 19 nt, Artificial Sequence
  Description of Artificial Sequence: Synthetic oligonucleotide
  Antisense strand to SEQ ID NO: 1655577
ugcgaacgcagaaaucaaa

SEQ ID NO: 1655579 - RNA, 19 nt, Artificial Sequence
  Description of Artificial Sequence: Synthetic oligonucleotide
  Sense strand starting at position 3448 of SEQ ID NO: 1561222
gauuucugcguucgcaaag

SEQ ID NO: 1655580 - RNA, 19 nt, Artificial Sequence
  Description of Artificial Sequence: Synthetic oligonucleotide
  Antisense strand to SEQ ID NO: 1655579
cuuugcgaacgcagaaauc

SEQ ID NO: 1655581 - RNA, 19 nt, Artificial Sequence
  Description of Artificial Sequence: Synthetic oligonucleotide
  Sense strand starting at position 3562 of SEQ ID NO: 1561222
ggauuccugucuccuccaa

SEQ ID NO: 1655582 - RNA, 19 nt, Artificial Sequence
  Description of Artificial Sequence: Synthetic oligonucleotide
  Antisense strand to SEQ ID NO: 1655581
uuggaggagacaggaaucc

SEQ ID NO: 1655583 - RNA, 19 nt, Artificial Sequence
  Description of Artificial Sequence: Synthetic oligonucleotide
  Sense strand starting at position 3591 of SEQ ID NO: 1561222
gcuggagucuggguugcua

SEQ ID NO: 1655584 - RNA, 19 nt, Artificial Sequence
  Description of Artificial Sequence: Synthetic oligonucleotide
  Antisense strand to SEQ ID NO: 1655583
uagcaacccagacuccagc

SEQ ID NO: 1655585 - RNA, 19 nt, Artificial Sequence
  Description of Artificial Sequence: Synthetic oligonucleotide
  Sense strand starting at position 3604 of SEQ ID NO: 1561222
uugcuagguucucaaagga

SEQ ID NO: 1655586 - RNA, 19 nt, Artificial Sequence
  Description of Artificial Sequence: Synthetic oligonucleotide
  Antisense strand to SEQ ID NO: 1655585
uccuuugagaaccuagcaa

SEQ ID NO: 1655587 - RNA, 19 nt, Artificial Sequence
  Description of Artificial Sequence: Synthetic oligonucleotide
  Sense strand starting at position 3678 of SEQ ID NO: 1561222
guuccuggauccucgaaga

SEQ ID NO: 1655588 - RNA, 19 nt, Artificial Sequence
  Description of Artificial Sequence: Synthetic oligonucleotide
  Antisense strand to SEQ ID NO: 1655587
ucuucgaggauccaggaac

SEQ ID NO: 1655589 - RNA, 19 nt, Artificial Sequence
  Description of Artificial Sequence: Synthetic oligonucleotide
  Sense strand starting at position 3714 of SEQ ID NO: 1561222
cuggauuccuggguucuca

SEQ ID NO: 1655590 - RNA, 19 nt, Artificial Sequence
  Description of Artificial Sequence: Synthetic oligonucleotide
  Antisense strand to SEQ ID NO: 1655589
ugagaacccaggaauccag

SEQ ID NO: 1655591 - RNA, 19 nt, Artificial Sequence
  Description of Artificial Sequence: Synthetic oligonucleotide
  Sense strand starting at position 3722 of SEQ ID NO: 1561222
cuggguucucacugugaau

SEQ ID NO: 1655592 - RNA, 19 nt, Artificial Sequence
  Description of Artificial Sequence: Synthetic oligonucleotide
  Antisense strand to SEQ ID NO: 1655591
auucacagugagaacccag

SEQ ID NO: 1655593 - RNA, 19 nt, Artificial Sequence
  Description of Artificial Sequence: Synthetic oligonucleotide
  Sense strand starting at position 3724 of SEQ ID NO: 1561222
ggguucucacugugaaucu

SEQ ID NO: 1655594 - RNA, 19 nt, Artificial Sequence
  Description of Artificial Sequence: Synthetic oligonucleotide
  Antisense strand to SEQ ID NO: 1655593
agauucacagugagaaccc

SEQ ID NO: 1655595 - RNA, 19 nt, Artificial Sequence
  Description of Artificial Sequence: Synthetic oligonucleotide
  Sense strand starting at position 3757 of SEQ ID NO: 1561222
gaccaugucgccugaagaa

SEQ ID NO: 1655596 - RNA, 19 nt, Artificial Sequence
  Description of Artificial Sequence: Synthetic oligonucleotide
  Antisense strand to SEQ ID NO: 1655595
uucuucaggcgacaugguc

SEQ ID NO: 1655597 - RNA, 19 nt, Artificial Sequence
  Description of Artificial Sequence: Synthetic oligonucleotide
  Sense strand starting at position 3766 of SEQ ID NO: 1561222
gccugaagaauggacguau

SEQ ID NO: 1655598 - RNA, 19 nt, Artificial Sequence
  Description of Artificial Sequence: Synthetic oligonucleotide
  Antisense strand to SEQ ID NO: 1655597
auacguccauucuucaggc

SEQ ID NO: 1655599 - RNA, 19 nt, Artificial Sequence
  Description of Artificial Sequence: Synthetic oligonucleotide
  Sense strand starting at position 3777 of SEQ ID NO: 1561222
ggacguaucuagugguucu

SEQ ID NO: 1655600 - RNA, 19 nt, Artificial Sequence
  Description of Artificial Sequence: Synthetic oligonucleotide
  Antisense strand to SEQ ID NO: 1655599
agaaccacuagauacgucc

SEQ ID NO: 1655601 - RNA, 19 nt, Artificial Sequence
  Description of Artificial Sequence: Synthetic oligonucleotide
  Sense strand starting at position 3778 of SEQ ID NO: 1561222
gacguaucuagugguucuu

SEQ ID NO: 1655602 - RNA, 19 nt, Artificial Sequence
  Description of Artificial Sequence: Synthetic oligonucleotide
  Antisense strand to SEQ ID NO: 1655601
aagaaccacuagauacguc

SEQ ID NO: 1655603 - RNA, 19 nt, Artificial Sequence
  Description of Artificial Sequence: Synthetic oligonucleotide
  Sense strand starting at position 3784 of SEQ ID NO: 1561222
ucuagugguucuucuuauc

SEQ ID NO: 1655604 - RNA, 19 nt, Artificial Sequence
  Description of Artificial Sequence: Synthetic oligonucleotide
  Antisense strand to SEQ ID NO: 1655603
gauaagaagaaccacuaga

SEQ ID NO: 1655605 - RNA, 19 nt, Artificial Sequence
  Description of Artificial Sequence: Synthetic oligonucleotide
  Sense strand starting at position 3813 of SEQ ID NO: 1561222
ucggcuuccucuuuaagaa

SEQ ID NO: 1655606 - RNA, 19 nt, Artificial Sequence
  Description of Artificial Sequence: Synthetic oligonucleotide
  Antisense strand to SEQ ID NO: 1655605
uucuuaaagaggaagccga

SEQ ID NO: 1655607 - RNA, 19 nt, Artificial Sequence
  Description of Artificial Sequence: Synthetic oligonucleotide
  Sense strand starting at position 3814 of SEQ ID NO: 1561222
cggcuuccucuuuaagaaa

SEQ ID NO: 1655608 - RNA, 19 nt, Artificial Sequence
  Description of Artificial Sequence: Synthetic oligonucleotide
  Antisense strand to SEQ ID NO: 1655607
uuucuuaaagaggaagccg

SEQ ID NO: 1655609 - RNA, 19 nt, Artificial Sequence
  Description of Artificial Sequence: Synthetic oligonucleotide
  Sense strand starting at position 218 of SEQ ID NO: 1561223
acuacucaacuuugugaag

SEQ ID NO: 1655610 - RNA, 19 nt, Artificial Sequence
  Description of Artificial Sequence: Synthetic oligonucleotide
  Antisense strand to SEQ ID NO: 1655609
cuucacaaaguugaguagu

SEQ ID NO: 1655611 - RNA, 19 nt, Artificial Sequence
  Description of Artificial Sequence: Synthetic oligonucleotide
  Sense strand starting at position 220 of SEQ ID NO: 1561223
uacucaacuuugugaagga

SEQ ID NO: 1655612 - RNA, 19 nt, Artificial Sequence
  Description of Artificial Sequence: Synthetic oligonucleotide
  Antisense strand to SEQ ID NO: 1655611
uccuucacaaaguugagua

SEQ ID NO: 1655613 - RNA, 19 nt, Artificial Sequence
  Description of Artificial Sequence: Synthetic oligonucleotide
  Sense strand starting at position 221 of SEQ ID NO: 1561223
acucaacuuugugaaggau

SEQ ID NO: 1655614 - RNA, 19 nt, Artificial Sequence
  Description of Artificial Sequence: Synthetic oligonucleotide
  Antisense strand to SEQ ID NO: 1655613
auccuucacaaaguugagu

SEQ ID NO: 1655615 - RNA, 19 nt, Artificial Sequence
  Description of Artificial Sequence: Synthetic oligonucleotide
  Sense strand starting at position 267 of SEQ ID NO: 1561223
gguagauaagcucauugcu

SEQ ID NO: 1655616 - RNA, 19 nt, Artificial Sequence
  Description of Artificial Sequence: Synthetic oligonucleotide
  Antisense strand to SEQ ID NO: 1655615
agcaaugagcuuaucuacc

SEQ ID NO: 1655617 - RNA, 19 nt, Artificial Sequence
  Description of Artificial Sequence: Synthetic oligonucleotide
  Sense strand starting at position 270 of SEQ ID NO: 1561223
agauaagcucauugcuuga

SEQ ID NO: 1655618 - RNA, 19 nt, Artificial Sequence
  Description of Artificial Sequence: Synthetic oligonucleotide
  Antisense strand to SEQ ID NO: 1655617
ucaagcaaugagcuuaucu

SEQ ID NO: 1655619 - RNA, 19 nt, Artificial Sequence
  Description of Artificial Sequence: Synthetic oligonucleotide
  Sense strand starting at position 280 of SEQ ID NO: 1561223
auugcuugagccuggaauu

SEQ ID NO: 1655620 - RNA, 19 nt, Artificial Sequence
  Description of Artificial Sequence: Synthetic oligonucleotide
  Antisense strand to SEQ ID NO: 1655619
aauuccaggcucaagcaau

SEQ ID NO: 1655621 - RNA, 19 nt, Artificial Sequence
  Description of Artificial Sequence: Synthetic oligonucleotide
  Sense strand starting at position 281 of SEQ ID NO: 1561223
uugcuugagccuggaauuu

SEQ ID NO: 1655622 - RNA, 19 nt, Artificial Sequence
  Description of Artificial Sequence: Synthetic oligonucleotide
  Antisense strand to SEQ ID NO: 1655621
aaauuccaggcucaagcaa

SEQ ID NO: 1655623 - RNA, 19 nt, Artificial Sequence
  Description of Artificial Sequence: Synthetic oligonucleotide
  Sense strand starting at position 353 of SEQ ID NO: 1561223
gcggcaagcucccuacaau

SEQ ID NO: 1655624 - RNA, 19 nt, Artificial Sequence
  Description of Artificial Sequence: Synthetic oligonucleotide
  Antisense strand to SEQ ID NO: 1655623
auuguagggagcuugccgc

SEQ ID NO: 1655625 - RNA, 19 nt, Artificial Sequence
  Description of Artificial Sequence: Synthetic oligonucleotide
  Sense strand starting at position 493 of SEQ ID NO: 1561223
caaguacauuucugggaga

SEQ ID NO: 1655626 - RNA, 19 nt, Artificial Sequence
  Description of Artificial Sequence: Synthetic oligonucleotide
  Antisense strand to SEQ ID NO: 1655625
ucucccagaaauguacuug

SEQ ID NO: 1655627 - RNA, 19 nt, Artificial Sequence
  Description of Artificial Sequence: Synthetic oligonucleotide
  Sense strand starting at position 496 of SEQ ID NO: 1561223
guacauuucugggagaaga

SEQ ID NO: 1655628 - RNA, 19 nt, Artificial Sequence
  Description of Artificial Sequence: Synthetic oligonucleotide
  Antisense strand to SEQ ID NO: 1655627
ucuucucccagaaauguac

SEQ ID NO: 1655629 - RNA, 19 nt, Artificial Sequence
  Description of Artificial Sequence: Synthetic oligonucleotide
  Sense strand starting at position 602 of SEQ ID NO: 1561223
gcuggcaugauggaaauua

SEQ ID NO: 1655630 - RNA, 19 nt, Artificial Sequence
  Description of Artificial Sequence: Synthetic oligonucleotide
  Antisense strand to SEQ ID NO: 1655629
uaauuuccaucaugccagc

SEQ ID NO: 1655631 - RNA, 19 nt, Artificial Sequence
  Description of Artificial Sequence: Synthetic oligonucleotide
  Sense strand starting at position 612 of SEQ ID NO: 1561223
uggaaauuaugggcacuca

SEQ ID NO: 1655632 - RNA, 19 nt, Artificial Sequence
  Description of Artificial Sequence: Synthetic oligonucleotide
  Antisense strand to SEQ ID NO: 1655631
ugagugcccauaauuucca

SEQ ID NO: 1655633 - RNA, 19 nt, Artificial Sequence
  Description of Artificial Sequence: Synthetic oligonucleotide
  Sense strand starting at position 798 of SEQ ID NO: 1561223
ugcacaucugaguguuacu

SEQ ID NO: 1655634 - RNA, 19 nt, Artificial Sequence
  Description of Artificial Sequence: Synthetic oligonucleotide
  Antisense strand to SEQ ID NO: 1655633
aguaacacucagaugugca

SEQ ID NO: 1655635 - RNA, 19 nt, Artificial Sequence
  Description of Artificial Sequence: Synthetic oligonucleotide
  Sense strand starting at position 801 of SEQ ID NO: 1561223
acaucugaguguuacucau

SEQ ID NO: 1655636 - RNA, 19 nt, Artificial Sequence
  Description of Artificial Sequence: Synthetic oligonucleotide
  Antisense strand to SEQ ID NO: 1655635
augaguaacacucagaugu

SEQ ID NO: 1655637 - RNA, 19 nt, Artificial Sequence
  Description of Artificial Sequence: Synthetic oligonucleotide
  Sense strand starting at position 803 of SEQ ID NO: 1561223
aucugaguguuacucauau

SEQ ID NO: 1655638 - RNA, 19 nt, Artificial Sequence
  Description of Artificial Sequence: Synthetic oligonucleotide
  Antisense strand to SEQ ID NO: 1655637
auaugaguaacacucagau

SEQ ID NO: 1655639 - RNA, 19 nt, Artificial Sequence
  Description of Artificial Sequence: Synthetic oligonucleotide
  Sense strand starting at position 907 of SEQ ID NO: 1561223
agagcuuggccucacuauu

SEQ ID NO: 1655640 - RNA, 19 nt, Artificial Sequence
  Description of Artificial Sequence: Synthetic oligonucleotide
  Antisense strand to SEQ ID NO: 1655639
aauagugaggccaagcucu

SEQ ID NO: 1655641 - RNA, 19 nt, Artificial Sequence
  Description of Artificial Sequence: Synthetic oligonucleotide
  Sense strand starting at position 915 of SEQ ID NO: 1561223
gccucacuauugcaaguga

SEQ ID NO: 1655642 - RNA, 19 nt, Artificial Sequence
  Description of Artificial Sequence: Synthetic oligonucleotide
  Antisense strand to SEQ ID NO: 1655641
ucacuugcaauagugaggc

SEQ ID NO: 1655643 - RNA, 19 nt, Artificial Sequence
  Description of Artificial Sequence: Synthetic oligonucleotide
  Sense strand starting at position 936 of SEQ ID NO: 1561223
uauugauguuuauugggaa

SEQ ID NO: 1655644 - RNA, 19 nt, Artificial Sequence
  Description of Artificial Sequence: Synthetic oligonucleotide
  Antisense strand to SEQ ID NO: 1655643
uucccaauaaacaucaaua

SEQ ID NO: 1655645 - RNA, 19 nt, Artificial Sequence
  Description of Artificial Sequence: Synthetic oligonucleotide
  Sense strand starting at position 937 of SEQ ID NO: 1561223
auugauguuuauugggaau

SEQ ID NO: 1655646 - RNA, 19 nt, Artificial Sequence
  Description of Artificial Sequence: Synthetic oligonucleotide
  Antisense strand to SEQ ID NO: 1655645
auucccaauaaacaucaau

SEQ ID NO: 1655647 - RNA, 19 nt, Artificial Sequence
  Description of Artificial Sequence: Synthetic oligonucleotide
  Sense strand starting at position 939 of SEQ ID NO: 1561223
ugauguuuauugggaauga

SEQ ID NO: 1655648 - RNA, 19 nt, Artificial Sequence
  Description of Artificial Sequence: Synthetic oligonucleotide
  Antisense strand to SEQ ID NO: 1655647
ucauucccaauaaacauca

SEQ ID NO: 1655649 - RNA, 19 nt, Artificial Sequence
  Description of Artificial Sequence: Synthetic oligonucleotide
  Sense strand starting at position 940 of SEQ ID NO: 1561223
gauguuuauugggaaugaa

SEQ ID NO: 1655650 - RNA, 19 nt, Artificial Sequence
  Description of Artificial Sequence: Synthetic oligonucleotide
  Antisense strand to SEQ ID NO: 1655649
uucauucccaauaaacauc

SEQ ID NO: 1655651 - RNA, 19 nt, Artificial Sequence
  Description of Artificial Sequence: Synthetic oligonucleotide
  Sense strand starting at position 983 of SEQ ID NO: 1561223
ggcgaucaaucagucauca

SEQ ID NO: 1655652 - RNA, 19 nt, Artificial Sequence
  Description of Artificial Sequence: Synthetic oligonucleotide
  Antisense strand to SEQ ID NO: 1655651
ugaugacugauugaucgcc

SEQ ID NO: 1655653 - RNA, 19 nt, Artificial Sequence
  Description of Artificial Sequence: Synthetic oligonucleotide
  Sense strand starting at position 1158 of SEQ ID NO: 1561223
aguugacacucccgguuaa

SEQ ID NO: 1655654 - RNA, 19 nt, Artificial Sequence
  Description of Artificial Sequence: Synthetic oligonucleotide
  Antisense strand to SEQ ID NO: 1655653
uuaaccgggagugucaacu

SEQ ID NO: 1655655 - RNA, 19 nt, Artificial Sequence
  Description of Artificial Sequence: Synthetic oligonucleotide
  Sense strand starting at position 1159 of SEQ ID NO: 1561223
guugacacucccgguuaaa

SEQ ID NO: 1655656 - RNA, 19 nt, Artificial Sequence
  Description of Artificial Sequence: Synthetic oligonucleotide
  Antisense strand to SEQ ID NO: 1655655
uuuaaccgggagugucaac

SEQ ID NO: 1655657 - RNA, 19 nt, Artificial Sequence
  Description of Artificial Sequence: Synthetic oligonucleotide
  Sense strand starting at position 1235 of SEQ ID NO: 1561223
cuaagugcuaugcggagau

SEQ ID NO: 1655658 - RNA, 19 nt, Artificial Sequence
  Description of Artificial Sequence: Synthetic oligonucleotide
  Antisense strand to SEQ ID NO: 1655657
aucuccgcauagcacuuag

SEQ ID NO: 1655659 - RNA, 19 nt, Artificial Sequence
  Description of Artificial Sequence: Synthetic oligonucleotide
  Sense strand starting at position 1237 of SEQ ID NO: 1561223
aagugcuaugcggagauga

SEQ ID NO: 1655660 - RNA, 19 nt, Artificial Sequence
  Description of Artificial Sequence: Synthetic oligonucleotide
  Antisense strand to SEQ ID NO: 1655659
ucaucuccgcauagcacuu

SEQ ID NO: 1655661 - RNA, 19 nt, Artificial Sequence
  Description of Artificial Sequence: Synthetic oligonucleotide
  Sense strand starting at position 1337 of SEQ ID NO: 1561223
acuugacagucaucugaca

SEQ ID NO: 1655662 - RNA, 19 nt, Artificial Sequence
  Description of Artificial Sequence: Synthetic oligonucleotide
  Antisense strand to SEQ ID NO: 1655661
ugucagaugacugucaagu

SEQ ID NO: 1655663 - RNA, 19 nt, Artificial Sequence
  Description of Artificial Sequence: Synthetic oligonucleotide
  Sense strand starting at position 1395 of SEQ ID NO: 1561223
ccaguuugggcccaagaaa

SEQ ID NO: 1655664 - RNA, 19 nt, Artificial Sequence
  Description of Artificial Sequence: Synthetic oligonucleotide
  Antisense strand to SEQ ID NO: 1655663
uuucuugggcccaaacugg

SEQ ID NO: 1655665 - RNA, 19 nt, Artificial Sequence
  Description of Artificial Sequence: Synthetic oligonucleotide
  Sense strand starting at position 1414 of SEQ ID NO: 1561223
ugaggaaucaaucguguua

SEQ ID NO: 1655666 - RNA, 19 nt, Artificial Sequence
  Description of Artificial Sequence: Synthetic oligonucleotide
  Antisense strand to SEQ ID NO: 1655665
uaacacgauugauuccuca

SEQ ID NO: 1655667 - RNA, 19 nt, Artificial Sequence
  Description of Artificial Sequence: Synthetic oligonucleotide
  Sense strand starting at position 1416 of SEQ ID NO: 1561223
aggaaucaaucguguuagu

SEQ ID NO: 1655668 - RNA, 19 nt, Artificial Sequence
  Description of Artificial Sequence: Synthetic oligonucleotide
  Antisense strand to SEQ ID NO: 1655667
acuaacacgauugauuccu

SEQ ID NO: 1655669 - RNA, 19 nt, Artificial Sequence
  Description of Artificial Sequence: Synthetic oligonucleotide
  Sense strand starting at position 1419 of SEQ ID NO: 1561223
aaucaaucguguuaguacu

SEQ ID NO: 1655670 - RNA, 19 nt, Artificial Sequence
  Description of Artificial Sequence: Synthetic oligonucleotide
  Antisense strand to SEQ ID NO: 1655669
aguacuaacacgauugauu

SEQ ID NO: 1655671 - RNA, 19 nt, Artificial Sequence
  Description of Artificial Sequence: Synthetic oligonucleotide
  Sense strand starting at position 1421 of SEQ ID NO: 1561223
ucaaucguguuaguacuaa

SEQ ID NO: 1655672 - RNA, 19 nt, Artificial Sequence
  Description of Artificial Sequence: Synthetic oligonucleotide
  Antisense strand to SEQ ID NO: 1655671
uuaguacuaacacgauuga

SEQ ID NO: 1655673 - RNA, 19 nt, Artificial Sequence
  Description of Artificial Sequence: Synthetic oligonucleotide
  Sense strand starting at position 2264 of SEQ ID NO: 1561223
uuugacaaaucgcuccaga

SEQ ID NO: 1655674 - RNA, 19 nt, Artificial Sequence
  Description of Artificial Sequence: Synthetic oligonucleotide
  Antisense strand to SEQ ID NO: 1655673
ucuggagcgauuugucaaa

SEQ ID NO: 1655675 - RNA, 19 nt, Artificial Sequence
  Description of Artificial Sequence: Synthetic oligonucleotide
  Sense strand starting at position 2576 of SEQ ID NO: 1561223
aaaggagaugaucguguca

SEQ ID NO: 1655676 - RNA, 19 nt, Artificial Sequence
  Description of Artificial Sequence: Synthetic oligonucleotide
  Antisense strand to SEQ ID NO: 1655675
ugacacgaucaucuccuuu

SEQ ID NO: 1655677 - RNA, 19 nt, Artificial Sequence
  Description of Artificial Sequence: Synthetic oligonucleotide
  Sense strand starting at position 2578 of SEQ ID NO: 1561223
aggagaugaucgugucaau

SEQ ID NO: 1655678 - RNA, 19 nt, Artificial Sequence
  Description of Artificial Sequence: Synthetic oligonucleotide
  Antisense strand to SEQ ID NO: 1655677
auugacacgaucaucuccu

SEQ ID NO: 1655679 - RNA, 19 nt, Artificial Sequence
  Description of Artificial Sequence: Synthetic oligonucleotide
  Sense strand starting at position 3086 of SEQ ID NO: 1561223
aguuuccucuccugacuuu

SEQ ID NO: 1655680 - RNA, 19 nt, Artificial Sequence
  Description of Artificial Sequence: Synthetic oligonucleotide
  Antisense strand to SEQ ID NO: 1655679
aaagucaggagaggaaacu

SEQ ID NO: 1655681 - RNA, 19 nt, Artificial Sequence
  Description of Artificial Sequence: Synthetic oligonucleotide
  Sense strand starting at position 3095 of SEQ ID NO: 1561223
uccugacuuugggaugauc

SEQ ID NO: 1655682 - RNA, 19 nt, Artificial Sequence
  Description of Artificial Sequence: Synthetic oligonucleotide
  Antisense strand to SEQ ID NO: 1655681
gaucaucccaaagucagga

SEQ ID NO: 1655683 - RNA, 19 nt, Artificial Sequence
  Description of Artificial Sequence: Synthetic oligonucleotide
  Sense strand starting at position 3318 of SEQ ID NO: 1561223
auugauuauugauugguga

SEQ ID NO: 1655684 - RNA, 19 nt, Artificial Sequence
  Description of Artificial Sequence: Synthetic oligonucleotide
  Antisense strand to SEQ ID NO: 1655683
ucaccaaucaauaaucaau

SEQ ID NO: 1655685 - RNA, 19 nt, Artificial Sequence
  Description of Artificial Sequence: Synthetic oligonucleotide
  Sense strand starting at position 3319 of SEQ ID NO: 1561223
uugauuauugauuggugau

SEQ ID NO: 1655686 - RNA, 19 nt, Artificial Sequence
  Description of Artificial Sequence: Synthetic oligonucleotide
  Antisense strand to SEQ ID NO: 1655685
aucaccaaucaauaaucaa

SEQ ID NO: 1655687 - RNA, 19 nt, Artificial Sequence
  Description of Artificial Sequence: Synthetic oligonucleotide
  Sense strand starting at position 3320 of SEQ ID NO: 1561223
ugauuauugauuggugauc

SEQ ID NO: 1655688 - RNA, 19 nt, Artificial Sequence
  Description of Artificial Sequence: Synthetic oligonucleotide
  Antisense strand to SEQ ID NO: 1655687
gaucaccaaucaauaauca

SEQ ID NO: 1655689 - RNA, 19 nt, Artificial Sequence
  Description of Artificial Sequence: Synthetic oligonucleotide
  Sense strand starting at position 53 of SEQ ID NO: 1561224
ggugcagugaguuaaagga

SEQ ID NO: 1655690 - RNA, 19 nt, Artificial Sequence
  Description of Artificial Sequence: Synthetic oligonucleotide
  Antisense strand to SEQ ID NO: 1655689
uccuuuaacucacugcacc

SEQ ID NO: 1655691 - RNA, 19 nt, Artificial Sequence
  Description of Artificial Sequence: Synthetic oligonucleotide
  Sense strand starting at position 97 of SEQ ID NO: 1561224
gccagaaauucccuaaguc

SEQ ID NO: 1655692 - RNA, 19 nt, Artificial Sequence
  Description of Artificial Sequence: Synthetic oligonucleotide
  Antisense strand to SEQ ID NO: 1655691
gacuuagggaauuucuggc

SEQ ID NO: 1655693 - RNA, 19 nt, Artificial Sequence
  Description of Artificial Sequence: Synthetic oligonucleotide
  Sense strand starting at position 147 of SEQ ID NO: 1561224
cccagauucuuagcugacu

SEQ ID NO: 1655694 - RNA, 19 nt, Artificial Sequence
  Description of Artificial Sequence: Synthetic oligonucleotide
  Antisense strand to SEQ ID NO: 1655693
agucagcuaagaaucuggg

SEQ ID NO: 1655695 - RNA, 19 nt, Artificial Sequence
  Description of Artificial Sequence: Synthetic oligonucleotide
  Sense strand starting at position 221 of SEQ ID NO: 1561224
caggaagcuuucccuggua

SEQ ID NO: 1655696 - RNA, 19 nt, Artificial Sequence
  Description of Artificial Sequence: Synthetic oligonucleotide
  Antisense strand to SEQ ID NO: 1655695
uaccagggaaagcuuccug

SEQ ID NO: 1655697 - RNA, 19 nt, Artificial Sequence
  Description of Artificial Sequence: Synthetic oligonucleotide
  Sense strand starting at position 259 of SEQ ID NO: 1561224
gggccuuucucugggaucu

SEQ ID NO: 1655698 - RNA, 19 nt, Artificial Sequence
  Description of Artificial Sequence: Synthetic oligonucleotide
  Antisense strand to SEQ ID NO: 1655697
agaucccagagaaaggccc

SEQ ID NO: 1655699 - RNA, 19 nt, Artificial Sequence
  Description of Artificial Sequence: Synthetic oligonucleotide
  Sense strand starting at position 273 of SEQ ID NO: 1561224
gaucuccuccguuagggaa

SEQ ID NO: 1655700 - RNA, 19 nt, Artificial Sequence
  Description of Artificial Sequence: Synthetic oligonucleotide
  Antisense strand to SEQ ID NO: 1655699
uucccuaacggaggagauc

SEQ ID NO: 1655701 - RNA, 19 nt, Artificial Sequence
  Description of Artificial Sequence: Synthetic oligonucleotide
  Sense strand starting at position 393 of SEQ ID NO: 1561224
gggagugacugugugaacu

SEQ ID NO: 1655702 - RNA, 19 nt, Artificial Sequence
  Description of Artificial Sequence: Synthetic oligonucleotide
  Antisense strand to SEQ ID NO: 1655701
aguucacacagucacuccc

SEQ ID NO: 1655703 - RNA, 19 nt, Artificial Sequence
  Description of Artificial Sequence: Synthetic oligonucleotide
  Sense strand starting at position 395 of SEQ ID NO: 1561224
gagugacugugugaacuga

SEQ ID NO: 1655704 - RNA, 19 nt, Artificial Sequence
  Description of Artificial Sequence: Synthetic oligonucleotide
  Antisense strand to SEQ ID NO: 1655703
ucaguucacacagucacuc

SEQ ID NO: 1655705 - RNA, 19 nt, Artificial Sequence
  Description of Artificial Sequence: Synthetic oligonucleotide
  Sense strand starting at position 574 of SEQ ID NO: 1561224
auggcuggcugucagagaa

SEQ ID NO: 1655706 - RNA, 19 nt, Artificial Sequence
  Description of Artificial Sequence: Synthetic oligonucleotide
  Antisense strand to SEQ ID NO: 1655705
uucucugacagccagccau

SEQ ID NO: 1655707 - RNA, 19 nt, Artificial Sequence
  Description of Artificial Sequence: Synthetic oligonucleotide
  Sense strand starting at position 745 of SEQ ID NO: 1561224
ccaggauuuccgugauguc

SEQ ID NO: 1655708 - RNA, 19 nt, Artificial Sequence
  Description of Artificial Sequence: Synthetic oligonucleotide
  Antisense strand to SEQ ID NO: 1655707
gacaucacggaaauccugg

SEQ ID NO: 1655709 - RNA, 19 nt, Artificial Sequence
  Description of Artificial Sequence: Synthetic oligonucleotide
  Sense strand starting at position 752 of SEQ ID NO: 1561224
uuccgugaugucugcguca

SEQ ID NO: 1655710 - RNA, 19 nt, Artificial Sequence
  Description of Artificial Sequence: Synthetic oligonucleotide
  Antisense strand to SEQ ID NO: 1655709
ugacgcagacaucacggaa

SEQ ID NO: 1655711 - RNA, 19 nt, Artificial Sequence
  Description of Artificial Sequence: Synthetic oligonucleotide
  Sense strand starting at position 754 of SEQ ID NO: 1561224
ccgugaugucugcgucauc

SEQ ID NO: 1655712 - RNA, 19 nt, Artificial Sequence
  Description of Artificial Sequence: Synthetic oligonucleotide
  Antisense strand to SEQ ID NO: 1655711
gaugacgcagacaucacgg

SEQ ID NO: 1655713 - RNA, 19 nt, Artificial Sequence
  Description of Artificial Sequence: Synthetic oligonucleotide
  Sense strand starting at position 1080 of SEQ ID NO: 1561224
guauauaaguuucucccuu

SEQ ID NO: 1655714 - RNA, 19 nt, Artificial Sequence
  Description of Artificial Sequence: Synthetic oligonucleotide
  Antisense strand to SEQ ID NO: 1655713
aagggagaaacuuauauac

SEQ ID NO: 1655715 - RNA, 19 nt, Artificial Sequence
  Description of Artificial Sequence: Synthetic oligonucleotide
  Sense strand starting at position 1768 of SEQ ID NO: 1561224
ggagguagugcugggcauu

SEQ ID NO: 1655716 - RNA, 19 nt, Artificial Sequence
  Description of Artificial Sequence: Synthetic oligonucleotide
  Antisense strand to SEQ ID NO: 1655715
aaugcccagcacuaccucc

SEQ ID NO: 1655717 - RNA, 19 nt, Artificial Sequence
  Description of Artificial Sequence: Synthetic oligonucleotide
  Sense strand starting at position 1769 of SEQ ID NO: 1561224
gagguagugcugggcauua

SEQ ID NO: 1655718 - RNA, 19 nt, Artificial Sequence
  Description of Artificial Sequence: Synthetic oligonucleotide
  Antisense strand to SEQ ID NO: 1655717
uaaugcccagcacuaccuc

SEQ ID NO: 1655719 - RNA, 19 nt, Artificial Sequence
  Description of Artificial Sequence: Synthetic oligonucleotide
  Sense strand starting at position 1771 of SEQ ID NO: 1561224
gguagugcugggcauuaga

SEQ ID NO: 1655720 - RNA, 19 nt, Artificial Sequence
  Description of Artificial Sequence: Synthetic oligonucleotide
  Antisense strand to SEQ ID NO: 1655719
ucuaaugcccagcacuacc

SEQ ID NO: 1655721 - RNA, 19 nt, Artificial Sequence
  Description of Artificial Sequence: Synthetic oligonucleotide
  Sense strand starting at position 1946 of SEQ ID NO: 1561224
aucucuuuggacugccaga

SEQ ID NO: 1655722 - RNA, 19 nt, Artificial Sequence
  Description of Artificial Sequence: Synthetic oligonucleotide
  Antisense strand to SEQ ID NO: 1655721
ucuggcaguccaaagagau

SEQ ID NO: 1655723 - RNA, 19 nt, Artificial Sequence
  Description of Artificial Sequence: Synthetic oligonucleotide
  Sense strand starting at position 2017 of SEQ ID NO: 1561224
ggcuccuuccucugagacu

SEQ ID NO: 1655724 - RNA, 19 nt, Artificial Sequence
  Description of Artificial Sequence: Synthetic oligonucleotide
  Antisense strand to SEQ ID NO: 1655723
agucucagaggaaggagcc

SEQ ID NO: 1655725 - RNA, 19 nt, Artificial Sequence
  Description of Artificial Sequence: Synthetic oligonucleotide
  Sense strand starting at position 2018 of SEQ ID NO: 1561224
gcuccuuccucugagacuu

SEQ ID NO: 1655726 - RNA, 19 nt, Artificial Sequence
  Description of Artificial Sequence: Synthetic oligonucleotide
  Antisense strand to SEQ ID NO: 1655725
aagucucagaggaaggagc

SEQ ID NO: 1655727 - RNA, 19 nt, Artificial Sequence
  Description of Artificial Sequence: Synthetic oligonucleotide
  Sense strand starting at position 2193 of SEQ ID NO: 1561224
ucaggauucuaguuacaug

SEQ ID NO: 1655728 - RNA, 19 nt, Artificial Sequence
  Description of Artificial Sequence: Synthetic oligonucleotide
  Antisense strand to SEQ ID NO: 1655727
cauguaacuagaauccuga

SEQ ID NO: 1655729 - RNA, 19 nt, Artificial Sequence
  Description of Artificial Sequence: Synthetic oligonucleotide
  Sense strand starting at position 2287 of SEQ ID NO: 1561224
acggauucuugggagaggu

SEQ ID NO: 1655730 - RNA, 19 nt, Artificial Sequence
  Description of Artificial Sequence: Synthetic oligonucleotide
  Antisense strand to SEQ ID NO: 1655729
accucucccaagaauccgu

SEQ ID NO: 1655731 - RNA, 19 nt, Artificial Sequence
  Description of Artificial Sequence: Synthetic oligonucleotide
  Sense strand starting at position 2353 of SEQ ID NO: 1561224
gcacuuguucuugauucuu

SEQ ID NO: 1655732 - RNA, 19 nt, Artificial Sequence
  Description of Artificial Sequence: Synthetic oligonucleotide
  Antisense strand to SEQ ID NO: 1655731
aagaaucaagaacaagugc

SEQ ID NO: 1655733 - RNA, 19 nt, Artificial Sequence
  Description of Artificial Sequence: Synthetic oligonucleotide
  Sense strand starting at position 2371 of SEQ ID NO: 1561224
ucauguagcuuccuggauu

SEQ ID NO: 1655734 - RNA, 19 nt, Artificial Sequence
  Description of Artificial Sequence: Synthetic oligonucleotide
  Antisense strand to SEQ ID NO: 1655733
aauccaggaagcuacauga

SEQ ID NO: 1655735 - RNA, 19 nt, Artificial Sequence
  Description of Artificial Sequence: Synthetic oligonucleotide
  Sense strand starting at position 2372 of SEQ ID NO: 1561224
cauguagcuuccuggauuu

SEQ ID NO: 1655736 - RNA, 19 nt, Artificial Sequence
  Description of Artificial Sequence: Synthetic oligonucleotide
  Antisense strand to SEQ ID NO: 1655735
aaauccaggaagcuacaug

SEQ ID NO: 1655737 - RNA, 19 nt, Artificial Sequence
  Description of Artificial Sequence: Synthetic oligonucleotide
  Sense strand starting at position 2379 of SEQ ID NO: 1561224
cuuccuggauuugacaauu

SEQ ID NO: 1655738 - RNA, 19 nt, Artificial Sequence
  Description of Artificial Sequence: Synthetic oligonucleotide
  Antisense strand to SEQ ID NO: 1655737
aauugucaaauccaggaag

SEQ ID NO: 1655739 - RNA, 19 nt, Artificial Sequence
  Description of Artificial Sequence: Synthetic oligonucleotide
  Sense strand starting at position 2407 of SEQ ID NO: 1561224
uugagagacuguggucgaa

SEQ ID NO: 1655740 - RNA, 19 nt, Artificial Sequence
  Description of Artificial Sequence: Synthetic oligonucleotide
  Antisense strand to SEQ ID NO: 1655739
uucgaccacagucucucaa

SEQ ID NO: 1655741 - RNA, 19 nt, Artificial Sequence
  Description of Artificial Sequence: Synthetic oligonucleotide
  Sense strand starting at position 2409 of SEQ ID NO: 1561224
gagagacuguggucgaaga

SEQ ID NO: 1655742 - RNA, 19 nt, Artificial Sequence
  Description of Artificial Sequence: Synthetic oligonucleotide
  Antisense strand to SEQ ID NO: 1655741
ucuucgaccacagucucuc

SEQ ID NO: 1655743 - RNA, 19 nt, Artificial Sequence
  Description of Artificial Sequence: Synthetic oligonucleotide
  Sense strand starting at position 2492 of SEQ ID NO: 1561224
aggcaauauacagguagau

SEQ ID NO: 1655744 - RNA, 19 nt, Artificial Sequence
  Description of Artificial Sequence: Synthetic oligonucleotide
  Antisense strand to SEQ ID NO: 1655743
aucuaccuguauauugccu

SEQ ID NO: 1655745 - RNA, 19 nt, Artificial Sequence
  Description of Artificial Sequence: Synthetic oligonucleotide
  Sense strand starting at position 2928 of SEQ ID NO: 1561224
ccaccaugcuccgcuauaa

SEQ ID NO: 1655746 - RNA, 19 nt, Artificial Sequence
  Description of Artificial Sequence: Synthetic oligonucleotide
  Antisense strand to SEQ ID NO: 1655745
uuauagcggagcauggugg

SEQ ID NO: 1655747 - RNA, 19 nt, Artificial Sequence
  Description of Artificial Sequence: Synthetic oligonucleotide
  Sense strand starting at position 3273 of SEQ ID NO: 1561224
uggaacaugucacaaauuu

SEQ ID NO: 1655748 - RNA, 19 nt, Artificial Sequence
  Description of Artificial Sequence: Synthetic oligonucleotide
  Antisense strand to SEQ ID NO: 1655747
aaauuugugacauguucca

SEQ ID NO: 1655749 - RNA, 19 nt, Artificial Sequence
  Description of Artificial Sequence: Synthetic oligonucleotide
  Sense strand starting at position 3334 of SEQ ID NO: 1561224
ucguuccaauguuaauaca

SEQ ID NO: 1655750 - RNA, 19 nt, Artificial Sequence
  Description of Artificial Sequence: Synthetic oligonucleotide
  Antisense strand to SEQ ID NO: 1655749
uguauuaacauuggaacga

SEQ ID NO: 1655751 - RNA, 19 nt, Artificial Sequence
  Description of Artificial Sequence: Synthetic oligonucleotide
  Sense strand starting at position 3366 of SEQ ID NO: 1561224
cgagcacugcccugcuauu

SEQ ID NO: 1655752 - RNA, 19 nt, Artificial Sequence
  Description of Artificial Sequence: Synthetic oligonucleotide
  Antisense strand to SEQ ID NO: 1655751
aauagcagggcagugcucg

SEQ ID NO: 1655753 - RNA, 19 nt, Artificial Sequence
  Description of Artificial Sequence: Synthetic oligonucleotide
  Sense strand starting at position 3376 of SEQ ID NO: 1561224
ccugcuauuuagggacaga

SEQ ID NO: 1655754 - RNA, 19 nt, Artificial Sequence
  Description of Artificial Sequence: Synthetic oligonucleotide
  Antisense strand to SEQ ID NO: 1655753
ucugucccuaaauagcagg

SEQ ID NO: 1655755 - RNA, 19 nt, Artificial Sequence
  Description of Artificial Sequence: Synthetic oligonucleotide
  Sense strand starting at position 3481 of SEQ ID NO: 1561224
gaaaguacuucuuccuggu

SEQ ID NO: 1655756 - RNA, 19 nt, Artificial Sequence
  Description of Artificial Sequence: Synthetic oligonucleotide
  Antisense strand to SEQ ID NO: 1655755
accaggaagaaguacuuuc

SEQ ID NO: 1655757 - RNA, 19 nt, Artificial Sequence
  Description of Artificial Sequence: Synthetic oligonucleotide
  Sense strand starting at position 3487 of SEQ ID NO: 1561224
acuucuuccuggucaugaa

SEQ ID NO: 1655758 - RNA, 19 nt, Artificial Sequence
  Description of Artificial Sequence: Synthetic oligonucleotide
  Antisense strand to SEQ ID NO: 1655757
uucaugaccaggaagaagu

SEQ ID NO: 1655759 - RNA, 19 nt, Artificial Sequence
  Description of Artificial Sequence: Synthetic oligonucleotide
  Sense strand starting at position 3488 of SEQ ID NO: 1561224
cuucuuccuggucaugaau

SEQ ID NO: 1655760 - RNA, 19 nt, Artificial Sequence
  Description of Artificial Sequence: Synthetic oligonucleotide
  Antisense strand to SEQ ID NO: 1655759
auucaugaccaggaagaag

SEQ ID NO: 1655761 - RNA, 19 nt, Artificial Sequence
  Description of Artificial Sequence: Synthetic oligonucleotide
  Sense strand starting at position 3508 of SEQ ID NO: 1561224
gacuccaguucuuggaaca

SEQ ID NO: 1655762 - RNA, 19 nt, Artificial Sequence
  Description of Artificial Sequence: Synthetic oligonucleotide
  Antisense strand to SEQ ID NO: 1655761
uguuccaagaacuggaguc

SEQ ID NO: 1655763 - RNA, 19 nt, Artificial Sequence
  Description of Artificial Sequence: Synthetic oligonucleotide
  Sense strand starting at position 3749 of SEQ ID NO: 1561224
ucgcuuuaacucgggagga

SEQ ID NO: 1655764 - RNA, 19 nt, Artificial Sequence
  Description of Artificial Sequence: Synthetic oligonucleotide
  Antisense strand to SEQ ID NO: 1655763
uccucccgaguuaaagcga

SEQ ID NO: 1655765 - RNA, 19 nt, Artificial Sequence
  Description of Artificial Sequence: Synthetic oligonucleotide
  Sense strand starting at position 3750 of SEQ ID NO: 1561224
cgcuuuaacucgggaggaa

SEQ ID NO: 1655766 - RNA, 19 nt, Artificial Sequence
  Description of Artificial Sequence: Synthetic oligonucleotide
  Antisense strand to SEQ ID NO: 1655765
uuccucccgaguuaaagcg

SEQ ID NO: 1655767 - RNA, 19 nt, Artificial Sequence
  Description of Artificial Sequence: Synthetic oligonucleotide
  Sense strand starting at position 3751 of SEQ ID NO: 1561224
gcuuuaacucgggaggaag

SEQ ID NO: 1655768 - RNA, 19 nt, Artificial Sequence
  Description of Artificial Sequence: Synthetic oligonucleotide
  Antisense strand to SEQ ID NO: 1655767
cuuccucccgaguuaaagc

SEQ ID NO: 1655769 - RNA, 19 nt, Artificial Sequence
  Description of Artificial Sequence: Synthetic oligonucleotide
  Sense strand starting at position 28 of SEQ ID NO: 1561225
aguaaucuguuaguuguau

SEQ ID NO: 1655770 - RNA, 19 nt, Artificial Sequence
  Description of Artificial Sequence: Synthetic oligonucleotide
  Antisense strand to SEQ ID NO: 1655769
auacaacuaacagauuacu

SEQ ID NO: 1655771 - RNA, 19 nt, Artificial Sequence
  Description of Artificial Sequence: Synthetic oligonucleotide
  Sense strand starting at position 29 of SEQ ID NO: 1561225
guaaucuguuaguuguaua

SEQ ID NO: 1655772 - RNA, 19 nt, Artificial Sequence
  Description of Artificial Sequence: Synthetic oligonucleotide
  Antisense strand to SEQ ID NO: 1655771
uauacaacuaacagauuac

SEQ ID NO: 1655773 - RNA, 19 nt, Artificial Sequence
  Description of Artificial Sequence: Synthetic oligonucleotide
  Sense strand starting at position 34 of SEQ ID NO: 1561225
cuguuaguuguauacaaau

SEQ ID NO: 1655774 - RNA, 19 nt, Artificial Sequence
  Description of Artificial Sequence: Synthetic oligonucleotide
  Antisense strand to SEQ ID NO: 1655773
auuuguauacaacuaacag

SEQ ID NO: 1655775 - RNA, 19 nt, Artificial Sequence
  Description of Artificial Sequence: Synthetic oligonucleotide
  Sense strand starting at position 36 of SEQ ID NO: 1561225
guuaguuguauacaaauag

SEQ ID NO: 1655776 - RNA, 19 nt, Artificial Sequence
  Description of Artificial Sequence: Synthetic oligonucleotide
  Antisense strand to SEQ ID NO: 1655775
cuauuuguauacaacuaac

SEQ ID NO: 1655777 - RNA, 19 nt, Artificial Sequence
  Description of Artificial Sequence: Synthetic oligonucleotide
  Sense strand starting at position 48 of SEQ ID NO: 1561225
caaauagaacugggugagu

SEQ ID NO: 1655778 - RNA, 19 nt, Artificial Sequence
  Description of Artificial Sequence: Synthetic oligonucleotide
  Antisense strand to SEQ ID NO: 1655777
acucacccaguucuauuug

SEQ ID NO: 1655779 - RNA, 19 nt, Artificial Sequence
  Description of Artificial Sequence: Synthetic oligonucleotide
  Sense strand starting at position 143 of SEQ ID NO: 1561225
uugguaagaccucaucugu

SEQ ID NO: 1655780 - RNA, 19 nt, Artificial Sequence
  Description of Artificial Sequence: Synthetic oligonucleotide
  Antisense strand to SEQ ID NO: 1655779
acagaugaggucuuaccaa

SEQ ID NO: 1655781 - RNA, 19 nt, Artificial Sequence
  Description of Artificial Sequence: Synthetic oligonucleotide
  Sense strand starting at position 251 of SEQ ID NO: 1561225
agcucaugagguugagacu

SEQ ID NO: 1655782 - RNA, 19 nt, Artificial Sequence
  Description of Artificial Sequence: Synthetic oligonucleotide
  Antisense strand to SEQ ID NO: 1655781
agucucaaccucaugagcu

SEQ ID NO: 1655783 - RNA, 19 nt, Artificial Sequence
  Description of Artificial Sequence: Synthetic oligonucleotide
  Sense strand starting at position 750 of SEQ ID NO: 1561225
guucuauugguguagccca

SEQ ID NO: 1655784 - RNA, 19 nt, Artificial Sequence
  Description of Artificial Sequence: Synthetic oligonucleotide
  Antisense strand to SEQ ID NO: 1655783
ugggcuacaccaauagaac

SEQ ID NO: 1655785 - RNA, 19 nt, Artificial Sequence
  Description of Artificial Sequence: Synthetic oligonucleotide
  Sense strand starting at position 955 of SEQ ID NO: 1561225
cggccuuaauucucuuuaa

SEQ ID NO: 1655786 - RNA, 19 nt, Artificial Sequence
  Description of Artificial Sequence: Synthetic oligonucleotide
  Antisense strand to SEQ ID NO: 1655785
uuaaagagaauuaaggccg

SEQ ID NO: 1655787 - RNA, 19 nt, Artificial Sequence
  Description of Artificial Sequence: Synthetic oligonucleotide
  Sense strand starting at position 1381 of SEQ ID NO: 1561225
gccugacaauuccuuagca

SEQ ID NO: 1655788 - RNA, 19 nt, Artificial Sequence
  Description of Artificial Sequence: Synthetic oligonucleotide
  Antisense strand to SEQ ID NO: 1655787
ugcuaaggaauugucaggc

SEQ ID NO: 1655789 - RNA, 19 nt, Artificial Sequence
  Description of Artificial Sequence: Synthetic oligonucleotide
  Sense strand starting at position 1508 of SEQ ID NO: 1561225
ggauuugacuuagagccaa

SEQ ID NO: 1655790 - RNA, 19 nt, Artificial Sequence
  Description of Artificial Sequence: Synthetic oligonucleotide
  Antisense strand to SEQ ID NO: 1655789
uuggcucuaagucaaaucc

SEQ ID NO: 1655791 - RNA, 19 nt, Artificial Sequence
  Description of Artificial Sequence: Synthetic oligonucleotide
  Sense strand starting at position 1561 of SEQ ID NO: 1561225
acacucaucugugcuggau

SEQ ID NO: 1655792 - RNA, 19 nt, Artificial Sequence
  Description of Artificial Sequence: Synthetic oligonucleotide
  Antisense strand to SEQ ID NO: 1655791
auccagcacagaugagugu

SEQ ID NO: 1655793 - RNA, 19 nt, Artificial Sequence
  Description of Artificial Sequence: Synthetic oligonucleotide
  Sense strand starting at position 1584 of SEQ ID NO: 1561225
ccagcucucgguugaugga

SEQ ID NO: 1655794 - RNA, 19 nt, Artificial Sequence
  Description of Artificial Sequence: Synthetic oligonucleotide
  Antisense strand to SEQ ID NO: 1655793
uccaucaaccgagagcugg

SEQ ID NO: 1655795 - RNA, 19 nt, Artificial Sequence
  Description of Artificial Sequence: Synthetic oligonucleotide
  Sense strand starting at position 2065 of SEQ ID NO: 1561225
gcucaugguccagggaaau

SEQ ID NO: 1655796 - RNA, 19 nt, Artificial Sequence
  Description of Artificial Sequence: Synthetic oligonucleotide
  Antisense strand to SEQ ID NO: 1655795
auuucccuggaccaugagc

SEQ ID NO: 1655797 - RNA, 19 nt, Artificial Sequence
  Description of Artificial Sequence: Synthetic oligonucleotide
  Sense strand starting at position 2275 of SEQ ID NO: 1561225
gggaacuugggcuguccua

SEQ ID NO: 1655798 - RNA, 19 nt, Artificial Sequence
  Description of Artificial Sequence: Synthetic oligonucleotide
  Antisense strand to SEQ ID NO: 1655797
uaggacagcccaaguuccc

SEQ ID NO: 1655799 - RNA, 19 nt, Artificial Sequence
  Description of Artificial Sequence: Synthetic oligonucleotide
  Sense strand starting at position 2667 of SEQ ID NO: 1561225
ggcucugugaugcagaaau

SEQ ID NO: 1655800 - RNA, 19 nt, Artificial Sequence
  Description of Artificial Sequence: Synthetic oligonucleotide
  Antisense strand to SEQ ID NO: 1655799
auuucugcaucacagagcc

SEQ ID NO: 1655801 - RNA, 19 nt, Artificial Sequence
  Description of Artificial Sequence: Synthetic oligonucleotide
  Sense strand starting at position 2669 of SEQ ID NO: 1561225
cucugugaugcagaaaucu

SEQ ID NO: 1655802 - RNA, 19 nt, Artificial Sequence
  Description of Artificial Sequence: Synthetic oligonucleotide
  Antisense strand to SEQ ID NO: 1655801
agauuucugcaucacagag

SEQ ID NO: 1655803 - RNA, 19 nt, Artificial Sequence
  Description of Artificial Sequence: Synthetic oligonucleotide
  Sense strand starting at position 2678 of SEQ ID NO: 1561225
gcagaaaucuagcuacaag

SEQ ID NO: 1655804 - RNA, 19 nt, Artificial Sequence
  Description of Artificial Sequence: Synthetic oligonucleotide
  Antisense strand to SEQ ID NO: 1655803
cuuguagcuagauuucugc

SEQ ID NO: 1655805 - RNA, 19 nt, Artificial Sequence
  Description of Artificial Sequence: Synthetic oligonucleotide
  Sense strand starting at position 2858 of SEQ ID NO: 1561225
cugugagccauuggucacu

SEQ ID NO: 1655806 - RNA, 19 nt, Artificial Sequence
  Description of Artificial Sequence: Synthetic oligonucleotide
  Antisense strand to SEQ ID NO: 1655805
agugaccaauggcucacag

SEQ ID NO: 1655807 - RNA, 19 nt, Artificial Sequence
  Description of Artificial Sequence: Synthetic oligonucleotide
  Sense strand starting at position 2864 of SEQ ID NO: 1561225
gccauuggucacuggguuu

SEQ ID NO: 1655808 - RNA, 19 nt, Artificial Sequence
  Description of Artificial Sequence: Synthetic oligonucleotide
  Antisense strand to SEQ ID NO: 1655807
aaacccagugaccaauggc

SEQ ID NO: 1655809 - RNA, 19 nt, Artificial Sequence
  Description of Artificial Sequence: Synthetic oligonucleotide
  Sense strand starting at position 3019 of SEQ ID NO: 1561225
uuucuccauggugauagau

SEQ ID NO: 1655810 - RNA, 19 nt, Artificial Sequence
  Description of Artificial Sequence: Synthetic oligonucleotide
  Antisense strand to SEQ ID NO: 1655809
aucuaucaccauggagaaa

SEQ ID NO: 1655811 - RNA, 19 nt, Artificial Sequence
  Description of Artificial Sequence: Synthetic oligonucleotide
  Sense strand starting at position 3025 of SEQ ID NO: 1561225
cauggugauagauguaguu

SEQ ID NO: 1655812 - RNA, 19 nt, Artificial Sequence
  Description of Artificial Sequence: Synthetic oligonucleotide
  Antisense strand to SEQ ID NO: 1655811
aacuacaucuaucaccaug

SEQ ID NO: 1655813 - RNA, 19 nt, Artificial Sequence
  Description of Artificial Sequence: Synthetic oligonucleotide
  Sense strand starting at position 3027 of SEQ ID NO: 1561225
uggugauagauguaguuag

SEQ ID NO: 1655814 - RNA, 19 nt, Artificial Sequence
  Description of Artificial Sequence: Synthetic oligonucleotide
  Antisense strand to SEQ ID NO: 1655813
cuaacuacaucuaucacca

SEQ ID NO: 1655815 - RNA, 19 nt, Artificial Sequence
  Description of Artificial Sequence: Synthetic oligonucleotide
  Sense strand starting at position 3065 of SEQ ID NO: 1561225
uucuguaugucagcacuga

SEQ ID NO: 1655816 - RNA, 19 nt, Artificial Sequence
  Description of Artificial Sequence: Synthetic oligonucleotide
  Antisense strand to SEQ ID NO: 1655815
ucagugcugacauacagaa

SEQ ID NO: 1655817 - RNA, 19 nt, Artificial Sequence
  Description of Artificial Sequence: Synthetic oligonucleotide
  Sense strand starting at position 3066 of SEQ ID NO: 1561225
ucuguaugucagcacugaa

SEQ ID NO: 1655818 - RNA, 19 nt, Artificial Sequence
  Description of Artificial Sequence: Synthetic oligonucleotide
  Antisense strand to SEQ ID NO: 1655817
uucagugcugacauacaga

SEQ ID NO: 1655819 - RNA, 19 nt, Artificial Sequence
  Description of Artificial Sequence: Synthetic oligonucleotide
  Sense strand starting at position 3069 of SEQ ID NO: 1561225
guaugucagcacugaagac

SEQ ID NO: 1655820 - RNA, 19 nt, Artificial Sequence
  Description of Artificial Sequence: Synthetic oligonucleotide
  Antisense strand to SEQ ID NO: 1655819
gucuucagugcugacauac

SEQ ID NO: 1655821 - RNA, 19 nt, Artificial Sequence
  Description of Artificial Sequence: Synthetic oligonucleotide
  Sense strand starting at position 3239 of SEQ ID NO: 1561225
gaaggcggaugguucaaau

SEQ ID NO: 1655822 - RNA, 19 nt, Artificial Sequence
  Description of Artificial Sequence: Synthetic oligonucleotide
  Antisense strand to SEQ ID NO: 1655821
auuugaaccauccgccuuc

SEQ ID NO: 1655823 - RNA, 19 nt, Artificial Sequence
  Description of Artificial Sequence: Synthetic oligonucleotide
  Sense strand starting at position 3286 of SEQ ID NO: 1561225
uuuaaugaaugucugucaa

SEQ ID NO: 1655824 - RNA, 19 nt, Artificial Sequence
  Description of Artificial Sequence: Synthetic oligonucleotide
  Antisense strand to SEQ ID NO: 1655823
uugacagacauucauuaaa

SEQ ID NO: 1655825 - RNA, 19 nt, Artificial Sequence
  Description of Artificial Sequence: Synthetic oligonucleotide
  Sense strand starting at position 3300 of SEQ ID NO: 1561225
gucaaaucgccugcuucuu

SEQ ID NO: 1655826 - RNA, 19 nt, Artificial Sequence
  Description of Artificial Sequence: Synthetic oligonucleotide
  Antisense strand to SEQ ID NO: 1655825
aagaagcaggcgauuugac

SEQ ID NO: 1655827 - RNA, 19 nt, Artificial Sequence
  Description of Artificial Sequence: Synthetic oligonucleotide
  Sense strand starting at position 3394 of SEQ ID NO: 1561225
aggaguguguccuuccaca

SEQ ID NO: 1655828 - RNA, 19 nt, Artificial Sequence
  Description of Artificial Sequence: Synthetic oligonucleotide
  Antisense strand to SEQ ID NO: 1655827
uguggaaggacacacuccu

SEQ ID NO: 1655829 - RNA, 19 nt, Artificial Sequence
  Description of Artificial Sequence: Synthetic oligonucleotide
  Sense strand starting at position 3412 of SEQ ID NO: 1561225
accuuuauuuaagagguca

SEQ ID NO: 1655830 - RNA, 19 nt, Artificial Sequence
  Description of Artificial Sequence: Synthetic oligonucleotide
  Antisense strand to SEQ ID NO: 1655829
ugaccucuuaaauaaaggu

SEQ ID NO: 1655831 - RNA, 19 nt, Artificial Sequence
  Description of Artificial Sequence: Synthetic oligonucleotide
  Sense strand starting at position 3700 of SEQ ID NO: 1561225
gagggagacuccuccguuu

SEQ ID NO: 1655832 - RNA, 19 nt, Artificial Sequence
  Description of Artificial Sequence: Synthetic oligonucleotide
  Antisense strand to SEQ ID NO: 1655831
aaacggaggagucucccuc

SEQ ID NO: 1655833 - RNA, 19 nt, Artificial Sequence
  Description of Artificial Sequence: Synthetic oligonucleotide
  Sense strand starting at position 3702 of SEQ ID NO: 1561225
gggagacuccuccguuuca

SEQ ID NO: 1655834 - RNA, 19 nt, Artificial Sequence
  Description of Artificial Sequence: Synthetic oligonucleotide
  Antisense strand to SEQ ID NO: 1655833
ugaaacggaggagucuccc

SEQ ID NO: 1655835 - RNA, 19 nt, Artificial Sequence
  Description of Artificial Sequence: Synthetic oligonucleotide
  Sense strand starting at position 3811 of SEQ ID NO: 1561225
gugauaaaugggcaugcaa

SEQ ID NO: 1655836 - RNA, 19 nt, Artificial Sequence
  Description of Artificial Sequence: Synthetic oligonucleotide
  Antisense strand to SEQ ID NO: 1655835
uugcaugcccauuuaucac

SEQ ID NO: 1655837 - RNA, 19 nt, Artificial Sequence
  Description of Artificial Sequence: Synthetic oligonucleotide
  Sense strand starting at position 3813 of SEQ ID NO: 1561225
gauaaaugggcaugcaaga

SEQ ID NO: 1655838 - RNA, 19 nt, Artificial Sequence
  Description of Artificial Sequence: Synthetic oligonucleotide
  Antisense strand to SEQ ID NO: 1655837
ucuugcaugcccauuuauc

SEQ ID NO: 1655839 - RNA, 19 nt, Artificial Sequence
  Description of Artificial Sequence: Synthetic oligonucleotide
  Sense strand starting at position 3944 of SEQ ID NO: 1561225
gauggaaacuuggcugcaa

SEQ ID NO: 1655840 - RNA, 19 nt, Artificial Sequence
  Description of Artificial Sequence: Synthetic oligonucleotide
  Antisense strand to SEQ ID NO: 1655839
uugcagccaaguuuccauc

SEQ ID NO: 1655841 - RNA, 19 nt, Artificial Sequence
  Description of Artificial Sequence: Synthetic oligonucleotide
  Sense strand starting at position 3945 of SEQ ID NO: 1561225
auggaaacuuggcugcaaa

SEQ ID NO: 1655842 - RNA, 19 nt, Artificial Sequence
  Description of Artificial Sequence: Synthetic oligonucleotide
  Antisense strand to SEQ ID NO: 1655841
uuugcagccaaguuuccau

SEQ ID NO: 1655843 - RNA, 19 nt, Artificial Sequence
  Description of Artificial Sequence: Synthetic oligonucleotide
  Sense strand starting at position 3946 of SEQ ID NO: 1561225
uggaaacuuggcugcaaau

SEQ ID NO: 1655844 - RNA, 19 nt, Artificial Sequence
  Description of Artificial Sequence: Synthetic oligonucleotide
  Antisense strand to SEQ ID NO: 1655843
auuugcagccaaguuucca

SEQ ID NO: 1655845 - RNA, 19 nt, Artificial Sequence
  Description of Artificial Sequence: Synthetic oligonucleotide
  Sense strand starting at position 3948 of SEQ ID NO: 1561225
gaaacuuggcugcaaauga

SEQ ID NO: 1655846 - RNA, 19 nt, Artificial Sequence
  Description of Artificial Sequence: Synthetic oligonucleotide
  Antisense strand to SEQ ID NO: 1655845
ucauuugcagccaaguuuc

SEQ ID NO: 1655847 - RNA, 19 nt, Artificial Sequence
  Description of Artificial Sequence: Synthetic oligonucleotide
  Sense strand starting at position 3959 of SEQ ID NO: 1561225
gcaaaugagcagugggaaa

SEQ ID NO: 1655848 - RNA, 19 nt, Artificial Sequence
  Description of Artificial Sequence: Synthetic oligonucleotide
  Antisense strand to SEQ ID NO: 1655847
uuucccacugcucauuugc

SEQ ID NO: 1655849 - RNA, 19 nt, Artificial Sequence
  Description of Artificial Sequence: Synthetic oligonucleotide
  Sense strand starting at position 59 of SEQ ID NO: 1561226
ugaggucucggcugugaug

SEQ ID NO: 1655850 - RNA, 19 nt, Artificial Sequence
  Description of Artificial Sequence: Synthetic oligonucleotide
  Antisense strand to SEQ ID NO: 1655849
caucacagccgagaccuca

SEQ ID NO: 1655851 - RNA, 19 nt, Artificial Sequence
  Description of Artificial Sequence: Synthetic oligonucleotide
  Sense strand starting at position 231 of SEQ ID NO: 1561226
ccuacuuuacguggagaca

SEQ ID NO: 1655852 - RNA, 19 nt, Artificial Sequence
  Description of Artificial Sequence: Synthetic oligonucleotide
  Antisense strand to SEQ ID NO: 1655851
ugucuccacguaaaguagg

SEQ ID NO: 1655853 - RNA, 19 nt, Artificial Sequence
  Description of Artificial Sequence: Synthetic oligonucleotide
  Sense strand starting at position 371 of SEQ ID NO: 1561226
uccuuugaguuugcccaua

SEQ ID NO: 1655854 - RNA, 19 nt, Artificial Sequence
  Description of Artificial Sequence: Synthetic oligonucleotide
  Antisense strand to SEQ ID NO: 1655853
uaugggcaaacucaaagga

SEQ ID NO: 1655855 - RNA, 19 nt, Artificial Sequence
  Description of Artificial Sequence: Synthetic oligonucleotide
  Sense strand starting at position 373 of SEQ ID NO: 1561226
cuuugaguuugcccauacu

SEQ ID NO: 1655856 - RNA, 19 nt, Artificial Sequence
  Description of Artificial Sequence: Synthetic oligonucleotide
  Antisense strand to SEQ ID NO: 1655855
aguaugggcaaacucaaag

SEQ ID NO: 1655857 - RNA, 19 nt, Artificial Sequence
  Description of Artificial Sequence: Synthetic oligonucleotide
  Sense strand starting at position 436 of SEQ ID NO: 1561226
ugagucuuggagcaauaac

SEQ ID NO: 1655858 - RNA, 19 nt, Artificial Sequence
  Description of Artificial Sequence: Synthetic oligonucleotide
  Antisense strand to SEQ ID NO: 1655857
guuauugcuccaagacuca

SEQ ID NO: 1655859 - RNA, 19 nt, Artificial Sequence
  Description of Artificial Sequence: Synthetic oligonucleotide
  Sense strand starting at position 457 of SEQ ID NO: 1561226
caacaugcgugacucuaaa

SEQ ID NO: 1655860 - RNA, 19 nt, Artificial Sequence
  Description of Artificial Sequence: Synthetic oligonucleotide
  Antisense strand to SEQ ID NO: 1655859
uuuagagucacgcauguug

SEQ ID NO: 1655861 - RNA, 19 nt, Artificial Sequence
  Description of Artificial Sequence: Synthetic oligonucleotide
  Sense strand starting at position 507 of SEQ ID NO: 1561226
gagcgaucgcuucuccacu

SEQ ID NO: 1655862 - RNA, 19 nt, Artificial Sequence
  Description of Artificial Sequence: Synthetic oligonucleotide
  Antisense strand to SEQ ID NO: 1655861
aguggagaagcgaucgcuc

SEQ ID NO: 1655863 - RNA, 19 nt, Artificial Sequence
  Description of Artificial Sequence: Synthetic oligonucleotide
  Sense strand starting at position 508 of SEQ ID NO: 1561226
agcgaucgcuucuccacua

SEQ ID NO: 1655864 - RNA, 19 nt, Artificial Sequence
  Description of Artificial Sequence: Synthetic oligonucleotide
  Antisense strand to SEQ ID NO: 1655863
uaguggagaagcgaucgcu

SEQ ID NO: 1655865 - RNA, 19 nt, Artificial Sequence
  Description of Artificial Sequence: Synthetic oligonucleotide
  Sense strand starting at position 572 of SEQ ID NO: 1561226
gaguuuauugcagguucca

SEQ ID NO: 1655866 - RNA, 19 nt, Artificial Sequence
  Description of Artificial Sequence: Synthetic oligonucleotide
  Antisense strand to SEQ ID NO: 1655865
uggaaccugcaauaaacuc

SEQ ID NO: 1655867 - RNA, 19 nt, Artificial Sequence
  Description of Artificial Sequence: Synthetic oligonucleotide
  Sense strand starting at position 699 of SEQ ID NO: 1561226
gggccuggucgcagggaau

SEQ ID NO: 1655868 - RNA, 19 nt, Artificial Sequence
  Description of Artificial Sequence: Synthetic oligonucleotide
  Antisense strand to SEQ ID NO: 1655867
auucccugcgaccaggccc

SEQ ID NO: 1655869 - RNA, 19 nt, Artificial Sequence
  Description of Artificial Sequence: Synthetic oligonucleotide
  Sense strand starting at position 757 of SEQ ID NO: 1561226
gaacguggauuccgaacaa

SEQ ID NO: 1655870 - RNA, 19 nt, Artificial Sequence
  Description of Artificial Sequence: Synthetic oligonucleotide
  Antisense strand to SEQ ID NO: 1655869
uuguucggaauccacguuc

SEQ ID NO: 1655871 - RNA, 19 nt, Artificial Sequence
  Description of Artificial Sequence: Synthetic oligonucleotide
  Sense strand starting at position 1062 of SEQ ID NO: 1561226
gcucgaggccuucgggaua

SEQ ID NO: 1655872 - RNA, 19 nt, Artificial Sequence
  Description of Artificial Sequence: Synthetic oligonucleotide
  Antisense strand to SEQ ID NO: 1655871
uaucccgaaggccucgagc

SEQ ID NO: 1655873 - RNA, 19 nt, Artificial Sequence
  Description of Artificial Sequence: Synthetic oligonucleotide
  Sense strand starting at position 1113 of SEQ ID NO: 1561226
cggcgauguccgagucguc

SEQ ID NO: 1655874 - RNA, 19 nt, Artificial Sequence
  Description of Artificial Sequence: Synthetic oligonucleotide
  Antisense strand to SEQ ID NO: 1655873
gacgacucggacaucgccg

SEQ ID NO: 1655875 - RNA, 19 nt, Artificial Sequence
  Description of Artificial Sequence: Synthetic oligonucleotide
  Sense strand starting at position 1116 of SEQ ID NO: 1561226
cgauguccgagucgucgaa

SEQ ID NO: 1655876 - RNA, 19 nt, Artificial Sequence
  Description of Artificial Sequence: Synthetic oligonucleotide
  Antisense strand to SEQ ID NO: 1655875
uucgacgacucggacaucg

SEQ ID NO: 1655877 - RNA, 19 nt, Artificial Sequence
  Description of Artificial Sequence: Synthetic oligonucleotide
  Sense strand starting at position 1299 of SEQ ID NO: 1561226
agccgaagucggugagcuu

SEQ ID NO: 1655878 - RNA, 19 nt, Artificial Sequence
  Description of Artificial Sequence: Synthetic oligonucleotide
  Antisense strand to SEQ ID NO: 1655877
aagcucaccgacuucggcu

SEQ ID NO: 1655879 - RNA, 19 nt, Artificial Sequence
  Description of Artificial Sequence: Synthetic oligonucleotide
  Sense strand starting at position 1596 of SEQ ID NO: 1561226
gcaggaacuuguugacgaa

SEQ ID NO: 1655880 - RNA, 19 nt, Artificial Sequence
  Description of Artificial Sequence: Synthetic oligonucleotide
  Antisense strand to SEQ ID NO: 1655879
uucgucaacaaguuccugc

SEQ ID NO: 1655881 - RNA, 19 nt, Artificial Sequence
  Description of Artificial Sequence: Synthetic oligonucleotide
  Sense strand starting at position 1728 of SEQ ID NO: 1561226
gcuuauaaccgaguucgcu

SEQ ID NO: 1655882 - RNA, 19 nt, Artificial Sequence
  Description of Artificial Sequence: Synthetic oligonucleotide
  Antisense strand to SEQ ID NO: 1655881
agcgaacucgguuauaagc

SEQ ID NO: 1655883 - RNA, 19 nt, Artificial Sequence
  Description of Artificial Sequence: Synthetic oligonucleotide
  Sense strand starting at position 1748 of SEQ ID NO: 1561226
agaaguuugucucccgaca

SEQ ID NO: 1655884 - RNA, 19 nt, Artificial Sequence
  Description of Artificial Sequence: Synthetic oligonucleotide
  Antisense strand to SEQ ID NO: 1655883
ugucgggagacaaacuucu

SEQ ID NO: 1655885 - RNA, 19 nt, Artificial Sequence
  Description of Artificial Sequence: Synthetic oligonucleotide
  Sense strand starting at position 1824 of SEQ ID NO: 1561226
acuccaaucucgggucuaa

SEQ ID NO: 1655886 - RNA, 19 nt, Artificial Sequence
  Description of Artificial Sequence: Synthetic oligonucleotide
  Antisense strand to SEQ ID NO: 1655885
uuagacccgagauuggagu

SEQ ID NO: 1655887 - RNA, 19 nt, Artificial Sequence
  Description of Artificial Sequence: Synthetic oligonucleotide
  Sense strand starting at position 2016 of SEQ ID NO: 1561226
ccugcuuugugacucauaa

SEQ ID NO: 1655888 - RNA, 19 nt, Artificial Sequence
  Description of Artificial Sequence: Synthetic oligonucleotide
  Antisense strand to SEQ ID NO: 1655887
uuaugagucacaaagcagg

SEQ ID NO: 1655889 - RNA, 19 nt, Artificial Sequence
  Description of Artificial Sequence: Synthetic oligonucleotide
  Sense strand starting at position 2036 of SEQ ID NO: 1561226
cauccugaauggucaguuu

SEQ ID NO: 1655890 - RNA, 19 nt, Artificial Sequence
  Description of Artificial Sequence: Synthetic oligonucleotide
  Antisense strand to SEQ ID NO: 1655889
aaacugaccauucaggaug

SEQ ID NO: 1655891 - RNA, 19 nt, Artificial Sequence
  Description of Artificial Sequence: Synthetic oligonucleotide
  Sense strand starting at position 2045 of SEQ ID NO: 1561226
uggucaguuuccgaugaga

SEQ ID NO: 1655892 - RNA, 19 nt, Artificial Sequence
  Description of Artificial Sequence: Synthetic oligonucleotide
  Antisense strand to SEQ ID NO: 1655891
ucucaucggaaacugacca

SEQ ID NO: 1655893 - RNA, 19 nt, Artificial Sequence
  Description of Artificial Sequence: Synthetic oligonucleotide
  Sense strand starting at position 2047 of SEQ ID NO: 1561226
gucaguuuccgaugagagg

SEQ ID NO: 1655894 - RNA, 19 nt, Artificial Sequence
  Description of Artificial Sequence: Synthetic oligonucleotide
  Antisense strand to SEQ ID NO: 1655893
ccucucaucggaaacugac

SEQ ID NO: 1655895 - RNA, 19 nt, Artificial Sequence
  Description of Artificial Sequence: Synthetic oligonucleotide
  Sense strand starting at position 2249 of SEQ ID NO: 1561226
gcaccuggcuccuuugaga

SEQ ID NO: 1655896 - RNA, 19 nt, Artificial Sequence
  Description of Artificial Sequence: Synthetic oligonucleotide
  Antisense strand to SEQ ID NO: 1655895
ucucaaaggagccaggugc

SEQ ID NO: 1655897 - RNA, 19 nt, Artificial Sequence
  Description of Artificial Sequence: Synthetic oligonucleotide
  Sense strand starting at position 2260 of SEQ ID NO: 1561226
cuuugagagcucggaguuu

SEQ ID NO: 1655898 - RNA, 19 nt, Artificial Sequence
  Description of Artificial Sequence: Synthetic oligonucleotide
  Antisense strand to SEQ ID NO: 1655897
aaacuccgagcucucaaag

SEQ ID NO: 1655899 - RNA, 19 nt, Artificial Sequence
  Description of Artificial Sequence: Synthetic oligonucleotide
  Sense strand starting at position 2446 of SEQ ID NO: 1561226
gucggauaguuacacuacu

SEQ ID NO: 1655900 - RNA, 19 nt, Artificial Sequence
  Description of Artificial Sequence: Synthetic oligonucleotide
  Antisense strand to SEQ ID NO: 1655899
aguaguguaacuauccgac

SEQ ID NO: 1655901 - RNA, 19 nt, Artificial Sequence
  Description of Artificial Sequence: Synthetic oligonucleotide
  Sense strand starting at position 2457 of SEQ ID NO: 1561226
acacuacuguccgggacuu

SEQ ID NO: 1655902 - RNA, 19 nt, Artificial Sequence
  Description of Artificial Sequence: Synthetic oligonucleotide
  Antisense strand to SEQ ID NO: 1655901
aagucccggacaguagugu

SEQ ID NO: 1655903 - RNA, 19 nt, Artificial Sequence
  Description of Artificial Sequence: Synthetic oligonucleotide
  Sense strand starting at position 2815 of SEQ ID NO: 1561226
acgcuaagugcugcaguuu

SEQ ID NO: 1655904 - RNA, 19 nt, Artificial Sequence
  Description of Artificial Sequence: Synthetic oligonucleotide
  Antisense strand to SEQ ID NO: 1655903
aaacugcagcacuuagcgu

SEQ ID NO: 1655905 - RNA, 19 nt, Artificial Sequence
  Description of Artificial Sequence: Synthetic oligonucleotide
  Sense strand starting at position 2877 of SEQ ID NO: 1561226
ggaaaucggucccucuagu

SEQ ID NO: 1655906 - RNA, 19 nt, Artificial Sequence
  Description of Artificial Sequence: Synthetic oligonucleotide
  Antisense strand to SEQ ID NO: 1655905
acuagagggaccgauuucc

SEQ ID NO: 1655907 - RNA, 19 nt, Artificial Sequence
  Description of Artificial Sequence: Synthetic oligonucleotide
  Sense strand starting at position 2883 of SEQ ID NO: 1561226
cggucccucuaguuauuua

SEQ ID NO: 1655908 - RNA, 19 nt, Artificial Sequence
  Description of Artificial Sequence: Synthetic oligonucleotide
  Antisense strand to SEQ ID NO: 1655907
uaaauaacuagagggaccg

SEQ ID NO: 1655909 - RNA, 19 nt, Artificial Sequence
  Description of Artificial Sequence: Synthetic oligonucleotide
  Sense strand starting at position 2911 of SEQ ID NO: 1561226
guggguuaaacugagucau

SEQ ID NO: 1655910 - RNA, 19 nt, Artificial Sequence
  Description of Artificial Sequence: Synthetic oligonucleotide
  Antisense strand to SEQ ID NO: 1655909
augacucaguuuaacccac

SEQ ID NO: 1655911 - RNA, 19 nt, Artificial Sequence
  Description of Artificial Sequence: Synthetic oligonucleotide
  Sense strand starting at position 2913 of SEQ ID NO: 1561226
ggguuaaacugagucauag

SEQ ID NO: 1655912 - RNA, 19 nt, Artificial Sequence
  Description of Artificial Sequence: Synthetic oligonucleotide
  Antisense strand to SEQ ID NO: 1655911
cuaugacucaguuuaaccc

SEQ ID NO: 1655913 - RNA, 19 nt, Artificial Sequence
  Description of Artificial Sequence: Synthetic oligonucleotide
  Sense strand starting at position 3051 of SEQ ID NO: 1561226
caagauguucuaugcagug

SEQ ID NO: 1655914 - RNA, 19 nt, Artificial Sequence
  Description of Artificial Sequence: Synthetic oligonucleotide
  Antisense strand to SEQ ID NO: 1655913
cacugcauagaacaucuug

SEQ ID NO: 1655915 - RNA, 19 nt, Artificial Sequence
  Description of Artificial Sequence: Synthetic oligonucleotide
  Sense strand starting at position 3439 of SEQ ID NO: 1561226
auguuuaaguaacacguua

SEQ ID NO: 1655916 - RNA, 19 nt, Artificial Sequence
  Description of Artificial Sequence: Synthetic oligonucleotide
  Antisense strand to SEQ ID NO: 1655915
uaacguguuacuuaaacau

SEQ ID NO: 1655917 - RNA, 19 nt, Artificial Sequence
  Description of Artificial Sequence: Synthetic oligonucleotide
  Sense strand starting at position 3554 of SEQ ID NO: 1561226
aacguaaucuaagagugaa

SEQ ID NO: 1655918 - RNA, 19 nt, Artificial Sequence
  Description of Artificial Sequence: Synthetic oligonucleotide
  Antisense strand to SEQ ID NO: 1655917
uucacucuuagauuacguu

SEQ ID NO: 1655919 - RNA, 19 nt, Artificial Sequence
  Description of Artificial Sequence: Synthetic oligonucleotide
  Sense strand starting at position 3557 of SEQ ID NO: 1561226
guaaucuaagagugaauac

SEQ ID NO: 1655920 - RNA, 19 nt, Artificial Sequence
  Description of Artificial Sequence: Synthetic oligonucleotide
  Antisense strand to SEQ ID NO: 1655919
guauucacucuuagauuac

SEQ ID NO: 1655921 - RNA, 19 nt, Artificial Sequence
  Description of Artificial Sequence: Synthetic oligonucleotide
  Sense strand starting at position 3821 of SEQ ID NO: 1561226
ggacuaucggcaugagcua

SEQ ID NO: 1655922 - RNA, 19 nt, Artificial Sequence
  Description of Artificial Sequence: Synthetic oligonucleotide
  Antisense strand to SEQ ID NO: 1655921
uagcucaugccgauagucc

SEQ ID NO: 1655923 - RNA, 19 nt, Artificial Sequence
  Description of Artificial Sequence: Synthetic oligonucleotide
  Sense strand starting at position 3890 of SEQ ID NO: 1561226
auuacauguuaugcacauu

SEQ ID NO: 1655924 - RNA, 19 nt, Artificial Sequence
  Description of Artificial Sequence: Synthetic oligonucleotide
  Antisense strand to SEQ ID NO: 1655923
aaugugcauaacauguaau

SEQ ID NO: 1655925 - RNA, 19 nt, Artificial Sequence
  Description of Artificial Sequence: Synthetic oligonucleotide
  Sense strand starting at position 3893 of SEQ ID NO: 1561226
acauguuaugcacauuauu

SEQ ID NO: 1655926 - RNA, 19 nt, Artificial Sequence
  Description of Artificial Sequence: Synthetic oligonucleotide
  Antisense strand to SEQ ID NO: 1655925
aauaaugugcauaacaugu

SEQ ID NO: 1655927 - RNA, 19 nt, Artificial Sequence
  Description of Artificial Sequence: Synthetic oligonucleotide
  Sense strand starting at position 3979 of SEQ ID NO: 1561226
aaaucagugugaggugaaa

SEQ ID NO: 1655928 - RNA, 19 nt, Artificial Sequence
  Description of Artificial Sequence: Synthetic oligonucleotide
  Antisense strand to SEQ ID NO: 1655927
uuucaccucacacugauuu

SEQ ID NO: 1655929 - RNA, 19 nt, Artificial Sequence
  Description of Artificial Sequence: Synthetic oligonucleotide
  Sense strand starting at position 96 of SEQ ID NO: 1561227
aggaaugccucuucgcaga

SEQ ID NO: 1655930 - RNA, 19 nt, Artificial Sequence
  Description of Artificial Sequence: Synthetic oligonucleotide
  Antisense strand to SEQ ID NO: 1655929
ucugcgaagaggcauuccu

SEQ ID NO: 1655931 - RNA, 19 nt, Artificial Sequence
  Description of Artificial Sequence: Synthetic oligonucleotide
  Sense strand starting at position 154 of SEQ ID NO: 1561227
agaagucuguucucuccga

SEQ ID NO: 1655932 - RNA, 19 nt, Artificial Sequence
  Description of Artificial Sequence: Synthetic oligonucleotide
  Antisense strand to SEQ ID NO: 1655931
ucggagagaacagacuucu

SEQ ID NO: 1655933 - RNA, 19 nt, Artificial Sequence
  Description of Artificial Sequence: Synthetic oligonucleotide
  Sense strand starting at position 389 of SEQ ID NO: 1561227
aaugaauaggugugcguga

SEQ ID NO: 1655934 - RNA, 19 nt, Artificial Sequence
  Description of Artificial Sequence: Synthetic oligonucleotide
  Antisense strand to SEQ ID NO: 1655933
ucacgcacaccuauucauu

SEQ ID NO: 1655935 - RNA, 19 nt, Artificial Sequence
  Description of Artificial Sequence: Synthetic oligonucleotide
  Sense strand starting at position 390 of SEQ ID NO: 1561227
augaauaggugugcgugaa

SEQ ID NO: 1655936 - RNA, 19 nt, Artificial Sequence
  Description of Artificial Sequence: Synthetic oligonucleotide
  Antisense strand to SEQ ID NO: 1655935
uucacgcacaccuauucau

SEQ ID NO: 1655937 - RNA, 19 nt, Artificial Sequence
  Description of Artificial Sequence: Synthetic oligonucleotide
  Sense strand starting at position 455 of SEQ ID NO: 1561227
ggguaauggagaugacagu

SEQ ID NO: 1655938 - RNA, 19 nt, Artificial Sequence
  Description of Artificial Sequence: Synthetic oligonucleotide
  Antisense strand to SEQ ID NO: 1655937
acugucaucuccauuaccc

SEQ ID NO: 1655939 - RNA, 19 nt, Artificial Sequence
  Description of Artificial Sequence: Synthetic oligonucleotide
  Sense strand starting at position 507 of SEQ ID NO: 1561227
ggagauaucagauguggca

SEQ ID NO: 1655940 - RNA, 19 nt, Artificial Sequence
  Description of Artificial Sequence: Synthetic oligonucleotide
  Antisense strand to SEQ ID NO: 1655939
ugccacaucugauaucucc

SEQ ID NO: 1655941 - RNA, 19 nt, Artificial Sequence
  Description of Artificial Sequence: Synthetic oligonucleotide
  Sense strand starting at position 509 of SEQ ID NO: 1561227
agauaucagauguggcaau

SEQ ID NO: 1655942 - RNA, 19 nt, Artificial Sequence
  Description of Artificial Sequence: Synthetic oligonucleotide
  Antisense strand to SEQ ID NO: 1655941
auugccacaucugauaucu

SEQ ID NO: 1655943 - RNA, 19 nt, Artificial Sequence
  Description of Artificial Sequence: Synthetic oligonucleotide
  Sense strand starting at position 521 of SEQ ID NO: 1561227
uggcaaugacgguagauga

SEQ ID NO: 1655944 - RNA, 19 nt, Artificial Sequence
  Description of Artificial Sequence: Synthetic oligonucleotide
  Antisense strand to SEQ ID NO: 1655943
ucaucuaccgucauugcca

SEQ ID NO: 1655945 - RNA, 19 nt, Artificial Sequence
  Description of Artificial Sequence: Synthetic oligonucleotide
  Sense strand starting at position 902 of SEQ ID NO: 1561227
ucuccaguaccuugagaca

SEQ ID NO: 1655946 - RNA, 19 nt, Artificial Sequence
  Description of Artificial Sequence: Synthetic oligonucleotide
  Antisense strand to SEQ ID NO: 1655945
ugucucaagguacuggaga

SEQ ID NO: 1655947 - RNA, 19 nt, Artificial Sequence
  Description of Artificial Sequence: Synthetic oligonucleotide
  Sense strand starting at position 938 of SEQ ID NO: 1561227
cguaguuuaccagcuccga

SEQ ID NO: 1655948 - RNA, 19 nt, Artificial Sequence
  Description of Artificial Sequence: Synthetic oligonucleotide
  Antisense strand to SEQ ID NO: 1655947
ucggagcugguaaacuacg

SEQ ID NO: 1655949 - RNA, 19 nt, Artificial Sequence
  Description of Artificial Sequence: Synthetic oligonucleotide
  Sense strand starting at position 1072 of SEQ ID NO: 1561227
aagggauugcuccggcaac

SEQ ID NO: 1655950 - RNA, 19 nt, Artificial Sequence
  Description of Artificial Sequence: Synthetic oligonucleotide
  Antisense strand to SEQ ID NO: 1655949
guugccggagcaaucccuu

SEQ ID NO: 1655951 - RNA, 19 nt, Artificial Sequence
  Description of Artificial Sequence: Synthetic oligonucleotide
  Sense strand starting at position 1556 of SEQ ID NO: 1561227
ccgugagggagucguaaca

SEQ ID NO: 1655952 - RNA, 19 nt, Artificial Sequence
  Description of Artificial Sequence: Synthetic oligonucleotide
  Antisense strand to SEQ ID NO: 1655951
uguuacgacucccucacgg

SEQ ID NO: 1655953 - RNA, 19 nt, Artificial Sequence
  Description of Artificial Sequence: Synthetic oligonucleotide
  Sense strand starting at position 1738 of SEQ ID NO: 1561227
cggaacuucuucucucgau

SEQ ID NO: 1655954 - RNA, 19 nt, Artificial Sequence
  Description of Artificial Sequence: Synthetic oligonucleotide
  Antisense strand to SEQ ID NO: 1655953
aucgagagaagaaguuccg

SEQ ID NO: 1655955 - RNA, 19 nt, Artificial Sequence
  Description of Artificial Sequence: Synthetic oligonucleotide
  Sense strand starting at position 1739 of SEQ ID NO: 1561227
ggaacuucuucucucgaua

SEQ ID NO: 1655956 - RNA, 19 nt, Artificial Sequence
  Description of Artificial Sequence: Synthetic oligonucleotide
  Antisense strand to SEQ ID NO: 1655955
uaucgagagaagaaguucc

SEQ ID NO: 1655957 - RNA, 19 nt, Artificial Sequence
  Description of Artificial Sequence: Synthetic oligonucleotide
  Sense strand starting at position 1742 of SEQ ID NO: 1561227
acuucuucucucgauagca

SEQ ID NO: 1655958 - RNA, 19 nt, Artificial Sequence
  Description of Artificial Sequence: Synthetic oligonucleotide
  Antisense strand to SEQ ID NO: 1655957
ugcuaucgagagaagaagu

SEQ ID NO: 1655959 - RNA, 19 nt, Artificial Sequence
  Description of Artificial Sequence: Synthetic oligonucleotide
  Sense strand starting at position 2232 of SEQ ID NO: 1561227
cccaaagcucccgaagauu

SEQ ID NO: 1655960 - RNA, 19 nt, Artificial Sequence
  Description of Artificial Sequence: Synthetic oligonucleotide
  Antisense strand to SEQ ID NO: 1655959
aaucuucgggagcuuuggg

SEQ ID NO: 1655961 - RNA, 19 nt, Artificial Sequence
  Description of Artificial Sequence: Synthetic oligonucleotide
  Sense strand starting at position 2334 of SEQ ID NO: 1561227
uggcauaucgaaugagaac

SEQ ID NO: 1655962 - RNA, 19 nt, Artificial Sequence
  Description of Artificial Sequence: Synthetic oligonucleotide
  Antisense strand to SEQ ID NO: 1655961
guucucauucgauaugcca

SEQ ID NO: 1655963 - RNA, 19 nt, Artificial Sequence
  Description of Artificial Sequence: Synthetic oligonucleotide
  Sense strand starting at position 2401 of SEQ ID NO: 1561227
ucacuagugguaugacuua

SEQ ID NO: 1655964 - RNA, 19 nt, Artificial Sequence
  Description of Artificial Sequence: Synthetic oligonucleotide
  Antisense strand to SEQ ID NO: 1655963
uaagucauaccacuaguga

SEQ ID NO: 1655965 - RNA, 19 nt, Artificial Sequence
  Description of Artificial Sequence: Synthetic oligonucleotide
  Sense strand starting at position 2417 of SEQ ID NO: 1561227
uuagacagcucgcuuaaac

SEQ ID NO: 1655966 - RNA, 19 nt, Artificial Sequence
  Description of Artificial Sequence: Synthetic oligonucleotide
  Antisense strand to SEQ ID NO: 1655965
guuuaagcgagcugucuaa

SEQ ID NO: 1655967 - RNA, 19 nt, Artificial Sequence
  Description of Artificial Sequence: Synthetic oligonucleotide
  Sense strand starting at position 2449 of SEQ ID NO: 1561227
guauccucaucaguaacau

SEQ ID NO: 1655968 - RNA, 19 nt, Artificial Sequence
  Description of Artificial Sequence: Synthetic oligonucleotide
  Antisense strand to SEQ ID NO: 1655967
auguuacugaugaggauac

SEQ ID NO: 1655969 - RNA, 19 nt, Artificial Sequence
  Description of Artificial Sequence: Synthetic oligonucleotide
  Sense strand starting at position 2990 of SEQ ID NO: 1561227
cagcucugugcuggaugau

SEQ ID NO: 1655970 - RNA, 19 nt, Artificial Sequence
  Description of Artificial Sequence: Synthetic oligonucleotide
  Antisense strand to SEQ ID NO: 1655969
aucauccagcacagagcug

SEQ ID NO: 1655971 - RNA, 19 nt, Artificial Sequence
  Description of Artificial Sequence: Synthetic oligonucleotide
  Sense strand starting at position 3222 of SEQ ID NO: 1561227
uaaagucuuccuggaggag

SEQ ID NO: 1655972 - RNA, 19 nt, Artificial Sequence
  Description of Artificial Sequence: Synthetic oligonucleotide
  Antisense strand to SEQ ID NO: 1655971
cuccuccaggaagacuuua

SEQ ID NO: 1655973 - RNA, 19 nt, Artificial Sequence
  Description of Artificial Sequence: Synthetic oligonucleotide
  Sense strand starting at position 3469 of SEQ ID NO: 1561227
gucugugcgacaugaggau

SEQ ID NO: 1655974 - RNA, 19 nt, Artificial Sequence
  Description of Artificial Sequence: Synthetic oligonucleotide
  Antisense strand to SEQ ID NO: 1655973
auccucaugucgcacagac

SEQ ID NO: 1655975 - RNA, 19 nt, Artificial Sequence
  Description of Artificial Sequence: Synthetic oligonucleotide
  Sense strand starting at position 3473 of SEQ ID NO: 1561227
gugcgacaugaggauagaa

SEQ ID NO: 1655976 - RNA, 19 nt, Artificial Sequence
  Description of Artificial Sequence: Synthetic oligonucleotide
  Antisense strand to SEQ ID NO: 1655975
uucuauccucaugucgcac

SEQ ID NO: 1655977 - RNA, 19 nt, Artificial Sequence
  Description of Artificial Sequence: Synthetic oligonucleotide
  Sense strand starting at position 3511 of SEQ ID NO: 1561227
gguugcagagacugaauua

SEQ ID NO: 1655978 - RNA, 19 nt, Artificial Sequence
  Description of Artificial Sequence: Synthetic oligonucleotide
  Antisense strand to SEQ ID NO: 1655977
uaauucagucucugcaacc

SEQ ID NO: 1655979 - RNA, 19 nt, Artificial Sequence
  Description of Artificial Sequence: Synthetic oligonucleotide
  Sense strand starting at position 3512 of SEQ ID NO: 1561227
guugcagagacugaauuau

SEQ ID NO: 1655980 - RNA, 19 nt, Artificial Sequence
  Description of Artificial Sequence: Synthetic oligonucleotide
  Antisense strand to SEQ ID NO: 1655979
auaauucagucucugcaac

SEQ ID NO: 1655981 - RNA, 19 nt, Artificial Sequence
  Description of Artificial Sequence: Synthetic oligonucleotide
  Sense strand starting at position 3524 of SEQ ID NO: 1561227
gaauuaucuuaugcaggua

SEQ ID NO: 1655982 - RNA, 19 nt, Artificial Sequence
  Description of Artificial Sequence: Synthetic oligonucleotide
  Antisense strand to SEQ ID NO: 1655981
uaccugcauaagauaauuc

SEQ ID NO: 1655983 - RNA, 19 nt, Artificial Sequence
  Description of Artificial Sequence: Synthetic oligonucleotide
  Sense strand starting at position 3564 of SEQ ID NO: 1561227
auacauuaaugggcaauua

SEQ ID NO: 1655984 - RNA, 19 nt, Artificial Sequence
  Description of Artificial Sequence: Synthetic oligonucleotide
  Antisense strand to SEQ ID NO: 1655983
uaauugcccauuaauguau

SEQ ID NO: 1655985 - RNA, 19 nt, Artificial Sequence
  Description of Artificial Sequence: Synthetic oligonucleotide
  Sense strand starting at position 3590 of SEQ ID NO: 1561227
guguuucuuaucguccauu

SEQ ID NO: 1655986 - RNA, 19 nt, Artificial Sequence
  Description of Artificial Sequence: Synthetic oligonucleotide
  Antisense strand to SEQ ID NO: 1655985
aauggacgauaagaaacac

SEQ ID NO: 1655987 - RNA, 19 nt, Artificial Sequence
  Description of Artificial Sequence: Synthetic oligonucleotide
  Sense strand starting at position 3593 of SEQ ID NO: 1561227
uuucuuaucguccauuaga

SEQ ID NO: 1655988 - RNA, 19 nt, Artificial Sequence
  Description of Artificial Sequence: Synthetic oligonucleotide
  Antisense strand to SEQ ID NO: 1655987
ucuaauggacgauaagaaa

SEQ ID NO: 1655989 - RNA, 19 nt, Artificial Sequence
  Description of Artificial Sequence: Synthetic oligonucleotide
  Sense strand starting at position 3603 of SEQ ID NO: 1561227
uccauuagacucugaguca

SEQ ID NO: 1655990 - RNA, 19 nt, Artificial Sequence
  Description of Artificial Sequence: Synthetic oligonucleotide
  Antisense strand to SEQ ID NO: 1655989
ugacucagagucuaaugga

SEQ ID NO: 1655991 - RNA, 19 nt, Artificial Sequence
  Description of Artificial Sequence: Synthetic oligonucleotide
  Sense strand starting at position 3606 of SEQ ID NO: 1561227
auuagacucugagucaugu

SEQ ID NO: 1655992 - RNA, 19 nt, Artificial Sequence
  Description of Artificial Sequence: Synthetic oligonucleotide
  Antisense strand to SEQ ID NO: 1655991
acaugacucagagucuaau

SEQ ID NO: 1655993 - RNA, 19 nt, Artificial Sequence
  Description of Artificial Sequence: Synthetic oligonucleotide
  Sense strand starting at position 3615 of SEQ ID NO: 1561227
ugagucaugugaucaugag

SEQ ID NO: 1655994 - RNA, 19 nt, Artificial Sequence
  Description of Artificial Sequence: Synthetic oligonucleotide
  Antisense strand to SEQ ID NO: 1655993
cucaugaucacaugacuca

SEQ ID NO: 1655995 - RNA, 19 nt, Artificial Sequence
  Description of Artificial Sequence: Synthetic oligonucleotide
  Sense strand starting at position 3616 of SEQ ID NO: 1561227
gagucaugugaucaugagu

SEQ ID NO: 1655996 - RNA, 19 nt, Artificial Sequence
  Description of Artificial Sequence: Synthetic oligonucleotide
  Antisense strand to SEQ ID NO: 1655995
acucaugaucacaugacuc

SEQ ID NO: 1655997 - RNA, 19 nt, Artificial Sequence
  Description of Artificial Sequence: Synthetic oligonucleotide
  Sense strand starting at position 3656 of SEQ ID NO: 1561227
cauauauaguuguugaaug

SEQ ID NO: 1655998 - RNA, 19 nt, Artificial Sequence
  Description of Artificial Sequence: Synthetic oligonucleotide
  Antisense strand to SEQ ID NO: 1655997
cauucaacaacuauauaug

SEQ ID NO: 1655999 - RNA, 19 nt, Artificial Sequence
  Description of Artificial Sequence: Synthetic oligonucleotide
  Sense strand starting at position 3682 of SEQ ID NO: 1561227
gugugagugaauggcauua

SEQ ID NO: 1656000 - RNA, 19 nt, Artificial Sequence
  Description of Artificial Sequence: Synthetic oligonucleotide
  Antisense strand to SEQ ID NO: 1655999
uaaugccauucacucacac

SEQ ID NO: 1656001 - RNA, 19 nt, Artificial Sequence
  Description of Artificial Sequence: Synthetic oligonucleotide
  Sense strand starting at position 3687 of SEQ ID NO: 1561227
agugaauggcauuaugcau

SEQ ID NO: 1656002 - RNA, 19 nt, Artificial Sequence
  Description of Artificial Sequence: Synthetic oligonucleotide
  Antisense strand to SEQ ID NO: 1656001
augcauaaugccauucacu

SEQ ID NO: 1656003 - RNA, 19 nt, Artificial Sequence
  Description of Artificial Sequence: Synthetic oligonucleotide
  Sense strand starting at position 3694 of SEQ ID NO: 1561227
ggcauuaugcauuacuacu

SEQ ID NO: 1656004 - RNA, 19 nt, Artificial Sequence
  Description of Artificial Sequence: Synthetic oligonucleotide
  Antisense strand to SEQ ID NO: 1656003
aguaguaaugcauaaugcc

SEQ ID NO: 1656005 - RNA, 19 nt, Artificial Sequence
  Description of Artificial Sequence: Synthetic oligonucleotide
  Sense strand starting at position 3814 of SEQ ID NO: 1561227
gcaggucacaugugacaga

SEQ ID NO: 1656006 - RNA, 19 nt, Artificial Sequence
  Description of Artificial Sequence: Synthetic oligonucleotide
  Antisense strand to SEQ ID NO: 1656005
ucugucacaugugaccugc

SEQ ID NO: 1656007 - RNA, 19 nt, Artificial Sequence
  Description of Artificial Sequence: Synthetic oligonucleotide
  Sense strand starting at position 3918 of SEQ ID NO: 1561227
gagugaguuucucccuuau

SEQ ID NO: 1656008 - RNA, 19 nt, Artificial Sequence
  Description of Artificial Sequence: Synthetic oligonucleotide
  Antisense strand to SEQ ID NO: 1656007
auaagggagaaacucacuc

SEQ ID NO: 1656009 - RNA, 19 nt, Artificial Sequence
  Description of Artificial Sequence: Synthetic oligonucleotide
  Sense strand starting at position 14 of SEQ ID NO: 1561228
auaugugaguguguaauga

SEQ ID NO: 1656010 - RNA, 19 nt, Artificial Sequence
  Description of Artificial Sequence: Synthetic oligonucleotide
  Antisense strand to SEQ ID NO: 1656009
ucauuacacacucacauau

SEQ ID NO: 1656011 - RNA, 19 nt, Artificial Sequence
  Description of Artificial Sequence: Synthetic oligonucleotide
  Sense strand starting at position 16 of SEQ ID NO: 1561228
augugaguguguaaugaga

SEQ ID NO: 1656012 - RNA, 19 nt, Artificial Sequence
  Description of Artificial Sequence: Synthetic oligonucleotide
  Antisense strand to SEQ ID NO: 1656011
ucucauuacacacucacau

SEQ ID NO: 1656013 - RNA, 19 nt, Artificial Sequence
  Description of Artificial Sequence: Synthetic oligonucleotide
  Sense strand starting at position 163 of SEQ ID NO: 1561228
cugagugugccugugcaua

SEQ ID NO: 1656014 - RNA, 19 nt, Artificial Sequence
  Description of Artificial Sequence: Synthetic oligonucleotide
  Antisense strand to SEQ ID NO: 1656013
uaugcacaggcacacucag

SEQ ID NO: 1656015 - RNA, 19 nt, Artificial Sequence
  Description of Artificial Sequence: Synthetic oligonucleotide
  Sense strand starting at position 221 of SEQ ID NO: 1561228
cugggugugccugugcaua

SEQ ID NO: 1656016 - RNA, 19 nt, Artificial Sequence
  Description of Artificial Sequence: Synthetic oligonucleotide
  Antisense strand to SEQ ID NO: 1656015
uaugcacaggcacacccag

SEQ ID NO: 1656017 - RNA, 19 nt, Artificial Sequence
  Description of Artificial Sequence: Synthetic oligonucleotide
  Sense strand starting at position 245 of SEQ ID NO: 1561228
gugcaugugaguguguaau

SEQ ID NO: 1656018 - RNA, 19 nt, Artificial Sequence
  Description of Artificial Sequence: Synthetic oligonucleotide
  Antisense strand to SEQ ID NO: 1656017
auuacacacucacaugcac

SEQ ID NO: 1656019 - RNA, 19 nt, Artificial Sequence
  Description of Artificial Sequence: Synthetic oligonucleotide
  Sense strand starting at position 550 of SEQ ID NO: 1561228
gggaggucuccgggccaga

SEQ ID NO: 1656020 - RNA, 19 nt, Artificial Sequence
  Description of Artificial Sequence: Synthetic oligonucleotide
  Antisense strand to SEQ ID NO: 1656019
ucuggcccggagaccuccc

SEQ ID NO: 1656021 - RNA, 19 nt, Artificial Sequence
  Description of Artificial Sequence: Synthetic oligonucleotide
  Sense strand starting at position 953 of SEQ ID NO: 1561228
cucauuaaucucgaaguca

SEQ ID NO: 1656022 - RNA, 19 nt, Artificial Sequence
  Description of Artificial Sequence: Synthetic oligonucleotide
  Antisense strand to SEQ ID NO: 1656021
ugacuucgagauuaaugag

SEQ ID NO: 1656023 - RNA, 19 nt, Artificial Sequence
  Description of Artificial Sequence: Synthetic oligonucleotide
  Sense strand starting at position 1001 of SEQ ID NO: 1561228
agcucuuucgcccauugga

SEQ ID NO: 1656024 - RNA, 19 nt, Artificial Sequence
  Description of Artificial Sequence: Synthetic oligonucleotide
  Antisense strand to SEQ ID NO: 1656023
uccaaugggcgaaagagcu

SEQ ID NO: 1656025 - RNA, 19 nt, Artificial Sequence
  Description of Artificial Sequence: Synthetic oligonucleotide
  Sense strand starting at position 1342 of SEQ ID NO: 1561228
ccaccuuaucugggacaua

SEQ ID NO: 1656026 - RNA, 19 nt, Artificial Sequence
  Description of Artificial Sequence: Synthetic oligonucleotide
  Antisense strand to SEQ ID NO: 1656025
uaugucccagauaaggugg

SEQ ID NO: 1656027 - RNA, 19 nt, Artificial Sequence
  Description of Artificial Sequence: Synthetic oligonucleotide
  Sense strand starting at position 1457 of SEQ ID NO: 1561228
guaucagacacccgggaau

SEQ ID NO: 1656028 - RNA, 19 nt, Artificial Sequence
  Description of Artificial Sequence: Synthetic oligonucleotide
  Antisense strand to SEQ ID NO: 1656027
auucccgggugucugauac

SEQ ID NO: 1656029 - RNA, 19 nt, Artificial Sequence
  Description of Artificial Sequence: Synthetic oligonucleotide
  Sense strand starting at position 1662 of SEQ ID NO: 1561228
ucaggaaaucugugaccca

SEQ ID NO: 1656030 - RNA, 19 nt, Artificial Sequence
  Description of Artificial Sequence: Synthetic oligonucleotide
  Antisense strand to SEQ ID NO: 1656029
ugggucacagauuuccuga

SEQ ID NO: 1656031 - RNA, 19 nt, Artificial Sequence
  Description of Artificial Sequence: Synthetic oligonucleotide
  Sense strand starting at position 2308 of SEQ ID NO: 1561228
gguugcuaguaaguacaga

SEQ ID NO: 1656032 - RNA, 19 nt, Artificial Sequence
  Description of Artificial Sequence: Synthetic oligonucleotide
  Antisense strand to SEQ ID NO: 1656031
ucuguacuuacuagcaacc

SEQ ID NO: 1656033 - RNA, 19 nt, Artificial Sequence
  Description of Artificial Sequence: Synthetic oligonucleotide
  Sense strand starting at position 2342 of SEQ ID NO: 1561228
cggccaauuccauggauaa

SEQ ID NO: 1656034 - RNA, 19 nt, Artificial Sequence
  Description of Artificial Sequence: Synthetic oligonucleotide
  Antisense strand to SEQ ID NO: 1656033
uuauccauggaauuggccg

SEQ ID NO: 1656035 - RNA, 19 nt, Artificial Sequence
  Description of Artificial Sequence: Synthetic oligonucleotide
  Sense strand starting at position 2343 of SEQ ID NO: 1561228
ggccaauuccauggauaag

SEQ ID NO: 1656036 - RNA, 19 nt, Artificial Sequence
  Description of Artificial Sequence: Synthetic oligonucleotide
  Antisense strand to SEQ ID NO: 1656035
cuuauccauggaauuggcc

SEQ ID NO: 1656037 - RNA, 19 nt, Artificial Sequence
  Description of Artificial Sequence: Synthetic oligonucleotide
  Sense strand starting at position 2358 of SEQ ID NO: 1561228
uaagaaguccucuguguac

SEQ ID NO: 1656038 - RNA, 19 nt, Artificial Sequence
  Description of Artificial Sequence: Synthetic oligonucleotide
  Antisense strand to SEQ ID NO: 1656037
guacacagaggacuucuua

SEQ ID NO: 1656039 - RNA, 19 nt, Artificial Sequence
  Description of Artificial Sequence: Synthetic oligonucleotide
  Sense strand starting at position 2361 of SEQ ID NO: 1561228
gaaguccucuguguacgaa

SEQ ID NO: 1656040 - RNA, 19 nt, Artificial Sequence
  Description of Artificial Sequence: Synthetic oligonucleotide
  Antisense strand to SEQ ID NO: 1656039
uucguacacagaggacuuc

SEQ ID NO: 1656041 - RNA, 19 nt, Artificial Sequence
  Description of Artificial Sequence: Synthetic oligonucleotide
  Sense strand starting at position 2362 of SEQ ID NO: 1561228
aaguccucuguguacgaaa

SEQ ID NO: 1656042 - RNA, 19 nt, Artificial Sequence
  Description of Artificial Sequence: Synthetic oligonucleotide
  Antisense strand to SEQ ID NO: 1656041
uuucguacacagaggacuu

SEQ ID NO: 1656043 - RNA, 19 nt, Artificial Sequence
  Description of Artificial Sequence: Synthetic oligonucleotide
  Sense strand starting at position 2399 of SEQ ID NO: 1561228
gaugcccguauuuguguaa

SEQ ID NO: 1656044 - RNA, 19 nt, Artificial Sequence
  Description of Artificial Sequence: Synthetic oligonucleotide
  Antisense strand to SEQ ID NO: 1656043
uuacacaaauacgggcauc

SEQ ID NO: 1656045 - RNA, 19 nt, Artificial Sequence
  Description of Artificial Sequence: Synthetic oligonucleotide
  Sense strand starting at position 2400 of SEQ ID NO: 1561228
augcccguauuuguguaaa

SEQ ID NO: 1656046 - RNA, 19 nt, Artificial Sequence
  Description of Artificial Sequence: Synthetic oligonucleotide
  Antisense strand to SEQ ID NO: 1656045
uuuacacaaauacgggcau

SEQ ID NO: 1656047 - RNA, 19 nt, Artificial Sequence
  Description of Artificial Sequence: Synthetic oligonucleotide
  Sense strand starting at position 2489 of SEQ ID NO: 1561228
gaggcuacuccagaaugua

SEQ ID NO: 1656048 - RNA, 19 nt, Artificial Sequence
  Description of Artificial Sequence: Synthetic oligonucleotide
  Antisense strand to SEQ ID NO: 1656047
uacauucuggaguagccuc

SEQ ID NO: 1656049 - RNA, 19 nt, Artificial Sequence
  Description of Artificial Sequence: Synthetic oligonucleotide
  Sense strand starting at position 2568 of SEQ ID NO: 1561228
gcauaaggacccuggucau

SEQ ID NO: 1656050 - RNA, 19 nt, Artificial Sequence
  Description of Artificial Sequence: Synthetic oligonucleotide
  Antisense strand to SEQ ID NO: 1656049
augaccaggguccuuaugc

SEQ ID NO: 1656051 - RNA, 19 nt, Artificial Sequence
  Description of Artificial Sequence: Synthetic oligonucleotide
  Sense strand starting at position 2571 of SEQ ID NO: 1561228
uaaggacccuggucaucua

SEQ ID NO: 1656052 - RNA, 19 nt, Artificial Sequence
  Description of Artificial Sequence: Synthetic oligonucleotide
  Antisense strand to SEQ ID NO: 1656051
uagaugaccaggguccuua

SEQ ID NO: 1656053 - RNA, 19 nt, Artificial Sequence
  Description of Artificial Sequence: Synthetic oligonucleotide
  Sense strand starting at position 2574 of SEQ ID NO: 1561228
ggacccuggucaucuauau

SEQ ID NO: 1656054 - RNA, 19 nt, Artificial Sequence
  Description of Artificial Sequence: Synthetic oligonucleotide
  Antisense strand to SEQ ID NO: 1656053
auauagaugaccagggucc

SEQ ID NO: 1656055 - RNA, 19 nt, Artificial Sequence
  Description of Artificial Sequence: Synthetic oligonucleotide
  Sense strand starting at position 2610 of SEQ ID NO: 1561228
uguaaacugacucgggauu

SEQ ID NO: 1656056 - RNA, 19 nt, Artificial Sequence
  Description of Artificial Sequence: Synthetic oligonucleotide
  Antisense strand to SEQ ID NO: 1656055
aaucccgagucaguuuaca

SEQ ID NO: 1656057 - RNA, 19 nt, Artificial Sequence
  Description of Artificial Sequence: Synthetic oligonucleotide
  Sense strand starting at position 2611 of SEQ ID NO: 1561228
guaaacugacucgggauua

SEQ ID NO: 1656058 - RNA, 19 nt, Artificial Sequence
  Description of Artificial Sequence: Synthetic oligonucleotide
  Antisense strand to SEQ ID NO: 1656057
uaaucccgagucaguuuac

SEQ ID NO: 1656059 - RNA, 19 nt, Artificial Sequence
  Description of Artificial Sequence: Synthetic oligonucleotide
  Sense strand starting at position 2623 of SEQ ID NO: 1561228
gggauuacuucgguguaua

SEQ ID NO: 1656060 - RNA, 19 nt, Artificial Sequence
  Description of Artificial Sequence: Synthetic oligonucleotide
  Antisense strand to SEQ ID NO: 1656059
uauacaccgaaguaauccc

SEQ ID NO: 1656061 - RNA, 19 nt, Artificial Sequence
  Description of Artificial Sequence: Synthetic oligonucleotide
  Sense strand starting at position 2624 of SEQ ID NO: 1561228
ggauuacuucgguguauac

SEQ ID NO: 1656062 - RNA, 19 nt, Artificial Sequence
  Description of Artificial Sequence: Synthetic oligonucleotide
  Antisense strand to SEQ ID NO: 1656061
guauacaccgaaguaaucc

SEQ ID NO: 1656063 - RNA, 19 nt, Artificial Sequence
  Description of Artificial Sequence: Synthetic oligonucleotide
  Sense strand starting at position 2626 of SEQ ID NO: 1561228
auuacuucgguguauacaa

SEQ ID NO: 1656064 - RNA, 19 nt, Artificial Sequence
  Description of Artificial Sequence: Synthetic oligonucleotide
  Antisense strand to SEQ ID NO: 1656063
uuguauacaccgaaguaau

SEQ ID NO: 1656065 - RNA, 19 nt, Artificial Sequence
  Description of Artificial Sequence: Synthetic oligonucleotide
  Sense strand starting at position 2705 of SEQ ID NO: 1561228
uguuacaucucacuggaau

SEQ ID NO: 1656066 - RNA, 19 nt, Artificial Sequence
  Description of Artificial Sequence: Synthetic oligonucleotide
  Antisense strand to SEQ ID NO: 1656065
auuccagugagauguaaca

SEQ ID NO: 1656067 - RNA, 19 nt, Artificial Sequence
  Description of Artificial Sequence: Synthetic oligonucleotide
  Sense strand starting at position 2706 of SEQ ID NO: 1561228
guuacaucucacuggaauc

SEQ ID NO: 1656068 - RNA, 19 nt, Artificial Sequence
  Description of Artificial Sequence: Synthetic oligonucleotide
  Antisense strand to SEQ ID NO: 1656067
gauuccagugagauguaac

SEQ ID NO: 1656069 - RNA, 19 nt, Artificial Sequence
  Description of Artificial Sequence: Synthetic oligonucleotide
  Sense strand starting at position 2796 of SEQ ID NO: 1561228
ccagacugucacuauugca

SEQ ID NO: 1656070 - RNA, 19 nt, Artificial Sequence
  Description of Artificial Sequence: Synthetic oligonucleotide
  Antisense strand to SEQ ID NO: 1656069
ugcaauagugacagucugg

SEQ ID NO: 1656071 - RNA, 19 nt, Artificial Sequence
  Description of Artificial Sequence: Synthetic oligonucleotide
  Sense strand starting at position 2871 of SEQ ID NO: 1561228
gggugagacuuugccaucu

SEQ ID NO: 1656072 - RNA, 19 nt, Artificial Sequence
  Description of Artificial Sequence: Synthetic oligonucleotide
  Antisense strand to SEQ ID NO: 1656071
agauggcaaagucucaccc

SEQ ID NO: 1656073 - RNA, 19 nt, Artificial Sequence
  Description of Artificial Sequence: Synthetic oligonucleotide
  Sense strand starting at position 2942 of SEQ ID NO: 1561228
ggagauuaguucuccacuu

SEQ ID NO: 1656074 - RNA, 19 nt, Artificial Sequence
  Description of Artificial Sequence: Synthetic oligonucleotide
  Antisense strand to SEQ ID NO: 1656073
aaguggagaacuaaucucc

SEQ ID NO: 1656075 - RNA, 19 nt, Artificial Sequence
  Description of Artificial Sequence: Synthetic oligonucleotide
  Sense strand starting at position 3057 of SEQ ID NO: 1561228
ggugauuauguuggugaua

SEQ ID NO: 1656076 - RNA, 19 nt, Artificial Sequence
  Description of Artificial Sequence: Synthetic oligonucleotide
  Antisense strand to SEQ ID NO: 1656075
uaucaccaacauaaucacc

SEQ ID NO: 1656077 - RNA, 19 nt, Artificial Sequence
  Description of Artificial Sequence: Synthetic oligonucleotide
  Sense strand starting at position 3058 of SEQ ID NO: 1561228
gugauuauguuggugauau

SEQ ID NO: 1656078 - RNA, 19 nt, Artificial Sequence
  Description of Artificial Sequence: Synthetic oligonucleotide
  Antisense strand to SEQ ID NO: 1656077
auaucaccaacauaaucac

SEQ ID NO: 1656079 - RNA, 19 nt, Artificial Sequence
  Description of Artificial Sequence: Synthetic oligonucleotide
  Sense strand starting at position 3060 of SEQ ID NO: 1561228
gauuauguuggugauauga

SEQ ID NO: 1656080 - RNA, 19 nt, Artificial Sequence
  Description of Artificial Sequence: Synthetic oligonucleotide
  Antisense strand to SEQ ID NO: 1656079
ucauaucaccaacauaauc

SEQ ID NO: 1656081 - RNA, 19 nt, Artificial Sequence
  Description of Artificial Sequence: Synthetic oligonucleotide
  Sense strand starting at position 3168 of SEQ ID NO: 1561228
agacaugauuauguugaca

SEQ ID NO: 1656082 - RNA, 19 nt, Artificial Sequence
  Description of Artificial Sequence: Synthetic oligonucleotide
  Antisense strand to SEQ ID NO: 1656081
ugucaacauaaucaugucu

SEQ ID NO: 1656083 - RNA, 19 nt, Artificial Sequence
  Description of Artificial Sequence: Synthetic oligonucleotide
  Sense strand starting at position 3171 of SEQ ID NO: 1561228
caugauuauguugacaugu

SEQ ID NO: 1656084 - RNA, 19 nt, Artificial Sequence
  Description of Artificial Sequence: Synthetic oligonucleotide
  Antisense strand to SEQ ID NO: 1656083
acaugucaacauaaucaug

SEQ ID NO: 1656085 - RNA, 19 nt, Artificial Sequence
  Description of Artificial Sequence: Synthetic oligonucleotide
  Sense strand starting at position 3841 of SEQ ID NO: 1561228
caagauuauguugacaugu

SEQ ID NO: 1656086 - RNA, 19 nt, Artificial Sequence
  Description of Artificial Sequence: Synthetic oligonucleotide
  Antisense strand to SEQ ID NO: 1656085
acaugucaacauaaucuug

SEQ ID NO: 1656087 - RNA, 19 nt, Artificial Sequence
  Description of Artificial Sequence: Synthetic oligonucleotide
  Sense strand starting at position 3932 of SEQ ID NO: 1561228
gauagugauauuggugaag

SEQ ID NO: 1656088 - RNA, 19 nt, Artificial Sequence
  Description of Artificial Sequence: Synthetic oligonucleotide
  Antisense strand to SEQ ID NO: 1656087
cuucaccaauaucacuauc

SEQ ID NO: 1656089 - RNA, 19 nt, Artificial Sequence
  Description of Artificial Sequence: Synthetic oligonucleotide
  Sense strand starting at position 54 of SEQ ID NO: 1561229
gggagcuccggcuguuuga

SEQ ID NO: 1656090 - RNA, 19 nt, Artificial Sequence
  Description of Artificial Sequence: Synthetic oligonucleotide
  Antisense strand to SEQ ID NO: 1656089
ucaaacagccggagcuccc

SEQ ID NO: 1656091 - RNA, 19 nt, Artificial Sequence
  Description of Artificial Sequence: Synthetic oligonucleotide
  Sense strand starting at position 67 of SEQ ID NO: 1561229
guuugauucuuaccuggau

SEQ ID NO: 1656092 - RNA, 19 nt, Artificial Sequence
  Description of Artificial Sequence: Synthetic oligonucleotide
  Antisense strand to SEQ ID NO: 1656091
auccagguaagaaucaaac

SEQ ID NO: 1656093 - RNA, 19 nt, Artificial Sequence
  Description of Artificial Sequence: Synthetic oligonucleotide
  Sense strand starting at position 121 of SEQ ID NO: 1561229
gugcucacuguuuguugaa

SEQ ID NO: 1656094 - RNA, 19 nt, Artificial Sequence
  Description of Artificial Sequence: Synthetic oligonucleotide
  Antisense strand to SEQ ID NO: 1656093
uucaacaaacagugagcac

SEQ ID NO: 1656095 - RNA, 19 nt, Artificial Sequence
  Description of Artificial Sequence: Synthetic oligonucleotide
  Sense strand starting at position 122 of SEQ ID NO: 1561229
ugcucacuguuuguugaau

SEQ ID NO: 1656096 - RNA, 19 nt, Artificial Sequence
  Description of Artificial Sequence: Synthetic oligonucleotide
  Antisense strand to SEQ ID NO: 1656095
auucaacaaacagugagca

SEQ ID NO: 1656097 - RNA, 19 nt, Artificial Sequence
  Description of Artificial Sequence: Synthetic oligonucleotide
  Sense strand starting at position 128 of SEQ ID NO: 1561229
cuguuuguugaaugcauga

SEQ ID NO: 1656098 - RNA, 19 nt, Artificial Sequence
  Description of Artificial Sequence: Synthetic oligonucleotide
  Antisense strand to SEQ ID NO: 1656097
ucaugcauucaacaaacag

SEQ ID NO: 1656099 - RNA, 19 nt, Artificial Sequence
  Description of Artificial Sequence: Synthetic oligonucleotide
  Sense strand starting at position 151 of SEQ ID NO: 1561229
gcagaauugggaugugcac

SEQ ID NO: 1656100 - RNA, 19 nt, Artificial Sequence
  Description of Artificial Sequence: Synthetic oligonucleotide
  Antisense strand to SEQ ID NO: 1656099
gugcacaucccaauucugc

SEQ ID NO: 1656101 - RNA, 19 nt, Artificial Sequence
  Description of Artificial Sequence: Synthetic oligonucleotide
  Sense strand starting at position 187 of SEQ ID NO: 1561229
gguucagaccguugaauua

SEQ ID NO: 1656102 - RNA, 19 nt, Artificial Sequence
  Description of Artificial Sequence: Synthetic oligonucleotide
  Antisense strand to SEQ ID NO: 1656101
uaauucaacggucugaacc

SEQ ID NO: 1656103 - RNA, 19 nt, Artificial Sequence
  Description of Artificial Sequence: Synthetic oligonucleotide
  Sense strand starting at position 223 of SEQ ID NO: 1561229
ggaagacuucccugaaucc

SEQ ID NO: 1656104 - RNA, 19 nt, Artificial Sequence
  Description of Artificial Sequence: Synthetic oligonucleotide
  Antisense strand to SEQ ID NO: 1656103
ggauucagggaagucuucc

SEQ ID NO: 1656105 - RNA, 19 nt, Artificial Sequence
  Description of Artificial Sequence: Synthetic oligonucleotide
  Sense strand starting at position 381 of SEQ ID NO: 1561229
ugguguuagcaggaauaag

SEQ ID NO: 1656106 - RNA, 19 nt, Artificial Sequence
  Description of Artificial Sequence: Synthetic oligonucleotide
  Antisense strand to SEQ ID NO: 1656105
cuuauuccugcuaacacca

SEQ ID NO: 1656107 - RNA, 19 nt, Artificial Sequence
  Description of Artificial Sequence: Synthetic oligonucleotide
  Sense strand starting at position 448 of SEQ ID NO: 1561229
aguuguccggccgaaagau

SEQ ID NO: 1656108 - RNA, 19 nt, Artificial Sequence
  Description of Artificial Sequence: Synthetic oligonucleotide
  Antisense strand to SEQ ID NO: 1656107
aucuuucggccggacaacu

SEQ ID NO: 1656109 - RNA, 19 nt, Artificial Sequence
  Description of Artificial Sequence: Synthetic oligonucleotide
  Sense strand starting at position 456 of SEQ ID NO: 1561229
ggccgaaagaucugaccga

SEQ ID NO: 1656110 - RNA, 19 nt, Artificial Sequence
  Description of Artificial Sequence: Synthetic oligonucleotide
  Antisense strand to SEQ ID NO: 1656109
ucggucagaucuuucggcc

SEQ ID NO: 1656111 - RNA, 19 nt, Artificial Sequence
  Description of Artificial Sequence: Synthetic oligonucleotide
  Sense strand starting at position 574 of SEQ ID NO: 1561229
guucgaugcgugccaggaa

SEQ ID NO: 1656112 - RNA, 19 nt, Artificial Sequence
  Description of Artificial Sequence: Synthetic oligonucleotide
  Antisense strand to SEQ ID NO: 1656111
uuccuggcacgcaucgaac

SEQ ID NO: 1656113 - RNA, 19 nt, Artificial Sequence
  Description of Artificial Sequence: Synthetic oligonucleotide
  Sense strand starting at position 744 of SEQ ID NO: 1561229
augccauguucgucacuga

SEQ ID NO: 1656114 - RNA, 19 nt, Artificial Sequence
  Description of Artificial Sequence: Synthetic oligonucleotide
  Antisense strand to SEQ ID NO: 1656113
ucagugacgaacauggcau

SEQ ID NO: 1656115 - RNA, 19 nt, Artificial Sequence
  Description of Artificial Sequence: Synthetic oligonucleotide
  Sense strand starting at position 745 of SEQ ID NO: 1561229
ugccauguucgucacugau

SEQ ID NO: 1656116 - RNA, 19 nt, Artificial Sequence
  Description of Artificial Sequence: Synthetic oligonucleotide
  Antisense strand to SEQ ID NO: 1656115
aucagugacgaacauggca

SEQ ID NO: 1656117 - RNA, 19 nt, Artificial Sequence
  Description of Artificial Sequence: Synthetic oligonucleotide
  Sense strand starting at position 747 of SEQ ID NO: 1561229
ccauguucgucacugauaa

SEQ ID NO: 1656118 - RNA, 19 nt, Artificial Sequence
  Description of Artificial Sequence: Synthetic oligonucleotide
  Antisense strand to SEQ ID NO: 1656117
uuaucagugacgaacaugg

SEQ ID NO: 1656119 - RNA, 19 nt, Artificial Sequence
  Description of Artificial Sequence: Synthetic oligonucleotide
  Sense strand starting at position 748 of SEQ ID NO: 1561229
cauguucgucacugauaac

SEQ ID NO: 1656120 - RNA, 19 nt, Artificial Sequence
  Description of Artificial Sequence: Synthetic oligonucleotide
  Antisense strand to SEQ ID NO: 1656119
guuaucagugacgaacaug

SEQ ID NO: 1656121 - RNA, 19 nt, Artificial Sequence
  Description of Artificial Sequence: Synthetic oligonucleotide
  Sense strand starting at position 781 of SEQ ID NO: 1561229
gagagagguggucggaaga

SEQ ID NO: 1656122 - RNA, 19 nt, Artificial Sequence
  Description of Artificial Sequence: Synthetic oligonucleotide
  Antisense strand to SEQ ID NO: 1656121
ucuuccgaccaccucucuc

SEQ ID NO: 1656123 - RNA, 19 nt, Artificial Sequence
  Description of Artificial Sequence: Synthetic oligonucleotide
  Sense strand starting at position 1730 of SEQ ID NO: 1561229
cagaaauugggcggaggaa

SEQ ID NO: 1656124 - RNA, 19 nt, Artificial Sequence
  Description of Artificial Sequence: Synthetic oligonucleotide
  Antisense strand to SEQ ID NO: 1656123
uuccuccgcccaauuucug

SEQ ID NO: 1656125 - RNA, 19 nt, Artificial Sequence
  Description of Artificial Sequence: Synthetic oligonucleotide
  Sense strand starting at position 1871 of SEQ ID NO: 1561229
agaccucauucgccagaau

SEQ ID NO: 1656126 - RNA, 19 nt, Artificial Sequence
  Description of Artificial Sequence: Synthetic oligonucleotide
  Antisense strand to SEQ ID NO: 1656125
auucuggcgaaugaggucu

SEQ ID NO: 1656127 - RNA, 19 nt, Artificial Sequence
  Description of Artificial Sequence: Synthetic oligonucleotide
  Sense strand starting at position 1874 of SEQ ID NO: 1561229
ccucauucgccagaauccu

SEQ ID NO: 1656128 - RNA, 19 nt, Artificial Sequence
  Description of Artificial Sequence: Synthetic oligonucleotide
  Antisense strand to SEQ ID NO: 1656127
aggauucuggcgaaugagg

SEQ ID NO: 1656129 - RNA, 19 nt, Artificial Sequence
  Description of Artificial Sequence: Synthetic oligonucleotide
  Sense strand starting at position 1880 of SEQ ID NO: 1561229
ucgccagaauccuugcagu

SEQ ID NO: 1656130 - RNA, 19 nt, Artificial Sequence
  Description of Artificial Sequence: Synthetic oligonucleotide
  Antisense strand to SEQ ID NO: 1656129
acugcaaggauucuggcga

SEQ ID NO: 1656131 - RNA, 19 nt, Artificial Sequence
  Description of Artificial Sequence: Synthetic oligonucleotide
  Sense strand starting at position 1985 of SEQ ID NO: 1561229
ccugaagcugcauaguaaa

SEQ ID NO: 1656132 - RNA, 19 nt, Artificial Sequence
  Description of Artificial Sequence: Synthetic oligonucleotide
  Antisense strand to SEQ ID NO: 1656131
uuuacuaugcagcuucagg

SEQ ID NO: 1656133 - RNA, 19 nt, Artificial Sequence
  Description of Artificial Sequence: Synthetic oligonucleotide
  Sense strand starting at position 2017 of SEQ ID NO: 1561229
ucccaugauugggugcaga

SEQ ID NO: 1656134 - RNA, 19 nt, Artificial Sequence
  Description of Artificial Sequence: Synthetic oligonucleotide
  Antisense strand to SEQ ID NO: 1656133
ucugcacccaaucauggga

SEQ ID NO: 1656135 - RNA, 19 nt, Artificial Sequence
  Description of Artificial Sequence: Synthetic oligonucleotide
  Sense strand starting at position 2129 of SEQ ID NO: 1561229
guaagacagcuggguucau

SEQ ID NO: 1656136 - RNA, 19 nt, Artificial Sequence
  Description of Artificial Sequence: Synthetic oligonucleotide
  Antisense strand to SEQ ID NO: 1656135
augaacccagcugucuuac

SEQ ID NO: 1656137 - RNA, 19 nt, Artificial Sequence
  Description of Artificial Sequence: Synthetic oligonucleotide
  Sense strand starting at position 2203 of SEQ ID NO: 1561229
ccuccucuccaguauugua

SEQ ID NO: 1656138 - RNA, 19 nt, Artificial Sequence
  Description of Artificial Sequence: Synthetic oligonucleotide
  Antisense strand to SEQ ID NO: 1656137
uacaauacuggagaggagg

SEQ ID NO: 1656139 - RNA, 19 nt, Artificial Sequence
  Description of Artificial Sequence: Synthetic oligonucleotide
  Sense strand starting at position 2839 of SEQ ID NO: 1561229
cgcccagcucaguauuaua

SEQ ID NO: 1656140 - RNA, 19 nt, Artificial Sequence
  Description of Artificial Sequence: Synthetic oligonucleotide
  Antisense strand to SEQ ID NO: 1656139
uauaauacugagcugggcg

SEQ ID NO: 1656141 - RNA, 19 nt, Artificial Sequence
  Description of Artificial Sequence: Synthetic oligonucleotide
  Sense strand starting at position 2885 of SEQ ID NO: 1561229
cugcauuuccuguagcauu

SEQ ID NO: 1656142 - RNA, 19 nt, Artificial Sequence
  Description of Artificial Sequence: Synthetic oligonucleotide
  Antisense strand to SEQ ID NO: 1656141
aaugcuacaggaaaugcag

SEQ ID NO: 1656143 - RNA, 19 nt, Artificial Sequence
  Description of Artificial Sequence: Synthetic oligonucleotide
  Sense strand starting at position 2895 of SEQ ID NO: 1561229
uguagcauuagguguauga

SEQ ID NO: 1656144 - RNA, 19 nt, Artificial Sequence
  Description of Artificial Sequence: Synthetic oligonucleotide
  Antisense strand to SEQ ID NO: 1656143
ucauacaccuaaugcuaca

SEQ ID NO: 1656145 - RNA, 19 nt, Artificial Sequence
  Description of Artificial Sequence: Synthetic oligonucleotide
  Sense strand starting at position 2899 of SEQ ID NO: 1561229
gcauuagguguaugaccuu

SEQ ID NO: 1656146 - RNA, 19 nt, Artificial Sequence
  Description of Artificial Sequence: Synthetic oligonucleotide
  Antisense strand to SEQ ID NO: 1656145
aaggucauacaccuaaugc

SEQ ID NO: 1656147 - RNA, 19 nt, Artificial Sequence
  Description of Artificial Sequence: Synthetic oligonucleotide
  Sense strand starting at position 2928 of SEQ ID NO: 1561229
uccucucugugucugaauu

SEQ ID NO: 1656148 - RNA, 19 nt, Artificial Sequence
  Description of Artificial Sequence: Synthetic oligonucleotide
  Antisense strand to SEQ ID NO: 1656147
aauucagacacagagagga

SEQ ID NO: 1656149 - RNA, 19 nt, Artificial Sequence
  Description of Artificial Sequence: Synthetic oligonucleotide
  Sense strand starting at position 2982 of SEQ ID NO: 1561229
cccuccagggucugauuau

SEQ ID NO: 1656150 - RNA, 19 nt, Artificial Sequence
  Description of Artificial Sequence: Synthetic oligonucleotide
  Antisense strand to SEQ ID NO: 1656149
auaaucagacccuggaggg

SEQ ID NO: 1656151 - RNA, 19 nt, Artificial Sequence
  Description of Artificial Sequence: Synthetic oligonucleotide
  Sense strand starting at position 2989 of SEQ ID NO: 1561229
gggucugauuaugcgauga

SEQ ID NO: 1656152 - RNA, 19 nt, Artificial Sequence
  Description of Artificial Sequence: Synthetic oligonucleotide
  Antisense strand to SEQ ID NO: 1656151
ucaucgcauaaucagaccc

SEQ ID NO: 1656153 - RNA, 19 nt, Artificial Sequence
  Description of Artificial Sequence: Synthetic oligonucleotide
  Sense strand starting at position 2993 of SEQ ID NO: 1561229
cugauuaugcgaugaccca

SEQ ID NO: 1656154 - RNA, 19 nt, Artificial Sequence
  Description of Artificial Sequence: Synthetic oligonucleotide
  Antisense strand to SEQ ID NO: 1656153
ugggucaucgcauaaucag

SEQ ID NO: 1656155 - RNA, 19 nt, Artificial Sequence
  Description of Artificial Sequence: Synthetic oligonucleotide
  Sense strand starting at position 3057 of SEQ ID NO: 1561229
aauuguaucuuucucgagu

SEQ ID NO: 1656156 - RNA, 19 nt, Artificial Sequence
  Description of Artificial Sequence: Synthetic oligonucleotide
  Antisense strand to SEQ ID NO: 1656155
acucgagaaagauacaauu

SEQ ID NO: 1656157 - RNA, 19 nt, Artificial Sequence
  Description of Artificial Sequence: Synthetic oligonucleotide
  Sense strand starting at position 3058 of SEQ ID NO: 1561229
auuguaucuuucucgaguc

SEQ ID NO: 1656158 - RNA, 19 nt, Artificial Sequence
  Description of Artificial Sequence: Synthetic oligonucleotide
  Antisense strand to SEQ ID NO: 1656157
gacucgagaaagauacaau

SEQ ID NO: 1656159 - RNA, 19 nt, Artificial Sequence
  Description of Artificial Sequence: Synthetic oligonucleotide
  Sense strand starting at position 3060 of SEQ ID NO: 1561229
uguaucuuucucgagucua

SEQ ID NO: 1656160 - RNA, 19 nt, Artificial Sequence
  Description of Artificial Sequence: Synthetic oligonucleotide
  Antisense strand to SEQ ID NO: 1656159
uagacucgagaaagauaca

SEQ ID NO: 1656161 - RNA, 19 nt, Artificial Sequence
  Description of Artificial Sequence: Synthetic oligonucleotide
  Sense strand starting at position 3065 of SEQ ID NO: 1561229
cuuucucgagucuaaguau

SEQ ID NO: 1656162 - RNA, 19 nt, Artificial Sequence
  Description of Artificial Sequence: Synthetic oligonucleotide
  Antisense strand to SEQ ID NO: 1656161
auacuuagacucgagaaag

SEQ ID NO: 1656163 - RNA, 19 nt, Artificial Sequence
  Description of Artificial Sequence: Synthetic oligonucleotide
  Sense strand starting at position 3068 of SEQ ID NO: 1561229
ucucgagucuaaguauuau

SEQ ID NO: 1656164 - RNA, 19 nt, Artificial Sequence
  Description of Artificial Sequence: Synthetic oligonucleotide
  Antisense strand to SEQ ID NO: 1656163
auaauacuuagacucgaga

SEQ ID NO: 1656165 - RNA, 19 nt, Artificial Sequence
  Description of Artificial Sequence: Synthetic oligonucleotide
  Sense strand starting at position 3079 of SEQ ID NO: 1561229
aguauuaucagaggcugga

SEQ ID NO: 1656166 - RNA, 19 nt, Artificial Sequence
  Description of Artificial Sequence: Synthetic oligonucleotide
  Antisense strand to SEQ ID NO: 1656165
uccagccucugauaauacu

SEQ ID NO: 1656167 - RNA, 19 nt, Artificial Sequence
  Description of Artificial Sequence: Synthetic oligonucleotide
  Sense strand starting at position 3230 of SEQ ID NO: 1561229
ugguguauugcugguggga

SEQ ID NO: 1656168 - RNA, 19 nt, Artificial Sequence
  Description of Artificial Sequence: Synthetic oligonucleotide
  Antisense strand to SEQ ID NO: 1656167
ucccaccagcaauacacca

SEQ ID NO: 1656169 - RNA, 19 nt, Artificial Sequence
  Description of Artificial Sequence: Synthetic oligonucleotide
  Sense strand starting at position 241 of SEQ ID NO: 1561230
cuggcagagcuuuacuuau

SEQ ID NO: 1656170 - RNA, 19 nt, Artificial Sequence
  Description of Artificial Sequence: Synthetic oligonucleotide
  Antisense strand to SEQ ID NO: 1656169
auaaguaaagcucugccag

SEQ ID NO: 1656171 - RNA, 19 nt, Artificial Sequence
  Description of Artificial Sequence: Synthetic oligonucleotide
  Sense strand starting at position 243 of SEQ ID NO: 1561230
ggcagagcuuuacuuauuu

SEQ ID NO: 1656172 - RNA, 19 nt, Artificial Sequence
  Description of Artificial Sequence: Synthetic oligonucleotide
  Antisense strand to SEQ ID NO: 1656171
aaauaaguaaagcucugcc

SEQ ID NO: 1656173 - RNA, 19 nt, Artificial Sequence
  Description of Artificial Sequence: Synthetic oligonucleotide
  Sense strand starting at position 318 of SEQ ID NO: 1561230
gggagcuccggcuguuuga

SEQ ID NO: 1656174 - RNA, 19 nt, Artificial Sequence
  Description of Artificial Sequence: Synthetic oligonucleotide
  Antisense strand to SEQ ID NO: 1656173
ucaaacagccggagcuccc

SEQ ID NO: 1656175 - RNA, 19 nt, Artificial Sequence
  Description of Artificial Sequence: Synthetic oligonucleotide
  Sense strand starting at position 331 of SEQ ID NO: 1561230
guuugauucuuaccuggau

SEQ ID NO: 1656176 - RNA, 19 nt, Artificial Sequence
  Description of Artificial Sequence: Synthetic oligonucleotide
  Antisense strand to SEQ ID NO: 1656175
auccagguaagaaucaaac

SEQ ID NO: 1656177 - RNA, 19 nt, Artificial Sequence
  Description of Artificial Sequence: Synthetic oligonucleotide
  Sense strand starting at position 386 of SEQ ID NO: 1561230
ugcucacuguuuguugaau

SEQ ID NO: 1656178 - RNA, 19 nt, Artificial Sequence
  Description of Artificial Sequence: Synthetic oligonucleotide
  Antisense strand to SEQ ID NO: 1656177
auucaacaaacagugagca

SEQ ID NO: 1656179 - RNA, 19 nt, Artificial Sequence
  Description of Artificial Sequence: Synthetic oligonucleotide
  Sense strand starting at position 392 of SEQ ID NO: 1561230
cuguuuguugaaugcauga

SEQ ID NO: 1656180 - RNA, 19 nt, Artificial Sequence
  Description of Artificial Sequence: Synthetic oligonucleotide
  Antisense strand to SEQ ID NO: 1656179
ucaugcauucaacaaacag

SEQ ID NO: 1656181 - RNA, 19 nt, Artificial Sequence
  Description of Artificial Sequence: Synthetic oligonucleotide
  Sense strand starting at position 415 of SEQ ID NO: 1561230
gcagaauugggaugugcac

SEQ ID NO: 1656182 - RNA, 19 nt, Artificial Sequence
  Description of Artificial Sequence: Synthetic oligonucleotide
  Antisense strand to SEQ ID NO: 1656181
gugcacaucccaauucugc

SEQ ID NO: 1656183 - RNA, 19 nt, Artificial Sequence
  Description of Artificial Sequence: Synthetic oligonucleotide
  Sense strand starting at position 451 of SEQ ID NO: 1561230
gguucagaccguugaauua

SEQ ID NO: 1656184 - RNA, 19 nt, Artificial Sequence
  Description of Artificial Sequence: Synthetic oligonucleotide
  Antisense strand to SEQ ID NO: 1656183
uaauucaacggucugaacc

SEQ ID NO: 1656185 - RNA, 19 nt, Artificial Sequence
  Description of Artificial Sequence: Synthetic oligonucleotide
  Sense strand starting at position 487 of SEQ ID NO: 1561230
ggaagacuucccugaaucc

SEQ ID NO: 1656186 - RNA, 19 nt, Artificial Sequence
  Description of Artificial Sequence: Synthetic oligonucleotide
  Antisense strand to SEQ ID NO: 1656185
ggauucagggaagucuucc

SEQ ID NO: 1656187 - RNA, 19 nt, Artificial Sequence
  Description of Artificial Sequence: Synthetic oligonucleotide
  Sense strand starting at position 645 of SEQ ID NO: 1561230
ugguguuagcaggaauaag

SEQ ID NO: 1656188 - RNA, 19 nt, Artificial Sequence
  Description of Artificial Sequence: Synthetic oligonucleotide
  Antisense strand to SEQ ID NO: 1656187
cuuauuccugcuaacacca

SEQ ID NO: 1656189 - RNA, 19 nt, Artificial Sequence
  Description of Artificial Sequence: Synthetic oligonucleotide
  Sense strand starting at position 712 of SEQ ID NO: 1561230
aguuguccggccgaaagau

SEQ ID NO: 1656190 - RNA, 19 nt, Artificial Sequence
  Description of Artificial Sequence: Synthetic oligonucleotide
  Antisense strand to SEQ ID NO: 1656189
aucuuucggccggacaacu

SEQ ID NO: 1656191 - RNA, 19 nt, Artificial Sequence
  Description of Artificial Sequence: Synthetic oligonucleotide
  Sense strand starting at position 720 of SEQ ID NO: 1561230
ggccgaaagaucugaccga

SEQ ID NO: 1656192 - RNA, 19 nt, Artificial Sequence
  Description of Artificial Sequence: Synthetic oligonucleotide
  Antisense strand to SEQ ID NO: 1656191
ucggucagaucuuucggcc

SEQ ID NO: 1656193 - RNA, 19 nt, Artificial Sequence
  Description of Artificial Sequence: Synthetic oligonucleotide
  Sense strand starting at position 838 of SEQ ID NO: 1561230
guucgaugcgugccaggaa

SEQ ID NO: 1656194 - RNA, 19 nt, Artificial Sequence
  Description of Artificial Sequence: Synthetic oligonucleotide
  Antisense strand to SEQ ID NO: 1656193
uuccuggcacgcaucgaac

SEQ ID NO: 1656195 - RNA, 19 nt, Artificial Sequence
  Description of Artificial Sequence: Synthetic oligonucleotide
  Sense strand starting at position 1008 of SEQ ID NO: 1561230
augccauguucgucacuga

SEQ ID NO: 1656196 - RNA, 19 nt, Artificial Sequence
  Description of Artificial Sequence: Synthetic oligonucleotide
  Antisense strand to SEQ ID NO: 1656195
ucagugacgaacauggcau

SEQ ID NO: 1656197 - RNA, 19 nt, Artificial Sequence
  Description of Artificial Sequence: Synthetic oligonucleotide
  Sense strand starting at position 1009 of SEQ ID NO: 1561230
ugccauguucgucacugau

SEQ ID NO: 1656198 - RNA, 19 nt, Artificial Sequence
  Description of Artificial Sequence: Synthetic oligonucleotide
  Antisense strand to SEQ ID NO: 1656197
aucagugacgaacauggca

SEQ ID NO: 1656199 - RNA, 19 nt, Artificial Sequence
  Description of Artificial Sequence: Synthetic oligonucleotide
  Sense strand starting at position 1011 of SEQ ID NO: 1561230
ccauguucgucacugauaa

SEQ ID NO: 1656200 - RNA, 19 nt, Artificial Sequence
  Description of Artificial Sequence: Synthetic oligonucleotide
  Antisense strand to SEQ ID NO: 1656199
uuaucagugacgaacaugg

SEQ ID NO: 1656201 - RNA, 19 nt, Artificial Sequence
  Description of Artificial Sequence: Synthetic oligonucleotide
  Sense strand starting at position 1012 of SEQ ID NO: 1561230
cauguucgucacugauaac

SEQ ID NO: 1656202 - RNA, 19 nt, Artificial Sequence
  Description of Artificial Sequence: Synthetic oligonucleotide
  Antisense strand to SEQ ID NO: 1656201
guuaucagugacgaacaug

SEQ ID NO: 1656203 - RNA, 19 nt, Artificial Sequence
  Description of Artificial Sequence: Synthetic oligonucleotide
  Sense strand starting at position 1045 of SEQ ID NO: 1561230
gagagagguggucggaaga

SEQ ID NO: 1656204 - RNA, 19 nt, Artificial Sequence
  Description of Artificial Sequence: Synthetic oligonucleotide
  Antisense strand to SEQ ID NO: 1656203
ucuuccgaccaccucucuc

SEQ ID NO: 1656205 - RNA, 19 nt, Artificial Sequence
  Description of Artificial Sequence: Synthetic oligonucleotide
  Sense strand starting at position 1994 of SEQ ID NO: 1561230
cagaaauugggcggaggaa

SEQ ID NO: 1656206 - RNA, 19 nt, Artificial Sequence
  Description of Artificial Sequence: Synthetic oligonucleotide
  Antisense strand to SEQ ID NO: 1656205
uuccuccgcccaauuucug

SEQ ID NO: 1656207 - RNA, 19 nt, Artificial Sequence
  Description of Artificial Sequence: Synthetic oligonucleotide
  Sense strand starting at position 2135 of SEQ ID NO: 1561230
agaccucauucgccagaau

SEQ ID NO: 1656208 - RNA, 19 nt, Artificial Sequence
  Description of Artificial Sequence: Synthetic oligonucleotide
  Antisense strand to SEQ ID NO: 1656207
auucuggcgaaugaggucu

SEQ ID NO: 1656209 - RNA, 19 nt, Artificial Sequence
  Description of Artificial Sequence: Synthetic oligonucleotide
  Sense strand starting at position 2138 of SEQ ID NO: 1561230
ccucauucgccagaauccu

SEQ ID NO: 1656210 - RNA, 19 nt, Artificial Sequence
  Description of Artificial Sequence: Synthetic oligonucleotide
  Antisense strand to SEQ ID NO: 1656209
aggauucuggcgaaugagg

SEQ ID NO: 1656211 - RNA, 19 nt, Artificial Sequence
  Description of Artificial Sequence: Synthetic oligonucleotide
  Sense strand starting at position 2249 of SEQ ID NO: 1561230
ccugaagcugcauaguaaa

SEQ ID NO: 1656212 - RNA, 19 nt, Artificial Sequence
  Description of Artificial Sequence: Synthetic oligonucleotide
  Antisense strand to SEQ ID NO: 1656211
uuuacuaugcagcuucagg

SEQ ID NO: 1656213 - RNA, 19 nt, Artificial Sequence
  Description of Artificial Sequence: Synthetic oligonucleotide
  Sense strand starting at position 2281 of SEQ ID NO: 1561230
ucccaugauugggugcaga

SEQ ID NO: 1656214 - RNA, 19 nt, Artificial Sequence
  Description of Artificial Sequence: Synthetic oligonucleotide
  Antisense strand to SEQ ID NO: 1656213
ucugcacccaaucauggga

SEQ ID NO: 1656215 - RNA, 19 nt, Artificial Sequence
  Description of Artificial Sequence: Synthetic oligonucleotide
  Sense strand starting at position 2393 of SEQ ID NO: 1561230
guaagacagcuggguucau

SEQ ID NO: 1656216 - RNA, 19 nt, Artificial Sequence
  Description of Artificial Sequence: Synthetic oligonucleotide
  Antisense strand to SEQ ID NO: 1656215
augaacccagcugucuuac

SEQ ID NO: 1656217 - RNA, 19 nt, Artificial Sequence
  Description of Artificial Sequence: Synthetic oligonucleotide
  Sense strand starting at position 2467 of SEQ ID NO: 1561230
ccuccucuccaguauugua

SEQ ID NO: 1656218 - RNA, 19 nt, Artificial Sequence
  Description of Artificial Sequence: Synthetic oligonucleotide
  Antisense strand to SEQ ID NO: 1656217
uacaauacuggagaggagg

SEQ ID NO: 1656219 - RNA, 19 nt, Artificial Sequence
  Description of Artificial Sequence: Synthetic oligonucleotide
  Sense strand starting at position 3103 of SEQ ID NO: 1561230
cgcccagcucaguauuaua

SEQ ID NO: 1656220 - RNA, 19 nt, Artificial Sequence
  Description of Artificial Sequence: Synthetic oligonucleotide
  Antisense strand to SEQ ID NO: 1656219
uauaauacugagcugggcg

SEQ ID NO: 1656221 - RNA, 19 nt, Artificial Sequence
  Description of Artificial Sequence: Synthetic oligonucleotide
  Sense strand starting at position 3149 of SEQ ID NO: 1561230
cugcauuuccuguagcauu

SEQ ID NO: 1656222 - RNA, 19 nt, Artificial Sequence
  Description of Artificial Sequence: Synthetic oligonucleotide
  Antisense strand to SEQ ID NO: 1656221
aaugcuacaggaaaugcag

SEQ ID NO: 1656223 - RNA, 19 nt, Artificial Sequence
  Description of Artificial Sequence: Synthetic oligonucleotide
  Sense strand starting at position 3159 of SEQ ID NO: 1561230
uguagcauuagguguauga

SEQ ID NO: 1656224 - RNA, 19 nt, Artificial Sequence
  Description of Artificial Sequence: Synthetic oligonucleotide
  Antisense strand to SEQ ID NO: 1656223
ucauacaccuaaugcuaca

SEQ ID NO: 1656225 - RNA, 19 nt, Artificial Sequence
  Description of Artificial Sequence: Synthetic oligonucleotide
  Sense strand starting at position 3163 of SEQ ID NO: 1561230
gcauuagguguaugaccuu

SEQ ID NO: 1656226 - RNA, 19 nt, Artificial Sequence
  Description of Artificial Sequence: Synthetic oligonucleotide
  Antisense strand to SEQ ID NO: 1656225
aaggucauacaccuaaugc

SEQ ID NO: 1656227 - RNA, 19 nt, Artificial Sequence
  Description of Artificial Sequence: Synthetic oligonucleotide
  Sense strand starting at position 3192 of SEQ ID NO: 1561230
uccucucugugucugaauu

SEQ ID NO: 1656228 - RNA, 19 nt, Artificial Sequence
  Description of Artificial Sequence: Synthetic oligonucleotide
  Antisense strand to SEQ ID NO: 1656227
aauucagacacagagagga

SEQ ID NO: 1656229 - RNA, 19 nt, Artificial Sequence
  Description of Artificial Sequence: Synthetic oligonucleotide
  Sense strand starting at position 3246 of SEQ ID NO: 1561230
cccuccagggucugauuau

SEQ ID NO: 1656230 - RNA, 19 nt, Artificial Sequence
  Description of Artificial Sequence: Synthetic oligonucleotide
  Antisense strand to SEQ ID NO: 1656229
auaaucagacccuggaggg

SEQ ID NO: 1656231 - RNA, 19 nt, Artificial Sequence
  Description of Artificial Sequence: Synthetic oligonucleotide
  Sense strand starting at position 3253 of SEQ ID NO: 1561230
gggucugauuaugcgauga

SEQ ID NO: 1656232 - RNA, 19 nt, Artificial Sequence
  Description of Artificial Sequence: Synthetic oligonucleotide
  Antisense strand to SEQ ID NO: 1656231
ucaucgcauaaucagaccc

SEQ ID NO: 1656233 - RNA, 19 nt, Artificial Sequence
  Description of Artificial Sequence: Synthetic oligonucleotide
  Sense strand starting at position 3257 of SEQ ID NO: 1561230
cugauuaugcgaugaccca

SEQ ID NO: 1656234 - RNA, 19 nt, Artificial Sequence
  Description of Artificial Sequence: Synthetic oligonucleotide
  Antisense strand to SEQ ID NO: 1656233
ugggucaucgcauaaucag

SEQ ID NO: 1656235 - RNA, 19 nt, Artificial Sequence
  Description of Artificial Sequence: Synthetic oligonucleotide
  Sense strand starting at position 3321 of SEQ ID NO: 1561230
aauuguaucuuucucgagu

SEQ ID NO: 1656236 - RNA, 19 nt, Artificial Sequence
  Description of Artificial Sequence: Synthetic oligonucleotide
  Antisense strand to SEQ ID NO: 1656235
acucgagaaagauacaauu

SEQ ID NO: 1656237 - RNA, 19 nt, Artificial Sequence
  Description of Artificial Sequence: Synthetic oligonucleotide
  Sense strand starting at position 3322 of SEQ ID NO: 1561230
auuguaucuuucucgaguc

SEQ ID NO: 1656238 - RNA, 19 nt, Artificial Sequence
  Description of Artificial Sequence: Synthetic oligonucleotide
  Antisense strand to SEQ ID NO: 1656237
gacucgagaaagauacaau

SEQ ID NO: 1656239 - RNA, 19 nt, Artificial Sequence
  Description of Artificial Sequence: Synthetic oligonucleotide
  Sense strand starting at position 3324 of SEQ ID NO: 1561230
uguaucuuucucgagucua

SEQ ID NO: 1656240 - RNA, 19 nt, Artificial Sequence
  Description of Artificial Sequence: Synthetic oligonucleotide
  Antisense strand to SEQ ID NO: 1656239
uagacucgagaaagauaca

SEQ ID NO: 1656241 - RNA, 19 nt, Artificial Sequence
  Description of Artificial Sequence: Synthetic oligonucleotide
  Sense strand starting at position 3329 of SEQ ID NO: 1561230
cuuucucgagucuaaguau

SEQ ID NO: 1656242 - RNA, 19 nt, Artificial Sequence
  Description of Artificial Sequence: Synthetic oligonucleotide
  Antisense strand to SEQ ID NO: 1656241
auacuuagacucgagaaag

SEQ ID NO: 1656243 - RNA, 19 nt, Artificial Sequence
  Description of Artificial Sequence: Synthetic oligonucleotide
  Sense strand starting at position 3332 of SEQ ID NO: 1561230
ucucgagucuaaguauuau

SEQ ID NO: 1656244 - RNA, 19 nt, Artificial Sequence
  Description of Artificial Sequence: Synthetic oligonucleotide
  Antisense strand to SEQ ID NO: 1656243
auaauacuuagacucgaga

SEQ ID NO: 1656245 - RNA, 19 nt, Artificial Sequence
  Description of Artificial Sequence: Synthetic oligonucleotide
  Sense strand starting at position 3343 of SEQ ID NO: 1561230
aguauuaucagaggcugga

SEQ ID NO: 1656246 - RNA, 19 nt, Artificial Sequence
  Description of Artificial Sequence: Synthetic oligonucleotide
  Antisense strand to SEQ ID NO: 1656245
uccagccucugauaauacu

SEQ ID NO: 1656247 - RNA, 19 nt, Artificial Sequence
  Description of Artificial Sequence: Synthetic oligonucleotide
  Sense strand starting at position 3494 of SEQ ID NO: 1561230
ugguguauugcugguggga

SEQ ID NO: 1656248 - RNA, 19 nt, Artificial Sequence
  Description of Artificial Sequence: Synthetic oligonucleotide
  Antisense strand to SEQ ID NO: 1656247
ucccaccagcaauacacca

SEQ ID NO: 1656249 - RNA, 19 nt, Artificial Sequence
  Description of Artificial Sequence: Synthetic oligonucleotide
  Sense strand starting at position 59 of SEQ ID NO: 1561231
cuagaagccuuguuccuua

SEQ ID NO: 1656250 - RNA, 19 nt, Artificial Sequence
  Description of Artificial Sequence: Synthetic oligonucleotide
  Antisense strand to SEQ ID NO: 1656249
uaaggaacaaggcuucuag

SEQ ID NO: 1656251 - RNA, 19 nt, Artificial Sequence
  Description of Artificial Sequence: Synthetic oligonucleotide
  Sense strand starting at position 62 of SEQ ID NO: 1561231
gaagccuuguuccuuagaa

SEQ ID NO: 1656252 - RNA, 19 nt, Artificial Sequence
  Description of Artificial Sequence: Synthetic oligonucleotide
  Antisense strand to SEQ ID NO: 1656251
uucuaaggaacaaggcuuc

SEQ ID NO: 1656253 - RNA, 19 nt, Artificial Sequence
  Description of Artificial Sequence: Synthetic oligonucleotide
  Sense strand starting at position 64 of SEQ ID NO: 1561231
agccuuguuccuuagaaau

SEQ ID NO: 1656254 - RNA, 19 nt, Artificial Sequence
  Description of Artificial Sequence: Synthetic oligonucleotide
  Antisense strand to SEQ ID NO: 1656253
auuucuaaggaacaaggcu

SEQ ID NO: 1656255 - RNA, 19 nt, Artificial Sequence
  Description of Artificial Sequence: Synthetic oligonucleotide
  Sense strand starting at position 96 of SEQ ID NO: 1561231
uuguuugcuucuuuagaac

SEQ ID NO: 1656256 - RNA, 19 nt, Artificial Sequence
  Description of Artificial Sequence: Synthetic oligonucleotide
  Antisense strand to SEQ ID NO: 1656255
guucuaaagaagcaaacaa

SEQ ID NO: 1656257 - RNA, 19 nt, Artificial Sequence
  Description of Artificial Sequence: Synthetic oligonucleotide
  Sense strand starting at position 571 of SEQ ID NO: 1561231
aagaguuggaguggugaga

SEQ ID NO: 1656258 - RNA, 19 nt, Artificial Sequence
  Description of Artificial Sequence: Synthetic oligonucleotide
  Antisense strand to SEQ ID NO: 1656257
ucucaccacuccaacucuu

SEQ ID NO: 1656259 - RNA, 19 nt, Artificial Sequence
  Description of Artificial Sequence: Synthetic oligonucleotide
  Sense strand starting at position 584 of SEQ ID NO: 1561231
gugagauuccugggcacaa

SEQ ID NO: 1656260 - RNA, 19 nt, Artificial Sequence
  Description of Artificial Sequence: Synthetic oligonucleotide
  Antisense strand to SEQ ID NO: 1656259
uugugcccaggaaucucac

SEQ ID NO: 1656261 - RNA, 19 nt, Artificial Sequence
  Description of Artificial Sequence: Synthetic oligonucleotide
  Sense strand starting at position 585 of SEQ ID NO: 1561231
ugagauuccugggcacaau

SEQ ID NO: 1656262 - RNA, 19 nt, Artificial Sequence
  Description of Artificial Sequence: Synthetic oligonucleotide
  Antisense strand to SEQ ID NO: 1656261
auugugcccaggaaucuca

SEQ ID NO: 1656263 - RNA, 19 nt, Artificial Sequence
  Description of Artificial Sequence: Synthetic oligonucleotide
  Sense strand starting at position 922 of SEQ ID NO: 1561231
cccagaagucugcacccua

SEQ ID NO: 1656264 - RNA, 19 nt, Artificial Sequence
  Description of Artificial Sequence: Synthetic oligonucleotide
  Antisense strand to SEQ ID NO: 1656263
uagggugcagacuucuggg

SEQ ID NO: 1656265 - RNA, 19 nt, Artificial Sequence
  Description of Artificial Sequence: Synthetic oligonucleotide
  Sense strand starting at position 1009 of SEQ ID NO: 1561231
cugcaaacaugguuaugaa

SEQ ID NO: 1656266 - RNA, 19 nt, Artificial Sequence
  Description of Artificial Sequence: Synthetic oligonucleotide
  Antisense strand to SEQ ID NO: 1656265
uucauaaccauguuugcag

SEQ ID NO: 1656267 - RNA, 19 nt, Artificial Sequence
  Description of Artificial Sequence: Synthetic oligonucleotide
  Sense strand starting at position 1097 of SEQ ID NO: 1561231
cucucucaucaauguguca

SEQ ID NO: 1656268 - RNA, 19 nt, Artificial Sequence
  Description of Artificial Sequence: Synthetic oligonucleotide
  Antisense strand to SEQ ID NO: 1656267
ugacacauugaugagagag

SEQ ID NO: 1656269 - RNA, 19 nt, Artificial Sequence
  Description of Artificial Sequence: Synthetic oligonucleotide
  Sense strand starting at position 1100 of SEQ ID NO: 1561231
ucucaucaaugugucauua

SEQ ID NO: 1656270 - RNA, 19 nt, Artificial Sequence
  Description of Artificial Sequence: Synthetic oligonucleotide
  Antisense strand to SEQ ID NO: 1656269
uaaugacacauugaugaga

SEQ ID NO: 1656271 - RNA, 19 nt, Artificial Sequence
  Description of Artificial Sequence: Synthetic oligonucleotide
  Sense strand starting at position 1104 of SEQ ID NO: 1561231
aucaaugugucauuauccu

SEQ ID NO: 1656272 - RNA, 19 nt, Artificial Sequence
  Description of Artificial Sequence: Synthetic oligonucleotide
  Antisense strand to SEQ ID NO: 1656271
aggauaaugacacauugau

SEQ ID NO: 1656273 - RNA, 19 nt, Artificial Sequence
  Description of Artificial Sequence: Synthetic oligonucleotide
  Sense strand starting at position 1108 of SEQ ID NO: 1561231
augugucauuauccugaga

SEQ ID NO: 1656274 - RNA, 19 nt, Artificial Sequence
  Description of Artificial Sequence: Synthetic oligonucleotide
  Antisense strand to SEQ ID NO: 1656273
ucucaggauaaugacacau

SEQ ID NO: 1656275 - RNA, 19 nt, Artificial Sequence
  Description of Artificial Sequence: Synthetic oligonucleotide
  Sense strand starting at position 1111 of SEQ ID NO: 1561231
ugucauuauccugagacau

SEQ ID NO: 1656276 - RNA, 19 nt, Artificial Sequence
  Description of Artificial Sequence: Synthetic oligonucleotide
  Antisense strand to SEQ ID NO: 1656275
augucucaggauaaugaca

SEQ ID NO: 1656277 - RNA, 19 nt, Artificial Sequence
  Description of Artificial Sequence: Synthetic oligonucleotide
  Sense strand starting at position 1121 of SEQ ID NO: 1561231
cugagacauucugcagaag

SEQ ID NO: 1656278 - RNA, 19 nt, Artificial Sequence
  Description of Artificial Sequence: Synthetic oligonucleotide
  Antisense strand to SEQ ID NO: 1656277
cuucugcagaaugucucag

SEQ ID NO: 1656279 - RNA, 19 nt, Artificial Sequence
  Description of Artificial Sequence: Synthetic oligonucleotide
  Sense strand starting at position 1124 of SEQ ID NO: 1561231
agacauucugcagaagcaa

SEQ ID NO: 1656280 - RNA, 19 nt, Artificial Sequence
  Description of Artificial Sequence: Synthetic oligonucleotide
  Antisense strand to SEQ ID NO: 1656279
uugcuucugcagaaugucu

SEQ ID NO: 1656281 - RNA, 19 nt, Artificial Sequence
  Description of Artificial Sequence: Synthetic oligonucleotide
  Sense strand starting at position 1380 of SEQ ID NO: 1561231
ccgcuauucugccuaauuu

SEQ ID NO: 1656282 - RNA, 19 nt, Artificial Sequence
  Description of Artificial Sequence: Synthetic oligonucleotide
  Antisense strand to SEQ ID NO: 1656281
aaauuaggcagaauagcgg

SEQ ID NO: 1656283 - RNA, 19 nt, Artificial Sequence
  Description of Artificial Sequence: Synthetic oligonucleotide
  Sense strand starting at position 1525 of SEQ ID NO: 1561231
cggccugauccuuaccuuu

SEQ ID NO: 1656284 - RNA, 19 nt, Artificial Sequence
  Description of Artificial Sequence: Synthetic oligonucleotide
  Antisense strand to SEQ ID NO: 1656283
aaagguaaggaucaggccg

SEQ ID NO: 1656285 - RNA, 19 nt, Artificial Sequence
  Description of Artificial Sequence: Synthetic oligonucleotide
  Sense strand starting at position 1540 of SEQ ID NO: 1561231
cuuuaaauuugcuuccgga

SEQ ID NO: 1656286 - RNA, 19 nt, Artificial Sequence
  Description of Artificial Sequence: Synthetic oligonucleotide
  Antisense strand to SEQ ID NO: 1656285
uccggaagcaaauuuaaag

SEQ ID NO: 1656287 - RNA, 19 nt, Artificial Sequence
  Description of Artificial Sequence: Synthetic oligonucleotide
  Sense strand starting at position 1789 of SEQ ID NO: 1561231
uggagaggcugcucacauu

SEQ ID NO: 1656288 - RNA, 19 nt, Artificial Sequence
  Description of Artificial Sequence: Synthetic oligonucleotide
  Antisense strand to SEQ ID NO: 1656287
aaugugagcagccucucca

SEQ ID NO: 1656289 - RNA, 19 nt, Artificial Sequence
  Description of Artificial Sequence: Synthetic oligonucleotide
  Sense strand starting at position 1849 of SEQ ID NO: 1561231
accugauccucucuuugga

SEQ ID NO: 1656290 - RNA, 19 nt, Artificial Sequence
  Description of Artificial Sequence: Synthetic oligonucleotide
  Antisense strand to SEQ ID NO: 1656289
uccaaagagaggaucaggu

SEQ ID NO: 1656291 - RNA, 19 nt, Artificial Sequence
  Description of Artificial Sequence: Synthetic oligonucleotide
  Sense strand starting at position 1874 of SEQ ID NO: 1561231
ggaccuaaucucgggauau

SEQ ID NO: 1656292 - RNA, 19 nt, Artificial Sequence
  Description of Artificial Sequence: Synthetic oligonucleotide
  Antisense strand to SEQ ID NO: 1656291
auaucccgagauuaggucc

SEQ ID NO: 1656293 - RNA, 19 nt, Artificial Sequence
  Description of Artificial Sequence: Synthetic oligonucleotide
  Sense strand starting at position 1876 of SEQ ID NO: 1561231
accuaaucucgggauaucu

SEQ ID NO: 1656294 - RNA, 19 nt, Artificial Sequence
  Description of Artificial Sequence: Synthetic oligonucleotide
  Antisense strand to SEQ ID NO: 1656293
agauaucccgagauuaggu

SEQ ID NO: 1656295 - RNA, 19 nt, Artificial Sequence
  Description of Artificial Sequence: Synthetic oligonucleotide
  Sense strand starting at position 1884 of SEQ ID NO: 1561231
ucgggauaucugcgaaaua

SEQ ID NO: 1656296 - RNA, 19 nt, Artificial Sequence
  Description of Artificial Sequence: Synthetic oligonucleotide
  Antisense strand to SEQ ID NO: 1656295
uauuucgcagauaucccga

SEQ ID NO: 1656297 - RNA, 19 nt, Artificial Sequence
  Description of Artificial Sequence: Synthetic oligonucleotide
  Sense strand starting at position 2003 of SEQ ID NO: 1561231
aacgaacucggucacugau

SEQ ID NO: 1656298 - RNA, 19 nt, Artificial Sequence
  Description of Artificial Sequence: Synthetic oligonucleotide
  Antisense strand to SEQ ID NO: 1656297
aucagugaccgaguucguu

SEQ ID NO: 1656299 - RNA, 19 nt, Artificial Sequence
  Description of Artificial Sequence: Synthetic oligonucleotide
  Sense strand starting at position 2457 of SEQ ID NO: 1561231
guacacaucucgcuuacaa

SEQ ID NO: 1656300 - RNA, 19 nt, Artificial Sequence
  Description of Artificial Sequence: Synthetic oligonucleotide
  Antisense strand to SEQ ID NO: 1656299
uuguaagcgagauguguac

SEQ ID NO: 1656301 - RNA, 19 nt, Artificial Sequence
  Description of Artificial Sequence: Synthetic oligonucleotide
  Sense strand starting at position 2459 of SEQ ID NO: 1561231
acacaucucgcuuacaaga

SEQ ID NO: 1656302 - RNA, 19 nt, Artificial Sequence
  Description of Artificial Sequence: Synthetic oligonucleotide
  Antisense strand to SEQ ID NO: 1656301
ucuuguaagcgagaugugu

SEQ ID NO: 1656303 - RNA, 19 nt, Artificial Sequence
  Description of Artificial Sequence: Synthetic oligonucleotide
  Sense strand starting at position 2464 of SEQ ID NO: 1561231
ucucgcuuacaagaaacuu

SEQ ID NO: 1656304 - RNA, 19 nt, Artificial Sequence
  Description of Artificial Sequence: Synthetic oligonucleotide
  Antisense strand to SEQ ID NO: 1656303
aaguuucuuguaagcgaga

SEQ ID NO: 1656305 - RNA, 19 nt, Artificial Sequence
  Description of Artificial Sequence: Synthetic oligonucleotide
  Sense strand starting at position 2894 of SEQ ID NO: 1561231
ugacauccgucucuuuaaa

SEQ ID NO: 1656306 - RNA, 19 nt, Artificial Sequence
  Description of Artificial Sequence: Synthetic oligonucleotide
  Antisense strand to SEQ ID NO: 1656305
uuuaaagagacggauguca

SEQ ID NO: 1656307 - RNA, 19 nt, Artificial Sequence
  Description of Artificial Sequence: Synthetic oligonucleotide
  Sense strand starting at position 2927 of SEQ ID NO: 1561231
aagugugagaagugugaaa

SEQ ID NO: 1656308 - RNA, 19 nt, Artificial Sequence
  Description of Artificial Sequence: Synthetic oligonucleotide
  Antisense strand to SEQ ID NO: 1656307
uuucacacuucucacacuu

SEQ ID NO: 1656309 - RNA, 19 nt, Artificial Sequence
  Description of Artificial Sequence: Synthetic oligonucleotide
  Sense strand starting at position 2929 of SEQ ID NO: 1561231
gugugagaagugugaaaga

SEQ ID NO: 1656310 - RNA, 19 nt, Artificial Sequence
  Description of Artificial Sequence: Synthetic oligonucleotide
  Antisense strand to SEQ ID NO: 1656309
ucuuucacacuucucacac

SEQ ID NO: 1656311 - RNA, 19 nt, Artificial Sequence
  Description of Artificial Sequence: Synthetic oligonucleotide
  Sense strand starting at position 2938 of SEQ ID NO: 1561231
gugugaaagacagaacguu

SEQ ID NO: 1656312 - RNA, 19 nt, Artificial Sequence
  Description of Artificial Sequence: Synthetic oligonucleotide
  Antisense strand to SEQ ID NO: 1656311
aacguucugucuuucacac

SEQ ID NO: 1656313 - RNA, 19 nt, Artificial Sequence
  Description of Artificial Sequence: Synthetic oligonucleotide
  Sense strand starting at position 3158 of SEQ ID NO: 1561231
agcaaacccugucucgaau

SEQ ID NO: 1656314 - RNA, 19 nt, Artificial Sequence
  Description of Artificial Sequence: Synthetic oligonucleotide
  Antisense strand to SEQ ID NO: 1656313
auucgagacaggguuugcu

SEQ ID NO: 1656315 - RNA, 19 nt, Artificial Sequence
  Description of Artificial Sequence: Synthetic oligonucleotide
  Sense strand starting at position 3164 of SEQ ID NO: 1561231
cccugucucgaauaauaag

SEQ ID NO: 1656316 - RNA, 19 nt, Artificial Sequence
  Description of Artificial Sequence: Synthetic oligonucleotide
  Antisense strand to SEQ ID NO: 1656315
cuuauuauucgagacaggg

SEQ ID NO: 1656317 - RNA, 19 nt, Artificial Sequence
  Description of Artificial Sequence: Synthetic oligonucleotide
  Sense strand starting at position 3218 of SEQ ID NO: 1561231
aauugcuaccgcgcuauaa

SEQ ID NO: 1656318 - RNA, 19 nt, Artificial Sequence
  Description of Artificial Sequence: Synthetic oligonucleotide
  Antisense strand to SEQ ID NO: 1656317
uuauagcgcgguagcaauu

SEQ ID NO: 1656319 - RNA, 19 nt, Artificial Sequence
  Description of Artificial Sequence: Synthetic oligonucleotide
  Sense strand starting at position 3805 of SEQ ID NO: 1561231
cggauuccugagugugaga

SEQ ID NO: 1656320 - RNA, 19 nt, Artificial Sequence
  Description of Artificial Sequence: Synthetic oligonucleotide
  Antisense strand to SEQ ID NO: 1656319
ucucacacucaggaauccg

SEQ ID NO: 1656321 - RNA, 19 nt, Artificial Sequence
  Description of Artificial Sequence: Synthetic oligonucleotide
  Sense strand starting at position 3807 of SEQ ID NO: 1561231
gauuccugagugugagaga

SEQ ID NO: 1656322 - RNA, 19 nt, Artificial Sequence
  Description of Artificial Sequence: Synthetic oligonucleotide
  Antisense strand to SEQ ID NO: 1656321
ucucucacacucaggaauc

SEQ ID NO: 1656323 - RNA, 19 nt, Artificial Sequence
  Description of Artificial Sequence: Synthetic oligonucleotide
  Sense strand starting at position 3867 of SEQ ID NO: 1561231
gacuccugugucggaggaa

SEQ ID NO: 1656324 - RNA, 19 nt, Artificial Sequence
  Description of Artificial Sequence: Synthetic oligonucleotide
  Antisense strand to SEQ ID NO: 1656323
uuccuccgacacaggaguc

SEQ ID NO: 1656325 - RNA, 19 nt, Artificial Sequence
  Description of Artificial Sequence: Synthetic oligonucleotide
  Sense strand starting at position 3926 of SEQ ID NO: 1561231
aaaugcuugugucuugauu

SEQ ID NO: 1656326 - RNA, 19 nt, Artificial Sequence
  Description of Artificial Sequence: Synthetic oligonucleotide
  Antisense strand to SEQ ID NO: 1656325
aaucaagacacaagcauuu

SEQ ID NO: 1656327 - RNA, 19 nt, Artificial Sequence
  Description of Artificial Sequence: Synthetic oligonucleotide
  Sense strand starting at position 3934 of SEQ ID NO: 1561231
gugucuugauucuuggaag

SEQ ID NO: 1656328 - RNA, 19 nt, Artificial Sequence
  Description of Artificial Sequence: Synthetic oligonucleotide
  Antisense strand to SEQ ID NO: 1656327
cuuccaagaaucaagacac

SEQ ID NO: 1656329 - RNA, 19 nt, Artificial Sequence
  Description of Artificial Sequence: Synthetic oligonucleotide
  Sense strand starting at position 236 of SEQ ID NO: 1561232
cuguuucuacaagacguuu

SEQ ID NO: 1656330 - RNA, 19 nt, Artificial Sequence
  Description of Artificial Sequence: Synthetic oligonucleotide
  Antisense strand to SEQ ID NO: 1656329
aaacgucuuguagaaacag

SEQ ID NO: 1656331 - RNA, 19 nt, Artificial Sequence
  Description of Artificial Sequence: Synthetic oligonucleotide
  Sense strand starting at position 355 of SEQ ID NO: 1561232
gguacaaucuugcucacca

SEQ ID NO: 1656332 - RNA, 19 nt, Artificial Sequence
  Description of Artificial Sequence: Synthetic oligonucleotide
  Antisense strand to SEQ ID NO: 1656331
uggugagcaagauuguacc

SEQ ID NO: 1656333 - RNA, 19 nt, Artificial Sequence
  Description of Artificial Sequence: Synthetic oligonucleotide
  Sense strand starting at position 1019 of SEQ ID NO: 1561232
acaggcagauguggucaaa

SEQ ID NO: 1656334 - RNA, 19 nt, Artificial Sequence
  Description of Artificial Sequence: Synthetic oligonucleotide
  Antisense strand to SEQ ID NO: 1656333
uuugaccacaucugccugu

SEQ ID NO: 1656335 - RNA, 19 nt, Artificial Sequence
  Description of Artificial Sequence: Synthetic oligonucleotide
  Sense strand starting at position 1022 of SEQ ID NO: 1561232
ggcagauguggucaaacau

SEQ ID NO: 1656336 - RNA, 19 nt, Artificial Sequence
  Description of Artificial Sequence: Synthetic oligonucleotide
  Antisense strand to SEQ ID NO: 1656335
auguuugaccacaucugcc

SEQ ID NO: 1656337 - RNA, 19 nt, Artificial Sequence
  Description of Artificial Sequence: Synthetic oligonucleotide
  Sense strand starting at position 1170 of SEQ ID NO: 1561232
ucaauauaguuccgcauau

SEQ ID NO: 1656338 - RNA, 19 nt, Artificial Sequence
  Description of Artificial Sequence: Synthetic oligonucleotide
  Antisense strand to SEQ ID NO: 1656337
auaugcggaacuauauuga

SEQ ID NO: 1656339 - RNA, 19 nt, Artificial Sequence
  Description of Artificial Sequence: Synthetic oligonucleotide
  Sense strand starting at position 1265 of SEQ ID NO: 1561232
uuauuaguuucaucguggu

SEQ ID NO: 1656340 - RNA, 19 nt, Artificial Sequence
  Description of Artificial Sequence: Synthetic oligonucleotide
  Antisense strand to SEQ ID NO: 1656339
accacgaugaaacuaauaa

SEQ ID NO: 1656341 - RNA, 19 nt, Artificial Sequence
  Description of Artificial Sequence: Synthetic oligonucleotide
  Sense strand starting at position 1268 of SEQ ID NO: 1561232
uuaguuucaucguggugau

SEQ ID NO: 1656342 - RNA, 19 nt, Artificial Sequence
  Description of Artificial Sequence: Synthetic oligonucleotide
  Antisense strand to SEQ ID NO: 1656341
aucaccacgaugaaacuaa

SEQ ID NO: 1656343 - RNA, 19 nt, Artificial Sequence
  Description of Artificial Sequence: Synthetic oligonucleotide
  Sense strand starting at position 1269 of SEQ ID NO: 1561232
uaguuucaucguggugaug

SEQ ID NO: 1656344 - RNA, 19 nt, Artificial Sequence
  Description of Artificial Sequence: Synthetic oligonucleotide
  Antisense strand to SEQ ID NO: 1656343
caucaccacgaugaaacua

SEQ ID NO: 1656345 - RNA, 19 nt, Artificial Sequence
  Description of Artificial Sequence: Synthetic oligonucleotide
  Sense strand starting at position 1369 of SEQ ID NO: 1561232
gagaguuuauguccagcuc

SEQ ID NO: 1656346 - RNA, 19 nt, Artificial Sequence
  Description of Artificial Sequence: Synthetic oligonucleotide
  Antisense strand to SEQ ID NO: 1656345
gagcuggacauaaacucuc

SEQ ID NO: 1656347 - RNA, 19 nt, Artificial Sequence
  Description of Artificial Sequence: Synthetic oligonucleotide
  Sense strand starting at position 1544 of SEQ ID NO: 1561232
cagagaaagugccugguau

SEQ ID NO: 1656348 - RNA, 19 nt, Artificial Sequence
  Description of Artificial Sequence: Synthetic oligonucleotide
  Antisense strand to SEQ ID NO: 1656347
auaccaggcacuuucucug

SEQ ID NO: 1656349 - RNA, 19 nt, Artificial Sequence
  Description of Artificial Sequence: Synthetic oligonucleotide
  Sense strand starting at position 1545 of SEQ ID NO: 1561232
agagaaagugccugguaua

SEQ ID NO: 1656350 - RNA, 19 nt, Artificial Sequence
  Description of Artificial Sequence: Synthetic oligonucleotide
  Antisense strand to SEQ ID NO: 1656349
uauaccaggcacuuucucu

SEQ ID NO: 1656351 - RNA, 19 nt, Artificial Sequence
  Description of Artificial Sequence: Synthetic oligonucleotide
  Sense strand starting at position 1546 of SEQ ID NO: 1561232
gagaaagugccugguauac

SEQ ID NO: 1656352 - RNA, 19 nt, Artificial Sequence
  Description of Artificial Sequence: Synthetic oligonucleotide
  Antisense strand to SEQ ID NO: 1656351
guauaccaggcacuuucuc

SEQ ID NO: 1656353 - RNA, 19 nt, Artificial Sequence
  Description of Artificial Sequence: Synthetic oligonucleotide
  Sense strand starting at position 1548 of SEQ ID NO: 1561232
gaaagugccugguauacag

SEQ ID NO: 1656354 - RNA, 19 nt, Artificial Sequence
  Description of Artificial Sequence: Synthetic oligonucleotide
  Antisense strand to SEQ ID NO: 1656353
cuguauaccaggcacuuuc

SEQ ID NO: 1656355 - RNA, 19 nt, Artificial Sequence
  Description of Artificial Sequence: Synthetic oligonucleotide
  Sense strand starting at position 1563 of SEQ ID NO: 1561232
acaguaagcgcuuaauuag

SEQ ID NO: 1656356 - RNA, 19 nt, Artificial Sequence
  Description of Artificial Sequence: Synthetic oligonucleotide
  Antisense strand to SEQ ID NO: 1656355
cuaauuaagcgcuuacugu

SEQ ID NO: 1656357 - RNA, 19 nt, Artificial Sequence
  Description of Artificial Sequence: Synthetic oligonucleotide
  Sense strand starting at position 1707 of SEQ ID NO: 1561232
cggagugaaguuugcaacu

SEQ ID NO: 1656358 - RNA, 19 nt, Artificial Sequence
  Description of Artificial Sequence: Synthetic oligonucleotide
  Antisense strand to SEQ ID NO: 1656357
aguugcaaacuucacuccg

SEQ ID NO: 1656359 - RNA, 19 nt, Artificial Sequence
  Description of Artificial Sequence: Synthetic oligonucleotide
  Sense strand starting at position 1713 of SEQ ID NO: 1561232
gaaguuugcaacugggaag

SEQ ID NO: 1656360 - RNA, 19 nt, Artificial Sequence
  Description of Artificial Sequence: Synthetic oligonucleotide
  Antisense strand to SEQ ID NO: 1656359
cuucccaguugcaaacuuc

SEQ ID NO: 1656361 - RNA, 19 nt, Artificial Sequence
  Description of Artificial Sequence: Synthetic oligonucleotide
  Sense strand starting at position 2076 of SEQ ID NO: 1561232
gcucgucaccauuggauuu

SEQ ID NO: 1656362 - RNA, 19 nt, Artificial Sequence
  Description of Artificial Sequence: Synthetic oligonucleotide
  Antisense strand to SEQ ID NO: 1656361
aaauccaauggugacgagc

SEQ ID NO: 1656363 - RNA, 19 nt, Artificial Sequence
  Description of Artificial Sequence: Synthetic oligonucleotide
  Sense strand starting at position 2701 of SEQ ID NO: 1561232
auuugauccuagcagcaau

SEQ ID NO: 1656364 - RNA, 19 nt, Artificial Sequence
  Description of Artificial Sequence: Synthetic oligonucleotide
  Antisense strand to SEQ ID NO: 1656363
auugcugcuaggaucaaau

SEQ ID NO: 1656365 - RNA, 19 nt, Artificial Sequence
  Description of Artificial Sequence: Synthetic oligonucleotide
  Sense strand starting at position 2722 of SEQ ID NO: 1561232
ccuguauggcggcucuuau

SEQ ID NO: 1656366 - RNA, 19 nt, Artificial Sequence
  Description of Artificial Sequence: Synthetic oligonucleotide
  Antisense strand to SEQ ID NO: 1656365
auaagagccgccauacagg

SEQ ID NO: 1656367 - RNA, 19 nt, Artificial Sequence
  Description of Artificial Sequence: Synthetic oligonucleotide
  Sense strand starting at position 2723 of SEQ ID NO: 1561232
cuguauggcggcucuuauu

SEQ ID NO: 1656368 - RNA, 19 nt, Artificial Sequence
  Description of Artificial Sequence: Synthetic oligonucleotide
  Antisense strand to SEQ ID NO: 1656367
aauaagagccgccauacag

SEQ ID NO: 1656369 - RNA, 19 nt, Artificial Sequence
  Description of Artificial Sequence: Synthetic oligonucleotide
  Sense strand starting at position 2758 of SEQ ID NO: 1561232
ggaagaaacucaggcauga

SEQ ID NO: 1656370 - RNA, 19 nt, Artificial Sequence
  Description of Artificial Sequence: Synthetic oligonucleotide
  Antisense strand to SEQ ID NO: 1656369
ucaugccugaguuucuucc

SEQ ID NO: 1656371 - RNA, 19 nt, Artificial Sequence
  Description of Artificial Sequence: Synthetic oligonucleotide
  Sense strand starting at position 2854 of SEQ ID NO: 1561232
ccagccaagucuuagcaaa

SEQ ID NO: 1656372 - RNA, 19 nt, Artificial Sequence
  Description of Artificial Sequence: Synthetic oligonucleotide
  Antisense strand to SEQ ID NO: 1656371
uuugcuaagacuuggcugg

SEQ ID NO: 1656373 - RNA, 19 nt, Artificial Sequence
  Description of Artificial Sequence: Synthetic oligonucleotide
  Sense strand starting at position 2856 of SEQ ID NO: 1561232
agccaagucuuagcaaaga

SEQ ID NO: 1656374 - RNA, 19 nt, Artificial Sequence
  Description of Artificial Sequence: Synthetic oligonucleotide
  Antisense strand to SEQ ID NO: 1656373
ucuuugcuaagacuuggcu

SEQ ID NO: 1656375 - RNA, 19 nt, Artificial Sequence
  Description of Artificial Sequence: Synthetic oligonucleotide
  Sense strand starting at position 2892 of SEQ ID NO: 1561232
gcucauccuugaugucuga

SEQ ID NO: 1656376 - RNA, 19 nt, Artificial Sequence
  Description of Artificial Sequence: Synthetic oligonucleotide
  Antisense strand to SEQ ID NO: 1656375
ucagacaucaaggaugagc

SEQ ID NO: 1656377 - RNA, 19 nt, Artificial Sequence
  Description of Artificial Sequence: Synthetic oligonucleotide
  Sense strand starting at position 2896 of SEQ ID NO: 1561232
auccuugaugucugaucaa

SEQ ID NO: 1656378 - RNA, 19 nt, Artificial Sequence
  Description of Artificial Sequence: Synthetic oligonucleotide
  Antisense strand to SEQ ID NO: 1656377
uugaucagacaucaaggau

SEQ ID NO: 1656379 - RNA, 19 nt, Artificial Sequence
  Description of Artificial Sequence: Synthetic oligonucleotide
  Sense strand starting at position 2899 of SEQ ID NO: 1561232
cuugaugucugaucaacuu

SEQ ID NO: 1656380 - RNA, 19 nt, Artificial Sequence
  Description of Artificial Sequence: Synthetic oligonucleotide
  Antisense strand to SEQ ID NO: 1656379
aaguugaucagacaucaag

SEQ ID NO: 1656381 - RNA, 19 nt, Artificial Sequence
  Description of Artificial Sequence: Synthetic oligonucleotide
  Sense strand starting at position 3429 of SEQ ID NO: 1561232
gcugcuucucucugaguca

SEQ ID NO: 1656382 - RNA, 19 nt, Artificial Sequence
  Description of Artificial Sequence: Synthetic oligonucleotide
  Antisense strand to SEQ ID NO: 1656381
ugacucagagagaagcagc

SEQ ID NO: 1656383 - RNA, 19 nt, Artificial Sequence
  Description of Artificial Sequence: Synthetic oligonucleotide
  Sense strand starting at position 3432 of SEQ ID NO: 1561232
gcuucucucugagucagaa

SEQ ID NO: 1656384 - RNA, 19 nt, Artificial Sequence
  Description of Artificial Sequence: Synthetic oligonucleotide
  Antisense strand to SEQ ID NO: 1656383
uucugacucagagagaagc

SEQ ID NO: 1656385 - RNA, 19 nt, Artificial Sequence
  Description of Artificial Sequence: Synthetic oligonucleotide
  Sense strand starting at position 3517 of SEQ ID NO: 1561232
cgggaauggucucuuucac

SEQ ID NO: 1656386 - RNA, 19 nt, Artificial Sequence
  Description of Artificial Sequence: Synthetic oligonucleotide
  Antisense strand to SEQ ID NO: 1656385
gugaaagagaccauucccg

SEQ ID NO: 1656387 - RNA, 19 nt, Artificial Sequence
  Description of Artificial Sequence: Synthetic oligonucleotide
  Sense strand starting at position 233 of SEQ ID NO: 1561233
ggacuccucucuuuagagu

SEQ ID NO: 1656388 - RNA, 19 nt, Artificial Sequence
  Description of Artificial Sequence: Synthetic oligonucleotide
  Antisense strand to SEQ ID NO: 1656387
acucuaaagagaggagucc

SEQ ID NO: 1656389 - RNA, 19 nt, Artificial Sequence
  Description of Artificial Sequence: Synthetic oligonucleotide
  Sense strand starting at position 242 of SEQ ID NO: 1561233
ucuuuagaguuaccaaggu

SEQ ID NO: 1656390 - RNA, 19 nt, Artificial Sequence
  Description of Artificial Sequence: Synthetic oligonucleotide
  Antisense strand to SEQ ID NO: 1656389
accuugguaacucuaaaga

SEQ ID NO: 1656391 - RNA, 19 nt, Artificial Sequence
  Description of Artificial Sequence: Synthetic oligonucleotide
  Sense strand starting at position 287 of SEQ ID NO: 1561233
cugagagcgucucccagaa

SEQ ID NO: 1656392 - RNA, 19 nt, Artificial Sequence
  Description of Artificial Sequence: Synthetic oligonucleotide
  Antisense strand to SEQ ID NO: 1656391
uucugggagacgcucucag

SEQ ID NO: 1656393 - RNA, 19 nt, Artificial Sequence
  Description of Artificial Sequence: Synthetic oligonucleotide
  Sense strand starting at position 289 of SEQ ID NO: 1561233
gagagcgucucccagaaau

SEQ ID NO: 1656394 - RNA, 19 nt, Artificial Sequence
  Description of Artificial Sequence: Synthetic oligonucleotide
  Antisense strand to SEQ ID NO: 1656393
auuucugggagacgcucuc

SEQ ID NO: 1656395 - RNA, 19 nt, Artificial Sequence
  Description of Artificial Sequence: Synthetic oligonucleotide
  Sense strand starting at position 291 of SEQ ID NO: 1561233
gagcgucucccagaaauca

SEQ ID NO: 1656396 - RNA, 19 nt, Artificial Sequence
  Description of Artificial Sequence: Synthetic oligonucleotide
  Antisense strand to SEQ ID NO: 1656395
ugauuucugggagacgcuc

SEQ ID NO: 1656397 - RNA, 19 nt, Artificial Sequence
  Description of Artificial Sequence: Synthetic oligonucleotide
  Sense strand starting at position 728 of SEQ ID NO: 1561233
ugaccauaagcuugugguu

SEQ ID NO: 1656398 - RNA, 19 nt, Artificial Sequence
  Description of Artificial Sequence: Synthetic oligonucleotide
  Antisense strand to SEQ ID NO: 1656397
aaccacaagcuuaugguca

SEQ ID NO: 1656399 - RNA, 19 nt, Artificial Sequence
  Description of Artificial Sequence: Synthetic oligonucleotide
  Sense strand starting at position 733 of SEQ ID NO: 1561233
auaagcuugugguugauca

SEQ ID NO: 1656400 - RNA, 19 nt, Artificial Sequence
  Description of Artificial Sequence: Synthetic oligonucleotide
  Antisense strand to SEQ ID NO: 1656399
ugaucaaccacaagcuuau

SEQ ID NO: 1656401 - RNA, 19 nt, Artificial Sequence
  Description of Artificial Sequence: Synthetic oligonucleotide
  Sense strand starting at position 734 of SEQ ID NO: 1561233
uaagcuugugguugaucau

SEQ ID NO: 1656402 - RNA, 19 nt, Artificial Sequence
  Description of Artificial Sequence: Synthetic oligonucleotide
  Antisense strand to SEQ ID NO: 1656401
augaucaaccacaagcuua

SEQ ID NO: 1656403 - RNA, 19 nt, Artificial Sequence
  Description of Artificial Sequence: Synthetic oligonucleotide
  Sense strand starting at position 735 of SEQ ID NO: 1561233
aagcuugugguugaucauu

SEQ ID NO: 1656404 - RNA, 19 nt, Artificial Sequence
  Description of Artificial Sequence: Synthetic oligonucleotide
  Antisense strand to SEQ ID NO: 1656403
aaugaucaaccacaagcuu

SEQ ID NO: 1656405 - RNA, 19 nt, Artificial Sequence
  Description of Artificial Sequence: Synthetic oligonucleotide
  Sense strand starting at position 925 of SEQ ID NO: 1561233
gucucagugauacgcuguu

SEQ ID NO: 1656406 - RNA, 19 nt, Artificial Sequence
  Description of Artificial Sequence: Synthetic oligonucleotide
  Antisense strand to SEQ ID NO: 1656405
aacagcguaucacugagac

SEQ ID NO: 1656407 - RNA, 19 nt, Artificial Sequence
  Description of Artificial Sequence: Synthetic oligonucleotide
  Sense strand starting at position 1047 of SEQ ID NO: 1561233
cccuuuggauguuugagau

SEQ ID NO: 1656408 - RNA, 19 nt, Artificial Sequence
  Description of Artificial Sequence: Synthetic oligonucleotide
  Antisense strand to SEQ ID NO: 1656407
aucucaaacauccaaaggg

SEQ ID NO: 1656409 - RNA, 19 nt, Artificial Sequence
  Description of Artificial Sequence: Synthetic oligonucleotide
  Sense strand starting at position 1055 of SEQ ID NO: 1561233
auguuugagaucugggagu

SEQ ID NO: 1656410 - RNA, 19 nt, Artificial Sequence
  Description of Artificial Sequence: Synthetic oligonucleotide
  Antisense strand to SEQ ID NO: 1656409
acucccagaucucaaacau

SEQ ID NO: 1656411 - RNA, 19 nt, Artificial Sequence
  Description of Artificial Sequence: Synthetic oligonucleotide
  Sense strand starting at position 1057 of SEQ ID NO: 1561233
guuugagaucugggaguuu

SEQ ID NO: 1656412 - RNA, 19 nt, Artificial Sequence
  Description of Artificial Sequence: Synthetic oligonucleotide
  Antisense strand to SEQ ID NO: 1656411
aaacucccagaucucaaac

SEQ ID NO: 1656413 - RNA, 19 nt, Artificial Sequence
  Description of Artificial Sequence: Synthetic oligonucleotide
  Sense strand starting at position 1096 of SEQ ID NO: 1561233
cuaggcaaguccucaggau

SEQ ID NO: 1656414 - RNA, 19 nt, Artificial Sequence
  Description of Artificial Sequence: Synthetic oligonucleotide
  Antisense strand to SEQ ID NO: 1656413
auccugaggacuugccuag

SEQ ID NO: 1656415 - RNA, 19 nt, Artificial Sequence
  Description of Artificial Sequence: Synthetic oligonucleotide
  Sense strand starting at position 1373 of SEQ ID NO: 1561233
gggaggucucugggaggua

SEQ ID NO: 1656416 - RNA, 19 nt, Artificial Sequence
  Description of Artificial Sequence: Synthetic oligonucleotide
  Antisense strand to SEQ ID NO: 1656415
uaccucccagagaccuccc

SEQ ID NO: 1656417 - RNA, 19 nt, Artificial Sequence
  Description of Artificial Sequence: Synthetic oligonucleotide
  Sense strand starting at position 1531 of SEQ ID NO: 1561233
gguggauccugacagccaa

SEQ ID NO: 1656418 - RNA, 19 nt, Artificial Sequence
  Description of Artificial Sequence: Synthetic oligonucleotide
  Antisense strand to SEQ ID NO: 1656417
uuggcugucaggauccacc

SEQ ID NO: 1656419 - RNA, 19 nt, Artificial Sequence
  Description of Artificial Sequence: Synthetic oligonucleotide
  Sense strand starting at position 1609 of SEQ ID NO: 1561233
cggacuaugugcguuacuu

SEQ ID NO: 1656420 - RNA, 19 nt, Artificial Sequence
  Description of Artificial Sequence: Synthetic oligonucleotide
  Antisense strand to SEQ ID NO: 1656419
aaguaacgcacauaguccg

SEQ ID NO: 1656421 - RNA, 19 nt, Artificial Sequence
  Description of Artificial Sequence: Synthetic oligonucleotide
  Sense strand starting at position 1611 of SEQ ID NO: 1561233
gacuaugugcguuacuucu

SEQ ID NO: 1656422 - RNA, 19 nt, Artificial Sequence
  Description of Artificial Sequence: Synthetic oligonucleotide
  Antisense strand to SEQ ID NO: 1656421
agaaguaacgcacauaguc

SEQ ID NO: 1656423 - RNA, 19 nt, Artificial Sequence
  Description of Artificial Sequence: Synthetic oligonucleotide
  Sense strand starting at position 1618 of SEQ ID NO: 1561233
ugcguuacuucugcacaac

SEQ ID NO: 1656424 - RNA, 19 nt, Artificial Sequence
  Description of Artificial Sequence: Synthetic oligonucleotide
  Antisense strand to SEQ ID NO: 1656423
guugugcagaaguaacgca

SEQ ID NO: 1656425 - RNA, 19 nt, Artificial Sequence
  Description of Artificial Sequence: Synthetic oligonucleotide
  Sense strand starting at position 1619 of SEQ ID NO: 1561233
gcguuacuucugcacaacu

SEQ ID NO: 1656426 - RNA, 19 nt, Artificial Sequence
  Description of Artificial Sequence: Synthetic oligonucleotide
  Antisense strand to SEQ ID NO: 1656425
aguugugcagaaguaacgc

SEQ ID NO: 1656427 - RNA, 19 nt, Artificial Sequence
  Description of Artificial Sequence: Synthetic oligonucleotide
  Sense strand starting at position 1633 of SEQ ID NO: 1561233
caacuuguccuguggcaac

SEQ ID NO: 1656428 - RNA, 19 nt, Artificial Sequence
  Description of Artificial Sequence: Synthetic oligonucleotide
  Antisense strand to SEQ ID NO: 1656427
guugccacaggacaaguug

SEQ ID NO: 1656429 - RNA, 19 nt, Artificial Sequence
  Description of Artificial Sequence: Synthetic oligonucleotide
  Sense strand starting at position 2210 of SEQ ID NO: 1561233
cuuccucuggcugauugaa

SEQ ID NO: 1656430 - RNA, 19 nt, Artificial Sequence
  Description of Artificial Sequence: Synthetic oligonucleotide
  Antisense strand to SEQ ID NO: 1656429
uucaaucagccagaggaag

SEQ ID NO: 1656431 - RNA, 19 nt, Artificial Sequence
  Description of Artificial Sequence: Synthetic oligonucleotide
  Sense strand starting at position 2252 of SEQ ID NO: 1561233
ggucaaccuugagugcaau

SEQ ID NO: 1656432 - RNA, 19 nt, Artificial Sequence
  Description of Artificial Sequence: Synthetic oligonucleotide
  Antisense strand to SEQ ID NO: 1656431
auugcacucaagguugacc

SEQ ID NO: 1656433 - RNA, 19 nt, Artificial Sequence
  Description of Artificial Sequence: Synthetic oligonucleotide
  Sense strand starting at position 2623 of SEQ ID NO: 1561233
gucugacccuugucagcuu

SEQ ID NO: 1656434 - RNA, 19 nt, Artificial Sequence
  Description of Artificial Sequence: Synthetic oligonucleotide
  Antisense strand to SEQ ID NO: 1656433
aagcugacaagggucagac

SEQ ID NO: 1656435 - RNA, 19 nt, Artificial Sequence
  Description of Artificial Sequence: Synthetic oligonucleotide
  Sense strand starting at position 2653 of SEQ ID NO: 1561233
cagcuaugaugaugauuau

SEQ ID NO: 1656436 - RNA, 19 nt, Artificial Sequence
  Description of Artificial Sequence: Synthetic oligonucleotide
  Antisense strand to SEQ ID NO: 1656435
auaaucaucaucauagcug

SEQ ID NO: 1656437 - RNA, 19 nt, Artificial Sequence
  Description of Artificial Sequence: Synthetic oligonucleotide
  Sense strand starting at position 2679 of SEQ ID NO: 1561233
ucagaaacuugugcuguuu

SEQ ID NO: 1656438 - RNA, 19 nt, Artificial Sequence
  Description of Artificial Sequence: Synthetic oligonucleotide
  Antisense strand to SEQ ID NO: 1656437
aaacagcacaaguuucuga

SEQ ID NO: 1656439 - RNA, 19 nt, Artificial Sequence
  Description of Artificial Sequence: Synthetic oligonucleotide
  Sense strand starting at position 2685 of SEQ ID NO: 1561233
acuugugcuguuuaaagga

SEQ ID NO: 1656440 - RNA, 19 nt, Artificial Sequence
  Description of Artificial Sequence: Synthetic oligonucleotide
  Antisense strand to SEQ ID NO: 1656439
uccuuuaaacagcacaagu

SEQ ID NO: 1656441 - RNA, 19 nt, Artificial Sequence
  Description of Artificial Sequence: Synthetic oligonucleotide
  Sense strand starting at position 2718 of SEQ ID NO: 1561233
gcagcaugugggcacuaau

SEQ ID NO: 1656442 - RNA, 19 nt, Artificial Sequence
  Description of Artificial Sequence: Synthetic oligonucleotide
  Antisense strand to SEQ ID NO: 1656441
auuagugcccacaugcugc

SEQ ID NO: 1656443 - RNA, 19 nt, Artificial Sequence
  Description of Artificial Sequence: Synthetic oligonucleotide
  Sense strand starting at position 2752 of SEQ ID NO: 1561233
ugucccaagcguuaaauca

SEQ ID NO: 1656444 - RNA, 19 nt, Artificial Sequence
  Description of Artificial Sequence: Synthetic oligonucleotide
  Antisense strand to SEQ ID NO: 1656443
ugauuuaacgcuugggaca

SEQ ID NO: 1656445 - RNA, 19 nt, Artificial Sequence
  Description of Artificial Sequence: Synthetic oligonucleotide
  Sense strand starting at position 2830 of SEQ ID NO: 1561233
gguagagacgcuugccuaa

SEQ ID NO: 1656446 - RNA, 19 nt, Artificial Sequence
  Description of Artificial Sequence: Synthetic oligonucleotide
  Antisense strand to SEQ ID NO: 1656445
uuaggcaagcgucucuacc

SEQ ID NO: 1656447 - RNA, 19 nt, Artificial Sequence
  Description of Artificial Sequence: Synthetic oligonucleotide
  Sense strand starting at position 2857 of SEQ ID NO: 1561233
agcaaaucaagguggaaau

SEQ ID NO: 1656448 - RNA, 19 nt, Artificial Sequence
  Description of Artificial Sequence: Synthetic oligonucleotide
  Antisense strand to SEQ ID NO: 1656447
auuuccaccuugauuugcu

SEQ ID NO: 1656449 - RNA, 19 nt, Artificial Sequence
  Description of Artificial Sequence: Synthetic oligonucleotide
  Sense strand starting at position 3644 of SEQ ID NO: 1561233
cugggauauuugugaggau

SEQ ID NO: 1656450 - RNA, 19 nt, Artificial Sequence
  Description of Artificial Sequence: Synthetic oligonucleotide
  Antisense strand to SEQ ID NO: 1656449
auccucacaaauaucccag

SEQ ID NO: 1656451 - RNA, 19 nt, Artificial Sequence
  Description of Artificial Sequence: Synthetic oligonucleotide
  Sense strand starting at position 3645 of SEQ ID NO: 1561233
ugggauauuugugaggaua

SEQ ID NO: 1656452 - RNA, 19 nt, Artificial Sequence
  Description of Artificial Sequence: Synthetic oligonucleotide
  Antisense strand to SEQ ID NO: 1656451
uauccucacaaauauccca

SEQ ID NO: 1656453 - RNA, 19 nt, Artificial Sequence
  Description of Artificial Sequence: Synthetic oligonucleotide
  Sense strand starting at position 3647 of SEQ ID NO: 1561233
ggauauuugugaggauauu

SEQ ID NO: 1656454 - RNA, 19 nt, Artificial Sequence
  Description of Artificial Sequence: Synthetic oligonucleotide
  Antisense strand to SEQ ID NO: 1656453
aauauccucacaaauaucc

SEQ ID NO: 1656455 - RNA, 19 nt, Artificial Sequence
  Description of Artificial Sequence: Synthetic oligonucleotide
  Sense strand starting at position 3656 of SEQ ID NO: 1561233
ugaggauauugugaggucu

SEQ ID NO: 1656456 - RNA, 19 nt, Artificial Sequence
  Description of Artificial Sequence: Synthetic oligonucleotide
  Antisense strand to SEQ ID NO: 1656455
agaccucacaauauccuca

SEQ ID NO: 1656457 - RNA, 19 nt, Artificial Sequence
  Description of Artificial Sequence: Synthetic oligonucleotide
  Sense strand starting at position 3662 of SEQ ID NO: 1561233
uauugugaggucuauuaga

SEQ ID NO: 1656458 - RNA, 19 nt, Artificial Sequence
  Description of Artificial Sequence: Synthetic oligonucleotide
  Antisense strand to SEQ ID NO: 1656457
ucuaauagaccucacaaua

SEQ ID NO: 1656459 - RNA, 19 nt, Artificial Sequence
  Description of Artificial Sequence: Synthetic oligonucleotide
  Sense strand starting at position 3667 of SEQ ID NO: 1561233
ugaggucuauuagaauaau

SEQ ID NO: 1656460 - RNA, 19 nt, Artificial Sequence
  Description of Artificial Sequence: Synthetic oligonucleotide
  Antisense strand to SEQ ID NO: 1656459
auuauucuaauagaccuca

SEQ ID NO: 1656461 - RNA, 19 nt, Artificial Sequence
  Description of Artificial Sequence: Synthetic oligonucleotide
  Sense strand starting at position 3677 of SEQ ID NO: 1561233
uagaauaaugccugguuga

SEQ ID NO: 1656462 - RNA, 19 nt, Artificial Sequence
  Description of Artificial Sequence: Synthetic oligonucleotide
  Antisense strand to SEQ ID NO: 1656461
ucaaccaggcauuauucua

SEQ ID NO: 1656463 - RNA, 19 nt, Artificial Sequence
  Description of Artificial Sequence: Synthetic oligonucleotide
  Sense strand starting at position 3678 of SEQ ID NO: 1561233
agaauaaugccugguugag

SEQ ID NO: 1656464 - RNA, 19 nt, Artificial Sequence
  Description of Artificial Sequence: Synthetic oligonucleotide
  Antisense strand to SEQ ID NO: 1656463
cucaaccaggcauuauucu

SEQ ID NO: 1656465 - RNA, 19 nt, Artificial Sequence
  Description of Artificial Sequence: Synthetic oligonucleotide
  Sense strand starting at position 3680 of SEQ ID NO: 1561233
aauaaugccugguugaguu

SEQ ID NO: 1656466 - RNA, 19 nt, Artificial Sequence
  Description of Artificial Sequence: Synthetic oligonucleotide
  Antisense strand to SEQ ID NO: 1656465
aacucaaccaggcauuauu

SEQ ID NO: 1656467 - RNA, 19 nt, Artificial Sequence
  Description of Artificial Sequence: Synthetic oligonucleotide
  Sense strand starting at position 295 of SEQ ID NO: 1561234
uaggguuaggcucaucuga

SEQ ID NO: 1656468 - RNA, 19 nt, Artificial Sequence
  Description of Artificial Sequence: Synthetic oligonucleotide
  Antisense strand to SEQ ID NO: 1656467
ucagaugagccuaacccua

SEQ ID NO: 1656469 - RNA, 19 nt, Artificial Sequence
  Description of Artificial Sequence: Synthetic oligonucleotide
  Sense strand starting at position 451 of SEQ ID NO: 1561234
cggguacauucccugcaua

SEQ ID NO: 1656470 - RNA, 19 nt, Artificial Sequence
  Description of Artificial Sequence: Synthetic oligonucleotide
  Antisense strand to SEQ ID NO: 1656469
uaugcagggaauguacccg

SEQ ID NO: 1656471 - RNA, 19 nt, Artificial Sequence
  Description of Artificial Sequence: Synthetic oligonucleotide
  Sense strand starting at position 454 of SEQ ID NO: 1561234
guacauucccugcauagag

SEQ ID NO: 1656472 - RNA, 19 nt, Artificial Sequence
  Description of Artificial Sequence: Synthetic oligonucleotide
  Antisense strand to SEQ ID NO: 1656471
cucuaugcagggaauguac

SEQ ID NO: 1656473 - RNA, 19 nt, Artificial Sequence
  Description of Artificial Sequence: Synthetic oligonucleotide
  Sense strand starting at position 484 of SEQ ID NO: 1561234
ggaggaagccauugucacu

SEQ ID NO: 1656474 - RNA, 19 nt, Artificial Sequence
  Description of Artificial Sequence: Synthetic oligonucleotide
  Antisense strand to SEQ ID NO: 1656473
agugacaauggcuuccucc

SEQ ID NO: 1656475 - RNA, 19 nt, Artificial Sequence
  Description of Artificial Sequence: Synthetic oligonucleotide
  Sense strand starting at position 590 of SEQ ID NO: 1561234
gcaugacucccggaaguca

SEQ ID NO: 1656476 - RNA, 19 nt, Artificial Sequence
  Description of Artificial Sequence: Synthetic oligonucleotide
  Antisense strand to SEQ ID NO: 1656475
ugacuuccgggagucaugc

SEQ ID NO: 1656477 - RNA, 19 nt, Artificial Sequence
  Description of Artificial Sequence: Synthetic oligonucleotide
  Sense strand starting at position 782 of SEQ ID NO: 1561234
uggauuuagugaugaaauu

SEQ ID NO: 1656478 - RNA, 19 nt, Artificial Sequence
  Description of Artificial Sequence: Synthetic oligonucleotide
  Antisense strand to SEQ ID NO: 1656477
aauuucaucacuaaaucca

SEQ ID NO: 1656479 - RNA, 19 nt, Artificial Sequence
  Description of Artificial Sequence: Synthetic oligonucleotide
  Sense strand starting at position 957 of SEQ ID NO: 1561234
uccugcaguucugugaaca

SEQ ID NO: 1656480 - RNA, 19 nt, Artificial Sequence
  Description of Artificial Sequence: Synthetic oligonucleotide
  Antisense strand to SEQ ID NO: 1656479
uguucacagaacugcagga

SEQ ID NO: 1656481 - RNA, 19 nt, Artificial Sequence
  Description of Artificial Sequence: Synthetic oligonucleotide
  Sense strand starting at position 971 of SEQ ID NO: 1561234
gaacaccuccuguggaaga

SEQ ID NO: 1656482 - RNA, 19 nt, Artificial Sequence
  Description of Artificial Sequence: Synthetic oligonucleotide
  Antisense strand to SEQ ID NO: 1656481
ucuuccacaggagguguuc

SEQ ID NO: 1656483 - RNA, 19 nt, Artificial Sequence
  Description of Artificial Sequence: Synthetic oligonucleotide
  Sense strand starting at position 1216 of SEQ ID NO: 1561234
uguggauuccgguacaggu

SEQ ID NO: 1656484 - RNA, 19 nt, Artificial Sequence
  Description of Artificial Sequence: Synthetic oligonucleotide
  Antisense strand to SEQ ID NO: 1656483
accuguaccggaauccaca

SEQ ID NO: 1656485 - RNA, 19 nt, Artificial Sequence
  Description of Artificial Sequence: Synthetic oligonucleotide
  Sense strand starting at position 1241 of SEQ ID NO: 1561234
gcacuauggucugcacaga

SEQ ID NO: 1656486 - RNA, 19 nt, Artificial Sequence
  Description of Artificial Sequence: Synthetic oligonucleotide
  Antisense strand to SEQ ID NO: 1656485
ucugugcagaccauagugc

SEQ ID NO: 1656487 - RNA, 19 nt, Artificial Sequence
  Description of Artificial Sequence: Synthetic oligonucleotide
  Sense strand starting at position 1242 of SEQ ID NO: 1561234
cacuauggucugcacagaa

SEQ ID NO: 1656488 - RNA, 19 nt, Artificial Sequence
  Description of Artificial Sequence: Synthetic oligonucleotide
  Antisense strand to SEQ ID NO: 1656487
uucugugcagaccauagug

SEQ ID NO: 1656489 - RNA, 19 nt, Artificial Sequence
  Description of Artificial Sequence: Synthetic oligonucleotide
  Sense strand starting at position 1348 of SEQ ID NO: 1561234
cagccuaagcaucaugagu

SEQ ID NO: 1656490 - RNA, 19 nt, Artificial Sequence
  Description of Artificial Sequence: Synthetic oligonucleotide
  Antisense strand to SEQ ID NO: 1656489
acucaugaugcuuaggcug

SEQ ID NO: 1656491 - RNA, 19 nt, Artificial Sequence
  Description of Artificial Sequence: Synthetic oligonucleotide
  Sense strand starting at position 1914 of SEQ ID NO: 1561234
cucagucccgaauaucgaa

SEQ ID NO: 1656492 - RNA, 19 nt, Artificial Sequence
  Description of Artificial Sequence: Synthetic oligonucleotide
  Antisense strand to SEQ ID NO: 1656491
uucgauauucgggacugag

SEQ ID NO: 1656493 - RNA, 19 nt, Artificial Sequence
  Description of Artificial Sequence: Synthetic oligonucleotide
  Sense strand starting at position 1983 of SEQ ID NO: 1561234
acgucacuuccguugcuua

SEQ ID NO: 1656494 - RNA, 19 nt, Artificial Sequence
  Description of Artificial Sequence: Synthetic oligonucleotide
  Antisense strand to SEQ ID NO: 1656493
uaagcaacggaagugacgu

SEQ ID NO: 1656495 - RNA, 19 nt, Artificial Sequence
  Description of Artificial Sequence: Synthetic oligonucleotide
  Sense strand starting at position 2366 of SEQ ID NO: 1561234
acauuuaucucugauuugu

SEQ ID NO: 1656496 - RNA, 19 nt, Artificial Sequence
  Description of Artificial Sequence: Synthetic oligonucleotide
  Antisense strand to SEQ ID NO: 1656495
acaaaucagagauaaaugu

SEQ ID NO: 1656497 - RNA, 19 nt, Artificial Sequence
  Description of Artificial Sequence: Synthetic oligonucleotide
  Sense strand starting at position 2375 of SEQ ID NO: 1561234
ucugauuuguucuaauagg

SEQ ID NO: 1656498 - RNA, 19 nt, Artificial Sequence
  Description of Artificial Sequence: Synthetic oligonucleotide
  Antisense strand to SEQ ID NO: 1656497
ccuauuagaacaaaucaga

SEQ ID NO: 1656499 - RNA, 19 nt, Artificial Sequence
  Description of Artificial Sequence: Synthetic oligonucleotide
  Sense strand starting at position 2535 of SEQ ID NO: 1561234
ggaaguacuaccuggguaa

SEQ ID NO: 1656500 - RNA, 19 nt, Artificial Sequence
  Description of Artificial Sequence: Synthetic oligonucleotide
  Antisense strand to SEQ ID NO: 1656499
uuacccagguaguacuucc

SEQ ID NO: 1656501 - RNA, 19 nt, Artificial Sequence
  Description of Artificial Sequence: Synthetic oligonucleotide
  Sense strand starting at position 2536 of SEQ ID NO: 1561234
gaaguacuaccuggguaag

SEQ ID NO: 1656502 - RNA, 19 nt, Artificial Sequence
  Description of Artificial Sequence: Synthetic oligonucleotide
  Antisense strand to SEQ ID NO: 1656501
cuuacccagguaguacuuc

SEQ ID NO: 1656503 - RNA, 19 nt, Artificial Sequence
  Description of Artificial Sequence: Synthetic oligonucleotide
  Sense strand starting at position 2727 of SEQ ID NO: 1561234
auuucuggaucccaagaga

SEQ ID NO: 1656504 - RNA, 19 nt, Artificial Sequence
  Description of Artificial Sequence: Synthetic oligonucleotide
  Antisense strand to SEQ ID NO: 1656503
ucucuugggauccagaaau

SEQ ID NO: 1656505 - RNA, 19 nt, Artificial Sequence
  Description of Artificial Sequence: Synthetic oligonucleotide
  Sense strand starting at position 2778 of SEQ ID NO: 1561234
cugugaaagagaugguuga

SEQ ID NO: 1656506 - RNA, 19 nt, Artificial Sequence
  Description of Artificial Sequence: Synthetic oligonucleotide
  Antisense strand to SEQ ID NO: 1656505
ucaaccaucucuuucacag

SEQ ID NO: 1656507 - RNA, 19 nt, Artificial Sequence
  Description of Artificial Sequence: Synthetic oligonucleotide
  Sense strand starting at position 2831 of SEQ ID NO: 1561234
auuccugagucccugacaa

SEQ ID NO: 1656508 - RNA, 19 nt, Artificial Sequence
  Description of Artificial Sequence: Synthetic oligonucleotide
  Antisense strand to SEQ ID NO: 1656507
uugucagggacucaggaau

SEQ ID NO: 1656509 - RNA, 19 nt, Artificial Sequence
  Description of Artificial Sequence: Synthetic oligonucleotide
  Sense strand starting at position 2833 of SEQ ID NO: 1561234
uccugagucccugacaaca

SEQ ID NO: 1656510 - RNA, 19 nt, Artificial Sequence
  Description of Artificial Sequence: Synthetic oligonucleotide
  Antisense strand to SEQ ID NO: 1656509
uguugucagggacucagga

SEQ ID NO: 1656511 - RNA, 19 nt, Artificial Sequence
  Description of Artificial Sequence: Synthetic oligonucleotide
  Sense strand starting at position 2875 of SEQ ID NO: 1561234
gugggagaguuucuuccaa

SEQ ID NO: 1656512 - RNA, 19 nt, Artificial Sequence
  Description of Artificial Sequence: Synthetic oligonucleotide
  Antisense strand to SEQ ID NO: 1656511
uuggaagaaacucucccac

SEQ ID NO: 1656513 - RNA, 19 nt, Artificial Sequence
  Description of Artificial Sequence: Synthetic oligonucleotide
  Sense strand starting at position 2877 of SEQ ID NO: 1561234
gggagaguuucuuccaaau

SEQ ID NO: 1656514 - RNA, 19 nt, Artificial Sequence
  Description of Artificial Sequence: Synthetic oligonucleotide
  Antisense strand to SEQ ID NO: 1656513
auuuggaagaaacucuccc

SEQ ID NO: 1656515 - RNA, 19 nt, Artificial Sequence
  Description of Artificial Sequence: Synthetic oligonucleotide
  Sense strand starting at position 2891 of SEQ ID NO: 1561234
caaauagaucucgguggga

SEQ ID NO: 1656516 - RNA, 19 nt, Artificial Sequence
  Description of Artificial Sequence: Synthetic oligonucleotide
  Antisense strand to SEQ ID NO: 1656515
ucccaccgagaucuauuug

SEQ ID NO: 1656517 - RNA, 19 nt, Artificial Sequence
  Description of Artificial Sequence: Synthetic oligonucleotide
  Sense strand starting at position 2893 of SEQ ID NO: 1561234
aauagaucucggugggagu

SEQ ID NO: 1656518 - RNA, 19 nt, Artificial Sequence
  Description of Artificial Sequence: Synthetic oligonucleotide
  Antisense strand to SEQ ID NO: 1656517
acucccaccgagaucuauu

SEQ ID NO: 1656519 - RNA, 19 nt, Artificial Sequence
  Description of Artificial Sequence: Synthetic oligonucleotide
  Sense strand starting at position 2894 of SEQ ID NO: 1561234
auagaucucggugggaguu

SEQ ID NO: 1656520 - RNA, 19 nt, Artificial Sequence
  Description of Artificial Sequence: Synthetic oligonucleotide
  Antisense strand to SEQ ID NO: 1656519
aacucccaccgagaucuau

SEQ ID NO: 1656521 - RNA, 19 nt, Artificial Sequence
  Description of Artificial Sequence: Synthetic oligonucleotide
  Sense strand starting at position 3248 of SEQ ID NO: 1561234
uucuguuucccaugacaga

SEQ ID NO: 1656522 - RNA, 19 nt, Artificial Sequence
  Description of Artificial Sequence: Synthetic oligonucleotide
  Antisense strand to SEQ ID NO: 1656521
ucugucaugggaaacagaa

SEQ ID NO: 1656523 - RNA, 19 nt, Artificial Sequence
  Description of Artificial Sequence: Synthetic oligonucleotide
  Sense strand starting at position 3249 of SEQ ID NO: 1561234
ucuguuucccaugacagau

SEQ ID NO: 1656524 - RNA, 19 nt, Artificial Sequence
  Description of Artificial Sequence: Synthetic oligonucleotide
  Antisense strand to SEQ ID NO: 1656523
aucugucaugggaaacaga

SEQ ID NO: 1656525 - RNA, 19 nt, Artificial Sequence
  Description of Artificial Sequence: Synthetic oligonucleotide
  Sense strand starting at position 3714 of SEQ ID NO: 1561234
uuuccugcucaggaaacua

SEQ ID NO: 1656526 - RNA, 19 nt, Artificial Sequence
  Description of Artificial Sequence: Synthetic oligonucleotide
  Antisense strand to SEQ ID NO: 1656525
uaguuuccugagcaggaaa

SEQ ID NO: 1656527 - RNA, 19 nt, Artificial Sequence
  Description of Artificial Sequence: Synthetic oligonucleotide
  Sense strand starting at position 3724 of SEQ ID NO: 1561234
aggaaacuauuagaugaga

SEQ ID NO: 1656528 - RNA, 19 nt, Artificial Sequence
  Description of Artificial Sequence: Synthetic oligonucleotide
  Antisense strand to SEQ ID NO: 1656527
ucucaucuaauaguuuccu

SEQ ID NO: 1656529 - RNA, 19 nt, Artificial Sequence
  Description of Artificial Sequence: Synthetic oligonucleotide
  Sense strand starting at position 3729 of SEQ ID NO: 1561234
acuauuagaugagaaacua

SEQ ID NO: 1656530 - RNA, 19 nt, Artificial Sequence
  Description of Artificial Sequence: Synthetic oligonucleotide
  Antisense strand to SEQ ID NO: 1656529
uaguuucucaucuaauagu

SEQ ID NO: 1656531 - RNA, 19 nt, Artificial Sequence
  Description of Artificial Sequence: Synthetic oligonucleotide
  Sense strand starting at position 3751 of SEQ ID NO: 1561234
aaggaauagugcuuccauu

SEQ ID NO: 1656532 - RNA, 19 nt, Artificial Sequence
  Description of Artificial Sequence: Synthetic oligonucleotide
  Antisense strand to SEQ ID NO: 1656531
aauggaagcacuauuccuu

SEQ ID NO: 1656533 - RNA, 19 nt, Artificial Sequence
  Description of Artificial Sequence: Synthetic oligonucleotide
  Sense strand starting at position 3876 of SEQ ID NO: 1561234
gcuguuauccuguacuggu

SEQ ID NO: 1656534 - RNA, 19 nt, Artificial Sequence
  Description of Artificial Sequence: Synthetic oligonucleotide
  Antisense strand to SEQ ID NO: 1656533
accaguacaggauaacagc

SEQ ID NO: 1656535 - RNA, 19 nt, Artificial Sequence
  Description of Artificial Sequence: Synthetic oligonucleotide
  Sense strand starting at position 3889 of SEQ ID NO: 1561234
acugguagucgugaauuca

SEQ ID NO: 1656536 - RNA, 19 nt, Artificial Sequence
  Description of Artificial Sequence: Synthetic oligonucleotide
  Antisense strand to SEQ ID NO: 1656535
ugaauucacgacuaccagu

SEQ ID NO: 1656537 - RNA, 19 nt, Artificial Sequence
  Description of Artificial Sequence: Synthetic oligonucleotide
  Sense strand starting at position 3934 of SEQ ID NO: 1561234
gcaguauucucaucagaag

SEQ ID NO: 1656538 - RNA, 19 nt, Artificial Sequence
  Description of Artificial Sequence: Synthetic oligonucleotide
  Antisense strand to SEQ ID NO: 1656537
cuucugaugagaauacugc

SEQ ID NO: 1656539 - RNA, 19 nt, Artificial Sequence
  Description of Artificial Sequence: Synthetic oligonucleotide
  Sense strand starting at position 3951 of SEQ ID NO: 1561234
aguguagaucacgaugcua

SEQ ID NO: 1656540 - RNA, 19 nt, Artificial Sequence
  Description of Artificial Sequence: Synthetic oligonucleotide
  Antisense strand to SEQ ID NO: 1656539
uagcaucgugaucuacacu

SEQ ID NO: 1656541 - RNA, 19 nt, Artificial Sequence
  Description of Artificial Sequence: Synthetic oligonucleotide
  Sense strand starting at position 3953 of SEQ ID NO: 1561234
uguagaucacgaugcuacu

SEQ ID NO: 1656542 - RNA, 19 nt, Artificial Sequence
  Description of Artificial Sequence: Synthetic oligonucleotide
  Antisense strand to SEQ ID NO: 1656541
aguagcaucgugaucuaca

SEQ ID NO: 1656543 - RNA, 19 nt, Artificial Sequence
  Description of Artificial Sequence: Synthetic oligonucleotide
  Sense strand starting at position 3966 of SEQ ID NO: 1561234
gcuacuuccugggauuuau

SEQ ID NO: 1656544 - RNA, 19 nt, Artificial Sequence
  Description of Artificial Sequence: Synthetic oligonucleotide
  Antisense strand to SEQ ID NO: 1656543
auaaaucccaggaaguagc

SEQ ID NO: 1656545 - RNA, 19 nt, Artificial Sequence
  Description of Artificial Sequence: Synthetic oligonucleotide
  Sense strand starting at position 3975 of SEQ ID NO: 1561234
ugggauuuaucuggaccaa

SEQ ID NO: 1656546 - RNA, 19 nt, Artificial Sequence
  Description of Artificial Sequence: Synthetic oligonucleotide
  Antisense strand to SEQ ID NO: 1656545
uugguccagauaaauccca

SEQ ID NO: 1656547 - RNA, 19 nt, Artificial Sequence
  Description of Artificial Sequence: Synthetic oligonucleotide
  Sense strand starting at position 4 of SEQ ID NO: 1561235
cccguaagugaagaguuua

SEQ ID NO: 1656548 - RNA, 19 nt, Artificial Sequence
  Description of Artificial Sequence: Synthetic oligonucleotide
  Antisense strand to SEQ ID NO: 1656547
uaaacucuucacuuacggg

SEQ ID NO: 1656549 - RNA, 19 nt, Artificial Sequence
  Description of Artificial Sequence: Synthetic oligonucleotide
  Sense strand starting at position 70 of SEQ ID NO: 1561235
ucucuauauugagaucuga

SEQ ID NO: 1656550 - RNA, 19 nt, Artificial Sequence
  Description of Artificial Sequence: Synthetic oligonucleotide
  Antisense strand to SEQ ID NO: 1656549
ucagaucucaauauagaga

SEQ ID NO: 1656551 - RNA, 19 nt, Artificial Sequence
  Description of Artificial Sequence: Synthetic oligonucleotide
  Sense strand starting at position 89 of SEQ ID NO: 1561235
gacugaguauuaucaggug

SEQ ID NO: 1656552 - RNA, 19 nt, Artificial Sequence
  Description of Artificial Sequence: Synthetic oligonucleotide
  Antisense strand to SEQ ID NO: 1656551
caccugauaauacucaguc

SEQ ID NO: 1656553 - RNA, 19 nt, Artificial Sequence
  Description of Artificial Sequence: Synthetic oligonucleotide
  Sense strand starting at position 105 of SEQ ID NO: 1561235
gugcccugagauugggauu

SEQ ID NO: 1656554 - RNA, 19 nt, Artificial Sequence
  Description of Artificial Sequence: Synthetic oligonucleotide
  Antisense strand to SEQ ID NO: 1656553
aaucccaaucucagggcac

SEQ ID NO: 1656555 - RNA, 19 nt, Artificial Sequence
  Description of Artificial Sequence: Synthetic oligonucleotide
  Sense strand starting at position 108 of SEQ ID NO: 1561235
cccugagauugggauugua

SEQ ID NO: 1656556 - RNA, 19 nt, Artificial Sequence
  Description of Artificial Sequence: Synthetic oligonucleotide
  Antisense strand to SEQ ID NO: 1656555
uacaaucccaaucucaggg

SEQ ID NO: 1656557 - RNA, 19 nt, Artificial Sequence
  Description of Artificial Sequence: Synthetic oligonucleotide
  Sense strand starting at position 123 of SEQ ID NO: 1561235
uguaaaugauuugagguuu

SEQ ID NO: 1656558 - RNA, 19 nt, Artificial Sequence
  Description of Artificial Sequence: Synthetic oligonucleotide
  Antisense strand to SEQ ID NO: 1656557
aaaccucaaaucauuuaca

SEQ ID NO: 1656559 - RNA, 19 nt, Artificial Sequence
  Description of Artificial Sequence: Synthetic oligonucleotide
  Sense strand starting at position 134 of SEQ ID NO: 1561235
ugagguuugucucaaacac

SEQ ID NO: 1656560 - RNA, 19 nt, Artificial Sequence
  Description of Artificial Sequence: Synthetic oligonucleotide
  Antisense strand to SEQ ID NO: 1656559
guguuugagacaaaccuca

SEQ ID NO: 1656561 - RNA, 19 nt, Artificial Sequence
  Description of Artificial Sequence: Synthetic oligonucleotide
  Sense strand starting at position 248 of SEQ ID NO: 1561235
ugccaaacacguuaauaug

SEQ ID NO: 1656562 - RNA, 19 nt, Artificial Sequence
  Description of Artificial Sequence: Synthetic oligonucleotide
  Antisense strand to SEQ ID NO: 1656561
cauauuaacguguuuggca

SEQ ID NO: 1656563 - RNA, 19 nt, Artificial Sequence
  Description of Artificial Sequence: Synthetic oligonucleotide
  Sense strand starting at position 392 of SEQ ID NO: 1561235
cccucauccacgugaagga

SEQ ID NO: 1656564 - RNA, 19 nt, Artificial Sequence
  Description of Artificial Sequence: Synthetic oligonucleotide
  Antisense strand to SEQ ID NO: 1656563
uccuucacguggaugaggg

SEQ ID NO: 1656565 - RNA, 19 nt, Artificial Sequence
  Description of Artificial Sequence: Synthetic oligonucleotide
  Sense strand starting at position 888 of SEQ ID NO: 1561235
gugcccucaccuuguuuau

SEQ ID NO: 1656566 - RNA, 19 nt, Artificial Sequence
  Description of Artificial Sequence: Synthetic oligonucleotide
  Antisense strand to SEQ ID NO: 1656565
auaaacaaggugagggcac

SEQ ID NO: 1656567 - RNA, 19 nt, Artificial Sequence
  Description of Artificial Sequence: Synthetic oligonucleotide
  Sense strand starting at position 2056 of SEQ ID NO: 1561235
gcgcgagauuucccuuaca

SEQ ID NO: 1656568 - RNA, 19 nt, Artificial Sequence
  Description of Artificial Sequence: Synthetic oligonucleotide
  Antisense strand to SEQ ID NO: 1656567
uguaagggaaaucucgcgc

SEQ ID NO: 1656569 - RNA, 19 nt, Artificial Sequence
  Description of Artificial Sequence: Synthetic oligonucleotide
  Sense strand starting at position 2067 of SEQ ID NO: 1561235
cccuuacaacggugaaagu

SEQ ID NO: 1656570 - RNA, 19 nt, Artificial Sequence
  Description of Artificial Sequence: Synthetic oligonucleotide
  Antisense strand to SEQ ID NO: 1656569
acuuucaccguuguaaggg

SEQ ID NO: 1656571 - RNA, 19 nt, Artificial Sequence
  Description of Artificial Sequence: Synthetic oligonucleotide
  Sense strand starting at position 2180 of SEQ ID NO: 1561235
gacggaucaucuggcauua

SEQ ID NO: 1656572 - RNA, 19 nt, Artificial Sequence
  Description of Artificial Sequence: Synthetic oligonucleotide
  Antisense strand to SEQ ID NO: 1656571
uaaugccagaugauccguc

SEQ ID NO: 1656573 - RNA, 19 nt, Artificial Sequence
  Description of Artificial Sequence: Synthetic oligonucleotide
  Sense strand starting at position 2182 of SEQ ID NO: 1561235
cggaucaucuggcauuacu

SEQ ID NO: 1656574 - RNA, 19 nt, Artificial Sequence
  Description of Artificial Sequence: Synthetic oligonucleotide
  Antisense strand to SEQ ID NO: 1656573
aguaaugccagaugauccg

SEQ ID NO: 1656575 - RNA, 19 nt, Artificial Sequence
  Description of Artificial Sequence: Synthetic oligonucleotide
  Sense strand starting at position 2191 of SEQ ID NO: 1561235
uggcauuacuuccgggaga

SEQ ID NO: 1656576 - RNA, 19 nt, Artificial Sequence
  Description of Artificial Sequence: Synthetic oligonucleotide
  Antisense strand to SEQ ID NO: 1656575
ucucccggaaguaaugcca

SEQ ID NO: 1656577 - RNA, 19 nt, Artificial Sequence
  Description of Artificial Sequence: Synthetic oligonucleotide
  Sense strand starting at position 2192 of SEQ ID NO: 1561235
ggcauuacuuccgggagac

SEQ ID NO: 1656578 - RNA, 19 nt, Artificial Sequence
  Description of Artificial Sequence: Synthetic oligonucleotide
  Antisense strand to SEQ ID NO: 1656577
gucucccggaaguaaugcc

SEQ ID NO: 1656579 - RNA, 19 nt, Artificial Sequence
  Description of Artificial Sequence: Synthetic oligonucleotide
  Sense strand starting at position 2193 of SEQ ID NO: 1561235
gcauuacuuccgggagaca

SEQ ID NO: 1656580 - RNA, 19 nt, Artificial Sequence
  Description of Artificial Sequence: Synthetic oligonucleotide
  Antisense strand to SEQ ID NO: 1656579
ugucucccggaaguaaugc

SEQ ID NO: 1656581 - RNA, 19 nt, Artificial Sequence
  Description of Artificial Sequence: Synthetic oligonucleotide
  Sense strand starting at position 2208 of SEQ ID NO: 1561235
gacagaugaucuggcguua

SEQ ID NO: 1656582 - RNA, 19 nt, Artificial Sequence
  Description of Artificial Sequence: Synthetic oligonucleotide
  Antisense strand to SEQ ID NO: 1656581
uaacgccagaucaucuguc

SEQ ID NO: 1656583 - RNA, 19 nt, Artificial Sequence
  Description of Artificial Sequence: Synthetic oligonucleotide
  Sense strand starting at position 2245 of SEQ ID NO: 1561235
acggaaguauccuccagac

SEQ ID NO: 1656584 - RNA, 19 nt, Artificial Sequence
  Description of Artificial Sequence: Synthetic oligonucleotide
  Antisense strand to SEQ ID NO: 1656583
gucuggaggauacuuccgu

SEQ ID NO: 1656585 - RNA, 19 nt, Artificial Sequence
  Description of Artificial Sequence: Synthetic oligonucleotide
  Sense strand starting at position 2292 of SEQ ID NO: 1561235
gcuagaggucaucgacuca

SEQ ID NO: 1656586 - RNA, 19 nt, Artificial Sequence
  Description of Artificial Sequence: Synthetic oligonucleotide
  Antisense strand to SEQ ID NO: 1656585
ugagucgaugaccucuagc

SEQ ID NO: 1656587 - RNA, 19 nt, Artificial Sequence
  Description of Artificial Sequence: Synthetic oligonucleotide
  Sense strand starting at position 2687 of SEQ ID NO: 1561235
cgagcucugccuccgaguu

SEQ ID NO: 1656588 - RNA, 19 nt, Artificial Sequence
  Description of Artificial Sequence: Synthetic oligonucleotide
  Antisense strand to SEQ ID NO: 1656587
aacucggaggcagagcucg

SEQ ID NO: 1656589 - RNA, 19 nt, Artificial Sequence
  Description of Artificial Sequence: Synthetic oligonucleotide
  Sense strand starting at position 2688 of SEQ ID NO: 1561235
gagcucugccuccgaguuu

SEQ ID NO: 1656590 - RNA, 19 nt, Artificial Sequence
  Description of Artificial Sequence: Synthetic oligonucleotide
  Antisense strand to SEQ ID NO: 1656589
aaacucggaggcagagcuc

SEQ ID NO: 1656591 - RNA, 19 nt, Artificial Sequence
  Description of Artificial Sequence: Synthetic oligonucleotide
  Sense strand starting at position 2882 of SEQ ID NO: 1561235
aggccaaguuuauuccaaa

SEQ ID NO: 1656592 - RNA, 19 nt, Artificial Sequence
  Description of Artificial Sequence: Synthetic oligonucleotide
  Antisense strand to SEQ ID NO: 1656591
uuuggaauaaacuuggccu

SEQ ID NO: 1656593 - RNA, 19 nt, Artificial Sequence
  Description of Artificial Sequence: Synthetic oligonucleotide
  Sense strand starting at position 2883 of SEQ ID NO: 1561235
ggccaaguuuauuccaaau

SEQ ID NO: 1656594 - RNA, 19 nt, Artificial Sequence
  Description of Artificial Sequence: Synthetic oligonucleotide
  Antisense strand to SEQ ID NO: 1656593
auuuggaauaaacuuggcc

SEQ ID NO: 1656595 - RNA, 19 nt, Artificial Sequence
  Description of Artificial Sequence: Synthetic oligonucleotide
  Sense strand starting at position 29 of SEQ ID NO: 1561236
uuuguuuaaucauccugga

SEQ ID NO: 1656596 - RNA, 19 nt, Artificial Sequence
  Description of Artificial Sequence: Synthetic oligonucleotide
  Antisense strand to SEQ ID NO: 1656595
uccaggaugauuaaacaaa

SEQ ID NO: 1656597 - RNA, 19 nt, Artificial Sequence
  Description of Artificial Sequence: Synthetic oligonucleotide
  Sense strand starting at position 103 of SEQ ID NO: 1561236
auaugugcugucgagguaa

SEQ ID NO: 1656598 - RNA, 19 nt, Artificial Sequence
  Description of Artificial Sequence: Synthetic oligonucleotide
  Antisense strand to SEQ ID NO: 1656597
uuaccucgacagcacauau

SEQ ID NO: 1656599 - RNA, 19 nt, Artificial Sequence
  Description of Artificial Sequence: Synthetic oligonucleotide
  Sense strand starting at position 105 of SEQ ID NO: 1561236
augugcugucgagguaaac

SEQ ID NO: 1656600 - RNA, 19 nt, Artificial Sequence
  Description of Artificial Sequence: Synthetic oligonucleotide
  Antisense strand to SEQ ID NO: 1656599
guuuaccucgacagcacau

SEQ ID NO: 1656601 - RNA, 19 nt, Artificial Sequence
  Description of Artificial Sequence: Synthetic oligonucleotide
  Sense strand starting at position 746 of SEQ ID NO: 1561236
auggcaaacguuuauugaa

SEQ ID NO: 1656602 - RNA, 19 nt, Artificial Sequence
  Description of Artificial Sequence: Synthetic oligonucleotide
  Antisense strand to SEQ ID NO: 1656601
uucaauaaacguuugccau

SEQ ID NO: 1656603 - RNA, 19 nt, Artificial Sequence
  Description of Artificial Sequence: Synthetic oligonucleotide
  Sense strand starting at position 749 of SEQ ID NO: 1561236
gcaaacguuuauugaauuu

SEQ ID NO: 1656604 - RNA, 19 nt, Artificial Sequence
  Description of Artificial Sequence: Synthetic oligonucleotide
  Antisense strand to SEQ ID NO: 1656603
aaauucaauaaacguuugc

SEQ ID NO: 1656605 - RNA, 19 nt, Artificial Sequence
  Description of Artificial Sequence: Synthetic oligonucleotide
  Sense strand starting at position 816 of SEQ ID NO: 1561236
cuauuaaccugagaacugu

SEQ ID NO: 1656606 - RNA, 19 nt, Artificial Sequence
  Description of Artificial Sequence: Synthetic oligonucleotide
  Antisense strand to SEQ ID NO: 1656605
acaguucucagguuaauag

SEQ ID NO: 1656607 - RNA, 19 nt, Artificial Sequence
  Description of Artificial Sequence: Synthetic oligonucleotide
  Sense strand starting at position 1035 of SEQ ID NO: 1561236
aaguuugcauuaguagaaa

SEQ ID NO: 1656608 - RNA, 19 nt, Artificial Sequence
  Description of Artificial Sequence: Synthetic oligonucleotide
  Antisense strand to SEQ ID NO: 1656607
uuucuacuaaugcaaacuu

SEQ ID NO: 1656609 - RNA, 19 nt, Artificial Sequence
  Description of Artificial Sequence: Synthetic oligonucleotide
  Sense strand starting at position 1107 of SEQ ID NO: 1561236
guccuaacgucuuuaauga

SEQ ID NO: 1656610 - RNA, 19 nt, Artificial Sequence
  Description of Artificial Sequence: Synthetic oligonucleotide
  Antisense strand to SEQ ID NO: 1656609
ucauuaaagacguuaggac

SEQ ID NO: 1656611 - RNA, 19 nt, Artificial Sequence
  Description of Artificial Sequence: Synthetic oligonucleotide
  Sense strand starting at position 1108 of SEQ ID NO: 1561236
uccuaacgucuuuaaugaa

SEQ ID NO: 1656612 - RNA, 19 nt, Artificial Sequence
  Description of Artificial Sequence: Synthetic oligonucleotide
  Antisense strand to SEQ ID NO: 1656611
uucauuaaagacguuagga

SEQ ID NO: 1656613 - RNA, 19 nt, Artificial Sequence
  Description of Artificial Sequence: Synthetic oligonucleotide
  Sense strand starting at position 1141 of SEQ ID NO: 1561236
cgucuacugugagagcaau

SEQ ID NO: 1656614 - RNA, 19 nt, Artificial Sequence
  Description of Artificial Sequence: Synthetic oligonucleotide
  Antisense strand to SEQ ID NO: 1656613
auugcucucacaguagacg

SEQ ID NO: 1656615 - RNA, 19 nt, Artificial Sequence
  Description of Artificial Sequence: Synthetic oligonucleotide
  Sense strand starting at position 1147 of SEQ ID NO: 1561236
cugugagagcaaugacagu

SEQ ID NO: 1656616 - RNA, 19 nt, Artificial Sequence
  Description of Artificial Sequence: Synthetic oligonucleotide
  Antisense strand to SEQ ID NO: 1656615
acugucauugcucucacag

SEQ ID NO: 1656617 - RNA, 19 nt, Artificial Sequence
  Description of Artificial Sequence: Synthetic oligonucleotide
  Sense strand starting at position 1268 of SEQ ID NO: 1561236
ggaaauagcguuugcacuc

SEQ ID NO: 1656618 - RNA, 19 nt, Artificial Sequence
  Description of Artificial Sequence: Synthetic oligonucleotide
  Antisense strand to SEQ ID NO: 1656617
gagugcaaacgcuauuucc

SEQ ID NO: 1656619 - RNA, 19 nt, Artificial Sequence
  Description of Artificial Sequence: Synthetic oligonucleotide
  Sense strand starting at position 1306 of SEQ ID NO: 1561236
gugcgcguuccguguguaa

SEQ ID NO: 1656620 - RNA, 19 nt, Artificial Sequence
  Description of Artificial Sequence: Synthetic oligonucleotide
  Antisense strand to SEQ ID NO: 1656619
uuacacacggaacgcgcac

SEQ ID NO: 1656621 - RNA, 19 nt, Artificial Sequence
  Description of Artificial Sequence: Synthetic oligonucleotide
  Sense strand starting at position 1307 of SEQ ID NO: 1561236
ugcgcguuccguguguaaa

SEQ ID NO: 1656622 - RNA, 19 nt, Artificial Sequence
  Description of Artificial Sequence: Synthetic oligonucleotide
  Antisense strand to SEQ ID NO: 1656621
uuuacacacggaacgcgca

SEQ ID NO: 1656623 - RNA, 19 nt, Artificial Sequence
  Description of Artificial Sequence: Synthetic oligonucleotide
  Sense strand starting at position 1308 of SEQ ID NO: 1561236
gcgcguuccguguguaaac

SEQ ID NO: 1656624 - RNA, 19 nt, Artificial Sequence
  Description of Artificial Sequence: Synthetic oligonucleotide
  Antisense strand to SEQ ID NO: 1656623
guuuacacacggaacgcgc

SEQ ID NO: 1656625 - RNA, 19 nt, Artificial Sequence
  Description of Artificial Sequence: Synthetic oligonucleotide
  Sense strand starting at position 1318 of SEQ ID NO: 1561236
uguguaaacccgcucguga

SEQ ID NO: 1656626 - RNA, 19 nt, Artificial Sequence
  Description of Artificial Sequence: Synthetic oligonucleotide
  Antisense strand to SEQ ID NO: 1656625
ucacgagcggguuuacaca

SEQ ID NO: 1656627 - RNA, 19 nt, Artificial Sequence
  Description of Artificial Sequence: Synthetic oligonucleotide
  Sense strand starting at position 1349 of SEQ ID NO: 1561236
acgcguuggucgcuaucau

SEQ ID NO: 1656628 - RNA, 19 nt, Artificial Sequence
  Description of Artificial Sequence: Synthetic oligonucleotide
  Antisense strand to SEQ ID NO: 1656627
augauagcgaccaacgcgu

SEQ ID NO: 1656629 - RNA, 19 nt, Artificial Sequence
  Description of Artificial Sequence: Synthetic oligonucleotide
  Sense strand starting at position 1350 of SEQ ID NO: 1561236
cgcguuggucgcuaucauu

SEQ ID NO: 1656630 - RNA, 19 nt, Artificial Sequence
  Description of Artificial Sequence: Synthetic oligonucleotide
  Antisense strand to SEQ ID NO: 1656629
aaugauagcgaccaacgcg

SEQ ID NO: 1656631 - RNA, 19 nt, Artificial Sequence
  Description of Artificial Sequence: Synthetic oligonucleotide
  Sense strand starting at position 1384 of SEQ ID NO: 1561236
gcgucguuacuucggaguu

SEQ ID NO: 1656632 - RNA, 19 nt, Artificial Sequence
  Description of Artificial Sequence: Synthetic oligonucleotide
  Antisense strand to SEQ ID NO: 1656631
aacuccgaaguaacgacgc

SEQ ID NO: 1656633 - RNA, 19 nt, Artificial Sequence
  Description of Artificial Sequence: Synthetic oligonucleotide
  Sense strand starting at position 1386 of SEQ ID NO: 1561236
gucguuacuucggaguuac

SEQ ID NO: 1656634 - RNA, 19 nt, Artificial Sequence
  Description of Artificial Sequence: Synthetic oligonucleotide
  Antisense strand to SEQ ID NO: 1656633
guaacuccgaaguaacgac

SEQ ID NO: 1656635 - RNA, 19 nt, Artificial Sequence
  Description of Artificial Sequence: Synthetic oligonucleotide
  Sense strand starting at position 2140 of SEQ ID NO: 1561236
cgguguuauucccacacca

SEQ ID NO: 1656636 - RNA, 19 nt, Artificial Sequence
  Description of Artificial Sequence: Synthetic oligonucleotide
  Antisense strand to SEQ ID NO: 1656635
uggugugggaauaacaccg

SEQ ID NO: 1656637 - RNA, 19 nt, Artificial Sequence
  Description of Artificial Sequence: Synthetic oligonucleotide
  Sense strand starting at position 2186 of SEQ ID NO: 1561236
gucuaagggucgccuucua

SEQ ID NO: 1656638 - RNA, 19 nt, Artificial Sequence
  Description of Artificial Sequence: Synthetic oligonucleotide
  Antisense strand to SEQ ID NO: 1656637
uagaaggcgacccuuagac

SEQ ID NO: 1656639 - RNA, 19 nt, Artificial Sequence
  Description of Artificial Sequence: Synthetic oligonucleotide
  Sense strand starting at position 2226 of SEQ ID NO: 1561236
ccaagacuuccuuacaggu

SEQ ID NO: 1656640 - RNA, 19 nt, Artificial Sequence
  Description of Artificial Sequence: Synthetic oligonucleotide
  Antisense strand to SEQ ID NO: 1656639
accuguaaggaagucuugg

SEQ ID NO: 1656641 - RNA, 19 nt, Artificial Sequence
  Description of Artificial Sequence: Synthetic oligonucleotide
  Sense strand starting at position 2250 of SEQ ID NO: 1561236
aacugaugucccuauacgu

SEQ ID NO: 1656642 - RNA, 19 nt, Artificial Sequence
  Description of Artificial Sequence: Synthetic oligonucleotide
  Antisense strand to SEQ ID NO: 1656641
acguauagggacaucaguu

SEQ ID NO: 1656643 - RNA, 19 nt, Artificial Sequence
  Description of Artificial Sequence: Synthetic oligonucleotide
  Sense strand starting at position 2346 of SEQ ID NO: 1561236
auuggacaauaugaucaau

SEQ ID NO: 1656644 - RNA, 19 nt, Artificial Sequence
  Description of Artificial Sequence: Synthetic oligonucleotide
  Antisense strand to SEQ ID NO: 1656643
auugaucauauuguccaau

SEQ ID NO: 1656645 - RNA, 19 nt, Artificial Sequence
  Description of Artificial Sequence: Synthetic oligonucleotide
  Sense strand starting at position 3000 of SEQ ID NO: 1561236
cuacuaaacugguagaaag

SEQ ID NO: 1656646 - RNA, 19 nt, Artificial Sequence
  Description of Artificial Sequence: Synthetic oligonucleotide
  Antisense strand to SEQ ID NO: 1656645
cuuucuaccaguuuaguag

SEQ ID NO: 1656647 - RNA, 19 nt, Artificial Sequence
  Description of Artificial Sequence: Synthetic oligonucleotide
  Sense strand starting at position 3074 of SEQ ID NO: 1561236
agguaaagauuccaaagca

SEQ ID NO: 1656648 - RNA, 19 nt, Artificial Sequence
  Description of Artificial Sequence: Synthetic oligonucleotide
  Antisense strand to SEQ ID NO: 1656647
ugcuuuggaaucuuuaccu

SEQ ID NO: 1656649 - RNA, 19 nt, Artificial Sequence
  Description of Artificial Sequence: Synthetic oligonucleotide
  Sense strand starting at position 3301 of SEQ ID NO: 1561236
uuccaauucuaggaaacug

SEQ ID NO: 1656650 - RNA, 19 nt, Artificial Sequence
  Description of Artificial Sequence: Synthetic oligonucleotide
  Antisense strand to SEQ ID NO: 1656649
caguuuccuagaauuggaa

SEQ ID NO: 1656651 - RNA, 19 nt, Artificial Sequence
  Description of Artificial Sequence: Synthetic oligonucleotide
  Sense strand starting at position 3311 of SEQ ID NO: 1561236
aggaaacuguccuguagca

SEQ ID NO: 1656652 - RNA, 19 nt, Artificial Sequence
  Description of Artificial Sequence: Synthetic oligonucleotide
  Antisense strand to SEQ ID NO: 1656651
ugcuacaggacaguuuccu

SEQ ID NO: 1656653 - RNA, 19 nt, Artificial Sequence
  Description of Artificial Sequence: Synthetic oligonucleotide
  Sense strand starting at position 3313 of SEQ ID NO: 1561236
gaaacuguccuguagcagu

SEQ ID NO: 1656654 - RNA, 19 nt, Artificial Sequence
  Description of Artificial Sequence: Synthetic oligonucleotide
  Antisense strand to SEQ ID NO: 1656653
acugcuacaggacaguuuc

SEQ ID NO: 1656655 - RNA, 19 nt, Artificial Sequence
  Description of Artificial Sequence: Synthetic oligonucleotide
  Sense strand starting at position 3323 of SEQ ID NO: 1561236
uguagcaguuaucauugau

SEQ ID NO: 1656656 - RNA, 19 nt, Artificial Sequence
  Description of Artificial Sequence: Synthetic oligonucleotide
  Antisense strand to SEQ ID NO: 1656655
aucaaugauaacugcuaca

SEQ ID NO: 1656657 - RNA, 19 nt, Artificial Sequence
  Description of Artificial Sequence: Synthetic oligonucleotide
  Sense strand starting at position 3354 of SEQ ID NO: 1561236
uaaauuuaguuacagggau

SEQ ID NO: 1656658 - RNA, 19 nt, Artificial Sequence
  Description of Artificial Sequence: Synthetic oligonucleotide
  Antisense strand to SEQ ID NO: 1656657
aucccuguaacuaaauuua

SEQ ID NO: 1656659 - RNA, 19 nt, Artificial Sequence
  Description of Artificial Sequence: Synthetic oligonucleotide
  Sense strand starting at position 3370 of SEQ ID NO: 1561236
gauggccaucaugggaaua

SEQ ID NO: 1656660 - RNA, 19 nt, Artificial Sequence
  Description of Artificial Sequence: Synthetic oligonucleotide
  Antisense strand to SEQ ID NO: 1656659
uauucccaugauggccauc

SEQ ID NO: 1656661 - RNA, 19 nt, Artificial Sequence
  Description of Artificial Sequence: Synthetic oligonucleotide
  Sense strand starting at position 3372 of SEQ ID NO: 1561236
uggccaucaugggaauaaa

SEQ ID NO: 1656662 - RNA, 19 nt, Artificial Sequence
  Description of Artificial Sequence: Synthetic oligonucleotide
  Antisense strand to SEQ ID NO: 1656661
uuuauucccaugauggcca

SEQ ID NO: 1656663 - RNA, 19 nt, Artificial Sequence
  Description of Artificial Sequence: Synthetic oligonucleotide
  Sense strand starting at position 3458 of SEQ ID NO: 1561236
uauaaauuauguuguggga

SEQ ID NO: 1656664 - RNA, 19 nt, Artificial Sequence
  Description of Artificial Sequence: Synthetic oligonucleotide
  Antisense strand to SEQ ID NO: 1656663
ucccacaacauaauuuaua

SEQ ID NO: 1656665 - RNA, 19 nt, Artificial Sequence
  Description of Artificial Sequence: Synthetic oligonucleotide
  Sense strand starting at position 3460 of SEQ ID NO: 1561236
uaaauuauguugugggaaa

SEQ ID NO: 1656666 - RNA, 19 nt, Artificial Sequence
  Description of Artificial Sequence: Synthetic oligonucleotide
  Antisense strand to SEQ ID NO: 1656665
uuucccacaacauaauuua

SEQ ID NO: 1656667 - RNA, 19 nt, Artificial Sequence
  Description of Artificial Sequence: Synthetic oligonucleotide
  Sense strand starting at position 3552 of SEQ ID NO: 1561236
ucauuauccucaucuacgu

SEQ ID NO: 1656668 - RNA, 19 nt, Artificial Sequence
  Description of Artificial Sequence: Synthetic oligonucleotide
  Antisense strand to SEQ ID NO: 1656667
acguagaugaggauaauga

SEQ ID NO: 1656669 - RNA, 19 nt, Artificial Sequence
  Description of Artificial Sequence: Synthetic oligonucleotide
  Sense strand starting at position 3572 of SEQ ID NO: 1561236
ggcagagcaugucugaaca

SEQ ID NO: 1656670 - RNA, 19 nt, Artificial Sequence
  Description of Artificial Sequence: Synthetic oligonucleotide
  Antisense strand to SEQ ID NO: 1656669
uguucagacaugcucugcc

SEQ ID NO: 1656671 - RNA, 19 nt, Artificial Sequence
  Description of Artificial Sequence: Synthetic oligonucleotide
  Sense strand starting at position 3842 of SEQ ID NO: 1561236
gguucaguggcuugaucag

SEQ ID NO: 1656672 - RNA, 19 nt, Artificial Sequence
  Description of Artificial Sequence: Synthetic oligonucleotide
  Antisense strand to SEQ ID NO: 1656671
cugaucaagccacugaacc

SEQ ID NO: 1656673 - RNA, 19 nt, Artificial Sequence
  Description of Artificial Sequence: Synthetic oligonucleotide
  Sense strand starting at position 3896 of SEQ ID NO: 1561236
gugucagagguguacacaa

SEQ ID NO: 1656674 - RNA, 19 nt, Artificial Sequence
  Description of Artificial Sequence: Synthetic oligonucleotide
  Antisense strand to SEQ ID NO: 1656673
uuguguacaccucugacac

SEQ ID NO: 1656675 - RNA, 19 nt, Artificial Sequence
  Description of Artificial Sequence: Synthetic oligonucleotide
  Sense strand starting at position 54 of SEQ ID NO: 1561237
uaccuuucuggauguugua

SEQ ID NO: 1656676 - RNA, 19 nt, Artificial Sequence
  Description of Artificial Sequence: Synthetic oligonucleotide
  Antisense strand to SEQ ID NO: 1656675
uacaacauccagaaaggua

SEQ ID NO: 1656677 - RNA, 19 nt, Artificial Sequence
  Description of Artificial Sequence: Synthetic oligonucleotide
  Sense strand starting at position 170 of SEQ ID NO: 1561237
ggcucugcggaccauauua

SEQ ID NO: 1656678 - RNA, 19 nt, Artificial Sequence
  Description of Artificial Sequence: Synthetic oligonucleotide
  Antisense strand to SEQ ID NO: 1656677
uaauaugguccgcagagcc

SEQ ID NO: 1656679 - RNA, 19 nt, Artificial Sequence
  Description of Artificial Sequence: Synthetic oligonucleotide
  Sense strand starting at position 178 of SEQ ID NO: 1561237
ggaccauauuacuggcagu

SEQ ID NO: 1656680 - RNA, 19 nt, Artificial Sequence
  Description of Artificial Sequence: Synthetic oligonucleotide
  Antisense strand to SEQ ID NO: 1656679
acugccaguaauauggucc

SEQ ID NO: 1656681 - RNA, 19 nt, Artificial Sequence
  Description of Artificial Sequence: Synthetic oligonucleotide
  Sense strand starting at position 502 of SEQ ID NO: 1561237
cauguuugcgucugcagga

SEQ ID NO: 1656682 - RNA, 19 nt, Artificial Sequence
  Description of Artificial Sequence: Synthetic oligonucleotide
  Antisense strand to SEQ ID NO: 1656681
uccugcagacgcaaacaug

SEQ ID NO: 1656683 - RNA, 19 nt, Artificial Sequence
  Description of Artificial Sequence: Synthetic oligonucleotide
  Sense strand starting at position 532 of SEQ ID NO: 1561237
aggauagacuggugagcaa

SEQ ID NO: 1656684 - RNA, 19 nt, Artificial Sequence
  Description of Artificial Sequence: Synthetic oligonucleotide
  Antisense strand to SEQ ID NO: 1656683
uugcucaccagucuauccu

SEQ ID NO: 1656685 - RNA, 19 nt, Artificial Sequence
  Description of Artificial Sequence: Synthetic oligonucleotide
  Sense strand starting at position 546 of SEQ ID NO: 1561237
agcaaugcaugccugagua

SEQ ID NO: 1656686 - RNA, 19 nt, Artificial Sequence
  Description of Artificial Sequence: Synthetic oligonucleotide
  Antisense strand to SEQ ID NO: 1656685
uacucaggcaugcauugcu

SEQ ID NO: 1656687 - RNA, 19 nt, Artificial Sequence
  Description of Artificial Sequence: Synthetic oligonucleotide
  Sense strand starting at position 671 of SEQ ID NO: 1561237
cugcuaggcuucucacaca

SEQ ID NO: 1656688 - RNA, 19 nt, Artificial Sequence
  Description of Artificial Sequence: Synthetic oligonucleotide
  Antisense strand to SEQ ID NO: 1656687
ugugugagaagccuagcag

SEQ ID NO: 1656689 - RNA, 19 nt, Artificial Sequence
  Description of Artificial Sequence: Synthetic oligonucleotide
  Sense strand starting at position 693 of SEQ ID NO: 1561237
uggccuguagucuaaacau

SEQ ID NO: 1656690 - RNA, 19 nt, Artificial Sequence
  Description of Artificial Sequence: Synthetic oligonucleotide
  Antisense strand to SEQ ID NO: 1656689
auguuuagacuacaggcca

SEQ ID NO: 1656691 - RNA, 19 nt, Artificial Sequence
  Description of Artificial Sequence: Synthetic oligonucleotide
  Sense strand starting at position 702 of SEQ ID NO: 1561237
gucuaaacauguccuggaa

SEQ ID NO: 1656692 - RNA, 19 nt, Artificial Sequence
  Description of Artificial Sequence: Synthetic oligonucleotide
  Antisense strand to SEQ ID NO: 1656691
uuccaggacauguuuagac

SEQ ID NO: 1656693 - RNA, 19 nt, Artificial Sequence
  Description of Artificial Sequence: Synthetic oligonucleotide
  Sense strand starting at position 704 of SEQ ID NO: 1561237
cuaaacauguccuggaacu

SEQ ID NO: 1656694 - RNA, 19 nt, Artificial Sequence
  Description of Artificial Sequence: Synthetic oligonucleotide
  Antisense strand to SEQ ID NO: 1656693
aguuccaggacauguuuag

SEQ ID NO: 1656695 - RNA, 19 nt, Artificial Sequence
  Description of Artificial Sequence: Synthetic oligonucleotide
  Sense strand starting at position 770 of SEQ ID NO: 1561237
gaacacagacugugguuau

SEQ ID NO: 1656696 - RNA, 19 nt, Artificial Sequence
  Description of Artificial Sequence: Synthetic oligonucleotide
  Antisense strand to SEQ ID NO: 1656695
auaaccacagucuguguuc

SEQ ID NO: 1656697 - RNA, 19 nt, Artificial Sequence
  Description of Artificial Sequence: Synthetic oligonucleotide
  Sense strand starting at position 771 of SEQ ID NO: 1561237
aacacagacugugguuauu

SEQ ID NO: 1656698 - RNA, 19 nt, Artificial Sequence
  Description of Artificial Sequence: Synthetic oligonucleotide
  Antisense strand to SEQ ID NO: 1656697
aauaaccacagucuguguu

SEQ ID NO: 1656699 - RNA, 19 nt, Artificial Sequence
  Description of Artificial Sequence: Synthetic oligonucleotide
  Sense strand starting at position 782 of SEQ ID NO: 1561237
ugguuauucuccuuagguu

SEQ ID NO: 1656700 - RNA, 19 nt, Artificial Sequence
  Description of Artificial Sequence: Synthetic oligonucleotide
  Antisense strand to SEQ ID NO: 1656699
aaccuaaggagaauaacca

SEQ ID NO: 1656701 - RNA, 19 nt, Artificial Sequence
  Description of Artificial Sequence: Synthetic oligonucleotide
  Sense strand starting at position 783 of SEQ ID NO: 1561237
gguuauucuccuuagguuu

SEQ ID NO: 1656702 - RNA, 19 nt, Artificial Sequence
  Description of Artificial Sequence: Synthetic oligonucleotide
  Antisense strand to SEQ ID NO: 1656701
aaaccuaaggagaauaacc

SEQ ID NO: 1656703 - RNA, 19 nt, Artificial Sequence
  Description of Artificial Sequence: Synthetic oligonucleotide
  Sense strand starting at position 805 of SEQ ID NO: 1561237
ggcggaaggacucgucagu

SEQ ID NO: 1656704 - RNA, 19 nt, Artificial Sequence
  Description of Artificial Sequence: Synthetic oligonucleotide
  Antisense strand to SEQ ID NO: 1656703
acugacgaguccuuccgcc

SEQ ID NO: 1656705 - RNA, 19 nt, Artificial Sequence
  Description of Artificial Sequence: Synthetic oligonucleotide
  Sense strand starting at position 821 of SEQ ID NO: 1561237
aguaucuccugauggaaua

SEQ ID NO: 1656706 - RNA, 19 nt, Artificial Sequence
  Description of Artificial Sequence: Synthetic oligonucleotide
  Antisense strand to SEQ ID NO: 1656705
uauuccaucaggagauacu

SEQ ID NO: 1656707 - RNA, 19 nt, Artificial Sequence
  Description of Artificial Sequence: Synthetic oligonucleotide
  Sense strand starting at position 822 of SEQ ID NO: 1561237
guaucuccugauggaauaa

SEQ ID NO: 1656708 - RNA, 19 nt, Artificial Sequence
  Description of Artificial Sequence: Synthetic oligonucleotide
  Antisense strand to SEQ ID NO: 1656707
uuauuccaucaggagauac

SEQ ID NO: 1656709 - RNA, 19 nt, Artificial Sequence
  Description of Artificial Sequence: Synthetic oligonucleotide
  Sense strand starting at position 850 of SEQ ID NO: 1561237
ggcaucaucuugcuagauc

SEQ ID NO: 1656710 - RNA, 19 nt, Artificial Sequence
  Description of Artificial Sequence: Synthetic oligonucleotide
  Antisense strand to SEQ ID NO: 1656709
gaucuagcaagaugaugcc

SEQ ID NO: 1656711 - RNA, 19 nt, Artificial Sequence
  Description of Artificial Sequence: Synthetic oligonucleotide
  Sense strand starting at position 1095 of SEQ ID NO: 1561237
ccacgaacaucacuuagua

SEQ ID NO: 1656712 - RNA, 19 nt, Artificial Sequence
  Description of Artificial Sequence: Synthetic oligonucleotide
  Antisense strand to SEQ ID NO: 1656711
uacuaagugauguucgugg

SEQ ID NO: 1656713 - RNA, 19 nt, Artificial Sequence
  Description of Artificial Sequence: Synthetic oligonucleotide
  Sense strand starting at position 1527 of SEQ ID NO: 1561237
uaguaauggagccagguau

SEQ ID NO: 1656714 - RNA, 19 nt, Artificial Sequence
  Description of Artificial Sequence: Synthetic oligonucleotide
  Antisense strand to SEQ ID NO: 1656713
auaccuggcuccauuacua

SEQ ID NO: 1656715 - RNA, 19 nt, Artificial Sequence
  Description of Artificial Sequence: Synthetic oligonucleotide
  Sense strand starting at position 1546 of SEQ ID NO: 1561237
gaagacucagcucgagaaa

SEQ ID NO: 1656716 - RNA, 19 nt, Artificial Sequence
  Description of Artificial Sequence: Synthetic oligonucleotide
  Antisense strand to SEQ ID NO: 1656715
uuucucgagcugagucuuc

SEQ ID NO: 1656717 - RNA, 19 nt, Artificial Sequence
  Description of Artificial Sequence: Synthetic oligonucleotide
  Sense strand starting at position 1590 of SEQ ID NO: 1561237
cagugacuggcagaguuaa

SEQ ID NO: 1656718 - RNA, 19 nt, Artificial Sequence
  Description of Artificial Sequence: Synthetic oligonucleotide
  Antisense strand to SEQ ID NO: 1656717
uuaacucugccagucacug

SEQ ID NO: 1656719 - RNA, 19 nt, Artificial Sequence
  Description of Artificial Sequence: Synthetic oligonucleotide
  Sense strand starting at position 2007 of SEQ ID NO: 1561237
ggacgccugcgucacaauu

SEQ ID NO: 1656720 - RNA, 19 nt, Artificial Sequence
  Description of Artificial Sequence: Synthetic oligonucleotide
  Antisense strand to SEQ ID NO: 1656719
aauugugacgcaggcgucc

SEQ ID NO: 1656721 - RNA, 19 nt, Artificial Sequence
  Description of Artificial Sequence: Synthetic oligonucleotide
  Sense strand starting at position 2137 of SEQ ID NO: 1561237
cgagucacuugagacgauu

SEQ ID NO: 1656722 - RNA, 19 nt, Artificial Sequence
  Description of Artificial Sequence: Synthetic oligonucleotide
  Antisense strand to SEQ ID NO: 1656721
aaucgucucaagugacucg

SEQ ID NO: 1656723 - RNA, 19 nt, Artificial Sequence
  Description of Artificial Sequence: Synthetic oligonucleotide
  Sense strand starting at position 2332 of SEQ ID NO: 1561237
acaccuggaaucgguuauu

SEQ ID NO: 1656724 - RNA, 19 nt, Artificial Sequence
  Description of Artificial Sequence: Synthetic oligonucleotide
  Antisense strand to SEQ ID NO: 1656723
aauaaccgauuccaggugu

SEQ ID NO: 1656725 - RNA, 19 nt, Artificial Sequence
  Description of Artificial Sequence: Synthetic oligonucleotide
  Sense strand starting at position 2335 of SEQ ID NO: 1561237
ccuggaaucgguuauuaua

SEQ ID NO: 1656726 - RNA, 19 nt, Artificial Sequence
  Description of Artificial Sequence: Synthetic oligonucleotide
  Antisense strand to SEQ ID NO: 1656725
uauaauaaccgauuccagg

SEQ ID NO: 1656727 - RNA, 19 nt, Artificial Sequence
  Description of Artificial Sequence: Synthetic oligonucleotide
  Sense strand starting at position 2337 of SEQ ID NO: 1561237
uggaaucgguuauuauaaa

SEQ ID NO: 1656728 - RNA, 19 nt, Artificial Sequence
  Description of Artificial Sequence: Synthetic oligonucleotide
  Antisense strand to SEQ ID NO: 1656727
uuuauaauaaccgauucca

SEQ ID NO: 1656729 - RNA, 19 nt, Artificial Sequence
  Description of Artificial Sequence: Synthetic oligonucleotide
  Sense strand starting at position 2338 of SEQ ID NO: 1561237
ggaaucgguuauuauaaag

SEQ ID NO: 1656730 - RNA, 19 nt, Artificial Sequence
  Description of Artificial Sequence: Synthetic oligonucleotide
  Antisense strand to SEQ ID NO: 1656729
cuuuauaauaaccgauucc

SEQ ID NO: 1656731 - RNA, 19 nt, Artificial Sequence
  Description of Artificial Sequence: Synthetic oligonucleotide
  Sense strand starting at position 2418 of SEQ ID NO: 1561237
cgcauucgcccagaaaggu

SEQ ID NO: 1656732 - RNA, 19 nt, Artificial Sequence
  Description of Artificial Sequence: Synthetic oligonucleotide
  Antisense strand to SEQ ID NO: 1656731
accuuucugggcgaaugcg

SEQ ID NO: 1656733 - RNA, 19 nt, Artificial Sequence
  Description of Artificial Sequence: Synthetic oligonucleotide
  Sense strand starting at position 2434 of SEQ ID NO: 1561237
ggugguggugccugacaaa

SEQ ID NO: 1656734 - RNA, 19 nt, Artificial Sequence
  Description of Artificial Sequence: Synthetic oligonucleotide
  Antisense strand to SEQ ID NO: 1656733
uuugucaggcaccaccacc

SEQ ID NO: 1656735 - RNA, 19 nt, Artificial Sequence
  Description of Artificial Sequence: Synthetic oligonucleotide
  Sense strand starting at position 2610 of SEQ ID NO: 1561237
ugcgauuacaagugugcga

SEQ ID NO: 1656736 - RNA, 19 nt, Artificial Sequence
  Description of Artificial Sequence: Synthetic oligonucleotide
  Antisense strand to SEQ ID NO: 1656735
ucgcacacuuguaaucgca

SEQ ID NO: 1656737 - RNA, 19 nt, Artificial Sequence
  Description of Artificial Sequence: Synthetic oligonucleotide
  Sense strand starting at position 2612 of SEQ ID NO: 1561237
cgauuacaagugugcgaca

SEQ ID NO: 1656738 - RNA, 19 nt, Artificial Sequence
  Description of Artificial Sequence: Synthetic oligonucleotide
  Antisense strand to SEQ ID NO: 1656737
ugucgcacacuuguaaucg

SEQ ID NO: 1656739 - RNA, 19 nt, Artificial Sequence
  Description of Artificial Sequence: Synthetic oligonucleotide
  Sense strand starting at position 2791 of SEQ ID NO: 1561237
uccagauuugugggugguu

SEQ ID NO: 1656740 - RNA, 19 nt, Artificial Sequence
  Description of Artificial Sequence: Synthetic oligonucleotide
  Antisense strand to SEQ ID NO: 1656739
aaccacccacaaaucugga

SEQ ID NO: 1656741 - RNA, 19 nt, Artificial Sequence
  Description of Artificial Sequence: Synthetic oligonucleotide
  Sense strand starting at position 3036 of SEQ ID NO: 1561237
guugcaauuagccgagaga

SEQ ID NO: 1656742 - RNA, 19 nt, Artificial Sequence
  Description of Artificial Sequence: Synthetic oligonucleotide
  Antisense strand to SEQ ID NO: 1656741
ucucucggcuaauugcaac

SEQ ID NO: 1656743 - RNA, 19 nt, Artificial Sequence
  Description of Artificial Sequence: Synthetic oligonucleotide
  Sense strand starting at position 3039 of SEQ ID NO: 1561237
gcaauuagccgagagagug

SEQ ID NO: 1656744 - RNA, 19 nt, Artificial Sequence
  Description of Artificial Sequence: Synthetic oligonucleotide
  Antisense strand to SEQ ID NO: 1656743
cacucucucggcuaauugc

SEQ ID NO: 1656745 - RNA, 19 nt, Artificial Sequence
  Description of Artificial Sequence: Synthetic oligonucleotide
  Sense strand starting at position 3441 of SEQ ID NO: 1561237
gaacuauccagguguggug

SEQ ID NO: 1656746 - RNA, 19 nt, Artificial Sequence
  Description of Artificial Sequence: Synthetic oligonucleotide
  Antisense strand to SEQ ID NO: 1656745
caccacaccuggauaguuc

SEQ ID NO: 1656747 - RNA, 19 nt, Artificial Sequence
  Description of Artificial Sequence: Synthetic oligonucleotide
  Sense strand starting at position 3507 of SEQ ID NO: 1561237
aacccauagguuugagauu

SEQ ID NO: 1656748 - RNA, 19 nt, Artificial Sequence
  Description of Artificial Sequence: Synthetic oligonucleotide
  Antisense strand to SEQ ID NO: 1656747
aaucucaaaccuauggguu

SEQ ID NO: 1656749 - RNA, 19 nt, Artificial Sequence
  Description of Artificial Sequence: Synthetic oligonucleotide
  Sense strand starting at position 3518 of SEQ ID NO: 1561237
uugagauugcagugaccca

SEQ ID NO: 1656750 - RNA, 19 nt, Artificial Sequence
  Description of Artificial Sequence: Synthetic oligonucleotide
  Antisense strand to SEQ ID NO: 1656749
ugggucacugcaaucucaa

SEQ ID NO: 1656751 - RNA, 19 nt, Artificial Sequence
  Description of Artificial Sequence: Synthetic oligonucleotide
  Sense strand starting at position 3638 of SEQ ID NO: 1561237
agaaguuaccuauaggcuu

SEQ ID NO: 1656752 - RNA, 19 nt, Artificial Sequence
  Description of Artificial Sequence: Synthetic oligonucleotide
  Antisense strand to SEQ ID NO: 1656751
aagccuauagguaacuucu

SEQ ID NO: 1656753 - RNA, 19 nt, Artificial Sequence
  Description of Artificial Sequence: Synthetic oligonucleotide
  Sense strand starting at position 3722 of SEQ ID NO: 1561237
cucucacgucugggaagau

SEQ ID NO: 1656754 - RNA, 19 nt, Artificial Sequence
  Description of Artificial Sequence: Synthetic oligonucleotide
  Antisense strand to SEQ ID NO: 1656753
aucuucccagacgugagag

SEQ ID NO: 1656755 - RNA, 19 nt, Artificial Sequence
  Description of Artificial Sequence: Synthetic oligonucleotide
  Sense strand starting at position 49 of SEQ ID NO: 1561238
ugguuugcuccugggaauu

SEQ ID NO: 1656756 - RNA, 19 nt, Artificial Sequence
  Description of Artificial Sequence: Synthetic oligonucleotide
  Antisense strand to SEQ ID NO: 1656755
aauucccaggagcaaacca

SEQ ID NO: 1656757 - RNA, 19 nt, Artificial Sequence
  Description of Artificial Sequence: Synthetic oligonucleotide
  Sense strand starting at position 98 of SEQ ID NO: 1561238
agaugaccagcuugaaguu

SEQ ID NO: 1656758 - RNA, 19 nt, Artificial Sequence
  Description of Artificial Sequence: Synthetic oligonucleotide
  Antisense strand to SEQ ID NO: 1656757
aacuucaagcuggucaucu

SEQ ID NO: 1656759 - RNA, 19 nt, Artificial Sequence
  Description of Artificial Sequence: Synthetic oligonucleotide
  Sense strand starting at position 171 of SEQ ID NO: 1561238
cucguuuaugucuggguuu

SEQ ID NO: 1656760 - RNA, 19 nt, Artificial Sequence
  Description of Artificial Sequence: Synthetic oligonucleotide
  Antisense strand to SEQ ID NO: 1656759
aaacccagacauaaacgag

SEQ ID NO: 1656761 - RNA, 19 nt, Artificial Sequence
  Description of Artificial Sequence: Synthetic oligonucleotide
  Sense strand starting at position 398 of SEQ ID NO: 1561238
gcauguucagcuguguaug

SEQ ID NO: 1656762 - RNA, 19 nt, Artificial Sequence
  Description of Artificial Sequence: Synthetic oligonucleotide
  Antisense strand to SEQ ID NO: 1656761
cauacacagcugaacaugc

SEQ ID NO: 1656763 - RNA, 19 nt, Artificial Sequence
  Description of Artificial Sequence: Synthetic oligonucleotide
  Sense strand starting at position 408 of SEQ ID NO: 1561238
cuguguaugcgugucccaa

SEQ ID NO: 1656764 - RNA, 19 nt, Artificial Sequence
  Description of Artificial Sequence: Synthetic oligonucleotide
  Antisense strand to SEQ ID NO: 1656763
uugggacacgcauacacag

SEQ ID NO: 1656765 - RNA, 19 nt, Artificial Sequence
  Description of Artificial Sequence: Synthetic oligonucleotide
  Sense strand starting at position 409 of SEQ ID NO: 1561238
uguguaugcgugucccaac

SEQ ID NO: 1656766 - RNA, 19 nt, Artificial Sequence
  Description of Artificial Sequence: Synthetic oligonucleotide
  Antisense strand to SEQ ID NO: 1656765
guugggacacgcauacaca

SEQ ID NO: 1656767 - RNA, 19 nt, Artificial Sequence
  Description of Artificial Sequence: Synthetic oligonucleotide
  Sense strand starting at position 802 of SEQ ID NO: 1561238
cccaaauugcugugacuca

SEQ ID NO: 1656768 - RNA, 19 nt, Artificial Sequence
  Description of Artificial Sequence: Synthetic oligonucleotide
  Antisense strand to SEQ ID NO: 1656767
ugagucacagcaauuuggg

SEQ ID NO: 1656769 - RNA, 19 nt, Artificial Sequence
  Description of Artificial Sequence: Synthetic oligonucleotide
  Sense strand starting at position 858 of SEQ ID NO: 1561238
acccguuugacucagagau

SEQ ID NO: 1656770 - RNA, 19 nt, Artificial Sequence
  Description of Artificial Sequence: Synthetic oligonucleotide
  Antisense strand to SEQ ID NO: 1656769
aucucugagucaaacgggu

SEQ ID NO: 1656771 - RNA, 19 nt, Artificial Sequence
  Description of Artificial Sequence: Synthetic oligonucleotide
  Sense strand starting at position 868 of SEQ ID NO: 1561238
cucagagauucccagagac

SEQ ID NO: 1656772 - RNA, 19 nt, Artificial Sequence
  Description of Artificial Sequence: Synthetic oligonucleotide
  Antisense strand to SEQ ID NO: 1656771
gucucugggaaucucugag

SEQ ID NO: 1656773 - RNA, 19 nt, Artificial Sequence
  Description of Artificial Sequence: Synthetic oligonucleotide
  Sense strand starting at position 1026 of SEQ ID NO: 1561238
acugccugacucugagauu

SEQ ID NO: 1656774 - RNA, 19 nt, Artificial Sequence
  Description of Artificial Sequence: Synthetic oligonucleotide
  Antisense strand to SEQ ID NO: 1656773
aaucucagagucaggcagu

SEQ ID NO: 1656775 - RNA, 19 nt, Artificial Sequence
  Description of Artificial Sequence: Synthetic oligonucleotide
  Sense strand starting at position 2150 of SEQ ID NO: 1561238
ggaguuagucgccaucuuu

SEQ ID NO: 1656776 - RNA, 19 nt, Artificial Sequence
  Description of Artificial Sequence: Synthetic oligonucleotide
  Antisense strand to SEQ ID NO: 1656775
aaagauggcgacuaacucc

SEQ ID NO: 1656777 - RNA, 19 nt, Artificial Sequence
  Description of Artificial Sequence: Synthetic oligonucleotide
  Sense strand starting at position 2450 of SEQ ID NO: 1561238
uguauugugccagagagug

SEQ ID NO: 1656778 - RNA, 19 nt, Artificial Sequence
  Description of Artificial Sequence: Synthetic oligonucleotide
  Antisense strand to SEQ ID NO: 1656777
cacucucuggcacaauaca

SEQ ID NO: 1656779 - RNA, 19 nt, Artificial Sequence
  Description of Artificial Sequence: Synthetic oligonucleotide
  Sense strand starting at position 2480 of SEQ ID NO: 1561238
ggaggguuacaguggugua

SEQ ID NO: 1656780 - RNA, 19 nt, Artificial Sequence
  Description of Artificial Sequence: Synthetic oligonucleotide
  Antisense strand to SEQ ID NO: 1656779
uacaccacuguaacccucc

SEQ ID NO: 1656781 - RNA, 19 nt, Artificial Sequence
  Description of Artificial Sequence: Synthetic oligonucleotide
  Sense strand starting at position 2876 of SEQ ID NO: 1561238
cuguguuaccugcacccaa

SEQ ID NO: 1656782 - RNA, 19 nt, Artificial Sequence
  Description of Artificial Sequence: Synthetic oligonucleotide
  Antisense strand to SEQ ID NO: 1656781
uugggugcagguaacacag

SEQ ID NO: 1656783 - RNA, 19 nt, Artificial Sequence
  Description of Artificial Sequence: Synthetic oligonucleotide
  Sense strand starting at position 2927 of SEQ ID NO: 1561238
gugugaaggaccuggacaa

SEQ ID NO: 1656784 - RNA, 19 nt, Artificial Sequence
  Description of Artificial Sequence: Synthetic oligonucleotide
  Antisense strand to SEQ ID NO: 1656783
uuguccagguccuucacac

SEQ ID NO: 1656785 - RNA, 19 nt, Artificial Sequence
  Description of Artificial Sequence: Synthetic oligonucleotide
  Sense strand starting at position 2958 of SEQ ID NO: 1561238
ggaagauggcuagggcaaa

SEQ ID NO: 1656786 - RNA, 19 nt, Artificial Sequence
  Description of Artificial Sequence: Synthetic oligonucleotide
  Antisense strand to SEQ ID NO: 1656785
uuugcccuagccaucuucc

SEQ ID NO: 1656787 - RNA, 19 nt, Artificial Sequence
  Description of Artificial Sequence: Synthetic oligonucleotide
  Sense strand starting at position 3080 of SEQ ID NO: 1561238
ugguuugcugcugaaucua

SEQ ID NO: 1656788 - RNA, 19 nt, Artificial Sequence
  Description of Artificial Sequence: Synthetic oligonucleotide
  Antisense strand to SEQ ID NO: 1656787
uagauucagcagcaaacca

SEQ ID NO: 1656789 - RNA, 19 nt, Artificial Sequence
  Description of Artificial Sequence: Synthetic oligonucleotide
  Sense strand starting at position 3150 of SEQ ID NO: 1561238
cagcucuagcgaugggaau

SEQ ID NO: 1656790 - RNA, 19 nt, Artificial Sequence
  Description of Artificial Sequence: Synthetic oligonucleotide
  Antisense strand to SEQ ID NO: 1656789
auucccaucgcuagagcug

SEQ ID NO: 1656791 - RNA, 19 nt, Artificial Sequence
  Description of Artificial Sequence: Synthetic oligonucleotide
  Sense strand starting at position 3206 of SEQ ID NO: 1561238
agccuuugcuucucagacu

SEQ ID NO: 1656792 - RNA, 19 nt, Artificial Sequence
  Description of Artificial Sequence: Synthetic oligonucleotide
  Antisense strand to SEQ ID NO: 1656791
agucugagaagcaaaggcu

SEQ ID NO: 1656793 - RNA, 19 nt, Artificial Sequence
  Description of Artificial Sequence: Synthetic oligonucleotide
  Sense strand starting at position 3266 of SEQ ID NO: 1561238
gcugcuugugaacacgaga

SEQ ID NO: 1656794 - RNA, 19 nt, Artificial Sequence
  Description of Artificial Sequence: Synthetic oligonucleotide
  Antisense strand to SEQ ID NO: 1656793
ucucguguucacaagcagc

SEQ ID NO: 1656795 - RNA, 19 nt, Artificial Sequence
  Description of Artificial Sequence: Synthetic oligonucleotide
  Sense strand starting at position 3269 of SEQ ID NO: 1561238
gcuugugaacacgagaaca

SEQ ID NO: 1656796 - RNA, 19 nt, Artificial Sequence
  Description of Artificial Sequence: Synthetic oligonucleotide
  Antisense strand to SEQ ID NO: 1656795
uguucucguguucacaagc

SEQ ID NO: 1656797 - RNA, 19 nt, Artificial Sequence
  Description of Artificial Sequence: Synthetic oligonucleotide
  Sense strand starting at position 3341 of SEQ ID NO: 1561238
aggaaaugguuuccuaggu

SEQ ID NO: 1656798 - RNA, 19 nt, Artificial Sequence
  Description of Artificial Sequence: Synthetic oligonucleotide
  Antisense strand to SEQ ID NO: 1656797
accuaggaaaccauuuccu

SEQ ID NO: 1656799 - RNA, 19 nt, Artificial Sequence
  Description of Artificial Sequence: Synthetic oligonucleotide
  Sense strand starting at position 3345 of SEQ ID NO: 1561238
aaugguuuccuagguguaa

SEQ ID NO: 1656800 - RNA, 19 nt, Artificial Sequence
  Description of Artificial Sequence: Synthetic oligonucleotide
  Antisense strand to SEQ ID NO: 1656799
uuacaccuaggaaaccauu

SEQ ID NO: 1656801 - RNA, 19 nt, Artificial Sequence
  Description of Artificial Sequence: Synthetic oligonucleotide
  Sense strand starting at position 3346 of SEQ ID NO: 1561238
augguuuccuagguguaaa

SEQ ID NO: 1656802 - RNA, 19 nt, Artificial Sequence
  Description of Artificial Sequence: Synthetic oligonucleotide
  Antisense strand to SEQ ID NO: 1656801
uuuacaccuaggaaaccau

SEQ ID NO: 1656803 - RNA, 19 nt, Artificial Sequence
  Description of Artificial Sequence: Synthetic oligonucleotide
  Sense strand starting at position 3347 of SEQ ID NO: 1561238
ugguuuccuagguguaaag

SEQ ID NO: 1656804 - RNA, 19 nt, Artificial Sequence
  Description of Artificial Sequence: Synthetic oligonucleotide
  Antisense strand to SEQ ID NO: 1656803
cuuuacaccuaggaaacca

SEQ ID NO: 1656805 - RNA, 19 nt, Artificial Sequence
  Description of Artificial Sequence: Synthetic oligonucleotide
  Sense strand starting at position 3349 of SEQ ID NO: 1561238
guuuccuagguguaaagga

SEQ ID NO: 1656806 - RNA, 19 nt, Artificial Sequence
  Description of Artificial Sequence: Synthetic oligonucleotide
  Antisense strand to SEQ ID NO: 1656805
uccuuuacaccuaggaaac

SEQ ID NO: 1656807 - RNA, 19 nt, Artificial Sequence
  Description of Artificial Sequence: Synthetic oligonucleotide
  Sense strand starting at position 3376 of SEQ ID NO: 1561238
aagacauccugaggcagaa

SEQ ID NO: 1656808 - RNA, 19 nt, Artificial Sequence
  Description of Artificial Sequence: Synthetic oligonucleotide
  Antisense strand to SEQ ID NO: 1656807
uucugccucaggaugucuu

SEQ ID NO: 1656809 - RNA, 19 nt, Artificial Sequence
  Description of Artificial Sequence: Synthetic oligonucleotide
  Sense strand starting at position 3432 of SEQ ID NO: 1561238
gcauaaucuugguuggcua

SEQ ID NO: 1656810 - RNA, 19 nt, Artificial Sequence
  Description of Artificial Sequence: Synthetic oligonucleotide
  Antisense strand to SEQ ID NO: 1656809
uagccaaccaagauuaugc

SEQ ID NO: 1656811 - RNA, 19 nt, Artificial Sequence
  Description of Artificial Sequence: Synthetic oligonucleotide
  Sense strand starting at position 3439 of SEQ ID NO: 1561238
cuugguuggcuagggagau

SEQ ID NO: 1656812 - RNA, 19 nt, Artificial Sequence
  Description of Artificial Sequence: Synthetic oligonucleotide
  Antisense strand to SEQ ID NO: 1656811
aucucccuagccaaccaag

SEQ ID NO: 1656813 - RNA, 19 nt, Artificial Sequence
  Description of Artificial Sequence: Synthetic oligonucleotide
  Sense strand starting at position 3451 of SEQ ID NO: 1561238
gggagauucuggccugucu

SEQ ID NO: 1656814 - RNA, 19 nt, Artificial Sequence
  Description of Artificial Sequence: Synthetic oligonucleotide
  Antisense strand to SEQ ID NO: 1656813
agacaggccagaaucuccc

SEQ ID NO: 1656815 - RNA, 19 nt, Artificial Sequence
  Description of Artificial Sequence: Synthetic oligonucleotide
  Sense strand starting at position 3544 of SEQ ID NO: 1561238
gguugcaggcaucaaguuu

SEQ ID NO: 1656816 - RNA, 19 nt, Artificial Sequence
  Description of Artificial Sequence: Synthetic oligonucleotide
  Antisense strand to SEQ ID NO: 1656815
aaacuugaugccugcaacc

SEQ ID NO: 1656817 - RNA, 19 nt, Artificial Sequence
  Description of Artificial Sequence: Synthetic oligonucleotide
  Sense strand starting at position 3614 of SEQ ID NO: 1561238
uuggcucccagcuguaaga

SEQ ID NO: 1656818 - RNA, 19 nt, Artificial Sequence
  Description of Artificial Sequence: Synthetic oligonucleotide
  Antisense strand to SEQ ID NO: 1656817
ucuuacagcugggagccaa

SEQ ID NO: 1656819 - RNA, 19 nt, Artificial Sequence
  Description of Artificial Sequence: Synthetic oligonucleotide
  Sense strand starting at position 3653 of SEQ ID NO: 1561238
ucccuuuguuccucuagua

SEQ ID NO: 1656820 - RNA, 19 nt, Artificial Sequence
  Description of Artificial Sequence: Synthetic oligonucleotide
  Antisense strand to SEQ ID NO: 1656819
uacuagaggaacaaaggga

SEQ ID NO: 1656821 - RNA, 19 nt, Artificial Sequence
  Description of Artificial Sequence: Synthetic oligonucleotide
  Sense strand starting at position 3665 of SEQ ID NO: 1561238
ucuaguacuaagggugaga

SEQ ID NO: 1656822 - RNA, 19 nt, Artificial Sequence
  Description of Artificial Sequence: Synthetic oligonucleotide
  Antisense strand to SEQ ID NO: 1656821
ucucacccuuaguacuaga

SEQ ID NO: 1656823 - RNA, 19 nt, Artificial Sequence
  Description of Artificial Sequence: Synthetic oligonucleotide
  Sense strand starting at position 3723 of SEQ ID NO: 1561238
uccuacugauagguagaua

SEQ ID NO: 1656824 - RNA, 19 nt, Artificial Sequence
  Description of Artificial Sequence: Synthetic oligonucleotide
  Antisense strand to SEQ ID NO: 1656823
uaucuaccuaucaguagga

SEQ ID NO: 1656825 - RNA, 19 nt, Artificial Sequence
  Description of Artificial Sequence: Synthetic oligonucleotide
  Sense strand starting at position 3833 of SEQ ID NO: 1561238
gguaguaucaugggaauga

SEQ ID NO: 1656826 - RNA, 19 nt, Artificial Sequence
  Description of Artificial Sequence: Synthetic oligonucleotide
  Antisense strand to SEQ ID NO: 1656825
ucauucccaugauacuacc

SEQ ID NO: 1656827 - RNA, 19 nt, Artificial Sequence
  Description of Artificial Sequence: Synthetic oligonucleotide
  Sense strand starting at position 3834 of SEQ ID NO: 1561238
guaguaucaugggaaugaa

SEQ ID NO: 1656828 - RNA, 19 nt, Artificial Sequence
  Description of Artificial Sequence: Synthetic oligonucleotide
  Antisense strand to SEQ ID NO: 1656827
uucauucccaugauacuac

SEQ ID NO: 1656829 - RNA, 19 nt, Artificial Sequence
  Description of Artificial Sequence: Synthetic oligonucleotide
  Sense strand starting at position 3897 of SEQ ID NO: 1561238
cugguaaccucccugagga

SEQ ID NO: 1656830 - RNA, 19 nt, Artificial Sequence
  Description of Artificial Sequence: Synthetic oligonucleotide
  Antisense strand to SEQ ID NO: 1656829
uccucagggagguuaccag

SEQ ID NO: 1656831 - RNA, 19 nt, Artificial Sequence
  Description of Artificial Sequence: Synthetic oligonucleotide
  Sense strand starting at position 3898 of SEQ ID NO: 1561238
ugguaaccucccugaggau

SEQ ID NO: 1656832 - RNA, 19 nt, Artificial Sequence
  Description of Artificial Sequence: Synthetic oligonucleotide
  Antisense strand to SEQ ID NO: 1656831
auccucagggagguuacca

SEQ ID NO: 1656833 - RNA, 19 nt, Artificial Sequence
  Description of Artificial Sequence: Synthetic oligonucleotide
  Sense strand starting at position 3912 of SEQ ID NO: 1561238
aggauugaguguucuccca

SEQ ID NO: 1656834 - RNA, 19 nt, Artificial Sequence
  Description of Artificial Sequence: Synthetic oligonucleotide
  Antisense strand to SEQ ID NO: 1656833
ugggagaacacucaauccu

SEQ ID NO: 1656835 - RNA, 19 nt, Artificial Sequence
  Description of Artificial Sequence: Synthetic oligonucleotide
  Sense strand starting at position 192 of SEQ ID NO: 1561239
gccuuccuauugucaugau

SEQ ID NO: 1656836 - RNA, 19 nt, Artificial Sequence
  Description of Artificial Sequence: Synthetic oligonucleotide
  Antisense strand to SEQ ID NO: 1656835
aucaugacaauaggaaggc

SEQ ID NO: 1656837 - RNA, 19 nt, Artificial Sequence
  Description of Artificial Sequence: Synthetic oligonucleotide
  Sense strand starting at position 262 of SEQ ID NO: 1561239
ggucuuuccugaccaccua

SEQ ID NO: 1656838 - RNA, 19 nt, Artificial Sequence
  Description of Artificial Sequence: Synthetic oligonucleotide
  Antisense strand to SEQ ID NO: 1656837
uagguggucaggaaagacc

SEQ ID NO: 1656839 - RNA, 19 nt, Artificial Sequence
  Description of Artificial Sequence: Synthetic oligonucleotide
  Sense strand starting at position 329 of SEQ ID NO: 1561239
aauccugacuuuguaggaa

SEQ ID NO: 1656840 - RNA, 19 nt, Artificial Sequence
  Description of Artificial Sequence: Synthetic oligonucleotide
  Antisense strand to SEQ ID NO: 1656839
uuccuacaaagucaggauu

SEQ ID NO: 1656841 - RNA, 19 nt, Artificial Sequence
  Description of Artificial Sequence: Synthetic oligonucleotide
  Sense strand starting at position 342 of SEQ ID NO: 1561239
uaggaauucuggugauaac

SEQ ID NO: 1656842 - RNA, 19 nt, Artificial Sequence
  Description of Artificial Sequence: Synthetic oligonucleotide
  Antisense strand to SEQ ID NO: 1656841
guuaucaccagaauuccua

SEQ ID NO: 1656843 - RNA, 19 nt, Artificial Sequence
  Description of Artificial Sequence: Synthetic oligonucleotide
  Sense strand starting at position 345 of SEQ ID NO: 1561239
gaauucuggugauaacaga

SEQ ID NO: 1656844 - RNA, 19 nt, Artificial Sequence
  Description of Artificial Sequence: Synthetic oligonucleotide
  Antisense strand to SEQ ID NO: 1656843
ucuguuaucaccagaauuc

SEQ ID NO: 1656845 - RNA, 19 nt, Artificial Sequence
  Description of Artificial Sequence: Synthetic oligonucleotide
  Sense strand starting at position 359 of SEQ ID NO: 1561239
acagaaauguagccugcau

SEQ ID NO: 1656846 - RNA, 19 nt, Artificial Sequence
  Description of Artificial Sequence: Synthetic oligonucleotide
  Antisense strand to SEQ ID NO: 1656845
augcaggcuacauuucugu

SEQ ID NO: 1656847 - RNA, 19 nt, Artificial Sequence
  Description of Artificial Sequence: Synthetic oligonucleotide
  Sense strand starting at position 361 of SEQ ID NO: 1561239
agaaauguagccugcauga

SEQ ID NO: 1656848 - RNA, 19 nt, Artificial Sequence
  Description of Artificial Sequence: Synthetic oligonucleotide
  Antisense strand to SEQ ID NO: 1656847
ucaugcaggcuacauuucu

SEQ ID NO: 1656849 - RNA, 19 nt, Artificial Sequence
  Description of Artificial Sequence: Synthetic oligonucleotide
  Sense strand starting at position 406 of SEQ ID NO: 1561239
ucaugugacccgcaaauca

SEQ ID NO: 1656850 - RNA, 19 nt, Artificial Sequence
  Description of Artificial Sequence: Synthetic oligonucleotide
  Antisense strand to SEQ ID NO: 1656849
ugauuugcgggucacauga

SEQ ID NO: 1656851 - RNA, 19 nt, Artificial Sequence
  Description of Artificial Sequence: Synthetic oligonucleotide
  Sense strand starting at position 636 of SEQ ID NO: 1561239
aguaccgucccaugauaua

SEQ ID NO: 1656852 - RNA, 19 nt, Artificial Sequence
  Description of Artificial Sequence: Synthetic oligonucleotide
  Antisense strand to SEQ ID NO: 1656851
uauaucaugggacgguacu

SEQ ID NO: 1656853 - RNA, 19 nt, Artificial Sequence
  Description of Artificial Sequence: Synthetic oligonucleotide
  Sense strand starting at position 698 of SEQ ID NO: 1561239
guacauaauugucauuugu

SEQ ID NO: 1656854 - RNA, 19 nt, Artificial Sequence
  Description of Artificial Sequence: Synthetic oligonucleotide
  Antisense strand to SEQ ID NO: 1656853
acaaaugacaauuauguac

SEQ ID NO: 1656855 - RNA, 19 nt, Artificial Sequence
  Description of Artificial Sequence: Synthetic oligonucleotide
  Sense strand starting at position 984 of SEQ ID NO: 1561239
guagguucuccacguugga

SEQ ID NO: 1656856 - RNA, 19 nt, Artificial Sequence
  Description of Artificial Sequence: Synthetic oligonucleotide
  Antisense strand to SEQ ID NO: 1656855
uccaacguggagaaccuac

SEQ ID NO: 1656857 - RNA, 19 nt, Artificial Sequence
  Description of Artificial Sequence: Synthetic oligonucleotide
  Sense strand starting at position 999 of SEQ ID NO: 1561239
uggaguucugggcacggau

SEQ ID NO: 1656858 - RNA, 19 nt, Artificial Sequence
  Description of Artificial Sequence: Synthetic oligonucleotide
  Antisense strand to SEQ ID NO: 1656857
auccgugcccagaacucca

SEQ ID NO: 1656859 - RNA, 19 nt, Artificial Sequence
  Description of Artificial Sequence: Synthetic oligonucleotide
  Sense strand starting at position 1334 of SEQ ID NO: 1561239
guuagagcauccuugaaac

SEQ ID NO: 1656860 - RNA, 19 nt, Artificial Sequence
  Description of Artificial Sequence: Synthetic oligonucleotide
  Antisense strand to SEQ ID NO: 1656859
guuucaaggaugcucuaac

SEQ ID NO: 1656861 - RNA, 19 nt, Artificial Sequence
  Description of Artificial Sequence: Synthetic oligonucleotide
  Sense strand starting at position 1382 of SEQ ID NO: 1561239
gcguccuugcuccugguaa

SEQ ID NO: 1656862 - RNA, 19 nt, Artificial Sequence
  Description of Artificial Sequence: Synthetic oligonucleotide
  Antisense strand to SEQ ID NO: 1656861
uuaccaggagcaaggacgc

SEQ ID NO: 1656863 - RNA, 19 nt, Artificial Sequence
  Description of Artificial Sequence: Synthetic oligonucleotide
  Sense strand starting at position 1384 of SEQ ID NO: 1561239
guccuugcuccugguaaca

SEQ ID NO: 1656864 - RNA, 19 nt, Artificial Sequence
  Description of Artificial Sequence: Synthetic oligonucleotide
  Antisense strand to SEQ ID NO: 1656863
uguuaccaggagcaaggac

SEQ ID NO: 1656865 - RNA, 19 nt, Artificial Sequence
  Description of Artificial Sequence: Synthetic oligonucleotide
  Sense strand starting at position 1962 of SEQ ID NO: 1561239
cgcaaacuauggucagaag

SEQ ID NO: 1656866 - RNA, 19 nt, Artificial Sequence
  Description of Artificial Sequence: Synthetic oligonucleotide
  Antisense strand to SEQ ID NO: 1656865
cuucugaccauaguuugcg

SEQ ID NO: 1656867 - RNA, 19 nt, Artificial Sequence
  Description of Artificial Sequence: Synthetic oligonucleotide
  Sense strand starting at position 1965 of SEQ ID NO: 1561239
aaacuauggucagaagcga

SEQ ID NO: 1656868 - RNA, 19 nt, Artificial Sequence
  Description of Artificial Sequence: Synthetic oligonucleotide
  Antisense strand to SEQ ID NO: 1656867
ucgcuucugaccauaguuu

SEQ ID NO: 1656869 - RNA, 19 nt, Artificial Sequence
  Description of Artificial Sequence: Synthetic oligonucleotide
  Sense strand starting at position 2038 of SEQ ID NO: 1561239
ucgggaggguucucaaaga

SEQ ID NO: 1656870 - RNA, 19 nt, Artificial Sequence
  Description of Artificial Sequence: Synthetic oligonucleotide
  Antisense strand to SEQ ID NO: 1656869
ucuuugagaacccucccga

SEQ ID NO: 1656871 - RNA, 19 nt, Artificial Sequence
  Description of Artificial Sequence: Synthetic oligonucleotide
  Sense strand starting at position 2326 of SEQ ID NO: 1561239
ugggccaaugacugauaga

SEQ ID NO: 1656872 - RNA, 19 nt, Artificial Sequence
  Description of Artificial Sequence: Synthetic oligonucleotide
  Antisense strand to SEQ ID NO: 1656871
ucuaucagucauuggccca

SEQ ID NO: 1656873 - RNA, 19 nt, Artificial Sequence
  Description of Artificial Sequence: Synthetic oligonucleotide
  Sense strand starting at position 2329 of SEQ ID NO: 1561239
gccaaugacugauagagac

SEQ ID NO: 1656874 - RNA, 19 nt, Artificial Sequence
  Description of Artificial Sequence: Synthetic oligonucleotide
  Antisense strand to SEQ ID NO: 1656873
gucucuaucagucauuggc

SEQ ID NO: 1656875 - RNA, 19 nt, Artificial Sequence
  Description of Artificial Sequence: Synthetic oligonucleotide
  Sense strand starting at position 2362 of SEQ ID NO: 1561239
cccaguuucgugcagauca

SEQ ID NO: 1656876 - RNA, 19 nt, Artificial Sequence
  Description of Artificial Sequence: Synthetic oligonucleotide
  Antisense strand to SEQ ID NO: 1656875
ugaucugcacgaaacuggg

SEQ ID NO: 1656877 - RNA, 19 nt, Artificial Sequence
  Description of Artificial Sequence: Synthetic oligonucleotide
  Sense strand starting at position 2364 of SEQ ID NO: 1561239
caguuucgugcagaucaaa

SEQ ID NO: 1656878 - RNA, 19 nt, Artificial Sequence
  Description of Artificial Sequence: Synthetic oligonucleotide
  Antisense strand to SEQ ID NO: 1656877
uuugaucugcacgaaacug

SEQ ID NO: 1656879 - RNA, 19 nt, Artificial Sequence
  Description of Artificial Sequence: Synthetic oligonucleotide
  Sense strand starting at position 2525 of SEQ ID NO: 1561239
ggaaaugcucuuggaccca

SEQ ID NO: 1656880 - RNA, 19 nt, Artificial Sequence
  Description of Artificial Sequence: Synthetic oligonucleotide
  Antisense strand to SEQ ID NO: 1656879
uggguccaagagcauuucc

SEQ ID NO: 1656881 - RNA, 19 nt, Artificial Sequence
  Description of Artificial Sequence: Synthetic oligonucleotide
  Sense strand starting at position 2552 of SEQ ID NO: 1561239
auugcuaaggcucaaagau

SEQ ID NO: 1656882 - RNA, 19 nt, Artificial Sequence
  Description of Artificial Sequence: Synthetic oligonucleotide
  Antisense strand to SEQ ID NO: 1656881
aucuuugagccuuagcaau

SEQ ID NO: 1656883 - RNA, 19 nt, Artificial Sequence
  Description of Artificial Sequence: Synthetic oligonucleotide
  Sense strand starting at position 2561 of SEQ ID NO: 1561239
gcucaaagaucagucagaa

SEQ ID NO: 1656884 - RNA, 19 nt, Artificial Sequence
  Description of Artificial Sequence: Synthetic oligonucleotide
  Antisense strand to SEQ ID NO: 1656883
uucugacugaucuuugagc

SEQ ID NO: 1656885 - RNA, 19 nt, Artificial Sequence
  Description of Artificial Sequence: Synthetic oligonucleotide
  Sense strand starting at position 2565 of SEQ ID NO: 1561239
aaagaucagucagaaugac

SEQ ID NO: 1656886 - RNA, 19 nt, Artificial Sequence
  Description of Artificial Sequence: Synthetic oligonucleotide
  Antisense strand to SEQ ID NO: 1656885
gucauucugacugaucuuu

SEQ ID NO: 1656887 - RNA, 19 nt, Artificial Sequence
  Description of Artificial Sequence: Synthetic oligonucleotide
  Sense strand starting at position 2571 of SEQ ID NO: 1561239
cagucagaaugaccuugaa

SEQ ID NO: 1656888 - RNA, 19 nt, Artificial Sequence
  Description of Artificial Sequence: Synthetic oligonucleotide
  Antisense strand to SEQ ID NO: 1656887
uucaaggucauucugacug

SEQ ID NO: 1656889 - RNA, 19 nt, Artificial Sequence
  Description of Artificial Sequence: Synthetic oligonucleotide
  Sense strand starting at position 2693 of SEQ ID NO: 1561239
guuguauugccagggaaag

SEQ ID NO: 1656890 - RNA, 19 nt, Artificial Sequence
  Description of Artificial Sequence: Synthetic oligonucleotide
  Antisense strand to SEQ ID NO: 1656889
cuuucccuggcaauacaac

SEQ ID NO: 1656891 - RNA, 19 nt, Artificial Sequence
  Description of Artificial Sequence: Synthetic oligonucleotide
  Sense strand starting at position 2694 of SEQ ID NO: 1561239
uuguauugccagggaaaga

SEQ ID NO: 1656892 - RNA, 19 nt, Artificial Sequence
  Description of Artificial Sequence: Synthetic oligonucleotide
  Antisense strand to SEQ ID NO: 1656891
ucuuucccuggcaauacaa

SEQ ID NO: 1656893 - RNA, 19 nt, Artificial Sequence
  Description of Artificial Sequence: Synthetic oligonucleotide
  Sense strand starting at position 2732 of SEQ ID NO: 1561239
gguuauucacggcaugguu

SEQ ID NO: 1656894 - RNA, 19 nt, Artificial Sequence
  Description of Artificial Sequence: Synthetic oligonucleotide
  Antisense strand to SEQ ID NO: 1656893
aaccaugccgugaauaacc

SEQ ID NO: 1656895 - RNA, 19 nt, Artificial Sequence
  Description of Artificial Sequence: Synthetic oligonucleotide
  Sense strand starting at position 2744 of SEQ ID NO: 1561239
caugguuaugccuaugacu

SEQ ID NO: 1656896 - RNA, 19 nt, Artificial Sequence
  Description of Artificial Sequence: Synthetic oligonucleotide
  Antisense strand to SEQ ID NO: 1656895
agucauaggcauaaccaug

SEQ ID NO: 1656897 - RNA, 19 nt, Artificial Sequence
  Description of Artificial Sequence: Synthetic oligonucleotide
  Sense strand starting at position 2746 of SEQ ID NO: 1561239
ugguuaugccuaugacuga

SEQ ID NO: 1656898 - RNA, 19 nt, Artificial Sequence
  Description of Artificial Sequence: Synthetic oligonucleotide
  Antisense strand to SEQ ID NO: 1656897
ucagucauaggcauaacca

SEQ ID NO: 1656899 - RNA, 19 nt, Artificial Sequence
  Description of Artificial Sequence: Synthetic oligonucleotide
  Sense strand starting at position 2803 of SEQ ID NO: 1561239
aguuucccucucuaggaaa

SEQ ID NO: 1656900 - RNA, 19 nt, Artificial Sequence
  Description of Artificial Sequence: Synthetic oligonucleotide
  Antisense strand to SEQ ID NO: 1656899
uuuccuagagagggaaacu

SEQ ID NO: 1656901 - RNA, 19 nt, Artificial Sequence
  Description of Artificial Sequence: Synthetic oligonucleotide
  Sense strand starting at position 2825 of SEQ ID NO: 1561239
acacauagcugccuggaaa

SEQ ID NO: 1656902 - RNA, 19 nt, Artificial Sequence
  Description of Artificial Sequence: Synthetic oligonucleotide
  Antisense strand to SEQ ID NO: 1656901
uuuccaggcagcuaugugu

SEQ ID NO: 1656903 - RNA, 19 nt, Artificial Sequence
  Description of Artificial Sequence: Synthetic oligonucleotide
  Sense strand starting at position 2880 of SEQ ID NO: 1561239
ucaggcaauugcuugagaa

SEQ ID NO: 1656904 - RNA, 19 nt, Artificial Sequence
  Description of Artificial Sequence: Synthetic oligonucleotide
  Antisense strand to SEQ ID NO: 1656903
uucucaagcaauugccuga

SEQ ID NO: 1656905 - RNA, 19 nt, Artificial Sequence
  Description of Artificial Sequence: Synthetic oligonucleotide
  Sense strand starting at position 2881 of SEQ ID NO: 1561239
caggcaauugcuugagaac

SEQ ID NO: 1656906 - RNA, 19 nt, Artificial Sequence
  Description of Artificial Sequence: Synthetic oligonucleotide
  Antisense strand to SEQ ID NO: 1656905
guucucaagcaauugccug

SEQ ID NO: 1656907 - RNA, 19 nt, Artificial Sequence
  Description of Artificial Sequence: Synthetic oligonucleotide
  Sense strand starting at position 3082 of SEQ ID NO: 1561239
auuaacaucugggccuaau

SEQ ID NO: 1656908 - RNA, 19 nt, Artificial Sequence
  Description of Artificial Sequence: Synthetic oligonucleotide
  Antisense strand to SEQ ID NO: 1656907
auuaggcccagauguuaau

SEQ ID NO: 1656909 - RNA, 19 nt, Artificial Sequence
  Description of Artificial Sequence: Synthetic oligonucleotide
  Sense strand starting at position 3721 of SEQ ID NO: 1561239
cauaacuaguuuguggaga

SEQ ID NO: 1656910 - RNA, 19 nt, Artificial Sequence
  Description of Artificial Sequence: Synthetic oligonucleotide
  Antisense strand to SEQ ID NO: 1656909
ucuccacaaacuaguuaug

SEQ ID NO: 1656911 - RNA, 19 nt, Artificial Sequence
  Description of Artificial Sequence: Synthetic oligonucleotide
  Sense strand starting at position 3800 of SEQ ID NO: 1561239
guugacgucaucuacugaa

SEQ ID NO: 1656912 - RNA, 19 nt, Artificial Sequence
  Description of Artificial Sequence: Synthetic oligonucleotide
  Antisense strand to SEQ ID NO: 1656911
uucaguagaugacgucaac

SEQ ID NO: 1656913 - RNA, 19 nt, Artificial Sequence
  Description of Artificial Sequence: Synthetic oligonucleotide
  Sense strand starting at position 3862 of SEQ ID NO: 1561239
gagucaacgucaucccauu

SEQ ID NO: 1656914 - RNA, 19 nt, Artificial Sequence
  Description of Artificial Sequence: Synthetic oligonucleotide
  Antisense strand to SEQ ID NO: 1656913
aaugggaugacguugacuc

SEQ ID NO: 1656915 - RNA, 19 nt, Artificial Sequence
  Description of Artificial Sequence: Synthetic oligonucleotide
  Sense strand starting at position 479 of SEQ ID NO: 1561240
uugagacuagccuggcaua

SEQ ID NO: 1656916 - RNA, 19 nt, Artificial Sequence
  Description of Artificial Sequence: Synthetic oligonucleotide
  Antisense strand to SEQ ID NO: 1656915
uaugccaggcuagucucaa

SEQ ID NO: 1656917 - RNA, 19 nt, Artificial Sequence
  Description of Artificial Sequence: Synthetic oligonucleotide
  Sense strand starting at position 732 of SEQ ID NO: 1561240
aauagauaugccugagucu

SEQ ID NO: 1656918 - RNA, 19 nt, Artificial Sequence
  Description of Artificial Sequence: Synthetic oligonucleotide
  Antisense strand to SEQ ID NO: 1656917
agacucaggcauaucuauu

SEQ ID NO: 1656919 - RNA, 19 nt, Artificial Sequence
  Description of Artificial Sequence: Synthetic oligonucleotide
  Sense strand starting at position 779 of SEQ ID NO: 1561240
ucagguggaggucaguaau

SEQ ID NO: 1656920 - RNA, 19 nt, Artificial Sequence
  Description of Artificial Sequence: Synthetic oligonucleotide
  Antisense strand to SEQ ID NO: 1656919
auuacugaccuccaccuga

SEQ ID NO: 1656921 - RNA, 19 nt, Artificial Sequence
  Description of Artificial Sequence: Synthetic oligonucleotide
  Sense strand starting at position 785 of SEQ ID NO: 1561240
ggaggucaguaauaaauau

SEQ ID NO: 1656922 - RNA, 19 nt, Artificial Sequence
  Description of Artificial Sequence: Synthetic oligonucleotide
  Antisense strand to SEQ ID NO: 1656921
auauuuauuacugaccucc

SEQ ID NO: 1656923 - RNA, 19 nt, Artificial Sequence
  Description of Artificial Sequence: Synthetic oligonucleotide
  Sense strand starting at position 885 of SEQ ID NO: 1561240
caccaugugccacguauua

SEQ ID NO: 1656924 - RNA, 19 nt, Artificial Sequence
  Description of Artificial Sequence: Synthetic oligonucleotide
  Antisense strand to SEQ ID NO: 1656923
uaauacguggcacauggug

SEQ ID NO: 1656925 - RNA, 19 nt, Artificial Sequence
  Description of Artificial Sequence: Synthetic oligonucleotide
  Sense strand starting at position 887 of SEQ ID NO: 1561240
ccaugugccacguauuaag

SEQ ID NO: 1656926 - RNA, 19 nt, Artificial Sequence
  Description of Artificial Sequence: Synthetic oligonucleotide
  Antisense strand to SEQ ID NO: 1656925
cuuaauacguggcacaugg

SEQ ID NO: 1656927 - RNA, 19 nt, Artificial Sequence
  Description of Artificial Sequence: Synthetic oligonucleotide
  Sense strand starting at position 968 of SEQ ID NO: 1561240
guauguagaugcuuccuca

SEQ ID NO: 1656928 - RNA, 19 nt, Artificial Sequence
  Description of Artificial Sequence: Synthetic oligonucleotide
  Antisense strand to SEQ ID NO: 1656927
ugaggaagcaucuacauac

SEQ ID NO: 1656929 - RNA, 19 nt, Artificial Sequence
  Description of Artificial Sequence: Synthetic oligonucleotide
  Sense strand starting at position 1420 of SEQ ID NO: 1561240
gauugaguugccugccuca

SEQ ID NO: 1656930 - RNA, 19 nt, Artificial Sequence
  Description of Artificial Sequence: Synthetic oligonucleotide
  Antisense strand to SEQ ID NO: 1656929
ugaggcaggcaacucaauc

SEQ ID NO: 1656931 - RNA, 19 nt, Artificial Sequence
  Description of Artificial Sequence: Synthetic oligonucleotide
  Sense strand starting at position 1479 of SEQ ID NO: 1561240
aguggauacuugcauuuaa

SEQ ID NO: 1656932 - RNA, 19 nt, Artificial Sequence
  Description of Artificial Sequence: Synthetic oligonucleotide
  Antisense strand to SEQ ID NO: 1656931
uuaaaugcaaguauccacu

SEQ ID NO: 1656933 - RNA, 19 nt, Artificial Sequence
  Description of Artificial Sequence: Synthetic oligonucleotide
  Sense strand starting at position 1770 of SEQ ID NO: 1561240
cccuucucgccgccugaaa

SEQ ID NO: 1656934 - RNA, 19 nt, Artificial Sequence
  Description of Artificial Sequence: Synthetic oligonucleotide
  Antisense strand to SEQ ID NO: 1656933
uuucaggcggcgagaaggg

SEQ ID NO: 1656935 - RNA, 19 nt, Artificial Sequence
  Description of Artificial Sequence: Synthetic oligonucleotide
  Sense strand starting at position 2041 of SEQ ID NO: 1561240
gggacaaguucuuccgggu

SEQ ID NO: 1656936 - RNA, 19 nt, Artificial Sequence
  Description of Artificial Sequence: Synthetic oligonucleotide
  Antisense strand to SEQ ID NO: 1656935
acccggaagaacuuguccc

SEQ ID NO: 1656937 - RNA, 19 nt, Artificial Sequence
  Description of Artificial Sequence: Synthetic oligonucleotide
  Sense strand starting at position 2167 of SEQ ID NO: 1561240
cggguuuguggccagggaa

SEQ ID NO: 1656938 - RNA, 19 nt, Artificial Sequence
  Description of Artificial Sequence: Synthetic oligonucleotide
  Antisense strand to SEQ ID NO: 1656937
uucccuggccacaaacccg

SEQ ID NO: 1656939 - RNA, 19 nt, Artificial Sequence
  Description of Artificial Sequence: Synthetic oligonucleotide
  Sense strand starting at position 2221 of SEQ ID NO: 1561240
cgcccagcucguuugaagu

SEQ ID NO: 1656940 - RNA, 19 nt, Artificial Sequence
  Description of Artificial Sequence: Synthetic oligonucleotide
  Antisense strand to SEQ ID NO: 1656939
acuucaaacgagcugggcg

SEQ ID NO: 1656941 - RNA, 19 nt, Artificial Sequence
  Description of Artificial Sequence: Synthetic oligonucleotide
  Sense strand starting at position 2227 of SEQ ID NO: 1561240
gcucguuugaagucauugu

SEQ ID NO: 1656942 - RNA, 19 nt, Artificial Sequence
  Description of Artificial Sequence: Synthetic oligonucleotide
  Antisense strand to SEQ ID NO: 1656941
acaaugacuucaaacgagc

SEQ ID NO: 1656943 - RNA, 19 nt, Artificial Sequence
  Description of Artificial Sequence: Synthetic oligonucleotide
  Sense strand starting at position 2228 of SEQ ID NO: 1561240
cucguuugaagucauuguu

SEQ ID NO: 1656944 - RNA, 19 nt, Artificial Sequence
  Description of Artificial Sequence: Synthetic oligonucleotide
  Antisense strand to SEQ ID NO: 1656943
aacaaugacuucaaacgag

SEQ ID NO: 1656945 - RNA, 19 nt, Artificial Sequence
  Description of Artificial Sequence: Synthetic oligonucleotide
  Sense strand starting at position 2231 of SEQ ID NO: 1561240
guuugaagucauuguuugu

SEQ ID NO: 1656946 - RNA, 19 nt, Artificial Sequence
  Description of Artificial Sequence: Synthetic oligonucleotide
  Antisense strand to SEQ ID NO: 1656945
acaaacaaugacuucaaac

SEQ ID NO: 1656947 - RNA, 19 nt, Artificial Sequence
  Description of Artificial Sequence: Synthetic oligonucleotide
  Sense strand starting at position 2235 of SEQ ID NO: 1561240
gaagucauuguuuguugca

SEQ ID NO: 1656948 - RNA, 19 nt, Artificial Sequence
  Description of Artificial Sequence: Synthetic oligonucleotide
  Antisense strand to SEQ ID NO: 1656947
ugcaacaaacaaugacuuc

SEQ ID NO: 1656949 - RNA, 19 nt, Artificial Sequence
  Description of Artificial Sequence: Synthetic oligonucleotide
  Sense strand starting at position 2252 of SEQ ID NO: 1561240
cagggagacucggucacau

SEQ ID NO: 1656950 - RNA, 19 nt, Artificial Sequence
  Description of Artificial Sequence: Synthetic oligonucleotide
  Antisense strand to SEQ ID NO: 1656949
augugaccgagucucccug

SEQ ID NO: 1656951 - RNA, 19 nt, Artificial Sequence
  Description of Artificial Sequence: Synthetic oligonucleotide
  Sense strand starting at position 2375 of SEQ ID NO: 1561240
ggacgaguucugcagucau

SEQ ID NO: 1656952 - RNA, 19 nt, Artificial Sequence
  Description of Artificial Sequence: Synthetic oligonucleotide
  Antisense strand to SEQ ID NO: 1656951
augacugcagaacucgucc

SEQ ID NO: 1656953 - RNA, 19 nt, Artificial Sequence
  Description of Artificial Sequence: Synthetic oligonucleotide
  Sense strand starting at position 2499 of SEQ ID NO: 1561240
ggcgaagcuugauccuaga

SEQ ID NO: 1656954 - RNA, 19 nt, Artificial Sequence
  Description of Artificial Sequence: Synthetic oligonucleotide
  Antisense strand to SEQ ID NO: 1656953
ucuaggaucaagcuucgcc

SEQ ID NO: 1656955 - RNA, 19 nt, Artificial Sequence
  Description of Artificial Sequence: Synthetic oligonucleotide
  Sense strand starting at position 2625 of SEQ ID NO: 1561240
gcugcaaguuuauuaagca

SEQ ID NO: 1656956 - RNA, 19 nt, Artificial Sequence
  Description of Artificial Sequence: Synthetic oligonucleotide
  Antisense strand to SEQ ID NO: 1656955
ugcuuaauaaacuugcagc

SEQ ID NO: 1656957 - RNA, 19 nt, Artificial Sequence
  Description of Artificial Sequence: Synthetic oligonucleotide
  Sense strand starting at position 2672 of SEQ ID NO: 1561240
cggacugaccucugcgaga

SEQ ID NO: 1656958 - RNA, 19 nt, Artificial Sequence
  Description of Artificial Sequence: Synthetic oligonucleotide
  Antisense strand to SEQ ID NO: 1656957
ucucgcagaggucaguccg

SEQ ID NO: 1656959 - RNA, 19 nt, Artificial Sequence
  Description of Artificial Sequence: Synthetic oligonucleotide
  Sense strand starting at position 2674 of SEQ ID NO: 1561240
gacugaccucugcgagaua

SEQ ID NO: 1656960 - RNA, 19 nt, Artificial Sequence
  Description of Artificial Sequence: Synthetic oligonucleotide
  Antisense strand to SEQ ID NO: 1656959
uaucucgcagaggucaguc

SEQ ID NO: 1656961 - RNA, 19 nt, Artificial Sequence
  Description of Artificial Sequence: Synthetic oligonucleotide
  Sense strand starting at position 2677 of SEQ ID NO: 1561240
ugaccucugcgagauaaga

SEQ ID NO: 1656962 - RNA, 19 nt, Artificial Sequence
  Description of Artificial Sequence: Synthetic oligonucleotide
  Antisense strand to SEQ ID NO: 1656961
ucuuaucucgcagagguca

SEQ ID NO: 1656963 - RNA, 19 nt, Artificial Sequence
  Description of Artificial Sequence: Synthetic oligonucleotide
  Sense strand starting at position 2953 of SEQ ID NO: 1561240
ucccaaggcugccuaauau

SEQ ID NO: 1656964 - RNA, 19 nt, Artificial Sequence
  Description of Artificial Sequence: Synthetic oligonucleotide
  Antisense strand to SEQ ID NO: 1656963
auauuaggcagccuuggga

SEQ ID NO: 1656965 - RNA, 19 nt, Artificial Sequence
  Description of Artificial Sequence: Synthetic oligonucleotide
  Sense strand starting at position 2964 of SEQ ID NO: 1561240
ccuaauaucuagccagugu

SEQ ID NO: 1656966 - RNA, 19 nt, Artificial Sequence
  Description of Artificial Sequence: Synthetic oligonucleotide
  Antisense strand to SEQ ID NO: 1656965
acacuggcuagauauuagg

SEQ ID NO: 1656967 - RNA, 19 nt, Artificial Sequence
  Description of Artificial Sequence: Synthetic oligonucleotide
  Sense strand starting at position 2990 of SEQ ID NO: 1561240
uuugaaugauagguguguu

SEQ ID NO: 1656968 - RNA, 19 nt, Artificial Sequence
  Description of Artificial Sequence: Synthetic oligonucleotide
  Antisense strand to SEQ ID NO: 1656967
aacacaccuaucauucaaa

SEQ ID NO: 1656969 - RNA, 19 nt, Artificial Sequence
  Description of Artificial Sequence: Synthetic oligonucleotide
  Sense strand starting at position 2993 of SEQ ID NO: 1561240
gaaugauagguguguugcu

SEQ ID NO: 1656970 - RNA, 19 nt, Artificial Sequence
  Description of Artificial Sequence: Synthetic oligonucleotide
  Antisense strand to SEQ ID NO: 1656969
agcaacacaccuaucauuc

SEQ ID NO: 1656971 - RNA, 19 nt, Artificial Sequence
  Description of Artificial Sequence: Synthetic oligonucleotide
  Sense strand starting at position 2998 of SEQ ID NO: 1561240
auagguguguugcuuacuu

SEQ ID NO: 1656972 - RNA, 19 nt, Artificial Sequence
  Description of Artificial Sequence: Synthetic oligonucleotide
  Antisense strand to SEQ ID NO: 1656971
aaguaagcaacacaccuau

SEQ ID NO: 1656973 - RNA, 19 nt, Artificial Sequence
  Description of Artificial Sequence: Synthetic oligonucleotide
  Sense strand starting at position 3075 of SEQ ID NO: 1561240
cgcuaaugagcugguuauc

SEQ ID NO: 1656974 - RNA, 19 nt, Artificial Sequence
  Description of Artificial Sequence: Synthetic oligonucleotide
  Antisense strand to SEQ ID NO: 1656973
gauaaccagcucauuagcg

SEQ ID NO: 1656975 - RNA, 19 nt, Artificial Sequence
  Description of Artificial Sequence: Synthetic oligonucleotide
  Sense strand starting at position 3078 of SEQ ID NO: 1561240
uaaugagcugguuauccuu

SEQ ID NO: 1656976 - RNA, 19 nt, Artificial Sequence
  Description of Artificial Sequence: Synthetic oligonucleotide
  Antisense strand to SEQ ID NO: 1656975
aaggauaaccagcucauua

SEQ ID NO: 1656977 - RNA, 19 nt, Artificial Sequence
  Description of Artificial Sequence: Synthetic oligonucleotide
  Sense strand starting at position 3080 of SEQ ID NO: 1561240
augagcugguuauccuuau

SEQ ID NO: 1656978 - RNA, 19 nt, Artificial Sequence
  Description of Artificial Sequence: Synthetic oligonucleotide
  Antisense strand to SEQ ID NO: 1656977
auaaggauaaccagcucau

SEQ ID NO: 1656979 - RNA, 19 nt, Artificial Sequence
  Description of Artificial Sequence: Synthetic oligonucleotide
  Sense strand starting at position 3084 of SEQ ID NO: 1561240
gcugguuauccuuaucaug

SEQ ID NO: 1656980 - RNA, 19 nt, Artificial Sequence
  Description of Artificial Sequence: Synthetic oligonucleotide
  Antisense strand to SEQ ID NO: 1656979
caugauaaggauaaccagc

SEQ ID NO: 1656981 - RNA, 19 nt, Artificial Sequence
  Description of Artificial Sequence: Synthetic oligonucleotide
  Sense strand starting at position 3086 of SEQ ID NO: 1561240
ugguuauccuuaucauguu

SEQ ID NO: 1656982 - RNA, 19 nt, Artificial Sequence
  Description of Artificial Sequence: Synthetic oligonucleotide
  Antisense strand to SEQ ID NO: 1656981
aacaugauaaggauaacca

SEQ ID NO: 1656983 - RNA, 19 nt, Artificial Sequence
  Description of Artificial Sequence: Synthetic oligonucleotide
  Sense strand starting at position 3119 of SEQ ID NO: 1561240
ucuuuaaugcgcgugcuua

SEQ ID NO: 1656984 - RNA, 19 nt, Artificial Sequence
  Description of Artificial Sequence: Synthetic oligonucleotide
  Antisense strand to SEQ ID NO: 1656983
uaagcacgcgcauuaaaga

SEQ ID NO: 1656985 - RNA, 19 nt, Artificial Sequence
  Description of Artificial Sequence: Synthetic oligonucleotide
  Sense strand starting at position 3130 of SEQ ID NO: 1561240
cgugcuuaugccuaaagag

SEQ ID NO: 1656986 - RNA, 19 nt, Artificial Sequence
  Description of Artificial Sequence: Synthetic oligonucleotide
  Antisense strand to SEQ ID NO: 1656985
cucuuuaggcauaagcacg

SEQ ID NO: 1656987 - RNA, 19 nt, Artificial Sequence
  Description of Artificial Sequence: Synthetic oligonucleotide
  Sense strand starting at position 3727 of SEQ ID NO: 1561240
cuuaaaugccugcgaggua

SEQ ID NO: 1656988 - RNA, 19 nt, Artificial Sequence
  Description of Artificial Sequence: Synthetic oligonucleotide
  Antisense strand to SEQ ID NO: 1656987
uaccucgcaggcauuuaag

SEQ ID NO: 1656989 - RNA, 19 nt, Artificial Sequence
  Description of Artificial Sequence: Synthetic oligonucleotide
  Sense strand starting at position 3747 of SEQ ID NO: 1561240
cuggaaacauugcacauuu

SEQ ID NO: 1656990 - RNA, 19 nt, Artificial Sequence
  Description of Artificial Sequence: Synthetic oligonucleotide
  Antisense strand to SEQ ID NO: 1656989
aaaugugcaauguuuccag

SEQ ID NO: 1656991 - RNA, 19 nt, Artificial Sequence
  Description of Artificial Sequence: Synthetic oligonucleotide
  Sense strand starting at position 3902 of SEQ ID NO: 1561240
ucaauaaauugacagguuu

SEQ ID NO: 1656992 - RNA, 19 nt, Artificial Sequence
  Description of Artificial Sequence: Synthetic oligonucleotide
  Antisense strand to SEQ ID NO: 1656991
aaaccugucaauuuauuga

SEQ ID NO: 1656993 - RNA, 19 nt, Artificial Sequence
  Description of Artificial Sequence: Synthetic oligonucleotide
  Sense strand starting at position 3916 of SEQ ID NO: 1561240
gguuuauguagacaagguu

SEQ ID NO: 1656994 - RNA, 19 nt, Artificial Sequence
  Description of Artificial Sequence: Synthetic oligonucleotide
  Antisense strand to SEQ ID NO: 1656993
aaccuugucuacauaaacc

SEQ ID NO: 1656995 - RNA, 19 nt, Artificial Sequence
  Description of Artificial Sequence: Synthetic oligonucleotide
  Sense strand starting at position 491 of SEQ ID NO: 1561241
uugagacuagccuggcaua

SEQ ID NO: 1656996 - RNA, 19 nt, Artificial Sequence
  Description of Artificial Sequence: Synthetic oligonucleotide
  Antisense strand to SEQ ID NO: 1656995
uaugccaggcuagucucaa

SEQ ID NO: 1656997 - RNA, 19 nt, Artificial Sequence
  Description of Artificial Sequence: Synthetic oligonucleotide
  Sense strand starting at position 744 of SEQ ID NO: 1561241
aauagauaugccugagucu

SEQ ID NO: 1656998 - RNA, 19 nt, Artificial Sequence
  Description of Artificial Sequence: Synthetic oligonucleotide
  Antisense strand to SEQ ID NO: 1656997
agacucaggcauaucuauu

SEQ ID NO: 1656999 - RNA, 19 nt, Artificial Sequence
  Description of Artificial Sequence: Synthetic oligonucleotide
  Sense strand starting at position 791 of SEQ ID NO: 1561241
ucagguggaggucaguaau

SEQ ID NO: 1657000 - RNA, 19 nt, Artificial Sequence
  Description of Artificial Sequence: Synthetic oligonucleotide
  Antisense strand to SEQ ID NO: 1656999
auuacugaccuccaccuga

SEQ ID NO: 1657001 - RNA, 19 nt, Artificial Sequence
  Description of Artificial Sequence: Synthetic oligonucleotide
  Sense strand starting at position 797 of SEQ ID NO: 1561241
ggaggucaguaauaaauau

SEQ ID NO: 1657002 - RNA, 19 nt, Artificial Sequence
  Description of Artificial Sequence: Synthetic oligonucleotide
  Antisense strand to SEQ ID NO: 1657001
auauuuauuacugaccucc

SEQ ID NO: 1657003 - RNA, 19 nt, Artificial Sequence
  Description of Artificial Sequence: Synthetic oligonucleotide
  Sense strand starting at position 897 of SEQ ID NO: 1561241
caccaugugccacguauua

SEQ ID NO: 1657004 - RNA, 19 nt, Artificial Sequence
  Description of Artificial Sequence: Synthetic oligonucleotide
  Antisense strand to SEQ ID NO: 1657003
uaauacguggcacauggug

SEQ ID NO: 1657005 - RNA, 19 nt, Artificial Sequence
  Description of Artificial Sequence: Synthetic oligonucleotide
  Sense strand starting at position 899 of SEQ ID NO: 1561241
ccaugugccacguauuaag

SEQ ID NO: 1657006 - RNA, 19 nt, Artificial Sequence
  Description of Artificial Sequence: Synthetic oligonucleotide
  Antisense strand to SEQ ID NO: 1657005
cuuaauacguggcacaugg

SEQ ID NO: 1657007 - RNA, 19 nt, Artificial Sequence
  Description of Artificial Sequence: Synthetic oligonucleotide
  Sense strand starting at position 980 of SEQ ID NO: 1561241
guauguagaugcuuccuca

SEQ ID NO: 1657008 - RNA, 19 nt, Artificial Sequence
  Description of Artificial Sequence: Synthetic oligonucleotide
  Antisense strand to SEQ ID NO: 1657007
ugaggaagcaucuacauac

SEQ ID NO: 1657009 - RNA, 19 nt, Artificial Sequence
  Description of Artificial Sequence: Synthetic oligonucleotide
  Sense strand starting at position 1432 of SEQ ID NO: 1561241
gauugaguugccugccuca

SEQ ID NO: 1657010 - RNA, 19 nt, Artificial Sequence
  Description of Artificial Sequence: Synthetic oligonucleotide
  Antisense strand to SEQ ID NO: 1657009
ugaggcaggcaacucaauc

SEQ ID NO: 1657011 - RNA, 19 nt, Artificial Sequence
  Description of Artificial Sequence: Synthetic oligonucleotide
  Sense strand starting at position 1491 of SEQ ID NO: 1561241
aguggauacuugcauuuaa

SEQ ID NO: 1657012 - RNA, 19 nt, Artificial Sequence
  Description of Artificial Sequence: Synthetic oligonucleotide
  Antisense strand to SEQ ID NO: 1657011
uuaaaugcaaguauccacu

SEQ ID NO: 1657013 - RNA, 19 nt, Artificial Sequence
  Description of Artificial Sequence: Synthetic oligonucleotide
  Sense strand starting at position 1782 of SEQ ID NO: 1561241
cccuucucgccgccugaaa

SEQ ID NO: 1657014 - RNA, 19 nt, Artificial Sequence
  Description of Artificial Sequence: Synthetic oligonucleotide
  Antisense strand to SEQ ID NO: 1657013
uuucaggcggcgagaaggg

SEQ ID NO: 1657015 - RNA, 19 nt, Artificial Sequence
  Description of Artificial Sequence: Synthetic oligonucleotide
  Sense strand starting at position 2053 of SEQ ID NO: 1561241
gggacaaguucuuccgggu

SEQ ID NO: 1657016 - RNA, 19 nt, Artificial Sequence
  Description of Artificial Sequence: Synthetic oligonucleotide
  Antisense strand to SEQ ID NO: 1657015
acccggaagaacuuguccc

SEQ ID NO: 1657017 - RNA, 19 nt, Artificial Sequence
  Description of Artificial Sequence: Synthetic oligonucleotide
  Sense strand starting at position 2179 of SEQ ID NO: 1561241
cggguuuguggccagggaa

SEQ ID NO: 1657018 - RNA, 19 nt, Artificial Sequence
  Description of Artificial Sequence: Synthetic oligonucleotide
  Antisense strand to SEQ ID NO: 1657017
uucccuggccacaaacccg

SEQ ID NO: 1657019 - RNA, 19 nt, Artificial Sequence
  Description of Artificial Sequence: Synthetic oligonucleotide
  Sense strand starting at position 2233 of SEQ ID NO: 1561241
cgcccagcucguuugaagu

SEQ ID NO: 1657020 - RNA, 19 nt, Artificial Sequence
  Description of Artificial Sequence: Synthetic oligonucleotide
  Antisense strand to SEQ ID NO: 1657019
acuucaaacgagcugggcg

SEQ ID NO: 1657021 - RNA, 19 nt, Artificial Sequence
  Description of Artificial Sequence: Synthetic oligonucleotide
  Sense strand starting at position 2239 of SEQ ID NO: 1561241
gcucguuugaagucauugu

SEQ ID NO: 1657022 - RNA, 19 nt, Artificial Sequence
  Description of Artificial Sequence: Synthetic oligonucleotide
  Antisense strand to SEQ ID NO: 1657021
acaaugacuucaaacgagc

SEQ ID NO: 1657023 - RNA, 19 nt, Artificial Sequence
  Description of Artificial Sequence: Synthetic oligonucleotide
  Sense strand starting at position 2240 of SEQ ID NO: 1561241
cucguuugaagucauuguu

SEQ ID NO: 1657024 - RNA, 19 nt, Artificial Sequence
  Description of Artificial Sequence: Synthetic oligonucleotide
  Antisense strand to SEQ ID NO: 1657023
aacaaugacuucaaacgag

SEQ ID NO: 1657025 - RNA, 19 nt, Artificial Sequence
  Description of Artificial Sequence: Synthetic oligonucleotide
  Sense strand starting at position 2243 of SEQ ID NO: 1561241
guuugaagucauuguuugu

SEQ ID NO: 1657026 - RNA, 19 nt, Artificial Sequence
  Description of Artificial Sequence: Synthetic oligonucleotide
  Antisense strand to SEQ ID NO: 1657025
acaaacaaugacuucaaac

SEQ ID NO: 1657027 - RNA, 19 nt, Artificial Sequence
  Description of Artificial Sequence: Synthetic oligonucleotide
  Sense strand starting at position 2247 of SEQ ID NO: 1561241
gaagucauuguuuguugca

SEQ ID NO: 1657028 - RNA, 19 nt, Artificial Sequence
  Description of Artificial Sequence: Synthetic oligonucleotide
  Antisense strand to SEQ ID NO: 1657027
ugcaacaaacaaugacuuc

SEQ ID NO: 1657029 - RNA, 19 nt, Artificial Sequence
  Description of Artificial Sequence: Synthetic oligonucleotide
  Sense strand starting at position 2264 of SEQ ID NO: 1561241
cagggagacucggucacau

SEQ ID NO: 1657030 - RNA, 19 nt, Artificial Sequence
  Description of Artificial Sequence: Synthetic oligonucleotide
  Antisense strand to SEQ ID NO: 1657029
augugaccgagucucccug

SEQ ID NO: 1657031 - RNA, 19 nt, Artificial Sequence
  Description of Artificial Sequence: Synthetic oligonucleotide
  Sense strand starting at position 2387 of SEQ ID NO: 1561241
ggacgaguucugcagucau

SEQ ID NO: 1657032 - RNA, 19 nt, Artificial Sequence
  Description of Artificial Sequence: Synthetic oligonucleotide
  Antisense strand to SEQ ID NO: 1657031
augacugcagaacucgucc

SEQ ID NO: 1657033 - RNA, 19 nt, Artificial Sequence
  Description of Artificial Sequence: Synthetic oligonucleotide
  Sense strand starting at position 2511 of SEQ ID NO: 1561241
ggcgaagcuugauccuaga

SEQ ID NO: 1657034 - RNA, 19 nt, Artificial Sequence
  Description of Artificial Sequence: Synthetic oligonucleotide
  Antisense strand to SEQ ID NO: 1657033
ucuaggaucaagcuucgcc

SEQ ID NO: 1657035 - RNA, 19 nt, Artificial Sequence
  Description of Artificial Sequence: Synthetic oligonucleotide
  Sense strand starting at position 2637 of SEQ ID NO: 1561241
gcugcaaguuuauuaagca

SEQ ID NO: 1657036 - RNA, 19 nt, Artificial Sequence
  Description of Artificial Sequence: Synthetic oligonucleotide
  Antisense strand to SEQ ID NO: 1657035
ugcuuaauaaacuugcagc

SEQ ID NO: 1657037 - RNA, 19 nt, Artificial Sequence
  Description of Artificial Sequence: Synthetic oligonucleotide
  Sense strand starting at position 2684 of SEQ ID NO: 1561241
cggacugaccucugcgaga

SEQ ID NO: 1657038 - RNA, 19 nt, Artificial Sequence
  Description of Artificial Sequence: Synthetic oligonucleotide
  Antisense strand to SEQ ID NO: 1657037
ucucgcagaggucaguccg

SEQ ID NO: 1657039 - RNA, 19 nt, Artificial Sequence
  Description of Artificial Sequence: Synthetic oligonucleotide
  Sense strand starting at position 2686 of SEQ ID NO: 1561241
gacugaccucugcgagaua

SEQ ID NO: 1657040 - RNA, 19 nt, Artificial Sequence
  Description of Artificial Sequence: Synthetic oligonucleotide
  Antisense strand to SEQ ID NO: 1657039
uaucucgcagaggucaguc

SEQ ID NO: 1657041 - RNA, 19 nt, Artificial Sequence
  Description of Artificial Sequence: Synthetic oligonucleotide
  Sense strand starting at position 2689 of SEQ ID NO: 1561241
ugaccucugcgagauaaga

SEQ ID NO: 1657042 - RNA, 19 nt, Artificial Sequence
  Description of Artificial Sequence: Synthetic oligonucleotide
  Antisense strand to SEQ ID NO: 1657041
ucuuaucucgcagagguca

SEQ ID NO: 1657043 - RNA, 19 nt, Artificial Sequence
  Description of Artificial Sequence: Synthetic oligonucleotide
  Sense strand starting at position 2965 of SEQ ID NO: 1561241
ucccaaggcugccuaauau

SEQ ID NO: 1657044 - RNA, 19 nt, Artificial Sequence
  Description of Artificial Sequence: Synthetic oligonucleotide
  Antisense strand to SEQ ID NO: 1657043
auauuaggcagccuuggga

SEQ ID NO: 1657045 - RNA, 19 nt, Artificial Sequence
  Description of Artificial Sequence: Synthetic oligonucleotide
  Sense strand starting at position 2976 of SEQ ID NO: 1561241
ccuaauaucuagccagugu

SEQ ID NO: 1657046 - RNA, 19 nt, Artificial Sequence
  Description of Artificial Sequence: Synthetic oligonucleotide
  Antisense strand to SEQ ID NO: 1657045
acacuggcuagauauuagg

SEQ ID NO: 1657047 - RNA, 19 nt, Artificial Sequence
  Description of Artificial Sequence: Synthetic oligonucleotide
  Sense strand starting at position 3002 of SEQ ID NO: 1561241
uuugaaugauagguguguu

SEQ ID NO: 1657048 - RNA, 19 nt, Artificial Sequence
  Description of Artificial Sequence: Synthetic oligonucleotide
  Antisense strand to SEQ ID NO: 1657047
aacacaccuaucauucaaa

SEQ ID NO: 1657049 - RNA, 19 nt, Artificial Sequence
  Description of Artificial Sequence: Synthetic oligonucleotide
  Sense strand starting at position 3005 of SEQ ID NO: 1561241
gaaugauagguguguugcu

SEQ ID NO: 1657050 - RNA, 19 nt, Artificial Sequence
  Description of Artificial Sequence: Synthetic oligonucleotide
  Antisense strand to SEQ ID NO: 1657049
agcaacacaccuaucauuc

SEQ ID NO: 1657051 - RNA, 19 nt, Artificial Sequence
  Description of Artificial Sequence: Synthetic oligonucleotide
  Sense strand starting at position 3010 of SEQ ID NO: 1561241
auagguguguugcuuacuu

SEQ ID NO: 1657052 - RNA, 19 nt, Artificial Sequence
  Description of Artificial Sequence: Synthetic oligonucleotide
  Antisense strand to SEQ ID NO: 1657051
aaguaagcaacacaccuau

SEQ ID NO: 1657053 - RNA, 19 nt, Artificial Sequence
  Description of Artificial Sequence: Synthetic oligonucleotide
  Sense strand starting at position 3087 of SEQ ID NO: 1561241
cgcuaaugagcugguuauc

SEQ ID NO: 1657054 - RNA, 19 nt, Artificial Sequence
  Description of Artificial Sequence: Synthetic oligonucleotide
  Antisense strand to SEQ ID NO: 1657053
gauaaccagcucauuagcg

SEQ ID NO: 1657055 - RNA, 19 nt, Artificial Sequence
  Description of Artificial Sequence: Synthetic oligonucleotide
  Sense strand starting at position 3090 of SEQ ID NO: 1561241
uaaugagcugguuauccuu

SEQ ID NO: 1657056 - RNA, 19 nt, Artificial Sequence
  Description of Artificial Sequence: Synthetic oligonucleotide
  Antisense strand to SEQ ID NO: 1657055
aaggauaaccagcucauua

SEQ ID NO: 1657057 - RNA, 19 nt, Artificial Sequence
  Description of Artificial Sequence: Synthetic oligonucleotide
  Sense strand starting at position 3092 of SEQ ID NO: 1561241
augagcugguuauccuuau

SEQ ID NO: 1657058 - RNA, 19 nt, Artificial Sequence
  Description of Artificial Sequence: Synthetic oligonucleotide
  Antisense strand to SEQ ID NO: 1657057
auaaggauaaccagcucau

SEQ ID NO: 1657059 - RNA, 19 nt, Artificial Sequence
  Description of Artificial Sequence: Synthetic oligonucleotide
  Sense strand starting at position 3096 of SEQ ID NO: 1561241
gcugguuauccuuaucaug

SEQ ID NO: 1657060 - RNA, 19 nt, Artificial Sequence
  Description of Artificial Sequence: Synthetic oligonucleotide
  Antisense strand to SEQ ID NO: 1657059
caugauaaggauaaccagc

SEQ ID NO: 1657061 - RNA, 19 nt, Artificial Sequence
  Description of Artificial Sequence: Synthetic oligonucleotide
  Sense strand starting at position 3098 of SEQ ID NO: 1561241
ugguuauccuuaucauguu

SEQ ID NO: 1657062 - RNA, 19 nt, Artificial Sequence
  Description of Artificial Sequence: Synthetic oligonucleotide
  Antisense strand to SEQ ID NO: 1657061
aacaugauaaggauaacca

SEQ ID NO: 1657063 - RNA, 19 nt, Artificial Sequence
  Description of Artificial Sequence: Synthetic oligonucleotide
  Sense strand starting at position 3131 of SEQ ID NO: 1561241
ucuuuaaugcgcgugcuua

SEQ ID NO: 1657064 - RNA, 19 nt, Artificial Sequence
  Description of Artificial Sequence: Synthetic oligonucleotide
  Antisense strand to SEQ ID NO: 1657063
uaagcacgcgcauuaaaga

SEQ ID NO: 1657065 - RNA, 19 nt, Artificial Sequence
  Description of Artificial Sequence: Synthetic oligonucleotide
  Sense strand starting at position 3142 of SEQ ID NO: 1561241
cgugcuuaugccuaaagag

SEQ ID NO: 1657066 - RNA, 19 nt, Artificial Sequence
  Description of Artificial Sequence: Synthetic oligonucleotide
  Antisense strand to SEQ ID NO: 1657065
cucuuuaggcauaagcacg

SEQ ID NO: 1657067 - RNA, 19 nt, Artificial Sequence
  Description of Artificial Sequence: Synthetic oligonucleotide
  Sense strand starting at position 3739 of SEQ ID NO: 1561241
cuuaaaugccugcgaggua

SEQ ID NO: 1657068 - RNA, 19 nt, Artificial Sequence
  Description of Artificial Sequence: Synthetic oligonucleotide
  Antisense strand to SEQ ID NO: 1657067
uaccucgcaggcauuuaag

SEQ ID NO: 1657069 - RNA, 19 nt, Artificial Sequence
  Description of Artificial Sequence: Synthetic oligonucleotide
  Sense strand starting at position 3759 of SEQ ID NO: 1561241
cuggaaacauugcacauuu

SEQ ID NO: 1657070 - RNA, 19 nt, Artificial Sequence
  Description of Artificial Sequence: Synthetic oligonucleotide
  Antisense strand to SEQ ID NO: 1657069
aaaugugcaauguuuccag

SEQ ID NO: 1657071 - RNA, 19 nt, Artificial Sequence
  Description of Artificial Sequence: Synthetic oligonucleotide
  Sense strand starting at position 3914 of SEQ ID NO: 1561241
ucaauaaauugacagguuu

SEQ ID NO: 1657072 - RNA, 19 nt, Artificial Sequence
  Description of Artificial Sequence: Synthetic oligonucleotide
  Antisense strand to SEQ ID NO: 1657071
aaaccugucaauuuauuga

SEQ ID NO: 1657073 - RNA, 19 nt, Artificial Sequence
  Description of Artificial Sequence: Synthetic oligonucleotide
  Sense strand starting at position 3928 of SEQ ID NO: 1561241
gguuuauguagacaagguu

SEQ ID NO: 1657074 - RNA, 19 nt, Artificial Sequence
  Description of Artificial Sequence: Synthetic oligonucleotide
  Antisense strand to SEQ ID NO: 1657073
aaccuugucuacauaaacc

SEQ ID NO: 1657075 - RNA, 19 nt, Artificial Sequence
  Description of Artificial Sequence: Synthetic oligonucleotide
  Sense strand starting at position 196 of SEQ ID NO: 1561242
gguggcuucggcuugaagu

SEQ ID NO: 1657076 - RNA, 19 nt, Artificial Sequence
  Description of Artificial Sequence: Synthetic oligonucleotide
  Antisense strand to SEQ ID NO: 1657075
acuucaagccgaagccacc

SEQ ID NO: 1657077 - RNA, 19 nt, Artificial Sequence
  Description of Artificial Sequence: Synthetic oligonucleotide
  Sense strand starting at position 197 of SEQ ID NO: 1561242
guggcuucggcuugaaguu

SEQ ID NO: 1657078 - RNA, 19 nt, Artificial Sequence
  Description of Artificial Sequence: Synthetic oligonucleotide
  Antisense strand to SEQ ID NO: 1657077
aacuucaagccgaagccac

SEQ ID NO: 1657079 - RNA, 19 nt, Artificial Sequence
  Description of Artificial Sequence: Synthetic oligonucleotide
  Sense strand starting at position 206 of SEQ ID NO: 1561242
gcuugaaguuccuuucuca

SEQ ID NO: 1657080 - RNA, 19 nt, Artificial Sequence
  Description of Artificial Sequence: Synthetic oligonucleotide
  Antisense strand to SEQ ID NO: 1657079
ugagaaaggaacuucaagc

SEQ ID NO: 1657081 - RNA, 19 nt, Artificial Sequence
  Description of Artificial Sequence: Synthetic oligonucleotide
  Sense strand starting at position 536 of SEQ ID NO: 1561242
cacgguugcucaugugacu

SEQ ID NO: 1657082 - RNA, 19 nt, Artificial Sequence
  Description of Artificial Sequence: Synthetic oligonucleotide
  Antisense strand to SEQ ID NO: 1657081
agucacaugagcaaccgug

SEQ ID NO: 1657083 - RNA, 19 nt, Artificial Sequence
  Description of Artificial Sequence: Synthetic oligonucleotide
  Sense strand starting at position 959 of SEQ ID NO: 1561242
accagaugguucuacugca

SEQ ID NO: 1657084 - RNA, 19 nt, Artificial Sequence
  Description of Artificial Sequence: Synthetic oligonucleotide
  Antisense strand to SEQ ID NO: 1657083
ugcaguagaaccaucuggu

SEQ ID NO: 1657085 - RNA, 19 nt, Artificial Sequence
  Description of Artificial Sequence: Synthetic oligonucleotide
  Sense strand starting at position 999 of SEQ ID NO: 1561242
aggagaugcugguuccacu

SEQ ID NO: 1657086 - RNA, 19 nt, Artificial Sequence
  Description of Artificial Sequence: Synthetic oligonucleotide
  Antisense strand to SEQ ID NO: 1657085
aguggaaccagcaucuccu

SEQ ID NO: 1657087 - RNA, 19 nt, Artificial Sequence
  Description of Artificial Sequence: Synthetic oligonucleotide
  Sense strand starting at position 1114 of SEQ ID NO: 1561242
uugacauccucagugcuuu

SEQ ID NO: 1657088 - RNA, 19 nt, Artificial Sequence
  Description of Artificial Sequence: Synthetic oligonucleotide
  Antisense strand to SEQ ID NO: 1657087
aaagcacugaggaugucaa

SEQ ID NO: 1657089 - RNA, 19 nt, Artificial Sequence
  Description of Artificial Sequence: Synthetic oligonucleotide
  Sense strand starting at position 1258 of SEQ ID NO: 1561242
gggacuuagaggcaagcau

SEQ ID NO: 1657090 - RNA, 19 nt, Artificial Sequence
  Description of Artificial Sequence: Synthetic oligonucleotide
  Antisense strand to SEQ ID NO: 1657089
augcuugccucuaaguccc

SEQ ID NO: 1657091 - RNA, 19 nt, Artificial Sequence
  Description of Artificial Sequence: Synthetic oligonucleotide
  Sense strand starting at position 1417 of SEQ ID NO: 1561242
ccgcauccucaggaauuga

SEQ ID NO: 1657092 - RNA, 19 nt, Artificial Sequence
  Description of Artificial Sequence: Synthetic oligonucleotide
  Antisense strand to SEQ ID NO: 1657091
ucaauuccugaggaugcgg

SEQ ID NO: 1657093 - RNA, 19 nt, Artificial Sequence
  Description of Artificial Sequence: Synthetic oligonucleotide
  Sense strand starting at position 1550 of SEQ ID NO: 1561242
ggucggcucgcuugguuua

SEQ ID NO: 1657094 - RNA, 19 nt, Artificial Sequence
  Description of Artificial Sequence: Synthetic oligonucleotide
  Antisense strand to SEQ ID NO: 1657093
uaaaccaagcgagccgacc

SEQ ID NO: 1657095 - RNA, 19 nt, Artificial Sequence
  Description of Artificial Sequence: Synthetic oligonucleotide
  Sense strand starting at position 1795 of SEQ ID NO: 1561242
aggagaguuccguaaccca

SEQ ID NO: 1657096 - RNA, 19 nt, Artificial Sequence
  Description of Artificial Sequence: Synthetic oligonucleotide
  Antisense strand to SEQ ID NO: 1657095
uggguuacggaacucuccu

SEQ ID NO: 1657097 - RNA, 19 nt, Artificial Sequence
  Description of Artificial Sequence: Synthetic oligonucleotide
  Sense strand starting at position 1833 of SEQ ID NO: 1561242
agagaagccucgcagagaa

SEQ ID NO: 1657098 - RNA, 19 nt, Artificial Sequence
  Description of Artificial Sequence: Synthetic oligonucleotide
  Antisense strand to SEQ ID NO: 1657097
uucucugcgaggcuucucu

SEQ ID NO: 1657099 - RNA, 19 nt, Artificial Sequence
  Description of Artificial Sequence: Synthetic oligonucleotide
  Sense strand starting at position 1917 of SEQ ID NO: 1561242
acuuacgggcugugucaau

SEQ ID NO: 1657100 - RNA, 19 nt, Artificial Sequence
  Description of Artificial Sequence: Synthetic oligonucleotide
  Antisense strand to SEQ ID NO: 1657099
auugacacagcccguaagu

SEQ ID NO: 1657101 - RNA, 19 nt, Artificial Sequence
  Description of Artificial Sequence: Synthetic oligonucleotide
  Sense strand starting at position 1929 of SEQ ID NO: 1561242
ugucaauuucugugccgua

SEQ ID NO: 1657102 - RNA, 19 nt, Artificial Sequence
  Description of Artificial Sequence: Synthetic oligonucleotide
  Antisense strand to SEQ ID NO: 1657101
uacggcacagaaauugaca

SEQ ID NO: 1657103 - RNA, 19 nt, Artificial Sequence
  Description of Artificial Sequence: Synthetic oligonucleotide
  Sense strand starting at position 2074 of SEQ ID NO: 1561242
gagcaucuuggguggaaga

SEQ ID NO: 1657104 - RNA, 19 nt, Artificial Sequence
  Description of Artificial Sequence: Synthetic oligonucleotide
  Antisense strand to SEQ ID NO: 1657103
ucuuccacccaagaugcuc

SEQ ID NO: 1657105 - RNA, 19 nt, Artificial Sequence
  Description of Artificial Sequence: Synthetic oligonucleotide
  Sense strand starting at position 2093 of SEQ ID NO: 1561242
ggagaugacucaugaagac

SEQ ID NO: 1657106 - RNA, 19 nt, Artificial Sequence
  Description of Artificial Sequence: Synthetic oligonucleotide
  Antisense strand to SEQ ID NO: 1657105
gucuucaugagucaucucc

SEQ ID NO: 1657107 - RNA, 19 nt, Artificial Sequence
  Description of Artificial Sequence: Synthetic oligonucleotide
  Sense strand starting at position 2125 of SEQ ID NO: 1561242
auccgauaucugggucuuu

SEQ ID NO: 1657108 - RNA, 19 nt, Artificial Sequence
  Description of Artificial Sequence: Synthetic oligonucleotide
  Antisense strand to SEQ ID NO: 1657107
aaagacccagauaucggau

SEQ ID NO: 1657109 - RNA, 19 nt, Artificial Sequence
  Description of Artificial Sequence: Synthetic oligonucleotide
  Sense strand starting at position 2417 of SEQ ID NO: 1561242
ugcaccuucugcccagaau

SEQ ID NO: 1657110 - RNA, 19 nt, Artificial Sequence
  Description of Artificial Sequence: Synthetic oligonucleotide
  Antisense strand to SEQ ID NO: 1657109
auucugggcagaaggugca

SEQ ID NO: 1657111 - RNA, 19 nt, Artificial Sequence
  Description of Artificial Sequence: Synthetic oligonucleotide
  Sense strand starting at position 2529 of SEQ ID NO: 1561242
cucacuguguccugggaga

SEQ ID NO: 1657112 - RNA, 19 nt, Artificial Sequence
  Description of Artificial Sequence: Synthetic oligonucleotide
  Antisense strand to SEQ ID NO: 1657111
ucucccaggacacagugag

SEQ ID NO: 1657113 - RNA, 19 nt, Artificial Sequence
  Description of Artificial Sequence: Synthetic oligonucleotide
  Sense strand starting at position 2637 of SEQ ID NO: 1561242
aaggucuguugguuuauuu

SEQ ID NO: 1657114 - RNA, 19 nt, Artificial Sequence
  Description of Artificial Sequence: Synthetic oligonucleotide
  Antisense strand to SEQ ID NO: 1657113
aaauaaaccaacagaccuu

SEQ ID NO: 1657115 - RNA, 19 nt, Artificial Sequence
  Description of Artificial Sequence: Synthetic oligonucleotide
  Sense strand starting at position 2927 of SEQ ID NO: 1561242
cccacuauugguugaauca

SEQ ID NO: 1657116 - RNA, 19 nt, Artificial Sequence
  Description of Artificial Sequence: Synthetic oligonucleotide
  Antisense strand to SEQ ID NO: 1657115
ugauucaaccaauaguggg

SEQ ID NO: 1657117 - RNA, 19 nt, Artificial Sequence
  Description of Artificial Sequence: Synthetic oligonucleotide
  Sense strand starting at position 3547 of SEQ ID NO: 1561242
cggguaagaguccaucugu

SEQ ID NO: 1657118 - RNA, 19 nt, Artificial Sequence
  Description of Artificial Sequence: Synthetic oligonucleotide
  Antisense strand to SEQ ID NO: 1657117
acagauggacucuuacccg

SEQ ID NO: 1657119 - RNA, 19 nt, Artificial Sequence
  Description of Artificial Sequence: Synthetic oligonucleotide
  Sense strand starting at position 3552 of SEQ ID NO: 1561242
aagaguccaucugucagaa

SEQ ID NO: 1657120 - RNA, 19 nt, Artificial Sequence
  Description of Artificial Sequence: Synthetic oligonucleotide
  Antisense strand to SEQ ID NO: 1657119
uucugacagauggacucuu

SEQ ID NO: 1657121 - RNA, 19 nt, Artificial Sequence
  Description of Artificial Sequence: Synthetic oligonucleotide
  Sense strand starting at position 3554 of SEQ ID NO: 1561242
gaguccaucugucagaauc

SEQ ID NO: 1657122 - RNA, 19 nt, Artificial Sequence
  Description of Artificial Sequence: Synthetic oligonucleotide
  Antisense strand to SEQ ID NO: 1657121
gauucugacagauggacuc

SEQ ID NO: 1657123 - RNA, 19 nt, Artificial Sequence
  Description of Artificial Sequence: Synthetic oligonucleotide
  Sense strand starting at position 3614 of SEQ ID NO: 1561242
cucucaauucgccaggaca

SEQ ID NO: 1657124 - RNA, 19 nt, Artificial Sequence
  Description of Artificial Sequence: Synthetic oligonucleotide
  Antisense strand to SEQ ID NO: 1657123
uguccuggcgaauugagag

SEQ ID NO: 1657125 - RNA, 19 nt, Artificial Sequence
  Description of Artificial Sequence: Synthetic oligonucleotide
  Sense strand starting at position 3616 of SEQ ID NO: 1561242
cucaauucgccaggacauc

SEQ ID NO: 1657126 - RNA, 19 nt, Artificial Sequence
  Description of Artificial Sequence: Synthetic oligonucleotide
  Antisense strand to SEQ ID NO: 1657125
gauguccuggcgaauugag

SEQ ID NO: 1657127 - RNA, 19 nt, Artificial Sequence
  Description of Artificial Sequence: Synthetic oligonucleotide
  Sense strand starting at position 3675 of SEQ ID NO: 1561242
cuuccagacucuuucuagu

SEQ ID NO: 1657128 - RNA, 19 nt, Artificial Sequence
  Description of Artificial Sequence: Synthetic oligonucleotide
  Antisense strand to SEQ ID NO: 1657127
acuagaaagagucuggaag

SEQ ID NO: 1657129 - RNA, 19 nt, Artificial Sequence
  Description of Artificial Sequence: Synthetic oligonucleotide
  Sense strand starting at position 33 of SEQ ID NO: 1561243
cucacuguguccugggaga

SEQ ID NO: 1657130 - RNA, 19 nt, Artificial Sequence
  Description of Artificial Sequence: Synthetic oligonucleotide
  Antisense strand to SEQ ID NO: 1657129
ucucccaggacacagugag

SEQ ID NO: 1657131 - RNA, 19 nt, Artificial Sequence
  Description of Artificial Sequence: Synthetic oligonucleotide
  Sense strand starting at position 141 of SEQ ID NO: 1561243
aaggucuguugguuuauuu

SEQ ID NO: 1657132 - RNA, 19 nt, Artificial Sequence
  Description of Artificial Sequence: Synthetic oligonucleotide
  Antisense strand to SEQ ID NO: 1657131
aaauaaaccaacagaccuu

SEQ ID NO: 1657133 - RNA, 19 nt, Artificial Sequence
  Description of Artificial Sequence: Synthetic oligonucleotide
  Sense strand starting at position 431 of SEQ ID NO: 1561243
cccacuauugguugaauca

SEQ ID NO: 1657134 - RNA, 19 nt, Artificial Sequence
  Description of Artificial Sequence: Synthetic oligonucleotide
  Antisense strand to SEQ ID NO: 1657133
ugauucaaccaauaguggg

SEQ ID NO: 1657135 - RNA, 19 nt, Artificial Sequence
  Description of Artificial Sequence: Synthetic oligonucleotide
  Sense strand starting at position 969 of SEQ ID NO: 1561243
agagaagccucgcagagaa

SEQ ID NO: 1657136 - RNA, 19 nt, Artificial Sequence
  Description of Artificial Sequence: Synthetic oligonucleotide
  Antisense strand to SEQ ID NO: 1657135
uucucugcgaggcuucucu

SEQ ID NO: 1657137 - RNA, 19 nt, Artificial Sequence
  Description of Artificial Sequence: Synthetic oligonucleotide
  Sense strand starting at position 1051 of SEQ ID NO: 1561243
cggguaagaguccaucugu

SEQ ID NO: 1657138 - RNA, 19 nt, Artificial Sequence
  Description of Artificial Sequence: Synthetic oligonucleotide
  Antisense strand to SEQ ID NO: 1657137
acagauggacucuuacccg

SEQ ID NO: 1657139 - RNA, 19 nt, Artificial Sequence
  Description of Artificial Sequence: Synthetic oligonucleotide
  Sense strand starting at position 1056 of SEQ ID NO: 1561243
aagaguccaucugucagaa

SEQ ID NO: 1657140 - RNA, 19 nt, Artificial Sequence
  Description of Artificial Sequence: Synthetic oligonucleotide
  Antisense strand to SEQ ID NO: 1657139
uucugacagauggacucuu

SEQ ID NO: 1657141 - RNA, 19 nt, Artificial Sequence
  Description of Artificial Sequence: Synthetic oligonucleotide
  Sense strand starting at position 1058 of SEQ ID NO: 1561243
gaguccaucugucagaauc

SEQ ID NO: 1657142 - RNA, 19 nt, Artificial Sequence
  Description of Artificial Sequence: Synthetic oligonucleotide
  Antisense strand to SEQ ID NO: 1657141
gauucugacagauggacuc

SEQ ID NO: 1657143 - RNA, 19 nt, Artificial Sequence
  Description of Artificial Sequence: Synthetic oligonucleotide
  Sense strand starting at position 1118 of SEQ ID NO: 1561243
cucucaauucgccaggaca

SEQ ID NO: 1657144 - RNA, 19 nt, Artificial Sequence
  Description of Artificial Sequence: Synthetic oligonucleotide
  Antisense strand to SEQ ID NO: 1657143
uguccuggcgaauugagag

SEQ ID NO: 1657145 - RNA, 19 nt, Artificial Sequence
  Description of Artificial Sequence: Synthetic oligonucleotide
  Sense strand starting at position 1120 of SEQ ID NO: 1561243
cucaauucgccaggacauc

SEQ ID NO: 1657146 - RNA, 19 nt, Artificial Sequence
  Description of Artificial Sequence: Synthetic oligonucleotide
  Antisense strand to SEQ ID NO: 1657145
gauguccuggcgaauugag

SEQ ID NO: 1657147 - RNA, 19 nt, Artificial Sequence
  Description of Artificial Sequence: Synthetic oligonucleotide
  Sense strand starting at position 1179 of SEQ ID NO: 1561243
cuuccagacucuuucuagu

SEQ ID NO: 1657148 - RNA, 19 nt, Artificial Sequence
  Description of Artificial Sequence: Synthetic oligonucleotide
  Antisense strand to SEQ ID NO: 1657147
acuagaaagagucuggaag

SEQ ID NO: 1657149 - RNA, 19 nt, Artificial Sequence
  Description of Artificial Sequence: Synthetic oligonucleotide
  Sense strand starting at position 2062 of SEQ ID NO: 1561243
uggccugccacgugacaau

SEQ ID NO: 1657150 - RNA, 19 nt, Artificial Sequence
  Description of Artificial Sequence: Synthetic oligonucleotide
  Antisense strand to SEQ ID NO: 1657149
auugucacguggcaggcca

SEQ ID NO: 1657151 - RNA, 19 nt, Artificial Sequence
  Description of Artificial Sequence: Synthetic oligonucleotide
  Sense strand starting at position 2073 of SEQ ID NO: 1561243
gugacaaucgacuagacgu

SEQ ID NO: 1657152 - RNA, 19 nt, Artificial Sequence
  Description of Artificial Sequence: Synthetic oligonucleotide
  Antisense strand to SEQ ID NO: 1657151
acgucuagucgauugucac

SEQ ID NO: 1657153 - RNA, 19 nt, Artificial Sequence
  Description of Artificial Sequence: Synthetic oligonucleotide
  Sense strand starting at position 2271 of SEQ ID NO: 1561243
aacugaaccucgcagagaa

SEQ ID NO: 1657154 - RNA, 19 nt, Artificial Sequence
  Description of Artificial Sequence: Synthetic oligonucleotide
  Antisense strand to SEQ ID NO: 1657153
uucucugcgagguucaguu

SEQ ID NO: 1657155 - RNA, 19 nt, Artificial Sequence
  Description of Artificial Sequence: Synthetic oligonucleotide
  Sense strand starting at position 2650 of SEQ ID NO: 1561243
cccagagcuuacgugauaa

SEQ ID NO: 1657156 - RNA, 19 nt, Artificial Sequence
  Description of Artificial Sequence: Synthetic oligonucleotide
  Antisense strand to SEQ ID NO: 1657155
uuaucacguaagcucuggg

SEQ ID NO: 1657157 - RNA, 19 nt, Artificial Sequence
  Description of Artificial Sequence: Synthetic oligonucleotide
  Sense strand starting at position 2759 of SEQ ID NO: 1561243
cuagguaggagcuguuuaa

SEQ ID NO: 1657158 - RNA, 19 nt, Artificial Sequence
  Description of Artificial Sequence: Synthetic oligonucleotide
  Antisense strand to SEQ ID NO: 1657157
uuaaacagcuccuaccuag

SEQ ID NO: 1657159 - RNA, 19 nt, Artificial Sequence
  Description of Artificial Sequence: Synthetic oligonucleotide
  Sense strand starting at position 3150 of SEQ ID NO: 1561243
guggacaccaguuaauagu

SEQ ID NO: 1657160 - RNA, 19 nt, Artificial Sequence
  Description of Artificial Sequence: Synthetic oligonucleotide
  Antisense strand to SEQ ID NO: 1657159
acuauuaacugguguccac

SEQ ID NO: 1657161 - RNA, 19 nt, Artificial Sequence
  Description of Artificial Sequence: Synthetic oligonucleotide
  Sense strand starting at position 3156 of SEQ ID NO: 1561243
accaguuaauaguggcgua

SEQ ID NO: 1657162 - RNA, 19 nt, Artificial Sequence
  Description of Artificial Sequence: Synthetic oligonucleotide
  Antisense strand to SEQ ID NO: 1657161
uacgccacuauuaacuggu

SEQ ID NO: 1657163 - RNA, 19 nt, Artificial Sequence
  Description of Artificial Sequence: Synthetic oligonucleotide
  Sense strand starting at position 3159 of SEQ ID NO: 1561243
aguuaauaguggcguacuu

SEQ ID NO: 1657164 - RNA, 19 nt, Artificial Sequence
  Description of Artificial Sequence: Synthetic oligonucleotide
  Antisense strand to SEQ ID NO: 1657163
aaguacgccacuauuaacu

SEQ ID NO: 1657165 - RNA, 19 nt, Artificial Sequence
  Description of Artificial Sequence: Synthetic oligonucleotide
  Sense strand starting at position 3171 of SEQ ID NO: 1561243
cguacuuuggucugugcaa

SEQ ID NO: 1657166 - RNA, 19 nt, Artificial Sequence
  Description of Artificial Sequence: Synthetic oligonucleotide
  Antisense strand to SEQ ID NO: 1657165
uugcacagaccaaaguacg

SEQ ID NO: 1657167 - RNA, 19 nt, Artificial Sequence
  Description of Artificial Sequence: Synthetic oligonucleotide
  Sense strand starting at position 3172 of SEQ ID NO: 1561243
guacuuuggucugugcaau

SEQ ID NO: 1657168 - RNA, 19 nt, Artificial Sequence
  Description of Artificial Sequence: Synthetic oligonucleotide
  Antisense strand to SEQ ID NO: 1657167
auugcacagaccaaaguac

SEQ ID NO: 1657169 - RNA, 19 nt, Artificial Sequence
  Description of Artificial Sequence: Synthetic oligonucleotide
  Sense strand starting at position 3173 of SEQ ID NO: 1561243
uacuuuggucugugcaauc

SEQ ID NO: 1657170 - RNA, 19 nt, Artificial Sequence
  Description of Artificial Sequence: Synthetic oligonucleotide
  Antisense strand to SEQ ID NO: 1657169
gauugcacagaccaaagua

SEQ ID NO: 1657171 - RNA, 19 nt, Artificial Sequence
  Description of Artificial Sequence: Synthetic oligonucleotide
  Sense strand starting at position 3182 of SEQ ID NO: 1561243
cugugcaauccacaaagaa

SEQ ID NO: 1657172 - RNA, 19 nt, Artificial Sequence
  Description of Artificial Sequence: Synthetic oligonucleotide
  Antisense strand to SEQ ID NO: 1657171
uucuuuguggauugcacag

SEQ ID NO: 1657173 - RNA, 19 nt, Artificial Sequence
  Description of Artificial Sequence: Synthetic oligonucleotide
  Sense strand starting at position 3584 of SEQ ID NO: 1561243
auugaaauaucauggguug

SEQ ID NO: 1657174 - RNA, 19 nt, Artificial Sequence
  Description of Artificial Sequence: Synthetic oligonucleotide
  Antisense strand to SEQ ID NO: 1657173
caacccaugauauuucaau

SEQ ID NO: 1657175 - RNA, 19 nt, Artificial Sequence
  Description of Artificial Sequence: Synthetic oligonucleotide
  Sense strand starting at position 3658 of SEQ ID NO: 1561243
ugcuuuagcccaggaauug

SEQ ID NO: 1657176 - RNA, 19 nt, Artificial Sequence
  Description of Artificial Sequence: Synthetic oligonucleotide
  Antisense strand to SEQ ID NO: 1657175
caauuccugggcuaaagca

SEQ ID NO: 1657177 - RNA, 19 nt, Artificial Sequence
  Description of Artificial Sequence: Synthetic oligonucleotide
  Sense strand starting at position 3729 of SEQ ID NO: 1561243
gccagacccugucuuauua

SEQ ID NO: 1657178 - RNA, 19 nt, Artificial Sequence
  Description of Artificial Sequence: Synthetic oligonucleotide
  Antisense strand to SEQ ID NO: 1657177
uaauaagacagggucuggc

SEQ ID NO: 1657179 - RNA, 19 nt, Artificial Sequence
  Description of Artificial Sequence: Synthetic oligonucleotide
  Sense strand starting at position 191 of SEQ ID NO: 1561244
gugucaaucugugaguccu

SEQ ID NO: 1657180 - RNA, 19 nt, Artificial Sequence
  Description of Artificial Sequence: Synthetic oligonucleotide
  Antisense strand to SEQ ID NO: 1657179
aggacucacagauugacac

SEQ ID NO: 1657181 - RNA, 19 nt, Artificial Sequence
  Description of Artificial Sequence: Synthetic oligonucleotide
  Sense strand starting at position 197 of SEQ ID NO: 1561244
aucugugaguccucccuuu

SEQ ID NO: 1657182 - RNA, 19 nt, Artificial Sequence
  Description of Artificial Sequence: Synthetic oligonucleotide
  Antisense strand to SEQ ID NO: 1657181
aaagggaggacucacagau

SEQ ID NO: 1657183 - RNA, 19 nt, Artificial Sequence
  Description of Artificial Sequence: Synthetic oligonucleotide
  Sense strand starting at position 251 of SEQ ID NO: 1561244
gacuucuccuuccgggaga

SEQ ID NO: 1657184 - RNA, 19 nt, Artificial Sequence
  Description of Artificial Sequence: Synthetic oligonucleotide
  Antisense strand to SEQ ID NO: 1657183
ucucccggaaggagaaguc

SEQ ID NO: 1657185 - RNA, 19 nt, Artificial Sequence
  Description of Artificial Sequence: Synthetic oligonucleotide
  Sense strand starting at position 254 of SEQ ID NO: 1561244
uucuccuuccgggagagau

SEQ ID NO: 1657186 - RNA, 19 nt, Artificial Sequence
  Description of Artificial Sequence: Synthetic oligonucleotide
  Antisense strand to SEQ ID NO: 1657185
aucucucccggaaggagaa

SEQ ID NO: 1657187 - RNA, 19 nt, Artificial Sequence
  Description of Artificial Sequence: Synthetic oligonucleotide
  Sense strand starting at position 2293 of SEQ ID NO: 1561244
ccggaaucaauguguaaau

SEQ ID NO: 1657188 - RNA, 19 nt, Artificial Sequence
  Description of Artificial Sequence: Synthetic oligonucleotide
  Antisense strand to SEQ ID NO: 1657187
auuuacacauugauuccgg

SEQ ID NO: 1657189 - RNA, 19 nt, Artificial Sequence
  Description of Artificial Sequence: Synthetic oligonucleotide
  Sense strand starting at position 2294 of SEQ ID NO: 1561244
cggaaucaauguguaaaua

SEQ ID NO: 1657190 - RNA, 19 nt, Artificial Sequence
  Description of Artificial Sequence: Synthetic oligonucleotide
  Antisense strand to SEQ ID NO: 1657189
uauuuacacauugauuccg

SEQ ID NO: 1657191 - RNA, 19 nt, Artificial Sequence
  Description of Artificial Sequence: Synthetic oligonucleotide
  Sense strand starting at position 2304 of SEQ ID NO: 1561244
guguaaauacugcgaggga

SEQ ID NO: 1657192 - RNA, 19 nt, Artificial Sequence
  Description of Artificial Sequence: Synthetic oligonucleotide
  Antisense strand to SEQ ID NO: 1657191
ucccucgcaguauuuacac

SEQ ID NO: 1657193 - RNA, 19 nt, Artificial Sequence
  Description of Artificial Sequence: Synthetic oligonucleotide
  Sense strand starting at position 2305 of SEQ ID NO: 1561244
uguaaauacugcgagggaa

SEQ ID NO: 1657194 - RNA, 19 nt, Artificial Sequence
  Description of Artificial Sequence: Synthetic oligonucleotide
  Antisense strand to SEQ ID NO: 1657193
uucccucgcaguauuuaca

SEQ ID NO: 1657195 - RNA, 19 nt, Artificial Sequence
  Description of Artificial Sequence: Synthetic oligonucleotide
  Sense strand starting at position 2434 of SEQ ID NO: 1561244
gggcuuguuugcugucuuu

SEQ ID NO: 1657196 - RNA, 19 nt, Artificial Sequence
  Description of Artificial Sequence: Synthetic oligonucleotide
  Antisense strand to SEQ ID NO: 1657195
aaagacagcaaacaagccc

SEQ ID NO: 1657197 - RNA, 19 nt, Artificial Sequence
  Description of Artificial Sequence: Synthetic oligonucleotide
  Sense strand starting at position 2595 of SEQ ID NO: 1561244
guugcucagagcugcagaa

SEQ ID NO: 1657198 - RNA, 19 nt, Artificial Sequence
  Description of Artificial Sequence: Synthetic oligonucleotide
  Antisense strand to SEQ ID NO: 1657197
uucugcagcucugagcaac

SEQ ID NO: 1657199 - RNA, 19 nt, Artificial Sequence
  Description of Artificial Sequence: Synthetic oligonucleotide
  Sense strand starting at position 2713 of SEQ ID NO: 1561244
ucagaugauuccuuauagg

SEQ ID NO: 1657200 - RNA, 19 nt, Artificial Sequence
  Description of Artificial Sequence: Synthetic oligonucleotide
  Antisense strand to SEQ ID NO: 1657199
ccuauaaggaaucaucuga

SEQ ID NO: 1657201 - RNA, 19 nt, Artificial Sequence
  Description of Artificial Sequence: Synthetic oligonucleotide
  Sense strand starting at position 2716 of SEQ ID NO: 1561244
gaugauuccuuauaggaga

SEQ ID NO: 1657202 - RNA, 19 nt, Artificial Sequence
  Description of Artificial Sequence: Synthetic oligonucleotide
  Antisense strand to SEQ ID NO: 1657201
ucuccuauaaggaaucauc

SEQ ID NO: 1657203 - RNA, 19 nt, Artificial Sequence
  Description of Artificial Sequence: Synthetic oligonucleotide
  Sense strand starting at position 2718 of SEQ ID NO: 1561244
ugauuccuuauaggagagu

SEQ ID NO: 1657204 - RNA, 19 nt, Artificial Sequence
  Description of Artificial Sequence: Synthetic oligonucleotide
  Antisense strand to SEQ ID NO: 1657203
acucuccuauaaggaauca

SEQ ID NO: 1657205 - RNA, 19 nt, Artificial Sequence
  Description of Artificial Sequence: Synthetic oligonucleotide
  Sense strand starting at position 3019 of SEQ ID NO: 1561244
uuuggucuuucccuugaga

SEQ ID NO: 1657206 - RNA, 19 nt, Artificial Sequence
  Description of Artificial Sequence: Synthetic oligonucleotide
  Antisense strand to SEQ ID NO: 1657205
ucucaagggaaagaccaaa

SEQ ID NO: 1657207 - RNA, 19 nt, Artificial Sequence
  Description of Artificial Sequence: Synthetic oligonucleotide
  Sense strand starting at position 3021 of SEQ ID NO: 1561244
uggucuuucccuugagagc

SEQ ID NO: 1657208 - RNA, 19 nt, Artificial Sequence
  Description of Artificial Sequence: Synthetic oligonucleotide
  Antisense strand to SEQ ID NO: 1657207
gcucucaagggaaagacca

SEQ ID NO: 1657209 - RNA, 19 nt, Artificial Sequence
  Description of Artificial Sequence: Synthetic oligonucleotide
  Sense strand starting at position 3022 of SEQ ID NO: 1561244
ggucuuucccuugagagcu

SEQ ID NO: 1657210 - RNA, 19 nt, Artificial Sequence
  Description of Artificial Sequence: Synthetic oligonucleotide
  Antisense strand to SEQ ID NO: 1657209
agcucucaagggaaagacc

SEQ ID NO: 1657211 - RNA, 19 nt, Artificial Sequence
  Description of Artificial Sequence: Synthetic oligonucleotide
  Sense strand starting at position 3081 of SEQ ID NO: 1561244
guuucuucgucacucuauu

SEQ ID NO: 1657212 - RNA, 19 nt, Artificial Sequence
  Description of Artificial Sequence: Synthetic oligonucleotide
  Antisense strand to SEQ ID NO: 1657211
aauagagugacgaagaaac

SEQ ID NO: 1657213 - RNA, 19 nt, Artificial Sequence
  Description of Artificial Sequence: Synthetic oligonucleotide
  Sense strand starting at position 3132 of SEQ ID NO: 1561244
cuaugucccuaauauagga

SEQ ID NO: 1657214 - RNA, 19 nt, Artificial Sequence
  Description of Artificial Sequence: Synthetic oligonucleotide
  Antisense strand to SEQ ID NO: 1657213
uccuauauuagggacauag

SEQ ID NO: 1657215 - RNA, 19 nt, Artificial Sequence
  Description of Artificial Sequence: Synthetic oligonucleotide
  Sense strand starting at position 3211 of SEQ ID NO: 1561244
cugugaauacagugccuua

SEQ ID NO: 1657216 - RNA, 19 nt, Artificial Sequence
  Description of Artificial Sequence: Synthetic oligonucleotide
  Antisense strand to SEQ ID NO: 1657215
uaaggcacuguauucacag

SEQ ID NO: 1657217 - RNA, 19 nt, Artificial Sequence
  Description of Artificial Sequence: Synthetic oligonucleotide
  Sense strand starting at position 3258 of SEQ ID NO: 1561244
aggugugauucaguuaaug

SEQ ID NO: 1657218 - RNA, 19 nt, Artificial Sequence
  Description of Artificial Sequence: Synthetic oligonucleotide
  Antisense strand to SEQ ID NO: 1657217
cauuaacugaaucacaccu

SEQ ID NO: 1657219 - RNA, 19 nt, Artificial Sequence
  Description of Artificial Sequence: Synthetic oligonucleotide
  Sense strand starting at position 3289 of SEQ ID NO: 1561244
ggagcgucuccugggugau

SEQ ID NO: 1657220 - RNA, 19 nt, Artificial Sequence
  Description of Artificial Sequence: Synthetic oligonucleotide
  Antisense strand to SEQ ID NO: 1657219
aucacccaggagacgcucc

SEQ ID NO: 1657221 - RNA, 19 nt, Artificial Sequence
  Description of Artificial Sequence: Synthetic oligonucleotide
  Sense strand starting at position 3290 of SEQ ID NO: 1561244
gagcgucuccugggugauc

SEQ ID NO: 1657222 - RNA, 19 nt, Artificial Sequence
  Description of Artificial Sequence: Synthetic oligonucleotide
  Antisense strand to SEQ ID NO: 1657221
gaucacccaggagacgcuc

SEQ ID NO: 1657223 - RNA, 19 nt, Artificial Sequence
  Description of Artificial Sequence: Synthetic oligonucleotide
  Sense strand starting at position 3756 of SEQ ID NO: 1561244
agccucugguggcuagaaa

SEQ ID NO: 1657224 - RNA, 19 nt, Artificial Sequence
  Description of Artificial Sequence: Synthetic oligonucleotide
  Antisense strand to SEQ ID NO: 1657223
uuucuagccaccagaggcu

SEQ ID NO: 1657225 - RNA, 19 nt, Artificial Sequence
  Description of Artificial Sequence: Synthetic oligonucleotide
  Sense strand starting at position 3835 of SEQ ID NO: 1561244
cccaaacuguaagaugaua

SEQ ID NO: 1657226 - RNA, 19 nt, Artificial Sequence
  Description of Artificial Sequence: Synthetic oligonucleotide
  Antisense strand to SEQ ID NO: 1657225
uaucaucuuacaguuuggg

SEQ ID NO: 1657227 - RNA, 19 nt, Artificial Sequence
  Description of Artificial Sequence: Synthetic oligonucleotide
  Sense strand starting at position 3941 of SEQ ID NO: 1561244
gccagacuagccuggucaa

SEQ ID NO: 1657228 - RNA, 19 nt, Artificial Sequence
  Description of Artificial Sequence: Synthetic oligonucleotide
  Antisense strand to SEQ ID NO: 1657227
uugaccaggcuagucuggc

SEQ ID NO: 1657229 - RNA, 19 nt, Artificial Sequence
  Description of Artificial Sequence: Synthetic oligonucleotide
  Sense strand starting at position 1 of SEQ ID NO: 1561245
auuccauccugggccaaau

SEQ ID NO: 1657230 - RNA, 19 nt, Artificial Sequence
  Description of Artificial Sequence: Synthetic oligonucleotide
  Antisense strand to SEQ ID NO: 1657229
auuuggcccaggauggaau

SEQ ID NO: 1657231 - RNA, 19 nt, Artificial Sequence
  Description of Artificial Sequence: Synthetic oligonucleotide
  Sense strand starting at position 38 of SEQ ID NO: 1561245
guuggaugagcuugacuua

SEQ ID NO: 1657232 - RNA, 19 nt, Artificial Sequence
  Description of Artificial Sequence: Synthetic oligonucleotide
  Antisense strand to SEQ ID NO: 1657231
uaagucaagcucauccaac

SEQ ID NO: 1657233 - RNA, 19 nt, Artificial Sequence
  Description of Artificial Sequence: Synthetic oligonucleotide
  Sense strand starting at position 223 of SEQ ID NO: 1561245
caggaauaauuguuagagu

SEQ ID NO: 1657234 - RNA, 19 nt, Artificial Sequence
  Description of Artificial Sequence: Synthetic oligonucleotide
  Antisense strand to SEQ ID NO: 1657233
acucuaacaauuauuccug

SEQ ID NO: 1657235 - RNA, 19 nt, Artificial Sequence
  Description of Artificial Sequence: Synthetic oligonucleotide
  Sense strand starting at position 224 of SEQ ID NO: 1561245
aggaauaauuguuagagug

SEQ ID NO: 1657236 - RNA, 19 nt, Artificial Sequence
  Description of Artificial Sequence: Synthetic oligonucleotide
  Antisense strand to SEQ ID NO: 1657235
cacucuaacaauuauuccu

SEQ ID NO: 1657237 - RNA, 19 nt, Artificial Sequence
  Description of Artificial Sequence: Synthetic oligonucleotide
  Sense strand starting at position 271 of SEQ ID NO: 1561245
augauacauucucagaggu

SEQ ID NO: 1657238 - RNA, 19 nt, Artificial Sequence
  Description of Artificial Sequence: Synthetic oligonucleotide
  Antisense strand to SEQ ID NO: 1657237
accucugagaauguaucau

SEQ ID NO: 1657239 - RNA, 19 nt, Artificial Sequence
  Description of Artificial Sequence: Synthetic oligonucleotide
  Sense strand starting at position 273 of SEQ ID NO: 1561245
gauacauucucagagguca

SEQ ID NO: 1657240 - RNA, 19 nt, Artificial Sequence
  Description of Artificial Sequence: Synthetic oligonucleotide
  Antisense strand to SEQ ID NO: 1657239
ugaccucugagaauguauc

SEQ ID NO: 1657241 - RNA, 19 nt, Artificial Sequence
  Description of Artificial Sequence: Synthetic oligonucleotide
  Sense strand starting at position 281 of SEQ ID NO: 1561245
cucagaggucauuaaguca

SEQ ID NO: 1657242 - RNA, 19 nt, Artificial Sequence
  Description of Artificial Sequence: Synthetic oligonucleotide
  Antisense strand to SEQ ID NO: 1657241
ugacuuaaugaccucugag

SEQ ID NO: 1657243 - RNA, 19 nt, Artificial Sequence
  Description of Artificial Sequence: Synthetic oligonucleotide
  Sense strand starting at position 362 of SEQ ID NO: 1561245
gggucacgcagacauugau

SEQ ID NO: 1657244 - RNA, 19 nt, Artificial Sequence
  Description of Artificial Sequence: Synthetic oligonucleotide
  Antisense strand to SEQ ID NO: 1657243
aucaaugucugcgugaccc

SEQ ID NO: 1657245 - RNA, 19 nt, Artificial Sequence
  Description of Artificial Sequence: Synthetic oligonucleotide
  Sense strand starting at position 1103 of SEQ ID NO: 1561245
gucaaucaugcagggaguu

SEQ ID NO: 1657246 - RNA, 19 nt, Artificial Sequence
  Description of Artificial Sequence: Synthetic oligonucleotide
  Antisense strand to SEQ ID NO: 1657245
aacucccugcaugauugac

SEQ ID NO: 1657247 - RNA, 19 nt, Artificial Sequence
  Description of Artificial Sequence: Synthetic oligonucleotide
  Sense strand starting at position 1115 of SEQ ID NO: 1561245
gggaguugcugcuuccuga

SEQ ID NO: 1657248 - RNA, 19 nt, Artificial Sequence
  Description of Artificial Sequence: Synthetic oligonucleotide
  Antisense strand to SEQ ID NO: 1657247
ucaggaagcagcaacuccc

SEQ ID NO: 1657249 - RNA, 19 nt, Artificial Sequence
  Description of Artificial Sequence: Synthetic oligonucleotide
  Sense strand starting at position 1134 of SEQ ID NO: 1561245
uggugucgauguucagauu

SEQ ID NO: 1657250 - RNA, 19 nt, Artificial Sequence
  Description of Artificial Sequence: Synthetic oligonucleotide
  Antisense strand to SEQ ID NO: 1657249
aaucugaacaucgacacca

SEQ ID NO: 1657251 - RNA, 19 nt, Artificial Sequence
  Description of Artificial Sequence: Synthetic oligonucleotide
  Sense strand starting at position 1135 of SEQ ID NO: 1561245
ggugucgauguucagauua

SEQ ID NO: 1657252 - RNA, 19 nt, Artificial Sequence
  Description of Artificial Sequence: Synthetic oligonucleotide
  Antisense strand to SEQ ID NO: 1657251
uaaucugaacaucgacacc

SEQ ID NO: 1657253 - RNA, 19 nt, Artificial Sequence
  Description of Artificial Sequence: Synthetic oligonucleotide
  Sense strand starting at position 1202 of SEQ ID NO: 1561245
uggccauaucucuauguuu

SEQ ID NO: 1657254 - RNA, 19 nt, Artificial Sequence
  Description of Artificial Sequence: Synthetic oligonucleotide
  Antisense strand to SEQ ID NO: 1657253
aaacauagagauauggcca

SEQ ID NO: 1657255 - RNA, 19 nt, Artificial Sequence
  Description of Artificial Sequence: Synthetic oligonucleotide
  Sense strand starting at position 1242 of SEQ ID NO: 1561245
aauguagagucuuuaagau

SEQ ID NO: 1657256 - RNA, 19 nt, Artificial Sequence
  Description of Artificial Sequence: Synthetic oligonucleotide
  Antisense strand to SEQ ID NO: 1657255
aucuuaaagacucuacauu

SEQ ID NO: 1657257 - RNA, 19 nt, Artificial Sequence
  Description of Artificial Sequence: Synthetic oligonucleotide
  Sense strand starting at position 1246 of SEQ ID NO: 1561245
uagagucuuuaagaugaaa

SEQ ID NO: 1657258 - RNA, 19 nt, Artificial Sequence
  Description of Artificial Sequence: Synthetic oligonucleotide
  Antisense strand to SEQ ID NO: 1657257
uuucaucuuaaagacucua

SEQ ID NO: 1657259 - RNA, 19 nt, Artificial Sequence
  Description of Artificial Sequence: Synthetic oligonucleotide
  Sense strand starting at position 2143 of SEQ ID NO: 1561245
ggaacucugagcugaguga

SEQ ID NO: 1657260 - RNA, 19 nt, Artificial Sequence
  Description of Artificial Sequence: Synthetic oligonucleotide
  Antisense strand to SEQ ID NO: 1657259
ucacucagcucagaguucc

SEQ ID NO: 1657261 - RNA, 19 nt, Artificial Sequence
  Description of Artificial Sequence: Synthetic oligonucleotide
  Sense strand starting at position 2144 of SEQ ID NO: 1561245
gaacucugagcugagugau

SEQ ID NO: 1657262 - RNA, 19 nt, Artificial Sequence
  Description of Artificial Sequence: Synthetic oligonucleotide
  Antisense strand to SEQ ID NO: 1657261
aucacucagcucagaguuc

SEQ ID NO: 1657263 - RNA, 19 nt, Artificial Sequence
  Description of Artificial Sequence: Synthetic oligonucleotide
  Sense strand starting at position 2159 of SEQ ID NO: 1561245
ugaugucauagauggauua

SEQ ID NO: 1657264 - RNA, 19 nt, Artificial Sequence
  Description of Artificial Sequence: Synthetic oligonucleotide
  Antisense strand to SEQ ID NO: 1657263
uaauccaucuaugacauca

SEQ ID NO: 1657265 - RNA, 19 nt, Artificial Sequence
  Description of Artificial Sequence: Synthetic oligonucleotide
  Sense strand starting at position 2197 of SEQ ID NO: 1561245
ccgggaauuucagggacau

SEQ ID NO: 1657266 - RNA, 19 nt, Artificial Sequence
  Description of Artificial Sequence: Synthetic oligonucleotide
  Antisense strand to SEQ ID NO: 1657265
augucccugaaauucccgg

SEQ ID NO: 1657267 - RNA, 19 nt, Artificial Sequence
  Description of Artificial Sequence: Synthetic oligonucleotide
  Sense strand starting at position 2261 of SEQ ID NO: 1561245
uguggugaagucgaucgaa

SEQ ID NO: 1657268 - RNA, 19 nt, Artificial Sequence
  Description of Artificial Sequence: Synthetic oligonucleotide
  Antisense strand to SEQ ID NO: 1657267
uucgaucgacuucaccaca

SEQ ID NO: 1657269 - RNA, 19 nt, Artificial Sequence
  Description of Artificial Sequence: Synthetic oligonucleotide
  Sense strand starting at position 2264 of SEQ ID NO: 1561245
ggugaagucgaucgaauua

SEQ ID NO: 1657270 - RNA, 19 nt, Artificial Sequence
  Description of Artificial Sequence: Synthetic oligonucleotide
  Antisense strand to SEQ ID NO: 1657269
uaauucgaucgacuucacc

SEQ ID NO: 1657271 - RNA, 19 nt, Artificial Sequence
  Description of Artificial Sequence: Synthetic oligonucleotide
  Sense strand starting at position 2279 of SEQ ID NO: 1561245
auuagugcugcccgaggau

SEQ ID NO: 1657272 - RNA, 19 nt, Artificial Sequence
  Description of Artificial Sequence: Synthetic oligonucleotide
  Antisense strand to SEQ ID NO: 1657271
auccucgggcagcacuaau

SEQ ID NO: 1657273 - RNA, 19 nt, Artificial Sequence
  Description of Artificial Sequence: Synthetic oligonucleotide
  Sense strand starting at position 2332 of SEQ ID NO: 1561245
aggugaucuuaacccugaa

SEQ ID NO: 1657274 - RNA, 19 nt, Artificial Sequence
  Description of Artificial Sequence: Synthetic oligonucleotide
  Antisense strand to SEQ ID NO: 1657273
uucaggguuaagaucaccu

SEQ ID NO: 1657275 - RNA, 19 nt, Artificial Sequence
  Description of Artificial Sequence: Synthetic oligonucleotide
  Sense strand starting at position 2335 of SEQ ID NO: 1561245
ugaucuuaacccugaacag

SEQ ID NO: 1657276 - RNA, 19 nt, Artificial Sequence
  Description of Artificial Sequence: Synthetic oligonucleotide
  Antisense strand to SEQ ID NO: 1657275
cuguucaggguuaagauca

SEQ ID NO: 1657277 - RNA, 19 nt, Artificial Sequence
  Description of Artificial Sequence: Synthetic oligonucleotide
  Sense strand starting at position 2402 of SEQ ID NO: 1561245
cgucgaauggagugaagaa

SEQ ID NO: 1657278 - RNA, 19 nt, Artificial Sequence
  Description of Artificial Sequence: Synthetic oligonucleotide
  Antisense strand to SEQ ID NO: 1657277
uucuucacuccauucgacg

SEQ ID NO: 1657279 - RNA, 19 nt, Artificial Sequence
  Description of Artificial Sequence: Synthetic oligonucleotide
  Sense strand starting at position 2427 of SEQ ID NO: 1561245
gcauccugugauuauagca

SEQ ID NO: 1657280 - RNA, 19 nt, Artificial Sequence
  Description of Artificial Sequence: Synthetic oligonucleotide
  Antisense strand to SEQ ID NO: 1657279
ugcuauaaucacaggaugc

SEQ ID NO: 1657281 - RNA, 19 nt, Artificial Sequence
  Description of Artificial Sequence: Synthetic oligonucleotide
  Sense strand starting at position 2434 of SEQ ID NO: 1561245
gugauuauagcagaaaugu

SEQ ID NO: 1657282 - RNA, 19 nt, Artificial Sequence
  Description of Artificial Sequence: Synthetic oligonucleotide
  Antisense strand to SEQ ID NO: 1657281
acauuucugcuauaaucac

SEQ ID NO: 1657283 - RNA, 19 nt, Artificial Sequence
  Description of Artificial Sequence: Synthetic oligonucleotide
  Sense strand starting at position 2469 of SEQ ID NO: 1561245
gcagacuacgugcauaaga

SEQ ID NO: 1657284 - RNA, 19 nt, Artificial Sequence
  Description of Artificial Sequence: Synthetic oligonucleotide
  Antisense strand to SEQ ID NO: 1657283
ucuuaugcacguagucugc

SEQ ID NO: 1657285 - RNA, 19 nt, Artificial Sequence
  Description of Artificial Sequence: Synthetic oligonucleotide
  Sense strand starting at position 2471 of SEQ ID NO: 1561245
agacuacgugcauaagaca

SEQ ID NO: 1657286 - RNA, 19 nt, Artificial Sequence
  Description of Artificial Sequence: Synthetic oligonucleotide
  Antisense strand to SEQ ID NO: 1657285
ugucuuaugcacguagucu

SEQ ID NO: 1657287 - RNA, 19 nt, Artificial Sequence
  Description of Artificial Sequence: Synthetic oligonucleotide
  Sense strand starting at position 2488 of SEQ ID NO: 1561245
caaagacauucccagugga

SEQ ID NO: 1657288 - RNA, 19 nt, Artificial Sequence
  Description of Artificial Sequence: Synthetic oligonucleotide
  Antisense strand to SEQ ID NO: 1657287
uccacugggaaugucuuug

SEQ ID NO: 1657289 - RNA, 19 nt, Artificial Sequence
  Description of Artificial Sequence: Synthetic oligonucleotide
  Sense strand starting at position 2779 of SEQ ID NO: 1561245
uugagaggccucugagaag

SEQ ID NO: 1657290 - RNA, 19 nt, Artificial Sequence
  Description of Artificial Sequence: Synthetic oligonucleotide
  Antisense strand to SEQ ID NO: 1657289
cuucucagaggccucucaa

SEQ ID NO: 1657291 - RNA, 19 nt, Artificial Sequence
  Description of Artificial Sequence: Synthetic oligonucleotide
  Sense strand starting at position 3089 of SEQ ID NO: 1561245
aucacuugaacucgugaag

SEQ ID NO: 1657292 - RNA, 19 nt, Artificial Sequence
  Description of Artificial Sequence: Synthetic oligonucleotide
  Antisense strand to SEQ ID NO: 1657291
cuucacgaguucaagugau

SEQ ID NO: 1657293 - RNA, 19 nt, Artificial Sequence
  Description of Artificial Sequence: Synthetic oligonucleotide
  Sense strand starting at position 3252 of SEQ ID NO: 1561245
caggucagaucugaaaucu

SEQ ID NO: 1657294 - RNA, 19 nt, Artificial Sequence
  Description of Artificial Sequence: Synthetic oligonucleotide
  Antisense strand to SEQ ID NO: 1657293
agauuucagaucugaccug

SEQ ID NO: 1657295 - RNA, 19 nt, Artificial Sequence
  Description of Artificial Sequence: Synthetic oligonucleotide
  Sense strand starting at position 3271 of SEQ ID NO: 1561245
gaacaaaugucagagaguc

SEQ ID NO: 1657296 - RNA, 19 nt, Artificial Sequence
  Description of Artificial Sequence: Synthetic oligonucleotide
  Antisense strand to SEQ ID NO: 1657295
gacucucugacauuuguuc

SEQ ID NO: 1657297 - RNA, 19 nt, Artificial Sequence
  Description of Artificial Sequence: Synthetic oligonucleotide
  Sense strand starting at position 3279 of SEQ ID NO: 1561245
gucagagagucugcugagu

SEQ ID NO: 1657298 - RNA, 19 nt, Artificial Sequence
  Description of Artificial Sequence: Synthetic oligonucleotide
  Antisense strand to SEQ ID NO: 1657297
acucagcagacucucugac

SEQ ID NO: 1657299 - RNA, 19 nt, Artificial Sequence
  Description of Artificial Sequence: Synthetic oligonucleotide
  Sense strand starting at position 3303 of SEQ ID NO: 1561245
gggaaauuauauguccauu

SEQ ID NO: 1657300 - RNA, 19 nt, Artificial Sequence
  Description of Artificial Sequence: Synthetic oligonucleotide
  Antisense strand to SEQ ID NO: 1657299
aauggacauauaauuuccc

SEQ ID NO: 1657301 - RNA, 19 nt, Artificial Sequence
  Description of Artificial Sequence: Synthetic oligonucleotide
  Sense strand starting at position 3338 of SEQ ID NO: 1561245
gggauauucccagguauua

SEQ ID NO: 1657302 - RNA, 19 nt, Artificial Sequence
  Description of Artificial Sequence: Synthetic oligonucleotide
  Antisense strand to SEQ ID NO: 1657301
uaauaccugggaauauccc

SEQ ID NO: 1657303 - RNA, 19 nt, Artificial Sequence
  Description of Artificial Sequence: Synthetic oligonucleotide
  Sense strand starting at position 3379 of SEQ ID NO: 1561245
ccaacacuuggcugaacaa

SEQ ID NO: 1657304 - RNA, 19 nt, Artificial Sequence
  Description of Artificial Sequence: Synthetic oligonucleotide
  Antisense strand to SEQ ID NO: 1657303
uuguucagccaaguguugg

SEQ ID NO: 1657305 - RNA, 19 nt, Artificial Sequence
  Description of Artificial Sequence: Synthetic oligonucleotide
  Sense strand starting at position 3388 of SEQ ID NO: 1561245
ggcugaacaaaguguaauu

SEQ ID NO: 1657306 - RNA, 19 nt, Artificial Sequence
  Description of Artificial Sequence: Synthetic oligonucleotide
  Antisense strand to SEQ ID NO: 1657305
aauuacacuuuguucagcc

SEQ ID NO: 1657307 - RNA, 19 nt, Artificial Sequence
  Description of Artificial Sequence: Synthetic oligonucleotide
  Sense strand starting at position 3795 of SEQ ID NO: 1561245
aggccaguggugugaucaa

SEQ ID NO: 1657308 - RNA, 19 nt, Artificial Sequence
  Description of Artificial Sequence: Synthetic oligonucleotide
  Antisense strand to SEQ ID NO: 1657307
uugaucacaccacuggccu

SEQ ID NO: 1657309 - RNA, 19 nt, Artificial Sequence
  Description of Artificial Sequence: Synthetic oligonucleotide
  Sense strand starting at position 13 of SEQ ID NO: 1561246
gcaugcaagccagagaaau

SEQ ID NO: 1657310 - RNA, 19 nt, Artificial Sequence
  Description of Artificial Sequence: Synthetic oligonucleotide
  Antisense strand to SEQ ID NO: 1657309
auuucucuggcuugcaugc

SEQ ID NO: 1657311 - RNA, 19 nt, Artificial Sequence
  Description of Artificial Sequence: Synthetic oligonucleotide
  Sense strand starting at position 39 of SEQ ID NO: 1561246
caggucucaucuggaguga

SEQ ID NO: 1657312 - RNA, 19 nt, Artificial Sequence
  Description of Artificial Sequence: Synthetic oligonucleotide
  Antisense strand to SEQ ID NO: 1657311
ucacuccagaugagaccug

SEQ ID NO: 1657313 - RNA, 19 nt, Artificial Sequence
  Description of Artificial Sequence: Synthetic oligonucleotide
  Sense strand starting at position 280 of SEQ ID NO: 1561246
gucucauccugccgggaaa

SEQ ID NO: 1657314 - RNA, 19 nt, Artificial Sequence
  Description of Artificial Sequence: Synthetic oligonucleotide
  Antisense strand to SEQ ID NO: 1657313
uuucccggcaggaugagac

SEQ ID NO: 1657315 - RNA, 19 nt, Artificial Sequence
  Description of Artificial Sequence: Synthetic oligonucleotide
  Sense strand starting at position 535 of SEQ ID NO: 1561246
ggcggaaauuccugauuag

SEQ ID NO: 1657316 - RNA, 19 nt, Artificial Sequence
  Description of Artificial Sequence: Synthetic oligonucleotide
  Antisense strand to SEQ ID NO: 1657315
cuaaucaggaauuuccgcc

SEQ ID NO: 1657317 - RNA, 19 nt, Artificial Sequence
  Description of Artificial Sequence: Synthetic oligonucleotide
  Sense strand starting at position 536 of SEQ ID NO: 1561246
gcggaaauuccugauuagc

SEQ ID NO: 1657318 - RNA, 19 nt, Artificial Sequence
  Description of Artificial Sequence: Synthetic oligonucleotide
  Antisense strand to SEQ ID NO: 1657317
gcuaaucaggaauuuccgc

SEQ ID NO: 1657319 - RNA, 19 nt, Artificial Sequence
  Description of Artificial Sequence: Synthetic oligonucleotide
  Sense strand starting at position 538 of SEQ ID NO: 1561246
ggaaauuccugauuagcaa

SEQ ID NO: 1657320 - RNA, 19 nt, Artificial Sequence
  Description of Artificial Sequence: Synthetic oligonucleotide
  Antisense strand to SEQ ID NO: 1657319
uugcuaaucaggaauuucc

SEQ ID NO: 1657321 - RNA, 19 nt, Artificial Sequence
  Description of Artificial Sequence: Synthetic oligonucleotide
  Sense strand starting at position 563 of SEQ ID NO: 1561246
ucuccagacucugaauaag

SEQ ID NO: 1657322 - RNA, 19 nt, Artificial Sequence
  Description of Artificial Sequence: Synthetic oligonucleotide
  Antisense strand to SEQ ID NO: 1657321
cuuauucagagucuggaga

SEQ ID NO: 1657323 - RNA, 19 nt, Artificial Sequence
  Description of Artificial Sequence: Synthetic oligonucleotide
  Sense strand starting at position 642 of SEQ ID NO: 1561246
agagcaauuggugguggau

SEQ ID NO: 1657324 - RNA, 19 nt, Artificial Sequence
  Description of Artificial Sequence: Synthetic oligonucleotide
  Antisense strand to SEQ ID NO: 1657323
auccaccaccaauugcucu

SEQ ID NO: 1657325 - RNA, 19 nt, Artificial Sequence
  Description of Artificial Sequence: Synthetic oligonucleotide
  Sense strand starting at position 648 of SEQ ID NO: 1561246
auuggugguggauguuuaa

SEQ ID NO: 1657326 - RNA, 19 nt, Artificial Sequence
  Description of Artificial Sequence: Synthetic oligonucleotide
  Antisense strand to SEQ ID NO: 1657325
uuaaacauccaccaccaau

SEQ ID NO: 1657327 - RNA, 19 nt, Artificial Sequence
  Description of Artificial Sequence: Synthetic oligonucleotide
  Sense strand starting at position 854 of SEQ ID NO: 1561246
gugucaaucugugaguccu

SEQ ID NO: 1657328 - RNA, 19 nt, Artificial Sequence
  Description of Artificial Sequence: Synthetic oligonucleotide
  Antisense strand to SEQ ID NO: 1657327
aggacucacagauugacac

SEQ ID NO: 1657329 - RNA, 19 nt, Artificial Sequence
  Description of Artificial Sequence: Synthetic oligonucleotide
  Sense strand starting at position 860 of SEQ ID NO: 1561246
aucugugaguccucccuuu

SEQ ID NO: 1657330 - RNA, 19 nt, Artificial Sequence
  Description of Artificial Sequence: Synthetic oligonucleotide
  Antisense strand to SEQ ID NO: 1657329
aaagggaggacucacagau

SEQ ID NO: 1657331 - RNA, 19 nt, Artificial Sequence
  Description of Artificial Sequence: Synthetic oligonucleotide
  Sense strand starting at position 914 of SEQ ID NO: 1561246
gacuucuccuuccgggaga

SEQ ID NO: 1657332 - RNA, 19 nt, Artificial Sequence
  Description of Artificial Sequence: Synthetic oligonucleotide
  Antisense strand to SEQ ID NO: 1657331
ucucccggaaggagaaguc

SEQ ID NO: 1657333 - RNA, 19 nt, Artificial Sequence
  Description of Artificial Sequence: Synthetic oligonucleotide
  Sense strand starting at position 917 of SEQ ID NO: 1561246
uucuccuuccgggagagau

SEQ ID NO: 1657334 - RNA, 19 nt, Artificial Sequence
  Description of Artificial Sequence: Synthetic oligonucleotide
  Antisense strand to SEQ ID NO: 1657333
aucucucccggaaggagaa

SEQ ID NO: 1657335 - RNA, 19 nt, Artificial Sequence
  Description of Artificial Sequence: Synthetic oligonucleotide
  Sense strand starting at position 2956 of SEQ ID NO: 1561246
ccggaaucaauguguaaau

SEQ ID NO: 1657336 - RNA, 19 nt, Artificial Sequence
  Description of Artificial Sequence: Synthetic oligonucleotide
  Antisense strand to SEQ ID NO: 1657335
auuuacacauugauuccgg

SEQ ID NO: 1657337 - RNA, 19 nt, Artificial Sequence
  Description of Artificial Sequence: Synthetic oligonucleotide
  Sense strand starting at position 2957 of SEQ ID NO: 1561246
cggaaucaauguguaaaua

SEQ ID NO: 1657338 - RNA, 19 nt, Artificial Sequence
  Description of Artificial Sequence: Synthetic oligonucleotide
  Antisense strand to SEQ ID NO: 1657337
uauuuacacauugauuccg

SEQ ID NO: 1657339 - RNA, 19 nt, Artificial Sequence
  Description of Artificial Sequence: Synthetic oligonucleotide
  Sense strand starting at position 2967 of SEQ ID NO: 1561246
guguaaauacugcgaggga

SEQ ID NO: 1657340 - RNA, 19 nt, Artificial Sequence
  Description of Artificial Sequence: Synthetic oligonucleotide
  Antisense strand to SEQ ID NO: 1657339
ucccucgcaguauuuacac

SEQ ID NO: 1657341 - RNA, 19 nt, Artificial Sequence
  Description of Artificial Sequence: Synthetic oligonucleotide
  Sense strand starting at position 2968 of SEQ ID NO: 1561246
uguaaauacugcgagggaa

SEQ ID NO: 1657342 - RNA, 19 nt, Artificial Sequence
  Description of Artificial Sequence: Synthetic oligonucleotide
  Antisense strand to SEQ ID NO: 1657341
uucccucgcaguauuuaca

SEQ ID NO: 1657343 - RNA, 19 nt, Artificial Sequence
  Description of Artificial Sequence: Synthetic oligonucleotide
  Sense strand starting at position 3097 of SEQ ID NO: 1561246
gggcuuguuugcugucuuu

SEQ ID NO: 1657344 - RNA, 19 nt, Artificial Sequence
  Description of Artificial Sequence: Synthetic oligonucleotide
  Antisense strand to SEQ ID NO: 1657343
aaagacagcaaacaagccc

SEQ ID NO: 1657345 - RNA, 19 nt, Artificial Sequence
  Description of Artificial Sequence: Synthetic oligonucleotide
  Sense strand starting at position 3258 of SEQ ID NO: 1561246
guugcucagagcugcagaa

SEQ ID NO: 1657346 - RNA, 19 nt, Artificial Sequence
  Description of Artificial Sequence: Synthetic oligonucleotide
  Antisense strand to SEQ ID NO: 1657345
uucugcagcucugagcaac

SEQ ID NO: 1657347 - RNA, 19 nt, Artificial Sequence
  Description of Artificial Sequence: Synthetic oligonucleotide
  Sense strand starting at position 3376 of SEQ ID NO: 1561246
ucagaugauuccuuauagg

SEQ ID NO: 1657348 - RNA, 19 nt, Artificial Sequence
  Description of Artificial Sequence: Synthetic oligonucleotide
  Antisense strand to SEQ ID NO: 1657347
ccuauaaggaaucaucuga

SEQ ID NO: 1657349 - RNA, 19 nt, Artificial Sequence
  Description of Artificial Sequence: Synthetic oligonucleotide
  Sense strand starting at position 3379 of SEQ ID NO: 1561246
gaugauuccuuauaggaga

SEQ ID NO: 1657350 - RNA, 19 nt, Artificial Sequence
  Description of Artificial Sequence: Synthetic oligonucleotide
  Antisense strand to SEQ ID NO: 1657349
ucuccuauaaggaaucauc

SEQ ID NO: 1657351 - RNA, 19 nt, Artificial Sequence
  Description of Artificial Sequence: Synthetic oligonucleotide
  Sense strand starting at position 3381 of SEQ ID NO: 1561246
ugauuccuuauaggagagu

SEQ ID NO: 1657352 - RNA, 19 nt, Artificial Sequence
  Description of Artificial Sequence: Synthetic oligonucleotide
  Antisense strand to SEQ ID NO: 1657351
acucuccuauaaggaauca

SEQ ID NO: 1657353 - RNA, 19 nt, Artificial Sequence
  Description of Artificial Sequence: Synthetic oligonucleotide
  Sense strand starting at position 3682 of SEQ ID NO: 1561246
uuuggucuuucccuugaga

SEQ ID NO: 1657354 - RNA, 19 nt, Artificial Sequence
  Description of Artificial Sequence: Synthetic oligonucleotide
  Antisense strand to SEQ ID NO: 1657353
ucucaagggaaagaccaaa

SEQ ID NO: 1657355 - RNA, 19 nt, Artificial Sequence
  Description of Artificial Sequence: Synthetic oligonucleotide
  Sense strand starting at position 3684 of SEQ ID NO: 1561246
uggucuuucccuugagagc

SEQ ID NO: 1657356 - RNA, 19 nt, Artificial Sequence
  Description of Artificial Sequence: Synthetic oligonucleotide
  Antisense strand to SEQ ID NO: 1657355
gcucucaagggaaagacca

SEQ ID NO: 1657357 - RNA, 19 nt, Artificial Sequence
  Description of Artificial Sequence: Synthetic oligonucleotide
  Sense strand starting at position 3685 of SEQ ID NO: 1561246
ggucuuucccuugagagcu

SEQ ID NO: 1657358 - RNA, 19 nt, Artificial Sequence
  Description of Artificial Sequence: Synthetic oligonucleotide
  Antisense strand to SEQ ID NO: 1657357
agcucucaagggaaagacc

SEQ ID NO: 1657359 - RNA, 19 nt, Artificial Sequence
  Description of Artificial Sequence: Synthetic oligonucleotide
  Sense strand starting at position 3744 of SEQ ID NO: 1561246
guuucuucgucacucuauu

SEQ ID NO: 1657360 - RNA, 19 nt, Artificial Sequence
  Description of Artificial Sequence: Synthetic oligonucleotide
  Antisense strand to SEQ ID NO: 1657359
aauagagugacgaagaaac

SEQ ID NO: 1657361 - RNA, 19 nt, Artificial Sequence
  Description of Artificial Sequence: Synthetic oligonucleotide
  Sense strand starting at position 3795 of SEQ ID NO: 1561246
cuaugucccuaauauagga

SEQ ID NO: 1657362 - RNA, 19 nt, Artificial Sequence
  Description of Artificial Sequence: Synthetic oligonucleotide
  Antisense strand to SEQ ID NO: 1657361
uccuauauuagggacauag

SEQ ID NO: 1657363 - RNA, 19 nt, Artificial Sequence
  Description of Artificial Sequence: Synthetic oligonucleotide
  Sense strand starting at position 3874 of SEQ ID NO: 1561246
cugugaauacagugccuua

SEQ ID NO: 1657364 - RNA, 19 nt, Artificial Sequence
  Description of Artificial Sequence: Synthetic oligonucleotide
  Antisense strand to SEQ ID NO: 1657363
uaaggcacuguauucacag

SEQ ID NO: 1657365 - RNA, 19 nt, Artificial Sequence
  Description of Artificial Sequence: Synthetic oligonucleotide
  Sense strand starting at position 3921 of SEQ ID NO: 1561246
aggugugauucaguuaaug

SEQ ID NO: 1657366 - RNA, 19 nt, Artificial Sequence
  Description of Artificial Sequence: Synthetic oligonucleotide
  Antisense strand to SEQ ID NO: 1657365
cauuaacugaaucacaccu

SEQ ID NO: 1657367 - RNA, 19 nt, Artificial Sequence
  Description of Artificial Sequence: Synthetic oligonucleotide
  Sense strand starting at position 3952 of SEQ ID NO: 1561246
ggagcgucuccugggugau

SEQ ID NO: 1657368 - RNA, 19 nt, Artificial Sequence
  Description of Artificial Sequence: Synthetic oligonucleotide
  Antisense strand to SEQ ID NO: 1657367
aucacccaggagacgcucc

SEQ ID NO: 1657369 - RNA, 19 nt, Artificial Sequence
  Description of Artificial Sequence: Synthetic oligonucleotide
  Sense strand starting at position 3953 of SEQ ID NO: 1561246
gagcgucuccugggugauc

SEQ ID NO: 1657370 - RNA, 19 nt, Artificial Sequence
  Description of Artificial Sequence: Synthetic oligonucleotide
  Antisense strand to SEQ ID NO: 1657369
gaucacccaggagacgcuc

SEQ ID NO: 1657371 - RNA, 19 nt, Artificial Sequence
  Description of Artificial Sequence: Synthetic oligonucleotide
  Sense strand starting at position 213 of SEQ ID NO: 1561247
cggguuaacucagauucuu

SEQ ID NO: 1657372 - RNA, 19 nt, Artificial Sequence
  Description of Artificial Sequence: Synthetic oligonucleotide
  Antisense strand to SEQ ID NO: 1657371
aagaaucugaguuaacccg

SEQ ID NO: 1657373 - RNA, 19 nt, Artificial Sequence
  Description of Artificial Sequence: Synthetic oligonucleotide
  Sense strand starting at position 246 of SEQ ID NO: 1561247
cacgucucuuacgggaaga

SEQ ID NO: 1657374 - RNA, 19 nt, Artificial Sequence
  Description of Artificial Sequence: Synthetic oligonucleotide
  Antisense strand to SEQ ID NO: 1657373
ucuucccguaagagacgug

SEQ ID NO: 1657375 - RNA, 19 nt, Artificial Sequence
  Description of Artificial Sequence: Synthetic oligonucleotide
  Sense strand starting at position 273 of SEQ ID NO: 1561247
gaaggucuccuauggcaug

SEQ ID NO: 1657376 - RNA, 19 nt, Artificial Sequence
  Description of Artificial Sequence: Synthetic oligonucleotide
  Antisense strand to SEQ ID NO: 1657375
caugccauaggagaccuuc

SEQ ID NO: 1657377 - RNA, 19 nt, Artificial Sequence
  Description of Artificial Sequence: Synthetic oligonucleotide
  Sense strand starting at position 287 of SEQ ID NO: 1561247
gcaugcaagccagagaaau

SEQ ID NO: 1657378 - RNA, 19 nt, Artificial Sequence
  Description of Artificial Sequence: Synthetic oligonucleotide
  Antisense strand to SEQ ID NO: 1657377
auuucucuggcuugcaugc

SEQ ID NO: 1657379 - RNA, 19 nt, Artificial Sequence
  Description of Artificial Sequence: Synthetic oligonucleotide
  Sense strand starting at position 313 of SEQ ID NO: 1561247
caggucucaucuggaguga

SEQ ID NO: 1657380 - RNA, 19 nt, Artificial Sequence
  Description of Artificial Sequence: Synthetic oligonucleotide
  Antisense strand to SEQ ID NO: 1657379
ucacuccagaugagaccug

SEQ ID NO: 1657381 - RNA, 19 nt, Artificial Sequence
  Description of Artificial Sequence: Synthetic oligonucleotide
  Sense strand starting at position 554 of SEQ ID NO: 1561247
gucucauccugccgggaaa

SEQ ID NO: 1657382 - RNA, 19 nt, Artificial Sequence
  Description of Artificial Sequence: Synthetic oligonucleotide
  Antisense strand to SEQ ID NO: 1657381
uuucccggcaggaugagac

SEQ ID NO: 1657383 - RNA, 19 nt, Artificial Sequence
  Description of Artificial Sequence: Synthetic oligonucleotide
  Sense strand starting at position 809 of SEQ ID NO: 1561247
ggcggaaauuccugauuag

SEQ ID NO: 1657384 - RNA, 19 nt, Artificial Sequence
  Description of Artificial Sequence: Synthetic oligonucleotide
  Antisense strand to SEQ ID NO: 1657383
cuaaucaggaauuuccgcc

SEQ ID NO: 1657385 - RNA, 19 nt, Artificial Sequence
  Description of Artificial Sequence: Synthetic oligonucleotide
  Sense strand starting at position 810 of SEQ ID NO: 1561247
gcggaaauuccugauuagc

SEQ ID NO: 1657386 - RNA, 19 nt, Artificial Sequence
  Description of Artificial Sequence: Synthetic oligonucleotide
  Antisense strand to SEQ ID NO: 1657385
gcuaaucaggaauuuccgc

SEQ ID NO: 1657387 - RNA, 19 nt, Artificial Sequence
  Description of Artificial Sequence: Synthetic oligonucleotide
  Sense strand starting at position 812 of SEQ ID NO: 1561247
ggaaauuccugauuagcaa

SEQ ID NO: 1657388 - RNA, 19 nt, Artificial Sequence
  Description of Artificial Sequence: Synthetic oligonucleotide
  Antisense strand to SEQ ID NO: 1657387
uugcuaaucaggaauuucc

SEQ ID NO: 1657389 - RNA, 19 nt, Artificial Sequence
  Description of Artificial Sequence: Synthetic oligonucleotide
  Sense strand starting at position 837 of SEQ ID NO: 1561247
ucuccagacucugaauaag

SEQ ID NO: 1657390 - RNA, 19 nt, Artificial Sequence
  Description of Artificial Sequence: Synthetic oligonucleotide
  Antisense strand to SEQ ID NO: 1657389
cuuauucagagucuggaga

SEQ ID NO: 1657391 - RNA, 19 nt, Artificial Sequence
  Description of Artificial Sequence: Synthetic oligonucleotide
  Sense strand starting at position 916 of SEQ ID NO: 1561247
agagcaauuggugguggau

SEQ ID NO: 1657392 - RNA, 19 nt, Artificial Sequence
  Description of Artificial Sequence: Synthetic oligonucleotide
  Antisense strand to SEQ ID NO: 1657391
auccaccaccaauugcucu

SEQ ID NO: 1657393 - RNA, 19 nt, Artificial Sequence
  Description of Artificial Sequence: Synthetic oligonucleotide
  Sense strand starting at position 922 of SEQ ID NO: 1561247
auuggugguggauguuuaa

SEQ ID NO: 1657394 - RNA, 19 nt, Artificial Sequence
  Description of Artificial Sequence: Synthetic oligonucleotide
  Antisense strand to SEQ ID NO: 1657393
uuaaacauccaccaccaau

SEQ ID NO: 1657395 - RNA, 19 nt, Artificial Sequence
  Description of Artificial Sequence: Synthetic oligonucleotide
  Sense strand starting at position 1128 of SEQ ID NO: 1561247
gugucaaucugugaguccu

SEQ ID NO: 1657396 - RNA, 19 nt, Artificial Sequence
  Description of Artificial Sequence: Synthetic oligonucleotide
  Antisense strand to SEQ ID NO: 1657395
aggacucacagauugacac

SEQ ID NO: 1657397 - RNA, 19 nt, Artificial Sequence
  Description of Artificial Sequence: Synthetic oligonucleotide
  Sense strand starting at position 1134 of SEQ ID NO: 1561247
aucugugaguccucccuuu

SEQ ID NO: 1657398 - RNA, 19 nt, Artificial Sequence
  Description of Artificial Sequence: Synthetic oligonucleotide
  Antisense strand to SEQ ID NO: 1657397
aaagggaggacucacagau

SEQ ID NO: 1657399 - RNA, 19 nt, Artificial Sequence
  Description of Artificial Sequence: Synthetic oligonucleotide
  Sense strand starting at position 1188 of SEQ ID NO: 1561247
gacuucuccuuccgggaga

SEQ ID NO: 1657400 - RNA, 19 nt, Artificial Sequence
  Description of Artificial Sequence: Synthetic oligonucleotide
  Antisense strand to SEQ ID NO: 1657399
ucucccggaaggagaaguc

SEQ ID NO: 1657401 - RNA, 19 nt, Artificial Sequence
  Description of Artificial Sequence: Synthetic oligonucleotide
  Sense strand starting at position 1191 of SEQ ID NO: 1561247
uucuccuuccgggagagau

SEQ ID NO: 1657402 - RNA, 19 nt, Artificial Sequence
  Description of Artificial Sequence: Synthetic oligonucleotide
  Antisense strand to SEQ ID NO: 1657401
aucucucccggaaggagaa

SEQ ID NO: 1657403 - RNA, 19 nt, Artificial Sequence
  Description of Artificial Sequence: Synthetic oligonucleotide
  Sense strand starting at position 3230 of SEQ ID NO: 1561247
ccggaaucaauguguaaau

SEQ ID NO: 1657404 - RNA, 19 nt, Artificial Sequence
  Description of Artificial Sequence: Synthetic oligonucleotide
  Antisense strand to SEQ ID NO: 1657403
auuuacacauugauuccgg

SEQ ID NO: 1657405 - RNA, 19 nt, Artificial Sequence
  Description of Artificial Sequence: Synthetic oligonucleotide
  Sense strand starting at position 3231 of SEQ ID NO: 1561247
cggaaucaauguguaaaua

SEQ ID NO: 1657406 - RNA, 19 nt, Artificial Sequence
  Description of Artificial Sequence: Synthetic oligonucleotide
  Antisense strand to SEQ ID NO: 1657405
uauuuacacauugauuccg

SEQ ID NO: 1657407 - RNA, 19 nt, Artificial Sequence
  Description of Artificial Sequence: Synthetic oligonucleotide
  Sense strand starting at position 3241 of SEQ ID NO: 1561247
guguaaauacugcgaggga

SEQ ID NO: 1657408 - RNA, 19 nt, Artificial Sequence
  Description of Artificial Sequence: Synthetic oligonucleotide
  Antisense strand to SEQ ID NO: 1657407
ucccucgcaguauuuacac

SEQ ID NO: 1657409 - RNA, 19 nt, Artificial Sequence
  Description of Artificial Sequence: Synthetic oligonucleotide
  Sense strand starting at position 3242 of SEQ ID NO: 1561247
uguaaauacugcgagggaa

SEQ ID NO: 1657410 - RNA, 19 nt, Artificial Sequence
  Description of Artificial Sequence: Synthetic oligonucleotide
  Antisense strand to SEQ ID NO: 1657409
uucccucgcaguauuuaca

SEQ ID NO: 1657411 - RNA, 19 nt, Artificial Sequence
  Description of Artificial Sequence: Synthetic oligonucleotide
  Sense strand starting at position 3371 of SEQ ID NO: 1561247
gggcuuguuugcugucuuu

SEQ ID NO: 1657412 - RNA, 19 nt, Artificial Sequence
  Description of Artificial Sequence: Synthetic oligonucleotide
  Antisense strand to SEQ ID NO: 1657411
aaagacagcaaacaagccc

SEQ ID NO: 1657413 - RNA, 19 nt, Artificial Sequence
  Description of Artificial Sequence: Synthetic oligonucleotide
  Sense strand starting at position 3532 of SEQ ID NO: 1561247
guugcucagagcugcagaa

SEQ ID NO: 1657414 - RNA, 19 nt, Artificial Sequence
  Description of Artificial Sequence: Synthetic oligonucleotide
  Antisense strand to SEQ ID NO: 1657413
uucugcagcucugagcaac

SEQ ID NO: 1657415 - RNA, 19 nt, Artificial Sequence
  Description of Artificial Sequence: Synthetic oligonucleotide
  Sense strand starting at position 3650 of SEQ ID NO: 1561247
ucagaugauuccuuauagg

SEQ ID NO: 1657416 - RNA, 19 nt, Artificial Sequence
  Description of Artificial Sequence: Synthetic oligonucleotide
  Antisense strand to SEQ ID NO: 1657415
ccuauaaggaaucaucuga

SEQ ID NO: 1657417 - RNA, 19 nt, Artificial Sequence
  Description of Artificial Sequence: Synthetic oligonucleotide
  Sense strand starting at position 3653 of SEQ ID NO: 1561247
gaugauuccuuauaggaga

SEQ ID NO: 1657418 - RNA, 19 nt, Artificial Sequence
  Description of Artificial Sequence: Synthetic oligonucleotide
  Antisense strand to SEQ ID NO: 1657417
ucuccuauaaggaaucauc

SEQ ID NO: 1657419 - RNA, 19 nt, Artificial Sequence
  Description of Artificial Sequence: Synthetic oligonucleotide
  Sense strand starting at position 3655 of SEQ ID NO: 1561247
ugauuccuuauaggagagu

SEQ ID NO: 1657420 - RNA, 19 nt, Artificial Sequence
  Description of Artificial Sequence: Synthetic oligonucleotide
  Antisense strand to SEQ ID NO: 1657419
acucuccuauaaggaauca

SEQ ID NO: 1657421 - RNA, 19 nt, Artificial Sequence
  Description of Artificial Sequence: Synthetic oligonucleotide
  Sense strand starting at position 3956 of SEQ ID NO: 1561247
uuuggucuuucccuugaga

SEQ ID NO: 1657422 - RNA, 19 nt, Artificial Sequence
  Description of Artificial Sequence: Synthetic oligonucleotide
  Antisense strand to SEQ ID NO: 1657421
ucucaagggaaagaccaaa

SEQ ID NO: 1657423 - RNA, 19 nt, Artificial Sequence
  Description of Artificial Sequence: Synthetic oligonucleotide
  Sense strand starting at position 3958 of SEQ ID NO: 1561247
uggucuuucccuugagagc

SEQ ID NO: 1657424 - RNA, 19 nt, Artificial Sequence
  Description of Artificial Sequence: Synthetic oligonucleotide
  Antisense strand to SEQ ID NO: 1657423
gcucucaagggaaagacca

SEQ ID NO: 1657425 - RNA, 19 nt, Artificial Sequence
  Description of Artificial Sequence: Synthetic oligonucleotide
  Sense strand starting at position 3959 of SEQ ID NO: 1561247
ggucuuucccuugagagcu

SEQ ID NO: 1657426 - RNA, 19 nt, Artificial Sequence
  Description of Artificial Sequence: Synthetic oligonucleotide
  Antisense strand to SEQ ID NO: 1657425
agcucucaagggaaagacc

SEQ ID NO: 1657427 - RNA, 19 nt, Artificial Sequence
  Description of Artificial Sequence: Synthetic oligonucleotide
  Sense strand starting at position 62 of SEQ ID NO: 1561248
gccuccuguuugcgucaga

SEQ ID NO: 1657428 - RNA, 19 nt, Artificial Sequence
  Description of Artificial Sequence: Synthetic oligonucleotide
  Antisense strand to SEQ ID NO: 1657427
ucugacgcaaacaggaggc

SEQ ID NO: 1657429 - RNA, 19 nt, Artificial Sequence
  Description of Artificial Sequence: Synthetic oligonucleotide
  Sense strand starting at position 65 of SEQ ID NO: 1561248
uccuguuugcgucagaguu

SEQ ID NO: 1657430 - RNA, 19 nt, Artificial Sequence
  Description of Artificial Sequence: Synthetic oligonucleotide
  Antisense strand to SEQ ID NO: 1657429
aacucugacgcaaacagga

SEQ ID NO: 1657431 - RNA, 19 nt, Artificial Sequence
  Description of Artificial Sequence: Synthetic oligonucleotide
  Sense strand starting at position 67 of SEQ ID NO: 1561248
cuguuugcgucagaguuaa

SEQ ID NO: 1657432 - RNA, 19 nt, Artificial Sequence
  Description of Artificial Sequence: Synthetic oligonucleotide
  Antisense strand to SEQ ID NO: 1657431
uuaacucugacgcaaacag

SEQ ID NO: 1657433 - RNA, 19 nt, Artificial Sequence
  Description of Artificial Sequence: Synthetic oligonucleotide
  Sense strand starting at position 75 of SEQ ID NO: 1561248
gucagaguuaagggugaga

SEQ ID NO: 1657434 - RNA, 19 nt, Artificial Sequence
  Description of Artificial Sequence: Synthetic oligonucleotide
  Antisense strand to SEQ ID NO: 1657433
ucucacccuuaacucugac

SEQ ID NO: 1657435 - RNA, 19 nt, Artificial Sequence
  Description of Artificial Sequence: Synthetic oligonucleotide
  Sense strand starting at position 77 of SEQ ID NO: 1561248
cagaguuaagggugagauc

SEQ ID NO: 1657436 - RNA, 19 nt, Artificial Sequence
  Description of Artificial Sequence: Synthetic oligonucleotide
  Antisense strand to SEQ ID NO: 1657435
gaucucacccuuaacucug

SEQ ID NO: 1657437 - RNA, 19 nt, Artificial Sequence
  Description of Artificial Sequence: Synthetic oligonucleotide
  Sense strand starting at position 127 of SEQ ID NO: 1561248
aggcaaaccuuccagagaa

SEQ ID NO: 1657438 - RNA, 19 nt, Artificial Sequence
  Description of Artificial Sequence: Synthetic oligonucleotide
  Antisense strand to SEQ ID NO: 1657437
uucucuggaagguuugccu

SEQ ID NO: 1657439 - RNA, 19 nt, Artificial Sequence
  Description of Artificial Sequence: Synthetic oligonucleotide
  Sense strand starting at position 421 of SEQ ID NO: 1561248
ggaguugaccuuugacucu

SEQ ID NO: 1657440 - RNA, 19 nt, Artificial Sequence
  Description of Artificial Sequence: Synthetic oligonucleotide
  Antisense strand to SEQ ID NO: 1657439
agagucaaaggucaacucc

SEQ ID NO: 1657441 - RNA, 19 nt, Artificial Sequence
  Description of Artificial Sequence: Synthetic oligonucleotide
  Sense strand starting at position 592 of SEQ ID NO: 1561248
gggcaggguuugugaauga

SEQ ID NO: 1657442 - RNA, 19 nt, Artificial Sequence
  Description of Artificial Sequence: Synthetic oligonucleotide
  Antisense strand to SEQ ID NO: 1657441
ucauucacaaacccugccc

SEQ ID NO: 1657443 - RNA, 19 nt, Artificial Sequence
  Description of Artificial Sequence: Synthetic oligonucleotide
  Sense strand starting at position 792 of SEQ ID NO: 1561248
ucuugaaaugggugggagu

SEQ ID NO: 1657444 - RNA, 19 nt, Artificial Sequence
  Description of Artificial Sequence: Synthetic oligonucleotide
  Antisense strand to SEQ ID NO: 1657443
acucccacccauuucaaga

SEQ ID NO: 1657445 - RNA, 19 nt, Artificial Sequence
  Description of Artificial Sequence: Synthetic oligonucleotide
  Sense strand starting at position 848 of SEQ ID NO: 1561248
gagcucuguaggcguggaa

SEQ ID NO: 1657446 - RNA, 19 nt, Artificial Sequence
  Description of Artificial Sequence: Synthetic oligonucleotide
  Antisense strand to SEQ ID NO: 1657445
uuccacgccuacagagcuc

SEQ ID NO: 1657447 - RNA, 19 nt, Artificial Sequence
  Description of Artificial Sequence: Synthetic oligonucleotide
  Sense strand starting at position 1185 of SEQ ID NO: 1561248
agacauugcucuuccaaga

SEQ ID NO: 1657448 - RNA, 19 nt, Artificial Sequence
  Description of Artificial Sequence: Synthetic oligonucleotide
  Antisense strand to SEQ ID NO: 1657447
ucuuggaagagcaaugucu

SEQ ID NO: 1657449 - RNA, 19 nt, Artificial Sequence
  Description of Artificial Sequence: Synthetic oligonucleotide
  Sense strand starting at position 1228 of SEQ ID NO: 1561248
cugaaacguguuugggaga

SEQ ID NO: 1657450 - RNA, 19 nt, Artificial Sequence
  Description of Artificial Sequence: Synthetic oligonucleotide
  Antisense strand to SEQ ID NO: 1657449
ucucccaaacacguuucag

SEQ ID NO: 1657451 - RNA, 19 nt, Artificial Sequence
  Description of Artificial Sequence: Synthetic oligonucleotide
  Sense strand starting at position 1229 of SEQ ID NO: 1561248
ugaaacguguuugggagaa

SEQ ID NO: 1657452 - RNA, 19 nt, Artificial Sequence
  Description of Artificial Sequence: Synthetic oligonucleotide
  Antisense strand to SEQ ID NO: 1657451
uucucccaaacacguuuca

SEQ ID NO: 1657453 - RNA, 19 nt, Artificial Sequence
  Description of Artificial Sequence: Synthetic oligonucleotide
  Sense strand starting at position 1267 of SEQ ID NO: 1561248
ggaagaccuucuggacauu

SEQ ID NO: 1657454 - RNA, 19 nt, Artificial Sequence
  Description of Artificial Sequence: Synthetic oligonucleotide
  Antisense strand to SEQ ID NO: 1657453
aauguccagaaggucuucc

SEQ ID NO: 1657455 - RNA, 19 nt, Artificial Sequence
  Description of Artificial Sequence: Synthetic oligonucleotide
  Sense strand starting at position 1425 of SEQ ID NO: 1561248
cugggagaguccuagaacu

SEQ ID NO: 1657456 - RNA, 19 nt, Artificial Sequence
  Description of Artificial Sequence: Synthetic oligonucleotide
  Antisense strand to SEQ ID NO: 1657455
aguucuaggacucucccag

SEQ ID NO: 1657457 - RNA, 19 nt, Artificial Sequence
  Description of Artificial Sequence: Synthetic oligonucleotide
  Sense strand starting at position 1432 of SEQ ID NO: 1561248
aguccuagaacucguggau

SEQ ID NO: 1657458 - RNA, 19 nt, Artificial Sequence
  Description of Artificial Sequence: Synthetic oligonucleotide
  Antisense strand to SEQ ID NO: 1657457
auccacgaguucuaggacu

SEQ ID NO: 1657459 - RNA, 19 nt, Artificial Sequence
  Description of Artificial Sequence: Synthetic oligonucleotide
  Sense strand starting at position 1512 of SEQ ID NO: 1561248
accgcacucuccuucgaau

SEQ ID NO: 1657460 - RNA, 19 nt, Artificial Sequence
  Description of Artificial Sequence: Synthetic oligonucleotide
  Antisense strand to SEQ ID NO: 1657459
auucgaaggagagugcggu

SEQ ID NO: 1657461 - RNA, 19 nt, Artificial Sequence
  Description of Artificial Sequence: Synthetic oligonucleotide
  Sense strand starting at position 1514 of SEQ ID NO: 1561248
cgcacucuccuucgaauuu

SEQ ID NO: 1657462 - RNA, 19 nt, Artificial Sequence
  Description of Artificial Sequence: Synthetic oligonucleotide
  Antisense strand to SEQ ID NO: 1657461
aaauucgaaggagagugcg

SEQ ID NO: 1657463 - RNA, 19 nt, Artificial Sequence
  Description of Artificial Sequence: Synthetic oligonucleotide
  Sense strand starting at position 1680 of SEQ ID NO: 1561248
ucuagaucguuuccgggua

SEQ ID NO: 1657464 - RNA, 19 nt, Artificial Sequence
  Description of Artificial Sequence: Synthetic oligonucleotide
  Antisense strand to SEQ ID NO: 1657463
uacccggaaacgaucuaga

SEQ ID NO: 1657465 - RNA, 19 nt, Artificial Sequence
  Description of Artificial Sequence: Synthetic oligonucleotide
  Sense strand starting at position 1682 of SEQ ID NO: 1561248
uagaucguuuccggguaga

SEQ ID NO: 1657466 - RNA, 19 nt, Artificial Sequence
  Description of Artificial Sequence: Synthetic oligonucleotide
  Antisense strand to SEQ ID NO: 1657465
ucuacccggaaacgaucua

SEQ ID NO: 1657467 - RNA, 19 nt, Artificial Sequence
  Description of Artificial Sequence: Synthetic oligonucleotide
  Sense strand starting at position 1994 of SEQ ID NO: 1561248
gagacaugucuccgagcuc

SEQ ID NO: 1657468 - RNA, 19 nt, Artificial Sequence
  Description of Artificial Sequence: Synthetic oligonucleotide
  Antisense strand to SEQ ID NO: 1657467
gagcucggagacaugucuc

SEQ ID NO: 1657469 - RNA, 19 nt, Artificial Sequence
  Description of Artificial Sequence: Synthetic oligonucleotide
  Sense strand starting at position 2330 of SEQ ID NO: 1561248
gcagguuuccuccugugca

SEQ ID NO: 1657470 - RNA, 19 nt, Artificial Sequence
  Description of Artificial Sequence: Synthetic oligonucleotide
  Antisense strand to SEQ ID NO: 1657469
ugcacaggaggaaaccugc

SEQ ID NO: 1657471 - RNA, 19 nt, Artificial Sequence
  Description of Artificial Sequence: Synthetic oligonucleotide
  Sense strand starting at position 2398 of SEQ ID NO: 1561248
ggacauuccugcccuggua

SEQ ID NO: 1657472 - RNA, 19 nt, Artificial Sequence
  Description of Artificial Sequence: Synthetic oligonucleotide
  Antisense strand to SEQ ID NO: 1657471
uaccagggcaggaaugucc

SEQ ID NO: 1657473 - RNA, 19 nt, Artificial Sequence
  Description of Artificial Sequence: Synthetic oligonucleotide
  Sense strand starting at position 2462 of SEQ ID NO: 1561248
augcaagcucuugugugua

SEQ ID NO: 1657474 - RNA, 19 nt, Artificial Sequence
  Description of Artificial Sequence: Synthetic oligonucleotide
  Antisense strand to SEQ ID NO: 1657473
uacacacaagagcuugcau

SEQ ID NO: 1657475 - RNA, 19 nt, Artificial Sequence
  Description of Artificial Sequence: Synthetic oligonucleotide
  Sense strand starting at position 2505 of SEQ ID NO: 1561248
ugguccuguucucugagua

SEQ ID NO: 1657476 - RNA, 19 nt, Artificial Sequence
  Description of Artificial Sequence: Synthetic oligonucleotide
  Antisense strand to SEQ ID NO: 1657475
uacucagagaacaggacca

SEQ ID NO: 1657477 - RNA, 19 nt, Artificial Sequence
  Description of Artificial Sequence: Synthetic oligonucleotide
  Sense strand starting at position 2506 of SEQ ID NO: 1561248
gguccuguucucugaguau

SEQ ID NO: 1657478 - RNA, 19 nt, Artificial Sequence
  Description of Artificial Sequence: Synthetic oligonucleotide
  Antisense strand to SEQ ID NO: 1657477
auacucagagaacaggacc

SEQ ID NO: 1657479 - RNA, 19 nt, Artificial Sequence
  Description of Artificial Sequence: Synthetic oligonucleotide
  Sense strand starting at position 2756 of SEQ ID NO: 1561248
ccaucaaugucuugucuga

SEQ ID NO: 1657480 - RNA, 19 nt, Artificial Sequence
  Description of Artificial Sequence: Synthetic oligonucleotide
  Antisense strand to SEQ ID NO: 1657479
ucagacaagacauugaugg

SEQ ID NO: 1657481 - RNA, 19 nt, Artificial Sequence
  Description of Artificial Sequence: Synthetic oligonucleotide
  Sense strand starting at position 2758 of SEQ ID NO: 1561248
aucaaugucuugucugaau

SEQ ID NO: 1657482 - RNA, 19 nt, Artificial Sequence
  Description of Artificial Sequence: Synthetic oligonucleotide
  Antisense strand to SEQ ID NO: 1657481
auucagacaagacauugau

SEQ ID NO: 1657483 - RNA, 19 nt, Artificial Sequence
  Description of Artificial Sequence: Synthetic oligonucleotide
  Sense strand starting at position 3365 of SEQ ID NO: 1561248
gcagaaugugcauggaguu

SEQ ID NO: 1657484 - RNA, 19 nt, Artificial Sequence
  Description of Artificial Sequence: Synthetic oligonucleotide
  Antisense strand to SEQ ID NO: 1657483
aacuccaugcacauucugc

SEQ ID NO: 1657485 - RNA, 19 nt, Artificial Sequence
  Description of Artificial Sequence: Synthetic oligonucleotide
  Sense strand starting at position 3378 of SEQ ID NO: 1561248
ggaguugagugaggccauu

SEQ ID NO: 1657486 - RNA, 19 nt, Artificial Sequence
  Description of Artificial Sequence: Synthetic oligonucleotide
  Antisense strand to SEQ ID NO: 1657485
aauggccucacucaacucc

SEQ ID NO: 1657487 - RNA, 19 nt, Artificial Sequence
  Description of Artificial Sequence: Synthetic oligonucleotide
  Sense strand starting at position 3467 of SEQ ID NO: 1561248
aguuuccgcaccuguagaa

SEQ ID NO: 1657488 - RNA, 19 nt, Artificial Sequence
  Description of Artificial Sequence: Synthetic oligonucleotide
  Antisense strand to SEQ ID NO: 1657487
uucuacaggugcggaaacu

SEQ ID NO: 1657489 - RNA, 19 nt, Artificial Sequence
  Description of Artificial Sequence: Synthetic oligonucleotide
  Sense strand starting at position 3474 of SEQ ID NO: 1561248
gcaccuguagaaugaauau

SEQ ID NO: 1657490 - RNA, 19 nt, Artificial Sequence
  Description of Artificial Sequence: Synthetic oligonucleotide
  Antisense strand to SEQ ID NO: 1657489
auauucauucuacaggugc

SEQ ID NO: 1657491 - RNA, 19 nt, Artificial Sequence
  Description of Artificial Sequence: Synthetic oligonucleotide
  Sense strand starting at position 3513 of SEQ ID NO: 1561248
aagguugcuggagguauua

SEQ ID NO: 1657492 - RNA, 19 nt, Artificial Sequence
  Description of Artificial Sequence: Synthetic oligonucleotide
  Antisense strand to SEQ ID NO: 1657491
uaauaccuccagcaaccuu

SEQ ID NO: 1657493 - RNA, 19 nt, Artificial Sequence
  Description of Artificial Sequence: Synthetic oligonucleotide
  Sense strand starting at position 3515 of SEQ ID NO: 1561248
gguugcuggagguauuaca

SEQ ID NO: 1657494 - RNA, 19 nt, Artificial Sequence
  Description of Artificial Sequence: Synthetic oligonucleotide
  Antisense strand to SEQ ID NO: 1657493
uguaauaccuccagcaacc

SEQ ID NO: 1657495 - RNA, 19 nt, Artificial Sequence
  Description of Artificial Sequence: Synthetic oligonucleotide
  Sense strand starting at position 3522 of SEQ ID NO: 1561248
ggagguauuacaugaguua

SEQ ID NO: 1657496 - RNA, 19 nt, Artificial Sequence
  Description of Artificial Sequence: Synthetic oligonucleotide
  Antisense strand to SEQ ID NO: 1657495
uaacucauguaauaccucc

SEQ ID NO: 1657497 - RNA, 19 nt, Artificial Sequence
  Description of Artificial Sequence: Synthetic oligonucleotide
  Sense strand starting at position 3525 of SEQ ID NO: 1561248
gguauuacaugaguuaaca

SEQ ID NO: 1657498 - RNA, 19 nt, Artificial Sequence
  Description of Artificial Sequence: Synthetic oligonucleotide
  Antisense strand to SEQ ID NO: 1657497
uguuaacucauguaauacc

SEQ ID NO: 1657499 - RNA, 19 nt, Artificial Sequence
  Description of Artificial Sequence: Synthetic oligonucleotide
  Sense strand starting at position 3869 of SEQ ID NO: 1561248
gccuaauaguaaccauguu

SEQ ID NO: 1657500 - RNA, 19 nt, Artificial Sequence
  Description of Artificial Sequence: Synthetic oligonucleotide
  Antisense strand to SEQ ID NO: 1657499
aacaugguuacuauuaggc

SEQ ID NO: 1657501 - RNA, 19 nt, Artificial Sequence
  Description of Artificial Sequence: Synthetic oligonucleotide
  Sense strand starting at position 3888 of SEQ ID NO: 1561248
uguaucugucacugcuuua

SEQ ID NO: 1657502 - RNA, 19 nt, Artificial Sequence
  Description of Artificial Sequence: Synthetic oligonucleotide
  Antisense strand to SEQ ID NO: 1657501
uaaagcagugacagauaca

SEQ ID NO: 1657503 - RNA, 19 nt, Artificial Sequence
  Description of Artificial Sequence: Synthetic oligonucleotide
  Sense strand starting at position 13 of SEQ ID NO: 1561249
ggguuagaaugagucaaau

SEQ ID NO: 1657504 - RNA, 19 nt, Artificial Sequence
  Description of Artificial Sequence: Synthetic oligonucleotide
  Antisense strand to SEQ ID NO: 1657503
auuugacucauucuaaccc

SEQ ID NO: 1657505 - RNA, 19 nt, Artificial Sequence
  Description of Artificial Sequence: Synthetic oligonucleotide
  Sense strand starting at position 15 of SEQ ID NO: 1561249
guuagaaugagucaaaugu

SEQ ID NO: 1657506 - RNA, 19 nt, Artificial Sequence
  Description of Artificial Sequence: Synthetic oligonucleotide
  Antisense strand to SEQ ID NO: 1657505
acauuugacucauucuaac

SEQ ID NO: 1657507 - RNA, 19 nt, Artificial Sequence
  Description of Artificial Sequence: Synthetic oligonucleotide
  Sense strand starting at position 73 of SEQ ID NO: 1561249
guggucuacccacgagagu

SEQ ID NO: 1657508 - RNA, 19 nt, Artificial Sequence
  Description of Artificial Sequence: Synthetic oligonucleotide
  Antisense strand to SEQ ID NO: 1657507
acucucguggguagaccac

SEQ ID NO: 1657509 - RNA, 19 nt, Artificial Sequence
  Description of Artificial Sequence: Synthetic oligonucleotide
  Sense strand starting at position 84 of SEQ ID NO: 1561249
acgagagugacucaaucga

SEQ ID NO: 1657510 - RNA, 19 nt, Artificial Sequence
  Description of Artificial Sequence: Synthetic oligonucleotide
  Antisense strand to SEQ ID NO: 1657509
ucgauugagucacucucgu

SEQ ID NO: 1657511 - RNA, 19 nt, Artificial Sequence
  Description of Artificial Sequence: Synthetic oligonucleotide
  Sense strand starting at position 419 of SEQ ID NO: 1561249
gcccgauacuucucccaac

SEQ ID NO: 1657512 - RNA, 19 nt, Artificial Sequence
  Description of Artificial Sequence: Synthetic oligonucleotide
  Antisense strand to SEQ ID NO: 1657511
guugggagaaguaucgggc

SEQ ID NO: 1657513 - RNA, 19 nt, Artificial Sequence
  Description of Artificial Sequence: Synthetic oligonucleotide
  Sense strand starting at position 495 of SEQ ID NO: 1561249
auaaguuuccaacguggca

SEQ ID NO: 1657514 - RNA, 19 nt, Artificial Sequence
  Description of Artificial Sequence: Synthetic oligonucleotide
  Antisense strand to SEQ ID NO: 1657513
ugccacguuggaaacuuau

SEQ ID NO: 1657515 - RNA, 19 nt, Artificial Sequence
  Description of Artificial Sequence: Synthetic oligonucleotide
  Sense strand starting at position 508 of SEQ ID NO: 1561249
guggcagacucguuuaugu

SEQ ID NO: 1657516 - RNA, 19 nt, Artificial Sequence
  Description of Artificial Sequence: Synthetic oligonucleotide
  Antisense strand to SEQ ID NO: 1657515
acauaaacgagucugccac

SEQ ID NO: 1657517 - RNA, 19 nt, Artificial Sequence
  Description of Artificial Sequence: Synthetic oligonucleotide
  Sense strand starting at position 510 of SEQ ID NO: 1561249
ggcagacucguuuauguaa

SEQ ID NO: 1657518 - RNA, 19 nt, Artificial Sequence
  Description of Artificial Sequence: Synthetic oligonucleotide
  Antisense strand to SEQ ID NO: 1657517
uuacauaaacgagucugcc

SEQ ID NO: 1657519 - RNA, 19 nt, Artificial Sequence
  Description of Artificial Sequence: Synthetic oligonucleotide
  Sense strand starting at position 523 of SEQ ID NO: 1561249
auguaaagccauuauugcu

SEQ ID NO: 1657520 - RNA, 19 nt, Artificial Sequence
  Description of Artificial Sequence: Synthetic oligonucleotide
  Antisense strand to SEQ ID NO: 1657519
agcaauaauggcuuuacau

SEQ ID NO: 1657521 - RNA, 19 nt, Artificial Sequence
  Description of Artificial Sequence: Synthetic oligonucleotide
  Sense strand starting at position 536 of SEQ ID NO: 1561249
auugcugucuuauuggaag

SEQ ID NO: 1657522 - RNA, 19 nt, Artificial Sequence
  Description of Artificial Sequence: Synthetic oligonucleotide
  Antisense strand to SEQ ID NO: 1657521
cuuccaauaagacagcaau

SEQ ID NO: 1657523 - RNA, 19 nt, Artificial Sequence
  Description of Artificial Sequence: Synthetic oligonucleotide
  Sense strand starting at position 538 of SEQ ID NO: 1561249
ugcugucuuauuggaagaa

SEQ ID NO: 1657524 - RNA, 19 nt, Artificial Sequence
  Description of Artificial Sequence: Synthetic oligonucleotide
  Antisense strand to SEQ ID NO: 1657523
uucuuccaauaagacagca

SEQ ID NO: 1657525 - RNA, 19 nt, Artificial Sequence
  Description of Artificial Sequence: Synthetic oligonucleotide
  Sense strand starting at position 653 of SEQ ID NO: 1561249
cugcuuccugaaugaucuu

SEQ ID NO: 1657526 - RNA, 19 nt, Artificial Sequence
  Description of Artificial Sequence: Synthetic oligonucleotide
  Antisense strand to SEQ ID NO: 1657525
aagaucauucaggaagcag

SEQ ID NO: 1657527 - RNA, 19 nt, Artificial Sequence
  Description of Artificial Sequence: Synthetic oligonucleotide
  Sense strand starting at position 659 of SEQ ID NO: 1561249
ccugaaugaucuuaauagc

SEQ ID NO: 1657528 - RNA, 19 nt, Artificial Sequence
  Description of Artificial Sequence: Synthetic oligonucleotide
  Antisense strand to SEQ ID NO: 1657527
gcuauuaagaucauucagg

SEQ ID NO: 1657529 - RNA, 19 nt, Artificial Sequence
  Description of Artificial Sequence: Synthetic oligonucleotide
  Sense strand starting at position 680 of SEQ ID NO: 1561249
gccaauaugugcuccucca

SEQ ID NO: 1657530 - RNA, 19 nt, Artificial Sequence
  Description of Artificial Sequence: Synthetic oligonucleotide
  Antisense strand to SEQ ID NO: 1657529
uggaggagcacauauuggc

SEQ ID NO: 1657531 - RNA, 19 nt, Artificial Sequence
  Description of Artificial Sequence: Synthetic oligonucleotide
  Sense strand starting at position 772 of SEQ ID NO: 1561249
acgcuccgugacugugaaa

SEQ ID NO: 1657532 - RNA, 19 nt, Artificial Sequence
  Description of Artificial Sequence: Synthetic oligonucleotide
  Antisense strand to SEQ ID NO: 1657531
uuucacagucacggagcgu

SEQ ID NO: 1657533 - RNA, 19 nt, Artificial Sequence
  Description of Artificial Sequence: Synthetic oligonucleotide
  Sense strand starting at position 902 of SEQ ID NO: 1561249
gcaggucacccuggauacu

SEQ ID NO: 1657534 - RNA, 19 nt, Artificial Sequence
  Description of Artificial Sequence: Synthetic oligonucleotide
  Antisense strand to SEQ ID NO: 1657533
aguauccagggugaccugc

SEQ ID NO: 1657535 - RNA, 19 nt, Artificial Sequence
  Description of Artificial Sequence: Synthetic oligonucleotide
  Sense strand starting at position 1003 of SEQ ID NO: 1561249
uaccgagaccugcgaaaga

SEQ ID NO: 1657536 - RNA, 19 nt, Artificial Sequence
  Description of Artificial Sequence: Synthetic oligonucleotide
  Antisense strand to SEQ ID NO: 1657535
ucuuucgcaggucucggua

SEQ ID NO: 1657537 - RNA, 19 nt, Artificial Sequence
  Description of Artificial Sequence: Synthetic oligonucleotide
  Sense strand starting at position 1099 of SEQ ID NO: 1561249
gacugauugugggacacaa

SEQ ID NO: 1657538 - RNA, 19 nt, Artificial Sequence
  Description of Artificial Sequence: Synthetic oligonucleotide
  Antisense strand to SEQ ID NO: 1657537
uugugucccacaaucaguc

SEQ ID NO: 1657539 - RNA, 19 nt, Artificial Sequence
  Description of Artificial Sequence: Synthetic oligonucleotide
  Sense strand starting at position 2221 of SEQ ID NO: 1561249
gacgguguuucgguuuaau

SEQ ID NO: 1657540 - RNA, 19 nt, Artificial Sequence
  Description of Artificial Sequence: Synthetic oligonucleotide
  Antisense strand to SEQ ID NO: 1657539
auuaaaccgaaacaccguc

SEQ ID NO: 1657541 - RNA, 19 nt, Artificial Sequence
  Description of Artificial Sequence: Synthetic oligonucleotide
  Sense strand starting at position 2223 of SEQ ID NO: 1561249
cgguguuucgguuuaauug

SEQ ID NO: 1657542 - RNA, 19 nt, Artificial Sequence
  Description of Artificial Sequence: Synthetic oligonucleotide
  Antisense strand to SEQ ID NO: 1657541
caauuaaaccgaaacaccg

SEQ ID NO: 1657543 - RNA, 19 nt, Artificial Sequence
  Description of Artificial Sequence: Synthetic oligonucleotide
  Sense strand starting at position 2224 of SEQ ID NO: 1561249
gguguuucgguuuaauuga

SEQ ID NO: 1657544 - RNA, 19 nt, Artificial Sequence
  Description of Artificial Sequence: Synthetic oligonucleotide
  Antisense strand to SEQ ID NO: 1657543
ucaauuaaaccgaaacacc

SEQ ID NO: 1657545 - RNA, 19 nt, Artificial Sequence
  Description of Artificial Sequence: Synthetic oligonucleotide
  Sense strand starting at position 2384 of SEQ ID NO: 1561249
guagaugcucccugugcau

SEQ ID NO: 1657546 - RNA, 19 nt, Artificial Sequence
  Description of Artificial Sequence: Synthetic oligonucleotide
  Antisense strand to SEQ ID NO: 1657545
augcacagggagcaucuac

SEQ ID NO: 1657547 - RNA, 19 nt, Artificial Sequence
  Description of Artificial Sequence: Synthetic oligonucleotide
  Sense strand starting at position 2391 of SEQ ID NO: 1561249
cucccugugcauugguuua

SEQ ID NO: 1657548 - RNA, 19 nt, Artificial Sequence
  Description of Artificial Sequence: Synthetic oligonucleotide
  Antisense strand to SEQ ID NO: 1657547
uaaaccaaugcacagggag

SEQ ID NO: 1657549 - RNA, 19 nt, Artificial Sequence
  Description of Artificial Sequence: Synthetic oligonucleotide
  Sense strand starting at position 2393 of SEQ ID NO: 1561249
cccugugcauugguuuaaa

SEQ ID NO: 1657550 - RNA, 19 nt, Artificial Sequence
  Description of Artificial Sequence: Synthetic oligonucleotide
  Antisense strand to SEQ ID NO: 1657549
uuuaaaccaaugcacaggg

SEQ ID NO: 1657551 - RNA, 19 nt, Artificial Sequence
  Description of Artificial Sequence: Synthetic oligonucleotide
  Sense strand starting at position 3045 of SEQ ID NO: 1561249
gggccuggcacuuggaaau

SEQ ID NO: 1657552 - RNA, 19 nt, Artificial Sequence
  Description of Artificial Sequence: Synthetic oligonucleotide
  Antisense strand to SEQ ID NO: 1657551
auuuccaagugccaggccc

SEQ ID NO: 1657553 - RNA, 19 nt, Artificial Sequence
  Description of Artificial Sequence: Synthetic oligonucleotide
  Sense strand starting at position 3085 of SEQ ID NO: 1561249
ugccucugccacuguuauu

SEQ ID NO: 1657554 - RNA, 19 nt, Artificial Sequence
  Description of Artificial Sequence: Synthetic oligonucleotide
  Antisense strand to SEQ ID NO: 1657553
aauaacaguggcagaggca

SEQ ID NO: 1657555 - RNA, 19 nt, Artificial Sequence
  Description of Artificial Sequence: Synthetic oligonucleotide
  Sense strand starting at position 3200 of SEQ ID NO: 1561249
cuuaccagcugugugaaau

SEQ ID NO: 1657556 - RNA, 19 nt, Artificial Sequence
  Description of Artificial Sequence: Synthetic oligonucleotide
  Antisense strand to SEQ ID NO: 1657555
auuucacacagcugguaag

SEQ ID NO: 1657557 - RNA, 19 nt, Artificial Sequence
  Description of Artificial Sequence: Synthetic oligonucleotide
  Sense strand starting at position 3249 of SEQ ID NO: 1561249
ggguuucuguugccauuaa

SEQ ID NO: 1657558 - RNA, 19 nt, Artificial Sequence
  Description of Artificial Sequence: Synthetic oligonucleotide
  Antisense strand to SEQ ID NO: 1657557
uuaauggcaacagaaaccc

SEQ ID NO: 1657559 - RNA, 19 nt, Artificial Sequence
  Description of Artificial Sequence: Synthetic oligonucleotide
  Sense strand starting at position 3258 of SEQ ID NO: 1561249
uugccauuaagguggcaua

SEQ ID NO: 1657560 - RNA, 19 nt, Artificial Sequence
  Description of Artificial Sequence: Synthetic oligonucleotide
  Antisense strand to SEQ ID NO: 1657559
uaugccaccuuaauggcaa

SEQ ID NO: 1657561 - RNA, 19 nt, Artificial Sequence
  Description of Artificial Sequence: Synthetic oligonucleotide
  Sense strand starting at position 3497 of SEQ ID NO: 1561249
auacucucaugugauauau

SEQ ID NO: 1657562 - RNA, 19 nt, Artificial Sequence
  Description of Artificial Sequence: Synthetic oligonucleotide
  Antisense strand to SEQ ID NO: 1657561
auauaucacaugagaguau

SEQ ID NO: 1657563 - RNA, 19 nt, Artificial Sequence
  Description of Artificial Sequence: Synthetic oligonucleotide
  Sense strand starting at position 3507 of SEQ ID NO: 1561249
gugauauaugguugcugcu

SEQ ID NO: 1657564 - RNA, 19 nt, Artificial Sequence
  Description of Artificial Sequence: Synthetic oligonucleotide
  Antisense strand to SEQ ID NO: 1657563
agcagcaaccauauaucac

SEQ ID NO: 1657565 - RNA, 19 nt, Artificial Sequence
  Description of Artificial Sequence: Synthetic oligonucleotide
  Sense strand starting at position 3509 of SEQ ID NO: 1561249
gauauaugguugcugcuga

SEQ ID NO: 1657566 - RNA, 19 nt, Artificial Sequence
  Description of Artificial Sequence: Synthetic oligonucleotide
  Antisense strand to SEQ ID NO: 1657565
ucagcagcaaccauauauc

SEQ ID NO: 1657567 - RNA, 19 nt, Artificial Sequence
  Description of Artificial Sequence: Synthetic oligonucleotide
  Sense strand starting at position 3671 of SEQ ID NO: 1561249
cuggauguguuccaaagag

SEQ ID NO: 1657568 - RNA, 19 nt, Artificial Sequence
  Description of Artificial Sequence: Synthetic oligonucleotide
  Antisense strand to SEQ ID NO: 1657567
cucuuuggaacacauccag

SEQ ID NO: 1657569 - RNA, 19 nt, Artificial Sequence
  Description of Artificial Sequence: Synthetic oligonucleotide
  Sense strand starting at position 3675 of SEQ ID NO: 1561249
auguguuccaaagagagcu

SEQ ID NO: 1657570 - RNA, 19 nt, Artificial Sequence
  Description of Artificial Sequence: Synthetic oligonucleotide
  Antisense strand to SEQ ID NO: 1657569
agcucucuuuggaacacau

SEQ ID NO: 1657571 - RNA, 19 nt, Artificial Sequence
  Description of Artificial Sequence: Synthetic oligonucleotide
  Sense strand starting at position 3687 of SEQ ID NO: 1561249
gagagcuuugcaugauauu

SEQ ID NO: 1657572 - RNA, 19 nt, Artificial Sequence
  Description of Artificial Sequence: Synthetic oligonucleotide
  Antisense strand to SEQ ID NO: 1657571
aauaucaugcaaagcucuc

SEQ ID NO: 1657573 - RNA, 19 nt, Artificial Sequence
  Description of Artificial Sequence: Synthetic oligonucleotide
  Sense strand starting at position 3688 of SEQ ID NO: 1561249
agagcuuugcaugauauua

SEQ ID NO: 1657574 - RNA, 19 nt, Artificial Sequence
  Description of Artificial Sequence: Synthetic oligonucleotide
  Antisense strand to SEQ ID NO: 1657573
uaauaucaugcaaagcucu

SEQ ID NO: 1657575 - RNA, 19 nt, Artificial Sequence
  Description of Artificial Sequence: Synthetic oligonucleotide
  Sense strand starting at position 3707 of SEQ ID NO: 1561249
aaauuaucuguuggucugu

SEQ ID NO: 1657576 - RNA, 19 nt, Artificial Sequence
  Description of Artificial Sequence: Synthetic oligonucleotide
  Antisense strand to SEQ ID NO: 1657575
acagaccaacagauaauuu

SEQ ID NO: 1657577 - RNA, 19 nt, Artificial Sequence
  Description of Artificial Sequence: Synthetic oligonucleotide
  Sense strand starting at position 3712 of SEQ ID NO: 1561249
aucuguuggucugucagua

SEQ ID NO: 1657578 - RNA, 19 nt, Artificial Sequence
  Description of Artificial Sequence: Synthetic oligonucleotide
  Antisense strand to SEQ ID NO: 1657577
uacugacagaccaacagau

SEQ ID NO: 1657579 - RNA, 19 nt, Artificial Sequence
  Description of Artificial Sequence: Synthetic oligonucleotide
  Sense strand starting at position 3780 of SEQ ID NO: 1561249
uuguuuauauuccuacagu

SEQ ID NO: 1657580 - RNA, 19 nt, Artificial Sequence
  Description of Artificial Sequence: Synthetic oligonucleotide
  Antisense strand to SEQ ID NO: 1657579
acuguaggaauauaaacaa

SEQ ID NO: 1657581 - RNA, 19 nt, Artificial Sequence
  Description of Artificial Sequence: Synthetic oligonucleotide
  Sense strand starting at position 3931 of SEQ ID NO: 1561249
aagagcugugauuauaggu

SEQ ID NO: 1657582 - RNA, 19 nt, Artificial Sequence
  Description of Artificial Sequence: Synthetic oligonucleotide
  Antisense strand to SEQ ID NO: 1657581
accuauaaucacagcucuu

SEQ ID NO: 1657583 - RNA, 19 nt, Artificial Sequence
  Description of Artificial Sequence: Synthetic oligonucleotide
  Sense strand starting at position 117 of SEQ ID NO: 1561250
caggcaucuccacgagcaa

SEQ ID NO: 1657584 - RNA, 19 nt, Artificial Sequence
  Description of Artificial Sequence: Synthetic oligonucleotide
  Antisense strand to SEQ ID NO: 1657583
uugcucguggagaugccug

SEQ ID NO: 1657585 - RNA, 19 nt, Artificial Sequence
  Description of Artificial Sequence: Synthetic oligonucleotide
  Sense strand starting at position 342 of SEQ ID NO: 1561250
ggagaugcuugguccaucu

SEQ ID NO: 1657586 - RNA, 19 nt, Artificial Sequence
  Description of Artificial Sequence: Synthetic oligonucleotide
  Antisense strand to SEQ ID NO: 1657585
agauggaccaagcaucucc

SEQ ID NO: 1657587 - RNA, 19 nt, Artificial Sequence
  Description of Artificial Sequence: Synthetic oligonucleotide
  Sense strand starting at position 403 of SEQ ID NO: 1561250
uggccauggccauaaacau

SEQ ID NO: 1657588 - RNA, 19 nt, Artificial Sequence
  Description of Artificial Sequence: Synthetic oligonucleotide
  Antisense strand to SEQ ID NO: 1657587
auguuuauggccauggcca

SEQ ID NO: 1657589 - RNA, 19 nt, Artificial Sequence
  Description of Artificial Sequence: Synthetic oligonucleotide
  Sense strand starting at position 1236 of SEQ ID NO: 1561250
auugaaagacacuguuguu

SEQ ID NO: 1657590 - RNA, 19 nt, Artificial Sequence
  Description of Artificial Sequence: Synthetic oligonucleotide
  Antisense strand to SEQ ID NO: 1657589
aacaacagugucuuucaau

SEQ ID NO: 1657591 - RNA, 19 nt, Artificial Sequence
  Description of Artificial Sequence: Synthetic oligonucleotide
  Sense strand starting at position 1287 of SEQ ID NO: 1561250
gucacuuuauauccauagu

SEQ ID NO: 1657592 - RNA, 19 nt, Artificial Sequence
  Description of Artificial Sequence: Synthetic oligonucleotide
  Antisense strand to SEQ ID NO: 1657591
acuauggauauaaagugac

SEQ ID NO: 1657593 - RNA, 19 nt, Artificial Sequence
  Description of Artificial Sequence: Synthetic oligonucleotide
  Sense strand starting at position 1303 of SEQ ID NO: 1561250
agugaugcugauggugaua

SEQ ID NO: 1657594 - RNA, 19 nt, Artificial Sequence
  Description of Artificial Sequence: Synthetic oligonucleotide
  Antisense strand to SEQ ID NO: 1657593
uaucaccaucagcaucacu

SEQ ID NO: 1657595 - RNA, 19 nt, Artificial Sequence
  Description of Artificial Sequence: Synthetic oligonucleotide
  Sense strand starting at position 1315 of SEQ ID NO: 1561250
ggugauagccagcauuggu

SEQ ID NO: 1657596 - RNA, 19 nt, Artificial Sequence
  Description of Artificial Sequence: Synthetic oligonucleotide
  Antisense strand to SEQ ID NO: 1657595
accaaugcuggcuaucacc

SEQ ID NO: 1657597 - RNA, 19 nt, Artificial Sequence
  Description of Artificial Sequence: Synthetic oligonucleotide
  Sense strand starting at position 1407 of SEQ ID NO: 1561250
gucuauagaugaggaaaga

SEQ ID NO: 1657598 - RNA, 19 nt, Artificial Sequence
  Description of Artificial Sequence: Synthetic oligonucleotide
  Antisense strand to SEQ ID NO: 1657597
ucuuuccucaucuauagac

SEQ ID NO: 1657599 - RNA, 19 nt, Artificial Sequence
  Description of Artificial Sequence: Synthetic oligonucleotide
  Sense strand starting at position 1437 of SEQ ID NO: 1561250
gggacagucgcuugcuaag

SEQ ID NO: 1657600 - RNA, 19 nt, Artificial Sequence
  Description of Artificial Sequence: Synthetic oligonucleotide
  Antisense strand to SEQ ID NO: 1657599
cuuagcaagcgacuguccc

SEQ ID NO: 1657601 - RNA, 19 nt, Artificial Sequence
  Description of Artificial Sequence: Synthetic oligonucleotide
  Sense strand starting at position 1608 of SEQ ID NO: 1561250
gggcgagucucaccagaau

SEQ ID NO: 1657602 - RNA, 19 nt, Artificial Sequence
  Description of Artificial Sequence: Synthetic oligonucleotide
  Antisense strand to SEQ ID NO: 1657601
auucuggugagacucgccc

SEQ ID NO: 1657603 - RNA, 19 nt, Artificial Sequence
  Description of Artificial Sequence: Synthetic oligonucleotide
  Sense strand starting at position 1611 of SEQ ID NO: 1561250
cgagucucaccagaauaau

SEQ ID NO: 1657604 - RNA, 19 nt, Artificial Sequence
  Description of Artificial Sequence: Synthetic oligonucleotide
  Antisense strand to SEQ ID NO: 1657603
auuauucuggugagacucg

SEQ ID NO: 1657605 - RNA, 19 nt, Artificial Sequence
  Description of Artificial Sequence: Synthetic oligonucleotide
  Sense strand starting at position 1700 of SEQ ID NO: 1561250
gccaucauccugggacaca

SEQ ID NO: 1657606 - RNA, 19 nt, Artificial Sequence
  Description of Artificial Sequence: Synthetic oligonucleotide
  Antisense strand to SEQ ID NO: 1657605
ugugucccaggaugauggc

SEQ ID NO: 1657607 - RNA, 19 nt, Artificial Sequence
  Description of Artificial Sequence: Synthetic oligonucleotide
  Sense strand starting at position 1701 of SEQ ID NO: 1561250
ccaucauccugggacacau

SEQ ID NO: 1657608 - RNA, 19 nt, Artificial Sequence
  Description of Artificial Sequence: Synthetic oligonucleotide
  Antisense strand to SEQ ID NO: 1657607
augugucccaggaugaugg

SEQ ID NO: 1657609 - RNA, 19 nt, Artificial Sequence
  Description of Artificial Sequence: Synthetic oligonucleotide
  Sense strand starting at position 1893 of SEQ ID NO: 1561250
cagucacuggccugaacuu

SEQ ID NO: 1657610 - RNA, 19 nt, Artificial Sequence
  Description of Artificial Sequence: Synthetic oligonucleotide
  Antisense strand to SEQ ID NO: 1657609
aaguucaggccagugacug

SEQ ID NO: 1657611 - RNA, 19 nt, Artificial Sequence
  Description of Artificial Sequence: Synthetic oligonucleotide
  Sense strand starting at position 2014 of SEQ ID NO: 1561250
caccguggcucccuauaua

SEQ ID NO: 1657612 - RNA, 19 nt, Artificial Sequence
  Description of Artificial Sequence: Synthetic oligonucleotide
  Antisense strand to SEQ ID NO: 1657611
uauauagggagccacggug

SEQ ID NO: 1657613 - RNA, 19 nt, Artificial Sequence
  Description of Artificial Sequence: Synthetic oligonucleotide
  Sense strand starting at position 2050 of SEQ ID NO: 1561250
gggcuagucucccaggaag

SEQ ID NO: 1657614 - RNA, 19 nt, Artificial Sequence
  Description of Artificial Sequence: Synthetic oligonucleotide
  Antisense strand to SEQ ID NO: 1657613
cuuccugggagacuagccc

SEQ ID NO: 1657615 - RNA, 19 nt, Artificial Sequence
  Description of Artificial Sequence: Synthetic oligonucleotide
  Sense strand starting at position 2052 of SEQ ID NO: 1561250
gcuagucucccaggaagga

SEQ ID NO: 1657616 - RNA, 19 nt, Artificial Sequence
  Description of Artificial Sequence: Synthetic oligonucleotide
  Antisense strand to SEQ ID NO: 1657615
uccuuccugggagacuagc

SEQ ID NO: 1657617 - RNA, 19 nt, Artificial Sequence
  Description of Artificial Sequence: Synthetic oligonucleotide
  Sense strand starting at position 2200 of SEQ ID NO: 1561250
gaaauaccagauuguguag

SEQ ID NO: 1657618 - RNA, 19 nt, Artificial Sequence
  Description of Artificial Sequence: Synthetic oligonucleotide
  Antisense strand to SEQ ID NO: 1657617
cuacacaaucugguauuuc

SEQ ID NO: 1657619 - RNA, 19 nt, Artificial Sequence
  Description of Artificial Sequence: Synthetic oligonucleotide
  Sense strand starting at position 2312 of SEQ ID NO: 1561250
augggccuuccugggaaua

SEQ ID NO: 1657620 - RNA, 19 nt, Artificial Sequence
  Description of Artificial Sequence: Synthetic oligonucleotide
  Antisense strand to SEQ ID NO: 1657619
uauucccaggaaggcccau

SEQ ID NO: 1657621 - RNA, 19 nt, Artificial Sequence
  Description of Artificial Sequence: Synthetic oligonucleotide
  Sense strand starting at position 2667 of SEQ ID NO: 1561250
gguccugaaucccagaagu

SEQ ID NO: 1657622 - RNA, 19 nt, Artificial Sequence
  Description of Artificial Sequence: Synthetic oligonucleotide
  Antisense strand to SEQ ID NO: 1657621
acuucugggauucaggacc

SEQ ID NO: 1657623 - RNA, 19 nt, Artificial Sequence
  Description of Artificial Sequence: Synthetic oligonucleotide
  Sense strand starting at position 2669 of SEQ ID NO: 1561250
uccugaaucccagaagugu

SEQ ID NO: 1657624 - RNA, 19 nt, Artificial Sequence
  Description of Artificial Sequence: Synthetic oligonucleotide
  Antisense strand to SEQ ID NO: 1657623
acacuucugggauucagga

SEQ ID NO: 1657625 - RNA, 19 nt, Artificial Sequence
  Description of Artificial Sequence: Synthetic oligonucleotide
  Sense strand starting at position 2903 of SEQ ID NO: 1561250
gucugagauaagugcaaag

SEQ ID NO: 1657626 - RNA, 19 nt, Artificial Sequence
  Description of Artificial Sequence: Synthetic oligonucleotide
  Antisense strand to SEQ ID NO: 1657625
cuuugcacuuaucucagac

SEQ ID NO: 1657627 - RNA, 19 nt, Artificial Sequence
  Description of Artificial Sequence: Synthetic oligonucleotide
  Sense strand starting at position 2962 of SEQ ID NO: 1561250
ccgggcuugguugaagaaa

SEQ ID NO: 1657628 - RNA, 19 nt, Artificial Sequence
  Description of Artificial Sequence: Synthetic oligonucleotide
  Antisense strand to SEQ ID NO: 1657627
uuucuucaaccaagcccgg

SEQ ID NO: 1657629 - RNA, 19 nt, Artificial Sequence
  Description of Artificial Sequence: Synthetic oligonucleotide
  Sense strand starting at position 3028 of SEQ ID NO: 1561250
ucaggugcagaaugagaaa

SEQ ID NO: 1657630 - RNA, 19 nt, Artificial Sequence
  Description of Artificial Sequence: Synthetic oligonucleotide
  Antisense strand to SEQ ID NO: 1657629
uuucucauucugcaccuga

SEQ ID NO: 1657631 - RNA, 19 nt, Artificial Sequence
  Description of Artificial Sequence: Synthetic oligonucleotide
  Sense strand starting at position 3086 of SEQ ID NO: 1561250
cgacuuggcuuguggauuu

SEQ ID NO: 1657632 - RNA, 19 nt, Artificial Sequence
  Description of Artificial Sequence: Synthetic oligonucleotide
  Antisense strand to SEQ ID NO: 1657631
aaauccacaagccaagucg

SEQ ID NO: 1657633 - RNA, 19 nt, Artificial Sequence
  Description of Artificial Sequence: Synthetic oligonucleotide
  Sense strand starting at position 3107 of SEQ ID NO: 1561250
ccaucugcgaaauggguau

SEQ ID NO: 1657634 - RNA, 19 nt, Artificial Sequence
  Description of Artificial Sequence: Synthetic oligonucleotide
  Antisense strand to SEQ ID NO: 1657633
auacccauuucgcagaugg

SEQ ID NO: 1657635 - RNA, 19 nt, Artificial Sequence
  Description of Artificial Sequence: Synthetic oligonucleotide
  Sense strand starting at position 3111 of SEQ ID NO: 1561250
cugcgaaauggguaucauc

SEQ ID NO: 1657636 - RNA, 19 nt, Artificial Sequence
  Description of Artificial Sequence: Synthetic oligonucleotide
  Antisense strand to SEQ ID NO: 1657635
gaugauacccauuucgcag

SEQ ID NO: 1657637 - RNA, 19 nt, Artificial Sequence
  Description of Artificial Sequence: Synthetic oligonucleotide
  Sense strand starting at position 3114 of SEQ ID NO: 1561250
cgaaauggguaucaucaga

SEQ ID NO: 1657638 - RNA, 19 nt, Artificial Sequence
  Description of Artificial Sequence: Synthetic oligonucleotide
  Antisense strand to SEQ ID NO: 1657637
ucugaugauacccauuucg

SEQ ID NO: 1657639 - RNA, 19 nt, Artificial Sequence
  Description of Artificial Sequence: Synthetic oligonucleotide
  Sense strand starting at position 3360 of SEQ ID NO: 1561250
cugcgaauuuggcaaauga

SEQ ID NO: 1657640 - RNA, 19 nt, Artificial Sequence
  Description of Artificial Sequence: Synthetic oligonucleotide
  Antisense strand to SEQ ID NO: 1657639
ucauuugccaaauucgcag

SEQ ID NO: 1657641 - RNA, 19 nt, Artificial Sequence
  Description of Artificial Sequence: Synthetic oligonucleotide
  Sense strand starting at position 3398 of SEQ ID NO: 1561250
aaggcacugguuugguaau

SEQ ID NO: 1657642 - RNA, 19 nt, Artificial Sequence
  Description of Artificial Sequence: Synthetic oligonucleotide
  Antisense strand to SEQ ID NO: 1657641
auuaccaaaccagugccuu

SEQ ID NO: 1657643 - RNA, 19 nt, Artificial Sequence
  Description of Artificial Sequence: Synthetic oligonucleotide
  Sense strand starting at position 3400 of SEQ ID NO: 1561250
ggcacugguuugguaauaa

SEQ ID NO: 1657644 - RNA, 19 nt, Artificial Sequence
  Description of Artificial Sequence: Synthetic oligonucleotide
  Antisense strand to SEQ ID NO: 1657643
uuauuaccaaaccagugcc

SEQ ID NO: 1657645 - RNA, 19 nt, Artificial Sequence
  Description of Artificial Sequence: Synthetic oligonucleotide
  Sense strand starting at position 3404 of SEQ ID NO: 1561250
cugguuugguaauaagaua

SEQ ID NO: 1657646 - RNA, 19 nt, Artificial Sequence
  Description of Artificial Sequence: Synthetic oligonucleotide
  Antisense strand to SEQ ID NO: 1657645
uaucuuauuaccaaaccag

SEQ ID NO: 1657647 - RNA, 19 nt, Artificial Sequence
  Description of Artificial Sequence: Synthetic oligonucleotide
  Sense strand starting at position 3416 of SEQ ID NO: 1561250
uaagauacaugagauguuu

SEQ ID NO: 1657648 - RNA, 19 nt, Artificial Sequence
  Description of Artificial Sequence: Synthetic oligonucleotide
  Antisense strand to SEQ ID NO: 1657647
aaacaucucauguaucuua

SEQ ID NO: 1657649 - RNA, 19 nt, Artificial Sequence
  Description of Artificial Sequence: Synthetic oligonucleotide
  Sense strand starting at position 3672 of SEQ ID NO: 1561250
gagcuaaucgcuugaaccu

SEQ ID NO: 1657650 - RNA, 19 nt, Artificial Sequence
  Description of Artificial Sequence: Synthetic oligonucleotide
  Antisense strand to SEQ ID NO: 1657649
agguucaagcgauuagcuc

SEQ ID NO: 1657651 - RNA, 19 nt, Artificial Sequence
  Description of Artificial Sequence: Synthetic oligonucleotide
  Sense strand starting at position 3808 of SEQ ID NO: 1561250
gcagcugaaucuuaguaag

SEQ ID NO: 1657652 - RNA, 19 nt, Artificial Sequence
  Description of Artificial Sequence: Synthetic oligonucleotide
  Antisense strand to SEQ ID NO: 1657651
cuuacuaagauucagcugc

SEQ ID NO: 1657653 - RNA, 19 nt, Artificial Sequence
  Description of Artificial Sequence: Synthetic oligonucleotide
  Sense strand starting at position 3810 of SEQ ID NO: 1561250
agcugaaucuuaguaagag

SEQ ID NO: 1657654 - RNA, 19 nt, Artificial Sequence
  Description of Artificial Sequence: Synthetic oligonucleotide
  Antisense strand to SEQ ID NO: 1657653
cucuuacuaagauucagcu

SEQ ID NO: 1657655 - RNA, 19 nt, Artificial Sequence
  Description of Artificial Sequence: Synthetic oligonucleotide
  Sense strand starting at position 3811 of SEQ ID NO: 1561250
gcugaaucuuaguaagagc

SEQ ID NO: 1657656 - RNA, 19 nt, Artificial Sequence
  Description of Artificial Sequence: Synthetic oligonucleotide
  Antisense strand to SEQ ID NO: 1657655
gcucuuacuaagauucagc

SEQ ID NO: 1657657 - RNA, 19 nt, Artificial Sequence
  Description of Artificial Sequence: Synthetic oligonucleotide
  Sense strand starting at position 3814 of SEQ ID NO: 1561250
gaaucuuaguaagagcagu

SEQ ID NO: 1657658 - RNA, 19 nt, Artificial Sequence
  Description of Artificial Sequence: Synthetic oligonucleotide
  Antisense strand to SEQ ID NO: 1657657
acugcucuuacuaagauuc

SEQ ID NO: 1657659 - RNA, 19 nt, Artificial Sequence
  Description of Artificial Sequence: Synthetic oligonucleotide
  Sense strand starting at position 3820 of SEQ ID NO: 1561250
uaguaagagcagugaacuu

SEQ ID NO: 1657660 - RNA, 19 nt, Artificial Sequence
  Description of Artificial Sequence: Synthetic oligonucleotide
  Antisense strand to SEQ ID NO: 1657659
aaguucacugcucuuacua

SEQ ID NO: 1657661 - RNA, 19 nt, Artificial Sequence
  Description of Artificial Sequence: Synthetic oligonucleotide
  Sense strand starting at position 3827 of SEQ ID NO: 1561250
agcagugaacuuuaugacu

SEQ ID NO: 1657662 - RNA, 19 nt, Artificial Sequence
  Description of Artificial Sequence: Synthetic oligonucleotide
  Antisense strand to SEQ ID NO: 1657661
agucauaaaguucacugcu

SEQ ID NO: 1657663 - RNA, 19 nt, Artificial Sequence
  Description of Artificial Sequence: Synthetic oligonucleotide
  Sense strand starting at position 150 of SEQ ID NO: 1561251
auaaaugcuugcuguugga

SEQ ID NO: 1657664 - RNA, 19 nt, Artificial Sequence
  Description of Artificial Sequence: Synthetic oligonucleotide
  Antisense strand to SEQ ID NO: 1657663
uccaacagcaagcauuuau

SEQ ID NO: 1657665 - RNA, 19 nt, Artificial Sequence
  Description of Artificial Sequence: Synthetic oligonucleotide
  Sense strand starting at position 153 of SEQ ID NO: 1561251
aaugcuugcuguuggauga

SEQ ID NO: 1657666 - RNA, 19 nt, Artificial Sequence
  Description of Artificial Sequence: Synthetic oligonucleotide
  Antisense strand to SEQ ID NO: 1657665
ucauccaacagcaagcauu

SEQ ID NO: 1657667 - RNA, 19 nt, Artificial Sequence
  Description of Artificial Sequence: Synthetic oligonucleotide
  Sense strand starting at position 304 of SEQ ID NO: 1561251
cugaguuacccacgcugua

SEQ ID NO: 1657668 - RNA, 19 nt, Artificial Sequence
  Description of Artificial Sequence: Synthetic oligonucleotide
  Antisense strand to SEQ ID NO: 1657667
uacagcguggguaacucag

SEQ ID NO: 1657669 - RNA, 19 nt, Artificial Sequence
  Description of Artificial Sequence: Synthetic oligonucleotide
  Sense strand starting at position 415 of SEQ ID NO: 1561251
gaggaaguauguucuggcu

SEQ ID NO: 1657670 - RNA, 19 nt, Artificial Sequence
  Description of Artificial Sequence: Synthetic oligonucleotide
  Antisense strand to SEQ ID NO: 1657669
agccagaacauacuuccuc

SEQ ID NO: 1657671 - RNA, 19 nt, Artificial Sequence
  Description of Artificial Sequence: Synthetic oligonucleotide
  Sense strand starting at position 417 of SEQ ID NO: 1561251
ggaaguauguucuggcuuc

SEQ ID NO: 1657672 - RNA, 19 nt, Artificial Sequence
  Description of Artificial Sequence: Synthetic oligonucleotide
  Antisense strand to SEQ ID NO: 1657671
gaagccagaacauacuucc

SEQ ID NO: 1657673 - RNA, 19 nt, Artificial Sequence
  Description of Artificial Sequence: Synthetic oligonucleotide
  Sense strand starting at position 436 of SEQ ID NO: 1561251
cggagacacugccaaucau

SEQ ID NO: 1657674 - RNA, 19 nt, Artificial Sequence
  Description of Artificial Sequence: Synthetic oligonucleotide
  Antisense strand to SEQ ID NO: 1657673
augauuggcagugucuccg

SEQ ID NO: 1657675 - RNA, 19 nt, Artificial Sequence
  Description of Artificial Sequence: Synthetic oligonucleotide
  Sense strand starting at position 2223 of SEQ ID NO: 1561251
cgccuaguaugugccagaa

SEQ ID NO: 1657676 - RNA, 19 nt, Artificial Sequence
  Description of Artificial Sequence: Synthetic oligonucleotide
  Antisense strand to SEQ ID NO: 1657675
uucuggcacauacuaggcg

SEQ ID NO: 1657677 - RNA, 19 nt, Artificial Sequence
  Description of Artificial Sequence: Synthetic oligonucleotide
  Sense strand starting at position 2227 of SEQ ID NO: 1561251
uaguaugugccagaacguu

SEQ ID NO: 1657678 - RNA, 19 nt, Artificial Sequence
  Description of Artificial Sequence: Synthetic oligonucleotide
  Antisense strand to SEQ ID NO: 1657677
aacguucuggcacauacua

SEQ ID NO: 1657679 - RNA, 19 nt, Artificial Sequence
  Description of Artificial Sequence: Synthetic oligonucleotide
  Sense strand starting at position 2354 of SEQ ID NO: 1561251
ccugauucgcuguaggacu

SEQ ID NO: 1657680 - RNA, 19 nt, Artificial Sequence
  Description of Artificial Sequence: Synthetic oligonucleotide
  Antisense strand to SEQ ID NO: 1657679
aguccuacagcgaaucagg

SEQ ID NO: 1657681 - RNA, 19 nt, Artificial Sequence
  Description of Artificial Sequence: Synthetic oligonucleotide
  Sense strand starting at position 2368 of SEQ ID NO: 1561251
ggacuuuggucgagcggca

SEQ ID NO: 1657682 - RNA, 19 nt, Artificial Sequence
  Description of Artificial Sequence: Synthetic oligonucleotide
  Antisense strand to SEQ ID NO: 1657681
ugccgcucgaccaaagucc

SEQ ID NO: 1657683 - RNA, 19 nt, Artificial Sequence
  Description of Artificial Sequence: Synthetic oligonucleotide
  Sense strand starting at position 2432 of SEQ ID NO: 1561251
cggaaaucucuuugcagga

SEQ ID NO: 1657684 - RNA, 19 nt, Artificial Sequence
  Description of Artificial Sequence: Synthetic oligonucleotide
  Antisense strand to SEQ ID NO: 1657683
uccugcaaagagauuuccg

SEQ ID NO: 1657685 - RNA, 19 nt, Artificial Sequence
  Description of Artificial Sequence: Synthetic oligonucleotide
  Sense strand starting at position 2433 of SEQ ID NO: 1561251
ggaaaucucuuugcaggau

SEQ ID NO: 1657686 - RNA, 19 nt, Artificial Sequence
  Description of Artificial Sequence: Synthetic oligonucleotide
  Antisense strand to SEQ ID NO: 1657685
auccugcaaagagauuucc

SEQ ID NO: 1657687 - RNA, 19 nt, Artificial Sequence
  Description of Artificial Sequence: Synthetic oligonucleotide
  Sense strand starting at position 2474 of SEQ ID NO: 1561251
uccucauuccggcagcaga

SEQ ID NO: 1657688 - RNA, 19 nt, Artificial Sequence
  Description of Artificial Sequence: Synthetic oligonucleotide
  Antisense strand to SEQ ID NO: 1657687
ucugcugccggaaugagga

SEQ ID NO: 1657689 - RNA, 19 nt, Artificial Sequence
  Description of Artificial Sequence: Synthetic oligonucleotide
  Sense strand starting at position 2513 of SEQ ID NO: 1561251
cggugaacgucucuggaug

SEQ ID NO: 1657690 - RNA, 19 nt, Artificial Sequence
  Description of Artificial Sequence: Synthetic oligonucleotide
  Antisense strand to SEQ ID NO: 1657689
cauccagagacguucaccg

SEQ ID NO: 1657691 - RNA, 19 nt, Artificial Sequence
  Description of Artificial Sequence: Synthetic oligonucleotide
  Sense strand starting at position 2524 of SEQ ID NO: 1561251
ucuggaugcucuuagcuga

SEQ ID NO: 1657692 - RNA, 19 nt, Artificial Sequence
  Description of Artificial Sequence: Synthetic oligonucleotide
  Antisense strand to SEQ ID NO: 1657691
ucagcuaagagcauccaga

SEQ ID NO: 1657693 - RNA, 19 nt, Artificial Sequence
  Description of Artificial Sequence: Synthetic oligonucleotide
  Sense strand starting at position 2527 of SEQ ID NO: 1561251
ggaugcucuuagcugauga

SEQ ID NO: 1657694 - RNA, 19 nt, Artificial Sequence
  Description of Artificial Sequence: Synthetic oligonucleotide
  Antisense strand to SEQ ID NO: 1657693
ucaucagcuaagagcaucc

SEQ ID NO: 1657695 - RNA, 19 nt, Artificial Sequence
  Description of Artificial Sequence: Synthetic oligonucleotide
  Sense strand starting at position 2529 of SEQ ID NO: 1561251
augcucuuagcugaugaca

SEQ ID NO: 1657696 - RNA, 19 nt, Artificial Sequence
  Description of Artificial Sequence: Synthetic oligonucleotide
  Antisense strand to SEQ ID NO: 1657695
ugucaucagcuaagagcau

SEQ ID NO: 1657697 - RNA, 19 nt, Artificial Sequence
  Description of Artificial Sequence: Synthetic oligonucleotide
  Sense strand starting at position 2901 of SEQ ID NO: 1561251
acuugcaggccucgugaua

SEQ ID NO: 1657698 - RNA, 19 nt, Artificial Sequence
  Description of Artificial Sequence: Synthetic oligonucleotide
  Antisense strand to SEQ ID NO: 1657697
uaucacgaggccugcaagu

SEQ ID NO: 1657699 - RNA, 19 nt, Artificial Sequence
  Description of Artificial Sequence: Synthetic oligonucleotide
  Sense strand starting at position 2906 of SEQ ID NO: 1561251
caggccucgugauaaggaa

SEQ ID NO: 1657700 - RNA, 19 nt, Artificial Sequence
  Description of Artificial Sequence: Synthetic oligonucleotide
  Antisense strand to SEQ ID NO: 1657699
uuccuuaucacgaggccug

SEQ ID NO: 1657701 - RNA, 19 nt, Artificial Sequence
  Description of Artificial Sequence: Synthetic oligonucleotide
  Sense strand starting at position 3030 of SEQ ID NO: 1561251
cccuaucccugguuaagga

SEQ ID NO: 1657702 - RNA, 19 nt, Artificial Sequence
  Description of Artificial Sequence: Synthetic oligonucleotide
  Antisense strand to SEQ ID NO: 1657701
uccuuaaccagggauaggg

SEQ ID NO: 1657703 - RNA, 19 nt, Artificial Sequence
  Description of Artificial Sequence: Synthetic oligonucleotide
  Sense strand starting at position 3390 of SEQ ID NO: 1561251
cugggcauuguuuguagaa

SEQ ID NO: 1657704 - RNA, 19 nt, Artificial Sequence
  Description of Artificial Sequence: Synthetic oligonucleotide
  Antisense strand to SEQ ID NO: 1657703
uucuacaaacaaugcccag

SEQ ID NO: 1657705 - RNA, 19 nt, Artificial Sequence
  Description of Artificial Sequence: Synthetic oligonucleotide
  Sense strand starting at position 3391 of SEQ ID NO: 1561251
ugggcauuguuuguagaac

SEQ ID NO: 1657706 - RNA, 19 nt, Artificial Sequence
  Description of Artificial Sequence: Synthetic oligonucleotide
  Antisense strand to SEQ ID NO: 1657705
guucuacaaacaaugccca

SEQ ID NO: 1657707 - RNA, 19 nt, Artificial Sequence
  Description of Artificial Sequence: Synthetic oligonucleotide
  Sense strand starting at position 3392 of SEQ ID NO: 1561251
gggcauuguuuguagaacu

SEQ ID NO: 1657708 - RNA, 19 nt, Artificial Sequence
  Description of Artificial Sequence: Synthetic oligonucleotide
  Antisense strand to SEQ ID NO: 1657707
aguucuacaaacaaugccc

SEQ ID NO: 1657709 - RNA, 19 nt, Artificial Sequence
  Description of Artificial Sequence: Synthetic oligonucleotide
  Sense strand starting at position 3462 of SEQ ID NO: 1561251
gacucuucccauuggugga

SEQ ID NO: 1657710 - RNA, 19 nt, Artificial Sequence
  Description of Artificial Sequence: Synthetic oligonucleotide
  Antisense strand to SEQ ID NO: 1657709
uccaccaaugggaagaguc

SEQ ID NO: 1657711 - RNA, 19 nt, Artificial Sequence
  Description of Artificial Sequence: Synthetic oligonucleotide
  Sense strand starting at position 3467 of SEQ ID NO: 1561251
uucccauugguggaaacuu

SEQ ID NO: 1657712 - RNA, 19 nt, Artificial Sequence
  Description of Artificial Sequence: Synthetic oligonucleotide
  Antisense strand to SEQ ID NO: 1657711
aaguuuccaccaaugggaa

SEQ ID NO: 1657713 - RNA, 19 nt, Artificial Sequence
  Description of Artificial Sequence: Synthetic oligonucleotide
  Sense strand starting at position 3550 of SEQ ID NO: 1561251
gcuggaaugucagcccaga

SEQ ID NO: 1657714 - RNA, 19 nt, Artificial Sequence
  Description of Artificial Sequence: Synthetic oligonucleotide
  Antisense strand to SEQ ID NO: 1657713
ucugggcugacauuccagc

SEQ ID NO: 1657715 - RNA, 19 nt, Artificial Sequence
  Description of Artificial Sequence: Synthetic oligonucleotide
  Sense strand starting at position 450 of SEQ ID NO: 1561252
ccugauccuuaacugagau

SEQ ID NO: 1657716 - RNA, 19 nt, Artificial Sequence
  Description of Artificial Sequence: Synthetic oligonucleotide
  Antisense strand to SEQ ID NO: 1657715
aucucaguuaaggaucagg

SEQ ID NO: 1657717 - RNA, 19 nt, Artificial Sequence
  Description of Artificial Sequence: Synthetic oligonucleotide
  Sense strand starting at position 454 of SEQ ID NO: 1561252
auccuuaacugagauugaa

SEQ ID NO: 1657718 - RNA, 19 nt, Artificial Sequence
  Description of Artificial Sequence: Synthetic oligonucleotide
  Antisense strand to SEQ ID NO: 1657717
uucaaucucaguuaaggau

SEQ ID NO: 1657719 - RNA, 19 nt, Artificial Sequence
  Description of Artificial Sequence: Synthetic oligonucleotide
  Sense strand starting at position 580 of SEQ ID NO: 1561252
gcaauuugguuagcgugua

SEQ ID NO: 1657720 - RNA, 19 nt, Artificial Sequence
  Description of Artificial Sequence: Synthetic oligonucleotide
  Antisense strand to SEQ ID NO: 1657719
uacacgcuaaccaaauugc

SEQ ID NO: 1657721 - RNA, 19 nt, Artificial Sequence
  Description of Artificial Sequence: Synthetic oligonucleotide
  Sense strand starting at position 660 of SEQ ID NO: 1561252
ccugguaaagacugugaca

SEQ ID NO: 1657722 - RNA, 19 nt, Artificial Sequence
  Description of Artificial Sequence: Synthetic oligonucleotide
  Antisense strand to SEQ ID NO: 1657721
ugucacagucuuuaccagg

SEQ ID NO: 1657723 - RNA, 19 nt, Artificial Sequence
  Description of Artificial Sequence: Synthetic oligonucleotide
  Sense strand starting at position 662 of SEQ ID NO: 1561252
ugguaaagacugugacaaa

SEQ ID NO: 1657724 - RNA, 19 nt, Artificial Sequence
  Description of Artificial Sequence: Synthetic oligonucleotide
  Antisense strand to SEQ ID NO: 1657723
uuugucacagucuuuacca

SEQ ID NO: 1657725 - RNA, 19 nt, Artificial Sequence
  Description of Artificial Sequence: Synthetic oligonucleotide
  Sense strand starting at position 788 of SEQ ID NO: 1561252
aagagaugccauuagucuu

SEQ ID NO: 1657726 - RNA, 19 nt, Artificial Sequence
  Description of Artificial Sequence: Synthetic oligonucleotide
  Antisense strand to SEQ ID NO: 1657725
aagacuaauggcaucucuu

SEQ ID NO: 1657727 - RNA, 19 nt, Artificial Sequence
  Description of Artificial Sequence: Synthetic oligonucleotide
  Sense strand starting at position 796 of SEQ ID NO: 1561252
ccauuagucuucccaguuu

SEQ ID NO: 1657728 - RNA, 19 nt, Artificial Sequence
  Description of Artificial Sequence: Synthetic oligonucleotide
  Antisense strand to SEQ ID NO: 1657727
aaacugggaagacuaaugg

SEQ ID NO: 1657729 - RNA, 19 nt, Artificial Sequence
  Description of Artificial Sequence: Synthetic oligonucleotide
  Sense strand starting at position 1024 of SEQ ID NO: 1561252
ccuggugcgagucauucua

SEQ ID NO: 1657730 - RNA, 19 nt, Artificial Sequence
  Description of Artificial Sequence: Synthetic oligonucleotide
  Antisense strand to SEQ ID NO: 1657729
uagaaugacucgcaccagg

SEQ ID NO: 1657731 - RNA, 19 nt, Artificial Sequence
  Description of Artificial Sequence: Synthetic oligonucleotide
  Sense strand starting at position 1068 of SEQ ID NO: 1561252
auguaaaugucgucaaucu

SEQ ID NO: 1657732 - RNA, 19 nt, Artificial Sequence
  Description of Artificial Sequence: Synthetic oligonucleotide
  Antisense strand to SEQ ID NO: 1657731
agauugacgacauuuacau

SEQ ID NO: 1657733 - RNA, 19 nt, Artificial Sequence
  Description of Artificial Sequence: Synthetic oligonucleotide
  Sense strand starting at position 1069 of SEQ ID NO: 1561252
uguaaaugucgucaaucuc

SEQ ID NO: 1657734 - RNA, 19 nt, Artificial Sequence
  Description of Artificial Sequence: Synthetic oligonucleotide
  Antisense strand to SEQ ID NO: 1657733
gagauugacgacauuuaca

SEQ ID NO: 1657735 - RNA, 19 nt, Artificial Sequence
  Description of Artificial Sequence: Synthetic oligonucleotide
  Sense strand starting at position 1093 of SEQ ID NO: 1561252
guccuugacgacugauuau

SEQ ID NO: 1657736 - RNA, 19 nt, Artificial Sequence
  Description of Artificial Sequence: Synthetic oligonucleotide
  Antisense strand to SEQ ID NO: 1657735
auaaucagucgucaaggac

SEQ ID NO: 1657737 - RNA, 19 nt, Artificial Sequence
  Description of Artificial Sequence: Synthetic oligonucleotide
  Sense strand starting at position 1100 of SEQ ID NO: 1561252
acgacugauuauguuguga

SEQ ID NO: 1657738 - RNA, 19 nt, Artificial Sequence
  Description of Artificial Sequence: Synthetic oligonucleotide
  Antisense strand to SEQ ID NO: 1657737
ucacaacauaaucagucgu

SEQ ID NO: 1657739 - RNA, 19 nt, Artificial Sequence
  Description of Artificial Sequence: Synthetic oligonucleotide
  Sense strand starting at position 1127 of SEQ ID NO: 1561252
uguaacugaccuuguguau

SEQ ID NO: 1657740 - RNA, 19 nt, Artificial Sequence
  Description of Artificial Sequence: Synthetic oligonucleotide
  Antisense strand to SEQ ID NO: 1657739
auacacaaggucaguuaca

SEQ ID NO: 1657741 - RNA, 19 nt, Artificial Sequence
  Description of Artificial Sequence: Synthetic oligonucleotide
  Sense strand starting at position 1191 of SEQ ID NO: 1561252
acaugaagggaucgguagu

SEQ ID NO: 1657742 - RNA, 19 nt, Artificial Sequence
  Description of Artificial Sequence: Synthetic oligonucleotide
  Antisense strand to SEQ ID NO: 1657741
acuaccgaucccuucaugu

SEQ ID NO: 1657743 - RNA, 19 nt, Artificial Sequence
  Description of Artificial Sequence: Synthetic oligonucleotide
  Sense strand starting at position 1201 of SEQ ID NO: 1561252
aucgguaguggugagaaga

SEQ ID NO: 1657744 - RNA, 19 nt, Artificial Sequence
  Description of Artificial Sequence: Synthetic oligonucleotide
  Antisense strand to SEQ ID NO: 1657743
ucuucucaccacuaccgau

SEQ ID NO: 1657745 - RNA, 19 nt, Artificial Sequence
  Description of Artificial Sequence: Synthetic oligonucleotide
  Sense strand starting at position 1226 of SEQ ID NO: 1561252
ucccaaauauuaguaaguu

SEQ ID NO: 1657746 - RNA, 19 nt, Artificial Sequence
  Description of Artificial Sequence: Synthetic oligonucleotide
  Antisense strand to SEQ ID NO: 1657745
aacuuacuaauauuuggga

SEQ ID NO: 1657747 - RNA, 19 nt, Artificial Sequence
  Description of Artificial Sequence: Synthetic oligonucleotide
  Sense strand starting at position 1248 of SEQ ID NO: 1561252
auuucuuaagcauguaagu

SEQ ID NO: 1657748 - RNA, 19 nt, Artificial Sequence
  Description of Artificial Sequence: Synthetic oligonucleotide
  Antisense strand to SEQ ID NO: 1657747
acuuacaugcuuaagaaau

SEQ ID NO: 1657749 - RNA, 19 nt, Artificial Sequence
  Description of Artificial Sequence: Synthetic oligonucleotide
  Sense strand starting at position 1276 of SEQ ID NO: 1561252
gugcuaacggcuuuacgua

SEQ ID NO: 1657750 - RNA, 19 nt, Artificial Sequence
  Description of Artificial Sequence: Synthetic oligonucleotide
  Antisense strand to SEQ ID NO: 1657749
uacguaaagccguuagcac

SEQ ID NO: 1657751 - RNA, 19 nt, Artificial Sequence
  Description of Artificial Sequence: Synthetic oligonucleotide
  Sense strand starting at position 2255 of SEQ ID NO: 1561252
uuuaacuuaggaugguaau

SEQ ID NO: 1657752 - RNA, 19 nt, Artificial Sequence
  Description of Artificial Sequence: Synthetic oligonucleotide
  Antisense strand to SEQ ID NO: 1657751
auuaccauccuaaguuaaa

SEQ ID NO: 1657753 - RNA, 19 nt, Artificial Sequence
  Description of Artificial Sequence: Synthetic oligonucleotide
  Sense strand starting at position 2256 of SEQ ID NO: 1561252
uuaacuuaggaugguaaua

SEQ ID NO: 1657754 - RNA, 19 nt, Artificial Sequence
  Description of Artificial Sequence: Synthetic oligonucleotide
  Antisense strand to SEQ ID NO: 1657753
uauuaccauccuaaguuaa

SEQ ID NO: 1657755 - RNA, 19 nt, Artificial Sequence
  Description of Artificial Sequence: Synthetic oligonucleotide
  Sense strand starting at position 2258 of SEQ ID NO: 1561252
aacuuaggaugguaauaua

SEQ ID NO: 1657756 - RNA, 19 nt, Artificial Sequence
  Description of Artificial Sequence: Synthetic oligonucleotide
  Antisense strand to SEQ ID NO: 1657755
uauauuaccauccuaaguu

SEQ ID NO: 1657757 - RNA, 19 nt, Artificial Sequence
  Description of Artificial Sequence: Synthetic oligonucleotide
  Sense strand starting at position 2383 of SEQ ID NO: 1561252
ugugcaaagcucgauaaug

SEQ ID NO: 1657758 - RNA, 19 nt, Artificial Sequence
  Description of Artificial Sequence: Synthetic oligonucleotide
  Antisense strand to SEQ ID NO: 1657757
cauuaucgagcuuugcaca

SEQ ID NO: 1657759 - RNA, 19 nt, Artificial Sequence
  Description of Artificial Sequence: Synthetic oligonucleotide
  Sense strand starting at position 2385 of SEQ ID NO: 1561252
ugcaaagcucgauaaugcu

SEQ ID NO: 1657760 - RNA, 19 nt, Artificial Sequence
  Description of Artificial Sequence: Synthetic oligonucleotide
  Antisense strand to SEQ ID NO: 1657759
agcauuaucgagcuuugca

SEQ ID NO: 1657761 - RNA, 19 nt, Artificial Sequence
  Description of Artificial Sequence: Synthetic oligonucleotide
  Sense strand starting at position 2451 of SEQ ID NO: 1561252
uuauuauaccuacguucuu

SEQ ID NO: 1657762 - RNA, 19 nt, Artificial Sequence
  Description of Artificial Sequence: Synthetic oligonucleotide
  Antisense strand to SEQ ID NO: 1657761
aagaacguagguauaauaa

SEQ ID NO: 1657763 - RNA, 19 nt, Artificial Sequence
  Description of Artificial Sequence: Synthetic oligonucleotide
  Sense strand starting at position 2477 of SEQ ID NO: 1561252
uuaucaaggucucuaugaa

SEQ ID NO: 1657764 - RNA, 19 nt, Artificial Sequence
  Description of Artificial Sequence: Synthetic oligonucleotide
  Antisense strand to SEQ ID NO: 1657763
uucauagagaccuugauaa

SEQ ID NO: 1657765 - RNA, 19 nt, Artificial Sequence
  Description of Artificial Sequence: Synthetic oligonucleotide
  Sense strand starting at position 2579 of SEQ ID NO: 1561252
agaugugaagcaggguaau

SEQ ID NO: 1657766 - RNA, 19 nt, Artificial Sequence
  Description of Artificial Sequence: Synthetic oligonucleotide
  Antisense strand to SEQ ID NO: 1657765
auuacccugcuucacaucu

SEQ ID NO: 1657767 - RNA, 19 nt, Artificial Sequence
  Description of Artificial Sequence: Synthetic oligonucleotide
  Sense strand starting at position 2590 of SEQ ID NO: 1561252
aggguaaucugucuccuga

SEQ ID NO: 1657768 - RNA, 19 nt, Artificial Sequence
  Description of Artificial Sequence: Synthetic oligonucleotide
  Antisense strand to SEQ ID NO: 1657767
ucaggagacagauuacccu

SEQ ID NO: 1657769 - RNA, 19 nt, Artificial Sequence
  Description of Artificial Sequence: Synthetic oligonucleotide
  Sense strand starting at position 2592 of SEQ ID NO: 1561252
gguaaucugucuccugagu

SEQ ID NO: 1657770 - RNA, 19 nt, Artificial Sequence
  Description of Artificial Sequence: Synthetic oligonucleotide
  Antisense strand to SEQ ID NO: 1657769
acucaggagacagauuacc

SEQ ID NO: 1657771 - RNA, 19 nt, Artificial Sequence
  Description of Artificial Sequence: Synthetic oligonucleotide
  Sense strand starting at position 2756 of SEQ ID NO: 1561252
gagaaagucucaguuuggu

SEQ ID NO: 1657772 - RNA, 19 nt, Artificial Sequence
  Description of Artificial Sequence: Synthetic oligonucleotide
  Antisense strand to SEQ ID NO: 1657771
accaaacugagacuuucuc

SEQ ID NO: 1657773 - RNA, 19 nt, Artificial Sequence
  Description of Artificial Sequence: Synthetic oligonucleotide
  Sense strand starting at position 2920 of SEQ ID NO: 1561252
gccucaguuugauccuaau

SEQ ID NO: 1657774 - RNA, 19 nt, Artificial Sequence
  Description of Artificial Sequence: Synthetic oligonucleotide
  Antisense strand to SEQ ID NO: 1657773
auuaggaucaaacugaggc

SEQ ID NO: 1657775 - RNA, 19 nt, Artificial Sequence
  Description of Artificial Sequence: Synthetic oligonucleotide
  Sense strand starting at position 3001 of SEQ ID NO: 1561252
gcucuuagcagagaacuga

SEQ ID NO: 1657776 - RNA, 19 nt, Artificial Sequence
  Description of Artificial Sequence: Synthetic oligonucleotide
  Antisense strand to SEQ ID NO: 1657775
ucaguucucugcuaagagc

SEQ ID NO: 1657777 - RNA, 19 nt, Artificial Sequence
  Description of Artificial Sequence: Synthetic oligonucleotide
  Sense strand starting at position 3188 of SEQ ID NO: 1561252
ggcucugugaucugggcaa

SEQ ID NO: 1657778 - RNA, 19 nt, Artificial Sequence
  Description of Artificial Sequence: Synthetic oligonucleotide
  Antisense strand to SEQ ID NO: 1657777
uugcccagaucacagagcc

SEQ ID NO: 1657779 - RNA, 19 nt, Artificial Sequence
  Description of Artificial Sequence: Synthetic oligonucleotide
  Sense strand starting at position 3192 of SEQ ID NO: 1561252
cugugaucugggcaaguuc

SEQ ID NO: 1657780 - RNA, 19 nt, Artificial Sequence
  Description of Artificial Sequence: Synthetic oligonucleotide
  Antisense strand to SEQ ID NO: 1657779
gaacuugcccagaucacag

SEQ ID NO: 1657781 - RNA, 19 nt, Artificial Sequence
  Description of Artificial Sequence: Synthetic oligonucleotide
  Sense strand starting at position 3280 of SEQ ID NO: 1561252
aaguuacugggaggaguaa

SEQ ID NO: 1657782 - RNA, 19 nt, Artificial Sequence
  Description of Artificial Sequence: Synthetic oligonucleotide
  Antisense strand to SEQ ID NO: 1657781
uuacuccucccaguaacuu

SEQ ID NO: 1657783 - RNA, 19 nt, Artificial Sequence
  Description of Artificial Sequence: Synthetic oligonucleotide
  Sense strand starting at position 3359 of SEQ ID NO: 1561252
ggauuugcuagugguguuu

SEQ ID NO: 1657784 - RNA, 19 nt, Artificial Sequence
  Description of Artificial Sequence: Synthetic oligonucleotide
  Antisense strand to SEQ ID NO: 1657783
aaacaccacuagcaaaucc

SEQ ID NO: 1657785 - RNA, 19 nt, Artificial Sequence
  Description of Artificial Sequence: Synthetic oligonucleotide
  Sense strand starting at position 3419 of SEQ ID NO: 1561252
ccuugcugacucguuguua

SEQ ID NO: 1657786 - RNA, 19 nt, Artificial Sequence
  Description of Artificial Sequence: Synthetic oligonucleotide
  Antisense strand to SEQ ID NO: 1657785
uaacaacgagucagcaagg

SEQ ID NO: 1657787 - RNA, 19 nt, Artificial Sequence
  Description of Artificial Sequence: Synthetic oligonucleotide
  Sense strand starting at position 3422 of SEQ ID NO: 1561252
ugcugacucguuguuauuc

SEQ ID NO: 1657788 - RNA, 19 nt, Artificial Sequence
  Description of Artificial Sequence: Synthetic oligonucleotide
  Antisense strand to SEQ ID NO: 1657787
gaauaacaacgagucagca

SEQ ID NO: 1657789 - RNA, 19 nt, Artificial Sequence
  Description of Artificial Sequence: Synthetic oligonucleotide
  Sense strand starting at position 3431 of SEQ ID NO: 1561252
guuguuauuccucaugcca

SEQ ID NO: 1657790 - RNA, 19 nt, Artificial Sequence
  Description of Artificial Sequence: Synthetic oligonucleotide
  Antisense strand to SEQ ID NO: 1657789
uggcaugaggaauaacaac

SEQ ID NO: 1657791 - RNA, 19 nt, Artificial Sequence
  Description of Artificial Sequence: Synthetic oligonucleotide
  Sense strand starting at position 3797 of SEQ ID NO: 1561252
ugaacagaauaggaauuau

SEQ ID NO: 1657792 - RNA, 19 nt, Artificial Sequence
  Description of Artificial Sequence: Synthetic oligonucleotide
  Antisense strand to SEQ ID NO: 1657791
auaauuccuauucuguuca

SEQ ID NO: 1657793 - RNA, 19 nt, Artificial Sequence
  Description of Artificial Sequence: Synthetic oligonucleotide
  Sense strand starting at position 3876 of SEQ ID NO: 1561252
uuauuuaaucucugugugu

SEQ ID NO: 1657794 - RNA, 19 nt, Artificial Sequence
  Description of Artificial Sequence: Synthetic oligonucleotide
  Antisense strand to SEQ ID NO: 1657793
acacacagagauuaaauaa

SEQ ID NO: 1657795 - RNA, 19 nt, Artificial Sequence
  Description of Artificial Sequence: Synthetic oligonucleotide
  Sense strand starting at position 57 of SEQ ID NO: 1561253
ucaccaucucuguggaguu

SEQ ID NO: 1657796 - RNA, 19 nt, Artificial Sequence
  Description of Artificial Sequence: Synthetic oligonucleotide
  Antisense strand to SEQ ID NO: 1657795
aacuccacagagaugguga

SEQ ID NO: 1657797 - RNA, 19 nt, Artificial Sequence
  Description of Artificial Sequence: Synthetic oligonucleotide
  Sense strand starting at position 163 of SEQ ID NO: 1561253
augcaaugucuagacugaa

SEQ ID NO: 1657798 - RNA, 19 nt, Artificial Sequence
  Description of Artificial Sequence: Synthetic oligonucleotide
  Antisense strand to SEQ ID NO: 1657797
uucagucuagacauugcau

SEQ ID NO: 1657799 - RNA, 19 nt, Artificial Sequence
  Description of Artificial Sequence: Synthetic oligonucleotide
  Sense strand starting at position 277 of SEQ ID NO: 1561253
ccagcucugcccuagaauc

SEQ ID NO: 1657800 - RNA, 19 nt, Artificial Sequence
  Description of Artificial Sequence: Synthetic oligonucleotide
  Antisense strand to SEQ ID NO: 1657799
gauucuagggcagagcugg

SEQ ID NO: 1657801 - RNA, 19 nt, Artificial Sequence
  Description of Artificial Sequence: Synthetic oligonucleotide
  Sense strand starting at position 279 of SEQ ID NO: 1561253
agcucugcccuagaaucua

SEQ ID NO: 1657802 - RNA, 19 nt, Artificial Sequence
  Description of Artificial Sequence: Synthetic oligonucleotide
  Antisense strand to SEQ ID NO: 1657801
uagauucuagggcagagcu

SEQ ID NO: 1657803 - RNA, 19 nt, Artificial Sequence
  Description of Artificial Sequence: Synthetic oligonucleotide
  Sense strand starting at position 460 of SEQ ID NO: 1561253
ggaggcugucucugccuaa

SEQ ID NO: 1657804 - RNA, 19 nt, Artificial Sequence
  Description of Artificial Sequence: Synthetic oligonucleotide
  Antisense strand to SEQ ID NO: 1657803
uuaggcagagacagccucc

SEQ ID NO: 1657805 - RNA, 19 nt, Artificial Sequence
  Description of Artificial Sequence: Synthetic oligonucleotide
  Sense strand starting at position 464 of SEQ ID NO: 1561253
gcugucucugccuaaccaa

SEQ ID NO: 1657806 - RNA, 19 nt, Artificial Sequence
  Description of Artificial Sequence: Synthetic oligonucleotide
  Antisense strand to SEQ ID NO: 1657805
uugguuaggcagagacagc

SEQ ID NO: 1657807 - RNA, 19 nt, Artificial Sequence
  Description of Artificial Sequence: Synthetic oligonucleotide
  Sense strand starting at position 941 of SEQ ID NO: 1561253
guugcaucugugcaacaca

SEQ ID NO: 1657808 - RNA, 19 nt, Artificial Sequence
  Description of Artificial Sequence: Synthetic oligonucleotide
  Antisense strand to SEQ ID NO: 1657807
uguguugcacagaugcaac

SEQ ID NO: 1657809 - RNA, 19 nt, Artificial Sequence
  Description of Artificial Sequence: Synthetic oligonucleotide
  Sense strand starting at position 1109 of SEQ ID NO: 1561253
gggaauuccucagaaagaa

SEQ ID NO: 1657810 - RNA, 19 nt, Artificial Sequence
  Description of Artificial Sequence: Synthetic oligonucleotide
  Antisense strand to SEQ ID NO: 1657809
uucuuucugaggaauuccc

SEQ ID NO: 1657811 - RNA, 19 nt, Artificial Sequence
  Description of Artificial Sequence: Synthetic oligonucleotide
  Sense strand starting at position 1204 of SEQ ID NO: 1561253
uguuuagaucgccaguaca

SEQ ID NO: 1657812 - RNA, 19 nt, Artificial Sequence
  Description of Artificial Sequence: Synthetic oligonucleotide
  Antisense strand to SEQ ID NO: 1657811
uguacuggcgaucuaaaca

SEQ ID NO: 1657813 - RNA, 19 nt, Artificial Sequence
  Description of Artificial Sequence: Synthetic oligonucleotide
  Sense strand starting at position 1238 of SEQ ID NO: 1561253
gggcuccuguccuugaaac

SEQ ID NO: 1657814 - RNA, 19 nt, Artificial Sequence
  Description of Artificial Sequence: Synthetic oligonucleotide
  Antisense strand to SEQ ID NO: 1657813
guuucaaggacaggagccc

SEQ ID NO: 1657815 - RNA, 19 nt, Artificial Sequence
  Description of Artificial Sequence: Synthetic oligonucleotide
  Sense strand starting at position 1239 of SEQ ID NO: 1561253
ggcuccuguccuugaaacu

SEQ ID NO: 1657816 - RNA, 19 nt, Artificial Sequence
  Description of Artificial Sequence: Synthetic oligonucleotide
  Antisense strand to SEQ ID NO: 1657815
aguuucaaggacaggagcc

SEQ ID NO: 1657817 - RNA, 19 nt, Artificial Sequence
  Description of Artificial Sequence: Synthetic oligonucleotide
  Sense strand starting at position 1317 of SEQ ID NO: 1561253
gcacccagguguuugugaa

SEQ ID NO: 1657818 - RNA, 19 nt, Artificial Sequence
  Description of Artificial Sequence: Synthetic oligonucleotide
  Antisense strand to SEQ ID NO: 1657817
uucacaaacaccugggugc

SEQ ID NO: 1657819 - RNA, 19 nt, Artificial Sequence
  Description of Artificial Sequence: Synthetic oligonucleotide
  Sense strand starting at position 1318 of SEQ ID NO: 1561253
cacccagguguuugugaaa

SEQ ID NO: 1657820 - RNA, 19 nt, Artificial Sequence
  Description of Artificial Sequence: Synthetic oligonucleotide
  Antisense strand to SEQ ID NO: 1657819
uuucacaaacaccugggug

SEQ ID NO: 1657821 - RNA, 19 nt, Artificial Sequence
  Description of Artificial Sequence: Synthetic oligonucleotide
  Sense strand starting at position 1333 of SEQ ID NO: 1561253
gaaaguguggugugauggu

SEQ ID NO: 1657822 - RNA, 19 nt, Artificial Sequence
  Description of Artificial Sequence: Synthetic oligonucleotide
  Antisense strand to SEQ ID NO: 1657821
accaucacaccacacuuuc

SEQ ID NO: 1657823 - RNA, 19 nt, Artificial Sequence
  Description of Artificial Sequence: Synthetic oligonucleotide
  Sense strand starting at position 1442 of SEQ ID NO: 1561253
agagauugguacucgaauc

SEQ ID NO: 1657824 - RNA, 19 nt, Artificial Sequence
  Description of Artificial Sequence: Synthetic oligonucleotide
  Antisense strand to SEQ ID NO: 1657823
gauucgaguaccaaucucu

SEQ ID NO: 1657825 - RNA, 19 nt, Artificial Sequence
  Description of Artificial Sequence: Synthetic oligonucleotide
  Sense strand starting at position 1448 of SEQ ID NO: 1561253
ugguacucgaaucaguaga

SEQ ID NO: 1657826 - RNA, 19 nt, Artificial Sequence
  Description of Artificial Sequence: Synthetic oligonucleotide
  Antisense strand to SEQ ID NO: 1657825
ucuacugauucgaguacca

SEQ ID NO: 1657827 - RNA, 19 nt, Artificial Sequence
  Description of Artificial Sequence: Synthetic oligonucleotide
  Sense strand starting at position 1697 of SEQ ID NO: 1561253
gggacuucuuaggcuccua

SEQ ID NO: 1657828 - RNA, 19 nt, Artificial Sequence
  Description of Artificial Sequence: Synthetic oligonucleotide
  Antisense strand to SEQ ID NO: 1657827
uaggagccuaagaaguccc

SEQ ID NO: 1657829 - RNA, 19 nt, Artificial Sequence
  Description of Artificial Sequence: Synthetic oligonucleotide
  Sense strand starting at position 1749 of SEQ ID NO: 1561253
cuuccaggucuauagcuau

SEQ ID NO: 1657830 - RNA, 19 nt, Artificial Sequence
  Description of Artificial Sequence: Synthetic oligonucleotide
  Antisense strand to SEQ ID NO: 1657829
auagcuauagaccuggaag

SEQ ID NO: 1657831 - RNA, 19 nt, Artificial Sequence
  Description of Artificial Sequence: Synthetic oligonucleotide
  Sense strand starting at position 1755 of SEQ ID NO: 1561253
ggucuauagcuaugucuac

SEQ ID NO: 1657832 - RNA, 19 nt, Artificial Sequence
  Description of Artificial Sequence: Synthetic oligonucleotide
  Antisense strand to SEQ ID NO: 1657831
guagacauagcuauagacc

SEQ ID NO: 1657833 - RNA, 19 nt, Artificial Sequence
  Description of Artificial Sequence: Synthetic oligonucleotide
  Sense strand starting at position 1756 of SEQ ID NO: 1561253
gucuauagcuaugucuaca

SEQ ID NO: 1657834 - RNA, 19 nt, Artificial Sequence
  Description of Artificial Sequence: Synthetic oligonucleotide
  Antisense strand to SEQ ID NO: 1657833
uguagacauagcuauagac

SEQ ID NO: 1657835 - RNA, 19 nt, Artificial Sequence
  Description of Artificial Sequence: Synthetic oligonucleotide
  Sense strand starting at position 1775 of SEQ ID NO: 1561253
gcgccaucuguaucuuguu

SEQ ID NO: 1657836 - RNA, 19 nt, Artificial Sequence
  Description of Artificial Sequence: Synthetic oligonucleotide
  Antisense strand to SEQ ID NO: 1657835
aacaagauacagauggcgc

SEQ ID NO: 1657837 - RNA, 19 nt, Artificial Sequence
  Description of Artificial Sequence: Synthetic oligonucleotide
  Sense strand starting at position 1806 of SEQ ID NO: 1561253
cugacuaauccaugugguu

SEQ ID NO: 1657838 - RNA, 19 nt, Artificial Sequence
  Description of Artificial Sequence: Synthetic oligonucleotide
  Antisense strand to SEQ ID NO: 1657837
aaccacauggauuagucag

SEQ ID NO: 1657839 - RNA, 19 nt, Artificial Sequence
  Description of Artificial Sequence: Synthetic oligonucleotide
  Sense strand starting at position 1811 of SEQ ID NO: 1561253
uaauccaugugguuaaagu

SEQ ID NO: 1657840 - RNA, 19 nt, Artificial Sequence
  Description of Artificial Sequence: Synthetic oligonucleotide
  Antisense strand to SEQ ID NO: 1657839
acuuuaaccacauggauua

SEQ ID NO: 1657841 - RNA, 19 nt, Artificial Sequence
  Description of Artificial Sequence: Synthetic oligonucleotide
  Sense strand starting at position 1812 of SEQ ID NO: 1561253
aauccaugugguuaaagua

SEQ ID NO: 1657842 - RNA, 19 nt, Artificial Sequence
  Description of Artificial Sequence: Synthetic oligonucleotide
  Antisense strand to SEQ ID NO: 1657841
uacuuuaaccacauggauu

SEQ ID NO: 1657843 - RNA, 19 nt, Artificial Sequence
  Description of Artificial Sequence: Synthetic oligonucleotide
  Sense strand starting at position 2054 of SEQ ID NO: 1561253
ucugguggacgugaagauu

SEQ ID NO: 1657844 - RNA, 19 nt, Artificial Sequence
  Description of Artificial Sequence: Synthetic oligonucleotide
  Antisense strand to SEQ ID NO: 1657843
aaucuucacguccaccaga

SEQ ID NO: 1657845 - RNA, 19 nt, Artificial Sequence
  Description of Artificial Sequence: Synthetic oligonucleotide
  Sense strand starting at position 2232 of SEQ ID NO: 1561253
gccuauugcucccuggacu

SEQ ID NO: 1657846 - RNA, 19 nt, Artificial Sequence
  Description of Artificial Sequence: Synthetic oligonucleotide
  Antisense strand to SEQ ID NO: 1657845
aguccagggagcaauaggc

SEQ ID NO: 1657847 - RNA, 19 nt, Artificial Sequence
  Description of Artificial Sequence: Synthetic oligonucleotide
  Sense strand starting at position 2303 of SEQ ID NO: 1561253
agggcaauaucaguggcaa

SEQ ID NO: 1657848 - RNA, 19 nt, Artificial Sequence
  Description of Artificial Sequence: Synthetic oligonucleotide
  Antisense strand to SEQ ID NO: 1657847
uugccacugauauugcccu

SEQ ID NO: 1657849 - RNA, 19 nt, Artificial Sequence
  Description of Artificial Sequence: Synthetic oligonucleotide
  Sense strand starting at position 2304 of SEQ ID NO: 1561253
gggcaauaucaguggcaac

SEQ ID NO: 1657850 - RNA, 19 nt, Artificial Sequence
  Description of Artificial Sequence: Synthetic oligonucleotide
  Antisense strand to SEQ ID NO: 1657849
guugccacugauauugccc

SEQ ID NO: 1657851 - RNA, 19 nt, Artificial Sequence
  Description of Artificial Sequence: Synthetic oligonucleotide
  Sense strand starting at position 2607 of SEQ ID NO: 1561253
aggcaacucugcuccacau

SEQ ID NO: 1657852 - RNA, 19 nt, Artificial Sequence
  Description of Artificial Sequence: Synthetic oligonucleotide
  Antisense strand to SEQ ID NO: 1657851
auguggagcagaguugccu

SEQ ID NO: 1657853 - RNA, 19 nt, Artificial Sequence
  Description of Artificial Sequence: Synthetic oligonucleotide
  Sense strand starting at position 2650 of SEQ ID NO: 1561253
cugauuucguccuuaucuu

SEQ ID NO: 1657854 - RNA, 19 nt, Artificial Sequence
  Description of Artificial Sequence: Synthetic oligonucleotide
  Antisense strand to SEQ ID NO: 1657853
aagauaaggacgaaaucag

SEQ ID NO: 1657855 - RNA, 19 nt, Artificial Sequence
  Description of Artificial Sequence: Synthetic oligonucleotide
  Sense strand starting at position 2662 of SEQ ID NO: 1561253
uuaucuuagagauggcaga

SEQ ID NO: 1657856 - RNA, 19 nt, Artificial Sequence
  Description of Artificial Sequence: Synthetic oligonucleotide
  Antisense strand to SEQ ID NO: 1657855
ucugccaucucuaagauaa

SEQ ID NO: 1657857 - RNA, 19 nt, Artificial Sequence
  Description of Artificial Sequence: Synthetic oligonucleotide
  Sense strand starting at position 2663 of SEQ ID NO: 1561253
uaucuuagagauggcagaa

SEQ ID NO: 1657858 - RNA, 19 nt, Artificial Sequence
  Description of Artificial Sequence: Synthetic oligonucleotide
  Antisense strand to SEQ ID NO: 1657857
uucugccaucucuaagaua

SEQ ID NO: 1657859 - RNA, 19 nt, Artificial Sequence
  Description of Artificial Sequence: Synthetic oligonucleotide
  Sense strand starting at position 2742 of SEQ ID NO: 1561253
cugguucuguuggucaaca

SEQ ID NO: 1657860 - RNA, 19 nt, Artificial Sequence
  Description of Artificial Sequence: Synthetic oligonucleotide
  Antisense strand to SEQ ID NO: 1657859
uguugaccaacagaaccag

SEQ ID NO: 1657861 - RNA, 19 nt, Artificial Sequence
  Description of Artificial Sequence: Synthetic oligonucleotide
  Sense strand starting at position 2744 of SEQ ID NO: 1561253
gguucuguuggucaacaca

SEQ ID NO: 1657862 - RNA, 19 nt, Artificial Sequence
  Description of Artificial Sequence: Synthetic oligonucleotide
  Antisense strand to SEQ ID NO: 1657861
uguguugaccaacagaacc

SEQ ID NO: 1657863 - RNA, 19 nt, Artificial Sequence
  Description of Artificial Sequence: Synthetic oligonucleotide
  Sense strand starting at position 2813 of SEQ ID NO: 1561253
uggcaaaggguguagauaa

SEQ ID NO: 1657864 - RNA, 19 nt, Artificial Sequence
  Description of Artificial Sequence: Synthetic oligonucleotide
  Antisense strand to SEQ ID NO: 1657863
uuaucuacacccuuugcca

SEQ ID NO: 1657865 - RNA, 19 nt, Artificial Sequence
  Description of Artificial Sequence: Synthetic oligonucleotide
  Sense strand starting at position 2855 of SEQ ID NO: 1561253
ccaguacccaagggugaau

SEQ ID NO: 1657866 - RNA, 19 nt, Artificial Sequence
  Description of Artificial Sequence: Synthetic oligonucleotide
  Antisense strand to SEQ ID NO: 1657865
auucacccuuggguacugg

SEQ ID NO: 1657867 - RNA, 19 nt, Artificial Sequence
  Description of Artificial Sequence: Synthetic oligonucleotide
  Sense strand starting at position 3064 of SEQ ID NO: 1561253
gcaugagucucaucaacuu

SEQ ID NO: 1657868 - RNA, 19 nt, Artificial Sequence
  Description of Artificial Sequence: Synthetic oligonucleotide
  Antisense strand to SEQ ID NO: 1657867
aaguugaugagacucaugc

SEQ ID NO: 1657869 - RNA, 19 nt, Artificial Sequence
  Description of Artificial Sequence: Synthetic oligonucleotide
  Sense strand starting at position 3173 of SEQ ID NO: 1561253
uuuagauguaucuguguuu

SEQ ID NO: 1657870 - RNA, 19 nt, Artificial Sequence
  Description of Artificial Sequence: Synthetic oligonucleotide
  Antisense strand to SEQ ID NO: 1657869
aaacacagauacaucuaaa

SEQ ID NO: 1657871 - RNA, 19 nt, Artificial Sequence
  Description of Artificial Sequence: Synthetic oligonucleotide
  Sense strand starting at position 3467 of SEQ ID NO: 1561253
uguugucguuauuuaguuu

SEQ ID NO: 1657872 - RNA, 19 nt, Artificial Sequence
  Description of Artificial Sequence: Synthetic oligonucleotide
  Antisense strand to SEQ ID NO: 1657871
aaacuaaauaacgacaaca

SEQ ID NO: 1657873 - RNA, 19 nt, Artificial Sequence
  Description of Artificial Sequence: Synthetic oligonucleotide
  Sense strand starting at position 3639 of SEQ ID NO: 1561253
uggucuugagguuaagaua

SEQ ID NO: 1657874 - RNA, 19 nt, Artificial Sequence
  Description of Artificial Sequence: Synthetic oligonucleotide
  Antisense strand to SEQ ID NO: 1657873
uaucuuaaccucaagacca

SEQ ID NO: 1657875 - RNA, 19 nt, Artificial Sequence
  Description of Artificial Sequence: Synthetic oligonucleotide
  Sense strand starting at position 27 of SEQ ID NO: 1561254
acgccaaacuaguuaaguu

SEQ ID NO: 1657876 - RNA, 19 nt, Artificial Sequence
  Description of Artificial Sequence: Synthetic oligonucleotide
  Antisense strand to SEQ ID NO: 1657875
aacuuaacuaguuuggcgu

SEQ ID NO: 1657877 - RNA, 19 nt, Artificial Sequence
  Description of Artificial Sequence: Synthetic oligonucleotide
  Sense strand starting at position 134 of SEQ ID NO: 1561254
agugcaguugcaugaccau

SEQ ID NO: 1657878 - RNA, 19 nt, Artificial Sequence
  Description of Artificial Sequence: Synthetic oligonucleotide
  Antisense strand to SEQ ID NO: 1657877
auggucaugcaacugcacu

SEQ ID NO: 1657879 - RNA, 19 nt, Artificial Sequence
  Description of Artificial Sequence: Synthetic oligonucleotide
  Sense strand starting at position 430 of SEQ ID NO: 1561254
ccuaacaguugcguuauua

SEQ ID NO: 1657880 - RNA, 19 nt, Artificial Sequence
  Description of Artificial Sequence: Synthetic oligonucleotide
  Antisense strand to SEQ ID NO: 1657879
uaauaacgcaacuguuagg

SEQ ID NO: 1657881 - RNA, 19 nt, Artificial Sequence
  Description of Artificial Sequence: Synthetic oligonucleotide
  Sense strand starting at position 434 of SEQ ID NO: 1561254
acaguugcguuauuagaga

SEQ ID NO: 1657882 - RNA, 19 nt, Artificial Sequence
  Description of Artificial Sequence: Synthetic oligonucleotide
  Antisense strand to SEQ ID NO: 1657881
ucucuaauaacgcaacugu

SEQ ID NO: 1657883 - RNA, 19 nt, Artificial Sequence
  Description of Artificial Sequence: Synthetic oligonucleotide
  Sense strand starting at position 508 of SEQ ID NO: 1561254
aaagaaagauucccgcagu

SEQ ID NO: 1657884 - RNA, 19 nt, Artificial Sequence
  Description of Artificial Sequence: Synthetic oligonucleotide
  Antisense strand to SEQ ID NO: 1657883
acugcgggaaucuuucuuu

SEQ ID NO: 1657885 - RNA, 19 nt, Artificial Sequence
  Description of Artificial Sequence: Synthetic oligonucleotide
  Sense strand starting at position 535 of SEQ ID NO: 1561254
acaggugguuuccaagcaa

SEQ ID NO: 1657886 - RNA, 19 nt, Artificial Sequence
  Description of Artificial Sequence: Synthetic oligonucleotide
  Antisense strand to SEQ ID NO: 1657885
uugcuuggaaaccaccugu

SEQ ID NO: 1657887 - RNA, 19 nt, Artificial Sequence
  Description of Artificial Sequence: Synthetic oligonucleotide
  Sense strand starting at position 539 of SEQ ID NO: 1561254
gugguuuccaagcaaacga

SEQ ID NO: 1657888 - RNA, 19 nt, Artificial Sequence
  Description of Artificial Sequence: Synthetic oligonucleotide
  Antisense strand to SEQ ID NO: 1657887
ucguuugcuuggaaaccac

SEQ ID NO: 1657889 - RNA, 19 nt, Artificial Sequence
  Description of Artificial Sequence: Synthetic oligonucleotide
  Sense strand starting at position 618 of SEQ ID NO: 1561254
uguaaacagucguucuuau

SEQ ID NO: 1657890 - RNA, 19 nt, Artificial Sequence
  Description of Artificial Sequence: Synthetic oligonucleotide
  Antisense strand to SEQ ID NO: 1657889
auaagaacgacuguuuaca

SEQ ID NO: 1657891 - RNA, 19 nt, Artificial Sequence
  Description of Artificial Sequence: Synthetic oligonucleotide
  Sense strand starting at position 626 of SEQ ID NO: 1561254
gucguucuuauacaggaau

SEQ ID NO: 1657892 - RNA, 19 nt, Artificial Sequence
  Description of Artificial Sequence: Synthetic oligonucleotide
  Antisense strand to SEQ ID NO: 1657891
auuccuguauaagaacgac

SEQ ID NO: 1657893 - RNA, 19 nt, Artificial Sequence
  Description of Artificial Sequence: Synthetic oligonucleotide
  Sense strand starting at position 628 of SEQ ID NO: 1561254
cguucuuauacaggaaugu

SEQ ID NO: 1657894 - RNA, 19 nt, Artificial Sequence
  Description of Artificial Sequence: Synthetic oligonucleotide
  Antisense strand to SEQ ID NO: 1657893
acauuccuguauaagaacg

SEQ ID NO: 1657895 - RNA, 19 nt, Artificial Sequence
  Description of Artificial Sequence: Synthetic oligonucleotide
  Sense strand starting at position 629 of SEQ ID NO: 1561254
guucuuauacaggaauguu

SEQ ID NO: 1657896 - RNA, 19 nt, Artificial Sequence
  Description of Artificial Sequence: Synthetic oligonucleotide
  Antisense strand to SEQ ID NO: 1657895
aacauuccuguauaagaac

SEQ ID NO: 1657897 - RNA, 19 nt, Artificial Sequence
  Description of Artificial Sequence: Synthetic oligonucleotide
  Sense strand starting at position 676 of SEQ ID NO: 1561254
gcuuauaguguugaagcaa

SEQ ID NO: 1657898 - RNA, 19 nt, Artificial Sequence
  Description of Artificial Sequence: Synthetic oligonucleotide
  Antisense strand to SEQ ID NO: 1657897
uugcuucaacacuauaagc

SEQ ID NO: 1657899 - RNA, 19 nt, Artificial Sequence
  Description of Artificial Sequence: Synthetic oligonucleotide
  Sense strand starting at position 860 of SEQ ID NO: 1561254
uucuuaaauugggaauacu

SEQ ID NO: 1657900 - RNA, 19 nt, Artificial Sequence
  Description of Artificial Sequence: Synthetic oligonucleotide
  Antisense strand to SEQ ID NO: 1657899
aguauucccaauuuaagaa

SEQ ID NO: 1657901 - RNA, 19 nt, Artificial Sequence
  Description of Artificial Sequence: Synthetic oligonucleotide
  Sense strand starting at position 1129 of SEQ ID NO: 1561254
ggcauuauauugugacaaa

SEQ ID NO: 1657902 - RNA, 19 nt, Artificial Sequence
  Description of Artificial Sequence: Synthetic oligonucleotide
  Antisense strand to SEQ ID NO: 1657901
uuugucacaauauaaugcc

SEQ ID NO: 1657903 - RNA, 19 nt, Artificial Sequence
  Description of Artificial Sequence: Synthetic oligonucleotide
  Sense strand starting at position 1130 of SEQ ID NO: 1561254
gcauuauauugugacaaau

SEQ ID NO: 1657904 - RNA, 19 nt, Artificial Sequence
  Description of Artificial Sequence: Synthetic oligonucleotide
  Antisense strand to SEQ ID NO: 1657903
auuugucacaauauaaugc

SEQ ID NO: 1657905 - RNA, 19 nt, Artificial Sequence
  Description of Artificial Sequence: Synthetic oligonucleotide
  Sense strand starting at position 1244 of SEQ ID NO: 1561254
agcaauguuuaggucauua

SEQ ID NO: 1657906 - RNA, 19 nt, Artificial Sequence
  Description of Artificial Sequence: Synthetic oligonucleotide
  Antisense strand to SEQ ID NO: 1657905
uaaugaccuaaacauugcu

SEQ ID NO: 1657907 - RNA, 19 nt, Artificial Sequence
  Description of Artificial Sequence: Synthetic oligonucleotide
  Sense strand starting at position 1248 of SEQ ID NO: 1561254
auguuuaggucauuacaag

SEQ ID NO: 1657908 - RNA, 19 nt, Artificial Sequence
  Description of Artificial Sequence: Synthetic oligonucleotide
  Antisense strand to SEQ ID NO: 1657907
cuuguaaugaccuaaacau

SEQ ID NO: 1657909 - RNA, 19 nt, Artificial Sequence
  Description of Artificial Sequence: Synthetic oligonucleotide
  Sense strand starting at position 1281 of SEQ ID NO: 1561254
gcgaacgcuuccguugaca

SEQ ID NO: 1657910 - RNA, 19 nt, Artificial Sequence
  Description of Artificial Sequence: Synthetic oligonucleotide
  Antisense strand to SEQ ID NO: 1657909
ugucaacggaagcguucgc

SEQ ID NO: 1657911 - RNA, 19 nt, Artificial Sequence
  Description of Artificial Sequence: Synthetic oligonucleotide
  Sense strand starting at position 2140 of SEQ ID NO: 1561254
gcguuuguaucccucugga

SEQ ID NO: 1657912 - RNA, 19 nt, Artificial Sequence
  Description of Artificial Sequence: Synthetic oligonucleotide
  Antisense strand to SEQ ID NO: 1657911
uccagagggauacaaacgc

SEQ ID NO: 1657913 - RNA, 19 nt, Artificial Sequence
  Description of Artificial Sequence: Synthetic oligonucleotide
  Sense strand starting at position 2172 of SEQ ID NO: 1561254
ugccgauauuucuuucuuu

SEQ ID NO: 1657914 - RNA, 19 nt, Artificial Sequence
  Description of Artificial Sequence: Synthetic oligonucleotide
  Antisense strand to SEQ ID NO: 1657913
aaagaaagaaauaucggca

SEQ ID NO: 1657915 - RNA, 19 nt, Artificial Sequence
  Description of Artificial Sequence: Synthetic oligonucleotide
  Sense strand starting at position 2356 of SEQ ID NO: 1561254
aucuguaucuaggagcuua

SEQ ID NO: 1657916 - RNA, 19 nt, Artificial Sequence
  Description of Artificial Sequence: Synthetic oligonucleotide
  Antisense strand to SEQ ID NO: 1657915
uaagcuccuagauacagau

SEQ ID NO: 1657917 - RNA, 19 nt, Artificial Sequence
  Description of Artificial Sequence: Synthetic oligonucleotide
  Sense strand starting at position 2537 of SEQ ID NO: 1561254
uuaauaugcugcuaugaau

SEQ ID NO: 1657918 - RNA, 19 nt, Artificial Sequence
  Description of Artificial Sequence: Synthetic oligonucleotide
  Antisense strand to SEQ ID NO: 1657917
auucauagcagcauauuaa

SEQ ID NO: 1657919 - RNA, 19 nt, Artificial Sequence
  Description of Artificial Sequence: Synthetic oligonucleotide
  Sense strand starting at position 2810 of SEQ ID NO: 1561254
caggcuggucuugacauua

SEQ ID NO: 1657920 - RNA, 19 nt, Artificial Sequence
  Description of Artificial Sequence: Synthetic oligonucleotide
  Antisense strand to SEQ ID NO: 1657919
uaaugucaagaccagccug

SEQ ID NO: 1657921 - RNA, 19 nt, Artificial Sequence
  Description of Artificial Sequence: Synthetic oligonucleotide
  Sense strand starting at position 2815 of SEQ ID NO: 1561254
uggucuugacauuaagcga

SEQ ID NO: 1657922 - RNA, 19 nt, Artificial Sequence
  Description of Artificial Sequence: Synthetic oligonucleotide
  Antisense strand to SEQ ID NO: 1657921
ucgcuuaaugucaagacca

SEQ ID NO: 1657923 - RNA, 19 nt, Artificial Sequence
  Description of Artificial Sequence: Synthetic oligonucleotide
  Sense strand starting at position 2974 of SEQ ID NO: 1561254
uuaaccuaacugcgugaaa

SEQ ID NO: 1657924 - RNA, 19 nt, Artificial Sequence
  Description of Artificial Sequence: Synthetic oligonucleotide
  Antisense strand to SEQ ID NO: 1657923
uuucacgcaguuagguuaa

SEQ ID NO: 1657925 - RNA, 19 nt, Artificial Sequence
  Description of Artificial Sequence: Synthetic oligonucleotide
  Sense strand starting at position 2976 of SEQ ID NO: 1561254
aaccuaacugcgugaaagu

SEQ ID NO: 1657926 - RNA, 19 nt, Artificial Sequence
  Description of Artificial Sequence: Synthetic oligonucleotide
  Antisense strand to SEQ ID NO: 1657925
acuuucacgcaguuagguu

SEQ ID NO: 1657927 - RNA, 19 nt, Artificial Sequence
  Description of Artificial Sequence: Synthetic oligonucleotide
  Sense strand starting at position 3015 of SEQ ID NO: 1561254
agucgcuagcaguaaagau

SEQ ID NO: 1657928 - RNA, 19 nt, Artificial Sequence
  Description of Artificial Sequence: Synthetic oligonucleotide
  Antisense strand to SEQ ID NO: 1657927
aucuuuacugcuagcgacu

SEQ ID NO: 1657929 - RNA, 19 nt, Artificial Sequence
  Description of Artificial Sequence: Synthetic oligonucleotide
  Sense strand starting at position 3034 of SEQ ID NO: 1561254
gggucguguucguuccaca

SEQ ID NO: 1657930 - RNA, 19 nt, Artificial Sequence
  Description of Artificial Sequence: Synthetic oligonucleotide
  Antisense strand to SEQ ID NO: 1657929
uguggaacgaacacgaccc

SEQ ID NO: 1657931 - RNA, 19 nt, Artificial Sequence
  Description of Artificial Sequence: Synthetic oligonucleotide
  Sense strand starting at position 3035 of SEQ ID NO: 1561254
ggucguguucguuccacau

SEQ ID NO: 1657932 - RNA, 19 nt, Artificial Sequence
  Description of Artificial Sequence: Synthetic oligonucleotide
  Antisense strand to SEQ ID NO: 1657931
auguggaacgaacacgacc

SEQ ID NO: 1657933 - RNA, 19 nt, Artificial Sequence
  Description of Artificial Sequence: Synthetic oligonucleotide
  Sense strand starting at position 3059 of SEQ ID NO: 1561254
agacaagucuaggcagaga

SEQ ID NO: 1657934 - RNA, 19 nt, Artificial Sequence
  Description of Artificial Sequence: Synthetic oligonucleotide
  Antisense strand to SEQ ID NO: 1657933
ucucugccuagacuugucu

SEQ ID NO: 1657935 - RNA, 19 nt, Artificial Sequence
  Description of Artificial Sequence: Synthetic oligonucleotide
  Sense strand starting at position 3074 of SEQ ID NO: 1561254
gagagaugccugcagaguc

SEQ ID NO: 1657936 - RNA, 19 nt, Artificial Sequence
  Description of Artificial Sequence: Synthetic oligonucleotide
  Antisense strand to SEQ ID NO: 1657935
gacucugcaggcaucucuc

SEQ ID NO: 1657937 - RNA, 19 nt, Artificial Sequence
  Description of Artificial Sequence: Synthetic oligonucleotide
  Sense strand starting at position 3374 of SEQ ID NO: 1561254
cuacucuugucccuuguaa

SEQ ID NO: 1657938 - RNA, 19 nt, Artificial Sequence
  Description of Artificial Sequence: Synthetic oligonucleotide
  Antisense strand to SEQ ID NO: 1657937
uuacaagggacaagaguag

SEQ ID NO: 1657939 - RNA, 19 nt, Artificial Sequence
  Description of Artificial Sequence: Synthetic oligonucleotide
  Sense strand starting at position 3376 of SEQ ID NO: 1561254
acucuugucccuuguaaug

SEQ ID NO: 1657940 - RNA, 19 nt, Artificial Sequence
  Description of Artificial Sequence: Synthetic oligonucleotide
  Antisense strand to SEQ ID NO: 1657939
cauuacaagggacaagagu

SEQ ID NO: 1657941 - RNA, 19 nt, Artificial Sequence
  Description of Artificial Sequence: Synthetic oligonucleotide
  Sense strand starting at position 3382 of SEQ ID NO: 1561254
gucccuuguaauggagauc

SEQ ID NO: 1657942 - RNA, 19 nt, Artificial Sequence
  Description of Artificial Sequence: Synthetic oligonucleotide
  Antisense strand to SEQ ID NO: 1657941
gaucuccauuacaagggac

SEQ ID NO: 1657943 - RNA, 19 nt, Artificial Sequence
  Description of Artificial Sequence: Synthetic oligonucleotide
  Sense strand starting at position 3453 of SEQ ID NO: 1561254
uaguccugugccuguagga

SEQ ID NO: 1657944 - RNA, 19 nt, Artificial Sequence
  Description of Artificial Sequence: Synthetic oligonucleotide
  Antisense strand to SEQ ID NO: 1657943
uccuacaggcacaggacua

SEQ ID NO: 1657945 - RNA, 19 nt, Artificial Sequence
  Description of Artificial Sequence: Synthetic oligonucleotide
  Sense strand starting at position 3535 of SEQ ID NO: 1561254
caagaaugggugugcgaug

SEQ ID NO: 1657946 - RNA, 19 nt, Artificial Sequence
  Description of Artificial Sequence: Synthetic oligonucleotide
  Antisense strand to SEQ ID NO: 1657945
caucgcacacccauucuug

SEQ ID NO: 1657947 - RNA, 19 nt, Artificial Sequence
  Description of Artificial Sequence: Synthetic oligonucleotide
  Sense strand starting at position 3544 of SEQ ID NO: 1561254
gugugcgaugucguccaaa

SEQ ID NO: 1657948 - RNA, 19 nt, Artificial Sequence
  Description of Artificial Sequence: Synthetic oligonucleotide
  Antisense strand to SEQ ID NO: 1657947
uuuggacgacaucgcacac

SEQ ID NO: 1657949 - RNA, 19 nt, Artificial Sequence
  Description of Artificial Sequence: Synthetic oligonucleotide
  Sense strand starting at position 3546 of SEQ ID NO: 1561254
gugcgaugucguccaaaca

SEQ ID NO: 1657950 - RNA, 19 nt, Artificial Sequence
  Description of Artificial Sequence: Synthetic oligonucleotide
  Antisense strand to SEQ ID NO: 1657949
uguuuggacgacaucgcac

SEQ ID NO: 1657951 - RNA, 19 nt, Artificial Sequence
  Description of Artificial Sequence: Synthetic oligonucleotide
  Sense strand starting at position 3873 of SEQ ID NO: 1561254
cugagaagguucuuccuca

SEQ ID NO: 1657952 - RNA, 19 nt, Artificial Sequence
  Description of Artificial Sequence: Synthetic oligonucleotide
  Antisense strand to SEQ ID NO: 1657951
ugaggaagaaccuucucag

SEQ ID NO: 1657953 - RNA, 19 nt, Artificial Sequence
  Description of Artificial Sequence: Synthetic oligonucleotide
  Sense strand starting at position 3874 of SEQ ID NO: 1561254
ugagaagguucuuccucau

SEQ ID NO: 1657954 - RNA, 19 nt, Artificial Sequence
  Description of Artificial Sequence: Synthetic oligonucleotide
  Antisense strand to SEQ ID NO: 1657953
augaggaagaaccuucuca

SEQ ID NO: 1657955 - RNA, 19 nt, Artificial Sequence
  Description of Artificial Sequence: Synthetic oligonucleotide
  Sense strand starting at position 209 of SEQ ID NO: 1561255
aaguaaaugccaugaaguc

SEQ ID NO: 1657956 - RNA, 19 nt, Artificial Sequence
  Description of Artificial Sequence: Synthetic oligonucleotide
  Antisense strand to SEQ ID NO: 1657955
gacuucauggcauuuacuu

SEQ ID NO: 1657957 - RNA, 19 nt, Artificial Sequence
  Description of Artificial Sequence: Synthetic oligonucleotide
  Sense strand starting at position 210 of SEQ ID NO: 1561255
aguaaaugccaugaaguca

SEQ ID NO: 1657958 - RNA, 19 nt, Artificial Sequence
  Description of Artificial Sequence: Synthetic oligonucleotide
  Antisense strand to SEQ ID NO: 1657957
ugacuucauggcauuuacu

SEQ ID NO: 1657959 - RNA, 19 nt, Artificial Sequence
  Description of Artificial Sequence: Synthetic oligonucleotide
  Sense strand starting at position 235 of SEQ ID NO: 1561255
uugucuuguucccaaaccu

SEQ ID NO: 1657960 - RNA, 19 nt, Artificial Sequence
  Description of Artificial Sequence: Synthetic oligonucleotide
  Antisense strand to SEQ ID NO: 1657959
agguuugggaacaagacaa

SEQ ID NO: 1657961 - RNA, 19 nt, Artificial Sequence
  Description of Artificial Sequence: Synthetic oligonucleotide
  Sense strand starting at position 726 of SEQ ID NO: 1561255
gcugaagaaacuuaugugu

SEQ ID NO: 1657962 - RNA, 19 nt, Artificial Sequence
  Description of Artificial Sequence: Synthetic oligonucleotide
  Antisense strand to SEQ ID NO: 1657961
acacauaaguuucuucagc

SEQ ID NO: 1657963 - RNA, 19 nt, Artificial Sequence
  Description of Artificial Sequence: Synthetic oligonucleotide
  Sense strand starting at position 728 of SEQ ID NO: 1561255
ugaagaaacuuaugugucu

SEQ ID NO: 1657964 - RNA, 19 nt, Artificial Sequence
  Description of Artificial Sequence: Synthetic oligonucleotide
  Antisense strand to SEQ ID NO: 1657963
agacacauaaguuucuuca

SEQ ID NO: 1657965 - RNA, 19 nt, Artificial Sequence
  Description of Artificial Sequence: Synthetic oligonucleotide
  Sense strand starting at position 729 of SEQ ID NO: 1561255
gaagaaacuuaugugucuu

SEQ ID NO: 1657966 - RNA, 19 nt, Artificial Sequence
  Description of Artificial Sequence: Synthetic oligonucleotide
  Antisense strand to SEQ ID NO: 1657965
aagacacauaaguuucuuc

SEQ ID NO: 1657967 - RNA, 19 nt, Artificial Sequence
  Description of Artificial Sequence: Synthetic oligonucleotide
  Sense strand starting at position 735 of SEQ ID NO: 1561255
acuuaugugucuuguaagu

SEQ ID NO: 1657968 - RNA, 19 nt, Artificial Sequence
  Description of Artificial Sequence: Synthetic oligonucleotide
  Antisense strand to SEQ ID NO: 1657967
acuuacaagacacauaagu

SEQ ID NO: 1657969 - RNA, 19 nt, Artificial Sequence
  Description of Artificial Sequence: Synthetic oligonucleotide
  Sense strand starting at position 737 of SEQ ID NO: 1561255
uuaugugucuuguaaguug

SEQ ID NO: 1657970 - RNA, 19 nt, Artificial Sequence
  Description of Artificial Sequence: Synthetic oligonucleotide
  Antisense strand to SEQ ID NO: 1657969
caacuuacaagacacauaa

SEQ ID NO: 1657971 - RNA, 19 nt, Artificial Sequence
  Description of Artificial Sequence: Synthetic oligonucleotide
  Sense strand starting at position 740 of SEQ ID NO: 1561255
ugugucuuguaaguugcaa

SEQ ID NO: 1657972 - RNA, 19 nt, Artificial Sequence
  Description of Artificial Sequence: Synthetic oligonucleotide
  Antisense strand to SEQ ID NO: 1657971
uugcaacuuacaagacaca

SEQ ID NO: 1657973 - RNA, 19 nt, Artificial Sequence
  Description of Artificial Sequence: Synthetic oligonucleotide
  Sense strand starting at position 927 of SEQ ID NO: 1561255
gguuccuguaucugacagu

SEQ ID NO: 1657974 - RNA, 19 nt, Artificial Sequence
  Description of Artificial Sequence: Synthetic oligonucleotide
  Antisense strand to SEQ ID NO: 1657973
acugucagauacaggaacc

SEQ ID NO: 1657975 - RNA, 19 nt, Artificial Sequence
  Description of Artificial Sequence: Synthetic oligonucleotide
  Sense strand starting at position 928 of SEQ ID NO: 1561255
guuccuguaucugacagua

SEQ ID NO: 1657976 - RNA, 19 nt, Artificial Sequence
  Description of Artificial Sequence: Synthetic oligonucleotide
  Antisense strand to SEQ ID NO: 1657975
uacugucagauacaggaac

SEQ ID NO: 1657977 - RNA, 19 nt, Artificial Sequence
  Description of Artificial Sequence: Synthetic oligonucleotide
  Sense strand starting at position 930 of SEQ ID NO: 1561255
uccuguaucugacaguauu

SEQ ID NO: 1657978 - RNA, 19 nt, Artificial Sequence
  Description of Artificial Sequence: Synthetic oligonucleotide
  Antisense strand to SEQ ID NO: 1657977
aauacugucagauacagga

SEQ ID NO: 1657979 - RNA, 19 nt, Artificial Sequence
  Description of Artificial Sequence: Synthetic oligonucleotide
  Sense strand starting at position 979 of SEQ ID NO: 1561255
ccuauuccuguccaaggga

SEQ ID NO: 1657980 - RNA, 19 nt, Artificial Sequence
  Description of Artificial Sequence: Synthetic oligonucleotide
  Antisense strand to SEQ ID NO: 1657979
ucccuuggacaggaauagg

SEQ ID NO: 1657981 - RNA, 19 nt, Artificial Sequence
  Description of Artificial Sequence: Synthetic oligonucleotide
  Sense strand starting at position 1180 of SEQ ID NO: 1561255
ugcagaaaugugggaagau

SEQ ID NO: 1657982 - RNA, 19 nt, Artificial Sequence
  Description of Artificial Sequence: Synthetic oligonucleotide
  Antisense strand to SEQ ID NO: 1657981
aucuucccacauuucugca

SEQ ID NO: 1657983 - RNA, 19 nt, Artificial Sequence
  Description of Artificial Sequence: Synthetic oligonucleotide
  Sense strand starting at position 1181 of SEQ ID NO: 1561255
gcagaaaugugggaagaua

SEQ ID NO: 1657984 - RNA, 19 nt, Artificial Sequence
  Description of Artificial Sequence: Synthetic oligonucleotide
  Antisense strand to SEQ ID NO: 1657983
uaucuucccacauuucugc

SEQ ID NO: 1657985 - RNA, 19 nt, Artificial Sequence
  Description of Artificial Sequence: Synthetic oligonucleotide
  Sense strand starting at position 1435 of SEQ ID NO: 1561255
ugggauguccaguagcaca

SEQ ID NO: 1657986 - RNA, 19 nt, Artificial Sequence
  Description of Artificial Sequence: Synthetic oligonucleotide
  Antisense strand to SEQ ID NO: 1657985
ugugcuacuggacauccca

SEQ ID NO: 1657987 - RNA, 19 nt, Artificial Sequence
  Description of Artificial Sequence: Synthetic oligonucleotide
  Sense strand starting at position 1580 of SEQ ID NO: 1561255
uuucccauguccugaucau

SEQ ID NO: 1657988 - RNA, 19 nt, Artificial Sequence
  Description of Artificial Sequence: Synthetic oligonucleotide
  Antisense strand to SEQ ID NO: 1657987
augaucaggacaugggaaa

SEQ ID NO: 1657989 - RNA, 19 nt, Artificial Sequence
  Description of Artificial Sequence: Synthetic oligonucleotide
  Sense strand starting at position 1774 of SEQ ID NO: 1561255
ggcuuccaacccuaggaau

SEQ ID NO: 1657990 - RNA, 19 nt, Artificial Sequence
  Description of Artificial Sequence: Synthetic oligonucleotide
  Antisense strand to SEQ ID NO: 1657989
auuccuaggguuggaagcc

SEQ ID NO: 1657991 - RNA, 19 nt, Artificial Sequence
  Description of Artificial Sequence: Synthetic oligonucleotide
  Sense strand starting at position 2055 of SEQ ID NO: 1561255
cuuuguuuggagcggaagu

SEQ ID NO: 1657992 - RNA, 19 nt, Artificial Sequence
  Description of Artificial Sequence: Synthetic oligonucleotide
  Antisense strand to SEQ ID NO: 1657991
acuuccgcuccaaacaaag

SEQ ID NO: 1657993 - RNA, 19 nt, Artificial Sequence
  Description of Artificial Sequence: Synthetic oligonucleotide
  Sense strand starting at position 2056 of SEQ ID NO: 1561255
uuuguuuggagcggaagua

SEQ ID NO: 1657994 - RNA, 19 nt, Artificial Sequence
  Description of Artificial Sequence: Synthetic oligonucleotide
  Antisense strand to SEQ ID NO: 1657993
uacuuccgcuccaaacaaa

SEQ ID NO: 1657995 - RNA, 19 nt, Artificial Sequence
  Description of Artificial Sequence: Synthetic oligonucleotide
  Sense strand starting at position 2152 of SEQ ID NO: 1561255
gugggaaaggauugcuuga

SEQ ID NO: 1657996 - RNA, 19 nt, Artificial Sequence
  Description of Artificial Sequence: Synthetic oligonucleotide
  Antisense strand to SEQ ID NO: 1657995
ucaagcaauccuuucccac

SEQ ID NO: 1657997 - RNA, 19 nt, Artificial Sequence
  Description of Artificial Sequence: Synthetic oligonucleotide
  Sense strand starting at position 2182 of SEQ ID NO: 1561255
gcaagauagcgcuacucua

SEQ ID NO: 1657998 - RNA, 19 nt, Artificial Sequence
  Description of Artificial Sequence: Synthetic oligonucleotide
  Antisense strand to SEQ ID NO: 1657997
uagaguagcgcuaucuugc

SEQ ID NO: 1657999 - RNA, 19 nt, Artificial Sequence
  Description of Artificial Sequence: Synthetic oligonucleotide
  Sense strand starting at position 2190 of SEQ ID NO: 1561255
gcgcuacucuaucucuauu

SEQ ID NO: 1658000 - RNA, 19 nt, Artificial Sequence
  Description of Artificial Sequence: Synthetic oligonucleotide
  Antisense strand to SEQ ID NO: 1657999
aauagagauagaguagcgc

SEQ ID NO: 1658001 - RNA, 19 nt, Artificial Sequence
  Description of Artificial Sequence: Synthetic oligonucleotide
  Sense strand starting at position 2275 of SEQ ID NO: 1561255
auguuaacccuucgggaau

SEQ ID NO: 1658002 - RNA, 19 nt, Artificial Sequence
  Description of Artificial Sequence: Synthetic oligonucleotide
  Antisense strand to SEQ ID NO: 1658001
auucccgaaggguuaacau

SEQ ID NO: 1658003 - RNA, 19 nt, Artificial Sequence
  Description of Artificial Sequence: Synthetic oligonucleotide
  Sense strand starting at position 2276 of SEQ ID NO: 1561255
uguuaacccuucgggaaug

SEQ ID NO: 1658004 - RNA, 19 nt, Artificial Sequence
  Description of Artificial Sequence: Synthetic oligonucleotide
  Antisense strand to SEQ ID NO: 1658003
cauucccgaaggguuaaca

SEQ ID NO: 1658005 - RNA, 19 nt, Artificial Sequence
  Description of Artificial Sequence: Synthetic oligonucleotide
  Sense strand starting at position 2277 of SEQ ID NO: 1561255
guuaacccuucgggaauga

SEQ ID NO: 1658006 - RNA, 19 nt, Artificial Sequence
  Description of Artificial Sequence: Synthetic oligonucleotide
  Antisense strand to SEQ ID NO: 1658005
ucauucccgaaggguuaac

SEQ ID NO: 1658007 - RNA, 19 nt, Artificial Sequence
  Description of Artificial Sequence: Synthetic oligonucleotide
  Sense strand starting at position 2439 of SEQ ID NO: 1561255
cgauuucuguagccuggga

SEQ ID NO: 1658008 - RNA, 19 nt, Artificial Sequence
  Description of Artificial Sequence: Synthetic oligonucleotide
  Antisense strand to SEQ ID NO: 1658007
ucccaggcuacagaaaucg

SEQ ID NO: 1658009 - RNA, 19 nt, Artificial Sequence
  Description of Artificial Sequence: Synthetic oligonucleotide
  Sense strand starting at position 2494 of SEQ ID NO: 1561255
ucaucuguauugugguuau

SEQ ID NO: 1658010 - RNA, 19 nt, Artificial Sequence
  Description of Artificial Sequence: Synthetic oligonucleotide
  Antisense strand to SEQ ID NO: 1658009
auaaccacaauacagauga

SEQ ID NO: 1658011 - RNA, 19 nt, Artificial Sequence
  Description of Artificial Sequence: Synthetic oligonucleotide
  Sense strand starting at position 2596 of SEQ ID NO: 1561255
ggaaauggacagugugaca

SEQ ID NO: 1658012 - RNA, 19 nt, Artificial Sequence
  Description of Artificial Sequence: Synthetic oligonucleotide
  Antisense strand to SEQ ID NO: 1658011
ugucacacuguccauuucc

SEQ ID NO: 1658013 - RNA, 19 nt, Artificial Sequence
  Description of Artificial Sequence: Synthetic oligonucleotide
  Sense strand starting at position 2639 of SEQ ID NO: 1561255
gacagcucugccugagagu

SEQ ID NO: 1658014 - RNA, 19 nt, Artificial Sequence
  Description of Artificial Sequence: Synthetic oligonucleotide
  Antisense strand to SEQ ID NO: 1658013
acucucaggcagagcuguc

SEQ ID NO: 1658015 - RNA, 19 nt, Artificial Sequence
  Description of Artificial Sequence: Synthetic oligonucleotide
  Sense strand starting at position 2761 of SEQ ID NO: 1561255
ugccucucuucuggaguga

SEQ ID NO: 1658016 - RNA, 19 nt, Artificial Sequence
  Description of Artificial Sequence: Synthetic oligonucleotide
  Antisense strand to SEQ ID NO: 1658015
ucacuccagaagagaggca

SEQ ID NO: 1658017 - RNA, 19 nt, Artificial Sequence
  Description of Artificial Sequence: Synthetic oligonucleotide
  Sense strand starting at position 3492 of SEQ ID NO: 1561255
gcgagaccguguuucaaga

SEQ ID NO: 1658018 - RNA, 19 nt, Artificial Sequence
  Description of Artificial Sequence: Synthetic oligonucleotide
  Antisense strand to SEQ ID NO: 1658017
ucuugaaacacggucucgc

SEQ ID NO: 1658019 - RNA, 19 nt, Artificial Sequence
  Description of Artificial Sequence: Synthetic oligonucleotide
  Sense strand starting at position 3646 of SEQ ID NO: 1561255
gcaugugcugucugaacuu

SEQ ID NO: 1658020 - RNA, 19 nt, Artificial Sequence
  Description of Artificial Sequence: Synthetic oligonucleotide
  Antisense strand to SEQ ID NO: 1658019
aaguucagacagcacaugc

SEQ ID NO: 1658021 - RNA, 19 nt, Artificial Sequence
  Description of Artificial Sequence: Synthetic oligonucleotide
  Sense strand starting at position 3910 of SEQ ID NO: 1561255
cuguuugguggaggaucaa

SEQ ID NO: 1658022 - RNA, 19 nt, Artificial Sequence
  Description of Artificial Sequence: Synthetic oligonucleotide
  Antisense strand to SEQ ID NO: 1658021
uugauccuccaccaaacag

SEQ ID NO: 1658023 - RNA, 19 nt, Artificial Sequence
  Description of Artificial Sequence: Synthetic oligonucleotide
  Sense strand starting at position 3930 of SEQ ID NO: 1561255
acagaacuuugaggacagu

SEQ ID NO: 1658024 - RNA, 19 nt, Artificial Sequence
  Description of Artificial Sequence: Synthetic oligonucleotide
  Antisense strand to SEQ ID NO: 1658023
acuguccucaaaguucugu

SEQ ID NO: 1658025 - RNA, 19 nt, Artificial Sequence
  Description of Artificial Sequence: Synthetic oligonucleotide
  Sense strand starting at position 3933 of SEQ ID NO: 1561255
gaacuuugaggacaguguu

SEQ ID NO: 1658026 - RNA, 19 nt, Artificial Sequence
  Description of Artificial Sequence: Synthetic oligonucleotide
  Antisense strand to SEQ ID NO: 1658025
aacacuguccucaaaguuc

SEQ ID NO: 1658027 - RNA, 19 nt, Artificial Sequence
  Description of Artificial Sequence: Synthetic oligonucleotide
  Sense strand starting at position 38 of SEQ ID NO: 1561256
auacuuuaugugcacuaga

SEQ ID NO: 1658028 - RNA, 19 nt, Artificial Sequence
  Description of Artificial Sequence: Synthetic oligonucleotide
  Antisense strand to SEQ ID NO: 1658027
ucuagugcacauaaaguau

SEQ ID NO: 1658029 - RNA, 19 nt, Artificial Sequence
  Description of Artificial Sequence: Synthetic oligonucleotide
  Sense strand starting at position 41 of SEQ ID NO: 1561256
cuuuaugugcacuagagca

SEQ ID NO: 1658030 - RNA, 19 nt, Artificial Sequence
  Description of Artificial Sequence: Synthetic oligonucleotide
  Antisense strand to SEQ ID NO: 1658029
ugcucuagugcacauaaag

SEQ ID NO: 1658031 - RNA, 19 nt, Artificial Sequence
  Description of Artificial Sequence: Synthetic oligonucleotide
  Sense strand starting at position 656 of SEQ ID NO: 1561256
gggacuccuucugcgugua

SEQ ID NO: 1658032 - RNA, 19 nt, Artificial Sequence
  Description of Artificial Sequence: Synthetic oligonucleotide
  Antisense strand to SEQ ID NO: 1658031
uacacgcagaaggaguccc

SEQ ID NO: 1658033 - RNA, 19 nt, Artificial Sequence
  Description of Artificial Sequence: Synthetic oligonucleotide
  Sense strand starting at position 661 of SEQ ID NO: 1561256
uccuucugcguguagcauu

SEQ ID NO: 1658034 - RNA, 19 nt, Artificial Sequence
  Description of Artificial Sequence: Synthetic oligonucleotide
  Antisense strand to SEQ ID NO: 1658033
aaugcuacacgcagaagga

SEQ ID NO: 1658035 - RNA, 19 nt, Artificial Sequence
  Description of Artificial Sequence: Synthetic oligonucleotide
  Sense strand starting at position 672 of SEQ ID NO: 1561256
guagcauucuguccugugu

SEQ ID NO: 1658036 - RNA, 19 nt, Artificial Sequence
  Description of Artificial Sequence: Synthetic oligonucleotide
  Antisense strand to SEQ ID NO: 1658035
acacaggacagaaugcuac

SEQ ID NO: 1658037 - RNA, 19 nt, Artificial Sequence
  Description of Artificial Sequence: Synthetic oligonucleotide
  Sense strand starting at position 674 of SEQ ID NO: 1561256
agcauucuguccuguguuu

SEQ ID NO: 1658038 - RNA, 19 nt, Artificial Sequence
  Description of Artificial Sequence: Synthetic oligonucleotide
  Antisense strand to SEQ ID NO: 1658037
aaacacaggacagaaugcu

SEQ ID NO: 1658039 - RNA, 19 nt, Artificial Sequence
  Description of Artificial Sequence: Synthetic oligonucleotide
  Sense strand starting at position 723 of SEQ ID NO: 1561256
gcgaucacuugcugagcaa

SEQ ID NO: 1658040 - RNA, 19 nt, Artificial Sequence
  Description of Artificial Sequence: Synthetic oligonucleotide
  Antisense strand to SEQ ID NO: 1658039
uugcucagcaagugaucgc

SEQ ID NO: 1658041 - RNA, 19 nt, Artificial Sequence
  Description of Artificial Sequence: Synthetic oligonucleotide
  Sense strand starting at position 724 of SEQ ID NO: 1561256
cgaucacuugcugagcaaa

SEQ ID NO: 1658042 - RNA, 19 nt, Artificial Sequence
  Description of Artificial Sequence: Synthetic oligonucleotide
  Antisense strand to SEQ ID NO: 1658041
uuugcucagcaagugaucg

SEQ ID NO: 1658043 - RNA, 19 nt, Artificial Sequence
  Description of Artificial Sequence: Synthetic oligonucleotide
  Sense strand starting at position 735 of SEQ ID NO: 1561256
ugagcaaauccguuucgca

SEQ ID NO: 1658044 - RNA, 19 nt, Artificial Sequence
  Description of Artificial Sequence: Synthetic oligonucleotide
  Antisense strand to SEQ ID NO: 1658043
ugcgaaacggauuugcuca

SEQ ID NO: 1658045 - RNA, 19 nt, Artificial Sequence
  Description of Artificial Sequence: Synthetic oligonucleotide
  Sense strand starting at position 736 of SEQ ID NO: 1561256
gagcaaauccguuucgcac

SEQ ID NO: 1658046 - RNA, 19 nt, Artificial Sequence
  Description of Artificial Sequence: Synthetic oligonucleotide
  Antisense strand to SEQ ID NO: 1658045
gugcgaaacggauuugcuc

SEQ ID NO: 1658047 - RNA, 19 nt, Artificial Sequence
  Description of Artificial Sequence: Synthetic oligonucleotide
  Sense strand starting at position 745 of SEQ ID NO: 1561256
cguuucgcacucuaagaaa

SEQ ID NO: 1658048 - RNA, 19 nt, Artificial Sequence
  Description of Artificial Sequence: Synthetic oligonucleotide
  Antisense strand to SEQ ID NO: 1658047
uuucuuagagugcgaaacg

SEQ ID NO: 1658049 - RNA, 19 nt, Artificial Sequence
  Description of Artificial Sequence: Synthetic oligonucleotide
  Sense strand starting at position 748 of SEQ ID NO: 1561256
uucgcacucuaagaaacuu

SEQ ID NO: 1658050 - RNA, 19 nt, Artificial Sequence
  Description of Artificial Sequence: Synthetic oligonucleotide
  Antisense strand to SEQ ID NO: 1658049
aaguuucuuagagugcgaa

SEQ ID NO: 1658051 - RNA, 19 nt, Artificial Sequence
  Description of Artificial Sequence: Synthetic oligonucleotide
  Sense strand starting at position 2683 of SEQ ID NO: 1561256
gcccgaguuuggagacagu

SEQ ID NO: 1658052 - RNA, 19 nt, Artificial Sequence
  Description of Artificial Sequence: Synthetic oligonucleotide
  Antisense strand to SEQ ID NO: 1658051
acugucuccaaacucgggc

SEQ ID NO: 1658053 - RNA, 19 nt, Artificial Sequence
  Description of Artificial Sequence: Synthetic oligonucleotide
  Sense strand starting at position 2686 of SEQ ID NO: 1561256
cgaguuuggagacaguaaa

SEQ ID NO: 1658054 - RNA, 19 nt, Artificial Sequence
  Description of Artificial Sequence: Synthetic oligonucleotide
  Antisense strand to SEQ ID NO: 1658053
uuuacugucuccaaacucg

SEQ ID NO: 1658055 - RNA, 19 nt, Artificial Sequence
  Description of Artificial Sequence: Synthetic oligonucleotide
  Sense strand starting at position 3009 of SEQ ID NO: 1561256
acaaaugguucucuccaga

SEQ ID NO: 1658056 - RNA, 19 nt, Artificial Sequence
  Description of Artificial Sequence: Synthetic oligonucleotide
  Antisense strand to SEQ ID NO: 1658055
ucuggagagaaccauuugu

SEQ ID NO: 1658057 - RNA, 19 nt, Artificial Sequence
  Description of Artificial Sequence: Synthetic oligonucleotide
  Sense strand starting at position 3019 of SEQ ID NO: 1561256
cucuccagagcuugugauu

SEQ ID NO: 1658058 - RNA, 19 nt, Artificial Sequence
  Description of Artificial Sequence: Synthetic oligonucleotide
  Antisense strand to SEQ ID NO: 1658057
aaucacaagcucuggagag

SEQ ID NO: 1658059 - RNA, 19 nt, Artificial Sequence
  Description of Artificial Sequence: Synthetic oligonucleotide
  Sense strand starting at position 3022 of SEQ ID NO: 1561256
uccagagcuugugauuaua

SEQ ID NO: 1658060 - RNA, 19 nt, Artificial Sequence
  Description of Artificial Sequence: Synthetic oligonucleotide
  Antisense strand to SEQ ID NO: 1658059
uauaaucacaagcucugga

SEQ ID NO: 1658061 - RNA, 19 nt, Artificial Sequence
  Description of Artificial Sequence: Synthetic oligonucleotide
  Sense strand starting at position 3025 of SEQ ID NO: 1561256
agagcuugugauuauacgu

SEQ ID NO: 1658062 - RNA, 19 nt, Artificial Sequence
  Description of Artificial Sequence: Synthetic oligonucleotide
  Antisense strand to SEQ ID NO: 1658061
acguauaaucacaagcucu

SEQ ID NO: 1658063 - RNA, 19 nt, Artificial Sequence
  Description of Artificial Sequence: Synthetic oligonucleotide
  Sense strand starting at position 3162 of SEQ ID NO: 1561256
ggccaaguucugcaaggga

SEQ ID NO: 1658064 - RNA, 19 nt, Artificial Sequence
  Description of Artificial Sequence: Synthetic oligonucleotide
  Antisense strand to SEQ ID NO: 1658063
ucccuugcagaacuuggcc

SEQ ID NO: 1658065 - RNA, 19 nt, Artificial Sequence
  Description of Artificial Sequence: Synthetic oligonucleotide
  Sense strand starting at position 3165 of SEQ ID NO: 1561256
caaguucugcaagggagaa

SEQ ID NO: 1658066 - RNA, 19 nt, Artificial Sequence
  Description of Artificial Sequence: Synthetic oligonucleotide
  Antisense strand to SEQ ID NO: 1658065
uucucccuugcagaacuug

SEQ ID NO: 1658067 - RNA, 19 nt, Artificial Sequence
  Description of Artificial Sequence: Synthetic oligonucleotide
  Sense strand starting at position 3932 of SEQ ID NO: 1561256
caggguuugcaccaagagu

SEQ ID NO: 1658068 - RNA, 19 nt, Artificial Sequence
  Description of Artificial Sequence: Synthetic oligonucleotide
  Antisense strand to SEQ ID NO: 1658067
acucuuggugcaaacccug

SEQ ID NO: 1658069 - RNA, 19 nt, Artificial Sequence
  Description of Artificial Sequence: Synthetic oligonucleotide
  Sense strand starting at position 3962 of SEQ ID NO: 1561256
guaucagggagacauguuu

SEQ ID NO: 1658070 - RNA, 19 nt, Artificial Sequence
  Description of Artificial Sequence: Synthetic oligonucleotide
  Antisense strand to SEQ ID NO: 1658069
aaacaugucucccugauac

SEQ ID NO: 1658071 - RNA, 19 nt, Artificial Sequence
  Description of Artificial Sequence: Synthetic oligonucleotide
  Sense strand starting at position 69 of SEQ ID NO: 1561257
ggcacagucuccuuguacu

SEQ ID NO: 1658072 - RNA, 19 nt, Artificial Sequence
  Description of Artificial Sequence: Synthetic oligonucleotide
  Antisense strand to SEQ ID NO: 1658071
aguacaaggagacugugcc

SEQ ID NO: 1658073 - RNA, 19 nt, Artificial Sequence
  Description of Artificial Sequence: Synthetic oligonucleotide
  Sense strand starting at position 549 of SEQ ID NO: 1561257
gggaauucugagggcuuaa

SEQ ID NO: 1658074 - RNA, 19 nt, Artificial Sequence
  Description of Artificial Sequence: Synthetic oligonucleotide
  Antisense strand to SEQ ID NO: 1658073
uuaagcccucagaauuccc

SEQ ID NO: 1658075 - RNA, 19 nt, Artificial Sequence
  Description of Artificial Sequence: Synthetic oligonucleotide
  Sense strand starting at position 631 of SEQ ID NO: 1561257
cuggcaucccagggugaga

SEQ ID NO: 1658076 - RNA, 19 nt, Artificial Sequence
  Description of Artificial Sequence: Synthetic oligonucleotide
  Antisense strand to SEQ ID NO: 1658075
ucucacccugggaugccag

SEQ ID NO: 1658077 - RNA, 19 nt, Artificial Sequence
  Description of Artificial Sequence: Synthetic oligonucleotide
  Sense strand starting at position 677 of SEQ ID NO: 1561257
gcuagauagagguggugaa

SEQ ID NO: 1658078 - RNA, 19 nt, Artificial Sequence
  Description of Artificial Sequence: Synthetic oligonucleotide
  Antisense strand to SEQ ID NO: 1658077
uucaccaccucuaucuagc

SEQ ID NO: 1658079 - RNA, 19 nt, Artificial Sequence
  Description of Artificial Sequence: Synthetic oligonucleotide
  Sense strand starting at position 777 of SEQ ID NO: 1561257
gacagaaguuucuggaaau

SEQ ID NO: 1658080 - RNA, 19 nt, Artificial Sequence
  Description of Artificial Sequence: Synthetic oligonucleotide
  Antisense strand to SEQ ID NO: 1658079
auuuccagaaacuucuguc

SEQ ID NO: 1658081 - RNA, 19 nt, Artificial Sequence
  Description of Artificial Sequence: Synthetic oligonucleotide
  Sense strand starting at position 778 of SEQ ID NO: 1561257
acagaaguuucuggaaaua

SEQ ID NO: 1658082 - RNA, 19 nt, Artificial Sequence
  Description of Artificial Sequence: Synthetic oligonucleotide
  Antisense strand to SEQ ID NO: 1658081
uauuuccagaaacuucugu

SEQ ID NO: 1658083 - RNA, 19 nt, Artificial Sequence
  Description of Artificial Sequence: Synthetic oligonucleotide
  Sense strand starting at position 893 of SEQ ID NO: 1561257
gcuaauguggccugucuca

SEQ ID NO: 1658084 - RNA, 19 nt, Artificial Sequence
  Description of Artificial Sequence: Synthetic oligonucleotide
  Antisense strand to SEQ ID NO: 1658083
ugagacaggccacauuagc

SEQ ID NO: 1658085 - RNA, 19 nt, Artificial Sequence
  Description of Artificial Sequence: Synthetic oligonucleotide
  Sense strand starting at position 1095 of SEQ ID NO: 1561257
gcaauagggagcuauggua

SEQ ID NO: 1658086 - RNA, 19 nt, Artificial Sequence
  Description of Artificial Sequence: Synthetic oligonucleotide
  Antisense strand to SEQ ID NO: 1658085
uaccauagcucccuauugc

SEQ ID NO: 1658087 - RNA, 19 nt, Artificial Sequence
  Description of Artificial Sequence: Synthetic oligonucleotide
  Sense strand starting at position 1141 of SEQ ID NO: 1561257
cagaucuguggauggcaaa

SEQ ID NO: 1658088 - RNA, 19 nt, Artificial Sequence
  Description of Artificial Sequence: Synthetic oligonucleotide
  Antisense strand to SEQ ID NO: 1658087
uuugccauccacagaucug

SEQ ID NO: 1658089 - RNA, 19 nt, Artificial Sequence
  Description of Artificial Sequence: Synthetic oligonucleotide
  Sense strand starting at position 1144 of SEQ ID NO: 1561257
aucuguggauggcaaagau

SEQ ID NO: 1658090 - RNA, 19 nt, Artificial Sequence
  Description of Artificial Sequence: Synthetic oligonucleotide
  Antisense strand to SEQ ID NO: 1658089
aucuuugccauccacagau

SEQ ID NO: 1658091 - RNA, 19 nt, Artificial Sequence
  Description of Artificial Sequence: Synthetic oligonucleotide
  Sense strand starting at position 1498 of SEQ ID NO: 1561257
acucauugcuguccagaag

SEQ ID NO: 1658092 - RNA, 19 nt, Artificial Sequence
  Description of Artificial Sequence: Synthetic oligonucleotide
  Antisense strand to SEQ ID NO: 1658091
cuucuggacagcaaugagu

SEQ ID NO: 1658093 - RNA, 19 nt, Artificial Sequence
  Description of Artificial Sequence: Synthetic oligonucleotide
  Sense strand starting at position 1529 of SEQ ID NO: 1561257
gaaugcuucuccuucguca

SEQ ID NO: 1658094 - RNA, 19 nt, Artificial Sequence
  Description of Artificial Sequence: Synthetic oligonucleotide
  Antisense strand to SEQ ID NO: 1658093
ugacgaaggagaagcauuc

SEQ ID NO: 1658095 - RNA, 19 nt, Artificial Sequence
  Description of Artificial Sequence: Synthetic oligonucleotide
  Sense strand starting at position 1582 of SEQ ID NO: 1561257
cuuuguuguccuggacaaa

SEQ ID NO: 1658096 - RNA, 19 nt, Artificial Sequence
  Description of Artificial Sequence: Synthetic oligonucleotide
  Antisense strand to SEQ ID NO: 1658095
uuuguccaggacaacaaag

SEQ ID NO: 1658097 - RNA, 19 nt, Artificial Sequence
  Description of Artificial Sequence: Synthetic oligonucleotide
  Sense strand starting at position 1583 of SEQ ID NO: 1561257
uuuguuguccuggacaaag

SEQ ID NO: 1658098 - RNA, 19 nt, Artificial Sequence
  Description of Artificial Sequence: Synthetic oligonucleotide
  Antisense strand to SEQ ID NO: 1658097
cuuuguccaggacaacaaa

SEQ ID NO: 1658099 - RNA, 19 nt, Artificial Sequence
  Description of Artificial Sequence: Synthetic oligonucleotide
  Sense strand starting at position 1669 of SEQ ID NO: 1561257
aauguugauugggcagauu

SEQ ID NO: 1658100 - RNA, 19 nt, Artificial Sequence
  Description of Artificial Sequence: Synthetic oligonucleotide
  Antisense strand to SEQ ID NO: 1658099
aaucugcccaaucaacauu

SEQ ID NO: 1658101 - RNA, 19 nt, Artificial Sequence
  Description of Artificial Sequence: Synthetic oligonucleotide
  Sense strand starting at position 1707 of SEQ ID NO: 1561257
ggagcucacuaccuaagaa

SEQ ID NO: 1658102 - RNA, 19 nt, Artificial Sequence
  Description of Artificial Sequence: Synthetic oligonucleotide
  Antisense strand to SEQ ID NO: 1658101
uucuuagguagugagcucc

SEQ ID NO: 1658103 - RNA, 19 nt, Artificial Sequence
  Description of Artificial Sequence: Synthetic oligonucleotide
  Sense strand starting at position 1719 of SEQ ID NO: 1561257
cuaagaagguuguccugau

SEQ ID NO: 1658104 - RNA, 19 nt, Artificial Sequence
  Description of Artificial Sequence: Synthetic oligonucleotide
  Antisense strand to SEQ ID NO: 1658103
aucaggacaaccuucuuag

SEQ ID NO: 1658105 - RNA, 19 nt, Artificial Sequence
  Description of Artificial Sequence: Synthetic oligonucleotide
  Sense strand starting at position 1720 of SEQ ID NO: 1561257
uaagaagguuguccugauc

SEQ ID NO: 1658106 - RNA, 19 nt, Artificial Sequence
  Description of Artificial Sequence: Synthetic oligonucleotide
  Antisense strand to SEQ ID NO: 1658105
gaucaggacaaccuucuua

SEQ ID NO: 1658107 - RNA, 19 nt, Artificial Sequence
  Description of Artificial Sequence: Synthetic oligonucleotide
  Sense strand starting at position 2016 of SEQ ID NO: 1561257
cuggucacgugacuuguua

SEQ ID NO: 1658108 - RNA, 19 nt, Artificial Sequence
  Description of Artificial Sequence: Synthetic oligonucleotide
  Antisense strand to SEQ ID NO: 1658107
uaacaagucacgugaccag

SEQ ID NO: 1658109 - RNA, 19 nt, Artificial Sequence
  Description of Artificial Sequence: Synthetic oligonucleotide
  Sense strand starting at position 2018 of SEQ ID NO: 1561257
ggucacgugacuuguuauu

SEQ ID NO: 1658110 - RNA, 19 nt, Artificial Sequence
  Description of Artificial Sequence: Synthetic oligonucleotide
  Antisense strand to SEQ ID NO: 1658109
aauaacaagucacgugacc

SEQ ID NO: 1658111 - RNA, 19 nt, Artificial Sequence
  Description of Artificial Sequence: Synthetic oligonucleotide
  Sense strand starting at position 2020 of SEQ ID NO: 1561257
ucacgugacuuguuauugu

SEQ ID NO: 1658112 - RNA, 19 nt, Artificial Sequence
  Description of Artificial Sequence: Synthetic oligonucleotide
  Antisense strand to SEQ ID NO: 1658111
acaauaacaagucacguga

SEQ ID NO: 1658113 - RNA, 19 nt, Artificial Sequence
  Description of Artificial Sequence: Synthetic oligonucleotide
  Sense strand starting at position 2023 of SEQ ID NO: 1561257
cgugacuuguuauuguguu

SEQ ID NO: 1658114 - RNA, 19 nt, Artificial Sequence
  Description of Artificial Sequence: Synthetic oligonucleotide
  Antisense strand to SEQ ID NO: 1658113
aacacaauaacaagucacg

SEQ ID NO: 1658115 - RNA, 19 nt, Artificial Sequence
  Description of Artificial Sequence: Synthetic oligonucleotide
  Sense strand starting at position 2027 of SEQ ID NO: 1561257
acuuguuauuguguuguuu

SEQ ID NO: 1658116 - RNA, 19 nt, Artificial Sequence
  Description of Artificial Sequence: Synthetic oligonucleotide
  Antisense strand to SEQ ID NO: 1658115
aaacaacacaauaacaagu

SEQ ID NO: 1658117 - RNA, 19 nt, Artificial Sequence
  Description of Artificial Sequence: Synthetic oligonucleotide
  Sense strand starting at position 2031 of SEQ ID NO: 1561257
guuauuguguuguuuccuu

SEQ ID NO: 1658118 - RNA, 19 nt, Artificial Sequence
  Description of Artificial Sequence: Synthetic oligonucleotide
  Antisense strand to SEQ ID NO: 1658117
aaggaaacaacacaauaac

SEQ ID NO: 1658119 - RNA, 19 nt, Artificial Sequence
  Description of Artificial Sequence: Synthetic oligonucleotide
  Sense strand starting at position 2151 of SEQ ID NO: 1561257
agcucugacucuuggauuu

SEQ ID NO: 1658120 - RNA, 19 nt, Artificial Sequence
  Description of Artificial Sequence: Synthetic oligonucleotide
  Antisense strand to SEQ ID NO: 1658119
aaauccaagagucagagcu

SEQ ID NO: 1658121 - RNA, 19 nt, Artificial Sequence
  Description of Artificial Sequence: Synthetic oligonucleotide
  Sense strand starting at position 2242 of SEQ ID NO: 1561257
gaagacagaucgcuugagu

SEQ ID NO: 1658122 - RNA, 19 nt, Artificial Sequence
  Description of Artificial Sequence: Synthetic oligonucleotide
  Antisense strand to SEQ ID NO: 1658121
acucaagcgaucugucuuc

SEQ ID NO: 1658123 - RNA, 19 nt, Artificial Sequence
  Description of Artificial Sequence: Synthetic oligonucleotide
  Sense strand starting at position 2332 of SEQ ID NO: 1561257
ggaguaguggcguacgcuu

SEQ ID NO: 1658124 - RNA, 19 nt, Artificial Sequence
  Description of Artificial Sequence: Synthetic oligonucleotide
  Antisense strand to SEQ ID NO: 1658123
aagcguacgccacuacucc

SEQ ID NO: 1658125 - RNA, 19 nt, Artificial Sequence
  Description of Artificial Sequence: Synthetic oligonucleotide
  Sense strand starting at position 2388 of SEQ ID NO: 1561257
ugcuuaacaccuggaaguu

SEQ ID NO: 1658126 - RNA, 19 nt, Artificial Sequence
  Description of Artificial Sequence: Synthetic oligonucleotide
  Antisense strand to SEQ ID NO: 1658125
aacuuccagguguuaagca

SEQ ID NO: 1658127 - RNA, 19 nt, Artificial Sequence
  Description of Artificial Sequence: Synthetic oligonucleotide
  Sense strand starting at position 2439 of SEQ ID NO: 1561257
acuccauucuggguaauaa

SEQ ID NO: 1658128 - RNA, 19 nt, Artificial Sequence
  Description of Artificial Sequence: Synthetic oligonucleotide
  Antisense strand to SEQ ID NO: 1658127
uuauuacccagaauggagu

SEQ ID NO: 1658129 - RNA, 19 nt, Artificial Sequence
  Description of Artificial Sequence: Synthetic oligonucleotide
  Sense strand starting at position 2495 of SEQ ID NO: 1561257
gcuagaauguucccgugag

SEQ ID NO: 1658130 - RNA, 19 nt, Artificial Sequence
  Description of Artificial Sequence: Synthetic oligonucleotide
  Antisense strand to SEQ ID NO: 1658129
cucacgggaacauucuagc

SEQ ID NO: 1658131 - RNA, 19 nt, Artificial Sequence
  Description of Artificial Sequence: Synthetic oligonucleotide
  Sense strand starting at position 2499 of SEQ ID NO: 1561257
gaauguucccgugagcuga

SEQ ID NO: 1658132 - RNA, 19 nt, Artificial Sequence
  Description of Artificial Sequence: Synthetic oligonucleotide
  Antisense strand to SEQ ID NO: 1658131
ucagcucacgggaacauuc

SEQ ID NO: 1658133 - RNA, 19 nt, Artificial Sequence
  Description of Artificial Sequence: Synthetic oligonucleotide
  Sense strand starting at position 3018 of SEQ ID NO: 1561257
cuugaagccucaguuuauu

SEQ ID NO: 1658134 - RNA, 19 nt, Artificial Sequence
  Description of Artificial Sequence: Synthetic oligonucleotide
  Antisense strand to SEQ ID NO: 1658133
aauaaacugaggcuucaag

SEQ ID NO: 1658135 - RNA, 19 nt, Artificial Sequence
  Description of Artificial Sequence: Synthetic oligonucleotide
  Sense strand starting at position 3057 of SEQ ID NO: 1561257
auggaaucuuguucugcca

SEQ ID NO: 1658136 - RNA, 19 nt, Artificial Sequence
  Description of Artificial Sequence: Synthetic oligonucleotide
  Antisense strand to SEQ ID NO: 1658135
uggcagaacaagauuccau

SEQ ID NO: 1658137 - RNA, 19 nt, Artificial Sequence
  Description of Artificial Sequence: Synthetic oligonucleotide
  Sense strand starting at position 3386 of SEQ ID NO: 1561257
aggcucuaauucgagaaua

SEQ ID NO: 1658138 - RNA, 19 nt, Artificial Sequence
  Description of Artificial Sequence: Synthetic oligonucleotide
  Antisense strand to SEQ ID NO: 1658137
uauucucgaauuagagccu

SEQ ID NO: 1658139 - RNA, 19 nt, Artificial Sequence
  Description of Artificial Sequence: Synthetic oligonucleotide
  Sense strand starting at position 3388 of SEQ ID NO: 1561257
gcucuaauucgagaauagc

SEQ ID NO: 1658140 - RNA, 19 nt, Artificial Sequence
  Description of Artificial Sequence: Synthetic oligonucleotide
  Antisense strand to SEQ ID NO: 1658139
gcuauucucgaauuagagc

SEQ ID NO: 1658141 - RNA, 19 nt, Artificial Sequence
  Description of Artificial Sequence: Synthetic oligonucleotide
  Sense strand starting at position 3420 of SEQ ID NO: 1561257
uaaggugagcuuugaagca

SEQ ID NO: 1658142 - RNA, 19 nt, Artificial Sequence
  Description of Artificial Sequence: Synthetic oligonucleotide
  Antisense strand to SEQ ID NO: 1658141
ugcuucaaagcucaccuua

SEQ ID NO: 1658143 - RNA, 19 nt, Artificial Sequence
  Description of Artificial Sequence: Synthetic oligonucleotide
  Sense strand starting at position 3486 of SEQ ID NO: 1561257
aaggaacuuccugggcaaa

SEQ ID NO: 1658144 - RNA, 19 nt, Artificial Sequence
  Description of Artificial Sequence: Synthetic oligonucleotide
  Antisense strand to SEQ ID NO: 1658143
uuugcccaggaaguuccuu

SEQ ID NO: 1658145 - RNA, 19 nt, Artificial Sequence
  Description of Artificial Sequence: Synthetic oligonucleotide
  Sense strand starting at position 3686 of SEQ ID NO: 1561257
ggagaauugcucgaucccu

SEQ ID NO: 1658146 - RNA, 19 nt, Artificial Sequence
  Description of Artificial Sequence: Synthetic oligonucleotide
  Antisense strand to SEQ ID NO: 1658145
agggaucgagcaauucucc

SEQ ID NO: 1658147 - RNA, 19 nt, Artificial Sequence
  Description of Artificial Sequence: Synthetic oligonucleotide
  Sense strand starting at position 3823 of SEQ ID NO: 1561257
ggaagugugcacuaagaag

SEQ ID NO: 1658148 - RNA, 19 nt, Artificial Sequence
  Description of Artificial Sequence: Synthetic oligonucleotide
  Antisense strand to SEQ ID NO: 1658147
cuucuuagugcacacuucc

SEQ ID NO: 1658149 - RNA, 19 nt, Artificial Sequence
  Description of Artificial Sequence: Synthetic oligonucleotide
  Sense strand starting at position 3974 of SEQ ID NO: 1561257
uguagugacuagccaugau

SEQ ID NO: 1658150 - RNA, 19 nt, Artificial Sequence
  Description of Artificial Sequence: Synthetic oligonucleotide
  Antisense strand to SEQ ID NO: 1658149
aucauggcuagucacuaca

SEQ ID NO: 1658151 - RNA, 19 nt, Artificial Sequence
  Description of Artificial Sequence: Synthetic oligonucleotide
  Sense strand starting at position 130 of SEQ ID NO: 1561258
ggcacagucuccuuguacu

SEQ ID NO: 1658152 - RNA, 19 nt, Artificial Sequence
  Description of Artificial Sequence: Synthetic oligonucleotide
  Antisense strand to SEQ ID NO: 1658151
aguacaaggagacugugcc

SEQ ID NO: 1658153 - RNA, 19 nt, Artificial Sequence
  Description of Artificial Sequence: Synthetic oligonucleotide
  Sense strand starting at position 610 of SEQ ID NO: 1561258
gggaauucugagggcuuaa

SEQ ID NO: 1658154 - RNA, 19 nt, Artificial Sequence
  Description of Artificial Sequence: Synthetic oligonucleotide
  Antisense strand to SEQ ID NO: 1658153
uuaagcccucagaauuccc

SEQ ID NO: 1658155 - RNA, 19 nt, Artificial Sequence
  Description of Artificial Sequence: Synthetic oligonucleotide
  Sense strand starting at position 692 of SEQ ID NO: 1561258
cuggcaucccagggugaga

SEQ ID NO: 1658156 - RNA, 19 nt, Artificial Sequence
  Description of Artificial Sequence: Synthetic oligonucleotide
  Antisense strand to SEQ ID NO: 1658155
ucucacccugggaugccag

SEQ ID NO: 1658157 - RNA, 19 nt, Artificial Sequence
  Description of Artificial Sequence: Synthetic oligonucleotide
  Sense strand starting at position 738 of SEQ ID NO: 1561258
gcuagauagagguggugaa

SEQ ID NO: 1658158 - RNA, 19 nt, Artificial Sequence
  Description of Artificial Sequence: Synthetic oligonucleotide
  Antisense strand to SEQ ID NO: 1658157
uucaccaccucuaucuagc

SEQ ID NO: 1658159 - RNA, 19 nt, Artificial Sequence
  Description of Artificial Sequence: Synthetic oligonucleotide
  Sense strand starting at position 838 of SEQ ID NO: 1561258
gacagaaguuucuggaaau

SEQ ID NO: 1658160 - RNA, 19 nt, Artificial Sequence
  Description of Artificial Sequence: Synthetic oligonucleotide
  Antisense strand to SEQ ID NO: 1658159
auuuccagaaacuucuguc

SEQ ID NO: 1658161 - RNA, 19 nt, Artificial Sequence
  Description of Artificial Sequence: Synthetic oligonucleotide
  Sense strand starting at position 839 of SEQ ID NO: 1561258
acagaaguuucuggaaaua

SEQ ID NO: 1658162 - RNA, 19 nt, Artificial Sequence
  Description of Artificial Sequence: Synthetic oligonucleotide
  Antisense strand to SEQ ID NO: 1658161
uauuuccagaaacuucugu

SEQ ID NO: 1658163 - RNA, 19 nt, Artificial Sequence
  Description of Artificial Sequence: Synthetic oligonucleotide
  Sense strand starting at position 954 of SEQ ID NO: 1561258
gcuaauguggccugucuca

SEQ ID NO: 1658164 - RNA, 19 nt, Artificial Sequence
  Description of Artificial Sequence: Synthetic oligonucleotide
  Antisense strand to SEQ ID NO: 1658163
ugagacaggccacauuagc

SEQ ID NO: 1658165 - RNA, 19 nt, Artificial Sequence
  Description of Artificial Sequence: Synthetic oligonucleotide
  Sense strand starting at position 1156 of SEQ ID NO: 1561258
gcaauagggagcuauggua

SEQ ID NO: 1658166 - RNA, 19 nt, Artificial Sequence
  Description of Artificial Sequence: Synthetic oligonucleotide
  Antisense strand to SEQ ID NO: 1658165
uaccauagcucccuauugc

SEQ ID NO: 1658167 - RNA, 19 nt, Artificial Sequence
  Description of Artificial Sequence: Synthetic oligonucleotide
  Sense strand starting at position 1202 of SEQ ID NO: 1561258
cagaucuguggauggcaaa

SEQ ID NO: 1658168 - RNA, 19 nt, Artificial Sequence
  Description of Artificial Sequence: Synthetic oligonucleotide
  Antisense strand to SEQ ID NO: 1658167
uuugccauccacagaucug

SEQ ID NO: 1658169 - RNA, 19 nt, Artificial Sequence
  Description of Artificial Sequence: Synthetic oligonucleotide
  Sense strand starting at position 1205 of SEQ ID NO: 1561258
aucuguggauggcaaagau

SEQ ID NO: 1658170 - RNA, 19 nt, Artificial Sequence
  Description of Artificial Sequence: Synthetic oligonucleotide
  Antisense strand to SEQ ID NO: 1658169
aucuuugccauccacagau

SEQ ID NO: 1658171 - RNA, 19 nt, Artificial Sequence
  Description of Artificial Sequence: Synthetic oligonucleotide
  Sense strand starting at position 1559 of SEQ ID NO: 1561258
acucauugcuguccagaag

SEQ ID NO: 1658172 - RNA, 19 nt, Artificial Sequence
  Description of Artificial Sequence: Synthetic oligonucleotide
  Antisense strand to SEQ ID NO: 1658171
cuucuggacagcaaugagu

SEQ ID NO: 1658173 - RNA, 19 nt, Artificial Sequence
  Description of Artificial Sequence: Synthetic oligonucleotide
  Sense strand starting at position 1590 of SEQ ID NO: 1561258
gaaugcuucuccuucguca

SEQ ID NO: 1658174 - RNA, 19 nt, Artificial Sequence
  Description of Artificial Sequence: Synthetic oligonucleotide
  Antisense strand to SEQ ID NO: 1658173
ugacgaaggagaagcauuc

SEQ ID NO: 1658175 - RNA, 19 nt, Artificial Sequence
  Description of Artificial Sequence: Synthetic oligonucleotide
  Sense strand starting at position 1643 of SEQ ID NO: 1561258
cuuuguuguccuggacaaa

SEQ ID NO: 1658176 - RNA, 19 nt, Artificial Sequence
  Description of Artificial Sequence: Synthetic oligonucleotide
  Antisense strand to SEQ ID NO: 1658175
uuuguccaggacaacaaag

SEQ ID NO: 1658177 - RNA, 19 nt, Artificial Sequence
  Description of Artificial Sequence: Synthetic oligonucleotide
  Sense strand starting at position 1644 of SEQ ID NO: 1561258
uuuguuguccuggacaaag

SEQ ID NO: 1658178 - RNA, 19 nt, Artificial Sequence
  Description of Artificial Sequence: Synthetic oligonucleotide
  Antisense strand to SEQ ID NO: 1658177
cuuuguccaggacaacaaa

SEQ ID NO: 1658179 - RNA, 19 nt, Artificial Sequence
  Description of Artificial Sequence: Synthetic oligonucleotide
  Sense strand starting at position 1730 of SEQ ID NO: 1561258
aauguugauugggcagauu

SEQ ID NO: 1658180 - RNA, 19 nt, Artificial Sequence
  Description of Artificial Sequence: Synthetic oligonucleotide
  Antisense strand to SEQ ID NO: 1658179
aaucugcccaaucaacauu

SEQ ID NO: 1658181 - RNA, 19 nt, Artificial Sequence
  Description of Artificial Sequence: Synthetic oligonucleotide
  Sense strand starting at position 1768 of SEQ ID NO: 1561258
ggagcucacuaccuaagaa

SEQ ID NO: 1658182 - RNA, 19 nt, Artificial Sequence
  Description of Artificial Sequence: Synthetic oligonucleotide
  Antisense strand to SEQ ID NO: 1658181
uucuuagguagugagcucc

SEQ ID NO: 1658183 - RNA, 19 nt, Artificial Sequence
  Description of Artificial Sequence: Synthetic oligonucleotide
  Sense strand starting at position 1780 of SEQ ID NO: 1561258
cuaagaagguuguccugau

SEQ ID NO: 1658184 - RNA, 19 nt, Artificial Sequence
  Description of Artificial Sequence: Synthetic oligonucleotide
  Antisense strand to SEQ ID NO: 1658183
aucaggacaaccuucuuag

SEQ ID NO: 1658185 - RNA, 19 nt, Artificial Sequence
  Description of Artificial Sequence: Synthetic oligonucleotide
  Sense strand starting at position 1781 of SEQ ID NO: 1561258
uaagaagguuguccugauc

SEQ ID NO: 1658186 - RNA, 19 nt, Artificial Sequence
  Description of Artificial Sequence: Synthetic oligonucleotide
  Antisense strand to SEQ ID NO: 1658185
gaucaggacaaccuucuua

SEQ ID NO: 1658187 - RNA, 19 nt, Artificial Sequence
  Description of Artificial Sequence: Synthetic oligonucleotide
  Sense strand starting at position 2077 of SEQ ID NO: 1561258
cuggucacgugacuuguua

SEQ ID NO: 1658188 - RNA, 19 nt, Artificial Sequence
  Description of Artificial Sequence: Synthetic oligonucleotide
  Antisense strand to SEQ ID NO: 1658187
uaacaagucacgugaccag

SEQ ID NO: 1658189 - RNA, 19 nt, Artificial Sequence
  Description of Artificial Sequence: Synthetic oligonucleotide
  Sense strand starting at position 2079 of SEQ ID NO: 1561258
ggucacgugacuuguuauu

SEQ ID NO: 1658190 - RNA, 19 nt, Artificial Sequence
  Description of Artificial Sequence: Synthetic oligonucleotide
  Antisense strand to SEQ ID NO: 1658189
aauaacaagucacgugacc

SEQ ID NO: 1658191 - RNA, 19 nt, Artificial Sequence
  Description of Artificial Sequence: Synthetic oligonucleotide
  Sense strand starting at position 2081 of SEQ ID NO: 1561258
ucacgugacuuguuauugu

SEQ ID NO: 1658192 - RNA, 19 nt, Artificial Sequence
  Description of Artificial Sequence: Synthetic oligonucleotide
  Antisense strand to SEQ ID NO: 1658191
acaauaacaagucacguga

SEQ ID NO: 1658193 - RNA, 19 nt, Artificial Sequence
  Description of Artificial Sequence: Synthetic oligonucleotide
  Sense strand starting at position 2084 of SEQ ID NO: 1561258
cgugacuuguuauuguguu

SEQ ID NO: 1658194 - RNA, 19 nt, Artificial Sequence
  Description of Artificial Sequence: Synthetic oligonucleotide
  Antisense strand to SEQ ID NO: 1658193
aacacaauaacaagucacg

SEQ ID NO: 1658195 - RNA, 19 nt, Artificial Sequence
  Description of Artificial Sequence: Synthetic oligonucleotide
  Sense strand starting at position 2088 of SEQ ID NO: 1561258
acuuguuauuguguuguuu

SEQ ID NO: 1658196 - RNA, 19 nt, Artificial Sequence
  Description of Artificial Sequence: Synthetic oligonucleotide
  Antisense strand to SEQ ID NO: 1658195
aaacaacacaauaacaagu

SEQ ID NO: 1658197 - RNA, 19 nt, Artificial Sequence
  Description of Artificial Sequence: Synthetic oligonucleotide
  Sense strand starting at position 2092 of SEQ ID NO: 1561258
guuauuguguuguuuccuu

SEQ ID NO: 1658198 - RNA, 19 nt, Artificial Sequence
  Description of Artificial Sequence: Synthetic oligonucleotide
  Antisense strand to SEQ ID NO: 1658197
aaggaaacaacacaauaac

SEQ ID NO: 1658199 - RNA, 19 nt, Artificial Sequence
  Description of Artificial Sequence: Synthetic oligonucleotide
  Sense strand starting at position 2212 of SEQ ID NO: 1561258
agcucugacucuuggauuu

SEQ ID NO: 1658200 - RNA, 19 nt, Artificial Sequence
  Description of Artificial Sequence: Synthetic oligonucleotide
  Antisense strand to SEQ ID NO: 1658199
aaauccaagagucagagcu

SEQ ID NO: 1658201 - RNA, 19 nt, Artificial Sequence
  Description of Artificial Sequence: Synthetic oligonucleotide
  Sense strand starting at position 2303 of SEQ ID NO: 1561258
gaagacagaucgcuugagu

SEQ ID NO: 1658202 - RNA, 19 nt, Artificial Sequence
  Description of Artificial Sequence: Synthetic oligonucleotide
  Antisense strand to SEQ ID NO: 1658201
acucaagcgaucugucuuc

SEQ ID NO: 1658203 - RNA, 19 nt, Artificial Sequence
  Description of Artificial Sequence: Synthetic oligonucleotide
  Sense strand starting at position 2393 of SEQ ID NO: 1561258
ggaguaguggcguacgcuu

SEQ ID NO: 1658204 - RNA, 19 nt, Artificial Sequence
  Description of Artificial Sequence: Synthetic oligonucleotide
  Antisense strand to SEQ ID NO: 1658203
aagcguacgccacuacucc

SEQ ID NO: 1658205 - RNA, 19 nt, Artificial Sequence
  Description of Artificial Sequence: Synthetic oligonucleotide
  Sense strand starting at position 2449 of SEQ ID NO: 1561258
ugcuuaacaccuggaaguu

SEQ ID NO: 1658206 - RNA, 19 nt, Artificial Sequence
  Description of Artificial Sequence: Synthetic oligonucleotide
  Antisense strand to SEQ ID NO: 1658205
aacuuccagguguuaagca

SEQ ID NO: 1658207 - RNA, 19 nt, Artificial Sequence
  Description of Artificial Sequence: Synthetic oligonucleotide
  Sense strand starting at position 2500 of SEQ ID NO: 1561258
acuccauucuggguaauaa

SEQ ID NO: 1658208 - RNA, 19 nt, Artificial Sequence
  Description of Artificial Sequence: Synthetic oligonucleotide
  Antisense strand to SEQ ID NO: 1658207
uuauuacccagaauggagu

SEQ ID NO: 1658209 - RNA, 19 nt, Artificial Sequence
  Description of Artificial Sequence: Synthetic oligonucleotide
  Sense strand starting at position 2556 of SEQ ID NO: 1561258
gcuagaauguucccgugag

SEQ ID NO: 1658210 - RNA, 19 nt, Artificial Sequence
  Description of Artificial Sequence: Synthetic oligonucleotide
  Antisense strand to SEQ ID NO: 1658209
cucacgggaacauucuagc

SEQ ID NO: 1658211 - RNA, 19 nt, Artificial Sequence
  Description of Artificial Sequence: Synthetic oligonucleotide
  Sense strand starting at position 2560 of SEQ ID NO: 1561258
gaauguucccgugagcuga

SEQ ID NO: 1658212 - RNA, 19 nt, Artificial Sequence
  Description of Artificial Sequence: Synthetic oligonucleotide
  Antisense strand to SEQ ID NO: 1658211
ucagcucacgggaacauuc

SEQ ID NO: 1658213 - RNA, 19 nt, Artificial Sequence
  Description of Artificial Sequence: Synthetic oligonucleotide
  Sense strand starting at position 3079 of SEQ ID NO: 1561258
cuugaagccucaguuuauu

SEQ ID NO: 1658214 - RNA, 19 nt, Artificial Sequence
  Description of Artificial Sequence: Synthetic oligonucleotide
  Antisense strand to SEQ ID NO: 1658213
aauaaacugaggcuucaag

SEQ ID NO: 1658215 - RNA, 19 nt, Artificial Sequence
  Description of Artificial Sequence: Synthetic oligonucleotide
  Sense strand starting at position 3118 of SEQ ID NO: 1561258
auggaaucuuguucugcca

SEQ ID NO: 1658216 - RNA, 19 nt, Artificial Sequence
  Description of Artificial Sequence: Synthetic oligonucleotide
  Antisense strand to SEQ ID NO: 1658215
uggcagaacaagauuccau

SEQ ID NO: 1658217 - RNA, 19 nt, Artificial Sequence
  Description of Artificial Sequence: Synthetic oligonucleotide
  Sense strand starting at position 3447 of SEQ ID NO: 1561258
aggcucuaauucgagaaua

SEQ ID NO: 1658218 - RNA, 19 nt, Artificial Sequence
  Description of Artificial Sequence: Synthetic oligonucleotide
  Antisense strand to SEQ ID NO: 1658217
uauucucgaauuagagccu

SEQ ID NO: 1658219 - RNA, 19 nt, Artificial Sequence
  Description of Artificial Sequence: Synthetic oligonucleotide
  Sense strand starting at position 3449 of SEQ ID NO: 1561258
gcucuaauucgagaauagc

SEQ ID NO: 1658220 - RNA, 19 nt, Artificial Sequence
  Description of Artificial Sequence: Synthetic oligonucleotide
  Antisense strand to SEQ ID NO: 1658219
gcuauucucgaauuagagc

SEQ ID NO: 1658221 - RNA, 19 nt, Artificial Sequence
  Description of Artificial Sequence: Synthetic oligonucleotide
  Sense strand starting at position 3481 of SEQ ID NO: 1561258
uaaggugagcuuugaagca

SEQ ID NO: 1658222 - RNA, 19 nt, Artificial Sequence
  Description of Artificial Sequence: Synthetic oligonucleotide
  Antisense strand to SEQ ID NO: 1658221
ugcuucaaagcucaccuua

SEQ ID NO: 1658223 - RNA, 19 nt, Artificial Sequence
  Description of Artificial Sequence: Synthetic oligonucleotide
  Sense strand starting at position 3546 of SEQ ID NO: 1561258
gaaggaacuuccugggcaa

SEQ ID NO: 1658224 - RNA, 19 nt, Artificial Sequence
  Description of Artificial Sequence: Synthetic oligonucleotide
  Antisense strand to SEQ ID NO: 1658223
uugcccaggaaguuccuuc

SEQ ID NO: 1658225 - RNA, 19 nt, Artificial Sequence
  Description of Artificial Sequence: Synthetic oligonucleotide
  Sense strand starting at position 3547 of SEQ ID NO: 1561258
aaggaacuuccugggcaaa

SEQ ID NO: 1658226 - RNA, 19 nt, Artificial Sequence
  Description of Artificial Sequence: Synthetic oligonucleotide
  Antisense strand to SEQ ID NO: 1658225
uuugcccaggaaguuccuu

SEQ ID NO: 1658227 - RNA, 19 nt, Artificial Sequence
  Description of Artificial Sequence: Synthetic oligonucleotide
  Sense strand starting at position 3747 of SEQ ID NO: 1561258
ggagaauugcucgaucccu

SEQ ID NO: 1658228 - RNA, 19 nt, Artificial Sequence
  Description of Artificial Sequence: Synthetic oligonucleotide
  Antisense strand to SEQ ID NO: 1658227
agggaucgagcaauucucc

SEQ ID NO: 1658229 - RNA, 19 nt, Artificial Sequence
  Description of Artificial Sequence: Synthetic oligonucleotide
  Sense strand starting at position 3884 of SEQ ID NO: 1561258
ggaagugugcacuaagaag

SEQ ID NO: 1658230 - RNA, 19 nt, Artificial Sequence
  Description of Artificial Sequence: Synthetic oligonucleotide
  Antisense strand to SEQ ID NO: 1658229
cuucuuagugcacacuucc

SEQ ID NO: 1658231 - RNA, 19 nt, Artificial Sequence
  Description of Artificial Sequence: Synthetic oligonucleotide
  Sense strand starting at position 47 of SEQ ID NO: 1561259
acauaagaauugcaagauu

SEQ ID NO: 1658232 - RNA, 19 nt, Artificial Sequence
  Description of Artificial Sequence: Synthetic oligonucleotide
  Antisense strand to SEQ ID NO: 1658231
aaucuugcaauucuuaugu

SEQ ID NO: 1658233 - RNA, 19 nt, Artificial Sequence
  Description of Artificial Sequence: Synthetic oligonucleotide
  Sense strand starting at position 55 of SEQ ID NO: 1561259
auugcaagauuaguagaaa

SEQ ID NO: 1658234 - RNA, 19 nt, Artificial Sequence
  Description of Artificial Sequence: Synthetic oligonucleotide
  Antisense strand to SEQ ID NO: 1658233
uuucuacuaaucuugcaau

SEQ ID NO: 1658235 - RNA, 19 nt, Artificial Sequence
  Description of Artificial Sequence: Synthetic oligonucleotide
  Sense strand starting at position 56 of SEQ ID NO: 1561259
uugcaagauuaguagaaau

SEQ ID NO: 1658236 - RNA, 19 nt, Artificial Sequence
  Description of Artificial Sequence: Synthetic oligonucleotide
  Antisense strand to SEQ ID NO: 1658235
auuucuacuaaucuugcaa

SEQ ID NO: 1658237 - RNA, 19 nt, Artificial Sequence
  Description of Artificial Sequence: Synthetic oligonucleotide
  Sense strand starting at position 149 of SEQ ID NO: 1561259
uuugauguucuauguaucu

SEQ ID NO: 1658238 - RNA, 19 nt, Artificial Sequence
  Description of Artificial Sequence: Synthetic oligonucleotide
  Antisense strand to SEQ ID NO: 1658237
agauacauagaacaucaaa

SEQ ID NO: 1658239 - RNA, 19 nt, Artificial Sequence
  Description of Artificial Sequence: Synthetic oligonucleotide
  Sense strand starting at position 154 of SEQ ID NO: 1561259
uguucuauguaucuaucua

SEQ ID NO: 1658240 - RNA, 19 nt, Artificial Sequence
  Description of Artificial Sequence: Synthetic oligonucleotide
  Antisense strand to SEQ ID NO: 1658239
uagauagauacauagaaca

SEQ ID NO: 1658241 - RNA, 19 nt, Artificial Sequence
  Description of Artificial Sequence: Synthetic oligonucleotide
  Sense strand starting at position 906 of SEQ ID NO: 1561259
acguguaacaaauguggau

SEQ ID NO: 1658242 - RNA, 19 nt, Artificial Sequence
  Description of Artificial Sequence: Synthetic oligonucleotide
  Antisense strand to SEQ ID NO: 1658241
auccacauuuguuacacgu

SEQ ID NO: 1658243 - RNA, 19 nt, Artificial Sequence
  Description of Artificial Sequence: Synthetic oligonucleotide
  Sense strand starting at position 910 of SEQ ID NO: 1561259
guaacaaauguggauaguu

SEQ ID NO: 1658244 - RNA, 19 nt, Artificial Sequence
  Description of Artificial Sequence: Synthetic oligonucleotide
  Antisense strand to SEQ ID NO: 1658243
aacuauccacauuuguuac

SEQ ID NO: 1658245 - RNA, 19 nt, Artificial Sequence
  Description of Artificial Sequence: Synthetic oligonucleotide
  Sense strand starting at position 964 of SEQ ID NO: 1561259
guuugaccaaaguguagua

SEQ ID NO: 1658246 - RNA, 19 nt, Artificial Sequence
  Description of Artificial Sequence: Synthetic oligonucleotide
  Antisense strand to SEQ ID NO: 1658245
uacuacacuuuggucaaac

SEQ ID NO: 1658247 - RNA, 19 nt, Artificial Sequence
  Description of Artificial Sequence: Synthetic oligonucleotide
  Sense strand starting at position 1701 of SEQ ID NO: 1561259
gugcgaucauaccucacua

SEQ ID NO: 1658248 - RNA, 19 nt, Artificial Sequence
  Description of Artificial Sequence: Synthetic oligonucleotide
  Antisense strand to SEQ ID NO: 1658247
uagugagguaugaucgcac

SEQ ID NO: 1658249 - RNA, 19 nt, Artificial Sequence
  Description of Artificial Sequence: Synthetic oligonucleotide
  Sense strand starting at position 1778 of SEQ ID NO: 1561259
acuacaggcguggguaauu

SEQ ID NO: 1658250 - RNA, 19 nt, Artificial Sequence
  Description of Artificial Sequence: Synthetic oligonucleotide
  Antisense strand to SEQ ID NO: 1658249
aauuacccacgccuguagu

SEQ ID NO: 1658251 - RNA, 19 nt, Artificial Sequence
  Description of Artificial Sequence: Synthetic oligonucleotide
  Sense strand starting at position 2040 of SEQ ID NO: 1561259
agucgucaugauggaggua

SEQ ID NO: 1658252 - RNA, 19 nt, Artificial Sequence
  Description of Artificial Sequence: Synthetic oligonucleotide
  Antisense strand to SEQ ID NO: 1658251
uaccuccaucaugacgacu

SEQ ID NO: 1658253 - RNA, 19 nt, Artificial Sequence
  Description of Artificial Sequence: Synthetic oligonucleotide
  Sense strand starting at position 2045 of SEQ ID NO: 1561259
ucaugauggagguacaguu

SEQ ID NO: 1658254 - RNA, 19 nt, Artificial Sequence
  Description of Artificial Sequence: Synthetic oligonucleotide
  Antisense strand to SEQ ID NO: 1658253
aacuguaccuccaucauga

SEQ ID NO: 1658255 - RNA, 19 nt, Artificial Sequence
  Description of Artificial Sequence: Synthetic oligonucleotide
  Sense strand starting at position 2055 of SEQ ID NO: 1561259
gguacaguuccuuggacuu

SEQ ID NO: 1658256 - RNA, 19 nt, Artificial Sequence
  Description of Artificial Sequence: Synthetic oligonucleotide
  Antisense strand to SEQ ID NO: 1658255
aaguccaaggaacuguacc

SEQ ID NO: 1658257 - RNA, 19 nt, Artificial Sequence
  Description of Artificial Sequence: Synthetic oligonucleotide
  Sense strand starting at position 2078 of SEQ ID NO: 1561259
cucccauggcucuggaaau

SEQ ID NO: 1658258 - RNA, 19 nt, Artificial Sequence
  Description of Artificial Sequence: Synthetic oligonucleotide
  Antisense strand to SEQ ID NO: 1658257
auuuccagagccaugggag

SEQ ID NO: 1658259 - RNA, 19 nt, Artificial Sequence
  Description of Artificial Sequence: Synthetic oligonucleotide
  Sense strand starting at position 2089 of SEQ ID NO: 1561259
cuggaaaucucagcucgga

SEQ ID NO: 1658260 - RNA, 19 nt, Artificial Sequence
  Description of Artificial Sequence: Synthetic oligonucleotide
  Antisense strand to SEQ ID NO: 1658259
uccgagcugagauuuccag

SEQ ID NO: 1658261 - RNA, 19 nt, Artificial Sequence
  Description of Artificial Sequence: Synthetic oligonucleotide
  Sense strand starting at position 2132 of SEQ ID NO: 1561259
ccugauucuccugggaaca

SEQ ID NO: 1658262 - RNA, 19 nt, Artificial Sequence
  Description of Artificial Sequence: Synthetic oligonucleotide
  Antisense strand to SEQ ID NO: 1658261
uguucccaggagaaucagg

SEQ ID NO: 1658263 - RNA, 19 nt, Artificial Sequence
  Description of Artificial Sequence: Synthetic oligonucleotide
  Sense strand starting at position 2133 of SEQ ID NO: 1561259
cugauucuccugggaacag

SEQ ID NO: 1658264 - RNA, 19 nt, Artificial Sequence
  Description of Artificial Sequence: Synthetic oligonucleotide
  Antisense strand to SEQ ID NO: 1658263
cuguucccaggagaaucag

SEQ ID NO: 1658265 - RNA, 19 nt, Artificial Sequence
  Description of Artificial Sequence: Synthetic oligonucleotide
  Sense strand starting at position 2134 of SEQ ID NO: 1561259
ugauucuccugggaacaga

SEQ ID NO: 1658266 - RNA, 19 nt, Artificial Sequence
  Description of Artificial Sequence: Synthetic oligonucleotide
  Antisense strand to SEQ ID NO: 1658265
ucuguucccaggagaauca

SEQ ID NO: 1658267 - RNA, 19 nt, Artificial Sequence
  Description of Artificial Sequence: Synthetic oligonucleotide
  Sense strand starting at position 2152 of SEQ ID NO: 1561259
aagaguucugggcacagca

SEQ ID NO: 1658268 - RNA, 19 nt, Artificial Sequence
  Description of Artificial Sequence: Synthetic oligonucleotide
  Antisense strand to SEQ ID NO: 1658267
ugcugugcccagaacucuu

SEQ ID NO: 1658269 - RNA, 19 nt, Artificial Sequence
  Description of Artificial Sequence: Synthetic oligonucleotide
  Sense strand starting at position 2275 of SEQ ID NO: 1561259
ggcguaacggcaggaguua

SEQ ID NO: 1658270 - RNA, 19 nt, Artificial Sequence
  Description of Artificial Sequence: Synthetic oligonucleotide
  Antisense strand to SEQ ID NO: 1658269
uaacuccugccguuacgcc

SEQ ID NO: 1658271 - RNA, 19 nt, Artificial Sequence
  Description of Artificial Sequence: Synthetic oligonucleotide
  Sense strand starting at position 2395 of SEQ ID NO: 1561259
gggaauuguuaauaacagu

SEQ ID NO: 1658272 - RNA, 19 nt, Artificial Sequence
  Description of Artificial Sequence: Synthetic oligonucleotide
  Antisense strand to SEQ ID NO: 1658271
acuguuauuaacaauuccc

SEQ ID NO: 1658273 - RNA, 19 nt, Artificial Sequence
  Description of Artificial Sequence: Synthetic oligonucleotide
  Sense strand starting at position 2487 of SEQ ID NO: 1561259
aggucaggaguuugauauu

SEQ ID NO: 1658274 - RNA, 19 nt, Artificial Sequence
  Description of Artificial Sequence: Synthetic oligonucleotide
  Antisense strand to SEQ ID NO: 1658273
aauaucaaacuccugaccu

SEQ ID NO: 1658275 - RNA, 19 nt, Artificial Sequence
  Description of Artificial Sequence: Synthetic oligonucleotide
  Sense strand starting at position 2498 of SEQ ID NO: 1561259
uugauauuagccugaccaa

SEQ ID NO: 1658276 - RNA, 19 nt, Artificial Sequence
  Description of Artificial Sequence: Synthetic oligonucleotide
  Antisense strand to SEQ ID NO: 1658275
uuggucaggcuaauaucaa

SEQ ID NO: 1658277 - RNA, 19 nt, Artificial Sequence
  Description of Artificial Sequence: Synthetic oligonucleotide
  Sense strand starting at position 2499 of SEQ ID NO: 1561259
ugauauuagccugaccaac

SEQ ID NO: 1658278 - RNA, 19 nt, Artificial Sequence
  Description of Artificial Sequence: Synthetic oligonucleotide
  Antisense strand to SEQ ID NO: 1658277
guuggucaggcuaauauca

SEQ ID NO: 1658279 - RNA, 19 nt, Artificial Sequence
  Description of Artificial Sequence: Synthetic oligonucleotide
  Sense strand starting at position 2730 of SEQ ID NO: 1561259
ggucauccuccagguggaa

SEQ ID NO: 1658280 - RNA, 19 nt, Artificial Sequence
  Description of Artificial Sequence: Synthetic oligonucleotide
  Antisense strand to SEQ ID NO: 1658279
uuccaccuggaggaugacc

SEQ ID NO: 1658281 - RNA, 19 nt, Artificial Sequence
  Description of Artificial Sequence: Synthetic oligonucleotide
  Sense strand starting at position 2806 of SEQ ID NO: 1561259
gccucagccacccgugaau

SEQ ID NO: 1658282 - RNA, 19 nt, Artificial Sequence
  Description of Artificial Sequence: Synthetic oligonucleotide
  Antisense strand to SEQ ID NO: 1658281
auucacggguggcugaggc

SEQ ID NO: 1658283 - RNA, 19 nt, Artificial Sequence
  Description of Artificial Sequence: Synthetic oligonucleotide
  Sense strand starting at position 2945 of SEQ ID NO: 1561259
gguaguuugcgcagagggu

SEQ ID NO: 1658284 - RNA, 19 nt, Artificial Sequence
  Description of Artificial Sequence: Synthetic oligonucleotide
  Antisense strand to SEQ ID NO: 1658283
acccucugcgcaaacuacc

SEQ ID NO: 1658285 - RNA, 19 nt, Artificial Sequence
  Description of Artificial Sequence: Synthetic oligonucleotide
  Sense strand starting at position 3251 of SEQ ID NO: 1561259
ggaauucauggaugagcag

SEQ ID NO: 1658286 - RNA, 19 nt, Artificial Sequence
  Description of Artificial Sequence: Synthetic oligonucleotide
  Antisense strand to SEQ ID NO: 1658285
cugcucauccaugaauucc

SEQ ID NO: 1658287 - RNA, 19 nt, Artificial Sequence
  Description of Artificial Sequence: Synthetic oligonucleotide
  Sense strand starting at position 3283 of SEQ ID NO: 1561259
gauucauugcgacgggaau

SEQ ID NO: 1658288 - RNA, 19 nt, Artificial Sequence
  Description of Artificial Sequence: Synthetic oligonucleotide
  Antisense strand to SEQ ID NO: 1658287
auucccgucgcaaugaauc

SEQ ID NO: 1658289 - RNA, 19 nt, Artificial Sequence
  Description of Artificial Sequence: Synthetic oligonucleotide
  Sense strand starting at position 3284 of SEQ ID NO: 1561259
auucauugcgacgggaaua

SEQ ID NO: 1658290 - RNA, 19 nt, Artificial Sequence
  Description of Artificial Sequence: Synthetic oligonucleotide
  Antisense strand to SEQ ID NO: 1658289
uauucccgucgcaaugaau

SEQ ID NO: 1658291 - RNA, 19 nt, Artificial Sequence
  Description of Artificial Sequence: Synthetic oligonucleotide
  Sense strand starting at position 3296 of SEQ ID NO: 1561259
gggaauaaguacguacuga

SEQ ID NO: 1658292 - RNA, 19 nt, Artificial Sequence
  Description of Artificial Sequence: Synthetic oligonucleotide
  Antisense strand to SEQ ID NO: 1658291
ucaguacguacuuauuccc

SEQ ID NO: 1658293 - RNA, 19 nt, Artificial Sequence
  Description of Artificial Sequence: Synthetic oligonucleotide
  Sense strand starting at position 3363 of SEQ ID NO: 1561259
uggagcuaccuuuaaauau

SEQ ID NO: 1658294 - RNA, 19 nt, Artificial Sequence
  Description of Artificial Sequence: Synthetic oligonucleotide
  Antisense strand to SEQ ID NO: 1658293
auauuuaaagguagcucca

SEQ ID NO: 1658295 - RNA, 19 nt, Artificial Sequence
  Description of Artificial Sequence: Synthetic oligonucleotide
  Sense strand starting at position 3428 of SEQ ID NO: 1561259
guaaacauuucuugguacu

SEQ ID NO: 1658296 - RNA, 19 nt, Artificial Sequence
  Description of Artificial Sequence: Synthetic oligonucleotide
  Antisense strand to SEQ ID NO: 1658295
aguaccaagaaauguuuac

SEQ ID NO: 1658297 - RNA, 19 nt, Artificial Sequence
  Description of Artificial Sequence: Synthetic oligonucleotide
  Sense strand starting at position 3657 of SEQ ID NO: 1561259
aacgguuuccuuugcuagu

SEQ ID NO: 1658298 - RNA, 19 nt, Artificial Sequence
  Description of Artificial Sequence: Synthetic oligonucleotide
  Antisense strand to SEQ ID NO: 1658297
acuagcaaaggaaaccguu

SEQ ID NO: 1658299 - RNA, 19 nt, Artificial Sequence
  Description of Artificial Sequence: Synthetic oligonucleotide
  Sense strand starting at position 3679 of SEQ ID NO: 1561259
gugaaacuguugccuggaa

SEQ ID NO: 1658300 - RNA, 19 nt, Artificial Sequence
  Description of Artificial Sequence: Synthetic oligonucleotide
  Antisense strand to SEQ ID NO: 1658299
uuccaggcaacaguuucac

SEQ ID NO: 1658301 - RNA, 19 nt, Artificial Sequence
  Description of Artificial Sequence: Synthetic oligonucleotide
  Sense strand starting at position 3680 of SEQ ID NO: 1561259
ugaaacuguugccuggaau

SEQ ID NO: 1658302 - RNA, 19 nt, Artificial Sequence
  Description of Artificial Sequence: Synthetic oligonucleotide
  Antisense strand to SEQ ID NO: 1658301
auuccaggcaacaguuuca

SEQ ID NO: 1658303 - RNA, 19 nt, Artificial Sequence
  Description of Artificial Sequence: Synthetic oligonucleotide
  Sense strand starting at position 3681 of SEQ ID NO: 1561259
gaaacuguugccuggaauu

SEQ ID NO: 1658304 - RNA, 19 nt, Artificial Sequence
  Description of Artificial Sequence: Synthetic oligonucleotide
  Antisense strand to SEQ ID NO: 1658303
aauuccaggcaacaguuuc

SEQ ID NO: 1658305 - RNA, 19 nt, Artificial Sequence
  Description of Artificial Sequence: Synthetic oligonucleotide
  Sense strand starting at position 3711 of SEQ ID NO: 1561259
ugugaccaccuuuauuauu

SEQ ID NO: 1658306 - RNA, 19 nt, Artificial Sequence
  Description of Artificial Sequence: Synthetic oligonucleotide
  Antisense strand to SEQ ID NO: 1658305
aauaauaaagguggucaca

SEQ ID NO: 1658307 - RNA, 19 nt, Artificial Sequence
  Description of Artificial Sequence: Synthetic oligonucleotide
  Sense strand starting at position 3958 of SEQ ID NO: 1561259
cagggauggugaucguacu

SEQ ID NO: 1658308 - RNA, 19 nt, Artificial Sequence
  Description of Artificial Sequence: Synthetic oligonucleotide
  Antisense strand to SEQ ID NO: 1658307
aguacgaucaccaucccug

SEQ ID NO: 1658309 - RNA, 19 nt, Artificial Sequence
  Description of Artificial Sequence: Synthetic oligonucleotide
  Sense strand starting at position 3959 of SEQ ID NO: 1561259
agggauggugaucguacua

SEQ ID NO: 1658310 - RNA, 19 nt, Artificial Sequence
  Description of Artificial Sequence: Synthetic oligonucleotide
  Antisense strand to SEQ ID NO: 1658309
uaguacgaucaccaucccu

SEQ ID NO: 1658311 - RNA, 19 nt, Artificial Sequence
  Description of Artificial Sequence: Synthetic oligonucleotide
  Sense strand starting at position 177 of SEQ ID NO: 1561260
gcaggaagucuugagggua

SEQ ID NO: 1658312 - RNA, 19 nt, Artificial Sequence
  Description of Artificial Sequence: Synthetic oligonucleotide
  Antisense strand to SEQ ID NO: 1658311
uacccucaagacuuccugc

SEQ ID NO: 1658313 - RNA, 19 nt, Artificial Sequence
  Description of Artificial Sequence: Synthetic oligonucleotide
  Sense strand starting at position 180 of SEQ ID NO: 1561260
ggaagucuugaggguaucu

SEQ ID NO: 1658314 - RNA, 19 nt, Artificial Sequence
  Description of Artificial Sequence: Synthetic oligonucleotide
  Antisense strand to SEQ ID NO: 1658313
agauacccucaagacuucc

SEQ ID NO: 1658315 - RNA, 19 nt, Artificial Sequence
  Description of Artificial Sequence: Synthetic oligonucleotide
  Sense strand starting at position 203 of SEQ ID NO: 1561260
guguccuccuugcuccaaa

SEQ ID NO: 1658316 - RNA, 19 nt, Artificial Sequence
  Description of Artificial Sequence: Synthetic oligonucleotide
  Antisense strand to SEQ ID NO: 1658315
uuuggagcaaggaggacac

SEQ ID NO: 1658317 - RNA, 19 nt, Artificial Sequence
  Description of Artificial Sequence: Synthetic oligonucleotide
  Sense strand starting at position 268 of SEQ ID NO: 1561260
ggauucucuaguggucaua

SEQ ID NO: 1658318 - RNA, 19 nt, Artificial Sequence
  Description of Artificial Sequence: Synthetic oligonucleotide
  Antisense strand to SEQ ID NO: 1658317
uaugaccacuagagaaucc

SEQ ID NO: 1658319 - RNA, 19 nt, Artificial Sequence
  Description of Artificial Sequence: Synthetic oligonucleotide
  Sense strand starting at position 270 of SEQ ID NO: 1561260
auucucuaguggucauaaa

SEQ ID NO: 1658320 - RNA, 19 nt, Artificial Sequence
  Description of Artificial Sequence: Synthetic oligonucleotide
  Antisense strand to SEQ ID NO: 1658319
uuuaugaccacuagagaau

SEQ ID NO: 1658321 - RNA, 19 nt, Artificial Sequence
  Description of Artificial Sequence: Synthetic oligonucleotide
  Sense strand starting at position 299 of SEQ ID NO: 1561260
acgccacuccgaugucaaa

SEQ ID NO: 1658322 - RNA, 19 nt, Artificial Sequence
  Description of Artificial Sequence: Synthetic oligonucleotide
  Antisense strand to SEQ ID NO: 1658321
uuugacaucggaguggcgu

SEQ ID NO: 1658323 - RNA, 19 nt, Artificial Sequence
  Description of Artificial Sequence: Synthetic oligonucleotide
  Sense strand starting at position 443 of SEQ ID NO: 1561260
gagauaguauugucaggcu

SEQ ID NO: 1658324 - RNA, 19 nt, Artificial Sequence
  Description of Artificial Sequence: Synthetic oligonucleotide
  Antisense strand to SEQ ID NO: 1658323
agccugacaauacuaucuc

SEQ ID NO: 1658325 - RNA, 19 nt, Artificial Sequence
  Description of Artificial Sequence: Synthetic oligonucleotide
  Sense strand starting at position 622 of SEQ ID NO: 1561260
ggauuaaauuccugggaag

SEQ ID NO: 1658326 - RNA, 19 nt, Artificial Sequence
  Description of Artificial Sequence: Synthetic oligonucleotide
  Antisense strand to SEQ ID NO: 1658325
cuucccaggaauuuaaucc

SEQ ID NO: 1658327 - RNA, 19 nt, Artificial Sequence
  Description of Artificial Sequence: Synthetic oligonucleotide
  Sense strand starting at position 625 of SEQ ID NO: 1561260
uuaaauuccugggaagaua

SEQ ID NO: 1658328 - RNA, 19 nt, Artificial Sequence
  Description of Artificial Sequence: Synthetic oligonucleotide
  Antisense strand to SEQ ID NO: 1658327
uaucuucccaggaauuuaa

SEQ ID NO: 1658329 - RNA, 19 nt, Artificial Sequence
  Description of Artificial Sequence: Synthetic oligonucleotide
  Sense strand starting at position 634 of SEQ ID NO: 1561260
ugggaagauagcuggaauu

SEQ ID NO: 1658330 - RNA, 19 nt, Artificial Sequence
  Description of Artificial Sequence: Synthetic oligonucleotide
  Antisense strand to SEQ ID NO: 1658329
aauuccagcuaucuuccca

SEQ ID NO: 1658331 - RNA, 19 nt, Artificial Sequence
  Description of Artificial Sequence: Synthetic oligonucleotide
  Sense strand starting at position 644 of SEQ ID NO: 1561260
gcuggaauuaucugggaag

SEQ ID NO: 1658332 - RNA, 19 nt, Artificial Sequence
  Description of Artificial Sequence: Synthetic oligonucleotide
  Antisense strand to SEQ ID NO: 1658331
cuucccagauaauuccagc

SEQ ID NO: 1658333 - RNA, 19 nt, Artificial Sequence
  Description of Artificial Sequence: Synthetic oligonucleotide
  Sense strand starting at position 676 of SEQ ID NO: 1561260
ggaagagggcuaugaccuu

SEQ ID NO: 1658334 - RNA, 19 nt, Artificial Sequence
  Description of Artificial Sequence: Synthetic oligonucleotide
  Antisense strand to SEQ ID NO: 1658333
aaggucauagcccucuucc

SEQ ID NO: 1658335 - RNA, 19 nt, Artificial Sequence
  Description of Artificial Sequence: Synthetic oligonucleotide
  Sense strand starting at position 682 of SEQ ID NO: 1561260
gggcuaugaccuugaagcu

SEQ ID NO: 1658336 - RNA, 19 nt, Artificial Sequence
  Description of Artificial Sequence: Synthetic oligonucleotide
  Antisense strand to SEQ ID NO: 1658335
agcuucaaggucauagccc

SEQ ID NO: 1658337 - RNA, 19 nt, Artificial Sequence
  Description of Artificial Sequence: Synthetic oligonucleotide
  Sense strand starting at position 683 of SEQ ID NO: 1561260
ggcuaugaccuugaagcuu

SEQ ID NO: 1658338 - RNA, 19 nt, Artificial Sequence
  Description of Artificial Sequence: Synthetic oligonucleotide
  Antisense strand to SEQ ID NO: 1658337
aagcuucaaggucauagcc

SEQ ID NO: 1658339 - RNA, 19 nt, Artificial Sequence
  Description of Artificial Sequence: Synthetic oligonucleotide
  Sense strand starting at position 1219 of SEQ ID NO: 1561260
gucucagucucucuuccaa

SEQ ID NO: 1658340 - RNA, 19 nt, Artificial Sequence
  Description of Artificial Sequence: Synthetic oligonucleotide
  Antisense strand to SEQ ID NO: 1658339
uuggaagagagacugagac

SEQ ID NO: 1658341 - RNA, 19 nt, Artificial Sequence
  Description of Artificial Sequence: Synthetic oligonucleotide
  Sense strand starting at position 1385 of SEQ ID NO: 1561260
gucuuaacaauucgggagu

SEQ ID NO: 1658342 - RNA, 19 nt, Artificial Sequence
  Description of Artificial Sequence: Synthetic oligonucleotide
  Antisense strand to SEQ ID NO: 1658341
acucccgaauuguuaagac

SEQ ID NO: 1658343 - RNA, 19 nt, Artificial Sequence
  Description of Artificial Sequence: Synthetic oligonucleotide
  Sense strand starting at position 1471 of SEQ ID NO: 1561260
ggagucagucguggagaag

SEQ ID NO: 1658344 - RNA, 19 nt, Artificial Sequence
  Description of Artificial Sequence: Synthetic oligonucleotide
  Antisense strand to SEQ ID NO: 1658343
cuucuccacgacugacucc

SEQ ID NO: 1658345 - RNA, 19 nt, Artificial Sequence
  Description of Artificial Sequence: Synthetic oligonucleotide
  Sense strand starting at position 1472 of SEQ ID NO: 1561260
gagucagucguggagaagu

SEQ ID NO: 1658346 - RNA, 19 nt, Artificial Sequence
  Description of Artificial Sequence: Synthetic oligonucleotide
  Antisense strand to SEQ ID NO: 1658345
acuucuccacgacugacuc

SEQ ID NO: 1658347 - RNA, 19 nt, Artificial Sequence
  Description of Artificial Sequence: Synthetic oligonucleotide
  Sense strand starting at position 1474 of SEQ ID NO: 1561260
gucagucguggagaaguga

SEQ ID NO: 1658348 - RNA, 19 nt, Artificial Sequence
  Description of Artificial Sequence: Synthetic oligonucleotide
  Antisense strand to SEQ ID NO: 1658347
ucacuucuccacgacugac

SEQ ID NO: 1658349 - RNA, 19 nt, Artificial Sequence
  Description of Artificial Sequence: Synthetic oligonucleotide
  Sense strand starting at position 1482 of SEQ ID NO: 1561260
uggagaagugaucgacggu

SEQ ID NO: 1658350 - RNA, 19 nt, Artificial Sequence
  Description of Artificial Sequence: Synthetic oligonucleotide
  Antisense strand to SEQ ID NO: 1658349
accgucgaucacuucucca

SEQ ID NO: 1658351 - RNA, 19 nt, Artificial Sequence
  Description of Artificial Sequence: Synthetic oligonucleotide
  Sense strand starting at position 1483 of SEQ ID NO: 1561260
ggagaagugaucgacgguu

SEQ ID NO: 1658352 - RNA, 19 nt, Artificial Sequence
  Description of Artificial Sequence: Synthetic oligonucleotide
  Antisense strand to SEQ ID NO: 1658351
aaccgucgaucacuucucc

SEQ ID NO: 1658353 - RNA, 19 nt, Artificial Sequence
  Description of Artificial Sequence: Synthetic oligonucleotide
  Sense strand starting at position 1485 of SEQ ID NO: 1561260
agaagugaucgacgguucu

SEQ ID NO: 1658354 - RNA, 19 nt, Artificial Sequence
  Description of Artificial Sequence: Synthetic oligonucleotide
  Antisense strand to SEQ ID NO: 1658353
agaaccgucgaucacuucu

SEQ ID NO: 1658355 - RNA, 19 nt, Artificial Sequence
  Description of Artificial Sequence: Synthetic oligonucleotide
  Sense strand starting at position 2270 of SEQ ID NO: 1561260
ucucguacuccgcucaauu

SEQ ID NO: 1658356 - RNA, 19 nt, Artificial Sequence
  Description of Artificial Sequence: Synthetic oligonucleotide
  Antisense strand to SEQ ID NO: 1658355
aauugagcggaguacgaga

SEQ ID NO: 1658357 - RNA, 19 nt, Artificial Sequence
  Description of Artificial Sequence: Synthetic oligonucleotide
  Sense strand starting at position 2314 of SEQ ID NO: 1561260
uuaagcaaguggucucaga

SEQ ID NO: 1658358 - RNA, 19 nt, Artificial Sequence
  Description of Artificial Sequence: Synthetic oligonucleotide
  Antisense strand to SEQ ID NO: 1658357
ucugagaccacuugcuuaa

SEQ ID NO: 1658359 - RNA, 19 nt, Artificial Sequence
  Description of Artificial Sequence: Synthetic oligonucleotide
  Sense strand starting at position 2377 of SEQ ID NO: 1561260
cguuucucuucugucaauu

SEQ ID NO: 1658360 - RNA, 19 nt, Artificial Sequence
  Description of Artificial Sequence: Synthetic oligonucleotide
  Antisense strand to SEQ ID NO: 1658359
aauugacagaagagaaacg

SEQ ID NO: 1658361 - RNA, 19 nt, Artificial Sequence
  Description of Artificial Sequence: Synthetic oligonucleotide
  Sense strand starting at position 2387 of SEQ ID NO: 1561260
cugucaauuucggagaggu

SEQ ID NO: 1658362 - RNA, 19 nt, Artificial Sequence
  Description of Artificial Sequence: Synthetic oligonucleotide
  Antisense strand to SEQ ID NO: 1658361
accucuccgaaauugacag

SEQ ID NO: 1658363 - RNA, 19 nt, Artificial Sequence
  Description of Artificial Sequence: Synthetic oligonucleotide
  Sense strand starting at position 2643 of SEQ ID NO: 1561260
gcuucuuugguguguaaag

SEQ ID NO: 1658364 - RNA, 19 nt, Artificial Sequence
  Description of Artificial Sequence: Synthetic oligonucleotide
  Antisense strand to SEQ ID NO: 1658363
cuuuacacaccaaagaagc

SEQ ID NO: 1658365 - RNA, 19 nt, Artificial Sequence
  Description of Artificial Sequence: Synthetic oligonucleotide
  Sense strand starting at position 2926 of SEQ ID NO: 1561260
aucaguuaguuccacauuu

SEQ ID NO: 1658366 - RNA, 19 nt, Artificial Sequence
  Description of Artificial Sequence: Synthetic oligonucleotide
  Antisense strand to SEQ ID NO: 1658365
aaauguggaacuaacugau

SEQ ID NO: 1658367 - RNA, 19 nt, Artificial Sequence
  Description of Artificial Sequence: Synthetic oligonucleotide
  Sense strand starting at position 2973 of SEQ ID NO: 1561260
agggaaugaaucuggccua

SEQ ID NO: 1658368 - RNA, 19 nt, Artificial Sequence
  Description of Artificial Sequence: Synthetic oligonucleotide
  Antisense strand to SEQ ID NO: 1658367
uaggccagauucauucccu

SEQ ID NO: 1658369 - RNA, 19 nt, Artificial Sequence
  Description of Artificial Sequence: Synthetic oligonucleotide
  Sense strand starting at position 3064 of SEQ ID NO: 1561260
gccagcugacuaugugaga

SEQ ID NO: 1658370 - RNA, 19 nt, Artificial Sequence
  Description of Artificial Sequence: Synthetic oligonucleotide
  Antisense strand to SEQ ID NO: 1658369
ucucacauagucagcuggc

SEQ ID NO: 1658371 - RNA, 19 nt, Artificial Sequence
  Description of Artificial Sequence: Synthetic oligonucleotide
  Sense strand starting at position 3069 of SEQ ID NO: 1561260
cugacuaugugagagaauc

SEQ ID NO: 1658372 - RNA, 19 nt, Artificial Sequence
  Description of Artificial Sequence: Synthetic oligonucleotide
  Antisense strand to SEQ ID NO: 1658371
gauucucucacauagucag

SEQ ID NO: 1658373 - RNA, 19 nt, Artificial Sequence
  Description of Artificial Sequence: Synthetic oligonucleotide
  Sense strand starting at position 3249 of SEQ ID NO: 1561260
ggagguuaucauuguuucu

SEQ ID NO: 1658374 - RNA, 19 nt, Artificial Sequence
  Description of Artificial Sequence: Synthetic oligonucleotide
  Antisense strand to SEQ ID NO: 1658373
agaaacaaugauaaccucc

SEQ ID NO: 1658375 - RNA, 19 nt, Artificial Sequence
  Description of Artificial Sequence: Synthetic oligonucleotide
  Sense strand starting at position 3251 of SEQ ID NO: 1561260
agguuaucauuguuucuca

SEQ ID NO: 1658376 - RNA, 19 nt, Artificial Sequence
  Description of Artificial Sequence: Synthetic oligonucleotide
  Antisense strand to SEQ ID NO: 1658375
ugagaaacaaugauaaccu

SEQ ID NO: 1658377 - RNA, 19 nt, Artificial Sequence
  Description of Artificial Sequence: Synthetic oligonucleotide
  Sense strand starting at position 3283 of SEQ ID NO: 1561260
ggcugaguugucugggaga

SEQ ID NO: 1658378 - RNA, 19 nt, Artificial Sequence
  Description of Artificial Sequence: Synthetic oligonucleotide
  Antisense strand to SEQ ID NO: 1658377
ucucccagacaacucagcc

SEQ ID NO: 1658379 - RNA, 19 nt, Artificial Sequence
  Description of Artificial Sequence: Synthetic oligonucleotide
  Sense strand starting at position 3285 of SEQ ID NO: 1561260
cugaguugucugggagaau

SEQ ID NO: 1658380 - RNA, 19 nt, Artificial Sequence
  Description of Artificial Sequence: Synthetic oligonucleotide
  Antisense strand to SEQ ID NO: 1658379
auucucccagacaacucag

SEQ ID NO: 1658381 - RNA, 19 nt, Artificial Sequence
  Description of Artificial Sequence: Synthetic oligonucleotide
  Sense strand starting at position 3691 of SEQ ID NO: 1561260
uaccuaguugaaugaguua

SEQ ID NO: 1658382 - RNA, 19 nt, Artificial Sequence
  Description of Artificial Sequence: Synthetic oligonucleotide
  Antisense strand to SEQ ID NO: 1658381
uaacucauucaacuaggua

SEQ ID NO: 1658383 - RNA, 19 nt, Artificial Sequence
  Description of Artificial Sequence: Synthetic oligonucleotide
  Sense strand starting at position 3696 of SEQ ID NO: 1561260
aguugaaugaguuaccagu

SEQ ID NO: 1658384 - RNA, 19 nt, Artificial Sequence
  Description of Artificial Sequence: Synthetic oligonucleotide
  Antisense strand to SEQ ID NO: 1658383
acugguaacucauucaacu

SEQ ID NO: 1658385 - RNA, 19 nt, Artificial Sequence
  Description of Artificial Sequence: Synthetic oligonucleotide
  Sense strand starting at position 3758 of SEQ ID NO: 1561260
gcuuucccaucugugacau

SEQ ID NO: 1658386 - RNA, 19 nt, Artificial Sequence
  Description of Artificial Sequence: Synthetic oligonucleotide
  Antisense strand to SEQ ID NO: 1658385
augucacagaugggaaagc

SEQ ID NO: 1658387 - RNA, 19 nt, Artificial Sequence
  Description of Artificial Sequence: Synthetic oligonucleotide
  Sense strand starting at position 3759 of SEQ ID NO: 1561260
cuuucccaucugugacaua

SEQ ID NO: 1658388 - RNA, 19 nt, Artificial Sequence
  Description of Artificial Sequence: Synthetic oligonucleotide
  Antisense strand to SEQ ID NO: 1658387
uaugucacagaugggaaag

SEQ ID NO: 1658389 - RNA, 19 nt, Artificial Sequence
  Description of Artificial Sequence: Synthetic oligonucleotide
  Sense strand starting at position 3784 of SEQ ID NO: 1561260
guggcauuucugggugcca

SEQ ID NO: 1658390 - RNA, 19 nt, Artificial Sequence
  Description of Artificial Sequence: Synthetic oligonucleotide
  Antisense strand to SEQ ID NO: 1658389
uggcacccagaaaugccac

SEQ ID NO: 1658391 - RNA, 19 nt, Artificial Sequence
  Description of Artificial Sequence: Synthetic oligonucleotide
  Sense strand starting at position 132 of SEQ ID NO: 1561261
gcuugauccugagaggcua

SEQ ID NO: 1658392 - RNA, 19 nt, Artificial Sequence
  Description of Artificial Sequence: Synthetic oligonucleotide
  Antisense strand to SEQ ID NO: 1658391
uagccucucaggaucaagc

SEQ ID NO: 1658393 - RNA, 19 nt, Artificial Sequence
  Description of Artificial Sequence: Synthetic oligonucleotide
  Sense strand starting at position 557 of SEQ ID NO: 1561261
ggaguaaaggcgcauggau

SEQ ID NO: 1658394 - RNA, 19 nt, Artificial Sequence
  Description of Artificial Sequence: Synthetic oligonucleotide
  Antisense strand to SEQ ID NO: 1658393
auccaugcgccuuuacucc

SEQ ID NO: 1658395 - RNA, 19 nt, Artificial Sequence
  Description of Artificial Sequence: Synthetic oligonucleotide
  Sense strand starting at position 976 of SEQ ID NO: 1561261
agaaaucccugccgagaaa

SEQ ID NO: 1658396 - RNA, 19 nt, Artificial Sequence
  Description of Artificial Sequence: Synthetic oligonucleotide
  Antisense strand to SEQ ID NO: 1658395
uuucucggcagggauuucu

SEQ ID NO: 1658397 - RNA, 19 nt, Artificial Sequence
  Description of Artificial Sequence: Synthetic oligonucleotide
  Sense strand starting at position 1063 of SEQ ID NO: 1561261
uaucuccucugagauggau

SEQ ID NO: 1658398 - RNA, 19 nt, Artificial Sequence
  Description of Artificial Sequence: Synthetic oligonucleotide
  Antisense strand to SEQ ID NO: 1658397
auccaucucagaggagaua

SEQ ID NO: 1658399 - RNA, 19 nt, Artificial Sequence
  Description of Artificial Sequence: Synthetic oligonucleotide
  Sense strand starting at position 1460 of SEQ ID NO: 1561261
cagggagccuguuaagcuu

SEQ ID NO: 1658400 - RNA, 19 nt, Artificial Sequence
  Description of Artificial Sequence: Synthetic oligonucleotide
  Antisense strand to SEQ ID NO: 1658399
aagcuuaacaggcucccug

SEQ ID NO: 1658401 - RNA, 19 nt, Artificial Sequence
  Description of Artificial Sequence: Synthetic oligonucleotide
  Sense strand starting at position 1490 of SEQ ID NO: 1561261
cccagaaucucagauugug

SEQ ID NO: 1658402 - RNA, 19 nt, Artificial Sequence
  Description of Artificial Sequence: Synthetic oligonucleotide
  Antisense strand to SEQ ID NO: 1658401
cacaaucugagauucuggg

SEQ ID NO: 1658403 - RNA, 19 nt, Artificial Sequence
  Description of Artificial Sequence: Synthetic oligonucleotide
  Sense strand starting at position 2080 of SEQ ID NO: 1561261
ugcagaaucugacaucucu

SEQ ID NO: 1658404 - RNA, 19 nt, Artificial Sequence
  Description of Artificial Sequence: Synthetic oligonucleotide
  Antisense strand to SEQ ID NO: 1658403
agagaugucagauucugca

SEQ ID NO: 1658405 - RNA, 19 nt, Artificial Sequence
  Description of Artificial Sequence: Synthetic oligonucleotide
  Sense strand starting at position 2168 of SEQ ID NO: 1561261
cuaugagaugggugagcuu

SEQ ID NO: 1658406 - RNA, 19 nt, Artificial Sequence
  Description of Artificial Sequence: Synthetic oligonucleotide
  Antisense strand to SEQ ID NO: 1658405
aagcucacccaucucauag

SEQ ID NO: 1658407 - RNA, 19 nt, Artificial Sequence
  Description of Artificial Sequence: Synthetic oligonucleotide
  Sense strand starting at position 2177 of SEQ ID NO: 1561261
gggugagcuuccuccauau

SEQ ID NO: 1658408 - RNA, 19 nt, Artificial Sequence
  Description of Artificial Sequence: Synthetic oligonucleotide
  Antisense strand to SEQ ID NO: 1658407
auauggaggaagcucaccc

SEQ ID NO: 1658409 - RNA, 19 nt, Artificial Sequence
  Description of Artificial Sequence: Synthetic oligonucleotide
  Sense strand starting at position 2345 of SEQ ID NO: 1561261
agagguugccugugagcau

SEQ ID NO: 1658410 - RNA, 19 nt, Artificial Sequence
  Description of Artificial Sequence: Synthetic oligonucleotide
  Antisense strand to SEQ ID NO: 1658409
augcucacaggcaaccucu

SEQ ID NO: 1658411 - RNA, 19 nt, Artificial Sequence
  Description of Artificial Sequence: Synthetic oligonucleotide
  Sense strand starting at position 2648 of SEQ ID NO: 1561261
acaugucuuugcucaaaug

SEQ ID NO: 1658412 - RNA, 19 nt, Artificial Sequence
  Description of Artificial Sequence: Synthetic oligonucleotide
  Antisense strand to SEQ ID NO: 1658411
cauuugagcaaagacaugu

SEQ ID NO: 1658413 - RNA, 19 nt, Artificial Sequence
  Description of Artificial Sequence: Synthetic oligonucleotide
  Sense strand starting at position 2749 of SEQ ID NO: 1561261
uagguuaagcccugaucuu

SEQ ID NO: 1658414 - RNA, 19 nt, Artificial Sequence
  Description of Artificial Sequence: Synthetic oligonucleotide
  Antisense strand to SEQ ID NO: 1658413
aagaucagggcuuaaccua

SEQ ID NO: 1658415 - RNA, 19 nt, Artificial Sequence
  Description of Artificial Sequence: Synthetic oligonucleotide
  Sense strand starting at position 2750 of SEQ ID NO: 1561261
agguuaagcccugaucuuu

SEQ ID NO: 1658416 - RNA, 19 nt, Artificial Sequence
  Description of Artificial Sequence: Synthetic oligonucleotide
  Antisense strand to SEQ ID NO: 1658415
aaagaucagggcuuaaccu

SEQ ID NO: 1658417 - RNA, 19 nt, Artificial Sequence
  Description of Artificial Sequence: Synthetic oligonucleotide
  Sense strand starting at position 2756 of SEQ ID NO: 1561261
agcccugaucuuuguccaa

SEQ ID NO: 1658418 - RNA, 19 nt, Artificial Sequence
  Description of Artificial Sequence: Synthetic oligonucleotide
  Antisense strand to SEQ ID NO: 1658417
uuggacaaagaucagggcu

SEQ ID NO: 1658419 - RNA, 19 nt, Artificial Sequence
  Description of Artificial Sequence: Synthetic oligonucleotide
  Sense strand starting at position 3262 of SEQ ID NO: 1561261
gugugaucagcucaccaca

SEQ ID NO: 1658420 - RNA, 19 nt, Artificial Sequence
  Description of Artificial Sequence: Synthetic oligonucleotide
  Antisense strand to SEQ ID NO: 1658419
uguggugagcugaucacac

SEQ ID NO: 1658421 - RNA, 19 nt, Artificial Sequence
  Description of Artificial Sequence: Synthetic oligonucleotide
  Sense strand starting at position 3333 of SEQ ID NO: 1561261
ugagauuacgggcaugcau

SEQ ID NO: 1658422 - RNA, 19 nt, Artificial Sequence
  Description of Artificial Sequence: Synthetic oligonucleotide
  Antisense strand to SEQ ID NO: 1658421
augcaugcccguaaucuca

SEQ ID NO: 1658423 - RNA, 19 nt, Artificial Sequence
  Description of Artificial Sequence: Synthetic oligonucleotide
  Sense strand starting at position 273 of SEQ ID NO: 1561262
ugauguaacugcccaguga

SEQ ID NO: 1658424 - RNA, 19 nt, Artificial Sequence
  Description of Artificial Sequence: Synthetic oligonucleotide
  Antisense strand to SEQ ID NO: 1658423
ucacugggcaguuacauca

SEQ ID NO: 1658425 - RNA, 19 nt, Artificial Sequence
  Description of Artificial Sequence: Synthetic oligonucleotide
  Sense strand starting at position 334 of SEQ ID NO: 1561262
ggcuaagucuuacugaugu

SEQ ID NO: 1658426 - RNA, 19 nt, Artificial Sequence
  Description of Artificial Sequence: Synthetic oligonucleotide
  Antisense strand to SEQ ID NO: 1658425
acaucaguaagacuuagcc

SEQ ID NO: 1658427 - RNA, 19 nt, Artificial Sequence
  Description of Artificial Sequence: Synthetic oligonucleotide
  Sense strand starting at position 345 of SEQ ID NO: 1561262
acugaugugcuccaguacu

SEQ ID NO: 1658428 - RNA, 19 nt, Artificial Sequence
  Description of Artificial Sequence: Synthetic oligonucleotide
  Antisense strand to SEQ ID NO: 1658427
aguacuggagcacaucagu

SEQ ID NO: 1658429 - RNA, 19 nt, Artificial Sequence
  Description of Artificial Sequence: Synthetic oligonucleotide
  Sense strand starting at position 355 of SEQ ID NO: 1561262
uccaguacucagcagaaug

SEQ ID NO: 1658430 - RNA, 19 nt, Artificial Sequence
  Description of Artificial Sequence: Synthetic oligonucleotide
  Antisense strand to SEQ ID NO: 1658429
cauucugcugaguacugga

SEQ ID NO: 1658431 - RNA, 19 nt, Artificial Sequence
  Description of Artificial Sequence: Synthetic oligonucleotide
  Sense strand starting at position 389 of SEQ ID NO: 1561262
gugcucaaugaagacgaau

SEQ ID NO: 1658432 - RNA, 19 nt, Artificial Sequence
  Description of Artificial Sequence: Synthetic oligonucleotide
  Antisense strand to SEQ ID NO: 1658431
auucgucuucauugagcac

SEQ ID NO: 1658433 - RNA, 19 nt, Artificial Sequence
  Description of Artificial Sequence: Synthetic oligonucleotide
  Sense strand starting at position 391 of SEQ ID NO: 1561262
gcucaaugaagacgaauga

SEQ ID NO: 1658434 - RNA, 19 nt, Artificial Sequence
  Description of Artificial Sequence: Synthetic oligonucleotide
  Antisense strand to SEQ ID NO: 1658433
ucauucgucuucauugagc

SEQ ID NO: 1658435 - RNA, 19 nt, Artificial Sequence
  Description of Artificial Sequence: Synthetic oligonucleotide
  Sense strand starting at position 425 of SEQ ID NO: 1561262
agagcaggugcucgguaaa

SEQ ID NO: 1658436 - RNA, 19 nt, Artificial Sequence
  Description of Artificial Sequence: Synthetic oligonucleotide
  Antisense strand to SEQ ID NO: 1658435
uuuaccgagcaccugcucu

SEQ ID NO: 1658437 - RNA, 19 nt, Artificial Sequence
  Description of Artificial Sequence: Synthetic oligonucleotide
  Sense strand starting at position 454 of SEQ ID NO: 1561262
uccaauuagcucugaagua

SEQ ID NO: 1658438 - RNA, 19 nt, Artificial Sequence
  Description of Artificial Sequence: Synthetic oligonucleotide
  Antisense strand to SEQ ID NO: 1658437
uacuucagagcuaauugga

SEQ ID NO: 1658439 - RNA, 19 nt, Artificial Sequence
  Description of Artificial Sequence: Synthetic oligonucleotide
  Sense strand starting at position 1597 of SEQ ID NO: 1561262
acugauuacuaauucgagu

SEQ ID NO: 1658440 - RNA, 19 nt, Artificial Sequence
  Description of Artificial Sequence: Synthetic oligonucleotide
  Antisense strand to SEQ ID NO: 1658439
acucgaauuaguaaucagu

SEQ ID NO: 1658441 - RNA, 19 nt, Artificial Sequence
  Description of Artificial Sequence: Synthetic oligonucleotide
  Sense strand starting at position 1644 of SEQ ID NO: 1561262
cagucuagcgucuauacaa

SEQ ID NO: 1658442 - RNA, 19 nt, Artificial Sequence
  Description of Artificial Sequence: Synthetic oligonucleotide
  Antisense strand to SEQ ID NO: 1658441
uuguauagacgcuagacug

SEQ ID NO: 1658443 - RNA, 19 nt, Artificial Sequence
  Description of Artificial Sequence: Synthetic oligonucleotide
  Sense strand starting at position 2125 of SEQ ID NO: 1561262
cgguuccgggaucaugaaa

SEQ ID NO: 1658444 - RNA, 19 nt, Artificial Sequence
  Description of Artificial Sequence: Synthetic oligonucleotide
  Antisense strand to SEQ ID NO: 1658443
uuucaugaucccggaaccg

SEQ ID NO: 1658445 - RNA, 19 nt, Artificial Sequence
  Description of Artificial Sequence: Synthetic oligonucleotide
  Sense strand starting at position 2153 of SEQ ID NO: 1561262
ugaguuugggcucacucua

SEQ ID NO: 1658446 - RNA, 19 nt, Artificial Sequence
  Description of Artificial Sequence: Synthetic oligonucleotide
  Antisense strand to SEQ ID NO: 1658445
uagagugagcccaaacuca

SEQ ID NO: 1658447 - RNA, 19 nt, Artificial Sequence
  Description of Artificial Sequence: Synthetic oligonucleotide
  Sense strand starting at position 2158 of SEQ ID NO: 1561262
uugggcucacucuaggauu

SEQ ID NO: 1658448 - RNA, 19 nt, Artificial Sequence
  Description of Artificial Sequence: Synthetic oligonucleotide
  Antisense strand to SEQ ID NO: 1658447
aauccuagagugagcccaa

SEQ ID NO: 1658449 - RNA, 19 nt, Artificial Sequence
  Description of Artificial Sequence: Synthetic oligonucleotide
  Sense strand starting at position 2257 of SEQ ID NO: 1561262
uggucacaccuucgauacu

SEQ ID NO: 1658450 - RNA, 19 nt, Artificial Sequence
  Description of Artificial Sequence: Synthetic oligonucleotide
  Antisense strand to SEQ ID NO: 1658449
aguaucgaaggugugacca

SEQ ID NO: 1658451 - RNA, 19 nt, Artificial Sequence
  Description of Artificial Sequence: Synthetic oligonucleotide
  Sense strand starting at position 2408 of SEQ ID NO: 1561262
acagucucagauuggucaa

SEQ ID NO: 1658452 - RNA, 19 nt, Artificial Sequence
  Description of Artificial Sequence: Synthetic oligonucleotide
  Antisense strand to SEQ ID NO: 1658451
uugaccaaucugagacugu

SEQ ID NO: 1658453 - RNA, 19 nt, Artificial Sequence
  Description of Artificial Sequence: Synthetic oligonucleotide
  Sense strand starting at position 2410 of SEQ ID NO: 1561262
agucucagauuggucaagu

SEQ ID NO: 1658454 - RNA, 19 nt, Artificial Sequence
  Description of Artificial Sequence: Synthetic oligonucleotide
  Antisense strand to SEQ ID NO: 1658453
acuugaccaaucugagacu

SEQ ID NO: 1658455 - RNA, 19 nt, Artificial Sequence
  Description of Artificial Sequence: Synthetic oligonucleotide
  Sense strand starting at position 2411 of SEQ ID NO: 1561262
gucucagauuggucaaguc

SEQ ID NO: 1658456 - RNA, 19 nt, Artificial Sequence
  Description of Artificial Sequence: Synthetic oligonucleotide
  Antisense strand to SEQ ID NO: 1658455
gacuugaccaaucugagac

SEQ ID NO: 1658457 - RNA, 19 nt, Artificial Sequence
  Description of Artificial Sequence: Synthetic oligonucleotide
  Sense strand starting at position 2436 of SEQ ID NO: 1561262
agguuaugccuccaauucu

SEQ ID NO: 1658458 - RNA, 19 nt, Artificial Sequence
  Description of Artificial Sequence: Synthetic oligonucleotide
  Antisense strand to SEQ ID NO: 1658457
agaauuggaggcauaaccu

SEQ ID NO: 1658459 - RNA, 19 nt, Artificial Sequence
  Description of Artificial Sequence: Synthetic oligonucleotide
  Sense strand starting at position 2559 of SEQ ID NO: 1561262
auuggucacuuucccgaua

SEQ ID NO: 1658460 - RNA, 19 nt, Artificial Sequence
  Description of Artificial Sequence: Synthetic oligonucleotide
  Antisense strand to SEQ ID NO: 1658459
uaucgggaaagugaccaau

SEQ ID NO: 1658461 - RNA, 19 nt, Artificial Sequence
  Description of Artificial Sequence: Synthetic oligonucleotide
  Sense strand starting at position 2560 of SEQ ID NO: 1561262
uuggucacuuucccgauaa

SEQ ID NO: 1658462 - RNA, 19 nt, Artificial Sequence
  Description of Artificial Sequence: Synthetic oligonucleotide
  Antisense strand to SEQ ID NO: 1658461
uuaucgggaaagugaccaa

SEQ ID NO: 1658463 - RNA, 19 nt, Artificial Sequence
  Description of Artificial Sequence: Synthetic oligonucleotide
  Sense strand starting at position 2562 of SEQ ID NO: 1561262
ggucacuuucccgauaauc

SEQ ID NO: 1658464 - RNA, 19 nt, Artificial Sequence
  Description of Artificial Sequence: Synthetic oligonucleotide
  Antisense strand to SEQ ID NO: 1658463
gauuaucgggaaagugacc

SEQ ID NO: 1658465 - RNA, 19 nt, Artificial Sequence
  Description of Artificial Sequence: Synthetic oligonucleotide
  Sense strand starting at position 2659 of SEQ ID NO: 1561262
gaccacucgcuaugcagau

SEQ ID NO: 1658466 - RNA, 19 nt, Artificial Sequence
  Description of Artificial Sequence: Synthetic oligonucleotide
  Antisense strand to SEQ ID NO: 1658465
aucugcauagcgagugguc

SEQ ID NO: 1658467 - RNA, 19 nt, Artificial Sequence
  Description of Artificial Sequence: Synthetic oligonucleotide
  Sense strand starting at position 2732 of SEQ ID NO: 1561262
ucgucaugucuugcuccua

SEQ ID NO: 1658468 - RNA, 19 nt, Artificial Sequence
  Description of Artificial Sequence: Synthetic oligonucleotide
  Antisense strand to SEQ ID NO: 1658467
uaggagcaagacaugacga

SEQ ID NO: 1658469 - RNA, 19 nt, Artificial Sequence
  Description of Artificial Sequence: Synthetic oligonucleotide
  Sense strand starting at position 2814 of SEQ ID NO: 1561262
ucuaguagucccuaaccua

SEQ ID NO: 1658470 - RNA, 19 nt, Artificial Sequence
  Description of Artificial Sequence: Synthetic oligonucleotide
  Antisense strand to SEQ ID NO: 1658469
uagguuagggacuacuaga

SEQ ID NO: 1658471 - RNA, 19 nt, Artificial Sequence
  Description of Artificial Sequence: Synthetic oligonucleotide
  Sense strand starting at position 2853 of SEQ ID NO: 1561262
agcgaaaucugucugcacu

SEQ ID NO: 1658472 - RNA, 19 nt, Artificial Sequence
  Description of Artificial Sequence: Synthetic oligonucleotide
  Antisense strand to SEQ ID NO: 1658471
agugcagacagauuucgcu

SEQ ID NO: 1658473 - RNA, 19 nt, Artificial Sequence
  Description of Artificial Sequence: Synthetic oligonucleotide
  Sense strand starting at position 2855 of SEQ ID NO: 1561262
cgaaaucugucugcacuga

SEQ ID NO: 1658474 - RNA, 19 nt, Artificial Sequence
  Description of Artificial Sequence: Synthetic oligonucleotide
  Antisense strand to SEQ ID NO: 1658473
ucagugcagacagauuucg

SEQ ID NO: 1658475 - RNA, 19 nt, Artificial Sequence
  Description of Artificial Sequence: Synthetic oligonucleotide
  Sense strand starting at position 2856 of SEQ ID NO: 1561262
gaaaucugucugcacugau

SEQ ID NO: 1658476 - RNA, 19 nt, Artificial Sequence
  Description of Artificial Sequence: Synthetic oligonucleotide
  Antisense strand to SEQ ID NO: 1658475
aucagugcagacagauuuc

SEQ ID NO: 1658477 - RNA, 19 nt, Artificial Sequence
  Description of Artificial Sequence: Synthetic oligonucleotide
  Sense strand starting at position 2962 of SEQ ID NO: 1561262
gcgcgauccauguccaugu

SEQ ID NO: 1658478 - RNA, 19 nt, Artificial Sequence
  Description of Artificial Sequence: Synthetic oligonucleotide
  Antisense strand to SEQ ID NO: 1658477
acauggacauggaucgcgc

SEQ ID NO: 1658479 - RNA, 19 nt, Artificial Sequence
  Description of Artificial Sequence: Synthetic oligonucleotide
  Sense strand starting at position 2982 of SEQ ID NO: 1561262
cgcgccuaucaauaaaguu

SEQ ID NO: 1658480 - RNA, 19 nt, Artificial Sequence
  Description of Artificial Sequence: Synthetic oligonucleotide
  Antisense strand to SEQ ID NO: 1658479
aacuuuauugauaggcgcg

SEQ ID NO: 1658481 - RNA, 19 nt, Artificial Sequence
  Description of Artificial Sequence: Synthetic oligonucleotide
  Sense strand starting at position 3045 of SEQ ID NO: 1561262
gcccgagaagucucgcgau

SEQ ID NO: 1658482 - RNA, 19 nt, Artificial Sequence
  Description of Artificial Sequence: Synthetic oligonucleotide
  Antisense strand to SEQ ID NO: 1658481
aucgcgagacuucucgggc

SEQ ID NO: 1658483 - RNA, 19 nt, Artificial Sequence
  Description of Artificial Sequence: Synthetic oligonucleotide
  Sense strand starting at position 3150 of SEQ ID NO: 1561262
uucgucaguacugggauau

SEQ ID NO: 1658484 - RNA, 19 nt, Artificial Sequence
  Description of Artificial Sequence: Synthetic oligonucleotide
  Antisense strand to SEQ ID NO: 1658483
auaucccaguacugacgaa

SEQ ID NO: 1658485 - RNA, 19 nt, Artificial Sequence
  Description of Artificial Sequence: Synthetic oligonucleotide
  Sense strand starting at position 3151 of SEQ ID NO: 1561262
ucgucaguacugggauauc

SEQ ID NO: 1658486 - RNA, 19 nt, Artificial Sequence
  Description of Artificial Sequence: Synthetic oligonucleotide
  Antisense strand to SEQ ID NO: 1658485
gauaucccaguacugacga

SEQ ID NO: 1658487 - RNA, 19 nt, Artificial Sequence
  Description of Artificial Sequence: Synthetic oligonucleotide
  Sense strand starting at position 3381 of SEQ ID NO: 1561262
ucuugugugaaauggaugu

SEQ ID NO: 1658488 - RNA, 19 nt, Artificial Sequence
  Description of Artificial Sequence: Synthetic oligonucleotide
  Antisense strand to SEQ ID NO: 1658487
acauccauuucacacaaga

SEQ ID NO: 1658489 - RNA, 19 nt, Artificial Sequence
  Description of Artificial Sequence: Synthetic oligonucleotide
  Sense strand starting at position 3385 of SEQ ID NO: 1561262
gugugaaauggauguuggu

SEQ ID NO: 1658490 - RNA, 19 nt, Artificial Sequence
  Description of Artificial Sequence: Synthetic oligonucleotide
  Antisense strand to SEQ ID NO: 1658489
accaacauccauuucacac

SEQ ID NO: 1658491 - RNA, 19 nt, Artificial Sequence
  Description of Artificial Sequence: Synthetic oligonucleotide
  Sense strand starting at position 3503 of SEQ ID NO: 1561262
gggaaauuguggagugaga

SEQ ID NO: 1658492 - RNA, 19 nt, Artificial Sequence
  Description of Artificial Sequence: Synthetic oligonucleotide
  Antisense strand to SEQ ID NO: 1658491
ucucacuccacaauuuccc

SEQ ID NO: 1658493 - RNA, 19 nt, Artificial Sequence
  Description of Artificial Sequence: Synthetic oligonucleotide
  Sense strand starting at position 3505 of SEQ ID NO: 1561262
gaaauuguggagugagaca

SEQ ID NO: 1658494 - RNA, 19 nt, Artificial Sequence
  Description of Artificial Sequence: Synthetic oligonucleotide
  Antisense strand to SEQ ID NO: 1658493
ugucucacuccacaauuuc

SEQ ID NO: 1658495 - RNA, 19 nt, Artificial Sequence
  Description of Artificial Sequence: Synthetic oligonucleotide
  Sense strand starting at position 3516 of SEQ ID NO: 1561262
gugagacagggcuauuauc

SEQ ID NO: 1658496 - RNA, 19 nt, Artificial Sequence
  Description of Artificial Sequence: Synthetic oligonucleotide
  Antisense strand to SEQ ID NO: 1658495
gauaauagcccugucucac

SEQ ID NO: 1658497 - RNA, 19 nt, Artificial Sequence
  Description of Artificial Sequence: Synthetic oligonucleotide
  Sense strand starting at position 3624 of SEQ ID NO: 1561262
cgguacagauguuugagaa

SEQ ID NO: 1658498 - RNA, 19 nt, Artificial Sequence
  Description of Artificial Sequence: Synthetic oligonucleotide
  Antisense strand to SEQ ID NO: 1658497
uucucaaacaucuguaccg

SEQ ID NO: 1658499 - RNA, 19 nt, Artificial Sequence
  Description of Artificial Sequence: Synthetic oligonucleotide
  Sense strand starting at position 3625 of SEQ ID NO: 1561262
gguacagauguuugagaaa

SEQ ID NO: 1658500 - RNA, 19 nt, Artificial Sequence
  Description of Artificial Sequence: Synthetic oligonucleotide
  Antisense strand to SEQ ID NO: 1658499
uuucucaaacaucuguacc

SEQ ID NO: 1658501 - RNA, 19 nt, Artificial Sequence
  Description of Artificial Sequence: Synthetic oligonucleotide
  Sense strand starting at position 3658 of SEQ ID NO: 1561262
ugaggucuuucugugguca

SEQ ID NO: 1658502 - RNA, 19 nt, Artificial Sequence
  Description of Artificial Sequence: Synthetic oligonucleotide
  Antisense strand to SEQ ID NO: 1658501
ugaccacagaaagaccuca

SEQ ID NO: 1658503 - RNA, 19 nt, Artificial Sequence
  Description of Artificial Sequence: Synthetic oligonucleotide
  Sense strand starting at position 205 of SEQ ID NO: 1561263
ucaagucaucuugagugga

SEQ ID NO: 1658504 - RNA, 19 nt, Artificial Sequence
  Description of Artificial Sequence: Synthetic oligonucleotide
  Antisense strand to SEQ ID NO: 1658503
uccacucaagaugacuuga

SEQ ID NO: 1658505 - RNA, 19 nt, Artificial Sequence
  Description of Artificial Sequence: Synthetic oligonucleotide
  Sense strand starting at position 207 of SEQ ID NO: 1561263
aagucaucuugaguggauc

SEQ ID NO: 1658506 - RNA, 19 nt, Artificial Sequence
  Description of Artificial Sequence: Synthetic oligonucleotide
  Antisense strand to SEQ ID NO: 1658505
gauccacucaagaugacuu

SEQ ID NO: 1658507 - RNA, 19 nt, Artificial Sequence
  Description of Artificial Sequence: Synthetic oligonucleotide
  Sense strand starting at position 208 of SEQ ID NO: 1561263
agucaucuugaguggauca

SEQ ID NO: 1658508 - RNA, 19 nt, Artificial Sequence
  Description of Artificial Sequence: Synthetic oligonucleotide
  Antisense strand to SEQ ID NO: 1658507
ugauccacucaagaugacu

SEQ ID NO: 1658509 - RNA, 19 nt, Artificial Sequence
  Description of Artificial Sequence: Synthetic oligonucleotide
  Sense strand starting at position 218 of SEQ ID NO: 1561263
aguggaucacuugaggcau

SEQ ID NO: 1658510 - RNA, 19 nt, Artificial Sequence
  Description of Artificial Sequence: Synthetic oligonucleotide
  Antisense strand to SEQ ID NO: 1658509
augccucaagugauccacu

SEQ ID NO: 1658511 - RNA, 19 nt, Artificial Sequence
  Description of Artificial Sequence: Synthetic oligonucleotide
  Sense strand starting at position 357 of SEQ ID NO: 1561263
ugaaucaaacugugcuuua

SEQ ID NO: 1658512 - RNA, 19 nt, Artificial Sequence
  Description of Artificial Sequence: Synthetic oligonucleotide
  Antisense strand to SEQ ID NO: 1658511
uaaagcacaguuugauuca

SEQ ID NO: 1658513 - RNA, 19 nt, Artificial Sequence
  Description of Artificial Sequence: Synthetic oligonucleotide
  Sense strand starting at position 472 of SEQ ID NO: 1561263
ccugaacuugucugaagga

SEQ ID NO: 1658514 - RNA, 19 nt, Artificial Sequence
  Description of Artificial Sequence: Synthetic oligonucleotide
  Antisense strand to SEQ ID NO: 1658513
uccuucagacaaguucagg

SEQ ID NO: 1658515 - RNA, 19 nt, Artificial Sequence
  Description of Artificial Sequence: Synthetic oligonucleotide
  Sense strand starting at position 554 of SEQ ID NO: 1561263
gguauuagaucuuccugga

SEQ ID NO: 1658516 - RNA, 19 nt, Artificial Sequence
  Description of Artificial Sequence: Synthetic oligonucleotide
  Antisense strand to SEQ ID NO: 1658515
uccaggaagaucuaauacc

SEQ ID NO: 1658517 - RNA, 19 nt, Artificial Sequence
  Description of Artificial Sequence: Synthetic oligonucleotide
  Sense strand starting at position 558 of SEQ ID NO: 1561263
uuagaucuuccuggacaag

SEQ ID NO: 1658518 - RNA, 19 nt, Artificial Sequence
  Description of Artificial Sequence: Synthetic oligonucleotide
  Antisense strand to SEQ ID NO: 1658517
cuuguccaggaagaucuaa

SEQ ID NO: 1658519 - RNA, 19 nt, Artificial Sequence
  Description of Artificial Sequence: Synthetic oligonucleotide
  Sense strand starting at position 630 of SEQ ID NO: 1561263
uccuaaaucuuagcaagag

SEQ ID NO: 1658520 - RNA, 19 nt, Artificial Sequence
  Description of Artificial Sequence: Synthetic oligonucleotide
  Antisense strand to SEQ ID NO: 1658519
cucuugcuaagauuuagga

SEQ ID NO: 1658521 - RNA, 19 nt, Artificial Sequence
  Description of Artificial Sequence: Synthetic oligonucleotide
  Sense strand starting at position 660 of SEQ ID NO: 1561263
agcugaauuccaugaagag

SEQ ID NO: 1658522 - RNA, 19 nt, Artificial Sequence
  Description of Artificial Sequence: Synthetic oligonucleotide
  Antisense strand to SEQ ID NO: 1658521
cucuucauggaauucagcu

SEQ ID NO: 1658523 - RNA, 19 nt, Artificial Sequence
  Description of Artificial Sequence: Synthetic oligonucleotide
  Sense strand starting at position 753 of SEQ ID NO: 1561263
auaugaguaucacucauga

SEQ ID NO: 1658524 - RNA, 19 nt, Artificial Sequence
  Description of Artificial Sequence: Synthetic oligonucleotide
  Antisense strand to SEQ ID NO: 1658523
ucaugagugauacucauau

SEQ ID NO: 1658525 - RNA, 19 nt, Artificial Sequence
  Description of Artificial Sequence: Synthetic oligonucleotide
  Sense strand starting at position 815 of SEQ ID NO: 1561263
cacagaguuggucacuauc

SEQ ID NO: 1658526 - RNA, 19 nt, Artificial Sequence
  Description of Artificial Sequence: Synthetic oligonucleotide
  Antisense strand to SEQ ID NO: 1658525
gauagugaccaacucugug

SEQ ID NO: 1658527 - RNA, 19 nt, Artificial Sequence
  Description of Artificial Sequence: Synthetic oligonucleotide
  Sense strand starting at position 817 of SEQ ID NO: 1561263
cagaguuggucacuaucca

SEQ ID NO: 1658528 - RNA, 19 nt, Artificial Sequence
  Description of Artificial Sequence: Synthetic oligonucleotide
  Antisense strand to SEQ ID NO: 1658527
uggauagugaccaacucug

SEQ ID NO: 1658529 - RNA, 19 nt, Artificial Sequence
  Description of Artificial Sequence: Synthetic oligonucleotide
  Sense strand starting at position 857 of SEQ ID NO: 1561263
aguuguccaaauugucaga

SEQ ID NO: 1658530 - RNA, 19 nt, Artificial Sequence
  Description of Artificial Sequence: Synthetic oligonucleotide
  Antisense strand to SEQ ID NO: 1658529
ucugacaauuuggacaacu

SEQ ID NO: 1658531 - RNA, 19 nt, Artificial Sequence
  Description of Artificial Sequence: Synthetic oligonucleotide
  Sense strand starting at position 859 of SEQ ID NO: 1561263
uuguccaaauugucagaaa

SEQ ID NO: 1658532 - RNA, 19 nt, Artificial Sequence
  Description of Artificial Sequence: Synthetic oligonucleotide
  Antisense strand to SEQ ID NO: 1658531
uuucugacaauuuggacaa

SEQ ID NO: 1658533 - RNA, 19 nt, Artificial Sequence
  Description of Artificial Sequence: Synthetic oligonucleotide
  Sense strand starting at position 950 of SEQ ID NO: 1561263
ggaaggucugcaggagagu

SEQ ID NO: 1658534 - RNA, 19 nt, Artificial Sequence
  Description of Artificial Sequence: Synthetic oligonucleotide
  Antisense strand to SEQ ID NO: 1658533
acucuccugcagaccuucc

SEQ ID NO: 1658535 - RNA, 19 nt, Artificial Sequence
  Description of Artificial Sequence: Synthetic oligonucleotide
  Sense strand starting at position 1094 of SEQ ID NO: 1561263
ugagcuaaaucucuuugau

SEQ ID NO: 1658536 - RNA, 19 nt, Artificial Sequence
  Description of Artificial Sequence: Synthetic oligonucleotide
  Antisense strand to SEQ ID NO: 1658535
aucaaagagauuuagcuca

SEQ ID NO: 1658537 - RNA, 19 nt, Artificial Sequence
  Description of Artificial Sequence: Synthetic oligonucleotide
  Sense strand starting at position 1106 of SEQ ID NO: 1561263
cuuugaugcuuuguaagaa

SEQ ID NO: 1658538 - RNA, 19 nt, Artificial Sequence
  Description of Artificial Sequence: Synthetic oligonucleotide
  Antisense strand to SEQ ID NO: 1658537
uucuuacaaagcaucaaag

SEQ ID NO: 1658539 - RNA, 19 nt, Artificial Sequence
  Description of Artificial Sequence: Synthetic oligonucleotide
  Sense strand starting at position 1116 of SEQ ID NO: 1561263
uuguaagaacaguauccau

SEQ ID NO: 1658540 - RNA, 19 nt, Artificial Sequence
  Description of Artificial Sequence: Synthetic oligonucleotide
  Antisense strand to SEQ ID NO: 1658539
auggauacuguucuuacaa

SEQ ID NO: 1658541 - RNA, 19 nt, Artificial Sequence
  Description of Artificial Sequence: Synthetic oligonucleotide
  Sense strand starting at position 1297 of SEQ ID NO: 1561263
ugagcuuaauggcuuggaa

SEQ ID NO: 1658542 - RNA, 19 nt, Artificial Sequence
  Description of Artificial Sequence: Synthetic oligonucleotide
  Antisense strand to SEQ ID NO: 1658541
uuccaagccauuaagcuca

SEQ ID NO: 1658543 - RNA, 19 nt, Artificial Sequence
  Description of Artificial Sequence: Synthetic oligonucleotide
  Sense strand starting at position 1696 of SEQ ID NO: 1561263
agaaguaucuugucaucag

SEQ ID NO: 1658544 - RNA, 19 nt, Artificial Sequence
  Description of Artificial Sequence: Synthetic oligonucleotide
  Antisense strand to SEQ ID NO: 1658543
cugaugacaagauacuucu

SEQ ID NO: 1658545 - RNA, 19 nt, Artificial Sequence
  Description of Artificial Sequence: Synthetic oligonucleotide
  Sense strand starting at position 1700 of SEQ ID NO: 1561263
guaucuugucaucagugga

SEQ ID NO: 1658546 - RNA, 19 nt, Artificial Sequence
  Description of Artificial Sequence: Synthetic oligonucleotide
  Antisense strand to SEQ ID NO: 1658545
uccacugaugacaagauac

SEQ ID NO: 1658547 - RNA, 19 nt, Artificial Sequence
  Description of Artificial Sequence: Synthetic oligonucleotide
  Sense strand starting at position 1704 of SEQ ID NO: 1561263
cuugucaucaguggagaca

SEQ ID NO: 1658548 - RNA, 19 nt, Artificial Sequence
  Description of Artificial Sequence: Synthetic oligonucleotide
  Antisense strand to SEQ ID NO: 1658547
ugucuccacugaugacaag

SEQ ID NO: 1658549 - RNA, 19 nt, Artificial Sequence
  Description of Artificial Sequence: Synthetic oligonucleotide
  Sense strand starting at position 1956 of SEQ ID NO: 1561263
gagucaauaucauuagagu

SEQ ID NO: 1658550 - RNA, 19 nt, Artificial Sequence
  Description of Artificial Sequence: Synthetic oligonucleotide
  Antisense strand to SEQ ID NO: 1658549
acucuaaugauauugacuc

SEQ ID NO: 1658551 - RNA, 19 nt, Artificial Sequence
  Description of Artificial Sequence: Synthetic oligonucleotide
  Sense strand starting at position 2008 of SEQ ID NO: 1561263
gacggaacccuggguaaua

SEQ ID NO: 1658552 - RNA, 19 nt, Artificial Sequence
  Description of Artificial Sequence: Synthetic oligonucleotide
  Antisense strand to SEQ ID NO: 1658551
uauuacccaggguuccguc

SEQ ID NO: 1658553 - RNA, 19 nt, Artificial Sequence
  Description of Artificial Sequence: Synthetic oligonucleotide
  Sense strand starting at position 2009 of SEQ ID NO: 1561263
acggaacccuggguaauau

SEQ ID NO: 1658554 - RNA, 19 nt, Artificial Sequence
  Description of Artificial Sequence: Synthetic oligonucleotide
  Antisense strand to SEQ ID NO: 1658553
auauuacccaggguuccgu

SEQ ID NO: 1658555 - RNA, 19 nt, Artificial Sequence
  Description of Artificial Sequence: Synthetic oligonucleotide
  Sense strand starting at position 2021 of SEQ ID NO: 1561263
guaauauggacagggcuuu

SEQ ID NO: 1658556 - RNA, 19 nt, Artificial Sequence
  Description of Artificial Sequence: Synthetic oligonucleotide
  Antisense strand to SEQ ID NO: 1658555
aaagcccuguccauauuac

SEQ ID NO: 1658557 - RNA, 19 nt, Artificial Sequence
  Description of Artificial Sequence: Synthetic oligonucleotide
  Sense strand starting at position 2097 of SEQ ID NO: 1561263
aauuaaguagccuggagau

SEQ ID NO: 1658558 - RNA, 19 nt, Artificial Sequence
  Description of Artificial Sequence: Synthetic oligonucleotide
  Antisense strand to SEQ ID NO: 1658557
aucuccaggcuacuuaauu

SEQ ID NO: 1658559 - RNA, 19 nt, Artificial Sequence
  Description of Artificial Sequence: Synthetic oligonucleotide
  Sense strand starting at position 2099 of SEQ ID NO: 1561263
uuaaguagccuggagauau

SEQ ID NO: 1658560 - RNA, 19 nt, Artificial Sequence
  Description of Artificial Sequence: Synthetic oligonucleotide
  Antisense strand to SEQ ID NO: 1658559
auaucuccaggcuacuuaa

SEQ ID NO: 1658561 - RNA, 19 nt, Artificial Sequence
  Description of Artificial Sequence: Synthetic oligonucleotide
  Sense strand starting at position 2166 of SEQ ID NO: 1561263
aguaaacaccauuguuauu

SEQ ID NO: 1658562 - RNA, 19 nt, Artificial Sequence
  Description of Artificial Sequence: Synthetic oligonucleotide
  Antisense strand to SEQ ID NO: 1658561
aauaacaaugguguuuacu

SEQ ID NO: 1658563 - RNA, 19 nt, Artificial Sequence
  Description of Artificial Sequence: Synthetic oligonucleotide
  Sense strand starting at position 2590 of SEQ ID NO: 1561263
ucaacauugcaucauggua

SEQ ID NO: 1658564 - RNA, 19 nt, Artificial Sequence
  Description of Artificial Sequence: Synthetic oligonucleotide
  Antisense strand to SEQ ID NO: 1658563
uaccaugaugcaauguuga

SEQ ID NO: 1658565 - RNA, 19 nt, Artificial Sequence
  Description of Artificial Sequence: Synthetic oligonucleotide
  Sense strand starting at position 2653 of SEQ ID NO: 1561263
aggucuagagauugugaau

SEQ ID NO: 1658566 - RNA, 19 nt, Artificial Sequence
  Description of Artificial Sequence: Synthetic oligonucleotide
  Antisense strand to SEQ ID NO: 1658565
auucacaaucucuagaccu

SEQ ID NO: 1658567 - RNA, 19 nt, Artificial Sequence
  Description of Artificial Sequence: Synthetic oligonucleotide
  Sense strand starting at position 2666 of SEQ ID NO: 1561263
gugaauugacuccguagaa

SEQ ID NO: 1658568 - RNA, 19 nt, Artificial Sequence
  Description of Artificial Sequence: Synthetic oligonucleotide
  Antisense strand to SEQ ID NO: 1658567
uucuacggagucaauucac

SEQ ID NO: 1658569 - RNA, 19 nt, Artificial Sequence
  Description of Artificial Sequence: Synthetic oligonucleotide
  Sense strand starting at position 2667 of SEQ ID NO: 1561263
ugaauugacuccguagaaa

SEQ ID NO: 1658570 - RNA, 19 nt, Artificial Sequence
  Description of Artificial Sequence: Synthetic oligonucleotide
  Antisense strand to SEQ ID NO: 1658569
uuucuacggagucaauuca

SEQ ID NO: 1658571 - RNA, 19 nt, Artificial Sequence
  Description of Artificial Sequence: Synthetic oligonucleotide
  Sense strand starting at position 2828 of SEQ ID NO: 1561263
uccagaaagcuuggguuua

SEQ ID NO: 1658572 - RNA, 19 nt, Artificial Sequence
  Description of Artificial Sequence: Synthetic oligonucleotide
  Antisense strand to SEQ ID NO: 1658571
uaaacccaagcuuucugga

SEQ ID NO: 1658573 - RNA, 19 nt, Artificial Sequence
  Description of Artificial Sequence: Synthetic oligonucleotide
  Sense strand starting at position 2830 of SEQ ID NO: 1561263
cagaaagcuuggguuuauu

SEQ ID NO: 1658574 - RNA, 19 nt, Artificial Sequence
  Description of Artificial Sequence: Synthetic oligonucleotide
  Antisense strand to SEQ ID NO: 1658573
aauaaacccaagcuuucug

SEQ ID NO: 1658575 - RNA, 19 nt, Artificial Sequence
  Description of Artificial Sequence: Synthetic oligonucleotide
  Sense strand starting at position 3610 of SEQ ID NO: 1561263
aaauuagucagagguggug

SEQ ID NO: 1658576 - RNA, 19 nt, Artificial Sequence
  Description of Artificial Sequence: Synthetic oligonucleotide
  Antisense strand to SEQ ID NO: 1658575
caccaccucugacuaauuu

SEQ ID NO: 1658577 - RNA, 19 nt, Artificial Sequence
  Description of Artificial Sequence: Synthetic oligonucleotide
  Sense strand starting at position 3872 of SEQ ID NO: 1561263
ucaagauaguuccugauuc

SEQ ID NO: 1658578 - RNA, 19 nt, Artificial Sequence
  Description of Artificial Sequence: Synthetic oligonucleotide
  Antisense strand to SEQ ID NO: 1658577
gaaucaggaacuaucuuga

SEQ ID NO: 1658579 - RNA, 19 nt, Artificial Sequence
  Description of Artificial Sequence: Synthetic oligonucleotide
  Sense strand starting at position 3876 of SEQ ID NO: 1561263
gauaguuccugauucuuug

SEQ ID NO: 1658580 - RNA, 19 nt, Artificial Sequence
  Description of Artificial Sequence: Synthetic oligonucleotide
  Antisense strand to SEQ ID NO: 1658579
caaagaaucaggaacuauc

SEQ ID NO: 1658581 - RNA, 19 nt, Artificial Sequence
  Description of Artificial Sequence: Synthetic oligonucleotide
  Sense strand starting at position 3945 of SEQ ID NO: 1561263
auaugcauuugguuuccua

SEQ ID NO: 1658582 - RNA, 19 nt, Artificial Sequence
  Description of Artificial Sequence: Synthetic oligonucleotide
  Antisense strand to SEQ ID NO: 1658581
uaggaaaccaaaugcauau

SEQ ID NO: 1658583 - RNA, 19 nt, Artificial Sequence
  Description of Artificial Sequence: Synthetic oligonucleotide
  Sense strand starting at position 199 of SEQ ID NO: 1561264
ucaaauguuuaccuggaaa

SEQ ID NO: 1658584 - RNA, 19 nt, Artificial Sequence
  Description of Artificial Sequence: Synthetic oligonucleotide
  Antisense strand to SEQ ID NO: 1658583
uuuccagguaaacauuuga

SEQ ID NO: 1658585 - RNA, 19 nt, Artificial Sequence
  Description of Artificial Sequence: Synthetic oligonucleotide
  Sense strand starting at position 402 of SEQ ID NO: 1561264
ucuaguacgucuuaggaaa

SEQ ID NO: 1658586 - RNA, 19 nt, Artificial Sequence
  Description of Artificial Sequence: Synthetic oligonucleotide
  Antisense strand to SEQ ID NO: 1658585
uuuccuaagacguacuaga

SEQ ID NO: 1658587 - RNA, 19 nt, Artificial Sequence
  Description of Artificial Sequence: Synthetic oligonucleotide
  Sense strand starting at position 422 of SEQ ID NO: 1561264
uuuaauaucucagauugga

SEQ ID NO: 1658588 - RNA, 19 nt, Artificial Sequence
  Description of Artificial Sequence: Synthetic oligonucleotide
  Antisense strand to SEQ ID NO: 1658587
uccaaucugagauauuaaa

SEQ ID NO: 1658589 - RNA, 19 nt, Artificial Sequence
  Description of Artificial Sequence: Synthetic oligonucleotide
  Sense strand starting at position 611 of SEQ ID NO: 1561264
uuggauaagucucugucuu

SEQ ID NO: 1658590 - RNA, 19 nt, Artificial Sequence
  Description of Artificial Sequence: Synthetic oligonucleotide
  Antisense strand to SEQ ID NO: 1658589
aagacagagacuuauccaa

SEQ ID NO: 1658591 - RNA, 19 nt, Artificial Sequence
  Description of Artificial Sequence: Synthetic oligonucleotide
  Sense strand starting at position 612 of SEQ ID NO: 1561264
uggauaagucucugucuua

SEQ ID NO: 1658592 - RNA, 19 nt, Artificial Sequence
  Description of Artificial Sequence: Synthetic oligonucleotide
  Antisense strand to SEQ ID NO: 1658591
uaagacagagacuuaucca

SEQ ID NO: 1658593 - RNA, 19 nt, Artificial Sequence
  Description of Artificial Sequence: Synthetic oligonucleotide
  Sense strand starting at position 613 of SEQ ID NO: 1561264
ggauaagucucugucuuau

SEQ ID NO: 1658594 - RNA, 19 nt, Artificial Sequence
  Description of Artificial Sequence: Synthetic oligonucleotide
  Antisense strand to SEQ ID NO: 1658593
auaagacagagacuuaucc

SEQ ID NO: 1658595 - RNA, 19 nt, Artificial Sequence
  Description of Artificial Sequence: Synthetic oligonucleotide
  Sense strand starting at position 647 of SEQ ID NO: 1561264
cagugaaauuggcugauaa

SEQ ID NO: 1658596 - RNA, 19 nt, Artificial Sequence
  Description of Artificial Sequence: Synthetic oligonucleotide
  Antisense strand to SEQ ID NO: 1658595
uuaucagccaauuucacug

SEQ ID NO: 1658597 - RNA, 19 nt, Artificial Sequence
  Description of Artificial Sequence: Synthetic oligonucleotide
  Sense strand starting at position 649 of SEQ ID NO: 1561264
gugaaauuggcugauaauc

SEQ ID NO: 1658598 - RNA, 19 nt, Artificial Sequence
  Description of Artificial Sequence: Synthetic oligonucleotide
  Antisense strand to SEQ ID NO: 1658597
gauuaucagccaauuucac

SEQ ID NO: 1658599 - RNA, 19 nt, Artificial Sequence
  Description of Artificial Sequence: Synthetic oligonucleotide
  Sense strand starting at position 657 of SEQ ID NO: 1561264
ggcugauaaucauucuuaa

SEQ ID NO: 1658600 - RNA, 19 nt, Artificial Sequence
  Description of Artificial Sequence: Synthetic oligonucleotide
  Antisense strand to SEQ ID NO: 1658599
uuaagaaugauuaucagcc

SEQ ID NO: 1658601 - RNA, 19 nt, Artificial Sequence
  Description of Artificial Sequence: Synthetic oligonucleotide
  Sense strand starting at position 672 of SEQ ID NO: 1561264
uuaagaucccuugaggucu

SEQ ID NO: 1658602 - RNA, 19 nt, Artificial Sequence
  Description of Artificial Sequence: Synthetic oligonucleotide
  Antisense strand to SEQ ID NO: 1658601
agaccucaagggaucuuaa

SEQ ID NO: 1658603 - RNA, 19 nt, Artificial Sequence
  Description of Artificial Sequence: Synthetic oligonucleotide
  Sense strand starting at position 2177 of SEQ ID NO: 1561264
uggauaacugcagguggua

SEQ ID NO: 1658604 - RNA, 19 nt, Artificial Sequence
  Description of Artificial Sequence: Synthetic oligonucleotide
  Antisense strand to SEQ ID NO: 1658603
uaccaccugcaguuaucca

SEQ ID NO: 1658605 - RNA, 19 nt, Artificial Sequence
  Description of Artificial Sequence: Synthetic oligonucleotide
  Sense strand starting at position 2679 of SEQ ID NO: 1561264
uggcuugcugcccacaaau

SEQ ID NO: 1658606 - RNA, 19 nt, Artificial Sequence
  Description of Artificial Sequence: Synthetic oligonucleotide
  Antisense strand to SEQ ID NO: 1658605
auuugugggcagcaagcca

SEQ ID NO: 1658607 - RNA, 19 nt, Artificial Sequence
  Description of Artificial Sequence: Synthetic oligonucleotide
  Sense strand starting at position 2749 of SEQ ID NO: 1561264
agcacucaauauugaguaa

SEQ ID NO: 1658608 - RNA, 19 nt, Artificial Sequence
  Description of Artificial Sequence: Synthetic oligonucleotide
  Antisense strand to SEQ ID NO: 1658607
uuacucaauauugagugcu

SEQ ID NO: 1658609 - RNA, 19 nt, Artificial Sequence
  Description of Artificial Sequence: Synthetic oligonucleotide
  Sense strand starting at position 2752 of SEQ ID NO: 1561264
acucaauauugaguaagca

SEQ ID NO: 1658610 - RNA, 19 nt, Artificial Sequence
  Description of Artificial Sequence: Synthetic oligonucleotide
  Antisense strand to SEQ ID NO: 1658609
ugcuuacucaauauugagu

SEQ ID NO: 1658611 - RNA, 19 nt, Artificial Sequence
  Description of Artificial Sequence: Synthetic oligonucleotide
  Sense strand starting at position 2771 of SEQ ID NO: 1561264
gaagguucugcauggcaac

SEQ ID NO: 1658612 - RNA, 19 nt, Artificial Sequence
  Description of Artificial Sequence: Synthetic oligonucleotide
  Antisense strand to SEQ ID NO: 1658611
guugccaugcagaaccuuc

SEQ ID NO: 1658613 - RNA, 19 nt, Artificial Sequence
  Description of Artificial Sequence: Synthetic oligonucleotide
  Sense strand starting at position 2791 of SEQ ID NO: 1561264
cgaguugugggccacauuu

SEQ ID NO: 1658614 - RNA, 19 nt, Artificial Sequence
  Description of Artificial Sequence: Synthetic oligonucleotide
  Antisense strand to SEQ ID NO: 1658613
aaauguggcccacaacucg

SEQ ID NO: 1658615 - RNA, 19 nt, Artificial Sequence
  Description of Artificial Sequence: Synthetic oligonucleotide
  Sense strand starting at position 2955 of SEQ ID NO: 1561264
ugcuguaccuauucugaca

SEQ ID NO: 1658616 - RNA, 19 nt, Artificial Sequence
  Description of Artificial Sequence: Synthetic oligonucleotide
  Antisense strand to SEQ ID NO: 1658615
ugucagaauagguacagca

SEQ ID NO: 1658617 - RNA, 19 nt, Artificial Sequence
  Description of Artificial Sequence: Synthetic oligonucleotide
  Sense strand starting at position 2957 of SEQ ID NO: 1561264
cuguaccuauucugacauu

SEQ ID NO: 1658618 - RNA, 19 nt, Artificial Sequence
  Description of Artificial Sequence: Synthetic oligonucleotide
  Antisense strand to SEQ ID NO: 1658617
aaugucagaauagguacag

SEQ ID NO: 1658619 - RNA, 19 nt, Artificial Sequence
  Description of Artificial Sequence: Synthetic oligonucleotide
  Sense strand starting at position 2958 of SEQ ID NO: 1561264
uguaccuauucugacauuu

SEQ ID NO: 1658620 - RNA, 19 nt, Artificial Sequence
  Description of Artificial Sequence: Synthetic oligonucleotide
  Antisense strand to SEQ ID NO: 1658619
aaaugucagaauagguaca

SEQ ID NO: 1658621 - RNA, 19 nt, Artificial Sequence
  Description of Artificial Sequence: Synthetic oligonucleotide
  Sense strand starting at position 3038 of SEQ ID NO: 1561264
guuuaagcacaaggagauu

SEQ ID NO: 1658622 - RNA, 19 nt, Artificial Sequence
  Description of Artificial Sequence: Synthetic oligonucleotide
  Antisense strand to SEQ ID NO: 1658621
aaucuccuugugcuuaaac

SEQ ID NO: 1658623 - RNA, 19 nt, Artificial Sequence
  Description of Artificial Sequence: Synthetic oligonucleotide
  Sense strand starting at position 3130 of SEQ ID NO: 1561264
acuacuacgcuauaauagu

SEQ ID NO: 1658624 - RNA, 19 nt, Artificial Sequence
  Description of Artificial Sequence: Synthetic oligonucleotide
  Antisense strand to SEQ ID NO: 1658623
acuauuauagcguaguagu

SEQ ID NO: 1658625 - RNA, 19 nt, Artificial Sequence
  Description of Artificial Sequence: Synthetic oligonucleotide
  Sense strand starting at position 3139 of SEQ ID NO: 1561264
cuauaauaguugccuaguu

SEQ ID NO: 1658626 - RNA, 19 nt, Artificial Sequence
  Description of Artificial Sequence: Synthetic oligonucleotide
  Antisense strand to SEQ ID NO: 1658625
aacuaggcaacuauuauag

SEQ ID NO: 1658627 - RNA, 19 nt, Artificial Sequence
  Description of Artificial Sequence: Synthetic oligonucleotide
  Sense strand starting at position 3141 of SEQ ID NO: 1561264
auaauaguugccuaguugu

SEQ ID NO: 1658628 - RNA, 19 nt, Artificial Sequence
  Description of Artificial Sequence: Synthetic oligonucleotide
  Antisense strand to SEQ ID NO: 1658627
acaacuaggcaacuauuau

SEQ ID NO: 1658629 - RNA, 19 nt, Artificial Sequence
  Description of Artificial Sequence: Synthetic oligonucleotide
  Sense strand starting at position 3149 of SEQ ID NO: 1561264
ugccuaguuguguccuuua

SEQ ID NO: 1658630 - RNA, 19 nt, Artificial Sequence
  Description of Artificial Sequence: Synthetic oligonucleotide
  Antisense strand to SEQ ID NO: 1658629
uaaaggacacaacuaggca

SEQ ID NO: 1658631 - RNA, 19 nt, Artificial Sequence
  Description of Artificial Sequence: Synthetic oligonucleotide
  Sense strand starting at position 3154 of SEQ ID NO: 1561264
aguuguguccuuuauauau

SEQ ID NO: 1658632 - RNA, 19 nt, Artificial Sequence
  Description of Artificial Sequence: Synthetic oligonucleotide
  Antisense strand to SEQ ID NO: 1658631
auauauaaaggacacaacu

SEQ ID NO: 1658633 - RNA, 19 nt, Artificial Sequence
  Description of Artificial Sequence: Synthetic oligonucleotide
  Sense strand starting at position 3156 of SEQ ID NO: 1561264
uuguguccuuuauauaucu

SEQ ID NO: 1658634 - RNA, 19 nt, Artificial Sequence
  Description of Artificial Sequence: Synthetic oligonucleotide
  Antisense strand to SEQ ID NO: 1658633
agauauauaaaggacacaa

SEQ ID NO: 1658635 - RNA, 19 nt, Artificial Sequence
  Description of Artificial Sequence: Synthetic oligonucleotide
  Sense strand starting at position 3337 of SEQ ID NO: 1561264
aggucuugauaaguuauaa

SEQ ID NO: 1658636 - RNA, 19 nt, Artificial Sequence
  Description of Artificial Sequence: Synthetic oligonucleotide
  Antisense strand to SEQ ID NO: 1658635
uuauaacuuaucaagaccu

SEQ ID NO: 1658637 - RNA, 19 nt, Artificial Sequence
  Description of Artificial Sequence: Synthetic oligonucleotide
  Sense strand starting at position 3382 of SEQ ID NO: 1561264
caauguauuuaaugugagu

SEQ ID NO: 1658638 - RNA, 19 nt, Artificial Sequence
  Description of Artificial Sequence: Synthetic oligonucleotide
  Antisense strand to SEQ ID NO: 1658637
acucacauuaaauacauug

SEQ ID NO: 1658639 - RNA, 19 nt, Artificial Sequence
  Description of Artificial Sequence: Synthetic oligonucleotide
  Sense strand starting at position 3385 of SEQ ID NO: 1561264
uguauuuaaugugaguaga

SEQ ID NO: 1658640 - RNA, 19 nt, Artificial Sequence
  Description of Artificial Sequence: Synthetic oligonucleotide
  Antisense strand to SEQ ID NO: 1658639
ucuacucacauuaaauaca

SEQ ID NO: 1658641 - RNA, 19 nt, Artificial Sequence
  Description of Artificial Sequence: Synthetic oligonucleotide
  Sense strand starting at position 3395 of SEQ ID NO: 1561264
gugaguagauguuaagaua

SEQ ID NO: 1658642 - RNA, 19 nt, Artificial Sequence
  Description of Artificial Sequence: Synthetic oligonucleotide
  Antisense strand to SEQ ID NO: 1658641
uaucuuaacaucuacucac

SEQ ID NO: 1658643 - RNA, 19 nt, Artificial Sequence
  Description of Artificial Sequence: Synthetic oligonucleotide
  Sense strand starting at position 3398 of SEQ ID NO: 1561264
aguagauguuaagauacca

SEQ ID NO: 1658644 - RNA, 19 nt, Artificial Sequence
  Description of Artificial Sequence: Synthetic oligonucleotide
  Antisense strand to SEQ ID NO: 1658643
ugguaucuuaacaucuacu

SEQ ID NO: 1658645 - RNA, 19 nt, Artificial Sequence
  Description of Artificial Sequence: Synthetic oligonucleotide
  Sense strand starting at position 3678 of SEQ ID NO: 1561264
auuugaaaguauggaaucu

SEQ ID NO: 1658646 - RNA, 19 nt, Artificial Sequence
  Description of Artificial Sequence: Synthetic oligonucleotide
  Antisense strand to SEQ ID NO: 1658645
agauuccauacuuucaaau

SEQ ID NO: 1658647 - RNA, 19 nt, Artificial Sequence
  Description of Artificial Sequence: Synthetic oligonucleotide
  Sense strand starting at position 3687 of SEQ ID NO: 1561264
uauggaaucuugugcauuu

SEQ ID NO: 1658648 - RNA, 19 nt, Artificial Sequence
  Description of Artificial Sequence: Synthetic oligonucleotide
  Antisense strand to SEQ ID NO: 1658647
aaaugcacaagauuccaua

SEQ ID NO: 1658649 - RNA, 19 nt, Artificial Sequence
  Description of Artificial Sequence: Synthetic oligonucleotide
  Sense strand starting at position 3805 of SEQ ID NO: 1561264
gagacaucguagcuaauac

SEQ ID NO: 1658650 - RNA, 19 nt, Artificial Sequence
  Description of Artificial Sequence: Synthetic oligonucleotide
  Antisense strand to SEQ ID NO: 1658649
guauuagcuacgaugucuc

SEQ ID NO: 1658651 - RNA, 19 nt, Artificial Sequence
  Description of Artificial Sequence: Synthetic oligonucleotide
  Sense strand starting at position 3812 of SEQ ID NO: 1561264
cguagcuaauacggugaaa

SEQ ID NO: 1658652 - RNA, 19 nt, Artificial Sequence
  Description of Artificial Sequence: Synthetic oligonucleotide
  Antisense strand to SEQ ID NO: 1658651
uuucaccguauuagcuacg

SEQ ID NO: 1658653 - RNA, 19 nt, Artificial Sequence
  Description of Artificial Sequence: Synthetic oligonucleotide
  Sense strand starting at position 3834 of SEQ ID NO: 1561264
cgucuguacgggugagacu

SEQ ID NO: 1658654 - RNA, 19 nt, Artificial Sequence
  Description of Artificial Sequence: Synthetic oligonucleotide
  Antisense strand to SEQ ID NO: 1658653
agucucacccguacagacg

SEQ ID NO: 1658655 - RNA, 19 nt, Artificial Sequence
  Description of Artificial Sequence: Synthetic oligonucleotide
  Sense strand starting at position 14 of SEQ ID NO: 1561265
cgucuagauccucaaaucu

SEQ ID NO: 1658656 - RNA, 19 nt, Artificial Sequence
  Description of Artificial Sequence: Synthetic oligonucleotide
  Antisense strand to SEQ ID NO: 1658655
agauuugaggaucuagacg

SEQ ID NO: 1658657 - RNA, 19 nt, Artificial Sequence
  Description of Artificial Sequence: Synthetic oligonucleotide
  Sense strand starting at position 454 of SEQ ID NO: 1561265
cucauucuugaucagugua

SEQ ID NO: 1658658 - RNA, 19 nt, Artificial Sequence
  Description of Artificial Sequence: Synthetic oligonucleotide
  Antisense strand to SEQ ID NO: 1658657
uacacugaucaagaaugag

SEQ ID NO: 1658659 - RNA, 19 nt, Artificial Sequence
  Description of Artificial Sequence: Synthetic oligonucleotide
  Sense strand starting at position 459 of SEQ ID NO: 1561265
ucuugaucaguguaaccau

SEQ ID NO: 1658660 - RNA, 19 nt, Artificial Sequence
  Description of Artificial Sequence: Synthetic oligonucleotide
  Antisense strand to SEQ ID NO: 1658659
augguuacacugaucaaga

SEQ ID NO: 1658661 - RNA, 19 nt, Artificial Sequence
  Description of Artificial Sequence: Synthetic oligonucleotide
  Sense strand starting at position 535 of SEQ ID NO: 1561265
uuacuauuaucugucugag

SEQ ID NO: 1658662 - RNA, 19 nt, Artificial Sequence
  Description of Artificial Sequence: Synthetic oligonucleotide
  Antisense strand to SEQ ID NO: 1658661
cucagacagauaauaguaa

SEQ ID NO: 1658663 - RNA, 19 nt, Artificial Sequence
  Description of Artificial Sequence: Synthetic oligonucleotide
  Sense strand starting at position 537 of SEQ ID NO: 1561265
acuauuaucugucugagga

SEQ ID NO: 1658664 - RNA, 19 nt, Artificial Sequence
  Description of Artificial Sequence: Synthetic oligonucleotide
  Antisense strand to SEQ ID NO: 1658663
uccucagacagauaauagu

SEQ ID NO: 1658665 - RNA, 19 nt, Artificial Sequence
  Description of Artificial Sequence: Synthetic oligonucleotide
  Sense strand starting at position 538 of SEQ ID NO: 1561265
cuauuaucugucugaggau

SEQ ID NO: 1658666 - RNA, 19 nt, Artificial Sequence
  Description of Artificial Sequence: Synthetic oligonucleotide
  Antisense strand to SEQ ID NO: 1658665
auccucagacagauaauag

SEQ ID NO: 1658667 - RNA, 19 nt, Artificial Sequence
  Description of Artificial Sequence: Synthetic oligonucleotide
  Sense strand starting at position 551 of SEQ ID NO: 1561265
gaggauguaacguacagau

SEQ ID NO: 1658668 - RNA, 19 nt, Artificial Sequence
  Description of Artificial Sequence: Synthetic oligonucleotide
  Antisense strand to SEQ ID NO: 1658667
aucuguacguuacauccuc

SEQ ID NO: 1658669 - RNA, 19 nt, Artificial Sequence
  Description of Artificial Sequence: Synthetic oligonucleotide
  Sense strand starting at position 657 of SEQ ID NO: 1561265
uuuccugaauggucauauc

SEQ ID NO: 1658670 - RNA, 19 nt, Artificial Sequence
  Description of Artificial Sequence: Synthetic oligonucleotide
  Antisense strand to SEQ ID NO: 1658669
gauaugaccauucaggaaa

SEQ ID NO: 1658671 - RNA, 19 nt, Artificial Sequence
  Description of Artificial Sequence: Synthetic oligonucleotide
  Sense strand starting at position 742 of SEQ ID NO: 1561265
auuauaucagaucgaaggu

SEQ ID NO: 1658672 - RNA, 19 nt, Artificial Sequence
  Description of Artificial Sequence: Synthetic oligonucleotide
  Antisense strand to SEQ ID NO: 1658671
accuucgaucugauauaau

SEQ ID NO: 1658673 - RNA, 19 nt, Artificial Sequence
  Description of Artificial Sequence: Synthetic oligonucleotide
  Sense strand starting at position 743 of SEQ ID NO: 1561265
uuauaucagaucgaagguu

SEQ ID NO: 1658674 - RNA, 19 nt, Artificial Sequence
  Description of Artificial Sequence: Synthetic oligonucleotide
  Antisense strand to SEQ ID NO: 1658673
aaccuucgaucugauauaa

SEQ ID NO: 1658675 - RNA, 19 nt, Artificial Sequence
  Description of Artificial Sequence: Synthetic oligonucleotide
  Sense strand starting at position 780 of SEQ ID NO: 1561265
ccaucauugccagauugau

SEQ ID NO: 1658676 - RNA, 19 nt, Artificial Sequence
  Description of Artificial Sequence: Synthetic oligonucleotide
  Antisense strand to SEQ ID NO: 1658675
aucaaucuggcaaugaugg

SEQ ID NO: 1658677 - RNA, 19 nt, Artificial Sequence
  Description of Artificial Sequence: Synthetic oligonucleotide
  Sense strand starting at position 1004 of SEQ ID NO: 1561265
auuacauugcggcacagaa

SEQ ID NO: 1658678 - RNA, 19 nt, Artificial Sequence
  Description of Artificial Sequence: Synthetic oligonucleotide
  Antisense strand to SEQ ID NO: 1658677
uucugugccgcaauguaau

SEQ ID NO: 1658679 - RNA, 19 nt, Artificial Sequence
  Description of Artificial Sequence: Synthetic oligonucleotide
  Sense strand starting at position 1021 of SEQ ID NO: 1561265
aagaguaagucaucaauug

SEQ ID NO: 1658680 - RNA, 19 nt, Artificial Sequence
  Description of Artificial Sequence: Synthetic oligonucleotide
  Antisense strand to SEQ ID NO: 1658679
caauugaugacuuacucuu

SEQ ID NO: 1658681 - RNA, 19 nt, Artificial Sequence
  Description of Artificial Sequence: Synthetic oligonucleotide
  Sense strand starting at position 1033 of SEQ ID NO: 1561265
ucaauugaaccaugagcaa

SEQ ID NO: 1658682 - RNA, 19 nt, Artificial Sequence
  Description of Artificial Sequence: Synthetic oligonucleotide
  Antisense strand to SEQ ID NO: 1658681
uugcucaugguucaauuga

SEQ ID NO: 1658683 - RNA, 19 nt, Artificial Sequence
  Description of Artificial Sequence: Synthetic oligonucleotide
  Sense strand starting at position 1066 of SEQ ID NO: 1561265
cauguuuaugaugagguua

SEQ ID NO: 1658684 - RNA, 19 nt, Artificial Sequence
  Description of Artificial Sequence: Synthetic oligonucleotide
  Antisense strand to SEQ ID NO: 1658683
uaaccucaucauaaacaug

SEQ ID NO: 1658685 - RNA, 19 nt, Artificial Sequence
  Description of Artificial Sequence: Synthetic oligonucleotide
  Sense strand starting at position 1334 of SEQ ID NO: 1561265
gggagagauugcuccuauc

SEQ ID NO: 1658686 - RNA, 19 nt, Artificial Sequence
  Description of Artificial Sequence: Synthetic oligonucleotide
  Antisense strand to SEQ ID NO: 1658685
gauaggagcaaucucuccc

SEQ ID NO: 1658687 - RNA, 19 nt, Artificial Sequence
  Description of Artificial Sequence: Synthetic oligonucleotide
  Sense strand starting at position 1568 of SEQ ID NO: 1561265
agaugauguuuaccaacau

SEQ ID NO: 1658688 - RNA, 19 nt, Artificial Sequence
  Description of Artificial Sequence: Synthetic oligonucleotide
  Antisense strand to SEQ ID NO: 1658687
auguugguaaacaucaucu

SEQ ID NO: 1658689 - RNA, 19 nt, Artificial Sequence
  Description of Artificial Sequence: Synthetic oligonucleotide
  Sense strand starting at position 1676 of SEQ ID NO: 1561265
ccgugaucaccuggaagac

SEQ ID NO: 1658690 - RNA, 19 nt, Artificial Sequence
  Description of Artificial Sequence: Synthetic oligonucleotide
  Antisense strand to SEQ ID NO: 1658689
gucuuccaggugaucacgg

SEQ ID NO: 1658691 - RNA, 19 nt, Artificial Sequence
  Description of Artificial Sequence: Synthetic oligonucleotide
  Sense strand starting at position 1835 of SEQ ID NO: 1561265
cuaagaaguuggcuacaau

SEQ ID NO: 1658692 - RNA, 19 nt, Artificial Sequence
  Description of Artificial Sequence: Synthetic oligonucleotide
  Antisense strand to SEQ ID NO: 1658691
auuguagccaacuucuuag

SEQ ID NO: 1658693 - RNA, 19 nt, Artificial Sequence
  Description of Artificial Sequence: Synthetic oligonucleotide
  Sense strand starting at position 1849 of SEQ ID NO: 1561265
acaaucaggugcuuaacaa

SEQ ID NO: 1658694 - RNA, 19 nt, Artificial Sequence
  Description of Artificial Sequence: Synthetic oligonucleotide
  Antisense strand to SEQ ID NO: 1658693
uuguuaagcaccugauugu

SEQ ID NO: 1658695 - RNA, 19 nt, Artificial Sequence
  Description of Artificial Sequence: Synthetic oligonucleotide
  Sense strand starting at position 1961 of SEQ ID NO: 1561265
gugauaagaucauucccac

SEQ ID NO: 1658696 - RNA, 19 nt, Artificial Sequence
  Description of Artificial Sequence: Synthetic oligonucleotide
  Antisense strand to SEQ ID NO: 1658695
gugggaaugaucuuaucac

SEQ ID NO: 1658697 - RNA, 19 nt, Artificial Sequence
  Description of Artificial Sequence: Synthetic oligonucleotide
  Sense strand starting at position 2043 of SEQ ID NO: 1561265
ggagguccugcauggaaau

SEQ ID NO: 1658698 - RNA, 19 nt, Artificial Sequence
  Description of Artificial Sequence: Synthetic oligonucleotide
  Antisense strand to SEQ ID NO: 1658697
auuuccaugcaggaccucc

SEQ ID NO: 1658699 - RNA, 19 nt, Artificial Sequence
  Description of Artificial Sequence: Synthetic oligonucleotide
  Sense strand starting at position 2044 of SEQ ID NO: 1561265
gagguccugcauggaaaua

SEQ ID NO: 1658700 - RNA, 19 nt, Artificial Sequence
  Description of Artificial Sequence: Synthetic oligonucleotide
  Antisense strand to SEQ ID NO: 1658699
uauuuccaugcaggaccuc

SEQ ID NO: 1658701 - RNA, 19 nt, Artificial Sequence
  Description of Artificial Sequence: Synthetic oligonucleotide
  Sense strand starting at position 2179 of SEQ ID NO: 1561265
augcguaaccuuuaaagag

SEQ ID NO: 1658702 - RNA, 19 nt, Artificial Sequence
  Description of Artificial Sequence: Synthetic oligonucleotide
  Antisense strand to SEQ ID NO: 1658701
cucuuuaaagguuacgcau

SEQ ID NO: 1658703 - RNA, 19 nt, Artificial Sequence
  Description of Artificial Sequence: Synthetic oligonucleotide
  Sense strand starting at position 2405 of SEQ ID NO: 1561265
gcauuuagccguuauaguu

SEQ ID NO: 1658704 - RNA, 19 nt, Artificial Sequence
  Description of Artificial Sequence: Synthetic oligonucleotide
  Antisense strand to SEQ ID NO: 1658703
aacuauaacggcuaaaugc

SEQ ID NO: 1658705 - RNA, 19 nt, Artificial Sequence
  Description of Artificial Sequence: Synthetic oligonucleotide
  Sense strand starting at position 2445 of SEQ ID NO: 1561265
guguucuuugaauaagaca

SEQ ID NO: 1658706 - RNA, 19 nt, Artificial Sequence
  Description of Artificial Sequence: Synthetic oligonucleotide
  Antisense strand to SEQ ID NO: 1658705
ugucuuauucaaagaacac

SEQ ID NO: 1658707 - RNA, 19 nt, Artificial Sequence
  Description of Artificial Sequence: Synthetic oligonucleotide
  Sense strand starting at position 2653 of SEQ ID NO: 1561265
aauguagaugcagggauua

SEQ ID NO: 1658708 - RNA, 19 nt, Artificial Sequence
  Description of Artificial Sequence: Synthetic oligonucleotide
  Antisense strand to SEQ ID NO: 1658707
uaaucccugcaucuacauu

SEQ ID NO: 1658709 - RNA, 19 nt, Artificial Sequence
  Description of Artificial Sequence: Synthetic oligonucleotide
  Sense strand starting at position 2665 of SEQ ID NO: 1561265
gggauuacaguuugauacu

SEQ ID NO: 1658710 - RNA, 19 nt, Artificial Sequence
  Description of Artificial Sequence: Synthetic oligonucleotide
  Antisense strand to SEQ ID NO: 1658709
aguaucaaacuguaauccc

SEQ ID NO: 1658711 - RNA, 19 nt, Artificial Sequence
  Description of Artificial Sequence: Synthetic oligonucleotide
  Sense strand starting at position 2698 of SEQ ID NO: 1561265
caugacaaguuggauuuaa

SEQ ID NO: 1658712 - RNA, 19 nt, Artificial Sequence
  Description of Artificial Sequence: Synthetic oligonucleotide
  Antisense strand to SEQ ID NO: 1658711
uuaaauccaacuugucaug

SEQ ID NO: 1658713 - RNA, 19 nt, Artificial Sequence
  Description of Artificial Sequence: Synthetic oligonucleotide
  Sense strand starting at position 2722 of SEQ ID NO: 1561265
gcaagcauggaucaauauu

SEQ ID NO: 1658714 - RNA, 19 nt, Artificial Sequence
  Description of Artificial Sequence: Synthetic oligonucleotide
  Antisense strand to SEQ ID NO: 1658713
aauauugauccaugcuugc

SEQ ID NO: 1658715 - RNA, 19 nt, Artificial Sequence
  Description of Artificial Sequence: Synthetic oligonucleotide
  Sense strand starting at position 3052 of SEQ ID NO: 1561265
gagaguuugggugauguua

SEQ ID NO: 1658716 - RNA, 19 nt, Artificial Sequence
  Description of Artificial Sequence: Synthetic oligonucleotide
  Antisense strand to SEQ ID NO: 1658715
uaacaucacccaaacucuc

SEQ ID NO: 1658717 - RNA, 19 nt, Artificial Sequence
  Description of Artificial Sequence: Synthetic oligonucleotide
  Sense strand starting at position 3067 of SEQ ID NO: 1561265
guuagaaucuaucugaagc

SEQ ID NO: 1658718 - RNA, 19 nt, Artificial Sequence
  Description of Artificial Sequence: Synthetic oligonucleotide
  Antisense strand to SEQ ID NO: 1658717
gcuucagauagauucuaac

SEQ ID NO: 1658719 - RNA, 19 nt, Artificial Sequence
  Description of Artificial Sequence: Synthetic oligonucleotide
  Sense strand starting at position 3340 of SEQ ID NO: 1561265
acaugacuccuguagaguc

SEQ ID NO: 1658720 - RNA, 19 nt, Artificial Sequence
  Description of Artificial Sequence: Synthetic oligonucleotide
  Antisense strand to SEQ ID NO: 1658719
gacucuacaggagucaugu

SEQ ID NO: 1658721 - RNA, 19 nt, Artificial Sequence
  Description of Artificial Sequence: Synthetic oligonucleotide
  Sense strand starting at position 3366 of SEQ ID NO: 1561265
ucauuacaaguauggugau

SEQ ID NO: 1658722 - RNA, 19 nt, Artificial Sequence
  Description of Artificial Sequence: Synthetic oligonucleotide
  Antisense strand to SEQ ID NO: 1658721
aucaccauacuuguaauga

SEQ ID NO: 1658723 - RNA, 19 nt, Artificial Sequence
  Description of Artificial Sequence: Synthetic oligonucleotide
  Sense strand starting at position 3441 of SEQ ID NO: 1561265
ggcggaacagcagauugau

SEQ ID NO: 1658724 - RNA, 19 nt, Artificial Sequence
  Description of Artificial Sequence: Synthetic oligonucleotide
  Antisense strand to SEQ ID NO: 1658723
aucaaucugcuguuccgcc

SEQ ID NO: 1658725 - RNA, 19 nt, Artificial Sequence
  Description of Artificial Sequence: Synthetic oligonucleotide
  Sense strand starting at position 3464 of SEQ ID NO: 1561265
guaccacaguccuuaagaa

SEQ ID NO: 1658726 - RNA, 19 nt, Artificial Sequence
  Description of Artificial Sequence: Synthetic oligonucleotide
  Antisense strand to SEQ ID NO: 1658725
uucuuaaggacugugguac

SEQ ID NO: 1658727 - RNA, 19 nt, Artificial Sequence
  Description of Artificial Sequence: Synthetic oligonucleotide
  Sense strand starting at position 3516 of SEQ ID NO: 1561265
uuaagaauguuaguccuua

SEQ ID NO: 1658728 - RNA, 19 nt, Artificial Sequence
  Description of Artificial Sequence: Synthetic oligonucleotide
  Antisense strand to SEQ ID NO: 1658727
uaaggacuaacauucuuaa

SEQ ID NO: 1658729 - RNA, 19 nt, Artificial Sequence
  Description of Artificial Sequence: Synthetic oligonucleotide
  Sense strand starting at position 3520 of SEQ ID NO: 1561265
gaauguuaguccuuaagaa

SEQ ID NO: 1658730 - RNA, 19 nt, Artificial Sequence
  Description of Artificial Sequence: Synthetic oligonucleotide
  Antisense strand to SEQ ID NO: 1658729
uucuuaaggacuaacauuc

SEQ ID NO: 1658731 - RNA, 19 nt, Artificial Sequence
  Description of Artificial Sequence: Synthetic oligonucleotide
  Sense strand starting at position 3532 of SEQ ID NO: 1561265
uuaagaacauagucagguu

SEQ ID NO: 1658732 - RNA, 19 nt, Artificial Sequence
  Description of Artificial Sequence: Synthetic oligonucleotide
  Antisense strand to SEQ ID NO: 1658731
aaccugacuauguucuuaa

SEQ ID NO: 1658733 - RNA, 19 nt, Artificial Sequence
  Description of Artificial Sequence: Synthetic oligonucleotide
  Sense strand starting at position 3586 of SEQ ID NO: 1561265
caguguggauucuccuaaa

SEQ ID NO: 1658734 - RNA, 19 nt, Artificial Sequence
  Description of Artificial Sequence: Synthetic oligonucleotide
  Antisense strand to SEQ ID NO: 1658733
uuuaggagaauccacacug

SEQ ID NO: 1658735 - RNA, 19 nt, Artificial Sequence
  Description of Artificial Sequence: Synthetic oligonucleotide
  Sense strand starting at position 140 of SEQ ID NO: 1561266
gugaauaaaucauugucuc

SEQ ID NO: 1658736 - RNA, 19 nt, Artificial Sequence
  Description of Artificial Sequence: Synthetic oligonucleotide
  Antisense strand to SEQ ID NO: 1658735
gagacaaugauuuauucac

SEQ ID NO: 1658737 - RNA, 19 nt, Artificial Sequence
  Description of Artificial Sequence: Synthetic oligonucleotide
  Sense strand starting at position 264 of SEQ ID NO: 1561266
agcucagggccggaauuau

SEQ ID NO: 1658738 - RNA, 19 nt, Artificial Sequence
  Description of Artificial Sequence: Synthetic oligonucleotide
  Antisense strand to SEQ ID NO: 1658737
auaauuccggcccugagcu

SEQ ID NO: 1658739 - RNA, 19 nt, Artificial Sequence
  Description of Artificial Sequence: Synthetic oligonucleotide
  Sense strand starting at position 275 of SEQ ID NO: 1561266
ggaauuaucuagcuggaug

SEQ ID NO: 1658740 - RNA, 19 nt, Artificial Sequence
  Description of Artificial Sequence: Synthetic oligonucleotide
  Antisense strand to SEQ ID NO: 1658739
cauccagcuagauaauucc

SEQ ID NO: 1658741 - RNA, 19 nt, Artificial Sequence
  Description of Artificial Sequence: Synthetic oligonucleotide
  Sense strand starting at position 345 of SEQ ID NO: 1561266
ggauaaacuugggaaauaa

SEQ ID NO: 1658742 - RNA, 19 nt, Artificial Sequence
  Description of Artificial Sequence: Synthetic oligonucleotide
  Antisense strand to SEQ ID NO: 1658741
uuauuucccaaguuuaucc

SEQ ID NO: 1658743 - RNA, 19 nt, Artificial Sequence
  Description of Artificial Sequence: Synthetic oligonucleotide
  Sense strand starting at position 357 of SEQ ID NO: 1561266
gaaauaaucugccuggguu

SEQ ID NO: 1658744 - RNA, 19 nt, Artificial Sequence
  Description of Artificial Sequence: Synthetic oligonucleotide
  Antisense strand to SEQ ID NO: 1658743
aacccaggcagauuauuuc

SEQ ID NO: 1658745 - RNA, 19 nt, Artificial Sequence
  Description of Artificial Sequence: Synthetic oligonucleotide
  Sense strand starting at position 398 of SEQ ID NO: 1561266
uugcaugauggacagaguu

SEQ ID NO: 1658746 - RNA, 19 nt, Artificial Sequence
  Description of Artificial Sequence: Synthetic oligonucleotide
  Antisense strand to SEQ ID NO: 1658745
aacucuguccaucaugcaa

SEQ ID NO: 1658747 - RNA, 19 nt, Artificial Sequence
  Description of Artificial Sequence: Synthetic oligonucleotide
  Sense strand starting at position 744 of SEQ ID NO: 1561266
ggcaacucuccauaaguau

SEQ ID NO: 1658748 - RNA, 19 nt, Artificial Sequence
  Description of Artificial Sequence: Synthetic oligonucleotide
  Antisense strand to SEQ ID NO: 1658747
auacuuauggagaguugcc

SEQ ID NO: 1658749 - RNA, 19 nt, Artificial Sequence
  Description of Artificial Sequence: Synthetic oligonucleotide
  Sense strand starting at position 820 of SEQ ID NO: 1561266
ggguauugccagcaaacaa

SEQ ID NO: 1658750 - RNA, 19 nt, Artificial Sequence
  Description of Artificial Sequence: Synthetic oligonucleotide
  Antisense strand to SEQ ID NO: 1658749
uuguuugcuggcaauaccc

SEQ ID NO: 1658751 - RNA, 19 nt, Artificial Sequence
  Description of Artificial Sequence: Synthetic oligonucleotide
  Sense strand starting at position 941 of SEQ ID NO: 1561266
acugcagaccuguaaauau

SEQ ID NO: 1658752 - RNA, 19 nt, Artificial Sequence
  Description of Artificial Sequence: Synthetic oligonucleotide
  Antisense strand to SEQ ID NO: 1658751
auauuuacaggucugcagu

SEQ ID NO: 1658753 - RNA, 19 nt, Artificial Sequence
  Description of Artificial Sequence: Synthetic oligonucleotide
  Sense strand starting at position 997 of SEQ ID NO: 1561266
ccacccugagaaugugaau

SEQ ID NO: 1658754 - RNA, 19 nt, Artificial Sequence
  Description of Artificial Sequence: Synthetic oligonucleotide
  Antisense strand to SEQ ID NO: 1658753
auucacauucucagggugg

SEQ ID NO: 1658755 - RNA, 19 nt, Artificial Sequence
  Description of Artificial Sequence: Synthetic oligonucleotide
  Sense strand starting at position 1011 of SEQ ID NO: 1561266
ugaauuagcugggcaggau

SEQ ID NO: 1658756 - RNA, 19 nt, Artificial Sequence
  Description of Artificial Sequence: Synthetic oligonucleotide
  Antisense strand to SEQ ID NO: 1658755
auccugcccagcuaauuca

SEQ ID NO: 1658757 - RNA, 19 nt, Artificial Sequence
  Description of Artificial Sequence: Synthetic oligonucleotide
  Sense strand starting at position 1012 of SEQ ID NO: 1561266
gaauuagcugggcaggauu

SEQ ID NO: 1658758 - RNA, 19 nt, Artificial Sequence
  Description of Artificial Sequence: Synthetic oligonucleotide
  Antisense strand to SEQ ID NO: 1658757
aauccugcccagcuaauuc

SEQ ID NO: 1658759 - RNA, 19 nt, Artificial Sequence
  Description of Artificial Sequence: Synthetic oligonucleotide
  Sense strand starting at position 1049 of SEQ ID NO: 1561266
auaauaaccugggcuugaa

SEQ ID NO: 1658760 - RNA, 19 nt, Artificial Sequence
  Description of Artificial Sequence: Synthetic oligonucleotide
  Antisense strand to SEQ ID NO: 1658759
uucaagcccagguuauuau

SEQ ID NO: 1658761 - RNA, 19 nt, Artificial Sequence
  Description of Artificial Sequence: Synthetic oligonucleotide
  Sense strand starting at position 1063 of SEQ ID NO: 1561266
uugaacagugccuauuaga

SEQ ID NO: 1658762 - RNA, 19 nt, Artificial Sequence
  Description of Artificial Sequence: Synthetic oligonucleotide
  Antisense strand to SEQ ID NO: 1658761
ucuaauaggcacuguucaa

SEQ ID NO: 1658763 - RNA, 19 nt, Artificial Sequence
  Description of Artificial Sequence: Synthetic oligonucleotide
  Sense strand starting at position 1111 of SEQ ID NO: 1561266
guguaauaucgguugcacg

SEQ ID NO: 1658764 - RNA, 19 nt, Artificial Sequence
  Description of Artificial Sequence: Synthetic oligonucleotide
  Antisense strand to SEQ ID NO: 1658763
cgugcaaccgauauuacac

SEQ ID NO: 1658765 - RNA, 19 nt, Artificial Sequence
  Description of Artificial Sequence: Synthetic oligonucleotide
  Sense strand starting at position 1128 of SEQ ID NO: 1561266
cggagccuuccauauagua

SEQ ID NO: 1658766 - RNA, 19 nt, Artificial Sequence
  Description of Artificial Sequence: Synthetic oligonucleotide
  Antisense strand to SEQ ID NO: 1658765
uacuauauggaaggcuccg

SEQ ID NO: 1658767 - RNA, 19 nt, Artificial Sequence
  Description of Artificial Sequence: Synthetic oligonucleotide
  Sense strand starting at position 1160 of SEQ ID NO: 1561266
auuggaugugcugaaguca

SEQ ID NO: 1658768 - RNA, 19 nt, Artificial Sequence
  Description of Artificial Sequence: Synthetic oligonucleotide
  Antisense strand to SEQ ID NO: 1658767
ugacuucagcacauccaau

SEQ ID NO: 1658769 - RNA, 19 nt, Artificial Sequence
  Description of Artificial Sequence: Synthetic oligonucleotide
  Sense strand starting at position 1171 of SEQ ID NO: 1561266
ugaagucaccuaugcaaug

SEQ ID NO: 1658770 - RNA, 19 nt, Artificial Sequence
  Description of Artificial Sequence: Synthetic oligonucleotide
  Antisense strand to SEQ ID NO: 1658769
cauugcauaggugacuuca

SEQ ID NO: 1658771 - RNA, 19 nt, Artificial Sequence
  Description of Artificial Sequence: Synthetic oligonucleotide
  Sense strand starting at position 1281 of SEQ ID NO: 1561266
agcugcuaugcgucaacua

SEQ ID NO: 1658772 - RNA, 19 nt, Artificial Sequence
  Description of Artificial Sequence: Synthetic oligonucleotide
  Antisense strand to SEQ ID NO: 1658771
uaguugacgcauagcagcu

SEQ ID NO: 1658773 - RNA, 19 nt, Artificial Sequence
  Description of Artificial Sequence: Synthetic oligonucleotide
  Sense strand starting at position 1442 of SEQ ID NO: 1561266
ugacuuagacgccaaguuu

SEQ ID NO: 1658774 - RNA, 19 nt, Artificial Sequence
  Description of Artificial Sequence: Synthetic oligonucleotide
  Antisense strand to SEQ ID NO: 1658773
aaacuuggcgucuaaguca

SEQ ID NO: 1658775 - RNA, 19 nt, Artificial Sequence
  Description of Artificial Sequence: Synthetic oligonucleotide
  Sense strand starting at position 1958 of SEQ ID NO: 1561266
ucugauuccagacggaaug

SEQ ID NO: 1658776 - RNA, 19 nt, Artificial Sequence
  Description of Artificial Sequence: Synthetic oligonucleotide
  Antisense strand to SEQ ID NO: 1658775
cauuccgucuggaaucaga

SEQ ID NO: 1658777 - RNA, 19 nt, Artificial Sequence
  Description of Artificial Sequence: Synthetic oligonucleotide
  Sense strand starting at position 1978 of SEQ ID NO: 1561266
ggauuauucccucauugcu

SEQ ID NO: 1658778 - RNA, 19 nt, Artificial Sequence
  Description of Artificial Sequence: Synthetic oligonucleotide
  Antisense strand to SEQ ID NO: 1658777
agcaaugagggaauaaucc

SEQ ID NO: 1658779 - RNA, 19 nt, Artificial Sequence
  Description of Artificial Sequence: Synthetic oligonucleotide
  Sense strand starting at position 2012 of SEQ ID NO: 1561266
cguucuagccgcuuuggaa

SEQ ID NO: 1658780 - RNA, 19 nt, Artificial Sequence
  Description of Artificial Sequence: Synthetic oligonucleotide
  Antisense strand to SEQ ID NO: 1658779
uuccaaagcggcuagaacg

SEQ ID NO: 1658781 - RNA, 19 nt, Artificial Sequence
  Description of Artificial Sequence: Synthetic oligonucleotide
  Sense strand starting at position 2085 of SEQ ID NO: 1561266
ugagguaccucuccaccaa

SEQ ID NO: 1658782 - RNA, 19 nt, Artificial Sequence
  Description of Artificial Sequence: Synthetic oligonucleotide
  Antisense strand to SEQ ID NO: 1658781
uugguggagagguaccuca

SEQ ID NO: 1658783 - RNA, 19 nt, Artificial Sequence
  Description of Artificial Sequence: Synthetic oligonucleotide
  Sense strand starting at position 2173 of SEQ ID NO: 1561266
cgucacaacgcguuuccau

SEQ ID NO: 1658784 - RNA, 19 nt, Artificial Sequence
  Description of Artificial Sequence: Synthetic oligonucleotide
  Antisense strand to SEQ ID NO: 1658783
auggaaacgcguugugacg

SEQ ID NO: 1658785 - RNA, 19 nt, Artificial Sequence
  Description of Artificial Sequence: Synthetic oligonucleotide
  Sense strand starting at position 2220 of SEQ ID NO: 1561266
gguuaacacucccugacuu

SEQ ID NO: 1658786 - RNA, 19 nt, Artificial Sequence
  Description of Artificial Sequence: Synthetic oligonucleotide
  Antisense strand to SEQ ID NO: 1658785
aagucagggaguguuaacc

SEQ ID NO: 1658787 - RNA, 19 nt, Artificial Sequence
  Description of Artificial Sequence: Synthetic oligonucleotide
  Sense strand starting at position 2248 of SEQ ID NO: 1561266
gcaagaagcuaauuagaug

SEQ ID NO: 1658788 - RNA, 19 nt, Artificial Sequence
  Description of Artificial Sequence: Synthetic oligonucleotide
  Antisense strand to SEQ ID NO: 1658787
caucuaauuagcuucuugc

SEQ ID NO: 1658789 - RNA, 19 nt, Artificial Sequence
  Description of Artificial Sequence: Synthetic oligonucleotide
  Sense strand starting at position 2254 of SEQ ID NO: 1561266
agcuaauuagaugauucuu

SEQ ID NO: 1658790 - RNA, 19 nt, Artificial Sequence
  Description of Artificial Sequence: Synthetic oligonucleotide
  Antisense strand to SEQ ID NO: 1658789
aagaaucaucuaauuagcu

SEQ ID NO: 1658791 - RNA, 19 nt, Artificial Sequence
  Description of Artificial Sequence: Synthetic oligonucleotide
  Sense strand starting at position 3401 of SEQ ID NO: 1561266
ggaugggaguucuucggga

SEQ ID NO: 1658792 - RNA, 19 nt, Artificial Sequence
  Description of Artificial Sequence: Synthetic oligonucleotide
  Antisense strand to SEQ ID NO: 1658791
ucccgaagaacucccaucc

SEQ ID NO: 1658793 - RNA, 19 nt, Artificial Sequence
  Description of Artificial Sequence: Synthetic oligonucleotide
  Sense strand starting at position 3403 of SEQ ID NO: 1561266
augggaguucuucgggaag

SEQ ID NO: 1658794 - RNA, 19 nt, Artificial Sequence
  Description of Artificial Sequence: Synthetic oligonucleotide
  Antisense strand to SEQ ID NO: 1658793
cuucccgaagaacucccau

SEQ ID NO: 1658795 - RNA, 19 nt, Artificial Sequence
  Description of Artificial Sequence: Synthetic oligonucleotide
  Sense strand starting at position 3406 of SEQ ID NO: 1561266
ggaguucuucgggaaguug

SEQ ID NO: 1658796 - RNA, 19 nt, Artificial Sequence
  Description of Artificial Sequence: Synthetic oligonucleotide
  Antisense strand to SEQ ID NO: 1658795
caacuucccgaagaacucc

SEQ ID NO: 1658797 - RNA, 19 nt, Artificial Sequence
  Description of Artificial Sequence: Synthetic oligonucleotide
  Sense strand starting at position 3439 of SEQ ID NO: 1561266
uacaguauuugagugcuuu

SEQ ID NO: 1658798 - RNA, 19 nt, Artificial Sequence
  Description of Artificial Sequence: Synthetic oligonucleotide
  Antisense strand to SEQ ID NO: 1658797
aaagcacucaaauacugua

SEQ ID NO: 1658799 - RNA, 19 nt, Artificial Sequence
  Description of Artificial Sequence: Synthetic oligonucleotide
  Sense strand starting at position 3440 of SEQ ID NO: 1561266
acaguauuugagugcuuuc

SEQ ID NO: 1658800 - RNA, 19 nt, Artificial Sequence
  Description of Artificial Sequence: Synthetic oligonucleotide
  Antisense strand to SEQ ID NO: 1658799
gaaagcacucaaauacugu

SEQ ID NO: 1658801 - RNA, 19 nt, Artificial Sequence
  Description of Artificial Sequence: Synthetic oligonucleotide
  Sense strand starting at position 3509 of SEQ ID NO: 1561266
gcagcacugagacauaagu

SEQ ID NO: 1658802 - RNA, 19 nt, Artificial Sequence
  Description of Artificial Sequence: Synthetic oligonucleotide
  Antisense strand to SEQ ID NO: 1658801
acuuaugucucagugcugc

SEQ ID NO: 1658803 - RNA, 19 nt, Artificial Sequence
  Description of Artificial Sequence: Synthetic oligonucleotide
  Sense strand starting at position 3730 of SEQ ID NO: 1561266
ggcaauccaggugaaguuu

SEQ ID NO: 1658804 - RNA, 19 nt, Artificial Sequence
  Description of Artificial Sequence: Synthetic oligonucleotide
  Antisense strand to SEQ ID NO: 1658803
aaacuucaccuggauugcc

SEQ ID NO: 1658805 - RNA, 19 nt, Artificial Sequence
  Description of Artificial Sequence: Synthetic oligonucleotide
  Sense strand starting at position 3794 of SEQ ID NO: 1561266
ggaccauagaucuguugua

SEQ ID NO: 1658806 - RNA, 19 nt, Artificial Sequence
  Description of Artificial Sequence: Synthetic oligonucleotide
  Antisense strand to SEQ ID NO: 1658805
uacaacagaucuauggucc

SEQ ID NO: 1658807 - RNA, 19 nt, Artificial Sequence
  Description of Artificial Sequence: Synthetic oligonucleotide
  Sense strand starting at position 3795 of SEQ ID NO: 1561266
gaccauagaucuguuguau

SEQ ID NO: 1658808 - RNA, 19 nt, Artificial Sequence
  Description of Artificial Sequence: Synthetic oligonucleotide
  Antisense strand to SEQ ID NO: 1658807
auacaacagaucuaugguc

SEQ ID NO: 1658809 - RNA, 19 nt, Artificial Sequence
  Description of Artificial Sequence: Synthetic oligonucleotide
  Sense strand starting at position 3896 of SEQ ID NO: 1561266
gucucucagccugauaauu

SEQ ID NO: 1658810 - RNA, 19 nt, Artificial Sequence
  Description of Artificial Sequence: Synthetic oligonucleotide
  Antisense strand to SEQ ID NO: 1658809
aauuaucaggcugagagac

SEQ ID NO: 1658811 - RNA, 19 nt, Artificial Sequence
  Description of Artificial Sequence: Synthetic oligonucleotide
  Sense strand starting at position 3908 of SEQ ID NO: 1561266
gauaauuguuuggcuuaag

SEQ ID NO: 1658812 - RNA, 19 nt, Artificial Sequence
  Description of Artificial Sequence: Synthetic oligonucleotide
  Antisense strand to SEQ ID NO: 1658811
cuuaagccaaacaauuauc

SEQ ID NO: 1658813 - RNA, 19 nt, Artificial Sequence
  Description of Artificial Sequence: Synthetic oligonucleotide
  Sense strand starting at position 3911 of SEQ ID NO: 1561266
aauuguuuggcuuaaguca

SEQ ID NO: 1658814 - RNA, 19 nt, Artificial Sequence
  Description of Artificial Sequence: Synthetic oligonucleotide
  Antisense strand to SEQ ID NO: 1658813
ugacuuaagccaaacaauu

SEQ ID NO: 1658815 - RNA, 19 nt, Artificial Sequence
  Description of Artificial Sequence: Synthetic oligonucleotide
  Sense strand starting at position 773 of SEQ ID NO: 1561267
ccaggaguucgccagaaga

SEQ ID NO: 1658816 - RNA, 19 nt, Artificial Sequence
  Description of Artificial Sequence: Synthetic oligonucleotide
  Antisense strand to SEQ ID NO: 1658815
ucuucuggcgaacuccugg

SEQ ID NO: 1658817 - RNA, 19 nt, Artificial Sequence
  Description of Artificial Sequence: Synthetic oligonucleotide
  Sense strand starting at position 1404 of SEQ ID NO: 1561267
cagagaguuuaagauccau

SEQ ID NO: 1658818 - RNA, 19 nt, Artificial Sequence
  Description of Artificial Sequence: Synthetic oligonucleotide
  Antisense strand to SEQ ID NO: 1658817
auggaucuuaaacucucug

SEQ ID NO: 1658819 - RNA, 19 nt, Artificial Sequence
  Description of Artificial Sequence: Synthetic oligonucleotide
  Sense strand starting at position 1460 of SEQ ID NO: 1561267
gacaguuugguaugggaga

SEQ ID NO: 1658820 - RNA, 19 nt, Artificial Sequence
  Description of Artificial Sequence: Synthetic oligonucleotide
  Antisense strand to SEQ ID NO: 1658819
ucucccauaccaaacuguc

SEQ ID NO: 1658821 - RNA, 19 nt, Artificial Sequence
  Description of Artificial Sequence: Synthetic oligonucleotide
  Sense strand starting at position 1483 of SEQ ID NO: 1561267
aguagaaauguuugaagcu

SEQ ID NO: 1658822 - RNA, 19 nt, Artificial Sequence
  Description of Artificial Sequence: Synthetic oligonucleotide
  Antisense strand to SEQ ID NO: 1658821
agcuucaaacauuucuacu

SEQ ID NO: 1658823 - RNA, 19 nt, Artificial Sequence
  Description of Artificial Sequence: Synthetic oligonucleotide
  Sense strand starting at position 1503 of SEQ ID NO: 1561267
gggucuuaacagugaagga

SEQ ID NO: 1658824 - RNA, 19 nt, Artificial Sequence
  Description of Artificial Sequence: Synthetic oligonucleotide
  Antisense strand to SEQ ID NO: 1658823
uccuucacuguuaagaccc

SEQ ID NO: 1658825 - RNA, 19 nt, Artificial Sequence
  Description of Artificial Sequence: Synthetic oligonucleotide
  Sense strand starting at position 1529 of SEQ ID NO: 1561267
gggucuuuggcaggaacuu

SEQ ID NO: 1658826 - RNA, 19 nt, Artificial Sequence
  Description of Artificial Sequence: Synthetic oligonucleotide
  Antisense strand to SEQ ID NO: 1658825
aaguuccugccaaagaccc

SEQ ID NO: 1658827 - RNA, 19 nt, Artificial Sequence
  Description of Artificial Sequence: Synthetic oligonucleotide
  Sense strand starting at position 1544 of SEQ ID NO: 1561267
acuugaggauccgaaauau

SEQ ID NO: 1658828 - RNA, 19 nt, Artificial Sequence
  Description of Artificial Sequence: Synthetic oligonucleotide
  Antisense strand to SEQ ID NO: 1658827
auauuucggauccucaagu

SEQ ID NO: 1658829 - RNA, 19 nt, Artificial Sequence
  Description of Artificial Sequence: Synthetic oligonucleotide
  Sense strand starting at position 1553 of SEQ ID NO: 1561267
uccgaaauaucaggaaaua

SEQ ID NO: 1658830 - RNA, 19 nt, Artificial Sequence
  Description of Artificial Sequence: Synthetic oligonucleotide
  Antisense strand to SEQ ID NO: 1658829
uauuuccugauauuucgga

SEQ ID NO: 1658831 - RNA, 19 nt, Artificial Sequence
  Description of Artificial Sequence: Synthetic oligonucleotide
  Sense strand starting at position 1628 of SEQ ID NO: 1561267
gcagaaacauuugaccaga

SEQ ID NO: 1658832 - RNA, 19 nt, Artificial Sequence
  Description of Artificial Sequence: Synthetic oligonucleotide
  Antisense strand to SEQ ID NO: 1658831
ucuggucaaauguuucugc

SEQ ID NO: 1658833 - RNA, 19 nt, Artificial Sequence
  Description of Artificial Sequence: Synthetic oligonucleotide
  Sense strand starting at position 1724 of SEQ ID NO: 1561267
aggaacugaucuggaacuu

SEQ ID NO: 1658834 - RNA, 19 nt, Artificial Sequence
  Description of Artificial Sequence: Synthetic oligonucleotide
  Antisense strand to SEQ ID NO: 1658833
aaguuccagaucaguuccu

SEQ ID NO: 1658835 - RNA, 19 nt, Artificial Sequence
  Description of Artificial Sequence: Synthetic oligonucleotide
  Sense strand starting at position 1789 of SEQ ID NO: 1561267
ggaagagcucuuugagucu

SEQ ID NO: 1658836 - RNA, 19 nt, Artificial Sequence
  Description of Artificial Sequence: Synthetic oligonucleotide
  Antisense strand to SEQ ID NO: 1658835
agacucaaagagcucuucc

SEQ ID NO: 1658837 - RNA, 19 nt, Artificial Sequence
  Description of Artificial Sequence: Synthetic oligonucleotide
  Sense strand starting at position 1792 of SEQ ID NO: 1561267
agagcucuuugagucugaa

SEQ ID NO: 1658838 - RNA, 19 nt, Artificial Sequence
  Description of Artificial Sequence: Synthetic oligonucleotide
  Antisense strand to SEQ ID NO: 1658837
uucagacucaaagagcucu

SEQ ID NO: 1658839 - RNA, 19 nt, Artificial Sequence
  Description of Artificial Sequence: Synthetic oligonucleotide
  Sense strand starting at position 1795 of SEQ ID NO: 1561267
gcucuuugagucugaagag

SEQ ID NO: 1658840 - RNA, 19 nt, Artificial Sequence
  Description of Artificial Sequence: Synthetic oligonucleotide
  Antisense strand to SEQ ID NO: 1658839
cucuucagacucaaagagc

SEQ ID NO: 1658841 - RNA, 19 nt, Artificial Sequence
  Description of Artificial Sequence: Synthetic oligonucleotide
  Sense strand starting at position 1796 of SEQ ID NO: 1561267
cucuuugagucugaagaga

SEQ ID NO: 1658842 - RNA, 19 nt, Artificial Sequence
  Description of Artificial Sequence: Synthetic oligonucleotide
  Antisense strand to SEQ ID NO: 1658841
ucucuucagacucaaagag

SEQ ID NO: 1658843 - RNA, 19 nt, Artificial Sequence
  Description of Artificial Sequence: Synthetic oligonucleotide
  Sense strand starting at position 1825 of SEQ ID NO: 1561267
gaaguugguuugcugaagu

SEQ ID NO: 1658844 - RNA, 19 nt, Artificial Sequence
  Description of Artificial Sequence: Synthetic oligonucleotide
  Antisense strand to SEQ ID NO: 1658843
acuucagcaaaccaacuuc

SEQ ID NO: 1658845 - RNA, 19 nt, Artificial Sequence
  Description of Artificial Sequence: Synthetic oligonucleotide
  Sense strand starting at position 1860 of SEQ ID NO: 1561267
gggugaggaucccuaccaa

SEQ ID NO: 1658846 - RNA, 19 nt, Artificial Sequence
  Description of Artificial Sequence: Synthetic oligonucleotide
  Antisense strand to SEQ ID NO: 1658845
uugguagggauccucaccc

SEQ ID NO: 1658847 - RNA, 19 nt, Artificial Sequence
  Description of Artificial Sequence: Synthetic oligonucleotide
  Sense strand starting at position 2286 of SEQ ID NO: 1561267
ggagcaaauuugugagaca

SEQ ID NO: 1658848 - RNA, 19 nt, Artificial Sequence
  Description of Artificial Sequence: Synthetic oligonucleotide
  Antisense strand to SEQ ID NO: 1658847
ugucucacaaauuugcucc

SEQ ID NO: 1658849 - RNA, 19 nt, Artificial Sequence
  Description of Artificial Sequence: Synthetic oligonucleotide
  Sense strand starting at position 2287 of SEQ ID NO: 1561267
gagcaaauuugugagacaa

SEQ ID NO: 1658850 - RNA, 19 nt, Artificial Sequence
  Description of Artificial Sequence: Synthetic oligonucleotide
  Antisense strand to SEQ ID NO: 1658849
uugucucacaaauuugcuc

SEQ ID NO: 1658851 - RNA, 19 nt, Artificial Sequence
  Description of Artificial Sequence: Synthetic oligonucleotide
  Sense strand starting at position 2289 of SEQ ID NO: 1561267
gcaaauuugugagacaaag

SEQ ID NO: 1658852 - RNA, 19 nt, Artificial Sequence
  Description of Artificial Sequence: Synthetic oligonucleotide
  Antisense strand to SEQ ID NO: 1658851
cuuugucucacaaauuugc

SEQ ID NO: 1658853 - RNA, 19 nt, Artificial Sequence
  Description of Artificial Sequence: Synthetic oligonucleotide
  Sense strand starting at position 2534 of SEQ ID NO: 1561267
ccucuauccugagaccaga

SEQ ID NO: 1658854 - RNA, 19 nt, Artificial Sequence
  Description of Artificial Sequence: Synthetic oligonucleotide
  Antisense strand to SEQ ID NO: 1658853
ucuggucucaggauagagg

SEQ ID NO: 1658855 - RNA, 19 nt, Artificial Sequence
  Description of Artificial Sequence: Synthetic oligonucleotide
  Sense strand starting at position 2586 of SEQ ID NO: 1561267
gccugugucccgcuaaacu

SEQ ID NO: 1658856 - RNA, 19 nt, Artificial Sequence
  Description of Artificial Sequence: Synthetic oligonucleotide
  Antisense strand to SEQ ID NO: 1658855
aguuuagcgggacacaggc

SEQ ID NO: 1658857 - RNA, 19 nt, Artificial Sequence
  Description of Artificial Sequence: Synthetic oligonucleotide
  Sense strand starting at position 2661 of SEQ ID NO: 1561267
ucgcaaaugcuggagaaca

SEQ ID NO: 1658858 - RNA, 19 nt, Artificial Sequence
  Description of Artificial Sequence: Synthetic oligonucleotide
  Antisense strand to SEQ ID NO: 1658857
uguucuccagcauuugcga

SEQ ID NO: 1658859 - RNA, 19 nt, Artificial Sequence
  Description of Artificial Sequence: Synthetic oligonucleotide
  Sense strand starting at position 2663 of SEQ ID NO: 1561267
gcaaaugcuggagaacauu

SEQ ID NO: 1658860 - RNA, 19 nt, Artificial Sequence
  Description of Artificial Sequence: Synthetic oligonucleotide
  Antisense strand to SEQ ID NO: 1658859
aauguucuccagcauuugc

SEQ ID NO: 1658861 - RNA, 19 nt, Artificial Sequence
  Description of Artificial Sequence: Synthetic oligonucleotide
  Sense strand starting at position 2809 of SEQ ID NO: 1561267
cugccaggguccuucuaua

SEQ ID NO: 1658862 - RNA, 19 nt, Artificial Sequence
  Description of Artificial Sequence: Synthetic oligonucleotide
  Antisense strand to SEQ ID NO: 1658861
uauagaaggacccuggcag

SEQ ID NO: 1658863 - RNA, 19 nt, Artificial Sequence
  Description of Artificial Sequence: Synthetic oligonucleotide
  Sense strand starting at position 2820 of SEQ ID NO: 1561267
cuucuauacccagagcuga

SEQ ID NO: 1658864 - RNA, 19 nt, Artificial Sequence
  Description of Artificial Sequence: Synthetic oligonucleotide
  Antisense strand to SEQ ID NO: 1658863
ucagcucuggguauagaag

SEQ ID NO: 1658865 - RNA, 19 nt, Artificial Sequence
  Description of Artificial Sequence: Synthetic oligonucleotide
  Sense strand starting at position 2982 of SEQ ID NO: 1561267
ccaguccucuaccuggaau

SEQ ID NO: 1658866 - RNA, 19 nt, Artificial Sequence
  Description of Artificial Sequence: Synthetic oligonucleotide
  Antisense strand to SEQ ID NO: 1658865
auuccagguagaggacugg

SEQ ID NO: 1658867 - RNA, 19 nt, Artificial Sequence
  Description of Artificial Sequence: Synthetic oligonucleotide
  Sense strand starting at position 3057 of SEQ ID NO: 1561267
ggucucaccuuauuaagaa

SEQ ID NO: 1658868 - RNA, 19 nt, Artificial Sequence
  Description of Artificial Sequence: Synthetic oligonucleotide
  Antisense strand to SEQ ID NO: 1658867
uucuuaauaaggugagacc

SEQ ID NO: 1658869 - RNA, 19 nt, Artificial Sequence
  Description of Artificial Sequence: Synthetic oligonucleotide
  Sense strand starting at position 3110 of SEQ ID NO: 1561267
gcuaaauguuuccuaugca

SEQ ID NO: 1658870 - RNA, 19 nt, Artificial Sequence
  Description of Artificial Sequence: Synthetic oligonucleotide
  Antisense strand to SEQ ID NO: 1658869
ugcauaggaaacauuuagc

SEQ ID NO: 1658871 - RNA, 19 nt, Artificial Sequence
  Description of Artificial Sequence: Synthetic oligonucleotide
  Sense strand starting at position 3156 of SEQ ID NO: 1561267
cuauaagcugagugucauu

SEQ ID NO: 1658872 - RNA, 19 nt, Artificial Sequence
  Description of Artificial Sequence: Synthetic oligonucleotide
  Antisense strand to SEQ ID NO: 1658871
aaugacacucagcuuauag

SEQ ID NO: 1658873 - RNA, 19 nt, Artificial Sequence
  Description of Artificial Sequence: Synthetic oligonucleotide
  Sense strand starting at position 3161 of SEQ ID NO: 1561267
agcugagugucauuauacu

SEQ ID NO: 1658874 - RNA, 19 nt, Artificial Sequence
  Description of Artificial Sequence: Synthetic oligonucleotide
  Antisense strand to SEQ ID NO: 1658873
aguauaaugacacucagcu

SEQ ID NO: 1658875 - RNA, 19 nt, Artificial Sequence
  Description of Artificial Sequence: Synthetic oligonucleotide
  Sense strand starting at position 3167 of SEQ ID NO: 1561267
gugucauuauacucacuuu

SEQ ID NO: 1658876 - RNA, 19 nt, Artificial Sequence
  Description of Artificial Sequence: Synthetic oligonucleotide
  Antisense strand to SEQ ID NO: 1658875
aaagugaguauaaugacac

SEQ ID NO: 1658877 - RNA, 19 nt, Artificial Sequence
  Description of Artificial Sequence: Synthetic oligonucleotide
  Sense strand starting at position 3267 of SEQ ID NO: 1561267
ccaggauggucagaccauu

SEQ ID NO: 1658878 - RNA, 19 nt, Artificial Sequence
  Description of Artificial Sequence: Synthetic oligonucleotide
  Antisense strand to SEQ ID NO: 1658877
aauggucugaccauccugg

SEQ ID NO: 1658879 - RNA, 19 nt, Artificial Sequence
  Description of Artificial Sequence: Synthetic oligonucleotide
  Sense strand starting at position 3369 of SEQ ID NO: 1561267
cccaguucucaccaguaau

SEQ ID NO: 1658880 - RNA, 19 nt, Artificial Sequence
  Description of Artificial Sequence: Synthetic oligonucleotide
  Antisense strand to SEQ ID NO: 1658879
auuacuggugagaacuggg

SEQ ID NO: 1658881 - RNA, 19 nt, Artificial Sequence
  Description of Artificial Sequence: Synthetic oligonucleotide
  Sense strand starting at position 3372 of SEQ ID NO: 1561267
aguucucaccaguaauaau

SEQ ID NO: 1658882 - RNA, 19 nt, Artificial Sequence
  Description of Artificial Sequence: Synthetic oligonucleotide
  Antisense strand to SEQ ID NO: 1658881
auuauuacuggugagaacu

SEQ ID NO: 1658883 - RNA, 19 nt, Artificial Sequence
  Description of Artificial Sequence: Synthetic oligonucleotide
  Sense strand starting at position 3515 of SEQ ID NO: 1561267
ggaguauaggugugcauca

SEQ ID NO: 1658884 - RNA, 19 nt, Artificial Sequence
  Description of Artificial Sequence: Synthetic oligonucleotide
  Antisense strand to SEQ ID NO: 1658883
ugaugcacaccuauacucc

SEQ ID NO: 1658885 - RNA, 19 nt, Artificial Sequence
  Description of Artificial Sequence: Synthetic oligonucleotide
  Sense strand starting at position 3586 of SEQ ID NO: 1561267
uggccaggcuuaucaugaa

SEQ ID NO: 1658886 - RNA, 19 nt, Artificial Sequence
  Description of Artificial Sequence: Synthetic oligonucleotide
  Antisense strand to SEQ ID NO: 1658885
uucaugauaagccuggcca

SEQ ID NO: 1658887 - RNA, 19 nt, Artificial Sequence
  Description of Artificial Sequence: Synthetic oligonucleotide
  Sense strand starting at position 3675 of SEQ ID NO: 1561267
cggacuaauauugguaaua

SEQ ID NO: 1658888 - RNA, 19 nt, Artificial Sequence
  Description of Artificial Sequence: Synthetic oligonucleotide
  Antisense strand to SEQ ID NO: 1658887
uauuaccaauauuaguccg

SEQ ID NO: 1658889 - RNA, 19 nt, Artificial Sequence
  Description of Artificial Sequence: Synthetic oligonucleotide
  Sense strand starting at position 3785 of SEQ ID NO: 1561267
cuuaaagagggcugcaaau

SEQ ID NO: 1658890 - RNA, 19 nt, Artificial Sequence
  Description of Artificial Sequence: Synthetic oligonucleotide
  Antisense strand to SEQ ID NO: 1658889
auuugcagcccucuuuaag

SEQ ID NO: 1658891 - RNA, 19 nt, Artificial Sequence
  Description of Artificial Sequence: Synthetic oligonucleotide
  Sense strand starting at position 3927 of SEQ ID NO: 1561267
augccacuuucuguaucau

SEQ ID NO: 1658892 - RNA, 19 nt, Artificial Sequence
  Description of Artificial Sequence: Synthetic oligonucleotide
  Antisense strand to SEQ ID NO: 1658891
augauacagaaaguggcau

SEQ ID NO: 1658893 - RNA, 19 nt, Artificial Sequence
  Description of Artificial Sequence: Synthetic oligonucleotide
  Sense strand starting at position 3928 of SEQ ID NO: 1561267
ugccacuuucuguaucaua

SEQ ID NO: 1658894 - RNA, 19 nt, Artificial Sequence
  Description of Artificial Sequence: Synthetic oligonucleotide
  Antisense strand to SEQ ID NO: 1658893
uaugauacagaaaguggca

SEQ ID NO: 1658895 - RNA, 19 nt, Artificial Sequence
  Description of Artificial Sequence: Synthetic oligonucleotide
  Sense strand starting at position 228 of SEQ ID NO: 1561268
gucagccaucacuagaaga

SEQ ID NO: 1658896 - RNA, 19 nt, Artificial Sequence
  Description of Artificial Sequence: Synthetic oligonucleotide
  Antisense strand to SEQ ID NO: 1658895
ucuucuagugauggcugac

SEQ ID NO: 1658897 - RNA, 19 nt, Artificial Sequence
  Description of Artificial Sequence: Synthetic oligonucleotide
  Sense strand starting at position 272 of SEQ ID NO: 1561268
uaguucucagaaggaauca

SEQ ID NO: 1658898 - RNA, 19 nt, Artificial Sequence
  Description of Artificial Sequence: Synthetic oligonucleotide
  Antisense strand to SEQ ID NO: 1658897
ugauuccuucugagaacua

SEQ ID NO: 1658899 - RNA, 19 nt, Artificial Sequence
  Description of Artificial Sequence: Synthetic oligonucleotide
  Sense strand starting at position 451 of SEQ ID NO: 1561268
uggguaugaacccgauagu

SEQ ID NO: 1658900 - RNA, 19 nt, Artificial Sequence
  Description of Artificial Sequence: Synthetic oligonucleotide
  Antisense strand to SEQ ID NO: 1658899
acuaucggguucauaccca

SEQ ID NO: 1658901 - RNA, 19 nt, Artificial Sequence
  Description of Artificial Sequence: Synthetic oligonucleotide
  Sense strand starting at position 454 of SEQ ID NO: 1561268
guaugaacccgauagucau

SEQ ID NO: 1658902 - RNA, 19 nt, Artificial Sequence
  Description of Artificial Sequence: Synthetic oligonucleotide
  Antisense strand to SEQ ID NO: 1658901
augacuaucggguucauac

SEQ ID NO: 1658903 - RNA, 19 nt, Artificial Sequence
  Description of Artificial Sequence: Synthetic oligonucleotide
  Sense strand starting at position 460 of SEQ ID NO: 1561268
acccgauagucaucucuaa

SEQ ID NO: 1658904 - RNA, 19 nt, Artificial Sequence
  Description of Artificial Sequence: Synthetic oligonucleotide
  Antisense strand to SEQ ID NO: 1658903
uuagagaugacuaucgggu

SEQ ID NO: 1658905 - RNA, 19 nt, Artificial Sequence
  Description of Artificial Sequence: Synthetic oligonucleotide
  Sense strand starting at position 464 of SEQ ID NO: 1561268
gauagucaucucuaaggca

SEQ ID NO: 1658906 - RNA, 19 nt, Artificial Sequence
  Description of Artificial Sequence: Synthetic oligonucleotide
  Antisense strand to SEQ ID NO: 1658905
ugccuuagagaugacuauc

SEQ ID NO: 1658907 - RNA, 19 nt, Artificial Sequence
  Description of Artificial Sequence: Synthetic oligonucleotide
  Sense strand starting at position 797 of SEQ ID NO: 1561268
ugcaaauguguguaggaga

SEQ ID NO: 1658908 - RNA, 19 nt, Artificial Sequence
  Description of Artificial Sequence: Synthetic oligonucleotide
  Antisense strand to SEQ ID NO: 1658907
ucuccuacacacauuugca

SEQ ID NO: 1658909 - RNA, 19 nt, Artificial Sequence
  Description of Artificial Sequence: Synthetic oligonucleotide
  Sense strand starting at position 948 of SEQ ID NO: 1561268
cugggucaagccuagaguu

SEQ ID NO: 1658910 - RNA, 19 nt, Artificial Sequence
  Description of Artificial Sequence: Synthetic oligonucleotide
  Antisense strand to SEQ ID NO: 1658909
aacucuaggcuugacccag

SEQ ID NO: 1658911 - RNA, 19 nt, Artificial Sequence
  Description of Artificial Sequence: Synthetic oligonucleotide
  Sense strand starting at position 956 of SEQ ID NO: 1561268
agccuagaguuucuaugua

SEQ ID NO: 1658912 - RNA, 19 nt, Artificial Sequence
  Description of Artificial Sequence: Synthetic oligonucleotide
  Antisense strand to SEQ ID NO: 1658911
uacauagaaacucuaggcu

SEQ ID NO: 1658913 - RNA, 19 nt, Artificial Sequence
  Description of Artificial Sequence: Synthetic oligonucleotide
  Sense strand starting at position 960 of SEQ ID NO: 1561268
uagaguuucuauguaguaa

SEQ ID NO: 1658914 - RNA, 19 nt, Artificial Sequence
  Description of Artificial Sequence: Synthetic oligonucleotide
  Antisense strand to SEQ ID NO: 1658913
uuacuacauagaaacucua

SEQ ID NO: 1658915 - RNA, 19 nt, Artificial Sequence
  Description of Artificial Sequence: Synthetic oligonucleotide
  Sense strand starting at position 961 of SEQ ID NO: 1561268
agaguuucuauguaguaaa

SEQ ID NO: 1658916 - RNA, 19 nt, Artificial Sequence
  Description of Artificial Sequence: Synthetic oligonucleotide
  Antisense strand to SEQ ID NO: 1658915
uuuacuacauagaaacucu

SEQ ID NO: 1658917 - RNA, 19 nt, Artificial Sequence
  Description of Artificial Sequence: Synthetic oligonucleotide
  Sense strand starting at position 971 of SEQ ID NO: 1561268
uguaguaaagccgagauua

SEQ ID NO: 1658918 - RNA, 19 nt, Artificial Sequence
  Description of Artificial Sequence: Synthetic oligonucleotide
  Antisense strand to SEQ ID NO: 1658917
uaaucucggcuuuacuaca

SEQ ID NO: 1658919 - RNA, 19 nt, Artificial Sequence
  Description of Artificial Sequence: Synthetic oligonucleotide
  Sense strand starting at position 973 of SEQ ID NO: 1561268
uaguaaagccgagauuaua

SEQ ID NO: 1658920 - RNA, 19 nt, Artificial Sequence
  Description of Artificial Sequence: Synthetic oligonucleotide
  Antisense strand to SEQ ID NO: 1658919
uauaaucucggcuuuacua

SEQ ID NO: 1658921 - RNA, 19 nt, Artificial Sequence
  Description of Artificial Sequence: Synthetic oligonucleotide
  Sense strand starting at position 1038 of SEQ ID NO: 1561268
gguucaauuggaggauggu

SEQ ID NO: 1658922 - RNA, 19 nt, Artificial Sequence
  Description of Artificial Sequence: Synthetic oligonucleotide
  Antisense strand to SEQ ID NO: 1658921
accauccuccaauugaacc

SEQ ID NO: 1658923 - RNA, 19 nt, Artificial Sequence
  Description of Artificial Sequence: Synthetic oligonucleotide
  Sense strand starting at position 1039 of SEQ ID NO: 1561268
guucaauuggaggaugguu

SEQ ID NO: 1658924 - RNA, 19 nt, Artificial Sequence
  Description of Artificial Sequence: Synthetic oligonucleotide
  Antisense strand to SEQ ID NO: 1658923
aaccauccuccaauugaac

SEQ ID NO: 1658925 - RNA, 19 nt, Artificial Sequence
  Description of Artificial Sequence: Synthetic oligonucleotide
  Sense strand starting at position 1069 of SEQ ID NO: 1561268
aagaaucgagcuggucaga

SEQ ID NO: 1658926 - RNA, 19 nt, Artificial Sequence
  Description of Artificial Sequence: Synthetic oligonucleotide
  Antisense strand to SEQ ID NO: 1658925
ucugaccagcucgauucuu

SEQ ID NO: 1658927 - RNA, 19 nt, Artificial Sequence
  Description of Artificial Sequence: Synthetic oligonucleotide
  Sense strand starting at position 1490 of SEQ ID NO: 1561268
ccucuauuccgacggagga

SEQ ID NO: 1658928 - RNA, 19 nt, Artificial Sequence
  Description of Artificial Sequence: Synthetic oligonucleotide
  Antisense strand to SEQ ID NO: 1658927
uccuccgucggaauagagg

SEQ ID NO: 1658929 - RNA, 19 nt, Artificial Sequence
  Description of Artificial Sequence: Synthetic oligonucleotide
  Sense strand starting at position 1491 of SEQ ID NO: 1561268
cucuauuccgacggaggau

SEQ ID NO: 1658930 - RNA, 19 nt, Artificial Sequence
  Description of Artificial Sequence: Synthetic oligonucleotide
  Antisense strand to SEQ ID NO: 1658929
auccuccgucggaauagag

SEQ ID NO: 1658931 - RNA, 19 nt, Artificial Sequence
  Description of Artificial Sequence: Synthetic oligonucleotide
  Sense strand starting at position 1514 of SEQ ID NO: 1561268
gcaguacugcgguauuuag

SEQ ID NO: 1658932 - RNA, 19 nt, Artificial Sequence
  Description of Artificial Sequence: Synthetic oligonucleotide
  Antisense strand to SEQ ID NO: 1658931
cuaaauaccgcaguacugc

SEQ ID NO: 1658933 - RNA, 19 nt, Artificial Sequence
  Description of Artificial Sequence: Synthetic oligonucleotide
  Sense strand starting at position 1688 of SEQ ID NO: 1561268
ggaagucauuacuuccaca

SEQ ID NO: 1658934 - RNA, 19 nt, Artificial Sequence
  Description of Artificial Sequence: Synthetic oligonucleotide
  Antisense strand to SEQ ID NO: 1658933
uguggaaguaaugacuucc

SEQ ID NO: 1658935 - RNA, 19 nt, Artificial Sequence
  Description of Artificial Sequence: Synthetic oligonucleotide
  Sense strand starting at position 1806 of SEQ ID NO: 1561268
agaggaauucugcggucau

SEQ ID NO: 1658936 - RNA, 19 nt, Artificial Sequence
  Description of Artificial Sequence: Synthetic oligonucleotide
  Antisense strand to SEQ ID NO: 1658935
augaccgcagaauuccucu

SEQ ID NO: 1658937 - RNA, 19 nt, Artificial Sequence
  Description of Artificial Sequence: Synthetic oligonucleotide
  Sense strand starting at position 2015 of SEQ ID NO: 1561268
acaagaagccgucgaugau

SEQ ID NO: 1658938 - RNA, 19 nt, Artificial Sequence
  Description of Artificial Sequence: Synthetic oligonucleotide
  Antisense strand to SEQ ID NO: 1658937
aucaucgacggcuucuugu

SEQ ID NO: 1658939 - RNA, 19 nt, Artificial Sequence
  Description of Artificial Sequence: Synthetic oligonucleotide
  Sense strand starting at position 2016 of SEQ ID NO: 1561268
caagaagccgucgaugaua

SEQ ID NO: 1658940 - RNA, 19 nt, Artificial Sequence
  Description of Artificial Sequence: Synthetic oligonucleotide
  Antisense strand to SEQ ID NO: 1658939
uaucaucgacggcuucuug

SEQ ID NO: 1658941 - RNA, 19 nt, Artificial Sequence
  Description of Artificial Sequence: Synthetic oligonucleotide
  Sense strand starting at position 2094 of SEQ ID NO: 1561268
aucugaaguucugccaaga

SEQ ID NO: 1658942 - RNA, 19 nt, Artificial Sequence
  Description of Artificial Sequence: Synthetic oligonucleotide
  Antisense strand to SEQ ID NO: 1658941
ucuuggcagaacuucagau

SEQ ID NO: 1658943 - RNA, 19 nt, Artificial Sequence
  Description of Artificial Sequence: Synthetic oligonucleotide
  Sense strand starting at position 2421 of SEQ ID NO: 1561268
cggugaaacugucucaaac

SEQ ID NO: 1658944 - RNA, 19 nt, Artificial Sequence
  Description of Artificial Sequence: Synthetic oligonucleotide
  Antisense strand to SEQ ID NO: 1658943
guuugagacaguuucaccg

SEQ ID NO: 1658945 - RNA, 19 nt, Artificial Sequence
  Description of Artificial Sequence: Synthetic oligonucleotide
  Sense strand starting at position 2469 of SEQ ID NO: 1561268
gcuuuauagcuuccgugua

SEQ ID NO: 1658946 - RNA, 19 nt, Artificial Sequence
  Description of Artificial Sequence: Synthetic oligonucleotide
  Antisense strand to SEQ ID NO: 1658945
uacacggaagcuauaaagc

SEQ ID NO: 1658947 - RNA, 19 nt, Artificial Sequence
  Description of Artificial Sequence: Synthetic oligonucleotide
  Sense strand starting at position 2604 of SEQ ID NO: 1561268
gccucauggguuuaaggau

SEQ ID NO: 1658948 - RNA, 19 nt, Artificial Sequence
  Description of Artificial Sequence: Synthetic oligonucleotide
  Antisense strand to SEQ ID NO: 1658947
auccuuaaacccaugaggc

SEQ ID NO: 1658949 - RNA, 19 nt, Artificial Sequence
  Description of Artificial Sequence: Synthetic oligonucleotide
  Sense strand starting at position 2805 of SEQ ID NO: 1561268
ggccaaugguaaucucuua

SEQ ID NO: 1658950 - RNA, 19 nt, Artificial Sequence
  Description of Artificial Sequence: Synthetic oligonucleotide
  Antisense strand to SEQ ID NO: 1658949
uaagagauuaccauuggcc

SEQ ID NO: 1658951 - RNA, 19 nt, Artificial Sequence
  Description of Artificial Sequence: Synthetic oligonucleotide
  Sense strand starting at position 3354 of SEQ ID NO: 1561268
ggguauaguucuguaacau

SEQ ID NO: 1658952 - RNA, 19 nt, Artificial Sequence
  Description of Artificial Sequence: Synthetic oligonucleotide
  Antisense strand to SEQ ID NO: 1658951
auguuacagaacuauaccc

SEQ ID NO: 1658953 - RNA, 19 nt, Artificial Sequence
  Description of Artificial Sequence: Synthetic oligonucleotide
  Sense strand starting at position 3355 of SEQ ID NO: 1561268
gguauaguucuguaacauu

SEQ ID NO: 1658954 - RNA, 19 nt, Artificial Sequence
  Description of Artificial Sequence: Synthetic oligonucleotide
  Antisense strand to SEQ ID NO: 1658953
aauguuacagaacuauacc

SEQ ID NO: 1658955 - RNA, 19 nt, Artificial Sequence
  Description of Artificial Sequence: Synthetic oligonucleotide
  Sense strand starting at position 3384 of SEQ ID NO: 1561268
uauguauggcuuuauagaa

SEQ ID NO: 1658956 - RNA, 19 nt, Artificial Sequence
  Description of Artificial Sequence: Synthetic oligonucleotide
  Antisense strand to SEQ ID NO: 1658955
uucuauaaagccauacaua

SEQ ID NO: 1658957 - RNA, 19 nt, Artificial Sequence
  Description of Artificial Sequence: Synthetic oligonucleotide
  Sense strand starting at position 3504 of SEQ ID NO: 1561268
guucuacgucucuaucacu

SEQ ID NO: 1658958 - RNA, 19 nt, Artificial Sequence
  Description of Artificial Sequence: Synthetic oligonucleotide
  Antisense strand to SEQ ID NO: 1658957
agugauagagacguagaac

SEQ ID NO: 1658959 - RNA, 19 nt, Artificial Sequence
  Description of Artificial Sequence: Synthetic oligonucleotide
  Sense strand starting at position 3594 of SEQ ID NO: 1561268
cagcacaaugccugugaga

SEQ ID NO: 1658960 - RNA, 19 nt, Artificial Sequence
  Description of Artificial Sequence: Synthetic oligonucleotide
  Antisense strand to SEQ ID NO: 1658959
ucucacaggcauugugcug

SEQ ID NO: 1658961 - RNA, 19 nt, Artificial Sequence
  Description of Artificial Sequence: Synthetic oligonucleotide
  Sense strand starting at position 3596 of SEQ ID NO: 1561268
gcacaaugccugugagauu

SEQ ID NO: 1658962 - RNA, 19 nt, Artificial Sequence
  Description of Artificial Sequence: Synthetic oligonucleotide
  Antisense strand to SEQ ID NO: 1658961
aaucucacaggcauugugc

SEQ ID NO: 1658963 - RNA, 19 nt, Artificial Sequence
  Description of Artificial Sequence: Synthetic oligonucleotide
  Sense strand starting at position 3628 of SEQ ID NO: 1561268
guguguuaugaugauggau

SEQ ID NO: 1658964 - RNA, 19 nt, Artificial Sequence
  Description of Artificial Sequence: Synthetic oligonucleotide
  Antisense strand to SEQ ID NO: 1658963
auccaucaucauaacacac

SEQ ID NO: 1658965 - RNA, 19 nt, Artificial Sequence
  Description of Artificial Sequence: Synthetic oligonucleotide
  Sense strand starting at position 3631 of SEQ ID NO: 1561268
uguuaugaugauggauaca

SEQ ID NO: 1658966 - RNA, 19 nt, Artificial Sequence
  Description of Artificial Sequence: Synthetic oligonucleotide
  Antisense strand to SEQ ID NO: 1658965
uguauccaucaucauaaca

SEQ ID NO: 1658967 - RNA, 19 nt, Artificial Sequence
  Description of Artificial Sequence: Synthetic oligonucleotide
  Sense strand starting at position 3818 of SEQ ID NO: 1561268
ggauacaaugugugucacu

SEQ ID NO: 1658968 - RNA, 19 nt, Artificial Sequence
  Description of Artificial Sequence: Synthetic oligonucleotide
  Antisense strand to SEQ ID NO: 1658967
agugacacacauuguaucc

SEQ ID NO: 1658969 - RNA, 19 nt, Artificial Sequence
  Description of Artificial Sequence: Synthetic oligonucleotide
  Sense strand starting at position 3873 of SEQ ID NO: 1561268
uuuggaaucuauccaugca

SEQ ID NO: 1658970 - RNA, 19 nt, Artificial Sequence
  Description of Artificial Sequence: Synthetic oligonucleotide
  Antisense strand to SEQ ID NO: 1658969
ugcauggauagauuccaaa

SEQ ID NO: 1658971 - RNA, 19 nt, Artificial Sequence
  Description of Artificial Sequence: Synthetic oligonucleotide
  Sense strand starting at position 3876 of SEQ ID NO: 1561268
ggaaucuauccaugcaaua

SEQ ID NO: 1658972 - RNA, 19 nt, Artificial Sequence
  Description of Artificial Sequence: Synthetic oligonucleotide
  Antisense strand to SEQ ID NO: 1658971
uauugcauggauagauucc

SEQ ID NO: 1658973 - RNA, 19 nt, Artificial Sequence
  Description of Artificial Sequence: Synthetic oligonucleotide
  Sense strand starting at position 3934 of SEQ ID NO: 1561268
auaaucgucugggcaugau

SEQ ID NO: 1658974 - RNA, 19 nt, Artificial Sequence
  Description of Artificial Sequence: Synthetic oligonucleotide
  Antisense strand to SEQ ID NO: 1658973
aucaugcccagacgauuau

SEQ ID NO: 1658975 - RNA, 19 nt, Artificial Sequence
  Description of Artificial Sequence: Synthetic oligonucleotide
  Sense strand starting at position 567 of SEQ ID NO: 1561269
ggaguaacucuggguggga

SEQ ID NO: 1658976 - RNA, 19 nt, Artificial Sequence
  Description of Artificial Sequence: Synthetic oligonucleotide
  Antisense strand to SEQ ID NO: 1658975
ucccacccagaguuacucc

SEQ ID NO: 1658977 - RNA, 19 nt, Artificial Sequence
  Description of Artificial Sequence: Synthetic oligonucleotide
  Sense strand starting at position 647 of SEQ ID NO: 1561269
cacacuagaguguguaaga

SEQ ID NO: 1658978 - RNA, 19 nt, Artificial Sequence
  Description of Artificial Sequence: Synthetic oligonucleotide
  Antisense strand to SEQ ID NO: 1658977
ucuuacacacucuagugug

SEQ ID NO: 1658979 - RNA, 19 nt, Artificial Sequence
  Description of Artificial Sequence: Synthetic oligonucleotide
  Sense strand starting at position 1034 of SEQ ID NO: 1561269
cuuugaagaugcuuuggga

SEQ ID NO: 1658980 - RNA, 19 nt, Artificial Sequence
  Description of Artificial Sequence: Synthetic oligonucleotide
  Antisense strand to SEQ ID NO: 1658979
ucccaaagcaucuucaaag

SEQ ID NO: 1658981 - RNA, 19 nt, Artificial Sequence
  Description of Artificial Sequence: Synthetic oligonucleotide
  Sense strand starting at position 1041 of SEQ ID NO: 1561269
gaugcuuugggaugcgaag

SEQ ID NO: 1658982 - RNA, 19 nt, Artificial Sequence
  Description of Artificial Sequence: Synthetic oligonucleotide
  Antisense strand to SEQ ID NO: 1658981
cuucgcaucccaaagcauc

SEQ ID NO: 1658983 - RNA, 19 nt, Artificial Sequence
  Description of Artificial Sequence: Synthetic oligonucleotide
  Sense strand starting at position 2756 of SEQ ID NO: 1561269
ccgucuuucugguuggagu

SEQ ID NO: 1658984 - RNA, 19 nt, Artificial Sequence
  Description of Artificial Sequence: Synthetic oligonucleotide
  Antisense strand to SEQ ID NO: 1658983
acuccaaccagaaagacgg

SEQ ID NO: 1658985 - RNA, 19 nt, Artificial Sequence
  Description of Artificial Sequence: Synthetic oligonucleotide
  Sense strand starting at position 2757 of SEQ ID NO: 1561269
cgucuuucugguuggagua

SEQ ID NO: 1658986 - RNA, 19 nt, Artificial Sequence
  Description of Artificial Sequence: Synthetic oligonucleotide
  Antisense strand to SEQ ID NO: 1658985
uacuccaaccagaaagacg

SEQ ID NO: 1658987 - RNA, 19 nt, Artificial Sequence
  Description of Artificial Sequence: Synthetic oligonucleotide
  Sense strand starting at position 3310 of SEQ ID NO: 1561269
ccuucuuugcccggugcaa

SEQ ID NO: 1658988 - RNA, 19 nt, Artificial Sequence
  Description of Artificial Sequence: Synthetic oligonucleotide
  Antisense strand to SEQ ID NO: 1658987
uugcaccgggcaaagaagg

SEQ ID NO: 1658989 - RNA, 19 nt, Artificial Sequence
  Description of Artificial Sequence: Synthetic oligonucleotide
  Sense strand starting at position 3311 of SEQ ID NO: 1561269
cuucuuugcccggugcaaa

SEQ ID NO: 1658990 - RNA, 19 nt, Artificial Sequence
  Description of Artificial Sequence: Synthetic oligonucleotide
  Antisense strand to SEQ ID NO: 1658989
uuugcaccgggcaaagaag

SEQ ID NO: 1658991 - RNA, 19 nt, Artificial Sequence
  Description of Artificial Sequence: Synthetic oligonucleotide
  Sense strand starting at position 3498 of SEQ ID NO: 1561269
gacgcagcgcguagucaua

SEQ ID NO: 1658992 - RNA, 19 nt, Artificial Sequence
  Description of Artificial Sequence: Synthetic oligonucleotide
  Antisense strand to SEQ ID NO: 1658991
uaugacuacgcgcugcguc

SEQ ID NO: 1658993 - RNA, 19 nt, Artificial Sequence
  Description of Artificial Sequence: Synthetic oligonucleotide
  Sense strand starting at position 3504 of SEQ ID NO: 1561269
gcgcguagucauagucaua

SEQ ID NO: 1658994 - RNA, 19 nt, Artificial Sequence
  Description of Artificial Sequence: Synthetic oligonucleotide
  Antisense strand to SEQ ID NO: 1658993
uaugacuaugacuacgcgc

SEQ ID NO: 1658995 - RNA, 19 nt, Artificial Sequence
  Description of Artificial Sequence: Synthetic oligonucleotide
  Sense strand starting at position 3505 of SEQ ID NO: 1561269
cgcguagucauagucauag

SEQ ID NO: 1658996 - RNA, 19 nt, Artificial Sequence
  Description of Artificial Sequence: Synthetic oligonucleotide
  Antisense strand to SEQ ID NO: 1658995
cuaugacuaugacuacgcg

SEQ ID NO: 1658997 - RNA, 19 nt, Artificial Sequence
  Description of Artificial Sequence: Synthetic oligonucleotide
  Sense strand starting at position 3714 of SEQ ID NO: 1561269
gaggauucccugggagcca

SEQ ID NO: 1658998 - RNA, 19 nt, Artificial Sequence
  Description of Artificial Sequence: Synthetic oligonucleotide
  Antisense strand to SEQ ID NO: 1658997
uggcucccagggaauccuc

SEQ ID NO: 1658999 - RNA, 19 nt, Artificial Sequence
  Description of Artificial Sequence: Synthetic oligonucleotide
  Sense strand starting at position 74 of SEQ ID NO: 1561270
cccgcuagcccuggaagau

SEQ ID NO: 1659000 - RNA, 19 nt, Artificial Sequence
  Description of Artificial Sequence: Synthetic oligonucleotide
  Antisense strand to SEQ ID NO: 1658999
aucuuccagggcuagcggg

SEQ ID NO: 1659001 - RNA, 19 nt, Artificial Sequence
  Description of Artificial Sequence: Synthetic oligonucleotide
  Sense strand starting at position 213 of SEQ ID NO: 1561270
gggugaagcuuaggcuaua

SEQ ID NO: 1659002 - RNA, 19 nt, Artificial Sequence
  Description of Artificial Sequence: Synthetic oligonucleotide
  Antisense strand to SEQ ID NO: 1659001
uauagccuaagcuucaccc

SEQ ID NO: 1659003 - RNA, 19 nt, Artificial Sequence
  Description of Artificial Sequence: Synthetic oligonucleotide
  Sense strand starting at position 214 of SEQ ID NO: 1561270
ggugaagcuuaggcuauaa

SEQ ID NO: 1659004 - RNA, 19 nt, Artificial Sequence
  Description of Artificial Sequence: Synthetic oligonucleotide
  Antisense strand to SEQ ID NO: 1659003
uuauagccuaagcuucacc

SEQ ID NO: 1659005 - RNA, 19 nt, Artificial Sequence
  Description of Artificial Sequence: Synthetic oligonucleotide
  Sense strand starting at position 312 of SEQ ID NO: 1561270
ugagauguccugugggaaa

SEQ ID NO: 1659006 - RNA, 19 nt, Artificial Sequence
  Description of Artificial Sequence: Synthetic oligonucleotide
  Antisense strand to SEQ ID NO: 1659005
uuucccacaggacaucuca

SEQ ID NO: 1659007 - RNA, 19 nt, Artificial Sequence
  Description of Artificial Sequence: Synthetic oligonucleotide
  Sense strand starting at position 454 of SEQ ID NO: 1561270
uggagcugguccuaaggau

SEQ ID NO: 1659008 - RNA, 19 nt, Artificial Sequence
  Description of Artificial Sequence: Synthetic oligonucleotide
  Antisense strand to SEQ ID NO: 1659007
auccuuaggaccagcucca

SEQ ID NO: 1659009 - RNA, 19 nt, Artificial Sequence
  Description of Artificial Sequence: Synthetic oligonucleotide
  Sense strand starting at position 682 of SEQ ID NO: 1561270
gcuuccucugagggucaga

SEQ ID NO: 1659010 - RNA, 19 nt, Artificial Sequence
  Description of Artificial Sequence: Synthetic oligonucleotide
  Antisense strand to SEQ ID NO: 1659009
ucugacccucagaggaagc

SEQ ID NO: 1659011 - RNA, 19 nt, Artificial Sequence
  Description of Artificial Sequence: Synthetic oligonucleotide
  Sense strand starting at position 1162 of SEQ ID NO: 1561270
gggagaaauuuaugaguug

SEQ ID NO: 1659012 - RNA, 19 nt, Artificial Sequence
  Description of Artificial Sequence: Synthetic oligonucleotide
  Antisense strand to SEQ ID NO: 1659011
caacucauaaauuucuccc

SEQ ID NO: 1659013 - RNA, 19 nt, Artificial Sequence
  Description of Artificial Sequence: Synthetic oligonucleotide
  Sense strand starting at position 1163 of SEQ ID NO: 1561270
ggagaaauuuaugaguugu

SEQ ID NO: 1659014 - RNA, 19 nt, Artificial Sequence
  Description of Artificial Sequence: Synthetic oligonucleotide
  Antisense strand to SEQ ID NO: 1659013
acaacucauaaauuucucc

SEQ ID NO: 1659015 - RNA, 19 nt, Artificial Sequence
  Description of Artificial Sequence: Synthetic oligonucleotide
  Sense strand starting at position 1169 of SEQ ID NO: 1561270
auuuaugaguuguguguag

SEQ ID NO: 1659016 - RNA, 19 nt, Artificial Sequence
  Description of Artificial Sequence: Synthetic oligonucleotide
  Antisense strand to SEQ ID NO: 1659015
cuacacacaacucauaaau

SEQ ID NO: 1659017 - RNA, 19 nt, Artificial Sequence
  Description of Artificial Sequence: Synthetic oligonucleotide
  Sense strand starting at position 1171 of SEQ ID NO: 1561270
uuaugaguuguguguagac

SEQ ID NO: 1659018 - RNA, 19 nt, Artificial Sequence
  Description of Artificial Sequence: Synthetic oligonucleotide
  Antisense strand to SEQ ID NO: 1659017
gucuacacacaacucauaa

SEQ ID NO: 1659019 - RNA, 19 nt, Artificial Sequence
  Description of Artificial Sequence: Synthetic oligonucleotide
  Sense strand starting at position 1276 of SEQ ID NO: 1561270
gcauuugggcuugggagua

SEQ ID NO: 1659020 - RNA, 19 nt, Artificial Sequence
  Description of Artificial Sequence: Synthetic oligonucleotide
  Antisense strand to SEQ ID NO: 1659019
uacucccaagcccaaaugc

SEQ ID NO: 1659021 - RNA, 19 nt, Artificial Sequence
  Description of Artificial Sequence: Synthetic oligonucleotide
  Sense strand starting at position 1314 of SEQ ID NO: 1561270
cggugaguaucuguugcuu

SEQ ID NO: 1659022 - RNA, 19 nt, Artificial Sequence
  Description of Artificial Sequence: Synthetic oligonucleotide
  Antisense strand to SEQ ID NO: 1659021
aagcaacagauacucaccg

SEQ ID NO: 1659023 - RNA, 19 nt, Artificial Sequence
  Description of Artificial Sequence: Synthetic oligonucleotide
  Sense strand starting at position 1318 of SEQ ID NO: 1561270
gaguaucuguugcuuuauu

SEQ ID NO: 1659024 - RNA, 19 nt, Artificial Sequence
  Description of Artificial Sequence: Synthetic oligonucleotide
  Antisense strand to SEQ ID NO: 1659023
aauaaagcaacagauacuc

SEQ ID NO: 1659025 - RNA, 19 nt, Artificial Sequence
  Description of Artificial Sequence: Synthetic oligonucleotide
  Sense strand starting at position 1325 of SEQ ID NO: 1561270
uguugcuuuauuggaggaa

SEQ ID NO: 1659026 - RNA, 19 nt, Artificial Sequence
  Description of Artificial Sequence: Synthetic oligonucleotide
  Antisense strand to SEQ ID NO: 1659025
uuccuccaauaaagcaaca

SEQ ID NO: 1659027 - RNA, 19 nt, Artificial Sequence
  Description of Artificial Sequence: Synthetic oligonucleotide
  Sense strand starting at position 1326 of SEQ ID NO: 1561270
guugcuuuauuggaggaau

SEQ ID NO: 1659028 - RNA, 19 nt, Artificial Sequence
  Description of Artificial Sequence: Synthetic oligonucleotide
  Antisense strand to SEQ ID NO: 1659027
auuccuccaauaaagcaac

SEQ ID NO: 1659029 - RNA, 19 nt, Artificial Sequence
  Description of Artificial Sequence: Synthetic oligonucleotide
  Sense strand starting at position 1328 of SEQ ID NO: 1561270
ugcuuuauuggaggaauaa

SEQ ID NO: 1659030 - RNA, 19 nt, Artificial Sequence
  Description of Artificial Sequence: Synthetic oligonucleotide
  Antisense strand to SEQ ID NO: 1659029
uuauuccuccaauaaagca

SEQ ID NO: 1659031 - RNA, 19 nt, Artificial Sequence
  Description of Artificial Sequence: Synthetic oligonucleotide
  Sense strand starting at position 1466 of SEQ ID NO: 1561270
gcuccaagaacucgugcau

SEQ ID NO: 1659032 - RNA, 19 nt, Artificial Sequence
  Description of Artificial Sequence: Synthetic oligonucleotide
  Antisense strand to SEQ ID NO: 1659031
augcacgaguucuuggagc

SEQ ID NO: 1659033 - RNA, 19 nt, Artificial Sequence
  Description of Artificial Sequence: Synthetic oligonucleotide
  Sense strand starting at position 1666 of SEQ ID NO: 1561270
gccaauuccgacuaagggu

SEQ ID NO: 1659034 - RNA, 19 nt, Artificial Sequence
  Description of Artificial Sequence: Synthetic oligonucleotide
  Antisense strand to SEQ ID NO: 1659033
acccuuagucggaauuggc

SEQ ID NO: 1659035 - RNA, 19 nt, Artificial Sequence
  Description of Artificial Sequence: Synthetic oligonucleotide
  Sense strand starting at position 1993 of SEQ ID NO: 1561270
cccggacgugcgucaucau

SEQ ID NO: 1659036 - RNA, 19 nt, Artificial Sequence
  Description of Artificial Sequence: Synthetic oligonucleotide
  Antisense strand to SEQ ID NO: 1659035
augaugacgcacguccggg

SEQ ID NO: 1659037 - RNA, 19 nt, Artificial Sequence
  Description of Artificial Sequence: Synthetic oligonucleotide
  Sense strand starting at position 2114 of SEQ ID NO: 1561270
uuucuugugaagugggauu

SEQ ID NO: 1659038 - RNA, 19 nt, Artificial Sequence
  Description of Artificial Sequence: Synthetic oligonucleotide
  Antisense strand to SEQ ID NO: 1659037
aaucccacuucacaagaaa

SEQ ID NO: 1659039 - RNA, 19 nt, Artificial Sequence
  Description of Artificial Sequence: Synthetic oligonucleotide
  Sense strand starting at position 2218 of SEQ ID NO: 1561270
aucaguuaguagcucuaga

SEQ ID NO: 1659040 - RNA, 19 nt, Artificial Sequence
  Description of Artificial Sequence: Synthetic oligonucleotide
  Antisense strand to SEQ ID NO: 1659039
ucuagagcuacuaacugau

SEQ ID NO: 1659041 - RNA, 19 nt, Artificial Sequence
  Description of Artificial Sequence: Synthetic oligonucleotide
  Sense strand starting at position 2326 of SEQ ID NO: 1561270
uaauaaaguuccgacguca

SEQ ID NO: 1659042 - RNA, 19 nt, Artificial Sequence
  Description of Artificial Sequence: Synthetic oligonucleotide
  Antisense strand to SEQ ID NO: 1659041
ugacgucggaacuuuauua

SEQ ID NO: 1659043 - RNA, 19 nt, Artificial Sequence
  Description of Artificial Sequence: Synthetic oligonucleotide
  Sense strand starting at position 2397 of SEQ ID NO: 1561270
uggcuaguuggcgaugaau

SEQ ID NO: 1659044 - RNA, 19 nt, Artificial Sequence
  Description of Artificial Sequence: Synthetic oligonucleotide
  Antisense strand to SEQ ID NO: 1659043
auucaucgccaacuagcca

SEQ ID NO: 1659045 - RNA, 19 nt, Artificial Sequence
  Description of Artificial Sequence: Synthetic oligonucleotide
  Sense strand starting at position 2399 of SEQ ID NO: 1561270
gcuaguuggcgaugaauac

SEQ ID NO: 1659046 - RNA, 19 nt, Artificial Sequence
  Description of Artificial Sequence: Synthetic oligonucleotide
  Antisense strand to SEQ ID NO: 1659045
guauucaucgccaacuagc

SEQ ID NO: 1659047 - RNA, 19 nt, Artificial Sequence
  Description of Artificial Sequence: Synthetic oligonucleotide
  Sense strand starting at position 2400 of SEQ ID NO: 1561270
cuaguuggcgaugaauaca

SEQ ID NO: 1659048 - RNA, 19 nt, Artificial Sequence
  Description of Artificial Sequence: Synthetic oligonucleotide
  Antisense strand to SEQ ID NO: 1659047
uguauucaucgccaacuag

SEQ ID NO: 1659049 - RNA, 19 nt, Artificial Sequence
  Description of Artificial Sequence: Synthetic oligonucleotide
  Sense strand starting at position 2408 of SEQ ID NO: 1561270
cgaugaauacauuggaauu

SEQ ID NO: 1659050 - RNA, 19 nt, Artificial Sequence
  Description of Artificial Sequence: Synthetic oligonucleotide
  Antisense strand to SEQ ID NO: 1659049
aauuccaauguauucaucg

SEQ ID NO: 1659051 - RNA, 19 nt, Artificial Sequence
  Description of Artificial Sequence: Synthetic oligonucleotide
  Sense strand starting at position 2576 of SEQ ID NO: 1561270
guuuccuuauuggucgaca

SEQ ID NO: 1659052 - RNA, 19 nt, Artificial Sequence
  Description of Artificial Sequence: Synthetic oligonucleotide
  Antisense strand to SEQ ID NO: 1659051
ugucgaccaauaaggaaac

SEQ ID NO: 1659053 - RNA, 19 nt, Artificial Sequence
  Description of Artificial Sequence: Synthetic oligonucleotide
  Sense strand starting at position 2577 of SEQ ID NO: 1561270
uuuccuuauuggucgacau

SEQ ID NO: 1659054 - RNA, 19 nt, Artificial Sequence
  Description of Artificial Sequence: Synthetic oligonucleotide
  Antisense strand to SEQ ID NO: 1659053
augucgaccaauaaggaaa

SEQ ID NO: 1659055 - RNA, 19 nt, Artificial Sequence
  Description of Artificial Sequence: Synthetic oligonucleotide
  Sense strand starting at position 2578 of SEQ ID NO: 1561270
uuccuuauuggucgacauc

SEQ ID NO: 1659056 - RNA, 19 nt, Artificial Sequence
  Description of Artificial Sequence: Synthetic oligonucleotide
  Antisense strand to SEQ ID NO: 1659055
gaugucgaccaauaaggaa

SEQ ID NO: 1659057 - RNA, 19 nt, Artificial Sequence
  Description of Artificial Sequence: Synthetic oligonucleotide
  Sense strand starting at position 2579 of SEQ ID NO: 1561270
uccuuauuggucgacaucu

SEQ ID NO: 1659058 - RNA, 19 nt, Artificial Sequence
  Description of Artificial Sequence: Synthetic oligonucleotide
  Antisense strand to SEQ ID NO: 1659057
agaugucgaccaauaagga

SEQ ID NO: 1659059 - RNA, 19 nt, Artificial Sequence
  Description of Artificial Sequence: Synthetic oligonucleotide
  Sense strand starting at position 2633 of SEQ ID NO: 1561270
ucuaaauuauuagucggau

SEQ ID NO: 1659060 - RNA, 19 nt, Artificial Sequence
  Description of Artificial Sequence: Synthetic oligonucleotide
  Antisense strand to SEQ ID NO: 1659059
auccgacuaauaauuuaga

SEQ ID NO: 1659061 - RNA, 19 nt, Artificial Sequence
  Description of Artificial Sequence: Synthetic oligonucleotide
  Sense strand starting at position 2634 of SEQ ID NO: 1561270
cuaaauuauuagucggaua

SEQ ID NO: 1659062 - RNA, 19 nt, Artificial Sequence
  Description of Artificial Sequence: Synthetic oligonucleotide
  Antisense strand to SEQ ID NO: 1659061
uauccgacuaauaauuuag

SEQ ID NO: 1659063 - RNA, 19 nt, Artificial Sequence
  Description of Artificial Sequence: Synthetic oligonucleotide
  Sense strand starting at position 2637 of SEQ ID NO: 1561270
aauuauuagucggauagcu

SEQ ID NO: 1659064 - RNA, 19 nt, Artificial Sequence
  Description of Artificial Sequence: Synthetic oligonucleotide
  Antisense strand to SEQ ID NO: 1659063
agcuauccgacuaauaauu

SEQ ID NO: 1659065 - RNA, 19 nt, Artificial Sequence
  Description of Artificial Sequence: Synthetic oligonucleotide
  Sense strand starting at position 2639 of SEQ ID NO: 1561270
uuauuagucggauagcuug

SEQ ID NO: 1659066 - RNA, 19 nt, Artificial Sequence
  Description of Artificial Sequence: Synthetic oligonucleotide
  Antisense strand to SEQ ID NO: 1659065
caagcuauccgacuaauaa

SEQ ID NO: 1659067 - RNA, 19 nt, Artificial Sequence
  Description of Artificial Sequence: Synthetic oligonucleotide
  Sense strand starting at position 2651 of SEQ ID NO: 1561270
uagcuugguguaggucaaa

SEQ ID NO: 1659068 - RNA, 19 nt, Artificial Sequence
  Description of Artificial Sequence: Synthetic oligonucleotide
  Antisense strand to SEQ ID NO: 1659067
uuugaccuacaccaagcua

SEQ ID NO: 1659069 - RNA, 19 nt, Artificial Sequence
  Description of Artificial Sequence: Synthetic oligonucleotide
  Sense strand starting at position 2654 of SEQ ID NO: 1561270
cuugguguaggucaaacaa

SEQ ID NO: 1659070 - RNA, 19 nt, Artificial Sequence
  Description of Artificial Sequence: Synthetic oligonucleotide
  Antisense strand to SEQ ID NO: 1659069
uuguuugaccuacaccaag

SEQ ID NO: 1659071 - RNA, 19 nt, Artificial Sequence
  Description of Artificial Sequence: Synthetic oligonucleotide
  Sense strand starting at position 2676 of SEQ ID NO: 1561270
gccaguucuguccgagcca

SEQ ID NO: 1659072 - RNA, 19 nt, Artificial Sequence
  Description of Artificial Sequence: Synthetic oligonucleotide
  Antisense strand to SEQ ID NO: 1659071
uggcucggacagaacuggc

SEQ ID NO: 1659073 - RNA, 19 nt, Artificial Sequence
  Description of Artificial Sequence: Synthetic oligonucleotide
  Sense strand starting at position 3124 of SEQ ID NO: 1561270
cucuuaaaccgcugggauu

SEQ ID NO: 1659074 - RNA, 19 nt, Artificial Sequence
  Description of Artificial Sequence: Synthetic oligonucleotide
  Antisense strand to SEQ ID NO: 1659073
aaucccagcgguuuaagag

SEQ ID NO: 1659075 - RNA, 19 nt, Artificial Sequence
  Description of Artificial Sequence: Synthetic oligonucleotide
  Sense strand starting at position 3125 of SEQ ID NO: 1561270
ucuuaaaccgcugggauua

SEQ ID NO: 1659076 - RNA, 19 nt, Artificial Sequence
  Description of Artificial Sequence: Synthetic oligonucleotide
  Antisense strand to SEQ ID NO: 1659075
uaaucccagcgguuuaaga

SEQ ID NO: 1659077 - RNA, 19 nt, Artificial Sequence
  Description of Artificial Sequence: Synthetic oligonucleotide
  Sense strand starting at position 3282 of SEQ ID NO: 1561270
ggucgugugcccucgagca

SEQ ID NO: 1659078 - RNA, 19 nt, Artificial Sequence
  Description of Artificial Sequence: Synthetic oligonucleotide
  Antisense strand to SEQ ID NO: 1659077
ugcucgagggcacacgacc

SEQ ID NO: 1659079 - RNA, 19 nt, Artificial Sequence
  Description of Artificial Sequence: Synthetic oligonucleotide
  Sense strand starting at position 195 of SEQ ID NO: 1561271
cucugaauuugcuauuguu

SEQ ID NO: 1659080 - RNA, 19 nt, Artificial Sequence
  Description of Artificial Sequence: Synthetic oligonucleotide
  Antisense strand to SEQ ID NO: 1659079
aacaauagcaaauucagag

SEQ ID NO: 1659081 - RNA, 19 nt, Artificial Sequence
  Description of Artificial Sequence: Synthetic oligonucleotide
  Sense strand starting at position 205 of SEQ ID NO: 1561271
gcuauuguuauauguaguu

SEQ ID NO: 1659082 - RNA, 19 nt, Artificial Sequence
  Description of Artificial Sequence: Synthetic oligonucleotide
  Antisense strand to SEQ ID NO: 1659081
aacuacauauaacaauagc

SEQ ID NO: 1659083 - RNA, 19 nt, Artificial Sequence
  Description of Artificial Sequence: Synthetic oligonucleotide
  Sense strand starting at position 218 of SEQ ID NO: 1561271
guaguuuaauagcucaaag

SEQ ID NO: 1659084 - RNA, 19 nt, Artificial Sequence
  Description of Artificial Sequence: Synthetic oligonucleotide
  Antisense strand to SEQ ID NO: 1659083
cuuugagcuauuaaacuac

SEQ ID NO: 1659085 - RNA, 19 nt, Artificial Sequence
  Description of Artificial Sequence: Synthetic oligonucleotide
  Sense strand starting at position 257 of SEQ ID NO: 1561271
agauaaaggcuaugaagua

SEQ ID NO: 1659086 - RNA, 19 nt, Artificial Sequence
  Description of Artificial Sequence: Synthetic oligonucleotide
  Antisense strand to SEQ ID NO: 1659085
uacuucauagccuuuaucu

SEQ ID NO: 1659087 - RNA, 19 nt, Artificial Sequence
  Description of Artificial Sequence: Synthetic oligonucleotide
  Sense strand starting at position 258 of SEQ ID NO: 1561271
gauaaaggcuaugaaguau

SEQ ID NO: 1659088 - RNA, 19 nt, Artificial Sequence
  Description of Artificial Sequence: Synthetic oligonucleotide
  Antisense strand to SEQ ID NO: 1659087
auacuucauagccuuuauc

SEQ ID NO: 1659089 - RNA, 19 nt, Artificial Sequence
  Description of Artificial Sequence: Synthetic oligonucleotide
  Sense strand starting at position 299 of SEQ ID NO: 1561271
gguggcuguuugcuuuaga

SEQ ID NO: 1659090 - RNA, 19 nt, Artificial Sequence
  Description of Artificial Sequence: Synthetic oligonucleotide
  Antisense strand to SEQ ID NO: 1659089
ucuaaagcaaacagccacc

SEQ ID NO: 1659091 - RNA, 19 nt, Artificial Sequence
  Description of Artificial Sequence: Synthetic oligonucleotide
  Sense strand starting at position 300 of SEQ ID NO: 1561271
guggcuguuugcuuuagaa

SEQ ID NO: 1659092 - RNA, 19 nt, Artificial Sequence
  Description of Artificial Sequence: Synthetic oligonucleotide
  Antisense strand to SEQ ID NO: 1659091
uucuaaagcaaacagccac

SEQ ID NO: 1659093 - RNA, 19 nt, Artificial Sequence
  Description of Artificial Sequence: Synthetic oligonucleotide
  Sense strand starting at position 302 of SEQ ID NO: 1561271
ggcuguuugcuuuagaaug

SEQ ID NO: 1659094 - RNA, 19 nt, Artificial Sequence
  Description of Artificial Sequence: Synthetic oligonucleotide
  Antisense strand to SEQ ID NO: 1659093
cauucuaaagcaaacagcc

SEQ ID NO: 1659095 - RNA, 19 nt, Artificial Sequence
  Description of Artificial Sequence: Synthetic oligonucleotide
  Sense strand starting at position 485 of SEQ ID NO: 1561271
gccagugugacugaaccuu

SEQ ID NO: 1659096 - RNA, 19 nt, Artificial Sequence
  Description of Artificial Sequence: Synthetic oligonucleotide
  Antisense strand to SEQ ID NO: 1659095
aagguucagucacacuggc

SEQ ID NO: 1659097 - RNA, 19 nt, Artificial Sequence
  Description of Artificial Sequence: Synthetic oligonucleotide
  Sense strand starting at position 494 of SEQ ID NO: 1561271
acugaaccuuggugacaga

SEQ ID NO: 1659098 - RNA, 19 nt, Artificial Sequence
  Description of Artificial Sequence: Synthetic oligonucleotide
  Antisense strand to SEQ ID NO: 1659097
ucugucaccaagguucagu

SEQ ID NO: 1659099 - RNA, 19 nt, Artificial Sequence
  Description of Artificial Sequence: Synthetic oligonucleotide
  Sense strand starting at position 546 of SEQ ID NO: 1561271
ccaggagugggcgguauaa

SEQ ID NO: 1659100 - RNA, 19 nt, Artificial Sequence
  Description of Artificial Sequence: Synthetic oligonucleotide
  Antisense strand to SEQ ID NO: 1659099
uuauaccgcccacuccugg

SEQ ID NO: 1659101 - RNA, 19 nt, Artificial Sequence
  Description of Artificial Sequence: Synthetic oligonucleotide
  Sense strand starting at position 548 of SEQ ID NO: 1561271
aggagugggcgguauaauc

SEQ ID NO: 1659102 - RNA, 19 nt, Artificial Sequence
  Description of Artificial Sequence: Synthetic oligonucleotide
  Antisense strand to SEQ ID NO: 1659101
gauuauaccgcccacuccu

SEQ ID NO: 1659103 - RNA, 19 nt, Artificial Sequence
  Description of Artificial Sequence: Synthetic oligonucleotide
  Sense strand starting at position 559 of SEQ ID NO: 1561271
guauaaucacagugcagga

SEQ ID NO: 1659104 - RNA, 19 nt, Artificial Sequence
  Description of Artificial Sequence: Synthetic oligonucleotide
  Antisense strand to SEQ ID NO: 1659103
uccugcacugugauuauac

SEQ ID NO: 1659105 - RNA, 19 nt, Artificial Sequence
  Description of Artificial Sequence: Synthetic oligonucleotide
  Sense strand starting at position 921 of SEQ ID NO: 1561271
acugaucucaggugaacag

SEQ ID NO: 1659106 - RNA, 19 nt, Artificial Sequence
  Description of Artificial Sequence: Synthetic oligonucleotide
  Antisense strand to SEQ ID NO: 1659105
cuguucaccugagaucagu

SEQ ID NO: 1659107 - RNA, 19 nt, Artificial Sequence
  Description of Artificial Sequence: Synthetic oligonucleotide
  Sense strand starting at position 994 of SEQ ID NO: 1561271
ccaguaguaugguucuuau

SEQ ID NO: 1659108 - RNA, 19 nt, Artificial Sequence
  Description of Artificial Sequence: Synthetic oligonucleotide
  Antisense strand to SEQ ID NO: 1659107
auaagaaccauacuacugg

SEQ ID NO: 1659109 - RNA, 19 nt, Artificial Sequence
  Description of Artificial Sequence: Synthetic oligonucleotide
  Sense strand starting at position 997 of SEQ ID NO: 1561271
guaguaugguucuuaucau

SEQ ID NO: 1659110 - RNA, 19 nt, Artificial Sequence
  Description of Artificial Sequence: Synthetic oligonucleotide
  Antisense strand to SEQ ID NO: 1659109
augauaagaaccauacuac

SEQ ID NO: 1659111 - RNA, 19 nt, Artificial Sequence
  Description of Artificial Sequence: Synthetic oligonucleotide
  Sense strand starting at position 1003 of SEQ ID NO: 1561271
ugguucuuaucaucuccau

SEQ ID NO: 1659112 - RNA, 19 nt, Artificial Sequence
  Description of Artificial Sequence: Synthetic oligonucleotide
  Antisense strand to SEQ ID NO: 1659111
auggagaugauaagaacca

SEQ ID NO: 1659113 - RNA, 19 nt, Artificial Sequence
  Description of Artificial Sequence: Synthetic oligonucleotide
  Sense strand starting at position 1068 of SEQ ID NO: 1561271
uuaauugccgcugugcuaa

SEQ ID NO: 1659114 - RNA, 19 nt, Artificial Sequence
  Description of Artificial Sequence: Synthetic oligonucleotide
  Antisense strand to SEQ ID NO: 1659113
uuagcacagcggcaauuaa

SEQ ID NO: 1659115 - RNA, 19 nt, Artificial Sequence
  Description of Artificial Sequence: Synthetic oligonucleotide
  Sense strand starting at position 1228 of SEQ ID NO: 1561271
gagugacaauauggauuaa

SEQ ID NO: 1659116 - RNA, 19 nt, Artificial Sequence
  Description of Artificial Sequence: Synthetic oligonucleotide
  Antisense strand to SEQ ID NO: 1659115
uuaauccauauugucacuc

SEQ ID NO: 1659117 - RNA, 19 nt, Artificial Sequence
  Description of Artificial Sequence: Synthetic oligonucleotide
  Sense strand starting at position 1415 of SEQ ID NO: 1561271
acgucuaaaggcgauagaa

SEQ ID NO: 1659118 - RNA, 19 nt, Artificial Sequence
  Description of Artificial Sequence: Synthetic oligonucleotide
  Antisense strand to SEQ ID NO: 1659117
uucuaucgccuuuagacgu

SEQ ID NO: 1659119 - RNA, 19 nt, Artificial Sequence
  Description of Artificial Sequence: Synthetic oligonucleotide
  Sense strand starting at position 1450 of SEQ ID NO: 1561271
gcaggacuaggcugugauu

SEQ ID NO: 1659120 - RNA, 19 nt, Artificial Sequence
  Description of Artificial Sequence: Synthetic oligonucleotide
  Antisense strand to SEQ ID NO: 1659119
aaucacagccuaguccugc

SEQ ID NO: 1659121 - RNA, 19 nt, Artificial Sequence
  Description of Artificial Sequence: Synthetic oligonucleotide
  Sense strand starting at position 1453 of SEQ ID NO: 1561271
ggacuaggcugugauuuac

SEQ ID NO: 1659122 - RNA, 19 nt, Artificial Sequence
  Description of Artificial Sequence: Synthetic oligonucleotide
  Antisense strand to SEQ ID NO: 1659121
guaaaucacagccuagucc

SEQ ID NO: 1659123 - RNA, 19 nt, Artificial Sequence
  Description of Artificial Sequence: Synthetic oligonucleotide
  Sense strand starting at position 2129 of SEQ ID NO: 1561271
uguacuggaugccugauua

SEQ ID NO: 1659124 - RNA, 19 nt, Artificial Sequence
  Description of Artificial Sequence: Synthetic oligonucleotide
  Antisense strand to SEQ ID NO: 1659123
uaaucaggcauccaguaca

SEQ ID NO: 1659125 - RNA, 19 nt, Artificial Sequence
  Description of Artificial Sequence: Synthetic oligonucleotide
  Sense strand starting at position 2181 of SEQ ID NO: 1561271
ucauuauucgcugaaacau

SEQ ID NO: 1659126 - RNA, 19 nt, Artificial Sequence
  Description of Artificial Sequence: Synthetic oligonucleotide
  Antisense strand to SEQ ID NO: 1659125
auguuucagcgaauaauga

SEQ ID NO: 1659127 - RNA, 19 nt, Artificial Sequence
  Description of Artificial Sequence: Synthetic oligonucleotide
  Sense strand starting at position 2189 of SEQ ID NO: 1561271
cgcugaaacauacagguuu

SEQ ID NO: 1659128 - RNA, 19 nt, Artificial Sequence
  Description of Artificial Sequence: Synthetic oligonucleotide
  Antisense strand to SEQ ID NO: 1659127
aaaccuguauguuucagcg

SEQ ID NO: 1659129 - RNA, 19 nt, Artificial Sequence
  Description of Artificial Sequence: Synthetic oligonucleotide
  Sense strand starting at position 2306 of SEQ ID NO: 1561271
aggguggagccguaagaga

SEQ ID NO: 1659130 - RNA, 19 nt, Artificial Sequence
  Description of Artificial Sequence: Synthetic oligonucleotide
  Antisense strand to SEQ ID NO: 1659129
ucucuuacggcuccacccu

SEQ ID NO: 1659131 - RNA, 19 nt, Artificial Sequence
  Description of Artificial Sequence: Synthetic oligonucleotide
  Sense strand starting at position 2314 of SEQ ID NO: 1561271
gccguaagagauugacuag

SEQ ID NO: 1659132 - RNA, 19 nt, Artificial Sequence
  Description of Artificial Sequence: Synthetic oligonucleotide
  Antisense strand to SEQ ID NO: 1659131
cuagucaaucucuuacggc

SEQ ID NO: 1659133 - RNA, 19 nt, Artificial Sequence
  Description of Artificial Sequence: Synthetic oligonucleotide
  Sense strand starting at position 2317 of SEQ ID NO: 1561271
guaagagauugacuagcca

SEQ ID NO: 1659134 - RNA, 19 nt, Artificial Sequence
  Description of Artificial Sequence: Synthetic oligonucleotide
  Antisense strand to SEQ ID NO: 1659133
uggcuagucaaucucuuac

SEQ ID NO: 1659135 - RNA, 19 nt, Artificial Sequence
  Description of Artificial Sequence: Synthetic oligonucleotide
  Sense strand starting at position 2654 of SEQ ID NO: 1561271
gcuggauagccaugcccaa

SEQ ID NO: 1659136 - RNA, 19 nt, Artificial Sequence
  Description of Artificial Sequence: Synthetic oligonucleotide
  Antisense strand to SEQ ID NO: 1659135
uugggcauggcuauccagc

SEQ ID NO: 1659137 - RNA, 19 nt, Artificial Sequence
  Description of Artificial Sequence: Synthetic oligonucleotide
  Sense strand starting at position 2891 of SEQ ID NO: 1561271
ggcaguguccauugcacau

SEQ ID NO: 1659138 - RNA, 19 nt, Artificial Sequence
  Description of Artificial Sequence: Synthetic oligonucleotide
  Antisense strand to SEQ ID NO: 1659137
augugcaauggacacugcc

SEQ ID NO: 1659139 - RNA, 19 nt, Artificial Sequence
  Description of Artificial Sequence: Synthetic oligonucleotide
  Sense strand starting at position 2934 of SEQ ID NO: 1561271
ggaguagacgauugacuac

SEQ ID NO: 1659140 - RNA, 19 nt, Artificial Sequence
  Description of Artificial Sequence: Synthetic oligonucleotide
  Antisense strand to SEQ ID NO: 1659139
guagucaaucgucuacucc

SEQ ID NO: 1659141 - RNA, 19 nt, Artificial Sequence
  Description of Artificial Sequence: Synthetic oligonucleotide
  Sense strand starting at position 2986 of SEQ ID NO: 1561271
ggauguaagaagugaaguc

SEQ ID NO: 1659142 - RNA, 19 nt, Artificial Sequence
  Description of Artificial Sequence: Synthetic oligonucleotide
  Antisense strand to SEQ ID NO: 1659141
gacuucacuucuuacaucc

SEQ ID NO: 1659143 - RNA, 19 nt, Artificial Sequence
  Description of Artificial Sequence: Synthetic oligonucleotide
  Sense strand starting at position 3120 of SEQ ID NO: 1561271
cagucugucuuaucuuagu

SEQ ID NO: 1659144 - RNA, 19 nt, Artificial Sequence
  Description of Artificial Sequence: Synthetic oligonucleotide
  Antisense strand to SEQ ID NO: 1659143
acuaagauaagacagacug

SEQ ID NO: 1659145 - RNA, 19 nt, Artificial Sequence
  Description of Artificial Sequence: Synthetic oligonucleotide
  Sense strand starting at position 3125 of SEQ ID NO: 1561271
ugucuuaucuuaguagcgu

SEQ ID NO: 1659146 - RNA, 19 nt, Artificial Sequence
  Description of Artificial Sequence: Synthetic oligonucleotide
  Antisense strand to SEQ ID NO: 1659145
acgcuacuaagauaagaca

SEQ ID NO: 1659147 - RNA, 19 nt, Artificial Sequence
  Description of Artificial Sequence: Synthetic oligonucleotide
  Sense strand starting at position 3155 of SEQ ID NO: 1561271
cuuguugcuuagguuuaaa

SEQ ID NO: 1659148 - RNA, 19 nt, Artificial Sequence
  Description of Artificial Sequence: Synthetic oligonucleotide
  Antisense strand to SEQ ID NO: 1659147
uuuaaaccuaagcaacaag

SEQ ID NO: 1659149 - RNA, 19 nt, Artificial Sequence
  Description of Artificial Sequence: Synthetic oligonucleotide
  Sense strand starting at position 3185 of SEQ ID NO: 1561271
uuaccucuuucgucauacu

SEQ ID NO: 1659150 - RNA, 19 nt, Artificial Sequence
  Description of Artificial Sequence: Synthetic oligonucleotide
  Antisense strand to SEQ ID NO: 1659149
aguaugacgaaagagguaa

SEQ ID NO: 1659151 - RNA, 19 nt, Artificial Sequence
  Description of Artificial Sequence: Synthetic oligonucleotide
  Sense strand starting at position 3192 of SEQ ID NO: 1561271
uuucgucauacuugggaaa

SEQ ID NO: 1659152 - RNA, 19 nt, Artificial Sequence
  Description of Artificial Sequence: Synthetic oligonucleotide
  Antisense strand to SEQ ID NO: 1659151
uuucccaaguaugacgaaa

SEQ ID NO: 1659153 - RNA, 19 nt, Artificial Sequence
  Description of Artificial Sequence: Synthetic oligonucleotide
  Sense strand starting at position 3203 of SEQ ID NO: 1561271
uugggaaagucagaauuag

SEQ ID NO: 1659154 - RNA, 19 nt, Artificial Sequence
  Description of Artificial Sequence: Synthetic oligonucleotide
  Antisense strand to SEQ ID NO: 1659153
cuaauucugacuuucccaa

SEQ ID NO: 1659155 - RNA, 19 nt, Artificial Sequence
  Description of Artificial Sequence: Synthetic oligonucleotide
  Sense strand starting at position 3213 of SEQ ID NO: 1561271
cagaauuagcuucgacugu

SEQ ID NO: 1659156 - RNA, 19 nt, Artificial Sequence
  Description of Artificial Sequence: Synthetic oligonucleotide
  Antisense strand to SEQ ID NO: 1659155
acagucgaagcuaauucug

SEQ ID NO: 1659157 - RNA, 19 nt, Artificial Sequence
  Description of Artificial Sequence: Synthetic oligonucleotide
  Sense strand starting at position 3973 of SEQ ID NO: 1561271
gauguaaaguggcagaauu

SEQ ID NO: 1659158 - RNA, 19 nt, Artificial Sequence
  Description of Artificial Sequence: Synthetic oligonucleotide
  Antisense strand to SEQ ID NO: 1659157
aauucugccacuuuacauc

SEQ ID NO: 1659159 - RNA, 19 nt, Artificial Sequence
  Description of Artificial Sequence: Synthetic oligonucleotide
  Sense strand starting at position 105 of SEQ ID NO: 1561272
augaucuggugucuggaaa

SEQ ID NO: 1659160 - RNA, 19 nt, Artificial Sequence
  Description of Artificial Sequence: Synthetic oligonucleotide
  Antisense strand to SEQ ID NO: 1659159
uuuccagacaccagaucau

SEQ ID NO: 1659161 - RNA, 19 nt, Artificial Sequence
  Description of Artificial Sequence: Synthetic oligonucleotide
  Sense strand starting at position 109 of SEQ ID NO: 1561272
ucuggugucuggaaaggug

SEQ ID NO: 1659162 - RNA, 19 nt, Artificial Sequence
  Description of Artificial Sequence: Synthetic oligonucleotide
  Antisense strand to SEQ ID NO: 1659161
caccuuuccagacaccaga

SEQ ID NO: 1659163 - RNA, 19 nt, Artificial Sequence
  Description of Artificial Sequence: Synthetic oligonucleotide
  Sense strand starting at position 284 of SEQ ID NO: 1561272
augugagacuugcccuaca

SEQ ID NO: 1659164 - RNA, 19 nt, Artificial Sequence
  Description of Artificial Sequence: Synthetic oligonucleotide
  Antisense strand to SEQ ID NO: 1659163
uguagggcaagucucacau

SEQ ID NO: 1659165 - RNA, 19 nt, Artificial Sequence
  Description of Artificial Sequence: Synthetic oligonucleotide
  Sense strand starting at position 401 of SEQ ID NO: 1561272
gauguccuaucugcagaau

SEQ ID NO: 1659166 - RNA, 19 nt, Artificial Sequence
  Description of Artificial Sequence: Synthetic oligonucleotide
  Antisense strand to SEQ ID NO: 1659165
auucugcagauaggacauc

SEQ ID NO: 1659167 - RNA, 19 nt, Artificial Sequence
  Description of Artificial Sequence: Synthetic oligonucleotide
  Sense strand starting at position 404 of SEQ ID NO: 1561272
guccuaucugcagaauccu

SEQ ID NO: 1659168 - RNA, 19 nt, Artificial Sequence
  Description of Artificial Sequence: Synthetic oligonucleotide
  Antisense strand to SEQ ID NO: 1659167
aggauucugcagauaggac

SEQ ID NO: 1659169 - RNA, 19 nt, Artificial Sequence
  Description of Artificial Sequence: Synthetic oligonucleotide
  Sense strand starting at position 413 of SEQ ID NO: 1561272
gcagaauccucagcccaug

SEQ ID NO: 1659170 - RNA, 19 nt, Artificial Sequence
  Description of Artificial Sequence: Synthetic oligonucleotide
  Antisense strand to SEQ ID NO: 1659169
caugggcugaggauucugc

SEQ ID NO: 1659171 - RNA, 19 nt, Artificial Sequence
  Description of Artificial Sequence: Synthetic oligonucleotide
  Sense strand starting at position 534 of SEQ ID NO: 1561272
ccuggacuucccugaauga

SEQ ID NO: 1659172 - RNA, 19 nt, Artificial Sequence
  Description of Artificial Sequence: Synthetic oligonucleotide
  Antisense strand to SEQ ID NO: 1659171
ucauucagggaaguccagg

SEQ ID NO: 1659173 - RNA, 19 nt, Artificial Sequence
  Description of Artificial Sequence: Synthetic oligonucleotide
  Sense strand starting at position 590 of SEQ ID NO: 1561272
ggcccuuuccuagggaaca

SEQ ID NO: 1659174 - RNA, 19 nt, Artificial Sequence
  Description of Artificial Sequence: Synthetic oligonucleotide
  Antisense strand to SEQ ID NO: 1659173
uguucccuaggaaagggcc

SEQ ID NO: 1659175 - RNA, 19 nt, Artificial Sequence
  Description of Artificial Sequence: Synthetic oligonucleotide
  Sense strand starting at position 655 of SEQ ID NO: 1561272
ggagaugcuguccauguuu

SEQ ID NO: 1659176 - RNA, 19 nt, Artificial Sequence
  Description of Artificial Sequence: Synthetic oligonucleotide
  Antisense strand to SEQ ID NO: 1659175
aaacauggacagcaucucc

SEQ ID NO: 1659177 - RNA, 19 nt, Artificial Sequence
  Description of Artificial Sequence: Synthetic oligonucleotide
  Sense strand starting at position 684 of SEQ ID NO: 1561272
ucauuugcuuucucguuga

SEQ ID NO: 1659178 - RNA, 19 nt, Artificial Sequence
  Description of Artificial Sequence: Synthetic oligonucleotide
  Antisense strand to SEQ ID NO: 1659177
ucaacgagaaagcaaauga

SEQ ID NO: 1659179 - RNA, 19 nt, Artificial Sequence
  Description of Artificial Sequence: Synthetic oligonucleotide
  Sense strand starting at position 700 of SEQ ID NO: 1561272
ugaaaccuguuguuaauaa

SEQ ID NO: 1659180 - RNA, 19 nt, Artificial Sequence
  Description of Artificial Sequence: Synthetic oligonucleotide
  Antisense strand to SEQ ID NO: 1659179
uuauuaacaacagguuuca

SEQ ID NO: 1659181 - RNA, 19 nt, Artificial Sequence
  Description of Artificial Sequence: Synthetic oligonucleotide
  Sense strand starting at position 926 of SEQ ID NO: 1561272
ccugcugaccuagauaauc

SEQ ID NO: 1659182 - RNA, 19 nt, Artificial Sequence
  Description of Artificial Sequence: Synthetic oligonucleotide
  Antisense strand to SEQ ID NO: 1659181
gauuaucuaggucagcagg

SEQ ID NO: 1659183 - RNA, 19 nt, Artificial Sequence
  Description of Artificial Sequence: Synthetic oligonucleotide
  Sense strand starting at position 1741 of SEQ ID NO: 1561272
cuggauucccauggacaca

SEQ ID NO: 1659184 - RNA, 19 nt, Artificial Sequence
  Description of Artificial Sequence: Synthetic oligonucleotide
  Antisense strand to SEQ ID NO: 1659183
uguguccaugggaauccag

SEQ ID NO: 1659185 - RNA, 19 nt, Artificial Sequence
  Description of Artificial Sequence: Synthetic oligonucleotide
  Sense strand starting at position 2397 of SEQ ID NO: 1561272
cuuugugucauugcgaggu

SEQ ID NO: 1659186 - RNA, 19 nt, Artificial Sequence
  Description of Artificial Sequence: Synthetic oligonucleotide
  Antisense strand to SEQ ID NO: 1659185
accucgcaaugacacaaag

SEQ ID NO: 1659187 - RNA, 19 nt, Artificial Sequence
  Description of Artificial Sequence: Synthetic oligonucleotide
  Sense strand starting at position 2418 of SEQ ID NO: 1561272
ggcugugcgcaucugagua

SEQ ID NO: 1659188 - RNA, 19 nt, Artificial Sequence
  Description of Artificial Sequence: Synthetic oligonucleotide
  Antisense strand to SEQ ID NO: 1659187
uacucagaugcgcacagcc

SEQ ID NO: 1659189 - RNA, 19 nt, Artificial Sequence
  Description of Artificial Sequence: Synthetic oligonucleotide
  Sense strand starting at position 2423 of SEQ ID NO: 1561272
ugcgcaucugaguauagga

SEQ ID NO: 1659190 - RNA, 19 nt, Artificial Sequence
  Description of Artificial Sequence: Synthetic oligonucleotide
  Antisense strand to SEQ ID NO: 1659189
uccuauacucagaugcgca

SEQ ID NO: 1659191 - RNA, 19 nt, Artificial Sequence
  Description of Artificial Sequence: Synthetic oligonucleotide
  Sense strand starting at position 2487 of SEQ ID NO: 1561272
agacuuugucugcacuuaa

SEQ ID NO: 1659192 - RNA, 19 nt, Artificial Sequence
  Description of Artificial Sequence: Synthetic oligonucleotide
  Antisense strand to SEQ ID NO: 1659191
uuaagugcagacaaagucu

SEQ ID NO: 1659193 - RNA, 19 nt, Artificial Sequence
  Description of Artificial Sequence: Synthetic oligonucleotide
  Sense strand starting at position 2497 of SEQ ID NO: 1561272
ugcacuuaacugugggauu

SEQ ID NO: 1659194 - RNA, 19 nt, Artificial Sequence
  Description of Artificial Sequence: Synthetic oligonucleotide
  Antisense strand to SEQ ID NO: 1659193
aaucccacaguuaagugca

SEQ ID NO: 1659195 - RNA, 19 nt, Artificial Sequence
  Description of Artificial Sequence: Synthetic oligonucleotide
  Sense strand starting at position 2585 of SEQ ID NO: 1561272
ucuggagucugccugaaau

SEQ ID NO: 1659196 - RNA, 19 nt, Artificial Sequence
  Description of Artificial Sequence: Synthetic oligonucleotide
  Antisense strand to SEQ ID NO: 1659195
auuucaggcagacuccaga

SEQ ID NO: 1659197 - RNA, 19 nt, Artificial Sequence
  Description of Artificial Sequence: Synthetic oligonucleotide
  Sense strand starting at position 2587 of SEQ ID NO: 1561272
uggagucugccugaaauuc

SEQ ID NO: 1659198 - RNA, 19 nt, Artificial Sequence
  Description of Artificial Sequence: Synthetic oligonucleotide
  Antisense strand to SEQ ID NO: 1659197
gaauuucaggcagacucca

SEQ ID NO: 1659199 - RNA, 19 nt, Artificial Sequence
  Description of Artificial Sequence: Synthetic oligonucleotide
  Sense strand starting at position 2732 of SEQ ID NO: 1561272
ucggcaaaugcugaacaaa

SEQ ID NO: 1659200 - RNA, 19 nt, Artificial Sequence
  Description of Artificial Sequence: Synthetic oligonucleotide
  Antisense strand to SEQ ID NO: 1659199
uuuguucagcauuugccga

SEQ ID NO: 1659201 - RNA, 19 nt, Artificial Sequence
  Description of Artificial Sequence: Synthetic oligonucleotide
  Sense strand starting at position 2818 of SEQ ID NO: 1561272
uggaguuguaucuaugagc

SEQ ID NO: 1659202 - RNA, 19 nt, Artificial Sequence
  Description of Artificial Sequence: Synthetic oligonucleotide
  Antisense strand to SEQ ID NO: 1659201
gcucauagauacaacucca

SEQ ID NO: 1659203 - RNA, 19 nt, Artificial Sequence
  Description of Artificial Sequence: Synthetic oligonucleotide
  Sense strand starting at position 2912 of SEQ ID NO: 1561272
gucacucaccucuagauca

SEQ ID NO: 1659204 - RNA, 19 nt, Artificial Sequence
  Description of Artificial Sequence: Synthetic oligonucleotide
  Antisense strand to SEQ ID NO: 1659203
ugaucuagaggugagugac

SEQ ID NO: 1659205 - RNA, 19 nt, Artificial Sequence
  Description of Artificial Sequence: Synthetic oligonucleotide
  Sense strand starting at position 2960 of SEQ ID NO: 1561272
gguuauugacaagguaugu

SEQ ID NO: 1659206 - RNA, 19 nt, Artificial Sequence
  Description of Artificial Sequence: Synthetic oligonucleotide
  Antisense strand to SEQ ID NO: 1659205
acauaccuugucaauaacc

SEQ ID NO: 1659207 - RNA, 19 nt, Artificial Sequence
  Description of Artificial Sequence: Synthetic oligonucleotide
  Sense strand starting at position 3191 of SEQ ID NO: 1561272
cccuaauauccaggguuug

SEQ ID NO: 1659208 - RNA, 19 nt, Artificial Sequence
  Description of Artificial Sequence: Synthetic oligonucleotide
  Antisense strand to SEQ ID NO: 1659207
caaacccuggauauuaggg

SEQ ID NO: 1659209 - RNA, 19 nt, Artificial Sequence
  Description of Artificial Sequence: Synthetic oligonucleotide
  Sense strand starting at position 3209 of SEQ ID NO: 1561272
gggcuccucugucuaggaa

SEQ ID NO: 1659210 - RNA, 19 nt, Artificial Sequence
  Description of Artificial Sequence: Synthetic oligonucleotide
  Antisense strand to SEQ ID NO: 1659209
uuccuagacagaggagccc

SEQ ID NO: 1659211 - RNA, 19 nt, Artificial Sequence
  Description of Artificial Sequence: Synthetic oligonucleotide
  Sense strand starting at position 3210 of SEQ ID NO: 1561272
ggcuccucugucuaggaau

SEQ ID NO: 1659212 - RNA, 19 nt, Artificial Sequence
  Description of Artificial Sequence: Synthetic oligonucleotide
  Antisense strand to SEQ ID NO: 1659211
auuccuagacagaggagcc

SEQ ID NO: 1659213 - RNA, 19 nt, Artificial Sequence
  Description of Artificial Sequence: Synthetic oligonucleotide
  Sense strand starting at position 3212 of SEQ ID NO: 1561272
cuccucugucuaggaauaa

SEQ ID NO: 1659214 - RNA, 19 nt, Artificial Sequence
  Description of Artificial Sequence: Synthetic oligonucleotide
  Antisense strand to SEQ ID NO: 1659213
uuauuccuagacagaggag

SEQ ID NO: 1659215 - RNA, 19 nt, Artificial Sequence
  Description of Artificial Sequence: Synthetic oligonucleotide
  Sense strand starting at position 3255 of SEQ ID NO: 1561272
agagccuuaucccuguuau

SEQ ID NO: 1659216 - RNA, 19 nt, Artificial Sequence
  Description of Artificial Sequence: Synthetic oligonucleotide
  Antisense strand to SEQ ID NO: 1659215
auaacagggauaaggcucu

SEQ ID NO: 1659217 - RNA, 19 nt, Artificial Sequence
  Description of Artificial Sequence: Synthetic oligonucleotide
  Sense strand starting at position 3265 of SEQ ID NO: 1561272
cccuguuauccacagucaa

SEQ ID NO: 1659218 - RNA, 19 nt, Artificial Sequence
  Description of Artificial Sequence: Synthetic oligonucleotide
  Antisense strand to SEQ ID NO: 1659217
uugacuguggauaacaggg

SEQ ID NO: 1659219 - RNA, 19 nt, Artificial Sequence
  Description of Artificial Sequence: Synthetic oligonucleotide
  Sense strand starting at position 3360 of SEQ ID NO: 1561272
cgcuucauuuacguggaga

SEQ ID NO: 1659220 - RNA, 19 nt, Artificial Sequence
  Description of Artificial Sequence: Synthetic oligonucleotide
  Antisense strand to SEQ ID NO: 1659219
ucuccacguaaaugaagcg

SEQ ID NO: 1659221 - RNA, 19 nt, Artificial Sequence
  Description of Artificial Sequence: Synthetic oligonucleotide
  Sense strand starting at position 3425 of SEQ ID NO: 1561272
ggaagucgugcgagaccuu

SEQ ID NO: 1659222 - RNA, 19 nt, Artificial Sequence
  Description of Artificial Sequence: Synthetic oligonucleotide
  Antisense strand to SEQ ID NO: 1659221
aaggucucgcacgacuucc

SEQ ID NO: 1659223 - RNA, 19 nt, Artificial Sequence
  Description of Artificial Sequence: Synthetic oligonucleotide
  Sense strand starting at position 3509 of SEQ ID NO: 1561272
caucucugguuucugagau

SEQ ID NO: 1659224 - RNA, 19 nt, Artificial Sequence
  Description of Artificial Sequence: Synthetic oligonucleotide
  Antisense strand to SEQ ID NO: 1659223
aucucagaaaccagagaug

SEQ ID NO: 1659225 - RNA, 19 nt, Artificial Sequence
  Description of Artificial Sequence: Synthetic oligonucleotide
  Sense strand starting at position 3540 of SEQ ID NO: 1561272
gugcaagcuguauaacaug

SEQ ID NO: 1659226 - RNA, 19 nt, Artificial Sequence
  Description of Artificial Sequence: Synthetic oligonucleotide
  Antisense strand to SEQ ID NO: 1659225
cauguuauacagcuugcac

SEQ ID NO: 1659227 - RNA, 19 nt, Artificial Sequence
  Description of Artificial Sequence: Synthetic oligonucleotide
  Sense strand starting at position 3666 of SEQ ID NO: 1561272
uucccauaucugggaacua

SEQ ID NO: 1659228 - RNA, 19 nt, Artificial Sequence
  Description of Artificial Sequence: Synthetic oligonucleotide
  Antisense strand to SEQ ID NO: 1659227
uaguucccagauaugggaa

SEQ ID NO: 1659229 - RNA, 19 nt, Artificial Sequence
  Description of Artificial Sequence: Synthetic oligonucleotide
  Sense strand starting at position 3705 of SEQ ID NO: 1561272
uuguccuuccgccagaaau

SEQ ID NO: 1659230 - RNA, 19 nt, Artificial Sequence
  Description of Artificial Sequence: Synthetic oligonucleotide
  Antisense strand to SEQ ID NO: 1659229
auuucuggcggaaggacaa

SEQ ID NO: 1659231 - RNA, 19 nt, Artificial Sequence
  Description of Artificial Sequence: Synthetic oligonucleotide
  Sense strand starting at position 3715 of SEQ ID NO: 1561272
gccagaaauguguacacag

SEQ ID NO: 1659232 - RNA, 19 nt, Artificial Sequence
  Description of Artificial Sequence: Synthetic oligonucleotide
  Antisense strand to SEQ ID NO: 1659231
cuguguacacauuucuggc

SEQ ID NO: 1659233 - RNA, 19 nt, Artificial Sequence
  Description of Artificial Sequence: Synthetic oligonucleotide
  Sense strand starting at position 3909 of SEQ ID NO: 1561272
cugcgcuuucuggaggaca

SEQ ID NO: 1659234 - RNA, 19 nt, Artificial Sequence
  Description of Artificial Sequence: Synthetic oligonucleotide
  Antisense strand to SEQ ID NO: 1659233
uguccuccagaaagcgcag

SEQ ID NO: 1659235 - RNA, 19 nt, Artificial Sequence
  Description of Artificial Sequence: Synthetic oligonucleotide
  Sense strand starting at position 3912 of SEQ ID NO: 1561272
cgcuuucuggaggacacau

SEQ ID NO: 1659236 - RNA, 19 nt, Artificial Sequence
  Description of Artificial Sequence: Synthetic oligonucleotide
  Antisense strand to SEQ ID NO: 1659235
auguguccuccagaaagcg

SEQ ID NO: 1659237 - RNA, 19 nt, Artificial Sequence
  Description of Artificial Sequence: Synthetic oligonucleotide
  Sense strand starting at position 3923 of SEQ ID NO: 1561272
ggacacauuuggcaaugau

SEQ ID NO: 1659238 - RNA, 19 nt, Artificial Sequence
  Description of Artificial Sequence: Synthetic oligonucleotide
  Antisense strand to SEQ ID NO: 1659237
aucauugccaaaugugucc

SEQ ID NO: 1659239 - RNA, 19 nt, Artificial Sequence
  Description of Artificial Sequence: Synthetic oligonucleotide
  Sense strand starting at position 69 of SEQ ID NO: 1561273
ugcucuaucgcccaggagu

SEQ ID NO: 1659240 - RNA, 19 nt, Artificial Sequence
  Description of Artificial Sequence: Synthetic oligonucleotide
  Antisense strand to SEQ ID NO: 1659239
acuccugggcgauagagca

SEQ ID NO: 1659241 - RNA, 19 nt, Artificial Sequence
  Description of Artificial Sequence: Synthetic oligonucleotide
  Sense strand starting at position 653 of SEQ ID NO: 1561273
ccggccagauuauuauuau

SEQ ID NO: 1659242 - RNA, 19 nt, Artificial Sequence
  Description of Artificial Sequence: Synthetic oligonucleotide
  Antisense strand to SEQ ID NO: 1659241
auaauaauaaucuggccgg

SEQ ID NO: 1659243 - RNA, 19 nt, Artificial Sequence
  Description of Artificial Sequence: Synthetic oligonucleotide
  Sense strand starting at position 1203 of SEQ ID NO: 1561273
uucccagugucgguuaaag

SEQ ID NO: 1659244 - RNA, 19 nt, Artificial Sequence
  Description of Artificial Sequence: Synthetic oligonucleotide
  Antisense strand to SEQ ID NO: 1659243
cuuuaaccgacacugggaa

SEQ ID NO: 1659245 - RNA, 19 nt, Artificial Sequence
  Description of Artificial Sequence: Synthetic oligonucleotide
  Sense strand starting at position 1205 of SEQ ID NO: 1561273
cccagugucgguuaaagca

SEQ ID NO: 1659246 - RNA, 19 nt, Artificial Sequence
  Description of Artificial Sequence: Synthetic oligonucleotide
  Antisense strand to SEQ ID NO: 1659245
ugcuuuaaccgacacuggg

SEQ ID NO: 1659247 - RNA, 19 nt, Artificial Sequence
  Description of Artificial Sequence: Synthetic oligonucleotide
  Sense strand starting at position 1324 of SEQ ID NO: 1561273
ggauccuuacgguguaaug

SEQ ID NO: 1659248 - RNA, 19 nt, Artificial Sequence
  Description of Artificial Sequence: Synthetic oligonucleotide
  Antisense strand to SEQ ID NO: 1659247
cauuacaccguaaggaucc

SEQ ID NO: 1659249 - RNA, 19 nt, Artificial Sequence
  Description of Artificial Sequence: Synthetic oligonucleotide
  Sense strand starting at position 1799 of SEQ ID NO: 1561273
gaaggcgcucaccauuaaa

SEQ ID NO: 1659250 - RNA, 19 nt, Artificial Sequence
  Description of Artificial Sequence: Synthetic oligonucleotide
  Antisense strand to SEQ ID NO: 1659249
uuuaauggugagcgccuuc

SEQ ID NO: 1659251 - RNA, 19 nt, Artificial Sequence
  Description of Artificial Sequence: Synthetic oligonucleotide
  Sense strand starting at position 1988 of SEQ ID NO: 1561273
gguguaaccuuauuauugu

SEQ ID NO: 1659252 - RNA, 19 nt, Artificial Sequence
  Description of Artificial Sequence: Synthetic oligonucleotide
  Antisense strand to SEQ ID NO: 1659251
acaauaauaagguuacacc

SEQ ID NO: 1659253 - RNA, 19 nt, Artificial Sequence
  Description of Artificial Sequence: Synthetic oligonucleotide
  Sense strand starting at position 2054 of SEQ ID NO: 1561273
gcauuucggugaucggguu

SEQ ID NO: 1659254 - RNA, 19 nt, Artificial Sequence
  Description of Artificial Sequence: Synthetic oligonucleotide
  Antisense strand to SEQ ID NO: 1659253
aacccgaucaccgaaaugc

SEQ ID NO: 1659255 - RNA, 19 nt, Artificial Sequence
  Description of Artificial Sequence: Synthetic oligonucleotide
  Sense strand starting at position 2060 of SEQ ID NO: 1561273
cggugaucggguuggaacu

SEQ ID NO: 1659256 - RNA, 19 nt, Artificial Sequence
  Description of Artificial Sequence: Synthetic oligonucleotide
  Antisense strand to SEQ ID NO: 1659255
aguuccaacccgaucaccg

SEQ ID NO: 1659257 - RNA, 19 nt, Artificial Sequence
  Description of Artificial Sequence: Synthetic oligonucleotide
  Sense strand starting at position 2061 of SEQ ID NO: 1561273
ggugaucggguuggaacua

SEQ ID NO: 1659258 - RNA, 19 nt, Artificial Sequence
  Description of Artificial Sequence: Synthetic oligonucleotide
  Antisense strand to SEQ ID NO: 1659257
uaguuccaacccgaucacc

SEQ ID NO: 1659259 - RNA, 19 nt, Artificial Sequence
  Description of Artificial Sequence: Synthetic oligonucleotide
  Sense strand starting at position 2066 of SEQ ID NO: 1561273
ucggguuggaacuauugaa

SEQ ID NO: 1659260 - RNA, 19 nt, Artificial Sequence
  Description of Artificial Sequence: Synthetic oligonucleotide
  Antisense strand to SEQ ID NO: 1659259
uucaauaguuccaacccga

SEQ ID NO: 1659261 - RNA, 19 nt, Artificial Sequence
  Description of Artificial Sequence: Synthetic oligonucleotide
  Sense strand starting at position 2182 of SEQ ID NO: 1561273
ugucaugaggaacggaaau

SEQ ID NO: 1659262 - RNA, 19 nt, Artificial Sequence
  Description of Artificial Sequence: Synthetic oligonucleotide
  Antisense strand to SEQ ID NO: 1659261
auuuccguuccucaugaca

SEQ ID NO: 1659263 - RNA, 19 nt, Artificial Sequence
  Description of Artificial Sequence: Synthetic oligonucleotide
  Sense strand starting at position 2277 of SEQ ID NO: 1561273
gcgugaucuggccuucgac

SEQ ID NO: 1659264 - RNA, 19 nt, Artificial Sequence
  Description of Artificial Sequence: Synthetic oligonucleotide
  Antisense strand to SEQ ID NO: 1659263
gucgaaggccagaucacgc

SEQ ID NO: 1659265 - RNA, 19 nt, Artificial Sequence
  Description of Artificial Sequence: Synthetic oligonucleotide
  Sense strand starting at position 2297 of SEQ ID NO: 1561273
cgcuauguccacuaacaau

SEQ ID NO: 1659266 - RNA, 19 nt, Artificial Sequence
  Description of Artificial Sequence: Synthetic oligonucleotide
  Antisense strand to SEQ ID NO: 1659265
auuguuaguggacauagcg

SEQ ID NO: 1659267 - RNA, 19 nt, Artificial Sequence
  Description of Artificial Sequence: Synthetic oligonucleotide
  Sense strand starting at position 2590 of SEQ ID NO: 1561273
agcuucuauggguguaguu

SEQ ID NO: 1659268 - RNA, 19 nt, Artificial Sequence
  Description of Artificial Sequence: Synthetic oligonucleotide
  Antisense strand to SEQ ID NO: 1659267
aacuacacccauagaagcu

SEQ ID NO: 1659269 - RNA, 19 nt, Artificial Sequence
  Description of Artificial Sequence: Synthetic oligonucleotide
  Sense strand starting at position 2602 of SEQ ID NO: 1561273
uguaguuggaccugagaac

SEQ ID NO: 1659270 - RNA, 19 nt, Artificial Sequence
  Description of Artificial Sequence: Synthetic oligonucleotide
  Antisense strand to SEQ ID NO: 1659269
guucucagguccaacuaca

SEQ ID NO: 1659271 - RNA, 19 nt, Artificial Sequence
  Description of Artificial Sequence: Synthetic oligonucleotide
  Sense strand starting at position 2731 of SEQ ID NO: 1561273
ccagucuuuggugaaguca

SEQ ID NO: 1659272 - RNA, 19 nt, Artificial Sequence
  Description of Artificial Sequence: Synthetic oligonucleotide
  Antisense strand to SEQ ID NO: 1659271
ugacuucaccaaagacugg

SEQ ID NO: 1659273 - RNA, 19 nt, Artificial Sequence
  Description of Artificial Sequence: Synthetic oligonucleotide
  Sense strand starting at position 2740 of SEQ ID NO: 1561273
ggugaagucaaggauucga

SEQ ID NO: 1659274 - RNA, 19 nt, Artificial Sequence
  Description of Artificial Sequence: Synthetic oligonucleotide
  Antisense strand to SEQ ID NO: 1659273
ucgaauccuugacuucacc

SEQ ID NO: 1659275 - RNA, 19 nt, Artificial Sequence
  Description of Artificial Sequence: Synthetic oligonucleotide
  Sense strand starting at position 2842 of SEQ ID NO: 1561273
gggucuuaagcauguggga

SEQ ID NO: 1659276 - RNA, 19 nt, Artificial Sequence
  Description of Artificial Sequence: Synthetic oligonucleotide
  Antisense strand to SEQ ID NO: 1659275
ucccacaugcuuaagaccc

SEQ ID NO: 1659277 - RNA, 19 nt, Artificial Sequence
  Description of Artificial Sequence: Synthetic oligonucleotide
  Sense strand starting at position 2844 of SEQ ID NO: 1561273
gucuuaagcaugugggaug

SEQ ID NO: 1659278 - RNA, 19 nt, Artificial Sequence
  Description of Artificial Sequence: Synthetic oligonucleotide
  Antisense strand to SEQ ID NO: 1659277
caucccacaugcuuaagac

SEQ ID NO: 1659279 - RNA, 19 nt, Artificial Sequence
  Description of Artificial Sequence: Synthetic oligonucleotide
  Sense strand starting at position 2849 of SEQ ID NO: 1561273
aagcaugugggaugucaga

SEQ ID NO: 1659280 - RNA, 19 nt, Artificial Sequence
  Description of Artificial Sequence: Synthetic oligonucleotide
  Antisense strand to SEQ ID NO: 1659279
ucugacaucccacaugcuu

SEQ ID NO: 1659281 - RNA, 19 nt, Artificial Sequence
  Description of Artificial Sequence: Synthetic oligonucleotide
  Sense strand starting at position 2871 of SEQ ID NO: 1561273
ucucuugguccugagagac

SEQ ID NO: 1659282 - RNA, 19 nt, Artificial Sequence
  Description of Artificial Sequence: Synthetic oligonucleotide
  Antisense strand to SEQ ID NO: 1659281
gucucucaggaccaagaga

SEQ ID NO: 1659283 - RNA, 19 nt, Artificial Sequence
  Description of Artificial Sequence: Synthetic oligonucleotide
  Sense strand starting at position 3004 of SEQ ID NO: 1561273
augaucuggugucuggaaa

SEQ ID NO: 1659284 - RNA, 19 nt, Artificial Sequence
  Description of Artificial Sequence: Synthetic oligonucleotide
  Antisense strand to SEQ ID NO: 1659283
uuuccagacaccagaucau

SEQ ID NO: 1659285 - RNA, 19 nt, Artificial Sequence
  Description of Artificial Sequence: Synthetic oligonucleotide
  Sense strand starting at position 3008 of SEQ ID NO: 1561273
ucuggugucuggaaaggug

SEQ ID NO: 1659286 - RNA, 19 nt, Artificial Sequence
  Description of Artificial Sequence: Synthetic oligonucleotide
  Antisense strand to SEQ ID NO: 1659285
caccuuuccagacaccaga

SEQ ID NO: 1659287 - RNA, 19 nt, Artificial Sequence
  Description of Artificial Sequence: Synthetic oligonucleotide
  Sense strand starting at position 3183 of SEQ ID NO: 1561273
augugagacuugcccuaca

SEQ ID NO: 1659288 - RNA, 19 nt, Artificial Sequence
  Description of Artificial Sequence: Synthetic oligonucleotide
  Antisense strand to SEQ ID NO: 1659287
uguagggcaagucucacau

SEQ ID NO: 1659289 - RNA, 19 nt, Artificial Sequence
  Description of Artificial Sequence: Synthetic oligonucleotide
  Sense strand starting at position 3300 of SEQ ID NO: 1561273
gauguccuaucugcagaau

SEQ ID NO: 1659290 - RNA, 19 nt, Artificial Sequence
  Description of Artificial Sequence: Synthetic oligonucleotide
  Antisense strand to SEQ ID NO: 1659289
auucugcagauaggacauc

SEQ ID NO: 1659291 - RNA, 19 nt, Artificial Sequence
  Description of Artificial Sequence: Synthetic oligonucleotide
  Sense strand starting at position 3303 of SEQ ID NO: 1561273
guccuaucugcagaauccu

SEQ ID NO: 1659292 - RNA, 19 nt, Artificial Sequence
  Description of Artificial Sequence: Synthetic oligonucleotide
  Antisense strand to SEQ ID NO: 1659291
aggauucugcagauaggac

SEQ ID NO: 1659293 - RNA, 19 nt, Artificial Sequence
  Description of Artificial Sequence: Synthetic oligonucleotide
  Sense strand starting at position 3312 of SEQ ID NO: 1561273
gcagaauccucagcccaug

SEQ ID NO: 1659294 - RNA, 19 nt, Artificial Sequence
  Description of Artificial Sequence: Synthetic oligonucleotide
  Antisense strand to SEQ ID NO: 1659293
caugggcugaggauucugc

SEQ ID NO: 1659295 - RNA, 19 nt, Artificial Sequence
  Description of Artificial Sequence: Synthetic oligonucleotide
  Sense strand starting at position 3393 of SEQ ID NO: 1561273
cugggcuuuggcugcuaaa

SEQ ID NO: 1659296 - RNA, 19 nt, Artificial Sequence
  Description of Artificial Sequence: Synthetic oligonucleotide
  Antisense strand to SEQ ID NO: 1659295
uuuagcagccaaagcccag

SEQ ID NO: 1659297 - RNA, 19 nt, Artificial Sequence
  Description of Artificial Sequence: Synthetic oligonucleotide
  Sense strand starting at position 3433 of SEQ ID NO: 1561273
ccuggacuucccugaauga

SEQ ID NO: 1659298 - RNA, 19 nt, Artificial Sequence
  Description of Artificial Sequence: Synthetic oligonucleotide
  Antisense strand to SEQ ID NO: 1659297
ucauucagggaaguccagg

SEQ ID NO: 1659299 - RNA, 19 nt, Artificial Sequence
  Description of Artificial Sequence: Synthetic oligonucleotide
  Sense strand starting at position 3489 of SEQ ID NO: 1561273
ggcccuuuccuagggaaca

SEQ ID NO: 1659300 - RNA, 19 nt, Artificial Sequence
  Description of Artificial Sequence: Synthetic oligonucleotide
  Antisense strand to SEQ ID NO: 1659299
uguucccuaggaaagggcc

SEQ ID NO: 1659301 - RNA, 19 nt, Artificial Sequence
  Description of Artificial Sequence: Synthetic oligonucleotide
  Sense strand starting at position 3553 of SEQ ID NO: 1561273
gggagaugcuguccauguu

SEQ ID NO: 1659302 - RNA, 19 nt, Artificial Sequence
  Description of Artificial Sequence: Synthetic oligonucleotide
  Antisense strand to SEQ ID NO: 1659301
aacauggacagcaucuccc

SEQ ID NO: 1659303 - RNA, 19 nt, Artificial Sequence
  Description of Artificial Sequence: Synthetic oligonucleotide
  Sense strand starting at position 3554 of SEQ ID NO: 1561273
ggagaugcuguccauguuu

SEQ ID NO: 1659304 - RNA, 19 nt, Artificial Sequence
  Description of Artificial Sequence: Synthetic oligonucleotide
  Antisense strand to SEQ ID NO: 1659303
aaacauggacagcaucucc

SEQ ID NO: 1659305 - RNA, 19 nt, Artificial Sequence
  Description of Artificial Sequence: Synthetic oligonucleotide
  Sense strand starting at position 3583 of SEQ ID NO: 1561273
ucauuugcuuucucguuga

SEQ ID NO: 1659306 - RNA, 19 nt, Artificial Sequence
  Description of Artificial Sequence: Synthetic oligonucleotide
  Antisense strand to SEQ ID NO: 1659305
ucaacgagaaagcaaauga

SEQ ID NO: 1659307 - RNA, 19 nt, Artificial Sequence
  Description of Artificial Sequence: Synthetic oligonucleotide
  Sense strand starting at position 3586 of SEQ ID NO: 1561273
uuugcuuucucguugaaac

SEQ ID NO: 1659308 - RNA, 19 nt, Artificial Sequence
  Description of Artificial Sequence: Synthetic oligonucleotide
  Antisense strand to SEQ ID NO: 1659307
guuucaacgagaaagcaaa

SEQ ID NO: 1659309 - RNA, 19 nt, Artificial Sequence
  Description of Artificial Sequence: Synthetic oligonucleotide
  Sense strand starting at position 3587 of SEQ ID NO: 1561273
uugcuuucucguugaaacc

SEQ ID NO: 1659310 - RNA, 19 nt, Artificial Sequence
  Description of Artificial Sequence: Synthetic oligonucleotide
  Antisense strand to SEQ ID NO: 1659309
gguuucaacgagaaagcaa

SEQ ID NO: 1659311 - RNA, 19 nt, Artificial Sequence
  Description of Artificial Sequence: Synthetic oligonucleotide
  Sense strand starting at position 3588 of SEQ ID NO: 1561273
ugcuuucucguugaaaccu

SEQ ID NO: 1659312 - RNA, 19 nt, Artificial Sequence
  Description of Artificial Sequence: Synthetic oligonucleotide
  Antisense strand to SEQ ID NO: 1659311
agguuucaacgagaaagca

SEQ ID NO: 1659313 - RNA, 19 nt, Artificial Sequence
  Description of Artificial Sequence: Synthetic oligonucleotide
  Sense strand starting at position 3594 of SEQ ID NO: 1561273
cucguugaaaccuguuguu

SEQ ID NO: 1659314 - RNA, 19 nt, Artificial Sequence
  Description of Artificial Sequence: Synthetic oligonucleotide
  Antisense strand to SEQ ID NO: 1659313
aacaacagguuucaacgag

SEQ ID NO: 1659315 - RNA, 19 nt, Artificial Sequence
  Description of Artificial Sequence: Synthetic oligonucleotide
  Sense strand starting at position 3599 of SEQ ID NO: 1561273
ugaaaccuguuguuaauaa

SEQ ID NO: 1659316 - RNA, 19 nt, Artificial Sequence
  Description of Artificial Sequence: Synthetic oligonucleotide
  Antisense strand to SEQ ID NO: 1659315
uuauuaacaacagguuuca

SEQ ID NO: 1659317 - RNA, 19 nt, Artificial Sequence
  Description of Artificial Sequence: Synthetic oligonucleotide
  Sense strand starting at position 3825 of SEQ ID NO: 1561273
ccugcugaccuagauaauc

SEQ ID NO: 1659318 - RNA, 19 nt, Artificial Sequence
  Description of Artificial Sequence: Synthetic oligonucleotide
  Antisense strand to SEQ ID NO: 1659317
gauuaucuaggucagcagg

SEQ ID NO: 1659319 - RNA, 19 nt, Artificial Sequence
  Description of Artificial Sequence: Synthetic oligonucleotide
  Sense strand starting at position 41 of SEQ ID NO: 1561274
acgcauuuguggucccagu

SEQ ID NO: 1659320 - RNA, 19 nt, Artificial Sequence
  Description of Artificial Sequence: Synthetic oligonucleotide
  Antisense strand to SEQ ID NO: 1659319
acugggaccacaaaugcgu

SEQ ID NO: 1659321 - RNA, 19 nt, Artificial Sequence
  Description of Artificial Sequence: Synthetic oligonucleotide
  Sense strand starting at position 107 of SEQ ID NO: 1561274
ggcugcagugaacauagau

SEQ ID NO: 1659322 - RNA, 19 nt, Artificial Sequence
  Description of Artificial Sequence: Synthetic oligonucleotide
  Antisense strand to SEQ ID NO: 1659321
aucuauguucacugcagcc

SEQ ID NO: 1659323 - RNA, 19 nt, Artificial Sequence
  Description of Artificial Sequence: Synthetic oligonucleotide
  Sense strand starting at position 116 of SEQ ID NO: 1561274
gaacauagauugugccacu

SEQ ID NO: 1659324 - RNA, 19 nt, Artificial Sequence
  Description of Artificial Sequence: Synthetic oligonucleotide
  Antisense strand to SEQ ID NO: 1659323
aguggcacaaucuauguuc

SEQ ID NO: 1659325 - RNA, 19 nt, Artificial Sequence
  Description of Artificial Sequence: Synthetic oligonucleotide
  Sense strand starting at position 208 of SEQ ID NO: 1561274
uagauuaucuaggucagca

SEQ ID NO: 1659326 - RNA, 19 nt, Artificial Sequence
  Description of Artificial Sequence: Synthetic oligonucleotide
  Antisense strand to SEQ ID NO: 1659325
ugcugaccuagauaaucua

SEQ ID NO: 1659327 - RNA, 19 nt, Artificial Sequence
  Description of Artificial Sequence: Synthetic oligonucleotide
  Sense strand starting at position 251 of SEQ ID NO: 1561274
ggcagaagucacugucuug

SEQ ID NO: 1659328 - RNA, 19 nt, Artificial Sequence
  Description of Artificial Sequence: Synthetic oligonucleotide
  Antisense strand to SEQ ID NO: 1659327
caagacagugacuucugcc

SEQ ID NO: 1659329 - RNA, 19 nt, Artificial Sequence
  Description of Artificial Sequence: Synthetic oligonucleotide
  Sense strand starting at position 272 of SEQ ID NO: 1561274
ccuagcaccugacuuaaga

SEQ ID NO: 1659330 - RNA, 19 nt, Artificial Sequence
  Description of Artificial Sequence: Synthetic oligonucleotide
  Antisense strand to SEQ ID NO: 1659329
ucuuaagucaggugcuagg

SEQ ID NO: 1659331 - RNA, 19 nt, Artificial Sequence
  Description of Artificial Sequence: Synthetic oligonucleotide
  Sense strand starting at position 290 of SEQ ID NO: 1561274
acacaagguuuaugaagua

SEQ ID NO: 1659332 - RNA, 19 nt, Artificial Sequence
  Description of Artificial Sequence: Synthetic oligonucleotide
  Antisense strand to SEQ ID NO: 1659331
uacuucauaaaccuugugu

SEQ ID NO: 1659333 - RNA, 19 nt, Artificial Sequence
  Description of Artificial Sequence: Synthetic oligonucleotide
  Sense strand starting at position 295 of SEQ ID NO: 1561274
agguuuaugaaguaagcaa

SEQ ID NO: 1659334 - RNA, 19 nt, Artificial Sequence
  Description of Artificial Sequence: Synthetic oligonucleotide
  Antisense strand to SEQ ID NO: 1659333
uugcuuacuucauaaaccu

SEQ ID NO: 1659335 - RNA, 19 nt, Artificial Sequence
  Description of Artificial Sequence: Synthetic oligonucleotide
  Sense strand starting at position 541 of SEQ ID NO: 1561274
uaggguguucccuaggaaa

SEQ ID NO: 1659336 - RNA, 19 nt, Artificial Sequence
  Description of Artificial Sequence: Synthetic oligonucleotide
  Antisense strand to SEQ ID NO: 1659335
uuuccuagggaacacccua

SEQ ID NO: 1659337 - RNA, 19 nt, Artificial Sequence
  Description of Artificial Sequence: Synthetic oligonucleotide
  Sense strand starting at position 543 of SEQ ID NO: 1561274
ggguguucccuaggaaagg

SEQ ID NO: 1659338 - RNA, 19 nt, Artificial Sequence
  Description of Artificial Sequence: Synthetic oligonucleotide
  Antisense strand to SEQ ID NO: 1659337
ccuuuccuagggaacaccc

SEQ ID NO: 1659339 - RNA, 19 nt, Artificial Sequence
  Description of Artificial Sequence: Synthetic oligonucleotide
  Sense strand starting at position 597 of SEQ ID NO: 1561274
cggccucauucagggaagu

SEQ ID NO: 1659340 - RNA, 19 nt, Artificial Sequence
  Description of Artificial Sequence: Synthetic oligonucleotide
  Antisense strand to SEQ ID NO: 1659339
acuucccugaaugaggccg

SEQ ID NO: 1659341 - RNA, 19 nt, Artificial Sequence
  Description of Artificial Sequence: Synthetic oligonucleotide
  Sense strand starting at position 718 of SEQ ID NO: 1561274
ggcgucaugggcugaggau

SEQ ID NO: 1659342 - RNA, 19 nt, Artificial Sequence
  Description of Artificial Sequence: Synthetic oligonucleotide
  Antisense strand to SEQ ID NO: 1659341
auccucagcccaugacgcc

SEQ ID NO: 1659343 - RNA, 19 nt, Artificial Sequence
  Description of Artificial Sequence: Synthetic oligonucleotide
  Sense strand starting at position 719 of SEQ ID NO: 1561274
gcgucaugggcugaggauu

SEQ ID NO: 1659344 - RNA, 19 nt, Artificial Sequence
  Description of Artificial Sequence: Synthetic oligonucleotide
  Antisense strand to SEQ ID NO: 1659343
aauccucagcccaugacgc

SEQ ID NO: 1659345 - RNA, 19 nt, Artificial Sequence
  Description of Artificial Sequence: Synthetic oligonucleotide
  Sense strand starting at position 727 of SEQ ID NO: 1561274
ggcugaggauucugcagau

SEQ ID NO: 1659346 - RNA, 19 nt, Artificial Sequence
  Description of Artificial Sequence: Synthetic oligonucleotide
  Antisense strand to SEQ ID NO: 1659345
aucugcagaauccucagcc

SEQ ID NO: 1659347 - RNA, 19 nt, Artificial Sequence
  Description of Artificial Sequence: Synthetic oligonucleotide
  Sense strand starting at position 837 of SEQ ID NO: 1561274
aagagucacuuguucugua

SEQ ID NO: 1659348 - RNA, 19 nt, Artificial Sequence
  Description of Artificial Sequence: Synthetic oligonucleotide
  Antisense strand to SEQ ID NO: 1659347
uacagaacaagugacucuu

SEQ ID NO: 1659349 - RNA, 19 nt, Artificial Sequence
  Description of Artificial Sequence: Synthetic oligonucleotide
  Sense strand starting at position 842 of SEQ ID NO: 1561274
ucacuuguucuguagggca

SEQ ID NO: 1659350 - RNA, 19 nt, Artificial Sequence
  Description of Artificial Sequence: Synthetic oligonucleotide
  Antisense strand to SEQ ID NO: 1659349
ugcccuacagaacaaguga

SEQ ID NO: 1659351 - RNA, 19 nt, Artificial Sequence
  Description of Artificial Sequence: Synthetic oligonucleotide
  Sense strand starting at position 1041 of SEQ ID NO: 1561274
ccagaucaugcccacugau

SEQ ID NO: 1659352 - RNA, 19 nt, Artificial Sequence
  Description of Artificial Sequence: Synthetic oligonucleotide
  Antisense strand to SEQ ID NO: 1659351
aucagugggcaugaucugg

SEQ ID NO: 1659353 - RNA, 19 nt, Artificial Sequence
  Description of Artificial Sequence: Synthetic oligonucleotide
  Sense strand starting at position 1118 of SEQ ID NO: 1561274
uggcauacucuagauacgu

SEQ ID NO: 1659354 - RNA, 19 nt, Artificial Sequence
  Description of Artificial Sequence: Synthetic oligonucleotide
  Antisense strand to SEQ ID NO: 1659353
acguaucuagaguaugcca

SEQ ID NO: 1659355 - RNA, 19 nt, Artificial Sequence
  Description of Artificial Sequence: Synthetic oligonucleotide
  Sense strand starting at position 1127 of SEQ ID NO: 1561274
cuagauacgugguuucuag

SEQ ID NO: 1659356 - RNA, 19 nt, Artificial Sequence
  Description of Artificial Sequence: Synthetic oligonucleotide
  Antisense strand to SEQ ID NO: 1659355
cuagaaaccacguaucuag

SEQ ID NO: 1659357 - RNA, 19 nt, Artificial Sequence
  Description of Artificial Sequence: Synthetic oligonucleotide
  Sense strand starting at position 1134 of SEQ ID NO: 1561274
cgugguuucuaguccuacu

SEQ ID NO: 1659358 - RNA, 19 nt, Artificial Sequence
  Description of Artificial Sequence: Synthetic oligonucleotide
  Antisense strand to SEQ ID NO: 1659357
aguaggacuagaaaccacg

SEQ ID NO: 1659359 - RNA, 19 nt, Artificial Sequence
  Description of Artificial Sequence: Synthetic oligonucleotide
  Sense strand starting at position 1291 of SEQ ID NO: 1561274
ugacucgaauccuugacuu

SEQ ID NO: 1659360 - RNA, 19 nt, Artificial Sequence
  Description of Artificial Sequence: Synthetic oligonucleotide
  Antisense strand to SEQ ID NO: 1659359
aagucaaggauucgaguca

SEQ ID NO: 1659361 - RNA, 19 nt, Artificial Sequence
  Description of Artificial Sequence: Synthetic oligonucleotide
  Sense strand starting at position 1721 of SEQ ID NO: 1561274
cuccguggguccgacauau

SEQ ID NO: 1659362 - RNA, 19 nt, Artificial Sequence
  Description of Artificial Sequence: Synthetic oligonucleotide
  Antisense strand to SEQ ID NO: 1659361
auaugucggacccacggag

SEQ ID NO: 1659363 - RNA, 19 nt, Artificial Sequence
  Description of Artificial Sequence: Synthetic oligonucleotide
  Sense strand starting at position 1725 of SEQ ID NO: 1561274
guggguccgacauauuguu

SEQ ID NO: 1659364 - RNA, 19 nt, Artificial Sequence
  Description of Artificial Sequence: Synthetic oligonucleotide
  Antisense strand to SEQ ID NO: 1659363
aacaauaugucggacccac

SEQ ID NO: 1659365 - RNA, 19 nt, Artificial Sequence
  Description of Artificial Sequence: Synthetic oligonucleotide
  Sense strand starting at position 1731 of SEQ ID NO: 1561274
ccgacauauuguuagugga

SEQ ID NO: 1659366 - RNA, 19 nt, Artificial Sequence
  Description of Artificial Sequence: Synthetic oligonucleotide
  Antisense strand to SEQ ID NO: 1659365
uccacuaacaauaugucgg

SEQ ID NO: 1659367 - RNA, 19 nt, Artificial Sequence
  Description of Artificial Sequence: Synthetic oligonucleotide
  Sense strand starting at position 1733 of SEQ ID NO: 1561274
gacauauuguuaguggaca

SEQ ID NO: 1659368 - RNA, 19 nt, Artificial Sequence
  Description of Artificial Sequence: Synthetic oligonucleotide
  Antisense strand to SEQ ID NO: 1659367
uguccacuaacaauauguc

SEQ ID NO: 1659369 - RNA, 19 nt, Artificial Sequence
  Description of Artificial Sequence: Synthetic oligonucleotide
  Sense strand starting at position 1734 of SEQ ID NO: 1561274
acauauuguuaguggacau

SEQ ID NO: 1659370 - RNA, 19 nt, Artificial Sequence
  Description of Artificial Sequence: Synthetic oligonucleotide
  Antisense strand to SEQ ID NO: 1659369
auguccacuaacaauaugu

SEQ ID NO: 1659371 - RNA, 19 nt, Artificial Sequence
  Description of Artificial Sequence: Synthetic oligonucleotide
  Sense strand starting at position 1851 of SEQ ID NO: 1561274
gcauuuccguuccucauga

SEQ ID NO: 1659372 - RNA, 19 nt, Artificial Sequence
  Description of Artificial Sequence: Synthetic oligonucleotide
  Antisense strand to SEQ ID NO: 1659371
ucaugaggaacggaaaugc

SEQ ID NO: 1659373 - RNA, 19 nt, Artificial Sequence
  Description of Artificial Sequence: Synthetic oligonucleotide
  Sense strand starting at position 1855 of SEQ ID NO: 1561274
uuccguuccucaugacaga

SEQ ID NO: 1659374 - RNA, 19 nt, Artificial Sequence
  Description of Artificial Sequence: Synthetic oligonucleotide
  Antisense strand to SEQ ID NO: 1659373
ucugucaugaggaacggaa

SEQ ID NO: 1659375 - RNA, 19 nt, Artificial Sequence
  Description of Artificial Sequence: Synthetic oligonucleotide
  Sense strand starting at position 2029 of SEQ ID NO: 1561274
ggaaguaggucaggaagaa

SEQ ID NO: 1659376 - RNA, 19 nt, Artificial Sequence
  Description of Artificial Sequence: Synthetic oligonucleotide
  Antisense strand to SEQ ID NO: 1659375
uucuuccugaccuacuucc

SEQ ID NO: 1659377 - RNA, 19 nt, Artificial Sequence
  Description of Artificial Sequence: Synthetic oligonucleotide
  Sense strand starting at position 2709 of SEQ ID NO: 1561274
cccauuacaccguaaggau

SEQ ID NO: 1659378 - RNA, 19 nt, Artificial Sequence
  Description of Artificial Sequence: Synthetic oligonucleotide
  Antisense strand to SEQ ID NO: 1659377
auccuuacgguguaauggg

SEQ ID NO: 1659379 - RNA, 19 nt, Artificial Sequence
  Description of Artificial Sequence: Synthetic oligonucleotide
  Sense strand starting at position 2882 of SEQ ID NO: 1561274
gccuccucugaguggcaau

SEQ ID NO: 1659380 - RNA, 19 nt, Artificial Sequence
  Description of Artificial Sequence: Synthetic oligonucleotide
  Antisense strand to SEQ ID NO: 1659379
auugccacucagaggaggc

SEQ ID NO: 1659381 - RNA, 19 nt, Artificial Sequence
  Description of Artificial Sequence: Synthetic oligonucleotide
  Sense strand starting at position 2895 of SEQ ID NO: 1561274
ggcaauaacuuucucagaa

SEQ ID NO: 1659382 - RNA, 19 nt, Artificial Sequence
  Description of Artificial Sequence: Synthetic oligonucleotide
  Antisense strand to SEQ ID NO: 1659381
uucugagaaaguuauugcc

SEQ ID NO: 1659383 - RNA, 19 nt, Artificial Sequence
  Description of Artificial Sequence: Synthetic oligonucleotide
  Sense strand starting at position 2896 of SEQ ID NO: 1561274
gcaauaacuuucucagaag

SEQ ID NO: 1659384 - RNA, 19 nt, Artificial Sequence
  Description of Artificial Sequence: Synthetic oligonucleotide
  Antisense strand to SEQ ID NO: 1659383
cuucugagaaaguuauugc

SEQ ID NO: 1659385 - RNA, 19 nt, Artificial Sequence
  Description of Artificial Sequence: Synthetic oligonucleotide
  Sense strand starting at position 2899 of SEQ ID NO: 1561274
auaacuuucucagaaggug

SEQ ID NO: 1659386 - RNA, 19 nt, Artificial Sequence
  Description of Artificial Sequence: Synthetic oligonucleotide
  Antisense strand to SEQ ID NO: 1659385
caccuucugagaaaguuau

SEQ ID NO: 1659387 - RNA, 19 nt, Artificial Sequence
  Description of Artificial Sequence: Synthetic oligonucleotide
  Sense strand starting at position 2946 of SEQ ID NO: 1561274
caguuauccuguccgguga

SEQ ID NO: 1659388 - RNA, 19 nt, Artificial Sequence
  Description of Artificial Sequence: Synthetic oligonucleotide
  Antisense strand to SEQ ID NO: 1659387
ucaccggacaggauaacug

SEQ ID NO: 1659389 - RNA, 19 nt, Artificial Sequence
  Description of Artificial Sequence: Synthetic oligonucleotide
  Sense strand starting at position 3346 of SEQ ID NO: 1561274
cacuccaugcugggugaaa

SEQ ID NO: 1659390 - RNA, 19 nt, Artificial Sequence
  Description of Artificial Sequence: Synthetic oligonucleotide
  Antisense strand to SEQ ID NO: 1659389
uuucacccagcauggagug

SEQ ID NO: 1659391 - RNA, 19 nt, Artificial Sequence
  Description of Artificial Sequence: Synthetic oligonucleotide
  Sense strand starting at position 3348 of SEQ ID NO: 1561274
cuccaugcugggugaaaga

SEQ ID NO: 1659392 - RNA, 19 nt, Artificial Sequence
  Description of Artificial Sequence: Synthetic oligonucleotide
  Antisense strand to SEQ ID NO: 1659391
ucuuucacccagcauggag

SEQ ID NO: 1659393 - RNA, 19 nt, Artificial Sequence
  Description of Artificial Sequence: Synthetic oligonucleotide
  Sense strand starting at position 3961 of SEQ ID NO: 1561274
acuacacuccugggcgaua

SEQ ID NO: 1659394 - RNA, 19 nt, Artificial Sequence
  Description of Artificial Sequence: Synthetic oligonucleotide
  Antisense strand to SEQ ID NO: 1659393
uaucgcccaggaguguagu

SEQ ID NO: 1659395 - RNA, 19 nt, Artificial Sequence
  Description of Artificial Sequence: Synthetic oligonucleotide
  Sense strand starting at position 125 of SEQ ID NO: 1561275
aauggacauucgguaguuu

SEQ ID NO: 1659396 - RNA, 19 nt, Artificial Sequence
  Description of Artificial Sequence: Synthetic oligonucleotide
  Antisense strand to SEQ ID NO: 1659395
aaacuaccgaauguccauu

SEQ ID NO: 1659397 - RNA, 19 nt, Artificial Sequence
  Description of Artificial Sequence: Synthetic oligonucleotide
  Sense strand starting at position 129 of SEQ ID NO: 1561275
gacauucgguaguuuccaa

SEQ ID NO: 1659398 - RNA, 19 nt, Artificial Sequence
  Description of Artificial Sequence: Synthetic oligonucleotide
  Antisense strand to SEQ ID NO: 1659397
uuggaaacuaccgaauguc

SEQ ID NO: 1659399 - RNA, 19 nt, Artificial Sequence
  Description of Artificial Sequence: Synthetic oligonucleotide
  Sense strand starting at position 161 of SEQ ID NO: 1561275
cagcuaaugccgcaaauga

SEQ ID NO: 1659400 - RNA, 19 nt, Artificial Sequence
  Description of Artificial Sequence: Synthetic oligonucleotide
  Antisense strand to SEQ ID NO: 1659399
ucauuugcggcauuagcug

SEQ ID NO: 1659401 - RNA, 19 nt, Artificial Sequence
  Description of Artificial Sequence: Synthetic oligonucleotide
  Sense strand starting at position 174 of SEQ ID NO: 1561275
aaaugaguaucuuuguuag

SEQ ID NO: 1659402 - RNA, 19 nt, Artificial Sequence
  Description of Artificial Sequence: Synthetic oligonucleotide
  Antisense strand to SEQ ID NO: 1659401
cuaacaaagauacucauuu

SEQ ID NO: 1659403 - RNA, 19 nt, Artificial Sequence
  Description of Artificial Sequence: Synthetic oligonucleotide
  Sense strand starting at position 186 of SEQ ID NO: 1561275
uuguuagugccucauaaca

SEQ ID NO: 1659404 - RNA, 19 nt, Artificial Sequence
  Description of Artificial Sequence: Synthetic oligonucleotide
  Antisense strand to SEQ ID NO: 1659403
uguuaugaggcacuaacaa

SEQ ID NO: 1659405 - RNA, 19 nt, Artificial Sequence
  Description of Artificial Sequence: Synthetic oligonucleotide
  Sense strand starting at position 636 of SEQ ID NO: 1561275
uuucauagcugggugagau

SEQ ID NO: 1659406 - RNA, 19 nt, Artificial Sequence
  Description of Artificial Sequence: Synthetic oligonucleotide
  Antisense strand to SEQ ID NO: 1659405
aucucacccagcuaugaaa

SEQ ID NO: 1659407 - RNA, 19 nt, Artificial Sequence
  Description of Artificial Sequence: Synthetic oligonucleotide
  Sense strand starting at position 696 of SEQ ID NO: 1561275
ggaacaugucuugaggcca

SEQ ID NO: 1659408 - RNA, 19 nt, Artificial Sequence
  Description of Artificial Sequence: Synthetic oligonucleotide
  Antisense strand to SEQ ID NO: 1659407
uggccucaagacauguucc

SEQ ID NO: 1659409 - RNA, 19 nt, Artificial Sequence
  Description of Artificial Sequence: Synthetic oligonucleotide
  Sense strand starting at position 819 of SEQ ID NO: 1561275
uguggcuugcauuacacau

SEQ ID NO: 1659410 - RNA, 19 nt, Artificial Sequence
  Description of Artificial Sequence: Synthetic oligonucleotide
  Antisense strand to SEQ ID NO: 1659409
auguguaaugcaagccaca

SEQ ID NO: 1659411 - RNA, 19 nt, Artificial Sequence
  Description of Artificial Sequence: Synthetic oligonucleotide
  Sense strand starting at position 950 of SEQ ID NO: 1561275
gggcuuaagcgauacucag

SEQ ID NO: 1659412 - RNA, 19 nt, Artificial Sequence
  Description of Artificial Sequence: Synthetic oligonucleotide
  Antisense strand to SEQ ID NO: 1659411
cugaguaucgcuuaagccc

SEQ ID NO: 1659413 - RNA, 19 nt, Artificial Sequence
  Description of Artificial Sequence: Synthetic oligonucleotide
  Sense strand starting at position 972 of SEQ ID NO: 1561275
cuuaaauagcugggacuau

SEQ ID NO: 1659414 - RNA, 19 nt, Artificial Sequence
  Description of Artificial Sequence: Synthetic oligonucleotide
  Antisense strand to SEQ ID NO: 1659413
auagucccagcuauuuaag

SEQ ID NO: 1659415 - RNA, 19 nt, Artificial Sequence
  Description of Artificial Sequence: Synthetic oligonucleotide
  Sense strand starting at position 1116 of SEQ ID NO: 1561275
ggguauauuucucuuagcu

SEQ ID NO: 1659416 - RNA, 19 nt, Artificial Sequence
  Description of Artificial Sequence: Synthetic oligonucleotide
  Antisense strand to SEQ ID NO: 1659415
agcuaagagaaauauaccc

SEQ ID NO: 1659417 - RNA, 19 nt, Artificial Sequence
  Description of Artificial Sequence: Synthetic oligonucleotide
  Sense strand starting at position 1133 of SEQ ID NO: 1561275
cuaguauugcucuacauug

SEQ ID NO: 1659418 - RNA, 19 nt, Artificial Sequence
  Description of Artificial Sequence: Synthetic oligonucleotide
  Antisense strand to SEQ ID NO: 1659417
caauguagagcaauacuag

SEQ ID NO: 1659419 - RNA, 19 nt, Artificial Sequence
  Description of Artificial Sequence: Synthetic oligonucleotide
  Sense strand starting at position 1135 of SEQ ID NO: 1561275
aguauugcucuacauuguu

SEQ ID NO: 1659420 - RNA, 19 nt, Artificial Sequence
  Description of Artificial Sequence: Synthetic oligonucleotide
  Antisense strand to SEQ ID NO: 1659419
aacaauguagagcaauacu

SEQ ID NO: 1659421 - RNA, 19 nt, Artificial Sequence
  Description of Artificial Sequence: Synthetic oligonucleotide
  Sense strand starting at position 1168 of SEQ ID NO: 1561275
gccugauaucccuacugga

SEQ ID NO: 1659422 - RNA, 19 nt, Artificial Sequence
  Description of Artificial Sequence: Synthetic oligonucleotide
  Antisense strand to SEQ ID NO: 1659421
uccaguagggauaucaggc

SEQ ID NO: 1659423 - RNA, 19 nt, Artificial Sequence
  Description of Artificial Sequence: Synthetic oligonucleotide
  Sense strand starting at position 1259 of SEQ ID NO: 1561275
cauggaauaggugguuaau

SEQ ID NO: 1659424 - RNA, 19 nt, Artificial Sequence
  Description of Artificial Sequence: Synthetic oligonucleotide
  Antisense strand to SEQ ID NO: 1659423
auuaaccaccuauuccaug

SEQ ID NO: 1659425 - RNA, 19 nt, Artificial Sequence
  Description of Artificial Sequence: Synthetic oligonucleotide
  Sense strand starting at position 1305 of SEQ ID NO: 1561275
gugcucucccaggaagaaa

SEQ ID NO: 1659426 - RNA, 19 nt, Artificial Sequence
  Description of Artificial Sequence: Synthetic oligonucleotide
  Antisense strand to SEQ ID NO: 1659425
uuucuuccugggagagcac

SEQ ID NO: 1659427 - RNA, 19 nt, Artificial Sequence
  Description of Artificial Sequence: Synthetic oligonucleotide
  Sense strand starting at position 1350 of SEQ ID NO: 1561275
gugaacaucuuccuagaag

SEQ ID NO: 1659428 - RNA, 19 nt, Artificial Sequence
  Description of Artificial Sequence: Synthetic oligonucleotide
  Antisense strand to SEQ ID NO: 1659427
cuucuaggaagauguucac

SEQ ID NO: 1659429 - RNA, 19 nt, Artificial Sequence
  Description of Artificial Sequence: Synthetic oligonucleotide
  Sense strand starting at position 1408 of SEQ ID NO: 1561275
accagaggaccuugcaauu

SEQ ID NO: 1659430 - RNA, 19 nt, Artificial Sequence
  Description of Artificial Sequence: Synthetic oligonucleotide
  Antisense strand to SEQ ID NO: 1659429
aauugcaagguccucuggu

SEQ ID NO: 1659431 - RNA, 19 nt, Artificial Sequence
  Description of Artificial Sequence: Synthetic oligonucleotide
  Sense strand starting at position 1554 of SEQ ID NO: 1561275
agguguagguacucuacaa

SEQ ID NO: 1659432 - RNA, 19 nt, Artificial Sequence
  Description of Artificial Sequence: Synthetic oligonucleotide
  Antisense strand to SEQ ID NO: 1659431
uuguagaguaccuacaccu

SEQ ID NO: 1659433 - RNA, 19 nt, Artificial Sequence
  Description of Artificial Sequence: Synthetic oligonucleotide
  Sense strand starting at position 1881 of SEQ ID NO: 1561275
cggauguugcgagaggacu

SEQ ID NO: 1659434 - RNA, 19 nt, Artificial Sequence
  Description of Artificial Sequence: Synthetic oligonucleotide
  Antisense strand to SEQ ID NO: 1659433
aguccucucgcaacauccg

SEQ ID NO: 1659435 - RNA, 19 nt, Artificial Sequence
  Description of Artificial Sequence: Synthetic oligonucleotide
  Sense strand starting at position 2221 of SEQ ID NO: 1561275
agagguuccgccgaaugaa

SEQ ID NO: 1659436 - RNA, 19 nt, Artificial Sequence
  Description of Artificial Sequence: Synthetic oligonucleotide
  Antisense strand to SEQ ID NO: 1659435
uucauucggcggaaccucu

SEQ ID NO: 1659437 - RNA, 19 nt, Artificial Sequence
  Description of Artificial Sequence: Synthetic oligonucleotide
  Sense strand starting at position 2307 of SEQ ID NO: 1561275
agcuguagucugcaggaga

SEQ ID NO: 1659438 - RNA, 19 nt, Artificial Sequence
  Description of Artificial Sequence: Synthetic oligonucleotide
  Antisense strand to SEQ ID NO: 1659437
ucuccugcagacuacagcu

SEQ ID NO: 1659439 - RNA, 19 nt, Artificial Sequence
  Description of Artificial Sequence: Synthetic oligonucleotide
  Sense strand starting at position 2357 of SEQ ID NO: 1561275
gcggaagugcucuacagac

SEQ ID NO: 1659440 - RNA, 19 nt, Artificial Sequence
  Description of Artificial Sequence: Synthetic oligonucleotide
  Antisense strand to SEQ ID NO: 1659439
gucuguagagcacuuccgc

SEQ ID NO: 1659441 - RNA, 19 nt, Artificial Sequence
  Description of Artificial Sequence: Synthetic oligonucleotide
  Sense strand starting at position 2984 of SEQ ID NO: 1561275
ggcggagacucuguugaga

SEQ ID NO: 1659442 - RNA, 19 nt, Artificial Sequence
  Description of Artificial Sequence: Synthetic oligonucleotide
  Antisense strand to SEQ ID NO: 1659441
ucucaacagagucuccgcc

SEQ ID NO: 1659443 - RNA, 19 nt, Artificial Sequence
  Description of Artificial Sequence: Synthetic oligonucleotide
  Sense strand starting at position 3037 of SEQ ID NO: 1561275
uuacuacguauuuggguua

SEQ ID NO: 1659444 - RNA, 19 nt, Artificial Sequence
  Description of Artificial Sequence: Synthetic oligonucleotide
  Antisense strand to SEQ ID NO: 1659443
uaacccaaauacguaguaa

SEQ ID NO: 1659445 - RNA, 19 nt, Artificial Sequence
  Description of Artificial Sequence: Synthetic oligonucleotide
  Sense strand starting at position 3042 of SEQ ID NO: 1561275
acguauuuggguuauuguu

SEQ ID NO: 1659446 - RNA, 19 nt, Artificial Sequence
  Description of Artificial Sequence: Synthetic oligonucleotide
  Antisense strand to SEQ ID NO: 1659445
aacaauaacccaaauacgu

SEQ ID NO: 1659447 - RNA, 19 nt, Artificial Sequence
  Description of Artificial Sequence: Synthetic oligonucleotide
  Sense strand starting at position 3133 of SEQ ID NO: 1561275
agaggugaguccuuaguua

SEQ ID NO: 1659448 - RNA, 19 nt, Artificial Sequence
  Description of Artificial Sequence: Synthetic oligonucleotide
  Antisense strand to SEQ ID NO: 1659447
uaacuaaggacucaccucu

SEQ ID NO: 1659449 - RNA, 19 nt, Artificial Sequence
  Description of Artificial Sequence: Synthetic oligonucleotide
  Sense strand starting at position 3172 of SEQ ID NO: 1561275
gcuguuaaccgagauuauu

SEQ ID NO: 1659450 - RNA, 19 nt, Artificial Sequence
  Description of Artificial Sequence: Synthetic oligonucleotide
  Antisense strand to SEQ ID NO: 1659449
aauaaucucgguuaacagc

SEQ ID NO: 1659451 - RNA, 19 nt, Artificial Sequence
  Description of Artificial Sequence: Synthetic oligonucleotide
  Sense strand starting at position 3331 of SEQ ID NO: 1561275
ccacuucgucgaguuguuu

SEQ ID NO: 1659452 - RNA, 19 nt, Artificial Sequence
  Description of Artificial Sequence: Synthetic oligonucleotide
  Antisense strand to SEQ ID NO: 1659451
aaacaacucgacgaagugg

SEQ ID NO: 1659453 - RNA, 19 nt, Artificial Sequence
  Description of Artificial Sequence: Synthetic oligonucleotide
  Sense strand starting at position 3360 of SEQ ID NO: 1561275
gugagaauaccauguguaa

SEQ ID NO: 1659454 - RNA, 19 nt, Artificial Sequence
  Description of Artificial Sequence: Synthetic oligonucleotide
  Antisense strand to SEQ ID NO: 1659453
uuacacaugguauucucac

SEQ ID NO: 1659455 - RNA, 19 nt, Artificial Sequence
  Description of Artificial Sequence: Synthetic oligonucleotide
  Sense strand starting at position 3363 of SEQ ID NO: 1561275
agaauaccauguguaaagu

SEQ ID NO: 1659456 - RNA, 19 nt, Artificial Sequence
  Description of Artificial Sequence: Synthetic oligonucleotide
  Antisense strand to SEQ ID NO: 1659455
acuuuacacaugguauucu

SEQ ID NO: 1659457 - RNA, 19 nt, Artificial Sequence
  Description of Artificial Sequence: Synthetic oligonucleotide
  Sense strand starting at position 3399 of SEQ ID NO: 1561275
gcauauaacgcucaguaaa

SEQ ID NO: 1659458 - RNA, 19 nt, Artificial Sequence
  Description of Artificial Sequence: Synthetic oligonucleotide
  Antisense strand to SEQ ID NO: 1659457
uuuacugagcguuauaugc

SEQ ID NO: 1659459 - RNA, 19 nt, Artificial Sequence
  Description of Artificial Sequence: Synthetic oligonucleotide
  Sense strand starting at position 3401 of SEQ ID NO: 1561275
auauaacgcucaguaaaug

SEQ ID NO: 1659460 - RNA, 19 nt, Artificial Sequence
  Description of Artificial Sequence: Synthetic oligonucleotide
  Antisense strand to SEQ ID NO: 1659459
cauuuacugagcguuauau

SEQ ID NO: 1659461 - RNA, 19 nt, Artificial Sequence
  Description of Artificial Sequence: Synthetic oligonucleotide
  Sense strand starting at position 3412 of SEQ ID NO: 1561275
aguaaaugguaccauuuau

SEQ ID NO: 1659462 - RNA, 19 nt, Artificial Sequence
  Description of Artificial Sequence: Synthetic oligonucleotide
  Antisense strand to SEQ ID NO: 1659461
auaaaugguaccauuuacu

SEQ ID NO: 1659463 - RNA, 19 nt, Artificial Sequence
  Description of Artificial Sequence: Synthetic oligonucleotide
  Sense strand starting at position 3602 of SEQ ID NO: 1561275
aggauuugcugagauugua

SEQ ID NO: 1659464 - RNA, 19 nt, Artificial Sequence
  Description of Artificial Sequence: Synthetic oligonucleotide
  Antisense strand to SEQ ID NO: 1659463
uacaaucucagcaaauccu

SEQ ID NO: 1659465 - RNA, 19 nt, Artificial Sequence
  Description of Artificial Sequence: Synthetic oligonucleotide
  Sense strand starting at position 3774 of SEQ ID NO: 1561275
ccaucuguggaaugguagu

SEQ ID NO: 1659466 - RNA, 19 nt, Artificial Sequence
  Description of Artificial Sequence: Synthetic oligonucleotide
  Antisense strand to SEQ ID NO: 1659465
acuaccauuccacagaugg

SEQ ID NO: 1659467 - RNA, 19 nt, Artificial Sequence
  Description of Artificial Sequence: Synthetic oligonucleotide
  Sense strand starting at position 3785 of SEQ ID NO: 1561275
augguagucauaggacuuu

SEQ ID NO: 1659468 - RNA, 19 nt, Artificial Sequence
  Description of Artificial Sequence: Synthetic oligonucleotide
  Antisense strand to SEQ ID NO: 1659467
aaaguccuaugacuaccau

SEQ ID NO: 1659469 - RNA, 19 nt, Artificial Sequence
  Description of Artificial Sequence: Synthetic oligonucleotide
  Sense strand starting at position 3812 of SEQ ID NO: 1561275
gauuguuuggaugguucca

SEQ ID NO: 1659470 - RNA, 19 nt, Artificial Sequence
  Description of Artificial Sequence: Synthetic oligonucleotide
  Antisense strand to SEQ ID NO: 1659469
uggaaccauccaaacaauc

SEQ ID NO: 1659471 - RNA, 19 nt, Artificial Sequence
  Description of Artificial Sequence: Synthetic oligonucleotide
  Sense strand starting at position 3840 of SEQ ID NO: 1561275
ucauguuuagugcuuugca

SEQ ID NO: 1659472 - RNA, 19 nt, Artificial Sequence
  Description of Artificial Sequence: Synthetic oligonucleotide
  Antisense strand to SEQ ID NO: 1659471
ugcaaagcacuaaacauga

SEQ ID NO: 1659473 - RNA, 19 nt, Artificial Sequence
  Description of Artificial Sequence: Synthetic oligonucleotide
  Sense strand starting at position 3872 of SEQ ID NO: 1561275
acaguaagugcuuauuaaa

SEQ ID NO: 1659474 - RNA, 19 nt, Artificial Sequence
  Description of Artificial Sequence: Synthetic oligonucleotide
  Antisense strand to SEQ ID NO: 1659473
uuuaauaagcacuuacugu

SEQ ID NO: 1659475 - RNA, 19 nt, Artificial Sequence
  Description of Artificial Sequence: Synthetic oligonucleotide
  Sense strand starting at position 445 of SEQ ID NO: 1561276
ggcagagguuucgaggaaa

SEQ ID NO: 1659476 - RNA, 19 nt, Artificial Sequence
  Description of Artificial Sequence: Synthetic oligonucleotide
  Antisense strand to SEQ ID NO: 1659475
uuuccucgaaaccucugcc

SEQ ID NO: 1659477 - RNA, 19 nt, Artificial Sequence
  Description of Artificial Sequence: Synthetic oligonucleotide
  Sense strand starting at position 478 of SEQ ID NO: 1561276
cucugacaucugcauguga

SEQ ID NO: 1659478 - RNA, 19 nt, Artificial Sequence
  Description of Artificial Sequence: Synthetic oligonucleotide
  Antisense strand to SEQ ID NO: 1659477
ucacaugcagaugucagag

SEQ ID NO: 1659479 - RNA, 19 nt, Artificial Sequence
  Description of Artificial Sequence: Synthetic oligonucleotide
  Sense strand starting at position 480 of SEQ ID NO: 1561276
cugacaucugcaugugagu

SEQ ID NO: 1659480 - RNA, 19 nt, Artificial Sequence
  Description of Artificial Sequence: Synthetic oligonucleotide
  Antisense strand to SEQ ID NO: 1659479
acucacaugcagaugucag

SEQ ID NO: 1659481 - RNA, 19 nt, Artificial Sequence
  Description of Artificial Sequence: Synthetic oligonucleotide
  Sense strand starting at position 486 of SEQ ID NO: 1561276
ucugcaugugagugcaaua

SEQ ID NO: 1659482 - RNA, 19 nt, Artificial Sequence
  Description of Artificial Sequence: Synthetic oligonucleotide
  Antisense strand to SEQ ID NO: 1659481
uauugcacucacaugcaga

SEQ ID NO: 1659483 - RNA, 19 nt, Artificial Sequence
  Description of Artificial Sequence: Synthetic oligonucleotide
  Sense strand starting at position 519 of SEQ ID NO: 1561276
augaaacgcuacuuauuga

SEQ ID NO: 1659484 - RNA, 19 nt, Artificial Sequence
  Description of Artificial Sequence: Synthetic oligonucleotide
  Antisense strand to SEQ ID NO: 1659483
ucaauaaguagcguuucau

SEQ ID NO: 1659485 - RNA, 19 nt, Artificial Sequence
  Description of Artificial Sequence: Synthetic oligonucleotide
  Sense strand starting at position 524 of SEQ ID NO: 1561276
acgcuacuuauugagaaug

SEQ ID NO: 1659486 - RNA, 19 nt, Artificial Sequence
  Description of Artificial Sequence: Synthetic oligonucleotide
  Antisense strand to SEQ ID NO: 1659485
cauucucaauaaguagcgu

SEQ ID NO: 1659487 - RNA, 19 nt, Artificial Sequence
  Description of Artificial Sequence: Synthetic oligonucleotide
  Sense strand starting at position 526 of SEQ ID NO: 1561276
gcuacuuauugagaauguu

SEQ ID NO: 1659488 - RNA, 19 nt, Artificial Sequence
  Description of Artificial Sequence: Synthetic oligonucleotide
  Antisense strand to SEQ ID NO: 1659487
aacauucucaauaaguagc

SEQ ID NO: 1659489 - RNA, 19 nt, Artificial Sequence
  Description of Artificial Sequence: Synthetic oligonucleotide
  Sense strand starting at position 529 of SEQ ID NO: 1561276
acuuauugagaauguucuu

SEQ ID NO: 1659490 - RNA, 19 nt, Artificial Sequence
  Description of Artificial Sequence: Synthetic oligonucleotide
  Antisense strand to SEQ ID NO: 1659489
aagaacauucucaauaagu

SEQ ID NO: 1659491 - RNA, 19 nt, Artificial Sequence
  Description of Artificial Sequence: Synthetic oligonucleotide
  Sense strand starting at position 535 of SEQ ID NO: 1561276
ugagaauguucuuuauugg

SEQ ID NO: 1659492 - RNA, 19 nt, Artificial Sequence
  Description of Artificial Sequence: Synthetic oligonucleotide
  Antisense strand to SEQ ID NO: 1659491
ccaauaaagaacauucuca

SEQ ID NO: 1659493 - RNA, 19 nt, Artificial Sequence
  Description of Artificial Sequence: Synthetic oligonucleotide
  Sense strand starting at position 538 of SEQ ID NO: 1561276
gaauguucuuuauuggguu

SEQ ID NO: 1659494 - RNA, 19 nt, Artificial Sequence
  Description of Artificial Sequence: Synthetic oligonucleotide
  Antisense strand to SEQ ID NO: 1659493
aacccaauaaagaacauuc

SEQ ID NO: 1659495 - RNA, 19 nt, Artificial Sequence
  Description of Artificial Sequence: Synthetic oligonucleotide
  Sense strand starting at position 1481 of SEQ ID NO: 1561276
cugaccuuugcccacagau

SEQ ID NO: 1659496 - RNA, 19 nt, Artificial Sequence
  Description of Artificial Sequence: Synthetic oligonucleotide
  Antisense strand to SEQ ID NO: 1659495
aucugugggcaaaggucag

SEQ ID NO: 1659497 - RNA, 19 nt, Artificial Sequence
  Description of Artificial Sequence: Synthetic oligonucleotide
  Sense strand starting at position 1483 of SEQ ID NO: 1561276
gaccuuugcccacagaugu

SEQ ID NO: 1659498 - RNA, 19 nt, Artificial Sequence
  Description of Artificial Sequence: Synthetic oligonucleotide
  Antisense strand to SEQ ID NO: 1659497
acaucugugggcaaagguc

SEQ ID NO: 1659499 - RNA, 19 nt, Artificial Sequence
  Description of Artificial Sequence: Synthetic oligonucleotide
  Sense strand starting at position 1639 of SEQ ID NO: 1561276
gguucugaccuuggagaga

SEQ ID NO: 1659500 - RNA, 19 nt, Artificial Sequence
  Description of Artificial Sequence: Synthetic oligonucleotide
  Antisense strand to SEQ ID NO: 1659499
ucucuccaaggucagaacc

SEQ ID NO: 1659501 - RNA, 19 nt, Artificial Sequence
  Description of Artificial Sequence: Synthetic oligonucleotide
  Sense strand starting at position 2214 of SEQ ID NO: 1561276
ggccaacagguuuagugaa

SEQ ID NO: 1659502 - RNA, 19 nt, Artificial Sequence
  Description of Artificial Sequence: Synthetic oligonucleotide
  Antisense strand to SEQ ID NO: 1659501
uucacuaaaccuguuggcc

SEQ ID NO: 1659503 - RNA, 19 nt, Artificial Sequence
  Description of Artificial Sequence: Synthetic oligonucleotide
  Sense strand starting at position 2376 of SEQ ID NO: 1561276
cuuugcauucugggaacca

SEQ ID NO: 1659504 - RNA, 19 nt, Artificial Sequence
  Description of Artificial Sequence: Synthetic oligonucleotide
  Antisense strand to SEQ ID NO: 1659503
ugguucccagaaugcaaag

SEQ ID NO: 1659505 - RNA, 19 nt, Artificial Sequence
  Description of Artificial Sequence: Synthetic oligonucleotide
  Sense strand starting at position 2451 of SEQ ID NO: 1561276
gcuccugucacagggcaau

SEQ ID NO: 1659506 - RNA, 19 nt, Artificial Sequence
  Description of Artificial Sequence: Synthetic oligonucleotide
  Antisense strand to SEQ ID NO: 1659505
auugcccugugacaggagc

SEQ ID NO: 1659507 - RNA, 19 nt, Artificial Sequence
  Description of Artificial Sequence: Synthetic oligonucleotide
  Sense strand starting at position 2614 of SEQ ID NO: 1561276
ggaaauaucugucacaacc

SEQ ID NO: 1659508 - RNA, 19 nt, Artificial Sequence
  Description of Artificial Sequence: Synthetic oligonucleotide
  Antisense strand to SEQ ID NO: 1659507
gguugugacagauauuucc

SEQ ID NO: 1659509 - RNA, 19 nt, Artificial Sequence
  Description of Artificial Sequence: Synthetic oligonucleotide
  Sense strand starting at position 2721 of SEQ ID NO: 1561276
auugaagaagggugucauc

SEQ ID NO: 1659510 - RNA, 19 nt, Artificial Sequence
  Description of Artificial Sequence: Synthetic oligonucleotide
  Antisense strand to SEQ ID NO: 1659509
gaugacacccuucuucaau

SEQ ID NO: 1659511 - RNA, 19 nt, Artificial Sequence
  Description of Artificial Sequence: Synthetic oligonucleotide
  Sense strand starting at position 2724 of SEQ ID NO: 1561276
gaagaagggugucaucuuu

SEQ ID NO: 1659512 - RNA, 19 nt, Artificial Sequence
  Description of Artificial Sequence: Synthetic oligonucleotide
  Antisense strand to SEQ ID NO: 1659511
aaagaugacacccuucuuc

SEQ ID NO: 1659513 - RNA, 19 nt, Artificial Sequence
  Description of Artificial Sequence: Synthetic oligonucleotide
  Sense strand starting at position 2730 of SEQ ID NO: 1561276
gggugucaucuuuggauga

SEQ ID NO: 1659514 - RNA, 19 nt, Artificial Sequence
  Description of Artificial Sequence: Synthetic oligonucleotide
  Antisense strand to SEQ ID NO: 1659513
ucauccaaagaugacaccc

SEQ ID NO: 1659515 - RNA, 19 nt, Artificial Sequence
  Description of Artificial Sequence: Synthetic oligonucleotide
  Sense strand starting at position 2731 of SEQ ID NO: 1561276
ggugucaucuuuggaugau

SEQ ID NO: 1659516 - RNA, 19 nt, Artificial Sequence
  Description of Artificial Sequence: Synthetic oligonucleotide
  Antisense strand to SEQ ID NO: 1659515
aucauccaaagaugacacc

SEQ ID NO: 1659517 - RNA, 19 nt, Artificial Sequence
  Description of Artificial Sequence: Synthetic oligonucleotide
  Sense strand starting at position 2732 of SEQ ID NO: 1561276
gugucaucuuuggaugaua

SEQ ID NO: 1659518 - RNA, 19 nt, Artificial Sequence
  Description of Artificial Sequence: Synthetic oligonucleotide
  Antisense strand to SEQ ID NO: 1659517
uaucauccaaagaugacac

SEQ ID NO: 1659519 - RNA, 19 nt, Artificial Sequence
  Description of Artificial Sequence: Synthetic oligonucleotide
  Sense strand starting at position 2734 of SEQ ID NO: 1561276
gucaucuuuggaugauaaa

SEQ ID NO: 1659520 - RNA, 19 nt, Artificial Sequence
  Description of Artificial Sequence: Synthetic oligonucleotide
  Antisense strand to SEQ ID NO: 1659519
uuuaucauccaaagaugac

SEQ ID NO: 1659521 - RNA, 19 nt, Artificial Sequence
  Description of Artificial Sequence: Synthetic oligonucleotide
  Sense strand starting at position 3104 of SEQ ID NO: 1561276
auuguugugaucuaugaug

SEQ ID NO: 1659522 - RNA, 19 nt, Artificial Sequence
  Description of Artificial Sequence: Synthetic oligonucleotide
  Antisense strand to SEQ ID NO: 1659521
caucauagaucacaacaau

SEQ ID NO: 1659523 - RNA, 19 nt, Artificial Sequence
  Description of Artificial Sequence: Synthetic oligonucleotide
  Sense strand starting at position 3106 of SEQ ID NO: 1561276
uguugugaucuaugaugcu

SEQ ID NO: 1659524 - RNA, 19 nt, Artificial Sequence
  Description of Artificial Sequence: Synthetic oligonucleotide
  Antisense strand to SEQ ID NO: 1659523
agcaucauagaucacaaca

SEQ ID NO: 1659525 - RNA, 19 nt, Artificial Sequence
  Description of Artificial Sequence: Synthetic oligonucleotide
  Sense strand starting at position 3109 of SEQ ID NO: 1561276
ugugaucuaugaugcuacu

SEQ ID NO: 1659526 - RNA, 19 nt, Artificial Sequence
  Description of Artificial Sequence: Synthetic oligonucleotide
  Antisense strand to SEQ ID NO: 1659525
aguagcaucauagaucaca

SEQ ID NO: 1659527 - RNA, 19 nt, Artificial Sequence
  Description of Artificial Sequence: Synthetic oligonucleotide
  Sense strand starting at position 3305 of SEQ ID NO: 1561276
aggucuccuugguacacau

SEQ ID NO: 1659528 - RNA, 19 nt, Artificial Sequence
  Description of Artificial Sequence: Synthetic oligonucleotide
  Antisense strand to SEQ ID NO: 1659527
auguguaccaaggagaccu

SEQ ID NO: 1659529 - RNA, 19 nt, Artificial Sequence
  Description of Artificial Sequence: Synthetic oligonucleotide
  Sense strand starting at position 3397 of SEQ ID NO: 1561276
cugccugucucagacacuu

SEQ ID NO: 1659530 - RNA, 19 nt, Artificial Sequence
  Description of Artificial Sequence: Synthetic oligonucleotide
  Antisense strand to SEQ ID NO: 1659529
aagugucugagacaggcag

SEQ ID NO: 1659531 - RNA, 19 nt, Artificial Sequence
  Description of Artificial Sequence: Synthetic oligonucleotide
  Sense strand starting at position 3417 of SEQ ID NO: 1561276
agugacaucuacccugaga

SEQ ID NO: 1659532 - RNA, 19 nt, Artificial Sequence
  Description of Artificial Sequence: Synthetic oligonucleotide
  Antisense strand to SEQ ID NO: 1659531
ucucaggguagaugucacu

SEQ ID NO: 1659533 - RNA, 19 nt, Artificial Sequence
  Description of Artificial Sequence: Synthetic oligonucleotide
  Sense strand starting at position 3646 of SEQ ID NO: 1561276
uuuaacgucccaggaaauu

SEQ ID NO: 1659534 - RNA, 19 nt, Artificial Sequence
  Description of Artificial Sequence: Synthetic oligonucleotide
  Antisense strand to SEQ ID NO: 1659533
aauuuccugggacguuaaa

SEQ ID NO: 1659535 - RNA, 19 nt, Artificial Sequence
  Description of Artificial Sequence: Synthetic oligonucleotide
  Sense strand starting at position 456 of SEQ ID NO: 1561277
aagggaaucugccucaguu

SEQ ID NO: 1659536 - RNA, 19 nt, Artificial Sequence
  Description of Artificial Sequence: Synthetic oligonucleotide
  Antisense strand to SEQ ID NO: 1659535
aacugaggcagauucccuu

SEQ ID NO: 1659537 - RNA, 19 nt, Artificial Sequence
  Description of Artificial Sequence: Synthetic oligonucleotide
  Sense strand starting at position 659 of SEQ ID NO: 1561277
ucaguuuacccauauugac

SEQ ID NO: 1659538 - RNA, 19 nt, Artificial Sequence
  Description of Artificial Sequence: Synthetic oligonucleotide
  Antisense strand to SEQ ID NO: 1659537
gucaauauggguaaacuga

SEQ ID NO: 1659539 - RNA, 19 nt, Artificial Sequence
  Description of Artificial Sequence: Synthetic oligonucleotide
  Sense strand starting at position 815 of SEQ ID NO: 1561277
ucguuuccucggcaagaau

SEQ ID NO: 1659540 - RNA, 19 nt, Artificial Sequence
  Description of Artificial Sequence: Synthetic oligonucleotide
  Antisense strand to SEQ ID NO: 1659539
auucuugccgaggaaacga

SEQ ID NO: 1659541 - RNA, 19 nt, Artificial Sequence
  Description of Artificial Sequence: Synthetic oligonucleotide
  Sense strand starting at position 844 of SEQ ID NO: 1561277
uguacacucugauccuaua

SEQ ID NO: 1659542 - RNA, 19 nt, Artificial Sequence
  Description of Artificial Sequence: Synthetic oligonucleotide
  Antisense strand to SEQ ID NO: 1659541
uauaggaucagaguguaca

SEQ ID NO: 1659543 - RNA, 19 nt, Artificial Sequence
  Description of Artificial Sequence: Synthetic oligonucleotide
  Sense strand starting at position 902 of SEQ ID NO: 1561277
uccauuggguugucccaua

SEQ ID NO: 1659544 - RNA, 19 nt, Artificial Sequence
  Description of Artificial Sequence: Synthetic oligonucleotide
  Antisense strand to SEQ ID NO: 1659543
uaugggacaacccaaugga

SEQ ID NO: 1659545 - RNA, 19 nt, Artificial Sequence
  Description of Artificial Sequence: Synthetic oligonucleotide
  Sense strand starting at position 907 of SEQ ID NO: 1561277
uggguugucccauaccaau

SEQ ID NO: 1659546 - RNA, 19 nt, Artificial Sequence
  Description of Artificial Sequence: Synthetic oligonucleotide
  Antisense strand to SEQ ID NO: 1659545
auugguaugggacaaccca

SEQ ID NO: 1659547 - RNA, 19 nt, Artificial Sequence
  Description of Artificial Sequence: Synthetic oligonucleotide
  Sense strand starting at position 975 of SEQ ID NO: 1561277
aggguucuccagcauuaac

SEQ ID NO: 1659548 - RNA, 19 nt, Artificial Sequence
  Description of Artificial Sequence: Synthetic oligonucleotide
  Antisense strand to SEQ ID NO: 1659547
guuaaugcuggagaacccu

SEQ ID NO: 1659549 - RNA, 19 nt, Artificial Sequence
  Description of Artificial Sequence: Synthetic oligonucleotide
  Sense strand starting at position 1115 of SEQ ID NO: 1561277
ccaagauugcucuaguccu

SEQ ID NO: 1659550 - RNA, 19 nt, Artificial Sequence
  Description of Artificial Sequence: Synthetic oligonucleotide
  Antisense strand to SEQ ID NO: 1659549
aggacuagagcaaucuugg

SEQ ID NO: 1659551 - RNA, 19 nt, Artificial Sequence
  Description of Artificial Sequence: Synthetic oligonucleotide
  Sense strand starting at position 1126 of SEQ ID NO: 1561277
cuaguccucgggcgaaaga

SEQ ID NO: 1659552 - RNA, 19 nt, Artificial Sequence
  Description of Artificial Sequence: Synthetic oligonucleotide
  Antisense strand to SEQ ID NO: 1659551
ucuuucgcccgaggacuag

SEQ ID NO: 1659553 - RNA, 19 nt, Artificial Sequence
  Description of Artificial Sequence: Synthetic oligonucleotide
  Sense strand starting at position 1153 of SEQ ID NO: 1561277
gggcuccugguccagaaau

SEQ ID NO: 1659554 - RNA, 19 nt, Artificial Sequence
  Description of Artificial Sequence: Synthetic oligonucleotide
  Antisense strand to SEQ ID NO: 1659553
auuucuggaccaggagccc

SEQ ID NO: 1659555 - RNA, 19 nt, Artificial Sequence
  Description of Artificial Sequence: Synthetic oligonucleotide
  Sense strand starting at position 1155 of SEQ ID NO: 1561277
gcuccugguccagaaauga

SEQ ID NO: 1659556 - RNA, 19 nt, Artificial Sequence
  Description of Artificial Sequence: Synthetic oligonucleotide
  Antisense strand to SEQ ID NO: 1659555
ucauuucuggaccaggagc

SEQ ID NO: 1659557 - RNA, 19 nt, Artificial Sequence
  Description of Artificial Sequence: Synthetic oligonucleotide
  Sense strand starting at position 1191 of SEQ ID NO: 1561277
gguuguccucucuaccuau

SEQ ID NO: 1659558 - RNA, 19 nt, Artificial Sequence
  Description of Artificial Sequence: Synthetic oligonucleotide
  Antisense strand to SEQ ID NO: 1659557
auagguagagaggacaacc

SEQ ID NO: 1659559 - RNA, 19 nt, Artificial Sequence
  Description of Artificial Sequence: Synthetic oligonucleotide
  Sense strand starting at position 1985 of SEQ ID NO: 1561277
gggacauugucccuuuaaa

SEQ ID NO: 1659560 - RNA, 19 nt, Artificial Sequence
  Description of Artificial Sequence: Synthetic oligonucleotide
  Antisense strand to SEQ ID NO: 1659559
uuuaaagggacaauguccc

SEQ ID NO: 1659561 - RNA, 19 nt, Artificial Sequence
  Description of Artificial Sequence: Synthetic oligonucleotide
  Sense strand starting at position 2352 of SEQ ID NO: 1561277
gggucauugaugggucauu

SEQ ID NO: 1659562 - RNA, 19 nt, Artificial Sequence
  Description of Artificial Sequence: Synthetic oligonucleotide
  Antisense strand to SEQ ID NO: 1659561
aaugacccaucaaugaccc

SEQ ID NO: 1659563 - RNA, 19 nt, Artificial Sequence
  Description of Artificial Sequence: Synthetic oligonucleotide
  Sense strand starting at position 2357 of SEQ ID NO: 1561277
auugaugggucauugauag

SEQ ID NO: 1659564 - RNA, 19 nt, Artificial Sequence
  Description of Artificial Sequence: Synthetic oligonucleotide
  Antisense strand to SEQ ID NO: 1659563
cuaucaaugacccaucaau

SEQ ID NO: 1659565 - RNA, 19 nt, Artificial Sequence
  Description of Artificial Sequence: Synthetic oligonucleotide
  Sense strand starting at position 2363 of SEQ ID NO: 1561277
gggucauugauaggucauu

SEQ ID NO: 1659566 - RNA, 19 nt, Artificial Sequence
  Description of Artificial Sequence: Synthetic oligonucleotide
  Antisense strand to SEQ ID NO: 1659565
aaugaccuaucaaugaccc

SEQ ID NO: 1659567 - RNA, 19 nt, Artificial Sequence
  Description of Artificial Sequence: Synthetic oligonucleotide
  Sense strand starting at position 2369 of SEQ ID NO: 1561277
uugauaggucauugaagac

SEQ ID NO: 1659568 - RNA, 19 nt, Artificial Sequence
  Description of Artificial Sequence: Synthetic oligonucleotide
  Antisense strand to SEQ ID NO: 1659567
gucuucaaugaccuaucaa

SEQ ID NO: 1659569 - RNA, 19 nt, Artificial Sequence
  Description of Artificial Sequence: Synthetic oligonucleotide
  Sense strand starting at position 2492 of SEQ ID NO: 1561277
ccuccaugucccuagaguu

SEQ ID NO: 1659570 - RNA, 19 nt, Artificial Sequence
  Description of Artificial Sequence: Synthetic oligonucleotide
  Antisense strand to SEQ ID NO: 1659569
aacucuagggacauggagg

SEQ ID NO: 1659571 - RNA, 19 nt, Artificial Sequence
  Description of Artificial Sequence: Synthetic oligonucleotide
  Sense strand starting at position 2545 of SEQ ID NO: 1561277
cccaguucccaggaucaca

SEQ ID NO: 1659572 - RNA, 19 nt, Artificial Sequence
  Description of Artificial Sequence: Synthetic oligonucleotide
  Antisense strand to SEQ ID NO: 1659571
ugugauccugggaacuggg

SEQ ID NO: 1659573 - RNA, 19 nt, Artificial Sequence
  Description of Artificial Sequence: Synthetic oligonucleotide
  Sense strand starting at position 2598 of SEQ ID NO: 1561277
gccuguugucuugucuuau

SEQ ID NO: 1659574 - RNA, 19 nt, Artificial Sequence
  Description of Artificial Sequence: Synthetic oligonucleotide
  Antisense strand to SEQ ID NO: 1659573
auaagacaagacaacaggc

SEQ ID NO: 1659575 - RNA, 19 nt, Artificial Sequence
  Description of Artificial Sequence: Synthetic oligonucleotide
  Sense strand starting at position 2604 of SEQ ID NO: 1561277
ugucuugucuuauccacca

SEQ ID NO: 1659576 - RNA, 19 nt, Artificial Sequence
  Description of Artificial Sequence: Synthetic oligonucleotide
  Antisense strand to SEQ ID NO: 1659575
ugguggauaagacaagaca

SEQ ID NO: 1659577 - RNA, 19 nt, Artificial Sequence
  Description of Artificial Sequence: Synthetic oligonucleotide
  Sense strand starting at position 2609 of SEQ ID NO: 1561277
ugucuuauccaccauguau

SEQ ID NO: 1659578 - RNA, 19 nt, Artificial Sequence
  Description of Artificial Sequence: Synthetic oligonucleotide
  Antisense strand to SEQ ID NO: 1659577
auacaugguggauaagaca

SEQ ID NO: 1659579 - RNA, 19 nt, Artificial Sequence
  Description of Artificial Sequence: Synthetic oligonucleotide
  Sense strand starting at position 2616 of SEQ ID NO: 1561277
uccaccauguauccagaua

SEQ ID NO: 1659580 - RNA, 19 nt, Artificial Sequence
  Description of Artificial Sequence: Synthetic oligonucleotide
  Antisense strand to SEQ ID NO: 1659579
uaucuggauacauggugga

SEQ ID NO: 1659581 - RNA, 19 nt, Artificial Sequence
  Description of Artificial Sequence: Synthetic oligonucleotide
  Sense strand starting at position 2892 of SEQ ID NO: 1561277
ccaccaguuugucuguuga

SEQ ID NO: 1659582 - RNA, 19 nt, Artificial Sequence
  Description of Artificial Sequence: Synthetic oligonucleotide
  Antisense strand to SEQ ID NO: 1659581
ucaacagacaaacuggugg

SEQ ID NO: 1659583 - RNA, 19 nt, Artificial Sequence
  Description of Artificial Sequence: Synthetic oligonucleotide
  Sense strand starting at position 2894 of SEQ ID NO: 1561277
accaguuugucuguugauu

SEQ ID NO: 1659584 - RNA, 19 nt, Artificial Sequence
  Description of Artificial Sequence: Synthetic oligonucleotide
  Antisense strand to SEQ ID NO: 1659583
aaucaacagacaaacuggu

SEQ ID NO: 1659585 - RNA, 19 nt, Artificial Sequence
  Description of Artificial Sequence: Synthetic oligonucleotide
  Sense strand starting at position 3334 of SEQ ID NO: 1561277
cuaggaagaugcucucacu

SEQ ID NO: 1659586 - RNA, 19 nt, Artificial Sequence
  Description of Artificial Sequence: Synthetic oligonucleotide
  Antisense strand to SEQ ID NO: 1659585
agugagagcaucuuccuag

SEQ ID NO: 1659587 - RNA, 19 nt, Artificial Sequence
  Description of Artificial Sequence: Synthetic oligonucleotide
  Sense strand starting at position 3342 of SEQ ID NO: 1561277
augcucucacugugggauu

SEQ ID NO: 1659588 - RNA, 19 nt, Artificial Sequence
  Description of Artificial Sequence: Synthetic oligonucleotide
  Antisense strand to SEQ ID NO: 1659587
aaucccacagugagagcau

SEQ ID NO: 1659589 - RNA, 19 nt, Artificial Sequence
  Description of Artificial Sequence: Synthetic oligonucleotide
  Sense strand starting at position 3400 of SEQ ID NO: 1561277
gcaggugcugccuauaaca

SEQ ID NO: 1659590 - RNA, 19 nt, Artificial Sequence
  Description of Artificial Sequence: Synthetic oligonucleotide
  Antisense strand to SEQ ID NO: 1659589
uguuauaggcagcaccugc

SEQ ID NO: 1659591 - RNA, 19 nt, Artificial Sequence
  Description of Artificial Sequence: Synthetic oligonucleotide
  Sense strand starting at position 3402 of SEQ ID NO: 1561277
aggugcugccuauaacaau

SEQ ID NO: 1659592 - RNA, 19 nt, Artificial Sequence
  Description of Artificial Sequence: Synthetic oligonucleotide
  Antisense strand to SEQ ID NO: 1659591
auuguuauaggcagcaccu

SEQ ID NO: 1659593 - RNA, 19 nt, Artificial Sequence
  Description of Artificial Sequence: Synthetic oligonucleotide
  Sense strand starting at position 3408 of SEQ ID NO: 1561277
ugccuauaacaauggugaa

SEQ ID NO: 1659594 - RNA, 19 nt, Artificial Sequence
  Description of Artificial Sequence: Synthetic oligonucleotide
  Antisense strand to SEQ ID NO: 1659593
uucaccauuguuauaggca

SEQ ID NO: 1659595 - RNA, 19 nt, Artificial Sequence
  Description of Artificial Sequence: Synthetic oligonucleotide
  Sense strand starting at position 3435 of SEQ ID NO: 1561277
aucgaaugccuuuaacuau

SEQ ID NO: 1659596 - RNA, 19 nt, Artificial Sequence
  Description of Artificial Sequence: Synthetic oligonucleotide
  Antisense strand to SEQ ID NO: 1659595
auaguuaaaggcauucgau

SEQ ID NO: 1659597 - RNA, 19 nt, Artificial Sequence
  Description of Artificial Sequence: Synthetic oligonucleotide
  Sense strand starting at position 3471 of SEQ ID NO: 1561277
agggaacuuuacguccauu

SEQ ID NO: 1659598 - RNA, 19 nt, Artificial Sequence
  Description of Artificial Sequence: Synthetic oligonucleotide
  Antisense strand to SEQ ID NO: 1659597
aauggacguaaaguucccu

SEQ ID NO: 1659599 - RNA, 19 nt, Artificial Sequence
  Description of Artificial Sequence: Synthetic oligonucleotide
  Sense strand starting at position 3545 of SEQ ID NO: 1561277
gugagaacuuguguacaug

SEQ ID NO: 1659600 - RNA, 19 nt, Artificial Sequence
  Description of Artificial Sequence: Synthetic oligonucleotide
  Antisense strand to SEQ ID NO: 1659599
cauguacacaaguucucac

SEQ ID NO: 1659601 - RNA, 19 nt, Artificial Sequence
  Description of Artificial Sequence: Synthetic oligonucleotide
  Sense strand starting at position 3562 of SEQ ID NO: 1561277
uggcccucuccaugagacu

SEQ ID NO: 1659602 - RNA, 19 nt, Artificial Sequence
  Description of Artificial Sequence: Synthetic oligonucleotide
  Antisense strand to SEQ ID NO: 1659601
agucucauggagagggcca

SEQ ID NO: 1659603 - RNA, 19 nt, Artificial Sequence
  Description of Artificial Sequence: Synthetic oligonucleotide
  Sense strand starting at position 3563 of SEQ ID NO: 1561277
ggcccucuccaugagacuu

SEQ ID NO: 1659604 - RNA, 19 nt, Artificial Sequence
  Description of Artificial Sequence: Synthetic oligonucleotide
  Antisense strand to SEQ ID NO: 1659603
aagucucauggagagggcc

SEQ ID NO: 1659605 - RNA, 19 nt, Artificial Sequence
  Description of Artificial Sequence: Synthetic oligonucleotide
  Sense strand starting at position 3643 of SEQ ID NO: 1561277
gcaauucuuagugggcaaa

SEQ ID NO: 1659606 - RNA, 19 nt, Artificial Sequence
  Description of Artificial Sequence: Synthetic oligonucleotide
  Antisense strand to SEQ ID NO: 1659605
uuugcccacuaagaauugc

SEQ ID NO: 1659607 - RNA, 19 nt, Artificial Sequence
  Description of Artificial Sequence: Synthetic oligonucleotide
  Sense strand starting at position 3645 of SEQ ID NO: 1561277
aauucuuagugggcaaaga

SEQ ID NO: 1659608 - RNA, 19 nt, Artificial Sequence
  Description of Artificial Sequence: Synthetic oligonucleotide
  Antisense strand to SEQ ID NO: 1659607
ucuuugcccacuaagaauu

SEQ ID NO: 1659609 - RNA, 19 nt, Artificial Sequence
  Description of Artificial Sequence: Synthetic oligonucleotide
  Sense strand starting at position 3849 of SEQ ID NO: 1561277
uggugucuccauugaggca

SEQ ID NO: 1659610 - RNA, 19 nt, Artificial Sequence
  Description of Artificial Sequence: Synthetic oligonucleotide
  Antisense strand to SEQ ID NO: 1659609
ugccucaauggagacacca

SEQ ID NO: 1659611 - RNA, 19 nt, Artificial Sequence
  Description of Artificial Sequence: Synthetic oligonucleotide
  Sense strand starting at position 3951 of SEQ ID NO: 1561277
gagccugaguucucuccau

SEQ ID NO: 1659612 - RNA, 19 nt, Artificial Sequence
  Description of Artificial Sequence: Synthetic oligonucleotide
  Antisense strand to SEQ ID NO: 1659611
auggagagaacucaggcuc

SEQ ID NO: 1659613 - RNA, 19 nt, Artificial Sequence
  Description of Artificial Sequence: Synthetic oligonucleotide
  Sense strand starting at position 3955 of SEQ ID NO: 1561277
cugaguucucuccaucuca

SEQ ID NO: 1659614 - RNA, 19 nt, Artificial Sequence
  Description of Artificial Sequence: Synthetic oligonucleotide
  Antisense strand to SEQ ID NO: 1659613
ugagauggagagaacucag

SEQ ID NO: 1659615 - RNA, 19 nt, Artificial Sequence
  Description of Artificial Sequence: Synthetic oligonucleotide
  Sense strand starting at position 162 of SEQ ID NO: 1561278
aagccaggugcuuaauaca

SEQ ID NO: 1659616 - RNA, 19 nt, Artificial Sequence
  Description of Artificial Sequence: Synthetic oligonucleotide
  Antisense strand to SEQ ID NO: 1659615
uguauuaagcaccuggcuu

SEQ ID NO: 1659617 - RNA, 19 nt, Artificial Sequence
  Description of Artificial Sequence: Synthetic oligonucleotide
  Sense strand starting at position 165 of SEQ ID NO: 1561278
ccaggugcuuaauacagaa

SEQ ID NO: 1659618 - RNA, 19 nt, Artificial Sequence
  Description of Artificial Sequence: Synthetic oligonucleotide
  Antisense strand to SEQ ID NO: 1659617
uucuguauuaagcaccugg

SEQ ID NO: 1659619 - RNA, 19 nt, Artificial Sequence
  Description of Artificial Sequence: Synthetic oligonucleotide
  Sense strand starting at position 344 of SEQ ID NO: 1561278
aggauuccuuuaggaaaca

SEQ ID NO: 1659620 - RNA, 19 nt, Artificial Sequence
  Description of Artificial Sequence: Synthetic oligonucleotide
  Antisense strand to SEQ ID NO: 1659619
uguuuccuaaaggaauccu

SEQ ID NO: 1659621 - RNA, 19 nt, Artificial Sequence
  Description of Artificial Sequence: Synthetic oligonucleotide
  Sense strand starting at position 345 of SEQ ID NO: 1561278
ggauuccuuuaggaaacau

SEQ ID NO: 1659622 - RNA, 19 nt, Artificial Sequence
  Description of Artificial Sequence: Synthetic oligonucleotide
  Antisense strand to SEQ ID NO: 1659621
auguuuccuaaaggaaucc

SEQ ID NO: 1659623 - RNA, 19 nt, Artificial Sequence
  Description of Artificial Sequence: Synthetic oligonucleotide
  Sense strand starting at position 581 of SEQ ID NO: 1561278
ccuuucugcucaucacgaa

SEQ ID NO: 1659624 - RNA, 19 nt, Artificial Sequence
  Description of Artificial Sequence: Synthetic oligonucleotide
  Antisense strand to SEQ ID NO: 1659623
uucgugaugagcagaaagg

SEQ ID NO: 1659625 - RNA, 19 nt, Artificial Sequence
  Description of Artificial Sequence: Synthetic oligonucleotide
  Sense strand starting at position 602 of SEQ ID NO: 1561278
augaaaggaucagauagaa

SEQ ID NO: 1659626 - RNA, 19 nt, Artificial Sequence
  Description of Artificial Sequence: Synthetic oligonucleotide
  Antisense strand to SEQ ID NO: 1659625
uucuaucugauccuuucau

SEQ ID NO: 1659627 - RNA, 19 nt, Artificial Sequence
  Description of Artificial Sequence: Synthetic oligonucleotide
  Sense strand starting at position 1019 of SEQ ID NO: 1561278
ggcucagugugcccaugaa

SEQ ID NO: 1659628 - RNA, 19 nt, Artificial Sequence
  Description of Artificial Sequence: Synthetic oligonucleotide
  Antisense strand to SEQ ID NO: 1659627
uucaugggcacacugagcc

SEQ ID NO: 1659629 - RNA, 19 nt, Artificial Sequence
  Description of Artificial Sequence: Synthetic oligonucleotide
  Sense strand starting at position 1037 of SEQ ID NO: 1561278
accugacuugccuguuaag

SEQ ID NO: 1659630 - RNA, 19 nt, Artificial Sequence
  Description of Artificial Sequence: Synthetic oligonucleotide
  Antisense strand to SEQ ID NO: 1659629
cuuaacaggcaagucaggu

SEQ ID NO: 1659631 - RNA, 19 nt, Artificial Sequence
  Description of Artificial Sequence: Synthetic oligonucleotide
  Sense strand starting at position 1040 of SEQ ID NO: 1561278
ugacuugccuguuaaguua

SEQ ID NO: 1659632 - RNA, 19 nt, Artificial Sequence
  Description of Artificial Sequence: Synthetic oligonucleotide
  Antisense strand to SEQ ID NO: 1659631
uaacuuaacaggcaaguca

SEQ ID NO: 1659633 - RNA, 19 nt, Artificial Sequence
  Description of Artificial Sequence: Synthetic oligonucleotide
  Sense strand starting at position 1323 of SEQ ID NO: 1561278
gagcgagcucaccgaagua

SEQ ID NO: 1659634 - RNA, 19 nt, Artificial Sequence
  Description of Artificial Sequence: Synthetic oligonucleotide
  Antisense strand to SEQ ID NO: 1659633
uacuucggugagcucgcuc

SEQ ID NO: 1659635 - RNA, 19 nt, Artificial Sequence
  Description of Artificial Sequence: Synthetic oligonucleotide
  Sense strand starting at position 1325 of SEQ ID NO: 1561278
gcgagcucaccgaaguagu

SEQ ID NO: 1659636 - RNA, 19 nt, Artificial Sequence
  Description of Artificial Sequence: Synthetic oligonucleotide
  Antisense strand to SEQ ID NO: 1659635
acuacuucggugagcucgc

SEQ ID NO: 1659637 - RNA, 19 nt, Artificial Sequence
  Description of Artificial Sequence: Synthetic oligonucleotide
  Sense strand starting at position 2529 of SEQ ID NO: 1561278
gagagauccaagcagucga

SEQ ID NO: 1659638 - RNA, 19 nt, Artificial Sequence
  Description of Artificial Sequence: Synthetic oligonucleotide
  Antisense strand to SEQ ID NO: 1659637
ucgacugcuuggaucucuc

SEQ ID NO: 1659639 - RNA, 19 nt, Artificial Sequence
  Description of Artificial Sequence: Synthetic oligonucleotide
  Sense strand starting at position 3078 of SEQ ID NO: 1561278
guacaagucacacggcuau

SEQ ID NO: 1659640 - RNA, 19 nt, Artificial Sequence
  Description of Artificial Sequence: Synthetic oligonucleotide
  Antisense strand to SEQ ID NO: 1659639
auagccgugugacuuguac

SEQ ID NO: 1659641 - RNA, 19 nt, Artificial Sequence
  Description of Artificial Sequence: Synthetic oligonucleotide
  Sense strand starting at position 3120 of SEQ ID NO: 1561278
cugucagggccugauggau

SEQ ID NO: 1659642 - RNA, 19 nt, Artificial Sequence
  Description of Artificial Sequence: Synthetic oligonucleotide
  Antisense strand to SEQ ID NO: 1659641
auccaucaggcccugacag

SEQ ID NO: 1659643 - RNA, 19 nt, Artificial Sequence
  Description of Artificial Sequence: Synthetic oligonucleotide
  Sense strand starting at position 3146 of SEQ ID NO: 1561278
aaguguugcgugagagagu

SEQ ID NO: 1659644 - RNA, 19 nt, Artificial Sequence
  Description of Artificial Sequence: Synthetic oligonucleotide
  Antisense strand to SEQ ID NO: 1659643
acucucucacgcaacacuu

SEQ ID NO: 1659645 - RNA, 19 nt, Artificial Sequence
  Description of Artificial Sequence: Synthetic oligonucleotide
  Sense strand starting at position 3147 of SEQ ID NO: 1561278
aguguugcgugagagagua

SEQ ID NO: 1659646 - RNA, 19 nt, Artificial Sequence
  Description of Artificial Sequence: Synthetic oligonucleotide
  Antisense strand to SEQ ID NO: 1659645
uacucucucacgcaacacu

SEQ ID NO: 1659647 - RNA, 19 nt, Artificial Sequence
  Description of Artificial Sequence: Synthetic oligonucleotide
  Sense strand starting at position 3176 of SEQ ID NO: 1561278
ggcccucucugcucagaga

SEQ ID NO: 1659648 - RNA, 19 nt, Artificial Sequence
  Description of Artificial Sequence: Synthetic oligonucleotide
  Antisense strand to SEQ ID NO: 1659647
ucucugagcagagagggcc

SEQ ID NO: 1659649 - RNA, 19 nt, Artificial Sequence
  Description of Artificial Sequence: Synthetic oligonucleotide
  Sense strand starting at position 3177 of SEQ ID NO: 1561278
gcccucucugcucagagau

SEQ ID NO: 1659650 - RNA, 19 nt, Artificial Sequence
  Description of Artificial Sequence: Synthetic oligonucleotide
  Antisense strand to SEQ ID NO: 1659649
aucucugagcagagagggc

SEQ ID NO: 1659651 - RNA, 19 nt, Artificial Sequence
  Description of Artificial Sequence: Synthetic oligonucleotide
  Sense strand starting at position 3179 of SEQ ID NO: 1561278
ccucucugcucagagauuu

SEQ ID NO: 1659652 - RNA, 19 nt, Artificial Sequence
  Description of Artificial Sequence: Synthetic oligonucleotide
  Antisense strand to SEQ ID NO: 1659651
aaaucucugagcagagagg

SEQ ID NO: 1659653 - RNA, 19 nt, Artificial Sequence
  Description of Artificial Sequence: Synthetic oligonucleotide
  Sense strand starting at position 3242 of SEQ ID NO: 1561278
gggaacugucccggccaga

SEQ ID NO: 1659654 - RNA, 19 nt, Artificial Sequence
  Description of Artificial Sequence: Synthetic oligonucleotide
  Antisense strand to SEQ ID NO: 1659653
ucuggccgggacaguuccc

SEQ ID NO: 1659655 - RNA, 19 nt, Artificial Sequence
  Description of Artificial Sequence: Synthetic oligonucleotide
  Sense strand starting at position 3477 of SEQ ID NO: 1561278
gaucacagcucacagugau

SEQ ID NO: 1659656 - RNA, 19 nt, Artificial Sequence
  Description of Artificial Sequence: Synthetic oligonucleotide
  Antisense strand to SEQ ID NO: 1659655
aucacugugagcugugauc

SEQ ID NO: 1659657 - RNA, 19 nt, Artificial Sequence
  Description of Artificial Sequence: Synthetic oligonucleotide
  Sense strand starting at position 3737 of SEQ ID NO: 1561278
uggacugcauuaucuacua

SEQ ID NO: 1659658 - RNA, 19 nt, Artificial Sequence
  Description of Artificial Sequence: Synthetic oligonucleotide
  Antisense strand to SEQ ID NO: 1659657
uaguagauaaugcagucca

SEQ ID NO: 1659659 - RNA, 19 nt, Artificial Sequence
  Description of Artificial Sequence: Synthetic oligonucleotide
  Sense strand starting at position 3775 of SEQ ID NO: 1561278
gcaggacuguggugaaaca

SEQ ID NO: 1659660 - RNA, 19 nt, Artificial Sequence
  Description of Artificial Sequence: Synthetic oligonucleotide
  Antisense strand to SEQ ID NO: 1659659
uguuucaccacaguccugc

SEQ ID NO: 1659661 - RNA, 19 nt, Artificial Sequence
  Description of Artificial Sequence: Synthetic oligonucleotide
  Sense strand starting at position 3784 of SEQ ID NO: 1561278
uggugaaacaguugcacau

SEQ ID NO: 1659662 - RNA, 19 nt, Artificial Sequence
  Description of Artificial Sequence: Synthetic oligonucleotide
  Antisense strand to SEQ ID NO: 1659661
augugcaacuguuucacca

SEQ ID NO: 1659663 - RNA, 19 nt, Artificial Sequence
  Description of Artificial Sequence: Synthetic oligonucleotide
  Sense strand starting at position 3786 of SEQ ID NO: 1561278
gugaaacaguugcacauau

SEQ ID NO: 1659664 - RNA, 19 nt, Artificial Sequence
  Description of Artificial Sequence: Synthetic oligonucleotide
  Antisense strand to SEQ ID NO: 1659663
auaugugcaacuguuucac

SEQ ID NO: 1659665 - RNA, 19 nt, Artificial Sequence
  Description of Artificial Sequence: Synthetic oligonucleotide
  Sense strand starting at position 3801 of SEQ ID NO: 1561278
auaugcuacugguaugagu

SEQ ID NO: 1659666 - RNA, 19 nt, Artificial Sequence
  Description of Artificial Sequence: Synthetic oligonucleotide
  Antisense strand to SEQ ID NO: 1659665
acucauaccaguagcauau

SEQ ID NO: 1659667 - RNA, 19 nt, Artificial Sequence
  Description of Artificial Sequence: Synthetic oligonucleotide
  Sense strand starting at position 3809 of SEQ ID NO: 1561278
cugguaugagugcaaauug

SEQ ID NO: 1659668 - RNA, 19 nt, Artificial Sequence
  Description of Artificial Sequence: Synthetic oligonucleotide
  Antisense strand to SEQ ID NO: 1659667
caauuugcacucauaccag

SEQ ID NO: 1659669 - RNA, 19 nt, Artificial Sequence
  Description of Artificial Sequence: Synthetic oligonucleotide
  Sense strand starting at position 3814 of SEQ ID NO: 1561278
augagugcaaauugggaua

SEQ ID NO: 1659670 - RNA, 19 nt, Artificial Sequence
  Description of Artificial Sequence: Synthetic oligonucleotide
  Antisense strand to SEQ ID NO: 1659669
uaucccaauuugcacucau

SEQ ID NO: 1659671 - RNA, 19 nt, Artificial Sequence
  Description of Artificial Sequence: Synthetic oligonucleotide
  Sense strand starting at position 3819 of SEQ ID NO: 1561278
ugcaaauugggauauccuu

SEQ ID NO: 1659672 - RNA, 19 nt, Artificial Sequence
  Description of Artificial Sequence: Synthetic oligonucleotide
  Antisense strand to SEQ ID NO: 1659671
aaggauaucccaauuugca

SEQ ID NO: 1659673 - RNA, 19 nt, Artificial Sequence
  Description of Artificial Sequence: Synthetic oligonucleotide
  Sense strand starting at position 3846 of SEQ ID NO: 1561278
agcaguuuggcggugucaa

SEQ ID NO: 1659674 - RNA, 19 nt, Artificial Sequence
  Description of Artificial Sequence: Synthetic oligonucleotide
  Antisense strand to SEQ ID NO: 1659673
uugacaccgccaaacugcu

SEQ ID NO: 1659675 - RNA, 19 nt, Artificial Sequence
  Description of Artificial Sequence: Synthetic oligonucleotide
  Sense strand starting at position 3847 of SEQ ID NO: 1561278
gcaguuuggcggugucaac

SEQ ID NO: 1659676 - RNA, 19 nt, Artificial Sequence
  Description of Artificial Sequence: Synthetic oligonucleotide
  Antisense strand to SEQ ID NO: 1659675
guugacaccgccaaacugc

SEQ ID NO: 1659677 - RNA, 19 nt, Artificial Sequence
  Description of Artificial Sequence: Synthetic oligonucleotide
  Sense strand starting at position 3858 of SEQ ID NO: 1561278
gugucaacauccgcacaaa

SEQ ID NO: 1659678 - RNA, 19 nt, Artificial Sequence
  Description of Artificial Sequence: Synthetic oligonucleotide
  Antisense strand to SEQ ID NO: 1659677
uuugugcggauguugacac

SEQ ID NO: 1659679 - RNA, 19 nt, Artificial Sequence
  Description of Artificial Sequence: Synthetic oligonucleotide
  Sense strand starting at position 3956 of SEQ ID NO: 1561278
caaucacaaccgugucgua

SEQ ID NO: 1659680 - RNA, 19 nt, Artificial Sequence
  Description of Artificial Sequence: Synthetic oligonucleotide
  Antisense strand to SEQ ID NO: 1659679
uacgacacgguugugauug

SEQ ID NO: 1659681 - RNA, 19 nt, Artificial Sequence
  Description of Artificial Sequence: Synthetic oligonucleotide
  Sense strand starting at position 3959 of SEQ ID NO: 1561278
ucacaaccgugucguauaa

SEQ ID NO: 1659682 - RNA, 19 nt, Artificial Sequence
  Description of Artificial Sequence: Synthetic oligonucleotide
  Antisense strand to SEQ ID NO: 1659681
uuauacgacacgguuguga

SEQ ID NO: 1659683 - RNA, 19 nt, Artificial Sequence
  Description of Artificial Sequence: Synthetic oligonucleotide
  Sense strand starting at position 3961 of SEQ ID NO: 1561278
acaaccgugucguauaauc

SEQ ID NO: 1659684 - RNA, 19 nt, Artificial Sequence
  Description of Artificial Sequence: Synthetic oligonucleotide
  Antisense strand to SEQ ID NO: 1659683
gauuauacgacacgguugu

SEQ ID NO: 1659685 - RNA, 19 nt, Artificial Sequence
  Description of Artificial Sequence: Synthetic oligonucleotide
  Sense strand starting at position 3969 of SEQ ID NO: 1561278
gucguauaaucccaacauc

SEQ ID NO: 1659686 - RNA, 19 nt, Artificial Sequence
  Description of Artificial Sequence: Synthetic oligonucleotide
  Antisense strand to SEQ ID NO: 1659685
gauguugggauuauacgac

SEQ ID NO: 1659687 - RNA, 19 nt, Artificial Sequence
  Description of Artificial Sequence: Synthetic oligonucleotide
  Sense strand starting at position 200 of SEQ ID NO: 1561279
ucaugacaguuguugacau

SEQ ID NO: 1659688 - RNA, 19 nt, Artificial Sequence
  Description of Artificial Sequence: Synthetic oligonucleotide
  Antisense strand to SEQ ID NO: 1659687
augucaacaacugucauga

SEQ ID NO: 1659689 - RNA, 19 nt, Artificial Sequence
  Description of Artificial Sequence: Synthetic oligonucleotide
  Sense strand starting at position 315 of SEQ ID NO: 1561279
gacagaugcugaucgguca

SEQ ID NO: 1659690 - RNA, 19 nt, Artificial Sequence
  Description of Artificial Sequence: Synthetic oligonucleotide
  Antisense strand to SEQ ID NO: 1659689
ugaccgaucagcaucuguc

SEQ ID NO: 1659691 - RNA, 19 nt, Artificial Sequence
  Description of Artificial Sequence: Synthetic oligonucleotide
  Sense strand starting at position 373 of SEQ ID NO: 1561279
uuggcaaaugugggaagaa

SEQ ID NO: 1659692 - RNA, 19 nt, Artificial Sequence
  Description of Artificial Sequence: Synthetic oligonucleotide
  Antisense strand to SEQ ID NO: 1659691
uucuucccacauuugccaa

SEQ ID NO: 1659693 - RNA, 19 nt, Artificial Sequence
  Description of Artificial Sequence: Synthetic oligonucleotide
  Sense strand starting at position 407 of SEQ ID NO: 1561279
ugacaugucucagcaauga

SEQ ID NO: 1659694 - RNA, 19 nt, Artificial Sequence
  Description of Artificial Sequence: Synthetic oligonucleotide
  Antisense strand to SEQ ID NO: 1659693
ucauugcugagacauguca

SEQ ID NO: 1659695 - RNA, 19 nt, Artificial Sequence
  Description of Artificial Sequence: Synthetic oligonucleotide
  Sense strand starting at position 459 of SEQ ID NO: 1561279
ugacccaucaagggaugua

SEQ ID NO: 1659696 - RNA, 19 nt, Artificial Sequence
  Description of Artificial Sequence: Synthetic oligonucleotide
  Antisense strand to SEQ ID NO: 1659695
uacaucccuugauggguca

SEQ ID NO: 1659697 - RNA, 19 nt, Artificial Sequence
  Description of Artificial Sequence: Synthetic oligonucleotide
  Sense strand starting at position 468 of SEQ ID NO: 1561279
aagggauguacaggucagu

SEQ ID NO: 1659698 - RNA, 19 nt, Artificial Sequence
  Description of Artificial Sequence: Synthetic oligonucleotide
  Antisense strand to SEQ ID NO: 1659697
acugaccuguacaucccuu

SEQ ID NO: 1659699 - RNA, 19 nt, Artificial Sequence
  Description of Artificial Sequence: Synthetic oligonucleotide
  Sense strand starting at position 471 of SEQ ID NO: 1561279
ggauguacaggucagugau

SEQ ID NO: 1659700 - RNA, 19 nt, Artificial Sequence
  Description of Artificial Sequence: Synthetic oligonucleotide
  Antisense strand to SEQ ID NO: 1659699
aucacugaccuguacaucc

SEQ ID NO: 1659701 - RNA, 19 nt, Artificial Sequence
  Description of Artificial Sequence: Synthetic oligonucleotide
  Sense strand starting at position 474 of SEQ ID NO: 1561279
uguacaggucagugaugaa

SEQ ID NO: 1659702 - RNA, 19 nt, Artificial Sequence
  Description of Artificial Sequence: Synthetic oligonucleotide
  Antisense strand to SEQ ID NO: 1659701
uucaucacugaccuguaca

SEQ ID NO: 1659703 - RNA, 19 nt, Artificial Sequence
  Description of Artificial Sequence: Synthetic oligonucleotide
  Sense strand starting at position 612 of SEQ ID NO: 1561279
uugagugcccgcucguaua

SEQ ID NO: 1659704 - RNA, 19 nt, Artificial Sequence
  Description of Artificial Sequence: Synthetic oligonucleotide
  Antisense strand to SEQ ID NO: 1659703
uauacgagcgggcacucaa

SEQ ID NO: 1659705 - RNA, 19 nt, Artificial Sequence
  Description of Artificial Sequence: Synthetic oligonucleotide
  Sense strand starting at position 700 of SEQ ID NO: 1561279
auugguuccgcaugauuuc

SEQ ID NO: 1659706 - RNA, 19 nt, Artificial Sequence
  Description of Artificial Sequence: Synthetic oligonucleotide
  Antisense strand to SEQ ID NO: 1659705
gaaaucaugcggaaccaau

SEQ ID NO: 1659707 - RNA, 19 nt, Artificial Sequence
  Description of Artificial Sequence: Synthetic oligonucleotide
  Sense strand starting at position 975 of SEQ ID NO: 1561279
ucaucagacuucucaguca

SEQ ID NO: 1659708 - RNA, 19 nt, Artificial Sequence
  Description of Artificial Sequence: Synthetic oligonucleotide
  Antisense strand to SEQ ID NO: 1659707
ugacugagaagucugauga

SEQ ID NO: 1659709 - RNA, 19 nt, Artificial Sequence
  Description of Artificial Sequence: Synthetic oligonucleotide
  Sense strand starting at position 978 of SEQ ID NO: 1561279
ucagacuucucagucauua

SEQ ID NO: 1659710 - RNA, 19 nt, Artificial Sequence
  Description of Artificial Sequence: Synthetic oligonucleotide
  Antisense strand to SEQ ID NO: 1659709
uaaugacugagaagucuga

SEQ ID NO: 1659711 - RNA, 19 nt, Artificial Sequence
  Description of Artificial Sequence: Synthetic oligonucleotide
  Sense strand starting at position 1008 of SEQ ID NO: 1561279
caggaaugaguccgcauca

SEQ ID NO: 1659712 - RNA, 19 nt, Artificial Sequence
  Description of Artificial Sequence: Synthetic oligonucleotide
  Antisense strand to SEQ ID NO: 1659711
ugaugcggacucauuccug

SEQ ID NO: 1659713 - RNA, 19 nt, Artificial Sequence
  Description of Artificial Sequence: Synthetic oligonucleotide
  Sense strand starting at position 1048 of SEQ ID NO: 1561279
uggucagacuccuuagaua

SEQ ID NO: 1659714 - RNA, 19 nt, Artificial Sequence
  Description of Artificial Sequence: Synthetic oligonucleotide
  Antisense strand to SEQ ID NO: 1659713
uaucuaaggagucugacca

SEQ ID NO: 1659715 - RNA, 19 nt, Artificial Sequence
  Description of Artificial Sequence: Synthetic oligonucleotide
  Sense strand starting at position 1404 of SEQ ID NO: 1561279
gccucuacuccagagagua

SEQ ID NO: 1659716 - RNA, 19 nt, Artificial Sequence
  Description of Artificial Sequence: Synthetic oligonucleotide
  Antisense strand to SEQ ID NO: 1659715
uacucucuggaguagaggc

SEQ ID NO: 1659717 - RNA, 19 nt, Artificial Sequence
  Description of Artificial Sequence: Synthetic oligonucleotide
  Sense strand starting at position 1999 of SEQ ID NO: 1561279
gagagucgcgcgcuuauga

SEQ ID NO: 1659718 - RNA, 19 nt, Artificial Sequence
  Description of Artificial Sequence: Synthetic oligonucleotide
  Antisense strand to SEQ ID NO: 1659717
ucauaagcgcgcgacucuc

SEQ ID NO: 1659719 - RNA, 19 nt, Artificial Sequence
  Description of Artificial Sequence: Synthetic oligonucleotide
  Sense strand starting at position 2008 of SEQ ID NO: 1561279
gcgcuuaugacgucuacca

SEQ ID NO: 1659720 - RNA, 19 nt, Artificial Sequence
  Description of Artificial Sequence: Synthetic oligonucleotide
  Antisense strand to SEQ ID NO: 1659719
ugguagacgucauaagcgc

SEQ ID NO: 1659721 - RNA, 19 nt, Artificial Sequence
  Description of Artificial Sequence: Synthetic oligonucleotide
  Sense strand starting at position 2156 of SEQ ID NO: 1561279
gcgccaucaggauacacau

SEQ ID NO: 1659722 - RNA, 19 nt, Artificial Sequence
  Description of Artificial Sequence: Synthetic oligonucleotide
  Antisense strand to SEQ ID NO: 1659721
auguguauccugauggcgc

SEQ ID NO: 1659723 - RNA, 19 nt, Artificial Sequence
  Description of Artificial Sequence: Synthetic oligonucleotide
  Sense strand starting at position 2419 of SEQ ID NO: 1561279
cucuuaagauuugagagga

SEQ ID NO: 1659724 - RNA, 19 nt, Artificial Sequence
  Description of Artificial Sequence: Synthetic oligonucleotide
  Antisense strand to SEQ ID NO: 1659723
uccucucaaaucuuaagag

SEQ ID NO: 1659725 - RNA, 19 nt, Artificial Sequence
  Description of Artificial Sequence: Synthetic oligonucleotide
  Sense strand starting at position 2436 of SEQ ID NO: 1561279
gaaccuuucugguuggaaa

SEQ ID NO: 1659726 - RNA, 19 nt, Artificial Sequence
  Description of Artificial Sequence: Synthetic oligonucleotide
  Antisense strand to SEQ ID NO: 1659725
uuuccaaccagaaagguuc

SEQ ID NO: 1659727 - RNA, 19 nt, Artificial Sequence
  Description of Artificial Sequence: Synthetic oligonucleotide
  Sense strand starting at position 2437 of SEQ ID NO: 1561279
aaccuuucugguuggaaau

SEQ ID NO: 1659728 - RNA, 19 nt, Artificial Sequence
  Description of Artificial Sequence: Synthetic oligonucleotide
  Antisense strand to SEQ ID NO: 1659727
auuuccaaccagaaagguu

SEQ ID NO: 1659729 - RNA, 19 nt, Artificial Sequence
  Description of Artificial Sequence: Synthetic oligonucleotide
  Sense strand starting at position 2438 of SEQ ID NO: 1561279
accuuucugguuggaaauc

SEQ ID NO: 1659730 - RNA, 19 nt, Artificial Sequence
  Description of Artificial Sequence: Synthetic oligonucleotide
  Antisense strand to SEQ ID NO: 1659729
gauuuccaaccagaaaggu

SEQ ID NO: 1659731 - RNA, 19 nt, Artificial Sequence
  Description of Artificial Sequence: Synthetic oligonucleotide
  Sense strand starting at position 2627 of SEQ ID NO: 1561279
gugucuaugacagggagau

SEQ ID NO: 1659732 - RNA, 19 nt, Artificial Sequence
  Description of Artificial Sequence: Synthetic oligonucleotide
  Antisense strand to SEQ ID NO: 1659731
aucucccugucauagacac

SEQ ID NO: 1659733 - RNA, 19 nt, Artificial Sequence
  Description of Artificial Sequence: Synthetic oligonucleotide
  Sense strand starting at position 2628 of SEQ ID NO: 1561279
ugucuaugacagggagauu

SEQ ID NO: 1659734 - RNA, 19 nt, Artificial Sequence
  Description of Artificial Sequence: Synthetic oligonucleotide
  Antisense strand to SEQ ID NO: 1659733
aaucucccugucauagaca

SEQ ID NO: 1659735 - RNA, 19 nt, Artificial Sequence
  Description of Artificial Sequence: Synthetic oligonucleotide
  Sense strand starting at position 2644 of SEQ ID NO: 1561279
auuccuagacuucgagaag

SEQ ID NO: 1659736 - RNA, 19 nt, Artificial Sequence
  Description of Artificial Sequence: Synthetic oligonucleotide
  Antisense strand to SEQ ID NO: 1659735
cuucucgaagucuaggaau

SEQ ID NO: 1659737 - RNA, 19 nt, Artificial Sequence
  Description of Artificial Sequence: Synthetic oligonucleotide
  Sense strand starting at position 2651 of SEQ ID NO: 1561279
gacuucgagaaguggaguu

SEQ ID NO: 1659738 - RNA, 19 nt, Artificial Sequence
  Description of Artificial Sequence: Synthetic oligonucleotide
  Antisense strand to SEQ ID NO: 1659737
aacuccacuucucgaaguc

SEQ ID NO: 1659739 - RNA, 19 nt, Artificial Sequence
  Description of Artificial Sequence: Synthetic oligonucleotide
  Sense strand starting at position 2695 of SEQ ID NO: 1561279
gggugcucccgggaucuua

SEQ ID NO: 1659740 - RNA, 19 nt, Artificial Sequence
  Description of Artificial Sequence: Synthetic oligonucleotide
  Antisense strand to SEQ ID NO: 1659739
uaagaucccgggagcaccc

SEQ ID NO: 1659741 - RNA, 19 nt, Artificial Sequence
  Description of Artificial Sequence: Synthetic oligonucleotide
  Sense strand starting at position 2781 of SEQ ID NO: 1561279
cuguguuugagaggaagac

SEQ ID NO: 1659742 - RNA, 19 nt, Artificial Sequence
  Description of Artificial Sequence: Synthetic oligonucleotide
  Antisense strand to SEQ ID NO: 1659741
gucuuccucucaaacacag

SEQ ID NO: 1659743 - RNA, 19 nt, Artificial Sequence
  Description of Artificial Sequence: Synthetic oligonucleotide
  Sense strand starting at position 2826 of SEQ ID NO: 1561279
ugaggccuccuggauuaua

SEQ ID NO: 1659744 - RNA, 19 nt, Artificial Sequence
  Description of Artificial Sequence: Synthetic oligonucleotide
  Antisense strand to SEQ ID NO: 1659743
uauaauccaggaggccuca

SEQ ID NO: 1659745 - RNA, 19 nt, Artificial Sequence
  Description of Artificial Sequence: Synthetic oligonucleotide
  Sense strand starting at position 2838 of SEQ ID NO: 1561279
gauuauaggaguuagguuu

SEQ ID NO: 1659746 - RNA, 19 nt, Artificial Sequence
  Description of Artificial Sequence: Synthetic oligonucleotide
  Antisense strand to SEQ ID NO: 1659745
aaaccuaacuccuauaauc

SEQ ID NO: 1659747 - RNA, 19 nt, Artificial Sequence
  Description of Artificial Sequence: Synthetic oligonucleotide
  Sense strand starting at position 2883 of SEQ ID NO: 1561279
gugggaguucugggauucu

SEQ ID NO: 1659748 - RNA, 19 nt, Artificial Sequence
  Description of Artificial Sequence: Synthetic oligonucleotide
  Antisense strand to SEQ ID NO: 1659747
agaaucccagaacucccac

SEQ ID NO: 1659749 - RNA, 19 nt, Artificial Sequence
  Description of Artificial Sequence: Synthetic oligonucleotide
  Sense strand starting at position 3007 of SEQ ID NO: 1561279
ucugccauuccagaugaua

SEQ ID NO: 1659750 - RNA, 19 nt, Artificial Sequence
  Description of Artificial Sequence: Synthetic oligonucleotide
  Antisense strand to SEQ ID NO: 1659749
uaucaucuggaauggcaga

SEQ ID NO: 1659751 - RNA, 19 nt, Artificial Sequence
  Description of Artificial Sequence: Synthetic oligonucleotide
  Sense strand starting at position 3010 of SEQ ID NO: 1561279
gccauuccagaugauaauc

SEQ ID NO: 1659752 - RNA, 19 nt, Artificial Sequence
  Description of Artificial Sequence: Synthetic oligonucleotide
  Antisense strand to SEQ ID NO: 1659751
gauuaucaucuggaauggc

SEQ ID NO: 1659753 - RNA, 19 nt, Artificial Sequence
  Description of Artificial Sequence: Synthetic oligonucleotide
  Sense strand starting at position 3111 of SEQ ID NO: 1561279
gcauaagaggaguguuuga

SEQ ID NO: 1659754 - RNA, 19 nt, Artificial Sequence
  Description of Artificial Sequence: Synthetic oligonucleotide
  Antisense strand to SEQ ID NO: 1659753
ucaaacacuccucuuaugc

SEQ ID NO: 1659755 - RNA, 19 nt, Artificial Sequence
  Description of Artificial Sequence: Synthetic oligonucleotide
  Sense strand starting at position 3240 of SEQ ID NO: 1561279
ucgugucccauuugugacu

SEQ ID NO: 1659756 - RNA, 19 nt, Artificial Sequence
  Description of Artificial Sequence: Synthetic oligonucleotide
  Antisense strand to SEQ ID NO: 1659755
agucacaaaugggacacga

SEQ ID NO: 1659757 - RNA, 19 nt, Artificial Sequence
  Description of Artificial Sequence: Synthetic oligonucleotide
  Sense strand starting at position 3290 of SEQ ID NO: 1561279
gaagguaagugaucucuuc

SEQ ID NO: 1659758 - RNA, 19 nt, Artificial Sequence
  Description of Artificial Sequence: Synthetic oligonucleotide
  Antisense strand to SEQ ID NO: 1659757
gaagagaucacuuaccuuc

SEQ ID NO: 1659759 - RNA, 19 nt, Artificial Sequence
  Description of Artificial Sequence: Synthetic oligonucleotide
  Sense strand starting at position 3335 of SEQ ID NO: 1561279
ggauucuuguauccgggau

SEQ ID NO: 1659760 - RNA, 19 nt, Artificial Sequence
  Description of Artificial Sequence: Synthetic oligonucleotide
  Antisense strand to SEQ ID NO: 1659759
aucccggauacaagaaucc

SEQ ID NO: 1659761 - RNA, 19 nt, Artificial Sequence
  Description of Artificial Sequence: Synthetic oligonucleotide
  Sense strand starting at position 3336 of SEQ ID NO: 1561279
gauucuuguauccgggaug

SEQ ID NO: 1659762 - RNA, 19 nt, Artificial Sequence
  Description of Artificial Sequence: Synthetic oligonucleotide
  Antisense strand to SEQ ID NO: 1659761
caucccggauacaagaauc

SEQ ID NO: 1659763 - RNA, 19 nt, Artificial Sequence
  Description of Artificial Sequence: Synthetic oligonucleotide
  Sense strand starting at position 3339 of SEQ ID NO: 1561279
ucuuguauccgggaugggu

SEQ ID NO: 1659764 - RNA, 19 nt, Artificial Sequence
  Description of Artificial Sequence: Synthetic oligonucleotide
  Antisense strand to SEQ ID NO: 1659763
acccaucccggauacaaga

SEQ ID NO: 1659765 - RNA, 19 nt, Artificial Sequence
  Description of Artificial Sequence: Synthetic oligonucleotide
  Sense strand starting at position 3396 of SEQ ID NO: 1561279
cuuguaaucccagggcaug

SEQ ID NO: 1659766 - RNA, 19 nt, Artificial Sequence
  Description of Artificial Sequence: Synthetic oligonucleotide
  Antisense strand to SEQ ID NO: 1659765
caugcccugggauuacaag

SEQ ID NO: 1659767 - RNA, 19 nt, Artificial Sequence
  Description of Artificial Sequence: Synthetic oligonucleotide
  Sense strand starting at position 422 of SEQ ID NO: 1561280
ugagcuaauccaugugagu

SEQ ID NO: 1659768 - RNA, 19 nt, Artificial Sequence
  Description of Artificial Sequence: Synthetic oligonucleotide
  Antisense strand to SEQ ID NO: 1659767
acucacauggauuagcuca

SEQ ID NO: 1659769 - RNA, 19 nt, Artificial Sequence
  Description of Artificial Sequence: Synthetic oligonucleotide
  Sense strand starting at position 424 of SEQ ID NO: 1561280
agcuaauccaugugaguga

SEQ ID NO: 1659770 - RNA, 19 nt, Artificial Sequence
  Description of Artificial Sequence: Synthetic oligonucleotide
  Antisense strand to SEQ ID NO: 1659769
ucacucacauggauuagcu

SEQ ID NO: 1659771 - RNA, 19 nt, Artificial Sequence
  Description of Artificial Sequence: Synthetic oligonucleotide
  Sense strand starting at position 456 of SEQ ID NO: 1561280
gcgacugacagguaacguu

SEQ ID NO: 1659772 - RNA, 19 nt, Artificial Sequence
  Description of Artificial Sequence: Synthetic oligonucleotide
  Antisense strand to SEQ ID NO: 1659771
aacguuaccugucagucgc

SEQ ID NO: 1659773 - RNA, 19 nt, Artificial Sequence
  Description of Artificial Sequence: Synthetic oligonucleotide
  Sense strand starting at position 463 of SEQ ID NO: 1561280
acagguaacguugaauaau

SEQ ID NO: 1659774 - RNA, 19 nt, Artificial Sequence
  Description of Artificial Sequence: Synthetic oligonucleotide
  Antisense strand to SEQ ID NO: 1659773
auuauucaacguuaccugu

SEQ ID NO: 1659775 - RNA, 19 nt, Artificial Sequence
  Description of Artificial Sequence: Synthetic oligonucleotide
  Sense strand starting at position 899 of SEQ ID NO: 1561280
caucucaggcucugaaagu

SEQ ID NO: 1659776 - RNA, 19 nt, Artificial Sequence
  Description of Artificial Sequence: Synthetic oligonucleotide
  Antisense strand to SEQ ID NO: 1659775
acuuucagagccugagaug

SEQ ID NO: 1659777 - RNA, 19 nt, Artificial Sequence
  Description of Artificial Sequence: Synthetic oligonucleotide
  Sense strand starting at position 970 of SEQ ID NO: 1561280
aguggaguugauuggcuua

SEQ ID NO: 1659778 - RNA, 19 nt, Artificial Sequence
  Description of Artificial Sequence: Synthetic oligonucleotide
  Antisense strand to SEQ ID NO: 1659777
uaagccaaucaacuccacu

SEQ ID NO: 1659779 - RNA, 19 nt, Artificial Sequence
  Description of Artificial Sequence: Synthetic oligonucleotide
  Sense strand starting at position 972 of SEQ ID NO: 1561280
uggaguugauuggcuuaga

SEQ ID NO: 1659780 - RNA, 19 nt, Artificial Sequence
  Description of Artificial Sequence: Synthetic oligonucleotide
  Antisense strand to SEQ ID NO: 1659779
ucuaagccaaucaacucca

SEQ ID NO: 1659781 - RNA, 19 nt, Artificial Sequence
  Description of Artificial Sequence: Synthetic oligonucleotide
  Sense strand starting at position 973 of SEQ ID NO: 1561280
ggaguugauuggcuuagac

SEQ ID NO: 1659782 - RNA, 19 nt, Artificial Sequence
  Description of Artificial Sequence: Synthetic oligonucleotide
  Antisense strand to SEQ ID NO: 1659781
gucuaagccaaucaacucc

SEQ ID NO: 1659783 - RNA, 19 nt, Artificial Sequence
  Description of Artificial Sequence: Synthetic oligonucleotide
  Sense strand starting at position 975 of SEQ ID NO: 1561280
aguugauuggcuuagacga

SEQ ID NO: 1659784 - RNA, 19 nt, Artificial Sequence
  Description of Artificial Sequence: Synthetic oligonucleotide
  Antisense strand to SEQ ID NO: 1659783
ucgucuaagccaaucaacu

SEQ ID NO: 1659785 - RNA, 19 nt, Artificial Sequence
  Description of Artificial Sequence: Synthetic oligonucleotide
  Sense strand starting at position 1062 of SEQ ID NO: 1561280
uuuguuccagcugaggaaa

SEQ ID NO: 1659786 - RNA, 19 nt, Artificial Sequence
  Description of Artificial Sequence: Synthetic oligonucleotide
  Antisense strand to SEQ ID NO: 1659785
uuuccucagcuggaacaaa

SEQ ID NO: 1659787 - RNA, 19 nt, Artificial Sequence
  Description of Artificial Sequence: Synthetic oligonucleotide
  Sense strand starting at position 1121 of SEQ ID NO: 1561280
cacugauuccuguggucau

SEQ ID NO: 1659788 - RNA, 19 nt, Artificial Sequence
  Description of Artificial Sequence: Synthetic oligonucleotide
  Antisense strand to SEQ ID NO: 1659787
augaccacaggaaucagug

SEQ ID NO: 1659789 - RNA, 19 nt, Artificial Sequence
  Description of Artificial Sequence: Synthetic oligonucleotide
  Sense strand starting at position 1131 of SEQ ID NO: 1561280
uguggucauccuggacuua

SEQ ID NO: 1659790 - RNA, 19 nt, Artificial Sequence
  Description of Artificial Sequence: Synthetic oligonucleotide
  Antisense strand to SEQ ID NO: 1659789
uaaguccaggaugaccaca

SEQ ID NO: 1659791 - RNA, 19 nt, Artificial Sequence
  Description of Artificial Sequence: Synthetic oligonucleotide
  Sense strand starting at position 1132 of SEQ ID NO: 1561280
guggucauccuggacuuaa

SEQ ID NO: 1659792 - RNA, 19 nt, Artificial Sequence
  Description of Artificial Sequence: Synthetic oligonucleotide
  Antisense strand to SEQ ID NO: 1659791
uuaaguccaggaugaccac

SEQ ID NO: 1659793 - RNA, 19 nt, Artificial Sequence
  Description of Artificial Sequence: Synthetic oligonucleotide
  Sense strand starting at position 1143 of SEQ ID NO: 1561280
ggacuuaauccuugggucu

SEQ ID NO: 1659794 - RNA, 19 nt, Artificial Sequence
  Description of Artificial Sequence: Synthetic oligonucleotide
  Antisense strand to SEQ ID NO: 1659793
agacccaaggauuaagucc

SEQ ID NO: 1659795 - RNA, 19 nt, Artificial Sequence
  Description of Artificial Sequence: Synthetic oligonucleotide
  Sense strand starting at position 1337 of SEQ ID NO: 1561280
ggaccacagagauggucuu

SEQ ID NO: 1659796 - RNA, 19 nt, Artificial Sequence
  Description of Artificial Sequence: Synthetic oligonucleotide
  Antisense strand to SEQ ID NO: 1659795
aagaccaucucuguggucc

SEQ ID NO: 1659797 - RNA, 19 nt, Artificial Sequence
  Description of Artificial Sequence: Synthetic oligonucleotide
  Sense strand starting at position 1386 of SEQ ID NO: 1561280
guaagugucugccuugaga

SEQ ID NO: 1659798 - RNA, 19 nt, Artificial Sequence
  Description of Artificial Sequence: Synthetic oligonucleotide
  Antisense strand to SEQ ID NO: 1659797
ucucaaggcagacacuuac

SEQ ID NO: 1659799 - RNA, 19 nt, Artificial Sequence
  Description of Artificial Sequence: Synthetic oligonucleotide
  Sense strand starting at position 1388 of SEQ ID NO: 1561280
aagugucugccuugagaag

SEQ ID NO: 1659800 - RNA, 19 nt, Artificial Sequence
  Description of Artificial Sequence: Synthetic oligonucleotide
  Antisense strand to SEQ ID NO: 1659799
cuucucaaggcagacacuu

SEQ ID NO: 1659801 - RNA, 19 nt, Artificial Sequence
  Description of Artificial Sequence: Synthetic oligonucleotide
  Sense strand starting at position 1389 of SEQ ID NO: 1561280
agugucugccuugagaaga

SEQ ID NO: 1659802 - RNA, 19 nt, Artificial Sequence
  Description of Artificial Sequence: Synthetic oligonucleotide
  Antisense strand to SEQ ID NO: 1659801
ucuucucaaggcagacacu

SEQ ID NO: 1659803 - RNA, 19 nt, Artificial Sequence
  Description of Artificial Sequence: Synthetic oligonucleotide
  Sense strand starting at position 1482 of SEQ ID NO: 1561280
gcucucagaugauuccuuu

SEQ ID NO: 1659804 - RNA, 19 nt, Artificial Sequence
  Description of Artificial Sequence: Synthetic oligonucleotide
  Antisense strand to SEQ ID NO: 1659803
aaaggaaucaucugagagc

SEQ ID NO: 1659805 - RNA, 19 nt, Artificial Sequence
  Description of Artificial Sequence: Synthetic oligonucleotide
  Sense strand starting at position 1485 of SEQ ID NO: 1561280
cucagaugauuccuuugag

SEQ ID NO: 1659806 - RNA, 19 nt, Artificial Sequence
  Description of Artificial Sequence: Synthetic oligonucleotide
  Antisense strand to SEQ ID NO: 1659805
cucaaaggaaucaucugag

SEQ ID NO: 1659807 - RNA, 19 nt, Artificial Sequence
  Description of Artificial Sequence: Synthetic oligonucleotide
  Sense strand starting at position 1486 of SEQ ID NO: 1561280
ucagaugauuccuuugagu

SEQ ID NO: 1659808 - RNA, 19 nt, Artificial Sequence
  Description of Artificial Sequence: Synthetic oligonucleotide
  Antisense strand to SEQ ID NO: 1659807
acucaaaggaaucaucuga

SEQ ID NO: 1659809 - RNA, 19 nt, Artificial Sequence
  Description of Artificial Sequence: Synthetic oligonucleotide
  Sense strand starting at position 1488 of SEQ ID NO: 1561280
agaugauuccuuugagucc

SEQ ID NO: 1659810 - RNA, 19 nt, Artificial Sequence
  Description of Artificial Sequence: Synthetic oligonucleotide
  Antisense strand to SEQ ID NO: 1659809
ggacucaaaggaaucaucu

SEQ ID NO: 1659811 - RNA, 19 nt, Artificial Sequence
  Description of Artificial Sequence: Synthetic oligonucleotide
  Sense strand starting at position 1495 of SEQ ID NO: 1561280
uccuuugaguccucccaag

SEQ ID NO: 1659812 - RNA, 19 nt, Artificial Sequence
  Description of Artificial Sequence: Synthetic oligonucleotide
  Antisense strand to SEQ ID NO: 1659811
cuugggaggacucaaagga

SEQ ID NO: 1659813 - RNA, 19 nt, Artificial Sequence
  Description of Artificial Sequence: Synthetic oligonucleotide
  Sense strand starting at position 1530 of SEQ ID NO: 1561280
gauuuaagcucucccguua

SEQ ID NO: 1659814 - RNA, 19 nt, Artificial Sequence
  Description of Artificial Sequence: Synthetic oligonucleotide
  Antisense strand to SEQ ID NO: 1659813
uaacgggagagcuuaaauc

SEQ ID NO: 1659815 - RNA, 19 nt, Artificial Sequence
  Description of Artificial Sequence: Synthetic oligonucleotide
  Sense strand starting at position 1556 of SEQ ID NO: 1561280
gacacucugccuggaguuu

SEQ ID NO: 1659816 - RNA, 19 nt, Artificial Sequence
  Description of Artificial Sequence: Synthetic oligonucleotide
  Antisense strand to SEQ ID NO: 1659815
aaacuccaggcagaguguc

SEQ ID NO: 1659817 - RNA, 19 nt, Artificial Sequence
  Description of Artificial Sequence: Synthetic oligonucleotide
  Sense strand starting at position 1582 of SEQ ID NO: 1561280
aacacuuucccguggaagu

SEQ ID NO: 1659818 - RNA, 19 nt, Artificial Sequence
  Description of Artificial Sequence: Synthetic oligonucleotide
  Antisense strand to SEQ ID NO: 1659817
acuuccacgggaaaguguu

SEQ ID NO: 1659819 - RNA, 19 nt, Artificial Sequence
  Description of Artificial Sequence: Synthetic oligonucleotide
  Sense strand starting at position 1583 of SEQ ID NO: 1561280
acacuuucccguggaaguu

SEQ ID NO: 1659820 - RNA, 19 nt, Artificial Sequence
  Description of Artificial Sequence: Synthetic oligonucleotide
  Antisense strand to SEQ ID NO: 1659819
aacuuccacgggaaagugu

SEQ ID NO: 1659821 - RNA, 19 nt, Artificial Sequence
  Description of Artificial Sequence: Synthetic oligonucleotide
  Sense strand starting at position 2215 of SEQ ID NO: 1561280
cgggauuggugucuggaag

SEQ ID NO: 1659822 - RNA, 19 nt, Artificial Sequence
  Description of Artificial Sequence: Synthetic oligonucleotide
  Antisense strand to SEQ ID NO: 1659821
cuuccagacaccaaucccg

SEQ ID NO: 1659823 - RNA, 19 nt, Artificial Sequence
  Description of Artificial Sequence: Synthetic oligonucleotide
  Sense strand starting at position 2216 of SEQ ID NO: 1561280
gggauuggugucuggaaga

SEQ ID NO: 1659824 - RNA, 19 nt, Artificial Sequence
  Description of Artificial Sequence: Synthetic oligonucleotide
  Antisense strand to SEQ ID NO: 1659823
ucuuccagacaccaauccc

SEQ ID NO: 1659825 - RNA, 19 nt, Artificial Sequence
  Description of Artificial Sequence: Synthetic oligonucleotide
  Sense strand starting at position 2221 of SEQ ID NO: 1561280
uggugucuggaagaaauuc

SEQ ID NO: 1659826 - RNA, 19 nt, Artificial Sequence
  Description of Artificial Sequence: Synthetic oligonucleotide
  Antisense strand to SEQ ID NO: 1659825
gaauuucuuccagacacca

SEQ ID NO: 1659827 - RNA, 19 nt, Artificial Sequence
  Description of Artificial Sequence: Synthetic oligonucleotide
  Sense strand starting at position 2229 of SEQ ID NO: 1561280
ggaagaaauucgccuuucu

SEQ ID NO: 1659828 - RNA, 19 nt, Artificial Sequence
  Description of Artificial Sequence: Synthetic oligonucleotide
  Antisense strand to SEQ ID NO: 1659827
agaaaggcgaauuucuucc

SEQ ID NO: 1659829 - RNA, 19 nt, Artificial Sequence
  Description of Artificial Sequence: Synthetic oligonucleotide
  Sense strand starting at position 2246 of SEQ ID NO: 1561280
cucauugcacgauggaguu

SEQ ID NO: 1659830 - RNA, 19 nt, Artificial Sequence
  Description of Artificial Sequence: Synthetic oligonucleotide
  Antisense strand to SEQ ID NO: 1659829
aacuccaucgugcaaugag

SEQ ID NO: 1659831 - RNA, 19 nt, Artificial Sequence
  Description of Artificial Sequence: Synthetic oligonucleotide
  Sense strand starting at position 2645 of SEQ ID NO: 1561280
cagcaaaucugagugaauu

SEQ ID NO: 1659832 - RNA, 19 nt, Artificial Sequence
  Description of Artificial Sequence: Synthetic oligonucleotide
  Antisense strand to SEQ ID NO: 1659831
aauucacucagauuugcug

SEQ ID NO: 1659833 - RNA, 19 nt, Artificial Sequence
  Description of Artificial Sequence: Synthetic oligonucleotide
  Sense strand starting at position 3207 of SEQ ID NO: 1561280
gggugcuuccuugggagga

SEQ ID NO: 1659834 - RNA, 19 nt, Artificial Sequence
  Description of Artificial Sequence: Synthetic oligonucleotide
  Antisense strand to SEQ ID NO: 1659833
uccucccaaggaagcaccc

SEQ ID NO: 1659835 - RNA, 19 nt, Artificial Sequence
  Description of Artificial Sequence: Synthetic oligonucleotide
  Sense strand starting at position 3357 of SEQ ID NO: 1561280
ggugacuuucuggguucua

SEQ ID NO: 1659836 - RNA, 19 nt, Artificial Sequence
  Description of Artificial Sequence: Synthetic oligonucleotide
  Antisense strand to SEQ ID NO: 1659835
uagaacccagaaagucacc

SEQ ID NO: 1659837 - RNA, 19 nt, Artificial Sequence
  Description of Artificial Sequence: Synthetic oligonucleotide
  Sense strand starting at position 3358 of SEQ ID NO: 1561280
gugacuuucuggguucuaa

SEQ ID NO: 1659838 - RNA, 19 nt, Artificial Sequence
  Description of Artificial Sequence: Synthetic oligonucleotide
  Antisense strand to SEQ ID NO: 1659837
uuagaacccagaaagucac

SEQ ID NO: 1659839 - RNA, 19 nt, Artificial Sequence
  Description of Artificial Sequence: Synthetic oligonucleotide
  Sense strand starting at position 3506 of SEQ ID NO: 1561280
ggguucugaccucagcuau

SEQ ID NO: 1659840 - RNA, 19 nt, Artificial Sequence
  Description of Artificial Sequence: Synthetic oligonucleotide
  Antisense strand to SEQ ID NO: 1659839
auagcugaggucagaaccc

SEQ ID NO: 1659841 - RNA, 19 nt, Artificial Sequence
  Description of Artificial Sequence: Synthetic oligonucleotide
  Sense strand starting at position 3676 of SEQ ID NO: 1561280
gggucuugguaagugacaa

SEQ ID NO: 1659842 - RNA, 19 nt, Artificial Sequence
  Description of Artificial Sequence: Synthetic oligonucleotide
  Antisense strand to SEQ ID NO: 1659841
uugucacuuaccaagaccc

SEQ ID NO: 1659843 - RNA, 19 nt, Artificial Sequence
  Description of Artificial Sequence: Synthetic oligonucleotide
  Sense strand starting at position 3677 of SEQ ID NO: 1561280
ggucuugguaagugacaag

SEQ ID NO: 1659844 - RNA, 19 nt, Artificial Sequence
  Description of Artificial Sequence: Synthetic oligonucleotide
  Antisense strand to SEQ ID NO: 1659843
cuugucacuuaccaagacc

SEQ ID NO: 1659845 - RNA, 19 nt, Artificial Sequence
  Description of Artificial Sequence: Synthetic oligonucleotide
  Sense strand starting at position 3887 of SEQ ID NO: 1561280
gugauuggaucccugagag

SEQ ID NO: 1659846 - RNA, 19 nt, Artificial Sequence
  Description of Artificial Sequence: Synthetic oligonucleotide
  Antisense strand to SEQ ID NO: 1659845
cucucagggauccaaucac

SEQ ID NO: 1659847 - RNA, 19 nt, Artificial Sequence
  Description of Artificial Sequence: Synthetic oligonucleotide
  Sense strand starting at position 167 of SEQ ID NO: 1561281
ucauaugucuacuuguuua

SEQ ID NO: 1659848 - RNA, 19 nt, Artificial Sequence
  Description of Artificial Sequence: Synthetic oligonucleotide
  Antisense strand to SEQ ID NO: 1659847
uaaacaaguagacauauga

SEQ ID NO: 1659849 - RNA, 19 nt, Artificial Sequence
  Description of Artificial Sequence: Synthetic oligonucleotide
  Sense strand starting at position 448 of SEQ ID NO: 1561281
ggugaaaucucggcccacu

SEQ ID NO: 1659850 - RNA, 19 nt, Artificial Sequence
  Description of Artificial Sequence: Synthetic oligonucleotide
  Antisense strand to SEQ ID NO: 1659849
agugggccgagauuucacc

SEQ ID NO: 1659851 - RNA, 19 nt, Artificial Sequence
  Description of Artificial Sequence: Synthetic oligonucleotide
  Sense strand starting at position 1463 of SEQ ID NO: 1561281
gaaguauccucuuccagga

SEQ ID NO: 1659852 - RNA, 19 nt, Artificial Sequence
  Description of Artificial Sequence: Synthetic oligonucleotide
  Antisense strand to SEQ ID NO: 1659851
uccuggaagaggauacuuc

SEQ ID NO: 1659853 - RNA, 19 nt, Artificial Sequence
  Description of Artificial Sequence: Synthetic oligonucleotide
  Sense strand starting at position 1573 of SEQ ID NO: 1561281
gagacaaguuagguugaau

SEQ ID NO: 1659854 - RNA, 19 nt, Artificial Sequence
  Description of Artificial Sequence: Synthetic oligonucleotide
  Antisense strand to SEQ ID NO: 1659853
auucaaccuaacuugucuc

SEQ ID NO: 1659855 - RNA, 19 nt, Artificial Sequence
  Description of Artificial Sequence: Synthetic oligonucleotide
  Sense strand starting at position 1656 of SEQ ID NO: 1561281
aauacagguucgcuucuua

SEQ ID NO: 1659856 - RNA, 19 nt, Artificial Sequence
  Description of Artificial Sequence: Synthetic oligonucleotide
  Antisense strand to SEQ ID NO: 1659855
uaagaagcgaaccuguauu

SEQ ID NO: 1659857 - RNA, 19 nt, Artificial Sequence
  Description of Artificial Sequence: Synthetic oligonucleotide
  Sense strand starting at position 1660 of SEQ ID NO: 1561281
cagguucgcuucuuaaaug

SEQ ID NO: 1659858 - RNA, 19 nt, Artificial Sequence
  Description of Artificial Sequence: Synthetic oligonucleotide
  Antisense strand to SEQ ID NO: 1659857
cauuuaagaagcgaaccug

SEQ ID NO: 1659859 - RNA, 19 nt, Artificial Sequence
  Description of Artificial Sequence: Synthetic oligonucleotide
  Sense strand starting at position 1672 of SEQ ID NO: 1561281
uuaaaugagcgguaggcau

SEQ ID NO: 1659860 - RNA, 19 nt, Artificial Sequence
  Description of Artificial Sequence: Synthetic oligonucleotide
  Antisense strand to SEQ ID NO: 1659859
augccuaccgcucauuuaa

SEQ ID NO: 1659861 - RNA, 19 nt, Artificial Sequence
  Description of Artificial Sequence: Synthetic oligonucleotide
  Sense strand starting at position 1793 of SEQ ID NO: 1561281
gaucgcuaacugcaaauga

SEQ ID NO: 1659862 - RNA, 19 nt, Artificial Sequence
  Description of Artificial Sequence: Synthetic oligonucleotide
  Antisense strand to SEQ ID NO: 1659861
ucauuugcaguuagcgauc

SEQ ID NO: 1659863 - RNA, 19 nt, Artificial Sequence
  Description of Artificial Sequence: Synthetic oligonucleotide
  Sense strand starting at position 1801 of SEQ ID NO: 1561281
acugcaaaugaaugaaagu

SEQ ID NO: 1659864 - RNA, 19 nt, Artificial Sequence
  Description of Artificial Sequence: Synthetic oligonucleotide
  Antisense strand to SEQ ID NO: 1659863
acuuucauucauuugcagu

SEQ ID NO: 1659865 - RNA, 19 nt, Artificial Sequence
  Description of Artificial Sequence: Synthetic oligonucleotide
  Sense strand starting at position 1810 of SEQ ID NO: 1561281
gaaugaaaguugcauuucu

SEQ ID NO: 1659866 - RNA, 19 nt, Artificial Sequence
  Description of Artificial Sequence: Synthetic oligonucleotide
  Antisense strand to SEQ ID NO: 1659865
agaaaugcaacuuucauuc

SEQ ID NO: 1659867 - RNA, 19 nt, Artificial Sequence
  Description of Artificial Sequence: Synthetic oligonucleotide
  Sense strand starting at position 1817 of SEQ ID NO: 1561281
aguugcauuucucugcaua

SEQ ID NO: 1659868 - RNA, 19 nt, Artificial Sequence
  Description of Artificial Sequence: Synthetic oligonucleotide
  Antisense strand to SEQ ID NO: 1659867
uaugcagagaaaugcaacu

SEQ ID NO: 1659869 - RNA, 19 nt, Artificial Sequence
  Description of Artificial Sequence: Synthetic oligonucleotide
  Sense strand starting at position 1818 of SEQ ID NO: 1561281
guugcauuucucugcauau

SEQ ID NO: 1659870 - RNA, 19 nt, Artificial Sequence
  Description of Artificial Sequence: Synthetic oligonucleotide
  Antisense strand to SEQ ID NO: 1659869
auaugcagagaaaugcaac

SEQ ID NO: 1659871 - RNA, 19 nt, Artificial Sequence
  Description of Artificial Sequence: Synthetic oligonucleotide
  Sense strand starting at position 1947 of SEQ ID NO: 1561281
gguuccagauccuugaucu

SEQ ID NO: 1659872 - RNA, 19 nt, Artificial Sequence
  Description of Artificial Sequence: Synthetic oligonucleotide
  Antisense strand to SEQ ID NO: 1659871
agaucaaggaucuggaacc

SEQ ID NO: 1659873 - RNA, 19 nt, Artificial Sequence
  Description of Artificial Sequence: Synthetic oligonucleotide
  Sense strand starting at position 1948 of SEQ ID NO: 1561281
guuccagauccuugaucuc

SEQ ID NO: 1659874 - RNA, 19 nt, Artificial Sequence
  Description of Artificial Sequence: Synthetic oligonucleotide
  Antisense strand to SEQ ID NO: 1659873
gagaucaaggaucuggaac

SEQ ID NO: 1659875 - RNA, 19 nt, Artificial Sequence
  Description of Artificial Sequence: Synthetic oligonucleotide
  Sense strand starting at position 2193 of SEQ ID NO: 1561281
gccaauggacgucaggauu

SEQ ID NO: 1659876 - RNA, 19 nt, Artificial Sequence
  Description of Artificial Sequence: Synthetic oligonucleotide
  Antisense strand to SEQ ID NO: 1659875
aauccugacguccauuggc

SEQ ID NO: 1659877 - RNA, 19 nt, Artificial Sequence
  Description of Artificial Sequence: Synthetic oligonucleotide
  Sense strand starting at position 2390 of SEQ ID NO: 1561281
ggugucugccacgacagaa

SEQ ID NO: 1659878 - RNA, 19 nt, Artificial Sequence
  Description of Artificial Sequence: Synthetic oligonucleotide
  Antisense strand to SEQ ID NO: 1659877
uucugucguggcagacacc

SEQ ID NO: 1659879 - RNA, 19 nt, Artificial Sequence
  Description of Artificial Sequence: Synthetic oligonucleotide
  Sense strand starting at position 2662 of SEQ ID NO: 1561281
cgagaucuccaucgcuaca

SEQ ID NO: 1659880 - RNA, 19 nt, Artificial Sequence
  Description of Artificial Sequence: Synthetic oligonucleotide
  Antisense strand to SEQ ID NO: 1659879
uguagcgauggagaucucg

SEQ ID NO: 1659881 - RNA, 19 nt, Artificial Sequence
  Description of Artificial Sequence: Synthetic oligonucleotide
  Sense strand starting at position 2664 of SEQ ID NO: 1561281
agaucuccaucgcuacaaa

SEQ ID NO: 1659882 - RNA, 19 nt, Artificial Sequence
  Description of Artificial Sequence: Synthetic oligonucleotide
  Antisense strand to SEQ ID NO: 1659881
uuuguagcgauggagaucu

SEQ ID NO: 1659883 - RNA, 19 nt, Artificial Sequence
  Description of Artificial Sequence: Synthetic oligonucleotide
  Sense strand starting at position 2738 of SEQ ID NO: 1561281
ugcagacagccguucaguu

SEQ ID NO: 1659884 - RNA, 19 nt, Artificial Sequence
  Description of Artificial Sequence: Synthetic oligonucleotide
  Antisense strand to SEQ ID NO: 1659883
aacugaacggcugucugca

SEQ ID NO: 1659885 - RNA, 19 nt, Artificial Sequence
  Description of Artificial Sequence: Synthetic oligonucleotide
  Sense strand starting at position 2739 of SEQ ID NO: 1561281
gcagacagccguucaguuu

SEQ ID NO: 1659886 - RNA, 19 nt, Artificial Sequence
  Description of Artificial Sequence: Synthetic oligonucleotide
  Antisense strand to SEQ ID NO: 1659885
aaacugaacggcugucugc

SEQ ID NO: 1659887 - RNA, 19 nt, Artificial Sequence
  Description of Artificial Sequence: Synthetic oligonucleotide
  Sense strand starting at position 2752 of SEQ ID NO: 1561281
caguuugggucauugagag

SEQ ID NO: 1659888 - RNA, 19 nt, Artificial Sequence
  Description of Artificial Sequence: Synthetic oligonucleotide
  Antisense strand to SEQ ID NO: 1659887
cucucaaugacccaaacug

SEQ ID NO: 1659889 - RNA, 19 nt, Artificial Sequence
  Description of Artificial Sequence: Synthetic oligonucleotide
  Sense strand starting at position 2808 of SEQ ID NO: 1561281
gagaaacauuuguguuccu

SEQ ID NO: 1659890 - RNA, 19 nt, Artificial Sequence
  Description of Artificial Sequence: Synthetic oligonucleotide
  Antisense strand to SEQ ID NO: 1659889
aggaacacaaauguuucuc

SEQ ID NO: 1659891 - RNA, 19 nt, Artificial Sequence
  Description of Artificial Sequence: Synthetic oligonucleotide
  Sense strand starting at position 2863 of SEQ ID NO: 1561281
uuugacaucccuuagguau

SEQ ID NO: 1659892 - RNA, 19 nt, Artificial Sequence
  Description of Artificial Sequence: Synthetic oligonucleotide
  Antisense strand to SEQ ID NO: 1659891
auaccuaagggaugucaaa

SEQ ID NO: 1659893 - RNA, 19 nt, Artificial Sequence
  Description of Artificial Sequence: Synthetic oligonucleotide
  Sense strand starting at position 3119 of SEQ ID NO: 1561281
gcauuaggauuacagacau

SEQ ID NO: 1659894 - RNA, 19 nt, Artificial Sequence
  Description of Artificial Sequence: Synthetic oligonucleotide
  Antisense strand to SEQ ID NO: 1659893
augucuguaauccuaaugc

SEQ ID NO: 1659895 - RNA, 19 nt, Artificial Sequence
  Description of Artificial Sequence: Synthetic oligonucleotide
  Sense strand starting at position 3150 of SEQ ID NO: 1561281
ccggccuuaaagugaauau

SEQ ID NO: 1659896 - RNA, 19 nt, Artificial Sequence
  Description of Artificial Sequence: Synthetic oligonucleotide
  Antisense strand to SEQ ID NO: 1659895
auauucacuuuaaggccgg

SEQ ID NO: 1659897 - RNA, 19 nt, Artificial Sequence
  Description of Artificial Sequence: Synthetic oligonucleotide
  Sense strand starting at position 3151 of SEQ ID NO: 1561281
cggccuuaaagugaauauu

SEQ ID NO: 1659898 - RNA, 19 nt, Artificial Sequence
  Description of Artificial Sequence: Synthetic oligonucleotide
  Antisense strand to SEQ ID NO: 1659897
aauauucacuuuaaggccg

SEQ ID NO: 1659899 - RNA, 19 nt, Artificial Sequence
  Description of Artificial Sequence: Synthetic oligonucleotide
  Sense strand starting at position 3189 of SEQ ID NO: 1561281
ccaacaaguuaggugagaa

SEQ ID NO: 1659900 - RNA, 19 nt, Artificial Sequence
  Description of Artificial Sequence: Synthetic oligonucleotide
  Antisense strand to SEQ ID NO: 1659899
uucucaccuaacuuguugg

SEQ ID NO: 1659901 - RNA, 19 nt, Artificial Sequence
  Description of Artificial Sequence: Synthetic oligonucleotide
  Sense strand starting at position 3211 of SEQ ID NO: 1561281
ccaggugucucucuuggaa

SEQ ID NO: 1659902 - RNA, 19 nt, Artificial Sequence
  Description of Artificial Sequence: Synthetic oligonucleotide
  Antisense strand to SEQ ID NO: 1659901
uuccaagagagacaccugg

SEQ ID NO: 1659903 - RNA, 19 nt, Artificial Sequence
  Description of Artificial Sequence: Synthetic oligonucleotide
  Sense strand starting at position 3214 of SEQ ID NO: 1561281
ggugucucucuuggaauag

SEQ ID NO: 1659904 - RNA, 19 nt, Artificial Sequence
  Description of Artificial Sequence: Synthetic oligonucleotide
  Antisense strand to SEQ ID NO: 1659903
cuauuccaagagagacacc

SEQ ID NO: 1659905 - RNA, 19 nt, Artificial Sequence
  Description of Artificial Sequence: Synthetic oligonucleotide
  Sense strand starting at position 3225 of SEQ ID NO: 1561281
uggaauagaucuuaaggca

SEQ ID NO: 1659906 - RNA, 19 nt, Artificial Sequence
  Description of Artificial Sequence: Synthetic oligonucleotide
  Antisense strand to SEQ ID NO: 1659905
ugccuuaagaucuauucca

SEQ ID NO: 1659907 - RNA, 19 nt, Artificial Sequence
  Description of Artificial Sequence: Synthetic oligonucleotide
  Sense strand starting at position 3237 of SEQ ID NO: 1561281
uaaggcaguuucccagaaa

SEQ ID NO: 1659908 - RNA, 19 nt, Artificial Sequence
  Description of Artificial Sequence: Synthetic oligonucleotide
  Antisense strand to SEQ ID NO: 1659907
uuucugggaaacugccuua

SEQ ID NO: 1659909 - RNA, 19 nt, Artificial Sequence
  Description of Artificial Sequence: Synthetic oligonucleotide
  Sense strand starting at position 3240 of SEQ ID NO: 1561281
ggcaguuucccagaaauuc

SEQ ID NO: 1659910 - RNA, 19 nt, Artificial Sequence
  Description of Artificial Sequence: Synthetic oligonucleotide
  Antisense strand to SEQ ID NO: 1659909
gaauuucugggaaacugcc

SEQ ID NO: 1659911 - RNA, 19 nt, Artificial Sequence
  Description of Artificial Sequence: Synthetic oligonucleotide
  Sense strand starting at position 3453 of SEQ ID NO: 1561281
aacauagugguggaaguua

SEQ ID NO: 1659912 - RNA, 19 nt, Artificial Sequence
  Description of Artificial Sequence: Synthetic oligonucleotide
  Antisense strand to SEQ ID NO: 1659911
uaacuuccaccacuauguu

SEQ ID NO: 1659913 - RNA, 19 nt, Artificial Sequence
  Description of Artificial Sequence: Synthetic oligonucleotide
  Sense strand starting at position 3497 of SEQ ID NO: 1561281
gaaggaugucagcaaguga

SEQ ID NO: 1659914 - RNA, 19 nt, Artificial Sequence
  Description of Artificial Sequence: Synthetic oligonucleotide
  Antisense strand to SEQ ID NO: 1659913
ucacuugcugacauccuuc

SEQ ID NO: 1659915 - RNA, 19 nt, Artificial Sequence
  Description of Artificial Sequence: Synthetic oligonucleotide
  Sense strand starting at position 3579 of SEQ ID NO: 1561281
gcuccugguuucucaguga

SEQ ID NO: 1659916 - RNA, 19 nt, Artificial Sequence
  Description of Artificial Sequence: Synthetic oligonucleotide
  Antisense strand to SEQ ID NO: 1659915
ucacugagaaaccaggagc

SEQ ID NO: 1659917 - RNA, 19 nt, Artificial Sequence
  Description of Artificial Sequence: Synthetic oligonucleotide
  Sense strand starting at position 3582 of SEQ ID NO: 1561281
ccugguuucucagugauga

SEQ ID NO: 1659918 - RNA, 19 nt, Artificial Sequence
  Description of Artificial Sequence: Synthetic oligonucleotide
  Antisense strand to SEQ ID NO: 1659917
ucaucacugagaaaccagg

SEQ ID NO: 1659919 - RNA, 19 nt, Artificial Sequence
  Description of Artificial Sequence: Synthetic oligonucleotide
  Sense strand starting at position 3583 of SEQ ID NO: 1561281
cugguuucucagugaugag

SEQ ID NO: 1659920 - RNA, 19 nt, Artificial Sequence
  Description of Artificial Sequence: Synthetic oligonucleotide
  Antisense strand to SEQ ID NO: 1659919
cucaucacugagaaaccag

SEQ ID NO: 1659921 - RNA, 19 nt, Artificial Sequence
  Description of Artificial Sequence: Synthetic oligonucleotide
  Sense strand starting at position 3584 of SEQ ID NO: 1561281
ugguuucucagugaugagu

SEQ ID NO: 1659922 - RNA, 19 nt, Artificial Sequence
  Description of Artificial Sequence: Synthetic oligonucleotide
  Antisense strand to SEQ ID NO: 1659921
acucaucacugagaaacca

SEQ ID NO: 1659923 - RNA, 19 nt, Artificial Sequence
  Description of Artificial Sequence: Synthetic oligonucleotide
  Sense strand starting at position 3631 of SEQ ID NO: 1561281
agcgaaaugcccgcauucu

SEQ ID NO: 1659924 - RNA, 19 nt, Artificial Sequence
  Description of Artificial Sequence: Synthetic oligonucleotide
  Antisense strand to SEQ ID NO: 1659923
agaaugcgggcauuucgcu

SEQ ID NO: 1659925 - RNA, 19 nt, Artificial Sequence
  Description of Artificial Sequence: Synthetic oligonucleotide
  Sense strand starting at position 3724 of SEQ ID NO: 1561281
cugguugcuccagauacau

SEQ ID NO: 1659926 - RNA, 19 nt, Artificial Sequence
  Description of Artificial Sequence: Synthetic oligonucleotide
  Antisense strand to SEQ ID NO: 1659925
auguaucuggagcaaccag

SEQ ID NO: 1659927 - RNA, 19 nt, Artificial Sequence
  Description of Artificial Sequence: Synthetic oligonucleotide
  Sense strand starting at position 6 of SEQ ID NO: 1561282
ucauaugucuacuuguuua

SEQ ID NO: 1659928 - RNA, 19 nt, Artificial Sequence
  Description of Artificial Sequence: Synthetic oligonucleotide
  Antisense strand to SEQ ID NO: 1659927
uaaacaaguagacauauga

SEQ ID NO: 1659929 - RNA, 19 nt, Artificial Sequence
  Description of Artificial Sequence: Synthetic oligonucleotide
  Sense strand starting at position 287 of SEQ ID NO: 1561282
ggugaaaucucggcccacu

SEQ ID NO: 1659930 - RNA, 19 nt, Artificial Sequence
  Description of Artificial Sequence: Synthetic oligonucleotide
  Antisense strand to SEQ ID NO: 1659929
agugggccgagauuucacc

SEQ ID NO: 1659931 - RNA, 19 nt, Artificial Sequence
  Description of Artificial Sequence: Synthetic oligonucleotide
  Sense strand starting at position 1302 of SEQ ID NO: 1561282
gaaguauccucuuccagga

SEQ ID NO: 1659932 - RNA, 19 nt, Artificial Sequence
  Description of Artificial Sequence: Synthetic oligonucleotide
  Antisense strand to SEQ ID NO: 1659931
uccuggaagaggauacuuc

SEQ ID NO: 1659933 - RNA, 19 nt, Artificial Sequence
  Description of Artificial Sequence: Synthetic oligonucleotide
  Sense strand starting at position 1412 of SEQ ID NO: 1561282
gagacaaguuagguugaau

SEQ ID NO: 1659934 - RNA, 19 nt, Artificial Sequence
  Description of Artificial Sequence: Synthetic oligonucleotide
  Antisense strand to SEQ ID NO: 1659933
auucaaccuaacuugucuc

SEQ ID NO: 1659935 - RNA, 19 nt, Artificial Sequence
  Description of Artificial Sequence: Synthetic oligonucleotide
  Sense strand starting at position 1495 of SEQ ID NO: 1561282
aauacagguucgcuucuua

SEQ ID NO: 1659936 - RNA, 19 nt, Artificial Sequence
  Description of Artificial Sequence: Synthetic oligonucleotide
  Antisense strand to SEQ ID NO: 1659935
uaagaagcgaaccuguauu

SEQ ID NO: 1659937 - RNA, 19 nt, Artificial Sequence
  Description of Artificial Sequence: Synthetic oligonucleotide
  Sense strand starting at position 1499 of SEQ ID NO: 1561282
cagguucgcuucuuaaaug

SEQ ID NO: 1659938 - RNA, 19 nt, Artificial Sequence
  Description of Artificial Sequence: Synthetic oligonucleotide
  Antisense strand to SEQ ID NO: 1659937
cauuuaagaagcgaaccug

SEQ ID NO: 1659939 - RNA, 19 nt, Artificial Sequence
  Description of Artificial Sequence: Synthetic oligonucleotide
  Sense strand starting at position 1511 of SEQ ID NO: 1561282
uuaaaugagcgguaggcau

SEQ ID NO: 1659940 - RNA, 19 nt, Artificial Sequence
  Description of Artificial Sequence: Synthetic oligonucleotide
  Antisense strand to SEQ ID NO: 1659939
augccuaccgcucauuuaa

SEQ ID NO: 1659941 - RNA, 19 nt, Artificial Sequence
  Description of Artificial Sequence: Synthetic oligonucleotide
  Sense strand starting at position 1632 of SEQ ID NO: 1561282
gaucgcuaacugcaaauga

SEQ ID NO: 1659942 - RNA, 19 nt, Artificial Sequence
  Description of Artificial Sequence: Synthetic oligonucleotide
  Antisense strand to SEQ ID NO: 1659941
ucauuugcaguuagcgauc

SEQ ID NO: 1659943 - RNA, 19 nt, Artificial Sequence
  Description of Artificial Sequence: Synthetic oligonucleotide
  Sense strand starting at position 1640 of SEQ ID NO: 1561282
acugcaaaugaaugaaagu

SEQ ID NO: 1659944 - RNA, 19 nt, Artificial Sequence
  Description of Artificial Sequence: Synthetic oligonucleotide
  Antisense strand to SEQ ID NO: 1659943
acuuucauucauuugcagu

SEQ ID NO: 1659945 - RNA, 19 nt, Artificial Sequence
  Description of Artificial Sequence: Synthetic oligonucleotide
  Sense strand starting at position 1649 of SEQ ID NO: 1561282
gaaugaaaguugcauuucu

SEQ ID NO: 1659946 - RNA, 19 nt, Artificial Sequence
  Description of Artificial Sequence: Synthetic oligonucleotide
  Antisense strand to SEQ ID NO: 1659945
agaaaugcaacuuucauuc

SEQ ID NO: 1659947 - RNA, 19 nt, Artificial Sequence
  Description of Artificial Sequence: Synthetic oligonucleotide
  Sense strand starting at position 1656 of SEQ ID NO: 1561282
aguugcauuucucugcaua

SEQ ID NO: 1659948 - RNA, 19 nt, Artificial Sequence
  Description of Artificial Sequence: Synthetic oligonucleotide
  Antisense strand to SEQ ID NO: 1659947
uaugcagagaaaugcaacu

SEQ ID NO: 1659949 - RNA, 19 nt, Artificial Sequence
  Description of Artificial Sequence: Synthetic oligonucleotide
  Sense strand starting at position 1657 of SEQ ID NO: 1561282
guugcauuucucugcauau

SEQ ID NO: 1659950 - RNA, 19 nt, Artificial Sequence
  Description of Artificial Sequence: Synthetic oligonucleotide
  Antisense strand to SEQ ID NO: 1659949
auaugcagagaaaugcaac

SEQ ID NO: 1659951 - RNA, 19 nt, Artificial Sequence
  Description of Artificial Sequence: Synthetic oligonucleotide
  Sense strand starting at position 1786 of SEQ ID NO: 1561282
gguuccagauccuugaucu

SEQ ID NO: 1659952 - RNA, 19 nt, Artificial Sequence
  Description of Artificial Sequence: Synthetic oligonucleotide
  Antisense strand to SEQ ID NO: 1659951
agaucaaggaucuggaacc

SEQ ID NO: 1659953 - RNA, 19 nt, Artificial Sequence
  Description of Artificial Sequence: Synthetic oligonucleotide
  Sense strand starting at position 1787 of SEQ ID NO: 1561282
guuccagauccuugaucuc

SEQ ID NO: 1659954 - RNA, 19 nt, Artificial Sequence
  Description of Artificial Sequence: Synthetic oligonucleotide
  Antisense strand to SEQ ID NO: 1659953
gagaucaaggaucuggaac

SEQ ID NO: 1659955 - RNA, 19 nt, Artificial Sequence
  Description of Artificial Sequence: Synthetic oligonucleotide
  Sense strand starting at position 2032 of SEQ ID NO: 1561282
gccaauggacgucaggauu

SEQ ID NO: 1659956 - RNA, 19 nt, Artificial Sequence
  Description of Artificial Sequence: Synthetic oligonucleotide
  Antisense strand to SEQ ID NO: 1659955
aauccugacguccauuggc

SEQ ID NO: 1659957 - RNA, 19 nt, Artificial Sequence
  Description of Artificial Sequence: Synthetic oligonucleotide
  Sense strand starting at position 2229 of SEQ ID NO: 1561282
ggugucugccacgacagaa

SEQ ID NO: 1659958 - RNA, 19 nt, Artificial Sequence
  Description of Artificial Sequence: Synthetic oligonucleotide
  Antisense strand to SEQ ID NO: 1659957
uucugucguggcagacacc

SEQ ID NO: 1659959 - RNA, 19 nt, Artificial Sequence
  Description of Artificial Sequence: Synthetic oligonucleotide
  Sense strand starting at position 2501 of SEQ ID NO: 1561282
cgagaucuccaucgcuaca

SEQ ID NO: 1659960 - RNA, 19 nt, Artificial Sequence
  Description of Artificial Sequence: Synthetic oligonucleotide
  Antisense strand to SEQ ID NO: 1659959
uguagcgauggagaucucg

SEQ ID NO: 1659961 - RNA, 19 nt, Artificial Sequence
  Description of Artificial Sequence: Synthetic oligonucleotide
  Sense strand starting at position 2503 of SEQ ID NO: 1561282
agaucuccaucgcuacaaa

SEQ ID NO: 1659962 - RNA, 19 nt, Artificial Sequence
  Description of Artificial Sequence: Synthetic oligonucleotide
  Antisense strand to SEQ ID NO: 1659961
uuuguagcgauggagaucu

SEQ ID NO: 1659963 - RNA, 19 nt, Artificial Sequence
  Description of Artificial Sequence: Synthetic oligonucleotide
  Sense strand starting at position 2577 of SEQ ID NO: 1561282
ugcagacagccguucaguu

SEQ ID NO: 1659964 - RNA, 19 nt, Artificial Sequence
  Description of Artificial Sequence: Synthetic oligonucleotide
  Antisense strand to SEQ ID NO: 1659963
aacugaacggcugucugca

SEQ ID NO: 1659965 - RNA, 19 nt, Artificial Sequence
  Description of Artificial Sequence: Synthetic oligonucleotide
  Sense strand starting at position 2578 of SEQ ID NO: 1561282
gcagacagccguucaguuu

SEQ ID NO: 1659966 - RNA, 19 nt, Artificial Sequence
  Description of Artificial Sequence: Synthetic oligonucleotide
  Antisense strand to SEQ ID NO: 1659965
aaacugaacggcugucugc

SEQ ID NO: 1659967 - RNA, 19 nt, Artificial Sequence
  Description of Artificial Sequence: Synthetic oligonucleotide
  Sense strand starting at position 2591 of SEQ ID NO: 1561282
caguuugggucauugagag

SEQ ID NO: 1659968 - RNA, 19 nt, Artificial Sequence
  Description of Artificial Sequence: Synthetic oligonucleotide
  Antisense strand to SEQ ID NO: 1659967
cucucaaugacccaaacug

SEQ ID NO: 1659969 - RNA, 19 nt, Artificial Sequence
  Description of Artificial Sequence: Synthetic oligonucleotide
  Sense strand starting at position 2647 of SEQ ID NO: 1561282
gagaaacauuuguguuccu

SEQ ID NO: 1659970 - RNA, 19 nt, Artificial Sequence
  Description of Artificial Sequence: Synthetic oligonucleotide
  Antisense strand to SEQ ID NO: 1659969
aggaacacaaauguuucuc

SEQ ID NO: 1659971 - RNA, 19 nt, Artificial Sequence
  Description of Artificial Sequence: Synthetic oligonucleotide
  Sense strand starting at position 2702 of SEQ ID NO: 1561282
uuugacaucccuuagguau

SEQ ID NO: 1659972 - RNA, 19 nt, Artificial Sequence
  Description of Artificial Sequence: Synthetic oligonucleotide
  Antisense strand to SEQ ID NO: 1659971
auaccuaagggaugucaaa

SEQ ID NO: 1659973 - RNA, 19 nt, Artificial Sequence
  Description of Artificial Sequence: Synthetic oligonucleotide
  Sense strand starting at position 2958 of SEQ ID NO: 1561282
gcauuaggauuacagacau

SEQ ID NO: 1659974 - RNA, 19 nt, Artificial Sequence
  Description of Artificial Sequence: Synthetic oligonucleotide
  Antisense strand to SEQ ID NO: 1659973
augucuguaauccuaaugc

SEQ ID NO: 1659975 - RNA, 19 nt, Artificial Sequence
  Description of Artificial Sequence: Synthetic oligonucleotide
  Sense strand starting at position 2989 of SEQ ID NO: 1561282
ccggccuuaaagugaauau

SEQ ID NO: 1659976 - RNA, 19 nt, Artificial Sequence
  Description of Artificial Sequence: Synthetic oligonucleotide
  Antisense strand to SEQ ID NO: 1659975
auauucacuuuaaggccgg

SEQ ID NO: 1659977 - RNA, 19 nt, Artificial Sequence
  Description of Artificial Sequence: Synthetic oligonucleotide
  Sense strand starting at position 2990 of SEQ ID NO: 1561282
cggccuuaaagugaauauu

SEQ ID NO: 1659978 - RNA, 19 nt, Artificial Sequence
  Description of Artificial Sequence: Synthetic oligonucleotide
  Antisense strand to SEQ ID NO: 1659977
aauauucacuuuaaggccg

SEQ ID NO: 1659979 - RNA, 19 nt, Artificial Sequence
  Description of Artificial Sequence: Synthetic oligonucleotide
  Sense strand starting at position 3028 of SEQ ID NO: 1561282
ccaacaaguuaggugagaa

SEQ ID NO: 1659980 - RNA, 19 nt, Artificial Sequence
  Description of Artificial Sequence: Synthetic oligonucleotide
  Antisense strand to SEQ ID NO: 1659979
uucucaccuaacuuguugg

SEQ ID NO: 1659981 - RNA, 19 nt, Artificial Sequence
  Description of Artificial Sequence: Synthetic oligonucleotide
  Sense strand starting at position 3050 of SEQ ID NO: 1561282
ccaggugucucucuuggaa

SEQ ID NO: 1659982 - RNA, 19 nt, Artificial Sequence
  Description of Artificial Sequence: Synthetic oligonucleotide
  Antisense strand to SEQ ID NO: 1659981
uuccaagagagacaccugg

SEQ ID NO: 1659983 - RNA, 19 nt, Artificial Sequence
  Description of Artificial Sequence: Synthetic oligonucleotide
  Sense strand starting at position 3053 of SEQ ID NO: 1561282
ggugucucucuuggaauag

SEQ ID NO: 1659984 - RNA, 19 nt, Artificial Sequence
  Description of Artificial Sequence: Synthetic oligonucleotide
  Antisense strand to SEQ ID NO: 1659983
cuauuccaagagagacacc

SEQ ID NO: 1659985 - RNA, 19 nt, Artificial Sequence
  Description of Artificial Sequence: Synthetic oligonucleotide
  Sense strand starting at position 3064 of SEQ ID NO: 1561282
uggaauagaucuuaaggca

SEQ ID NO: 1659986 - RNA, 19 nt, Artificial Sequence
  Description of Artificial Sequence: Synthetic oligonucleotide
  Antisense strand to SEQ ID NO: 1659985
ugccuuaagaucuauucca

SEQ ID NO: 1659987 - RNA, 19 nt, Artificial Sequence
  Description of Artificial Sequence: Synthetic oligonucleotide
  Sense strand starting at position 3076 of SEQ ID NO: 1561282
uaaggcaguuucccagaaa

SEQ ID NO: 1659988 - RNA, 19 nt, Artificial Sequence
  Description of Artificial Sequence: Synthetic oligonucleotide
  Antisense strand to SEQ ID NO: 1659987
uuucugggaaacugccuua

SEQ ID NO: 1659989 - RNA, 19 nt, Artificial Sequence
  Description of Artificial Sequence: Synthetic oligonucleotide
  Sense strand starting at position 3079 of SEQ ID NO: 1561282
ggcaguuucccagaaauuc

SEQ ID NO: 1659990 - RNA, 19 nt, Artificial Sequence
  Description of Artificial Sequence: Synthetic oligonucleotide
  Antisense strand to SEQ ID NO: 1659989
gaauuucugggaaacugcc

SEQ ID NO: 1659991 - RNA, 19 nt, Artificial Sequence
  Description of Artificial Sequence: Synthetic oligonucleotide
  Sense strand starting at position 3292 of SEQ ID NO: 1561282
aacauagugguggaaguua

SEQ ID NO: 1659992 - RNA, 19 nt, Artificial Sequence
  Description of Artificial Sequence: Synthetic oligonucleotide
  Antisense strand to SEQ ID NO: 1659991
uaacuuccaccacuauguu

SEQ ID NO: 1659993 - RNA, 19 nt, Artificial Sequence
  Description of Artificial Sequence: Synthetic oligonucleotide
  Sense strand starting at position 3336 of SEQ ID NO: 1561282
gaaggaugucagcaaguga

SEQ ID NO: 1659994 - RNA, 19 nt, Artificial Sequence
  Description of Artificial Sequence: Synthetic oligonucleotide
  Antisense strand to SEQ ID NO: 1659993
ucacuugcugacauccuuc

SEQ ID NO: 1659995 - RNA, 19 nt, Artificial Sequence
  Description of Artificial Sequence: Synthetic oligonucleotide
  Sense strand starting at position 3418 of SEQ ID NO: 1561282
gcuccugguuucucaguga

SEQ ID NO: 1659996 - RNA, 19 nt, Artificial Sequence
  Description of Artificial Sequence: Synthetic oligonucleotide
  Antisense strand to SEQ ID NO: 1659995
ucacugagaaaccaggagc

SEQ ID NO: 1659997 - RNA, 19 nt, Artificial Sequence
  Description of Artificial Sequence: Synthetic oligonucleotide
  Sense strand starting at position 3421 of SEQ ID NO: 1561282
ccugguuucucagugauga

SEQ ID NO: 1659998 - RNA, 19 nt, Artificial Sequence
  Description of Artificial Sequence: Synthetic oligonucleotide
  Antisense strand to SEQ ID NO: 1659997
ucaucacugagaaaccagg

SEQ ID NO: 1659999 - RNA, 19 nt, Artificial Sequence
  Description of Artificial Sequence: Synthetic oligonucleotide
  Sense strand starting at position 3422 of SEQ ID NO: 1561282
cugguuucucagugaugag

SEQ ID NO: 1660000 - RNA, 19 nt, Artificial Sequence
  Description of Artificial Sequence: Synthetic oligonucleotide
  Antisense strand to SEQ ID NO: 1659999
cucaucacugagaaaccag

SEQ ID NO: 1660001 - RNA, 19 nt, Artificial Sequence
  Description of Artificial Sequence: Synthetic oligonucleotide
  Sense strand starting at position 3423 of SEQ ID NO: 1561282
ugguuucucagugaugagu

SEQ ID NO: 1660002 - RNA, 19 nt, Artificial Sequence
  Description of Artificial Sequence: Synthetic oligonucleotide
  Antisense strand to SEQ ID NO: 1660001
acucaucacugagaaacca

SEQ ID NO: 1660003 - RNA, 19 nt, Artificial Sequence
  Description of Artificial Sequence: Synthetic oligonucleotide
  Sense strand starting at position 3470 of SEQ ID NO: 1561282
agcgaaaugcccgcauucu

SEQ ID NO: 1660004 - RNA, 19 nt, Artificial Sequence
  Description of Artificial Sequence: Synthetic oligonucleotide
  Antisense strand to SEQ ID NO: 1660003
agaaugcgggcauuucgcu

SEQ ID NO: 1660005 - RNA, 19 nt, Artificial Sequence
  Description of Artificial Sequence: Synthetic oligonucleotide
  Sense strand starting at position 3563 of SEQ ID NO: 1561282
cugguugcuccagauacau

SEQ ID NO: 1660006 - RNA, 19 nt, Artificial Sequence
  Description of Artificial Sequence: Synthetic oligonucleotide
  Antisense strand to SEQ ID NO: 1660005
auguaucuggagcaaccag

SEQ ID NO: 1660007 - RNA, 19 nt, Artificial Sequence
  Description of Artificial Sequence: Synthetic oligonucleotide
  Sense strand starting at position 213 of SEQ ID NO: 1561283
ucuugaacuccucagguua

SEQ ID NO: 1660008 - RNA, 19 nt, Artificial Sequence
  Description of Artificial Sequence: Synthetic oligonucleotide
  Antisense strand to SEQ ID NO: 1660007
uaaccugaggaguucaaga

SEQ ID NO: 1660009 - RNA, 19 nt, Artificial Sequence
  Description of Artificial Sequence: Synthetic oligonucleotide
  Sense strand starting at position 380 of SEQ ID NO: 1561283
uccuuuaggucucagccaa

SEQ ID NO: 1660010 - RNA, 19 nt, Artificial Sequence
  Description of Artificial Sequence: Synthetic oligonucleotide
  Antisense strand to SEQ ID NO: 1660009
uuggcugagaccuaaagga

SEQ ID NO: 1660011 - RNA, 19 nt, Artificial Sequence
  Description of Artificial Sequence: Synthetic oligonucleotide
  Sense strand starting at position 459 of SEQ ID NO: 1561283
ucccauagucccgauccau

SEQ ID NO: 1660012 - RNA, 19 nt, Artificial Sequence
  Description of Artificial Sequence: Synthetic oligonucleotide
  Antisense strand to SEQ ID NO: 1660011
auggaucgggacuauggga

SEQ ID NO: 1660013 - RNA, 19 nt, Artificial Sequence
  Description of Artificial Sequence: Synthetic oligonucleotide
  Sense strand starting at position 623 of SEQ ID NO: 1561283
agguguccacgucaaagaa

SEQ ID NO: 1660014 - RNA, 19 nt, Artificial Sequence
  Description of Artificial Sequence: Synthetic oligonucleotide
  Antisense strand to SEQ ID NO: 1660013
uucuuugacguggacaccu

SEQ ID NO: 1660015 - RNA, 19 nt, Artificial Sequence
  Description of Artificial Sequence: Synthetic oligonucleotide
  Sense strand starting at position 635 of SEQ ID NO: 1561283
caaagaagcucugauagua

SEQ ID NO: 1660016 - RNA, 19 nt, Artificial Sequence
  Description of Artificial Sequence: Synthetic oligonucleotide
  Antisense strand to SEQ ID NO: 1660015
uacuaucagagcuucuuug

SEQ ID NO: 1660017 - RNA, 19 nt, Artificial Sequence
  Description of Artificial Sequence: Synthetic oligonucleotide
  Sense strand starting at position 912 of SEQ ID NO: 1561283
gggugucagccagaagauu

SEQ ID NO: 1660018 - RNA, 19 nt, Artificial Sequence
  Description of Artificial Sequence: Synthetic oligonucleotide
  Antisense strand to SEQ ID NO: 1660017
aaucuucuggcugacaccc

SEQ ID NO: 1660019 - RNA, 19 nt, Artificial Sequence
  Description of Artificial Sequence: Synthetic oligonucleotide
  Sense strand starting at position 939 of SEQ ID NO: 1561283
ccucgaauucuguggagga

SEQ ID NO: 1660020 - RNA, 19 nt, Artificial Sequence
  Description of Artificial Sequence: Synthetic oligonucleotide
  Antisense strand to SEQ ID NO: 1660019
uccuccacagaauucgagg

SEQ ID NO: 1660021 - RNA, 19 nt, Artificial Sequence
  Description of Artificial Sequence: Synthetic oligonucleotide
  Sense strand starting at position 940 of SEQ ID NO: 1561283
cucgaauucuguggaggag

SEQ ID NO: 1660022 - RNA, 19 nt, Artificial Sequence
  Description of Artificial Sequence: Synthetic oligonucleotide
  Antisense strand to SEQ ID NO: 1660021
cuccuccacagaauucgag

SEQ ID NO: 1660023 - RNA, 19 nt, Artificial Sequence
  Description of Artificial Sequence: Synthetic oligonucleotide
  Sense strand starting at position 942 of SEQ ID NO: 1561283
cgaauucuguggaggaggu

SEQ ID NO: 1660024 - RNA, 19 nt, Artificial Sequence
  Description of Artificial Sequence: Synthetic oligonucleotide
  Antisense strand to SEQ ID NO: 1660023
accuccuccacagaauucg

SEQ ID NO: 1660025 - RNA, 19 nt, Artificial Sequence
  Description of Artificial Sequence: Synthetic oligonucleotide
  Sense strand starting at position 943 of SEQ ID NO: 1561283
gaauucuguggaggaggua

SEQ ID NO: 1660026 - RNA, 19 nt, Artificial Sequence
  Description of Artificial Sequence: Synthetic oligonucleotide
  Antisense strand to SEQ ID NO: 1660025
uaccuccuccacagaauuc

SEQ ID NO: 1660027 - RNA, 19 nt, Artificial Sequence
  Description of Artificial Sequence: Synthetic oligonucleotide
  Sense strand starting at position 1074 of SEQ ID NO: 1561283
ggcccaacuuccucaguuu

SEQ ID NO: 1660028 - RNA, 19 nt, Artificial Sequence
  Description of Artificial Sequence: Synthetic oligonucleotide
  Antisense strand to SEQ ID NO: 1660027
aaacugaggaaguugggcc

SEQ ID NO: 1660029 - RNA, 19 nt, Artificial Sequence
  Description of Artificial Sequence: Synthetic oligonucleotide
  Sense strand starting at position 1191 of SEQ ID NO: 1561283
ggguuugaggucugaguuc

SEQ ID NO: 1660030 - RNA, 19 nt, Artificial Sequence
  Description of Artificial Sequence: Synthetic oligonucleotide
  Antisense strand to SEQ ID NO: 1660029
gaacucagaccucaaaccc

SEQ ID NO: 1660031 - RNA, 19 nt, Artificial Sequence
  Description of Artificial Sequence: Synthetic oligonucleotide
  Sense strand starting at position 1224 of SEQ ID NO: 1561283
guucgagucagagaugggu

SEQ ID NO: 1660032 - RNA, 19 nt, Artificial Sequence
  Description of Artificial Sequence: Synthetic oligonucleotide
  Antisense strand to SEQ ID NO: 1660031
acccaucucugacucgaac

SEQ ID NO: 1660033 - RNA, 19 nt, Artificial Sequence
  Description of Artificial Sequence: Synthetic oligonucleotide
  Sense strand starting at position 1671 of SEQ ID NO: 1561283
gcgccuguccucuuucuau

SEQ ID NO: 1660034 - RNA, 19 nt, Artificial Sequence
  Description of Artificial Sequence: Synthetic oligonucleotide
  Antisense strand to SEQ ID NO: 1660033
auagaaagaggacaggcgc

SEQ ID NO: 1660035 - RNA, 19 nt, Artificial Sequence
  Description of Artificial Sequence: Synthetic oligonucleotide
  Sense strand starting at position 1705 of SEQ ID NO: 1561283
agccacuuccgguaaaguu

SEQ ID NO: 1660036 - RNA, 19 nt, Artificial Sequence
  Description of Artificial Sequence: Synthetic oligonucleotide
  Antisense strand to SEQ ID NO: 1660035
aacuuuaccggaaguggcu

SEQ ID NO: 1660037 - RNA, 19 nt, Artificial Sequence
  Description of Artificial Sequence: Synthetic oligonucleotide
  Sense strand starting at position 1724 of SEQ ID NO: 1561283
ggcgcuugcgcagaagaga

SEQ ID NO: 1660038 - RNA, 19 nt, Artificial Sequence
  Description of Artificial Sequence: Synthetic oligonucleotide
  Antisense strand to SEQ ID NO: 1660037
ucucuucugcgcaagcgcc

SEQ ID NO: 1660039 - RNA, 19 nt, Artificial Sequence
  Description of Artificial Sequence: Synthetic oligonucleotide
  Sense strand starting at position 3709 of SEQ ID NO: 1561283
ggcaaaucauuugagcuua

SEQ ID NO: 1660040 - RNA, 19 nt, Artificial Sequence
  Description of Artificial Sequence: Synthetic oligonucleotide
  Antisense strand to SEQ ID NO: 1660039
uaagcucaaaugauuugcc

SEQ ID NO: 1660041 - RNA, 19 nt, Artificial Sequence
  Description of Artificial Sequence: Synthetic oligonucleotide
  Sense strand starting at position 3790 of SEQ ID NO: 1561283
uaccaaagguguugaauga

SEQ ID NO: 1660042 - RNA, 19 nt, Artificial Sequence
  Description of Artificial Sequence: Synthetic oligonucleotide
  Antisense strand to SEQ ID NO: 1660041
ucauucaacaccuuuggua

SEQ ID NO: 1660043 - RNA, 19 nt, Artificial Sequence
  Description of Artificial Sequence: Synthetic oligonucleotide
  Sense strand starting at position 3797 of SEQ ID NO: 1561283
gguguugaaugagaauuga

SEQ ID NO: 1660044 - RNA, 19 nt, Artificial Sequence
  Description of Artificial Sequence: Synthetic oligonucleotide
  Antisense strand to SEQ ID NO: 1660043
ucaauucucauucaacacc

SEQ ID NO: 1660045 - RNA, 19 nt, Artificial Sequence
  Description of Artificial Sequence: Synthetic oligonucleotide
  Sense strand starting at position 3840 of SEQ ID NO: 1561283
gccagacauguuggaccau

SEQ ID NO: 1660046 - RNA, 19 nt, Artificial Sequence
  Description of Artificial Sequence: Synthetic oligonucleotide
  Antisense strand to SEQ ID NO: 1660045
augguccaacaugucuggc

SEQ ID NO: 1660047 - RNA, 19 nt, Artificial Sequence
  Description of Artificial Sequence: Synthetic oligonucleotide
  Sense strand starting at position 383 of SEQ ID NO: 1561284
cugucuaacuggucauuag

SEQ ID NO: 1660048 - RNA, 19 nt, Artificial Sequence
  Description of Artificial Sequence: Synthetic oligonucleotide
  Antisense strand to SEQ ID NO: 1660047
cuaaugaccaguuagacag

SEQ ID NO: 1660049 - RNA, 19 nt, Artificial Sequence
  Description of Artificial Sequence: Synthetic oligonucleotide
  Sense strand starting at position 384 of SEQ ID NO: 1561284
ugucuaacuggucauuaga

SEQ ID NO: 1660050 - RNA, 19 nt, Artificial Sequence
  Description of Artificial Sequence: Synthetic oligonucleotide
  Antisense strand to SEQ ID NO: 1660049
ucuaaugaccaguuagaca

SEQ ID NO: 1660051 - RNA, 19 nt, Artificial Sequence
  Description of Artificial Sequence: Synthetic oligonucleotide
  Sense strand starting at position 386 of SEQ ID NO: 1561284
ucuaacuggucauuagaau

SEQ ID NO: 1660052 - RNA, 19 nt, Artificial Sequence
  Description of Artificial Sequence: Synthetic oligonucleotide
  Antisense strand to SEQ ID NO: 1660051
auucuaaugaccaguuaga

SEQ ID NO: 1660053 - RNA, 19 nt, Artificial Sequence
  Description of Artificial Sequence: Synthetic oligonucleotide
  Sense strand starting at position 497 of SEQ ID NO: 1561284
ggaauuggagccuggugaa

SEQ ID NO: 1660054 - RNA, 19 nt, Artificial Sequence
  Description of Artificial Sequence: Synthetic oligonucleotide
  Antisense strand to SEQ ID NO: 1660053
uucaccaggcuccaauucc

SEQ ID NO: 1660055 - RNA, 19 nt, Artificial Sequence
  Description of Artificial Sequence: Synthetic oligonucleotide
  Sense strand starting at position 720 of SEQ ID NO: 1561284
ggcuuucugggaggugaaa

SEQ ID NO: 1660056 - RNA, 19 nt, Artificial Sequence
  Description of Artificial Sequence: Synthetic oligonucleotide
  Antisense strand to SEQ ID NO: 1660055
uuucaccucccagaaagcc

SEQ ID NO: 1660057 - RNA, 19 nt, Artificial Sequence
  Description of Artificial Sequence: Synthetic oligonucleotide
  Sense strand starting at position 1555 of SEQ ID NO: 1561284
cagcgcugcugaugaauca

SEQ ID NO: 1660058 - RNA, 19 nt, Artificial Sequence
  Description of Artificial Sequence: Synthetic oligonucleotide
  Antisense strand to SEQ ID NO: 1660057
ugauucaucagcagcgcug

SEQ ID NO: 1660059 - RNA, 19 nt, Artificial Sequence
  Description of Artificial Sequence: Synthetic oligonucleotide
  Sense strand starting at position 1619 of SEQ ID NO: 1561284
agcuuagugucuccagcaa

SEQ ID NO: 1660060 - RNA, 19 nt, Artificial Sequence
  Description of Artificial Sequence: Synthetic oligonucleotide
  Antisense strand to SEQ ID NO: 1660059
uugcuggagacacuaagcu

SEQ ID NO: 1660061 - RNA, 19 nt, Artificial Sequence
  Description of Artificial Sequence: Synthetic oligonucleotide
  Sense strand starting at position 1623 of SEQ ID NO: 1561284
uagugucuccagcaagaug

SEQ ID NO: 1660062 - RNA, 19 nt, Artificial Sequence
  Description of Artificial Sequence: Synthetic oligonucleotide
  Antisense strand to SEQ ID NO: 1660061
caucuugcuggagacacua

SEQ ID NO: 1660063 - RNA, 19 nt, Artificial Sequence
  Description of Artificial Sequence: Synthetic oligonucleotide
  Sense strand starting at position 1772 of SEQ ID NO: 1561284
cccauucugucccagcuau

SEQ ID NO: 1660064 - RNA, 19 nt, Artificial Sequence
  Description of Artificial Sequence: Synthetic oligonucleotide
  Antisense strand to SEQ ID NO: 1660063
auagcugggacagaauggg

SEQ ID NO: 1660065 - RNA, 19 nt, Artificial Sequence
  Description of Artificial Sequence: Synthetic oligonucleotide
  Sense strand starting at position 2347 of SEQ ID NO: 1561284
acuuguauccgggagguca

SEQ ID NO: 1660066 - RNA, 19 nt, Artificial Sequence
  Description of Artificial Sequence: Synthetic oligonucleotide
  Antisense strand to SEQ ID NO: 1660065
ugaccucccggauacaagu

SEQ ID NO: 1660067 - RNA, 19 nt, Artificial Sequence
  Description of Artificial Sequence: Synthetic oligonucleotide
  Sense strand starting at position 2381 of SEQ ID NO: 1561284
uccagaccuccguggagaa

SEQ ID NO: 1660068 - RNA, 19 nt, Artificial Sequence
  Description of Artificial Sequence: Synthetic oligonucleotide
  Antisense strand to SEQ ID NO: 1660067
uucuccacggaggucugga

SEQ ID NO: 1660069 - RNA, 19 nt, Artificial Sequence
  Description of Artificial Sequence: Synthetic oligonucleotide
  Sense strand starting at position 2393 of SEQ ID NO: 1561284
uggagaaggucugacccaa

SEQ ID NO: 1660070 - RNA, 19 nt, Artificial Sequence
  Description of Artificial Sequence: Synthetic oligonucleotide
  Antisense strand to SEQ ID NO: 1660069
uugggucagaccuucucca

SEQ ID NO: 1660071 - RNA, 19 nt, Artificial Sequence
  Description of Artificial Sequence: Synthetic oligonucleotide
  Sense strand starting at position 2555 of SEQ ID NO: 1561284
gaggucacccugugcauau

SEQ ID NO: 1660072 - RNA, 19 nt, Artificial Sequence
  Description of Artificial Sequence: Synthetic oligonucleotide
  Antisense strand to SEQ ID NO: 1660071
auaugcacagggugaccuc

SEQ ID NO: 1660073 - RNA, 19 nt, Artificial Sequence
  Description of Artificial Sequence: Synthetic oligonucleotide
  Sense strand starting at position 3571 of SEQ ID NO: 1561284
uuuguaggcgccugugaaa

SEQ ID NO: 1660074 - RNA, 19 nt, Artificial Sequence
  Description of Artificial Sequence: Synthetic oligonucleotide
  Antisense strand to SEQ ID NO: 1660073
uuucacaggcgccuacaaa

SEQ ID NO: 1660075 - RNA, 19 nt, Artificial Sequence
  Description of Artificial Sequence: Synthetic oligonucleotide
  Sense strand starting at position 3796 of SEQ ID NO: 1561284
ggugacugcccacaagacu

SEQ ID NO: 1660076 - RNA, 19 nt, Artificial Sequence
  Description of Artificial Sequence: Synthetic oligonucleotide
  Antisense strand to SEQ ID NO: 1660075
agucuugugggcagucacc

SEQ ID NO: 1660077 - RNA, 19 nt, Artificial Sequence
  Description of Artificial Sequence: Synthetic oligonucleotide
  Sense strand starting at position 3805 of SEQ ID NO: 1561284
ccacaagacuguuggcuuu

SEQ ID NO: 1660078 - RNA, 19 nt, Artificial Sequence
  Description of Artificial Sequence: Synthetic oligonucleotide
  Antisense strand to SEQ ID NO: 1660077
aaagccaacagucuugugg

SEQ ID NO: 1660079 - RNA, 19 nt, Artificial Sequence
  Description of Artificial Sequence: Synthetic oligonucleotide
  Sense strand starting at position 3808 of SEQ ID NO: 1561284
caagacuguuggcuuucua

SEQ ID NO: 1660080 - RNA, 19 nt, Artificial Sequence
  Description of Artificial Sequence: Synthetic oligonucleotide
  Antisense strand to SEQ ID NO: 1660079
uagaaagccaacagucuug

SEQ ID NO: 1660081 - RNA, 19 nt, Artificial Sequence
  Description of Artificial Sequence: Synthetic oligonucleotide
  Sense strand starting at position 3863 of SEQ ID NO: 1561284
auaacucugccugaugauc

SEQ ID NO: 1660082 - RNA, 19 nt, Artificial Sequence
  Description of Artificial Sequence: Synthetic oligonucleotide
  Antisense strand to SEQ ID NO: 1660081
gaucaucaggcagaguuau

SEQ ID NO: 1660083 - RNA, 19 nt, Artificial Sequence
  Description of Artificial Sequence: Synthetic oligonucleotide
  Sense strand starting at position 3871 of SEQ ID NO: 1561284
gccugaugaucgcgacgaa

SEQ ID NO: 1660084 - RNA, 19 nt, Artificial Sequence
  Description of Artificial Sequence: Synthetic oligonucleotide
  Antisense strand to SEQ ID NO: 1660083
uucgucgcgaucaucaggc

SEQ ID NO: 1660085 - RNA, 19 nt, Artificial Sequence
  Description of Artificial Sequence: Synthetic oligonucleotide
  Sense strand starting at position 457 of SEQ ID NO: 1561285
cucuguccugagugagcaa

SEQ ID NO: 1660086 - RNA, 19 nt, Artificial Sequence
  Description of Artificial Sequence: Synthetic oligonucleotide
  Antisense strand to SEQ ID NO: 1660085
uugcucacucaggacagag

SEQ ID NO: 1660087 - RNA, 19 nt, Artificial Sequence
  Description of Artificial Sequence: Synthetic oligonucleotide
  Sense strand starting at position 458 of SEQ ID NO: 1561285
ucuguccugagugagcaaa

SEQ ID NO: 1660088 - RNA, 19 nt, Artificial Sequence
  Description of Artificial Sequence: Synthetic oligonucleotide
  Antisense strand to SEQ ID NO: 1660087
uuugcucacucaggacaga

SEQ ID NO: 1660089 - RNA, 19 nt, Artificial Sequence
  Description of Artificial Sequence: Synthetic oligonucleotide
  Sense strand starting at position 460 of SEQ ID NO: 1561285
uguccugagugagcaaaua

SEQ ID NO: 1660090 - RNA, 19 nt, Artificial Sequence
  Description of Artificial Sequence: Synthetic oligonucleotide
  Antisense strand to SEQ ID NO: 1660089
uauuugcucacucaggaca

SEQ ID NO: 1660091 - RNA, 19 nt, Artificial Sequence
  Description of Artificial Sequence: Synthetic oligonucleotide
  Sense strand starting at position 496 of SEQ ID NO: 1561285
auuggagcuuauccagaau

SEQ ID NO: 1660092 - RNA, 19 nt, Artificial Sequence
  Description of Artificial Sequence: Synthetic oligonucleotide
  Antisense strand to SEQ ID NO: 1660091
auucuggauaagcuccaau

SEQ ID NO: 1660093 - RNA, 19 nt, Artificial Sequence
  Description of Artificial Sequence: Synthetic oligonucleotide
  Sense strand starting at position 579 of SEQ ID NO: 1561285
gggccagucaguuaacaga

SEQ ID NO: 1660094 - RNA, 19 nt, Artificial Sequence
  Description of Artificial Sequence: Synthetic oligonucleotide
  Antisense strand to SEQ ID NO: 1660093
ucuguuaacugacuggccc

SEQ ID NO: 1660095 - RNA, 19 nt, Artificial Sequence
  Description of Artificial Sequence: Synthetic oligonucleotide
  Sense strand starting at position 599 of SEQ ID NO: 1561285
auaucuaguaguggguuua

SEQ ID NO: 1660096 - RNA, 19 nt, Artificial Sequence
  Description of Artificial Sequence: Synthetic oligonucleotide
  Antisense strand to SEQ ID NO: 1660095
uaaacccacuacuagauau

SEQ ID NO: 1660097 - RNA, 19 nt, Artificial Sequence
  Description of Artificial Sequence: Synthetic oligonucleotide
  Sense strand starting at position 600 of SEQ ID NO: 1561285
uaucuaguaguggguuuaa

SEQ ID NO: 1660098 - RNA, 19 nt, Artificial Sequence
  Description of Artificial Sequence: Synthetic oligonucleotide
  Antisense strand to SEQ ID NO: 1660097
uuaaacccacuacuagaua

SEQ ID NO: 1660099 - RNA, 19 nt, Artificial Sequence
  Description of Artificial Sequence: Synthetic oligonucleotide
  Sense strand starting at position 927 of SEQ ID NO: 1561285
cagucaucacugugaagcu

SEQ ID NO: 1660100 - RNA, 19 nt, Artificial Sequence
  Description of Artificial Sequence: Synthetic oligonucleotide
  Antisense strand to SEQ ID NO: 1660099
agcuucacagugaugacug

SEQ ID NO: 1660101 - RNA, 19 nt, Artificial Sequence
  Description of Artificial Sequence: Synthetic oligonucleotide
  Sense strand starting at position 1119 of SEQ ID NO: 1561285
gaggcuguuuccucucaag

SEQ ID NO: 1660102 - RNA, 19 nt, Artificial Sequence
  Description of Artificial Sequence: Synthetic oligonucleotide
  Antisense strand to SEQ ID NO: 1660101
cuugagaggaaacagccuc

SEQ ID NO: 1660103 - RNA, 19 nt, Artificial Sequence
  Description of Artificial Sequence: Synthetic oligonucleotide
  Sense strand starting at position 1141 of SEQ ID NO: 1561285
uggguaaggagaugguuua

SEQ ID NO: 1660104 - RNA, 19 nt, Artificial Sequence
  Description of Artificial Sequence: Synthetic oligonucleotide
  Antisense strand to SEQ ID NO: 1660103
uaaaccaucuccuuaccca

SEQ ID NO: 1660105 - RNA, 19 nt, Artificial Sequence
  Description of Artificial Sequence: Synthetic oligonucleotide
  Sense strand starting at position 1142 of SEQ ID NO: 1561285
ggguaaggagaugguuuaa

SEQ ID NO: 1660106 - RNA, 19 nt, Artificial Sequence
  Description of Artificial Sequence: Synthetic oligonucleotide
  Antisense strand to SEQ ID NO: 1660105
uuaaaccaucuccuuaccc

SEQ ID NO: 1660107 - RNA, 19 nt, Artificial Sequence
  Description of Artificial Sequence: Synthetic oligonucleotide
  Sense strand starting at position 1288 of SEQ ID NO: 1561285
ccagaaccucagugucuua

SEQ ID NO: 1660108 - RNA, 19 nt, Artificial Sequence
  Description of Artificial Sequence: Synthetic oligonucleotide
  Antisense strand to SEQ ID NO: 1660107
uaagacacugagguucugg

SEQ ID NO: 1660109 - RNA, 19 nt, Artificial Sequence
  Description of Artificial Sequence: Synthetic oligonucleotide
  Sense strand starting at position 1419 of SEQ ID NO: 1561285
gacagaaagaguugugaug

SEQ ID NO: 1660110 - RNA, 19 nt, Artificial Sequence
  Description of Artificial Sequence: Synthetic oligonucleotide
  Antisense strand to SEQ ID NO: 1660109
caucacaacucuuucuguc

SEQ ID NO: 1660111 - RNA, 19 nt, Artificial Sequence
  Description of Artificial Sequence: Synthetic oligonucleotide
  Sense strand starting at position 1578 of SEQ ID NO: 1561285
ggaugucccaaguaucagu

SEQ ID NO: 1660112 - RNA, 19 nt, Artificial Sequence
  Description of Artificial Sequence: Synthetic oligonucleotide
  Antisense strand to SEQ ID NO: 1660111
acugauacuugggacaucc

SEQ ID NO: 1660113 - RNA, 19 nt, Artificial Sequence
  Description of Artificial Sequence: Synthetic oligonucleotide
  Sense strand starting at position 1727 of SEQ ID NO: 1561285
ugugaacuccuagagucaa

SEQ ID NO: 1660114 - RNA, 19 nt, Artificial Sequence
  Description of Artificial Sequence: Synthetic oligonucleotide
  Antisense strand to SEQ ID NO: 1660113
uugacucuaggaguucaca

SEQ ID NO: 1660115 - RNA, 19 nt, Artificial Sequence
  Description of Artificial Sequence: Synthetic oligonucleotide
  Sense strand starting at position 1735 of SEQ ID NO: 1561285
ccuagagucaaagaagugu

SEQ ID NO: 1660116 - RNA, 19 nt, Artificial Sequence
  Description of Artificial Sequence: Synthetic oligonucleotide
  Antisense strand to SEQ ID NO: 1660115
acacuucuuugacucuagg

SEQ ID NO: 1660117 - RNA, 19 nt, Artificial Sequence
  Description of Artificial Sequence: Synthetic oligonucleotide
  Sense strand starting at position 1741 of SEQ ID NO: 1561285
gucaaagaaguguaucugu

SEQ ID NO: 1660118 - RNA, 19 nt, Artificial Sequence
  Description of Artificial Sequence: Synthetic oligonucleotide
  Antisense strand to SEQ ID NO: 1660117
acagauacacuucuuugac

SEQ ID NO: 1660119 - RNA, 19 nt, Artificial Sequence
  Description of Artificial Sequence: Synthetic oligonucleotide
  Sense strand starting at position 1762 of SEQ ID NO: 1561285
cagcaaggaccuuggaaua

SEQ ID NO: 1660120 - RNA, 19 nt, Artificial Sequence
  Description of Artificial Sequence: Synthetic oligonucleotide
  Antisense strand to SEQ ID NO: 1660119
uauuccaagguccuugcug

SEQ ID NO: 1660121 - RNA, 19 nt, Artificial Sequence
  Description of Artificial Sequence: Synthetic oligonucleotide
  Sense strand starting at position 2036 of SEQ ID NO: 1561285
acauuuggaucccaagaau

SEQ ID NO: 1660122 - RNA, 19 nt, Artificial Sequence
  Description of Artificial Sequence: Synthetic oligonucleotide
  Antisense strand to SEQ ID NO: 1660121
auucuugggauccaaaugu

SEQ ID NO: 1660123 - RNA, 19 nt, Artificial Sequence
  Description of Artificial Sequence: Synthetic oligonucleotide
  Sense strand starting at position 2112 of SEQ ID NO: 1561285
cucauuugcugccugggaa

SEQ ID NO: 1660124 - RNA, 19 nt, Artificial Sequence
  Description of Artificial Sequence: Synthetic oligonucleotide
  Antisense strand to SEQ ID NO: 1660123
uucccaggcagcaaaugag

SEQ ID NO: 1660125 - RNA, 19 nt, Artificial Sequence
  Description of Artificial Sequence: Synthetic oligonucleotide
  Sense strand starting at position 2113 of SEQ ID NO: 1561285
ucauuugcugccugggaau

SEQ ID NO: 1660126 - RNA, 19 nt, Artificial Sequence
  Description of Artificial Sequence: Synthetic oligonucleotide
  Antisense strand to SEQ ID NO: 1660125
auucccaggcagcaaauga

SEQ ID NO: 1660127 - RNA, 19 nt, Artificial Sequence
  Description of Artificial Sequence: Synthetic oligonucleotide
  Sense strand starting at position 2145 of SEQ ID NO: 1561285
gugugugagugacucagau

SEQ ID NO: 1660128 - RNA, 19 nt, Artificial Sequence
  Description of Artificial Sequence: Synthetic oligonucleotide
  Antisense strand to SEQ ID NO: 1660127
aucugagucacucacacac

SEQ ID NO: 1660129 - RNA, 19 nt, Artificial Sequence
  Description of Artificial Sequence: Synthetic oligonucleotide
  Sense strand starting at position 2202 of SEQ ID NO: 1561285
acgugugguggucuucgaa

SEQ ID NO: 1660130 - RNA, 19 nt, Artificial Sequence
  Description of Artificial Sequence: Synthetic oligonucleotide
  Antisense strand to SEQ ID NO: 1660129
uucgaagaccaccacacgu

SEQ ID NO: 1660131 - RNA, 19 nt, Artificial Sequence
  Description of Artificial Sequence: Synthetic oligonucleotide
  Sense strand starting at position 2374 of SEQ ID NO: 1561285
gucuuagaggcucaacuuu

SEQ ID NO: 1660132 - RNA, 19 nt, Artificial Sequence
  Description of Artificial Sequence: Synthetic oligonucleotide
  Antisense strand to SEQ ID NO: 1660131
aaaguugagccucuaagac

SEQ ID NO: 1660133 - RNA, 19 nt, Artificial Sequence
  Description of Artificial Sequence: Synthetic oligonucleotide
  Sense strand starting at position 2769 of SEQ ID NO: 1561285
gugccuggcguauauuaga

SEQ ID NO: 1660134 - RNA, 19 nt, Artificial Sequence
  Description of Artificial Sequence: Synthetic oligonucleotide
  Antisense strand to SEQ ID NO: 1660133
ucuaauauacgccaggcac

SEQ ID NO: 1660135 - RNA, 19 nt, Artificial Sequence
  Description of Artificial Sequence: Synthetic oligonucleotide
  Sense strand starting at position 2776 of SEQ ID NO: 1561285
gcguauauuagauacacag

SEQ ID NO: 1660136 - RNA, 19 nt, Artificial Sequence
  Description of Artificial Sequence: Synthetic oligonucleotide
  Antisense strand to SEQ ID NO: 1660135
cuguguaucuaauauacgc

SEQ ID NO: 1660137 - RNA, 19 nt, Artificial Sequence
  Description of Artificial Sequence: Synthetic oligonucleotide
  Sense strand starting at position 3172 of SEQ ID NO: 1561285
cccauaggcuucucuuaag

SEQ ID NO: 1660138 - RNA, 19 nt, Artificial Sequence
  Description of Artificial Sequence: Synthetic oligonucleotide
  Antisense strand to SEQ ID NO: 1660137
cuuaagagaagccuauggg

SEQ ID NO: 1660139 - RNA, 19 nt, Artificial Sequence
  Description of Artificial Sequence: Synthetic oligonucleotide
  Sense strand starting at position 3367 of SEQ ID NO: 1561285
ucagacagggugugucaau

SEQ ID NO: 1660140 - RNA, 19 nt, Artificial Sequence
  Description of Artificial Sequence: Synthetic oligonucleotide
  Antisense strand to SEQ ID NO: 1660139
auugacacacccugucuga

SEQ ID NO: 1660141 - RNA, 19 nt, Artificial Sequence
  Description of Artificial Sequence: Synthetic oligonucleotide
  Sense strand starting at position 3373 of SEQ ID NO: 1561285
agggugugucaauggguga

SEQ ID NO: 1660142 - RNA, 19 nt, Artificial Sequence
  Description of Artificial Sequence: Synthetic oligonucleotide
  Antisense strand to SEQ ID NO: 1660141
ucacccauugacacacccu

SEQ ID NO: 1660143 - RNA, 19 nt, Artificial Sequence
  Description of Artificial Sequence: Synthetic oligonucleotide
  Sense strand starting at position 3425 of SEQ ID NO: 1561285
gaagaugagucagaacgaa

SEQ ID NO: 1660144 - RNA, 19 nt, Artificial Sequence
  Description of Artificial Sequence: Synthetic oligonucleotide
  Antisense strand to SEQ ID NO: 1660143
uucguucugacucaucuuc

SEQ ID NO: 1660145 - RNA, 19 nt, Artificial Sequence
  Description of Artificial Sequence: Synthetic oligonucleotide
  Sense strand starting at position 3457 of SEQ ID NO: 1561285
augugagagcuguguucau

SEQ ID NO: 1660146 - RNA, 19 nt, Artificial Sequence
  Description of Artificial Sequence: Synthetic oligonucleotide
  Antisense strand to SEQ ID NO: 1660145
augaacacagcucucacau

SEQ ID NO: 1660147 - RNA, 19 nt, Artificial Sequence
  Description of Artificial Sequence: Synthetic oligonucleotide
  Sense strand starting at position 3565 of SEQ ID NO: 1561285
gucccucugauauguaugu

SEQ ID NO: 1660148 - RNA, 19 nt, Artificial Sequence
  Description of Artificial Sequence: Synthetic oligonucleotide
  Antisense strand to SEQ ID NO: 1660147
acauacauaucagagggac

SEQ ID NO: 1660149 - RNA, 19 nt, Artificial Sequence
  Description of Artificial Sequence: Synthetic oligonucleotide
  Sense strand starting at position 3566 of SEQ ID NO: 1561285
ucccucugauauguaugua

SEQ ID NO: 1660150 - RNA, 19 nt, Artificial Sequence
  Description of Artificial Sequence: Synthetic oligonucleotide
  Antisense strand to SEQ ID NO: 1660149
uacauacauaucagaggga

SEQ ID NO: 1660151 - RNA, 19 nt, Artificial Sequence
  Description of Artificial Sequence: Synthetic oligonucleotide
  Sense strand starting at position 3752 of SEQ ID NO: 1561285
acaucaugugcuugugacu

SEQ ID NO: 1660152 - RNA, 19 nt, Artificial Sequence
  Description of Artificial Sequence: Synthetic oligonucleotide
  Antisense strand to SEQ ID NO: 1660151
agucacaagcacaugaugu

SEQ ID NO: 1660153 - RNA, 19 nt, Artificial Sequence
  Description of Artificial Sequence: Synthetic oligonucleotide
  Sense strand starting at position 3782 of SEQ ID NO: 1561285
cugguuugcucauugauga

SEQ ID NO: 1660154 - RNA, 19 nt, Artificial Sequence
  Description of Artificial Sequence: Synthetic oligonucleotide
  Antisense strand to SEQ ID NO: 1660153
ucaucaaugagcaaaccag

SEQ ID NO: 1660155 - RNA, 19 nt, Artificial Sequence
  Description of Artificial Sequence: Synthetic oligonucleotide
  Sense strand starting at position 3783 of SEQ ID NO: 1561285
ugguuugcucauugaugau

SEQ ID NO: 1660156 - RNA, 19 nt, Artificial Sequence
  Description of Artificial Sequence: Synthetic oligonucleotide
  Antisense strand to SEQ ID NO: 1660155
aucaucaaugagcaaacca

SEQ ID NO: 1660157 - RNA, 19 nt, Artificial Sequence
  Description of Artificial Sequence: Synthetic oligonucleotide
  Sense strand starting at position 3789 of SEQ ID NO: 1561285
gcucauugaugaucgagag

SEQ ID NO: 1660158 - RNA, 19 nt, Artificial Sequence
  Description of Artificial Sequence: Synthetic oligonucleotide
  Antisense strand to SEQ ID NO: 1660157
cucucgaucaucaaugagc

SEQ ID NO: 1660159 - RNA, 19 nt, Artificial Sequence
  Description of Artificial Sequence: Synthetic oligonucleotide
  Sense strand starting at position 3790 of SEQ ID NO: 1561285
cucauugaugaucgagaga

SEQ ID NO: 1660160 - RNA, 19 nt, Artificial Sequence
  Description of Artificial Sequence: Synthetic oligonucleotide
  Antisense strand to SEQ ID NO: 1660159
ucucucgaucaucaaugag

SEQ ID NO: 1660161 - RNA, 19 nt, Artificial Sequence
  Description of Artificial Sequence: Synthetic oligonucleotide
  Sense strand starting at position 3806 of SEQ ID NO: 1561285
agaguuggagacugcucaa

SEQ ID NO: 1660162 - RNA, 19 nt, Artificial Sequence
  Description of Artificial Sequence: Synthetic oligonucleotide
  Antisense strand to SEQ ID NO: 1660161
uugagcagucuccaacucu

SEQ ID NO: 1660163 - RNA, 19 nt, Artificial Sequence
  Description of Artificial Sequence: Synthetic oligonucleotide
  Sense strand starting at position 3829 of SEQ ID NO: 1561285
cagcauucuguguaagcca

SEQ ID NO: 1660164 - RNA, 19 nt, Artificial Sequence
  Description of Artificial Sequence: Synthetic oligonucleotide
  Antisense strand to SEQ ID NO: 1660163
uggcuuacacagaaugcug

SEQ ID NO: 1660165 - RNA, 19 nt, Artificial Sequence
  Description of Artificial Sequence: Synthetic oligonucleotide
  Sense strand starting at position 387 of SEQ ID NO: 1561286
ggguguuggccucaaucac

SEQ ID NO: 1660166 - RNA, 19 nt, Artificial Sequence
  Description of Artificial Sequence: Synthetic oligonucleotide
  Antisense strand to SEQ ID NO: 1660165
gugauugaggccaacaccc

SEQ ID NO: 1660167 - RNA, 19 nt, Artificial Sequence
  Description of Artificial Sequence: Synthetic oligonucleotide
  Sense strand starting at position 685 of SEQ ID NO: 1561286
caggauugcugccucagaa

SEQ ID NO: 1660168 - RNA, 19 nt, Artificial Sequence
  Description of Artificial Sequence: Synthetic oligonucleotide
  Antisense strand to SEQ ID NO: 1660167
uucugaggcagcaauccug

SEQ ID NO: 1660169 - RNA, 19 nt, Artificial Sequence
  Description of Artificial Sequence: Synthetic oligonucleotide
  Sense strand starting at position 784 of SEQ ID NO: 1561286
gggugugccuagucacuaa

SEQ ID NO: 1660170 - RNA, 19 nt, Artificial Sequence
  Description of Artificial Sequence: Synthetic oligonucleotide
  Antisense strand to SEQ ID NO: 1660169
uuagugacuaggcacaccc

SEQ ID NO: 1660171 - RNA, 19 nt, Artificial Sequence
  Description of Artificial Sequence: Synthetic oligonucleotide
  Sense strand starting at position 1006 of SEQ ID NO: 1561286
gauagcugcccauggagua

SEQ ID NO: 1660172 - RNA, 19 nt, Artificial Sequence
  Description of Artificial Sequence: Synthetic oligonucleotide
  Antisense strand to SEQ ID NO: 1660171
uacuccaugggcagcuauc

SEQ ID NO: 1660173 - RNA, 19 nt, Artificial Sequence
  Description of Artificial Sequence: Synthetic oligonucleotide
  Sense strand starting at position 1084 of SEQ ID NO: 1561286
ucuggaaucugaggaguuc

SEQ ID NO: 1660174 - RNA, 19 nt, Artificial Sequence
  Description of Artificial Sequence: Synthetic oligonucleotide
  Antisense strand to SEQ ID NO: 1660173
gaacuccucagauuccaga

SEQ ID NO: 1660175 - RNA, 19 nt, Artificial Sequence
  Description of Artificial Sequence: Synthetic oligonucleotide
  Sense strand starting at position 1121 of SEQ ID NO: 1561286
gcagguaaaccgugauccu

SEQ ID NO: 1660176 - RNA, 19 nt, Artificial Sequence
  Description of Artificial Sequence: Synthetic oligonucleotide
  Antisense strand to SEQ ID NO: 1660175
aggaucacgguuuaccugc

SEQ ID NO: 1660177 - RNA, 19 nt, Artificial Sequence
  Description of Artificial Sequence: Synthetic oligonucleotide
  Sense strand starting at position 1122 of SEQ ID NO: 1561286
cagguaaaccgugauccuu

SEQ ID NO: 1660178 - RNA, 19 nt, Artificial Sequence
  Description of Artificial Sequence: Synthetic oligonucleotide
  Antisense strand to SEQ ID NO: 1660177
aaggaucacgguuuaccug

SEQ ID NO: 1660179 - RNA, 19 nt, Artificial Sequence
  Description of Artificial Sequence: Synthetic oligonucleotide
  Sense strand starting at position 1169 of SEQ ID NO: 1561286
ggaugagauacucggcuca

SEQ ID NO: 1660180 - RNA, 19 nt, Artificial Sequence
  Description of Artificial Sequence: Synthetic oligonucleotide
  Antisense strand to SEQ ID NO: 1660179
ugagccgaguaucucaucc

SEQ ID NO: 1660181 - RNA, 19 nt, Artificial Sequence
  Description of Artificial Sequence: Synthetic oligonucleotide
  Sense strand starting at position 1171 of SEQ ID NO: 1561286
augagauacucggcucauc

SEQ ID NO: 1660182 - RNA, 19 nt, Artificial Sequence
  Description of Artificial Sequence: Synthetic oligonucleotide
  Antisense strand to SEQ ID NO: 1660181
gaugagccgaguaucucau

SEQ ID NO: 1660183 - RNA, 19 nt, Artificial Sequence
  Description of Artificial Sequence: Synthetic oligonucleotide
  Sense strand starting at position 1716 of SEQ ID NO: 1561286
cugaaaggauucuaaucug

SEQ ID NO: 1660184 - RNA, 19 nt, Artificial Sequence
  Description of Artificial Sequence: Synthetic oligonucleotide
  Antisense strand to SEQ ID NO: 1660183
cagauuagaauccuuucag

SEQ ID NO: 1660185 - RNA, 19 nt, Artificial Sequence
  Description of Artificial Sequence: Synthetic oligonucleotide
  Sense strand starting at position 1749 of SEQ ID NO: 1561286
acggaaacuugcgcaucaa

SEQ ID NO: 1660186 - RNA, 19 nt, Artificial Sequence
  Description of Artificial Sequence: Synthetic oligonucleotide
  Antisense strand to SEQ ID NO: 1660185
uugaugcgcaaguuuccgu

SEQ ID NO: 1660187 - RNA, 19 nt, Artificial Sequence
  Description of Artificial Sequence: Synthetic oligonucleotide
  Sense strand starting at position 1750 of SEQ ID NO: 1561286
cggaaacuugcgcaucaac

SEQ ID NO: 1660188 - RNA, 19 nt, Artificial Sequence
  Description of Artificial Sequence: Synthetic oligonucleotide
  Antisense strand to SEQ ID NO: 1660187
guugaugcgcaaguuuccg

SEQ ID NO: 1660189 - RNA, 19 nt, Artificial Sequence
  Description of Artificial Sequence: Synthetic oligonucleotide
  Sense strand starting at position 1761 of SEQ ID NO: 1561286
gcaucaacccgagagacuu

SEQ ID NO: 1660190 - RNA, 19 nt, Artificial Sequence
  Description of Artificial Sequence: Synthetic oligonucleotide
  Antisense strand to SEQ ID NO: 1660189
aagucucucggguugaugc

SEQ ID NO: 1660191 - RNA, 19 nt, Artificial Sequence
  Description of Artificial Sequence: Synthetic oligonucleotide
  Sense strand starting at position 2380 of SEQ ID NO: 1561286
uccucuuagucggaaccaa

SEQ ID NO: 1660192 - RNA, 19 nt, Artificial Sequence
  Description of Artificial Sequence: Synthetic oligonucleotide
  Antisense strand to SEQ ID NO: 1660191
uugguuccgacuaagagga

SEQ ID NO: 1660193 - RNA, 19 nt, Artificial Sequence
  Description of Artificial Sequence: Synthetic oligonucleotide
  Sense strand starting at position 2427 of SEQ ID NO: 1561286
cgaggaaugucuggaccag

SEQ ID NO: 1660194 - RNA, 19 nt, Artificial Sequence
  Description of Artificial Sequence: Synthetic oligonucleotide
  Antisense strand to SEQ ID NO: 1660193
cugguccagacauuccucg

SEQ ID NO: 1660195 - RNA, 19 nt, Artificial Sequence
  Description of Artificial Sequence: Synthetic oligonucleotide
  Sense strand starting at position 2484 of SEQ ID NO: 1561286
gcgggccugcgcgaucaau

SEQ ID NO: 1660196 - RNA, 19 nt, Artificial Sequence
  Description of Artificial Sequence: Synthetic oligonucleotide
  Antisense strand to SEQ ID NO: 1660195
auugaucgcgcaggcccgc

SEQ ID NO: 1660197 - RNA, 19 nt, Artificial Sequence
  Description of Artificial Sequence: Synthetic oligonucleotide
  Sense strand starting at position 2502 of SEQ ID NO: 1561286
uccgcaagcucccugugau

SEQ ID NO: 1660198 - RNA, 19 nt, Artificial Sequence
  Description of Artificial Sequence: Synthetic oligonucleotide
  Antisense strand to SEQ ID NO: 1660197
aucacagggagcuugcgga

SEQ ID NO: 1660199 - RNA, 19 nt, Artificial Sequence
  Description of Artificial Sequence: Synthetic oligonucleotide
  Sense strand starting at position 2503 of SEQ ID NO: 1561286
ccgcaagcucccugugaug

SEQ ID NO: 1660200 - RNA, 19 nt, Artificial Sequence
  Description of Artificial Sequence: Synthetic oligonucleotide
  Antisense strand to SEQ ID NO: 1660199
caucacagggagcuugcgg

SEQ ID NO: 1660201 - RNA, 19 nt, Artificial Sequence
  Description of Artificial Sequence: Synthetic oligonucleotide
  Sense strand starting at position 2555 of SEQ ID NO: 1561286
caacguguucuggccaguu

SEQ ID NO: 1660202 - RNA, 19 nt, Artificial Sequence
  Description of Artificial Sequence: Synthetic oligonucleotide
  Antisense strand to SEQ ID NO: 1660201
aacuggccagaacacguug

SEQ ID NO: 1660203 - RNA, 19 nt, Artificial Sequence
  Description of Artificial Sequence: Synthetic oligonucleotide
  Sense strand starting at position 2557 of SEQ ID NO: 1561286
acguguucuggccaguuua

SEQ ID NO: 1660204 - RNA, 19 nt, Artificial Sequence
  Description of Artificial Sequence: Synthetic oligonucleotide
  Antisense strand to SEQ ID NO: 1660203
uaaacuggccagaacacgu

SEQ ID NO: 1660205 - RNA, 19 nt, Artificial Sequence
  Description of Artificial Sequence: Synthetic oligonucleotide
  Sense strand starting at position 2601 of SEQ ID NO: 1561286
gccuuauuccugugacacg

SEQ ID NO: 1660206 - RNA, 19 nt, Artificial Sequence
  Description of Artificial Sequence: Synthetic oligonucleotide
  Antisense strand to SEQ ID NO: 1660205
cgugucacaggaauaaggc

SEQ ID NO: 1660207 - RNA, 19 nt, Artificial Sequence
  Description of Artificial Sequence: Synthetic oligonucleotide
  Sense strand starting at position 2617 of SEQ ID NO: 1561286
acgggugagagcugaagua

SEQ ID NO: 1660208 - RNA, 19 nt, Artificial Sequence
  Description of Artificial Sequence: Synthetic oligonucleotide
  Antisense strand to SEQ ID NO: 1660207
uacuucagcucucacccgu

SEQ ID NO: 1660209 - RNA, 19 nt, Artificial Sequence
  Description of Artificial Sequence: Synthetic oligonucleotide
  Sense strand starting at position 2807 of SEQ ID NO: 1561286
ugagcuagacccugugaga

SEQ ID NO: 1660210 - RNA, 19 nt, Artificial Sequence
  Description of Artificial Sequence: Synthetic oligonucleotide
  Antisense strand to SEQ ID NO: 1660209
ucucacagggucuagcuca

SEQ ID NO: 1660211 - RNA, 19 nt, Artificial Sequence
  Description of Artificial Sequence: Synthetic oligonucleotide
  Sense strand starting at position 2818 of SEQ ID NO: 1561286
cugugagauucugggacau

SEQ ID NO: 1660212 - RNA, 19 nt, Artificial Sequence
  Description of Artificial Sequence: Synthetic oligonucleotide
  Antisense strand to SEQ ID NO: 1660211
augucccagaaucucacag

SEQ ID NO: 1660213 - RNA, 19 nt, Artificial Sequence
  Description of Artificial Sequence: Synthetic oligonucleotide
  Sense strand starting at position 2820 of SEQ ID NO: 1561286
gugagauucugggacauug

SEQ ID NO: 1660214 - RNA, 19 nt, Artificial Sequence
  Description of Artificial Sequence: Synthetic oligonucleotide
  Antisense strand to SEQ ID NO: 1660213
caaugucccagaaucucac

SEQ ID NO: 1660215 - RNA, 19 nt, Artificial Sequence
  Description of Artificial Sequence: Synthetic oligonucleotide
  Sense strand starting at position 2884 of SEQ ID NO: 1561286
ccgagauuuccgugcccaa

SEQ ID NO: 1660216 - RNA, 19 nt, Artificial Sequence
  Description of Artificial Sequence: Synthetic oligonucleotide
  Antisense strand to SEQ ID NO: 1660215
uugggcacggaaaucucgg

SEQ ID NO: 1660217 - RNA, 19 nt, Artificial Sequence
  Description of Artificial Sequence: Synthetic oligonucleotide
  Sense strand starting at position 2887 of SEQ ID NO: 1561286
agauuuccgugcccaaauc

SEQ ID NO: 1660218 - RNA, 19 nt, Artificial Sequence
  Description of Artificial Sequence: Synthetic oligonucleotide
  Antisense strand to SEQ ID NO: 1660217
gauuugggcacggaaaucu

SEQ ID NO: 1660219 - RNA, 19 nt, Artificial Sequence
  Description of Artificial Sequence: Synthetic oligonucleotide
  Sense strand starting at position 2944 of SEQ ID NO: 1561286
guuacacuacauggugaaa

SEQ ID NO: 1660220 - RNA, 19 nt, Artificial Sequence
  Description of Artificial Sequence: Synthetic oligonucleotide
  Antisense strand to SEQ ID NO: 1660219
uuucaccauguaguguaac

SEQ ID NO: 1660221 - RNA, 19 nt, Artificial Sequence
  Description of Artificial Sequence: Synthetic oligonucleotide
  Sense strand starting at position 2970 of SEQ ID NO: 1561286
ugcggaaauaauuaagguu

SEQ ID NO: 1660222 - RNA, 19 nt, Artificial Sequence
  Description of Artificial Sequence: Synthetic oligonucleotide
  Antisense strand to SEQ ID NO: 1660221
aaccuuaauuauuuccgca

SEQ ID NO: 1660223 - RNA, 19 nt, Artificial Sequence
  Description of Artificial Sequence: Synthetic oligonucleotide
  Sense strand starting at position 2973 of SEQ ID NO: 1561286
ggaaauaauuaagguuacu

SEQ ID NO: 1660224 - RNA, 19 nt, Artificial Sequence
  Description of Artificial Sequence: Synthetic oligonucleotide
  Antisense strand to SEQ ID NO: 1660223
aguaaccuuaauuauuucc

SEQ ID NO: 1660225 - RNA, 19 nt, Artificial Sequence
  Description of Artificial Sequence: Synthetic oligonucleotide
  Sense strand starting at position 2983 of SEQ ID NO: 1561286
aagguuacucauuagcuga

SEQ ID NO: 1660226 - RNA, 19 nt, Artificial Sequence
  Description of Artificial Sequence: Synthetic oligonucleotide
  Antisense strand to SEQ ID NO: 1660225
ucagcuaaugaguaaccuu

SEQ ID NO: 1660227 - RNA, 19 nt, Artificial Sequence
  Description of Artificial Sequence: Synthetic oligonucleotide
  Sense strand starting at position 3035 of SEQ ID NO: 1561286
guagguccaagguaucaua

SEQ ID NO: 1660228 - RNA, 19 nt, Artificial Sequence
  Description of Artificial Sequence: Synthetic oligonucleotide
  Antisense strand to SEQ ID NO: 1660227
uaugauaccuuggaccuac

SEQ ID NO: 1660229 - RNA, 19 nt, Artificial Sequence
  Description of Artificial Sequence: Synthetic oligonucleotide
  Sense strand starting at position 3079 of SEQ ID NO: 1561286
gguggagaaacuugaagua

SEQ ID NO: 1660230 - RNA, 19 nt, Artificial Sequence
  Description of Artificial Sequence: Synthetic oligonucleotide
  Antisense strand to SEQ ID NO: 1660229
uacuucaaguuucuccacc

SEQ ID NO: 1660231 - RNA, 19 nt, Artificial Sequence
  Description of Artificial Sequence: Synthetic oligonucleotide
  Sense strand starting at position 3108 of SEQ ID NO: 1561286
uccagaggcuuugaaggua

SEQ ID NO: 1660232 - RNA, 19 nt, Artificial Sequence
  Description of Artificial Sequence: Synthetic oligonucleotide
  Antisense strand to SEQ ID NO: 1660231
uaccuucaaagccucugga

SEQ ID NO: 1660233 - RNA, 19 nt, Artificial Sequence
  Description of Artificial Sequence: Synthetic oligonucleotide
  Sense strand starting at position 3128 of SEQ ID NO: 1561286
agagguccaugagaggaaa

SEQ ID NO: 1660234 - RNA, 19 nt, Artificial Sequence
  Description of Artificial Sequence: Synthetic oligonucleotide
  Antisense strand to SEQ ID NO: 1660233
uuuccucucauggaccucu

SEQ ID NO: 1660235 - RNA, 19 nt, Artificial Sequence
  Description of Artificial Sequence: Synthetic oligonucleotide
  Sense strand starting at position 3158 of SEQ ID NO: 1561286
aggugucaugcugagaauc

SEQ ID NO: 1660236 - RNA, 19 nt, Artificial Sequence
  Description of Artificial Sequence: Synthetic oligonucleotide
  Antisense strand to SEQ ID NO: 1660235
gauucucagcaugacaccu

SEQ ID NO: 1660237 - RNA, 19 nt, Artificial Sequence
  Description of Artificial Sequence: Synthetic oligonucleotide
  Sense strand starting at position 3166 of SEQ ID NO: 1561286
ugcugagaaucugagaaga

SEQ ID NO: 1660238 - RNA, 19 nt, Artificial Sequence
  Description of Artificial Sequence: Synthetic oligonucleotide
  Antisense strand to SEQ ID NO: 1660237
ucuucucagauucucagca

SEQ ID NO: 1660239 - RNA, 19 nt, Artificial Sequence
  Description of Artificial Sequence: Synthetic oligonucleotide
  Sense strand starting at position 3850 of SEQ ID NO: 1561286
agaccuuagcccuagaagu

SEQ ID NO: 1660240 - RNA, 19 nt, Artificial Sequence
  Description of Artificial Sequence: Synthetic oligonucleotide
  Antisense strand to SEQ ID NO: 1660239
acuucuagggcuaaggucu

SEQ ID NO: 1660241 - RNA, 19 nt, Artificial Sequence
  Description of Artificial Sequence: Synthetic oligonucleotide
  Sense strand starting at position 3874 of SEQ ID NO: 1561286
gagcuagauuccgcccaca

SEQ ID NO: 1660242 - RNA, 19 nt, Artificial Sequence
  Description of Artificial Sequence: Synthetic oligonucleotide
  Antisense strand to SEQ ID NO: 1660241
ugugggcggaaucuagcuc

SEQ ID NO: 1660243 - RNA, 19 nt, Artificial Sequence
  Description of Artificial Sequence: Synthetic oligonucleotide
  Sense strand starting at position 3935 of SEQ ID NO: 1561286
gauagcagcuuaguccaua

SEQ ID NO: 1660244 - RNA, 19 nt, Artificial Sequence
  Description of Artificial Sequence: Synthetic oligonucleotide
  Antisense strand to SEQ ID NO: 1660243
uauggacuaagcugcuauc

SEQ ID NO: 1660245 - RNA, 19 nt, Artificial Sequence
  Description of Artificial Sequence: Synthetic oligonucleotide
  Sense strand starting at position 31 of SEQ ID NO: 1561287
gcugcauuccgccaacauu

SEQ ID NO: 1660246 - RNA, 19 nt, Artificial Sequence
  Description of Artificial Sequence: Synthetic oligonucleotide
  Antisense strand to SEQ ID NO: 1660245
aauguuggcggaaugcagc

SEQ ID NO: 1660247 - RNA, 19 nt, Artificial Sequence
  Description of Artificial Sequence: Synthetic oligonucleotide
  Sense strand starting at position 2046 of SEQ ID NO: 1561287
ccguaugaugcucgcgacu

SEQ ID NO: 1660248 - RNA, 19 nt, Artificial Sequence
  Description of Artificial Sequence: Synthetic oligonucleotide
  Antisense strand to SEQ ID NO: 1660247
agucgcgagcaucauacgg

SEQ ID NO: 1660249 - RNA, 19 nt, Artificial Sequence
  Description of Artificial Sequence: Synthetic oligonucleotide
  Sense strand starting at position 2070 of SEQ ID NO: 1561287
ccugguuucuccgagggca

SEQ ID NO: 1660250 - RNA, 19 nt, Artificial Sequence
  Description of Artificial Sequence: Synthetic oligonucleotide
  Antisense strand to SEQ ID NO: 1660249
ugcccucggagaaaccagg

SEQ ID NO: 1660251 - RNA, 19 nt, Artificial Sequence
  Description of Artificial Sequence: Synthetic oligonucleotide
  Sense strand starting at position 2073 of SEQ ID NO: 1561287
gguuucuccgagggcaaga

SEQ ID NO: 1660252 - RNA, 19 nt, Artificial Sequence
  Description of Artificial Sequence: Synthetic oligonucleotide
  Antisense strand to SEQ ID NO: 1660251
ucuugcccucggagaaacc

SEQ ID NO: 1660253 - RNA, 19 nt, Artificial Sequence
  Description of Artificial Sequence: Synthetic oligonucleotide
  Sense strand starting at position 2094 of SEQ ID NO: 1561287
gguccucccuugucuuaaa

SEQ ID NO: 1660254 - RNA, 19 nt, Artificial Sequence
  Description of Artificial Sequence: Synthetic oligonucleotide
  Antisense strand to SEQ ID NO: 1660253
uuuaagacaagggaggacc

SEQ ID NO: 1660255 - RNA, 19 nt, Artificial Sequence
  Description of Artificial Sequence: Synthetic oligonucleotide
  Sense strand starting at position 2097 of SEQ ID NO: 1561287
ccucccuugucuuaaaggu

SEQ ID NO: 1660256 - RNA, 19 nt, Artificial Sequence
  Description of Artificial Sequence: Synthetic oligonucleotide
  Antisense strand to SEQ ID NO: 1660255
accuuuaagacaagggagg

SEQ ID NO: 1660257 - RNA, 19 nt, Artificial Sequence
  Description of Artificial Sequence: Synthetic oligonucleotide
  Sense strand starting at position 2243 of SEQ ID NO: 1561287
gggagaccgggcuguuauu

SEQ ID NO: 1660258 - RNA, 19 nt, Artificial Sequence
  Description of Artificial Sequence: Synthetic oligonucleotide
  Antisense strand to SEQ ID NO: 1660257
aauaacagcccggucuccc

SEQ ID NO: 1660259 - RNA, 19 nt, Artificial Sequence
  Description of Artificial Sequence: Synthetic oligonucleotide
  Sense strand starting at position 2760 of SEQ ID NO: 1561287
cugcccucccgcgauuaua

SEQ ID NO: 1660260 - RNA, 19 nt, Artificial Sequence
  Description of Artificial Sequence: Synthetic oligonucleotide
  Antisense strand to SEQ ID NO: 1660259
uauaaucgcgggagggcag

SEQ ID NO: 1660261 - RNA, 19 nt, Artificial Sequence
  Description of Artificial Sequence: Synthetic oligonucleotide
  Sense strand starting at position 2763 of SEQ ID NO: 1561287
cccucccgcgauuauauaa

SEQ ID NO: 1660262 - RNA, 19 nt, Artificial Sequence
  Description of Artificial Sequence: Synthetic oligonucleotide
  Antisense strand to SEQ ID NO: 1660261
uuauauaaucgcgggaggg

SEQ ID NO: 1660263 - RNA, 19 nt, Artificial Sequence
  Description of Artificial Sequence: Synthetic oligonucleotide
  Sense strand starting at position 3006 of SEQ ID NO: 1561287
guugguucagcgcgacuuu

SEQ ID NO: 1660264 - RNA, 19 nt, Artificial Sequence
  Description of Artificial Sequence: Synthetic oligonucleotide
  Antisense strand to SEQ ID NO: 1660263
aaagucgcgcugaaccaac

SEQ ID NO: 1660265 - RNA, 19 nt, Artificial Sequence
  Description of Artificial Sequence: Synthetic oligonucleotide
  Sense strand starting at position 3244 of SEQ ID NO: 1561287
uuuagcugccguuuaguga

SEQ ID NO: 1660266 - RNA, 19 nt, Artificial Sequence
  Description of Artificial Sequence: Synthetic oligonucleotide
  Antisense strand to SEQ ID NO: 1660265
ucacuaaacggcagcuaaa

SEQ ID NO: 1660267 - RNA, 19 nt, Artificial Sequence
  Description of Artificial Sequence: Synthetic oligonucleotide
  Sense strand starting at position 3251 of SEQ ID NO: 1561287
gccguuuagugagcgcuua

SEQ ID NO: 1660268 - RNA, 19 nt, Artificial Sequence
  Description of Artificial Sequence: Synthetic oligonucleotide
  Antisense strand to SEQ ID NO: 1660267
uaagcgcucacuaaacggc

SEQ ID NO: 1660269 - RNA, 19 nt, Artificial Sequence
  Description of Artificial Sequence: Synthetic oligonucleotide
  Sense strand starting at position 3252 of SEQ ID NO: 1561287
ccguuuagugagcgcuuau

SEQ ID NO: 1660270 - RNA, 19 nt, Artificial Sequence
  Description of Artificial Sequence: Synthetic oligonucleotide
  Antisense strand to SEQ ID NO: 1660269
auaagcgcucacuaaacgg

SEQ ID NO: 1660271 - RNA, 19 nt, Artificial Sequence
  Description of Artificial Sequence: Synthetic oligonucleotide
  Sense strand starting at position 3253 of SEQ ID NO: 1561287
cguuuagugagcgcuuauc

SEQ ID NO: 1660272 - RNA, 19 nt, Artificial Sequence
  Description of Artificial Sequence: Synthetic oligonucleotide
  Antisense strand to SEQ ID NO: 1660271
gauaagcgcucacuaaacg

SEQ ID NO: 1660273 - RNA, 19 nt, Artificial Sequence
  Description of Artificial Sequence: Synthetic oligonucleotide
  Sense strand starting at position 3263 of SEQ ID NO: 1561287
gcgcuuauccaguggguga

SEQ ID NO: 1660274 - RNA, 19 nt, Artificial Sequence
  Description of Artificial Sequence: Synthetic oligonucleotide
  Antisense strand to SEQ ID NO: 1660273
ucacccacuggauaagcgc

SEQ ID NO: 1660275 - RNA, 19 nt, Artificial Sequence
  Description of Artificial Sequence: Synthetic oligonucleotide
  Sense strand starting at position 3317 of SEQ ID NO: 1561287
accuaaucccagggucauu

SEQ ID NO: 1660276 - RNA, 19 nt, Artificial Sequence
  Description of Artificial Sequence: Synthetic oligonucleotide
  Antisense strand to SEQ ID NO: 1660275
aaugacccugggauuaggu

SEQ ID NO: 1660277 - RNA, 19 nt, Artificial Sequence
  Description of Artificial Sequence: Synthetic oligonucleotide
  Sense strand starting at position 3322 of SEQ ID NO: 1561287
aucccagggucauuauuau

SEQ ID NO: 1660278 - RNA, 19 nt, Artificial Sequence
  Description of Artificial Sequence: Synthetic oligonucleotide
  Antisense strand to SEQ ID NO: 1660277
auaauaaugacccugggau

SEQ ID NO: 1660279 - RNA, 19 nt, Artificial Sequence
  Description of Artificial Sequence: Synthetic oligonucleotide
  Sense strand starting at position 3354 of SEQ ID NO: 1561287
cuggcauucuuaguaccaa

SEQ ID NO: 1660280 - RNA, 19 nt, Artificial Sequence
  Description of Artificial Sequence: Synthetic oligonucleotide
  Antisense strand to SEQ ID NO: 1660279
uugguacuaagaaugccag

SEQ ID NO: 1660281 - RNA, 19 nt, Artificial Sequence
  Description of Artificial Sequence: Synthetic oligonucleotide
  Sense strand starting at position 3439 of SEQ ID NO: 1561287
aagccucuccugcgagaga

SEQ ID NO: 1660282 - RNA, 19 nt, Artificial Sequence
  Description of Artificial Sequence: Synthetic oligonucleotide
  Antisense strand to SEQ ID NO: 1660281
ucucucgcaggagaggcuu

SEQ ID NO: 1660283 - RNA, 19 nt, Artificial Sequence
  Description of Artificial Sequence: Synthetic oligonucleotide
  Sense strand starting at position 3448 of SEQ ID NO: 1561287
cugcgagagacacaguuua

SEQ ID NO: 1660284 - RNA, 19 nt, Artificial Sequence
  Description of Artificial Sequence: Synthetic oligonucleotide
  Antisense strand to SEQ ID NO: 1660283
uaaacugugucucucgcag

SEQ ID NO: 1660285 - RNA, 19 nt, Artificial Sequence
  Description of Artificial Sequence: Synthetic oligonucleotide
  Sense strand starting at position 3466 of SEQ ID NO: 1561287
auggcuucuucgcacaauu

SEQ ID NO: 1660286 - RNA, 19 nt, Artificial Sequence
  Description of Artificial Sequence: Synthetic oligonucleotide
  Antisense strand to SEQ ID NO: 1660285
aauugugcgaagaagccau

SEQ ID NO: 1660287 - RNA, 19 nt, Artificial Sequence
  Description of Artificial Sequence: Synthetic oligonucleotide
  Sense strand starting at position 3468 of SEQ ID NO: 1561287
ggcuucuucgcacaauuua

SEQ ID NO: 1660288 - RNA, 19 nt, Artificial Sequence
  Description of Artificial Sequence: Synthetic oligonucleotide
  Antisense strand to SEQ ID NO: 1660287
uaaauugugcgaagaagcc

SEQ ID NO: 1660289 - RNA, 19 nt, Artificial Sequence
  Description of Artificial Sequence: Synthetic oligonucleotide
  Sense strand starting at position 3533 of SEQ ID NO: 1561287
auaauaaucuggcuacgag

SEQ ID NO: 1660290 - RNA, 19 nt, Artificial Sequence
  Description of Artificial Sequence: Synthetic oligonucleotide
  Antisense strand to SEQ ID NO: 1660289
cucguagccagauuauuau

SEQ ID NO: 1660291 - RNA, 19 nt, Artificial Sequence
  Description of Artificial Sequence: Synthetic oligonucleotide
  Sense strand starting at position 3667 of SEQ ID NO: 1561287
gggugucauccagggacuu

SEQ ID NO: 1660292 - RNA, 19 nt, Artificial Sequence
  Description of Artificial Sequence: Synthetic oligonucleotide
  Antisense strand to SEQ ID NO: 1660291
aagucccuggaugacaccc

SEQ ID NO: 1660293 - RNA, 19 nt, Artificial Sequence
  Description of Artificial Sequence: Synthetic oligonucleotide
  Sense strand starting at position 3668 of SEQ ID NO: 1561287
ggugucauccagggacuuu

SEQ ID NO: 1660294 - RNA, 19 nt, Artificial Sequence
  Description of Artificial Sequence: Synthetic oligonucleotide
  Antisense strand to SEQ ID NO: 1660293
aaagucccuggaugacacc

SEQ ID NO: 1660295 - RNA, 19 nt, Artificial Sequence
  Description of Artificial Sequence: Synthetic oligonucleotide
  Sense strand starting at position 3679 of SEQ ID NO: 1561287
gggacuuugcuccaaggac

SEQ ID NO: 1660296 - RNA, 19 nt, Artificial Sequence
  Description of Artificial Sequence: Synthetic oligonucleotide
  Antisense strand to SEQ ID NO: 1660295
guccuuggagcaaaguccc

SEQ ID NO: 1660297 - RNA, 19 nt, Artificial Sequence
  Description of Artificial Sequence: Synthetic oligonucleotide
  Sense strand starting at position 3695 of SEQ ID NO: 1561287
gacccugccugggauagaa

SEQ ID NO: 1660298 - RNA, 19 nt, Artificial Sequence
  Description of Artificial Sequence: Synthetic oligonucleotide
  Antisense strand to SEQ ID NO: 1660297
uucuaucccaggcaggguc

SEQ ID NO: 1660299 - RNA, 19 nt, Artificial Sequence
  Description of Artificial Sequence: Synthetic oligonucleotide
  Sense strand starting at position 3770 of SEQ ID NO: 1561287
gcacgauucuucccagauc

SEQ ID NO: 1660300 - RNA, 19 nt, Artificial Sequence
  Description of Artificial Sequence: Synthetic oligonucleotide
  Antisense strand to SEQ ID NO: 1660299
gaucugggaagaaucgugc

SEQ ID NO: 1660301 - RNA, 19 nt, Artificial Sequence
  Description of Artificial Sequence: Synthetic oligonucleotide
  Sense strand starting at position 3773 of SEQ ID NO: 1561287
cgauucuucccagauccca

SEQ ID NO: 1660302 - RNA, 19 nt, Artificial Sequence
  Description of Artificial Sequence: Synthetic oligonucleotide
  Antisense strand to SEQ ID NO: 1660301
ugggaucugggaagaaucg

SEQ ID NO: 1660303 - RNA, 19 nt, Artificial Sequence
  Description of Artificial Sequence: Synthetic oligonucleotide
  Sense strand starting at position 3797 of SEQ ID NO: 1561287
guguuuggauuucugcaaa

SEQ ID NO: 1660304 - RNA, 19 nt, Artificial Sequence
  Description of Artificial Sequence: Synthetic oligonucleotide
  Antisense strand to SEQ ID NO: 1660303
uuugcagaaauccaaacac

SEQ ID NO: 1660305 - RNA, 19 nt, Artificial Sequence
  Description of Artificial Sequence: Synthetic oligonucleotide
  Sense strand starting at position 3813 of SEQ ID NO: 1561287
aaaugaugcccagacguuu

SEQ ID NO: 1660306 - RNA, 19 nt, Artificial Sequence
  Description of Artificial Sequence: Synthetic oligonucleotide
  Antisense strand to SEQ ID NO: 1660305
aaacgucugggcaucauuu

SEQ ID NO: 1660307 - RNA, 19 nt, Artificial Sequence
  Description of Artificial Sequence: Synthetic oligonucleotide
  Sense strand starting at position 912 of SEQ ID NO: 1561288
gagggcuccugaugggaau

SEQ ID NO: 1660308 - RNA, 19 nt, Artificial Sequence
  Description of Artificial Sequence: Synthetic oligonucleotide
  Antisense strand to SEQ ID NO: 1660307
auucccaucaggagcccuc

SEQ ID NO: 1660309 - RNA, 19 nt, Artificial Sequence
  Description of Artificial Sequence: Synthetic oligonucleotide
  Sense strand starting at position 1141 of SEQ ID NO: 1561288
gugggugguuggguguaau

SEQ ID NO: 1660310 - RNA, 19 nt, Artificial Sequence
  Description of Artificial Sequence: Synthetic oligonucleotide
  Antisense strand to SEQ ID NO: 1660309
auuacacccaaccacccac

SEQ ID NO: 1660311 - RNA, 19 nt, Artificial Sequence
  Description of Artificial Sequence: Synthetic oligonucleotide
  Sense strand starting at position 1142 of SEQ ID NO: 1561288
ugggugguuggguguaauu

SEQ ID NO: 1660312 - RNA, 19 nt, Artificial Sequence
  Description of Artificial Sequence: Synthetic oligonucleotide
  Antisense strand to SEQ ID NO: 1660311
aauuacacccaaccaccca

SEQ ID NO: 1660313 - RNA, 19 nt, Artificial Sequence
  Description of Artificial Sequence: Synthetic oligonucleotide
  Sense strand starting at position 1144 of SEQ ID NO: 1561288
ggugguuggguguaauuag

SEQ ID NO: 1660314 - RNA, 19 nt, Artificial Sequence
  Description of Artificial Sequence: Synthetic oligonucleotide
  Antisense strand to SEQ ID NO: 1660313
cuaauuacacccaaccacc

SEQ ID NO: 1660315 - RNA, 19 nt, Artificial Sequence
  Description of Artificial Sequence: Synthetic oligonucleotide
  Sense strand starting at position 1772 of SEQ ID NO: 1561288
ggguaaugcgauuaagaga

SEQ ID NO: 1660316 - RNA, 19 nt, Artificial Sequence
  Description of Artificial Sequence: Synthetic oligonucleotide
  Antisense strand to SEQ ID NO: 1660315
ucucuuaaucgcauuaccc

SEQ ID NO: 1660317 - RNA, 19 nt, Artificial Sequence
  Description of Artificial Sequence: Synthetic oligonucleotide
  Sense strand starting at position 1833 of SEQ ID NO: 1561288
ucaggaauucgccggagag

SEQ ID NO: 1660318 - RNA, 19 nt, Artificial Sequence
  Description of Artificial Sequence: Synthetic oligonucleotide
  Antisense strand to SEQ ID NO: 1660317
cucuccggcgaauuccuga

SEQ ID NO: 1660319 - RNA, 19 nt, Artificial Sequence
  Description of Artificial Sequence: Synthetic oligonucleotide
  Sense strand starting at position 1835 of SEQ ID NO: 1561288
aggaauucgccggagagca

SEQ ID NO: 1660320 - RNA, 19 nt, Artificial Sequence
  Description of Artificial Sequence: Synthetic oligonucleotide
  Antisense strand to SEQ ID NO: 1660319
ugcucuccggcgaauuccu

SEQ ID NO: 1660321 - RNA, 19 nt, Artificial Sequence
  Description of Artificial Sequence: Synthetic oligonucleotide
  Sense strand starting at position 1870 of SEQ ID NO: 1561288
aauugcuaguuugaaggaa

SEQ ID NO: 1660322 - RNA, 19 nt, Artificial Sequence
  Description of Artificial Sequence: Synthetic oligonucleotide
  Antisense strand to SEQ ID NO: 1660321
uuccuucaaacuagcaauu

SEQ ID NO: 1660323 - RNA, 19 nt, Artificial Sequence
  Description of Artificial Sequence: Synthetic oligonucleotide
  Sense strand starting at position 1994 of SEQ ID NO: 1561288
gucggagguuuccggagaa

SEQ ID NO: 1660324 - RNA, 19 nt, Artificial Sequence
  Description of Artificial Sequence: Synthetic oligonucleotide
  Antisense strand to SEQ ID NO: 1660323
uucuccggaaaccuccgac

SEQ ID NO: 1660325 - RNA, 19 nt, Artificial Sequence
  Description of Artificial Sequence: Synthetic oligonucleotide
  Sense strand starting at position 1998 of SEQ ID NO: 1561288
gagguuuccggagaagcga

SEQ ID NO: 1660326 - RNA, 19 nt, Artificial Sequence
  Description of Artificial Sequence: Synthetic oligonucleotide
  Antisense strand to SEQ ID NO: 1660325
ucgcuucuccggaaaccuc

SEQ ID NO: 1660327 - RNA, 19 nt, Artificial Sequence
  Description of Artificial Sequence: Synthetic oligonucleotide
  Sense strand starting at position 2058 of SEQ ID NO: 1561288
agucgaugaugucaucauu

SEQ ID NO: 1660328 - RNA, 19 nt, Artificial Sequence
  Description of Artificial Sequence: Synthetic oligonucleotide
  Antisense strand to SEQ ID NO: 1660327
aaugaugacaucaucgacu

SEQ ID NO: 1660329 - RNA, 19 nt, Artificial Sequence
  Description of Artificial Sequence: Synthetic oligonucleotide
  Sense strand starting at position 2061 of SEQ ID NO: 1561288
cgaugaugucaucauugga

SEQ ID NO: 1660330 - RNA, 19 nt, Artificial Sequence
  Description of Artificial Sequence: Synthetic oligonucleotide
  Antisense strand to SEQ ID NO: 1660329
uccaaugaugacaucaucg

SEQ ID NO: 1660331 - RNA, 19 nt, Artificial Sequence
  Description of Artificial Sequence: Synthetic oligonucleotide
  Sense strand starting at position 2068 of SEQ ID NO: 1561288
gucaucauuggaugcgaga

SEQ ID NO: 1660332 - RNA, 19 nt, Artificial Sequence
  Description of Artificial Sequence: Synthetic oligonucleotide
  Antisense strand to SEQ ID NO: 1660331
ucucgcauccaaugaugac

SEQ ID NO: 1660333 - RNA, 19 nt, Artificial Sequence
  Description of Artificial Sequence: Synthetic oligonucleotide
  Sense strand starting at position 2142 of SEQ ID NO: 1561288
auggaaggcucucaaauag

SEQ ID NO: 1660334 - RNA, 19 nt, Artificial Sequence
  Description of Artificial Sequence: Synthetic oligonucleotide
  Antisense strand to SEQ ID NO: 1660333
cuauuugagagccuuccau

SEQ ID NO: 1660335 - RNA, 19 nt, Artificial Sequence
  Description of Artificial Sequence: Synthetic oligonucleotide
  Sense strand starting at position 2178 of SEQ ID NO: 1561288
gccggugucguagacugua

SEQ ID NO: 1660336 - RNA, 19 nt, Artificial Sequence
  Description of Artificial Sequence: Synthetic oligonucleotide
  Antisense strand to SEQ ID NO: 1660335
uacagucuacgacaccggc

SEQ ID NO: 1660337 - RNA, 19 nt, Artificial Sequence
  Description of Artificial Sequence: Synthetic oligonucleotide
  Sense strand starting at position 2181 of SEQ ID NO: 1561288
ggugucguagacuguacaa

SEQ ID NO: 1660338 - RNA, 19 nt, Artificial Sequence
  Description of Artificial Sequence: Synthetic oligonucleotide
  Antisense strand to SEQ ID NO: 1660337
uuguacagucuacgacacc

SEQ ID NO: 1660339 - RNA, 19 nt, Artificial Sequence
  Description of Artificial Sequence: Synthetic oligonucleotide
  Sense strand starting at position 2286 of SEQ ID NO: 1561288
gguucacggucauaggauu

SEQ ID NO: 1660340 - RNA, 19 nt, Artificial Sequence
  Description of Artificial Sequence: Synthetic oligonucleotide
  Antisense strand to SEQ ID NO: 1660339
aauccuaugaccgugaacc

SEQ ID NO: 1660341 - RNA, 19 nt, Artificial Sequence
  Description of Artificial Sequence: Synthetic oligonucleotide
  Sense strand starting at position 2294 of SEQ ID NO: 1561288
gucauaggauuaguucuaa

SEQ ID NO: 1660342 - RNA, 19 nt, Artificial Sequence
  Description of Artificial Sequence: Synthetic oligonucleotide
  Antisense strand to SEQ ID NO: 1660341
uuagaacuaauccuaugac

SEQ ID NO: 1660343 - RNA, 19 nt, Artificial Sequence
  Description of Artificial Sequence: Synthetic oligonucleotide
  Sense strand starting at position 2402 of SEQ ID NO: 1561288
ccucgaauccagggaucuu

SEQ ID NO: 1660344 - RNA, 19 nt, Artificial Sequence
  Description of Artificial Sequence: Synthetic oligonucleotide
  Antisense strand to SEQ ID NO: 1660343
aagaucccuggauucgagg

SEQ ID NO: 1660345 - RNA, 19 nt, Artificial Sequence
  Description of Artificial Sequence: Synthetic oligonucleotide
  Sense strand starting at position 2430 of SEQ ID NO: 1561288
cuuguuagcucuuucuaca

SEQ ID NO: 1660346 - RNA, 19 nt, Artificial Sequence
  Description of Artificial Sequence: Synthetic oligonucleotide
  Antisense strand to SEQ ID NO: 1660345
uguagaaagagcuaacaag

SEQ ID NO: 1660347 - RNA, 19 nt, Artificial Sequence
  Description of Artificial Sequence: Synthetic oligonucleotide
  Sense strand starting at position 2547 of SEQ ID NO: 1561288
ggguggguggaguguuaga

SEQ ID NO: 1660348 - RNA, 19 nt, Artificial Sequence
  Description of Artificial Sequence: Synthetic oligonucleotide
  Antisense strand to SEQ ID NO: 1660347
ucuaacacuccacccaccc

SEQ ID NO: 1660349 - RNA, 19 nt, Artificial Sequence
  Description of Artificial Sequence: Synthetic oligonucleotide
  Sense strand starting at position 2563 of SEQ ID NO: 1561288
agaggagggucuuguaauu

SEQ ID NO: 1660350 - RNA, 19 nt, Artificial Sequence
  Description of Artificial Sequence: Synthetic oligonucleotide
  Antisense strand to SEQ ID NO: 1660349
aauuacaagacccuccucu

SEQ ID NO: 1660351 - RNA, 19 nt, Artificial Sequence
  Description of Artificial Sequence: Synthetic oligonucleotide
  Sense strand starting at position 2569 of SEQ ID NO: 1561288
gggucuuguaauuguucuu

SEQ ID NO: 1660352 - RNA, 19 nt, Artificial Sequence
  Description of Artificial Sequence: Synthetic oligonucleotide
  Antisense strand to SEQ ID NO: 1660351
aagaacaauuacaagaccc

SEQ ID NO: 1660353 - RNA, 19 nt, Artificial Sequence
  Description of Artificial Sequence: Synthetic oligonucleotide
  Sense strand starting at position 3007 of SEQ ID NO: 1561288
ccgugucaacagugauaaa

SEQ ID NO: 1660354 - RNA, 19 nt, Artificial Sequence
  Description of Artificial Sequence: Synthetic oligonucleotide
  Antisense strand to SEQ ID NO: 1660353
uuuaucacuguugacacgg

SEQ ID NO: 1660355 - RNA, 19 nt, Artificial Sequence
  Description of Artificial Sequence: Synthetic oligonucleotide
  Sense strand starting at position 3008 of SEQ ID NO: 1561288
cgugucaacagugauaaau

SEQ ID NO: 1660356 - RNA, 19 nt, Artificial Sequence
  Description of Artificial Sequence: Synthetic oligonucleotide
  Antisense strand to SEQ ID NO: 1660355
auuuaucacuguugacacg

SEQ ID NO: 1660357 - RNA, 19 nt, Artificial Sequence
  Description of Artificial Sequence: Synthetic oligonucleotide
  Sense strand starting at position 3010 of SEQ ID NO: 1561288
ugucaacagugauaaaucu

SEQ ID NO: 1660358 - RNA, 19 nt, Artificial Sequence
  Description of Artificial Sequence: Synthetic oligonucleotide
  Antisense strand to SEQ ID NO: 1660357
agauuuaucacuguugaca

SEQ ID NO: 1660359 - RNA, 19 nt, Artificial Sequence
  Description of Artificial Sequence: Synthetic oligonucleotide
  Sense strand starting at position 3017 of SEQ ID NO: 1561288
agugauaaaucuggagaca

SEQ ID NO: 1660360 - RNA, 19 nt, Artificial Sequence
  Description of Artificial Sequence: Synthetic oligonucleotide
  Antisense strand to SEQ ID NO: 1660359
ugucuccagauuuaucacu

SEQ ID NO: 1660361 - RNA, 19 nt, Artificial Sequence
  Description of Artificial Sequence: Synthetic oligonucleotide
  Sense strand starting at position 3042 of SEQ ID NO: 1561288
ccaugugacuuccugguau

SEQ ID NO: 1660362 - RNA, 19 nt, Artificial Sequence
  Description of Artificial Sequence: Synthetic oligonucleotide
  Antisense strand to SEQ ID NO: 1660361
auaccaggaagucacaugg

SEQ ID NO: 1660363 - RNA, 19 nt, Artificial Sequence
  Description of Artificial Sequence: Synthetic oligonucleotide
  Sense strand starting at position 3044 of SEQ ID NO: 1561288
augugacuuccugguauau

SEQ ID NO: 1660364 - RNA, 19 nt, Artificial Sequence
  Description of Artificial Sequence: Synthetic oligonucleotide
  Antisense strand to SEQ ID NO: 1660363
auauaccaggaagucacau

SEQ ID NO: 1660365 - RNA, 19 nt, Artificial Sequence
  Description of Artificial Sequence: Synthetic oligonucleotide
  Sense strand starting at position 3046 of SEQ ID NO: 1561288
gugacuuccugguauauug

SEQ ID NO: 1660366 - RNA, 19 nt, Artificial Sequence
  Description of Artificial Sequence: Synthetic oligonucleotide
  Antisense strand to SEQ ID NO: 1660365
caauauaccaggaagucac

SEQ ID NO: 1660367 - RNA, 19 nt, Artificial Sequence
  Description of Artificial Sequence: Synthetic oligonucleotide
  Sense strand starting at position 3048 of SEQ ID NO: 1561288
gacuuccugguauauugau

SEQ ID NO: 1660368 - RNA, 19 nt, Artificial Sequence
  Description of Artificial Sequence: Synthetic oligonucleotide
  Antisense strand to SEQ ID NO: 1660367
aucaauauaccaggaaguc

SEQ ID NO: 1660369 - RNA, 19 nt, Artificial Sequence
  Description of Artificial Sequence: Synthetic oligonucleotide
  Sense strand starting at position 3054 of SEQ ID NO: 1561288
cugguauauugauccuacu

SEQ ID NO: 1660370 - RNA, 19 nt, Artificial Sequence
  Description of Artificial Sequence: Synthetic oligonucleotide
  Antisense strand to SEQ ID NO: 1660369
aguaggaucaauauaccag

SEQ ID NO: 1660371 - RNA, 19 nt, Artificial Sequence
  Description of Artificial Sequence: Synthetic oligonucleotide
  Sense strand starting at position 3888 of SEQ ID NO: 1561288
cuauaauucuagcacagga

SEQ ID NO: 1660372 - RNA, 19 nt, Artificial Sequence
  Description of Artificial Sequence: Synthetic oligonucleotide
  Antisense strand to SEQ ID NO: 1660371
uccugugcuagaauuauag

SEQ ID NO: 1660373 - RNA, 19 nt, Artificial Sequence
  Description of Artificial Sequence: Synthetic oligonucleotide
  Sense strand starting at position 3 of SEQ ID NO: 1561289
agagaccuaguggguaauu

SEQ ID NO: 1660374 - RNA, 19 nt, Artificial Sequence
  Description of Artificial Sequence: Synthetic oligonucleotide
  Antisense strand to SEQ ID NO: 1660373
aauuacccacuaggucucu

SEQ ID NO: 1660375 - RNA, 19 nt, Artificial Sequence
  Description of Artificial Sequence: Synthetic oligonucleotide
  Sense strand starting at position 45 of SEQ ID NO: 1561289
acuaaucaccaucgaauga

SEQ ID NO: 1660376 - RNA, 19 nt, Artificial Sequence
  Description of Artificial Sequence: Synthetic oligonucleotide
  Antisense strand to SEQ ID NO: 1660375
ucauucgauggugauuagu

SEQ ID NO: 1660377 - RNA, 19 nt, Artificial Sequence
  Description of Artificial Sequence: Synthetic oligonucleotide
  Sense strand starting at position 49 of SEQ ID NO: 1561289
aucaccaucgaaugaaagu

SEQ ID NO: 1660378 - RNA, 19 nt, Artificial Sequence
  Description of Artificial Sequence: Synthetic oligonucleotide
  Antisense strand to SEQ ID NO: 1660377
acuuucauucgauggugau

SEQ ID NO: 1660379 - RNA, 19 nt, Artificial Sequence
  Description of Artificial Sequence: Synthetic oligonucleotide
  Sense strand starting at position 116 of SEQ ID NO: 1561289
guggaagaauuccuugacu

SEQ ID NO: 1660380 - RNA, 19 nt, Artificial Sequence
  Description of Artificial Sequence: Synthetic oligonucleotide
  Antisense strand to SEQ ID NO: 1660379
agucaaggaauucuuccac

SEQ ID NO: 1660381 - RNA, 19 nt, Artificial Sequence
  Description of Artificial Sequence: Synthetic oligonucleotide
  Sense strand starting at position 118 of SEQ ID NO: 1561289
ggaagaauuccuugacucc

SEQ ID NO: 1660382 - RNA, 19 nt, Artificial Sequence
  Description of Artificial Sequence: Synthetic oligonucleotide
  Antisense strand to SEQ ID NO: 1660381
ggagucaaggaauucuucc

SEQ ID NO: 1660383 - RNA, 19 nt, Artificial Sequence
  Description of Artificial Sequence: Synthetic oligonucleotide
  Sense strand starting at position 404 of SEQ ID NO: 1561289
gguuuacuuccagaccauc

SEQ ID NO: 1660384 - RNA, 19 nt, Artificial Sequence
  Description of Artificial Sequence: Synthetic oligonucleotide
  Antisense strand to SEQ ID NO: 1660383
gauggucuggaaguaaacc

SEQ ID NO: 1660385 - RNA, 19 nt, Artificial Sequence
  Description of Artificial Sequence: Synthetic oligonucleotide
  Sense strand starting at position 465 of SEQ ID NO: 1561289
cugccaaaugcucauguca

SEQ ID NO: 1660386 - RNA, 19 nt, Artificial Sequence
  Description of Artificial Sequence: Synthetic oligonucleotide
  Antisense strand to SEQ ID NO: 1660385
ugacaugagcauuuggcag

SEQ ID NO: 1660387 - RNA, 19 nt, Artificial Sequence
  Description of Artificial Sequence: Synthetic oligonucleotide
  Sense strand starting at position 782 of SEQ ID NO: 1561289
gucuaacuagcugaagauu

SEQ ID NO: 1660388 - RNA, 19 nt, Artificial Sequence
  Description of Artificial Sequence: Synthetic oligonucleotide
  Antisense strand to SEQ ID NO: 1660387
aaucuucagcuaguuagac

SEQ ID NO: 1660389 - RNA, 19 nt, Artificial Sequence
  Description of Artificial Sequence: Synthetic oligonucleotide
  Sense strand starting at position 834 of SEQ ID NO: 1561289
auaucuauugacuggcaga

SEQ ID NO: 1660390 - RNA, 19 nt, Artificial Sequence
  Description of Artificial Sequence: Synthetic oligonucleotide
  Antisense strand to SEQ ID NO: 1660389
ucugccagucaauagauau

SEQ ID NO: 1660391 - RNA, 19 nt, Artificial Sequence
  Description of Artificial Sequence: Synthetic oligonucleotide
  Sense strand starting at position 926 of SEQ ID NO: 1561289
uugaguuccagcugaaaga

SEQ ID NO: 1660392 - RNA, 19 nt, Artificial Sequence
  Description of Artificial Sequence: Synthetic oligonucleotide
  Antisense strand to SEQ ID NO: 1660391
ucuuucagcuggaacucaa

SEQ ID NO: 1660393 - RNA, 19 nt, Artificial Sequence
  Description of Artificial Sequence: Synthetic oligonucleotide
  Sense strand starting at position 927 of SEQ ID NO: 1561289
ugaguuccagcugaaagau

SEQ ID NO: 1660394 - RNA, 19 nt, Artificial Sequence
  Description of Artificial Sequence: Synthetic oligonucleotide
  Antisense strand to SEQ ID NO: 1660393
aucuuucagcuggaacuca

SEQ ID NO: 1660395 - RNA, 19 nt, Artificial Sequence
  Description of Artificial Sequence: Synthetic oligonucleotide
  Sense strand starting at position 936 of SEQ ID NO: 1561289
gcugaaagauucuaaggag

SEQ ID NO: 1660396 - RNA, 19 nt, Artificial Sequence
  Description of Artificial Sequence: Synthetic oligonucleotide
  Antisense strand to SEQ ID NO: 1660395
cuccuuagaaucuuucagc

SEQ ID NO: 1660397 - RNA, 19 nt, Artificial Sequence
  Description of Artificial Sequence: Synthetic oligonucleotide
  Sense strand starting at position 939 of SEQ ID NO: 1561289
gaaagauucuaaggaggau

SEQ ID NO: 1660398 - RNA, 19 nt, Artificial Sequence
  Description of Artificial Sequence: Synthetic oligonucleotide
  Antisense strand to SEQ ID NO: 1660397
auccuccuuagaaucuuuc

SEQ ID NO: 1660399 - RNA, 19 nt, Artificial Sequence
  Description of Artificial Sequence: Synthetic oligonucleotide
  Sense strand starting at position 987 of SEQ ID NO: 1561289
cuguuuccgaggugagauu

SEQ ID NO: 1660400 - RNA, 19 nt, Artificial Sequence
  Description of Artificial Sequence: Synthetic oligonucleotide
  Antisense strand to SEQ ID NO: 1660399
aaucucaccucggaaacag

SEQ ID NO: 1660401 - RNA, 19 nt, Artificial Sequence
  Description of Artificial Sequence: Synthetic oligonucleotide
  Sense strand starting at position 988 of SEQ ID NO: 1561289
uguuuccgaggugagauua

SEQ ID NO: 1660402 - RNA, 19 nt, Artificial Sequence
  Description of Artificial Sequence: Synthetic oligonucleotide
  Antisense strand to SEQ ID NO: 1660401
uaaucucaccucggaaaca

SEQ ID NO: 1660403 - RNA, 19 nt, Artificial Sequence
  Description of Artificial Sequence: Synthetic oligonucleotide
  Sense strand starting at position 1015 of SEQ ID NO: 1561289
agggauuaaugagauauug

SEQ ID NO: 1660404 - RNA, 19 nt, Artificial Sequence
  Description of Artificial Sequence: Synthetic oligonucleotide
  Antisense strand to SEQ ID NO: 1660403
caauaucucauuaaucccu

SEQ ID NO: 1660405 - RNA, 19 nt, Artificial Sequence
  Description of Artificial Sequence: Synthetic oligonucleotide
  Sense strand starting at position 1024 of SEQ ID NO: 1561289
ugagauauugaaugcaauc

SEQ ID NO: 1660406 - RNA, 19 nt, Artificial Sequence
  Description of Artificial Sequence: Synthetic oligonucleotide
  Antisense strand to SEQ ID NO: 1660405
gauugcauucaauaucuca

SEQ ID NO: 1660407 - RNA, 19 nt, Artificial Sequence
  Description of Artificial Sequence: Synthetic oligonucleotide
  Sense strand starting at position 1033 of SEQ ID NO: 1561289
gaaugcaaucaugagugua

SEQ ID NO: 1660408 - RNA, 19 nt, Artificial Sequence
  Description of Artificial Sequence: Synthetic oligonucleotide
  Antisense strand to SEQ ID NO: 1660407
uacacucaugauugcauuc

SEQ ID NO: 1660409 - RNA, 19 nt, Artificial Sequence
  Description of Artificial Sequence: Synthetic oligonucleotide
  Sense strand starting at position 1035 of SEQ ID NO: 1561289
augcaaucaugaguguaau

SEQ ID NO: 1660410 - RNA, 19 nt, Artificial Sequence
  Description of Artificial Sequence: Synthetic oligonucleotide
  Antisense strand to SEQ ID NO: 1660409
auuacacucaugauugcau

SEQ ID NO: 1660411 - RNA, 19 nt, Artificial Sequence
  Description of Artificial Sequence: Synthetic oligonucleotide
  Sense strand starting at position 1036 of SEQ ID NO: 1561289
ugcaaucaugaguguaauc

SEQ ID NO: 1660412 - RNA, 19 nt, Artificial Sequence
  Description of Artificial Sequence: Synthetic oligonucleotide
  Antisense strand to SEQ ID NO: 1660411
gauuacacucaugauugca

SEQ ID NO: 1660413 - RNA, 19 nt, Artificial Sequence
  Description of Artificial Sequence: Synthetic oligonucleotide
  Sense strand starting at position 1041 of SEQ ID NO: 1561289
ucaugaguguaaucaagag

SEQ ID NO: 1660414 - RNA, 19 nt, Artificial Sequence
  Description of Artificial Sequence: Synthetic oligonucleotide
  Antisense strand to SEQ ID NO: 1660413
cucuugauuacacucauga

SEQ ID NO: 1660415 - RNA, 19 nt, Artificial Sequence
  Description of Artificial Sequence: Synthetic oligonucleotide
  Sense strand starting at position 1047 of SEQ ID NO: 1561289
guguaaucaagaggguauc

SEQ ID NO: 1660416 - RNA, 19 nt, Artificial Sequence
  Description of Artificial Sequence: Synthetic oligonucleotide
  Antisense strand to SEQ ID NO: 1660415
gauacccucuugauuacac

SEQ ID NO: 1660417 - RNA, 19 nt, Artificial Sequence
  Description of Artificial Sequence: Synthetic oligonucleotide
  Sense strand starting at position 1097 of SEQ ID NO: 1561289
ucuagaacaucacugguaa

SEQ ID NO: 1660418 - RNA, 19 nt, Artificial Sequence
  Description of Artificial Sequence: Synthetic oligonucleotide
  Antisense strand to SEQ ID NO: 1660417
uuaccagugauguucuaga

SEQ ID NO: 1660419 - RNA, 19 nt, Artificial Sequence
  Description of Artificial Sequence: Synthetic oligonucleotide
  Sense strand starting at position 1098 of SEQ ID NO: 1561289
cuagaacaucacugguaag

SEQ ID NO: 1660420 - RNA, 19 nt, Artificial Sequence
  Description of Artificial Sequence: Synthetic oligonucleotide
  Antisense strand to SEQ ID NO: 1660419
cuuaccagugauguucuag

SEQ ID NO: 1660421 - RNA, 19 nt, Artificial Sequence
  Description of Artificial Sequence: Synthetic oligonucleotide
  Sense strand starting at position 1230 of SEQ ID NO: 1561289
uuccuagccugauuaauga

SEQ ID NO: 1660422 - RNA, 19 nt, Artificial Sequence
  Description of Artificial Sequence: Synthetic oligonucleotide
  Antisense strand to SEQ ID NO: 1660421
ucauuaaucaggcuaggaa

SEQ ID NO: 1660423 - RNA, 19 nt, Artificial Sequence
  Description of Artificial Sequence: Synthetic oligonucleotide
  Sense strand starting at position 1375 of SEQ ID NO: 1561289
gauguugacuugucuauau

SEQ ID NO: 1660424 - RNA, 19 nt, Artificial Sequence
  Description of Artificial Sequence: Synthetic oligonucleotide
  Antisense strand to SEQ ID NO: 1660423
auauagacaagucaacauc

SEQ ID NO: 1660425 - RNA, 19 nt, Artificial Sequence
  Description of Artificial Sequence: Synthetic oligonucleotide
  Sense strand starting at position 1379 of SEQ ID NO: 1561289
uugacuugucuauaugcaa

SEQ ID NO: 1660426 - RNA, 19 nt, Artificial Sequence
  Description of Artificial Sequence: Synthetic oligonucleotide
  Antisense strand to SEQ ID NO: 1660425
uugcauauagacaagucaa

SEQ ID NO: 1660427 - RNA, 19 nt, Artificial Sequence
  Description of Artificial Sequence: Synthetic oligonucleotide
  Sense strand starting at position 1386 of SEQ ID NO: 1561289
gucuauaugcaacagcaau

SEQ ID NO: 1660428 - RNA, 19 nt, Artificial Sequence
  Description of Artificial Sequence: Synthetic oligonucleotide
  Antisense strand to SEQ ID NO: 1660427
auugcuguugcauauagac

SEQ ID NO: 1660429 - RNA, 19 nt, Artificial Sequence
  Description of Artificial Sequence: Synthetic oligonucleotide
  Sense strand starting at position 1595 of SEQ ID NO: 1561289
gacccuuucccguaucaga

SEQ ID NO: 1660430 - RNA, 19 nt, Artificial Sequence
  Description of Artificial Sequence: Synthetic oligonucleotide
  Antisense strand to SEQ ID NO: 1660429
ucugauacgggaaaggguc

SEQ ID NO: 1660431 - RNA, 19 nt, Artificial Sequence
  Description of Artificial Sequence: Synthetic oligonucleotide
  Sense strand starting at position 1643 of SEQ ID NO: 1561289
ugggaucugucuccgaguu

SEQ ID NO: 1660432 - RNA, 19 nt, Artificial Sequence
  Description of Artificial Sequence: Synthetic oligonucleotide
  Antisense strand to SEQ ID NO: 1660431
aacucggagacagauccca

SEQ ID NO: 1660433 - RNA, 19 nt, Artificial Sequence
  Description of Artificial Sequence: Synthetic oligonucleotide
  Sense strand starting at position 1644 of SEQ ID NO: 1561289
gggaucugucuccgaguuc

SEQ ID NO: 1660434 - RNA, 19 nt, Artificial Sequence
  Description of Artificial Sequence: Synthetic oligonucleotide
  Antisense strand to SEQ ID NO: 1660433
gaacucggagacagauccc

SEQ ID NO: 1660435 - RNA, 19 nt, Artificial Sequence
  Description of Artificial Sequence: Synthetic oligonucleotide
  Sense strand starting at position 1666 of SEQ ID NO: 1561289
gcaguuuccaugggaggga

SEQ ID NO: 1660436 - RNA, 19 nt, Artificial Sequence
  Description of Artificial Sequence: Synthetic oligonucleotide
  Antisense strand to SEQ ID NO: 1660435
ucccucccauggaaacugc

SEQ ID NO: 1660437 - RNA, 19 nt, Artificial Sequence
  Description of Artificial Sequence: Synthetic oligonucleotide
  Sense strand starting at position 2375 of SEQ ID NO: 1561289
accagaucucccuauguua

SEQ ID NO: 1660438 - RNA, 19 nt, Artificial Sequence
  Description of Artificial Sequence: Synthetic oligonucleotide
  Antisense strand to SEQ ID NO: 1660437
uaacauagggagaucuggu

SEQ ID NO: 1660439 - RNA, 19 nt, Artificial Sequence
  Description of Artificial Sequence: Synthetic oligonucleotide
  Sense strand starting at position 2516 of SEQ ID NO: 1561289
ccagcagaugccuaauaug

SEQ ID NO: 1660440 - RNA, 19 nt, Artificial Sequence
  Description of Artificial Sequence: Synthetic oligonucleotide
  Antisense strand to SEQ ID NO: 1660439
cauauuaggcaucugcugg

SEQ ID NO: 1660441 - RNA, 19 nt, Artificial Sequence
  Description of Artificial Sequence: Synthetic oligonucleotide
  Sense strand starting at position 2524 of SEQ ID NO: 1561289
ugccuaauauguguacuaa

SEQ ID NO: 1660442 - RNA, 19 nt, Artificial Sequence
  Description of Artificial Sequence: Synthetic oligonucleotide
  Antisense strand to SEQ ID NO: 1660441
uuaguacacauauuaggca

SEQ ID NO: 1660443 - RNA, 19 nt, Artificial Sequence
  Description of Artificial Sequence: Synthetic oligonucleotide
  Sense strand starting at position 2525 of SEQ ID NO: 1561289
gccuaauauguguacuaaa

SEQ ID NO: 1660444 - RNA, 19 nt, Artificial Sequence
  Description of Artificial Sequence: Synthetic oligonucleotide
  Antisense strand to SEQ ID NO: 1660443
uuuaguacacauauuaggc

SEQ ID NO: 1660445 - RNA, 19 nt, Artificial Sequence
  Description of Artificial Sequence: Synthetic oligonucleotide
  Sense strand starting at position 2549 of SEQ ID NO: 1561289
accaguuacucacugcaua

SEQ ID NO: 1660446 - RNA, 19 nt, Artificial Sequence
  Description of Artificial Sequence: Synthetic oligonucleotide
  Antisense strand to SEQ ID NO: 1660445
uaugcagugaguaacuggu

SEQ ID NO: 1660447 - RNA, 19 nt, Artificial Sequence
  Description of Artificial Sequence: Synthetic oligonucleotide
  Sense strand starting at position 2974 of SEQ ID NO: 1561289
agaggucugucuccaauga

SEQ ID NO: 1660448 - RNA, 19 nt, Artificial Sequence
  Description of Artificial Sequence: Synthetic oligonucleotide
  Antisense strand to SEQ ID NO: 1660447
ucauuggagacagaccucu

SEQ ID NO: 1660449 - RNA, 19 nt, Artificial Sequence
  Description of Artificial Sequence: Synthetic oligonucleotide
  Sense strand starting at position 2978 of SEQ ID NO: 1561289
gucugucuccaaugagacu

SEQ ID NO: 1660450 - RNA, 19 nt, Artificial Sequence
  Description of Artificial Sequence: Synthetic oligonucleotide
  Antisense strand to SEQ ID NO: 1660449
agucucauuggagacagac

SEQ ID NO: 1660451 - RNA, 19 nt, Artificial Sequence
  Description of Artificial Sequence: Synthetic oligonucleotide
  Sense strand starting at position 3630 of SEQ ID NO: 1561289
cuauguacauguuuacaau

SEQ ID NO: 1660452 - RNA, 19 nt, Artificial Sequence
  Description of Artificial Sequence: Synthetic oligonucleotide
  Antisense strand to SEQ ID NO: 1660451
auuguaaacauguacauag

SEQ ID NO: 1660453 - RNA, 19 nt, Artificial Sequence
  Description of Artificial Sequence: Synthetic oligonucleotide
  Sense strand starting at position 14 of SEQ ID NO: 1561290
uguucaagucacggaggua

SEQ ID NO: 1660454 - RNA, 19 nt, Artificial Sequence
  Description of Artificial Sequence: Synthetic oligonucleotide
  Antisense strand to SEQ ID NO: 1660453
uaccuccgugacuugaaca

SEQ ID NO: 1660455 - RNA, 19 nt, Artificial Sequence
  Description of Artificial Sequence: Synthetic oligonucleotide
  Sense strand starting at position 26 of SEQ ID NO: 1561290
ggagguaagaacuguggca

SEQ ID NO: 1660456 - RNA, 19 nt, Artificial Sequence
  Description of Artificial Sequence: Synthetic oligonucleotide
  Antisense strand to SEQ ID NO: 1660455
ugccacaguucuuaccucc

SEQ ID NO: 1660457 - RNA, 19 nt, Artificial Sequence
  Description of Artificial Sequence: Synthetic oligonucleotide
  Sense strand starting at position 65 of SEQ ID NO: 1561290
augaaagucagaugagugu

SEQ ID NO: 1660458 - RNA, 19 nt, Artificial Sequence
  Description of Artificial Sequence: Synthetic oligonucleotide
  Antisense strand to SEQ ID NO: 1660457
acacucaucugacuuucau

SEQ ID NO: 1660459 - RNA, 19 nt, Artificial Sequence
  Description of Artificial Sequence: Synthetic oligonucleotide
  Sense strand starting at position 69 of SEQ ID NO: 1561290
aagucagaugagugugaga

SEQ ID NO: 1660460 - RNA, 19 nt, Artificial Sequence
  Description of Artificial Sequence: Synthetic oligonucleotide
  Antisense strand to SEQ ID NO: 1660459
ucucacacucaucugacuu

SEQ ID NO: 1660461 - RNA, 19 nt, Artificial Sequence
  Description of Artificial Sequence: Synthetic oligonucleotide
  Sense strand starting at position 71 of SEQ ID NO: 1561290
gucagaugagugugagauc

SEQ ID NO: 1660462 - RNA, 19 nt, Artificial Sequence
  Description of Artificial Sequence: Synthetic oligonucleotide
  Antisense strand to SEQ ID NO: 1660461
gaucucacacucaucugac

SEQ ID NO: 1660463 - RNA, 19 nt, Artificial Sequence
  Description of Artificial Sequence: Synthetic oligonucleotide
  Sense strand starting at position 82 of SEQ ID NO: 1561290
gugagaucccaguagccaa

SEQ ID NO: 1660464 - RNA, 19 nt, Artificial Sequence
  Description of Artificial Sequence: Synthetic oligonucleotide
  Antisense strand to SEQ ID NO: 1660463
uuggcuacugggaucucac

SEQ ID NO: 1660465 - RNA, 19 nt, Artificial Sequence
  Description of Artificial Sequence: Synthetic oligonucleotide
  Sense strand starting at position 133 of SEQ ID NO: 1561290
ugagcuauuugagggauag

SEQ ID NO: 1660466 - RNA, 19 nt, Artificial Sequence
  Description of Artificial Sequence: Synthetic oligonucleotide
  Antisense strand to SEQ ID NO: 1660465
cuaucccucaaauagcuca

SEQ ID NO: 1660467 - RNA, 19 nt, Artificial Sequence
  Description of Artificial Sequence: Synthetic oligonucleotide
  Sense strand starting at position 317 of SEQ ID NO: 1561290
gccagccucugagcuauuu

SEQ ID NO: 1660468 - RNA, 19 nt, Artificial Sequence
  Description of Artificial Sequence: Synthetic oligonucleotide
  Antisense strand to SEQ ID NO: 1660467
aaauagcucagaggcuggc

SEQ ID NO: 1660469 - RNA, 19 nt, Artificial Sequence
  Description of Artificial Sequence: Synthetic oligonucleotide
  Sense strand starting at position 362 of SEQ ID NO: 1561290
cuaagaauugagcacugca

SEQ ID NO: 1660470 - RNA, 19 nt, Artificial Sequence
  Description of Artificial Sequence: Synthetic oligonucleotide
  Antisense strand to SEQ ID NO: 1660469
ugcagugcucaauucuuag

SEQ ID NO: 1660471 - RNA, 19 nt, Artificial Sequence
  Description of Artificial Sequence: Synthetic oligonucleotide
  Sense strand starting at position 503 of SEQ ID NO: 1561290
augagcuagcuaugauauu

SEQ ID NO: 1660472 - RNA, 19 nt, Artificial Sequence
  Description of Artificial Sequence: Synthetic oligonucleotide
  Antisense strand to SEQ ID NO: 1660471
aauaucauagcuagcucau

SEQ ID NO: 1660473 - RNA, 19 nt, Artificial Sequence
  Description of Artificial Sequence: Synthetic oligonucleotide
  Sense strand starting at position 512 of SEQ ID NO: 1561290
cuaugauauuuauaggaga

SEQ ID NO: 1660474 - RNA, 19 nt, Artificial Sequence
  Description of Artificial Sequence: Synthetic oligonucleotide
  Antisense strand to SEQ ID NO: 1660473
ucuccuauaaauaucauag

SEQ ID NO: 1660475 - RNA, 19 nt, Artificial Sequence
  Description of Artificial Sequence: Synthetic oligonucleotide
  Sense strand starting at position 698 of SEQ ID NO: 1561290
gguaaauaggccuacccuu

SEQ ID NO: 1660476 - RNA, 19 nt, Artificial Sequence
  Description of Artificial Sequence: Synthetic oligonucleotide
  Antisense strand to SEQ ID NO: 1660475
aaggguaggccuauuuacc

SEQ ID NO: 1660477 - RNA, 19 nt, Artificial Sequence
  Description of Artificial Sequence: Synthetic oligonucleotide
  Sense strand starting at position 750 of SEQ ID NO: 1561290
guaguccucgcucauaaua

SEQ ID NO: 1660478 - RNA, 19 nt, Artificial Sequence
  Description of Artificial Sequence: Synthetic oligonucleotide
  Antisense strand to SEQ ID NO: 1660477
uauuaugagcgaggacuac

SEQ ID NO: 1660479 - RNA, 19 nt, Artificial Sequence
  Description of Artificial Sequence: Synthetic oligonucleotide
  Sense strand starting at position 773 of SEQ ID NO: 1561290
gcccaaggaugaucacauu

SEQ ID NO: 1660480 - RNA, 19 nt, Artificial Sequence
  Description of Artificial Sequence: Synthetic oligonucleotide
  Antisense strand to SEQ ID NO: 1660479
aaugugaucauccuugggc

SEQ ID NO: 1660481 - RNA, 19 nt, Artificial Sequence
  Description of Artificial Sequence: Synthetic oligonucleotide
  Sense strand starting at position 802 of SEQ ID NO: 1561290
gcuuguuuccuugacauug

SEQ ID NO: 1660482 - RNA, 19 nt, Artificial Sequence
  Description of Artificial Sequence: Synthetic oligonucleotide
  Antisense strand to SEQ ID NO: 1660481
caaugucaaggaaacaagc

SEQ ID NO: 1660483 - RNA, 19 nt, Artificial Sequence
  Description of Artificial Sequence: Synthetic oligonucleotide
  Sense strand starting at position 848 of SEQ ID NO: 1561290
gggacuagggcuuagcuau

SEQ ID NO: 1660484 - RNA, 19 nt, Artificial Sequence
  Description of Artificial Sequence: Synthetic oligonucleotide
  Antisense strand to SEQ ID NO: 1660483
auagcuaagcccuaguccc

SEQ ID NO: 1660485 - RNA, 19 nt, Artificial Sequence
  Description of Artificial Sequence: Synthetic oligonucleotide
  Sense strand starting at position 884 of SEQ ID NO: 1561290
ggcacaaaguggucaccaa

SEQ ID NO: 1660486 - RNA, 19 nt, Artificial Sequence
  Description of Artificial Sequence: Synthetic oligonucleotide
  Antisense strand to SEQ ID NO: 1660485
uuggugaccacuuugugcc

SEQ ID NO: 1660487 - RNA, 19 nt, Artificial Sequence
  Description of Artificial Sequence: Synthetic oligonucleotide
  Sense strand starting at position 885 of SEQ ID NO: 1561290
gcacaaaguggucaccaaa

SEQ ID NO: 1660488 - RNA, 19 nt, Artificial Sequence
  Description of Artificial Sequence: Synthetic oligonucleotide
  Antisense strand to SEQ ID NO: 1660487
uuuggugaccacuuugugc

SEQ ID NO: 1660489 - RNA, 19 nt, Artificial Sequence
  Description of Artificial Sequence: Synthetic oligonucleotide
  Sense strand starting at position 908 of SEQ ID NO: 1561290
ccauguauagcagaagagu

SEQ ID NO: 1660490 - RNA, 19 nt, Artificial Sequence
  Description of Artificial Sequence: Synthetic oligonucleotide
  Antisense strand to SEQ ID NO: 1660489
acucuucugcuauacaugg

SEQ ID NO: 1660491 - RNA, 19 nt, Artificial Sequence
  Description of Artificial Sequence: Synthetic oligonucleotide
  Sense strand starting at position 944 of SEQ ID NO: 1561290
gggcacaauuccuccauca

SEQ ID NO: 1660492 - RNA, 19 nt, Artificial Sequence
  Description of Artificial Sequence: Synthetic oligonucleotide
  Antisense strand to SEQ ID NO: 1660491
ugauggaggaauugugccc

SEQ ID NO: 1660493 - RNA, 19 nt, Artificial Sequence
  Description of Artificial Sequence: Synthetic oligonucleotide
  Sense strand starting at position 1390 of SEQ ID NO: 1561290
cgucccuuccugcaugaaa

SEQ ID NO: 1660494 - RNA, 19 nt, Artificial Sequence
  Description of Artificial Sequence: Synthetic oligonucleotide
  Antisense strand to SEQ ID NO: 1660493
uuucaugcaggaagggacg

SEQ ID NO: 1660495 - RNA, 19 nt, Artificial Sequence
  Description of Artificial Sequence: Synthetic oligonucleotide
  Sense strand starting at position 1507 of SEQ ID NO: 1561290
agagucacccugggaaagu

SEQ ID NO: 1660496 - RNA, 19 nt, Artificial Sequence
  Description of Artificial Sequence: Synthetic oligonucleotide
  Antisense strand to SEQ ID NO: 1660495
acuuucccagggugacucu

SEQ ID NO: 1660497 - RNA, 19 nt, Artificial Sequence
  Description of Artificial Sequence: Synthetic oligonucleotide
  Sense strand starting at position 1614 of SEQ ID NO: 1561290
gggcacaguucuccagcaa

SEQ ID NO: 1660498 - RNA, 19 nt, Artificial Sequence
  Description of Artificial Sequence: Synthetic oligonucleotide
  Antisense strand to SEQ ID NO: 1660497
uugcuggagaacugugccc

SEQ ID NO: 1660499 - RNA, 19 nt, Artificial Sequence
  Description of Artificial Sequence: Synthetic oligonucleotide
  Sense strand starting at position 2676 of SEQ ID NO: 1561290
uccggaggaucacucugau

SEQ ID NO: 1660500 - RNA, 19 nt, Artificial Sequence
  Description of Artificial Sequence: Synthetic oligonucleotide
  Antisense strand to SEQ ID NO: 1660499
aucagagugauccuccgga

SEQ ID NO: 1660501 - RNA, 19 nt, Artificial Sequence
  Description of Artificial Sequence: Synthetic oligonucleotide
  Sense strand starting at position 2984 of SEQ ID NO: 1561290
ugaaucacggucugaaguu

SEQ ID NO: 1660502 - RNA, 19 nt, Artificial Sequence
  Description of Artificial Sequence: Synthetic oligonucleotide
  Antisense strand to SEQ ID NO: 1660501
aacuucagaccgugauuca

SEQ ID NO: 1660503 - RNA, 19 nt, Artificial Sequence
  Description of Artificial Sequence: Synthetic oligonucleotide
  Sense strand starting at position 3009 of SEQ ID NO: 1561290
uggauuuauucuugaacau

SEQ ID NO: 1660504 - RNA, 19 nt, Artificial Sequence
  Description of Artificial Sequence: Synthetic oligonucleotide
  Antisense strand to SEQ ID NO: 1660503
auguucaagaauaaaucca

SEQ ID NO: 1660505 - RNA, 19 nt, Artificial Sequence
  Description of Artificial Sequence: Synthetic oligonucleotide
  Sense strand starting at position 3123 of SEQ ID NO: 1561290
uuacaccagucaucacaga

SEQ ID NO: 1660506 - RNA, 19 nt, Artificial Sequence
  Description of Artificial Sequence: Synthetic oligonucleotide
  Antisense strand to SEQ ID NO: 1660505
ucugugaugacugguguaa

SEQ ID NO: 1660507 - RNA, 19 nt, Artificial Sequence
  Description of Artificial Sequence: Synthetic oligonucleotide
  Sense strand starting at position 3179 of SEQ ID NO: 1561290
uggucuccuuacucuugaa

SEQ ID NO: 1660508 - RNA, 19 nt, Artificial Sequence
  Description of Artificial Sequence: Synthetic oligonucleotide
  Antisense strand to SEQ ID NO: 1660507
uucaagaguaaggagacca

SEQ ID NO: 1660509 - RNA, 19 nt, Artificial Sequence
  Description of Artificial Sequence: Synthetic oligonucleotide
  Sense strand starting at position 3212 of SEQ ID NO: 1561290
gucuccuggccucagugau

SEQ ID NO: 1660510 - RNA, 19 nt, Artificial Sequence
  Description of Artificial Sequence: Synthetic oligonucleotide
  Antisense strand to SEQ ID NO: 1660509
aucacugaggccaggagac

SEQ ID NO: 1660511 - RNA, 19 nt, Artificial Sequence
  Description of Artificial Sequence: Synthetic oligonucleotide
  Sense strand starting at position 3219 of SEQ ID NO: 1561290
ggccucagugauggaauua

SEQ ID NO: 1660512 - RNA, 19 nt, Artificial Sequence
  Description of Artificial Sequence: Synthetic oligonucleotide
  Antisense strand to SEQ ID NO: 1660511
uaauuccaucacugaggcc

SEQ ID NO: 1660513 - RNA, 19 nt, Artificial Sequence
  Description of Artificial Sequence: Synthetic oligonucleotide
  Sense strand starting at position 3220 of SEQ ID NO: 1561290
gccucagugauggaauuaa

SEQ ID NO: 1660514 - RNA, 19 nt, Artificial Sequence
  Description of Artificial Sequence: Synthetic oligonucleotide
  Antisense strand to SEQ ID NO: 1660513
uuaauuccaucacugaggc

SEQ ID NO: 1660515 - RNA, 19 nt, Artificial Sequence
  Description of Artificial Sequence: Synthetic oligonucleotide
  Sense strand starting at position 3252 of SEQ ID NO: 1561290
ucugaauccaagggugacu

SEQ ID NO: 1660516 - RNA, 19 nt, Artificial Sequence
  Description of Artificial Sequence: Synthetic oligonucleotide
  Antisense strand to SEQ ID NO: 1660515
agucacccuuggauucaga

SEQ ID NO: 1660517 - RNA, 19 nt, Artificial Sequence
  Description of Artificial Sequence: Synthetic oligonucleotide
  Sense strand starting at position 3354 of SEQ ID NO: 1561290
gguggaccuagccauguaa

SEQ ID NO: 1660518 - RNA, 19 nt, Artificial Sequence
  Description of Artificial Sequence: Synthetic oligonucleotide
  Antisense strand to SEQ ID NO: 1660517
uuacauggcuagguccacc

SEQ ID NO: 1660519 - RNA, 19 nt, Artificial Sequence
  Description of Artificial Sequence: Synthetic oligonucleotide
  Sense strand starting at position 3356 of SEQ ID NO: 1561290
uggaccuagccauguaaua

SEQ ID NO: 1660520 - RNA, 19 nt, Artificial Sequence
  Description of Artificial Sequence: Synthetic oligonucleotide
  Antisense strand to SEQ ID NO: 1660519
uauuacauggcuaggucca

SEQ ID NO: 1660521 - RNA, 19 nt, Artificial Sequence
  Description of Artificial Sequence: Synthetic oligonucleotide
  Sense strand starting at position 3556 of SEQ ID NO: 1561290
guggauguguggaaagaga

SEQ ID NO: 1660522 - RNA, 19 nt, Artificial Sequence
  Description of Artificial Sequence: Synthetic oligonucleotide
  Antisense strand to SEQ ID NO: 1660521
ucucuuuccacacauccac

SEQ ID NO: 1660523 - RNA, 19 nt, Artificial Sequence
  Description of Artificial Sequence: Synthetic oligonucleotide
  Sense strand starting at position 3824 of SEQ ID NO: 1561290
gcuccuugagguuaucuaa

SEQ ID NO: 1660524 - RNA, 19 nt, Artificial Sequence
  Description of Artificial Sequence: Synthetic oligonucleotide
  Antisense strand to SEQ ID NO: 1660523
uuagauaaccucaaggagc

SEQ ID NO: 1660525 - RNA, 19 nt, Artificial Sequence
  Description of Artificial Sequence: Synthetic oligonucleotide
  Sense strand starting at position 3832 of SEQ ID NO: 1561290
agguuaucuaaugggacau

SEQ ID NO: 1660526 - RNA, 19 nt, Artificial Sequence
  Description of Artificial Sequence: Synthetic oligonucleotide
  Antisense strand to SEQ ID NO: 1660525
augucccauuagauaaccu

SEQ ID NO: 1660527 - RNA, 19 nt, Artificial Sequence
  Description of Artificial Sequence: Synthetic oligonucleotide
  Sense strand starting at position 3833 of SEQ ID NO: 1561290
gguuaucuaaugggacauc

SEQ ID NO: 1660528 - RNA, 19 nt, Artificial Sequence
  Description of Artificial Sequence: Synthetic oligonucleotide
  Antisense strand to SEQ ID NO: 1660527
gaugucccauuagauaacc

SEQ ID NO: 1660529 - RNA, 19 nt, Artificial Sequence
  Description of Artificial Sequence: Synthetic oligonucleotide
  Sense strand starting at position 3854 of SEQ ID NO: 1561290
gagccuauugguugacgaa

SEQ ID NO: 1660530 - RNA, 19 nt, Artificial Sequence
  Description of Artificial Sequence: Synthetic oligonucleotide
  Antisense strand to SEQ ID NO: 1660529
uucgucaaccaauaggcuc

SEQ ID NO: 1660531 - RNA, 19 nt, Artificial Sequence
  Description of Artificial Sequence: Synthetic oligonucleotide
  Sense strand starting at position 3855 of SEQ ID NO: 1561290
agccuauugguugacgaau

SEQ ID NO: 1660532 - RNA, 19 nt, Artificial Sequence
  Description of Artificial Sequence: Synthetic oligonucleotide
  Antisense strand to SEQ ID NO: 1660531
auucgucaaccaauaggcu

SEQ ID NO: 1660533 - RNA, 19 nt, Artificial Sequence
  Description of Artificial Sequence: Synthetic oligonucleotide
  Sense strand starting at position 192 of SEQ ID NO: 1561291
caucacauggagugugauu

SEQ ID NO: 1660534 - RNA, 19 nt, Artificial Sequence
  Description of Artificial Sequence: Synthetic oligonucleotide
  Antisense strand to SEQ ID NO: 1660533
aaucacacuccaugugaug

SEQ ID NO: 1660535 - RNA, 19 nt, Artificial Sequence
  Description of Artificial Sequence: Synthetic oligonucleotide
  Sense strand starting at position 255 of SEQ ID NO: 1561291
cccgaaagucauuaccagu

SEQ ID NO: 1660536 - RNA, 19 nt, Artificial Sequence
  Description of Artificial Sequence: Synthetic oligonucleotide
  Antisense strand to SEQ ID NO: 1660535
acugguaaugacuuucggg

SEQ ID NO: 1660537 - RNA, 19 nt, Artificial Sequence
  Description of Artificial Sequence: Synthetic oligonucleotide
  Sense strand starting at position 303 of SEQ ID NO: 1561291
guuguuggagcuuauacaa

SEQ ID NO: 1660538 - RNA, 19 nt, Artificial Sequence
  Description of Artificial Sequence: Synthetic oligonucleotide
  Antisense strand to SEQ ID NO: 1660537
uuguauaagcuccaacaac

SEQ ID NO: 1660539 - RNA, 19 nt, Artificial Sequence
  Description of Artificial Sequence: Synthetic oligonucleotide
  Sense strand starting at position 545 of SEQ ID NO: 1561291
ugcauuggucuuggaaaua

SEQ ID NO: 1660540 - RNA, 19 nt, Artificial Sequence
  Description of Artificial Sequence: Synthetic oligonucleotide
  Antisense strand to SEQ ID NO: 1660539
uauuuccaagaccaaugca

SEQ ID NO: 1660541 - RNA, 19 nt, Artificial Sequence
  Description of Artificial Sequence: Synthetic oligonucleotide
  Sense strand starting at position 577 of SEQ ID NO: 1561291
ggaaaugacugagcaucau

SEQ ID NO: 1660542 - RNA, 19 nt, Artificial Sequence
  Description of Artificial Sequence: Synthetic oligonucleotide
  Antisense strand to SEQ ID NO: 1660541
augaugcucagucauuucc

SEQ ID NO: 1660543 - RNA, 19 nt, Artificial Sequence
  Description of Artificial Sequence: Synthetic oligonucleotide
  Sense strand starting at position 581 of SEQ ID NO: 1561291
augacugagcaucaucauu

SEQ ID NO: 1660544 - RNA, 19 nt, Artificial Sequence
  Description of Artificial Sequence: Synthetic oligonucleotide
  Antisense strand to SEQ ID NO: 1660543
aaugaugaugcucagucau

SEQ ID NO: 1660545 - RNA, 19 nt, Artificial Sequence
  Description of Artificial Sequence: Synthetic oligonucleotide
  Sense strand starting at position 736 of SEQ ID NO: 1561291
agcacagauugcuuaaacu

SEQ ID NO: 1660546 - RNA, 19 nt, Artificial Sequence
  Description of Artificial Sequence: Synthetic oligonucleotide
  Antisense strand to SEQ ID NO: 1660545
aguuuaagcaaucugugcu

SEQ ID NO: 1660547 - RNA, 19 nt, Artificial Sequence
  Description of Artificial Sequence: Synthetic oligonucleotide
  Sense strand starting at position 767 of SEQ ID NO: 1561291
aguggcagucaggauucaa

SEQ ID NO: 1660548 - RNA, 19 nt, Artificial Sequence
  Description of Artificial Sequence: Synthetic oligonucleotide
  Antisense strand to SEQ ID NO: 1660547
uugaauccugacugccacu

SEQ ID NO: 1660549 - RNA, 19 nt, Artificial Sequence
  Description of Artificial Sequence: Synthetic oligonucleotide
  Sense strand starting at position 792 of SEQ ID NO: 1561291
uuaaucuaggcucgaaauu

SEQ ID NO: 1660550 - RNA, 19 nt, Artificial Sequence
  Description of Artificial Sequence: Synthetic oligonucleotide
  Antisense strand to SEQ ID NO: 1660549
aauuucgagccuagauuaa

SEQ ID NO: 1660551 - RNA, 19 nt, Artificial Sequence
  Description of Artificial Sequence: Synthetic oligonucleotide
  Sense strand starting at position 1066 of SEQ ID NO: 1561291
cucacagaguaauugaauu

SEQ ID NO: 1660552 - RNA, 19 nt, Artificial Sequence
  Description of Artificial Sequence: Synthetic oligonucleotide
  Antisense strand to SEQ ID NO: 1660551
aauucaauuacucugugag

SEQ ID NO: 1660553 - RNA, 19 nt, Artificial Sequence
  Description of Artificial Sequence: Synthetic oligonucleotide
  Sense strand starting at position 1101 of SEQ ID NO: 1561291
cuaaccaugugucuaacua

SEQ ID NO: 1660554 - RNA, 19 nt, Artificial Sequence
  Description of Artificial Sequence: Synthetic oligonucleotide
  Antisense strand to SEQ ID NO: 1660553
uaguuagacacaugguuag

SEQ ID NO: 1660555 - RNA, 19 nt, Artificial Sequence
  Description of Artificial Sequence: Synthetic oligonucleotide
  Sense strand starting at position 1105 of SEQ ID NO: 1561291
ccaugugucuaacuauaga

SEQ ID NO: 1660556 - RNA, 19 nt, Artificial Sequence
  Description of Artificial Sequence: Synthetic oligonucleotide
  Antisense strand to SEQ ID NO: 1660555
ucuauaguuagacacaugg

SEQ ID NO: 1660557 - RNA, 19 nt, Artificial Sequence
  Description of Artificial Sequence: Synthetic oligonucleotide
  Sense strand starting at position 1108 of SEQ ID NO: 1561291
ugugucuaacuauagaaca

SEQ ID NO: 1660558 - RNA, 19 nt, Artificial Sequence
  Description of Artificial Sequence: Synthetic oligonucleotide
  Antisense strand to SEQ ID NO: 1660557
uguucuauaguuagacaca

SEQ ID NO: 1660559 - RNA, 19 nt, Artificial Sequence
  Description of Artificial Sequence: Synthetic oligonucleotide
  Sense strand starting at position 1137 of SEQ ID NO: 1561291
ggcacuaacaacgggaaau

SEQ ID NO: 1660560 - RNA, 19 nt, Artificial Sequence
  Description of Artificial Sequence: Synthetic oligonucleotide
  Antisense strand to SEQ ID NO: 1660559
auuucccguuguuagugcc

SEQ ID NO: 1660561 - RNA, 19 nt, Artificial Sequence
  Description of Artificial Sequence: Synthetic oligonucleotide
  Sense strand starting at position 1175 of SEQ ID NO: 1561291
ccguuaacuagguagggaa

SEQ ID NO: 1660562 - RNA, 19 nt, Artificial Sequence
  Description of Artificial Sequence: Synthetic oligonucleotide
  Antisense strand to SEQ ID NO: 1660561
uucccuaccuaguuaacgg

SEQ ID NO: 1660563 - RNA, 19 nt, Artificial Sequence
  Description of Artificial Sequence: Synthetic oligonucleotide
  Sense strand starting at position 1325 of SEQ ID NO: 1561291
cagcgauucguuucuccuu

SEQ ID NO: 1660564 - RNA, 19 nt, Artificial Sequence
  Description of Artificial Sequence: Synthetic oligonucleotide
  Antisense strand to SEQ ID NO: 1660563
aaggagaaacgaaucgcug

SEQ ID NO: 1660565 - RNA, 19 nt, Artificial Sequence
  Description of Artificial Sequence: Synthetic oligonucleotide
  Sense strand starting at position 2604 of SEQ ID NO: 1561291
cgugaguuggauggaggaa

SEQ ID NO: 1660566 - RNA, 19 nt, Artificial Sequence
  Description of Artificial Sequence: Synthetic oligonucleotide
  Antisense strand to SEQ ID NO: 1660565
uuccuccauccaacucacg

SEQ ID NO: 1660567 - RNA, 19 nt, Artificial Sequence
  Description of Artificial Sequence: Synthetic oligonucleotide
  Sense strand starting at position 2924 of SEQ ID NO: 1561291
cugccucauccagcguuau

SEQ ID NO: 1660568 - RNA, 19 nt, Artificial Sequence
  Description of Artificial Sequence: Synthetic oligonucleotide
  Antisense strand to SEQ ID NO: 1660567
auaacgcuggaugaggcag

SEQ ID NO: 1660569 - RNA, 19 nt, Artificial Sequence
  Description of Artificial Sequence: Synthetic oligonucleotide
  Sense strand starting at position 3115 of SEQ ID NO: 1561291
aaggaauaagguugcuauu

SEQ ID NO: 1660570 - RNA, 19 nt, Artificial Sequence
  Description of Artificial Sequence: Synthetic oligonucleotide
  Antisense strand to SEQ ID NO: 1660569
aauagcaaccuuauuccuu

SEQ ID NO: 1660571 - RNA, 19 nt, Artificial Sequence
  Description of Artificial Sequence: Synthetic oligonucleotide
  Sense strand starting at position 3117 of SEQ ID NO: 1561291
ggaauaagguugcuauuac

SEQ ID NO: 1660572 - RNA, 19 nt, Artificial Sequence
  Description of Artificial Sequence: Synthetic oligonucleotide
  Antisense strand to SEQ ID NO: 1660571
guaauagcaaccuuauucc

SEQ ID NO: 1660573 - RNA, 19 nt, Artificial Sequence
  Description of Artificial Sequence: Synthetic oligonucleotide
  Sense strand starting at position 3144 of SEQ ID NO: 1561291
gauggaauuguaggacugu

SEQ ID NO: 1660574 - RNA, 19 nt, Artificial Sequence
  Description of Artificial Sequence: Synthetic oligonucleotide
  Antisense strand to SEQ ID NO: 1660573
acaguccuacaauuccauc

SEQ ID NO: 1660575 - RNA, 19 nt, Artificial Sequence
  Description of Artificial Sequence: Synthetic oligonucleotide
  Sense strand starting at position 3221 of SEQ ID NO: 1561291
auaccuggucuuggaauau

SEQ ID NO: 1660576 - RNA, 19 nt, Artificial Sequence
  Description of Artificial Sequence: Synthetic oligonucleotide
  Antisense strand to SEQ ID NO: 1660575
auauuccaagaccagguau

SEQ ID NO: 1660577 - RNA, 19 nt, Artificial Sequence
  Description of Artificial Sequence: Synthetic oligonucleotide
  Sense strand starting at position 3225 of SEQ ID NO: 1561291
cuggucuuggaauauucua

SEQ ID NO: 1660578 - RNA, 19 nt, Artificial Sequence
  Description of Artificial Sequence: Synthetic oligonucleotide
  Antisense strand to SEQ ID NO: 1660577
uagaauauuccaagaccag

SEQ ID NO: 1660579 - RNA, 19 nt, Artificial Sequence
  Description of Artificial Sequence: Synthetic oligonucleotide
  Sense strand starting at position 3265 of SEQ ID NO: 1561291
cccuuuguuccuggaugaa

SEQ ID NO: 1660580 - RNA, 19 nt, Artificial Sequence
  Description of Artificial Sequence: Synthetic oligonucleotide
  Antisense strand to SEQ ID NO: 1660579
uucauccaggaacaaaggg

SEQ ID NO: 1660581 - RNA, 19 nt, Artificial Sequence
  Description of Artificial Sequence: Synthetic oligonucleotide
  Sense strand starting at position 3304 of SEQ ID NO: 1561291
cuccaagcauucuuggaua

SEQ ID NO: 1660582 - RNA, 19 nt, Artificial Sequence
  Description of Artificial Sequence: Synthetic oligonucleotide
  Antisense strand to SEQ ID NO: 1660581
uauccaagaaugcuuggag

SEQ ID NO: 1660583 - RNA, 19 nt, Artificial Sequence
  Description of Artificial Sequence: Synthetic oligonucleotide
  Sense strand starting at position 3309 of SEQ ID NO: 1561291
agcauucuuggauaguaag

SEQ ID NO: 1660584 - RNA, 19 nt, Artificial Sequence
  Description of Artificial Sequence: Synthetic oligonucleotide
  Antisense strand to SEQ ID NO: 1660583
cuuacuauccaagaaugcu

SEQ ID NO: 1660585 - RNA, 19 nt, Artificial Sequence
  Description of Artificial Sequence: Synthetic oligonucleotide
  Sense strand starting at position 3319 of SEQ ID NO: 1561291
gauaguaaguuucuuugau

SEQ ID NO: 1660586 - RNA, 19 nt, Artificial Sequence
  Description of Artificial Sequence: Synthetic oligonucleotide
  Antisense strand to SEQ ID NO: 1660585
aucaaagaaacuuacuauc

SEQ ID NO: 1660587 - RNA, 19 nt, Artificial Sequence
  Description of Artificial Sequence: Synthetic oligonucleotide
  Sense strand starting at position 3320 of SEQ ID NO: 1561291
auaguaaguuucuuugauc

SEQ ID NO: 1660588 - RNA, 19 nt, Artificial Sequence
  Description of Artificial Sequence: Synthetic oligonucleotide
  Antisense strand to SEQ ID NO: 1660587
gaucaaagaaacuuacuau

SEQ ID NO: 1660589 - RNA, 19 nt, Artificial Sequence
  Description of Artificial Sequence: Synthetic oligonucleotide
  Sense strand starting at position 3331 of SEQ ID NO: 1561291
cuuugaucuuuaguugaaa

SEQ ID NO: 1660590 - RNA, 19 nt, Artificial Sequence
  Description of Artificial Sequence: Synthetic oligonucleotide
  Antisense strand to SEQ ID NO: 1660589
uuucaacuaaagaucaaag

SEQ ID NO: 1660591 - RNA, 19 nt, Artificial Sequence
  Description of Artificial Sequence: Synthetic oligonucleotide
  Sense strand starting at position 3332 of SEQ ID NO: 1561291
uuugaucuuuaguugaaag

SEQ ID NO: 1660592 - RNA, 19 nt, Artificial Sequence
  Description of Artificial Sequence: Synthetic oligonucleotide
  Antisense strand to SEQ ID NO: 1660591
cuuucaacuaaagaucaaa

SEQ ID NO: 1660593 - RNA, 19 nt, Artificial Sequence
  Description of Artificial Sequence: Synthetic oligonucleotide
  Sense strand starting at position 3343 of SEQ ID NO: 1561291
guugaaagaucagccucau

SEQ ID NO: 1660594 - RNA, 19 nt, Artificial Sequence
  Description of Artificial Sequence: Synthetic oligonucleotide
  Antisense strand to SEQ ID NO: 1660593
augaggcugaucuuucaac

SEQ ID NO: 1660595 - RNA, 19 nt, Artificial Sequence
  Description of Artificial Sequence: Synthetic oligonucleotide
  Sense strand starting at position 3478 of SEQ ID NO: 1561291
agugaauauguggaguaua

SEQ ID NO: 1660596 - RNA, 19 nt, Artificial Sequence
  Description of Artificial Sequence: Synthetic oligonucleotide
  Antisense strand to SEQ ID NO: 1660595
uauacuccacauauucacu

SEQ ID NO: 1660597 - RNA, 19 nt, Artificial Sequence
  Description of Artificial Sequence: Synthetic oligonucleotide
  Sense strand starting at position 3481 of SEQ ID NO: 1561291
gaauauguggaguauaugu

SEQ ID NO: 1660598 - RNA, 19 nt, Artificial Sequence
  Description of Artificial Sequence: Synthetic oligonucleotide
  Antisense strand to SEQ ID NO: 1660597
acauauacuccacauauuc

SEQ ID NO: 1660599 - RNA, 19 nt, Artificial Sequence
  Description of Artificial Sequence: Synthetic oligonucleotide
  Sense strand starting at position 3486 of SEQ ID NO: 1561291
uguggaguauauguacuaa

SEQ ID NO: 1660600 - RNA, 19 nt, Artificial Sequence
  Description of Artificial Sequence: Synthetic oligonucleotide
  Antisense strand to SEQ ID NO: 1660599
uuaguacauauacuccaca

SEQ ID NO: 1660601 - RNA, 19 nt, Artificial Sequence
  Description of Artificial Sequence: Synthetic oligonucleotide
  Sense strand starting at position 3546 of SEQ ID NO: 1561291
acaugaguuuguuuaucaa

SEQ ID NO: 1660602 - RNA, 19 nt, Artificial Sequence
  Description of Artificial Sequence: Synthetic oligonucleotide
  Antisense strand to SEQ ID NO: 1660601
uugauaaacaaacucaugu

SEQ ID NO: 1660603 - RNA, 19 nt, Artificial Sequence
  Description of Artificial Sequence: Synthetic oligonucleotide
  Sense strand starting at position 3549 of SEQ ID NO: 1561291
ugaguuuguuuaucaagga

SEQ ID NO: 1660604 - RNA, 19 nt, Artificial Sequence
  Description of Artificial Sequence: Synthetic oligonucleotide
  Antisense strand to SEQ ID NO: 1660603
uccuugauaaacaaacuca

SEQ ID NO: 1660605 - RNA, 19 nt, Artificial Sequence
  Description of Artificial Sequence: Synthetic oligonucleotide
  Sense strand starting at position 3651 of SEQ ID NO: 1561291
ugguucaaacaucggagua

SEQ ID NO: 1660606 - RNA, 19 nt, Artificial Sequence
  Description of Artificial Sequence: Synthetic oligonucleotide
  Antisense strand to SEQ ID NO: 1660605
uacuccgauguuugaacca

SEQ ID NO: 1660607 - RNA, 19 nt, Artificial Sequence
  Description of Artificial Sequence: Synthetic oligonucleotide
  Sense strand starting at position 3694 of SEQ ID NO: 1561291
gcaauuggacuguacaguu

SEQ ID NO: 1660608 - RNA, 19 nt, Artificial Sequence
  Description of Artificial Sequence: Synthetic oligonucleotide
  Antisense strand to SEQ ID NO: 1660607
aacuguacaguccaauugc

SEQ ID NO: 1660609 - RNA, 19 nt, Artificial Sequence
  Description of Artificial Sequence: Synthetic oligonucleotide
  Sense strand starting at position 3747 of SEQ ID NO: 1561291
ugauucuuguuuccuagaa

SEQ ID NO: 1660610 - RNA, 19 nt, Artificial Sequence
  Description of Artificial Sequence: Synthetic oligonucleotide
  Antisense strand to SEQ ID NO: 1660609
uucuaggaaacaagaauca

SEQ ID NO: 1660611 - RNA, 19 nt, Artificial Sequence
  Description of Artificial Sequence: Synthetic oligonucleotide
  Sense strand starting at position 3804 of SEQ ID NO: 1561291
ccuuaagaugcauguauua

SEQ ID NO: 1660612 - RNA, 19 nt, Artificial Sequence
  Description of Artificial Sequence: Synthetic oligonucleotide
  Antisense strand to SEQ ID NO: 1660611
uaauacaugcaucuuaagg

SEQ ID NO: 1660613 - RNA, 19 nt, Artificial Sequence
  Description of Artificial Sequence: Synthetic oligonucleotide
  Sense strand starting at position 1108 of SEQ ID NO: 1561292
gcggaaaugggucgguuaa

SEQ ID NO: 1660614 - RNA, 19 nt, Artificial Sequence
  Description of Artificial Sequence: Synthetic oligonucleotide
  Antisense strand to SEQ ID NO: 1660613
uuaaccgacccauuuccgc

SEQ ID NO: 1660615 - RNA, 19 nt, Artificial Sequence
  Description of Artificial Sequence: Synthetic oligonucleotide
  Sense strand starting at position 1109 of SEQ ID NO: 1561292
cggaaaugggucgguuaag

SEQ ID NO: 1660616 - RNA, 19 nt, Artificial Sequence
  Description of Artificial Sequence: Synthetic oligonucleotide
  Antisense strand to SEQ ID NO: 1660615
cuuaaccgacccauuuccg

SEQ ID NO: 1660617 - RNA, 19 nt, Artificial Sequence
  Description of Artificial Sequence: Synthetic oligonucleotide
  Sense strand starting at position 1261 of SEQ ID NO: 1561292
guuggagguucugaguuua

SEQ ID NO: 1660618 - RNA, 19 nt, Artificial Sequence
  Description of Artificial Sequence: Synthetic oligonucleotide
  Antisense strand to SEQ ID NO: 1660617
uaaacucagaaccuccaac

SEQ ID NO: 1660619 - RNA, 19 nt, Artificial Sequence
  Description of Artificial Sequence: Synthetic oligonucleotide
  Sense strand starting at position 1289 of SEQ ID NO: 1561292
gaggccuuaucccgaggga

SEQ ID NO: 1660620 - RNA, 19 nt, Artificial Sequence
  Description of Artificial Sequence: Synthetic oligonucleotide
  Antisense strand to SEQ ID NO: 1660619
ucccucgggauaaggccuc

SEQ ID NO: 1660621 - RNA, 19 nt, Artificial Sequence
  Description of Artificial Sequence: Synthetic oligonucleotide
  Sense strand starting at position 1441 of SEQ ID NO: 1561292
ggagaaaccgggcaaaguu

SEQ ID NO: 1660622 - RNA, 19 nt, Artificial Sequence
  Description of Artificial Sequence: Synthetic oligonucleotide
  Antisense strand to SEQ ID NO: 1660621
aacuuugcccgguuucucc

SEQ ID NO: 1660623 - RNA, 19 nt, Artificial Sequence
  Description of Artificial Sequence: Synthetic oligonucleotide
  Sense strand starting at position 1450 of SEQ ID NO: 1561292
gggcaaaguugaccuggaa

SEQ ID NO: 1660624 - RNA, 19 nt, Artificial Sequence
  Description of Artificial Sequence: Synthetic oligonucleotide
  Antisense strand to SEQ ID NO: 1660623
uuccaggucaacuuugccc

SEQ ID NO: 1660625 - RNA, 19 nt, Artificial Sequence
  Description of Artificial Sequence: Synthetic oligonucleotide
  Sense strand starting at position 1640 of SEQ ID NO: 1561292
gcagccucggucugagaaa

SEQ ID NO: 1660626 - RNA, 19 nt, Artificial Sequence
  Description of Artificial Sequence: Synthetic oligonucleotide
  Antisense strand to SEQ ID NO: 1660625
uuucucagaccgaggcugc

SEQ ID NO: 1660627 - RNA, 19 nt, Artificial Sequence
  Description of Artificial Sequence: Synthetic oligonucleotide
  Sense strand starting at position 1693 of SEQ ID NO: 1561292
acccauguuugagcgaaga

SEQ ID NO: 1660628 - RNA, 19 nt, Artificial Sequence
  Description of Artificial Sequence: Synthetic oligonucleotide
  Antisense strand to SEQ ID NO: 1660627
ucuucgcucaaacaugggu

SEQ ID NO: 1660629 - RNA, 19 nt, Artificial Sequence
  Description of Artificial Sequence: Synthetic oligonucleotide
  Sense strand starting at position 1841 of SEQ ID NO: 1561292
uggaguuugcggcgcuaga

SEQ ID NO: 1660630 - RNA, 19 nt, Artificial Sequence
  Description of Artificial Sequence: Synthetic oligonucleotide
  Antisense strand to SEQ ID NO: 1660629
ucuagcgccgcaaacucca

SEQ ID NO: 1660631 - RNA, 19 nt, Artificial Sequence
  Description of Artificial Sequence: Synthetic oligonucleotide
  Sense strand starting at position 1843 of SEQ ID NO: 1561292
gaguuugcggcgcuagaga

SEQ ID NO: 1660632 - RNA, 19 nt, Artificial Sequence
  Description of Artificial Sequence: Synthetic oligonucleotide
  Antisense strand to SEQ ID NO: 1660631
ucucuagcgccgcaaacuc

SEQ ID NO: 1660633 - RNA, 19 nt, Artificial Sequence
  Description of Artificial Sequence: Synthetic oligonucleotide
  Sense strand starting at position 2012 of SEQ ID NO: 1561292
ccgagagccggcuacuuau

SEQ ID NO: 1660634 - RNA, 19 nt, Artificial Sequence
  Description of Artificial Sequence: Synthetic oligonucleotide
  Antisense strand to SEQ ID NO: 1660633
auaaguagccggcucucgg

SEQ ID NO: 1660635 - RNA, 19 nt, Artificial Sequence
  Description of Artificial Sequence: Synthetic oligonucleotide
  Sense strand starting at position 2018 of SEQ ID NO: 1561292
gccggcuacuuauaggaaa

SEQ ID NO: 1660636 - RNA, 19 nt, Artificial Sequence
  Description of Artificial Sequence: Synthetic oligonucleotide
  Antisense strand to SEQ ID NO: 1660635
uuuccuauaaguagccggc

SEQ ID NO: 1660637 - RNA, 19 nt, Artificial Sequence
  Description of Artificial Sequence: Synthetic oligonucleotide
  Sense strand starting at position 2020 of SEQ ID NO: 1561292
cggcuacuuauaggaaacu

SEQ ID NO: 1660638 - RNA, 19 nt, Artificial Sequence
  Description of Artificial Sequence: Synthetic oligonucleotide
  Antisense strand to SEQ ID NO: 1660637
aguuuccuauaaguagccg

SEQ ID NO: 1660639 - RNA, 19 nt, Artificial Sequence
  Description of Artificial Sequence: Synthetic oligonucleotide
  Sense strand starting at position 2268 of SEQ ID NO: 1561292
gagacugaggcuuguagaa

SEQ ID NO: 1660640 - RNA, 19 nt, Artificial Sequence
  Description of Artificial Sequence: Synthetic oligonucleotide
  Antisense strand to SEQ ID NO: 1660639
uucuacaagccucagucuc

SEQ ID NO: 1660641 - RNA, 19 nt, Artificial Sequence
  Description of Artificial Sequence: Synthetic oligonucleotide
  Sense strand starting at position 2920 of SEQ ID NO: 1561292
gagaaagacugugagaaau

SEQ ID NO: 1660642 - RNA, 19 nt, Artificial Sequence
  Description of Artificial Sequence: Synthetic oligonucleotide
  Antisense strand to SEQ ID NO: 1660641
auuucucacagucuuucuc

SEQ ID NO: 1660643 - RNA, 19 nt, Artificial Sequence
  Description of Artificial Sequence: Synthetic oligonucleotide
  Sense strand starting at position 2922 of SEQ ID NO: 1561292
gaaagacugugagaaauaa

SEQ ID NO: 1660644 - RNA, 19 nt, Artificial Sequence
  Description of Artificial Sequence: Synthetic oligonucleotide
  Antisense strand to SEQ ID NO: 1660643
uuauuucucacagucuuuc

SEQ ID NO: 1660645 - RNA, 19 nt, Artificial Sequence
  Description of Artificial Sequence: Synthetic oligonucleotide
  Sense strand starting at position 3002 of SEQ ID NO: 1561292
ggaauucucugagaacugc

SEQ ID NO: 1660646 - RNA, 19 nt, Artificial Sequence
  Description of Artificial Sequence: Synthetic oligonucleotide
  Antisense strand to SEQ ID NO: 1660645
gcaguucucagagaauucc

SEQ ID NO: 1660647 - RNA, 19 nt, Artificial Sequence
  Description of Artificial Sequence: Synthetic oligonucleotide
  Sense strand starting at position 3208 of SEQ ID NO: 1561292
ggcggaugaucucuucuag

SEQ ID NO: 1660648 - RNA, 19 nt, Artificial Sequence
  Description of Artificial Sequence: Synthetic oligonucleotide
  Antisense strand to SEQ ID NO: 1660647
cuagaagagaucauccgcc

SEQ ID NO: 1660649 - RNA, 19 nt, Artificial Sequence
  Description of Artificial Sequence: Synthetic oligonucleotide
  Sense strand starting at position 3215 of SEQ ID NO: 1561292
gaucucuucuaggcugagu

SEQ ID NO: 1660650 - RNA, 19 nt, Artificial Sequence
  Description of Artificial Sequence: Synthetic oligonucleotide
  Antisense strand to SEQ ID NO: 1660649
acucagccuagaagagauc

SEQ ID NO: 1660651 - RNA, 19 nt, Artificial Sequence
  Description of Artificial Sequence: Synthetic oligonucleotide
  Sense strand starting at position 3217 of SEQ ID NO: 1561292
ucucuucuaggcugaguua

SEQ ID NO: 1660652 - RNA, 19 nt, Artificial Sequence
  Description of Artificial Sequence: Synthetic oligonucleotide
  Antisense strand to SEQ ID NO: 1660651
uaacucagccuagaagaga

SEQ ID NO: 1660653 - RNA, 19 nt, Artificial Sequence
  Description of Artificial Sequence: Synthetic oligonucleotide
  Sense strand starting at position 3264 of SEQ ID NO: 1561292
guacuuuacgcacauuaau

SEQ ID NO: 1660654 - RNA, 19 nt, Artificial Sequence
  Description of Artificial Sequence: Synthetic oligonucleotide
  Antisense strand to SEQ ID NO: 1660653
auuaaugugcguaaaguac

SEQ ID NO: 1660655 - RNA, 19 nt, Artificial Sequence
  Description of Artificial Sequence: Synthetic oligonucleotide
  Sense strand starting at position 3281 of SEQ ID NO: 1561292
auccuaaugccagguggua

SEQ ID NO: 1660656 - RNA, 19 nt, Artificial Sequence
  Description of Artificial Sequence: Synthetic oligonucleotide
  Antisense strand to SEQ ID NO: 1660655
uaccaccuggcauuaggau

SEQ ID NO: 1660657 - RNA, 19 nt, Artificial Sequence
  Description of Artificial Sequence: Synthetic oligonucleotide
  Sense strand starting at position 3652 of SEQ ID NO: 1561292
ccuaguucgagcuagcaaa

SEQ ID NO: 1660658 - RNA, 19 nt, Artificial Sequence
  Description of Artificial Sequence: Synthetic oligonucleotide
  Antisense strand to SEQ ID NO: 1660657
uuugcuagcucgaacuagg

SEQ ID NO: 1660659 - RNA, 19 nt, Artificial Sequence
  Description of Artificial Sequence: Synthetic oligonucleotide
  Sense strand starting at position 3683 of SEQ ID NO: 1561292
cauacuagggucugaaauu

SEQ ID NO: 1660660 - RNA, 19 nt, Artificial Sequence
  Description of Artificial Sequence: Synthetic oligonucleotide
  Antisense strand to SEQ ID NO: 1660659
aauuucagacccuaguaug

SEQ ID NO: 1660661 - RNA, 19 nt, Artificial Sequence
  Description of Artificial Sequence: Synthetic oligonucleotide
  Sense strand starting at position 3684 of SEQ ID NO: 1561292
auacuagggucugaaauua

SEQ ID NO: 1660662 - RNA, 19 nt, Artificial Sequence
  Description of Artificial Sequence: Synthetic oligonucleotide
  Antisense strand to SEQ ID NO: 1660661
uaauuucagacccuaguau

SEQ ID NO: 1660663 - RNA, 19 nt, Artificial Sequence
  Description of Artificial Sequence: Synthetic oligonucleotide
  Sense strand starting at position 3694 of SEQ ID NO: 1561292
cugaaauuaugucgagguu

SEQ ID NO: 1660664 - RNA, 19 nt, Artificial Sequence
  Description of Artificial Sequence: Synthetic oligonucleotide
  Antisense strand to SEQ ID NO: 1660663
aaccucgacauaauuucag

SEQ ID NO: 1660665 - RNA, 19 nt, Artificial Sequence
  Description of Artificial Sequence: Synthetic oligonucleotide
  Sense strand starting at position 3695 of SEQ ID NO: 1561292
ugaaauuaugucgagguuu

SEQ ID NO: 1660666 - RNA, 19 nt, Artificial Sequence
  Description of Artificial Sequence: Synthetic oligonucleotide
  Antisense strand to SEQ ID NO: 1660665
aaaccucgacauaauuuca

SEQ ID NO: 1660667 - RNA, 19 nt, Artificial Sequence
  Description of Artificial Sequence: Synthetic oligonucleotide
  Sense strand starting at position 3708 of SEQ ID NO: 1561292
agguuugcccucugagaaa

SEQ ID NO: 1660668 - RNA, 19 nt, Artificial Sequence
  Description of Artificial Sequence: Synthetic oligonucleotide
  Antisense strand to SEQ ID NO: 1660667
uuucucagagggcaaaccu

SEQ ID NO: 1660669 - RNA, 19 nt, Artificial Sequence
  Description of Artificial Sequence: Synthetic oligonucleotide
  Sense strand starting at position 3761 of SEQ ID NO: 1561292
aacugaugguugcauugau

SEQ ID NO: 1660670 - RNA, 19 nt, Artificial Sequence
  Description of Artificial Sequence: Synthetic oligonucleotide
  Antisense strand to SEQ ID NO: 1660669
aucaaugcaaccaucaguu

SEQ ID NO: 1660671 - RNA, 19 nt, Artificial Sequence
  Description of Artificial Sequence: Synthetic oligonucleotide
  Sense strand starting at position 3806 of SEQ ID NO: 1561292
aaaggucauccucaguuga

SEQ ID NO: 1660672 - RNA, 19 nt, Artificial Sequence
  Description of Artificial Sequence: Synthetic oligonucleotide
  Antisense strand to SEQ ID NO: 1660671
ucaacugaggaugaccuuu

SEQ ID NO: 1660673 - RNA, 19 nt, Artificial Sequence
  Description of Artificial Sequence: Synthetic oligonucleotide
  Sense strand starting at position 3808 of SEQ ID NO: 1561292
aggucauccucaguugaug

SEQ ID NO: 1660674 - RNA, 19 nt, Artificial Sequence
  Description of Artificial Sequence: Synthetic oligonucleotide
  Antisense strand to SEQ ID NO: 1660673
caucaacugaggaugaccu

SEQ ID NO: 1660675 - RNA, 19 nt, Artificial Sequence
  Description of Artificial Sequence: Synthetic oligonucleotide
  Sense strand starting at position 3828 of SEQ ID NO: 1561292
cuggaugggucucuuauag

SEQ ID NO: 1660676 - RNA, 19 nt, Artificial Sequence
  Description of Artificial Sequence: Synthetic oligonucleotide
  Antisense strand to SEQ ID NO: 1660675
cuauaagagacccauccag

SEQ ID NO: 1660677 - RNA, 19 nt, Artificial Sequence
  Description of Artificial Sequence: Synthetic oligonucleotide
  Sense strand starting at position 518 of SEQ ID NO: 1561293
ccacaauuggcuuaguauu

SEQ ID NO: 1660678 - RNA, 19 nt, Artificial Sequence
  Description of Artificial Sequence: Synthetic oligonucleotide
  Antisense strand to SEQ ID NO: 1660677
aauacuaagccaauugugg

SEQ ID NO: 1660679 - RNA, 19 nt, Artificial Sequence
  Description of Artificial Sequence: Synthetic oligonucleotide
  Sense strand starting at position 552 of SEQ ID NO: 1561293
ucuauagaaggcugaugua

SEQ ID NO: 1660680 - RNA, 19 nt, Artificial Sequence
  Description of Artificial Sequence: Synthetic oligonucleotide
  Antisense strand to SEQ ID NO: 1660679
uacaucagccuucuauaga

SEQ ID NO: 1660681 - RNA, 19 nt, Artificial Sequence
  Description of Artificial Sequence: Synthetic oligonucleotide
  Sense strand starting at position 565 of SEQ ID NO: 1561293
gauguagaauugcuccaaa

SEQ ID NO: 1660682 - RNA, 19 nt, Artificial Sequence
  Description of Artificial Sequence: Synthetic oligonucleotide
  Antisense strand to SEQ ID NO: 1660681
uuuggagcaauucuacauc

SEQ ID NO: 1660683 - RNA, 19 nt, Artificial Sequence
  Description of Artificial Sequence: Synthetic oligonucleotide
  Sense strand starting at position 568 of SEQ ID NO: 1561293
guagaauugcuccaaauca

SEQ ID NO: 1660684 - RNA, 19 nt, Artificial Sequence
  Description of Artificial Sequence: Synthetic oligonucleotide
  Antisense strand to SEQ ID NO: 1660683
ugauuuggagcaauucuac

SEQ ID NO: 1660685 - RNA, 19 nt, Artificial Sequence
  Description of Artificial Sequence: Synthetic oligonucleotide
  Sense strand starting at position 629 of SEQ ID NO: 1561293
ggucucaggaacuguucua

SEQ ID NO: 1660686 - RNA, 19 nt, Artificial Sequence
  Description of Artificial Sequence: Synthetic oligonucleotide
  Antisense strand to SEQ ID NO: 1660685
uagaacaguuccugagacc

SEQ ID NO: 1660687 - RNA, 19 nt, Artificial Sequence
  Description of Artificial Sequence: Synthetic oligonucleotide
  Sense strand starting at position 704 of SEQ ID NO: 1561293
ccaaauggguaugugcaua

SEQ ID NO: 1660688 - RNA, 19 nt, Artificial Sequence
  Description of Artificial Sequence: Synthetic oligonucleotide
  Antisense strand to SEQ ID NO: 1660687
uaugcacauacccauuugg

SEQ ID NO: 1660689 - RNA, 19 nt, Artificial Sequence
  Description of Artificial Sequence: Synthetic oligonucleotide
  Sense strand starting at position 743 of SEQ ID NO: 1561293
uagguaucagcucaaugga

SEQ ID NO: 1660690 - RNA, 19 nt, Artificial Sequence
  Description of Artificial Sequence: Synthetic oligonucleotide
  Antisense strand to SEQ ID NO: 1660689
uccauugagcugauaccua

SEQ ID NO: 1660691 - RNA, 19 nt, Artificial Sequence
  Description of Artificial Sequence: Synthetic oligonucleotide
  Sense strand starting at position 752 of SEQ ID NO: 1561293
gcucaauggacaggacauu

SEQ ID NO: 1660692 - RNA, 19 nt, Artificial Sequence
  Description of Artificial Sequence: Synthetic oligonucleotide
  Antisense strand to SEQ ID NO: 1660691
aauguccuguccauugagc

SEQ ID NO: 1660693 - RNA, 19 nt, Artificial Sequence
  Description of Artificial Sequence: Synthetic oligonucleotide
  Sense strand starting at position 1013 of SEQ ID NO: 1561293
agaguaacauaagagagau

SEQ ID NO: 1660694 - RNA, 19 nt, Artificial Sequence
  Description of Artificial Sequence: Synthetic oligonucleotide
  Antisense strand to SEQ ID NO: 1660693
aucucucuuauguuacucu

SEQ ID NO: 1660695 - RNA, 19 nt, Artificial Sequence
  Description of Artificial Sequence: Synthetic oligonucleotide
  Sense strand starting at position 1019 of SEQ ID NO: 1561293
acauaagagagaugguguu

SEQ ID NO: 1660696 - RNA, 19 nt, Artificial Sequence
  Description of Artificial Sequence: Synthetic oligonucleotide
  Antisense strand to SEQ ID NO: 1660695
aacaccaucucucuuaugu

SEQ ID NO: 1660697 - RNA, 19 nt, Artificial Sequence
  Description of Artificial Sequence: Synthetic oligonucleotide
  Sense strand starting at position 1037 of SEQ ID NO: 1561293
uguuaacucuucccaguau

SEQ ID NO: 1660698 - RNA, 19 nt, Artificial Sequence
  Description of Artificial Sequence: Synthetic oligonucleotide
  Antisense strand to SEQ ID NO: 1660697
auacugggaagaguuaaca

SEQ ID NO: 1660699 - RNA, 19 nt, Artificial Sequence
  Description of Artificial Sequence: Synthetic oligonucleotide
  Sense strand starting at position 1439 of SEQ ID NO: 1561293
uuaaauuucugguacagau

SEQ ID NO: 1660700 - RNA, 19 nt, Artificial Sequence
  Description of Artificial Sequence: Synthetic oligonucleotide
  Antisense strand to SEQ ID NO: 1660699
aucuguaccagaaauuuaa

SEQ ID NO: 1660701 - RNA, 19 nt, Artificial Sequence
  Description of Artificial Sequence: Synthetic oligonucleotide
  Sense strand starting at position 1619 of SEQ ID NO: 1561293
gggccauuucucugcagcu

SEQ ID NO: 1660702 - RNA, 19 nt, Artificial Sequence
  Description of Artificial Sequence: Synthetic oligonucleotide
  Antisense strand to SEQ ID NO: 1660701
agcugcagagaaauggccc

SEQ ID NO: 1660703 - RNA, 19 nt, Artificial Sequence
  Description of Artificial Sequence: Synthetic oligonucleotide
  Sense strand starting at position 2203 of SEQ ID NO: 1561293
auggcuggcgcguuaaaga

SEQ ID NO: 1660704 - RNA, 19 nt, Artificial Sequence
  Description of Artificial Sequence: Synthetic oligonucleotide
  Antisense strand to SEQ ID NO: 1660703
ucuuuaacgcgccagccau

SEQ ID NO: 1660705 - RNA, 19 nt, Artificial Sequence
  Description of Artificial Sequence: Synthetic oligonucleotide
  Sense strand starting at position 2315 of SEQ ID NO: 1561293
ggauucuuucacugggugu

SEQ ID NO: 1660706 - RNA, 19 nt, Artificial Sequence
  Description of Artificial Sequence: Synthetic oligonucleotide
  Antisense strand to SEQ ID NO: 1660705
acacccagugaaagaaucc

SEQ ID NO: 1660707 - RNA, 19 nt, Artificial Sequence
  Description of Artificial Sequence: Synthetic oligonucleotide
  Sense strand starting at position 2374 of SEQ ID NO: 1561293
ggaagccaguuccuauauu

SEQ ID NO: 1660708 - RNA, 19 nt, Artificial Sequence
  Description of Artificial Sequence: Synthetic oligonucleotide
  Antisense strand to SEQ ID NO: 1660707
aauauaggaacuggcuucc

SEQ ID NO: 1660709 - RNA, 19 nt, Artificial Sequence
  Description of Artificial Sequence: Synthetic oligonucleotide
  Sense strand starting at position 2513 of SEQ ID NO: 1561293
ccguguuugauuguguacu

SEQ ID NO: 1660710 - RNA, 19 nt, Artificial Sequence
  Description of Artificial Sequence: Synthetic oligonucleotide
  Antisense strand to SEQ ID NO: 1660709
aguacacaaucaaacacgg

SEQ ID NO: 1660711 - RNA, 19 nt, Artificial Sequence
  Description of Artificial Sequence: Synthetic oligonucleotide
  Sense strand starting at position 2558 of SEQ ID NO: 1561293
gacagacucgaguaguuac

SEQ ID NO: 1660712 - RNA, 19 nt, Artificial Sequence
  Description of Artificial Sequence: Synthetic oligonucleotide
  Antisense strand to SEQ ID NO: 1660711
guaacuacucgagucuguc

SEQ ID NO: 1660713 - RNA, 19 nt, Artificial Sequence
  Description of Artificial Sequence: Synthetic oligonucleotide
  Sense strand starting at position 2561 of SEQ ID NO: 1561293
agacucgaguaguuacaca

SEQ ID NO: 1660714 - RNA, 19 nt, Artificial Sequence
  Description of Artificial Sequence: Synthetic oligonucleotide
  Antisense strand to SEQ ID NO: 1660713
uguguaacuacucgagucu

SEQ ID NO: 1660715 - RNA, 19 nt, Artificial Sequence
  Description of Artificial Sequence: Synthetic oligonucleotide
  Sense strand starting at position 2566 of SEQ ID NO: 1561293
cgaguaguuacacagacca

SEQ ID NO: 1660716 - RNA, 19 nt, Artificial Sequence
  Description of Artificial Sequence: Synthetic oligonucleotide
  Antisense strand to SEQ ID NO: 1660715
uggucuguguaacuacucg

SEQ ID NO: 1660717 - RNA, 19 nt, Artificial Sequence
  Description of Artificial Sequence: Synthetic oligonucleotide
  Sense strand starting at position 2630 of SEQ ID NO: 1561293
guaguuauggucuauaaac

SEQ ID NO: 1660718 - RNA, 19 nt, Artificial Sequence
  Description of Artificial Sequence: Synthetic oligonucleotide
  Antisense strand to SEQ ID NO: 1660717
guuuauagaccauaacuac

SEQ ID NO: 1660719 - RNA, 19 nt, Artificial Sequence
  Description of Artificial Sequence: Synthetic oligonucleotide
  Sense strand starting at position 2632 of SEQ ID NO: 1561293
aguuauggucuauaaacuu

SEQ ID NO: 1660720 - RNA, 19 nt, Artificial Sequence
  Description of Artificial Sequence: Synthetic oligonucleotide
  Antisense strand to SEQ ID NO: 1660719
aaguuuauagaccauaacu

SEQ ID NO: 1660721 - RNA, 19 nt, Artificial Sequence
  Description of Artificial Sequence: Synthetic oligonucleotide
  Sense strand starting at position 2702 of SEQ ID NO: 1561293
caggguuaguuuccuguaa

SEQ ID NO: 1660722 - RNA, 19 nt, Artificial Sequence
  Description of Artificial Sequence: Synthetic oligonucleotide
  Antisense strand to SEQ ID NO: 1660721
uuacaggaaacuaacccug

SEQ ID NO: 1660723 - RNA, 19 nt, Artificial Sequence
  Description of Artificial Sequence: Synthetic oligonucleotide
  Sense strand starting at position 2703 of SEQ ID NO: 1561293
aggguuaguuuccuguaag

SEQ ID NO: 1660724 - RNA, 19 nt, Artificial Sequence
  Description of Artificial Sequence: Synthetic oligonucleotide
  Antisense strand to SEQ ID NO: 1660723
cuuacaggaaacuaacccu

SEQ ID NO: 1660725 - RNA, 19 nt, Artificial Sequence
  Description of Artificial Sequence: Synthetic oligonucleotide
  Sense strand starting at position 2706 of SEQ ID NO: 1561293
guuaguuuccuguaagcau

SEQ ID NO: 1660726 - RNA, 19 nt, Artificial Sequence
  Description of Artificial Sequence: Synthetic oligonucleotide
  Antisense strand to SEQ ID NO: 1660725
augcuuacaggaaacuaac

SEQ ID NO: 1660727 - RNA, 19 nt, Artificial Sequence
  Description of Artificial Sequence: Synthetic oligonucleotide
  Sense strand starting at position 3321 of SEQ ID NO: 1561293
augagaagccaagguacua

SEQ ID NO: 1660728 - RNA, 19 nt, Artificial Sequence
  Description of Artificial Sequence: Synthetic oligonucleotide
  Antisense strand to SEQ ID NO: 1660727
uaguaccuuggcuucucau

SEQ ID NO: 1660729 - RNA, 19 nt, Artificial Sequence
  Description of Artificial Sequence: Synthetic oligonucleotide
  Sense strand starting at position 3353 of SEQ ID NO: 1561293
aaggguaccuguuuacagu

SEQ ID NO: 1660730 - RNA, 19 nt, Artificial Sequence
  Description of Artificial Sequence: Synthetic oligonucleotide
  Antisense strand to SEQ ID NO: 1660729
acuguaaacagguacccuu

SEQ ID NO: 1660731 - RNA, 19 nt, Artificial Sequence
  Description of Artificial Sequence: Synthetic oligonucleotide
  Sense strand starting at position 3354 of SEQ ID NO: 1561293
aggguaccuguuuacagua

SEQ ID NO: 1660732 - RNA, 19 nt, Artificial Sequence
  Description of Artificial Sequence: Synthetic oligonucleotide
  Antisense strand to SEQ ID NO: 1660731
uacuguaaacagguacccu

SEQ ID NO: 1660733 - RNA, 19 nt, Artificial Sequence
  Description of Artificial Sequence: Synthetic oligonucleotide
  Sense strand starting at position 3359 of SEQ ID NO: 1561293
accuguuuacaguaugaga

SEQ ID NO: 1660734 - RNA, 19 nt, Artificial Sequence
  Description of Artificial Sequence: Synthetic oligonucleotide
  Antisense strand to SEQ ID NO: 1660733
ucucauacuguaaacaggu

SEQ ID NO: 1660735 - RNA, 19 nt, Artificial Sequence
  Description of Artificial Sequence: Synthetic oligonucleotide
  Sense strand starting at position 3397 of SEQ ID NO: 1561293
gggucacuuuguuugacuu

SEQ ID NO: 1660736 - RNA, 19 nt, Artificial Sequence
  Description of Artificial Sequence: Synthetic oligonucleotide
  Antisense strand to SEQ ID NO: 1660735
aagucaaacaaagugaccc

SEQ ID NO: 1660737 - RNA, 19 nt, Artificial Sequence
  Description of Artificial Sequence: Synthetic oligonucleotide
  Sense strand starting at position 3398 of SEQ ID NO: 1561293
ggucacuuuguuugacuuu

SEQ ID NO: 1660738 - RNA, 19 nt, Artificial Sequence
  Description of Artificial Sequence: Synthetic oligonucleotide
  Antisense strand to SEQ ID NO: 1660737
aaagucaaacaaagugacc

SEQ ID NO: 1660739 - RNA, 19 nt, Artificial Sequence
  Description of Artificial Sequence: Synthetic oligonucleotide
  Sense strand starting at position 3407 of SEQ ID NO: 1561293
guuugacuuuggcugagaa

SEQ ID NO: 1660740 - RNA, 19 nt, Artificial Sequence
  Description of Artificial Sequence: Synthetic oligonucleotide
  Antisense strand to SEQ ID NO: 1660739
uucucagccaaagucaaac

SEQ ID NO: 1660741 - RNA, 19 nt, Artificial Sequence
  Description of Artificial Sequence: Synthetic oligonucleotide
  Sense strand starting at position 3408 of SEQ ID NO: 1561293
uuugacuuuggcugagaac

SEQ ID NO: 1660742 - RNA, 19 nt, Artificial Sequence
  Description of Artificial Sequence: Synthetic oligonucleotide
  Antisense strand to SEQ ID NO: 1660741
guucucagccaaagucaaa

SEQ ID NO: 1660743 - RNA, 19 nt, Artificial Sequence
  Description of Artificial Sequence: Synthetic oligonucleotide
  Sense strand starting at position 3419 of SEQ ID NO: 1561293
cugagaacaugccuguuaa

SEQ ID NO: 1660744 - RNA, 19 nt, Artificial Sequence
  Description of Artificial Sequence: Synthetic oligonucleotide
  Antisense strand to SEQ ID NO: 1660743
uuaacaggcauguucucag

SEQ ID NO: 1660745 - RNA, 19 nt, Artificial Sequence
  Description of Artificial Sequence: Synthetic oligonucleotide
  Sense strand starting at position 3420 of SEQ ID NO: 1561293
ugagaacaugccuguuaag

SEQ ID NO: 1660746 - RNA, 19 nt, Artificial Sequence
  Description of Artificial Sequence: Synthetic oligonucleotide
  Antisense strand to SEQ ID NO: 1660745
cuuaacaggcauguucuca

SEQ ID NO: 1660747 - RNA, 19 nt, Artificial Sequence
  Description of Artificial Sequence: Synthetic oligonucleotide
  Sense strand starting at position 3462 of SEQ ID NO: 1561293
uucggauguccacaaauga

SEQ ID NO: 1660748 - RNA, 19 nt, Artificial Sequence
  Description of Artificial Sequence: Synthetic oligonucleotide
  Antisense strand to SEQ ID NO: 1660747
ucauuuguggacauccgaa

SEQ ID NO: 1660749 - RNA, 19 nt, Artificial Sequence
  Description of Artificial Sequence: Synthetic oligonucleotide
  Sense strand starting at position 3496 of SEQ ID NO: 1561293
aaauauugacucuggguuu

SEQ ID NO: 1660750 - RNA, 19 nt, Artificial Sequence
  Description of Artificial Sequence: Synthetic oligonucleotide
  Antisense strand to SEQ ID NO: 1660749
aaacccagagucaauauuu

SEQ ID NO: 1660751 - RNA, 19 nt, Artificial Sequence
  Description of Artificial Sequence: Synthetic oligonucleotide
  Sense strand starting at position 3499 of SEQ ID NO: 1561293
uauugacucuggguuuaua

SEQ ID NO: 1660752 - RNA, 19 nt, Artificial Sequence
  Description of Artificial Sequence: Synthetic oligonucleotide
  Antisense strand to SEQ ID NO: 1660751
uauaaacccagagucaaua

SEQ ID NO: 1660753 - RNA, 19 nt, Artificial Sequence
  Description of Artificial Sequence: Synthetic oligonucleotide
  Sense strand starting at position 3563 of SEQ ID NO: 1561293
aaugaagauugacuguauu

SEQ ID NO: 1660754 - RNA, 19 nt, Artificial Sequence
  Description of Artificial Sequence: Synthetic oligonucleotide
  Antisense strand to SEQ ID NO: 1660753
aauacagucaaucuucauu

SEQ ID NO: 1660755 - RNA, 19 nt, Artificial Sequence
  Description of Artificial Sequence: Synthetic oligonucleotide
  Sense strand starting at position 3630 of SEQ ID NO: 1561293
ugucccucuuaguuauaca

SEQ ID NO: 1660756 - RNA, 19 nt, Artificial Sequence
  Description of Artificial Sequence: Synthetic oligonucleotide
  Antisense strand to SEQ ID NO: 1660755
uguauaacuaagagggaca

SEQ ID NO: 1660757 - RNA, 19 nt, Artificial Sequence
  Description of Artificial Sequence: Synthetic oligonucleotide
  Sense strand starting at position 77 of SEQ ID NO: 1561294
ucucuuccaugugcugaaa

SEQ ID NO: 1660758 - RNA, 19 nt, Artificial Sequence
  Description of Artificial Sequence: Synthetic oligonucleotide
  Antisense strand to SEQ ID NO: 1660757
uuucagcacauggaagaga

SEQ ID NO: 1660759 - RNA, 19 nt, Artificial Sequence
  Description of Artificial Sequence: Synthetic oligonucleotide
  Sense strand starting at position 79 of SEQ ID NO: 1561294
ucuuccaugugcugaaaug

SEQ ID NO: 1660760 - RNA, 19 nt, Artificial Sequence
  Description of Artificial Sequence: Synthetic oligonucleotide
  Antisense strand to SEQ ID NO: 1660759
cauuucagcacauggaaga

SEQ ID NO: 1660761 - RNA, 19 nt, Artificial Sequence
  Description of Artificial Sequence: Synthetic oligonucleotide
  Sense strand starting at position 246 of SEQ ID NO: 1561294
aagggugacacgcggaaau

SEQ ID NO: 1660762 - RNA, 19 nt, Artificial Sequence
  Description of Artificial Sequence: Synthetic oligonucleotide
  Antisense strand to SEQ ID NO: 1660761
auuuccgcgugucacccuu

SEQ ID NO: 1660763 - RNA, 19 nt, Artificial Sequence
  Description of Artificial Sequence: Synthetic oligonucleotide
  Sense strand starting at position 256 of SEQ ID NO: 1561294
cgcggaaaugaucaacugu

SEQ ID NO: 1660764 - RNA, 19 nt, Artificial Sequence
  Description of Artificial Sequence: Synthetic oligonucleotide
  Antisense strand to SEQ ID NO: 1660763
acaguugaucauuuccgcg

SEQ ID NO: 1660765 - RNA, 19 nt, Artificial Sequence
  Description of Artificial Sequence: Synthetic oligonucleotide
  Sense strand starting at position 354 of SEQ ID NO: 1561294
ggcugaagauagcagagau

SEQ ID NO: 1660766 - RNA, 19 nt, Artificial Sequence
  Description of Artificial Sequence: Synthetic oligonucleotide
  Antisense strand to SEQ ID NO: 1660765
aucucugcuaucuucagcc

SEQ ID NO: 1660767 - RNA, 19 nt, Artificial Sequence
  Description of Artificial Sequence: Synthetic oligonucleotide
  Sense strand starting at position 632 of SEQ ID NO: 1561294
ggucccaguucccuggaaa

SEQ ID NO: 1660768 - RNA, 19 nt, Artificial Sequence
  Description of Artificial Sequence: Synthetic oligonucleotide
  Antisense strand to SEQ ID NO: 1660767
uuuccagggaacugggacc

SEQ ID NO: 1660769 - RNA, 19 nt, Artificial Sequence
  Description of Artificial Sequence: Synthetic oligonucleotide
  Sense strand starting at position 633 of SEQ ID NO: 1561294
gucccaguucccuggaaac

SEQ ID NO: 1660770 - RNA, 19 nt, Artificial Sequence
  Description of Artificial Sequence: Synthetic oligonucleotide
  Antisense strand to SEQ ID NO: 1660769
guuuccagggaacugggac

SEQ ID NO: 1660771 - RNA, 19 nt, Artificial Sequence
  Description of Artificial Sequence: Synthetic oligonucleotide
  Sense strand starting at position 975 of SEQ ID NO: 1561294
cgggaaacuucccaggucu

SEQ ID NO: 1660772 - RNA, 19 nt, Artificial Sequence
  Description of Artificial Sequence: Synthetic oligonucleotide
  Antisense strand to SEQ ID NO: 1660771
agaccugggaaguuucccg

SEQ ID NO: 1660773 - RNA, 19 nt, Artificial Sequence
  Description of Artificial Sequence: Synthetic oligonucleotide
  Sense strand starting at position 977 of SEQ ID NO: 1561294
ggaaacuucccaggucucu

SEQ ID NO: 1660774 - RNA, 19 nt, Artificial Sequence
  Description of Artificial Sequence: Synthetic oligonucleotide
  Antisense strand to SEQ ID NO: 1660773
agagaccugggaaguuucc

SEQ ID NO: 1660775 - RNA, 19 nt, Artificial Sequence
  Description of Artificial Sequence: Synthetic oligonucleotide
  Sense strand starting at position 1155 of SEQ ID NO: 1561294
guuucugucuucucucuua

SEQ ID NO: 1660776 - RNA, 19 nt, Artificial Sequence
  Description of Artificial Sequence: Synthetic oligonucleotide
  Antisense strand to SEQ ID NO: 1660775
uaagagagaagacagaaac

SEQ ID NO: 1660777 - RNA, 19 nt, Artificial Sequence
  Description of Artificial Sequence: Synthetic oligonucleotide
  Sense strand starting at position 1958 of SEQ ID NO: 1561294
gcgcgaagucgaaauacug

SEQ ID NO: 1660778 - RNA, 19 nt, Artificial Sequence
  Description of Artificial Sequence: Synthetic oligonucleotide
  Antisense strand to SEQ ID NO: 1660777
caguauuucgacuucgcgc

SEQ ID NO: 1660779 - RNA, 19 nt, Artificial Sequence
  Description of Artificial Sequence: Synthetic oligonucleotide
  Sense strand starting at position 2112 of SEQ ID NO: 1561294
gcuuccuucucuuaggcua

SEQ ID NO: 1660780 - RNA, 19 nt, Artificial Sequence
  Description of Artificial Sequence: Synthetic oligonucleotide
  Antisense strand to SEQ ID NO: 1660779
uagccuaagagaaggaagc

SEQ ID NO: 1660781 - RNA, 19 nt, Artificial Sequence
  Description of Artificial Sequence: Synthetic oligonucleotide
  Sense strand starting at position 2212 of SEQ ID NO: 1561294
uguggaggucucugcucaa

SEQ ID NO: 1660782 - RNA, 19 nt, Artificial Sequence
  Description of Artificial Sequence: Synthetic oligonucleotide
  Antisense strand to SEQ ID NO: 1660781
uugagcagagaccuccaca

SEQ ID NO: 1660783 - RNA, 19 nt, Artificial Sequence
  Description of Artificial Sequence: Synthetic oligonucleotide
  Sense strand starting at position 2295 of SEQ ID NO: 1561294
uguggugguaucugaucaa

SEQ ID NO: 1660784 - RNA, 19 nt, Artificial Sequence
  Description of Artificial Sequence: Synthetic oligonucleotide
  Antisense strand to SEQ ID NO: 1660783
uugaucagauaccaccaca

SEQ ID NO: 1660785 - RNA, 19 nt, Artificial Sequence
  Description of Artificial Sequence: Synthetic oligonucleotide
  Sense strand starting at position 2298 of SEQ ID NO: 1561294
ggugguaucugaucaaguc

SEQ ID NO: 1660786 - RNA, 19 nt, Artificial Sequence
  Description of Artificial Sequence: Synthetic oligonucleotide
  Antisense strand to SEQ ID NO: 1660785
gacuugaucagauaccacc

SEQ ID NO: 1660787 - RNA, 19 nt, Artificial Sequence
  Description of Artificial Sequence: Synthetic oligonucleotide
  Sense strand starting at position 2375 of SEQ ID NO: 1561294
agaugugaucucugcucaa

SEQ ID NO: 1660788 - RNA, 19 nt, Artificial Sequence
  Description of Artificial Sequence: Synthetic oligonucleotide
  Antisense strand to SEQ ID NO: 1660787
uugagcagagaucacaucu

SEQ ID NO: 1660789 - RNA, 19 nt, Artificial Sequence
  Description of Artificial Sequence: Synthetic oligonucleotide
  Sense strand starting at position 2536 of SEQ ID NO: 1561294
cagauauggucucugcaca

SEQ ID NO: 1660790 - RNA, 19 nt, Artificial Sequence
  Description of Artificial Sequence: Synthetic oligonucleotide
  Antisense strand to SEQ ID NO: 1660789
ugugcagagaccauaucug

SEQ ID NO: 1660791 - RNA, 19 nt, Artificial Sequence
  Description of Artificial Sequence: Synthetic oligonucleotide
  Sense strand starting at position 2537 of SEQ ID NO: 1561294
agauauggucucugcacaa

SEQ ID NO: 1660792 - RNA, 19 nt, Artificial Sequence
  Description of Artificial Sequence: Synthetic oligonucleotide
  Antisense strand to SEQ ID NO: 1660791
uugugcagagaccauaucu

SEQ ID NO: 1660793 - RNA, 19 nt, Artificial Sequence
  Description of Artificial Sequence: Synthetic oligonucleotide
  Sense strand starting at position 2907 of SEQ ID NO: 1561294
gaucuugagcccuaggacu

SEQ ID NO: 1660794 - RNA, 19 nt, Artificial Sequence
  Description of Artificial Sequence: Synthetic oligonucleotide
  Antisense strand to SEQ ID NO: 1660793
aguccuagggcucaagauc

SEQ ID NO: 1660795 - RNA, 19 nt, Artificial Sequence
  Description of Artificial Sequence: Synthetic oligonucleotide
  Sense strand starting at position 2909 of SEQ ID NO: 1561294
ucuugagcccuaggacuuu

SEQ ID NO: 1660796 - RNA, 19 nt, Artificial Sequence
  Description of Artificial Sequence: Synthetic oligonucleotide
  Antisense strand to SEQ ID NO: 1660795
aaaguccuagggcucaaga

SEQ ID NO: 1660797 - RNA, 19 nt, Artificial Sequence
  Description of Artificial Sequence: Synthetic oligonucleotide
  Sense strand starting at position 2915 of SEQ ID NO: 1561294
gcccuaggacuuugagacu

SEQ ID NO: 1660798 - RNA, 19 nt, Artificial Sequence
  Description of Artificial Sequence: Synthetic oligonucleotide
  Antisense strand to SEQ ID NO: 1660797
agucucaaaguccuagggc

SEQ ID NO: 1660799 - RNA, 19 nt, Artificial Sequence
  Description of Artificial Sequence: Synthetic oligonucleotide
  Sense strand starting at position 3071 of SEQ ID NO: 1561294
gugaucugugacuguacca

SEQ ID NO: 1660800 - RNA, 19 nt, Artificial Sequence
  Description of Artificial Sequence: Synthetic oligonucleotide
  Antisense strand to SEQ ID NO: 1660799
ugguacagucacagaucac

SEQ ID NO: 1660801 - RNA, 19 nt, Artificial Sequence
  Description of Artificial Sequence: Synthetic oligonucleotide
  Sense strand starting at position 3580 of SEQ ID NO: 1561294
agacaaaucucuuaugcag

SEQ ID NO: 1660802 - RNA, 19 nt, Artificial Sequence
  Description of Artificial Sequence: Synthetic oligonucleotide
  Antisense strand to SEQ ID NO: 1660801
cugcauaagagauuugucu

SEQ ID NO: 1660803 - RNA, 19 nt, Artificial Sequence
  Description of Artificial Sequence: Synthetic oligonucleotide
  Sense strand starting at position 3604 of SEQ ID NO: 1561294
uuccuaauuuguguagcua

SEQ ID NO: 1660804 - RNA, 19 nt, Artificial Sequence
  Description of Artificial Sequence: Synthetic oligonucleotide
  Antisense strand to SEQ ID NO: 1660803
uagcuacacaaauuaggaa

SEQ ID NO: 1660805 - RNA, 19 nt, Artificial Sequence
  Description of Artificial Sequence: Synthetic oligonucleotide
  Sense strand starting at position 3721 of SEQ ID NO: 1561294
gggagagucacuugacagu

SEQ ID NO: 1660806 - RNA, 19 nt, Artificial Sequence
  Description of Artificial Sequence: Synthetic oligonucleotide
  Antisense strand to SEQ ID NO: 1660805
acugucaagugacucuccc

SEQ ID NO: 1660807 - RNA, 19 nt, Artificial Sequence
  Description of Artificial Sequence: Synthetic oligonucleotide
  Sense strand starting at position 3724 of SEQ ID NO: 1561294
agagucacuugacaguauu

SEQ ID NO: 1660808 - RNA, 19 nt, Artificial Sequence
  Description of Artificial Sequence: Synthetic oligonucleotide
  Antisense strand to SEQ ID NO: 1660807
aauacugucaagugacucu

SEQ ID NO: 1660809 - RNA, 19 nt, Artificial Sequence
  Description of Artificial Sequence: Synthetic oligonucleotide
  Sense strand starting at position 3727 of SEQ ID NO: 1561294
gucacuugacaguauugaa

SEQ ID NO: 1660810 - RNA, 19 nt, Artificial Sequence
  Description of Artificial Sequence: Synthetic oligonucleotide
  Antisense strand to SEQ ID NO: 1660809
uucaauacugucaagugac

SEQ ID NO: 1660811 - RNA, 19 nt, Artificial Sequence
  Description of Artificial Sequence: Synthetic oligonucleotide
  Sense strand starting at position 3981 of SEQ ID NO: 1561294
gaauuauuccaccgcggug

SEQ ID NO: 1660812 - RNA, 19 nt, Artificial Sequence
  Description of Artificial Sequence: Synthetic oligonucleotide
  Antisense strand to SEQ ID NO: 1660811
caccgcgguggaauaauuc

SEQ ID NO: 1660813 - RNA, 19 nt, Artificial Sequence
  Description of Artificial Sequence: Synthetic oligonucleotide
  Sense strand starting at position 18 of SEQ ID NO: 1561295
cgcuaucucugcuuacuga

SEQ ID NO: 1660814 - RNA, 19 nt, Artificial Sequence
  Description of Artificial Sequence: Synthetic oligonucleotide
  Antisense strand to SEQ ID NO: 1660813
ucaguaagcagagauagcg

SEQ ID NO: 1660815 - RNA, 19 nt, Artificial Sequence
  Description of Artificial Sequence: Synthetic oligonucleotide
  Sense strand starting at position 19 of SEQ ID NO: 1561295
gcuaucucugcuuacugaa

SEQ ID NO: 1660816 - RNA, 19 nt, Artificial Sequence
  Description of Artificial Sequence: Synthetic oligonucleotide
  Antisense strand to SEQ ID NO: 1660815
uucaguaagcagagauagc

SEQ ID NO: 1660817 - RNA, 19 nt, Artificial Sequence
  Description of Artificial Sequence: Synthetic oligonucleotide
  Sense strand starting at position 308 of SEQ ID NO: 1561295
cucuuauuguugucacuac

SEQ ID NO: 1660818 - RNA, 19 nt, Artificial Sequence
  Description of Artificial Sequence: Synthetic oligonucleotide
  Antisense strand to SEQ ID NO: 1660817
guagugacaacaauaagag

SEQ ID NO: 1660819 - RNA, 19 nt, Artificial Sequence
  Description of Artificial Sequence: Synthetic oligonucleotide
  Sense strand starting at position 315 of SEQ ID NO: 1561295
uguugucacuaccaacaaa

SEQ ID NO: 1660820 - RNA, 19 nt, Artificial Sequence
  Description of Artificial Sequence: Synthetic oligonucleotide
  Antisense strand to SEQ ID NO: 1660819
uuuguugguagugacaaca

SEQ ID NO: 1660821 - RNA, 19 nt, Artificial Sequence
  Description of Artificial Sequence: Synthetic oligonucleotide
  Sense strand starting at position 340 of SEQ ID NO: 1561295
cuguuagcauuauugggaa

SEQ ID NO: 1660822 - RNA, 19 nt, Artificial Sequence
  Description of Artificial Sequence: Synthetic oligonucleotide
  Antisense strand to SEQ ID NO: 1660821
uucccaauaaugcuaacag

SEQ ID NO: 1660823 - RNA, 19 nt, Artificial Sequence
  Description of Artificial Sequence: Synthetic oligonucleotide
  Sense strand starting at position 396 of SEQ ID NO: 1561295
aggccugauuccuaaagag

SEQ ID NO: 1660824 - RNA, 19 nt, Artificial Sequence
  Description of Artificial Sequence: Synthetic oligonucleotide
  Antisense strand to SEQ ID NO: 1660823
cucuuuaggaaucaggccu

SEQ ID NO: 1660825 - RNA, 19 nt, Artificial Sequence
  Description of Artificial Sequence: Synthetic oligonucleotide
  Sense strand starting at position 571 of SEQ ID NO: 1561295
acugguguuugcguuguaa

SEQ ID NO: 1660826 - RNA, 19 nt, Artificial Sequence
  Description of Artificial Sequence: Synthetic oligonucleotide
  Antisense strand to SEQ ID NO: 1660825
uuacaacgcaaacaccagu

SEQ ID NO: 1660827 - RNA, 19 nt, Artificial Sequence
  Description of Artificial Sequence: Synthetic oligonucleotide
  Sense strand starting at position 579 of SEQ ID NO: 1561295
uugcguuguaacugggaga

SEQ ID NO: 1660828 - RNA, 19 nt, Artificial Sequence
  Description of Artificial Sequence: Synthetic oligonucleotide
  Antisense strand to SEQ ID NO: 1660827
ucucccaguuacaacgcaa

SEQ ID NO: 1660829 - RNA, 19 nt, Artificial Sequence
  Description of Artificial Sequence: Synthetic oligonucleotide
  Sense strand starting at position 580 of SEQ ID NO: 1561295
ugcguuguaacugggagaa

SEQ ID NO: 1660830 - RNA, 19 nt, Artificial Sequence
  Description of Artificial Sequence: Synthetic oligonucleotide
  Antisense strand to SEQ ID NO: 1660829
uucucccaguuacaacgca

SEQ ID NO: 1660831 - RNA, 19 nt, Artificial Sequence
  Description of Artificial Sequence: Synthetic oligonucleotide
  Sense strand starting at position 582 of SEQ ID NO: 1561295
cguuguaacugggagaaag

SEQ ID NO: 1660832 - RNA, 19 nt, Artificial Sequence
  Description of Artificial Sequence: Synthetic oligonucleotide
  Antisense strand to SEQ ID NO: 1660831
cuuucucccaguuacaacg

SEQ ID NO: 1660833 - RNA, 19 nt, Artificial Sequence
  Description of Artificial Sequence: Synthetic oligonucleotide
  Sense strand starting at position 814 of SEQ ID NO: 1561295
gucuguguguccuuggaau

SEQ ID NO: 1660834 - RNA, 19 nt, Artificial Sequence
  Description of Artificial Sequence: Synthetic oligonucleotide
  Antisense strand to SEQ ID NO: 1660833
auuccaaggacacacagac

SEQ ID NO: 1660835 - RNA, 19 nt, Artificial Sequence
  Description of Artificial Sequence: Synthetic oligonucleotide
  Sense strand starting at position 1027 of SEQ ID NO: 1561295
gggugacuccuggguuuag

SEQ ID NO: 1660836 - RNA, 19 nt, Artificial Sequence
  Description of Artificial Sequence: Synthetic oligonucleotide
  Antisense strand to SEQ ID NO: 1660835
cuaaacccaggagucaccc

SEQ ID NO: 1660837 - RNA, 19 nt, Artificial Sequence
  Description of Artificial Sequence: Synthetic oligonucleotide
  Sense strand starting at position 1124 of SEQ ID NO: 1561295
uuucuaacucuggguggaa

SEQ ID NO: 1660838 - RNA, 19 nt, Artificial Sequence
  Description of Artificial Sequence: Synthetic oligonucleotide
  Antisense strand to SEQ ID NO: 1660837
uuccacccagaguuagaaa

SEQ ID NO: 1660839 - RNA, 19 nt, Artificial Sequence
  Description of Artificial Sequence: Synthetic oligonucleotide
  Sense strand starting at position 1135 of SEQ ID NO: 1561295
ggguggaagguuuaagagu

SEQ ID NO: 1660840 - RNA, 19 nt, Artificial Sequence
  Description of Artificial Sequence: Synthetic oligonucleotide
  Antisense strand to SEQ ID NO: 1660839
acucuuaaaccuuccaccc

SEQ ID NO: 1660841 - RNA, 19 nt, Artificial Sequence
  Description of Artificial Sequence: Synthetic oligonucleotide
  Sense strand starting at position 1136 of SEQ ID NO: 1561295
gguggaagguuuaagaguu

SEQ ID NO: 1660842 - RNA, 19 nt, Artificial Sequence
  Description of Artificial Sequence: Synthetic oligonucleotide
  Antisense strand to SEQ ID NO: 1660841
aacucuuaaaccuuccacc

SEQ ID NO: 1660843 - RNA, 19 nt, Artificial Sequence
  Description of Artificial Sequence: Synthetic oligonucleotide
  Sense strand starting at position 1142 of SEQ ID NO: 1561295
agguuuaagaguugcagua

SEQ ID NO: 1660844 - RNA, 19 nt, Artificial Sequence
  Description of Artificial Sequence: Synthetic oligonucleotide
  Antisense strand to SEQ ID NO: 1660843
uacugcaacucuuaaaccu

SEQ ID NO: 1660845 - RNA, 19 nt, Artificial Sequence
  Description of Artificial Sequence: Synthetic oligonucleotide
  Sense strand starting at position 1483 of SEQ ID NO: 1561295
gccgcuggcuugccauaau

SEQ ID NO: 1660846 - RNA, 19 nt, Artificial Sequence
  Description of Artificial Sequence: Synthetic oligonucleotide
  Antisense strand to SEQ ID NO: 1660845
auuauggcaagccagcggc

SEQ ID NO: 1660847 - RNA, 19 nt, Artificial Sequence
  Description of Artificial Sequence: Synthetic oligonucleotide
  Sense strand starting at position 1486 of SEQ ID NO: 1561295
gcuggcuugccauaauaug

SEQ ID NO: 1660848 - RNA, 19 nt, Artificial Sequence
  Description of Artificial Sequence: Synthetic oligonucleotide
  Antisense strand to SEQ ID NO: 1660847
cauauuauggcaagccagc

SEQ ID NO: 1660849 - RNA, 19 nt, Artificial Sequence
  Description of Artificial Sequence: Synthetic oligonucleotide
  Sense strand starting at position 1494 of SEQ ID NO: 1561295
gccauaauaugauuacgau

SEQ ID NO: 1660850 - RNA, 19 nt, Artificial Sequence
  Description of Artificial Sequence: Synthetic oligonucleotide
  Antisense strand to SEQ ID NO: 1660849
aucguaaucauauuauggc

SEQ ID NO: 1660851 - RNA, 19 nt, Artificial Sequence
  Description of Artificial Sequence: Synthetic oligonucleotide
  Sense strand starting at position 1608 of SEQ ID NO: 1561295
gccucugaucccuagauga

SEQ ID NO: 1660852 - RNA, 19 nt, Artificial Sequence
  Description of Artificial Sequence: Synthetic oligonucleotide
  Antisense strand to SEQ ID NO: 1660851
ucaucuagggaucagaggc

SEQ ID NO: 1660853 - RNA, 19 nt, Artificial Sequence
  Description of Artificial Sequence: Synthetic oligonucleotide
  Sense strand starting at position 1645 of SEQ ID NO: 1561295
accagaaccucuuuguaag

SEQ ID NO: 1660854 - RNA, 19 nt, Artificial Sequence
  Description of Artificial Sequence: Synthetic oligonucleotide
  Antisense strand to SEQ ID NO: 1660853
cuuacaaagagguucuggu

SEQ ID NO: 1660855 - RNA, 19 nt, Artificial Sequence
  Description of Artificial Sequence: Synthetic oligonucleotide
  Sense strand starting at position 1646 of SEQ ID NO: 1561295
ccagaaccucuuuguaagu

SEQ ID NO: 1660856 - RNA, 19 nt, Artificial Sequence
  Description of Artificial Sequence: Synthetic oligonucleotide
  Antisense strand to SEQ ID NO: 1660855
acuuacaaagagguucugg

SEQ ID NO: 1660857 - RNA, 19 nt, Artificial Sequence
  Description of Artificial Sequence: Synthetic oligonucleotide
  Sense strand starting at position 1648 of SEQ ID NO: 1561295
agaaccucuuuguaaguuu

SEQ ID NO: 1660858 - RNA, 19 nt, Artificial Sequence
  Description of Artificial Sequence: Synthetic oligonucleotide
  Antisense strand to SEQ ID NO: 1660857
aaacuuacaaagagguucu

SEQ ID NO: 1660859 - RNA, 19 nt, Artificial Sequence
  Description of Artificial Sequence: Synthetic oligonucleotide
  Sense strand starting at position 1896 of SEQ ID NO: 1561295
cauugaggaguccgggauu

SEQ ID NO: 1660860 - RNA, 19 nt, Artificial Sequence
  Description of Artificial Sequence: Synthetic oligonucleotide
  Antisense strand to SEQ ID NO: 1660859
aaucccggacuccucaaug

SEQ ID NO: 1660861 - RNA, 19 nt, Artificial Sequence
  Description of Artificial Sequence: Synthetic oligonucleotide
  Sense strand starting at position 2028 of SEQ ID NO: 1561295
agcgcucuugguagaggau

SEQ ID NO: 1660862 - RNA, 19 nt, Artificial Sequence
  Description of Artificial Sequence: Synthetic oligonucleotide
  Antisense strand to SEQ ID NO: 1660861
auccucuaccaagagcgcu

SEQ ID NO: 1660863 - RNA, 19 nt, Artificial Sequence
  Description of Artificial Sequence: Synthetic oligonucleotide
  Sense strand starting at position 2373 of SEQ ID NO: 1561295
aguggaauggccugaucac

SEQ ID NO: 1660864 - RNA, 19 nt, Artificial Sequence
  Description of Artificial Sequence: Synthetic oligonucleotide
  Antisense strand to SEQ ID NO: 1660863
gugaucaggccauuccacu

SEQ ID NO: 1660865 - RNA, 19 nt, Artificial Sequence
  Description of Artificial Sequence: Synthetic oligonucleotide
  Sense strand starting at position 2656 of SEQ ID NO: 1561295
gggccuguguuaucgauuu

SEQ ID NO: 1660866 - RNA, 19 nt, Artificial Sequence
  Description of Artificial Sequence: Synthetic oligonucleotide
  Antisense strand to SEQ ID NO: 1660865
aaaucgauaacacaggccc

SEQ ID NO: 1660867 - RNA, 19 nt, Artificial Sequence
  Description of Artificial Sequence: Synthetic oligonucleotide
  Sense strand starting at position 2658 of SEQ ID NO: 1561295
gccuguguuaucgauuuau

SEQ ID NO: 1660868 - RNA, 19 nt, Artificial Sequence
  Description of Artificial Sequence: Synthetic oligonucleotide
  Antisense strand to SEQ ID NO: 1660867
auaaaucgauaacacaggc

SEQ ID NO: 1660869 - RNA, 19 nt, Artificial Sequence
  Description of Artificial Sequence: Synthetic oligonucleotide
  Sense strand starting at position 2662 of SEQ ID NO: 1561295
guguuaucgauuuauugca

SEQ ID NO: 1660870 - RNA, 19 nt, Artificial Sequence
  Description of Artificial Sequence: Synthetic oligonucleotide
  Antisense strand to SEQ ID NO: 1660869
ugcaauaaaucgauaacac

SEQ ID NO: 1660871 - RNA, 19 nt, Artificial Sequence
  Description of Artificial Sequence: Synthetic oligonucleotide
  Sense strand starting at position 2905 of SEQ ID NO: 1561295
uguggaaugguccaggugu

SEQ ID NO: 1660872 - RNA, 19 nt, Artificial Sequence
  Description of Artificial Sequence: Synthetic oligonucleotide
  Antisense strand to SEQ ID NO: 1660871
acaccuggaccauuccaca

SEQ ID NO: 1660873 - RNA, 19 nt, Artificial Sequence
  Description of Artificial Sequence: Synthetic oligonucleotide
  Sense strand starting at position 2906 of SEQ ID NO: 1561295
guggaaugguccagguguu

SEQ ID NO: 1660874 - RNA, 19 nt, Artificial Sequence
  Description of Artificial Sequence: Synthetic oligonucleotide
  Antisense strand to SEQ ID NO: 1660873
aacaccuggaccauuccac

SEQ ID NO: 1660875 - RNA, 19 nt, Artificial Sequence
  Description of Artificial Sequence: Synthetic oligonucleotide
  Sense strand starting at position 2948 of SEQ ID NO: 1561295
uggccauccacguagaagu

SEQ ID NO: 1660876 - RNA, 19 nt, Artificial Sequence
  Description of Artificial Sequence: Synthetic oligonucleotide
  Antisense strand to SEQ ID NO: 1660875
acuucuacguggauggcca

SEQ ID NO: 1660877 - RNA, 19 nt, Artificial Sequence
  Description of Artificial Sequence: Synthetic oligonucleotide
  Sense strand starting at position 2959 of SEQ ID NO: 1561295
guagaaguuccuggugauc

SEQ ID NO: 1660878 - RNA, 19 nt, Artificial Sequence
  Description of Artificial Sequence: Synthetic oligonucleotide
  Antisense strand to SEQ ID NO: 1660877
gaucaccaggaacuucuac

SEQ ID NO: 1660879 - RNA, 19 nt, Artificial Sequence
  Description of Artificial Sequence: Synthetic oligonucleotide
  Sense strand starting at position 3039 of SEQ ID NO: 1561295
gcgaguucuccuggaggag

SEQ ID NO: 1660880 - RNA, 19 nt, Artificial Sequence
  Description of Artificial Sequence: Synthetic oligonucleotide
  Antisense strand to SEQ ID NO: 1660879
cuccuccaggagaacucgc

SEQ ID NO: 1660881 - RNA, 19 nt, Artificial Sequence
  Description of Artificial Sequence: Synthetic oligonucleotide
  Sense strand starting at position 3246 of SEQ ID NO: 1561295
cugaaugcuccagggugaa

SEQ ID NO: 1660882 - RNA, 19 nt, Artificial Sequence
  Description of Artificial Sequence: Synthetic oligonucleotide
  Antisense strand to SEQ ID NO: 1660881
uucacccuggagcauucag

SEQ ID NO: 1660883 - RNA, 19 nt, Artificial Sequence
  Description of Artificial Sequence: Synthetic oligonucleotide
  Sense strand starting at position 3314 of SEQ ID NO: 1561295
aggagauccagguggucuu

SEQ ID NO: 1660884 - RNA, 19 nt, Artificial Sequence
  Description of Artificial Sequence: Synthetic oligonucleotide
  Antisense strand to SEQ ID NO: 1660883
aagaccaccuggaucuccu

SEQ ID NO: 1660885 - RNA, 19 nt, Artificial Sequence
  Description of Artificial Sequence: Synthetic oligonucleotide
  Sense strand starting at position 3532 of SEQ ID NO: 1561295
ugugucauguccucaaugu

SEQ ID NO: 1660886 - RNA, 19 nt, Artificial Sequence
  Description of Artificial Sequence: Synthetic oligonucleotide
  Antisense strand to SEQ ID NO: 1660885
acauugaggacaugacaca

SEQ ID NO: 1660887 - RNA, 19 nt, Artificial Sequence
  Description of Artificial Sequence: Synthetic oligonucleotide
  Sense strand starting at position 3533 of SEQ ID NO: 1561295
gugucauguccucaauguc

SEQ ID NO: 1660888 - RNA, 19 nt, Artificial Sequence
  Description of Artificial Sequence: Synthetic oligonucleotide
  Antisense strand to SEQ ID NO: 1660887
gacauugaggacaugacac

SEQ ID NO: 1660889 - RNA, 19 nt, Artificial Sequence
  Description of Artificial Sequence: Synthetic oligonucleotide
  Sense strand starting at position 3630 of SEQ ID NO: 1561295
ggcugagaugcagaaccau

SEQ ID NO: 1660890 - RNA, 19 nt, Artificial Sequence
  Description of Artificial Sequence: Synthetic oligonucleotide
  Antisense strand to SEQ ID NO: 1660889
augguucugcaucucagcc

SEQ ID NO: 1660891 - RNA, 19 nt, Artificial Sequence
  Description of Artificial Sequence: Synthetic oligonucleotide
  Sense strand starting at position 3768 of SEQ ID NO: 1561295
uccacugcucuuggaggau

SEQ ID NO: 1660892 - RNA, 19 nt, Artificial Sequence
  Description of Artificial Sequence: Synthetic oligonucleotide
  Antisense strand to SEQ ID NO: 1660891
auccuccaagagcagugga

SEQ ID NO: 1660893 - RNA, 19 nt, Artificial Sequence
  Description of Artificial Sequence: Synthetic oligonucleotide
  Sense strand starting at position 137 of SEQ ID NO: 1561296
accugaugucuccauauau

SEQ ID NO: 1660894 - RNA, 19 nt, Artificial Sequence
  Description of Artificial Sequence: Synthetic oligonucleotide
  Antisense strand to SEQ ID NO: 1660893
auauauggagacaucaggu

SEQ ID NO: 1660895 - RNA, 19 nt, Artificial Sequence
  Description of Artificial Sequence: Synthetic oligonucleotide
  Sense strand starting at position 163 of SEQ ID NO: 1561296
uggaauaucucagacuaug

SEQ ID NO: 1660896 - RNA, 19 nt, Artificial Sequence
  Description of Artificial Sequence: Synthetic oligonucleotide
  Antisense strand to SEQ ID NO: 1660895
cauagucugagauauucca

SEQ ID NO: 1660897 - RNA, 19 nt, Artificial Sequence
  Description of Artificial Sequence: Synthetic oligonucleotide
  Sense strand starting at position 632 of SEQ ID NO: 1561296
uggaguaaugcuugaccag

SEQ ID NO: 1660898 - RNA, 19 nt, Artificial Sequence
  Description of Artificial Sequence: Synthetic oligonucleotide
  Antisense strand to SEQ ID NO: 1660897
cuggucaagcauuacucca

SEQ ID NO: 1660899 - RNA, 19 nt, Artificial Sequence
  Description of Artificial Sequence: Synthetic oligonucleotide
  Sense strand starting at position 633 of SEQ ID NO: 1561296
ggaguaaugcuugaccagu

SEQ ID NO: 1660900 - RNA, 19 nt, Artificial Sequence
  Description of Artificial Sequence: Synthetic oligonucleotide
  Antisense strand to SEQ ID NO: 1660899
acuggucaagcauuacucc

SEQ ID NO: 1660901 - RNA, 19 nt, Artificial Sequence
  Description of Artificial Sequence: Synthetic oligonucleotide
  Sense strand starting at position 635 of SEQ ID NO: 1561296
aguaaugcuugaccaguau

SEQ ID NO: 1660902 - RNA, 19 nt, Artificial Sequence
  Description of Artificial Sequence: Synthetic oligonucleotide
  Antisense strand to SEQ ID NO: 1660901
auacuggucaagcauuacu

SEQ ID NO: 1660903 - RNA, 19 nt, Artificial Sequence
  Description of Artificial Sequence: Synthetic oligonucleotide
  Sense strand starting at position 746 of SEQ ID NO: 1561296
uggugaagccacuaucaaa

SEQ ID NO: 1660904 - RNA, 19 nt, Artificial Sequence
  Description of Artificial Sequence: Synthetic oligonucleotide
  Antisense strand to SEQ ID NO: 1660903
uuugauaguggcuucacca

SEQ ID NO: 1660905 - RNA, 19 nt, Artificial Sequence
  Description of Artificial Sequence: Synthetic oligonucleotide
  Sense strand starting at position 822 of SEQ ID NO: 1561296
cccacagaguauucucuau

SEQ ID NO: 1660906 - RNA, 19 nt, Artificial Sequence
  Description of Artificial Sequence: Synthetic oligonucleotide
  Antisense strand to SEQ ID NO: 1660905
auagagaauacucuguggg

SEQ ID NO: 1660907 - RNA, 19 nt, Artificial Sequence
  Description of Artificial Sequence: Synthetic oligonucleotide
  Sense strand starting at position 826 of SEQ ID NO: 1561296
cagaguauucucuaugcug

SEQ ID NO: 1660908 - RNA, 19 nt, Artificial Sequence
  Description of Artificial Sequence: Synthetic oligonucleotide
  Antisense strand to SEQ ID NO: 1660907
cagcauagagaauacucug

SEQ ID NO: 1660909 - RNA, 19 nt, Artificial Sequence
  Description of Artificial Sequence: Synthetic oligonucleotide
  Sense strand starting at position 842 of SEQ ID NO: 1561296
cugcauuaacagugaaccu

SEQ ID NO: 1660910 - RNA, 19 nt, Artificial Sequence
  Description of Artificial Sequence: Synthetic oligonucleotide
  Antisense strand to SEQ ID NO: 1660909
agguucacuguuaaugcag

SEQ ID NO: 1660911 - RNA, 19 nt, Artificial Sequence
  Description of Artificial Sequence: Synthetic oligonucleotide
  Sense strand starting at position 860 of SEQ ID NO: 1561296
ugaugagaccagugucaga

SEQ ID NO: 1660912 - RNA, 19 nt, Artificial Sequence
  Description of Artificial Sequence: Synthetic oligonucleotide
  Antisense strand to SEQ ID NO: 1660911
ucugacacuggucucauca

SEQ ID NO: 1660913 - RNA, 19 nt, Artificial Sequence
  Description of Artificial Sequence: Synthetic oligonucleotide
  Sense strand starting at position 984 of SEQ ID NO: 1561296
gaguucccaugagaaagaa

SEQ ID NO: 1660914 - RNA, 19 nt, Artificial Sequence
  Description of Artificial Sequence: Synthetic oligonucleotide
  Antisense strand to SEQ ID NO: 1660913
uucuuucucaugggaacuc

SEQ ID NO: 1660915 - RNA, 19 nt, Artificial Sequence
  Description of Artificial Sequence: Synthetic oligonucleotide
  Sense strand starting at position 1006 of SEQ ID NO: 1561296
agaguuguguuucccugaa

SEQ ID NO: 1660916 - RNA, 19 nt, Artificial Sequence
  Description of Artificial Sequence: Synthetic oligonucleotide
  Antisense strand to SEQ ID NO: 1660915
uucagggaaacacaacucu

SEQ ID NO: 1660917 - RNA, 19 nt, Artificial Sequence
  Description of Artificial Sequence: Synthetic oligonucleotide
  Sense strand starting at position 1008 of SEQ ID NO: 1561296
aguuguguuucccugaauc

SEQ ID NO: 1660918 - RNA, 19 nt, Artificial Sequence
  Description of Artificial Sequence: Synthetic oligonucleotide
  Antisense strand to SEQ ID NO: 1660917
gauucagggaaacacaacu

SEQ ID NO: 1660919 - RNA, 19 nt, Artificial Sequence
  Description of Artificial Sequence: Synthetic oligonucleotide
  Sense strand starting at position 1010 of SEQ ID NO: 1561296
uuguguuucccugaaucag

SEQ ID NO: 1660920 - RNA, 19 nt, Artificial Sequence
  Description of Artificial Sequence: Synthetic oligonucleotide
  Antisense strand to SEQ ID NO: 1660919
cugauucagggaaacacaa

SEQ ID NO: 1660921 - RNA, 19 nt, Artificial Sequence
  Description of Artificial Sequence: Synthetic oligonucleotide
  Sense strand starting at position 1165 of SEQ ID NO: 1561296
ugugaagaguccuuagguc

SEQ ID NO: 1660922 - RNA, 19 nt, Artificial Sequence
  Description of Artificial Sequence: Synthetic oligonucleotide
  Antisense strand to SEQ ID NO: 1660921
gaccuaaggacucuucaca

SEQ ID NO: 1660923 - RNA, 19 nt, Artificial Sequence
  Description of Artificial Sequence: Synthetic oligonucleotide
  Sense strand starting at position 1301 of SEQ ID NO: 1561296
cacaguaaccuguggaaag

SEQ ID NO: 1660924 - RNA, 19 nt, Artificial Sequence
  Description of Artificial Sequence: Synthetic oligonucleotide
  Antisense strand to SEQ ID NO: 1660923
cuuuccacagguuacugug

SEQ ID NO: 1660925 - RNA, 19 nt, Artificial Sequence
  Description of Artificial Sequence: Synthetic oligonucleotide
  Sense strand starting at position 1377 of SEQ ID NO: 1561296
gauuccuguccaggccaga

SEQ ID NO: 1660926 - RNA, 19 nt, Artificial Sequence
  Description of Artificial Sequence: Synthetic oligonucleotide
  Antisense strand to SEQ ID NO: 1660925
ucuggccuggacaggaauc

SEQ ID NO: 1660927 - RNA, 19 nt, Artificial Sequence
  Description of Artificial Sequence: Synthetic oligonucleotide
  Sense strand starting at position 1404 of SEQ ID NO: 1561296
gacugaggaugccugcauu

SEQ ID NO: 1660928 - RNA, 19 nt, Artificial Sequence
  Description of Artificial Sequence: Synthetic oligonucleotide
  Antisense strand to SEQ ID NO: 1660927
aaugcaggcauccucaguc

SEQ ID NO: 1660929 - RNA, 19 nt, Artificial Sequence
  Description of Artificial Sequence: Synthetic oligonucleotide
  Sense strand starting at position 1407 of SEQ ID NO: 1561296
ugaggaugccugcauuauu

SEQ ID NO: 1660930 - RNA, 19 nt, Artificial Sequence
  Description of Artificial Sequence: Synthetic oligonucleotide
  Antisense strand to SEQ ID NO: 1660929
aauaaugcaggcauccuca

SEQ ID NO: 1660931 - RNA, 19 nt, Artificial Sequence
  Description of Artificial Sequence: Synthetic oligonucleotide
  Sense strand starting at position 1530 of SEQ ID NO: 1561296
agucuaacuccaugagguu

SEQ ID NO: 1660932 - RNA, 19 nt, Artificial Sequence
  Description of Artificial Sequence: Synthetic oligonucleotide
  Antisense strand to SEQ ID NO: 1660931
aaccucauggaguuagacu

SEQ ID NO: 1660933 - RNA, 19 nt, Artificial Sequence
  Description of Artificial Sequence: Synthetic oligonucleotide
  Sense strand starting at position 1531 of SEQ ID NO: 1561296
gucuaacuccaugagguuu

SEQ ID NO: 1660934 - RNA, 19 nt, Artificial Sequence
  Description of Artificial Sequence: Synthetic oligonucleotide
  Antisense strand to SEQ ID NO: 1660933
aaaccucauggaguuagac

SEQ ID NO: 1660935 - RNA, 19 nt, Artificial Sequence
  Description of Artificial Sequence: Synthetic oligonucleotide
  Sense strand starting at position 1678 of SEQ ID NO: 1561296
cugugucuccaagaguuua

SEQ ID NO: 1660936 - RNA, 19 nt, Artificial Sequence
  Description of Artificial Sequence: Synthetic oligonucleotide
  Antisense strand to SEQ ID NO: 1660935
uaaacucuuggagacacag

SEQ ID NO: 1660937 - RNA, 19 nt, Artificial Sequence
  Description of Artificial Sequence: Synthetic oligonucleotide
  Sense strand starting at position 2116 of SEQ ID NO: 1561296
ugaagugauaccggaaguc

SEQ ID NO: 1660938 - RNA, 19 nt, Artificial Sequence
  Description of Artificial Sequence: Synthetic oligonucleotide
  Antisense strand to SEQ ID NO: 1660937
gacuuccgguaucacuuca

SEQ ID NO: 1660939 - RNA, 19 nt, Artificial Sequence
  Description of Artificial Sequence: Synthetic oligonucleotide
  Sense strand starting at position 2356 of SEQ ID NO: 1561296
gggccuugucgcuccuuaa

SEQ ID NO: 1660940 - RNA, 19 nt, Artificial Sequence
  Description of Artificial Sequence: Synthetic oligonucleotide
  Antisense strand to SEQ ID NO: 1660939
uuaaggagcgacaaggccc

SEQ ID NO: 1660941 - RNA, 19 nt, Artificial Sequence
  Description of Artificial Sequence: Synthetic oligonucleotide
  Sense strand starting at position 2357 of SEQ ID NO: 1561296
ggccuugucgcuccuuaaa

SEQ ID NO: 1660942 - RNA, 19 nt, Artificial Sequence
  Description of Artificial Sequence: Synthetic oligonucleotide
  Antisense strand to SEQ ID NO: 1660941
uuuaaggagcgacaaggcc

SEQ ID NO: 1660943 - RNA, 19 nt, Artificial Sequence
  Description of Artificial Sequence: Synthetic oligonucleotide
  Sense strand starting at position 2422 of SEQ ID NO: 1561296
cgugauuagaagcauugau

SEQ ID NO: 1660944 - RNA, 19 nt, Artificial Sequence
  Description of Artificial Sequence: Synthetic oligonucleotide
  Antisense strand to SEQ ID NO: 1660943
aucaaugcuucuaaucacg

SEQ ID NO: 1660945 - RNA, 19 nt, Artificial Sequence
  Description of Artificial Sequence: Synthetic oligonucleotide
  Sense strand starting at position 2479 of SEQ ID NO: 1561296
guauuccauacguauucga

SEQ ID NO: 1660946 - RNA, 19 nt, Artificial Sequence
  Description of Artificial Sequence: Synthetic oligonucleotide
  Antisense strand to SEQ ID NO: 1660945
ucgaauacguauggaauac

SEQ ID NO: 1660947 - RNA, 19 nt, Artificial Sequence
  Description of Artificial Sequence: Synthetic oligonucleotide
  Sense strand starting at position 2570 of SEQ ID NO: 1561296
caaggcuauucugugaaag

SEQ ID NO: 1660948 - RNA, 19 nt, Artificial Sequence
  Description of Artificial Sequence: Synthetic oligonucleotide
  Antisense strand to SEQ ID NO: 1660947
cuuucacagaauagccuug

SEQ ID NO: 1660949 - RNA, 19 nt, Artificial Sequence
  Description of Artificial Sequence: Synthetic oligonucleotide
  Sense strand starting at position 2571 of SEQ ID NO: 1561296
aaggcuauucugugaaagg

SEQ ID NO: 1660950 - RNA, 19 nt, Artificial Sequence
  Description of Artificial Sequence: Synthetic oligonucleotide
  Antisense strand to SEQ ID NO: 1660949
ccuuucacagaauagccuu

SEQ ID NO: 1660951 - RNA, 19 nt, Artificial Sequence
  Description of Artificial Sequence: Synthetic oligonucleotide
  Sense strand starting at position 3050 of SEQ ID NO: 1561296
gccucuggagcccaagaau

SEQ ID NO: 1660952 - RNA, 19 nt, Artificial Sequence
  Description of Artificial Sequence: Synthetic oligonucleotide
  Antisense strand to SEQ ID NO: 1660951
auucuugggcuccagaggc

SEQ ID NO: 1660953 - RNA, 19 nt, Artificial Sequence
  Description of Artificial Sequence: Synthetic oligonucleotide
  Sense strand starting at position 3186 of SEQ ID NO: 1561296
agguuuaaccacuggacca

SEQ ID NO: 1660954 - RNA, 19 nt, Artificial Sequence
  Description of Artificial Sequence: Synthetic oligonucleotide
  Antisense strand to SEQ ID NO: 1660953
ugguccagugguuaaaccu

SEQ ID NO: 1660955 - RNA, 19 nt, Artificial Sequence
  Description of Artificial Sequence: Synthetic oligonucleotide
  Sense strand starting at position 3229 of SEQ ID NO: 1561296
guaacauaauguccaguua

SEQ ID NO: 1660956 - RNA, 19 nt, Artificial Sequence
  Description of Artificial Sequence: Synthetic oligonucleotide
  Antisense strand to SEQ ID NO: 1660955
uaacuggacauuauguuac

SEQ ID NO: 1660957 - RNA, 19 nt, Artificial Sequence
  Description of Artificial Sequence: Synthetic oligonucleotide
  Sense strand starting at position 3286 of SEQ ID NO: 1561296
gcuagagaaugugcagaaa

SEQ ID NO: 1660958 - RNA, 19 nt, Artificial Sequence
  Description of Artificial Sequence: Synthetic oligonucleotide
  Antisense strand to SEQ ID NO: 1660957
uuucugcacauucucuagc

SEQ ID NO: 1660959 - RNA, 19 nt, Artificial Sequence
  Description of Artificial Sequence: Synthetic oligonucleotide
  Sense strand starting at position 3493 of SEQ ID NO: 1561296
ccaggagaucacgguuaca

SEQ ID NO: 1660960 - RNA, 19 nt, Artificial Sequence
  Description of Artificial Sequence: Synthetic oligonucleotide
  Antisense strand to SEQ ID NO: 1660959
uguaaccgugaucuccugg

SEQ ID NO: 1660961 - RNA, 19 nt, Artificial Sequence
  Description of Artificial Sequence: Synthetic oligonucleotide
  Sense strand starting at position 3502 of SEQ ID NO: 1561296
cacgguuacagugaguuau

SEQ ID NO: 1660962 - RNA, 19 nt, Artificial Sequence
  Description of Artificial Sequence: Synthetic oligonucleotide
  Antisense strand to SEQ ID NO: 1660961
auaacucacuguaaccgug

SEQ ID NO: 1660963 - RNA, 19 nt, Artificial Sequence
  Description of Artificial Sequence: Synthetic oligonucleotide
  Sense strand starting at position 3504 of SEQ ID NO: 1561296
cgguuacagugaguuauga

SEQ ID NO: 1660964 - RNA, 19 nt, Artificial Sequence
  Description of Artificial Sequence: Synthetic oligonucleotide
  Antisense strand to SEQ ID NO: 1660963
ucauaacucacuguaaccg

SEQ ID NO: 1660965 - RNA, 19 nt, Artificial Sequence
  Description of Artificial Sequence: Synthetic oligonucleotide
  Sense strand starting at position 3753 of SEQ ID NO: 1561296
ucugaauguugggugauaa

SEQ ID NO: 1660966 - RNA, 19 nt, Artificial Sequence
  Description of Artificial Sequence: Synthetic oligonucleotide
  Antisense strand to SEQ ID NO: 1660965
uuaucacccaacauucaga

SEQ ID NO: 1660967 - RNA, 19 nt, Artificial Sequence
  Description of Artificial Sequence: Synthetic oligonucleotide
  Sense strand starting at position 3754 of SEQ ID NO: 1561296
cugaauguugggugauaac

SEQ ID NO: 1660968 - RNA, 19 nt, Artificial Sequence
  Description of Artificial Sequence: Synthetic oligonucleotide
  Antisense strand to SEQ ID NO: 1660967
guuaucacccaacauucag

SEQ ID NO: 1660969 - RNA, 19 nt, Artificial Sequence
  Description of Artificial Sequence: Synthetic oligonucleotide
  Sense strand starting at position 3783 of SEQ ID NO: 1561296
ccgccuugccaucaauaga

SEQ ID NO: 1660970 - RNA, 19 nt, Artificial Sequence
  Description of Artificial Sequence: Synthetic oligonucleotide
  Antisense strand to SEQ ID NO: 1660969
ucuauugauggcaaggcgg

SEQ ID NO: 1660971 - RNA, 19 nt, Artificial Sequence
  Description of Artificial Sequence: Synthetic oligonucleotide
  Sense strand starting at position 3933 of SEQ ID NO: 1561296
gucgacuugcaauaaaggu

SEQ ID NO: 1660972 - RNA, 19 nt, Artificial Sequence
  Description of Artificial Sequence: Synthetic oligonucleotide
  Antisense strand to SEQ ID NO: 1660971
accuuuauugcaagucgac

SEQ ID NO: 1660973 - RNA, 19 nt, Artificial Sequence
  Description of Artificial Sequence: Synthetic oligonucleotide
  Sense strand starting at position 560 of SEQ ID NO: 1561297
gccugagcagaucgucaua

SEQ ID NO: 1660974 - RNA, 19 nt, Artificial Sequence
  Description of Artificial Sequence: Synthetic oligonucleotide
  Antisense strand to SEQ ID NO: 1660973
uaugacgaucugcucaggc

SEQ ID NO: 1660975 - RNA, 19 nt, Artificial Sequence
  Description of Artificial Sequence: Synthetic oligonucleotide
  Sense strand starting at position 565 of SEQ ID NO: 1561297
agcagaucgucauauccaa

SEQ ID NO: 1660976 - RNA, 19 nt, Artificial Sequence
  Description of Artificial Sequence: Synthetic oligonucleotide
  Antisense strand to SEQ ID NO: 1660975
uuggauaugacgaucugcu

SEQ ID NO: 1660977 - RNA, 19 nt, Artificial Sequence
  Description of Artificial Sequence: Synthetic oligonucleotide
  Sense strand starting at position 572 of SEQ ID NO: 1561297
cgucauauccaaugcuaca

SEQ ID NO: 1660978 - RNA, 19 nt, Artificial Sequence
  Description of Artificial Sequence: Synthetic oligonucleotide
  Antisense strand to SEQ ID NO: 1660977
uguagcauuggauaugacg

SEQ ID NO: 1660979 - RNA, 19 nt, Artificial Sequence
  Description of Artificial Sequence: Synthetic oligonucleotide
  Sense strand starting at position 698 of SEQ ID NO: 1561297
gccugaacagaucgucaca

SEQ ID NO: 1660980 - RNA, 19 nt, Artificial Sequence
  Description of Artificial Sequence: Synthetic oligonucleotide
  Antisense strand to SEQ ID NO: 1660979
ugugacgaucuguucaggc

SEQ ID NO: 1660981 - RNA, 19 nt, Artificial Sequence
  Description of Artificial Sequence: Synthetic oligonucleotide
  Sense strand starting at position 701 of SEQ ID NO: 1561297
ugaacagaucgucacaucu

SEQ ID NO: 1660982 - RNA, 19 nt, Artificial Sequence
  Description of Artificial Sequence: Synthetic oligonucleotide
  Antisense strand to SEQ ID NO: 1660981
agaugugacgaucuguuca

SEQ ID NO: 1660983 - RNA, 19 nt, Artificial Sequence
  Description of Artificial Sequence: Synthetic oligonucleotide
  Sense strand starting at position 808 of SEQ ID NO: 1561297
caucaaacauggcgucaaa

SEQ ID NO: 1660984 - RNA, 19 nt, Artificial Sequence
  Description of Artificial Sequence: Synthetic oligonucleotide
  Antisense strand to SEQ ID NO: 1660983
uuugacgccauguuugaug

SEQ ID NO: 1660985 - RNA, 19 nt, Artificial Sequence
  Description of Artificial Sequence: Synthetic oligonucleotide
  Sense strand starting at position 842 of SEQ ID NO: 1561297
guggauaguuacccaauca

SEQ ID NO: 1660986 - RNA, 19 nt, Artificial Sequence
  Description of Artificial Sequence: Synthetic oligonucleotide
  Antisense strand to SEQ ID NO: 1660985
ugauuggguaacuauccac

SEQ ID NO: 1660987 - RNA, 19 nt, Artificial Sequence
  Description of Artificial Sequence: Synthetic oligonucleotide
  Sense strand starting at position 2047 of SEQ ID NO: 1561297
gggcuucugugcuagccaa

SEQ ID NO: 1660988 - RNA, 19 nt, Artificial Sequence
  Description of Artificial Sequence: Synthetic oligonucleotide
  Antisense strand to SEQ ID NO: 1660987
uuggcuagcacagaagccc

SEQ ID NO: 1660989 - RNA, 19 nt, Artificial Sequence
  Description of Artificial Sequence: Synthetic oligonucleotide
  Sense strand starting at position 2928 of SEQ ID NO: 1561297
gcaagaaauuguugaugag

SEQ ID NO: 1660990 - RNA, 19 nt, Artificial Sequence
  Description of Artificial Sequence: Synthetic oligonucleotide
  Antisense strand to SEQ ID NO: 1660989
cucaucaacaauuucuugc

SEQ ID NO: 1660991 - RNA, 19 nt, Artificial Sequence
  Description of Artificial Sequence: Synthetic oligonucleotide
  Sense strand starting at position 2934 of SEQ ID NO: 1561297
aauuguugaugaguuacuu

SEQ ID NO: 1660992 - RNA, 19 nt, Artificial Sequence
  Description of Artificial Sequence: Synthetic oligonucleotide
  Antisense strand to SEQ ID NO: 1660991
aaguaacucaucaacaauu

SEQ ID NO: 1660993 - RNA, 19 nt, Artificial Sequence
  Description of Artificial Sequence: Synthetic oligonucleotide
  Sense strand starting at position 2942 of SEQ ID NO: 1561297
augaguuacuucuagggac

SEQ ID NO: 1660994 - RNA, 19 nt, Artificial Sequence
  Description of Artificial Sequence: Synthetic oligonucleotide
  Antisense strand to SEQ ID NO: 1660993
gucccuagaaguaacucau

SEQ ID NO: 1660995 - RNA, 19 nt, Artificial Sequence
  Description of Artificial Sequence: Synthetic oligonucleotide
  Sense strand starting at position 2944 of SEQ ID NO: 1561297
gaguuacuucuagggacaa

SEQ ID NO: 1660996 - RNA, 19 nt, Artificial Sequence
  Description of Artificial Sequence: Synthetic oligonucleotide
  Antisense strand to SEQ ID NO: 1660995
uugucccuagaaguaacuc

SEQ ID NO: 1660997 - RNA, 19 nt, Artificial Sequence
  Description of Artificial Sequence: Synthetic oligonucleotide
  Sense strand starting at position 2945 of SEQ ID NO: 1561297
aguuacuucuagggacaag

SEQ ID NO: 1660998 - RNA, 19 nt, Artificial Sequence
  Description of Artificial Sequence: Synthetic oligonucleotide
  Antisense strand to SEQ ID NO: 1660997
cuugucccuagaaguaacu

SEQ ID NO: 1660999 - RNA, 19 nt, Artificial Sequence
  Description of Artificial Sequence: Synthetic oligonucleotide
  Sense strand starting at position 2996 of SEQ ID NO: 1561297
ugccauccauacugugaau

SEQ ID NO: 1661000 - RNA, 19 nt, Artificial Sequence
  Description of Artificial Sequence: Synthetic oligonucleotide
  Antisense strand to SEQ ID NO: 1660999
auucacaguauggauggca

SEQ ID NO: 1661001 - RNA, 19 nt, Artificial Sequence
  Description of Artificial Sequence: Synthetic oligonucleotide
  Sense strand starting at position 3030 of SEQ ID NO: 1561297
acguauuucuucucuggca

SEQ ID NO: 1661002 - RNA, 19 nt, Artificial Sequence
  Description of Artificial Sequence: Synthetic oligonucleotide
  Antisense strand to SEQ ID NO: 1661001
ugccagagaagaaauacgu

SEQ ID NO: 1661003 - RNA, 19 nt, Artificial Sequence
  Description of Artificial Sequence: Synthetic oligonucleotide
  Sense strand starting at position 3032 of SEQ ID NO: 1561297
guauuucuucucuggcagu

SEQ ID NO: 1661004 - RNA, 19 nt, Artificial Sequence
  Description of Artificial Sequence: Synthetic oligonucleotide
  Antisense strand to SEQ ID NO: 1661003
acugccagagaagaaauac

SEQ ID NO: 1661005 - RNA, 19 nt, Artificial Sequence
  Description of Artificial Sequence: Synthetic oligonucleotide
  Sense strand starting at position 3035 of SEQ ID NO: 1561297
uuucuucucuggcaguaaa

SEQ ID NO: 1661006 - RNA, 19 nt, Artificial Sequence
  Description of Artificial Sequence: Synthetic oligonucleotide
  Antisense strand to SEQ ID NO: 1661005
uuuacugccagagaagaaa

SEQ ID NO: 1661007 - RNA, 19 nt, Artificial Sequence
  Description of Artificial Sequence: Synthetic oligonucleotide
  Sense strand starting at position 3162 of SEQ ID NO: 1561297
agggauauucacggagcau

SEQ ID NO: 1661008 - RNA, 19 nt, Artificial Sequence
  Description of Artificial Sequence: Synthetic oligonucleotide
  Antisense strand to SEQ ID NO: 1661007
augcuccgugaauaucccu

SEQ ID NO: 1661009 - RNA, 19 nt, Artificial Sequence
  Description of Artificial Sequence: Synthetic oligonucleotide
  Sense strand starting at position 3217 of SEQ ID NO: 1561297
auuaaacuguauucuggua

SEQ ID NO: 1661010 - RNA, 19 nt, Artificial Sequence
  Description of Artificial Sequence: Synthetic oligonucleotide
  Antisense strand to SEQ ID NO: 1661009
uaccagaauacaguuuaau

SEQ ID NO: 1661011 - RNA, 19 nt, Artificial Sequence
  Description of Artificial Sequence: Synthetic oligonucleotide
  Sense strand starting at position 3222 of SEQ ID NO: 1561297
acuguauucugguaaauuu

SEQ ID NO: 1661012 - RNA, 19 nt, Artificial Sequence
  Description of Artificial Sequence: Synthetic oligonucleotide
  Antisense strand to SEQ ID NO: 1661011
aaauuuaccagaauacagu

SEQ ID NO: 1661013 - RNA, 19 nt, Artificial Sequence
  Description of Artificial Sequence: Synthetic oligonucleotide
  Sense strand starting at position 3235 of SEQ ID NO: 1561297
aaauuuacacagcgcgauu

SEQ ID NO: 1661014 - RNA, 19 nt, Artificial Sequence
  Description of Artificial Sequence: Synthetic oligonucleotide
  Antisense strand to SEQ ID NO: 1661013
aaucgcgcuguguaaauuu

SEQ ID NO: 1661015 - RNA, 19 nt, Artificial Sequence
  Description of Artificial Sequence: Synthetic oligonucleotide
  Sense strand starting at position 3302 of SEQ ID NO: 1561297
aucuguaagaugugguuaa

SEQ ID NO: 1661016 - RNA, 19 nt, Artificial Sequence
  Description of Artificial Sequence: Synthetic oligonucleotide
  Antisense strand to SEQ ID NO: 1661015
uuaaccacaucuuacagau

SEQ ID NO: 1661017 - RNA, 19 nt, Artificial Sequence
  Description of Artificial Sequence: Synthetic oligonucleotide
  Sense strand starting at position 3303 of SEQ ID NO: 1561297
ucuguaagaugugguuaau

SEQ ID NO: 1661018 - RNA, 19 nt, Artificial Sequence
  Description of Artificial Sequence: Synthetic oligonucleotide
  Antisense strand to SEQ ID NO: 1661017
auuaaccacaucuuacaga

SEQ ID NO: 1661019 - RNA, 19 nt, Artificial Sequence
  Description of Artificial Sequence: Synthetic oligonucleotide
  Sense strand starting at position 3306 of SEQ ID NO: 1561297
guaagaugugguuaauuac

SEQ ID NO: 1661020 - RNA, 19 nt, Artificial Sequence
  Description of Artificial Sequence: Synthetic oligonucleotide
  Antisense strand to SEQ ID NO: 1661019
guaauuaaccacaucuuac

SEQ ID NO: 1661021 - RNA, 19 nt, Artificial Sequence
  Description of Artificial Sequence: Synthetic oligonucleotide
  Sense strand starting at position 3309 of SEQ ID NO: 1561297
agaugugguuaauuaccaa

SEQ ID NO: 1661022 - RNA, 19 nt, Artificial Sequence
  Description of Artificial Sequence: Synthetic oligonucleotide
  Antisense strand to SEQ ID NO: 1661021
uugguaauuaaccacaucu

SEQ ID NO: 1661023 - RNA, 19 nt, Artificial Sequence
  Description of Artificial Sequence: Synthetic oligonucleotide
  Sense strand starting at position 3327 of SEQ ID NO: 1561297
aaagguguuuaccuaagga

SEQ ID NO: 1661024 - RNA, 19 nt, Artificial Sequence
  Description of Artificial Sequence: Synthetic oligonucleotide
  Antisense strand to SEQ ID NO: 1661023
uccuuagguaaacaccuuu

SEQ ID NO: 1661025 - RNA, 19 nt, Artificial Sequence
  Description of Artificial Sequence: Synthetic oligonucleotide
  Sense strand starting at position 3392 of SEQ ID NO: 1561297
ggaguuaucagugguugcu

SEQ ID NO: 1661026 - RNA, 19 nt, Artificial Sequence
  Description of Artificial Sequence: Synthetic oligonucleotide
  Antisense strand to SEQ ID NO: 1661025
agcaaccacugauaacucc

SEQ ID NO: 1661027 - RNA, 19 nt, Artificial Sequence
  Description of Artificial Sequence: Synthetic oligonucleotide
  Sense strand starting at position 3567 of SEQ ID NO: 1561297
gaaggugaaugugguagua

SEQ ID NO: 1661028 - RNA, 19 nt, Artificial Sequence
  Description of Artificial Sequence: Synthetic oligonucleotide
  Antisense strand to SEQ ID NO: 1661027
uacuaccacauucaccuuc

SEQ ID NO: 1661029 - RNA, 19 nt, Artificial Sequence
  Description of Artificial Sequence: Synthetic oligonucleotide
  Sense strand starting at position 3577 of SEQ ID NO: 1561297
gugguaguacccugacuua

SEQ ID NO: 1661030 - RNA, 19 nt, Artificial Sequence
  Description of Artificial Sequence: Synthetic oligonucleotide
  Antisense strand to SEQ ID NO: 1661029
uaagucaggguacuaccac

SEQ ID NO: 1661031 - RNA, 19 nt, Artificial Sequence
  Description of Artificial Sequence: Synthetic oligonucleotide
  Sense strand starting at position 3589 of SEQ ID NO: 1561297
ugacuuagguuacagauuu

SEQ ID NO: 1661032 - RNA, 19 nt, Artificial Sequence
  Description of Artificial Sequence: Synthetic oligonucleotide
  Antisense strand to SEQ ID NO: 1661031
aaaucuguaaccuaaguca

SEQ ID NO: 1661033 - RNA, 19 nt, Artificial Sequence
  Description of Artificial Sequence: Synthetic oligonucleotide
  Sense strand starting at position 3644 of SEQ ID NO: 1561297
gcuguuaaacaaugcagau

SEQ ID NO: 1661034 - RNA, 19 nt, Artificial Sequence
  Description of Artificial Sequence: Synthetic oligonucleotide
  Antisense strand to SEQ ID NO: 1661033
aucugcauuguuuaacagc

SEQ ID NO: 1661035 - RNA, 19 nt, Artificial Sequence
  Description of Artificial Sequence: Synthetic oligonucleotide
  Sense strand starting at position 3657 of SEQ ID NO: 1561297
gcagauucccaguguccca

SEQ ID NO: 1661036 - RNA, 19 nt, Artificial Sequence
  Description of Artificial Sequence: Synthetic oligonucleotide
  Antisense strand to SEQ ID NO: 1661035
ugggacacugggaaucugc

SEQ ID NO: 1661037 - RNA, 19 nt, Artificial Sequence
  Description of Artificial Sequence: Synthetic oligonucleotide
  Sense strand starting at position 3664 of SEQ ID NO: 1561297
cccagugucccacagagau

SEQ ID NO: 1661038 - RNA, 19 nt, Artificial Sequence
  Description of Artificial Sequence: Synthetic oligonucleotide
  Antisense strand to SEQ ID NO: 1661037
aucucugugggacacuggg

SEQ ID NO: 1661039 - RNA, 19 nt, Artificial Sequence
  Description of Artificial Sequence: Synthetic oligonucleotide
  Sense strand starting at position 3702 of SEQ ID NO: 1561297
aagggauccuaaugucuag

SEQ ID NO: 1661040 - RNA, 19 nt, Artificial Sequence
  Description of Artificial Sequence: Synthetic oligonucleotide
  Antisense strand to SEQ ID NO: 1661039
cuagacauuaggaucccuu

SEQ ID NO: 1661041 - RNA, 19 nt, Artificial Sequence
  Description of Artificial Sequence: Synthetic oligonucleotide
  Sense strand starting at position 3705 of SEQ ID NO: 1561297
ggauccuaaugucuaguua

SEQ ID NO: 1661042 - RNA, 19 nt, Artificial Sequence
  Description of Artificial Sequence: Synthetic oligonucleotide
  Antisense strand to SEQ ID NO: 1661041
uaacuagacauuaggaucc

SEQ ID NO: 1661043 - RNA, 19 nt, Artificial Sequence
  Description of Artificial Sequence: Synthetic oligonucleotide
  Sense strand starting at position 3709 of SEQ ID NO: 1561297
ccuaaugucuaguuaaggu

SEQ ID NO: 1661044 - RNA, 19 nt, Artificial Sequence
  Description of Artificial Sequence: Synthetic oligonucleotide
  Antisense strand to SEQ ID NO: 1661043
accuuaacuagacauuagg

SEQ ID NO: 1661045 - RNA, 19 nt, Artificial Sequence
  Description of Artificial Sequence: Synthetic oligonucleotide
  Sense strand starting at position 3918 of SEQ ID NO: 1561297
agagcagucuacugucacu

SEQ ID NO: 1661046 - RNA, 19 nt, Artificial Sequence
  Description of Artificial Sequence: Synthetic oligonucleotide
  Antisense strand to SEQ ID NO: 1661045
agugacaguagacugcucu

SEQ ID NO: 1661047 - RNA, 19 nt, Artificial Sequence
  Description of Artificial Sequence: Synthetic oligonucleotide
  Sense strand starting at position 3924 of SEQ ID NO: 1561297
gucuacugucacuaacuca

SEQ ID NO: 1661048 - RNA, 19 nt, Artificial Sequence
  Description of Artificial Sequence: Synthetic oligonucleotide
  Antisense strand to SEQ ID NO: 1661047
ugaguuagugacaguagac

SEQ ID NO: 1661049 - RNA, 19 nt, Artificial Sequence
  Description of Artificial Sequence: Synthetic oligonucleotide
  Sense strand starting at position 277 of SEQ ID NO: 1561298
agcuguggucgugacgaau

SEQ ID NO: 1661050 - RNA, 19 nt, Artificial Sequence
  Description of Artificial Sequence: Synthetic oligonucleotide
  Antisense strand to SEQ ID NO: 1661049
auucgucacgaccacagcu

SEQ ID NO: 1661051 - RNA, 19 nt, Artificial Sequence
  Description of Artificial Sequence: Synthetic oligonucleotide
  Sense strand starting at position 291 of SEQ ID NO: 1561298
cgaauaacgccgcagugaa

SEQ ID NO: 1661052 - RNA, 19 nt, Artificial Sequence
  Description of Artificial Sequence: Synthetic oligonucleotide
  Antisense strand to SEQ ID NO: 1661051
uucacugcggcguuauucg

SEQ ID NO: 1661053 - RNA, 19 nt, Artificial Sequence
  Description of Artificial Sequence: Synthetic oligonucleotide
  Sense strand starting at position 345 of SEQ ID NO: 1561298
gcgggacagcuggaucauu

SEQ ID NO: 1661054 - RNA, 19 nt, Artificial Sequence
  Description of Artificial Sequence: Synthetic oligonucleotide
  Antisense strand to SEQ ID NO: 1661053
aaugauccagcugucccgc

SEQ ID NO: 1661055 - RNA, 19 nt, Artificial Sequence
  Description of Artificial Sequence: Synthetic oligonucleotide
  Sense strand starting at position 350 of SEQ ID NO: 1561298
acagcuggaucauugguaa

SEQ ID NO: 1661056 - RNA, 19 nt, Artificial Sequence
  Description of Artificial Sequence: Synthetic oligonucleotide
  Antisense strand to SEQ ID NO: 1661055
uuaccaaugauccagcugu

SEQ ID NO: 1661057 - RNA, 19 nt, Artificial Sequence
  Description of Artificial Sequence: Synthetic oligonucleotide
  Sense strand starting at position 353 of SEQ ID NO: 1561298
gcuggaucauugguaauuc

SEQ ID NO: 1661058 - RNA, 19 nt, Artificial Sequence
  Description of Artificial Sequence: Synthetic oligonucleotide
  Antisense strand to SEQ ID NO: 1661057
gaauuaccaaugauccagc

SEQ ID NO: 1661059 - RNA, 19 nt, Artificial Sequence
  Description of Artificial Sequence: Synthetic oligonucleotide
  Sense strand starting at position 354 of SEQ ID NO: 1561298
cuggaucauugguaauucu

SEQ ID NO: 1661060 - RNA, 19 nt, Artificial Sequence
  Description of Artificial Sequence: Synthetic oligonucleotide
  Antisense strand to SEQ ID NO: 1661059
agaauuaccaaugauccag

SEQ ID NO: 1661061 - RNA, 19 nt, Artificial Sequence
  Description of Artificial Sequence: Synthetic oligonucleotide
  Sense strand starting at position 361 of SEQ ID NO: 1561298
auugguaauucuuugccaa

SEQ ID NO: 1661062 - RNA, 19 nt, Artificial Sequence
  Description of Artificial Sequence: Synthetic oligonucleotide
  Antisense strand to SEQ ID NO: 1661061
uuggcaaagaauuaccaau

SEQ ID NO: 1661063 - RNA, 19 nt, Artificial Sequence
  Description of Artificial Sequence: Synthetic oligonucleotide
  Sense strand starting at position 362 of SEQ ID NO: 1561298
uugguaauucuuugccaaa

SEQ ID NO: 1661064 - RNA, 19 nt, Artificial Sequence
  Description of Artificial Sequence: Synthetic oligonucleotide
  Antisense strand to SEQ ID NO: 1661063
uuuggcaaagaauuaccaa

SEQ ID NO: 1661065 - RNA, 19 nt, Artificial Sequence
  Description of Artificial Sequence: Synthetic oligonucleotide
  Sense strand starting at position 808 of SEQ ID NO: 1561298
agugaaaccucugucucaa

SEQ ID NO: 1661066 - RNA, 19 nt, Artificial Sequence
  Description of Artificial Sequence: Synthetic oligonucleotide
  Antisense strand to SEQ ID NO: 1661065
uugagacagagguuucacu

SEQ ID NO: 1661067 - RNA, 19 nt, Artificial Sequence
  Description of Artificial Sequence: Synthetic oligonucleotide
  Sense strand starting at position 818 of SEQ ID NO: 1561298
cugucucaauguuuaagua

SEQ ID NO: 1661068 - RNA, 19 nt, Artificial Sequence
  Description of Artificial Sequence: Synthetic oligonucleotide
  Antisense strand to SEQ ID NO: 1661067
uacuuaaacauugagacag

SEQ ID NO: 1661069 - RNA, 19 nt, Artificial Sequence
  Description of Artificial Sequence: Synthetic oligonucleotide
  Sense strand starting at position 819 of SEQ ID NO: 1561298
ugucucaauguuuaaguaa

SEQ ID NO: 1661070 - RNA, 19 nt, Artificial Sequence
  Description of Artificial Sequence: Synthetic oligonucleotide
  Antisense strand to SEQ ID NO: 1661069
uuacuuaaacauugagaca

SEQ ID NO: 1661071 - RNA, 19 nt, Artificial Sequence
  Description of Artificial Sequence: Synthetic oligonucleotide
  Sense strand starting at position 966 of SEQ ID NO: 1561298
uggccuccugaauaguuaa

SEQ ID NO: 1661072 - RNA, 19 nt, Artificial Sequence
  Description of Artificial Sequence: Synthetic oligonucleotide
  Antisense strand to SEQ ID NO: 1661071
uuaacuauucaggaggcca

SEQ ID NO: 1661073 - RNA, 19 nt, Artificial Sequence
  Description of Artificial Sequence: Synthetic oligonucleotide
  Sense strand starting at position 1035 of SEQ ID NO: 1561298
aagggaucuugcuauguca

SEQ ID NO: 1661074 - RNA, 19 nt, Artificial Sequence
  Description of Artificial Sequence: Synthetic oligonucleotide
  Antisense strand to SEQ ID NO: 1661073
ugacauagcaagaucccuu

SEQ ID NO: 1661075 - RNA, 19 nt, Artificial Sequence
  Description of Artificial Sequence: Synthetic oligonucleotide
  Sense strand starting at position 1216 of SEQ ID NO: 1561298
uuauuaaaguuugaggagu

SEQ ID NO: 1661076 - RNA, 19 nt, Artificial Sequence
  Description of Artificial Sequence: Synthetic oligonucleotide
  Antisense strand to SEQ ID NO: 1661075
acuccucaaacuuuaauaa

SEQ ID NO: 1661077 - RNA, 19 nt, Artificial Sequence
  Description of Artificial Sequence: Synthetic oligonucleotide
  Sense strand starting at position 1224 of SEQ ID NO: 1561298
guuugaggaguccaauucu

SEQ ID NO: 1661078 - RNA, 19 nt, Artificial Sequence
  Description of Artificial Sequence: Synthetic oligonucleotide
  Antisense strand to SEQ ID NO: 1661077
agaauuggacuccucaaac

SEQ ID NO: 1661079 - RNA, 19 nt, Artificial Sequence
  Description of Artificial Sequence: Synthetic oligonucleotide
  Sense strand starting at position 1468 of SEQ ID NO: 1561298
uugaguguccugggagcau

SEQ ID NO: 1661080 - RNA, 19 nt, Artificial Sequence
  Description of Artificial Sequence: Synthetic oligonucleotide
  Antisense strand to SEQ ID NO: 1661079
augcucccaggacacucaa

SEQ ID NO: 1661081 - RNA, 19 nt, Artificial Sequence
  Description of Artificial Sequence: Synthetic oligonucleotide
  Sense strand starting at position 1542 of SEQ ID NO: 1561298
agcuuauuccagcaaauag

SEQ ID NO: 1661082 - RNA, 19 nt, Artificial Sequence
  Description of Artificial Sequence: Synthetic oligonucleotide
  Antisense strand to SEQ ID NO: 1661081
cuauuugcuggaauaagcu

SEQ ID NO: 1661083 - RNA, 19 nt, Artificial Sequence
  Description of Artificial Sequence: Synthetic oligonucleotide
  Sense strand starting at position 1658 of SEQ ID NO: 1561298
uccaguggaaucuggcaua

SEQ ID NO: 1661084 - RNA, 19 nt, Artificial Sequence
  Description of Artificial Sequence: Synthetic oligonucleotide
  Antisense strand to SEQ ID NO: 1661083
uaugccagauuccacugga

SEQ ID NO: 1661085 - RNA, 19 nt, Artificial Sequence
  Description of Artificial Sequence: Synthetic oligonucleotide
  Sense strand starting at position 1661 of SEQ ID NO: 1561298
aguggaaucuggcauaaau

SEQ ID NO: 1661086 - RNA, 19 nt, Artificial Sequence
  Description of Artificial Sequence: Synthetic oligonucleotide
  Antisense strand to SEQ ID NO: 1661085
auuuaugccagauuccacu

SEQ ID NO: 1661087 - RNA, 19 nt, Artificial Sequence
  Description of Artificial Sequence: Synthetic oligonucleotide
  Sense strand starting at position 1690 of SEQ ID NO: 1561298
auugauuucugaugccugu

SEQ ID NO: 1661088 - RNA, 19 nt, Artificial Sequence
  Description of Artificial Sequence: Synthetic oligonucleotide
  Antisense strand to SEQ ID NO: 1661087
acaggcaucagaaaucaau

SEQ ID NO: 1661089 - RNA, 19 nt, Artificial Sequence
  Description of Artificial Sequence: Synthetic oligonucleotide
  Sense strand starting at position 1696 of SEQ ID NO: 1561298
uucugaugccuguggucuu

SEQ ID NO: 1661090 - RNA, 19 nt, Artificial Sequence
  Description of Artificial Sequence: Synthetic oligonucleotide
  Antisense strand to SEQ ID NO: 1661089
aagaccacaggcaucagaa

SEQ ID NO: 1661091 - RNA, 19 nt, Artificial Sequence
  Description of Artificial Sequence: Synthetic oligonucleotide
  Sense strand starting at position 1797 of SEQ ID NO: 1561298
cgcuguauuccgcaucaua

SEQ ID NO: 1661092 - RNA, 19 nt, Artificial Sequence
  Description of Artificial Sequence: Synthetic oligonucleotide
  Antisense strand to SEQ ID NO: 1661091
uaugaugcggaauacagcg

SEQ ID NO: 1661093 - RNA, 19 nt, Artificial Sequence
  Description of Artificial Sequence: Synthetic oligonucleotide
  Sense strand starting at position 1800 of SEQ ID NO: 1561298
uguauuccgcaucauaauc

SEQ ID NO: 1661094 - RNA, 19 nt, Artificial Sequence
  Description of Artificial Sequence: Synthetic oligonucleotide
  Antisense strand to SEQ ID NO: 1661093
gauuaugaugcggaauaca

SEQ ID NO: 1661095 - RNA, 19 nt, Artificial Sequence
  Description of Artificial Sequence: Synthetic oligonucleotide
  Sense strand starting at position 1981 of SEQ ID NO: 1561298
ccaaucaguuuccaaugga

SEQ ID NO: 1661096 - RNA, 19 nt, Artificial Sequence
  Description of Artificial Sequence: Synthetic oligonucleotide
  Antisense strand to SEQ ID NO: 1661095
uccauuggaaacugauugg

SEQ ID NO: 1661097 - RNA, 19 nt, Artificial Sequence
  Description of Artificial Sequence: Synthetic oligonucleotide
  Sense strand starting at position 1984 of SEQ ID NO: 1561298
aucaguuuccaauggaauu

SEQ ID NO: 1661098 - RNA, 19 nt, Artificial Sequence
  Description of Artificial Sequence: Synthetic oligonucleotide
  Antisense strand to SEQ ID NO: 1661097
aauuccauuggaaacugau

SEQ ID NO: 1661099 - RNA, 19 nt, Artificial Sequence
  Description of Artificial Sequence: Synthetic oligonucleotide
  Sense strand starting at position 2069 of SEQ ID NO: 1561298
auccaaaugucagaggaug

SEQ ID NO: 1661100 - RNA, 19 nt, Artificial Sequence
  Description of Artificial Sequence: Synthetic oligonucleotide
  Antisense strand to SEQ ID NO: 1661099
cauccucugacauuuggau

SEQ ID NO: 1661101 - RNA, 19 nt, Artificial Sequence
  Description of Artificial Sequence: Synthetic oligonucleotide
  Sense strand starting at position 2554 of SEQ ID NO: 1561298
uagucuggguguugaauuu

SEQ ID NO: 1661102 - RNA, 19 nt, Artificial Sequence
  Description of Artificial Sequence: Synthetic oligonucleotide
  Antisense strand to SEQ ID NO: 1661101
aaauucaacacccagacua

SEQ ID NO: 1661103 - RNA, 19 nt, Artificial Sequence
  Description of Artificial Sequence: Synthetic oligonucleotide
  Sense strand starting at position 2629 of SEQ ID NO: 1561298
ccaacugaauuccaagaga

SEQ ID NO: 1661104 - RNA, 19 nt, Artificial Sequence
  Description of Artificial Sequence: Synthetic oligonucleotide
  Antisense strand to SEQ ID NO: 1661103
ucucuuggaauucaguugg

SEQ ID NO: 1661105 - RNA, 19 nt, Artificial Sequence
  Description of Artificial Sequence: Synthetic oligonucleotide
  Sense strand starting at position 2703 of SEQ ID NO: 1561298
gagguauccaaagaucgua

SEQ ID NO: 1661106 - RNA, 19 nt, Artificial Sequence
  Description of Artificial Sequence: Synthetic oligonucleotide
  Antisense strand to SEQ ID NO: 1661105
uacgaucuuuggauaccuc

SEQ ID NO: 1661107 - RNA, 19 nt, Artificial Sequence
  Description of Artificial Sequence: Synthetic oligonucleotide
  Sense strand starting at position 2706 of SEQ ID NO: 1561298
guauccaaagaucguauua

SEQ ID NO: 1661108 - RNA, 19 nt, Artificial Sequence
  Description of Artificial Sequence: Synthetic oligonucleotide
  Antisense strand to SEQ ID NO: 1661107
uaauacgaucuuuggauac

SEQ ID NO: 1661109 - RNA, 19 nt, Artificial Sequence
  Description of Artificial Sequence: Synthetic oligonucleotide
  Sense strand starting at position 2711 of SEQ ID NO: 1561298
caaagaucguauuagcaaa

SEQ ID NO: 1661110 - RNA, 19 nt, Artificial Sequence
  Description of Artificial Sequence: Synthetic oligonucleotide
  Antisense strand to SEQ ID NO: 1661109
uuugcuaauacgaucuuug

SEQ ID NO: 1661111 - RNA, 19 nt, Artificial Sequence
  Description of Artificial Sequence: Synthetic oligonucleotide
  Sense strand starting at position 3080 of SEQ ID NO: 1561298
cgccgugucggacuacuau

SEQ ID NO: 1661112 - RNA, 19 nt, Artificial Sequence
  Description of Artificial Sequence: Synthetic oligonucleotide
  Antisense strand to SEQ ID NO: 1661111
auaguaguccgacacggcg

SEQ ID NO: 1661113 - RNA, 19 nt, Artificial Sequence
  Description of Artificial Sequence: Synthetic oligonucleotide
  Sense strand starting at position 3089 of SEQ ID NO: 1561298
ggacuacuauagucccaga

SEQ ID NO: 1661114 - RNA, 19 nt, Artificial Sequence
  Description of Artificial Sequence: Synthetic oligonucleotide
  Antisense strand to SEQ ID NO: 1661113
ucugggacuauaguagucc

SEQ ID NO: 1661115 - RNA, 19 nt, Artificial Sequence
  Description of Artificial Sequence: Synthetic oligonucleotide
  Sense strand starting at position 3092 of SEQ ID NO: 1561298
cuacuauagucccagauac

SEQ ID NO: 1661116 - RNA, 19 nt, Artificial Sequence
  Description of Artificial Sequence: Synthetic oligonucleotide
  Antisense strand to SEQ ID NO: 1661115
guaucugggacuauaguag

SEQ ID NO: 1661117 - RNA, 19 nt, Artificial Sequence
  Description of Artificial Sequence: Synthetic oligonucleotide
  Sense strand starting at position 3554 of SEQ ID NO: 1561298
ggaugauucucuuacauga

SEQ ID NO: 1661118 - RNA, 19 nt, Artificial Sequence
  Description of Artificial Sequence: Synthetic oligonucleotide
  Antisense strand to SEQ ID NO: 1661117
ucauguaagagaaucaucc

SEQ ID NO: 1661119 - RNA, 19 nt, Artificial Sequence
  Description of Artificial Sequence: Synthetic oligonucleotide
  Sense strand starting at position 3580 of SEQ ID NO: 1561298
gcagcuggugacugaauuu

SEQ ID NO: 1661120 - RNA, 19 nt, Artificial Sequence
  Description of Artificial Sequence: Synthetic oligonucleotide
  Antisense strand to SEQ ID NO: 1661119
aaauucagucaccagcugc

SEQ ID NO: 1661121 - RNA, 19 nt, Artificial Sequence
  Description of Artificial Sequence: Synthetic oligonucleotide
  Sense strand starting at position 3643 of SEQ ID NO: 1561298
gaauuaugcuggccaaaug

SEQ ID NO: 1661122 - RNA, 19 nt, Artificial Sequence
  Description of Artificial Sequence: Synthetic oligonucleotide
  Antisense strand to SEQ ID NO: 1661121
cauuuggccagcauaauuc

SEQ ID NO: 1661123 - RNA, 19 nt, Artificial Sequence
  Description of Artificial Sequence: Synthetic oligonucleotide
  Sense strand starting at position 3977 of SEQ ID NO: 1561298
aucugugcucuauaaauga

SEQ ID NO: 1661124 - RNA, 19 nt, Artificial Sequence
  Description of Artificial Sequence: Synthetic oligonucleotide
  Antisense strand to SEQ ID NO: 1661123
ucauuuauagagcacagau

SEQ ID NO: 1661125 - RNA, 19 nt, Artificial Sequence
  Description of Artificial Sequence: Synthetic oligonucleotide
  Sense strand starting at position 3 of SEQ ID NO: 1561299
acgugucuccaagaaauga

SEQ ID NO: 1661126 - RNA, 19 nt, Artificial Sequence
  Description of Artificial Sequence: Synthetic oligonucleotide
  Antisense strand to SEQ ID NO: 1661125
ucauuucuuggagacacgu

SEQ ID NO: 1661127 - RNA, 19 nt, Artificial Sequence
  Description of Artificial Sequence: Synthetic oligonucleotide
  Sense strand starting at position 152 of SEQ ID NO: 1561299
ggucauccuacgggagaaa

SEQ ID NO: 1661128 - RNA, 19 nt, Artificial Sequence
  Description of Artificial Sequence: Synthetic oligonucleotide
  Antisense strand to SEQ ID NO: 1661127
uuucucccguaggaugacc

SEQ ID NO: 1661129 - RNA, 19 nt, Artificial Sequence
  Description of Artificial Sequence: Synthetic oligonucleotide
  Sense strand starting at position 196 of SEQ ID NO: 1561299
ggcacuuuagcugacagaa

SEQ ID NO: 1661130 - RNA, 19 nt, Artificial Sequence
  Description of Artificial Sequence: Synthetic oligonucleotide
  Antisense strand to SEQ ID NO: 1661129
uucugucagcuaaagugcc

SEQ ID NO: 1661131 - RNA, 19 nt, Artificial Sequence
  Description of Artificial Sequence: Synthetic oligonucleotide
  Sense strand starting at position 229 of SEQ ID NO: 1561299
ucgguuuauccacagauag

SEQ ID NO: 1661132 - RNA, 19 nt, Artificial Sequence
  Description of Artificial Sequence: Synthetic oligonucleotide
  Antisense strand to SEQ ID NO: 1661131
cuaucuguggauaaaccga

SEQ ID NO: 1661133 - RNA, 19 nt, Artificial Sequence
  Description of Artificial Sequence: Synthetic oligonucleotide
  Sense strand starting at position 347 of SEQ ID NO: 1561299
aaaucucugugccuagaga

SEQ ID NO: 1661134 - RNA, 19 nt, Artificial Sequence
  Description of Artificial Sequence: Synthetic oligonucleotide
  Antisense strand to SEQ ID NO: 1661133
ucucuaggcacagagauuu

SEQ ID NO: 1661135 - RNA, 19 nt, Artificial Sequence
  Description of Artificial Sequence: Synthetic oligonucleotide
  Sense strand starting at position 348 of SEQ ID NO: 1561299
aaucucugugccuagagaa

SEQ ID NO: 1661136 - RNA, 19 nt, Artificial Sequence
  Description of Artificial Sequence: Synthetic oligonucleotide
  Antisense strand to SEQ ID NO: 1661135
uucucuaggcacagagauu

SEQ ID NO: 1661137 - RNA, 19 nt, Artificial Sequence
  Description of Artificial Sequence: Synthetic oligonucleotide
  Sense strand starting at position 395 of SEQ ID NO: 1561299
ucuacaauacagugucaga

SEQ ID NO: 1661138 - RNA, 19 nt, Artificial Sequence
  Description of Artificial Sequence: Synthetic oligonucleotide
  Antisense strand to SEQ ID NO: 1661137
ucugacacuguauuguaga

SEQ ID NO: 1661139 - RNA, 19 nt, Artificial Sequence
  Description of Artificial Sequence: Synthetic oligonucleotide
  Sense strand starting at position 402 of SEQ ID NO: 1561299
uacagugucagaggauuag

SEQ ID NO: 1661140 - RNA, 19 nt, Artificial Sequence
  Description of Artificial Sequence: Synthetic oligonucleotide
  Antisense strand to SEQ ID NO: 1661139
cuaauccucugacacugua

SEQ ID NO: 1661141 - RNA, 19 nt, Artificial Sequence
  Description of Artificial Sequence: Synthetic oligonucleotide
  Sense strand starting at position 406 of SEQ ID NO: 1561299
gugucagaggauuagucuu

SEQ ID NO: 1661142 - RNA, 19 nt, Artificial Sequence
  Description of Artificial Sequence: Synthetic oligonucleotide
  Antisense strand to SEQ ID NO: 1661141
aagacuaauccucugacac

SEQ ID NO: 1661143 - RNA, 19 nt, Artificial Sequence
  Description of Artificial Sequence: Synthetic oligonucleotide
  Sense strand starting at position 479 of SEQ ID NO: 1561299
gccauuuaaugcuuuguca

SEQ ID NO: 1661144 - RNA, 19 nt, Artificial Sequence
  Description of Artificial Sequence: Synthetic oligonucleotide
  Antisense strand to SEQ ID NO: 1661143
ugacaaagcauuaaauggc

SEQ ID NO: 1661145 - RNA, 19 nt, Artificial Sequence
  Description of Artificial Sequence: Synthetic oligonucleotide
  Sense strand starting at position 629 of SEQ ID NO: 1561299
cagagugaggcuggagaaa

SEQ ID NO: 1661146 - RNA, 19 nt, Artificial Sequence
  Description of Artificial Sequence: Synthetic oligonucleotide
  Antisense strand to SEQ ID NO: 1661145
uuucuccagccucacucug

SEQ ID NO: 1661147 - RNA, 19 nt, Artificial Sequence
  Description of Artificial Sequence: Synthetic oligonucleotide
  Sense strand starting at position 747 of SEQ ID NO: 1561299
ggcaauuccacugaggugu

SEQ ID NO: 1661148 - RNA, 19 nt, Artificial Sequence
  Description of Artificial Sequence: Synthetic oligonucleotide
  Antisense strand to SEQ ID NO: 1661147
acaccucaguggaauugcc

SEQ ID NO: 1661149 - RNA, 19 nt, Artificial Sequence
  Description of Artificial Sequence: Synthetic oligonucleotide
  Sense strand starting at position 910 of SEQ ID NO: 1561299
accuguauuguacaaauca

SEQ ID NO: 1661150 - RNA, 19 nt, Artificial Sequence
  Description of Artificial Sequence: Synthetic oligonucleotide
  Antisense strand to SEQ ID NO: 1661149
ugauuuguacaauacaggu

SEQ ID NO: 1661151 - RNA, 19 nt, Artificial Sequence
  Description of Artificial Sequence: Synthetic oligonucleotide
  Sense strand starting at position 928 of SEQ ID NO: 1561299
aagaaacuacguuacugua

SEQ ID NO: 1661152 - RNA, 19 nt, Artificial Sequence
  Description of Artificial Sequence: Synthetic oligonucleotide
  Antisense strand to SEQ ID NO: 1661151
uacaguaacguaguuucuu

SEQ ID NO: 1661153 - RNA, 19 nt, Artificial Sequence
  Description of Artificial Sequence: Synthetic oligonucleotide
  Sense strand starting at position 1038 of SEQ ID NO: 1561299
cuggauacucuaugauucu

SEQ ID NO: 1661154 - RNA, 19 nt, Artificial Sequence
  Description of Artificial Sequence: Synthetic oligonucleotide
  Antisense strand to SEQ ID NO: 1661153
agaaucauagaguauccag

SEQ ID NO: 1661155 - RNA, 19 nt, Artificial Sequence
  Description of Artificial Sequence: Synthetic oligonucleotide
  Sense strand starting at position 1056 of SEQ ID NO: 1561299
uugaaucacuguuugauua

SEQ ID NO: 1661156 - RNA, 19 nt, Artificial Sequence
  Description of Artificial Sequence: Synthetic oligonucleotide
  Antisense strand to SEQ ID NO: 1661155
uaaucaaacagugauucaa

SEQ ID NO: 1661157 - RNA, 19 nt, Artificial Sequence
  Description of Artificial Sequence: Synthetic oligonucleotide
  Sense strand starting at position 1057 of SEQ ID NO: 1561299
ugaaucacuguuugauuaa

SEQ ID NO: 1661158 - RNA, 19 nt, Artificial Sequence
  Description of Artificial Sequence: Synthetic oligonucleotide
  Antisense strand to SEQ ID NO: 1661157
uuaaucaaacagugauuca

SEQ ID NO: 1661159 - RNA, 19 nt, Artificial Sequence
  Description of Artificial Sequence: Synthetic oligonucleotide
  Sense strand starting at position 1381 of SEQ ID NO: 1561299
guuaauauuugugcaguga

SEQ ID NO: 1661160 - RNA, 19 nt, Artificial Sequence
  Description of Artificial Sequence: Synthetic oligonucleotide
  Antisense strand to SEQ ID NO: 1661159
ucacugcacaaauauuaac

SEQ ID NO: 1661161 - RNA, 19 nt, Artificial Sequence
  Description of Artificial Sequence: Synthetic oligonucleotide
  Sense strand starting at position 2027 of SEQ ID NO: 1561299
guuggauaaugcuuaaauc

SEQ ID NO: 1661162 - RNA, 19 nt, Artificial Sequence
  Description of Artificial Sequence: Synthetic oligonucleotide
  Antisense strand to SEQ ID NO: 1661161
gauuuaagcauuauccaac

SEQ ID NO: 1661163 - RNA, 19 nt, Artificial Sequence
  Description of Artificial Sequence: Synthetic oligonucleotide
  Sense strand starting at position 2055 of SEQ ID NO: 1561299
ucaggcuuugagugacaga

SEQ ID NO: 1661164 - RNA, 19 nt, Artificial Sequence
  Description of Artificial Sequence: Synthetic oligonucleotide
  Antisense strand to SEQ ID NO: 1661163
ucugucacucaaagccuga

SEQ ID NO: 1661165 - RNA, 19 nt, Artificial Sequence
  Description of Artificial Sequence: Synthetic oligonucleotide
  Sense strand starting at position 2184 of SEQ ID NO: 1561299
gccuuuaaauuuguguaua

SEQ ID NO: 1661166 - RNA, 19 nt, Artificial Sequence
  Description of Artificial Sequence: Synthetic oligonucleotide
  Antisense strand to SEQ ID NO: 1661165
uauacacaaauuuaaaggc

SEQ ID NO: 1661167 - RNA, 19 nt, Artificial Sequence
  Description of Artificial Sequence: Synthetic oligonucleotide
  Sense strand starting at position 2417 of SEQ ID NO: 1561299
aguugaacugauuguuaac

SEQ ID NO: 1661168 - RNA, 19 nt, Artificial Sequence
  Description of Artificial Sequence: Synthetic oligonucleotide
  Antisense strand to SEQ ID NO: 1661167
guuaacaaucaguucaacu

SEQ ID NO: 1661169 - RNA, 19 nt, Artificial Sequence
  Description of Artificial Sequence: Synthetic oligonucleotide
  Sense strand starting at position 2419 of SEQ ID NO: 1561299
uugaacugauuguuaacaa

SEQ ID NO: 1661170 - RNA, 19 nt, Artificial Sequence
  Description of Artificial Sequence: Synthetic oligonucleotide
  Antisense strand to SEQ ID NO: 1661169
uuguuaacaaucaguucaa

SEQ ID NO: 1661171 - RNA, 19 nt, Artificial Sequence
  Description of Artificial Sequence: Synthetic oligonucleotide
  Sense strand starting at position 2478 of SEQ ID NO: 1561299
gugugagaaauauguaauu

SEQ ID NO: 1661172 - RNA, 19 nt, Artificial Sequence
  Description of Artificial Sequence: Synthetic oligonucleotide
  Antisense strand to SEQ ID NO: 1661171
aauuacauauuucucacac

SEQ ID NO: 1661173 - RNA, 19 nt, Artificial Sequence
  Description of Artificial Sequence: Synthetic oligonucleotide
  Sense strand starting at position 2740 of SEQ ID NO: 1561299
accagauaguucccauaga

SEQ ID NO: 1661174 - RNA, 19 nt, Artificial Sequence
  Description of Artificial Sequence: Synthetic oligonucleotide
  Antisense strand to SEQ ID NO: 1661173
ucuaugggaacuaucuggu

SEQ ID NO: 1661175 - RNA, 19 nt, Artificial Sequence
  Description of Artificial Sequence: Synthetic oligonucleotide
  Sense strand starting at position 2971 of SEQ ID NO: 1561299
uggucuuggcccuaacaau

SEQ ID NO: 1661176 - RNA, 19 nt, Artificial Sequence
  Description of Artificial Sequence: Synthetic oligonucleotide
  Antisense strand to SEQ ID NO: 1661175
auuguuagggccaagacca

SEQ ID NO: 1661177 - RNA, 19 nt, Artificial Sequence
  Description of Artificial Sequence: Synthetic oligonucleotide
  Sense strand starting at position 3025 of SEQ ID NO: 1561299
gggacuaugugagucuaag

SEQ ID NO: 1661178 - RNA, 19 nt, Artificial Sequence
  Description of Artificial Sequence: Synthetic oligonucleotide
  Antisense strand to SEQ ID NO: 1661177
cuuagacucacauaguccc

SEQ ID NO: 1661179 - RNA, 19 nt, Artificial Sequence
  Description of Artificial Sequence: Synthetic oligonucleotide
  Sense strand starting at position 3220 of SEQ ID NO: 1561299
guauuaguuagcuauugag

SEQ ID NO: 1661180 - RNA, 19 nt, Artificial Sequence
  Description of Artificial Sequence: Synthetic oligonucleotide
  Antisense strand to SEQ ID NO: 1661179
cucaauagcuaacuaauac

SEQ ID NO: 1661181 - RNA, 19 nt, Artificial Sequence
  Description of Artificial Sequence: Synthetic oligonucleotide
  Sense strand starting at position 3230 of SEQ ID NO: 1561299
gcuauugaggcauaacaaa

SEQ ID NO: 1661182 - RNA, 19 nt, Artificial Sequence
  Description of Artificial Sequence: Synthetic oligonucleotide
  Antisense strand to SEQ ID NO: 1661181
uuuguuaugccucaauagc

SEQ ID NO: 1661183 - RNA, 19 nt, Artificial Sequence
  Description of Artificial Sequence: Synthetic oligonucleotide
  Sense strand starting at position 3272 of SEQ ID NO: 1561299
aauugaaaugguuggccau

SEQ ID NO: 1661184 - RNA, 19 nt, Artificial Sequence
  Description of Artificial Sequence: Synthetic oligonucleotide
  Antisense strand to SEQ ID NO: 1661183
auggccaaccauuucaauu

SEQ ID NO: 1661185 - RNA, 19 nt, Artificial Sequence
  Description of Artificial Sequence: Synthetic oligonucleotide
  Sense strand starting at position 3463 of SEQ ID NO: 1561299
ggcuaacaugggcauuauu

SEQ ID NO: 1661186 - RNA, 19 nt, Artificial Sequence
  Description of Artificial Sequence: Synthetic oligonucleotide
  Antisense strand to SEQ ID NO: 1661185
aauaaugcccauguuagcc

SEQ ID NO: 1661187 - RNA, 19 nt, Artificial Sequence
  Description of Artificial Sequence: Synthetic oligonucleotide
  Sense strand starting at position 3484 of SEQ ID NO: 1561299
uggagauggcagcauucua

SEQ ID NO: 1661188 - RNA, 19 nt, Artificial Sequence
  Description of Artificial Sequence: Synthetic oligonucleotide
  Antisense strand to SEQ ID NO: 1661187
uagaaugcugccaucucca

SEQ ID NO: 1661189 - RNA, 19 nt, Artificial Sequence
  Description of Artificial Sequence: Synthetic oligonucleotide
  Sense strand starting at position 3513 of SEQ ID NO: 1561299
agaagcagucaauaccauu

SEQ ID NO: 1661190 - RNA, 19 nt, Artificial Sequence
  Description of Artificial Sequence: Synthetic oligonucleotide
  Antisense strand to SEQ ID NO: 1661189
aaugguauugacugcuucu

SEQ ID NO: 1661191 - RNA, 19 nt, Artificial Sequence
  Description of Artificial Sequence: Synthetic oligonucleotide
  Sense strand starting at position 3574 of SEQ ID NO: 1561299
uucuguugaccugagcaaa

SEQ ID NO: 1661192 - RNA, 19 nt, Artificial Sequence
  Description of Artificial Sequence: Synthetic oligonucleotide
  Antisense strand to SEQ ID NO: 1661191
uuugcucaggucaacagaa

SEQ ID NO: 1661193 - RNA, 19 nt, Artificial Sequence
  Description of Artificial Sequence: Synthetic oligonucleotide
  Sense strand starting at position 3577 of SEQ ID NO: 1561299
uguugaccugagcaaauaa

SEQ ID NO: 1661194 - RNA, 19 nt, Artificial Sequence
  Description of Artificial Sequence: Synthetic oligonucleotide
  Antisense strand to SEQ ID NO: 1661193
uuauuugcucaggucaaca

SEQ ID NO: 1661195 - RNA, 19 nt, Artificial Sequence
  Description of Artificial Sequence: Synthetic oligonucleotide
  Sense strand starting at position 3589 of SEQ ID NO: 1561299
caaauaaggucagccagau

SEQ ID NO: 1661196 - RNA, 19 nt, Artificial Sequence
  Description of Artificial Sequence: Synthetic oligonucleotide
  Antisense strand to SEQ ID NO: 1661195
aucuggcugaccuuauuug

SEQ ID NO: 1661197 - RNA, 19 nt, Artificial Sequence
  Description of Artificial Sequence: Synthetic oligonucleotide
  Sense strand starting at position 3660 of SEQ ID NO: 1561299
ccugguuaugggcaaagau

SEQ ID NO: 1661198 - RNA, 19 nt, Artificial Sequence
  Description of Artificial Sequence: Synthetic oligonucleotide
  Antisense strand to SEQ ID NO: 1661197
aucuuugcccauaaccagg

SEQ ID NO: 1661199 - RNA, 19 nt, Artificial Sequence
  Description of Artificial Sequence: Synthetic oligonucleotide
  Sense strand starting at position 3814 of SEQ ID NO: 1561299
ggaucaacuuuaucugacu

SEQ ID NO: 1661200 - RNA, 19 nt, Artificial Sequence
  Description of Artificial Sequence: Synthetic oligonucleotide
  Antisense strand to SEQ ID NO: 1661199
agucagauaaaguugaucc

SEQ ID NO: 1661201 - RNA, 19 nt, Artificial Sequence
  Description of Artificial Sequence: Synthetic oligonucleotide
  Sense strand starting at position 3890 of SEQ ID NO: 1561299
uauugaaauccuggagagu

SEQ ID NO: 1661202 - RNA, 19 nt, Artificial Sequence
  Description of Artificial Sequence: Synthetic oligonucleotide
  Antisense strand to SEQ ID NO: 1661201
acucuccaggauuucaaua

SEQ ID NO: 1661203 - RNA, 19 nt, Artificial Sequence
  Description of Artificial Sequence: Synthetic oligonucleotide
  Sense strand starting at position 3907 of SEQ ID NO: 1561299
gugacacuuccauaguaga

SEQ ID NO: 1661204 - RNA, 19 nt, Artificial Sequence
  Description of Artificial Sequence: Synthetic oligonucleotide
  Antisense strand to SEQ ID NO: 1661203
ucuacuauggaagugucac

SEQ ID NO: 1661205 - RNA, 19 nt, Artificial Sequence
  Description of Artificial Sequence: Synthetic oligonucleotide
  Sense strand starting at position 130 of SEQ ID NO: 1561300
gacccaauacccugugaag

SEQ ID NO: 1661206 - RNA, 19 nt, Artificial Sequence
  Description of Artificial Sequence: Synthetic oligonucleotide
  Antisense strand to SEQ ID NO: 1661205
cuucacaggguauuggguc

SEQ ID NO: 1661207 - RNA, 19 nt, Artificial Sequence
  Description of Artificial Sequence: Synthetic oligonucleotide
  Sense strand starting at position 132 of SEQ ID NO: 1561300
cccaauacccugugaaguu

SEQ ID NO: 1661208 - RNA, 19 nt, Artificial Sequence
  Description of Artificial Sequence: Synthetic oligonucleotide
  Antisense strand to SEQ ID NO: 1661207
aacuucacaggguauuggg

SEQ ID NO: 1661209 - RNA, 19 nt, Artificial Sequence
  Description of Artificial Sequence: Synthetic oligonucleotide
  Sense strand starting at position 141 of SEQ ID NO: 1561300
cugugaaguucccaagaga

SEQ ID NO: 1661210 - RNA, 19 nt, Artificial Sequence
  Description of Artificial Sequence: Synthetic oligonucleotide
  Antisense strand to SEQ ID NO: 1661209
ucucuugggaacuucacag

SEQ ID NO: 1661211 - RNA, 19 nt, Artificial Sequence
  Description of Artificial Sequence: Synthetic oligonucleotide
  Sense strand starting at position 168 of SEQ ID NO: 1561300
cccaaagacugucugauaa

SEQ ID NO: 1661212 - RNA, 19 nt, Artificial Sequence
  Description of Artificial Sequence: Synthetic oligonucleotide
  Antisense strand to SEQ ID NO: 1661211
uuaucagacagucuuuggg

SEQ ID NO: 1661213 - RNA, 19 nt, Artificial Sequence
  Description of Artificial Sequence: Synthetic oligonucleotide
  Sense strand starting at position 270 of SEQ ID NO: 1561300
cugcuuugcucgcauguga

SEQ ID NO: 1661214 - RNA, 19 nt, Artificial Sequence
  Description of Artificial Sequence: Synthetic oligonucleotide
  Antisense strand to SEQ ID NO: 1661213
ucacaugcgagcaaagcag

SEQ ID NO: 1661215 - RNA, 19 nt, Artificial Sequence
  Description of Artificial Sequence: Synthetic oligonucleotide
  Sense strand starting at position 274 of SEQ ID NO: 1561300
uuugcucgcaugugaaaug

SEQ ID NO: 1661216 - RNA, 19 nt, Artificial Sequence
  Description of Artificial Sequence: Synthetic oligonucleotide
  Antisense strand to SEQ ID NO: 1661215
cauuucacaugcgagcaaa

SEQ ID NO: 1661217 - RNA, 19 nt, Artificial Sequence
  Description of Artificial Sequence: Synthetic oligonucleotide
  Sense strand starting at position 806 of SEQ ID NO: 1561300
uuggaagacuccgaaggaa

SEQ ID NO: 1661218 - RNA, 19 nt, Artificial Sequence
  Description of Artificial Sequence: Synthetic oligonucleotide
  Antisense strand to SEQ ID NO: 1661217
uuccuucggagucuuccaa

SEQ ID NO: 1661219 - RNA, 19 nt, Artificial Sequence
  Description of Artificial Sequence: Synthetic oligonucleotide
  Sense strand starting at position 1473 of SEQ ID NO: 1561300
caaauaauccgcucgcugu

SEQ ID NO: 1661220 - RNA, 19 nt, Artificial Sequence
  Description of Artificial Sequence: Synthetic oligonucleotide
  Antisense strand to SEQ ID NO: 1661219
acagcgagcggauuauuug

SEQ ID NO: 1661221 - RNA, 19 nt, Artificial Sequence
  Description of Artificial Sequence: Synthetic oligonucleotide
  Sense strand starting at position 1497 of SEQ ID NO: 1561300
gugugacugacaggugcua

SEQ ID NO: 1661222 - RNA, 19 nt, Artificial Sequence
  Description of Artificial Sequence: Synthetic oligonucleotide
  Antisense strand to SEQ ID NO: 1661221
uagcaccugucagucacac

SEQ ID NO: 1661223 - RNA, 19 nt, Artificial Sequence
  Description of Artificial Sequence: Synthetic oligonucleotide
  Sense strand starting at position 1632 of SEQ ID NO: 1561300
guccuuugugaccgccaca

SEQ ID NO: 1661224 - RNA, 19 nt, Artificial Sequence
  Description of Artificial Sequence: Synthetic oligonucleotide
  Antisense strand to SEQ ID NO: 1661223
uguggcggucacaaaggac

SEQ ID NO: 1661225 - RNA, 19 nt, Artificial Sequence
  Description of Artificial Sequence: Synthetic oligonucleotide
  Sense strand starting at position 2445 of SEQ ID NO: 1561300
gagagacucccaggucaca

SEQ ID NO: 1661226 - RNA, 19 nt, Artificial Sequence
  Description of Artificial Sequence: Synthetic oligonucleotide
  Antisense strand to SEQ ID NO: 1661225
ugugaccugggagucucuc

SEQ ID NO: 1661227 - RNA, 19 nt, Artificial Sequence
  Description of Artificial Sequence: Synthetic oligonucleotide
  Sense strand starting at position 2482 of SEQ ID NO: 1561300
ccugauguccuccagagau

SEQ ID NO: 1661228 - RNA, 19 nt, Artificial Sequence
  Description of Artificial Sequence: Synthetic oligonucleotide
  Antisense strand to SEQ ID NO: 1661227
aucucuggaggacaucagg

SEQ ID NO: 1661229 - RNA, 19 nt, Artificial Sequence
  Description of Artificial Sequence: Synthetic oligonucleotide
  Sense strand starting at position 2500 of SEQ ID NO: 1561300
ucaggaauuuaugaggcua

SEQ ID NO: 1661230 - RNA, 19 nt, Artificial Sequence
  Description of Artificial Sequence: Synthetic oligonucleotide
  Antisense strand to SEQ ID NO: 1661229
uagccucauaaauuccuga

SEQ ID NO: 1661231 - RNA, 19 nt, Artificial Sequence
  Description of Artificial Sequence: Synthetic oligonucleotide
  Sense strand starting at position 2502 of SEQ ID NO: 1561300
aggaauuuaugaggcuauu

SEQ ID NO: 1661232 - RNA, 19 nt, Artificial Sequence
  Description of Artificial Sequence: Synthetic oligonucleotide
  Antisense strand to SEQ ID NO: 1661231
aauagccucauaaauuccu

SEQ ID NO: 1661233 - RNA, 19 nt, Artificial Sequence
  Description of Artificial Sequence: Synthetic oligonucleotide
  Sense strand starting at position 2532 of SEQ ID NO: 1561300
caaggcuuccuacacguua

SEQ ID NO: 1661234 - RNA, 19 nt, Artificial Sequence
  Description of Artificial Sequence: Synthetic oligonucleotide
  Antisense strand to SEQ ID NO: 1661233
uaacguguaggaagccuug

SEQ ID NO: 1661235 - RNA, 19 nt, Artificial Sequence
  Description of Artificial Sequence: Synthetic oligonucleotide
  Sense strand starting at position 2547 of SEQ ID NO: 1561300
guuacuucuucucaggcua

SEQ ID NO: 1661236 - RNA, 19 nt, Artificial Sequence
  Description of Artificial Sequence: Synthetic oligonucleotide
  Antisense strand to SEQ ID NO: 1661235
uagccugagaagaaguaac

SEQ ID NO: 1661237 - RNA, 19 nt, Artificial Sequence
  Description of Artificial Sequence: Synthetic oligonucleotide
  Sense strand starting at position 2775 of SEQ ID NO: 1561300
guccgaguagcuggaacua

SEQ ID NO: 1661238 - RNA, 19 nt, Artificial Sequence
  Description of Artificial Sequence: Synthetic oligonucleotide
  Antisense strand to SEQ ID NO: 1661237
uaguuccagcuacucggac

SEQ ID NO: 1661239 - RNA, 19 nt, Artificial Sequence
  Description of Artificial Sequence: Synthetic oligonucleotide
  Sense strand starting at position 2990 of SEQ ID NO: 1561300
agguauugcuaccagaaag

SEQ ID NO: 1661240 - RNA, 19 nt, Artificial Sequence
  Description of Artificial Sequence: Synthetic oligonucleotide
  Antisense strand to SEQ ID NO: 1661239
cuuucugguagcaauaccu

SEQ ID NO: 1661241 - RNA, 19 nt, Artificial Sequence
  Description of Artificial Sequence: Synthetic oligonucleotide
  Sense strand starting at position 3040 of SEQ ID NO: 1561300
uuggaccuuguaugggaaa

SEQ ID NO: 1661242 - RNA, 19 nt, Artificial Sequence
  Description of Artificial Sequence: Synthetic oligonucleotide
  Antisense strand to SEQ ID NO: 1661241
uuucccauacaagguccaa

SEQ ID NO: 1661243 - RNA, 19 nt, Artificial Sequence
  Description of Artificial Sequence: Synthetic oligonucleotide
  Sense strand starting at position 3043 of SEQ ID NO: 1561300
gaccuuguaugggaaagaa

SEQ ID NO: 1661244 - RNA, 19 nt, Artificial Sequence
  Description of Artificial Sequence: Synthetic oligonucleotide
  Antisense strand to SEQ ID NO: 1661243
uucuuucccauacaagguc

SEQ ID NO: 1661245 - RNA, 19 nt, Artificial Sequence
  Description of Artificial Sequence: Synthetic oligonucleotide
  Sense strand starting at position 3098 of SEQ ID NO: 1561300
cgaacuguaucaugggaca

SEQ ID NO: 1661246 - RNA, 19 nt, Artificial Sequence
  Description of Artificial Sequence: Synthetic oligonucleotide
  Antisense strand to SEQ ID NO: 1661245
ugucccaugauacaguucg

SEQ ID NO: 1661247 - RNA, 19 nt, Artificial Sequence
  Description of Artificial Sequence: Synthetic oligonucleotide
  Sense strand starting at position 3101 of SEQ ID NO: 1561300
acuguaucaugggacagaa

SEQ ID NO: 1661248 - RNA, 19 nt, Artificial Sequence
  Description of Artificial Sequence: Synthetic oligonucleotide
  Antisense strand to SEQ ID NO: 1661247
uucugucccaugauacagu

SEQ ID NO: 1661249 - RNA, 19 nt, Artificial Sequence
  Description of Artificial Sequence: Synthetic oligonucleotide
  Sense strand starting at position 3151 of SEQ ID NO: 1561300
cuuauuugauacuauguga

SEQ ID NO: 1661250 - RNA, 19 nt, Artificial Sequence
  Description of Artificial Sequence: Synthetic oligonucleotide
  Antisense strand to SEQ ID NO: 1661249
ucacauaguaucaaauaag

SEQ ID NO: 1661251 - RNA, 19 nt, Artificial Sequence
  Description of Artificial Sequence: Synthetic oligonucleotide
  Sense strand starting at position 466 of SEQ ID NO: 1561301
cguaguaagccaugacugu

SEQ ID NO: 1661252 - RNA, 19 nt, Artificial Sequence
  Description of Artificial Sequence: Synthetic oligonucleotide
  Antisense strand to SEQ ID NO: 1661251
acagucauggcuuacuacg

SEQ ID NO: 1661253 - RNA, 19 nt, Artificial Sequence
  Description of Artificial Sequence: Synthetic oligonucleotide
  Sense strand starting at position 517 of SEQ ID NO: 1561301
gggagaaguuucuuucuac

SEQ ID NO: 1661254 - RNA, 19 nt, Artificial Sequence
  Description of Artificial Sequence: Synthetic oligonucleotide
  Antisense strand to SEQ ID NO: 1661253
guagaaagaaacuucuccc

SEQ ID NO: 1661255 - RNA, 19 nt, Artificial Sequence
  Description of Artificial Sequence: Synthetic oligonucleotide
  Sense strand starting at position 518 of SEQ ID NO: 1561301
ggagaaguuucuuucuacu

SEQ ID NO: 1661256 - RNA, 19 nt, Artificial Sequence
  Description of Artificial Sequence: Synthetic oligonucleotide
  Antisense strand to SEQ ID NO: 1661255
aguagaaagaaacuucucc

SEQ ID NO: 1661257 - RNA, 19 nt, Artificial Sequence
  Description of Artificial Sequence: Synthetic oligonucleotide
  Sense strand starting at position 520 of SEQ ID NO: 1561301
agaaguuucuuucuacugu

SEQ ID NO: 1661258 - RNA, 19 nt, Artificial Sequence
  Description of Artificial Sequence: Synthetic oligonucleotide
  Antisense strand to SEQ ID NO: 1661257
acaguagaaagaaacuucu

SEQ ID NO: 1661259 - RNA, 19 nt, Artificial Sequence
  Description of Artificial Sequence: Synthetic oligonucleotide
  Sense strand starting at position 571 of SEQ ID NO: 1561301
gggaaucccucuggaauuu

SEQ ID NO: 1661260 - RNA, 19 nt, Artificial Sequence
  Description of Artificial Sequence: Synthetic oligonucleotide
  Antisense strand to SEQ ID NO: 1661259
aaauuccagagggauuccc

SEQ ID NO: 1661261 - RNA, 19 nt, Artificial Sequence
  Description of Artificial Sequence: Synthetic oligonucleotide
  Sense strand starting at position 580 of SEQ ID NO: 1561301
ucuggaauuuccuaaggaa

SEQ ID NO: 1661262 - RNA, 19 nt, Artificial Sequence
  Description of Artificial Sequence: Synthetic oligonucleotide
  Antisense strand to SEQ ID NO: 1661261
uuccuuaggaaauuccaga

SEQ ID NO: 1661263 - RNA, 19 nt, Artificial Sequence
  Description of Artificial Sequence: Synthetic oligonucleotide
  Sense strand starting at position 583 of SEQ ID NO: 1561301
ggaauuuccuaaggaaacu

SEQ ID NO: 1661264 - RNA, 19 nt, Artificial Sequence
  Description of Artificial Sequence: Synthetic oligonucleotide
  Antisense strand to SEQ ID NO: 1661263
aguuuccuuaggaaauucc

SEQ ID NO: 1661265 - RNA, 19 nt, Artificial Sequence
  Description of Artificial Sequence: Synthetic oligonucleotide
  Sense strand starting at position 765 of SEQ ID NO: 1561301
gacccaauacccugugaag

SEQ ID NO: 1661266 - RNA, 19 nt, Artificial Sequence
  Description of Artificial Sequence: Synthetic oligonucleotide
  Antisense strand to SEQ ID NO: 1661265
cuucacaggguauuggguc

SEQ ID NO: 1661267 - RNA, 19 nt, Artificial Sequence
  Description of Artificial Sequence: Synthetic oligonucleotide
  Sense strand starting at position 767 of SEQ ID NO: 1561301
cccaauacccugugaaguu

SEQ ID NO: 1661268 - RNA, 19 nt, Artificial Sequence
  Description of Artificial Sequence: Synthetic oligonucleotide
  Antisense strand to SEQ ID NO: 1661267
aacuucacaggguauuggg

SEQ ID NO: 1661269 - RNA, 19 nt, Artificial Sequence
  Description of Artificial Sequence: Synthetic oligonucleotide
  Sense strand starting at position 776 of SEQ ID NO: 1561301
cugugaaguucccaagaga

SEQ ID NO: 1661270 - RNA, 19 nt, Artificial Sequence
  Description of Artificial Sequence: Synthetic oligonucleotide
  Antisense strand to SEQ ID NO: 1661269
ucucuugggaacuucacag

SEQ ID NO: 1661271 - RNA, 19 nt, Artificial Sequence
  Description of Artificial Sequence: Synthetic oligonucleotide
  Sense strand starting at position 803 of SEQ ID NO: 1561301
cccaaagacugucugauaa

SEQ ID NO: 1661272 - RNA, 19 nt, Artificial Sequence
  Description of Artificial Sequence: Synthetic oligonucleotide
  Antisense strand to SEQ ID NO: 1661271
uuaucagacagucuuuggg

SEQ ID NO: 1661273 - RNA, 19 nt, Artificial Sequence
  Description of Artificial Sequence: Synthetic oligonucleotide
  Sense strand starting at position 905 of SEQ ID NO: 1561301
cugcuuugcucgcauguga

SEQ ID NO: 1661274 - RNA, 19 nt, Artificial Sequence
  Description of Artificial Sequence: Synthetic oligonucleotide
  Antisense strand to SEQ ID NO: 1661273
ucacaugcgagcaaagcag

SEQ ID NO: 1661275 - RNA, 19 nt, Artificial Sequence
  Description of Artificial Sequence: Synthetic oligonucleotide
  Sense strand starting at position 909 of SEQ ID NO: 1561301
uuugcucgcaugugaaaug

SEQ ID NO: 1661276 - RNA, 19 nt, Artificial Sequence
  Description of Artificial Sequence: Synthetic oligonucleotide
  Antisense strand to SEQ ID NO: 1661275
cauuucacaugcgagcaaa

SEQ ID NO: 1661277 - RNA, 19 nt, Artificial Sequence
  Description of Artificial Sequence: Synthetic oligonucleotide
  Sense strand starting at position 1441 of SEQ ID NO: 1561301
uuggaagacuccgaaggaa

SEQ ID NO: 1661278 - RNA, 19 nt, Artificial Sequence
  Description of Artificial Sequence: Synthetic oligonucleotide
  Antisense strand to SEQ ID NO: 1661277
uuccuucggagucuuccaa

SEQ ID NO: 1661279 - RNA, 19 nt, Artificial Sequence
  Description of Artificial Sequence: Synthetic oligonucleotide
  Sense strand starting at position 2108 of SEQ ID NO: 1561301
caaauaauccgcucgcugu

SEQ ID NO: 1661280 - RNA, 19 nt, Artificial Sequence
  Description of Artificial Sequence: Synthetic oligonucleotide
  Antisense strand to SEQ ID NO: 1661279
acagcgagcggauuauuug

SEQ ID NO: 1661281 - RNA, 19 nt, Artificial Sequence
  Description of Artificial Sequence: Synthetic oligonucleotide
  Sense strand starting at position 2132 of SEQ ID NO: 1561301
gugugacugacaggugcua

SEQ ID NO: 1661282 - RNA, 19 nt, Artificial Sequence
  Description of Artificial Sequence: Synthetic oligonucleotide
  Antisense strand to SEQ ID NO: 1661281
uagcaccugucagucacac

SEQ ID NO: 1661283 - RNA, 19 nt, Artificial Sequence
  Description of Artificial Sequence: Synthetic oligonucleotide
  Sense strand starting at position 2267 of SEQ ID NO: 1561301
guccuuugugaccgccaca

SEQ ID NO: 1661284 - RNA, 19 nt, Artificial Sequence
  Description of Artificial Sequence: Synthetic oligonucleotide
  Antisense strand to SEQ ID NO: 1661283
uguggcggucacaaaggac

SEQ ID NO: 1661285 - RNA, 19 nt, Artificial Sequence
  Description of Artificial Sequence: Synthetic oligonucleotide
  Sense strand starting at position 3080 of SEQ ID NO: 1561301
gagagacucccaggucaca

SEQ ID NO: 1661286 - RNA, 19 nt, Artificial Sequence
  Description of Artificial Sequence: Synthetic oligonucleotide
  Antisense strand to SEQ ID NO: 1661285
ugugaccugggagucucuc

SEQ ID NO: 1661287 - RNA, 19 nt, Artificial Sequence
  Description of Artificial Sequence: Synthetic oligonucleotide
  Sense strand starting at position 3117 of SEQ ID NO: 1561301
ccugauguccuccagagau

SEQ ID NO: 1661288 - RNA, 19 nt, Artificial Sequence
  Description of Artificial Sequence: Synthetic oligonucleotide
  Antisense strand to SEQ ID NO: 1661287
aucucuggaggacaucagg

SEQ ID NO: 1661289 - RNA, 19 nt, Artificial Sequence
  Description of Artificial Sequence: Synthetic oligonucleotide
  Sense strand starting at position 3135 of SEQ ID NO: 1561301
ucaggaauuuaugaggcua

SEQ ID NO: 1661290 - RNA, 19 nt, Artificial Sequence
  Description of Artificial Sequence: Synthetic oligonucleotide
  Antisense strand to SEQ ID NO: 1661289
uagccucauaaauuccuga

SEQ ID NO: 1661291 - RNA, 19 nt, Artificial Sequence
  Description of Artificial Sequence: Synthetic oligonucleotide
  Sense strand starting at position 3137 of SEQ ID NO: 1561301
aggaauuuaugaggcuauu

SEQ ID NO: 1661292 - RNA, 19 nt, Artificial Sequence
  Description of Artificial Sequence: Synthetic oligonucleotide
  Antisense strand to SEQ ID NO: 1661291
aauagccucauaaauuccu

SEQ ID NO: 1661293 - RNA, 19 nt, Artificial Sequence
  Description of Artificial Sequence: Synthetic oligonucleotide
  Sense strand starting at position 3167 of SEQ ID NO: 1561301
caaggcuuccuacacguua

SEQ ID NO: 1661294 - RNA, 19 nt, Artificial Sequence
  Description of Artificial Sequence: Synthetic oligonucleotide
  Antisense strand to SEQ ID NO: 1661293
uaacguguaggaagccuug

SEQ ID NO: 1661295 - RNA, 19 nt, Artificial Sequence
  Description of Artificial Sequence: Synthetic oligonucleotide
  Sense strand starting at position 3182 of SEQ ID NO: 1561301
guuacuucuucucaggcua

SEQ ID NO: 1661296 - RNA, 19 nt, Artificial Sequence
  Description of Artificial Sequence: Synthetic oligonucleotide
  Antisense strand to SEQ ID NO: 1661295
uagccugagaagaaguaac

SEQ ID NO: 1661297 - RNA, 19 nt, Artificial Sequence
  Description of Artificial Sequence: Synthetic oligonucleotide
  Sense strand starting at position 3410 of SEQ ID NO: 1561301
guccgaguagcuggaacua

SEQ ID NO: 1661298 - RNA, 19 nt, Artificial Sequence
  Description of Artificial Sequence: Synthetic oligonucleotide
  Antisense strand to SEQ ID NO: 1661297
uaguuccagcuacucggac

SEQ ID NO: 1661299 - RNA, 19 nt, Artificial Sequence
  Description of Artificial Sequence: Synthetic oligonucleotide
  Sense strand starting at position 3625 of SEQ ID NO: 1561301
agguauugcuaccagaaag

SEQ ID NO: 1661300 - RNA, 19 nt, Artificial Sequence
  Description of Artificial Sequence: Synthetic oligonucleotide
  Antisense strand to SEQ ID NO: 1661299
cuuucugguagcaauaccu

SEQ ID NO: 1661301 - RNA, 19 nt, Artificial Sequence
  Description of Artificial Sequence: Synthetic oligonucleotide
  Sense strand starting at position 3675 of SEQ ID NO: 1561301
uuggaccuuguaugggaaa

SEQ ID NO: 1661302 - RNA, 19 nt, Artificial Sequence
  Description of Artificial Sequence: Synthetic oligonucleotide
  Antisense strand to SEQ ID NO: 1661301
uuucccauacaagguccaa

SEQ ID NO: 1661303 - RNA, 19 nt, Artificial Sequence
  Description of Artificial Sequence: Synthetic oligonucleotide
  Sense strand starting at position 3678 of SEQ ID NO: 1561301
gaccuuguaugggaaagaa

SEQ ID NO: 1661304 - RNA, 19 nt, Artificial Sequence
  Description of Artificial Sequence: Synthetic oligonucleotide
  Antisense strand to SEQ ID NO: 1661303
uucuuucccauacaagguc

SEQ ID NO: 1661305 - RNA, 19 nt, Artificial Sequence
  Description of Artificial Sequence: Synthetic oligonucleotide
  Sense strand starting at position 3733 of SEQ ID NO: 1561301
cgaacuguaucaugggaca

SEQ ID NO: 1661306 - RNA, 19 nt, Artificial Sequence
  Description of Artificial Sequence: Synthetic oligonucleotide
  Antisense strand to SEQ ID NO: 1661305
ugucccaugauacaguucg

SEQ ID NO: 1661307 - RNA, 19 nt, Artificial Sequence
  Description of Artificial Sequence: Synthetic oligonucleotide
  Sense strand starting at position 3736 of SEQ ID NO: 1561301
acuguaucaugggacagaa

SEQ ID NO: 1661308 - RNA, 19 nt, Artificial Sequence
  Description of Artificial Sequence: Synthetic oligonucleotide
  Antisense strand to SEQ ID NO: 1661307
uucugucccaugauacagu

SEQ ID NO: 1661309 - RNA, 19 nt, Artificial Sequence
  Description of Artificial Sequence: Synthetic oligonucleotide
  Sense strand starting at position 3786 of SEQ ID NO: 1561301
cuuauuugauacuauguga

SEQ ID NO: 1661310 - RNA, 19 nt, Artificial Sequence
  Description of Artificial Sequence: Synthetic oligonucleotide
  Antisense strand to SEQ ID NO: 1661309
ucacauaguaucaaauaag

SEQ ID NO: 1661311 - RNA, 19 nt, Artificial Sequence
  Description of Artificial Sequence: Synthetic oligonucleotide
  Sense strand starting at position 153 of SEQ ID NO: 1561302
agguacaauucucuugcau

SEQ ID NO: 1661312 - RNA, 19 nt, Artificial Sequence
  Description of Artificial Sequence: Synthetic oligonucleotide
  Antisense strand to SEQ ID NO: 1661311
augcaagagaauuguaccu

SEQ ID NO: 1661313 - RNA, 19 nt, Artificial Sequence
  Description of Artificial Sequence: Synthetic oligonucleotide
  Sense strand starting at position 191 of SEQ ID NO: 1561302
aggaccauucuguaagcuu

SEQ ID NO: 1661314 - RNA, 19 nt, Artificial Sequence
  Description of Artificial Sequence: Synthetic oligonucleotide
  Antisense strand to SEQ ID NO: 1661313
aagcuuacagaaugguccu

SEQ ID NO: 1661315 - RNA, 19 nt, Artificial Sequence
  Description of Artificial Sequence: Synthetic oligonucleotide
  Sense strand starting at position 286 of SEQ ID NO: 1561302
acguuuggcaauuaugaca

SEQ ID NO: 1661316 - RNA, 19 nt, Artificial Sequence
  Description of Artificial Sequence: Synthetic oligonucleotide
  Antisense strand to SEQ ID NO: 1661315
ugucauaauugccaaacgu

SEQ ID NO: 1661317 - RNA, 19 nt, Artificial Sequence
  Description of Artificial Sequence: Synthetic oligonucleotide
  Sense strand starting at position 320 of SEQ ID NO: 1561302
uuauacuaagucgauguua

SEQ ID NO: 1661318 - RNA, 19 nt, Artificial Sequence
  Description of Artificial Sequence: Synthetic oligonucleotide
  Antisense strand to SEQ ID NO: 1661317
uaacaucgacuuaguauaa

SEQ ID NO: 1661319 - RNA, 19 nt, Artificial Sequence
  Description of Artificial Sequence: Synthetic oligonucleotide
  Sense strand starting at position 322 of SEQ ID NO: 1561302
auacuaagucgauguuaga

SEQ ID NO: 1661320 - RNA, 19 nt, Artificial Sequence
  Description of Artificial Sequence: Synthetic oligonucleotide
  Antisense strand to SEQ ID NO: 1661319
ucuaacaucgacuuaguau

SEQ ID NO: 1661321 - RNA, 19 nt, Artificial Sequence
  Description of Artificial Sequence: Synthetic oligonucleotide
  Sense strand starting at position 462 of SEQ ID NO: 1561302
uuuggcuaugcuuacaaau

SEQ ID NO: 1661322 - RNA, 19 nt, Artificial Sequence
  Description of Artificial Sequence: Synthetic oligonucleotide
  Antisense strand to SEQ ID NO: 1661321
auuuguaagcauagccaaa

SEQ ID NO: 1661323 - RNA, 19 nt, Artificial Sequence
  Description of Artificial Sequence: Synthetic oligonucleotide
  Sense strand starting at position 526 of SEQ ID NO: 1561302
uuugguuaaacauggguga

SEQ ID NO: 1661324 - RNA, 19 nt, Artificial Sequence
  Description of Artificial Sequence: Synthetic oligonucleotide
  Antisense strand to SEQ ID NO: 1661323
ucacccauguuuaaccaaa

SEQ ID NO: 1661325 - RNA, 19 nt, Artificial Sequence
  Description of Artificial Sequence: Synthetic oligonucleotide
  Sense strand starting at position 527 of SEQ ID NO: 1561302
uugguuaaacaugggugaa

SEQ ID NO: 1661326 - RNA, 19 nt, Artificial Sequence
  Description of Artificial Sequence: Synthetic oligonucleotide
  Antisense strand to SEQ ID NO: 1661325
uucacccauguuuaaccaa

SEQ ID NO: 1661327 - RNA, 19 nt, Artificial Sequence
  Description of Artificial Sequence: Synthetic oligonucleotide
  Sense strand starting at position 605 of SEQ ID NO: 1561302
auaucuugugguuagcaua

SEQ ID NO: 1661328 - RNA, 19 nt, Artificial Sequence
  Description of Artificial Sequence: Synthetic oligonucleotide
  Antisense strand to SEQ ID NO: 1661327
uaugcuaaccacaagauau

SEQ ID NO: 1661329 - RNA, 19 nt, Artificial Sequence
  Description of Artificial Sequence: Synthetic oligonucleotide
  Sense strand starting at position 793 of SEQ ID NO: 1561302
auccaaauauguguucuga

SEQ ID NO: 1661330 - RNA, 19 nt, Artificial Sequence
  Description of Artificial Sequence: Synthetic oligonucleotide
  Antisense strand to SEQ ID NO: 1661329
ucagaacacauauuuggau

SEQ ID NO: 1661331 - RNA, 19 nt, Artificial Sequence
  Description of Artificial Sequence: Synthetic oligonucleotide
  Sense strand starting at position 804 of SEQ ID NO: 1561302
uguucugaagcugauacua

SEQ ID NO: 1661332 - RNA, 19 nt, Artificial Sequence
  Description of Artificial Sequence: Synthetic oligonucleotide
  Antisense strand to SEQ ID NO: 1661331
uaguaucagcuucagaaca

SEQ ID NO: 1661333 - RNA, 19 nt, Artificial Sequence
  Description of Artificial Sequence: Synthetic oligonucleotide
  Sense strand starting at position 920 of SEQ ID NO: 1561302
gcucuaugucuguuugcuu

SEQ ID NO: 1661334 - RNA, 19 nt, Artificial Sequence
  Description of Artificial Sequence: Synthetic oligonucleotide
  Antisense strand to SEQ ID NO: 1661333
aagcaaacagacauagagc

SEQ ID NO: 1661335 - RNA, 19 nt, Artificial Sequence
  Description of Artificial Sequence: Synthetic oligonucleotide
  Sense strand starting at position 1022 of SEQ ID NO: 1561302
uuagaaugaucagcacuaa

SEQ ID NO: 1661336 - RNA, 19 nt, Artificial Sequence
  Description of Artificial Sequence: Synthetic oligonucleotide
  Antisense strand to SEQ ID NO: 1661335
uuagugcugaucauucuaa

SEQ ID NO: 1661337 - RNA, 19 nt, Artificial Sequence
  Description of Artificial Sequence: Synthetic oligonucleotide
  Sense strand starting at position 1083 of SEQ ID NO: 1561302
ucauccguuucugcauuua

SEQ ID NO: 1661338 - RNA, 19 nt, Artificial Sequence
  Description of Artificial Sequence: Synthetic oligonucleotide
  Antisense strand to SEQ ID NO: 1661337
uaaaugcagaaacggauga

SEQ ID NO: 1661339 - RNA, 19 nt, Artificial Sequence
  Description of Artificial Sequence: Synthetic oligonucleotide
  Sense strand starting at position 1116 of SEQ ID NO: 1561302
gcgcaucuucgagcagaau

SEQ ID NO: 1661340 - RNA, 19 nt, Artificial Sequence
  Description of Artificial Sequence: Synthetic oligonucleotide
  Antisense strand to SEQ ID NO: 1661339
auucugcucgaagaugcgc

SEQ ID NO: 1661341 - RNA, 19 nt, Artificial Sequence
  Description of Artificial Sequence: Synthetic oligonucleotide
  Sense strand starting at position 1151 of SEQ ID NO: 1561302
gaaauaucgucuucccuga

SEQ ID NO: 1661342 - RNA, 19 nt, Artificial Sequence
  Description of Artificial Sequence: Synthetic oligonucleotide
  Antisense strand to SEQ ID NO: 1661341
ucagggaagacgauauuuc

SEQ ID NO: 1661343 - RNA, 19 nt, Artificial Sequence
  Description of Artificial Sequence: Synthetic oligonucleotide
  Sense strand starting at position 1186 of SEQ ID NO: 1561302
guacuacucaggugagacu

SEQ ID NO: 1661344 - RNA, 19 nt, Artificial Sequence
  Description of Artificial Sequence: Synthetic oligonucleotide
  Antisense strand to SEQ ID NO: 1661343
agucucaccugaguaguac

SEQ ID NO: 1661345 - RNA, 19 nt, Artificial Sequence
  Description of Artificial Sequence: Synthetic oligonucleotide
  Sense strand starting at position 1255 of SEQ ID NO: 1561302
ucaagaagucaaggcuaaa

SEQ ID NO: 1661346 - RNA, 19 nt, Artificial Sequence
  Description of Artificial Sequence: Synthetic oligonucleotide
  Antisense strand to SEQ ID NO: 1661345
uuuagccuugacuucuuga

SEQ ID NO: 1661347 - RNA, 19 nt, Artificial Sequence
  Description of Artificial Sequence: Synthetic oligonucleotide
  Sense strand starting at position 1297 of SEQ ID NO: 1561302
ucagaacuccugcaugaau

SEQ ID NO: 1661348 - RNA, 19 nt, Artificial Sequence
  Description of Artificial Sequence: Synthetic oligonucleotide
  Antisense strand to SEQ ID NO: 1661347
auucaugcaggaguucuga

SEQ ID NO: 1661349 - RNA, 19 nt, Artificial Sequence
  Description of Artificial Sequence: Synthetic oligonucleotide
  Sense strand starting at position 1299 of SEQ ID NO: 1561302
agaacuccugcaugaauua

SEQ ID NO: 1661350 - RNA, 19 nt, Artificial Sequence
  Description of Artificial Sequence: Synthetic oligonucleotide
  Antisense strand to SEQ ID NO: 1661349
uaauucaugcaggaguucu

SEQ ID NO: 1661351 - RNA, 19 nt, Artificial Sequence
  Description of Artificial Sequence: Synthetic oligonucleotide
  Sense strand starting at position 1341 of SEQ ID NO: 1561302
gagugauccuguccuaaag

SEQ ID NO: 1661352 - RNA, 19 nt, Artificial Sequence
  Description of Artificial Sequence: Synthetic oligonucleotide
  Antisense strand to SEQ ID NO: 1661351
cuuuaggacaggaucacuc

SEQ ID NO: 1661353 - RNA, 19 nt, Artificial Sequence
  Description of Artificial Sequence: Synthetic oligonucleotide
  Sense strand starting at position 1364 of SEQ ID NO: 1561302
aucucucagugaucagaaa

SEQ ID NO: 1661354 - RNA, 19 nt, Artificial Sequence
  Description of Artificial Sequence: Synthetic oligonucleotide
  Antisense strand to SEQ ID NO: 1661353
uuucugaucacugagagau

SEQ ID NO: 1661355 - RNA, 19 nt, Artificial Sequence
  Description of Artificial Sequence: Synthetic oligonucleotide
  Sense strand starting at position 1917 of SEQ ID NO: 1561302
cucaccuuucugggaggaa

SEQ ID NO: 1661356 - RNA, 19 nt, Artificial Sequence
  Description of Artificial Sequence: Synthetic oligonucleotide
  Antisense strand to SEQ ID NO: 1661355
uuccucccagaaaggugag

SEQ ID NO: 1661357 - RNA, 19 nt, Artificial Sequence
  Description of Artificial Sequence: Synthetic oligonucleotide
  Sense strand starting at position 1994 of SEQ ID NO: 1561302
ggacuacgcuucccagaau

SEQ ID NO: 1661358 - RNA, 19 nt, Artificial Sequence
  Description of Artificial Sequence: Synthetic oligonucleotide
  Antisense strand to SEQ ID NO: 1661357
auucugggaagcguagucc

SEQ ID NO: 1661359 - RNA, 19 nt, Artificial Sequence
  Description of Artificial Sequence: Synthetic oligonucleotide
  Sense strand starting at position 2005 of SEQ ID NO: 1561302
cccagaauucccgacggga

SEQ ID NO: 1661360 - RNA, 19 nt, Artificial Sequence
  Description of Artificial Sequence: Synthetic oligonucleotide
  Antisense strand to SEQ ID NO: 1661359
ucccgucgggaauucuggg

SEQ ID NO: 1661361 - RNA, 19 nt, Artificial Sequence
  Description of Artificial Sequence: Synthetic oligonucleotide
  Sense strand starting at position 2007 of SEQ ID NO: 1561302
cagaauucccgacgggauc

SEQ ID NO: 1661362 - RNA, 19 nt, Artificial Sequence
  Description of Artificial Sequence: Synthetic oligonucleotide
  Antisense strand to SEQ ID NO: 1661361
gaucccgucgggaauucug

SEQ ID NO: 1661363 - RNA, 19 nt, Artificial Sequence
  Description of Artificial Sequence: Synthetic oligonucleotide
  Sense strand starting at position 2155 of SEQ ID NO: 1561302
agcugagagccuggaugau

SEQ ID NO: 1661364 - RNA, 19 nt, Artificial Sequence
  Description of Artificial Sequence: Synthetic oligonucleotide
  Antisense strand to SEQ ID NO: 1661363
aucauccaggcucucagcu

SEQ ID NO: 1661365 - RNA, 19 nt, Artificial Sequence
  Description of Artificial Sequence: Synthetic oligonucleotide
  Sense strand starting at position 2337 of SEQ ID NO: 1561302
ucuggacaauucccggaau

SEQ ID NO: 1661366 - RNA, 19 nt, Artificial Sequence
  Description of Artificial Sequence: Synthetic oligonucleotide
  Antisense strand to SEQ ID NO: 1661365
auuccgggaauuguccaga

SEQ ID NO: 1661367 - RNA, 19 nt, Artificial Sequence
  Description of Artificial Sequence: Synthetic oligonucleotide
  Sense strand starting at position 2404 of SEQ ID NO: 1561302
uagucaguauuuguauagu

SEQ ID NO: 1661368 - RNA, 19 nt, Artificial Sequence
  Description of Artificial Sequence: Synthetic oligonucleotide
  Antisense strand to SEQ ID NO: 1661367
acuauacaaauacugacua

SEQ ID NO: 1661369 - RNA, 19 nt, Artificial Sequence
  Description of Artificial Sequence: Synthetic oligonucleotide
  Sense strand starting at position 2410 of SEQ ID NO: 1561302
guauuuguauagucacuau

SEQ ID NO: 1661370 - RNA, 19 nt, Artificial Sequence
  Description of Artificial Sequence: Synthetic oligonucleotide
  Antisense strand to SEQ ID NO: 1661369
auagugacuauacaaauac

SEQ ID NO: 1661371 - RNA, 19 nt, Artificial Sequence
  Description of Artificial Sequence: Synthetic oligonucleotide
  Sense strand starting at position 2740 of SEQ ID NO: 1561302
accuuucuuugacucgauu

SEQ ID NO: 1661372 - RNA, 19 nt, Artificial Sequence
  Description of Artificial Sequence: Synthetic oligonucleotide
  Antisense strand to SEQ ID NO: 1661371
aaucgagucaaagaaaggu

SEQ ID NO: 1661373 - RNA, 19 nt, Artificial Sequence
  Description of Artificial Sequence: Synthetic oligonucleotide
  Sense strand starting at position 2746 of SEQ ID NO: 1561302
cuuugacucgauuaccuuu

SEQ ID NO: 1661374 - RNA, 19 nt, Artificial Sequence
  Description of Artificial Sequence: Synthetic oligonucleotide
  Antisense strand to SEQ ID NO: 1661373
aaagguaaucgagucaaag

SEQ ID NO: 1661375 - RNA, 19 nt, Artificial Sequence
  Description of Artificial Sequence: Synthetic oligonucleotide
  Sense strand starting at position 3117 of SEQ ID NO: 1561302
aguugucuuauggaggaca

SEQ ID NO: 1661376 - RNA, 19 nt, Artificial Sequence
  Description of Artificial Sequence: Synthetic oligonucleotide
  Antisense strand to SEQ ID NO: 1661375
uguccuccauaagacaacu

SEQ ID NO: 1661377 - RNA, 19 nt, Artificial Sequence
  Description of Artificial Sequence: Synthetic oligonucleotide
  Sense strand starting at position 3153 of SEQ ID NO: 1561302
cggugaauggguugacuca

SEQ ID NO: 1661378 - RNA, 19 nt, Artificial Sequence
  Description of Artificial Sequence: Synthetic oligonucleotide
  Antisense strand to SEQ ID NO: 1661377
ugagucaacccauucaccg

SEQ ID NO: 1661379 - RNA, 19 nt, Artificial Sequence
  Description of Artificial Sequence: Synthetic oligonucleotide
  Sense strand starting at position 3463 of SEQ ID NO: 1561302
agacacuauuaagagauga

SEQ ID NO: 1661380 - RNA, 19 nt, Artificial Sequence
  Description of Artificial Sequence: Synthetic oligonucleotide
  Antisense strand to SEQ ID NO: 1661379
ucaucucuuaauagugucu

SEQ ID NO: 1661381 - RNA, 19 nt, Artificial Sequence
  Description of Artificial Sequence: Synthetic oligonucleotide
  Sense strand starting at position 3478 of SEQ ID NO: 1561302
augagacuauuugauucuu

SEQ ID NO: 1661382 - RNA, 19 nt, Artificial Sequence
  Description of Artificial Sequence: Synthetic oligonucleotide
  Antisense strand to SEQ ID NO: 1661381
aagaaucaaauagucucau

SEQ ID NO: 1661383 - RNA, 19 nt, Artificial Sequence
  Description of Artificial Sequence: Synthetic oligonucleotide
  Sense strand starting at position 3534 of SEQ ID NO: 1561302
auacauacgguuuacauau

SEQ ID NO: 1661384 - RNA, 19 nt, Artificial Sequence
  Description of Artificial Sequence: Synthetic oligonucleotide
  Antisense strand to SEQ ID NO: 1661383
auauguaaaccguauguau

SEQ ID NO: 1661385 - RNA, 19 nt, Artificial Sequence
  Description of Artificial Sequence: Synthetic oligonucleotide
  Sense strand starting at position 3625 of SEQ ID NO: 1561302
agaauaauacuuuguguac

SEQ ID NO: 1661386 - RNA, 19 nt, Artificial Sequence
  Description of Artificial Sequence: Synthetic oligonucleotide
  Antisense strand to SEQ ID NO: 1661385
guacacaaaguauuauucu

SEQ ID NO: 1661387 - RNA, 19 nt, Artificial Sequence
  Description of Artificial Sequence: Synthetic oligonucleotide
  Sense strand starting at position 3666 of SEQ ID NO: 1561302
augagugauuuggaacaaa

SEQ ID NO: 1661388 - RNA, 19 nt, Artificial Sequence
  Description of Artificial Sequence: Synthetic oligonucleotide
  Antisense strand to SEQ ID NO: 1661387
uuuguuccaaaucacucau

SEQ ID NO: 1661389 - RNA, 19 nt, Artificial Sequence
  Description of Artificial Sequence: Synthetic oligonucleotide
  Sense strand starting at position 3749 of SEQ ID NO: 1561302
ggagaaauggugggccaaa

SEQ ID NO: 1661390 - RNA, 19 nt, Artificial Sequence
  Description of Artificial Sequence: Synthetic oligonucleotide
  Antisense strand to SEQ ID NO: 1661389
uuuggcccaccauuucucc

SEQ ID NO: 1661391 - RNA, 19 nt, Artificial Sequence
  Description of Artificial Sequence: Synthetic oligonucleotide
  Sense strand starting at position 47 of SEQ ID NO: 1561303
ccauuauaguuacacugau

SEQ ID NO: 1661392 - RNA, 19 nt, Artificial Sequence
  Description of Artificial Sequence: Synthetic oligonucleotide
  Antisense strand to SEQ ID NO: 1661391
aucaguguaacuauaaugg

SEQ ID NO: 1661393 - RNA, 19 nt, Artificial Sequence
  Description of Artificial Sequence: Synthetic oligonucleotide
  Sense strand starting at position 55 of SEQ ID NO: 1561303
guuacacugaugugaugaa

SEQ ID NO: 1661394 - RNA, 19 nt, Artificial Sequence
  Description of Artificial Sequence: Synthetic oligonucleotide
  Antisense strand to SEQ ID NO: 1661393
uucaucacaucaguguaac

SEQ ID NO: 1661395 - RNA, 19 nt, Artificial Sequence
  Description of Artificial Sequence: Synthetic oligonucleotide
  Sense strand starting at position 842 of SEQ ID NO: 1561303
acuaguaaaugucaugaac

SEQ ID NO: 1661396 - RNA, 19 nt, Artificial Sequence
  Description of Artificial Sequence: Synthetic oligonucleotide
  Antisense strand to SEQ ID NO: 1661395
guucaugacauuuacuagu

SEQ ID NO: 1661397 - RNA, 19 nt, Artificial Sequence
  Description of Artificial Sequence: Synthetic oligonucleotide
  Sense strand starting at position 879 of SEQ ID NO: 1561303
gggugugagcccuggaaga

SEQ ID NO: 1661398 - RNA, 19 nt, Artificial Sequence
  Description of Artificial Sequence: Synthetic oligonucleotide
  Antisense strand to SEQ ID NO: 1661397
ucuuccagggcucacaccc

SEQ ID NO: 1661399 - RNA, 19 nt, Artificial Sequence
  Description of Artificial Sequence: Synthetic oligonucleotide
  Sense strand starting at position 881 of SEQ ID NO: 1561303
gugugagcccuggaagaga

SEQ ID NO: 1661400 - RNA, 19 nt, Artificial Sequence
  Description of Artificial Sequence: Synthetic oligonucleotide
  Antisense strand to SEQ ID NO: 1661399
ucucuuccagggcucacac

SEQ ID NO: 1661401 - RNA, 19 nt, Artificial Sequence
  Description of Artificial Sequence: Synthetic oligonucleotide
  Sense strand starting at position 915 of SEQ ID NO: 1561303
uuugcauccugccuaaaga

SEQ ID NO: 1661402 - RNA, 19 nt, Artificial Sequence
  Description of Artificial Sequence: Synthetic oligonucleotide
  Antisense strand to SEQ ID NO: 1661401
ucuuuaggcaggaugcaaa

SEQ ID NO: 1661403 - RNA, 19 nt, Artificial Sequence
  Description of Artificial Sequence: Synthetic oligonucleotide
  Sense strand starting at position 916 of SEQ ID NO: 1561303
uugcauccugccuaaagaa

SEQ ID NO: 1661404 - RNA, 19 nt, Artificial Sequence
  Description of Artificial Sequence: Synthetic oligonucleotide
  Antisense strand to SEQ ID NO: 1661403
uucuuuaggcaggaugcaa

SEQ ID NO: 1661405 - RNA, 19 nt, Artificial Sequence
  Description of Artificial Sequence: Synthetic oligonucleotide
  Sense strand starting at position 1330 of SEQ ID NO: 1561303
gugacaucugaugaccguu

SEQ ID NO: 1661406 - RNA, 19 nt, Artificial Sequence
  Description of Artificial Sequence: Synthetic oligonucleotide
  Antisense strand to SEQ ID NO: 1661405
aacggucaucagaugucac

SEQ ID NO: 1661407 - RNA, 19 nt, Artificial Sequence
  Description of Artificial Sequence: Synthetic oligonucleotide
  Sense strand starting at position 1332 of SEQ ID NO: 1561303
gacaucugaugaccguuua

SEQ ID NO: 1661408 - RNA, 19 nt, Artificial Sequence
  Description of Artificial Sequence: Synthetic oligonucleotide
  Antisense strand to SEQ ID NO: 1661407
uaaacggucaucagauguc

SEQ ID NO: 1661409 - RNA, 19 nt, Artificial Sequence
  Description of Artificial Sequence: Synthetic oligonucleotide
  Sense strand starting at position 1333 of SEQ ID NO: 1561303
acaucugaugaccguuuaa

SEQ ID NO: 1661410 - RNA, 19 nt, Artificial Sequence
  Description of Artificial Sequence: Synthetic oligonucleotide
  Antisense strand to SEQ ID NO: 1661409
uuaaacggucaucagaugu

SEQ ID NO: 1661411 - RNA, 19 nt, Artificial Sequence
  Description of Artificial Sequence: Synthetic oligonucleotide
  Sense strand starting at position 1346 of SEQ ID NO: 1561303
guuuaaugacuguggucaa

SEQ ID NO: 1661412 - RNA, 19 nt, Artificial Sequence
  Description of Artificial Sequence: Synthetic oligonucleotide
  Antisense strand to SEQ ID NO: 1661411
uugaccacagucauuaaac

SEQ ID NO: 1661413 - RNA, 19 nt, Artificial Sequence
  Description of Artificial Sequence: Synthetic oligonucleotide
  Sense strand starting at position 1349 of SEQ ID NO: 1561303
uaaugacuguggucaacuu

SEQ ID NO: 1661414 - RNA, 19 nt, Artificial Sequence
  Description of Artificial Sequence: Synthetic oligonucleotide
  Antisense strand to SEQ ID NO: 1661413
aaguugaccacagucauua

SEQ ID NO: 1661415 - RNA, 19 nt, Artificial Sequence
  Description of Artificial Sequence: Synthetic oligonucleotide
  Sense strand starting at position 1350 of SEQ ID NO: 1561303
aaugacuguggucaacuua

SEQ ID NO: 1661416 - RNA, 19 nt, Artificial Sequence
  Description of Artificial Sequence: Synthetic oligonucleotide
  Antisense strand to SEQ ID NO: 1661415
uaaguugaccacagucauu

SEQ ID NO: 1661417 - RNA, 19 nt, Artificial Sequence
  Description of Artificial Sequence: Synthetic oligonucleotide
  Sense strand starting at position 1441 of SEQ ID NO: 1561303
gaagaaacuugauggcaag

SEQ ID NO: 1661418 - RNA, 19 nt, Artificial Sequence
  Description of Artificial Sequence: Synthetic oligonucleotide
  Antisense strand to SEQ ID NO: 1661417
cuugccaucaaguuucuuc

SEQ ID NO: 1661419 - RNA, 19 nt, Artificial Sequence
  Description of Artificial Sequence: Synthetic oligonucleotide
  Sense strand starting at position 1451 of SEQ ID NO: 1561303
gauggcaaguucccucaau

SEQ ID NO: 1661420 - RNA, 19 nt, Artificial Sequence
  Description of Artificial Sequence: Synthetic oligonucleotide
  Antisense strand to SEQ ID NO: 1661419
auugagggaacuugccauc

SEQ ID NO: 1661421 - RNA, 19 nt, Artificial Sequence
  Description of Artificial Sequence: Synthetic oligonucleotide
  Sense strand starting at position 1452 of SEQ ID NO: 1561303
auggcaaguucccucaauu

SEQ ID NO: 1661422 - RNA, 19 nt, Artificial Sequence
  Description of Artificial Sequence: Synthetic oligonucleotide
  Antisense strand to SEQ ID NO: 1661421
aauugagggaacuugccau

SEQ ID NO: 1661423 - RNA, 19 nt, Artificial Sequence
  Description of Artificial Sequence: Synthetic oligonucleotide
  Sense strand starting at position 1462 of SEQ ID NO: 1561303
cccucaauuugaggacaaa

SEQ ID NO: 1661424 - RNA, 19 nt, Artificial Sequence
  Description of Artificial Sequence: Synthetic oligonucleotide
  Antisense strand to SEQ ID NO: 1661423
uuuguccucaaauugaggg

SEQ ID NO: 1661425 - RNA, 19 nt, Artificial Sequence
  Description of Artificial Sequence: Synthetic oligonucleotide
  Sense strand starting at position 1492 of SEQ ID NO: 1561303
acaugacacugucagcaau

SEQ ID NO: 1661426 - RNA, 19 nt, Artificial Sequence
  Description of Artificial Sequence: Synthetic oligonucleotide
  Antisense strand to SEQ ID NO: 1661425
auugcugacagugucaugu

SEQ ID NO: 1661427 - RNA, 19 nt, Artificial Sequence
  Description of Artificial Sequence: Synthetic oligonucleotide
  Sense strand starting at position 1495 of SEQ ID NO: 1561303
ugacacugucagcaaugaa

SEQ ID NO: 1661428 - RNA, 19 nt, Artificial Sequence
  Description of Artificial Sequence: Synthetic oligonucleotide
  Antisense strand to SEQ ID NO: 1661427
uucauugcugacaguguca

SEQ ID NO: 1661429 - RNA, 19 nt, Artificial Sequence
  Description of Artificial Sequence: Synthetic oligonucleotide
  Sense strand starting at position 1498 of SEQ ID NO: 1561303
cacugucagcaaugaauug

SEQ ID NO: 1661430 - RNA, 19 nt, Artificial Sequence
  Description of Artificial Sequence: Synthetic oligonucleotide
  Antisense strand to SEQ ID NO: 1661429
caauucauugcugacagug

SEQ ID NO: 1661431 - RNA, 19 nt, Artificial Sequence
  Description of Artificial Sequence: Synthetic oligonucleotide
  Sense strand starting at position 1507 of SEQ ID NO: 1561303
caaugaauugcggacucaa

SEQ ID NO: 1661432 - RNA, 19 nt, Artificial Sequence
  Description of Artificial Sequence: Synthetic oligonucleotide
  Antisense strand to SEQ ID NO: 1661431
uugaguccgcaauucauug

SEQ ID NO: 1661433 - RNA, 19 nt, Artificial Sequence
  Description of Artificial Sequence: Synthetic oligonucleotide
  Sense strand starting at position 2064 of SEQ ID NO: 1561303
cugagcuguaaauaagagu

SEQ ID NO: 1661434 - RNA, 19 nt, Artificial Sequence
  Description of Artificial Sequence: Synthetic oligonucleotide
  Antisense strand to SEQ ID NO: 1661433
acucuuauuuacagcucag

SEQ ID NO: 1661435 - RNA, 19 nt, Artificial Sequence
  Description of Artificial Sequence: Synthetic oligonucleotide
  Sense strand starting at position 2103 of SEQ ID NO: 1561303
cgucuaucuugaccuuaua

SEQ ID NO: 1661436 - RNA, 19 nt, Artificial Sequence
  Description of Artificial Sequence: Synthetic oligonucleotide
  Antisense strand to SEQ ID NO: 1661435
uauaaggucaagauagacg

SEQ ID NO: 1661437 - RNA, 19 nt, Artificial Sequence
  Description of Artificial Sequence: Synthetic oligonucleotide
  Sense strand starting at position 2106 of SEQ ID NO: 1561303
cuaucuugaccuuauaguu

SEQ ID NO: 1661438 - RNA, 19 nt, Artificial Sequence
  Description of Artificial Sequence: Synthetic oligonucleotide
  Antisense strand to SEQ ID NO: 1661437
aacuauaaggucaagauag

SEQ ID NO: 1661439 - RNA, 19 nt, Artificial Sequence
  Description of Artificial Sequence: Synthetic oligonucleotide
  Sense strand starting at position 2114 of SEQ ID NO: 1561303
accuuauaguucccaagga

SEQ ID NO: 1661440 - RNA, 19 nt, Artificial Sequence
  Description of Artificial Sequence: Synthetic oligonucleotide
  Antisense strand to SEQ ID NO: 1661439
uccuugggaacuauaaggu

SEQ ID NO: 1661441 - RNA, 19 nt, Artificial Sequence
  Description of Artificial Sequence: Synthetic oligonucleotide
  Sense strand starting at position 2115 of SEQ ID NO: 1561303
ccuuauaguucccaaggaa

SEQ ID NO: 1661442 - RNA, 19 nt, Artificial Sequence
  Description of Artificial Sequence: Synthetic oligonucleotide
  Antisense strand to SEQ ID NO: 1661441
uuccuugggaacuauaagg

SEQ ID NO: 1661443 - RNA, 19 nt, Artificial Sequence
  Description of Artificial Sequence: Synthetic oligonucleotide
  Sense strand starting at position 2161 of SEQ ID NO: 1561303
acacgcaucucagcuguaa

SEQ ID NO: 1661444 - RNA, 19 nt, Artificial Sequence
  Description of Artificial Sequence: Synthetic oligonucleotide
  Antisense strand to SEQ ID NO: 1661443
uuacagcugagaugcgugu

SEQ ID NO: 1661445 - RNA, 19 nt, Artificial Sequence
  Description of Artificial Sequence: Synthetic oligonucleotide
  Sense strand starting at position 2174 of SEQ ID NO: 1561303
cuguaagccuaccuaagaa

SEQ ID NO: 1661446 - RNA, 19 nt, Artificial Sequence
  Description of Artificial Sequence: Synthetic oligonucleotide
  Antisense strand to SEQ ID NO: 1661445
uucuuagguaggcuuacag

SEQ ID NO: 1661447 - RNA, 19 nt, Artificial Sequence
  Description of Artificial Sequence: Synthetic oligonucleotide
  Sense strand starting at position 2351 of SEQ ID NO: 1561303
gcaucauugugagucagcu

SEQ ID NO: 1661448 - RNA, 19 nt, Artificial Sequence
  Description of Artificial Sequence: Synthetic oligonucleotide
  Antisense strand to SEQ ID NO: 1661447
agcugacucacaaugaugc

SEQ ID NO: 1661449 - RNA, 19 nt, Artificial Sequence
  Description of Artificial Sequence: Synthetic oligonucleotide
  Sense strand starting at position 2398 of SEQ ID NO: 1561303
ccugauuguccaugacgaa

SEQ ID NO: 1661450 - RNA, 19 nt, Artificial Sequence
  Description of Artificial Sequence: Synthetic oligonucleotide
  Antisense strand to SEQ ID NO: 1661449
uucgucauggacaaucagg

SEQ ID NO: 1661451 - RNA, 19 nt, Artificial Sequence
  Description of Artificial Sequence: Synthetic oligonucleotide
  Sense strand starting at position 2399 of SEQ ID NO: 1561303
cugauuguccaugacgaag

SEQ ID NO: 1661452 - RNA, 19 nt, Artificial Sequence
  Description of Artificial Sequence: Synthetic oligonucleotide
  Antisense strand to SEQ ID NO: 1661451
cuucgucauggacaaucag

SEQ ID NO: 1661453 - RNA, 19 nt, Artificial Sequence
  Description of Artificial Sequence: Synthetic oligonucleotide
  Sense strand starting at position 2413 of SEQ ID NO: 1561303
cgaagauauaccuggcuga

SEQ ID NO: 1661454 - RNA, 19 nt, Artificial Sequence
  Description of Artificial Sequence: Synthetic oligonucleotide
  Antisense strand to SEQ ID NO: 1661453
ucagccagguauaucuucg

SEQ ID NO: 1661455 - RNA, 19 nt, Artificial Sequence
  Description of Artificial Sequence: Synthetic oligonucleotide
  Sense strand starting at position 2414 of SEQ ID NO: 1561303
gaagauauaccuggcugau

SEQ ID NO: 1661456 - RNA, 19 nt, Artificial Sequence
  Description of Artificial Sequence: Synthetic oligonucleotide
  Antisense strand to SEQ ID NO: 1661455
aucagccagguauaucuuc

SEQ ID NO: 1661457 - RNA, 19 nt, Artificial Sequence
  Description of Artificial Sequence: Synthetic oligonucleotide
  Sense strand starting at position 2416 of SEQ ID NO: 1561303
agauauaccuggcugauga

SEQ ID NO: 1661458 - RNA, 19 nt, Artificial Sequence
  Description of Artificial Sequence: Synthetic oligonucleotide
  Antisense strand to SEQ ID NO: 1661457
ucaucagccagguauaucu

SEQ ID NO: 1661459 - RNA, 19 nt, Artificial Sequence
  Description of Artificial Sequence: Synthetic oligonucleotide
  Sense strand starting at position 2417 of SEQ ID NO: 1561303
gauauaccuggcugaugaa

SEQ ID NO: 1661460 - RNA, 19 nt, Artificial Sequence
  Description of Artificial Sequence: Synthetic oligonucleotide
  Antisense strand to SEQ ID NO: 1661459
uucaucagccagguauauc

SEQ ID NO: 1661461 - RNA, 19 nt, Artificial Sequence
  Description of Artificial Sequence: Synthetic oligonucleotide
  Sense strand starting at position 2523 of SEQ ID NO: 1561303
ggguuugauccugacaccu

SEQ ID NO: 1661462 - RNA, 19 nt, Artificial Sequence
  Description of Artificial Sequence: Synthetic oligonucleotide
  Antisense strand to SEQ ID NO: 1661461
aggugucaggaucaaaccc

SEQ ID NO: 1661463 - RNA, 19 nt, Artificial Sequence
  Description of Artificial Sequence: Synthetic oligonucleotide
  Sense strand starting at position 2525 of SEQ ID NO: 1561303
guuugauccugacaccuuc

SEQ ID NO: 1661464 - RNA, 19 nt, Artificial Sequence
  Description of Artificial Sequence: Synthetic oligonucleotide
  Antisense strand to SEQ ID NO: 1661463
gaaggugucaggaucaaac

SEQ ID NO: 1661465 - RNA, 19 nt, Artificial Sequence
  Description of Artificial Sequence: Synthetic oligonucleotide
  Sense strand starting at position 2591 of SEQ ID NO: 1561303
aggucucaguucccauaaa

SEQ ID NO: 1661466 - RNA, 19 nt, Artificial Sequence
  Description of Artificial Sequence: Synthetic oligonucleotide
  Antisense strand to SEQ ID NO: 1661465
uuuaugggaacugagaccu

SEQ ID NO: 1661467 - RNA, 19 nt, Artificial Sequence
  Description of Artificial Sequence: Synthetic oligonucleotide
  Sense strand starting at position 3783 of SEQ ID NO: 1561303
gucugaacacgugggucau

SEQ ID NO: 1661468 - RNA, 19 nt, Artificial Sequence
  Description of Artificial Sequence: Synthetic oligonucleotide
  Antisense strand to SEQ ID NO: 1661467
augacccacguguucagac

SEQ ID NO: 1661469 - RNA, 19 nt, Artificial Sequence
  Description of Artificial Sequence: Synthetic oligonucleotide
  Sense strand starting at position 3784 of SEQ ID NO: 1561303
ucugaacacgugggucauu

SEQ ID NO: 1661470 - RNA, 19 nt, Artificial Sequence
  Description of Artificial Sequence: Synthetic oligonucleotide
  Antisense strand to SEQ ID NO: 1661469
aaugacccacguguucaga

SEQ ID NO: 1661471 - RNA, 19 nt, Artificial Sequence
  Description of Artificial Sequence: Synthetic oligonucleotide
  Sense strand starting at position 26 of SEQ ID NO: 1561304
gggcaucucugcugcccaa

SEQ ID NO: 1661472 - RNA, 19 nt, Artificial Sequence
  Description of Artificial Sequence: Synthetic oligonucleotide
  Antisense strand to SEQ ID NO: 1661471
uugggcagcagagaugccc

SEQ ID NO: 1661473 - RNA, 19 nt, Artificial Sequence
  Description of Artificial Sequence: Synthetic oligonucleotide
  Sense strand starting at position 132 of SEQ ID NO: 1561304
gucugaacacgugggucau

SEQ ID NO: 1661474 - RNA, 19 nt, Artificial Sequence
  Description of Artificial Sequence: Synthetic oligonucleotide
  Antisense strand to SEQ ID NO: 1661473
augacccacguguucagac

SEQ ID NO: 1661475 - RNA, 19 nt, Artificial Sequence
  Description of Artificial Sequence: Synthetic oligonucleotide
  Sense strand starting at position 133 of SEQ ID NO: 1561304
ucugaacacgugggucauu

SEQ ID NO: 1661476 - RNA, 19 nt, Artificial Sequence
  Description of Artificial Sequence: Synthetic oligonucleotide
  Antisense strand to SEQ ID NO: 1661475
aaugacccacguguucaga

SEQ ID NO: 1661477 - RNA, 19 nt, Artificial Sequence
  Description of Artificial Sequence: Synthetic oligonucleotide
  Sense strand starting at position 366 of SEQ ID NO: 1561304
ggaucaaacuguugaaaua

SEQ ID NO: 1661478 - RNA, 19 nt, Artificial Sequence
  Description of Artificial Sequence: Synthetic oligonucleotide
  Antisense strand to SEQ ID NO: 1661477
uauuucaacaguuugaucc

SEQ ID NO: 1661479 - RNA, 19 nt, Artificial Sequence
  Description of Artificial Sequence: Synthetic oligonucleotide
  Sense strand starting at position 426 of SEQ ID NO: 1561304
auucguccugcccagacau

SEQ ID NO: 1661480 - RNA, 19 nt, Artificial Sequence
  Description of Artificial Sequence: Synthetic oligonucleotide
  Antisense strand to SEQ ID NO: 1661479
augucugggcaggacgaau

SEQ ID NO: 1661481 - RNA, 19 nt, Artificial Sequence
  Description of Artificial Sequence: Synthetic oligonucleotide
  Sense strand starting at position 617 of SEQ ID NO: 1561304
cgaccaguagauugacauu

SEQ ID NO: 1661482 - RNA, 19 nt, Artificial Sequence
  Description of Artificial Sequence: Synthetic oligonucleotide
  Antisense strand to SEQ ID NO: 1661481
aaugucaaucuacuggucg

SEQ ID NO: 1661483 - RNA, 19 nt, Artificial Sequence
  Description of Artificial Sequence: Synthetic oligonucleotide
  Sense strand starting at position 627 of SEQ ID NO: 1561304
auugacauuuccuguagaa

SEQ ID NO: 1661484 - RNA, 19 nt, Artificial Sequence
  Description of Artificial Sequence: Synthetic oligonucleotide
  Antisense strand to SEQ ID NO: 1661483
uucuacaggaaaugucaau

SEQ ID NO: 1661485 - RNA, 19 nt, Artificial Sequence
  Description of Artificial Sequence: Synthetic oligonucleotide
  Sense strand starting at position 976 of SEQ ID NO: 1561304
gucgccuacccuugaaaug

SEQ ID NO: 1661486 - RNA, 19 nt, Artificial Sequence
  Description of Artificial Sequence: Synthetic oligonucleotide
  Antisense strand to SEQ ID NO: 1661485
cauuucaaggguaggcgac

SEQ ID NO: 1661487 - RNA, 19 nt, Artificial Sequence
  Description of Artificial Sequence: Synthetic oligonucleotide
  Sense strand starting at position 977 of SEQ ID NO: 1561304
ucgccuacccuugaaauga

SEQ ID NO: 1661488 - RNA, 19 nt, Artificial Sequence
  Description of Artificial Sequence: Synthetic oligonucleotide
  Antisense strand to SEQ ID NO: 1661487
ucauuucaaggguaggcga

SEQ ID NO: 1661489 - RNA, 19 nt, Artificial Sequence
  Description of Artificial Sequence: Synthetic oligonucleotide
  Sense strand starting at position 2121 of SEQ ID NO: 1561304
ggugcauuguggagagauc

SEQ ID NO: 1661490 - RNA, 19 nt, Artificial Sequence
  Description of Artificial Sequence: Synthetic oligonucleotide
  Antisense strand to SEQ ID NO: 1661489
gaucucuccacaaugcacc

SEQ ID NO: 1661491 - RNA, 19 nt, Artificial Sequence
  Description of Artificial Sequence: Synthetic oligonucleotide
  Sense strand starting at position 2122 of SEQ ID NO: 1561304
gugcauuguggagagauca

SEQ ID NO: 1661492 - RNA, 19 nt, Artificial Sequence
  Description of Artificial Sequence: Synthetic oligonucleotide
  Antisense strand to SEQ ID NO: 1661491
ugaucucuccacaaugcac

SEQ ID NO: 1661493 - RNA, 19 nt, Artificial Sequence
  Description of Artificial Sequence: Synthetic oligonucleotide
  Sense strand starting at position 2224 of SEQ ID NO: 1561304
gucauaagguggguuaauc

SEQ ID NO: 1661494 - RNA, 19 nt, Artificial Sequence
  Description of Artificial Sequence: Synthetic oligonucleotide
  Antisense strand to SEQ ID NO: 1661493
gauuaacccaccuuaugac

SEQ ID NO: 1661495 - RNA, 19 nt, Artificial Sequence
  Description of Artificial Sequence: Synthetic oligonucleotide
  Sense strand starting at position 2324 of SEQ ID NO: 1561304
gacguauauguguagguca

SEQ ID NO: 1661496 - RNA, 19 nt, Artificial Sequence
  Description of Artificial Sequence: Synthetic oligonucleotide
  Antisense strand to SEQ ID NO: 1661495
ugaccuacacauauacguc

SEQ ID NO: 1661497 - RNA, 19 nt, Artificial Sequence
  Description of Artificial Sequence: Synthetic oligonucleotide
  Sense strand starting at position 2326 of SEQ ID NO: 1561304
cguauauguguaggucaca

SEQ ID NO: 1661498 - RNA, 19 nt, Artificial Sequence
  Description of Artificial Sequence: Synthetic oligonucleotide
  Antisense strand to SEQ ID NO: 1661497
ugugaccuacacauauacg

SEQ ID NO: 1661499 - RNA, 19 nt, Artificial Sequence
  Description of Artificial Sequence: Synthetic oligonucleotide
  Sense strand starting at position 2376 of SEQ ID NO: 1561304
gccugacacugggcuuaaa

SEQ ID NO: 1661500 - RNA, 19 nt, Artificial Sequence
  Description of Artificial Sequence: Synthetic oligonucleotide
  Antisense strand to SEQ ID NO: 1661499
uuuaagcccagugucaggc

SEQ ID NO: 1661501 - RNA, 19 nt, Artificial Sequence
  Description of Artificial Sequence: Synthetic oligonucleotide
  Sense strand starting at position 2776 of SEQ ID NO: 1561304
agcugaacaaagcguuuau

SEQ ID NO: 1661502 - RNA, 19 nt, Artificial Sequence
  Description of Artificial Sequence: Synthetic oligonucleotide
  Antisense strand to SEQ ID NO: 1661501
auaaacgcuuuguucagcu

SEQ ID NO: 1661503 - RNA, 19 nt, Artificial Sequence
  Description of Artificial Sequence: Synthetic oligonucleotide
  Sense strand starting at position 2787 of SEQ ID NO: 1561304
gcguuuauccucuacucga

SEQ ID NO: 1661504 - RNA, 19 nt, Artificial Sequence
  Description of Artificial Sequence: Synthetic oligonucleotide
  Antisense strand to SEQ ID NO: 1661503
ucgaguagaggauaaacgc

SEQ ID NO: 1661505 - RNA, 19 nt, Artificial Sequence
  Description of Artificial Sequence: Synthetic oligonucleotide
  Sense strand starting at position 2803 of SEQ ID NO: 1561304
cgaguuacaucguuucuuu

SEQ ID NO: 1661506 - RNA, 19 nt, Artificial Sequence
  Description of Artificial Sequence: Synthetic oligonucleotide
  Antisense strand to SEQ ID NO: 1661505
aaagaaacgauguaacucg

SEQ ID NO: 1661507 - RNA, 19 nt, Artificial Sequence
  Description of Artificial Sequence: Synthetic oligonucleotide
  Sense strand starting at position 2867 of SEQ ID NO: 1561304
uuugguucuuugggaggaa

SEQ ID NO: 1661508 - RNA, 19 nt, Artificial Sequence
  Description of Artificial Sequence: Synthetic oligonucleotide
  Antisense strand to SEQ ID NO: 1661507
uuccucccaaagaaccaaa

SEQ ID NO: 1661509 - RNA, 19 nt, Artificial Sequence
  Description of Artificial Sequence: Synthetic oligonucleotide
  Sense strand starting at position 2868 of SEQ ID NO: 1561304
uugguucuuugggaggaaa

SEQ ID NO: 1661510 - RNA, 19 nt, Artificial Sequence
  Description of Artificial Sequence: Synthetic oligonucleotide
  Antisense strand to SEQ ID NO: 1661509
uuuccucccaaagaaccaa

SEQ ID NO: 1661511 - RNA, 19 nt, Artificial Sequence
  Description of Artificial Sequence: Synthetic oligonucleotide
  Sense strand starting at position 2939 of SEQ ID NO: 1561304
gagucccuaucuggucaau

SEQ ID NO: 1661512 - RNA, 19 nt, Artificial Sequence
  Description of Artificial Sequence: Synthetic oligonucleotide
  Antisense strand to SEQ ID NO: 1661511
auugaccagauagggacuc

SEQ ID NO: 1661513 - RNA, 19 nt, Artificial Sequence
  Description of Artificial Sequence: Synthetic oligonucleotide
  Sense strand starting at position 2941 of SEQ ID NO: 1561304
gucccuaucuggucaauua

SEQ ID NO: 1661514 - RNA, 19 nt, Artificial Sequence
  Description of Artificial Sequence: Synthetic oligonucleotide
  Antisense strand to SEQ ID NO: 1661513
uaauugaccagauagggac

SEQ ID NO: 1661515 - RNA, 19 nt, Artificial Sequence
  Description of Artificial Sequence: Synthetic oligonucleotide
  Sense strand starting at position 3761 of SEQ ID NO: 1561304
cagccacaucgcuguguaa

SEQ ID NO: 1661516 - RNA, 19 nt, Artificial Sequence
  Description of Artificial Sequence: Synthetic oligonucleotide
  Antisense strand to SEQ ID NO: 1661515
uuacacagcgauguggcug

SEQ ID NO: 1661517 - RNA, 19 nt, Artificial Sequence
  Description of Artificial Sequence: Synthetic oligonucleotide
  Sense strand starting at position 3774 of SEQ ID NO: 1561304
guguaaccaucaucacgau

SEQ ID NO: 1661518 - RNA, 19 nt, Artificial Sequence
  Description of Artificial Sequence: Synthetic oligonucleotide
  Antisense strand to SEQ ID NO: 1661517
aucgugaugaugguuacac

SEQ ID NO: 1661519 - RNA, 19 nt, Artificial Sequence
  Description of Artificial Sequence: Synthetic oligonucleotide
  Sense strand starting at position 3829 of SEQ ID NO: 1561304
cuccguacccguuaaauaa

SEQ ID NO: 1661520 - RNA, 19 nt, Artificial Sequence
  Description of Artificial Sequence: Synthetic oligonucleotide
  Antisense strand to SEQ ID NO: 1661519
uuauuuaacggguacggag

SEQ ID NO: 1661521 - RNA, 19 nt, Artificial Sequence
  Description of Artificial Sequence: Synthetic oligonucleotide
  Sense strand starting at position 3877 of SEQ ID NO: 1561304
ccugguaagcucuguucua

SEQ ID NO: 1661522 - RNA, 19 nt, Artificial Sequence
  Description of Artificial Sequence: Synthetic oligonucleotide
  Antisense strand to SEQ ID NO: 1661521
uagaacagagcuuaccagg

SEQ ID NO: 1661523 - RNA, 19 nt, Artificial Sequence
  Description of Artificial Sequence: Synthetic oligonucleotide
  Sense strand starting at position 3878 of SEQ ID NO: 1561304
cugguaagcucuguucuac

SEQ ID NO: 1661524 - RNA, 19 nt, Artificial Sequence
  Description of Artificial Sequence: Synthetic oligonucleotide
  Antisense strand to SEQ ID NO: 1661523
guagaacagagcuuaccag

SEQ ID NO: 1661525 - RNA, 19 nt, Artificial Sequence
  Description of Artificial Sequence: Synthetic oligonucleotide
  Sense strand starting at position 3894 of SEQ ID NO: 1561304
uacuuucuguguccaggaa

SEQ ID NO: 1661526 - RNA, 19 nt, Artificial Sequence
  Description of Artificial Sequence: Synthetic oligonucleotide
  Antisense strand to SEQ ID NO: 1661525
uuccuggacacagaaagua

SEQ ID NO: 1661527 - RNA, 19 nt, Artificial Sequence
  Description of Artificial Sequence: Synthetic oligonucleotide
  Sense strand starting at position 3895 of SEQ ID NO: 1561304
acuuucuguguccaggaau

SEQ ID NO: 1661528 - RNA, 19 nt, Artificial Sequence
  Description of Artificial Sequence: Synthetic oligonucleotide
  Antisense strand to SEQ ID NO: 1661527
auuccuggacacagaaagu

SEQ ID NO: 1661529 - RNA, 19 nt, Artificial Sequence
  Description of Artificial Sequence: Synthetic oligonucleotide
  Sense strand starting at position 3912 of SEQ ID NO: 1561304
auuugacuguucuaggaau

SEQ ID NO: 1661530 - RNA, 19 nt, Artificial Sequence
  Description of Artificial Sequence: Synthetic oligonucleotide
  Antisense strand to SEQ ID NO: 1661529
auuccuagaacagucaaau

SEQ ID NO: 1661531 - RNA, 19 nt, Artificial Sequence
  Description of Artificial Sequence: Synthetic oligonucleotide
  Sense strand starting at position 3923 of SEQ ID NO: 1561304
cuaggaaucuccuagaagu

SEQ ID NO: 1661532 - RNA, 19 nt, Artificial Sequence
  Description of Artificial Sequence: Synthetic oligonucleotide
  Antisense strand to SEQ ID NO: 1661531
acuucuaggagauuccuag

SEQ ID NO: 1661533 - RNA, 19 nt, Artificial Sequence
  Description of Artificial Sequence: Synthetic oligonucleotide
  Sense strand starting at position 3939 of SEQ ID NO: 1561304
aguggaaucacucggccuu

SEQ ID NO: 1661534 - RNA, 19 nt, Artificial Sequence
  Description of Artificial Sequence: Synthetic oligonucleotide
  Antisense strand to SEQ ID NO: 1661533
aaggccgagugauuccacu

SEQ ID NO: 1661535 - RNA, 19 nt, Artificial Sequence
  Description of Artificial Sequence: Synthetic oligonucleotide
  Sense strand starting at position 3940 of SEQ ID NO: 1561304
guggaaucacucggccuuu

SEQ ID NO: 1661536 - RNA, 19 nt, Artificial Sequence
  Description of Artificial Sequence: Synthetic oligonucleotide
  Antisense strand to SEQ ID NO: 1661535
aaaggccgagugauuccac

SEQ ID NO: 1661537 - RNA, 19 nt, Artificial Sequence
  Description of Artificial Sequence: Synthetic oligonucleotide
  Sense strand starting at position 314 of SEQ ID NO: 1561305
gucuaaacaugcuguuaau

SEQ ID NO: 1661538 - RNA, 19 nt, Artificial Sequence
  Description of Artificial Sequence: Synthetic oligonucleotide
  Antisense strand to SEQ ID NO: 1661537
auuaacagcauguuuagac

SEQ ID NO: 1661539 - RNA, 19 nt, Artificial Sequence
  Description of Artificial Sequence: Synthetic oligonucleotide
  Sense strand starting at position 773 of SEQ ID NO: 1561305
agacaacagcuguguauua

SEQ ID NO: 1661540 - RNA, 19 nt, Artificial Sequence
  Description of Artificial Sequence: Synthetic oligonucleotide
  Antisense strand to SEQ ID NO: 1661539
uaauacacagcuguugucu

SEQ ID NO: 1661541 - RNA, 19 nt, Artificial Sequence
  Description of Artificial Sequence: Synthetic oligonucleotide
  Sense strand starting at position 774 of SEQ ID NO: 1561305
gacaacagcuguguauuau

SEQ ID NO: 1661542 - RNA, 19 nt, Artificial Sequence
  Description of Artificial Sequence: Synthetic oligonucleotide
  Antisense strand to SEQ ID NO: 1661541
auaauacacagcuguuguc

SEQ ID NO: 1661543 - RNA, 19 nt, Artificial Sequence
  Description of Artificial Sequence: Synthetic oligonucleotide
  Sense strand starting at position 775 of SEQ ID NO: 1561305
acaacagcuguguauuauu

SEQ ID NO: 1661544 - RNA, 19 nt, Artificial Sequence
  Description of Artificial Sequence: Synthetic oligonucleotide
  Antisense strand to SEQ ID NO: 1661543
aauaauacacagcuguugu

SEQ ID NO: 1661545 - RNA, 19 nt, Artificial Sequence
  Description of Artificial Sequence: Synthetic oligonucleotide
  Sense strand starting at position 784 of SEQ ID NO: 1561305
guguauuauugccuuucuu

SEQ ID NO: 1661546 - RNA, 19 nt, Artificial Sequence
  Description of Artificial Sequence: Synthetic oligonucleotide
  Antisense strand to SEQ ID NO: 1661545
aagaaaggcaauaauacac

SEQ ID NO: 1661547 - RNA, 19 nt, Artificial Sequence
  Description of Artificial Sequence: Synthetic oligonucleotide
  Sense strand starting at position 1283 of SEQ ID NO: 1561305
uguagaaaggcuuguagcu

SEQ ID NO: 1661548 - RNA, 19 nt, Artificial Sequence
  Description of Artificial Sequence: Synthetic oligonucleotide
  Antisense strand to SEQ ID NO: 1661547
agcuacaagccuuucuaca

SEQ ID NO: 1661549 - RNA, 19 nt, Artificial Sequence
  Description of Artificial Sequence: Synthetic oligonucleotide
  Sense strand starting at position 1421 of SEQ ID NO: 1561305
aucagaaaguaauguguca

SEQ ID NO: 1661550 - RNA, 19 nt, Artificial Sequence
  Description of Artificial Sequence: Synthetic oligonucleotide
  Antisense strand to SEQ ID NO: 1661549
ugacacauuacuuucugau

SEQ ID NO: 1661551 - RNA, 19 nt, Artificial Sequence
  Description of Artificial Sequence: Synthetic oligonucleotide
  Sense strand starting at position 1449 of SEQ ID NO: 1561305
auaggacaucaaugccaga

SEQ ID NO: 1661552 - RNA, 19 nt, Artificial Sequence
  Description of Artificial Sequence: Synthetic oligonucleotide
  Antisense strand to SEQ ID NO: 1661551
ucuggcauugauguccuau

SEQ ID NO: 1661553 - RNA, 19 nt, Artificial Sequence
  Description of Artificial Sequence: Synthetic oligonucleotide
  Sense strand starting at position 1462 of SEQ ID NO: 1561305
gccagauucucagacgaga

SEQ ID NO: 1661554 - RNA, 19 nt, Artificial Sequence
  Description of Artificial Sequence: Synthetic oligonucleotide
  Antisense strand to SEQ ID NO: 1661553
ucucgucugagaaucuggc

SEQ ID NO: 1661555 - RNA, 19 nt, Artificial Sequence
  Description of Artificial Sequence: Synthetic oligonucleotide
  Sense strand starting at position 1532 of SEQ ID NO: 1561305
gcagguguucaccaggaac

SEQ ID NO: 1661556 - RNA, 19 nt, Artificial Sequence
  Description of Artificial Sequence: Synthetic oligonucleotide
  Antisense strand to SEQ ID NO: 1661555
guuccuggugaacaccugc

SEQ ID NO: 1661557 - RNA, 19 nt, Artificial Sequence
  Description of Artificial Sequence: Synthetic oligonucleotide
  Sense strand starting at position 1535 of SEQ ID NO: 1561305
gguguucaccaggaacaug

SEQ ID NO: 1661558 - RNA, 19 nt, Artificial Sequence
  Description of Artificial Sequence: Synthetic oligonucleotide
  Antisense strand to SEQ ID NO: 1661557
cauguuccuggugaacacc

SEQ ID NO: 1661559 - RNA, 19 nt, Artificial Sequence
  Description of Artificial Sequence: Synthetic oligonucleotide
  Sense strand starting at position 1567 of SEQ ID NO: 1561305
guuccugaggcgcggaaau

SEQ ID NO: 1661560 - RNA, 19 nt, Artificial Sequence
  Description of Artificial Sequence: Synthetic oligonucleotide
  Antisense strand to SEQ ID NO: 1661559
auuuccgcgccucaggaac

SEQ ID NO: 1661561 - RNA, 19 nt, Artificial Sequence
  Description of Artificial Sequence: Synthetic oligonucleotide
  Sense strand starting at position 1937 of SEQ ID NO: 1561305
gguggacuccaccacgaua

SEQ ID NO: 1661562 - RNA, 19 nt, Artificial Sequence
  Description of Artificial Sequence: Synthetic oligonucleotide
  Antisense strand to SEQ ID NO: 1661561
uaucgugguggaguccacc

SEQ ID NO: 1661563 - RNA, 19 nt, Artificial Sequence
  Description of Artificial Sequence: Synthetic oligonucleotide
  Sense strand starting at position 1939 of SEQ ID NO: 1561305
uggacuccaccacgauaaa

SEQ ID NO: 1661564 - RNA, 19 nt, Artificial Sequence
  Description of Artificial Sequence: Synthetic oligonucleotide
  Antisense strand to SEQ ID NO: 1661563
uuuaucgugguggagucca

SEQ ID NO: 1661565 - RNA, 19 nt, Artificial Sequence
  Description of Artificial Sequence: Synthetic oligonucleotide
  Sense strand starting at position 1959 of SEQ ID NO: 1561305
gcgaaauggcacugaccau

SEQ ID NO: 1661566 - RNA, 19 nt, Artificial Sequence
  Description of Artificial Sequence: Synthetic oligonucleotide
  Antisense strand to SEQ ID NO: 1661565
auggucagugccauuucgc

SEQ ID NO: 1661567 - RNA, 19 nt, Artificial Sequence
  Description of Artificial Sequence: Synthetic oligonucleotide
  Sense strand starting at position 2269 of SEQ ID NO: 1561305
guggcuaaggccuguaagu

SEQ ID NO: 1661568 - RNA, 19 nt, Artificial Sequence
  Description of Artificial Sequence: Synthetic oligonucleotide
  Antisense strand to SEQ ID NO: 1661567
acuuacaggccuuagccac

SEQ ID NO: 1661569 - RNA, 19 nt, Artificial Sequence
  Description of Artificial Sequence: Synthetic oligonucleotide
  Sense strand starting at position 2414 of SEQ ID NO: 1561305
guauacaucucauguuccu

SEQ ID NO: 1661570 - RNA, 19 nt, Artificial Sequence
  Description of Artificial Sequence: Synthetic oligonucleotide
  Antisense strand to SEQ ID NO: 1661569
aggaacaugagauguauac

SEQ ID NO: 1661571 - RNA, 19 nt, Artificial Sequence
  Description of Artificial Sequence: Synthetic oligonucleotide
  Sense strand starting at position 2442 of SEQ ID NO: 1561305
ccaugauucuuccauaugg

SEQ ID NO: 1661572 - RNA, 19 nt, Artificial Sequence
  Description of Artificial Sequence: Synthetic oligonucleotide
  Antisense strand to SEQ ID NO: 1661571
ccauauggaagaaucaugg

SEQ ID NO: 1661573 - RNA, 19 nt, Artificial Sequence
  Description of Artificial Sequence: Synthetic oligonucleotide
  Sense strand starting at position 2450 of SEQ ID NO: 1561305
cuuccauauggauaaagcu

SEQ ID NO: 1661574 - RNA, 19 nt, Artificial Sequence
  Description of Artificial Sequence: Synthetic oligonucleotide
  Antisense strand to SEQ ID NO: 1661573
agcuuuauccauauggaag

SEQ ID NO: 1661575 - RNA, 19 nt, Artificial Sequence
  Description of Artificial Sequence: Synthetic oligonucleotide
  Sense strand starting at position 2459 of SEQ ID NO: 1561305
ggauaaagcugccagugaa

SEQ ID NO: 1661576 - RNA, 19 nt, Artificial Sequence
  Description of Artificial Sequence: Synthetic oligonucleotide
  Antisense strand to SEQ ID NO: 1661575
uucacuggcagcuuuaucc

SEQ ID NO: 1661577 - RNA, 19 nt, Artificial Sequence
  Description of Artificial Sequence: Synthetic oligonucleotide
  Sense strand starting at position 2483 of SEQ ID NO: 1561305
uggucuaucucuucuauuc

SEQ ID NO: 1661578 - RNA, 19 nt, Artificial Sequence
  Description of Artificial Sequence: Synthetic oligonucleotide
  Antisense strand to SEQ ID NO: 1661577
gaauagaagagauagacca

SEQ ID NO: 1661579 - RNA, 19 nt, Artificial Sequence
  Description of Artificial Sequence: Synthetic oligonucleotide
  Sense strand starting at position 2950 of SEQ ID NO: 1561305
auguauuucuggcugggua

SEQ ID NO: 1661580 - RNA, 19 nt, Artificial Sequence
  Description of Artificial Sequence: Synthetic oligonucleotide
  Antisense strand to SEQ ID NO: 1661579
uacccagccagaaauacau

SEQ ID NO: 1661581 - RNA, 19 nt, Artificial Sequence
  Description of Artificial Sequence: Synthetic oligonucleotide
  Sense strand starting at position 2951 of SEQ ID NO: 1561305
uguauuucuggcuggguau

SEQ ID NO: 1661582 - RNA, 19 nt, Artificial Sequence
  Description of Artificial Sequence: Synthetic oligonucleotide
  Antisense strand to SEQ ID NO: 1661581
auacccagccagaaauaca

SEQ ID NO: 1661583 - RNA, 19 nt, Artificial Sequence
  Description of Artificial Sequence: Synthetic oligonucleotide
  Sense strand starting at position 3542 of SEQ ID NO: 1561305
uggaguuagguacguugau

SEQ ID NO: 1661584 - RNA, 19 nt, Artificial Sequence
  Description of Artificial Sequence: Synthetic oligonucleotide
  Antisense strand to SEQ ID NO: 1661583
aucaacguaccuaacucca

SEQ ID NO: 1661585 - RNA, 19 nt, Artificial Sequence
  Description of Artificial Sequence: Synthetic oligonucleotide
  Sense strand starting at position 3543 of SEQ ID NO: 1561305
ggaguuagguacguugaua

SEQ ID NO: 1661586 - RNA, 19 nt, Artificial Sequence
  Description of Artificial Sequence: Synthetic oligonucleotide
  Antisense strand to SEQ ID NO: 1661585
uaucaacguaccuaacucc

SEQ ID NO: 1661587 - RNA, 19 nt, Artificial Sequence
  Description of Artificial Sequence: Synthetic oligonucleotide
  Sense strand starting at position 3548 of SEQ ID NO: 1561305
uagguacguugauacuaaa

SEQ ID NO: 1661588 - RNA, 19 nt, Artificial Sequence
  Description of Artificial Sequence: Synthetic oligonucleotide
  Antisense strand to SEQ ID NO: 1661587
uuuaguaucaacguaccua

SEQ ID NO: 1661589 - RNA, 19 nt, Artificial Sequence
  Description of Artificial Sequence: Synthetic oligonucleotide
  Sense strand starting at position 3551 of SEQ ID NO: 1561305
guacguugauacuaaaguu

SEQ ID NO: 1661590 - RNA, 19 nt, Artificial Sequence
  Description of Artificial Sequence: Synthetic oligonucleotide
  Antisense strand to SEQ ID NO: 1661589
aacuuuaguaucaacguac

SEQ ID NO: 1661591 - RNA, 19 nt, Artificial Sequence
  Description of Artificial Sequence: Synthetic oligonucleotide
  Sense strand starting at position 3560 of SEQ ID NO: 1561305
uacuaaaguuuauguggaa

SEQ ID NO: 1661592 - RNA, 19 nt, Artificial Sequence
  Description of Artificial Sequence: Synthetic oligonucleotide
  Antisense strand to SEQ ID NO: 1661591
uuccacauaaacuuuagua

SEQ ID NO: 1661593 - RNA, 19 nt, Artificial Sequence
  Description of Artificial Sequence: Synthetic oligonucleotide
  Sense strand starting at position 3623 of SEQ ID NO: 1561305
ugaugagcagcagauguua

SEQ ID NO: 1661594 - RNA, 19 nt, Artificial Sequence
  Description of Artificial Sequence: Synthetic oligonucleotide
  Antisense strand to SEQ ID NO: 1661593
uaacaucugcugcucauca

SEQ ID NO: 1661595 - RNA, 19 nt, Artificial Sequence
  Description of Artificial Sequence: Synthetic oligonucleotide
  Sense strand starting at position 3625 of SEQ ID NO: 1561305
augagcagcagauguuaaa

SEQ ID NO: 1661596 - RNA, 19 nt, Artificial Sequence
  Description of Artificial Sequence: Synthetic oligonucleotide
  Antisense strand to SEQ ID NO: 1661595
uuuaacaucugcugcucau

SEQ ID NO: 1661597 - RNA, 19 nt, Artificial Sequence
  Description of Artificial Sequence: Synthetic oligonucleotide
  Sense strand starting at position 81 of SEQ ID NO: 1561306
gccuaaacccgacauaauu

SEQ ID NO: 1661598 - RNA, 19 nt, Artificial Sequence
  Description of Artificial Sequence: Synthetic oligonucleotide
  Antisense strand to SEQ ID NO: 1661597
aauuaugucggguuuaggc

SEQ ID NO: 1661599 - RNA, 19 nt, Artificial Sequence
  Description of Artificial Sequence: Synthetic oligonucleotide
  Sense strand starting at position 138 of SEQ ID NO: 1561306
uuugguagugucugggaca

SEQ ID NO: 1661600 - RNA, 19 nt, Artificial Sequence
  Description of Artificial Sequence: Synthetic oligonucleotide
  Antisense strand to SEQ ID NO: 1661599
ugucccagacacuaccaaa

SEQ ID NO: 1661601 - RNA, 19 nt, Artificial Sequence
  Description of Artificial Sequence: Synthetic oligonucleotide
  Sense strand starting at position 699 of SEQ ID NO: 1561306
cuaccauguccuggcuaau

SEQ ID NO: 1661602 - RNA, 19 nt, Artificial Sequence
  Description of Artificial Sequence: Synthetic oligonucleotide
  Antisense strand to SEQ ID NO: 1661601
auuagccaggacaugguag

SEQ ID NO: 1661603 - RNA, 19 nt, Artificial Sequence
  Description of Artificial Sequence: Synthetic oligonucleotide
  Sense strand starting at position 894 of SEQ ID NO: 1561306
ucagguaauccauggccca

SEQ ID NO: 1661604 - RNA, 19 nt, Artificial Sequence
  Description of Artificial Sequence: Synthetic oligonucleotide
  Antisense strand to SEQ ID NO: 1661603
ugggccauggauuaccuga

SEQ ID NO: 1661605 - RNA, 19 nt, Artificial Sequence
  Description of Artificial Sequence: Synthetic oligonucleotide
  Sense strand starting at position 1079 of SEQ ID NO: 1561306
ucuguuaagacuggaguca

SEQ ID NO: 1661606 - RNA, 19 nt, Artificial Sequence
  Description of Artificial Sequence: Synthetic oligonucleotide
  Antisense strand to SEQ ID NO: 1661605
ugacuccagucuuaacaga

SEQ ID NO: 1661607 - RNA, 19 nt, Artificial Sequence
  Description of Artificial Sequence: Synthetic oligonucleotide
  Sense strand starting at position 1204 of SEQ ID NO: 1561306
cccuguuuccaccagacua

SEQ ID NO: 1661608 - RNA, 19 nt, Artificial Sequence
  Description of Artificial Sequence: Synthetic oligonucleotide
  Antisense strand to SEQ ID NO: 1661607
uagucugguggaaacaggg

SEQ ID NO: 1661609 - RNA, 19 nt, Artificial Sequence
  Description of Artificial Sequence: Synthetic oligonucleotide
  Sense strand starting at position 1286 of SEQ ID NO: 1561306
ggucacugucccugggaca

SEQ ID NO: 1661610 - RNA, 19 nt, Artificial Sequence
  Description of Artificial Sequence: Synthetic oligonucleotide
  Antisense strand to SEQ ID NO: 1661609
ugucccagggacagugacc

SEQ ID NO: 1661611 - RNA, 19 nt, Artificial Sequence
  Description of Artificial Sequence: Synthetic oligonucleotide
  Sense strand starting at position 1338 of SEQ ID NO: 1561306
augggaaucccucgauaua

SEQ ID NO: 1661612 - RNA, 19 nt, Artificial Sequence
  Description of Artificial Sequence: Synthetic oligonucleotide
  Antisense strand to SEQ ID NO: 1661611
uauaucgagggauucccau

SEQ ID NO: 1661613 - RNA, 19 nt, Artificial Sequence
  Description of Artificial Sequence: Synthetic oligonucleotide
  Sense strand starting at position 1672 of SEQ ID NO: 1561306
ggaccugucuucccaaaug

SEQ ID NO: 1661614 - RNA, 19 nt, Artificial Sequence
  Description of Artificial Sequence: Synthetic oligonucleotide
  Antisense strand to SEQ ID NO: 1661613
cauuugggaagacaggucc

SEQ ID NO: 1661615 - RNA, 19 nt, Artificial Sequence
  Description of Artificial Sequence: Synthetic oligonucleotide
  Sense strand starting at position 1777 of SEQ ID NO: 1561306
gggaacaccuuggcucaua

SEQ ID NO: 1661616 - RNA, 19 nt, Artificial Sequence
  Description of Artificial Sequence: Synthetic oligonucleotide
  Antisense strand to SEQ ID NO: 1661615
uaugagccaagguguuccc

SEQ ID NO: 1661617 - RNA, 19 nt, Artificial Sequence
  Description of Artificial Sequence: Synthetic oligonucleotide
  Sense strand starting at position 2061 of SEQ ID NO: 1561306
ugccaaggugauugaggaa

SEQ ID NO: 1661618 - RNA, 19 nt, Artificial Sequence
  Description of Artificial Sequence: Synthetic oligonucleotide
  Antisense strand to SEQ ID NO: 1661617
uuccucaaucaccuuggca

SEQ ID NO: 1661619 - RNA, 19 nt, Artificial Sequence
  Description of Artificial Sequence: Synthetic oligonucleotide
  Sense strand starting at position 2247 of SEQ ID NO: 1561306
ggaccaucacuuuggcauu

SEQ ID NO: 1661620 - RNA, 19 nt, Artificial Sequence
  Description of Artificial Sequence: Synthetic oligonucleotide
  Antisense strand to SEQ ID NO: 1661619
aaugccaaagugauggucc

SEQ ID NO: 1661621 - RNA, 19 nt, Artificial Sequence
  Description of Artificial Sequence: Synthetic oligonucleotide
  Sense strand starting at position 2705 of SEQ ID NO: 1561306
guccuaagucuccgauuga

SEQ ID NO: 1661622 - RNA, 19 nt, Artificial Sequence
  Description of Artificial Sequence: Synthetic oligonucleotide
  Antisense strand to SEQ ID NO: 1661621
ucaaucggagacuuaggac

SEQ ID NO: 1661623 - RNA, 19 nt, Artificial Sequence
  Description of Artificial Sequence: Synthetic oligonucleotide
  Sense strand starting at position 2709 of SEQ ID NO: 1561306
uaagucuccgauugagaag

SEQ ID NO: 1661624 - RNA, 19 nt, Artificial Sequence
  Description of Artificial Sequence: Synthetic oligonucleotide
  Antisense strand to SEQ ID NO: 1661623
cuucucaaucggagacuua

SEQ ID NO: 1661625 - RNA, 19 nt, Artificial Sequence
  Description of Artificial Sequence: Synthetic oligonucleotide
  Sense strand starting at position 2831 of SEQ ID NO: 1561306
ggaggagggaucugcauau

SEQ ID NO: 1661626 - RNA, 19 nt, Artificial Sequence
  Description of Artificial Sequence: Synthetic oligonucleotide
  Antisense strand to SEQ ID NO: 1661625
auaugcagaucccuccucc

SEQ ID NO: 1661627 - RNA, 19 nt, Artificial Sequence
  Description of Artificial Sequence: Synthetic oligonucleotide
  Sense strand starting at position 2835 of SEQ ID NO: 1561306
gagggaucugcauaugcga

SEQ ID NO: 1661628 - RNA, 19 nt, Artificial Sequence
  Description of Artificial Sequence: Synthetic oligonucleotide
  Antisense strand to SEQ ID NO: 1661627
ucgcauaugcagaucccuc

SEQ ID NO: 1661629 - RNA, 19 nt, Artificial Sequence
  Description of Artificial Sequence: Synthetic oligonucleotide
  Sense strand starting at position 2959 of SEQ ID NO: 1561306
gcgccugggagccaugaaa

SEQ ID NO: 1661630 - RNA, 19 nt, Artificial Sequence
  Description of Artificial Sequence: Synthetic oligonucleotide
  Antisense strand to SEQ ID NO: 1661629
uuucauggcucccaggcgc

SEQ ID NO: 1661631 - RNA, 19 nt, Artificial Sequence
  Description of Artificial Sequence: Synthetic oligonucleotide
  Sense strand starting at position 2997 of SEQ ID NO: 1561306
auggacaugaccugaguua

SEQ ID NO: 1661632 - RNA, 19 nt, Artificial Sequence
  Description of Artificial Sequence: Synthetic oligonucleotide
  Antisense strand to SEQ ID NO: 1661631
uaacucaggucauguccau

SEQ ID NO: 1661633 - RNA, 19 nt, Artificial Sequence
  Description of Artificial Sequence: Synthetic oligonucleotide
  Sense strand starting at position 3010 of SEQ ID NO: 1561306
gaguuagaauuuggaaagu

SEQ ID NO: 1661634 - RNA, 19 nt, Artificial Sequence
  Description of Artificial Sequence: Synthetic oligonucleotide
  Antisense strand to SEQ ID NO: 1661633
acuuuccaaauucuaacuc

SEQ ID NO: 1661635 - RNA, 19 nt, Artificial Sequence
  Description of Artificial Sequence: Synthetic oligonucleotide
  Sense strand starting at position 3027 of SEQ ID NO: 1561306
guauuucagugguugcuga

SEQ ID NO: 1661636 - RNA, 19 nt, Artificial Sequence
  Description of Artificial Sequence: Synthetic oligonucleotide
  Antisense strand to SEQ ID NO: 1661635
ucagcaaccacugaaauac

SEQ ID NO: 1661637 - RNA, 19 nt, Artificial Sequence
  Description of Artificial Sequence: Synthetic oligonucleotide
  Sense strand starting at position 3059 of SEQ ID NO: 1561306
uggagaaggugguuguagu

SEQ ID NO: 1661638 - RNA, 19 nt, Artificial Sequence
  Description of Artificial Sequence: Synthetic oligonucleotide
  Antisense strand to SEQ ID NO: 1661637
acuacaaccaccuucucca

SEQ ID NO: 1661639 - RNA, 19 nt, Artificial Sequence
  Description of Artificial Sequence: Synthetic oligonucleotide
  Sense strand starting at position 3106 of SEQ ID NO: 1561306
agguuauugcaguauuguu

SEQ ID NO: 1661640 - RNA, 19 nt, Artificial Sequence
  Description of Artificial Sequence: Synthetic oligonucleotide
  Antisense strand to SEQ ID NO: 1661639
aacaauacugcaauaaccu

SEQ ID NO: 1661641 - RNA, 19 nt, Artificial Sequence
  Description of Artificial Sequence: Synthetic oligonucleotide
  Sense strand starting at position 3111 of SEQ ID NO: 1561306
auugcaguauuguuccaga

SEQ ID NO: 1661642 - RNA, 19 nt, Artificial Sequence
  Description of Artificial Sequence: Synthetic oligonucleotide
  Antisense strand to SEQ ID NO: 1661641
ucuggaacaauacugcaau

SEQ ID NO: 1661643 - RNA, 19 nt, Artificial Sequence
  Description of Artificial Sequence: Synthetic oligonucleotide
  Sense strand starting at position 3116 of SEQ ID NO: 1561306
aguauuguuccagacaguu

SEQ ID NO: 1661644 - RNA, 19 nt, Artificial Sequence
  Description of Artificial Sequence: Synthetic oligonucleotide
  Antisense strand to SEQ ID NO: 1661643
aacugucuggaacaauacu

SEQ ID NO: 1661645 - RNA, 19 nt, Artificial Sequence
  Description of Artificial Sequence: Synthetic oligonucleotide
  Sense strand starting at position 3183 of SEQ ID NO: 1561306
ucagauucccaguggaucu

SEQ ID NO: 1661646 - RNA, 19 nt, Artificial Sequence
  Description of Artificial Sequence: Synthetic oligonucleotide
  Antisense strand to SEQ ID NO: 1661645
agauccacugggaaucuga

SEQ ID NO: 1661647 - RNA, 19 nt, Artificial Sequence
  Description of Artificial Sequence: Synthetic oligonucleotide
  Sense strand starting at position 3230 of SEQ ID NO: 1561306
uaccuuagauaaguggaau

SEQ ID NO: 1661648 - RNA, 19 nt, Artificial Sequence
  Description of Artificial Sequence: Synthetic oligonucleotide
  Antisense strand to SEQ ID NO: 1661647
auuccacuuaucuaaggua

SEQ ID NO: 1661649 - RNA, 19 nt, Artificial Sequence
  Description of Artificial Sequence: Synthetic oligonucleotide
  Sense strand starting at position 3242 of SEQ ID NO: 1561306
guggaauaagcaugaguag

SEQ ID NO: 1661650 - RNA, 19 nt, Artificial Sequence
  Description of Artificial Sequence: Synthetic oligonucleotide
  Antisense strand to SEQ ID NO: 1661649
cuacucaugcuuauuccac

SEQ ID NO: 1661651 - RNA, 19 nt, Artificial Sequence
  Description of Artificial Sequence: Synthetic oligonucleotide
  Sense strand starting at position 3297 of SEQ ID NO: 1561306
ggaugccuccuguggagaa

SEQ ID NO: 1661652 - RNA, 19 nt, Artificial Sequence
  Description of Artificial Sequence: Synthetic oligonucleotide
  Antisense strand to SEQ ID NO: 1661651
uucuccacaggaggcaucc

SEQ ID NO: 1661653 - RNA, 19 nt, Artificial Sequence
  Description of Artificial Sequence: Synthetic oligonucleotide
  Sense strand starting at position 3299 of SEQ ID NO: 1561306
augccuccuguggagaaua

SEQ ID NO: 1661654 - RNA, 19 nt, Artificial Sequence
  Description of Artificial Sequence: Synthetic oligonucleotide
  Antisense strand to SEQ ID NO: 1661653
uauucuccacaggaggcau

SEQ ID NO: 1661655 - RNA, 19 nt, Artificial Sequence
  Description of Artificial Sequence: Synthetic oligonucleotide
  Sense strand starting at position 3301 of SEQ ID NO: 1561306
gccuccuguggagaauaga

SEQ ID NO: 1661656 - RNA, 19 nt, Artificial Sequence
  Description of Artificial Sequence: Synthetic oligonucleotide
  Antisense strand to SEQ ID NO: 1661655
ucuauucuccacaggaggc

SEQ ID NO: 1661657 - RNA, 19 nt, Artificial Sequence
  Description of Artificial Sequence: Synthetic oligonucleotide
  Sense strand starting at position 3375 of SEQ ID NO: 1561306
agguauagagucugaauug

SEQ ID NO: 1661658 - RNA, 19 nt, Artificial Sequence
  Description of Artificial Sequence: Synthetic oligonucleotide
  Antisense strand to SEQ ID NO: 1661657
caauucagacucuauaccu

SEQ ID NO: 1661659 - RNA, 19 nt, Artificial Sequence
  Description of Artificial Sequence: Synthetic oligonucleotide
  Sense strand starting at position 3384 of SEQ ID NO: 1561306
gucugaauugucuggagac

SEQ ID NO: 1661660 - RNA, 19 nt, Artificial Sequence
  Description of Artificial Sequence: Synthetic oligonucleotide
  Antisense strand to SEQ ID NO: 1661659
gucuccagacaauucagac

SEQ ID NO: 1661661 - RNA, 19 nt, Artificial Sequence
  Description of Artificial Sequence: Synthetic oligonucleotide
  Sense strand starting at position 3495 of SEQ ID NO: 1561306
cagugaacggccugaggau

SEQ ID NO: 1661662 - RNA, 19 nt, Artificial Sequence
  Description of Artificial Sequence: Synthetic oligonucleotide
  Antisense strand to SEQ ID NO: 1661661
auccucaggccguucacug

SEQ ID NO: 1661663 - RNA, 19 nt, Artificial Sequence
  Description of Artificial Sequence: Synthetic oligonucleotide
  Sense strand starting at position 3496 of SEQ ID NO: 1561306
agugaacggccugaggaua

SEQ ID NO: 1661664 - RNA, 19 nt, Artificial Sequence
  Description of Artificial Sequence: Synthetic oligonucleotide
  Antisense strand to SEQ ID NO: 1661663
uauccucaggccguucacu

SEQ ID NO: 1661665 - RNA, 19 nt, Artificial Sequence
  Description of Artificial Sequence: Synthetic oligonucleotide
  Sense strand starting at position 3563 of SEQ ID NO: 1561306
acgcucagugcuuagauca

SEQ ID NO: 1661666 - RNA, 19 nt, Artificial Sequence
  Description of Artificial Sequence: Synthetic oligonucleotide
  Antisense strand to SEQ ID NO: 1661665
ugaucuaagcacugagcgu

SEQ ID NO: 1661667 - RNA, 19 nt, Artificial Sequence
  Description of Artificial Sequence: Synthetic oligonucleotide
  Sense strand starting at position 3637 of SEQ ID NO: 1561306
gucaguacaucuuccaaga

SEQ ID NO: 1661668 - RNA, 19 nt, Artificial Sequence
  Description of Artificial Sequence: Synthetic oligonucleotide
  Antisense strand to SEQ ID NO: 1661667
ucuuggaagauguacugac

SEQ ID NO: 1661669 - RNA, 19 nt, Artificial Sequence
  Description of Artificial Sequence: Synthetic oligonucleotide
  Sense strand starting at position 3684 of SEQ ID NO: 1561306
gggcuucuacagugacaug

SEQ ID NO: 1661670 - RNA, 19 nt, Artificial Sequence
  Description of Artificial Sequence: Synthetic oligonucleotide
  Antisense strand to SEQ ID NO: 1661669
caugucacuguagaagccc

SEQ ID NO: 1661671 - RNA, 19 nt, Artificial Sequence
  Description of Artificial Sequence: Synthetic oligonucleotide
  Sense strand starting at position 3685 of SEQ ID NO: 1561306
ggcuucuacagugacauga

SEQ ID NO: 1661672 - RNA, 19 nt, Artificial Sequence
  Description of Artificial Sequence: Synthetic oligonucleotide
  Antisense strand to SEQ ID NO: 1661671
ucaugucacuguagaagcc

SEQ ID NO: 1661673 - RNA, 19 nt, Artificial Sequence
  Description of Artificial Sequence: Synthetic oligonucleotide
  Sense strand starting at position 3857 of SEQ ID NO: 1561306
ggaauuguuuccuuccucu

SEQ ID NO: 1661674 - RNA, 19 nt, Artificial Sequence
  Description of Artificial Sequence: Synthetic oligonucleotide
  Antisense strand to SEQ ID NO: 1661673
agaggaaggaaacaauucc

SEQ ID NO: 1661675 - RNA, 19 nt, Artificial Sequence
  Description of Artificial Sequence: Synthetic oligonucleotide
  Sense strand starting at position 3919 of SEQ ID NO: 1561306
ucguguugaguguuacagu

SEQ ID NO: 1661676 - RNA, 19 nt, Artificial Sequence
  Description of Artificial Sequence: Synthetic oligonucleotide
  Antisense strand to SEQ ID NO: 1661675
acuguaacacucaacacga

SEQ ID NO: 1661677 - RNA, 19 nt, Artificial Sequence
  Description of Artificial Sequence: Synthetic oligonucleotide
  Sense strand starting at position 473 of SEQ ID NO: 1561307
ucuugcugacacuauaaga

SEQ ID NO: 1661678 - RNA, 19 nt, Artificial Sequence
  Description of Artificial Sequence: Synthetic oligonucleotide
  Antisense strand to SEQ ID NO: 1661677
ucuuauagugucagcaaga

SEQ ID NO: 1661679 - RNA, 19 nt, Artificial Sequence
  Description of Artificial Sequence: Synthetic oligonucleotide
  Sense strand starting at position 756 of SEQ ID NO: 1561307
acccaauuggcucagcuua

SEQ ID NO: 1661680 - RNA, 19 nt, Artificial Sequence
  Description of Artificial Sequence: Synthetic oligonucleotide
  Antisense strand to SEQ ID NO: 1661679
uaagcugagccaauugggu

SEQ ID NO: 1661681 - RNA, 19 nt, Artificial Sequence
  Description of Artificial Sequence: Synthetic oligonucleotide
  Sense strand starting at position 758 of SEQ ID NO: 1561307
ccaauuggcucagcuuaga

SEQ ID NO: 1661682 - RNA, 19 nt, Artificial Sequence
  Description of Artificial Sequence: Synthetic oligonucleotide
  Antisense strand to SEQ ID NO: 1661681
ucuaagcugagccaauugg

SEQ ID NO: 1661683 - RNA, 19 nt, Artificial Sequence
  Description of Artificial Sequence: Synthetic oligonucleotide
  Sense strand starting at position 761 of SEQ ID NO: 1561307
auuggcucagcuuagauua

SEQ ID NO: 1661684 - RNA, 19 nt, Artificial Sequence
  Description of Artificial Sequence: Synthetic oligonucleotide
  Antisense strand to SEQ ID NO: 1661683
uaaucuaagcugagccaau

SEQ ID NO: 1661685 - RNA, 19 nt, Artificial Sequence
  Description of Artificial Sequence: Synthetic oligonucleotide
  Sense strand starting at position 771 of SEQ ID NO: 1561307
cuuagauuaagcgguccga

SEQ ID NO: 1661686 - RNA, 19 nt, Artificial Sequence
  Description of Artificial Sequence: Synthetic oligonucleotide
  Antisense strand to SEQ ID NO: 1661685
ucggaccgcuuaaucuaag

SEQ ID NO: 1661687 - RNA, 19 nt, Artificial Sequence
  Description of Artificial Sequence: Synthetic oligonucleotide
  Sense strand starting at position 827 of SEQ ID NO: 1561307
gacuauggguuagagauaa

SEQ ID NO: 1661688 - RNA, 19 nt, Artificial Sequence
  Description of Artificial Sequence: Synthetic oligonucleotide
  Antisense strand to SEQ ID NO: 1661687
uuaucucuaacccauaguc

SEQ ID NO: 1661689 - RNA, 19 nt, Artificial Sequence
  Description of Artificial Sequence: Synthetic oligonucleotide
  Sense strand starting at position 872 of SEQ ID NO: 1561307
ugcucuugggaucgugauu

SEQ ID NO: 1661690 - RNA, 19 nt, Artificial Sequence
  Description of Artificial Sequence: Synthetic oligonucleotide
  Antisense strand to SEQ ID NO: 1661689
aaucacgaucccaagagca

SEQ ID NO: 1661691 - RNA, 19 nt, Artificial Sequence
  Description of Artificial Sequence: Synthetic oligonucleotide
  Sense strand starting at position 877 of SEQ ID NO: 1561307
uugggaucgugauuaacac

SEQ ID NO: 1661692 - RNA, 19 nt, Artificial Sequence
  Description of Artificial Sequence: Synthetic oligonucleotide
  Antisense strand to SEQ ID NO: 1661691
guguuaaucacgaucccaa

SEQ ID NO: 1661693 - RNA, 19 nt, Artificial Sequence
  Description of Artificial Sequence: Synthetic oligonucleotide
  Sense strand starting at position 1254 of SEQ ID NO: 1561307
ugcagaacaccuuagauuc

SEQ ID NO: 1661694 - RNA, 19 nt, Artificial Sequence
  Description of Artificial Sequence: Synthetic oligonucleotide
  Antisense strand to SEQ ID NO: 1661693
gaaucuaagguguucugca

SEQ ID NO: 1661695 - RNA, 19 nt, Artificial Sequence
  Description of Artificial Sequence: Synthetic oligonucleotide
  Sense strand starting at position 1318 of SEQ ID NO: 1561307
ugcugugacuuaccaauuu

SEQ ID NO: 1661696 - RNA, 19 nt, Artificial Sequence
  Description of Artificial Sequence: Synthetic oligonucleotide
  Antisense strand to SEQ ID NO: 1661695
aaauugguaagucacagca

SEQ ID NO: 1661697 - RNA, 19 nt, Artificial Sequence
  Description of Artificial Sequence: Synthetic oligonucleotide
  Sense strand starting at position 1607 of SEQ ID NO: 1561307
gucgguuuccuccucagca

SEQ ID NO: 1661698 - RNA, 19 nt, Artificial Sequence
  Description of Artificial Sequence: Synthetic oligonucleotide
  Antisense strand to SEQ ID NO: 1661697
ugcugaggaggaaaccgac

SEQ ID NO: 1661699 - RNA, 19 nt, Artificial Sequence
  Description of Artificial Sequence: Synthetic oligonucleotide
  Sense strand starting at position 1608 of SEQ ID NO: 1561307
ucgguuuccuccucagcaa

SEQ ID NO: 1661700 - RNA, 19 nt, Artificial Sequence
  Description of Artificial Sequence: Synthetic oligonucleotide
  Antisense strand to SEQ ID NO: 1661699
uugcugaggaggaaaccga

SEQ ID NO: 1661701 - RNA, 19 nt, Artificial Sequence
  Description of Artificial Sequence: Synthetic oligonucleotide
  Sense strand starting at position 1609 of SEQ ID NO: 1561307
cgguuuccuccucagcaaa

SEQ ID NO: 1661702 - RNA, 19 nt, Artificial Sequence
  Description of Artificial Sequence: Synthetic oligonucleotide
  Antisense strand to SEQ ID NO: 1661701
uuugcugaggaggaaaccg

SEQ ID NO: 1661703 - RNA, 19 nt, Artificial Sequence
  Description of Artificial Sequence: Synthetic oligonucleotide
  Sense strand starting at position 1619 of SEQ ID NO: 1561307
cucagcaaacauuggaaua

SEQ ID NO: 1661704 - RNA, 19 nt, Artificial Sequence
  Description of Artificial Sequence: Synthetic oligonucleotide
  Antisense strand to SEQ ID NO: 1661703
uauuccaauguuugcugag

SEQ ID NO: 1661705 - RNA, 19 nt, Artificial Sequence
  Description of Artificial Sequence: Synthetic oligonucleotide
  Sense strand starting at position 1691 of SEQ ID NO: 1561307
gcuccuaucguccucgcaa

SEQ ID NO: 1661706 - RNA, 19 nt, Artificial Sequence
  Description of Artificial Sequence: Synthetic oligonucleotide
  Antisense strand to SEQ ID NO: 1661705
uugcgaggacgauaggagc

SEQ ID NO: 1661707 - RNA, 19 nt, Artificial Sequence
  Description of Artificial Sequence: Synthetic oligonucleotide
  Sense strand starting at position 1895 of SEQ ID NO: 1561307
aggcgcuccucauuuggaa

SEQ ID NO: 1661708 - RNA, 19 nt, Artificial Sequence
  Description of Artificial Sequence: Synthetic oligonucleotide
  Antisense strand to SEQ ID NO: 1661707
uuccaaaugaggagcgccu

SEQ ID NO: 1661709 - RNA, 19 nt, Artificial Sequence
  Description of Artificial Sequence: Synthetic oligonucleotide
  Sense strand starting at position 1929 of SEQ ID NO: 1561307
cgggcgaaagucugggaaa

SEQ ID NO: 1661710 - RNA, 19 nt, Artificial Sequence
  Description of Artificial Sequence: Synthetic oligonucleotide
  Antisense strand to SEQ ID NO: 1661709
uuucccagacuuucgcccg

SEQ ID NO: 1661711 - RNA, 19 nt, Artificial Sequence
  Description of Artificial Sequence: Synthetic oligonucleotide
  Sense strand starting at position 2303 of SEQ ID NO: 1561307
cagguuucugggcaaugca

SEQ ID NO: 1661712 - RNA, 19 nt, Artificial Sequence
  Description of Artificial Sequence: Synthetic oligonucleotide
  Antisense strand to SEQ ID NO: 1661711
ugcauugcccagaaaccug

SEQ ID NO: 1661713 - RNA, 19 nt, Artificial Sequence
  Description of Artificial Sequence: Synthetic oligonucleotide
  Sense strand starting at position 2401 of SEQ ID NO: 1561307
cugagaaauuaugcccuga

SEQ ID NO: 1661714 - RNA, 19 nt, Artificial Sequence
  Description of Artificial Sequence: Synthetic oligonucleotide
  Antisense strand to SEQ ID NO: 1661713
ucagggcauaauuucucag

SEQ ID NO: 1661715 - RNA, 19 nt, Artificial Sequence
  Description of Artificial Sequence: Synthetic oligonucleotide
  Sense strand starting at position 2403 of SEQ ID NO: 1561307
gagaaauuaugcccugaga

SEQ ID NO: 1661716 - RNA, 19 nt, Artificial Sequence
  Description of Artificial Sequence: Synthetic oligonucleotide
  Antisense strand to SEQ ID NO: 1661715
ucucagggcauaauuucuc

SEQ ID NO: 1661717 - RNA, 19 nt, Artificial Sequence
  Description of Artificial Sequence: Synthetic oligonucleotide
  Sense strand starting at position 2479 of SEQ ID NO: 1561307
uagugaggucugcagggau

SEQ ID NO: 1661718 - RNA, 19 nt, Artificial Sequence
  Description of Artificial Sequence: Synthetic oligonucleotide
  Antisense strand to SEQ ID NO: 1661717
aucccugcagaccucacua

SEQ ID NO: 1661719 - RNA, 19 nt, Artificial Sequence
  Description of Artificial Sequence: Synthetic oligonucleotide
  Sense strand starting at position 2499 of SEQ ID NO: 1561307
cccgaaauauugggauaua

SEQ ID NO: 1661720 - RNA, 19 nt, Artificial Sequence
  Description of Artificial Sequence: Synthetic oligonucleotide
  Antisense strand to SEQ ID NO: 1661719
uauaucccaauauuucggg

SEQ ID NO: 1661721 - RNA, 19 nt, Artificial Sequence
  Description of Artificial Sequence: Synthetic oligonucleotide
  Sense strand starting at position 2500 of SEQ ID NO: 1561307
ccgaaauauugggauauau

SEQ ID NO: 1661722 - RNA, 19 nt, Artificial Sequence
  Description of Artificial Sequence: Synthetic oligonucleotide
  Antisense strand to SEQ ID NO: 1661721
auauaucccaauauuucgg

SEQ ID NO: 1661723 - RNA, 19 nt, Artificial Sequence
  Description of Artificial Sequence: Synthetic oligonucleotide
  Sense strand starting at position 2510 of SEQ ID NO: 1561307
gggauauauucuuacagau

SEQ ID NO: 1661724 - RNA, 19 nt, Artificial Sequence
  Description of Artificial Sequence: Synthetic oligonucleotide
  Antisense strand to SEQ ID NO: 1661723
aucuguaagaauauauccc

SEQ ID NO: 1661725 - RNA, 19 nt, Artificial Sequence
  Description of Artificial Sequence: Synthetic oligonucleotide
  Sense strand starting at position 2623 of SEQ ID NO: 1561307
auguguacuguagagggaa

SEQ ID NO: 1661726 - RNA, 19 nt, Artificial Sequence
  Description of Artificial Sequence: Synthetic oligonucleotide
  Antisense strand to SEQ ID NO: 1661725
uucccucuacaguacacau

SEQ ID NO: 1661727 - RNA, 19 nt, Artificial Sequence
  Description of Artificial Sequence: Synthetic oligonucleotide
  Sense strand starting at position 2792 of SEQ ID NO: 1561307
uccucugguuuccucagaa

SEQ ID NO: 1661728 - RNA, 19 nt, Artificial Sequence
  Description of Artificial Sequence: Synthetic oligonucleotide
  Antisense strand to SEQ ID NO: 1661727
uucugaggaaaccagagga

SEQ ID NO: 1661729 - RNA, 19 nt, Artificial Sequence
  Description of Artificial Sequence: Synthetic oligonucleotide
  Sense strand starting at position 2879 of SEQ ID NO: 1561307
cugccuguauggucacuaa

SEQ ID NO: 1661730 - RNA, 19 nt, Artificial Sequence
  Description of Artificial Sequence: Synthetic oligonucleotide
  Antisense strand to SEQ ID NO: 1661729
uuagugaccauacaggcag

SEQ ID NO: 1661731 - RNA, 19 nt, Artificial Sequence
  Description of Artificial Sequence: Synthetic oligonucleotide
  Sense strand starting at position 2882 of SEQ ID NO: 1561307
ccuguauggucacuaaugu

SEQ ID NO: 1661732 - RNA, 19 nt, Artificial Sequence
  Description of Artificial Sequence: Synthetic oligonucleotide
  Antisense strand to SEQ ID NO: 1661731
acauuagugaccauacagg

SEQ ID NO: 1661733 - RNA, 19 nt, Artificial Sequence
  Description of Artificial Sequence: Synthetic oligonucleotide
  Sense strand starting at position 2976 of SEQ ID NO: 1561307
uggugauguuucuuaucug

SEQ ID NO: 1661734 - RNA, 19 nt, Artificial Sequence
  Description of Artificial Sequence: Synthetic oligonucleotide
  Antisense strand to SEQ ID NO: 1661733
cagauaagaaacaucacca

SEQ ID NO: 1661735 - RNA, 19 nt, Artificial Sequence
  Description of Artificial Sequence: Synthetic oligonucleotide
  Sense strand starting at position 2979 of SEQ ID NO: 1561307
ugauguuucuuaucugaaa

SEQ ID NO: 1661736 - RNA, 19 nt, Artificial Sequence
  Description of Artificial Sequence: Synthetic oligonucleotide
  Antisense strand to SEQ ID NO: 1661735
uuucagauaagaaacauca

SEQ ID NO: 1661737 - RNA, 19 nt, Artificial Sequence
  Description of Artificial Sequence: Synthetic oligonucleotide
  Sense strand starting at position 3124 of SEQ ID NO: 1561307
cugcaauuacaccgacagu

SEQ ID NO: 1661738 - RNA, 19 nt, Artificial Sequence
  Description of Artificial Sequence: Synthetic oligonucleotide
  Antisense strand to SEQ ID NO: 1661737
acugucgguguaauugcag

SEQ ID NO: 1661739 - RNA, 19 nt, Artificial Sequence
  Description of Artificial Sequence: Synthetic oligonucleotide
  Sense strand starting at position 3133 of SEQ ID NO: 1561307
caccgacagugucugaauu

SEQ ID NO: 1661740 - RNA, 19 nt, Artificial Sequence
  Description of Artificial Sequence: Synthetic oligonucleotide
  Antisense strand to SEQ ID NO: 1661739
aauucagacacugucggug

SEQ ID NO: 1661741 - RNA, 19 nt, Artificial Sequence
  Description of Artificial Sequence: Synthetic oligonucleotide
  Sense strand starting at position 3546 of SEQ ID NO: 1561307
cggccaaauuacucaaagu

SEQ ID NO: 1661742 - RNA, 19 nt, Artificial Sequence
  Description of Artificial Sequence: Synthetic oligonucleotide
  Antisense strand to SEQ ID NO: 1661741
acuuugaguaauuuggccg

SEQ ID NO: 1661743 - RNA, 19 nt, Artificial Sequence
  Description of Artificial Sequence: Synthetic oligonucleotide
  Sense strand starting at position 3615 of SEQ ID NO: 1561307
acauaucugugauaaguga

SEQ ID NO: 1661744 - RNA, 19 nt, Artificial Sequence
  Description of Artificial Sequence: Synthetic oligonucleotide
  Antisense strand to SEQ ID NO: 1661743
ucacuuaucacagauaugu

SEQ ID NO: 1661745 - RNA, 19 nt, Artificial Sequence
  Description of Artificial Sequence: Synthetic oligonucleotide
  Sense strand starting at position 3668 of SEQ ID NO: 1561307
gacauugaauucugagaag

SEQ ID NO: 1661746 - RNA, 19 nt, Artificial Sequence
  Description of Artificial Sequence: Synthetic oligonucleotide
  Antisense strand to SEQ ID NO: 1661745
cuucucagaauucaauguc

SEQ ID NO: 1661747 - RNA, 19 nt, Artificial Sequence
  Description of Artificial Sequence: Synthetic oligonucleotide
  Sense strand starting at position 3671 of SEQ ID NO: 1561307
auugaauucugagaaguga

SEQ ID NO: 1661748 - RNA, 19 nt, Artificial Sequence
  Description of Artificial Sequence: Synthetic oligonucleotide
  Antisense strand to SEQ ID NO: 1661747
ucacuucucagaauucaau

SEQ ID NO: 1661749 - RNA, 19 nt, Artificial Sequence
  Description of Artificial Sequence: Synthetic oligonucleotide
  Sense strand starting at position 3701 of SEQ ID NO: 1561307
ugagcacacagcuguguua

SEQ ID NO: 1661750 - RNA, 19 nt, Artificial Sequence
  Description of Artificial Sequence: Synthetic oligonucleotide
  Antisense strand to SEQ ID NO: 1661749
uaacacagcugugugcuca

SEQ ID NO: 1661751 - RNA, 19 nt, Artificial Sequence
  Description of Artificial Sequence: Synthetic oligonucleotide
  Sense strand starting at position 3703 of SEQ ID NO: 1561307
agcacacagcuguguuaga

SEQ ID NO: 1661752 - RNA, 19 nt, Artificial Sequence
  Description of Artificial Sequence: Synthetic oligonucleotide
  Antisense strand to SEQ ID NO: 1661751
ucuaacacagcugugugcu

SEQ ID NO: 1661753 - RNA, 19 nt, Artificial Sequence
  Description of Artificial Sequence: Synthetic oligonucleotide
  Sense strand starting at position 3704 of SEQ ID NO: 1561307
gcacacagcuguguuagaa

SEQ ID NO: 1661754 - RNA, 19 nt, Artificial Sequence
  Description of Artificial Sequence: Synthetic oligonucleotide
  Antisense strand to SEQ ID NO: 1661753
uucuaacacagcugugugc

SEQ ID NO: 1661755 - RNA, 19 nt, Artificial Sequence
  Description of Artificial Sequence: Synthetic oligonucleotide
  Sense strand starting at position 3714 of SEQ ID NO: 1561307
guguuagaacuaugacuac

SEQ ID NO: 1661756 - RNA, 19 nt, Artificial Sequence
  Description of Artificial Sequence: Synthetic oligonucleotide
  Antisense strand to SEQ ID NO: 1661755
guagucauaguucuaacac

SEQ ID NO: 1661757 - RNA, 19 nt, Artificial Sequence
  Description of Artificial Sequence: Synthetic oligonucleotide
  Sense strand starting at position 1 of SEQ ID NO: 1561308
agcacagugagccaugauu

SEQ ID NO: 1661758 - RNA, 19 nt, Artificial Sequence
  Description of Artificial Sequence: Synthetic oligonucleotide
  Antisense strand to SEQ ID NO: 1661757
aaucauggcucacugugcu

SEQ ID NO: 1661759 - RNA, 19 nt, Artificial Sequence
  Description of Artificial Sequence: Synthetic oligonucleotide
  Sense strand starting at position 55 of SEQ ID NO: 1561308
uuauaaagcuaguagcaga

SEQ ID NO: 1661760 - RNA, 19 nt, Artificial Sequence
  Description of Artificial Sequence: Synthetic oligonucleotide
  Antisense strand to SEQ ID NO: 1661759
ucugcuacuagcuuuauaa

SEQ ID NO: 1661761 - RNA, 19 nt, Artificial Sequence
  Description of Artificial Sequence: Synthetic oligonucleotide
  Sense strand starting at position 66 of SEQ ID NO: 1561308
guagcagaagucuaaagac

SEQ ID NO: 1661762 - RNA, 19 nt, Artificial Sequence
  Description of Artificial Sequence: Synthetic oligonucleotide
  Antisense strand to SEQ ID NO: 1661761
gucuuuagacuucugcuac

SEQ ID NO: 1661763 - RNA, 19 nt, Artificial Sequence
  Description of Artificial Sequence: Synthetic oligonucleotide
  Sense strand starting at position 82 of SEQ ID NO: 1561308
gacugaaucugggugguuu

SEQ ID NO: 1661764 - RNA, 19 nt, Artificial Sequence
  Description of Artificial Sequence: Synthetic oligonucleotide
  Antisense strand to SEQ ID NO: 1661763
aaaccacccagauucaguc

SEQ ID NO: 1661765 - RNA, 19 nt, Artificial Sequence
  Description of Artificial Sequence: Synthetic oligonucleotide
  Sense strand starting at position 391 of SEQ ID NO: 1561308
cggccaaaucuggguuugu

SEQ ID NO: 1661766 - RNA, 19 nt, Artificial Sequence
  Description of Artificial Sequence: Synthetic oligonucleotide
  Antisense strand to SEQ ID NO: 1661765
acaaacccagauuuggccg

SEQ ID NO: 1661767 - RNA, 19 nt, Artificial Sequence
  Description of Artificial Sequence: Synthetic oligonucleotide
  Sense strand starting at position 392 of SEQ ID NO: 1561308
ggccaaaucuggguuuguu

SEQ ID NO: 1661768 - RNA, 19 nt, Artificial Sequence
  Description of Artificial Sequence: Synthetic oligonucleotide
  Antisense strand to SEQ ID NO: 1661767
aacaaacccagauuuggcc

SEQ ID NO: 1661769 - RNA, 19 nt, Artificial Sequence
  Description of Artificial Sequence: Synthetic oligonucleotide
  Sense strand starting at position 568 of SEQ ID NO: 1561308
uucugacauuccuacagga

SEQ ID NO: 1661770 - RNA, 19 nt, Artificial Sequence
  Description of Artificial Sequence: Synthetic oligonucleotide
  Antisense strand to SEQ ID NO: 1661769
uccuguaggaaugucagaa

SEQ ID NO: 1661771 - RNA, 19 nt, Artificial Sequence
  Description of Artificial Sequence: Synthetic oligonucleotide
  Sense strand starting at position 616 of SEQ ID NO: 1561308
ggguuaaugucaucauaaa

SEQ ID NO: 1661772 - RNA, 19 nt, Artificial Sequence
  Description of Artificial Sequence: Synthetic oligonucleotide
  Antisense strand to SEQ ID NO: 1661771
uuuaugaugacauuaaccc

SEQ ID NO: 1661773 - RNA, 19 nt, Artificial Sequence
  Description of Artificial Sequence: Synthetic oligonucleotide
  Sense strand starting at position 658 of SEQ ID NO: 1561308
cuccaugacgucugaggaa

SEQ ID NO: 1661774 - RNA, 19 nt, Artificial Sequence
  Description of Artificial Sequence: Synthetic oligonucleotide
  Antisense strand to SEQ ID NO: 1661773
uuccucagacgucauggag

SEQ ID NO: 1661775 - RNA, 19 nt, Artificial Sequence
  Description of Artificial Sequence: Synthetic oligonucleotide
  Sense strand starting at position 1263 of SEQ ID NO: 1561308
ggcccugcucugugggaaa

SEQ ID NO: 1661776 - RNA, 19 nt, Artificial Sequence
  Description of Artificial Sequence: Synthetic oligonucleotide
  Antisense strand to SEQ ID NO: 1661775
uuucccacagagcagggcc

SEQ ID NO: 1661777 - RNA, 19 nt, Artificial Sequence
  Description of Artificial Sequence: Synthetic oligonucleotide
  Sense strand starting at position 1508 of SEQ ID NO: 1561308
cgcagacucugagccuuaa

SEQ ID NO: 1661778 - RNA, 19 nt, Artificial Sequence
  Description of Artificial Sequence: Synthetic oligonucleotide
  Antisense strand to SEQ ID NO: 1661777
uuaaggcucagagucugcg

SEQ ID NO: 1661779 - RNA, 19 nt, Artificial Sequence
  Description of Artificial Sequence: Synthetic oligonucleotide
  Sense strand starting at position 2056 of SEQ ID NO: 1561308
uggcguucgugagcucuca

SEQ ID NO: 1661780 - RNA, 19 nt, Artificial Sequence
  Description of Artificial Sequence: Synthetic oligonucleotide
  Antisense strand to SEQ ID NO: 1661779
ugagagcucacgaacgcca

SEQ ID NO: 1661781 - RNA, 19 nt, Artificial Sequence
  Description of Artificial Sequence: Synthetic oligonucleotide
  Sense strand starting at position 2058 of SEQ ID NO: 1561308
gcguucgugagcucucagu

SEQ ID NO: 1661782 - RNA, 19 nt, Artificial Sequence
  Description of Artificial Sequence: Synthetic oligonucleotide
  Antisense strand to SEQ ID NO: 1661781
acugagagcucacgaacgc

SEQ ID NO: 1661783 - RNA, 19 nt, Artificial Sequence
  Description of Artificial Sequence: Synthetic oligonucleotide
  Sense strand starting at position 2092 of SEQ ID NO: 1561308
gugacugggccuggugaaa

SEQ ID NO: 1661784 - RNA, 19 nt, Artificial Sequence
  Description of Artificial Sequence: Synthetic oligonucleotide
  Antisense strand to SEQ ID NO: 1661783
uuucaccaggcccagucac

SEQ ID NO: 1661785 - RNA, 19 nt, Artificial Sequence
  Description of Artificial Sequence: Synthetic oligonucleotide
  Sense strand starting at position 2130 of SEQ ID NO: 1561308
gggcaucaacgcgggauaa

SEQ ID NO: 1661786 - RNA, 19 nt, Artificial Sequence
  Description of Artificial Sequence: Synthetic oligonucleotide
  Antisense strand to SEQ ID NO: 1661785
uuaucccgcguugaugccc

SEQ ID NO: 1661787 - RNA, 19 nt, Artificial Sequence
  Description of Artificial Sequence: Synthetic oligonucleotide
  Sense strand starting at position 2132 of SEQ ID NO: 1561308
gcaucaacgcgggauaagu

SEQ ID NO: 1661788 - RNA, 19 nt, Artificial Sequence
  Description of Artificial Sequence: Synthetic oligonucleotide
  Antisense strand to SEQ ID NO: 1661787
acuuaucccgcguugaugc

SEQ ID NO: 1661789 - RNA, 19 nt, Artificial Sequence
  Description of Artificial Sequence: Synthetic oligonucleotide
  Sense strand starting at position 2190 of SEQ ID NO: 1561308
ggcuuucguguuggaaacu

SEQ ID NO: 1661790 - RNA, 19 nt, Artificial Sequence
  Description of Artificial Sequence: Synthetic oligonucleotide
  Antisense strand to SEQ ID NO: 1661789
aguuuccaacacgaaagcc

SEQ ID NO: 1661791 - RNA, 19 nt, Artificial Sequence
  Description of Artificial Sequence: Synthetic oligonucleotide
  Sense strand starting at position 2352 of SEQ ID NO: 1561308
auuacaugguuauaaggaa

SEQ ID NO: 1661792 - RNA, 19 nt, Artificial Sequence
  Description of Artificial Sequence: Synthetic oligonucleotide
  Antisense strand to SEQ ID NO: 1661791
uuccuuauaaccauguaau

SEQ ID NO: 1661793 - RNA, 19 nt, Artificial Sequence
  Description of Artificial Sequence: Synthetic oligonucleotide
  Sense strand starting at position 2366 of SEQ ID NO: 1561308
aggaacaucacgugcaaga

SEQ ID NO: 1661794 - RNA, 19 nt, Artificial Sequence
  Description of Artificial Sequence: Synthetic oligonucleotide
  Antisense strand to SEQ ID NO: 1661793
ucuugcacgugauguuccu

SEQ ID NO: 1661795 - RNA, 19 nt, Artificial Sequence
  Description of Artificial Sequence: Synthetic oligonucleotide
  Sense strand starting at position 2376 of SEQ ID NO: 1561308
cgugcaagacacuaacaau

SEQ ID NO: 1661796 - RNA, 19 nt, Artificial Sequence
  Description of Artificial Sequence: Synthetic oligonucleotide
  Antisense strand to SEQ ID NO: 1661795
auuguuagugucuugcacg

SEQ ID NO: 1661797 - RNA, 19 nt, Artificial Sequence
  Description of Artificial Sequence: Synthetic oligonucleotide
  Sense strand starting at position 2394 of SEQ ID NO: 1561308
uuaugacgacuuuggacau

SEQ ID NO: 1661798 - RNA, 19 nt, Artificial Sequence
  Description of Artificial Sequence: Synthetic oligonucleotide
  Antisense strand to SEQ ID NO: 1661797
auguccaaagucgucauaa

SEQ ID NO: 1661799 - RNA, 19 nt, Artificial Sequence
  Description of Artificial Sequence: Synthetic oligonucleotide
  Sense strand starting at position 2404 of SEQ ID NO: 1561308
uuuggacauugcuagguaa

SEQ ID NO: 1661800 - RNA, 19 nt, Artificial Sequence
  Description of Artificial Sequence: Synthetic oligonucleotide
  Antisense strand to SEQ ID NO: 1661799
uuaccuagcaauguccaaa

SEQ ID NO: 1661801 - RNA, 19 nt, Artificial Sequence
  Description of Artificial Sequence: Synthetic oligonucleotide
  Sense strand starting at position 2406 of SEQ ID NO: 1561308
uggacauugcuagguaauu

SEQ ID NO: 1661802 - RNA, 19 nt, Artificial Sequence
  Description of Artificial Sequence: Synthetic oligonucleotide
  Antisense strand to SEQ ID NO: 1661801
aauuaccuagcaaugucca

SEQ ID NO: 1661803 - RNA, 19 nt, Artificial Sequence
  Description of Artificial Sequence: Synthetic oligonucleotide
  Sense strand starting at position 2407 of SEQ ID NO: 1561308
ggacauugcuagguaauug

SEQ ID NO: 1661804 - RNA, 19 nt, Artificial Sequence
  Description of Artificial Sequence: Synthetic oligonucleotide
  Antisense strand to SEQ ID NO: 1661803
caauuaccuagcaaugucc

SEQ ID NO: 1661805 - RNA, 19 nt, Artificial Sequence
  Description of Artificial Sequence: Synthetic oligonucleotide
  Sense strand starting at position 2411 of SEQ ID NO: 1561308
auugcuagguaauugucaa

SEQ ID NO: 1661806 - RNA, 19 nt, Artificial Sequence
  Description of Artificial Sequence: Synthetic oligonucleotide
  Antisense strand to SEQ ID NO: 1661805
uugacaauuaccuagcaau

SEQ ID NO: 1661807 - RNA, 19 nt, Artificial Sequence
  Description of Artificial Sequence: Synthetic oligonucleotide
  Sense strand starting at position 2705 of SEQ ID NO: 1561308
gggcuugggagcuguauuu

SEQ ID NO: 1661808 - RNA, 19 nt, Artificial Sequence
  Description of Artificial Sequence: Synthetic oligonucleotide
  Antisense strand to SEQ ID NO: 1661807
aaauacagcucccaagccc

SEQ ID NO: 1661809 - RNA, 19 nt, Artificial Sequence
  Description of Artificial Sequence: Synthetic oligonucleotide
  Sense strand starting at position 2801 of SEQ ID NO: 1561308
uacgaauucucguaccaca

SEQ ID NO: 1661810 - RNA, 19 nt, Artificial Sequence
  Description of Artificial Sequence: Synthetic oligonucleotide
  Antisense strand to SEQ ID NO: 1661809
ugugguacgagaauucgua

SEQ ID NO: 1661811 - RNA, 19 nt, Artificial Sequence
  Description of Artificial Sequence: Synthetic oligonucleotide
  Sense strand starting at position 2830 of SEQ ID NO: 1561308
ugcaaagauuuggcugguu

SEQ ID NO: 1661812 - RNA, 19 nt, Artificial Sequence
  Description of Artificial Sequence: Synthetic oligonucleotide
  Antisense strand to SEQ ID NO: 1661811
aaccagccaaaucuuugca

SEQ ID NO: 1661813 - RNA, 19 nt, Artificial Sequence
  Description of Artificial Sequence: Synthetic oligonucleotide
  Sense strand starting at position 2890 of SEQ ID NO: 1561308
aguggcaauuaugaagaga

SEQ ID NO: 1661814 - RNA, 19 nt, Artificial Sequence
  Description of Artificial Sequence: Synthetic oligonucleotide
  Antisense strand to SEQ ID NO: 1661813
ucucuucauaauugccacu

SEQ ID NO: 1661815 - RNA, 19 nt, Artificial Sequence
  Description of Artificial Sequence: Synthetic oligonucleotide
  Sense strand starting at position 2923 of SEQ ID NO: 1561308
aucauaaugcacugaugua

SEQ ID NO: 1661816 - RNA, 19 nt, Artificial Sequence
  Description of Artificial Sequence: Synthetic oligonucleotide
  Antisense strand to SEQ ID NO: 1661815
uacaucagugcauuaugau

SEQ ID NO: 1661817 - RNA, 19 nt, Artificial Sequence
  Description of Artificial Sequence: Synthetic oligonucleotide
  Sense strand starting at position 3226 of SEQ ID NO: 1561308
acacacaacucauggugaa

SEQ ID NO: 1661818 - RNA, 19 nt, Artificial Sequence
  Description of Artificial Sequence: Synthetic oligonucleotide
  Antisense strand to SEQ ID NO: 1661817
uucaccaugaguugugugu

SEQ ID NO: 1661819 - RNA, 19 nt, Artificial Sequence
  Description of Artificial Sequence: Synthetic oligonucleotide
  Sense strand starting at position 3252 of SEQ ID NO: 1561308
ucccaagcggucugauagu

SEQ ID NO: 1661820 - RNA, 19 nt, Artificial Sequence
  Description of Artificial Sequence: Synthetic oligonucleotide
  Antisense strand to SEQ ID NO: 1661819
acuaucagaccgcuuggga

SEQ ID NO: 1661821 - RNA, 19 nt, Artificial Sequence
  Description of Artificial Sequence: Synthetic oligonucleotide
  Sense strand starting at position 3261 of SEQ ID NO: 1561308
gucugauaguccuggugag

SEQ ID NO: 1661822 - RNA, 19 nt, Artificial Sequence
  Description of Artificial Sequence: Synthetic oligonucleotide
  Antisense strand to SEQ ID NO: 1661821
cucaccaggacuaucagac

SEQ ID NO: 1661823 - RNA, 19 nt, Artificial Sequence
  Description of Artificial Sequence: Synthetic oligonucleotide
  Sense strand starting at position 3262 of SEQ ID NO: 1561308
ucugauaguccuggugaga

SEQ ID NO: 1661824 - RNA, 19 nt, Artificial Sequence
  Description of Artificial Sequence: Synthetic oligonucleotide
  Antisense strand to SEQ ID NO: 1661823
ucucaccaggacuaucaga

SEQ ID NO: 1661825 - RNA, 19 nt, Artificial Sequence
  Description of Artificial Sequence: Synthetic oligonucleotide
  Sense strand starting at position 3723 of SEQ ID NO: 1561308
cuuggcuuccuguacgaau

SEQ ID NO: 1661826 - RNA, 19 nt, Artificial Sequence
  Description of Artificial Sequence: Synthetic oligonucleotide
  Antisense strand to SEQ ID NO: 1661825
auucguacaggaagccaag

SEQ ID NO: 1661827 - RNA, 19 nt, Artificial Sequence
  Description of Artificial Sequence: Synthetic oligonucleotide
  Sense strand starting at position 3857 of SEQ ID NO: 1561308
auagcagaacugugucaug

SEQ ID NO: 1661828 - RNA, 19 nt, Artificial Sequence
  Description of Artificial Sequence: Synthetic oligonucleotide
  Antisense strand to SEQ ID NO: 1661827
caugacacaguucugcuau

SEQ ID NO: 1661829 - RNA, 19 nt, Artificial Sequence
  Description of Artificial Sequence: Synthetic oligonucleotide
  Sense strand starting at position 3866 of SEQ ID NO: 1561308
cugugucaugcuguauguu

SEQ ID NO: 1661830 - RNA, 19 nt, Artificial Sequence
  Description of Artificial Sequence: Synthetic oligonucleotide
  Antisense strand to SEQ ID NO: 1661829
aacauacagcaugacacag

SEQ ID NO: 1661831 - RNA, 19 nt, Artificial Sequence
  Description of Artificial Sequence: Synthetic oligonucleotide
  Sense strand starting at position 3867 of SEQ ID NO: 1561308
ugugucaugcuguauguua

SEQ ID NO: 1661832 - RNA, 19 nt, Artificial Sequence
  Description of Artificial Sequence: Synthetic oligonucleotide
  Antisense strand to SEQ ID NO: 1661831
uaacauacagcaugacaca

SEQ ID NO: 1661833 - RNA, 19 nt, Artificial Sequence
  Description of Artificial Sequence: Synthetic oligonucleotide
  Sense strand starting at position 3869 of SEQ ID NO: 1561308
ugucaugcuguauguuaau

SEQ ID NO: 1661834 - RNA, 19 nt, Artificial Sequence
  Description of Artificial Sequence: Synthetic oligonucleotide
  Antisense strand to SEQ ID NO: 1661833
auuaacauacagcaugaca

SEQ ID NO: 1661835 - RNA, 19 nt, Artificial Sequence
  Description of Artificial Sequence: Synthetic oligonucleotide
  Sense strand starting at position 3938 of SEQ ID NO: 1561308
guuacagcucccuggacau

SEQ ID NO: 1661836 - RNA, 19 nt, Artificial Sequence
  Description of Artificial Sequence: Synthetic oligonucleotide
  Antisense strand to SEQ ID NO: 1661835
auguccagggagcuguaac

SEQ ID NO: 1661837 - RNA, 19 nt, Artificial Sequence
  Description of Artificial Sequence: Synthetic oligonucleotide
  Sense strand starting at position 37 of SEQ ID NO: 1561309
caggaugugggcugauaca

SEQ ID NO: 1661838 - RNA, 19 nt, Artificial Sequence
  Description of Artificial Sequence: Synthetic oligonucleotide
  Antisense strand to SEQ ID NO: 1661837
uguaucagcccacauccug

SEQ ID NO: 1661839 - RNA, 19 nt, Artificial Sequence
  Description of Artificial Sequence: Synthetic oligonucleotide
  Sense strand starting at position 75 of SEQ ID NO: 1561309
cucacugauuuacagaagu

SEQ ID NO: 1661840 - RNA, 19 nt, Artificial Sequence
  Description of Artificial Sequence: Synthetic oligonucleotide
  Antisense strand to SEQ ID NO: 1661839
acuucuguaaaucagugag

SEQ ID NO: 1661841 - RNA, 19 nt, Artificial Sequence
  Description of Artificial Sequence: Synthetic oligonucleotide
  Sense strand starting at position 108 of SEQ ID NO: 1561309
cguggcuaugcacuguuaa

SEQ ID NO: 1661842 - RNA, 19 nt, Artificial Sequence
  Description of Artificial Sequence: Synthetic oligonucleotide
  Antisense strand to SEQ ID NO: 1661841
uuaacagugcauagccacg

SEQ ID NO: 1661843 - RNA, 19 nt, Artificial Sequence
  Description of Artificial Sequence: Synthetic oligonucleotide
  Sense strand starting at position 150 of SEQ ID NO: 1561309
ucccguguugcauuaguaa

SEQ ID NO: 1661844 - RNA, 19 nt, Artificial Sequence
  Description of Artificial Sequence: Synthetic oligonucleotide
  Antisense strand to SEQ ID NO: 1661843
uuacuaaugcaacacggga

SEQ ID NO: 1661845 - RNA, 19 nt, Artificial Sequence
  Description of Artificial Sequence: Synthetic oligonucleotide
  Sense strand starting at position 230 of SEQ ID NO: 1561309
uuagaaggugauugcugua

SEQ ID NO: 1661846 - RNA, 19 nt, Artificial Sequence
  Description of Artificial Sequence: Synthetic oligonucleotide
  Antisense strand to SEQ ID NO: 1661845
uacagcaaucaccuucuaa

SEQ ID NO: 1661847 - RNA, 19 nt, Artificial Sequence
  Description of Artificial Sequence: Synthetic oligonucleotide
  Sense strand starting at position 235 of SEQ ID NO: 1561309
aggugauugcuguaucacu

SEQ ID NO: 1661848 - RNA, 19 nt, Artificial Sequence
  Description of Artificial Sequence: Synthetic oligonucleotide
  Antisense strand to SEQ ID NO: 1661847
agugauacagcaaucaccu

SEQ ID NO: 1661849 - RNA, 19 nt, Artificial Sequence
  Description of Artificial Sequence: Synthetic oligonucleotide
  Sense strand starting at position 243 of SEQ ID NO: 1561309
gcuguaucacuugaauguc

SEQ ID NO: 1661850 - RNA, 19 nt, Artificial Sequence
  Description of Artificial Sequence: Synthetic oligonucleotide
  Antisense strand to SEQ ID NO: 1661849
gacauucaagugauacagc

SEQ ID NO: 1661851 - RNA, 19 nt, Artificial Sequence
  Description of Artificial Sequence: Synthetic oligonucleotide
  Sense strand starting at position 289 of SEQ ID NO: 1561309
ccacauuuaucagacgaaa

SEQ ID NO: 1661852 - RNA, 19 nt, Artificial Sequence
  Description of Artificial Sequence: Synthetic oligonucleotide
  Antisense strand to SEQ ID NO: 1661851
uuucgucugauaaaugugg

SEQ ID NO: 1661853 - RNA, 19 nt, Artificial Sequence
  Description of Artificial Sequence: Synthetic oligonucleotide
  Sense strand starting at position 1101 of SEQ ID NO: 1561309
ggcauaucacccuguaaag

SEQ ID NO: 1661854 - RNA, 19 nt, Artificial Sequence
  Description of Artificial Sequence: Synthetic oligonucleotide
  Antisense strand to SEQ ID NO: 1661853
cuuuacagggugauaugcc

SEQ ID NO: 1661855 - RNA, 19 nt, Artificial Sequence
  Description of Artificial Sequence: Synthetic oligonucleotide
  Sense strand starting at position 1156 of SEQ ID NO: 1561309
ugagguaucugugcauaga

SEQ ID NO: 1661856 - RNA, 19 nt, Artificial Sequence
  Description of Artificial Sequence: Synthetic oligonucleotide
  Antisense strand to SEQ ID NO: 1661855
ucuaugcacagauaccuca

SEQ ID NO: 1661857 - RNA, 19 nt, Artificial Sequence
  Description of Artificial Sequence: Synthetic oligonucleotide
  Sense strand starting at position 1157 of SEQ ID NO: 1561309
gagguaucugugcauagag

SEQ ID NO: 1661858 - RNA, 19 nt, Artificial Sequence
  Description of Artificial Sequence: Synthetic oligonucleotide
  Antisense strand to SEQ ID NO: 1661857
cucuaugcacagauaccuc

SEQ ID NO: 1661859 - RNA, 19 nt, Artificial Sequence
  Description of Artificial Sequence: Synthetic oligonucleotide
  Sense strand starting at position 1159 of SEQ ID NO: 1561309
gguaucugugcauagagga

SEQ ID NO: 1661860 - RNA, 19 nt, Artificial Sequence
  Description of Artificial Sequence: Synthetic oligonucleotide
  Antisense strand to SEQ ID NO: 1661859
uccucuaugcacagauacc

SEQ ID NO: 1661861 - RNA, 19 nt, Artificial Sequence
  Description of Artificial Sequence: Synthetic oligonucleotide
  Sense strand starting at position 1251 of SEQ ID NO: 1561309
agaguaauccauugcuuug

SEQ ID NO: 1661862 - RNA, 19 nt, Artificial Sequence
  Description of Artificial Sequence: Synthetic oligonucleotide
  Antisense strand to SEQ ID NO: 1661861
caaagcaauggauuacucu

SEQ ID NO: 1661863 - RNA, 19 nt, Artificial Sequence
  Description of Artificial Sequence: Synthetic oligonucleotide
  Sense strand starting at position 1257 of SEQ ID NO: 1561309
auccauugcuuuguugaaa

SEQ ID NO: 1661864 - RNA, 19 nt, Artificial Sequence
  Description of Artificial Sequence: Synthetic oligonucleotide
  Antisense strand to SEQ ID NO: 1661863
uuucaacaaagcaauggau

SEQ ID NO: 1661865 - RNA, 19 nt, Artificial Sequence
  Description of Artificial Sequence: Synthetic oligonucleotide
  Sense strand starting at position 1315 of SEQ ID NO: 1561309
aggagaaacgguugcuaau

SEQ ID NO: 1661866 - RNA, 19 nt, Artificial Sequence
  Description of Artificial Sequence: Synthetic oligonucleotide
  Antisense strand to SEQ ID NO: 1661865
auuagcaaccguuucuccu

SEQ ID NO: 1661867 - RNA, 19 nt, Artificial Sequence
  Description of Artificial Sequence: Synthetic oligonucleotide
  Sense strand starting at position 1327 of SEQ ID NO: 1561309
ugcuaaugucgugaaugga

SEQ ID NO: 1661868 - RNA, 19 nt, Artificial Sequence
  Description of Artificial Sequence: Synthetic oligonucleotide
  Antisense strand to SEQ ID NO: 1661867
uccauucacgacauuagca

SEQ ID NO: 1661869 - RNA, 19 nt, Artificial Sequence
  Description of Artificial Sequence: Synthetic oligonucleotide
  Sense strand starting at position 1491 of SEQ ID NO: 1561309
guguccucuguggagagaa

SEQ ID NO: 1661870 - RNA, 19 nt, Artificial Sequence
  Description of Artificial Sequence: Synthetic oligonucleotide
  Antisense strand to SEQ ID NO: 1661869
uucucuccacagaggacac

SEQ ID NO: 1661871 - RNA, 19 nt, Artificial Sequence
  Description of Artificial Sequence: Synthetic oligonucleotide
  Sense strand starting at position 2116 of SEQ ID NO: 1561309
ugcaucuugacagauguga

SEQ ID NO: 1661872 - RNA, 19 nt, Artificial Sequence
  Description of Artificial Sequence: Synthetic oligonucleotide
  Antisense strand to SEQ ID NO: 1661871
ucacaucugucaagaugca

SEQ ID NO: 1661873 - RNA, 19 nt, Artificial Sequence
  Description of Artificial Sequence: Synthetic oligonucleotide
  Sense strand starting at position 2120 of SEQ ID NO: 1561309
ucuugacagaugugaauga

SEQ ID NO: 1661874 - RNA, 19 nt, Artificial Sequence
  Description of Artificial Sequence: Synthetic oligonucleotide
  Antisense strand to SEQ ID NO: 1661873
ucauucacaucugucaaga

SEQ ID NO: 1661875 - RNA, 19 nt, Artificial Sequence
  Description of Artificial Sequence: Synthetic oligonucleotide
  Sense strand starting at position 2145 of SEQ ID NO: 1561309
augugaagcauagaugagu

SEQ ID NO: 1661876 - RNA, 19 nt, Artificial Sequence
  Description of Artificial Sequence: Synthetic oligonucleotide
  Antisense strand to SEQ ID NO: 1661875
acucaucuaugcuucacau

SEQ ID NO: 1661877 - RNA, 19 nt, Artificial Sequence
  Description of Artificial Sequence: Synthetic oligonucleotide
  Sense strand starting at position 2156 of SEQ ID NO: 1561309
agaugagugaagcgggaau

SEQ ID NO: 1661878 - RNA, 19 nt, Artificial Sequence
  Description of Artificial Sequence: Synthetic oligonucleotide
  Antisense strand to SEQ ID NO: 1661877
auucccgcuucacucaucu

SEQ ID NO: 1661879 - RNA, 19 nt, Artificial Sequence
  Description of Artificial Sequence: Synthetic oligonucleotide
  Sense strand starting at position 2286 of SEQ ID NO: 1561309
gaacuuaauccggguuuac

SEQ ID NO: 1661880 - RNA, 19 nt, Artificial Sequence
  Description of Artificial Sequence: Synthetic oligonucleotide
  Antisense strand to SEQ ID NO: 1661879
guaaacccggauuaaguuc

SEQ ID NO: 1661881 - RNA, 19 nt, Artificial Sequence
  Description of Artificial Sequence: Synthetic oligonucleotide
  Sense strand starting at position 2308 of SEQ ID NO: 1561309
aggagauacuuccuguacu

SEQ ID NO: 1661882 - RNA, 19 nt, Artificial Sequence
  Description of Artificial Sequence: Synthetic oligonucleotide
  Antisense strand to SEQ ID NO: 1661881
aguacaggaaguaucuccu

SEQ ID NO: 1661883 - RNA, 19 nt, Artificial Sequence
  Description of Artificial Sequence: Synthetic oligonucleotide
  Sense strand starting at position 2380 of SEQ ID NO: 1561309
gggaguuccaggcaggacu

SEQ ID NO: 1661884 - RNA, 19 nt, Artificial Sequence
  Description of Artificial Sequence: Synthetic oligonucleotide
  Antisense strand to SEQ ID NO: 1661883
aguccugccuggaacuccc

SEQ ID NO: 1661885 - RNA, 19 nt, Artificial Sequence
  Description of Artificial Sequence: Synthetic oligonucleotide
  Sense strand starting at position 2405 of SEQ ID NO: 1561309
gaagaaagggcgugauauu

SEQ ID NO: 1661886 - RNA, 19 nt, Artificial Sequence
  Description of Artificial Sequence: Synthetic oligonucleotide
  Antisense strand to SEQ ID NO: 1661885
aauaucacgcccuuucuuc

SEQ ID NO: 1661887 - RNA, 19 nt, Artificial Sequence
  Description of Artificial Sequence: Synthetic oligonucleotide
  Sense strand starting at position 2406 of SEQ ID NO: 1561309
aagaaagggcgugauauuc

SEQ ID NO: 1661888 - RNA, 19 nt, Artificial Sequence
  Description of Artificial Sequence: Synthetic oligonucleotide
  Antisense strand to SEQ ID NO: 1661887
gaauaucacgcccuuucuu

SEQ ID NO: 1661889 - RNA, 19 nt, Artificial Sequence
  Description of Artificial Sequence: Synthetic oligonucleotide
  Sense strand starting at position 2416 of SEQ ID NO: 1561309
gugauauucccagggaucg

SEQ ID NO: 1661890 - RNA, 19 nt, Artificial Sequence
  Description of Artificial Sequence: Synthetic oligonucleotide
  Antisense strand to SEQ ID NO: 1661889
cgaucccugggaauaucac

SEQ ID NO: 1661891 - RNA, 19 nt, Artificial Sequence
  Description of Artificial Sequence: Synthetic oligonucleotide
  Sense strand starting at position 2422 of SEQ ID NO: 1561309
uucccagggaucggaaauu

SEQ ID NO: 1661892 - RNA, 19 nt, Artificial Sequence
  Description of Artificial Sequence: Synthetic oligonucleotide
  Antisense strand to SEQ ID NO: 1661891
aauuuccgaucccugggaa

SEQ ID NO: 1661893 - RNA, 19 nt, Artificial Sequence
  Description of Artificial Sequence: Synthetic oligonucleotide
  Sense strand starting at position 2740 of SEQ ID NO: 1561309
ggauuucguuuguugucca

SEQ ID NO: 1661894 - RNA, 19 nt, Artificial Sequence
  Description of Artificial Sequence: Synthetic oligonucleotide
  Antisense strand to SEQ ID NO: 1661893
uggacaacaaacgaaaucc

SEQ ID NO: 1661895 - RNA, 19 nt, Artificial Sequence
  Description of Artificial Sequence: Synthetic oligonucleotide
  Sense strand starting at position 2889 of SEQ ID NO: 1561309
aguucuauuuccguaaucu

SEQ ID NO: 1661896 - RNA, 19 nt, Artificial Sequence
  Description of Artificial Sequence: Synthetic oligonucleotide
  Antisense strand to SEQ ID NO: 1661895
agauuacggaaauagaacu

SEQ ID NO: 1661897 - RNA, 19 nt, Artificial Sequence
  Description of Artificial Sequence: Synthetic oligonucleotide
  Sense strand starting at position 2893 of SEQ ID NO: 1561309
cuauuuccguaaucuguaa

SEQ ID NO: 1661898 - RNA, 19 nt, Artificial Sequence
  Description of Artificial Sequence: Synthetic oligonucleotide
  Antisense strand to SEQ ID NO: 1661897
uuacagauuacggaaauag

SEQ ID NO: 1661899 - RNA, 19 nt, Artificial Sequence
  Description of Artificial Sequence: Synthetic oligonucleotide
  Sense strand starting at position 2897 of SEQ ID NO: 1561309
uuccguaaucuguaaagaa

SEQ ID NO: 1661900 - RNA, 19 nt, Artificial Sequence
  Description of Artificial Sequence: Synthetic oligonucleotide
  Antisense strand to SEQ ID NO: 1661899
uucuuuacagauuacggaa

SEQ ID NO: 1661901 - RNA, 19 nt, Artificial Sequence
  Description of Artificial Sequence: Synthetic oligonucleotide
  Sense strand starting at position 3022 of SEQ ID NO: 1561309
gcuuaagagucagugacug

SEQ ID NO: 1661902 - RNA, 19 nt, Artificial Sequence
  Description of Artificial Sequence: Synthetic oligonucleotide
  Antisense strand to SEQ ID NO: 1661901
cagucacugacucuuaagc

SEQ ID NO: 1661903 - RNA, 19 nt, Artificial Sequence
  Description of Artificial Sequence: Synthetic oligonucleotide
  Sense strand starting at position 3027 of SEQ ID NO: 1561309
agagucagugacugcugaa

SEQ ID NO: 1661904 - RNA, 19 nt, Artificial Sequence
  Description of Artificial Sequence: Synthetic oligonucleotide
  Antisense strand to SEQ ID NO: 1661903
uucagcagucacugacucu

SEQ ID NO: 1661905 - RNA, 19 nt, Artificial Sequence
  Description of Artificial Sequence: Synthetic oligonucleotide
  Sense strand starting at position 3195 of SEQ ID NO: 1561309
ucucaccuguggucaauuu

SEQ ID NO: 1661906 - RNA, 19 nt, Artificial Sequence
  Description of Artificial Sequence: Synthetic oligonucleotide
  Antisense strand to SEQ ID NO: 1661905
aaauugaccacaggugaga

SEQ ID NO: 1661907 - RNA, 19 nt, Artificial Sequence
  Description of Artificial Sequence: Synthetic oligonucleotide
  Sense strand starting at position 3706 of SEQ ID NO: 1561309
acgugcauuugccugugaa

SEQ ID NO: 1661908 - RNA, 19 nt, Artificial Sequence
  Description of Artificial Sequence: Synthetic oligonucleotide
  Antisense strand to SEQ ID NO: 1661907
uucacaggcaaaugcacgu

SEQ ID NO: 1661909 - RNA, 19 nt, Artificial Sequence
  Description of Artificial Sequence: Synthetic oligonucleotide
  Sense strand starting at position 3707 of SEQ ID NO: 1561309
cgugcauuugccugugaag

SEQ ID NO: 1661910 - RNA, 19 nt, Artificial Sequence
  Description of Artificial Sequence: Synthetic oligonucleotide
  Antisense strand to SEQ ID NO: 1661909
cuucacaggcaaaugcacg

SEQ ID NO: 1661911 - RNA, 19 nt, Artificial Sequence
  Description of Artificial Sequence: Synthetic oligonucleotide
  Sense strand starting at position 3709 of SEQ ID NO: 1561309
ugcauuugccugugaaguu

SEQ ID NO: 1661912 - RNA, 19 nt, Artificial Sequence
  Description of Artificial Sequence: Synthetic oligonucleotide
  Antisense strand to SEQ ID NO: 1661911
aacuucacaggcaaaugca

SEQ ID NO: 1661913 - RNA, 19 nt, Artificial Sequence
  Description of Artificial Sequence: Synthetic oligonucleotide
  Sense strand starting at position 3866 of SEQ ID NO: 1561309
cuuugcaggcuccagauua

SEQ ID NO: 1661914 - RNA, 19 nt, Artificial Sequence
  Description of Artificial Sequence: Synthetic oligonucleotide
  Antisense strand to SEQ ID NO: 1661913
uaaucuggagccugcaaag

SEQ ID NO: 1661915 - RNA, 19 nt, Artificial Sequence
  Description of Artificial Sequence: Synthetic oligonucleotide
  Sense strand starting at position 3879 of SEQ ID NO: 1561309
agauuagucucagugugga

SEQ ID NO: 1661916 - RNA, 19 nt, Artificial Sequence
  Description of Artificial Sequence: Synthetic oligonucleotide
  Antisense strand to SEQ ID NO: 1661915
uccacacugagacuaaucu

SEQ ID NO: 1661917 - RNA, 19 nt, Artificial Sequence
  Description of Artificial Sequence: Synthetic oligonucleotide
  Sense strand starting at position 516 of SEQ ID NO: 1561310
ggaaccuuccacugguuaa

SEQ ID NO: 1661918 - RNA, 19 nt, Artificial Sequence
  Description of Artificial Sequence: Synthetic oligonucleotide
  Antisense strand to SEQ ID NO: 1661917
uuaaccaguggaagguucc

SEQ ID NO: 1661919 - RNA, 19 nt, Artificial Sequence
  Description of Artificial Sequence: Synthetic oligonucleotide
  Sense strand starting at position 527 of SEQ ID NO: 1561310
cugguuaauugcucagaga

SEQ ID NO: 1661920 - RNA, 19 nt, Artificial Sequence
  Description of Artificial Sequence: Synthetic oligonucleotide
  Antisense strand to SEQ ID NO: 1661919
ucucugagcaauuaaccag

SEQ ID NO: 1661921 - RNA, 19 nt, Artificial Sequence
  Description of Artificial Sequence: Synthetic oligonucleotide
  Sense strand starting at position 528 of SEQ ID NO: 1561310
ugguuaauugcucagagaa

SEQ ID NO: 1661922 - RNA, 19 nt, Artificial Sequence
  Description of Artificial Sequence: Synthetic oligonucleotide
  Antisense strand to SEQ ID NO: 1661921
uucucugagcaauuaacca

SEQ ID NO: 1661923 - RNA, 19 nt, Artificial Sequence
  Description of Artificial Sequence: Synthetic oligonucleotide
  Sense strand starting at position 606 of SEQ ID NO: 1561310
aucagaauguaucaaagug

SEQ ID NO: 1661924 - RNA, 19 nt, Artificial Sequence
  Description of Artificial Sequence: Synthetic oligonucleotide
  Antisense strand to SEQ ID NO: 1661923
cacuuugauacauucugau

SEQ ID NO: 1661925 - RNA, 19 nt, Artificial Sequence
  Description of Artificial Sequence: Synthetic oligonucleotide
  Sense strand starting at position 973 of SEQ ID NO: 1561310
ccacuuauauacggaacaa

SEQ ID NO: 1661926 - RNA, 19 nt, Artificial Sequence
  Description of Artificial Sequence: Synthetic oligonucleotide
  Antisense strand to SEQ ID NO: 1661925
uuguuccguauauaagugg

SEQ ID NO: 1661927 - RNA, 19 nt, Artificial Sequence
  Description of Artificial Sequence: Synthetic oligonucleotide
  Sense strand starting at position 1035 of SEQ ID NO: 1561310
gcgaaaucucuuggguaga

SEQ ID NO: 1661928 - RNA, 19 nt, Artificial Sequence
  Description of Artificial Sequence: Synthetic oligonucleotide
  Antisense strand to SEQ ID NO: 1661927
ucuacccaagagauuucgc

SEQ ID NO: 1661929 - RNA, 19 nt, Artificial Sequence
  Description of Artificial Sequence: Synthetic oligonucleotide
  Sense strand starting at position 1197 of SEQ ID NO: 1561310
ggaauuaaggguggcuaga

SEQ ID NO: 1661930 - RNA, 19 nt, Artificial Sequence
  Description of Artificial Sequence: Synthetic oligonucleotide
  Antisense strand to SEQ ID NO: 1661929
ucuagccacccuuaauucc

SEQ ID NO: 1661931 - RNA, 19 nt, Artificial Sequence
  Description of Artificial Sequence: Synthetic oligonucleotide
  Sense strand starting at position 1199 of SEQ ID NO: 1561310
aauuaaggguggcuagaau

SEQ ID NO: 1661932 - RNA, 19 nt, Artificial Sequence
  Description of Artificial Sequence: Synthetic oligonucleotide
  Antisense strand to SEQ ID NO: 1661931
auucuagccacccuuaauu

SEQ ID NO: 1661933 - RNA, 19 nt, Artificial Sequence
  Description of Artificial Sequence: Synthetic oligonucleotide
  Sense strand starting at position 1256 of SEQ ID NO: 1561310
acuuucugaucaguuaaga

SEQ ID NO: 1661934 - RNA, 19 nt, Artificial Sequence
  Description of Artificial Sequence: Synthetic oligonucleotide
  Antisense strand to SEQ ID NO: 1661933
ucuuaacugaucagaaagu

SEQ ID NO: 1661935 - RNA, 19 nt, Artificial Sequence
  Description of Artificial Sequence: Synthetic oligonucleotide
  Sense strand starting at position 1366 of SEQ ID NO: 1561310
gggucagucccuggugaug

SEQ ID NO: 1661936 - RNA, 19 nt, Artificial Sequence
  Description of Artificial Sequence: Synthetic oligonucleotide
  Antisense strand to SEQ ID NO: 1661935
caucaccagggacugaccc

SEQ ID NO: 1661937 - RNA, 19 nt, Artificial Sequence
  Description of Artificial Sequence: Synthetic oligonucleotide
  Sense strand starting at position 1449 of SEQ ID NO: 1561310
gguucucacaagugaggaa

SEQ ID NO: 1661938 - RNA, 19 nt, Artificial Sequence
  Description of Artificial Sequence: Synthetic oligonucleotide
  Antisense strand to SEQ ID NO: 1661937
uuccucacuugugagaacc

SEQ ID NO: 1661939 - RNA, 19 nt, Artificial Sequence
  Description of Artificial Sequence: Synthetic oligonucleotide
  Sense strand starting at position 1496 of SEQ ID NO: 1561310
ccaaccaagugguuucuua

SEQ ID NO: 1661940 - RNA, 19 nt, Artificial Sequence
  Description of Artificial Sequence: Synthetic oligonucleotide
  Antisense strand to SEQ ID NO: 1661939
uaagaaaccacuugguugg

SEQ ID NO: 1661941 - RNA, 19 nt, Artificial Sequence
  Description of Artificial Sequence: Synthetic oligonucleotide
  Sense strand starting at position 1560 of SEQ ID NO: 1561310
cccgcugucaccgaacaau

SEQ ID NO: 1661942 - RNA, 19 nt, Artificial Sequence
  Description of Artificial Sequence: Synthetic oligonucleotide
  Antisense strand to SEQ ID NO: 1661941
auuguucggugacagcggg

SEQ ID NO: 1661943 - RNA, 19 nt, Artificial Sequence
  Description of Artificial Sequence: Synthetic oligonucleotide
  Sense strand starting at position 1868 of SEQ ID NO: 1561310
cgguguccucccuacggau

SEQ ID NO: 1661944 - RNA, 19 nt, Artificial Sequence
  Description of Artificial Sequence: Synthetic oligonucleotide
  Antisense strand to SEQ ID NO: 1661943
auccguagggaggacaccg

SEQ ID NO: 1661945 - RNA, 19 nt, Artificial Sequence
  Description of Artificial Sequence: Synthetic oligonucleotide
  Sense strand starting at position 1951 of SEQ ID NO: 1561310
gcaggugaaacgcaaucuu

SEQ ID NO: 1661946 - RNA, 19 nt, Artificial Sequence
  Description of Artificial Sequence: Synthetic oligonucleotide
  Antisense strand to SEQ ID NO: 1661945
aagauugcguuucaccugc

SEQ ID NO: 1661947 - RNA, 19 nt, Artificial Sequence
  Description of Artificial Sequence: Synthetic oligonucleotide
  Sense strand starting at position 2036 of SEQ ID NO: 1561310
agcugagguccugauugga

SEQ ID NO: 1661948 - RNA, 19 nt, Artificial Sequence
  Description of Artificial Sequence: Synthetic oligonucleotide
  Antisense strand to SEQ ID NO: 1661947
uccaaucaggaccucagcu

SEQ ID NO: 1661949 - RNA, 19 nt, Artificial Sequence
  Description of Artificial Sequence: Synthetic oligonucleotide
  Sense strand starting at position 2072 of SEQ ID NO: 1561310
ccucuuuaucacugaguga

SEQ ID NO: 1661950 - RNA, 19 nt, Artificial Sequence
  Description of Artificial Sequence: Synthetic oligonucleotide
  Antisense strand to SEQ ID NO: 1661949
ucacucagugauaaagagg

SEQ ID NO: 1661951 - RNA, 19 nt, Artificial Sequence
  Description of Artificial Sequence: Synthetic oligonucleotide
  Sense strand starting at position 2150 of SEQ ID NO: 1561310
caggacguuugcguuuaaa

SEQ ID NO: 1661952 - RNA, 19 nt, Artificial Sequence
  Description of Artificial Sequence: Synthetic oligonucleotide
  Antisense strand to SEQ ID NO: 1661951
uuuaaacgcaaacguccug

SEQ ID NO: 1661953 - RNA, 19 nt, Artificial Sequence
  Description of Artificial Sequence: Synthetic oligonucleotide
  Sense strand starting at position 2162 of SEQ ID NO: 1561310
guuuaaaccgaauguguuc

SEQ ID NO: 1661954 - RNA, 19 nt, Artificial Sequence
  Description of Artificial Sequence: Synthetic oligonucleotide
  Antisense strand to SEQ ID NO: 1661953
gaacacauucgguuuaaac

SEQ ID NO: 1661955 - RNA, 19 nt, Artificial Sequence
  Description of Artificial Sequence: Synthetic oligonucleotide
  Sense strand starting at position 2274 of SEQ ID NO: 1561310
acugaaaucugucucguug

SEQ ID NO: 1661956 - RNA, 19 nt, Artificial Sequence
  Description of Artificial Sequence: Synthetic oligonucleotide
  Antisense strand to SEQ ID NO: 1661955
caacgagacagauuucagu

SEQ ID NO: 1661957 - RNA, 19 nt, Artificial Sequence
  Description of Artificial Sequence: Synthetic oligonucleotide
  Sense strand starting at position 2278 of SEQ ID NO: 1561310
aaaucugucucguugcaca

SEQ ID NO: 1661958 - RNA, 19 nt, Artificial Sequence
  Description of Artificial Sequence: Synthetic oligonucleotide
  Antisense strand to SEQ ID NO: 1661957
ugugcaacgagacagauuu

SEQ ID NO: 1661959 - RNA, 19 nt, Artificial Sequence
  Description of Artificial Sequence: Synthetic oligonucleotide
  Sense strand starting at position 2335 of SEQ ID NO: 1561310
ccuccauuccauugucuga

SEQ ID NO: 1661960 - RNA, 19 nt, Artificial Sequence
  Description of Artificial Sequence: Synthetic oligonucleotide
  Antisense strand to SEQ ID NO: 1661959
ucagacaauggaauggagg

SEQ ID NO: 1661961 - RNA, 19 nt, Artificial Sequence
  Description of Artificial Sequence: Synthetic oligonucleotide
  Sense strand starting at position 2345 of SEQ ID NO: 1561310
auugucugaguucgugaau

SEQ ID NO: 1661962 - RNA, 19 nt, Artificial Sequence
  Description of Artificial Sequence: Synthetic oligonucleotide
  Antisense strand to SEQ ID NO: 1661961
auucacgaacucagacaau

SEQ ID NO: 1661963 - RNA, 19 nt, Artificial Sequence
  Description of Artificial Sequence: Synthetic oligonucleotide
  Sense strand starting at position 2346 of SEQ ID NO: 1561310
uugucugaguucgugaauu

SEQ ID NO: 1661964 - RNA, 19 nt, Artificial Sequence
  Description of Artificial Sequence: Synthetic oligonucleotide
  Antisense strand to SEQ ID NO: 1661963
aauucacgaacucagacaa

SEQ ID NO: 1661965 - RNA, 19 nt, Artificial Sequence
  Description of Artificial Sequence: Synthetic oligonucleotide
  Sense strand starting at position 2360 of SEQ ID NO: 1561310
gaauuugacugugggaauc

SEQ ID NO: 1661966 - RNA, 19 nt, Artificial Sequence
  Description of Artificial Sequence: Synthetic oligonucleotide
  Antisense strand to SEQ ID NO: 1661965
gauucccacagucaaauuc

SEQ ID NO: 1661967 - RNA, 19 nt, Artificial Sequence
  Description of Artificial Sequence: Synthetic oligonucleotide
  Sense strand starting at position 2382 of SEQ ID NO: 1561310
uguaaauggcgucauaaag

SEQ ID NO: 1661968 - RNA, 19 nt, Artificial Sequence
  Description of Artificial Sequence: Synthetic oligonucleotide
  Antisense strand to SEQ ID NO: 1661967
cuuuaugacgccauuuaca

SEQ ID NO: 1661969 - RNA, 19 nt, Artificial Sequence
  Description of Artificial Sequence: Synthetic oligonucleotide
  Sense strand starting at position 2454 of SEQ ID NO: 1561310
caccuuguaguauguguua

SEQ ID NO: 1661970 - RNA, 19 nt, Artificial Sequence
  Description of Artificial Sequence: Synthetic oligonucleotide
  Antisense strand to SEQ ID NO: 1661969
uaacacauacuacaaggug

SEQ ID NO: 1661971 - RNA, 19 nt, Artificial Sequence
  Description of Artificial Sequence: Synthetic oligonucleotide
  Sense strand starting at position 2457 of SEQ ID NO: 1561310
cuuguaguauguguuagga

SEQ ID NO: 1661972 - RNA, 19 nt, Artificial Sequence
  Description of Artificial Sequence: Synthetic oligonucleotide
  Antisense strand to SEQ ID NO: 1661971
uccuaacacauacuacaag

SEQ ID NO: 1661973 - RNA, 19 nt, Artificial Sequence
  Description of Artificial Sequence: Synthetic oligonucleotide
  Sense strand starting at position 2461 of SEQ ID NO: 1561310
uaguauguguuaggauuua

SEQ ID NO: 1661974 - RNA, 19 nt, Artificial Sequence
  Description of Artificial Sequence: Synthetic oligonucleotide
  Antisense strand to SEQ ID NO: 1661973
uaaauccuaacacauacua

SEQ ID NO: 1661975 - RNA, 19 nt, Artificial Sequence
  Description of Artificial Sequence: Synthetic oligonucleotide
  Sense strand starting at position 3451 of SEQ ID NO: 1561310
cuaaauuagucaguuccua

SEQ ID NO: 1661976 - RNA, 19 nt, Artificial Sequence
  Description of Artificial Sequence: Synthetic oligonucleotide
  Antisense strand to SEQ ID NO: 1661975
uaggaacugacuaauuuag

SEQ ID NO: 1661977 - RNA, 19 nt, Artificial Sequence
  Description of Artificial Sequence: Synthetic oligonucleotide
  Sense strand starting at position 3455 of SEQ ID NO: 1561310
auuagucaguuccuaaauc

SEQ ID NO: 1661978 - RNA, 19 nt, Artificial Sequence
  Description of Artificial Sequence: Synthetic oligonucleotide
  Antisense strand to SEQ ID NO: 1661977
gauuuaggaacugacuaau

SEQ ID NO: 1661979 - RNA, 19 nt, Artificial Sequence
  Description of Artificial Sequence: Synthetic oligonucleotide
  Sense strand starting at position 3881 of SEQ ID NO: 1561310
ugccuuuggcuaugguaaa

SEQ ID NO: 1661980 - RNA, 19 nt, Artificial Sequence
  Description of Artificial Sequence: Synthetic oligonucleotide
  Antisense strand to SEQ ID NO: 1661979
uuuaccauagccaaaggca

SEQ ID NO: 1661981 - RNA, 19 nt, Artificial Sequence
  Description of Artificial Sequence: Synthetic oligonucleotide
  Sense strand starting at position 3894 of SEQ ID NO: 1561310
gguaaauaauaugucuaug

SEQ ID NO: 1661982 - RNA, 19 nt, Artificial Sequence
  Description of Artificial Sequence: Synthetic oligonucleotide
  Antisense strand to SEQ ID NO: 1661981
cauagacauauuauuuacc

SEQ ID NO: 1661983 - RNA, 19 nt, Artificial Sequence
  Description of Artificial Sequence: Synthetic oligonucleotide
  Sense strand starting at position 3905 of SEQ ID NO: 1561310
ugucuaugaacauggguga

SEQ ID NO: 1661984 - RNA, 19 nt, Artificial Sequence
  Description of Artificial Sequence: Synthetic oligonucleotide
  Antisense strand to SEQ ID NO: 1661983
ucacccauguucauagaca

SEQ ID NO: 1661985 - RNA, 19 nt, Artificial Sequence
  Description of Artificial Sequence: Synthetic oligonucleotide
  Sense strand starting at position 3906 of SEQ ID NO: 1561310
gucuaugaacaugggugaa

SEQ ID NO: 1661986 - RNA, 19 nt, Artificial Sequence
  Description of Artificial Sequence: Synthetic oligonucleotide
  Antisense strand to SEQ ID NO: 1661985
uucacccauguucauagac

SEQ ID NO: 1661987 - RNA, 19 nt, Artificial Sequence
  Description of Artificial Sequence: Synthetic oligonucleotide
  Sense strand starting at position 3970 of SEQ ID NO: 1561310
agcagacuuccuggaucau

SEQ ID NO: 1661988 - RNA, 19 nt, Artificial Sequence
  Description of Artificial Sequence: Synthetic oligonucleotide
  Antisense strand to SEQ ID NO: 1661987
augauccaggaagucugcu

SEQ ID NO: 1661989 - RNA, 19 nt, Artificial Sequence
  Description of Artificial Sequence: Synthetic oligonucleotide
  Sense strand starting at position 3971 of SEQ ID NO: 1561310
gcagacuuccuggaucaua

SEQ ID NO: 1661990 - RNA, 19 nt, Artificial Sequence
  Description of Artificial Sequence: Synthetic oligonucleotide
  Antisense strand to SEQ ID NO: 1661989
uaugauccaggaagucugc

SEQ ID NO: 1661991 - RNA, 19 nt, Artificial Sequence
  Description of Artificial Sequence: Synthetic oligonucleotide
  Sense strand starting at position 3976 of SEQ ID NO: 1561310
cuuccuggaucauaugauu

SEQ ID NO: 1661992 - RNA, 19 nt, Artificial Sequence
  Description of Artificial Sequence: Synthetic oligonucleotide
  Antisense strand to SEQ ID NO: 1661991
aaucauaugauccaggaag

SEQ ID NO: 1661993 - RNA, 19 nt, Artificial Sequence
  Description of Artificial Sequence: Synthetic oligonucleotide
  Sense strand starting at position 3979 of SEQ ID NO: 1561310
ccuggaucauaugauuacu

SEQ ID NO: 1661994 - RNA, 19 nt, Artificial Sequence
  Description of Artificial Sequence: Synthetic oligonucleotide
  Antisense strand to SEQ ID NO: 1661993
aguaaucauaugauccagg

SEQ ID NO: 1661995 - RNA, 19 nt, Artificial Sequence
  Description of Artificial Sequence: Synthetic oligonucleotide
  Sense strand starting at position 3981 of SEQ ID NO: 1561310
uggaucauaugauuacuuu

SEQ ID NO: 1661996 - RNA, 19 nt, Artificial Sequence
  Description of Artificial Sequence: Synthetic oligonucleotide
  Antisense strand to SEQ ID NO: 1661995
aaaguaaucauaugaucca

SEQ ID NO: 1661997 - RNA, 19 nt, Artificial Sequence
  Description of Artificial Sequence: Synthetic oligonucleotide
  Sense strand starting at position 459 of SEQ ID NO: 1561311
uguaaauuagaaggcuauu

SEQ ID NO: 1661998 - RNA, 19 nt, Artificial Sequence
  Description of Artificial Sequence: Synthetic oligonucleotide
  Antisense strand to SEQ ID NO: 1661997
aauagccuucuaauuuaca

SEQ ID NO: 1661999 - RNA, 19 nt, Artificial Sequence
  Description of Artificial Sequence: Synthetic oligonucleotide
  Sense strand starting at position 533 of SEQ ID NO: 1561311
aaacuaugucaaugacgac

SEQ ID NO: 1662000 - RNA, 19 nt, Artificial Sequence
  Description of Artificial Sequence: Synthetic oligonucleotide
  Antisense strand to SEQ ID NO: 1661999
gucgucauugacauaguuu

SEQ ID NO: 1662001 - RNA, 19 nt, Artificial Sequence
  Description of Artificial Sequence: Synthetic oligonucleotide
  Sense strand starting at position 583 of SEQ ID NO: 1561311
caucuuuggagacgucagu

SEQ ID NO: 1662002 - RNA, 19 nt, Artificial Sequence
  Description of Artificial Sequence: Synthetic oligonucleotide
  Antisense strand to SEQ ID NO: 1662001
acugacgucuccaaagaug

SEQ ID NO: 1662003 - RNA, 19 nt, Artificial Sequence
  Description of Artificial Sequence: Synthetic oligonucleotide
  Sense strand starting at position 589 of SEQ ID NO: 1561311
uggagacgucaguagcauu

SEQ ID NO: 1662004 - RNA, 19 nt, Artificial Sequence
  Description of Artificial Sequence: Synthetic oligonucleotide
  Antisense strand to SEQ ID NO: 1662003
aaugcuacugacgucucca

SEQ ID NO: 1662005 - RNA, 19 nt, Artificial Sequence
  Description of Artificial Sequence: Synthetic oligonucleotide
  Sense strand starting at position 597 of SEQ ID NO: 1561311
ucaguagcauucuccauua

SEQ ID NO: 1662006 - RNA, 19 nt, Artificial Sequence
  Description of Artificial Sequence: Synthetic oligonucleotide
  Antisense strand to SEQ ID NO: 1662005
uaauggagaaugcuacuga

SEQ ID NO: 1662007 - RNA, 19 nt, Artificial Sequence
  Description of Artificial Sequence: Synthetic oligonucleotide
  Sense strand starting at position 599 of SEQ ID NO: 1561311
aguagcauucuccauuacu

SEQ ID NO: 1662008 - RNA, 19 nt, Artificial Sequence
  Description of Artificial Sequence: Synthetic oligonucleotide
  Antisense strand to SEQ ID NO: 1662007
aguaauggagaaugcuacu

SEQ ID NO: 1662009 - RNA, 19 nt, Artificial Sequence
  Description of Artificial Sequence: Synthetic oligonucleotide
  Sense strand starting at position 637 of SEQ ID NO: 1561311
ugagaacgccucgacucau

SEQ ID NO: 1662010 - RNA, 19 nt, Artificial Sequence
  Description of Artificial Sequence: Synthetic oligonucleotide
  Antisense strand to SEQ ID NO: 1662009
augagucgaggcguucuca

SEQ ID NO: 1662011 - RNA, 19 nt, Artificial Sequence
  Description of Artificial Sequence: Synthetic oligonucleotide
  Sense strand starting at position 643 of SEQ ID NO: 1561311
cgccucgacucauuaagga

SEQ ID NO: 1662012 - RNA, 19 nt, Artificial Sequence
  Description of Artificial Sequence: Synthetic oligonucleotide
  Antisense strand to SEQ ID NO: 1662011
uccuuaaugagucgaggcg

SEQ ID NO: 1662013 - RNA, 19 nt, Artificial Sequence
  Description of Artificial Sequence: Synthetic oligonucleotide
  Sense strand starting at position 731 of SEQ ID NO: 1561311
ugaggauaacugugccuaa

SEQ ID NO: 1662014 - RNA, 19 nt, Artificial Sequence
  Description of Artificial Sequence: Synthetic oligonucleotide
  Antisense strand to SEQ ID NO: 1662013
uuaggcacaguuauccuca

SEQ ID NO: 1662015 - RNA, 19 nt, Artificial Sequence
  Description of Artificial Sequence: Synthetic oligonucleotide
  Sense strand starting at position 732 of SEQ ID NO: 1561311
gaggauaacugugccuaac

SEQ ID NO: 1662016 - RNA, 19 nt, Artificial Sequence
  Description of Artificial Sequence: Synthetic oligonucleotide
  Antisense strand to SEQ ID NO: 1662015
guuaggcacaguuauccuc

SEQ ID NO: 1662017 - RNA, 19 nt, Artificial Sequence
  Description of Artificial Sequence: Synthetic oligonucleotide
  Sense strand starting at position 734 of SEQ ID NO: 1561311
ggauaacugugccuaaccu

SEQ ID NO: 1662018 - RNA, 19 nt, Artificial Sequence
  Description of Artificial Sequence: Synthetic oligonucleotide
  Antisense strand to SEQ ID NO: 1662017
agguuaggcacaguuaucc

SEQ ID NO: 1662019 - RNA, 19 nt, Artificial Sequence
  Description of Artificial Sequence: Synthetic oligonucleotide
  Sense strand starting at position 783 of SEQ ID NO: 1561311
guuauaugggauugcuucu

SEQ ID NO: 1662020 - RNA, 19 nt, Artificial Sequence
  Description of Artificial Sequence: Synthetic oligonucleotide
  Antisense strand to SEQ ID NO: 1662019
agaagcaaucccauauaac

SEQ ID NO: 1662021 - RNA, 19 nt, Artificial Sequence
  Description of Artificial Sequence: Synthetic oligonucleotide
  Sense strand starting at position 789 of SEQ ID NO: 1561311
ugggauugcuucucaaagc

SEQ ID NO: 1662022 - RNA, 19 nt, Artificial Sequence
  Description of Artificial Sequence: Synthetic oligonucleotide
  Antisense strand to SEQ ID NO: 1662021
gcuuugagaagcaauccca

SEQ ID NO: 1662023 - RNA, 19 nt, Artificial Sequence
  Description of Artificial Sequence: Synthetic oligonucleotide
  Sense strand starting at position 806 of SEQ ID NO: 1561311
gcguacaaugcuguuuagu

SEQ ID NO: 1662024 - RNA, 19 nt, Artificial Sequence
  Description of Artificial Sequence: Synthetic oligonucleotide
  Antisense strand to SEQ ID NO: 1662023
acuaaacagcauuguacgc

SEQ ID NO: 1662025 - RNA, 19 nt, Artificial Sequence
  Description of Artificial Sequence: Synthetic oligonucleotide
  Sense strand starting at position 807 of SEQ ID NO: 1561311
cguacaaugcuguuuaguc

SEQ ID NO: 1662026 - RNA, 19 nt, Artificial Sequence
  Description of Artificial Sequence: Synthetic oligonucleotide
  Antisense strand to SEQ ID NO: 1662025
gacuaaacagcauuguacg

SEQ ID NO: 1662027 - RNA, 19 nt, Artificial Sequence
  Description of Artificial Sequence: Synthetic oligonucleotide
  Sense strand starting at position 948 of SEQ ID NO: 1561311
cggugauuugcaugccacu

SEQ ID NO: 1662028 - RNA, 19 nt, Artificial Sequence
  Description of Artificial Sequence: Synthetic oligonucleotide
  Antisense strand to SEQ ID NO: 1662027
aguggcaugcaaaucaccg

SEQ ID NO: 1662029 - RNA, 19 nt, Artificial Sequence
  Description of Artificial Sequence: Synthetic oligonucleotide
  Sense strand starting at position 1066 of SEQ ID NO: 1561311
ggaagauggcaccguuaua

SEQ ID NO: 1662030 - RNA, 19 nt, Artificial Sequence
  Description of Artificial Sequence: Synthetic oligonucleotide
  Antisense strand to SEQ ID NO: 1662029
uauaacggugccaucuucc

SEQ ID NO: 1662031 - RNA, 19 nt, Artificial Sequence
  Description of Artificial Sequence: Synthetic oligonucleotide
  Sense strand starting at position 1090 of SEQ ID NO: 1561311
cagcacuuucgacaaggga

SEQ ID NO: 1662032 - RNA, 19 nt, Artificial Sequence
  Description of Artificial Sequence: Synthetic oligonucleotide
  Antisense strand to SEQ ID NO: 1662031
ucccuugucgaaagugcug

SEQ ID NO: 1662033 - RNA, 19 nt, Artificial Sequence
  Description of Artificial Sequence: Synthetic oligonucleotide
  Sense strand starting at position 2060 of SEQ ID NO: 1561311
gcggaugcgccguucugaa

SEQ ID NO: 1662034 - RNA, 19 nt, Artificial Sequence
  Description of Artificial Sequence: Synthetic oligonucleotide
  Antisense strand to SEQ ID NO: 1662033
uucagaacggcgcauccgc

SEQ ID NO: 1662035 - RNA, 19 nt, Artificial Sequence
  Description of Artificial Sequence: Synthetic oligonucleotide
  Sense strand starting at position 2166 of SEQ ID NO: 1561311
uguaaccaugugugauaga

SEQ ID NO: 1662036 - RNA, 19 nt, Artificial Sequence
  Description of Artificial Sequence: Synthetic oligonucleotide
  Antisense strand to SEQ ID NO: 1662035
ucuaucacacaugguuaca

SEQ ID NO: 1662037 - RNA, 19 nt, Artificial Sequence
  Description of Artificial Sequence: Synthetic oligonucleotide
  Sense strand starting at position 2171 of SEQ ID NO: 1561311
ccaugugugauagagagua

SEQ ID NO: 1662038 - RNA, 19 nt, Artificial Sequence
  Description of Artificial Sequence: Synthetic oligonucleotide
  Antisense strand to SEQ ID NO: 1662037
uacucucuaucacacaugg

SEQ ID NO: 1662039 - RNA, 19 nt, Artificial Sequence
  Description of Artificial Sequence: Synthetic oligonucleotide
  Sense strand starting at position 2303 of SEQ ID NO: 1561311
gcgggugugcgguugugau

SEQ ID NO: 1662040 - RNA, 19 nt, Artificial Sequence
  Description of Artificial Sequence: Synthetic oligonucleotide
  Antisense strand to SEQ ID NO: 1662039
aucacaaccgcacacccgc

SEQ ID NO: 1662041 - RNA, 19 nt, Artificial Sequence
  Description of Artificial Sequence: Synthetic oligonucleotide
  Sense strand starting at position 2501 of SEQ ID NO: 1561311
guugcuugugugaguguga

SEQ ID NO: 1662042 - RNA, 19 nt, Artificial Sequence
  Description of Artificial Sequence: Synthetic oligonucleotide
  Antisense strand to SEQ ID NO: 1662041
ucacacucacacaagcaac

SEQ ID NO: 1662043 - RNA, 19 nt, Artificial Sequence
  Description of Artificial Sequence: Synthetic oligonucleotide
  Sense strand starting at position 2526 of SEQ ID NO: 1561311
guauguccacagugaaagu

SEQ ID NO: 1662044 - RNA, 19 nt, Artificial Sequence
  Description of Artificial Sequence: Synthetic oligonucleotide
  Antisense strand to SEQ ID NO: 1662043
acuuucacuguggacauac

SEQ ID NO: 1662045 - RNA, 19 nt, Artificial Sequence
  Description of Artificial Sequence: Synthetic oligonucleotide
  Sense strand starting at position 2536 of SEQ ID NO: 1561311
agugaaaguucaguuguga

SEQ ID NO: 1662046 - RNA, 19 nt, Artificial Sequence
  Description of Artificial Sequence: Synthetic oligonucleotide
  Antisense strand to SEQ ID NO: 1662045
ucacaacugaacuuucacu

SEQ ID NO: 1662047 - RNA, 19 nt, Artificial Sequence
  Description of Artificial Sequence: Synthetic oligonucleotide
  Sense strand starting at position 2602 of SEQ ID NO: 1561311
gugugacugugacuauaug

SEQ ID NO: 1662048 - RNA, 19 nt, Artificial Sequence
  Description of Artificial Sequence: Synthetic oligonucleotide
  Antisense strand to SEQ ID NO: 1662047
cauauagucacagucacac

SEQ ID NO: 1662049 - RNA, 19 nt, Artificial Sequence
  Description of Artificial Sequence: Synthetic oligonucleotide
  Sense strand starting at position 2603 of SEQ ID NO: 1561311
ugugacugugacuauauga

SEQ ID NO: 1662050 - RNA, 19 nt, Artificial Sequence
  Description of Artificial Sequence: Synthetic oligonucleotide
  Antisense strand to SEQ ID NO: 1662049
ucauauagucacagucaca

SEQ ID NO: 1662051 - RNA, 19 nt, Artificial Sequence
  Description of Artificial Sequence: Synthetic oligonucleotide
  Sense strand starting at position 2651 of SEQ ID NO: 1561311
ugugacuauacgggaguaa

SEQ ID NO: 1662052 - RNA, 19 nt, Artificial Sequence
  Description of Artificial Sequence: Synthetic oligonucleotide
  Antisense strand to SEQ ID NO: 1662051
uuacucccguauagucaca

SEQ ID NO: 1662053 - RNA, 19 nt, Artificial Sequence
  Description of Artificial Sequence: Synthetic oligonucleotide
  Sense strand starting at position 2681 of SEQ ID NO: 1561311
uggagaguagauuguguga

SEQ ID NO: 1662054 - RNA, 19 nt, Artificial Sequence
  Description of Artificial Sequence: Synthetic oligonucleotide
  Antisense strand to SEQ ID NO: 1662053
ucacacaaucuacucucca

SEQ ID NO: 1662055 - RNA, 19 nt, Artificial Sequence
  Description of Artificial Sequence: Synthetic oligonucleotide
  Sense strand starting at position 2708 of SEQ ID NO: 1561311
gucuuagcgggugugugau

SEQ ID NO: 1662056 - RNA, 19 nt, Artificial Sequence
  Description of Artificial Sequence: Synthetic oligonucleotide
  Antisense strand to SEQ ID NO: 1662055
aucacacacccgcuaagac

SEQ ID NO: 1662057 - RNA, 19 nt, Artificial Sequence
  Description of Artificial Sequence: Synthetic oligonucleotide
  Sense strand starting at position 2720 of SEQ ID NO: 1561311
gugugauugugacuggaaa

SEQ ID NO: 1662058 - RNA, 19 nt, Artificial Sequence
  Description of Artificial Sequence: Synthetic oligonucleotide
  Antisense strand to SEQ ID NO: 1662057
uuuccagucacaaucacac

SEQ ID NO: 1662059 - RNA, 19 nt, Artificial Sequence
  Description of Artificial Sequence: Synthetic oligonucleotide
  Sense strand starting at position 2721 of SEQ ID NO: 1561311
ugugauugugacuggaaag

SEQ ID NO: 1662060 - RNA, 19 nt, Artificial Sequence
  Description of Artificial Sequence: Synthetic oligonucleotide
  Antisense strand to SEQ ID NO: 1662059
cuuuccagucacaaucaca

SEQ ID NO: 1662061 - RNA, 19 nt, Artificial Sequence
  Description of Artificial Sequence: Synthetic oligonucleotide
  Sense strand starting at position 2722 of SEQ ID NO: 1561311
gugauugugacuggaaaga

SEQ ID NO: 1662062 - RNA, 19 nt, Artificial Sequence
  Description of Artificial Sequence: Synthetic oligonucleotide
  Antisense strand to SEQ ID NO: 1662061
ucuuuccagucacaaucac

SEQ ID NO: 1662063 - RNA, 19 nt, Artificial Sequence
  Description of Artificial Sequence: Synthetic oligonucleotide
  Sense strand starting at position 2758 of SEQ ID NO: 1561311
uauagaggugucugugauu

SEQ ID NO: 1662064 - RNA, 19 nt, Artificial Sequence
  Description of Artificial Sequence: Synthetic oligonucleotide
  Antisense strand to SEQ ID NO: 1662063
aaucacagacaccucuaua

SEQ ID NO: 1662065 - RNA, 19 nt, Artificial Sequence
  Description of Artificial Sequence: Synthetic oligonucleotide
  Sense strand starting at position 3385 of SEQ ID NO: 1561311
aagaguggaugugugguua

SEQ ID NO: 1662066 - RNA, 19 nt, Artificial Sequence
  Description of Artificial Sequence: Synthetic oligonucleotide
  Antisense strand to SEQ ID NO: 1662065
uaaccacacauccacucuu

SEQ ID NO: 1662067 - RNA, 19 nt, Artificial Sequence
  Description of Artificial Sequence: Synthetic oligonucleotide
  Sense strand starting at position 3407 of SEQ ID NO: 1561311
uugugugacacugacugua

SEQ ID NO: 1662068 - RNA, 19 nt, Artificial Sequence
  Description of Artificial Sequence: Synthetic oligonucleotide
  Antisense strand to SEQ ID NO: 1662067
uacagucagugucacacaa

SEQ ID NO: 1662069 - RNA, 19 nt, Artificial Sequence
  Description of Artificial Sequence: Synthetic oligonucleotide
  Sense strand starting at position 3449 of SEQ ID NO: 1561311
gacucuagugcuugaccca

SEQ ID NO: 1662070 - RNA, 19 nt, Artificial Sequence
  Description of Artificial Sequence: Synthetic oligonucleotide
  Antisense strand to SEQ ID NO: 1662069
ugggucaagcacuagaguc

SEQ ID NO: 1662071 - RNA, 19 nt, Artificial Sequence
  Description of Artificial Sequence: Synthetic oligonucleotide
  Sense strand starting at position 3488 of SEQ ID NO: 1561311
gacagauucuggcccugga

SEQ ID NO: 1662072 - RNA, 19 nt, Artificial Sequence
  Description of Artificial Sequence: Synthetic oligonucleotide
  Antisense strand to SEQ ID NO: 1662071
uccagggccagaaucuguc

SEQ ID NO: 1662073 - RNA, 19 nt, Artificial Sequence
  Description of Artificial Sequence: Synthetic oligonucleotide
  Sense strand starting at position 3557 of SEQ ID NO: 1561311
guguucugugaccacacuu

SEQ ID NO: 1662074 - RNA, 19 nt, Artificial Sequence
  Description of Artificial Sequence: Synthetic oligonucleotide
  Antisense strand to SEQ ID NO: 1662073
aaguguggucacagaacac

SEQ ID NO: 1662075 - RNA, 19 nt, Artificial Sequence
  Description of Artificial Sequence: Synthetic oligonucleotide
  Sense strand starting at position 3577 of SEQ ID NO: 1561311
ccuauaugguagguaagga

SEQ ID NO: 1662076 - RNA, 19 nt, Artificial Sequence
  Description of Artificial Sequence: Synthetic oligonucleotide
  Antisense strand to SEQ ID NO: 1662075
uccuuaccuaccauauagg

SEQ ID NO: 1662077 - RNA, 19 nt, Artificial Sequence
  Description of Artificial Sequence: Synthetic oligonucleotide
  Sense strand starting at position 109 of SEQ ID NO: 1561312
guugucuccagugaauauu

SEQ ID NO: 1662078 - RNA, 19 nt, Artificial Sequence
  Description of Artificial Sequence: Synthetic oligonucleotide
  Antisense strand to SEQ ID NO: 1662077
aauauucacuggagacaac

SEQ ID NO: 1662079 - RNA, 19 nt, Artificial Sequence
  Description of Artificial Sequence: Synthetic oligonucleotide
  Sense strand starting at position 112 of SEQ ID NO: 1561312
gucuccagugaauauuacu

SEQ ID NO: 1662080 - RNA, 19 nt, Artificial Sequence
  Description of Artificial Sequence: Synthetic oligonucleotide
  Antisense strand to SEQ ID NO: 1662079
aguaauauucacuggagac

SEQ ID NO: 1662081 - RNA, 19 nt, Artificial Sequence
  Description of Artificial Sequence: Synthetic oligonucleotide
  Sense strand starting at position 375 of SEQ ID NO: 1561312
cuguuaggacuuugguaag

SEQ ID NO: 1662082 - RNA, 19 nt, Artificial Sequence
  Description of Artificial Sequence: Synthetic oligonucleotide
  Antisense strand to SEQ ID NO: 1662081
cuuaccaaaguccuaacag

SEQ ID NO: 1662083 - RNA, 19 nt, Artificial Sequence
  Description of Artificial Sequence: Synthetic oligonucleotide
  Sense strand starting at position 509 of SEQ ID NO: 1561312
gaaacagaucuaugguuuc

SEQ ID NO: 1662084 - RNA, 19 nt, Artificial Sequence
  Description of Artificial Sequence: Synthetic oligonucleotide
  Antisense strand to SEQ ID NO: 1662083
gaaaccauagaucuguuuc

SEQ ID NO: 1662085 - RNA, 19 nt, Artificial Sequence
  Description of Artificial Sequence: Synthetic oligonucleotide
  Sense strand starting at position 556 of SEQ ID NO: 1561312
gcacuugcgccuccugaua

SEQ ID NO: 1662086 - RNA, 19 nt, Artificial Sequence
  Description of Artificial Sequence: Synthetic oligonucleotide
  Antisense strand to SEQ ID NO: 1662085
uaucaggaggcgcaagugc

SEQ ID NO: 1662087 - RNA, 19 nt, Artificial Sequence
  Description of Artificial Sequence: Synthetic oligonucleotide
  Sense strand starting at position 567 of SEQ ID NO: 1561312
uccugauaccagugccaga

SEQ ID NO: 1662088 - RNA, 19 nt, Artificial Sequence
  Description of Artificial Sequence: Synthetic oligonucleotide
  Antisense strand to SEQ ID NO: 1662087
ucuggcacugguaucagga

SEQ ID NO: 1662089 - RNA, 19 nt, Artificial Sequence
  Description of Artificial Sequence: Synthetic oligonucleotide
  Sense strand starting at position 597 of SEQ ID NO: 1561312
acaaguuuccacuggcuga

SEQ ID NO: 1662090 - RNA, 19 nt, Artificial Sequence
  Description of Artificial Sequence: Synthetic oligonucleotide
  Antisense strand to SEQ ID NO: 1662089
ucagccaguggaaacuugu

SEQ ID NO: 1662091 - RNA, 19 nt, Artificial Sequence
  Description of Artificial Sequence: Synthetic oligonucleotide
  Sense strand starting at position 601 of SEQ ID NO: 1561312
guuuccacuggcugacaaa

SEQ ID NO: 1662092 - RNA, 19 nt, Artificial Sequence
  Description of Artificial Sequence: Synthetic oligonucleotide
  Antisense strand to SEQ ID NO: 1662091
uuugucagccaguggaaac

SEQ ID NO: 1662093 - RNA, 19 nt, Artificial Sequence
  Description of Artificial Sequence: Synthetic oligonucleotide
  Sense strand starting at position 723 of SEQ ID NO: 1561312
acuuaagaauacuaggaaa

SEQ ID NO: 1662094 - RNA, 19 nt, Artificial Sequence
  Description of Artificial Sequence: Synthetic oligonucleotide
  Antisense strand to SEQ ID NO: 1662093
uuuccuaguauucuuaagu

SEQ ID NO: 1662095 - RNA, 19 nt, Artificial Sequence
  Description of Artificial Sequence: Synthetic oligonucleotide
  Sense strand starting at position 790 of SEQ ID NO: 1561312
ucuccacuucccuauguga

SEQ ID NO: 1662096 - RNA, 19 nt, Artificial Sequence
  Description of Artificial Sequence: Synthetic oligonucleotide
  Antisense strand to SEQ ID NO: 1662095
ucacauagggaaguggaga

SEQ ID NO: 1662097 - RNA, 19 nt, Artificial Sequence
  Description of Artificial Sequence: Synthetic oligonucleotide
  Sense strand starting at position 869 of SEQ ID NO: 1561312
gcuagaugagcucaagccu

SEQ ID NO: 1662098 - RNA, 19 nt, Artificial Sequence
  Description of Artificial Sequence: Synthetic oligonucleotide
  Antisense strand to SEQ ID NO: 1662097
aggcuugagcucaucuagc

SEQ ID NO: 1662099 - RNA, 19 nt, Artificial Sequence
  Description of Artificial Sequence: Synthetic oligonucleotide
  Sense strand starting at position 1036 of SEQ ID NO: 1561312
ugugaacagucuuuggaaa

SEQ ID NO: 1662100 - RNA, 19 nt, Artificial Sequence
  Description of Artificial Sequence: Synthetic oligonucleotide
  Antisense strand to SEQ ID NO: 1662099
uuuccaaagacuguucaca

SEQ ID NO: 1662101 - RNA, 19 nt, Artificial Sequence
  Description of Artificial Sequence: Synthetic oligonucleotide
  Sense strand starting at position 1425 of SEQ ID NO: 1561312
gcauccucacaaugacagu

SEQ ID NO: 1662102 - RNA, 19 nt, Artificial Sequence
  Description of Artificial Sequence: Synthetic oligonucleotide
  Antisense strand to SEQ ID NO: 1662101
acugucauugugaggaugc

SEQ ID NO: 1662103 - RNA, 19 nt, Artificial Sequence
  Description of Artificial Sequence: Synthetic oligonucleotide
  Sense strand starting at position 1441 of SEQ ID NO: 1561312
aguacaacccuaggaguaa

SEQ ID NO: 1662104 - RNA, 19 nt, Artificial Sequence
  Description of Artificial Sequence: Synthetic oligonucleotide
  Antisense strand to SEQ ID NO: 1662103
uuacuccuaggguuguacu

SEQ ID NO: 1662105 - RNA, 19 nt, Artificial Sequence
  Description of Artificial Sequence: Synthetic oligonucleotide
  Sense strand starting at position 1662 of SEQ ID NO: 1561312
ccucacugauggcuuuaga

SEQ ID NO: 1662106 - RNA, 19 nt, Artificial Sequence
  Description of Artificial Sequence: Synthetic oligonucleotide
  Antisense strand to SEQ ID NO: 1662105
ucuaaagccaucagugagg

SEQ ID NO: 1662107 - RNA, 19 nt, Artificial Sequence
  Description of Artificial Sequence: Synthetic oligonucleotide
  Sense strand starting at position 1944 of SEQ ID NO: 1561312
cuaucucugauccggugaa

SEQ ID NO: 1662108 - RNA, 19 nt, Artificial Sequence
  Description of Artificial Sequence: Synthetic oligonucleotide
  Antisense strand to SEQ ID NO: 1662107
uucaccggaucagagauag

SEQ ID NO: 1662109 - RNA, 19 nt, Artificial Sequence
  Description of Artificial Sequence: Synthetic oligonucleotide
  Sense strand starting at position 1948 of SEQ ID NO: 1561312
cucugauccggugaacaca

SEQ ID NO: 1662110 - RNA, 19 nt, Artificial Sequence
  Description of Artificial Sequence: Synthetic oligonucleotide
  Antisense strand to SEQ ID NO: 1662109
uguguucaccggaucagag

SEQ ID NO: 1662111 - RNA, 19 nt, Artificial Sequence
  Description of Artificial Sequence: Synthetic oligonucleotide
  Sense strand starting at position 2029 of SEQ ID NO: 1561312
ugugacucucaaggaaagu

SEQ ID NO: 1662112 - RNA, 19 nt, Artificial Sequence
  Description of Artificial Sequence: Synthetic oligonucleotide
  Antisense strand to SEQ ID NO: 1662111
acuuuccuugagagucaca

SEQ ID NO: 1662113 - RNA, 19 nt, Artificial Sequence
  Description of Artificial Sequence: Synthetic oligonucleotide
  Sense strand starting at position 2092 of SEQ ID NO: 1561312
cagagcauucuagguaaug

SEQ ID NO: 1662114 - RNA, 19 nt, Artificial Sequence
  Description of Artificial Sequence: Synthetic oligonucleotide
  Antisense strand to SEQ ID NO: 1662113
cauuaccuagaaugcucug

SEQ ID NO: 1662115 - RNA, 19 nt, Artificial Sequence
  Description of Artificial Sequence: Synthetic oligonucleotide
  Sense strand starting at position 2093 of SEQ ID NO: 1561312
agagcauucuagguaaugu

SEQ ID NO: 1662116 - RNA, 19 nt, Artificial Sequence
  Description of Artificial Sequence: Synthetic oligonucleotide
  Antisense strand to SEQ ID NO: 1662115
acauuaccuagaaugcucu

SEQ ID NO: 1662117 - RNA, 19 nt, Artificial Sequence
  Description of Artificial Sequence: Synthetic oligonucleotide
  Sense strand starting at position 2192 of SEQ ID NO: 1561312
ggcgaugagaaauggcuua

SEQ ID NO: 1662118 - RNA, 19 nt, Artificial Sequence
  Description of Artificial Sequence: Synthetic oligonucleotide
  Antisense strand to SEQ ID NO: 1662117
uaagccauuucucaucgcc

SEQ ID NO: 1662119 - RNA, 19 nt, Artificial Sequence
  Description of Artificial Sequence: Synthetic oligonucleotide
  Sense strand starting at position 2199 of SEQ ID NO: 1561312
agaaauggcuuauccaagu

SEQ ID NO: 1662120 - RNA, 19 nt, Artificial Sequence
  Description of Artificial Sequence: Synthetic oligonucleotide
  Antisense strand to SEQ ID NO: 1662119
acuuggauaagccauuucu

SEQ ID NO: 1662121 - RNA, 19 nt, Artificial Sequence
  Description of Artificial Sequence: Synthetic oligonucleotide
  Sense strand starting at position 2256 of SEQ ID NO: 1561312
gucguaaucagacagcaua

SEQ ID NO: 1662122 - RNA, 19 nt, Artificial Sequence
  Description of Artificial Sequence: Synthetic oligonucleotide
  Antisense strand to SEQ ID NO: 1662121
uaugcugucugauuacgac

SEQ ID NO: 1662123 - RNA, 19 nt, Artificial Sequence
  Description of Artificial Sequence: Synthetic oligonucleotide
  Sense strand starting at position 2259 of SEQ ID NO: 1561312
guaaucagacagcauauua

SEQ ID NO: 1662124 - RNA, 19 nt, Artificial Sequence
  Description of Artificial Sequence: Synthetic oligonucleotide
  Antisense strand to SEQ ID NO: 1662123
uaauaugcugucugauuac

SEQ ID NO: 1662125 - RNA, 19 nt, Artificial Sequence
  Description of Artificial Sequence: Synthetic oligonucleotide
  Sense strand starting at position 2680 of SEQ ID NO: 1561312
ucacuaugguggucccaaa

SEQ ID NO: 1662126 - RNA, 19 nt, Artificial Sequence
  Description of Artificial Sequence: Synthetic oligonucleotide
  Antisense strand to SEQ ID NO: 1662125
uuugggaccaccauaguga

SEQ ID NO: 1662127 - RNA, 19 nt, Artificial Sequence
  Description of Artificial Sequence: Synthetic oligonucleotide
  Sense strand starting at position 2766 of SEQ ID NO: 1561312
guacccagccucuaucaua

SEQ ID NO: 1662128 - RNA, 19 nt, Artificial Sequence
  Description of Artificial Sequence: Synthetic oligonucleotide
  Antisense strand to SEQ ID NO: 1662127
uaugauagaggcuggguac

SEQ ID NO: 1662129 - RNA, 19 nt, Artificial Sequence
  Description of Artificial Sequence: Synthetic oligonucleotide
  Sense strand starting at position 2864 of SEQ ID NO: 1561312
cagauaguggcaugauagu

SEQ ID NO: 1662130 - RNA, 19 nt, Artificial Sequence
  Description of Artificial Sequence: Synthetic oligonucleotide
  Antisense strand to SEQ ID NO: 1662129
acuaucaugccacuaucug

SEQ ID NO: 1662131 - RNA, 19 nt, Artificial Sequence
  Description of Artificial Sequence: Synthetic oligonucleotide
  Sense strand starting at position 2907 of SEQ ID NO: 1561312
guuagaucaccuugaaaca

SEQ ID NO: 1662132 - RNA, 19 nt, Artificial Sequence
  Description of Artificial Sequence: Synthetic oligonucleotide
  Antisense strand to SEQ ID NO: 1662131
uguuucaaggugaucuaac

SEQ ID NO: 1662133 - RNA, 19 nt, Artificial Sequence
  Description of Artificial Sequence: Synthetic oligonucleotide
  Sense strand starting at position 2937 of SEQ ID NO: 1561312
guagaauucugucugauuc

SEQ ID NO: 1662134 - RNA, 19 nt, Artificial Sequence
  Description of Artificial Sequence: Synthetic oligonucleotide
  Antisense strand to SEQ ID NO: 1662133
gaaucagacagaauucuac

SEQ ID NO: 1662135 - RNA, 19 nt, Artificial Sequence
  Description of Artificial Sequence: Synthetic oligonucleotide
  Sense strand starting at position 3006 of SEQ ID NO: 1561312
guguccagucaauaacugu

SEQ ID NO: 1662136 - RNA, 19 nt, Artificial Sequence
  Description of Artificial Sequence: Synthetic oligonucleotide
  Antisense strand to SEQ ID NO: 1662135
acaguuauugacuggacac

SEQ ID NO: 1662137 - RNA, 19 nt, Artificial Sequence
  Description of Artificial Sequence: Synthetic oligonucleotide
  Sense strand starting at position 3012 of SEQ ID NO: 1561312
agucaauaacuguguccaa

SEQ ID NO: 1662138 - RNA, 19 nt, Artificial Sequence
  Description of Artificial Sequence: Synthetic oligonucleotide
  Antisense strand to SEQ ID NO: 1662137
uuggacacaguuauugacu

SEQ ID NO: 1662139 - RNA, 19 nt, Artificial Sequence
  Description of Artificial Sequence: Synthetic oligonucleotide
  Sense strand starting at position 3013 of SEQ ID NO: 1561312
gucaauaacuguguccaau

SEQ ID NO: 1662140 - RNA, 19 nt, Artificial Sequence
  Description of Artificial Sequence: Synthetic oligonucleotide
  Antisense strand to SEQ ID NO: 1662139
auuggacacaguuauugac

SEQ ID NO: 1662141 - RNA, 19 nt, Artificial Sequence
  Description of Artificial Sequence: Synthetic oligonucleotide
  Sense strand starting at position 3065 of SEQ ID NO: 1561312
cuuacuugauaucugagau

SEQ ID NO: 1662142 - RNA, 19 nt, Artificial Sequence
  Description of Artificial Sequence: Synthetic oligonucleotide
  Antisense strand to SEQ ID NO: 1662141
aucucagauaucaaguaag

SEQ ID NO: 1662143 - RNA, 19 nt, Artificial Sequence
  Description of Artificial Sequence: Synthetic oligonucleotide
  Sense strand starting at position 3078 of SEQ ID NO: 1561312
ugagauauauuccuucuag

SEQ ID NO: 1662144 - RNA, 19 nt, Artificial Sequence
  Description of Artificial Sequence: Synthetic oligonucleotide
  Antisense strand to SEQ ID NO: 1662143
cuagaaggaauauaucuca

SEQ ID NO: 1662145 - RNA, 19 nt, Artificial Sequence
  Description of Artificial Sequence: Synthetic oligonucleotide
  Sense strand starting at position 3177 of SEQ ID NO: 1561312
ucagaaagccggugaaaug

SEQ ID NO: 1662146 - RNA, 19 nt, Artificial Sequence
  Description of Artificial Sequence: Synthetic oligonucleotide
  Antisense strand to SEQ ID NO: 1662145
cauuucaccggcuuucuga

SEQ ID NO: 1662147 - RNA, 19 nt, Artificial Sequence
  Description of Artificial Sequence: Synthetic oligonucleotide
  Sense strand starting at position 3188 of SEQ ID NO: 1561312
gugaaaugcacuugaagga

SEQ ID NO: 1662148 - RNA, 19 nt, Artificial Sequence
  Description of Artificial Sequence: Synthetic oligonucleotide
  Antisense strand to SEQ ID NO: 1662147
uccuucaagugcauuucac

SEQ ID NO: 1662149 - RNA, 19 nt, Artificial Sequence
  Description of Artificial Sequence: Synthetic oligonucleotide
  Sense strand starting at position 3211 of SEQ ID NO: 1561312
agaaaugagccaugugggu

SEQ ID NO: 1662150 - RNA, 19 nt, Artificial Sequence
  Description of Artificial Sequence: Synthetic oligonucleotide
  Antisense strand to SEQ ID NO: 1662149
acccacauggcucauuucu

SEQ ID NO: 1662151 - RNA, 19 nt, Artificial Sequence
  Description of Artificial Sequence: Synthetic oligonucleotide
  Sense strand starting at position 3213 of SEQ ID NO: 1561312
aaaugagccauguggguau

SEQ ID NO: 1662152 - RNA, 19 nt, Artificial Sequence
  Description of Artificial Sequence: Synthetic oligonucleotide
  Antisense strand to SEQ ID NO: 1662151
auacccacauggcucauuu

SEQ ID NO: 1662153 - RNA, 19 nt, Artificial Sequence
  Description of Artificial Sequence: Synthetic oligonucleotide
  Sense strand starting at position 3695 of SEQ ID NO: 1561312
ccgagccuggccgagaaau

SEQ ID NO: 1662154 - RNA, 19 nt, Artificial Sequence
  Description of Artificial Sequence: Synthetic oligonucleotide
  Antisense strand to SEQ ID NO: 1662153
auuucucggccaggcucgg

SEQ ID NO: 1662155 - RNA, 19 nt, Artificial Sequence
  Description of Artificial Sequence: Synthetic oligonucleotide
  Sense strand starting at position 3697 of SEQ ID NO: 1561312
gagccuggccgagaaaucu

SEQ ID NO: 1662156 - RNA, 19 nt, Artificial Sequence
  Description of Artificial Sequence: Synthetic oligonucleotide
  Antisense strand to SEQ ID NO: 1662155
agauuucucggccaggcuc

SEQ ID NO: 1662157 - RNA, 19 nt, Artificial Sequence
  Description of Artificial Sequence: Synthetic oligonucleotide
  Sense strand starting at position 71 of SEQ ID NO: 1561313
acaggauguugacaaauuu

SEQ ID NO: 1662158 - RNA, 19 nt, Artificial Sequence
  Description of Artificial Sequence: Synthetic oligonucleotide
  Antisense strand to SEQ ID NO: 1662157
aaauuugucaacauccugu

SEQ ID NO: 1662159 - RNA, 19 nt, Artificial Sequence
  Description of Artificial Sequence: Synthetic oligonucleotide
  Sense strand starting at position 117 of SEQ ID NO: 1561313
cuaugagccuugcucucaa

SEQ ID NO: 1662160 - RNA, 19 nt, Artificial Sequence
  Description of Artificial Sequence: Synthetic oligonucleotide
  Antisense strand to SEQ ID NO: 1662159
uugagagcaaggcucauag

SEQ ID NO: 1662161 - RNA, 19 nt, Artificial Sequence
  Description of Artificial Sequence: Synthetic oligonucleotide
  Sense strand starting at position 261 of SEQ ID NO: 1561313
ccagcuguaccucauucua

SEQ ID NO: 1662162 - RNA, 19 nt, Artificial Sequence
  Description of Artificial Sequence: Synthetic oligonucleotide
  Antisense strand to SEQ ID NO: 1662161
uagaaugagguacagcugg

SEQ ID NO: 1662163 - RNA, 19 nt, Artificial Sequence
  Description of Artificial Sequence: Synthetic oligonucleotide
  Sense strand starting at position 271 of SEQ ID NO: 1561313
cucauucuacugggaacua

SEQ ID NO: 1662164 - RNA, 19 nt, Artificial Sequence
  Description of Artificial Sequence: Synthetic oligonucleotide
  Antisense strand to SEQ ID NO: 1662163
uaguucccaguagaaugag

SEQ ID NO: 1662165 - RNA, 19 nt, Artificial Sequence
  Description of Artificial Sequence: Synthetic oligonucleotide
  Sense strand starting at position 272 of SEQ ID NO: 1561313
ucauucuacugggaacuaa

SEQ ID NO: 1662166 - RNA, 19 nt, Artificial Sequence
  Description of Artificial Sequence: Synthetic oligonucleotide
  Antisense strand to SEQ ID NO: 1662165
uuaguucccaguagaauga

SEQ ID NO: 1662167 - RNA, 19 nt, Artificial Sequence
  Description of Artificial Sequence: Synthetic oligonucleotide
  Sense strand starting at position 668 of SEQ ID NO: 1561313
ugguguggcguaaauguau

SEQ ID NO: 1662168 - RNA, 19 nt, Artificial Sequence
  Description of Artificial Sequence: Synthetic oligonucleotide
  Antisense strand to SEQ ID NO: 1662167
auacauuuacgccacacca

SEQ ID NO: 1662169 - RNA, 19 nt, Artificial Sequence
  Description of Artificial Sequence: Synthetic oligonucleotide
  Sense strand starting at position 1177 of SEQ ID NO: 1561313
acagcuuuguccucaguag

SEQ ID NO: 1662170 - RNA, 19 nt, Artificial Sequence
  Description of Artificial Sequence: Synthetic oligonucleotide
  Antisense strand to SEQ ID NO: 1662169
cuacugaggacaaagcugu

SEQ ID NO: 1662171 - RNA, 19 nt, Artificial Sequence
  Description of Artificial Sequence: Synthetic oligonucleotide
  Sense strand starting at position 1303 of SEQ ID NO: 1561313
ucgugaaacguggaugcaa

SEQ ID NO: 1662172 - RNA, 19 nt, Artificial Sequence
  Description of Artificial Sequence: Synthetic oligonucleotide
  Antisense strand to SEQ ID NO: 1662171
uugcauccacguuucacga

SEQ ID NO: 1662173 - RNA, 19 nt, Artificial Sequence
  Description of Artificial Sequence: Synthetic oligonucleotide
  Sense strand starting at position 1430 of SEQ ID NO: 1561313
ugaccacuucgcgggaaau

SEQ ID NO: 1662174 - RNA, 19 nt, Artificial Sequence
  Description of Artificial Sequence: Synthetic oligonucleotide
  Antisense strand to SEQ ID NO: 1662173
auuucccgcgaagugguca

SEQ ID NO: 1662175 - RNA, 19 nt, Artificial Sequence
  Description of Artificial Sequence: Synthetic oligonucleotide
  Sense strand starting at position 1431 of SEQ ID NO: 1561313
gaccacuucgcgggaaauu

SEQ ID NO: 1662176 - RNA, 19 nt, Artificial Sequence
  Description of Artificial Sequence: Synthetic oligonucleotide
  Antisense strand to SEQ ID NO: 1662175
aauuucccgcgaagugguc

SEQ ID NO: 1662177 - RNA, 19 nt, Artificial Sequence
  Description of Artificial Sequence: Synthetic oligonucleotide
  Sense strand starting at position 1432 of SEQ ID NO: 1561313
accacuucgcgggaaauua

SEQ ID NO: 1662178 - RNA, 19 nt, Artificial Sequence
  Description of Artificial Sequence: Synthetic oligonucleotide
  Antisense strand to SEQ ID NO: 1662177
uaauuucccgcgaaguggu

SEQ ID NO: 1662179 - RNA, 19 nt, Artificial Sequence
  Description of Artificial Sequence: Synthetic oligonucleotide
  Sense strand starting at position 1593 of SEQ ID NO: 1561313
acguuauaucgcgagaaag

SEQ ID NO: 1662180 - RNA, 19 nt, Artificial Sequence
  Description of Artificial Sequence: Synthetic oligonucleotide
  Antisense strand to SEQ ID NO: 1662179
cuuucucgcgauauaacgu

SEQ ID NO: 1662181 - RNA, 19 nt, Artificial Sequence
  Description of Artificial Sequence: Synthetic oligonucleotide
  Sense strand starting at position 1594 of SEQ ID NO: 1561313
cguuauaucgcgagaaaga

SEQ ID NO: 1662182 - RNA, 19 nt, Artificial Sequence
  Description of Artificial Sequence: Synthetic oligonucleotide
  Antisense strand to SEQ ID NO: 1662181
ucuuucucgcgauauaacg

SEQ ID NO: 1662183 - RNA, 19 nt, Artificial Sequence
  Description of Artificial Sequence: Synthetic oligonucleotide
  Sense strand starting at position 1595 of SEQ ID NO: 1561313
guuauaucgcgagaaagag

SEQ ID NO: 1662184 - RNA, 19 nt, Artificial Sequence
  Description of Artificial Sequence: Synthetic oligonucleotide
  Antisense strand to SEQ ID NO: 1662183
cucuuucucgcgauauaac

SEQ ID NO: 1662185 - RNA, 19 nt, Artificial Sequence
  Description of Artificial Sequence: Synthetic oligonucleotide
  Sense strand starting at position 1640 of SEQ ID NO: 1561313
cggacugaacgaggucaaa

SEQ ID NO: 1662186 - RNA, 19 nt, Artificial Sequence
  Description of Artificial Sequence: Synthetic oligonucleotide
  Antisense strand to SEQ ID NO: 1662185
uuugaccucguucaguccg

SEQ ID NO: 1662187 - RNA, 19 nt, Artificial Sequence
  Description of Artificial Sequence: Synthetic oligonucleotide
  Sense strand starting at position 2159 of SEQ ID NO: 1561313
caaauuuccugcgcaucga

SEQ ID NO: 1662188 - RNA, 19 nt, Artificial Sequence
  Description of Artificial Sequence: Synthetic oligonucleotide
  Antisense strand to SEQ ID NO: 1662187
ucgaugcgcaggaaauuug

SEQ ID NO: 1662189 - RNA, 19 nt, Artificial Sequence
  Description of Artificial Sequence: Synthetic oligonucleotide
  Sense strand starting at position 2199 of SEQ ID NO: 1561313
ggcguuucgcugguaucuu

SEQ ID NO: 1662190 - RNA, 19 nt, Artificial Sequence
  Description of Artificial Sequence: Synthetic oligonucleotide
  Antisense strand to SEQ ID NO: 1662189
aagauaccagcgaaacgcc

SEQ ID NO: 1662191 - RNA, 19 nt, Artificial Sequence
  Description of Artificial Sequence: Synthetic oligonucleotide
  Sense strand starting at position 2238 of SEQ ID NO: 1561313
ucuguggaggcgugagaau

SEQ ID NO: 1662192 - RNA, 19 nt, Artificial Sequence
  Description of Artificial Sequence: Synthetic oligonucleotide
  Antisense strand to SEQ ID NO: 1662191
auucucacgccuccacaga

SEQ ID NO: 1662193 - RNA, 19 nt, Artificial Sequence
  Description of Artificial Sequence: Synthetic oligonucleotide
  Sense strand starting at position 2239 of SEQ ID NO: 1561313
cuguggaggcgugagaauu

SEQ ID NO: 1662194 - RNA, 19 nt, Artificial Sequence
  Description of Artificial Sequence: Synthetic oligonucleotide
  Antisense strand to SEQ ID NO: 1662193
aauucucacgccuccacag

SEQ ID NO: 1662195 - RNA, 19 nt, Artificial Sequence
  Description of Artificial Sequence: Synthetic oligonucleotide
  Sense strand starting at position 2278 of SEQ ID NO: 1561313
ugugaauucuggccuauca

SEQ ID NO: 1662196 - RNA, 19 nt, Artificial Sequence
  Description of Artificial Sequence: Synthetic oligonucleotide
  Antisense strand to SEQ ID NO: 1662195
ugauaggccagaauucaca

SEQ ID NO: 1662197 - RNA, 19 nt, Artificial Sequence
  Description of Artificial Sequence: Synthetic oligonucleotide
  Sense strand starting at position 2280 of SEQ ID NO: 1561313
ugaauucuggccuaucaac

SEQ ID NO: 1662198 - RNA, 19 nt, Artificial Sequence
  Description of Artificial Sequence: Synthetic oligonucleotide
  Antisense strand to SEQ ID NO: 1662197
guugauaggccagaauuca

SEQ ID NO: 1662199 - RNA, 19 nt, Artificial Sequence
  Description of Artificial Sequence: Synthetic oligonucleotide
  Sense strand starting at position 2322 of SEQ ID NO: 1561313
ggagucucauguucuauau

SEQ ID NO: 1662200 - RNA, 19 nt, Artificial Sequence
  Description of Artificial Sequence: Synthetic oligonucleotide
  Antisense strand to SEQ ID NO: 1662199
auauagaacaugagacucc

SEQ ID NO: 1662201 - RNA, 19 nt, Artificial Sequence
  Description of Artificial Sequence: Synthetic oligonucleotide
  Sense strand starting at position 2484 of SEQ ID NO: 1561313
cugcccucccaagagauaa

SEQ ID NO: 1662202 - RNA, 19 nt, Artificial Sequence
  Description of Artificial Sequence: Synthetic oligonucleotide
  Antisense strand to SEQ ID NO: 1662201
uuaucucuugggagggcag

SEQ ID NO: 1662203 - RNA, 19 nt, Artificial Sequence
  Description of Artificial Sequence: Synthetic oligonucleotide
  Sense strand starting at position 2532 of SEQ ID NO: 1561313
gcaggaaacugugccuaau

SEQ ID NO: 1662204 - RNA, 19 nt, Artificial Sequence
  Description of Artificial Sequence: Synthetic oligonucleotide
  Antisense strand to SEQ ID NO: 1662203
auuaggcacaguuuccugc

SEQ ID NO: 1662205 - RNA, 19 nt, Artificial Sequence
  Description of Artificial Sequence: Synthetic oligonucleotide
  Sense strand starting at position 2534 of SEQ ID NO: 1561313
aggaaacugugccuaauau

SEQ ID NO: 1662206 - RNA, 19 nt, Artificial Sequence
  Description of Artificial Sequence: Synthetic oligonucleotide
  Antisense strand to SEQ ID NO: 1662205
auauuaggcacaguuuccu

SEQ ID NO: 1662207 - RNA, 19 nt, Artificial Sequence
  Description of Artificial Sequence: Synthetic oligonucleotide
  Sense strand starting at position 2535 of SEQ ID NO: 1561313
ggaaacugugccuaauaua

SEQ ID NO: 1662208 - RNA, 19 nt, Artificial Sequence
  Description of Artificial Sequence: Synthetic oligonucleotide
  Antisense strand to SEQ ID NO: 1662207
uauauuaggcacaguuucc

SEQ ID NO: 1662209 - RNA, 19 nt, Artificial Sequence
  Description of Artificial Sequence: Synthetic oligonucleotide
  Sense strand starting at position 2630 of SEQ ID NO: 1561313
cugccauaaucugugaaau

SEQ ID NO: 1662210 - RNA, 19 nt, Artificial Sequence
  Description of Artificial Sequence: Synthetic oligonucleotide
  Antisense strand to SEQ ID NO: 1662209
auuucacagauuauggcag

SEQ ID NO: 1662211 - RNA, 19 nt, Artificial Sequence
  Description of Artificial Sequence: Synthetic oligonucleotide
  Sense strand starting at position 2631 of SEQ ID NO: 1561313
ugccauaaucugugaaaug

SEQ ID NO: 1662212 - RNA, 19 nt, Artificial Sequence
  Description of Artificial Sequence: Synthetic oligonucleotide
  Antisense strand to SEQ ID NO: 1662211
cauuucacagauuauggca

SEQ ID NO: 1662213 - RNA, 19 nt, Artificial Sequence
  Description of Artificial Sequence: Synthetic oligonucleotide
  Sense strand starting at position 2727 of SEQ ID NO: 1561313
ugaauuaguuaguugcuua

SEQ ID NO: 1662214 - RNA, 19 nt, Artificial Sequence
  Description of Artificial Sequence: Synthetic oligonucleotide
  Antisense strand to SEQ ID NO: 1662213
uaagcaacuaacuaauuca

SEQ ID NO: 1662215 - RNA, 19 nt, Artificial Sequence
  Description of Artificial Sequence: Synthetic oligonucleotide
  Sense strand starting at position 2731 of SEQ ID NO: 1561313
uuaguuaguugcuuaacca

SEQ ID NO: 1662216 - RNA, 19 nt, Artificial Sequence
  Description of Artificial Sequence: Synthetic oligonucleotide
  Antisense strand to SEQ ID NO: 1662215
ugguuaagcaacuaacuaa

SEQ ID NO: 1662217 - RNA, 19 nt, Artificial Sequence
  Description of Artificial Sequence: Synthetic oligonucleotide
  Sense strand starting at position 2794 of SEQ ID NO: 1561313
guagauaggcuguaaacuu

SEQ ID NO: 1662218 - RNA, 19 nt, Artificial Sequence
  Description of Artificial Sequence: Synthetic oligonucleotide
  Antisense strand to SEQ ID NO: 1662217
aaguuuacagccuaucuac

SEQ ID NO: 1662219 - RNA, 19 nt, Artificial Sequence
  Description of Artificial Sequence: Synthetic oligonucleotide
  Sense strand starting at position 2885 of SEQ ID NO: 1561313
acggguagucaagaugauu

SEQ ID NO: 1662220 - RNA, 19 nt, Artificial Sequence
  Description of Artificial Sequence: Synthetic oligonucleotide
  Antisense strand to SEQ ID NO: 1662219
aaucaucuugacuacccgu

SEQ ID NO: 1662221 - RNA, 19 nt, Artificial Sequence
  Description of Artificial Sequence: Synthetic oligonucleotide
  Sense strand starting at position 3122 of SEQ ID NO: 1561313
gaucaugacuaccuaggua

SEQ ID NO: 1662222 - RNA, 19 nt, Artificial Sequence
  Description of Artificial Sequence: Synthetic oligonucleotide
  Antisense strand to SEQ ID NO: 1662221
uaccuagguagucaugauc

SEQ ID NO: 1662223 - RNA, 19 nt, Artificial Sequence
  Description of Artificial Sequence: Synthetic oligonucleotide
  Sense strand starting at position 3130 of SEQ ID NO: 1561313
cuaccuagguaugcucuaa

SEQ ID NO: 1662224 - RNA, 19 nt, Artificial Sequence
  Description of Artificial Sequence: Synthetic oligonucleotide
  Antisense strand to SEQ ID NO: 1662223
uuagagcauaccuagguag

SEQ ID NO: 1662225 - RNA, 19 nt, Artificial Sequence
  Description of Artificial Sequence: Synthetic oligonucleotide
  Sense strand starting at position 3134 of SEQ ID NO: 1561313
cuagguaugcucuaacaag

SEQ ID NO: 1662226 - RNA, 19 nt, Artificial Sequence
  Description of Artificial Sequence: Synthetic oligonucleotide
  Antisense strand to SEQ ID NO: 1662225
cuuguuagagcauaccuag

SEQ ID NO: 1662227 - RNA, 19 nt, Artificial Sequence
  Description of Artificial Sequence: Synthetic oligonucleotide
  Sense strand starting at position 3143 of SEQ ID NO: 1561313
cucuaacaagauugauguu

SEQ ID NO: 1662228 - RNA, 19 nt, Artificial Sequence
  Description of Artificial Sequence: Synthetic oligonucleotide
  Antisense strand to SEQ ID NO: 1662227
aacaucaaucuuguuagag

SEQ ID NO: 1662229 - RNA, 19 nt, Artificial Sequence
  Description of Artificial Sequence: Synthetic oligonucleotide
  Sense strand starting at position 3180 of SEQ ID NO: 1561313
cucuauuucugagcgcuaa

SEQ ID NO: 1662230 - RNA, 19 nt, Artificial Sequence
  Description of Artificial Sequence: Synthetic oligonucleotide
  Antisense strand to SEQ ID NO: 1662229
uuagcgcucagaaauagag

SEQ ID NO: 1662231 - RNA, 19 nt, Artificial Sequence
  Description of Artificial Sequence: Synthetic oligonucleotide
  Sense strand starting at position 3181 of SEQ ID NO: 1561313
ucuauuucugagcgcuaac

SEQ ID NO: 1662232 - RNA, 19 nt, Artificial Sequence
  Description of Artificial Sequence: Synthetic oligonucleotide
  Antisense strand to SEQ ID NO: 1662231
guuagcgcucagaaauaga

SEQ ID NO: 1662233 - RNA, 19 nt, Artificial Sequence
  Description of Artificial Sequence: Synthetic oligonucleotide
  Sense strand starting at position 3190 of SEQ ID NO: 1561313
gagcgcuaaccagaauugu

SEQ ID NO: 1662234 - RNA, 19 nt, Artificial Sequence
  Description of Artificial Sequence: Synthetic oligonucleotide
  Antisense strand to SEQ ID NO: 1662233
acaauucugguuagcgcuc

SEQ ID NO: 1662235 - RNA, 19 nt, Artificial Sequence
  Description of Artificial Sequence: Synthetic oligonucleotide
  Sense strand starting at position 3199 of SEQ ID NO: 1561313
ccagaauuguccuuaucag

SEQ ID NO: 1662236 - RNA, 19 nt, Artificial Sequence
  Description of Artificial Sequence: Synthetic oligonucleotide
  Antisense strand to SEQ ID NO: 1662235
cugauaaggacaauucugg

SEQ ID NO: 1662237 - RNA, 19 nt, Artificial Sequence
  Description of Artificial Sequence: Synthetic oligonucleotide
  Sense strand starting at position 179 of SEQ ID NO: 1561314
cagcaugaacugugagaug

SEQ ID NO: 1662238 - RNA, 19 nt, Artificial Sequence
  Description of Artificial Sequence: Synthetic oligonucleotide
  Antisense strand to SEQ ID NO: 1662237
caucucacaguucaugcug

SEQ ID NO: 1662239 - RNA, 19 nt, Artificial Sequence
  Description of Artificial Sequence: Synthetic oligonucleotide
  Sense strand starting at position 182 of SEQ ID NO: 1561314
caugaacugugagaugaaa

SEQ ID NO: 1662240 - RNA, 19 nt, Artificial Sequence
  Description of Artificial Sequence: Synthetic oligonucleotide
  Antisense strand to SEQ ID NO: 1662239
uuucaucucacaguucaug

SEQ ID NO: 1662241 - RNA, 19 nt, Artificial Sequence
  Description of Artificial Sequence: Synthetic oligonucleotide
  Sense strand starting at position 403 of SEQ ID NO: 1561314
agagcuuuguaauucucau

SEQ ID NO: 1662242 - RNA, 19 nt, Artificial Sequence
  Description of Artificial Sequence: Synthetic oligonucleotide
  Antisense strand to SEQ ID NO: 1662241
augagaauuacaaagcucu

SEQ ID NO: 1662243 - RNA, 19 nt, Artificial Sequence
  Description of Artificial Sequence: Synthetic oligonucleotide
  Sense strand starting at position 544 of SEQ ID NO: 1561314
ucuuuauaacuauguguuc

SEQ ID NO: 1662244 - RNA, 19 nt, Artificial Sequence
  Description of Artificial Sequence: Synthetic oligonucleotide
  Antisense strand to SEQ ID NO: 1662243
gaacacauaguuauaaaga

SEQ ID NO: 1662245 - RNA, 19 nt, Artificial Sequence
  Description of Artificial Sequence: Synthetic oligonucleotide
  Sense strand starting at position 1257 of SEQ ID NO: 1561314
gucucucuuucuccugauu

SEQ ID NO: 1662246 - RNA, 19 nt, Artificial Sequence
  Description of Artificial Sequence: Synthetic oligonucleotide
  Antisense strand to SEQ ID NO: 1662245
aaucaggagaaagagagac

SEQ ID NO: 1662247 - RNA, 19 nt, Artificial Sequence
  Description of Artificial Sequence: Synthetic oligonucleotide
  Sense strand starting at position 1294 of SEQ ID NO: 1561314
acuggaggguuuguaguaa

SEQ ID NO: 1662248 - RNA, 19 nt, Artificial Sequence
  Description of Artificial Sequence: Synthetic oligonucleotide
  Antisense strand to SEQ ID NO: 1662247
uuacuacaaacccuccagu

SEQ ID NO: 1662249 - RNA, 19 nt, Artificial Sequence
  Description of Artificial Sequence: Synthetic oligonucleotide
  Sense strand starting at position 1306 of SEQ ID NO: 1561314
guaguaagaugucugcaug

SEQ ID NO: 1662250 - RNA, 19 nt, Artificial Sequence
  Description of Artificial Sequence: Synthetic oligonucleotide
  Antisense strand to SEQ ID NO: 1662249
caugcagacaucuuacuac

SEQ ID NO: 1662251 - RNA, 19 nt, Artificial Sequence
  Description of Artificial Sequence: Synthetic oligonucleotide
  Sense strand starting at position 1307 of SEQ ID NO: 1561314
uaguaagaugucugcaugu

SEQ ID NO: 1662252 - RNA, 19 nt, Artificial Sequence
  Description of Artificial Sequence: Synthetic oligonucleotide
  Antisense strand to SEQ ID NO: 1662251
acaugcagacaucuuacua

SEQ ID NO: 1662253 - RNA, 19 nt, Artificial Sequence
  Description of Artificial Sequence: Synthetic oligonucleotide
  Sense strand starting at position 1309 of SEQ ID NO: 1561314
guaagaugucugcauguug

SEQ ID NO: 1662254 - RNA, 19 nt, Artificial Sequence
  Description of Artificial Sequence: Synthetic oligonucleotide
  Antisense strand to SEQ ID NO: 1662253
caacaugcagacaucuuac

SEQ ID NO: 1662255 - RNA, 19 nt, Artificial Sequence
  Description of Artificial Sequence: Synthetic oligonucleotide
  Sense strand starting at position 1627 of SEQ ID NO: 1561314
cggugaggacuuuaagcga

SEQ ID NO: 1662256 - RNA, 19 nt, Artificial Sequence
  Description of Artificial Sequence: Synthetic oligonucleotide
  Antisense strand to SEQ ID NO: 1662255
ucgcuuaaaguccucaccg

SEQ ID NO: 1662257 - RNA, 19 nt, Artificial Sequence
  Description of Artificial Sequence: Synthetic oligonucleotide
  Sense strand starting at position 1714 of SEQ ID NO: 1561314
cgggaaaggccguguuuac

SEQ ID NO: 1662258 - RNA, 19 nt, Artificial Sequence
  Description of Artificial Sequence: Synthetic oligonucleotide
  Antisense strand to SEQ ID NO: 1662257
guaaacacggccuuucccg

SEQ ID NO: 1662259 - RNA, 19 nt, Artificial Sequence
  Description of Artificial Sequence: Synthetic oligonucleotide
  Sense strand starting at position 1723 of SEQ ID NO: 1561314
ccguguuuacuuggcccaa

SEQ ID NO: 1662260 - RNA, 19 nt, Artificial Sequence
  Description of Artificial Sequence: Synthetic oligonucleotide
  Antisense strand to SEQ ID NO: 1662259
uugggccaaguaaacacgg

SEQ ID NO: 1662261 - RNA, 19 nt, Artificial Sequence
  Description of Artificial Sequence: Synthetic oligonucleotide
  Sense strand starting at position 2321 of SEQ ID NO: 1561314
acguuagggucugcgauuu

SEQ ID NO: 1662262 - RNA, 19 nt, Artificial Sequence
  Description of Artificial Sequence: Synthetic oligonucleotide
  Antisense strand to SEQ ID NO: 1662261
aaaucgcagacccuaacgu

SEQ ID NO: 1662263 - RNA, 19 nt, Artificial Sequence
  Description of Artificial Sequence: Synthetic oligonucleotide
  Sense strand starting at position 2329 of SEQ ID NO: 1561314
gucugcgauuucgugugau

SEQ ID NO: 1662264 - RNA, 19 nt, Artificial Sequence
  Description of Artificial Sequence: Synthetic oligonucleotide
  Antisense strand to SEQ ID NO: 1662263
aucacacgaaaucgcagac

SEQ ID NO: 1662265 - RNA, 19 nt, Artificial Sequence
  Description of Artificial Sequence: Synthetic oligonucleotide
  Sense strand starting at position 2392 of SEQ ID NO: 1561314
cggcguagauguuucaaac

SEQ ID NO: 1662266 - RNA, 19 nt, Artificial Sequence
  Description of Artificial Sequence: Synthetic oligonucleotide
  Antisense strand to SEQ ID NO: 1662265
guuugaaacaucuacgccg

SEQ ID NO: 1662267 - RNA, 19 nt, Artificial Sequence
  Description of Artificial Sequence: Synthetic oligonucleotide
  Sense strand starting at position 2425 of SEQ ID NO: 1561314
agcacaguuguguagguua

SEQ ID NO: 1662268 - RNA, 19 nt, Artificial Sequence
  Description of Artificial Sequence: Synthetic oligonucleotide
  Antisense strand to SEQ ID NO: 1662267
uaaccuacacaacugugcu

SEQ ID NO: 1662269 - RNA, 19 nt, Artificial Sequence
  Description of Artificial Sequence: Synthetic oligonucleotide
  Sense strand starting at position 2427 of SEQ ID NO: 1561314
cacaguuguguagguuauu

SEQ ID NO: 1662270 - RNA, 19 nt, Artificial Sequence
  Description of Artificial Sequence: Synthetic oligonucleotide
  Antisense strand to SEQ ID NO: 1662269
aauaaccuacacaacugug

SEQ ID NO: 1662271 - RNA, 19 nt, Artificial Sequence
  Description of Artificial Sequence: Synthetic oligonucleotide
  Sense strand starting at position 2428 of SEQ ID NO: 1561314
acaguuguguagguuauuu

SEQ ID NO: 1662272 - RNA, 19 nt, Artificial Sequence
  Description of Artificial Sequence: Synthetic oligonucleotide
  Antisense strand to SEQ ID NO: 1662271
aaauaaccuacacaacugu

SEQ ID NO: 1662273 - RNA, 19 nt, Artificial Sequence
  Description of Artificial Sequence: Synthetic oligonucleotide
  Sense strand starting at position 2480 of SEQ ID NO: 1561314
gcgguuuauguugaaagca

SEQ ID NO: 1662274 - RNA, 19 nt, Artificial Sequence
  Description of Artificial Sequence: Synthetic oligonucleotide
  Antisense strand to SEQ ID NO: 1662273
ugcuuucaacauaaaccgc

SEQ ID NO: 1662275 - RNA, 19 nt, Artificial Sequence
  Description of Artificial Sequence: Synthetic oligonucleotide
  Sense strand starting at position 2510 of SEQ ID NO: 1561314
cgcguuuacccaguaaugu

SEQ ID NO: 1662276 - RNA, 19 nt, Artificial Sequence
  Description of Artificial Sequence: Synthetic oligonucleotide
  Antisense strand to SEQ ID NO: 1662275
acauuacuggguaaacgcg

SEQ ID NO: 1662277 - RNA, 19 nt, Artificial Sequence
  Description of Artificial Sequence: Synthetic oligonucleotide
  Sense strand starting at position 2511 of SEQ ID NO: 1561314
gcguuuacccaguaauguu

SEQ ID NO: 1662278 - RNA, 19 nt, Artificial Sequence
  Description of Artificial Sequence: Synthetic oligonucleotide
  Antisense strand to SEQ ID NO: 1662277
aacauuacuggguaaacgc

SEQ ID NO: 1662279 - RNA, 19 nt, Artificial Sequence
  Description of Artificial Sequence: Synthetic oligonucleotide
  Sense strand starting at position 2526 of SEQ ID NO: 1561314
uguuauugacgcugaagca

SEQ ID NO: 1662280 - RNA, 19 nt, Artificial Sequence
  Description of Artificial Sequence: Synthetic oligonucleotide
  Antisense strand to SEQ ID NO: 1662279
ugcuucagcgucaauaaca

SEQ ID NO: 1662281 - RNA, 19 nt, Artificial Sequence
  Description of Artificial Sequence: Synthetic oligonucleotide
  Sense strand starting at position 2547 of SEQ ID NO: 1561314
ccaggagucugggaacaug

SEQ ID NO: 1662282 - RNA, 19 nt, Artificial Sequence
  Description of Artificial Sequence: Synthetic oligonucleotide
  Antisense strand to SEQ ID NO: 1662281
cauguucccagacuccugg

SEQ ID NO: 1662283 - RNA, 19 nt, Artificial Sequence
  Description of Artificial Sequence: Synthetic oligonucleotide
  Sense strand starting at position 2635 of SEQ ID NO: 1561314
ugaaauuagcaguaacuuu

SEQ ID NO: 1662284 - RNA, 19 nt, Artificial Sequence
  Description of Artificial Sequence: Synthetic oligonucleotide
  Antisense strand to SEQ ID NO: 1662283
aaaguuacugcuaauuuca

SEQ ID NO: 1662285 - RNA, 19 nt, Artificial Sequence
  Description of Artificial Sequence: Synthetic oligonucleotide
  Sense strand starting at position 2696 of SEQ ID NO: 1561314
uauucuauuccgugcgaga

SEQ ID NO: 1662286 - RNA, 19 nt, Artificial Sequence
  Description of Artificial Sequence: Synthetic oligonucleotide
  Antisense strand to SEQ ID NO: 1662285
ucucgcacggaauagaaua

SEQ ID NO: 1662287 - RNA, 19 nt, Artificial Sequence
  Description of Artificial Sequence: Synthetic oligonucleotide
  Sense strand starting at position 2698 of SEQ ID NO: 1561314
uucuauuccgugcgagaug

SEQ ID NO: 1662288 - RNA, 19 nt, Artificial Sequence
  Description of Artificial Sequence: Synthetic oligonucleotide
  Antisense strand to SEQ ID NO: 1662287
caucucgcacggaauagaa

SEQ ID NO: 1662289 - RNA, 19 nt, Artificial Sequence
  Description of Artificial Sequence: Synthetic oligonucleotide
  Sense strand starting at position 2889 of SEQ ID NO: 1561314
ccacguucuuuagcggaga

SEQ ID NO: 1662290 - RNA, 19 nt, Artificial Sequence
  Description of Artificial Sequence: Synthetic oligonucleotide
  Antisense strand to SEQ ID NO: 1662289
ucuccgcuaaagaacgugg

SEQ ID NO: 1662291 - RNA, 19 nt, Artificial Sequence
  Description of Artificial Sequence: Synthetic oligonucleotide
  Sense strand starting at position 2892 of SEQ ID NO: 1561314
cguucuuuagcggagauga

SEQ ID NO: 1662292 - RNA, 19 nt, Artificial Sequence
  Description of Artificial Sequence: Synthetic oligonucleotide
  Antisense strand to SEQ ID NO: 1662291
ucaucuccgcuaaagaacg

SEQ ID NO: 1662293 - RNA, 19 nt, Artificial Sequence
  Description of Artificial Sequence: Synthetic oligonucleotide
  Sense strand starting at position 3175 of SEQ ID NO: 1561314
uagagagaauguuccaauc

SEQ ID NO: 1662294 - RNA, 19 nt, Artificial Sequence
  Description of Artificial Sequence: Synthetic oligonucleotide
  Antisense strand to SEQ ID NO: 1662293
gauuggaacauucucucua

SEQ ID NO: 1662295 - RNA, 19 nt, Artificial Sequence
  Description of Artificial Sequence: Synthetic oligonucleotide
  Sense strand starting at position 3177 of SEQ ID NO: 1561314
gagagaauguuccaaucac

SEQ ID NO: 1662296 - RNA, 19 nt, Artificial Sequence
  Description of Artificial Sequence: Synthetic oligonucleotide
  Antisense strand to SEQ ID NO: 1662295
gugauuggaacauucucuc

SEQ ID NO: 1662297 - RNA, 19 nt, Artificial Sequence
  Description of Artificial Sequence: Synthetic oligonucleotide
  Sense strand starting at position 3290 of SEQ ID NO: 1561314
aaguuaugaggcuguggau

SEQ ID NO: 1662298 - RNA, 19 nt, Artificial Sequence
  Description of Artificial Sequence: Synthetic oligonucleotide
  Antisense strand to SEQ ID NO: 1662297
auccacagccucauaacuu

SEQ ID NO: 1662299 - RNA, 19 nt, Artificial Sequence
  Description of Artificial Sequence: Synthetic oligonucleotide
  Sense strand starting at position 3315 of SEQ ID NO: 1561314
uuggcaugacuacaguuau

SEQ ID NO: 1662300 - RNA, 19 nt, Artificial Sequence
  Description of Artificial Sequence: Synthetic oligonucleotide
  Antisense strand to SEQ ID NO: 1662299
auaacuguagucaugccaa

SEQ ID NO: 1662301 - RNA, 19 nt, Artificial Sequence
  Description of Artificial Sequence: Synthetic oligonucleotide
  Sense strand starting at position 3335 of SEQ ID NO: 1561314
cagggaaaguuuguuaugu

SEQ ID NO: 1662302 - RNA, 19 nt, Artificial Sequence
  Description of Artificial Sequence: Synthetic oligonucleotide
  Antisense strand to SEQ ID NO: 1662301
acauaacaaacuuucccug

SEQ ID NO: 1662303 - RNA, 19 nt, Artificial Sequence
  Description of Artificial Sequence: Synthetic oligonucleotide
  Sense strand starting at position 3336 of SEQ ID NO: 1561314
agggaaaguuuguuauguu

SEQ ID NO: 1662304 - RNA, 19 nt, Artificial Sequence
  Description of Artificial Sequence: Synthetic oligonucleotide
  Antisense strand to SEQ ID NO: 1662303
aacauaacaaacuuucccu

SEQ ID NO: 1662305 - RNA, 19 nt, Artificial Sequence
  Description of Artificial Sequence: Synthetic oligonucleotide
  Sense strand starting at position 3377 of SEQ ID NO: 1561314
uuacauauuucuuggagag

SEQ ID NO: 1662306 - RNA, 19 nt, Artificial Sequence
  Description of Artificial Sequence: Synthetic oligonucleotide
  Antisense strand to SEQ ID NO: 1662305
cucuccaagaaauauguaa

SEQ ID NO: 1662307 - RNA, 19 nt, Artificial Sequence
  Description of Artificial Sequence: Synthetic oligonucleotide
  Sense strand starting at position 3379 of SEQ ID NO: 1561314
acauauuucuuggagagag

SEQ ID NO: 1662308 - RNA, 19 nt, Artificial Sequence
  Description of Artificial Sequence: Synthetic oligonucleotide
  Antisense strand to SEQ ID NO: 1662307
cucucuccaagaaauaugu

SEQ ID NO: 1662309 - RNA, 19 nt, Artificial Sequence
  Description of Artificial Sequence: Synthetic oligonucleotide
  Sense strand starting at position 3520 of SEQ ID NO: 1561314
cgucaccaugccuaguuaa

SEQ ID NO: 1662310 - RNA, 19 nt, Artificial Sequence
  Description of Artificial Sequence: Synthetic oligonucleotide
  Antisense strand to SEQ ID NO: 1662309
uuaacuaggcauggugacg

SEQ ID NO: 1662311 - RNA, 19 nt, Artificial Sequence
  Description of Artificial Sequence: Synthetic oligonucleotide
  Sense strand starting at position 3723 of SEQ ID NO: 1561314
gugucaagaccauagcuca

SEQ ID NO: 1662312 - RNA, 19 nt, Artificial Sequence
  Description of Artificial Sequence: Synthetic oligonucleotide
  Antisense strand to SEQ ID NO: 1662311
ugagcuauggucuugacac

SEQ ID NO: 1662313 - RNA, 19 nt, Artificial Sequence
  Description of Artificial Sequence: Synthetic oligonucleotide
  Sense strand starting at position 3852 of SEQ ID NO: 1561314
ggcggauucucacuauguu

SEQ ID NO: 1662314 - RNA, 19 nt, Artificial Sequence
  Description of Artificial Sequence: Synthetic oligonucleotide
  Antisense strand to SEQ ID NO: 1662313
aacauagugagaauccgcc

SEQ ID NO: 1662315 - RNA, 19 nt, Artificial Sequence
  Description of Artificial Sequence: Synthetic oligonucleotide
  Sense strand starting at position 3853 of SEQ ID NO: 1561314
gcggauucucacuauguug

SEQ ID NO: 1662316 - RNA, 19 nt, Artificial Sequence
  Description of Artificial Sequence: Synthetic oligonucleotide
  Antisense strand to SEQ ID NO: 1662315
caacauagugagaauccgc

SEQ ID NO: 1662317 - RNA, 19 nt, Artificial Sequence
  Description of Artificial Sequence: Synthetic oligonucleotide
  Sense strand starting at position 350 of SEQ ID NO: 1561315
gccgaccuauguguacaua

SEQ ID NO: 1662318 - RNA, 19 nt, Artificial Sequence
  Description of Artificial Sequence: Synthetic oligonucleotide
  Antisense strand to SEQ ID NO: 1662317
uauguacacauaggucggc

SEQ ID NO: 1662319 - RNA, 19 nt, Artificial Sequence
  Description of Artificial Sequence: Synthetic oligonucleotide
  Sense strand starting at position 351 of SEQ ID NO: 1561315
ccgaccuauguguacauau

SEQ ID NO: 1662320 - RNA, 19 nt, Artificial Sequence
  Description of Artificial Sequence: Synthetic oligonucleotide
  Antisense strand to SEQ ID NO: 1662319
auauguacacauaggucgg

SEQ ID NO: 1662321 - RNA, 19 nt, Artificial Sequence
  Description of Artificial Sequence: Synthetic oligonucleotide
  Sense strand starting at position 905 of SEQ ID NO: 1561315
ccuauuguuccacagagug

SEQ ID NO: 1662322 - RNA, 19 nt, Artificial Sequence
  Description of Artificial Sequence: Synthetic oligonucleotide
  Antisense strand to SEQ ID NO: 1662321
cacucuguggaacaauagg

SEQ ID NO: 1662323 - RNA, 19 nt, Artificial Sequence
  Description of Artificial Sequence: Synthetic oligonucleotide
  Sense strand starting at position 1027 of SEQ ID NO: 1561315
gcagauaugagccagaauc

SEQ ID NO: 1662324 - RNA, 19 nt, Artificial Sequence
  Description of Artificial Sequence: Synthetic oligonucleotide
  Antisense strand to SEQ ID NO: 1662323
gauucuggcucauaucugc

SEQ ID NO: 1662325 - RNA, 19 nt, Artificial Sequence
  Description of Artificial Sequence: Synthetic oligonucleotide
  Sense strand starting at position 1269 of SEQ ID NO: 1561315
ggaaauccugucgacucua

SEQ ID NO: 1662326 - RNA, 19 nt, Artificial Sequence
  Description of Artificial Sequence: Synthetic oligonucleotide
  Antisense strand to SEQ ID NO: 1662325
uagagucgacaggauuucc

SEQ ID NO: 1662327 - RNA, 19 nt, Artificial Sequence
  Description of Artificial Sequence: Synthetic oligonucleotide
  Sense strand starting at position 1279 of SEQ ID NO: 1561315
ucgacucuaucucugagau

SEQ ID NO: 1662328 - RNA, 19 nt, Artificial Sequence
  Description of Artificial Sequence: Synthetic oligonucleotide
  Antisense strand to SEQ ID NO: 1662327
aucucagagauagagucga

SEQ ID NO: 1662329 - RNA, 19 nt, Artificial Sequence
  Description of Artificial Sequence: Synthetic oligonucleotide
  Sense strand starting at position 1280 of SEQ ID NO: 1561315
cgacucuaucucugagauc

SEQ ID NO: 1662330 - RNA, 19 nt, Artificial Sequence
  Description of Artificial Sequence: Synthetic oligonucleotide
  Antisense strand to SEQ ID NO: 1662329
gaucucagagauagagucg

SEQ ID NO: 1662331 - RNA, 19 nt, Artificial Sequence
  Description of Artificial Sequence: Synthetic oligonucleotide
  Sense strand starting at position 1424 of SEQ ID NO: 1561315
cgucuaccucugggcauaa

SEQ ID NO: 1662332 - RNA, 19 nt, Artificial Sequence
  Description of Artificial Sequence: Synthetic oligonucleotide
  Antisense strand to SEQ ID NO: 1662331
uuaugcccagagguagacg

SEQ ID NO: 1662333 - RNA, 19 nt, Artificial Sequence
  Description of Artificial Sequence: Synthetic oligonucleotide
  Sense strand starting at position 2152 of SEQ ID NO: 1561315
acucgcguucaggaugaaa

SEQ ID NO: 1662334 - RNA, 19 nt, Artificial Sequence
  Description of Artificial Sequence: Synthetic oligonucleotide
  Antisense strand to SEQ ID NO: 1662333
uuucauccugaacgcgagu

SEQ ID NO: 1662335 - RNA, 19 nt, Artificial Sequence
  Description of Artificial Sequence: Synthetic oligonucleotide
  Sense strand starting at position 2190 of SEQ ID NO: 1561315
ggcuuugagaaaugcaguu

SEQ ID NO: 1662336 - RNA, 19 nt, Artificial Sequence
  Description of Artificial Sequence: Synthetic oligonucleotide
  Antisense strand to SEQ ID NO: 1662335
aacugcauuucucaaagcc

SEQ ID NO: 1662337 - RNA, 19 nt, Artificial Sequence
  Description of Artificial Sequence: Synthetic oligonucleotide
  Sense strand starting at position 2534 of SEQ ID NO: 1561315
ggaguaauaucuuuccuuu

SEQ ID NO: 1662338 - RNA, 19 nt, Artificial Sequence
  Description of Artificial Sequence: Synthetic oligonucleotide
  Antisense strand to SEQ ID NO: 1662337
aaaggaaagauauuacucc

SEQ ID NO: 1662339 - RNA, 19 nt, Artificial Sequence
  Description of Artificial Sequence: Synthetic oligonucleotide
  Sense strand starting at position 2552 of SEQ ID NO: 1561315
ucugaauaaucaguuauug

SEQ ID NO: 1662340 - RNA, 19 nt, Artificial Sequence
  Description of Artificial Sequence: Synthetic oligonucleotide
  Antisense strand to SEQ ID NO: 1662339
caauaacugauuauucaga

SEQ ID NO: 1662341 - RNA, 19 nt, Artificial Sequence
  Description of Artificial Sequence: Synthetic oligonucleotide
  Sense strand starting at position 2722 of SEQ ID NO: 1561315
agucaaagcccuugugcaa

SEQ ID NO: 1662342 - RNA, 19 nt, Artificial Sequence
  Description of Artificial Sequence: Synthetic oligonucleotide
  Antisense strand to SEQ ID NO: 1662341
uugcacaagggcuuugacu

SEQ ID NO: 1662343 - RNA, 19 nt, Artificial Sequence
  Description of Artificial Sequence: Synthetic oligonucleotide
  Sense strand starting at position 2749 of SEQ ID NO: 1561315
ucuuacuccugagauaaag

SEQ ID NO: 1662344 - RNA, 19 nt, Artificial Sequence
  Description of Artificial Sequence: Synthetic oligonucleotide
  Antisense strand to SEQ ID NO: 1662343
cuuuaucucaggaguaaga

SEQ ID NO: 1662345 - RNA, 19 nt, Artificial Sequence
  Description of Artificial Sequence: Synthetic oligonucleotide
  Sense strand starting at position 2765 of SEQ ID NO: 1561315
aagguuugggaaugcauga

SEQ ID NO: 1662346 - RNA, 19 nt, Artificial Sequence
  Description of Artificial Sequence: Synthetic oligonucleotide
  Antisense strand to SEQ ID NO: 1662345
ucaugcauucccaaaccuu

SEQ ID NO: 1662347 - RNA, 19 nt, Artificial Sequence
  Description of Artificial Sequence: Synthetic oligonucleotide
  Sense strand starting at position 2772 of SEQ ID NO: 1561315
gggaaugcaugaucucauc

SEQ ID NO: 1662348 - RNA, 19 nt, Artificial Sequence
  Description of Artificial Sequence: Synthetic oligonucleotide
  Antisense strand to SEQ ID NO: 1662347
gaugagaucaugcauuccc

SEQ ID NO: 1662349 - RNA, 19 nt, Artificial Sequence
  Description of Artificial Sequence: Synthetic oligonucleotide
  Sense strand starting at position 2783 of SEQ ID NO: 1561315
aucucaucucauuagugga

SEQ ID NO: 1662350 - RNA, 19 nt, Artificial Sequence
  Description of Artificial Sequence: Synthetic oligonucleotide
  Antisense strand to SEQ ID NO: 1662349
uccacuaaugagaugagau

SEQ ID NO: 1662351 - RNA, 19 nt, Artificial Sequence
  Description of Artificial Sequence: Synthetic oligonucleotide
  Sense strand starting at position 2785 of SEQ ID NO: 1561315
cucaucucauuaguggaaa

SEQ ID NO: 1662352 - RNA, 19 nt, Artificial Sequence
  Description of Artificial Sequence: Synthetic oligonucleotide
  Antisense strand to SEQ ID NO: 1662351
uuuccacuaaugagaugag

SEQ ID NO: 1662353 - RNA, 19 nt, Artificial Sequence
  Description of Artificial Sequence: Synthetic oligonucleotide
  Sense strand starting at position 2806 of SEQ ID NO: 1561315
gauuuaucauuucgccuga

SEQ ID NO: 1662354 - RNA, 19 nt, Artificial Sequence
  Description of Artificial Sequence: Synthetic oligonucleotide
  Antisense strand to SEQ ID NO: 1662353
ucaggcgaaaugauaaauc

SEQ ID NO: 1662355 - RNA, 19 nt, Artificial Sequence
  Description of Artificial Sequence: Synthetic oligonucleotide
  Sense strand starting at position 2843 of SEQ ID NO: 1561315
ugcacagggaguugaaauu

SEQ ID NO: 1662356 - RNA, 19 nt, Artificial Sequence
  Description of Artificial Sequence: Synthetic oligonucleotide
  Antisense strand to SEQ ID NO: 1662355
aauuucaacucccugugca

SEQ ID NO: 1662357 - RNA, 19 nt, Artificial Sequence
  Description of Artificial Sequence: Synthetic oligonucleotide
  Sense strand starting at position 2849 of SEQ ID NO: 1561315
gggaguugaaauugucucu

SEQ ID NO: 1662358 - RNA, 19 nt, Artificial Sequence
  Description of Artificial Sequence: Synthetic oligonucleotide
  Antisense strand to SEQ ID NO: 1662357
agagacaauuucaacuccc

SEQ ID NO: 1662359 - RNA, 19 nt, Artificial Sequence
  Description of Artificial Sequence: Synthetic oligonucleotide
  Sense strand starting at position 2852 of SEQ ID NO: 1561315
aguugaaauugucucugaa

SEQ ID NO: 1662360 - RNA, 19 nt, Artificial Sequence
  Description of Artificial Sequence: Synthetic oligonucleotide
  Antisense strand to SEQ ID NO: 1662359
uucagagacaauuucaacu

SEQ ID NO: 1662361 - RNA, 19 nt, Artificial Sequence
  Description of Artificial Sequence: Synthetic oligonucleotide
  Sense strand starting at position 2854 of SEQ ID NO: 1561315
uugaaauugucucugaaua

SEQ ID NO: 1662362 - RNA, 19 nt, Artificial Sequence
  Description of Artificial Sequence: Synthetic oligonucleotide
  Antisense strand to SEQ ID NO: 1662361
uauucagagacaauuucaa

SEQ ID NO: 1662363 - RNA, 19 nt, Artificial Sequence
  Description of Artificial Sequence: Synthetic oligonucleotide
  Sense strand starting at position 2855 of SEQ ID NO: 1561315
ugaaauugucucugaauaa

SEQ ID NO: 1662364 - RNA, 19 nt, Artificial Sequence
  Description of Artificial Sequence: Synthetic oligonucleotide
  Antisense strand to SEQ ID NO: 1662363
uuauucagagacaauuuca

SEQ ID NO: 1662365 - RNA, 19 nt, Artificial Sequence
  Description of Artificial Sequence: Synthetic oligonucleotide
  Sense strand starting at position 2877 of SEQ ID NO: 1561315
uugugaaauggcuauuacu

SEQ ID NO: 1662366 - RNA, 19 nt, Artificial Sequence
  Description of Artificial Sequence: Synthetic oligonucleotide
  Antisense strand to SEQ ID NO: 1662365
aguaauagccauuucacaa

SEQ ID NO: 1662367 - RNA, 19 nt, Artificial Sequence
  Description of Artificial Sequence: Synthetic oligonucleotide
  Sense strand starting at position 2905 of SEQ ID NO: 1561315
aaugacgauuauguagaua

SEQ ID NO: 1662368 - RNA, 19 nt, Artificial Sequence
  Description of Artificial Sequence: Synthetic oligonucleotide
  Antisense strand to SEQ ID NO: 1662367
uaucuacauaaucgucauu

SEQ ID NO: 1662369 - RNA, 19 nt, Artificial Sequence
  Description of Artificial Sequence: Synthetic oligonucleotide
  Sense strand starting at position 2954 of SEQ ID NO: 1561315
gaaacauauuugugauagg

SEQ ID NO: 1662370 - RNA, 19 nt, Artificial Sequence
  Description of Artificial Sequence: Synthetic oligonucleotide
  Antisense strand to SEQ ID NO: 1662369
ccuaucacaaauauguuuc

SEQ ID NO: 1662371 - RNA, 19 nt, Artificial Sequence
  Description of Artificial Sequence: Synthetic oligonucleotide
  Sense strand starting at position 2955 of SEQ ID NO: 1561315
aaacauauuugugauagga

SEQ ID NO: 1662372 - RNA, 19 nt, Artificial Sequence
  Description of Artificial Sequence: Synthetic oligonucleotide
  Antisense strand to SEQ ID NO: 1662371
uccuaucacaaauauguuu

SEQ ID NO: 1662373 - RNA, 19 nt, Artificial Sequence
  Description of Artificial Sequence: Synthetic oligonucleotide
  Sense strand starting at position 2957 of SEQ ID NO: 1561315
acauauuugugauaggagg

SEQ ID NO: 1662374 - RNA, 19 nt, Artificial Sequence
  Description of Artificial Sequence: Synthetic oligonucleotide
  Antisense strand to SEQ ID NO: 1662373
ccuccuaucacaaauaugu

SEQ ID NO: 1662375 - RNA, 19 nt, Artificial Sequence
  Description of Artificial Sequence: Synthetic oligonucleotide
  Sense strand starting at position 2981 of SEQ ID NO: 1561315
agcuaagguuguccuggaa

SEQ ID NO: 1662376 - RNA, 19 nt, Artificial Sequence
  Description of Artificial Sequence: Synthetic oligonucleotide
  Antisense strand to SEQ ID NO: 1662375
uuccaggacaaccuuagcu

SEQ ID NO: 1662377 - RNA, 19 nt, Artificial Sequence
  Description of Artificial Sequence: Synthetic oligonucleotide
  Sense strand starting at position 2984 of SEQ ID NO: 1561315
uaagguuguccuggaaccu

SEQ ID NO: 1662378 - RNA, 19 nt, Artificial Sequence
  Description of Artificial Sequence: Synthetic oligonucleotide
  Antisense strand to SEQ ID NO: 1662377
agguuccaggacaaccuua

SEQ ID NO: 1662379 - RNA, 19 nt, Artificial Sequence
  Description of Artificial Sequence: Synthetic oligonucleotide
  Sense strand starting at position 2985 of SEQ ID NO: 1561315
aagguuguccuggaaccuu

SEQ ID NO: 1662380 - RNA, 19 nt, Artificial Sequence
  Description of Artificial Sequence: Synthetic oligonucleotide
  Antisense strand to SEQ ID NO: 1662379
aagguuccaggacaaccuu

SEQ ID NO: 1662381 - RNA, 19 nt, Artificial Sequence
  Description of Artificial Sequence: Synthetic oligonucleotide
  Sense strand starting at position 3171 of SEQ ID NO: 1561315
gaugaacacucauucgaug

SEQ ID NO: 1662382 - RNA, 19 nt, Artificial Sequence
  Description of Artificial Sequence: Synthetic oligonucleotide
  Antisense strand to SEQ ID NO: 1662381
caucgaaugaguguucauc

SEQ ID NO: 1662383 - RNA, 19 nt, Artificial Sequence
  Description of Artificial Sequence: Synthetic oligonucleotide
  Sense strand starting at position 3183 of SEQ ID NO: 1561315
uucgaugccagguacaaua

SEQ ID NO: 1662384 - RNA, 19 nt, Artificial Sequence
  Description of Artificial Sequence: Synthetic oligonucleotide
  Antisense strand to SEQ ID NO: 1662383
uauuguaccuggcaucgaa

SEQ ID NO: 1662385 - RNA, 19 nt, Artificial Sequence
  Description of Artificial Sequence: Synthetic oligonucleotide
  Sense strand starting at position 3247 of SEQ ID NO: 1561315
gguccucuaagacacguaa

SEQ ID NO: 1662386 - RNA, 19 nt, Artificial Sequence
  Description of Artificial Sequence: Synthetic oligonucleotide
  Antisense strand to SEQ ID NO: 1662385
uuacgugucuuagaggacc

SEQ ID NO: 1662387 - RNA, 19 nt, Artificial Sequence
  Description of Artificial Sequence: Synthetic oligonucleotide
  Sense strand starting at position 3277 of SEQ ID NO: 1561315
ugaauuaguccucaguccu

SEQ ID NO: 1662388 - RNA, 19 nt, Artificial Sequence
  Description of Artificial Sequence: Synthetic oligonucleotide
  Antisense strand to SEQ ID NO: 1662387
aggacugaggacuaauuca

SEQ ID NO: 1662389 - RNA, 19 nt, Artificial Sequence
  Description of Artificial Sequence: Synthetic oligonucleotide
  Sense strand starting at position 3285 of SEQ ID NO: 1561315
uccucaguccuguauugac

SEQ ID NO: 1662390 - RNA, 19 nt, Artificial Sequence
  Description of Artificial Sequence: Synthetic oligonucleotide
  Antisense strand to SEQ ID NO: 1662389
gucaauacaggacugagga

SEQ ID NO: 1662391 - RNA, 19 nt, Artificial Sequence
  Description of Artificial Sequence: Synthetic oligonucleotide
  Sense strand starting at position 3304 of SEQ ID NO: 1561315
cuugucaggucacuuuaaa

SEQ ID NO: 1662392 - RNA, 19 nt, Artificial Sequence
  Description of Artificial Sequence: Synthetic oligonucleotide
  Antisense strand to SEQ ID NO: 1662391
uuuaaagugaccugacaag

SEQ ID NO: 1662393 - RNA, 19 nt, Artificial Sequence
  Description of Artificial Sequence: Synthetic oligonucleotide
  Sense strand starting at position 3413 of SEQ ID NO: 1561315
gcagcuauguuagcugaaa

SEQ ID NO: 1662394 - RNA, 19 nt, Artificial Sequence
  Description of Artificial Sequence: Synthetic oligonucleotide
  Antisense strand to SEQ ID NO: 1662393
uuucagcuaacauagcugc

SEQ ID NO: 1662395 - RNA, 19 nt, Artificial Sequence
  Description of Artificial Sequence: Synthetic oligonucleotide
  Sense strand starting at position 3470 of SEQ ID NO: 1561315
ugaucucuccugcagaauu

SEQ ID NO: 1662396 - RNA, 19 nt, Artificial Sequence
  Description of Artificial Sequence: Synthetic oligonucleotide
  Antisense strand to SEQ ID NO: 1662395
aauucugcaggagagauca

SEQ ID NO: 1662397 - RNA, 19 nt, Artificial Sequence
  Description of Artificial Sequence: Synthetic oligonucleotide
  Sense strand starting at position 140 of SEQ ID NO: 1561316
caaugaguacauggucacu

SEQ ID NO: 1662398 - RNA, 19 nt, Artificial Sequence
  Description of Artificial Sequence: Synthetic oligonucleotide
  Antisense strand to SEQ ID NO: 1662397
agugaccauguacucauug

SEQ ID NO: 1662399 - RNA, 19 nt, Artificial Sequence
  Description of Artificial Sequence: Synthetic oligonucleotide
  Sense strand starting at position 142 of SEQ ID NO: 1561316
augaguacauggucacuca

SEQ ID NO: 1662400 - RNA, 19 nt, Artificial Sequence
  Description of Artificial Sequence: Synthetic oligonucleotide
  Antisense strand to SEQ ID NO: 1662399
ugagugaccauguacucau

SEQ ID NO: 1662401 - RNA, 19 nt, Artificial Sequence
  Description of Artificial Sequence: Synthetic oligonucleotide
  Sense strand starting at position 143 of SEQ ID NO: 1561316
ugaguacauggucacucau

SEQ ID NO: 1662402 - RNA, 19 nt, Artificial Sequence
  Description of Artificial Sequence: Synthetic oligonucleotide
  Antisense strand to SEQ ID NO: 1662401
augagugaccauguacuca

SEQ ID NO: 1662403 - RNA, 19 nt, Artificial Sequence
  Description of Artificial Sequence: Synthetic oligonucleotide
  Sense strand starting at position 211 of SEQ ID NO: 1561316
ugugucagacauuggagua

SEQ ID NO: 1662404 - RNA, 19 nt, Artificial Sequence
  Description of Artificial Sequence: Synthetic oligonucleotide
  Antisense strand to SEQ ID NO: 1662403
uacuccaaugucugacaca

SEQ ID NO: 1662405 - RNA, 19 nt, Artificial Sequence
  Description of Artificial Sequence: Synthetic oligonucleotide
  Sense strand starting at position 212 of SEQ ID NO: 1561316
gugucagacauuggaguag

SEQ ID NO: 1662406 - RNA, 19 nt, Artificial Sequence
  Description of Artificial Sequence: Synthetic oligonucleotide
  Antisense strand to SEQ ID NO: 1662405
cuacuccaaugucugacac

SEQ ID NO: 1662407 - RNA, 19 nt, Artificial Sequence
  Description of Artificial Sequence: Synthetic oligonucleotide
  Sense strand starting at position 253 of SEQ ID NO: 1561316
cuaguuauuagucaggguu

SEQ ID NO: 1662408 - RNA, 19 nt, Artificial Sequence
  Description of Artificial Sequence: Synthetic oligonucleotide
  Antisense strand to SEQ ID NO: 1662407
aacccugacuaauaacuag

SEQ ID NO: 1662409 - RNA, 19 nt, Artificial Sequence
  Description of Artificial Sequence: Synthetic oligonucleotide
  Sense strand starting at position 256 of SEQ ID NO: 1561316
guuauuagucaggguuaaa

SEQ ID NO: 1662410 - RNA, 19 nt, Artificial Sequence
  Description of Artificial Sequence: Synthetic oligonucleotide
  Antisense strand to SEQ ID NO: 1662409
uuuaacccugacuaauaac

SEQ ID NO: 1662411 - RNA, 19 nt, Artificial Sequence
  Description of Artificial Sequence: Synthetic oligonucleotide
  Sense strand starting at position 288 of SEQ ID NO: 1561316
ucuggacuaaauggugaau

SEQ ID NO: 1662412 - RNA, 19 nt, Artificial Sequence
  Description of Artificial Sequence: Synthetic oligonucleotide
  Antisense strand to SEQ ID NO: 1662411
auucaccauuuaguccaga

SEQ ID NO: 1662413 - RNA, 19 nt, Artificial Sequence
  Description of Artificial Sequence: Synthetic oligonucleotide
  Sense strand starting at position 416 of SEQ ID NO: 1561316
caagaugaagcuugucaag

SEQ ID NO: 1662414 - RNA, 19 nt, Artificial Sequence
  Description of Artificial Sequence: Synthetic oligonucleotide
  Antisense strand to SEQ ID NO: 1662413
cuugacaagcuucaucuug

SEQ ID NO: 1662415 - RNA, 19 nt, Artificial Sequence
  Description of Artificial Sequence: Synthetic oligonucleotide
  Sense strand starting at position 452 of SEQ ID NO: 1561316
gcacgugauaaauaugaau

SEQ ID NO: 1662416 - RNA, 19 nt, Artificial Sequence
  Description of Artificial Sequence: Synthetic oligonucleotide
  Antisense strand to SEQ ID NO: 1662415
auucauauuuaucacgugc

SEQ ID NO: 1662417 - RNA, 19 nt, Artificial Sequence
  Description of Artificial Sequence: Synthetic oligonucleotide
  Sense strand starting at position 552 of SEQ ID NO: 1561316
ggcugugugcuguuacaua

SEQ ID NO: 1662418 - RNA, 19 nt, Artificial Sequence
  Description of Artificial Sequence: Synthetic oligonucleotide
  Antisense strand to SEQ ID NO: 1662417
uauguaacagcacacagcc

SEQ ID NO: 1662419 - RNA, 19 nt, Artificial Sequence
  Description of Artificial Sequence: Synthetic oligonucleotide
  Sense strand starting at position 818 of SEQ ID NO: 1561316
cucuucugacuagagcuaa

SEQ ID NO: 1662420 - RNA, 19 nt, Artificial Sequence
  Description of Artificial Sequence: Synthetic oligonucleotide
  Antisense strand to SEQ ID NO: 1662419
uuagcucuagucagaagag

SEQ ID NO: 1662421 - RNA, 19 nt, Artificial Sequence
  Description of Artificial Sequence: Synthetic oligonucleotide
  Sense strand starting at position 1074 of SEQ ID NO: 1561316
ccugauagccaagaaaugu

SEQ ID NO: 1662422 - RNA, 19 nt, Artificial Sequence
  Description of Artificial Sequence: Synthetic oligonucleotide
  Antisense strand to SEQ ID NO: 1662421
acauuucuuggcuaucagg

SEQ ID NO: 1662423 - RNA, 19 nt, Artificial Sequence
  Description of Artificial Sequence: Synthetic oligonucleotide
  Sense strand starting at position 1084 of SEQ ID NO: 1561316
aagaaauguuucccagcga

SEQ ID NO: 1662424 - RNA, 19 nt, Artificial Sequence
  Description of Artificial Sequence: Synthetic oligonucleotide
  Antisense strand to SEQ ID NO: 1662423
ucgcugggaaacauuucuu

SEQ ID NO: 1662425 - RNA, 19 nt, Artificial Sequence
  Description of Artificial Sequence: Synthetic oligonucleotide
  Sense strand starting at position 1390 of SEQ ID NO: 1561316
uacugauuccuauagguug

SEQ ID NO: 1662426 - RNA, 19 nt, Artificial Sequence
  Description of Artificial Sequence: Synthetic oligonucleotide
  Antisense strand to SEQ ID NO: 1662425
caaccuauaggaaucagua

SEQ ID NO: 1662427 - RNA, 19 nt, Artificial Sequence
  Description of Artificial Sequence: Synthetic oligonucleotide
  Sense strand starting at position 1436 of SEQ ID NO: 1561316
cagugugauccucaaaguc

SEQ ID NO: 1662428 - RNA, 19 nt, Artificial Sequence
  Description of Artificial Sequence: Synthetic oligonucleotide
  Antisense strand to SEQ ID NO: 1662427
gacuuugaggaucacacug

SEQ ID NO: 1662429 - RNA, 19 nt, Artificial Sequence
  Description of Artificial Sequence: Synthetic oligonucleotide
  Sense strand starting at position 1596 of SEQ ID NO: 1561316
aguuucguggaccaauaua

SEQ ID NO: 1662430 - RNA, 19 nt, Artificial Sequence
  Description of Artificial Sequence: Synthetic oligonucleotide
  Antisense strand to SEQ ID NO: 1662429
uauauugguccacgaaacu

SEQ ID NO: 1662431 - RNA, 19 nt, Artificial Sequence
  Description of Artificial Sequence: Synthetic oligonucleotide
  Sense strand starting at position 2021 of SEQ ID NO: 1561316
uuacauucccguuaggauu

SEQ ID NO: 1662432 - RNA, 19 nt, Artificial Sequence
  Description of Artificial Sequence: Synthetic oligonucleotide
  Antisense strand to SEQ ID NO: 1662431
aauccuaacgggaauguaa

SEQ ID NO: 1662433 - RNA, 19 nt, Artificial Sequence
  Description of Artificial Sequence: Synthetic oligonucleotide
  Sense strand starting at position 2322 of SEQ ID NO: 1561316
auauauuucuaggagaaac

SEQ ID NO: 1662434 - RNA, 19 nt, Artificial Sequence
  Description of Artificial Sequence: Synthetic oligonucleotide
  Antisense strand to SEQ ID NO: 1662433
guuucuccuagaaauauau

SEQ ID NO: 1662435 - RNA, 19 nt, Artificial Sequence
  Description of Artificial Sequence: Synthetic oligonucleotide
  Sense strand starting at position 2339 of SEQ ID NO: 1561316
acugacauguauucugaaa

SEQ ID NO: 1662436 - RNA, 19 nt, Artificial Sequence
  Description of Artificial Sequence: Synthetic oligonucleotide
  Antisense strand to SEQ ID NO: 1662435
uuucagaauacaugucagu

SEQ ID NO: 1662437 - RNA, 19 nt, Artificial Sequence
  Description of Artificial Sequence: Synthetic oligonucleotide
  Sense strand starting at position 2404 of SEQ ID NO: 1561316
uccugaauugcugaacaac

SEQ ID NO: 1662438 - RNA, 19 nt, Artificial Sequence
  Description of Artificial Sequence: Synthetic oligonucleotide
  Antisense strand to SEQ ID NO: 1662437
guuguucagcaauucagga

SEQ ID NO: 1662439 - RNA, 19 nt, Artificial Sequence
  Description of Artificial Sequence: Synthetic oligonucleotide
  Sense strand starting at position 2463 of SEQ ID NO: 1561316
gagaaauuguaucuuuguu

SEQ ID NO: 1662440 - RNA, 19 nt, Artificial Sequence
  Description of Artificial Sequence: Synthetic oligonucleotide
  Antisense strand to SEQ ID NO: 1662439
aacaaagauacaauuucuc

SEQ ID NO: 1662441 - RNA, 19 nt, Artificial Sequence
  Description of Artificial Sequence: Synthetic oligonucleotide
  Sense strand starting at position 2497 of SEQ ID NO: 1561316
cucucuauaccuggaugaa

SEQ ID NO: 1662442 - RNA, 19 nt, Artificial Sequence
  Description of Artificial Sequence: Synthetic oligonucleotide
  Antisense strand to SEQ ID NO: 1662441
uucauccagguauagagag

SEQ ID NO: 1662443 - RNA, 19 nt, Artificial Sequence
  Description of Artificial Sequence: Synthetic oligonucleotide
  Sense strand starting at position 2681 of SEQ ID NO: 1561316
ggaagagguuguucaauca

SEQ ID NO: 1662444 - RNA, 19 nt, Artificial Sequence
  Description of Artificial Sequence: Synthetic oligonucleotide
  Antisense strand to SEQ ID NO: 1662443
ugauugaacaaccucuucc

SEQ ID NO: 1662445 - RNA, 19 nt, Artificial Sequence
  Description of Artificial Sequence: Synthetic oligonucleotide
  Sense strand starting at position 2712 of SEQ ID NO: 1561316
uauauucuagaaggugagu

SEQ ID NO: 1662446 - RNA, 19 nt, Artificial Sequence
  Description of Artificial Sequence: Synthetic oligonucleotide
  Antisense strand to SEQ ID NO: 1662445
acucaccuucuagaauaua

SEQ ID NO: 1662447 - RNA, 19 nt, Artificial Sequence
  Description of Artificial Sequence: Synthetic oligonucleotide
  Sense strand starting at position 2717 of SEQ ID NO: 1561316
ucuagaaggugaguaauag

SEQ ID NO: 1662448 - RNA, 19 nt, Artificial Sequence
  Description of Artificial Sequence: Synthetic oligonucleotide
  Antisense strand to SEQ ID NO: 1662447
cuauuacucaccuucuaga

SEQ ID NO: 1662449 - RNA, 19 nt, Artificial Sequence
  Description of Artificial Sequence: Synthetic oligonucleotide
  Sense strand starting at position 3029 of SEQ ID NO: 1561316
gaacaugguuucccaggaa

SEQ ID NO: 1662450 - RNA, 19 nt, Artificial Sequence
  Description of Artificial Sequence: Synthetic oligonucleotide
  Antisense strand to SEQ ID NO: 1662449
uuccugggaaaccauguuc

SEQ ID NO: 1662451 - RNA, 19 nt, Artificial Sequence
  Description of Artificial Sequence: Synthetic oligonucleotide
  Sense strand starting at position 3032 of SEQ ID NO: 1561316
caugguuucccaggaauag

SEQ ID NO: 1662452 - RNA, 19 nt, Artificial Sequence
  Description of Artificial Sequence: Synthetic oligonucleotide
  Antisense strand to SEQ ID NO: 1662451
cuauuccugggaaaccaug

SEQ ID NO: 1662453 - RNA, 19 nt, Artificial Sequence
  Description of Artificial Sequence: Synthetic oligonucleotide
  Sense strand starting at position 3033 of SEQ ID NO: 1561316
augguuucccaggaauagu

SEQ ID NO: 1662454 - RNA, 19 nt, Artificial Sequence
  Description of Artificial Sequence: Synthetic oligonucleotide
  Antisense strand to SEQ ID NO: 1662453
acuauuccugggaaaccau

SEQ ID NO: 1662455 - RNA, 19 nt, Artificial Sequence
  Description of Artificial Sequence: Synthetic oligonucleotide
  Sense strand starting at position 3203 of SEQ ID NO: 1561316
uuguuugaguuacuaagaa

SEQ ID NO: 1662456 - RNA, 19 nt, Artificial Sequence
  Description of Artificial Sequence: Synthetic oligonucleotide
  Antisense strand to SEQ ID NO: 1662455
uucuuaguaacucaaacaa

SEQ ID NO: 1662457 - RNA, 19 nt, Artificial Sequence
  Description of Artificial Sequence: Synthetic oligonucleotide
  Sense strand starting at position 3266 of SEQ ID NO: 1561316
ugagacuauucuuuacugu

SEQ ID NO: 1662458 - RNA, 19 nt, Artificial Sequence
  Description of Artificial Sequence: Synthetic oligonucleotide
  Antisense strand to SEQ ID NO: 1662457
acaguaaagaauagucuca

SEQ ID NO: 1662459 - RNA, 19 nt, Artificial Sequence
  Description of Artificial Sequence: Synthetic oligonucleotide
  Sense strand starting at position 3430 of SEQ ID NO: 1561316
gggacaucuguauaucugu

SEQ ID NO: 1662460 - RNA, 19 nt, Artificial Sequence
  Description of Artificial Sequence: Synthetic oligonucleotide
  Antisense strand to SEQ ID NO: 1662459
acagauauacagauguccc

SEQ ID NO: 1662461 - RNA, 19 nt, Artificial Sequence
  Description of Artificial Sequence: Synthetic oligonucleotide
  Sense strand starting at position 3435 of SEQ ID NO: 1561316
aucuguauaucuguaggau

SEQ ID NO: 1662462 - RNA, 19 nt, Artificial Sequence
  Description of Artificial Sequence: Synthetic oligonucleotide
  Antisense strand to SEQ ID NO: 1662461
auccuacagauauacagau

SEQ ID NO: 1662463 - RNA, 19 nt, Artificial Sequence
  Description of Artificial Sequence: Synthetic oligonucleotide
  Sense strand starting at position 3436 of SEQ ID NO: 1561316
ucuguauaucuguaggaug

SEQ ID NO: 1662464 - RNA, 19 nt, Artificial Sequence
  Description of Artificial Sequence: Synthetic oligonucleotide
  Antisense strand to SEQ ID NO: 1662463
cauccuacagauauacaga

SEQ ID NO: 1662465 - RNA, 19 nt, Artificial Sequence
  Description of Artificial Sequence: Synthetic oligonucleotide
  Sense strand starting at position 3438 of SEQ ID NO: 1561316
uguauaucuguaggaugag

SEQ ID NO: 1662466 - RNA, 19 nt, Artificial Sequence
  Description of Artificial Sequence: Synthetic oligonucleotide
  Antisense strand to SEQ ID NO: 1662465
cucauccuacagauauaca

SEQ ID NO: 1662467 - RNA, 19 nt, Artificial Sequence
  Description of Artificial Sequence: Synthetic oligonucleotide
  Sense strand starting at position 3514 of SEQ ID NO: 1561316
ugagucacaccuuguacaa

SEQ ID NO: 1662468 - RNA, 19 nt, Artificial Sequence
  Description of Artificial Sequence: Synthetic oligonucleotide
  Antisense strand to SEQ ID NO: 1662467
uuguacaaggugugacuca

SEQ ID NO: 1662469 - RNA, 19 nt, Artificial Sequence
  Description of Artificial Sequence: Synthetic oligonucleotide
  Sense strand starting at position 3549 of SEQ ID NO: 1561316
gcaaacggaaccugagauu

SEQ ID NO: 1662470 - RNA, 19 nt, Artificial Sequence
  Description of Artificial Sequence: Synthetic oligonucleotide
  Antisense strand to SEQ ID NO: 1662469
aaucucagguuccguuugc

SEQ ID NO: 1662471 - RNA, 19 nt, Artificial Sequence
  Description of Artificial Sequence: Synthetic oligonucleotide
  Sense strand starting at position 3600 of SEQ ID NO: 1561316
ugggacuuaucucuauuau

SEQ ID NO: 1662472 - RNA, 19 nt, Artificial Sequence
  Description of Artificial Sequence: Synthetic oligonucleotide
  Antisense strand to SEQ ID NO: 1662471
auaauagagauaaguccca

SEQ ID NO: 1662473 - RNA, 19 nt, Artificial Sequence
  Description of Artificial Sequence: Synthetic oligonucleotide
  Sense strand starting at position 3754 of SEQ ID NO: 1561316
ucaaguaacaguggugaca

SEQ ID NO: 1662474 - RNA, 19 nt, Artificial Sequence
  Description of Artificial Sequence: Synthetic oligonucleotide
  Antisense strand to SEQ ID NO: 1662473
ugucaccacuguuacuuga

SEQ ID NO: 1662475 - RNA, 19 nt, Artificial Sequence
  Description of Artificial Sequence: Synthetic oligonucleotide
  Sense strand starting at position 3864 of SEQ ID NO: 1561316
uuaucauaugcaugguaau

SEQ ID NO: 1662476 - RNA, 19 nt, Artificial Sequence
  Description of Artificial Sequence: Synthetic oligonucleotide
  Antisense strand to SEQ ID NO: 1662475
auuaccaugcauaugauaa

SEQ ID NO: 1662477 - RNA, 19 nt, Artificial Sequence
  Description of Artificial Sequence: Synthetic oligonucleotide
  Sense strand starting at position 122 of SEQ ID NO: 1561317
ggaagcuucuucuuacuaa

SEQ ID NO: 1662478 - RNA, 19 nt, Artificial Sequence
  Description of Artificial Sequence: Synthetic oligonucleotide
  Antisense strand to SEQ ID NO: 1662477
uuaguaagaagaagcuucc

SEQ ID NO: 1662479 - RNA, 19 nt, Artificial Sequence
  Description of Artificial Sequence: Synthetic oligonucleotide
  Sense strand starting at position 157 of SEQ ID NO: 1561317
cauagaguguaguuacaau

SEQ ID NO: 1662480 - RNA, 19 nt, Artificial Sequence
  Description of Artificial Sequence: Synthetic oligonucleotide
  Antisense strand to SEQ ID NO: 1662479
auuguaacuacacucuaug

SEQ ID NO: 1662481 - RNA, 19 nt, Artificial Sequence
  Description of Artificial Sequence: Synthetic oligonucleotide
  Sense strand starting at position 370 of SEQ ID NO: 1561317
uggagaaauagcugagucu

SEQ ID NO: 1662482 - RNA, 19 nt, Artificial Sequence
  Description of Artificial Sequence: Synthetic oligonucleotide
  Antisense strand to SEQ ID NO: 1662481
agacucagcuauuucucca

SEQ ID NO: 1662483 - RNA, 19 nt, Artificial Sequence
  Description of Artificial Sequence: Synthetic oligonucleotide
  Sense strand starting at position 373 of SEQ ID NO: 1561317
agaaauagcugagucuagu

SEQ ID NO: 1662484 - RNA, 19 nt, Artificial Sequence
  Description of Artificial Sequence: Synthetic oligonucleotide
  Antisense strand to SEQ ID NO: 1662483
acuagacucagcuauuucu

SEQ ID NO: 1662485 - RNA, 19 nt, Artificial Sequence
  Description of Artificial Sequence: Synthetic oligonucleotide
  Sense strand starting at position 376 of SEQ ID NO: 1561317
aauagcugagucuaguaua

SEQ ID NO: 1662486 - RNA, 19 nt, Artificial Sequence
  Description of Artificial Sequence: Synthetic oligonucleotide
  Antisense strand to SEQ ID NO: 1662485
uauacuagacucagcuauu

SEQ ID NO: 1662487 - RNA, 19 nt, Artificial Sequence
  Description of Artificial Sequence: Synthetic oligonucleotide
  Sense strand starting at position 381 of SEQ ID NO: 1561317
cugagucuaguauagacua

SEQ ID NO: 1662488 - RNA, 19 nt, Artificial Sequence
  Description of Artificial Sequence: Synthetic oligonucleotide
  Antisense strand to SEQ ID NO: 1662487
uagucuauacuagacucag

SEQ ID NO: 1662489 - RNA, 19 nt, Artificial Sequence
  Description of Artificial Sequence: Synthetic oligonucleotide
  Sense strand starting at position 477 of SEQ ID NO: 1561317
uaggguugggcugaguuaa

SEQ ID NO: 1662490 - RNA, 19 nt, Artificial Sequence
  Description of Artificial Sequence: Synthetic oligonucleotide
  Antisense strand to SEQ ID NO: 1662489
uuaacucagcccaacccua

SEQ ID NO: 1662491 - RNA, 19 nt, Artificial Sequence
  Description of Artificial Sequence: Synthetic oligonucleotide
  Sense strand starting at position 487 of SEQ ID NO: 1561317
cugaguuaauaucccgaaa

SEQ ID NO: 1662492 - RNA, 19 nt, Artificial Sequence
  Description of Artificial Sequence: Synthetic oligonucleotide
  Antisense strand to SEQ ID NO: 1662491
uuucgggauauuaacucag

SEQ ID NO: 1662493 - RNA, 19 nt, Artificial Sequence
  Description of Artificial Sequence: Synthetic oligonucleotide
  Sense strand starting at position 498 of SEQ ID NO: 1561317
ucccgaaauuacuuagaac

SEQ ID NO: 1662494 - RNA, 19 nt, Artificial Sequence
  Description of Artificial Sequence: Synthetic oligonucleotide
  Antisense strand to SEQ ID NO: 1662493
guucuaaguaauuucggga

SEQ ID NO: 1662495 - RNA, 19 nt, Artificial Sequence
  Description of Artificial Sequence: Synthetic oligonucleotide
  Sense strand starting at position 536 of SEQ ID NO: 1561317
ggaccauaaaggugagcau

SEQ ID NO: 1662496 - RNA, 19 nt, Artificial Sequence
  Description of Artificial Sequence: Synthetic oligonucleotide
  Antisense strand to SEQ ID NO: 1662495
augcucaccuuuauggucc

SEQ ID NO: 1662497 - RNA, 19 nt, Artificial Sequence
  Description of Artificial Sequence: Synthetic oligonucleotide
  Sense strand starting at position 539 of SEQ ID NO: 1561317
ccauaaaggugagcauauu

SEQ ID NO: 1662498 - RNA, 19 nt, Artificial Sequence
  Description of Artificial Sequence: Synthetic oligonucleotide
  Antisense strand to SEQ ID NO: 1662497
aauaugcucaccuuuaugg

SEQ ID NO: 1662499 - RNA, 19 nt, Artificial Sequence
  Description of Artificial Sequence: Synthetic oligonucleotide
  Sense strand starting at position 545 of SEQ ID NO: 1561317
aggugagcauauuugcauu

SEQ ID NO: 1662500 - RNA, 19 nt, Artificial Sequence
  Description of Artificial Sequence: Synthetic oligonucleotide
  Antisense strand to SEQ ID NO: 1662499
aaugcaaauaugcucaccu

SEQ ID NO: 1662501 - RNA, 19 nt, Artificial Sequence
  Description of Artificial Sequence: Synthetic oligonucleotide
  Sense strand starting at position 654 of SEQ ID NO: 1561317
cuaggacucugucuucuua

SEQ ID NO: 1662502 - RNA, 19 nt, Artificial Sequence
  Description of Artificial Sequence: Synthetic oligonucleotide
  Antisense strand to SEQ ID NO: 1662501
uaagaagacagaguccuag

SEQ ID NO: 1662503 - RNA, 19 nt, Artificial Sequence
  Description of Artificial Sequence: Synthetic oligonucleotide
  Sense strand starting at position 656 of SEQ ID NO: 1561317
aggacucugucuucuuaac

SEQ ID NO: 1662504 - RNA, 19 nt, Artificial Sequence
  Description of Artificial Sequence: Synthetic oligonucleotide
  Antisense strand to SEQ ID NO: 1662503
guuaagaagacagaguccu

SEQ ID NO: 1662505 - RNA, 19 nt, Artificial Sequence
  Description of Artificial Sequence: Synthetic oligonucleotide
  Sense strand starting at position 734 of SEQ ID NO: 1561317
guuguaaacgaagacacau

SEQ ID NO: 1662506 - RNA, 19 nt, Artificial Sequence
  Description of Artificial Sequence: Synthetic oligonucleotide
  Antisense strand to SEQ ID NO: 1662505
augugucuucguuuacaac

SEQ ID NO: 1662507 - RNA, 19 nt, Artificial Sequence
  Description of Artificial Sequence: Synthetic oligonucleotide
  Sense strand starting at position 742 of SEQ ID NO: 1561317
cgaagacacauacgcauua

SEQ ID NO: 1662508 - RNA, 19 nt, Artificial Sequence
  Description of Artificial Sequence: Synthetic oligonucleotide
  Antisense strand to SEQ ID NO: 1662507
uaaugcguaugugucuucg

SEQ ID NO: 1662509 - RNA, 19 nt, Artificial Sequence
  Description of Artificial Sequence: Synthetic oligonucleotide
  Sense strand starting at position 755 of SEQ ID NO: 1561317
gcauuaaucuaggccuaaa

SEQ ID NO: 1662510 - RNA, 19 nt, Artificial Sequence
  Description of Artificial Sequence: Synthetic oligonucleotide
  Antisense strand to SEQ ID NO: 1662509
uuuaggccuagauuaaugc

SEQ ID NO: 1662511 - RNA, 19 nt, Artificial Sequence
  Description of Artificial Sequence: Synthetic oligonucleotide
  Sense strand starting at position 883 of SEQ ID NO: 1561317
cuucuagaaugucuucuga

SEQ ID NO: 1662512 - RNA, 19 nt, Artificial Sequence
  Description of Artificial Sequence: Synthetic oligonucleotide
  Antisense strand to SEQ ID NO: 1662511
ucagaagacauucuagaag

SEQ ID NO: 1662513 - RNA, 19 nt, Artificial Sequence
  Description of Artificial Sequence: Synthetic oligonucleotide
  Sense strand starting at position 885 of SEQ ID NO: 1561317
ucuagaaugucuucugaag

SEQ ID NO: 1662514 - RNA, 19 nt, Artificial Sequence
  Description of Artificial Sequence: Synthetic oligonucleotide
  Antisense strand to SEQ ID NO: 1662513
cuucagaagacauucuaga

SEQ ID NO: 1662515 - RNA, 19 nt, Artificial Sequence
  Description of Artificial Sequence: Synthetic oligonucleotide
  Sense strand starting at position 1002 of SEQ ID NO: 1561317
caguaauguggucacuuau

SEQ ID NO: 1662516 - RNA, 19 nt, Artificial Sequence
  Description of Artificial Sequence: Synthetic oligonucleotide
  Antisense strand to SEQ ID NO: 1662515
auaagugaccacauuacug

SEQ ID NO: 1662517 - RNA, 19 nt, Artificial Sequence
  Description of Artificial Sequence: Synthetic oligonucleotide
  Sense strand starting at position 1108 of SEQ ID NO: 1561317
augacagacaugugaguaa

SEQ ID NO: 1662518 - RNA, 19 nt, Artificial Sequence
  Description of Artificial Sequence: Synthetic oligonucleotide
  Antisense strand to SEQ ID NO: 1662517
uuacucacaugucugucau

SEQ ID NO: 1662519 - RNA, 19 nt, Artificial Sequence
  Description of Artificial Sequence: Synthetic oligonucleotide
  Sense strand starting at position 1122 of SEQ ID NO: 1561317
aguaaugugcuuuacaaug

SEQ ID NO: 1662520 - RNA, 19 nt, Artificial Sequence
  Description of Artificial Sequence: Synthetic oligonucleotide
  Antisense strand to SEQ ID NO: 1662519
cauuguaaagcacauuacu

SEQ ID NO: 1662521 - RNA, 19 nt, Artificial Sequence
  Description of Artificial Sequence: Synthetic oligonucleotide
  Sense strand starting at position 1147 of SEQ ID NO: 1561317
uggcuaugucauuagguga

SEQ ID NO: 1662522 - RNA, 19 nt, Artificial Sequence
  Description of Artificial Sequence: Synthetic oligonucleotide
  Antisense strand to SEQ ID NO: 1662521
ucaccuaaugacauagcca

SEQ ID NO: 1662523 - RNA, 19 nt, Artificial Sequence
  Description of Artificial Sequence: Synthetic oligonucleotide
  Sense strand starting at position 1152 of SEQ ID NO: 1561317
augucauuaggugauugga

SEQ ID NO: 1662524 - RNA, 19 nt, Artificial Sequence
  Description of Artificial Sequence: Synthetic oligonucleotide
  Antisense strand to SEQ ID NO: 1662523
uccaaucaccuaaugacau

SEQ ID NO: 1662525 - RNA, 19 nt, Artificial Sequence
  Description of Artificial Sequence: Synthetic oligonucleotide
  Sense strand starting at position 1154 of SEQ ID NO: 1561317
gucauuaggugauuggaau

SEQ ID NO: 1662526 - RNA, 19 nt, Artificial Sequence
  Description of Artificial Sequence: Synthetic oligonucleotide
  Antisense strand to SEQ ID NO: 1662525
auuccaaucaccuaaugac

SEQ ID NO: 1662527 - RNA, 19 nt, Artificial Sequence
  Description of Artificial Sequence: Synthetic oligonucleotide
  Sense strand starting at position 1155 of SEQ ID NO: 1561317
ucauuaggugauuggaauu

SEQ ID NO: 1662528 - RNA, 19 nt, Artificial Sequence
  Description of Artificial Sequence: Synthetic oligonucleotide
  Antisense strand to SEQ ID NO: 1662527
aauuccaaucaccuaauga

SEQ ID NO: 1662529 - RNA, 19 nt, Artificial Sequence
  Description of Artificial Sequence: Synthetic oligonucleotide
  Sense strand starting at position 1348 of SEQ ID NO: 1561317
gggcuucaucaguaaugga

SEQ ID NO: 1662530 - RNA, 19 nt, Artificial Sequence
  Description of Artificial Sequence: Synthetic oligonucleotide
  Antisense strand to SEQ ID NO: 1662529
uccauuacugaugaagccc

SEQ ID NO: 1662531 - RNA, 19 nt, Artificial Sequence
  Description of Artificial Sequence: Synthetic oligonucleotide
  Sense strand starting at position 1364 of SEQ ID NO: 1561317
ggagcugauuuauaggaaa

SEQ ID NO: 1662532 - RNA, 19 nt, Artificial Sequence
  Description of Artificial Sequence: Synthetic oligonucleotide
  Antisense strand to SEQ ID NO: 1662531
uuuccuauaaaucagcucc

SEQ ID NO: 1662533 - RNA, 19 nt, Artificial Sequence
  Description of Artificial Sequence: Synthetic oligonucleotide
  Sense strand starting at position 1367 of SEQ ID NO: 1561317
gcugauuuauaggaaauag

SEQ ID NO: 1662534 - RNA, 19 nt, Artificial Sequence
  Description of Artificial Sequence: Synthetic oligonucleotide
  Antisense strand to SEQ ID NO: 1662533
cuauuuccuauaaaucagc

SEQ ID NO: 1662535 - RNA, 19 nt, Artificial Sequence
  Description of Artificial Sequence: Synthetic oligonucleotide
  Sense strand starting at position 1486 of SEQ ID NO: 1561317
acccuaauacuguaacagu

SEQ ID NO: 1662536 - RNA, 19 nt, Artificial Sequence
  Description of Artificial Sequence: Synthetic oligonucleotide
  Antisense strand to SEQ ID NO: 1662535
acuguuacaguauuagggu

SEQ ID NO: 1662537 - RNA, 19 nt, Artificial Sequence
  Description of Artificial Sequence: Synthetic oligonucleotide
  Sense strand starting at position 1514 of SEQ ID NO: 1561317
auaacuuaucucuagugua

SEQ ID NO: 1662538 - RNA, 19 nt, Artificial Sequence
  Description of Artificial Sequence: Synthetic oligonucleotide
  Antisense strand to SEQ ID NO: 1662537
uacacuagagauaaguuau

SEQ ID NO: 1662539 - RNA, 19 nt, Artificial Sequence
  Description of Artificial Sequence: Synthetic oligonucleotide
  Sense strand starting at position 1768 of SEQ ID NO: 1561317
gaaaucaaagcguaucacu

SEQ ID NO: 1662540 - RNA, 19 nt, Artificial Sequence
  Description of Artificial Sequence: Synthetic oligonucleotide
  Antisense strand to SEQ ID NO: 1662539
agugauacgcuuugauuuc

SEQ ID NO: 1662541 - RNA, 19 nt, Artificial Sequence
  Description of Artificial Sequence: Synthetic oligonucleotide
  Sense strand starting at position 1882 of SEQ ID NO: 1561317
guaaguacuuacccaucaa

SEQ ID NO: 1662542 - RNA, 19 nt, Artificial Sequence
  Description of Artificial Sequence: Synthetic oligonucleotide
  Antisense strand to SEQ ID NO: 1662541
uugauggguaaguacuuac

SEQ ID NO: 1662543 - RNA, 19 nt, Artificial Sequence
  Description of Artificial Sequence: Synthetic oligonucleotide
  Sense strand starting at position 2097 of SEQ ID NO: 1561317
cugagaguagugggaguau

SEQ ID NO: 1662544 - RNA, 19 nt, Artificial Sequence
  Description of Artificial Sequence: Synthetic oligonucleotide
  Antisense strand to SEQ ID NO: 1662543
auacucccacuacucucag

SEQ ID NO: 1662545 - RNA, 19 nt, Artificial Sequence
  Description of Artificial Sequence: Synthetic oligonucleotide
  Sense strand starting at position 2180 of SEQ ID NO: 1561317
ggauuaaguucucuaguca

SEQ ID NO: 1662546 - RNA, 19 nt, Artificial Sequence
  Description of Artificial Sequence: Synthetic oligonucleotide
  Antisense strand to SEQ ID NO: 1662545
ugacuagagaacuuaaucc

SEQ ID NO: 1662547 - RNA, 19 nt, Artificial Sequence
  Description of Artificial Sequence: Synthetic oligonucleotide
  Sense strand starting at position 2271 of SEQ ID NO: 1561317
gcuuuaagaaugcauguag

SEQ ID NO: 1662548 - RNA, 19 nt, Artificial Sequence
  Description of Artificial Sequence: Synthetic oligonucleotide
  Antisense strand to SEQ ID NO: 1662547
cuacaugcauucuuaaagc

SEQ ID NO: 1662549 - RNA, 19 nt, Artificial Sequence
  Description of Artificial Sequence: Synthetic oligonucleotide
  Sense strand starting at position 2481 of SEQ ID NO: 1561317
uaaagaucgcagcagaaau

SEQ ID NO: 1662550 - RNA, 19 nt, Artificial Sequence
  Description of Artificial Sequence: Synthetic oligonucleotide
  Antisense strand to SEQ ID NO: 1662549
auuucugcugcgaucuuua

SEQ ID NO: 1662551 - RNA, 19 nt, Artificial Sequence
  Description of Artificial Sequence: Synthetic oligonucleotide
  Sense strand starting at position 2533 of SEQ ID NO: 1561317
gaugaaacugaauguuggu

SEQ ID NO: 1662552 - RNA, 19 nt, Artificial Sequence
  Description of Artificial Sequence: Synthetic oligonucleotide
  Antisense strand to SEQ ID NO: 1662551
accaacauucaguuucauc

SEQ ID NO: 1662553 - RNA, 19 nt, Artificial Sequence
  Description of Artificial Sequence: Synthetic oligonucleotide
  Sense strand starting at position 2966 of SEQ ID NO: 1561317
uuaugaggucagcauuaca

SEQ ID NO: 1662554 - RNA, 19 nt, Artificial Sequence
  Description of Artificial Sequence: Synthetic oligonucleotide
  Antisense strand to SEQ ID NO: 1662553
uguaaugcugaccucauaa

SEQ ID NO: 1662555 - RNA, 19 nt, Artificial Sequence
  Description of Artificial Sequence: Synthetic oligonucleotide
  Sense strand starting at position 3260 of SEQ ID NO: 1561317
agcauucuucugugauaaa

SEQ ID NO: 1662556 - RNA, 19 nt, Artificial Sequence
  Description of Artificial Sequence: Synthetic oligonucleotide
  Antisense strand to SEQ ID NO: 1662555
uuuaucacagaagaaugcu

SEQ ID NO: 1662557 - RNA, 19 nt, Artificial Sequence
  Description of Artificial Sequence: Synthetic oligonucleotide
  Sense strand starting at position 237 of SEQ ID NO: 1561318
acgcaauuaccucaucagu

SEQ ID NO: 1662558 - RNA, 19 nt, Artificial Sequence
  Description of Artificial Sequence: Synthetic oligonucleotide
  Antisense strand to SEQ ID NO: 1662557
acugaugagguaauugcgu

SEQ ID NO: 1662559 - RNA, 19 nt, Artificial Sequence
  Description of Artificial Sequence: Synthetic oligonucleotide
  Sense strand starting at position 288 of SEQ ID NO: 1561318
gcuggaucccuaggauucu

SEQ ID NO: 1662560 - RNA, 19 nt, Artificial Sequence
  Description of Artificial Sequence: Synthetic oligonucleotide
  Antisense strand to SEQ ID NO: 1662559
agaauccuagggauccagc

SEQ ID NO: 1662561 - RNA, 19 nt, Artificial Sequence
  Description of Artificial Sequence: Synthetic oligonucleotide
  Sense strand starting at position 297 of SEQ ID NO: 1561318
cuaggauucuaaguacaag

SEQ ID NO: 1662562 - RNA, 19 nt, Artificial Sequence
  Description of Artificial Sequence: Synthetic oligonucleotide
  Antisense strand to SEQ ID NO: 1662561
cuuguacuuagaauccuag

SEQ ID NO: 1662563 - RNA, 19 nt, Artificial Sequence
  Description of Artificial Sequence: Synthetic oligonucleotide
  Sense strand starting at position 539 of SEQ ID NO: 1561318
cuaauucccuugucaguuu

SEQ ID NO: 1662564 - RNA, 19 nt, Artificial Sequence
  Description of Artificial Sequence: Synthetic oligonucleotide
  Antisense strand to SEQ ID NO: 1662563
aaacugacaagggaauuag

SEQ ID NO: 1662565 - RNA, 19 nt, Artificial Sequence
  Description of Artificial Sequence: Synthetic oligonucleotide
  Sense strand starting at position 759 of SEQ ID NO: 1561318
aggagaacaucuguauauu

SEQ ID NO: 1662566 - RNA, 19 nt, Artificial Sequence
  Description of Artificial Sequence: Synthetic oligonucleotide
  Antisense strand to SEQ ID NO: 1662565
aauauacagauguucuccu

SEQ ID NO: 1662567 - RNA, 19 nt, Artificial Sequence
  Description of Artificial Sequence: Synthetic oligonucleotide
  Sense strand starting at position 808 of SEQ ID NO: 1561318
ucaaucugaccugguguau

SEQ ID NO: 1662568 - RNA, 19 nt, Artificial Sequence
  Description of Artificial Sequence: Synthetic oligonucleotide
  Antisense strand to SEQ ID NO: 1662567
auacaccaggucagauuga

SEQ ID NO: 1662569 - RNA, 19 nt, Artificial Sequence
  Description of Artificial Sequence: Synthetic oligonucleotide
  Sense strand starting at position 878 of SEQ ID NO: 1561318
ggaguaacugcugaugagu

SEQ ID NO: 1662570 - RNA, 19 nt, Artificial Sequence
  Description of Artificial Sequence: Synthetic oligonucleotide
  Antisense strand to SEQ ID NO: 1662569
acucaucagcaguuacucc

SEQ ID NO: 1662571 - RNA, 19 nt, Artificial Sequence
  Description of Artificial Sequence: Synthetic oligonucleotide
  Sense strand starting at position 886 of SEQ ID NO: 1561318
ugcugaugaguaugggauu

SEQ ID NO: 1662572 - RNA, 19 nt, Artificial Sequence
  Description of Artificial Sequence: Synthetic oligonucleotide
  Antisense strand to SEQ ID NO: 1662571
aaucccauacucaucagca

SEQ ID NO: 1662573 - RNA, 19 nt, Artificial Sequence
  Description of Artificial Sequence: Synthetic oligonucleotide
  Sense strand starting at position 924 of SEQ ID NO: 1561318
auguucuagaguuagauug

SEQ ID NO: 1662574 - RNA, 19 nt, Artificial Sequence
  Description of Artificial Sequence: Synthetic oligonucleotide
  Antisense strand to SEQ ID NO: 1662573
caaucuaacucuagaacau

SEQ ID NO: 1662575 - RNA, 19 nt, Artificial Sequence
  Description of Artificial Sequence: Synthetic oligonucleotide
  Sense strand starting at position 934 of SEQ ID NO: 1561318
guuagauuguagucauggu

SEQ ID NO: 1662576 - RNA, 19 nt, Artificial Sequence
  Description of Artificial Sequence: Synthetic oligonucleotide
  Antisense strand to SEQ ID NO: 1662575
accaugacuacaaucuaac

SEQ ID NO: 1662577 - RNA, 19 nt, Artificial Sequence
  Description of Artificial Sequence: Synthetic oligonucleotide
  Sense strand starting at position 1095 of SEQ ID NO: 1561318
gcugaaagcuuucuuucug

SEQ ID NO: 1662578 - RNA, 19 nt, Artificial Sequence
  Description of Artificial Sequence: Synthetic oligonucleotide
  Antisense strand to SEQ ID NO: 1662577
cagaaagaaagcuuucagc

SEQ ID NO: 1662579 - RNA, 19 nt, Artificial Sequence
  Description of Artificial Sequence: Synthetic oligonucleotide
  Sense strand starting at position 1096 of SEQ ID NO: 1561318
cugaaagcuuucuuucuga

SEQ ID NO: 1662580 - RNA, 19 nt, Artificial Sequence
  Description of Artificial Sequence: Synthetic oligonucleotide
  Antisense strand to SEQ ID NO: 1662579
ucagaaagaaagcuuucag

SEQ ID NO: 1662581 - RNA, 19 nt, Artificial Sequence
  Description of Artificial Sequence: Synthetic oligonucleotide
  Sense strand starting at position 1186 of SEQ ID NO: 1561318
gcaggagugggucguaaua

SEQ ID NO: 1662582 - RNA, 19 nt, Artificial Sequence
  Description of Artificial Sequence: Synthetic oligonucleotide
  Antisense strand to SEQ ID NO: 1662581
uauuacgacccacuccugc

SEQ ID NO: 1662583 - RNA, 19 nt, Artificial Sequence
  Description of Artificial Sequence: Synthetic oligonucleotide
  Sense strand starting at position 1193 of SEQ ID NO: 1561318
ugggucguaauaggauuau

SEQ ID NO: 1662584 - RNA, 19 nt, Artificial Sequence
  Description of Artificial Sequence: Synthetic oligonucleotide
  Antisense strand to SEQ ID NO: 1662583
auaauccuauuacgaccca

SEQ ID NO: 1662585 - RNA, 19 nt, Artificial Sequence
  Description of Artificial Sequence: Synthetic oligonucleotide
  Sense strand starting at position 1240 of SEQ ID NO: 1561318
acgauaugucaauauguaa

SEQ ID NO: 1662586 - RNA, 19 nt, Artificial Sequence
  Description of Artificial Sequence: Synthetic oligonucleotide
  Antisense strand to SEQ ID NO: 1662585
uuacauauugacauaucgu

SEQ ID NO: 1662587 - RNA, 19 nt, Artificial Sequence
  Description of Artificial Sequence: Synthetic oligonucleotide
  Sense strand starting at position 1366 of SEQ ID NO: 1561318
uggucauaccuaggaauua

SEQ ID NO: 1662588 - RNA, 19 nt, Artificial Sequence
  Description of Artificial Sequence: Synthetic oligonucleotide
  Antisense strand to SEQ ID NO: 1662587
uaauuccuagguaugacca

SEQ ID NO: 1662589 - RNA, 19 nt, Artificial Sequence
  Description of Artificial Sequence: Synthetic oligonucleotide
  Sense strand starting at position 2073 of SEQ ID NO: 1561318
cggauucgcccugaggacu

SEQ ID NO: 1662590 - RNA, 19 nt, Artificial Sequence
  Description of Artificial Sequence: Synthetic oligonucleotide
  Antisense strand to SEQ ID NO: 1662589
aguccucagggcgaauccg

SEQ ID NO: 1662591 - RNA, 19 nt, Artificial Sequence
  Description of Artificial Sequence: Synthetic oligonucleotide
  Sense strand starting at position 2200 of SEQ ID NO: 1561318
gggucucaaagcuaaguaa

SEQ ID NO: 1662592 - RNA, 19 nt, Artificial Sequence
  Description of Artificial Sequence: Synthetic oligonucleotide
  Antisense strand to SEQ ID NO: 1662591
uuacuuagcuuugagaccc

SEQ ID NO: 1662593 - RNA, 19 nt, Artificial Sequence
  Description of Artificial Sequence: Synthetic oligonucleotide
  Sense strand starting at position 2230 of SEQ ID NO: 1561318
gaacuagaauccguacugu

SEQ ID NO: 1662594 - RNA, 19 nt, Artificial Sequence
  Description of Artificial Sequence: Synthetic oligonucleotide
  Antisense strand to SEQ ID NO: 1662593
acaguacggauucuaguuc

SEQ ID NO: 1662595 - RNA, 19 nt, Artificial Sequence
  Description of Artificial Sequence: Synthetic oligonucleotide
  Sense strand starting at position 2381 of SEQ ID NO: 1561318
cggacuccaguuuaaacaa

SEQ ID NO: 1662596 - RNA, 19 nt, Artificial Sequence
  Description of Artificial Sequence: Synthetic oligonucleotide
  Antisense strand to SEQ ID NO: 1662595
uuguuuaaacuggaguccg

SEQ ID NO: 1662597 - RNA, 19 nt, Artificial Sequence
  Description of Artificial Sequence: Synthetic oligonucleotide
  Sense strand starting at position 2435 of SEQ ID NO: 1561318
cugugagcacuugaaauua

SEQ ID NO: 1662598 - RNA, 19 nt, Artificial Sequence
  Description of Artificial Sequence: Synthetic oligonucleotide
  Antisense strand to SEQ ID NO: 1662597
uaauuucaagugcucacag

SEQ ID NO: 1662599 - RNA, 19 nt, Artificial Sequence
  Description of Artificial Sequence: Synthetic oligonucleotide
  Sense strand starting at position 2443 of SEQ ID NO: 1561318
acuugaaauuauccgccaa

SEQ ID NO: 1662600 - RNA, 19 nt, Artificial Sequence
  Description of Artificial Sequence: Synthetic oligonucleotide
  Antisense strand to SEQ ID NO: 1662599
uuggcggauaauuucaagu

SEQ ID NO: 1662601 - RNA, 19 nt, Artificial Sequence
  Description of Artificial Sequence: Synthetic oligonucleotide
  Sense strand starting at position 2445 of SEQ ID NO: 1561318
uugaaauuauccgccaaca

SEQ ID NO: 1662602 - RNA, 19 nt, Artificial Sequence
  Description of Artificial Sequence: Synthetic oligonucleotide
  Antisense strand to SEQ ID NO: 1662601
uguuggcggauaauuucaa

SEQ ID NO: 1662603 - RNA, 19 nt, Artificial Sequence
  Description of Artificial Sequence: Synthetic oligonucleotide
  Sense strand starting at position 2510 of SEQ ID NO: 1561318
auuggaaccuuggaauuaa

SEQ ID NO: 1662604 - RNA, 19 nt, Artificial Sequence
  Description of Artificial Sequence: Synthetic oligonucleotide
  Antisense strand to SEQ ID NO: 1662603
uuaauuccaagguuccaau

SEQ ID NO: 1662605 - RNA, 19 nt, Artificial Sequence
  Description of Artificial Sequence: Synthetic oligonucleotide
  Sense strand starting at position 2569 of SEQ ID NO: 1561318
uuuaaauggcuuuggaguu

SEQ ID NO: 1662606 - RNA, 19 nt, Artificial Sequence
  Description of Artificial Sequence: Synthetic oligonucleotide
  Antisense strand to SEQ ID NO: 1662605
aacuccaaagccauuuaaa

SEQ ID NO: 1662607 - RNA, 19 nt, Artificial Sequence
  Description of Artificial Sequence: Synthetic oligonucleotide
  Sense strand starting at position 2704 of SEQ ID NO: 1561318
ugguuaagauaaucauuac

SEQ ID NO: 1662608 - RNA, 19 nt, Artificial Sequence
  Description of Artificial Sequence: Synthetic oligonucleotide
  Antisense strand to SEQ ID NO: 1662607
guaaugauuaucuuaacca

SEQ ID NO: 1662609 - RNA, 19 nt, Artificial Sequence
  Description of Artificial Sequence: Synthetic oligonucleotide
  Sense strand starting at position 3011 of SEQ ID NO: 1561318
cggccagagaaucauuguu

SEQ ID NO: 1662610 - RNA, 19 nt, Artificial Sequence
  Description of Artificial Sequence: Synthetic oligonucleotide
  Antisense strand to SEQ ID NO: 1662609
aacaaugauucucuggccg

SEQ ID NO: 1662611 - RNA, 19 nt, Artificial Sequence
  Description of Artificial Sequence: Synthetic oligonucleotide
  Sense strand starting at position 3013 of SEQ ID NO: 1561318
gccagagaaucauuguuaa

SEQ ID NO: 1662612 - RNA, 19 nt, Artificial Sequence
  Description of Artificial Sequence: Synthetic oligonucleotide
  Antisense strand to SEQ ID NO: 1662611
uuaacaaugauucucuggc

SEQ ID NO: 1662613 - RNA, 19 nt, Artificial Sequence
  Description of Artificial Sequence: Synthetic oligonucleotide
  Sense strand starting at position 3016 of SEQ ID NO: 1561318
agagaaucauuguuaaugu

SEQ ID NO: 1662614 - RNA, 19 nt, Artificial Sequence
  Description of Artificial Sequence: Synthetic oligonucleotide
  Antisense strand to SEQ ID NO: 1662613
acauuaacaaugauucucu

SEQ ID NO: 1662615 - RNA, 19 nt, Artificial Sequence
  Description of Artificial Sequence: Synthetic oligonucleotide
  Sense strand starting at position 3095 of SEQ ID NO: 1561318
gcagucugugccucucaca

SEQ ID NO: 1662616 - RNA, 19 nt, Artificial Sequence
  Description of Artificial Sequence: Synthetic oligonucleotide
  Antisense strand to SEQ ID NO: 1662615
ugugagaggcacagacugc

SEQ ID NO: 1662617 - RNA, 19 nt, Artificial Sequence
  Description of Artificial Sequence: Synthetic oligonucleotide
  Sense strand starting at position 3155 of SEQ ID NO: 1561318
cuuaaagcacuagggauua

SEQ ID NO: 1662618 - RNA, 19 nt, Artificial Sequence
  Description of Artificial Sequence: Synthetic oligonucleotide
  Antisense strand to SEQ ID NO: 1662617
uaaucccuagugcuuuaag

SEQ ID NO: 1662619 - RNA, 19 nt, Artificial Sequence
  Description of Artificial Sequence: Synthetic oligonucleotide
  Sense strand starting at position 3167 of SEQ ID NO: 1561318
gggauuaauuacuaacauu

SEQ ID NO: 1662620 - RNA, 19 nt, Artificial Sequence
  Description of Artificial Sequence: Synthetic oligonucleotide
  Antisense strand to SEQ ID NO: 1662619
aauguuaguaauuaauccc

SEQ ID NO: 1662621 - RNA, 19 nt, Artificial Sequence
  Description of Artificial Sequence: Synthetic oligonucleotide
  Sense strand starting at position 3198 of SEQ ID NO: 1561318
uagggccauuguguuuaaa

SEQ ID NO: 1662622 - RNA, 19 nt, Artificial Sequence
  Description of Artificial Sequence: Synthetic oligonucleotide
  Antisense strand to SEQ ID NO: 1662621
uuuaaacacaauggcccua

SEQ ID NO: 1662623 - RNA, 19 nt, Artificial Sequence
  Description of Artificial Sequence: Synthetic oligonucleotide
  Sense strand starting at position 3254 of SEQ ID NO: 1561318
uuaagaaguuagguucuuu

SEQ ID NO: 1662624 - RNA, 19 nt, Artificial Sequence
  Description of Artificial Sequence: Synthetic oligonucleotide
  Antisense strand to SEQ ID NO: 1662623
aaagaaccuaacuucuuaa

SEQ ID NO: 1662625 - RNA, 19 nt, Artificial Sequence
  Description of Artificial Sequence: Synthetic oligonucleotide
  Sense strand starting at position 3320 of SEQ ID NO: 1561318
ugaggauauuuacacacuu

SEQ ID NO: 1662626 - RNA, 19 nt, Artificial Sequence
  Description of Artificial Sequence: Synthetic oligonucleotide
  Antisense strand to SEQ ID NO: 1662625
aaguguguaaauauccuca

SEQ ID NO: 1662627 - RNA, 19 nt, Artificial Sequence
  Description of Artificial Sequence: Synthetic oligonucleotide
  Sense strand starting at position 3418 of SEQ ID NO: 1561318
uccugagcuccauggcaaa

SEQ ID NO: 1662628 - RNA, 19 nt, Artificial Sequence
  Description of Artificial Sequence: Synthetic oligonucleotide
  Antisense strand to SEQ ID NO: 1662627
uuugccauggagcucagga

SEQ ID NO: 1662629 - RNA, 19 nt, Artificial Sequence
  Description of Artificial Sequence: Synthetic oligonucleotide
  Sense strand starting at position 3474 of SEQ ID NO: 1561318
uguauucaugcacgaggua

SEQ ID NO: 1662630 - RNA, 19 nt, Artificial Sequence
  Description of Artificial Sequence: Synthetic oligonucleotide
  Antisense strand to SEQ ID NO: 1662629
uaccucgugcaugaauaca

SEQ ID NO: 1662631 - RNA, 19 nt, Artificial Sequence
  Description of Artificial Sequence: Synthetic oligonucleotide
  Sense strand starting at position 3477 of SEQ ID NO: 1561318
auucaugcacgagguagaa

SEQ ID NO: 1662632 - RNA, 19 nt, Artificial Sequence
  Description of Artificial Sequence: Synthetic oligonucleotide
  Antisense strand to SEQ ID NO: 1662631
uucuaccucgugcaugaau

SEQ ID NO: 1662633 - RNA, 19 nt, Artificial Sequence
  Description of Artificial Sequence: Synthetic oligonucleotide
  Sense strand starting at position 3808 of SEQ ID NO: 1561318
caaacauuggugggagcaa

SEQ ID NO: 1662634 - RNA, 19 nt, Artificial Sequence
  Description of Artificial Sequence: Synthetic oligonucleotide
  Antisense strand to SEQ ID NO: 1662633
uugcucccaccaauguuug

SEQ ID NO: 1662635 - RNA, 19 nt, Artificial Sequence
  Description of Artificial Sequence: Synthetic oligonucleotide
  Sense strand starting at position 3960 of SEQ ID NO: 1561318
cgaaucucauuugagaauu

SEQ ID NO: 1662636 - RNA, 19 nt, Artificial Sequence
  Description of Artificial Sequence: Synthetic oligonucleotide
  Antisense strand to SEQ ID NO: 1662635
aauucucaaaugagauucg

SEQ ID NO: 1662637 - RNA, 19 nt, Artificial Sequence
  Description of Artificial Sequence: Synthetic oligonucleotide
  Sense strand starting at position 6 of SEQ ID NO: 1561319
ggaagauccugucuuucca

SEQ ID NO: 1662638 - RNA, 19 nt, Artificial Sequence
  Description of Artificial Sequence: Synthetic oligonucleotide
  Antisense strand to SEQ ID NO: 1662637
uggaaagacaggaucuucc

SEQ ID NO: 1662639 - RNA, 19 nt, Artificial Sequence
  Description of Artificial Sequence: Synthetic oligonucleotide
  Sense strand starting at position 460 of SEQ ID NO: 1561319
ccaugcuccugagucaaca

SEQ ID NO: 1662640 - RNA, 19 nt, Artificial Sequence
  Description of Artificial Sequence: Synthetic oligonucleotide
  Antisense strand to SEQ ID NO: 1662639
uguugacucaggagcaugg

SEQ ID NO: 1662641 - RNA, 19 nt, Artificial Sequence
  Description of Artificial Sequence: Synthetic oligonucleotide
  Sense strand starting at position 599 of SEQ ID NO: 1561319
uaaacaguagcuugagcau

SEQ ID NO: 1662642 - RNA, 19 nt, Artificial Sequence
  Description of Artificial Sequence: Synthetic oligonucleotide
  Antisense strand to SEQ ID NO: 1662641
augcucaagcuacuguuua

SEQ ID NO: 1662643 - RNA, 19 nt, Artificial Sequence
  Description of Artificial Sequence: Synthetic oligonucleotide
  Sense strand starting at position 755 of SEQ ID NO: 1561319
agcucuucccgggaccaaa

SEQ ID NO: 1662644 - RNA, 19 nt, Artificial Sequence
  Description of Artificial Sequence: Synthetic oligonucleotide
  Antisense strand to SEQ ID NO: 1662643
uuuggucccgggaagagcu

SEQ ID NO: 1662645 - RNA, 19 nt, Artificial Sequence
  Description of Artificial Sequence: Synthetic oligonucleotide
  Sense strand starting at position 930 of SEQ ID NO: 1561319
cuguccuuccuggacuuaa

SEQ ID NO: 1662646 - RNA, 19 nt, Artificial Sequence
  Description of Artificial Sequence: Synthetic oligonucleotide
  Antisense strand to SEQ ID NO: 1662645
uuaaguccaggaaggacag

SEQ ID NO: 1662647 - RNA, 19 nt, Artificial Sequence
  Description of Artificial Sequence: Synthetic oligonucleotide
  Sense strand starting at position 994 of SEQ ID NO: 1561319
agagcucugcacuauccua

SEQ ID NO: 1662648 - RNA, 19 nt, Artificial Sequence
  Description of Artificial Sequence: Synthetic oligonucleotide
  Antisense strand to SEQ ID NO: 1662647
uaggauagugcagagcucu

SEQ ID NO: 1662649 - RNA, 19 nt, Artificial Sequence
  Description of Artificial Sequence: Synthetic oligonucleotide
  Sense strand starting at position 1001 of SEQ ID NO: 1561319
ugcacuauccuacauaggu

SEQ ID NO: 1662650 - RNA, 19 nt, Artificial Sequence
  Description of Artificial Sequence: Synthetic oligonucleotide
  Antisense strand to SEQ ID NO: 1662649
accuauguaggauagugca

SEQ ID NO: 1662651 - RNA, 19 nt, Artificial Sequence
  Description of Artificial Sequence: Synthetic oligonucleotide
  Sense strand starting at position 1010 of SEQ ID NO: 1561319
cuacauaggucccuacuau

SEQ ID NO: 1662652 - RNA, 19 nt, Artificial Sequence
  Description of Artificial Sequence: Synthetic oligonucleotide
  Antisense strand to SEQ ID NO: 1662651
auaguagggaccuauguag

SEQ ID NO: 1662653 - RNA, 19 nt, Artificial Sequence
  Description of Artificial Sequence: Synthetic oligonucleotide
  Sense strand starting at position 1145 of SEQ ID NO: 1561319
gguaauucccaccaagggu

SEQ ID NO: 1662654 - RNA, 19 nt, Artificial Sequence
  Description of Artificial Sequence: Synthetic oligonucleotide
  Antisense strand to SEQ ID NO: 1662653
acccuuggugggaauuacc

SEQ ID NO: 1662655 - RNA, 19 nt, Artificial Sequence
  Description of Artificial Sequence: Synthetic oligonucleotide
  Sense strand starting at position 1288 of SEQ ID NO: 1561319
cucggaaucuuaccuacaa

SEQ ID NO: 1662656 - RNA, 19 nt, Artificial Sequence
  Description of Artificial Sequence: Synthetic oligonucleotide
  Antisense strand to SEQ ID NO: 1662655
uuguagguaagauuccgag

SEQ ID NO: 1662657 - RNA, 19 nt, Artificial Sequence
  Description of Artificial Sequence: Synthetic oligonucleotide
  Sense strand starting at position 1289 of SEQ ID NO: 1561319
ucggaaucuuaccuacaac

SEQ ID NO: 1662658 - RNA, 19 nt, Artificial Sequence
  Description of Artificial Sequence: Synthetic oligonucleotide
  Antisense strand to SEQ ID NO: 1662657
guuguagguaagauuccga

SEQ ID NO: 1662659 - RNA, 19 nt, Artificial Sequence
  Description of Artificial Sequence: Synthetic oligonucleotide
  Sense strand starting at position 1569 of SEQ ID NO: 1561319
gaggacagucgcggaauau

SEQ ID NO: 1662660 - RNA, 19 nt, Artificial Sequence
  Description of Artificial Sequence: Synthetic oligonucleotide
  Antisense strand to SEQ ID NO: 1662659
auauuccgcgacuguccuc

SEQ ID NO: 1662661 - RNA, 19 nt, Artificial Sequence
  Description of Artificial Sequence: Synthetic oligonucleotide
  Sense strand starting at position 1570 of SEQ ID NO: 1561319
aggacagucgcggaauaua

SEQ ID NO: 1662662 - RNA, 19 nt, Artificial Sequence
  Description of Artificial Sequence: Synthetic oligonucleotide
  Antisense strand to SEQ ID NO: 1662661
uauauuccgcgacuguccu

SEQ ID NO: 1662663 - RNA, 19 nt, Artificial Sequence
  Description of Artificial Sequence: Synthetic oligonucleotide
  Sense strand starting at position 2501 of SEQ ID NO: 1561319
gccuauaaggccugaagga

SEQ ID NO: 1662664 - RNA, 19 nt, Artificial Sequence
  Description of Artificial Sequence: Synthetic oligonucleotide
  Antisense strand to SEQ ID NO: 1662663
uccuucaggccuuauaggc

SEQ ID NO: 1662665 - RNA, 19 nt, Artificial Sequence
  Description of Artificial Sequence: Synthetic oligonucleotide
  Sense strand starting at position 2871 of SEQ ID NO: 1561319
gcccauuugcuuggcacau

SEQ ID NO: 1662666 - RNA, 19 nt, Artificial Sequence
  Description of Artificial Sequence: Synthetic oligonucleotide
  Antisense strand to SEQ ID NO: 1662665
augugccaagcaaaugggc

SEQ ID NO: 1662667 - RNA, 19 nt, Artificial Sequence
  Description of Artificial Sequence: Synthetic oligonucleotide
  Sense strand starting at position 2872 of SEQ ID NO: 1561319
cccauuugcuuggcacauu

SEQ ID NO: 1662668 - RNA, 19 nt, Artificial Sequence
  Description of Artificial Sequence: Synthetic oligonucleotide
  Antisense strand to SEQ ID NO: 1662667
aaugugccaagcaaauggg

SEQ ID NO: 1662669 - RNA, 19 nt, Artificial Sequence
  Description of Artificial Sequence: Synthetic oligonucleotide
  Sense strand starting at position 2961 of SEQ ID NO: 1561319
gcagccucuccugagggau

SEQ ID NO: 1662670 - RNA, 19 nt, Artificial Sequence
  Description of Artificial Sequence: Synthetic oligonucleotide
  Antisense strand to SEQ ID NO: 1662669
aucccucaggagaggcugc

SEQ ID NO: 1662671 - RNA, 19 nt, Artificial Sequence
  Description of Artificial Sequence: Synthetic oligonucleotide
  Sense strand starting at position 3016 of SEQ ID NO: 1561319
ucaucuucucaugaggcau

SEQ ID NO: 1662672 - RNA, 19 nt, Artificial Sequence
  Description of Artificial Sequence: Synthetic oligonucleotide
  Antisense strand to SEQ ID NO: 1662671
augccucaugagaagauga

SEQ ID NO: 1662673 - RNA, 19 nt, Artificial Sequence
  Description of Artificial Sequence: Synthetic oligonucleotide
  Sense strand starting at position 3186 of SEQ ID NO: 1561319
cuaccacuacgaugucaau

SEQ ID NO: 1662674 - RNA, 19 nt, Artificial Sequence
  Description of Artificial Sequence: Synthetic oligonucleotide
  Antisense strand to SEQ ID NO: 1662673
auugacaucguagugguag

SEQ ID NO: 1662675 - RNA, 19 nt, Artificial Sequence
  Description of Artificial Sequence: Synthetic oligonucleotide
  Sense strand starting at position 3302 of SEQ ID NO: 1561319
aauaaauauucguuggcua

SEQ ID NO: 1662676 - RNA, 19 nt, Artificial Sequence
  Description of Artificial Sequence: Synthetic oligonucleotide
  Antisense strand to SEQ ID NO: 1662675
uagccaacgaauauuuauu

SEQ ID NO: 1662677 - RNA, 19 nt, Artificial Sequence
  Description of Artificial Sequence: Synthetic oligonucleotide
  Sense strand starting at position 3303 of SEQ ID NO: 1561319
auaaauauucguuggcuaa

SEQ ID NO: 1662678 - RNA, 19 nt, Artificial Sequence
  Description of Artificial Sequence: Synthetic oligonucleotide
  Antisense strand to SEQ ID NO: 1662677
uuagccaacgaauauuuau

SEQ ID NO: 1662679 - RNA, 19 nt, Artificial Sequence
  Description of Artificial Sequence: Synthetic oligonucleotide
  Sense strand starting at position 3304 of SEQ ID NO: 1561319
uaaauauucguuggcuaaa

SEQ ID NO: 1662680 - RNA, 19 nt, Artificial Sequence
  Description of Artificial Sequence: Synthetic oligonucleotide
  Antisense strand to SEQ ID NO: 1662679
uuuagccaacgaauauuua

SEQ ID NO: 1662681 - RNA, 19 nt, Artificial Sequence
  Description of Artificial Sequence: Synthetic oligonucleotide
  Sense strand starting at position 3305 of SEQ ID NO: 1561319
aaauauucguuggcuaaau

SEQ ID NO: 1662682 - RNA, 19 nt, Artificial Sequence
  Description of Artificial Sequence: Synthetic oligonucleotide
  Antisense strand to SEQ ID NO: 1662681
auuuagccaacgaauauuu

SEQ ID NO: 1662683 - RNA, 19 nt, Artificial Sequence
  Description of Artificial Sequence: Synthetic oligonucleotide
  Sense strand starting at position 3306 of SEQ ID NO: 1561319
aauauucguuggcuaaaua

SEQ ID NO: 1662684 - RNA, 19 nt, Artificial Sequence
  Description of Artificial Sequence: Synthetic oligonucleotide
  Antisense strand to SEQ ID NO: 1662683
uauuuagccaacgaauauu

SEQ ID NO: 1662685 - RNA, 19 nt, Artificial Sequence
  Description of Artificial Sequence: Synthetic oligonucleotide
  Sense strand starting at position 3307 of SEQ ID NO: 1561319
auauucguuggcuaaauaa

SEQ ID NO: 1662686 - RNA, 19 nt, Artificial Sequence
  Description of Artificial Sequence: Synthetic oligonucleotide
  Antisense strand to SEQ ID NO: 1662685
uuauuuagccaacgaauau

SEQ ID NO: 1662687 - RNA, 19 nt, Artificial Sequence
  Description of Artificial Sequence: Synthetic oligonucleotide
  Sense strand starting at position 3372 of SEQ ID NO: 1561319
ccaaucagccuaugaggua

SEQ ID NO: 1662688 - RNA, 19 nt, Artificial Sequence
  Description of Artificial Sequence: Synthetic oligonucleotide
  Antisense strand to SEQ ID NO: 1662687
uaccucauaggcugauugg

SEQ ID NO: 1662689 - RNA, 19 nt, Artificial Sequence
  Description of Artificial Sequence: Synthetic oligonucleotide
  Sense strand starting at position 3509 of SEQ ID NO: 1561319
cguaaauucugaccuuuaa

SEQ ID NO: 1662690 - RNA, 19 nt, Artificial Sequence
  Description of Artificial Sequence: Synthetic oligonucleotide
  Antisense strand to SEQ ID NO: 1662689
uuaaaggucagaauuuacg

SEQ ID NO: 1662691 - RNA, 19 nt, Artificial Sequence
  Description of Artificial Sequence: Synthetic oligonucleotide
  Sense strand starting at position 3572 of SEQ ID NO: 1561319
agcuucuuauuauugguua

SEQ ID NO: 1662692 - RNA, 19 nt, Artificial Sequence
  Description of Artificial Sequence: Synthetic oligonucleotide
  Antisense strand to SEQ ID NO: 1662691
uaaccaauaauaagaagcu

SEQ ID NO: 1662693 - RNA, 19 nt, Artificial Sequence
  Description of Artificial Sequence: Synthetic oligonucleotide
  Sense strand starting at position 3587 of SEQ ID NO: 1561319
guuauugugguugaucuuu

SEQ ID NO: 1662694 - RNA, 19 nt, Artificial Sequence
  Description of Artificial Sequence: Synthetic oligonucleotide
  Antisense strand to SEQ ID NO: 1662693
aaagaucaaccacaauaac

SEQ ID NO: 1662695 - RNA, 19 nt, Artificial Sequence
  Description of Artificial Sequence: Synthetic oligonucleotide
  Sense strand starting at position 3620 of SEQ ID NO: 1561319
uuuguaucugguuaaccua

SEQ ID NO: 1662696 - RNA, 19 nt, Artificial Sequence
  Description of Artificial Sequence: Synthetic oligonucleotide
  Antisense strand to SEQ ID NO: 1662695
uagguuaaccagauacaaa

SEQ ID NO: 1662697 - RNA, 19 nt, Artificial Sequence
  Description of Artificial Sequence: Synthetic oligonucleotide
  Sense strand starting at position 3692 of SEQ ID NO: 1561319
uugagacaguuaucuacaa

SEQ ID NO: 1662698 - RNA, 19 nt, Artificial Sequence
  Description of Artificial Sequence: Synthetic oligonucleotide
  Antisense strand to SEQ ID NO: 1662697
uuguagauaacugucucaa

SEQ ID NO: 1662699 - RNA, 19 nt, Artificial Sequence
  Description of Artificial Sequence: Synthetic oligonucleotide
  Sense strand starting at position 3693 of SEQ ID NO: 1561319
ugagacaguuaucuacaau

SEQ ID NO: 1662700 - RNA, 19 nt, Artificial Sequence
  Description of Artificial Sequence: Synthetic oligonucleotide
  Antisense strand to SEQ ID NO: 1662699
auuguagauaacugucuca

SEQ ID NO: 1662701 - RNA, 19 nt, Artificial Sequence
  Description of Artificial Sequence: Synthetic oligonucleotide
  Sense strand starting at position 3760 of SEQ ID NO: 1561319
uggauuauauuggcuacca

SEQ ID NO: 1662702 - RNA, 19 nt, Artificial Sequence
  Description of Artificial Sequence: Synthetic oligonucleotide
  Antisense strand to SEQ ID NO: 1662701
ugguagccaauauaaucca

SEQ ID NO: 1662703 - RNA, 19 nt, Artificial Sequence
  Description of Artificial Sequence: Synthetic oligonucleotide
  Sense strand starting at position 3761 of SEQ ID NO: 1561319
ggauuauauuggcuaccau

SEQ ID NO: 1662704 - RNA, 19 nt, Artificial Sequence
  Description of Artificial Sequence: Synthetic oligonucleotide
  Antisense strand to SEQ ID NO: 1662703
augguagccaauauaaucc

SEQ ID NO: 1662705 - RNA, 19 nt, Artificial Sequence
  Description of Artificial Sequence: Synthetic oligonucleotide
  Sense strand starting at position 3828 of SEQ ID NO: 1561319
auggacauaucucugaagu

SEQ ID NO: 1662706 - RNA, 19 nt, Artificial Sequence
  Description of Artificial Sequence: Synthetic oligonucleotide
  Antisense strand to SEQ ID NO: 1662705
acuucagagauauguccau

SEQ ID NO: 1662707 - RNA, 19 nt, Artificial Sequence
  Description of Artificial Sequence: Synthetic oligonucleotide
  Sense strand starting at position 3829 of SEQ ID NO: 1561319
uggacauaucucugaaguu

SEQ ID NO: 1662708 - RNA, 19 nt, Artificial Sequence
  Description of Artificial Sequence: Synthetic oligonucleotide
  Antisense strand to SEQ ID NO: 1662707
aacuucagagauaugucca

SEQ ID NO: 1662709 - RNA, 19 nt, Artificial Sequence
  Description of Artificial Sequence: Synthetic oligonucleotide
  Sense strand starting at position 3843 of SEQ ID NO: 1561319
aaguuugaggguuaaaugu

SEQ ID NO: 1662710 - RNA, 19 nt, Artificial Sequence
  Description of Artificial Sequence: Synthetic oligonucleotide
  Antisense strand to SEQ ID NO: 1662709
acauuuaacccucaaacuu

SEQ ID NO: 1662711 - RNA, 19 nt, Artificial Sequence
  Description of Artificial Sequence: Synthetic oligonucleotide
  Sense strand starting at position 3849 of SEQ ID NO: 1561319
gaggguuaaaugugacauc

SEQ ID NO: 1662712 - RNA, 19 nt, Artificial Sequence
  Description of Artificial Sequence: Synthetic oligonucleotide
  Antisense strand to SEQ ID NO: 1662711
gaugucacauuuaacccuc

SEQ ID NO: 1662713 - RNA, 19 nt, Artificial Sequence
  Description of Artificial Sequence: Synthetic oligonucleotide
  Sense strand starting at position 3861 of SEQ ID NO: 1561319
ugacaucgguuucuacauu

SEQ ID NO: 1662714 - RNA, 19 nt, Artificial Sequence
  Description of Artificial Sequence: Synthetic oligonucleotide
  Antisense strand to SEQ ID NO: 1662713
aauguagaaaccgauguca

SEQ ID NO: 1662715 - RNA, 19 nt, Artificial Sequence
  Description of Artificial Sequence: Synthetic oligonucleotide
  Sense strand starting at position 3867 of SEQ ID NO: 1561319
cgguuucuacauugaagua

SEQ ID NO: 1662716 - RNA, 19 nt, Artificial Sequence
  Description of Artificial Sequence: Synthetic oligonucleotide
  Antisense strand to SEQ ID NO: 1662715
uacuucaauguagaaaccg

SEQ ID NO: 1662717 - RNA, 19 nt, Artificial Sequence
  Description of Artificial Sequence: Synthetic oligonucleotide
  Sense strand starting at position 87 of SEQ ID NO: 1561320
acagauacuuccuaagugu

SEQ ID NO: 1662718 - RNA, 19 nt, Artificial Sequence
  Description of Artificial Sequence: Synthetic oligonucleotide
  Antisense strand to SEQ ID NO: 1662717
acacuuaggaaguaucugu

SEQ ID NO: 1662719 - RNA, 19 nt, Artificial Sequence
  Description of Artificial Sequence: Synthetic oligonucleotide
  Sense strand starting at position 94 of SEQ ID NO: 1561320
cuuccuaaguguuuagaag

SEQ ID NO: 1662720 - RNA, 19 nt, Artificial Sequence
  Description of Artificial Sequence: Synthetic oligonucleotide
  Antisense strand to SEQ ID NO: 1662719
cuucuaaacacuuaggaag

SEQ ID NO: 1662721 - RNA, 19 nt, Artificial Sequence
  Description of Artificial Sequence: Synthetic oligonucleotide
  Sense strand starting at position 95 of SEQ ID NO: 1561320
uuccuaaguguuuagaaga

SEQ ID NO: 1662722 - RNA, 19 nt, Artificial Sequence
  Description of Artificial Sequence: Synthetic oligonucleotide
  Antisense strand to SEQ ID NO: 1662721
ucuucuaaacacuuaggaa

SEQ ID NO: 1662723 - RNA, 19 nt, Artificial Sequence
  Description of Artificial Sequence: Synthetic oligonucleotide
  Sense strand starting at position 551 of SEQ ID NO: 1561320
caaugagcaugugcauaua

SEQ ID NO: 1662724 - RNA, 19 nt, Artificial Sequence
  Description of Artificial Sequence: Synthetic oligonucleotide
  Antisense strand to SEQ ID NO: 1662723
uauaugcacaugcucauug

SEQ ID NO: 1662725 - RNA, 19 nt, Artificial Sequence
  Description of Artificial Sequence: Synthetic oligonucleotide
  Sense strand starting at position 654 of SEQ ID NO: 1561320
agggaaggugacugcgauu

SEQ ID NO: 1662726 - RNA, 19 nt, Artificial Sequence
  Description of Artificial Sequence: Synthetic oligonucleotide
  Antisense strand to SEQ ID NO: 1662725
aaucgcagucaccuucccu

SEQ ID NO: 1662727 - RNA, 19 nt, Artificial Sequence
  Description of Artificial Sequence: Synthetic oligonucleotide
  Sense strand starting at position 660 of SEQ ID NO: 1561320
ggugacugcgauugcaaau

SEQ ID NO: 1662728 - RNA, 19 nt, Artificial Sequence
  Description of Artificial Sequence: Synthetic oligonucleotide
  Antisense strand to SEQ ID NO: 1662727
auuugcaaucgcagucacc

SEQ ID NO: 1662729 - RNA, 19 nt, Artificial Sequence
  Description of Artificial Sequence: Synthetic oligonucleotide
  Sense strand starting at position 739 of SEQ ID NO: 1561320
ggaugcaaguuugugcgua

SEQ ID NO: 1662730 - RNA, 19 nt, Artificial Sequence
  Description of Artificial Sequence: Synthetic oligonucleotide
  Antisense strand to SEQ ID NO: 1662729
uacgcacaaacuugcaucc

SEQ ID NO: 1662731 - RNA, 19 nt, Artificial Sequence
  Description of Artificial Sequence: Synthetic oligonucleotide
  Sense strand starting at position 766 of SEQ ID NO: 1561320
aagaauauuccacgucgau

SEQ ID NO: 1662732 - RNA, 19 nt, Artificial Sequence
  Description of Artificial Sequence: Synthetic oligonucleotide
  Antisense strand to SEQ ID NO: 1662731
aucgacguggaauauucuu

SEQ ID NO: 1662733 - RNA, 19 nt, Artificial Sequence
  Description of Artificial Sequence: Synthetic oligonucleotide
  Sense strand starting at position 855 of SEQ ID NO: 1561320
aagguaauggccuaauugu

SEQ ID NO: 1662734 - RNA, 19 nt, Artificial Sequence
  Description of Artificial Sequence: Synthetic oligonucleotide
  Antisense strand to SEQ ID NO: 1662733
acaauuaggccauuaccuu

SEQ ID NO: 1662735 - RNA, 19 nt, Artificial Sequence
  Description of Artificial Sequence: Synthetic oligonucleotide
  Sense strand starting at position 890 of SEQ ID NO: 1561320
agaagugacucaguuagag

SEQ ID NO: 1662736 - RNA, 19 nt, Artificial Sequence
  Description of Artificial Sequence: Synthetic oligonucleotide
  Antisense strand to SEQ ID NO: 1662735
cucuaacugagucacuucu

SEQ ID NO: 1662737 - RNA, 19 nt, Artificial Sequence
  Description of Artificial Sequence: Synthetic oligonucleotide
  Sense strand starting at position 919 of SEQ ID NO: 1561320
auuauagguugaggaauga

SEQ ID NO: 1662738 - RNA, 19 nt, Artificial Sequence
  Description of Artificial Sequence: Synthetic oligonucleotide
  Antisense strand to SEQ ID NO: 1662737
ucauuccucaaccuauaau

SEQ ID NO: 1662739 - RNA, 19 nt, Artificial Sequence
  Description of Artificial Sequence: Synthetic oligonucleotide
  Sense strand starting at position 1100 of SEQ ID NO: 1561320
gguaacuaauggucagauu

SEQ ID NO: 1662740 - RNA, 19 nt, Artificial Sequence
  Description of Artificial Sequence: Synthetic oligonucleotide
  Antisense strand to SEQ ID NO: 1662739
aaucugaccauuaguuacc

SEQ ID NO: 1662741 - RNA, 19 nt, Artificial Sequence
  Description of Artificial Sequence: Synthetic oligonucleotide
  Sense strand starting at position 1101 of SEQ ID NO: 1561320
guaacuaauggucagauuc

SEQ ID NO: 1662742 - RNA, 19 nt, Artificial Sequence
  Description of Artificial Sequence: Synthetic oligonucleotide
  Antisense strand to SEQ ID NO: 1662741
gaaucugaccauuaguuac

SEQ ID NO: 1662743 - RNA, 19 nt, Artificial Sequence
  Description of Artificial Sequence: Synthetic oligonucleotide
  Sense strand starting at position 1109 of SEQ ID NO: 1561320
uggucagauucuguauaca

SEQ ID NO: 1662744 - RNA, 19 nt, Artificial Sequence
  Description of Artificial Sequence: Synthetic oligonucleotide
  Antisense strand to SEQ ID NO: 1662743
uguauacagaaucugacca

SEQ ID NO: 1662745 - RNA, 19 nt, Artificial Sequence
  Description of Artificial Sequence: Synthetic oligonucleotide
  Sense strand starting at position 1128 of SEQ ID NO: 1561320
guguauagcuuagcuccaa

SEQ ID NO: 1662746 - RNA, 19 nt, Artificial Sequence
  Description of Artificial Sequence: Synthetic oligonucleotide
  Antisense strand to SEQ ID NO: 1662745
uuggagcuaagcuauacac

SEQ ID NO: 1662747 - RNA, 19 nt, Artificial Sequence
  Description of Artificial Sequence: Synthetic oligonucleotide
  Sense strand starting at position 1146 of SEQ ID NO: 1561320
acuagaggaucugaauaua

SEQ ID NO: 1662748 - RNA, 19 nt, Artificial Sequence
  Description of Artificial Sequence: Synthetic oligonucleotide
  Antisense strand to SEQ ID NO: 1662747
uauauucagauccucuagu

SEQ ID NO: 1662749 - RNA, 19 nt, Artificial Sequence
  Description of Artificial Sequence: Synthetic oligonucleotide
  Sense strand starting at position 1187 of SEQ ID NO: 1561320
caaggaugacugcaagcau

SEQ ID NO: 1662750 - RNA, 19 nt, Artificial Sequence
  Description of Artificial Sequence: Synthetic oligonucleotide
  Antisense strand to SEQ ID NO: 1662749
augcuugcagucauccuug

SEQ ID NO: 1662751 - RNA, 19 nt, Artificial Sequence
  Description of Artificial Sequence: Synthetic oligonucleotide
  Sense strand starting at position 1308 of SEQ ID NO: 1561320
acuagaaagucuucuagca

SEQ ID NO: 1662752 - RNA, 19 nt, Artificial Sequence
  Description of Artificial Sequence: Synthetic oligonucleotide
  Antisense strand to SEQ ID NO: 1662751
ugcuagaagacuuucuagu

SEQ ID NO: 1662753 - RNA, 19 nt, Artificial Sequence
  Description of Artificial Sequence: Synthetic oligonucleotide
  Sense strand starting at position 1360 of SEQ ID NO: 1561320
aggauaauaccuuggagcu

SEQ ID NO: 1662754 - RNA, 19 nt, Artificial Sequence
  Description of Artificial Sequence: Synthetic oligonucleotide
  Antisense strand to SEQ ID NO: 1662753
agcuccaagguauuauccu

SEQ ID NO: 1662755 - RNA, 19 nt, Artificial Sequence
  Description of Artificial Sequence: Synthetic oligonucleotide
  Sense strand starting at position 1361 of SEQ ID NO: 1561320
ggauaauaccuuggagcuc

SEQ ID NO: 1662756 - RNA, 19 nt, Artificial Sequence
  Description of Artificial Sequence: Synthetic oligonucleotide
  Antisense strand to SEQ ID NO: 1662755
gagcuccaagguauuaucc

SEQ ID NO: 1662757 - RNA, 19 nt, Artificial Sequence
  Description of Artificial Sequence: Synthetic oligonucleotide
  Sense strand starting at position 1391 of SEQ ID NO: 1561320
ccguccuuccuauacugaa

SEQ ID NO: 1662758 - RNA, 19 nt, Artificial Sequence
  Description of Artificial Sequence: Synthetic oligonucleotide
  Antisense strand to SEQ ID NO: 1662757
uucaguauaggaaggacgg

SEQ ID NO: 1662759 - RNA, 19 nt, Artificial Sequence
  Description of Artificial Sequence: Synthetic oligonucleotide
  Sense strand starting at position 1418 of SEQ ID NO: 1561320
uggauccagucccuuaaau

SEQ ID NO: 1662760 - RNA, 19 nt, Artificial Sequence
  Description of Artificial Sequence: Synthetic oligonucleotide
  Antisense strand to SEQ ID NO: 1662759
auuuaagggacuggaucca

SEQ ID NO: 1662761 - RNA, 19 nt, Artificial Sequence
  Description of Artificial Sequence: Synthetic oligonucleotide
  Sense strand starting at position 2080 of SEQ ID NO: 1561320
gcguuuacauaggaggaca

SEQ ID NO: 1662762 - RNA, 19 nt, Artificial Sequence
  Description of Artificial Sequence: Synthetic oligonucleotide
  Antisense strand to SEQ ID NO: 1662761
uguccuccuauguaaacgc

SEQ ID NO: 1662763 - RNA, 19 nt, Artificial Sequence
  Description of Artificial Sequence: Synthetic oligonucleotide
  Sense strand starting at position 2364 of SEQ ID NO: 1561320
aucgacauuucccagaauc

SEQ ID NO: 1662764 - RNA, 19 nt, Artificial Sequence
  Description of Artificial Sequence: Synthetic oligonucleotide
  Antisense strand to SEQ ID NO: 1662763
gauucugggaaaugucgau

SEQ ID NO: 1662765 - RNA, 19 nt, Artificial Sequence
  Description of Artificial Sequence: Synthetic oligonucleotide
  Sense strand starting at position 2574 of SEQ ID NO: 1561320
ggcauauagucauacugau

SEQ ID NO: 1662766 - RNA, 19 nt, Artificial Sequence
  Description of Artificial Sequence: Synthetic oligonucleotide
  Antisense strand to SEQ ID NO: 1662765
aucaguaugacuauaugcc

SEQ ID NO: 1662767 - RNA, 19 nt, Artificial Sequence
  Description of Artificial Sequence: Synthetic oligonucleotide
  Sense strand starting at position 2716 of SEQ ID NO: 1561320
gugcgcucacacuaauguu

SEQ ID NO: 1662768 - RNA, 19 nt, Artificial Sequence
  Description of Artificial Sequence: Synthetic oligonucleotide
  Antisense strand to SEQ ID NO: 1662767
aacauuagugugagcgcac

SEQ ID NO: 1662769 - RNA, 19 nt, Artificial Sequence
  Description of Artificial Sequence: Synthetic oligonucleotide
  Sense strand starting at position 2728 of SEQ ID NO: 1561320
uaauguuuaucucccggga

SEQ ID NO: 1662770 - RNA, 19 nt, Artificial Sequence
  Description of Artificial Sequence: Synthetic oligonucleotide
  Antisense strand to SEQ ID NO: 1662769
ucccgggagauaaacauua

SEQ ID NO: 1662771 - RNA, 19 nt, Artificial Sequence
  Description of Artificial Sequence: Synthetic oligonucleotide
  Sense strand starting at position 2731 of SEQ ID NO: 1561320
uguuuaucucccgggacgu

SEQ ID NO: 1662772 - RNA, 19 nt, Artificial Sequence
  Description of Artificial Sequence: Synthetic oligonucleotide
  Antisense strand to SEQ ID NO: 1662771
acgucccgggagauaaaca

SEQ ID NO: 1662773 - RNA, 19 nt, Artificial Sequence
  Description of Artificial Sequence: Synthetic oligonucleotide
  Sense strand starting at position 2769 of SEQ ID NO: 1561320
cgagcucucgccuuugcua

SEQ ID NO: 1662774 - RNA, 19 nt, Artificial Sequence
  Description of Artificial Sequence: Synthetic oligonucleotide
  Antisense strand to SEQ ID NO: 1662773
uagcaaaggcgagagcucg

SEQ ID NO: 1662775 - RNA, 19 nt, Artificial Sequence
  Description of Artificial Sequence: Synthetic oligonucleotide
  Sense strand starting at position 2834 of SEQ ID NO: 1561320
ccuguauggucuuugaggu

SEQ ID NO: 1662776 - RNA, 19 nt, Artificial Sequence
  Description of Artificial Sequence: Synthetic oligonucleotide
  Antisense strand to SEQ ID NO: 1662775
accucaaagaccauacagg

SEQ ID NO: 1662777 - RNA, 19 nt, Artificial Sequence
  Description of Artificial Sequence: Synthetic oligonucleotide
  Sense strand starting at position 2844 of SEQ ID NO: 1561320
cuuugaggucuuugagguu

SEQ ID NO: 1662778 - RNA, 19 nt, Artificial Sequence
  Description of Artificial Sequence: Synthetic oligonucleotide
  Antisense strand to SEQ ID NO: 1662777
aaccucaaagaccucaaag

SEQ ID NO: 1662779 - RNA, 19 nt, Artificial Sequence
  Description of Artificial Sequence: Synthetic oligonucleotide
  Sense strand starting at position 2914 of SEQ ID NO: 1561320
gauugugccagcuguaguu

SEQ ID NO: 1662780 - RNA, 19 nt, Artificial Sequence
  Description of Artificial Sequence: Synthetic oligonucleotide
  Antisense strand to SEQ ID NO: 1662779
aacuacagcuggcacaauc

SEQ ID NO: 1662781 - RNA, 19 nt, Artificial Sequence
  Description of Artificial Sequence: Synthetic oligonucleotide
  Sense strand starting at position 2920 of SEQ ID NO: 1561320
gccagcuguaguucgcgaa

SEQ ID NO: 1662782 - RNA, 19 nt, Artificial Sequence
  Description of Artificial Sequence: Synthetic oligonucleotide
  Antisense strand to SEQ ID NO: 1662781
uucgcgaacuacagcuggc

SEQ ID NO: 1662783 - RNA, 19 nt, Artificial Sequence
  Description of Artificial Sequence: Synthetic oligonucleotide
  Sense strand starting at position 2924 of SEQ ID NO: 1561320
gcuguaguucgcgaaccaa

SEQ ID NO: 1662784 - RNA, 19 nt, Artificial Sequence
  Description of Artificial Sequence: Synthetic oligonucleotide
  Antisense strand to SEQ ID NO: 1662783
uugguucgcgaacuacagc

SEQ ID NO: 1662785 - RNA, 19 nt, Artificial Sequence
  Description of Artificial Sequence: Synthetic oligonucleotide
  Sense strand starting at position 2968 of SEQ ID NO: 1561320
ccacguaucugugacagaa

SEQ ID NO: 1662786 - RNA, 19 nt, Artificial Sequence
  Description of Artificial Sequence: Synthetic oligonucleotide
  Antisense strand to SEQ ID NO: 1662785
uucugucacagauacgugg

SEQ ID NO: 1662787 - RNA, 19 nt, Artificial Sequence
  Description of Artificial Sequence: Synthetic oligonucleotide
  Sense strand starting at position 2970 of SEQ ID NO: 1561320
acguaucugugacagaaau

SEQ ID NO: 1662788 - RNA, 19 nt, Artificial Sequence
  Description of Artificial Sequence: Synthetic oligonucleotide
  Antisense strand to SEQ ID NO: 1662787
auuucugucacagauacgu

SEQ ID NO: 1662789 - RNA, 19 nt, Artificial Sequence
  Description of Artificial Sequence: Synthetic oligonucleotide
  Sense strand starting at position 2989 of SEQ ID NO: 1561320
ggcaguucucacgugcguu

SEQ ID NO: 1662790 - RNA, 19 nt, Artificial Sequence
  Description of Artificial Sequence: Synthetic oligonucleotide
  Antisense strand to SEQ ID NO: 1662789
aacgcacgugagaacugcc

SEQ ID NO: 1662791 - RNA, 19 nt, Artificial Sequence
  Description of Artificial Sequence: Synthetic oligonucleotide
  Sense strand starting at position 3203 of SEQ ID NO: 1561320
agucuacuguuguauauuu

SEQ ID NO: 1662792 - RNA, 19 nt, Artificial Sequence
  Description of Artificial Sequence: Synthetic oligonucleotide
  Antisense strand to SEQ ID NO: 1662791
aaauauacaacaguagacu

SEQ ID NO: 1662793 - RNA, 19 nt, Artificial Sequence
  Description of Artificial Sequence: Synthetic oligonucleotide
  Sense strand starting at position 3271 of SEQ ID NO: 1561320
ugccucuaccucugagaga

SEQ ID NO: 1662794 - RNA, 19 nt, Artificial Sequence
  Description of Artificial Sequence: Synthetic oligonucleotide
  Antisense strand to SEQ ID NO: 1662793
ucucucagagguagaggca

SEQ ID NO: 1662795 - RNA, 19 nt, Artificial Sequence
  Description of Artificial Sequence: Synthetic oligonucleotide
  Sense strand starting at position 3938 of SEQ ID NO: 1561320
gagguuaccuggcacacaa

SEQ ID NO: 1662796 - RNA, 19 nt, Artificial Sequence
  Description of Artificial Sequence: Synthetic oligonucleotide
  Antisense strand to SEQ ID NO: 1662795
uugugugccagguaaccuc

SEQ ID NO: 1662797 - RNA, 19 nt, Artificial Sequence
  Description of Artificial Sequence: Synthetic oligonucleotide
  Sense strand starting at position 91 of SEQ ID NO: 1561321
gugccuuacgaagauaaga

SEQ ID NO: 1662798 - RNA, 19 nt, Artificial Sequence
  Description of Artificial Sequence: Synthetic oligonucleotide
  Antisense strand to SEQ ID NO: 1662797
ucuuaucuucguaaggcac

SEQ ID NO: 1662799 - RNA, 19 nt, Artificial Sequence
  Description of Artificial Sequence: Synthetic oligonucleotide
  Sense strand starting at position 133 of SEQ ID NO: 1561321
uggaguaucaagugguuau

SEQ ID NO: 1662800 - RNA, 19 nt, Artificial Sequence
  Description of Artificial Sequence: Synthetic oligonucleotide
  Antisense strand to SEQ ID NO: 1662799
auaaccacuugauacucca

SEQ ID NO: 1662801 - RNA, 19 nt, Artificial Sequence
  Description of Artificial Sequence: Synthetic oligonucleotide
  Sense strand starting at position 134 of SEQ ID NO: 1561321
ggaguaucaagugguuauu

SEQ ID NO: 1662802 - RNA, 19 nt, Artificial Sequence
  Description of Artificial Sequence: Synthetic oligonucleotide
  Antisense strand to SEQ ID NO: 1662801
aauaaccacuugauacucc

SEQ ID NO: 1662803 - RNA, 19 nt, Artificial Sequence
  Description of Artificial Sequence: Synthetic oligonucleotide
  Sense strand starting at position 140 of SEQ ID NO: 1561321
ucaagugguuauucucuau

SEQ ID NO: 1662804 - RNA, 19 nt, Artificial Sequence
  Description of Artificial Sequence: Synthetic oligonucleotide
  Antisense strand to SEQ ID NO: 1662803
auagagaauaaccacuuga

SEQ ID NO: 1662805 - RNA, 19 nt, Artificial Sequence
  Description of Artificial Sequence: Synthetic oligonucleotide
  Sense strand starting at position 144 of SEQ ID NO: 1561321
gugguuauucucuauucua

SEQ ID NO: 1662806 - RNA, 19 nt, Artificial Sequence
  Description of Artificial Sequence: Synthetic oligonucleotide
  Antisense strand to SEQ ID NO: 1662805
uagaauagagaauaaccac

SEQ ID NO: 1662807 - RNA, 19 nt, Artificial Sequence
  Description of Artificial Sequence: Synthetic oligonucleotide
  Sense strand starting at position 244 of SEQ ID NO: 1561321
uacugcaucuaugugaaag

SEQ ID NO: 1662808 - RNA, 19 nt, Artificial Sequence
  Description of Artificial Sequence: Synthetic oligonucleotide
  Antisense strand to SEQ ID NO: 1662807
cuuucacauagaugcagua

SEQ ID NO: 1662809 - RNA, 19 nt, Artificial Sequence
  Description of Artificial Sequence: Synthetic oligonucleotide
  Sense strand starting at position 428 of SEQ ID NO: 1561321
uugauaauacugugaguug

SEQ ID NO: 1662810 - RNA, 19 nt, Artificial Sequence
  Description of Artificial Sequence: Synthetic oligonucleotide
  Antisense strand to SEQ ID NO: 1662809
caacucacaguauuaucaa

SEQ ID NO: 1662811 - RNA, 19 nt, Artificial Sequence
  Description of Artificial Sequence: Synthetic oligonucleotide
  Sense strand starting at position 453 of SEQ ID NO: 1561321
gggaguuaauguuuggaga

SEQ ID NO: 1662812 - RNA, 19 nt, Artificial Sequence
  Description of Artificial Sequence: Synthetic oligonucleotide
  Antisense strand to SEQ ID NO: 1662811
ucuccaaacauuaacuccc

SEQ ID NO: 1662813 - RNA, 19 nt, Artificial Sequence
  Description of Artificial Sequence: Synthetic oligonucleotide
  Sense strand starting at position 454 of SEQ ID NO: 1561321
ggaguuaauguuuggagau

SEQ ID NO: 1662814 - RNA, 19 nt, Artificial Sequence
  Description of Artificial Sequence: Synthetic oligonucleotide
  Antisense strand to SEQ ID NO: 1662813
aucuccaaacauuaacucc

SEQ ID NO: 1662815 - RNA, 19 nt, Artificial Sequence
  Description of Artificial Sequence: Synthetic oligonucleotide
  Sense strand starting at position 460 of SEQ ID NO: 1561321
aauguuuggagaugcggaa

SEQ ID NO: 1662816 - RNA, 19 nt, Artificial Sequence
  Description of Artificial Sequence: Synthetic oligonucleotide
  Antisense strand to SEQ ID NO: 1662815
uuccgcaucuccaaacauu

SEQ ID NO: 1662817 - RNA, 19 nt, Artificial Sequence
  Description of Artificial Sequence: Synthetic oligonucleotide
  Sense strand starting at position 504 of SEQ ID NO: 1561321
cugcaaacugcugaagagu

SEQ ID NO: 1662818 - RNA, 19 nt, Artificial Sequence
  Description of Artificial Sequence: Synthetic oligonucleotide
  Antisense strand to SEQ ID NO: 1662817
acucuucagcaguuugcag

SEQ ID NO: 1662819 - RNA, 19 nt, Artificial Sequence
  Description of Artificial Sequence: Synthetic oligonucleotide
  Sense strand starting at position 589 of SEQ ID NO: 1561321
cccuauagacagugugaaa

SEQ ID NO: 1662820 - RNA, 19 nt, Artificial Sequence
  Description of Artificial Sequence: Synthetic oligonucleotide
  Antisense strand to SEQ ID NO: 1662819
uuucacacugucuauaggg

SEQ ID NO: 1662821 - RNA, 19 nt, Artificial Sequence
  Description of Artificial Sequence: Synthetic oligonucleotide
  Sense strand starting at position 622 of SEQ ID NO: 1561321
agcaauuagacugaagugu

SEQ ID NO: 1662822 - RNA, 19 nt, Artificial Sequence
  Description of Artificial Sequence: Synthetic oligonucleotide
  Antisense strand to SEQ ID NO: 1662821
acacuucagucuaauugcu

SEQ ID NO: 1662823 - RNA, 19 nt, Artificial Sequence
  Description of Artificial Sequence: Synthetic oligonucleotide
  Sense strand starting at position 626 of SEQ ID NO: 1561321
auuagacugaaguguguuu

SEQ ID NO: 1662824 - RNA, 19 nt, Artificial Sequence
  Description of Artificial Sequence: Synthetic oligonucleotide
  Antisense strand to SEQ ID NO: 1662823
aaacacacuucagucuaau

SEQ ID NO: 1662825 - RNA, 19 nt, Artificial Sequence
  Description of Artificial Sequence: Synthetic oligonucleotide
  Sense strand starting at position 640 of SEQ ID NO: 1561321
uguuuagugcuauaagaaa

SEQ ID NO: 1662826 - RNA, 19 nt, Artificial Sequence
  Description of Artificial Sequence: Synthetic oligonucleotide
  Antisense strand to SEQ ID NO: 1662825
uuucuuauagcacuaaaca

SEQ ID NO: 1662827 - RNA, 19 nt, Artificial Sequence
  Description of Artificial Sequence: Synthetic oligonucleotide
  Sense strand starting at position 927 of SEQ ID NO: 1561321
cacacuguggaguguuaaa

SEQ ID NO: 1662828 - RNA, 19 nt, Artificial Sequence
  Description of Artificial Sequence: Synthetic oligonucleotide
  Antisense strand to SEQ ID NO: 1662827
uuuaacacuccacagugug

SEQ ID NO: 1662829 - RNA, 19 nt, Artificial Sequence
  Description of Artificial Sequence: Synthetic oligonucleotide
  Sense strand starting at position 1419 of SEQ ID NO: 1561321
ggcccaaacucuuuaacag

SEQ ID NO: 1662830 - RNA, 19 nt, Artificial Sequence
  Description of Artificial Sequence: Synthetic oligonucleotide
  Antisense strand to SEQ ID NO: 1662829
cuguuaaagaguuugggcc

SEQ ID NO: 1662831 - RNA, 19 nt, Artificial Sequence
  Description of Artificial Sequence: Synthetic oligonucleotide
  Sense strand starting at position 1808 of SEQ ID NO: 1561321
uagggcucccgugaauagu

SEQ ID NO: 1662832 - RNA, 19 nt, Artificial Sequence
  Description of Artificial Sequence: Synthetic oligonucleotide
  Antisense strand to SEQ ID NO: 1662831
acuauucacgggagcccua

SEQ ID NO: 1662833 - RNA, 19 nt, Artificial Sequence
  Description of Artificial Sequence: Synthetic oligonucleotide
  Sense strand starting at position 1880 of SEQ ID NO: 1561321
ggccucucggaguaggaaa

SEQ ID NO: 1662834 - RNA, 19 nt, Artificial Sequence
  Description of Artificial Sequence: Synthetic oligonucleotide
  Antisense strand to SEQ ID NO: 1662833
uuuccuacuccgagaggcc

SEQ ID NO: 1662835 - RNA, 19 nt, Artificial Sequence
  Description of Artificial Sequence: Synthetic oligonucleotide
  Sense strand starting at position 1895 of SEQ ID NO: 1561321
gaaaucugguaucccgaca

SEQ ID NO: 1662836 - RNA, 19 nt, Artificial Sequence
  Description of Artificial Sequence: Synthetic oligonucleotide
  Antisense strand to SEQ ID NO: 1662835
ugucgggauaccagauuuc

SEQ ID NO: 1662837 - RNA, 19 nt, Artificial Sequence
  Description of Artificial Sequence: Synthetic oligonucleotide
  Sense strand starting at position 1900 of SEQ ID NO: 1561321
cugguaucccgacaacaac

SEQ ID NO: 1662838 - RNA, 19 nt, Artificial Sequence
  Description of Artificial Sequence: Synthetic oligonucleotide
  Antisense strand to SEQ ID NO: 1662837
guuguugucgggauaccag

SEQ ID NO: 1662839 - RNA, 19 nt, Artificial Sequence
  Description of Artificial Sequence: Synthetic oligonucleotide
  Sense strand starting at position 2098 of SEQ ID NO: 1561321
acagcuucucucuaaggga

SEQ ID NO: 1662840 - RNA, 19 nt, Artificial Sequence
  Description of Artificial Sequence: Synthetic oligonucleotide
  Antisense strand to SEQ ID NO: 1662839
ucccuuagagagaagcugu

SEQ ID NO: 1662841 - RNA, 19 nt, Artificial Sequence
  Description of Artificial Sequence: Synthetic oligonucleotide
  Sense strand starting at position 2130 of SEQ ID NO: 1561321
gagcccuggucauuggaua

SEQ ID NO: 1662842 - RNA, 19 nt, Artificial Sequence
  Description of Artificial Sequence: Synthetic oligonucleotide
  Antisense strand to SEQ ID NO: 1662841
uauccaaugaccagggcuc

SEQ ID NO: 1662843 - RNA, 19 nt, Artificial Sequence
  Description of Artificial Sequence: Synthetic oligonucleotide
  Sense strand starting at position 2131 of SEQ ID NO: 1561321
agcccuggucauuggauau

SEQ ID NO: 1662844 - RNA, 19 nt, Artificial Sequence
  Description of Artificial Sequence: Synthetic oligonucleotide
  Antisense strand to SEQ ID NO: 1662843
auauccaaugaccagggcu

SEQ ID NO: 1662845 - RNA, 19 nt, Artificial Sequence
  Description of Artificial Sequence: Synthetic oligonucleotide
  Sense strand starting at position 2574 of SEQ ID NO: 1561321
ugaacuugaucuuuacgga

SEQ ID NO: 1662846 - RNA, 19 nt, Artificial Sequence
  Description of Artificial Sequence: Synthetic oligonucleotide
  Antisense strand to SEQ ID NO: 1662845
uccguaaagaucaaguuca

SEQ ID NO: 1662847 - RNA, 19 nt, Artificial Sequence
  Description of Artificial Sequence: Synthetic oligonucleotide
  Sense strand starting at position 2629 of SEQ ID NO: 1561321
ggacucuaugcaugucaaa

SEQ ID NO: 1662848 - RNA, 19 nt, Artificial Sequence
  Description of Artificial Sequence: Synthetic oligonucleotide
  Antisense strand to SEQ ID NO: 1662847
uuugacaugcauagagucc

SEQ ID NO: 1662849 - RNA, 19 nt, Artificial Sequence
  Description of Artificial Sequence: Synthetic oligonucleotide
  Sense strand starting at position 2978 of SEQ ID NO: 1561321
ccucaaucccacugcgaga

SEQ ID NO: 1662850 - RNA, 19 nt, Artificial Sequence
  Description of Artificial Sequence: Synthetic oligonucleotide
  Antisense strand to SEQ ID NO: 1662849
ucucgcagugggauugagg

SEQ ID NO: 1662851 - RNA, 19 nt, Artificial Sequence
  Description of Artificial Sequence: Synthetic oligonucleotide
  Sense strand starting at position 2980 of SEQ ID NO: 1561321
ucaaucccacugcgagaau

SEQ ID NO: 1662852 - RNA, 19 nt, Artificial Sequence
  Description of Artificial Sequence: Synthetic oligonucleotide
  Antisense strand to SEQ ID NO: 1662851
auucucgcagugggauuga

SEQ ID NO: 1662853 - RNA, 19 nt, Artificial Sequence
  Description of Artificial Sequence: Synthetic oligonucleotide
  Sense strand starting at position 3031 of SEQ ID NO: 1561321
uguauaaagucgaggagga

SEQ ID NO: 1662854 - RNA, 19 nt, Artificial Sequence
  Description of Artificial Sequence: Synthetic oligonucleotide
  Antisense strand to SEQ ID NO: 1662853
uccuccucgacuuuauaca

SEQ ID NO: 1662855 - RNA, 19 nt, Artificial Sequence
  Description of Artificial Sequence: Synthetic oligonucleotide
  Sense strand starting at position 3032 of SEQ ID NO: 1561321
guauaaagucgaggaggaa

SEQ ID NO: 1662856 - RNA, 19 nt, Artificial Sequence
  Description of Artificial Sequence: Synthetic oligonucleotide
  Antisense strand to SEQ ID NO: 1662855
uuccuccucgacuuuauac

SEQ ID NO: 1662857 - RNA, 19 nt, Artificial Sequence
  Description of Artificial Sequence: Synthetic oligonucleotide
  Sense strand starting at position 3280 of SEQ ID NO: 1561321
agaagaaucguuuguauca

SEQ ID NO: 1662858 - RNA, 19 nt, Artificial Sequence
  Description of Artificial Sequence: Synthetic oligonucleotide
  Antisense strand to SEQ ID NO: 1662857
ugauacaaacgauucuucu

SEQ ID NO: 1662859 - RNA, 19 nt, Artificial Sequence
  Description of Artificial Sequence: Synthetic oligonucleotide
  Sense strand starting at position 3281 of SEQ ID NO: 1561321
gaagaaucguuuguaucaa

SEQ ID NO: 1662860 - RNA, 19 nt, Artificial Sequence
  Description of Artificial Sequence: Synthetic oligonucleotide
  Antisense strand to SEQ ID NO: 1662859
uugauacaaacgauucuuc

SEQ ID NO: 1662861 - RNA, 19 nt, Artificial Sequence
  Description of Artificial Sequence: Synthetic oligonucleotide
  Sense strand starting at position 3394 of SEQ ID NO: 1561321
acaaauguuuagucauguu

SEQ ID NO: 1662862 - RNA, 19 nt, Artificial Sequence
  Description of Artificial Sequence: Synthetic oligonucleotide
  Antisense strand to SEQ ID NO: 1662861
aacaugacuaaacauuugu

SEQ ID NO: 1662863 - RNA, 19 nt, Artificial Sequence
  Description of Artificial Sequence: Synthetic oligonucleotide
  Sense strand starting at position 3474 of SEQ ID NO: 1561321
ccagaauuaugcuuugaag

SEQ ID NO: 1662864 - RNA, 19 nt, Artificial Sequence
  Description of Artificial Sequence: Synthetic oligonucleotide
  Antisense strand to SEQ ID NO: 1662863
cuucaaagcauaauucugg

SEQ ID NO: 1662865 - RNA, 19 nt, Artificial Sequence
  Description of Artificial Sequence: Synthetic oligonucleotide
  Sense strand starting at position 3476 of SEQ ID NO: 1561321
agaauuaugcuuugaagaa

SEQ ID NO: 1662866 - RNA, 19 nt, Artificial Sequence
  Description of Artificial Sequence: Synthetic oligonucleotide
  Antisense strand to SEQ ID NO: 1662865
uucuucaaagcauaauucu

SEQ ID NO: 1662867 - RNA, 19 nt, Artificial Sequence
  Description of Artificial Sequence: Synthetic oligonucleotide
  Sense strand starting at position 3651 of SEQ ID NO: 1561321
aguccacaugaguaaucua

SEQ ID NO: 1662868 - RNA, 19 nt, Artificial Sequence
  Description of Artificial Sequence: Synthetic oligonucleotide
  Antisense strand to SEQ ID NO: 1662867
uagauuacucauguggacu

SEQ ID NO: 1662869 - RNA, 19 nt, Artificial Sequence
  Description of Artificial Sequence: Synthetic oligonucleotide
  Sense strand starting at position 3861 of SEQ ID NO: 1561321
gggcauauuuaauagaguu

SEQ ID NO: 1662870 - RNA, 19 nt, Artificial Sequence
  Description of Artificial Sequence: Synthetic oligonucleotide
  Antisense strand to SEQ ID NO: 1662869
aacucuauuaaauaugccc

SEQ ID NO: 1662871 - RNA, 19 nt, Artificial Sequence
  Description of Artificial Sequence: Synthetic oligonucleotide
  Sense strand starting at position 3957 of SEQ ID NO: 1561321
gcugaauuuguuugucucu

SEQ ID NO: 1662872 - RNA, 19 nt, Artificial Sequence
  Description of Artificial Sequence: Synthetic oligonucleotide
  Antisense strand to SEQ ID NO: 1662871
agagacaaacaaauucagc

SEQ ID NO: 1662873 - RNA, 19 nt, Artificial Sequence
  Description of Artificial Sequence: Synthetic oligonucleotide
  Sense strand starting at position 3959 of SEQ ID NO: 1561321
ugaauuuguuugucucuua

SEQ ID NO: 1662874 - RNA, 19 nt, Artificial Sequence
  Description of Artificial Sequence: Synthetic oligonucleotide
  Antisense strand to SEQ ID NO: 1662873
uaagagacaaacaaauuca

SEQ ID NO: 1662875 - RNA, 19 nt, Artificial Sequence
  Description of Artificial Sequence: Synthetic oligonucleotide
  Sense strand starting at position 3962 of SEQ ID NO: 1561321
auuuguuugucucuuaagu

SEQ ID NO: 1662876 - RNA, 19 nt, Artificial Sequence
  Description of Artificial Sequence: Synthetic oligonucleotide
  Antisense strand to SEQ ID NO: 1662875
acuuaagagacaaacaaau

SEQ ID NO: 1662877 - RNA, 19 nt, Artificial Sequence
  Description of Artificial Sequence: Synthetic oligonucleotide
  Sense strand starting at position 34 of SEQ ID NO: 1561322
cccagauaguacugaaucu

SEQ ID NO: 1662878 - RNA, 19 nt, Artificial Sequence
  Description of Artificial Sequence: Synthetic oligonucleotide
  Antisense strand to SEQ ID NO: 1662877
agauucaguacuaucuggg

SEQ ID NO: 1662879 - RNA, 19 nt, Artificial Sequence
  Description of Artificial Sequence: Synthetic oligonucleotide
  Sense strand starting at position 133 of SEQ ID NO: 1561322
uucugauaucuaugucuac

SEQ ID NO: 1662880 - RNA, 19 nt, Artificial Sequence
  Description of Artificial Sequence: Synthetic oligonucleotide
  Antisense strand to SEQ ID NO: 1662879
guagacauagauaucagaa

SEQ ID NO: 1662881 - RNA, 19 nt, Artificial Sequence
  Description of Artificial Sequence: Synthetic oligonucleotide
  Sense strand starting at position 136 of SEQ ID NO: 1561322
ugauaucuaugucuacgga

SEQ ID NO: 1662882 - RNA, 19 nt, Artificial Sequence
  Description of Artificial Sequence: Synthetic oligonucleotide
  Antisense strand to SEQ ID NO: 1662881
uccguagacauagauauca

SEQ ID NO: 1662883 - RNA, 19 nt, Artificial Sequence
  Description of Artificial Sequence: Synthetic oligonucleotide
  Sense strand starting at position 137 of SEQ ID NO: 1561322
gauaucuaugucuacggaa

SEQ ID NO: 1662884 - RNA, 19 nt, Artificial Sequence
  Description of Artificial Sequence: Synthetic oligonucleotide
  Antisense strand to SEQ ID NO: 1662883
uuccguagacauagauauc

SEQ ID NO: 1662885 - RNA, 19 nt, Artificial Sequence
  Description of Artificial Sequence: Synthetic oligonucleotide
  Sense strand starting at position 293 of SEQ ID NO: 1561322
gaaauuggcguuugggaau

SEQ ID NO: 1662886 - RNA, 19 nt, Artificial Sequence
  Description of Artificial Sequence: Synthetic oligonucleotide
  Antisense strand to SEQ ID NO: 1662885
auucccaaacgccaauuuc

SEQ ID NO: 1662887 - RNA, 19 nt, Artificial Sequence
  Description of Artificial Sequence: Synthetic oligonucleotide
  Sense strand starting at position 299 of SEQ ID NO: 1561322
ggcguuugggaaugucaga

SEQ ID NO: 1662888 - RNA, 19 nt, Artificial Sequence
  Description of Artificial Sequence: Synthetic oligonucleotide
  Antisense strand to SEQ ID NO: 1662887
ucugacauucccaaacgcc

SEQ ID NO: 1662889 - RNA, 19 nt, Artificial Sequence
  Description of Artificial Sequence: Synthetic oligonucleotide
  Sense strand starting at position 377 of SEQ ID NO: 1561322
ggcagauagacuugagguc

SEQ ID NO: 1662890 - RNA, 19 nt, Artificial Sequence
  Description of Artificial Sequence: Synthetic oligonucleotide
  Antisense strand to SEQ ID NO: 1662889
gaccucaagucuaucugcc

SEQ ID NO: 1662891 - RNA, 19 nt, Artificial Sequence
  Description of Artificial Sequence: Synthetic oligonucleotide
  Sense strand starting at position 392 of SEQ ID NO: 1561322
gguccugcuugggacacau

SEQ ID NO: 1662892 - RNA, 19 nt, Artificial Sequence
  Description of Artificial Sequence: Synthetic oligonucleotide
  Antisense strand to SEQ ID NO: 1662891
augugucccaagcaggacc

SEQ ID NO: 1662893 - RNA, 19 nt, Artificial Sequence
  Description of Artificial Sequence: Synthetic oligonucleotide
  Sense strand starting at position 484 of SEQ ID NO: 1561322
aggcucuaguuucuaauuu

SEQ ID NO: 1662894 - RNA, 19 nt, Artificial Sequence
  Description of Artificial Sequence: Synthetic oligonucleotide
  Antisense strand to SEQ ID NO: 1662893
aaauuagaaacuagagccu

SEQ ID NO: 1662895 - RNA, 19 nt, Artificial Sequence
  Description of Artificial Sequence: Synthetic oligonucleotide
  Sense strand starting at position 926 of SEQ ID NO: 1561322
cuuccaucuugauguuaca

SEQ ID NO: 1662896 - RNA, 19 nt, Artificial Sequence
  Description of Artificial Sequence: Synthetic oligonucleotide
  Antisense strand to SEQ ID NO: 1662895
uguaacaucaagauggaag

SEQ ID NO: 1662897 - RNA, 19 nt, Artificial Sequence
  Description of Artificial Sequence: Synthetic oligonucleotide
  Sense strand starting at position 1186 of SEQ ID NO: 1561322
gagacaagaucgugccaca

SEQ ID NO: 1662898 - RNA, 19 nt, Artificial Sequence
  Description of Artificial Sequence: Synthetic oligonucleotide
  Antisense strand to SEQ ID NO: 1662897
uguggcacgaucuugucuc

SEQ ID NO: 1662899 - RNA, 19 nt, Artificial Sequence
  Description of Artificial Sequence: Synthetic oligonucleotide
  Sense strand starting at position 1225 of SEQ ID NO: 1561322
gagggaagacuccgucuca

SEQ ID NO: 1662900 - RNA, 19 nt, Artificial Sequence
  Description of Artificial Sequence: Synthetic oligonucleotide
  Antisense strand to SEQ ID NO: 1662899
ugagacggagucuucccuc

SEQ ID NO: 1662901 - RNA, 19 nt, Artificial Sequence
  Description of Artificial Sequence: Synthetic oligonucleotide
  Sense strand starting at position 1226 of SEQ ID NO: 1561322
agggaagacuccgucucaa

SEQ ID NO: 1662902 - RNA, 19 nt, Artificial Sequence
  Description of Artificial Sequence: Synthetic oligonucleotide
  Antisense strand to SEQ ID NO: 1662901
uugagacggagucuucccu

SEQ ID NO: 1662903 - RNA, 19 nt, Artificial Sequence
  Description of Artificial Sequence: Synthetic oligonucleotide
  Sense strand starting at position 1403 of SEQ ID NO: 1561322
uggaaucacucuuugauua

SEQ ID NO: 1662904 - RNA, 19 nt, Artificial Sequence
  Description of Artificial Sequence: Synthetic oligonucleotide
  Antisense strand to SEQ ID NO: 1662903
uaaucaaagagugauucca

SEQ ID NO: 1662905 - RNA, 19 nt, Artificial Sequence
  Description of Artificial Sequence: Synthetic oligonucleotide
  Sense strand starting at position 1404 of SEQ ID NO: 1561322
ggaaucacucuuugauuaa

SEQ ID NO: 1662906 - RNA, 19 nt, Artificial Sequence
  Description of Artificial Sequence: Synthetic oligonucleotide
  Antisense strand to SEQ ID NO: 1662905
uuaaucaaagagugauucc

SEQ ID NO: 1662907 - RNA, 19 nt, Artificial Sequence
  Description of Artificial Sequence: Synthetic oligonucleotide
  Sense strand starting at position 1438 of SEQ ID NO: 1561322
ugaggugacuuccauaaau

SEQ ID NO: 1662908 - RNA, 19 nt, Artificial Sequence
  Description of Artificial Sequence: Synthetic oligonucleotide
  Antisense strand to SEQ ID NO: 1662907
auuuauggaagucaccuca

SEQ ID NO: 1662909 - RNA, 19 nt, Artificial Sequence
  Description of Artificial Sequence: Synthetic oligonucleotide
  Sense strand starting at position 2220 of SEQ ID NO: 1561322
cccagagcaugcgaauauu

SEQ ID NO: 1662910 - RNA, 19 nt, Artificial Sequence
  Description of Artificial Sequence: Synthetic oligonucleotide
  Antisense strand to SEQ ID NO: 1662909
aauauucgcaugcucuggg

SEQ ID NO: 1662911 - RNA, 19 nt, Artificial Sequence
  Description of Artificial Sequence: Synthetic oligonucleotide
  Sense strand starting at position 2223 of SEQ ID NO: 1561322
agagcaugcgaauauucua

SEQ ID NO: 1662912 - RNA, 19 nt, Artificial Sequence
  Description of Artificial Sequence: Synthetic oligonucleotide
  Antisense strand to SEQ ID NO: 1662911
uagaauauucgcaugcucu

SEQ ID NO: 1662913 - RNA, 19 nt, Artificial Sequence
  Description of Artificial Sequence: Synthetic oligonucleotide
  Sense strand starting at position 2228 of SEQ ID NO: 1561322
augcgaauauucuaucucu

SEQ ID NO: 1662914 - RNA, 19 nt, Artificial Sequence
  Description of Artificial Sequence: Synthetic oligonucleotide
  Antisense strand to SEQ ID NO: 1662913
agagauagaauauucgcau

SEQ ID NO: 1662915 - RNA, 19 nt, Artificial Sequence
  Description of Artificial Sequence: Synthetic oligonucleotide
  Sense strand starting at position 2269 of SEQ ID NO: 1561322
auguauucgaaaugugaac

SEQ ID NO: 1662916 - RNA, 19 nt, Artificial Sequence
  Description of Artificial Sequence: Synthetic oligonucleotide
  Antisense strand to SEQ ID NO: 1662915
guucacauuucgaauacau

SEQ ID NO: 1662917 - RNA, 19 nt, Artificial Sequence
  Description of Artificial Sequence: Synthetic oligonucleotide
  Sense strand starting at position 2271 of SEQ ID NO: 1561322
guauucgaaaugugaacga

SEQ ID NO: 1662918 - RNA, 19 nt, Artificial Sequence
  Description of Artificial Sequence: Synthetic oligonucleotide
  Antisense strand to SEQ ID NO: 1662917
ucguucacauuucgaauac

SEQ ID NO: 1662919 - RNA, 19 nt, Artificial Sequence
  Description of Artificial Sequence: Synthetic oligonucleotide
  Sense strand starting at position 2275 of SEQ ID NO: 1561322
ucgaaaugugaacgaauau

SEQ ID NO: 1662920 - RNA, 19 nt, Artificial Sequence
  Description of Artificial Sequence: Synthetic oligonucleotide
  Antisense strand to SEQ ID NO: 1662919
auauucguucacauuucga

SEQ ID NO: 1662921 - RNA, 19 nt, Artificial Sequence
  Description of Artificial Sequence: Synthetic oligonucleotide
  Sense strand starting at position 2326 of SEQ ID NO: 1561322
uuuguuccagaguaaauua

SEQ ID NO: 1662922 - RNA, 19 nt, Artificial Sequence
  Description of Artificial Sequence: Synthetic oligonucleotide
  Antisense strand to SEQ ID NO: 1662921
uaauuuacucuggaacaaa

SEQ ID NO: 1662923 - RNA, 19 nt, Artificial Sequence
  Description of Artificial Sequence: Synthetic oligonucleotide
  Sense strand starting at position 2349 of SEQ ID NO: 1561322
uuacuuuagucauagugug

SEQ ID NO: 1662924 - RNA, 19 nt, Artificial Sequence
  Description of Artificial Sequence: Synthetic oligonucleotide
  Antisense strand to SEQ ID NO: 1662923
cacacuaugacuaaaguaa

SEQ ID NO: 1662925 - RNA, 19 nt, Artificial Sequence
  Description of Artificial Sequence: Synthetic oligonucleotide
  Sense strand starting at position 2354 of SEQ ID NO: 1561322
uuagucauaguguguuauc

SEQ ID NO: 1662926 - RNA, 19 nt, Artificial Sequence
  Description of Artificial Sequence: Synthetic oligonucleotide
  Antisense strand to SEQ ID NO: 1662925
gauaacacacuaugacuaa

SEQ ID NO: 1662927 - RNA, 19 nt, Artificial Sequence
  Description of Artificial Sequence: Synthetic oligonucleotide
  Sense strand starting at position 2355 of SEQ ID NO: 1561322
uagucauaguguguuauca

SEQ ID NO: 1662928 - RNA, 19 nt, Artificial Sequence
  Description of Artificial Sequence: Synthetic oligonucleotide
  Antisense strand to SEQ ID NO: 1662927
ugauaacacacuaugacua

SEQ ID NO: 1662929 - RNA, 19 nt, Artificial Sequence
  Description of Artificial Sequence: Synthetic oligonucleotide
  Sense strand starting at position 2357 of SEQ ID NO: 1561322
gucauaguguguuaucaau

SEQ ID NO: 1662930 - RNA, 19 nt, Artificial Sequence
  Description of Artificial Sequence: Synthetic oligonucleotide
  Antisense strand to SEQ ID NO: 1662929
auugauaacacacuaugac

SEQ ID NO: 1662931 - RNA, 19 nt, Artificial Sequence
  Description of Artificial Sequence: Synthetic oligonucleotide
  Sense strand starting at position 2401 of SEQ ID NO: 1561322
cgccuuuaaucucaacagu

SEQ ID NO: 1662932 - RNA, 19 nt, Artificial Sequence
  Description of Artificial Sequence: Synthetic oligonucleotide
  Antisense strand to SEQ ID NO: 1662931
acuguugagauuaaaggcg

SEQ ID NO: 1662933 - RNA, 19 nt, Artificial Sequence
  Description of Artificial Sequence: Synthetic oligonucleotide
  Sense strand starting at position 2888 of SEQ ID NO: 1561322
ugcucuguccaccagguua

SEQ ID NO: 1662934 - RNA, 19 nt, Artificial Sequence
  Description of Artificial Sequence: Synthetic oligonucleotide
  Antisense strand to SEQ ID NO: 1662933
uaaccugguggacagagca

SEQ ID NO: 1662935 - RNA, 19 nt, Artificial Sequence
  Description of Artificial Sequence: Synthetic oligonucleotide
  Sense strand starting at position 3034 of SEQ ID NO: 1561322
gugaccugaacuuguaguu

SEQ ID NO: 1662936 - RNA, 19 nt, Artificial Sequence
  Description of Artificial Sequence: Synthetic oligonucleotide
  Antisense strand to SEQ ID NO: 1662935
aacuacaaguucaggucac

SEQ ID NO: 1662937 - RNA, 19 nt, Artificial Sequence
  Description of Artificial Sequence: Synthetic oligonucleotide
  Sense strand starting at position 3043 of SEQ ID NO: 1561322
acuuguaguuaccagcuau

SEQ ID NO: 1662938 - RNA, 19 nt, Artificial Sequence
  Description of Artificial Sequence: Synthetic oligonucleotide
  Antisense strand to SEQ ID NO: 1662937
auagcugguaacuacaagu

SEQ ID NO: 1662939 - RNA, 19 nt, Artificial Sequence
  Description of Artificial Sequence: Synthetic oligonucleotide
  Sense strand starting at position 3191 of SEQ ID NO: 1561322
accuuaaacuuaugggagu

SEQ ID NO: 1662940 - RNA, 19 nt, Artificial Sequence
  Description of Artificial Sequence: Synthetic oligonucleotide
  Antisense strand to SEQ ID NO: 1662939
acucccauaaguuuaaggu

SEQ ID NO: 1662941 - RNA, 19 nt, Artificial Sequence
  Description of Artificial Sequence: Synthetic oligonucleotide
  Sense strand starting at position 3192 of SEQ ID NO: 1561322
ccuuaaacuuaugggaguu

SEQ ID NO: 1662942 - RNA, 19 nt, Artificial Sequence
  Description of Artificial Sequence: Synthetic oligonucleotide
  Antisense strand to SEQ ID NO: 1662941
aacucccauaaguuuaagg

SEQ ID NO: 1662943 - RNA, 19 nt, Artificial Sequence
  Description of Artificial Sequence: Synthetic oligonucleotide
  Sense strand starting at position 3263 of SEQ ID NO: 1561322
uacguaguauuugguuaca

SEQ ID NO: 1662944 - RNA, 19 nt, Artificial Sequence
  Description of Artificial Sequence: Synthetic oligonucleotide
  Antisense strand to SEQ ID NO: 1662943
uguaaccaaauacuacgua

SEQ ID NO: 1662945 - RNA, 19 nt, Artificial Sequence
  Description of Artificial Sequence: Synthetic oligonucleotide
  Sense strand starting at position 3265 of SEQ ID NO: 1561322
cguaguauuugguuacaug

SEQ ID NO: 1662946 - RNA, 19 nt, Artificial Sequence
  Description of Artificial Sequence: Synthetic oligonucleotide
  Antisense strand to SEQ ID NO: 1662945
cauguaaccaaauacuacg

SEQ ID NO: 1662947 - RNA, 19 nt, Artificial Sequence
  Description of Artificial Sequence: Synthetic oligonucleotide
  Sense strand starting at position 3307 of SEQ ID NO: 1561322
cugagauuuacgugcacca

SEQ ID NO: 1662948 - RNA, 19 nt, Artificial Sequence
  Description of Artificial Sequence: Synthetic oligonucleotide
  Antisense strand to SEQ ID NO: 1662947
uggugcacguaaaucucag

SEQ ID NO: 1662949 - RNA, 19 nt, Artificial Sequence
  Description of Artificial Sequence: Synthetic oligonucleotide
  Sense strand starting at position 3401 of SEQ ID NO: 1561322
gugcccagaguccauuaua

SEQ ID NO: 1662950 - RNA, 19 nt, Artificial Sequence
  Description of Artificial Sequence: Synthetic oligonucleotide
  Antisense strand to SEQ ID NO: 1662949
uauaauggacucugggcac

SEQ ID NO: 1662951 - RNA, 19 nt, Artificial Sequence
  Description of Artificial Sequence: Synthetic oligonucleotide
  Sense strand starting at position 20 of SEQ ID NO: 1561323
ggaaagguuggugguugaa

SEQ ID NO: 1662952 - RNA, 19 nt, Artificial Sequence
  Description of Artificial Sequence: Synthetic oligonucleotide
  Antisense strand to SEQ ID NO: 1662951
uucaaccaccaaccuuucc

SEQ ID NO: 1662953 - RNA, 19 nt, Artificial Sequence
  Description of Artificial Sequence: Synthetic oligonucleotide
  Sense strand starting at position 22 of SEQ ID NO: 1561323
aaagguuggugguugaaga

SEQ ID NO: 1662954 - RNA, 19 nt, Artificial Sequence
  Description of Artificial Sequence: Synthetic oligonucleotide
  Antisense strand to SEQ ID NO: 1662953
ucuucaaccaccaaccuuu

SEQ ID NO: 1662955 - RNA, 19 nt, Artificial Sequence
  Description of Artificial Sequence: Synthetic oligonucleotide
  Sense strand starting at position 23 of SEQ ID NO: 1561323
aagguuggugguugaagaa

SEQ ID NO: 1662956 - RNA, 19 nt, Artificial Sequence
  Description of Artificial Sequence: Synthetic oligonucleotide
  Antisense strand to SEQ ID NO: 1662955
uucuucaaccaccaaccuu

SEQ ID NO: 1662957 - RNA, 19 nt, Artificial Sequence
  Description of Artificial Sequence: Synthetic oligonucleotide
  Sense strand starting at position 35 of SEQ ID NO: 1561323
ugaagaacagucuguguaa

SEQ ID NO: 1662958 - RNA, 19 nt, Artificial Sequence
  Description of Artificial Sequence: Synthetic oligonucleotide
  Antisense strand to SEQ ID NO: 1662957
uuacacagacuguucuuca

SEQ ID NO: 1662959 - RNA, 19 nt, Artificial Sequence
  Description of Artificial Sequence: Synthetic oligonucleotide
  Sense strand starting at position 36 of SEQ ID NO: 1561323
gaagaacagucuguguaaa

SEQ ID NO: 1662960 - RNA, 19 nt, Artificial Sequence
  Description of Artificial Sequence: Synthetic oligonucleotide
  Antisense strand to SEQ ID NO: 1662959
uuuacacagacuguucuuc

SEQ ID NO: 1662961 - RNA, 19 nt, Artificial Sequence
  Description of Artificial Sequence: Synthetic oligonucleotide
  Sense strand starting at position 37 of SEQ ID NO: 1561323
aagaacagucuguguaaau

SEQ ID NO: 1662962 - RNA, 19 nt, Artificial Sequence
  Description of Artificial Sequence: Synthetic oligonucleotide
  Antisense strand to SEQ ID NO: 1662961
auuuacacagacuguucuu

SEQ ID NO: 1662963 - RNA, 19 nt, Artificial Sequence
  Description of Artificial Sequence: Synthetic oligonucleotide
  Sense strand starting at position 38 of SEQ ID NO: 1561323
agaacagucuguguaaaua

SEQ ID NO: 1662964 - RNA, 19 nt, Artificial Sequence
  Description of Artificial Sequence: Synthetic oligonucleotide
  Antisense strand to SEQ ID NO: 1662963
uauuuacacagacuguucu

SEQ ID NO: 1662965 - RNA, 19 nt, Artificial Sequence
  Description of Artificial Sequence: Synthetic oligonucleotide
  Sense strand starting at position 59 of SEQ ID NO: 1561323
ggcaaugucagugacuaca

SEQ ID NO: 1662966 - RNA, 19 nt, Artificial Sequence
  Description of Artificial Sequence: Synthetic oligonucleotide
  Antisense strand to SEQ ID NO: 1662965
uguagucacugacauugcc

SEQ ID NO: 1662967 - RNA, 19 nt, Artificial Sequence
  Description of Artificial Sequence: Synthetic oligonucleotide
  Sense strand starting at position 138 of SEQ ID NO: 1561323
gccauagaucuagaaaguc

SEQ ID NO: 1662968 - RNA, 19 nt, Artificial Sequence
  Description of Artificial Sequence: Synthetic oligonucleotide
  Antisense strand to SEQ ID NO: 1662967
gacuuucuagaucuauggc

SEQ ID NO: 1662969 - RNA, 19 nt, Artificial Sequence
  Description of Artificial Sequence: Synthetic oligonucleotide
  Sense strand starting at position 173 of SEQ ID NO: 1561323
gcaagucaggugggaucua

SEQ ID NO: 1662970 - RNA, 19 nt, Artificial Sequence
  Description of Artificial Sequence: Synthetic oligonucleotide
  Antisense strand to SEQ ID NO: 1662969
uagaucccaccugacuugc

SEQ ID NO: 1662971 - RNA, 19 nt, Artificial Sequence
  Description of Artificial Sequence: Synthetic oligonucleotide
  Sense strand starting at position 184 of SEQ ID NO: 1561323
gggaucuauuaggcuuacu

SEQ ID NO: 1662972 - RNA, 19 nt, Artificial Sequence
  Description of Artificial Sequence: Synthetic oligonucleotide
  Antisense strand to SEQ ID NO: 1662971
aguaagccuaauagauccc

SEQ ID NO: 1662973 - RNA, 19 nt, Artificial Sequence
  Description of Artificial Sequence: Synthetic oligonucleotide
  Sense strand starting at position 187 of SEQ ID NO: 1561323
aucuauuaggcuuacugua

SEQ ID NO: 1662974 - RNA, 19 nt, Artificial Sequence
  Description of Artificial Sequence: Synthetic oligonucleotide
  Antisense strand to SEQ ID NO: 1662973
uacaguaagccuaauagau

SEQ ID NO: 1662975 - RNA, 19 nt, Artificial Sequence
  Description of Artificial Sequence: Synthetic oligonucleotide
  Sense strand starting at position 192 of SEQ ID NO: 1561323
uuaggcuuacuguaagacu

SEQ ID NO: 1662976 - RNA, 19 nt, Artificial Sequence
  Description of Artificial Sequence: Synthetic oligonucleotide
  Antisense strand to SEQ ID NO: 1662975
agucuuacaguaagccuaa

SEQ ID NO: 1662977 - RNA, 19 nt, Artificial Sequence
  Description of Artificial Sequence: Synthetic oligonucleotide
  Sense strand starting at position 316 of SEQ ID NO: 1561323
gugccuauaguccagauau

SEQ ID NO: 1662978 - RNA, 19 nt, Artificial Sequence
  Description of Artificial Sequence: Synthetic oligonucleotide
  Antisense strand to SEQ ID NO: 1662977
auaucuggacuauaggcac

SEQ ID NO: 1662979 - RNA, 19 nt, Artificial Sequence
  Description of Artificial Sequence: Synthetic oligonucleotide
  Sense strand starting at position 318 of SEQ ID NO: 1561323
gccuauaguccagauauga

SEQ ID NO: 1662980 - RNA, 19 nt, Artificial Sequence
  Description of Artificial Sequence: Synthetic oligonucleotide
  Antisense strand to SEQ ID NO: 1662979
ucauaucuggacuauaggc

SEQ ID NO: 1662981 - RNA, 19 nt, Artificial Sequence
  Description of Artificial Sequence: Synthetic oligonucleotide
  Sense strand starting at position 341 of SEQ ID NO: 1561323
agagcugcuccugaggaaa

SEQ ID NO: 1662982 - RNA, 19 nt, Artificial Sequence
  Description of Artificial Sequence: Synthetic oligonucleotide
  Antisense strand to SEQ ID NO: 1662981
uuuccucaggagcagcucu

SEQ ID NO: 1662983 - RNA, 19 nt, Artificial Sequence
  Description of Artificial Sequence: Synthetic oligonucleotide
  Sense strand starting at position 529 of SEQ ID NO: 1561323
gucacacuucccuagcaua

SEQ ID NO: 1662984 - RNA, 19 nt, Artificial Sequence
  Description of Artificial Sequence: Synthetic oligonucleotide
  Antisense strand to SEQ ID NO: 1662983
uaugcuagggaagugugac

SEQ ID NO: 1662985 - RNA, 19 nt, Artificial Sequence
  Description of Artificial Sequence: Synthetic oligonucleotide
  Sense strand starting at position 572 of SEQ ID NO: 1561323
agucucaauuuggaagacu

SEQ ID NO: 1662986 - RNA, 19 nt, Artificial Sequence
  Description of Artificial Sequence: Synthetic oligonucleotide
  Antisense strand to SEQ ID NO: 1662985
agucuuccaaauugagacu

SEQ ID NO: 1662987 - RNA, 19 nt, Artificial Sequence
  Description of Artificial Sequence: Synthetic oligonucleotide
  Sense strand starting at position 730 of SEQ ID NO: 1561323
gucaacacuuggguuagau

SEQ ID NO: 1662988 - RNA, 19 nt, Artificial Sequence
  Description of Artificial Sequence: Synthetic oligonucleotide
  Antisense strand to SEQ ID NO: 1662987
aucuaacccaaguguugac

SEQ ID NO: 1662989 - RNA, 19 nt, Artificial Sequence
  Description of Artificial Sequence: Synthetic oligonucleotide
  Sense strand starting at position 932 of SEQ ID NO: 1561323
gaaacauuggccuggacuc

SEQ ID NO: 1662990 - RNA, 19 nt, Artificial Sequence
  Description of Artificial Sequence: Synthetic oligonucleotide
  Antisense strand to SEQ ID NO: 1662989
gaguccaggccaauguuuc

SEQ ID NO: 1662991 - RNA, 19 nt, Artificial Sequence
  Description of Artificial Sequence: Synthetic oligonucleotide
  Sense strand starting at position 997 of SEQ ID NO: 1561323
gagagaaugguaggugagu

SEQ ID NO: 1662992 - RNA, 19 nt, Artificial Sequence
  Description of Artificial Sequence: Synthetic oligonucleotide
  Antisense strand to SEQ ID NO: 1662991
acucaccuaccauucucuc

SEQ ID NO: 1662993 - RNA, 19 nt, Artificial Sequence
  Description of Artificial Sequence: Synthetic oligonucleotide
  Sense strand starting at position 1162 of SEQ ID NO: 1561323
gccucagaggaaugugauc

SEQ ID NO: 1662994 - RNA, 19 nt, Artificial Sequence
  Description of Artificial Sequence: Synthetic oligonucleotide
  Antisense strand to SEQ ID NO: 1662993
gaucacauuccucugaggc

SEQ ID NO: 1662995 - RNA, 19 nt, Artificial Sequence
  Description of Artificial Sequence: Synthetic oligonucleotide
  Sense strand starting at position 1164 of SEQ ID NO: 1561323
cucagaggaaugugaucau

SEQ ID NO: 1662996 - RNA, 19 nt, Artificial Sequence
  Description of Artificial Sequence: Synthetic oligonucleotide
  Antisense strand to SEQ ID NO: 1662995
augaucacauuccucugag

SEQ ID NO: 1662997 - RNA, 19 nt, Artificial Sequence
  Description of Artificial Sequence: Synthetic oligonucleotide
  Sense strand starting at position 1171 of SEQ ID NO: 1561323
gaaugugaucauggcagug

SEQ ID NO: 1662998 - RNA, 19 nt, Artificial Sequence
  Description of Artificial Sequence: Synthetic oligonucleotide
  Antisense strand to SEQ ID NO: 1662997
cacugccaugaucacauuc

SEQ ID NO: 1662999 - RNA, 19 nt, Artificial Sequence
  Description of Artificial Sequence: Synthetic oligonucleotide
  Sense strand starting at position 1445 of SEQ ID NO: 1561323
cucccacggcccuaagaau

SEQ ID NO: 1663000 - RNA, 19 nt, Artificial Sequence
  Description of Artificial Sequence: Synthetic oligonucleotide
  Antisense strand to SEQ ID NO: 1662999
auucuuagggccgugggag

SEQ ID NO: 1663001 - RNA, 19 nt, Artificial Sequence
  Description of Artificial Sequence: Synthetic oligonucleotide
  Sense strand starting at position 1487 of SEQ ID NO: 1561323
uguucccugcaguaacaau

SEQ ID NO: 1663002 - RNA, 19 nt, Artificial Sequence
  Description of Artificial Sequence: Synthetic oligonucleotide
  Antisense strand to SEQ ID NO: 1663001
auuguuacugcagggaaca

SEQ ID NO: 1663003 - RNA, 19 nt, Artificial Sequence
  Description of Artificial Sequence: Synthetic oligonucleotide
  Sense strand starting at position 2078 of SEQ ID NO: 1561323
caaggcuuucuggguaaug

SEQ ID NO: 1663004 - RNA, 19 nt, Artificial Sequence
  Description of Artificial Sequence: Synthetic oligonucleotide
  Antisense strand to SEQ ID NO: 1663003
cauuacccagaaagccuug

SEQ ID NO: 1663005 - RNA, 19 nt, Artificial Sequence
  Description of Artificial Sequence: Synthetic oligonucleotide
  Sense strand starting at position 2080 of SEQ ID NO: 1561323
aggcuuucuggguaaugua

SEQ ID NO: 1663006 - RNA, 19 nt, Artificial Sequence
  Description of Artificial Sequence: Synthetic oligonucleotide
  Antisense strand to SEQ ID NO: 1663005
uacauuacccagaaagccu

SEQ ID NO: 1663007 - RNA, 19 nt, Artificial Sequence
  Description of Artificial Sequence: Synthetic oligonucleotide
  Sense strand starting at position 2205 of SEQ ID NO: 1561323
ggucuuaaguagguugaca

SEQ ID NO: 1663008 - RNA, 19 nt, Artificial Sequence
  Description of Artificial Sequence: Synthetic oligonucleotide
  Antisense strand to SEQ ID NO: 1663007
ugucaaccuacuuaagacc

SEQ ID NO: 1663009 - RNA, 19 nt, Artificial Sequence
  Description of Artificial Sequence: Synthetic oligonucleotide
  Sense strand starting at position 2542 of SEQ ID NO: 1561323
guacaaguauaguucuuau

SEQ ID NO: 1663010 - RNA, 19 nt, Artificial Sequence
  Description of Artificial Sequence: Synthetic oligonucleotide
  Antisense strand to SEQ ID NO: 1663009
auaagaacuauacuuguac

SEQ ID NO: 1663011 - RNA, 19 nt, Artificial Sequence
  Description of Artificial Sequence: Synthetic oligonucleotide
  Sense strand starting at position 2646 of SEQ ID NO: 1561323
uguuaaucgacugggaguu

SEQ ID NO: 1663012 - RNA, 19 nt, Artificial Sequence
  Description of Artificial Sequence: Synthetic oligonucleotide
  Antisense strand to SEQ ID NO: 1663011
aacucccagucgauuaaca

SEQ ID NO: 1663013 - RNA, 19 nt, Artificial Sequence
  Description of Artificial Sequence: Synthetic oligonucleotide
  Sense strand starting at position 2656 of SEQ ID NO: 1561323
cugggaguuuauguaauuc

SEQ ID NO: 1663014 - RNA, 19 nt, Artificial Sequence
  Description of Artificial Sequence: Synthetic oligonucleotide
  Antisense strand to SEQ ID NO: 1663013
gaauuacauaaacucccag

SEQ ID NO: 1663015 - RNA, 19 nt, Artificial Sequence
  Description of Artificial Sequence: Synthetic oligonucleotide
  Sense strand starting at position 2718 of SEQ ID NO: 1561323
ggcuauuaguaguuaagac

SEQ ID NO: 1663016 - RNA, 19 nt, Artificial Sequence
  Description of Artificial Sequence: Synthetic oligonucleotide
  Antisense strand to SEQ ID NO: 1663015
gucuuaacuacuaauagcc

SEQ ID NO: 1663017 - RNA, 19 nt, Artificial Sequence
  Description of Artificial Sequence: Synthetic oligonucleotide
  Sense strand starting at position 2809 of SEQ ID NO: 1561323
aagggucagcuguauauca

SEQ ID NO: 1663018 - RNA, 19 nt, Artificial Sequence
  Description of Artificial Sequence: Synthetic oligonucleotide
  Antisense strand to SEQ ID NO: 1663017
ugauauacagcugacccuu

SEQ ID NO: 1663019 - RNA, 19 nt, Artificial Sequence
  Description of Artificial Sequence: Synthetic oligonucleotide
  Sense strand starting at position 2821 of SEQ ID NO: 1561323
uauaucagucucuagugua

SEQ ID NO: 1663020 - RNA, 19 nt, Artificial Sequence
  Description of Artificial Sequence: Synthetic oligonucleotide
  Antisense strand to SEQ ID NO: 1663019
uacacuagagacugauaua

SEQ ID NO: 1663021 - RNA, 19 nt, Artificial Sequence
  Description of Artificial Sequence: Synthetic oligonucleotide
  Sense strand starting at position 3025 of SEQ ID NO: 1561323
ggaagauaguggagggaua

SEQ ID NO: 1663022 - RNA, 19 nt, Artificial Sequence
  Description of Artificial Sequence: Synthetic oligonucleotide
  Antisense strand to SEQ ID NO: 1663021
uaucccuccacuaucuucc

SEQ ID NO: 1663023 - RNA, 19 nt, Artificial Sequence
  Description of Artificial Sequence: Synthetic oligonucleotide
  Sense strand starting at position 3147 of SEQ ID NO: 1561323
gcuuuaauacaugaauguu

SEQ ID NO: 1663024 - RNA, 19 nt, Artificial Sequence
  Description of Artificial Sequence: Synthetic oligonucleotide
  Antisense strand to SEQ ID NO: 1663023
aacauucauguauuaaagc

SEQ ID NO: 1663025 - RNA, 19 nt, Artificial Sequence
  Description of Artificial Sequence: Synthetic oligonucleotide
  Sense strand starting at position 3788 of SEQ ID NO: 1561323
uuguacaucugguuagauc

SEQ ID NO: 1663026 - RNA, 19 nt, Artificial Sequence
  Description of Artificial Sequence: Synthetic oligonucleotide
  Antisense strand to SEQ ID NO: 1663025
gaucuaaccagauguacaa

SEQ ID NO: 1663027 - RNA, 19 nt, Artificial Sequence
  Description of Artificial Sequence: Synthetic oligonucleotide
  Sense strand starting at position 3789 of SEQ ID NO: 1561323
uguacaucugguuagaucu

SEQ ID NO: 1663028 - RNA, 19 nt, Artificial Sequence
  Description of Artificial Sequence: Synthetic oligonucleotide
  Antisense strand to SEQ ID NO: 1663027
agaucuaaccagauguaca

SEQ ID NO: 1663029 - RNA, 19 nt, Artificial Sequence
  Description of Artificial Sequence: Synthetic oligonucleotide
  Sense strand starting at position 3850 of SEQ ID NO: 1561323
cuuggcugggccuauauua

SEQ ID NO: 1663030 - RNA, 19 nt, Artificial Sequence
  Description of Artificial Sequence: Synthetic oligonucleotide
  Antisense strand to SEQ ID NO: 1663029
uaauauaggcccagccaag

SEQ ID NO: 1663031 - RNA, 19 nt, Artificial Sequence
  Description of Artificial Sequence: Synthetic oligonucleotide
  Sense strand starting at position 282 of SEQ ID NO: 1561324
ugguuacuaucuuuauauc

SEQ ID NO: 1663032 - RNA, 19 nt, Artificial Sequence
  Description of Artificial Sequence: Synthetic oligonucleotide
  Antisense strand to SEQ ID NO: 1663031
gauauaaagauaguaacca

SEQ ID NO: 1663033 - RNA, 19 nt, Artificial Sequence
  Description of Artificial Sequence: Synthetic oligonucleotide
  Sense strand starting at position 330 of SEQ ID NO: 1561324
cuugucguauuucugcaau

SEQ ID NO: 1663034 - RNA, 19 nt, Artificial Sequence
  Description of Artificial Sequence: Synthetic oligonucleotide
  Antisense strand to SEQ ID NO: 1663033
auugcagaaauacgacaag

SEQ ID NO: 1663035 - RNA, 19 nt, Artificial Sequence
  Description of Artificial Sequence: Synthetic oligonucleotide
  Sense strand starting at position 344 of SEQ ID NO: 1561324
gcaauuucugaaugcucca

SEQ ID NO: 1663036 - RNA, 19 nt, Artificial Sequence
  Description of Artificial Sequence: Synthetic oligonucleotide
  Antisense strand to SEQ ID NO: 1663035
uggagcauucagaaauugc

SEQ ID NO: 1663037 - RNA, 19 nt, Artificial Sequence
  Description of Artificial Sequence: Synthetic oligonucleotide
  Sense strand starting at position 349 of SEQ ID NO: 1561324
uucugaaugcuccauaaug

SEQ ID NO: 1663038 - RNA, 19 nt, Artificial Sequence
  Description of Artificial Sequence: Synthetic oligonucleotide
  Antisense strand to SEQ ID NO: 1663037
cauuauggagcauucagaa

SEQ ID NO: 1663039 - RNA, 19 nt, Artificial Sequence
  Description of Artificial Sequence: Synthetic oligonucleotide
  Sense strand starting at position 351 of SEQ ID NO: 1561324
cugaaugcuccauaaugau

SEQ ID NO: 1663040 - RNA, 19 nt, Artificial Sequence
  Description of Artificial Sequence: Synthetic oligonucleotide
  Antisense strand to SEQ ID NO: 1663039
aucauuauggagcauucag

SEQ ID NO: 1663041 - RNA, 19 nt, Artificial Sequence
  Description of Artificial Sequence: Synthetic oligonucleotide
  Sense strand starting at position 435 of SEQ ID NO: 1561324
gaguccuagagagguccaa

SEQ ID NO: 1663042 - RNA, 19 nt, Artificial Sequence
  Description of Artificial Sequence: Synthetic oligonucleotide
  Antisense strand to SEQ ID NO: 1663041
uuggaccucucuaggacuc

SEQ ID NO: 1663043 - RNA, 19 nt, Artificial Sequence
  Description of Artificial Sequence: Synthetic oligonucleotide
  Sense strand starting at position 526 of SEQ ID NO: 1561324
uccucugccucagugagaa

SEQ ID NO: 1663044 - RNA, 19 nt, Artificial Sequence
  Description of Artificial Sequence: Synthetic oligonucleotide
  Antisense strand to SEQ ID NO: 1663043
uucucacugaggcagagga

SEQ ID NO: 1663045 - RNA, 19 nt, Artificial Sequence
  Description of Artificial Sequence: Synthetic oligonucleotide
  Sense strand starting at position 612 of SEQ ID NO: 1561324
cuuauuacuugggcaacua

SEQ ID NO: 1663046 - RNA, 19 nt, Artificial Sequence
  Description of Artificial Sequence: Synthetic oligonucleotide
  Antisense strand to SEQ ID NO: 1663045
uaguugcccaaguaauaag

SEQ ID NO: 1663047 - RNA, 19 nt, Artificial Sequence
  Description of Artificial Sequence: Synthetic oligonucleotide
  Sense strand starting at position 613 of SEQ ID NO: 1561324
uuauuacuugggcaacuau

SEQ ID NO: 1663048 - RNA, 19 nt, Artificial Sequence
  Description of Artificial Sequence: Synthetic oligonucleotide
  Antisense strand to SEQ ID NO: 1663047
auaguugcccaaguaauaa

SEQ ID NO: 1663049 - RNA, 19 nt, Artificial Sequence
  Description of Artificial Sequence: Synthetic oligonucleotide
  Sense strand starting at position 622 of SEQ ID NO: 1561324
gggcaacuaugggcaaaua

SEQ ID NO: 1663050 - RNA, 19 nt, Artificial Sequence
  Description of Artificial Sequence: Synthetic oligonucleotide
  Antisense strand to SEQ ID NO: 1663049
uauuugcccauaguugccc

SEQ ID NO: 1663051 - RNA, 19 nt, Artificial Sequence
  Description of Artificial Sequence: Synthetic oligonucleotide
  Sense strand starting at position 685 of SEQ ID NO: 1561324
ggcaguaccucuccacaga

SEQ ID NO: 1663052 - RNA, 19 nt, Artificial Sequence
  Description of Artificial Sequence: Synthetic oligonucleotide
  Antisense strand to SEQ ID NO: 1663051
ucuguggagagguacugcc

SEQ ID NO: 1663053 - RNA, 19 nt, Artificial Sequence
  Description of Artificial Sequence: Synthetic oligonucleotide
  Sense strand starting at position 717 of SEQ ID NO: 1561324
guacgugaauuucuuugua

SEQ ID NO: 1663054 - RNA, 19 nt, Artificial Sequence
  Description of Artificial Sequence: Synthetic oligonucleotide
  Antisense strand to SEQ ID NO: 1663053
uacaaagaaauucacguac

SEQ ID NO: 1663055 - RNA, 19 nt, Artificial Sequence
  Description of Artificial Sequence: Synthetic oligonucleotide
  Sense strand starting at position 719 of SEQ ID NO: 1561324
acgugaauuucuuuguaua

SEQ ID NO: 1663056 - RNA, 19 nt, Artificial Sequence
  Description of Artificial Sequence: Synthetic oligonucleotide
  Antisense strand to SEQ ID NO: 1663055
uauacaaagaaauucacgu

SEQ ID NO: 1663057 - RNA, 19 nt, Artificial Sequence
  Description of Artificial Sequence: Synthetic oligonucleotide
  Sense strand starting at position 720 of SEQ ID NO: 1561324
cgugaauuucuuuguauaa

SEQ ID NO: 1663058 - RNA, 19 nt, Artificial Sequence
  Description of Artificial Sequence: Synthetic oligonucleotide
  Antisense strand to SEQ ID NO: 1663057
uuauacaaagaaauucacg

SEQ ID NO: 1663059 - RNA, 19 nt, Artificial Sequence
  Description of Artificial Sequence: Synthetic oligonucleotide
  Sense strand starting at position 733 of SEQ ID NO: 1561324
guauaaagcccuuagaauu

SEQ ID NO: 1663060 - RNA, 19 nt, Artificial Sequence
  Description of Artificial Sequence: Synthetic oligonucleotide
  Antisense strand to SEQ ID NO: 1663059
aauucuaagggcuuuauac

SEQ ID NO: 1663061 - RNA, 19 nt, Artificial Sequence
  Description of Artificial Sequence: Synthetic oligonucleotide
  Sense strand starting at position 788 of SEQ ID NO: 1561324
gcccgauuacagcauccua

SEQ ID NO: 1663062 - RNA, 19 nt, Artificial Sequence
  Description of Artificial Sequence: Synthetic oligonucleotide
  Antisense strand to SEQ ID NO: 1663061
uaggaugcuguaaucgggc

SEQ ID NO: 1663063 - RNA, 19 nt, Artificial Sequence
  Description of Artificial Sequence: Synthetic oligonucleotide
  Sense strand starting at position 804 of SEQ ID NO: 1561324
cuacaauagaugugaacgu

SEQ ID NO: 1663064 - RNA, 19 nt, Artificial Sequence
  Description of Artificial Sequence: Synthetic oligonucleotide
  Antisense strand to SEQ ID NO: 1663063
acguucacaucuauuguag

SEQ ID NO: 1663065 - RNA, 19 nt, Artificial Sequence
  Description of Artificial Sequence: Synthetic oligonucleotide
  Sense strand starting at position 808 of SEQ ID NO: 1561324
aauagaugugaacguuacu

SEQ ID NO: 1663066 - RNA, 19 nt, Artificial Sequence
  Description of Artificial Sequence: Synthetic oligonucleotide
  Antisense strand to SEQ ID NO: 1663065
aguaacguucacaucuauu

SEQ ID NO: 1663067 - RNA, 19 nt, Artificial Sequence
  Description of Artificial Sequence: Synthetic oligonucleotide
  Sense strand starting at position 811 of SEQ ID NO: 1561324
agaugugaacguuacugua

SEQ ID NO: 1663068 - RNA, 19 nt, Artificial Sequence
  Description of Artificial Sequence: Synthetic oligonucleotide
  Antisense strand to SEQ ID NO: 1663067
uacaguaacguucacaucu

SEQ ID NO: 1663069 - RNA, 19 nt, Artificial Sequence
  Description of Artificial Sequence: Synthetic oligonucleotide
  Sense strand starting at position 813 of SEQ ID NO: 1561324
augugaacguuacuguaaa

SEQ ID NO: 1663070 - RNA, 19 nt, Artificial Sequence
  Description of Artificial Sequence: Synthetic oligonucleotide
  Antisense strand to SEQ ID NO: 1663069
uuuacaguaacguucacau

SEQ ID NO: 1663071 - RNA, 19 nt, Artificial Sequence
  Description of Artificial Sequence: Synthetic oligonucleotide
  Sense strand starting at position 869 of SEQ ID NO: 1561324
gucaguagucaaggaguca

SEQ ID NO: 1663072 - RNA, 19 nt, Artificial Sequence
  Description of Artificial Sequence: Synthetic oligonucleotide
  Antisense strand to SEQ ID NO: 1663071
ugacuccuugacuacugac

SEQ ID NO: 1663073 - RNA, 19 nt, Artificial Sequence
  Description of Artificial Sequence: Synthetic oligonucleotide
  Sense strand starting at position 1378 of SEQ ID NO: 1561324
gucaaagacuguccagaau

SEQ ID NO: 1663074 - RNA, 19 nt, Artificial Sequence
  Description of Artificial Sequence: Synthetic oligonucleotide
  Antisense strand to SEQ ID NO: 1663073
auucuggacagucuuugac

SEQ ID NO: 1663075 - RNA, 19 nt, Artificial Sequence
  Description of Artificial Sequence: Synthetic oligonucleotide
  Sense strand starting at position 1472 of SEQ ID NO: 1561324
ucaggaaauuaacaagaga

SEQ ID NO: 1663076 - RNA, 19 nt, Artificial Sequence
  Description of Artificial Sequence: Synthetic oligonucleotide
  Antisense strand to SEQ ID NO: 1663075
ucucuuguuaauuuccuga

SEQ ID NO: 1663077 - RNA, 19 nt, Artificial Sequence
  Description of Artificial Sequence: Synthetic oligonucleotide
  Sense strand starting at position 1480 of SEQ ID NO: 1561324
uuaacaagagaucgccauu

SEQ ID NO: 1663078 - RNA, 19 nt, Artificial Sequence
  Description of Artificial Sequence: Synthetic oligonucleotide
  Antisense strand to SEQ ID NO: 1663077
aauggcgaucucuuguuaa

SEQ ID NO: 1663079 - RNA, 19 nt, Artificial Sequence
  Description of Artificial Sequence: Synthetic oligonucleotide
  Sense strand starting at position 1559 of SEQ ID NO: 1561324
uucuauuaggaaggucuua

SEQ ID NO: 1663080 - RNA, 19 nt, Artificial Sequence
  Description of Artificial Sequence: Synthetic oligonucleotide
  Antisense strand to SEQ ID NO: 1663079
uaagaccuuccuaauagaa

SEQ ID NO: 1663081 - RNA, 19 nt, Artificial Sequence
  Description of Artificial Sequence: Synthetic oligonucleotide
  Sense strand starting at position 2065 of SEQ ID NO: 1561324
uugggacacuucccagaau

SEQ ID NO: 1663082 - RNA, 19 nt, Artificial Sequence
  Description of Artificial Sequence: Synthetic oligonucleotide
  Antisense strand to SEQ ID NO: 1663081
auucugggaagugucccaa

SEQ ID NO: 1663083 - RNA, 19 nt, Artificial Sequence
  Description of Artificial Sequence: Synthetic oligonucleotide
  Sense strand starting at position 2078 of SEQ ID NO: 1561324
cagaaugcccaaggaguaa

SEQ ID NO: 1663084 - RNA, 19 nt, Artificial Sequence
  Description of Artificial Sequence: Synthetic oligonucleotide
  Antisense strand to SEQ ID NO: 1663083
uuacuccuugggcauucug

SEQ ID NO: 1663085 - RNA, 19 nt, Artificial Sequence
  Description of Artificial Sequence: Synthetic oligonucleotide
  Sense strand starting at position 2090 of SEQ ID NO: 1561324
ggaguaaacguucacaguu

SEQ ID NO: 1663086 - RNA, 19 nt, Artificial Sequence
  Description of Artificial Sequence: Synthetic oligonucleotide
  Antisense strand to SEQ ID NO: 1663085
aacugugaacguuuacucc

SEQ ID NO: 1663087 - RNA, 19 nt, Artificial Sequence
  Description of Artificial Sequence: Synthetic oligonucleotide
  Sense strand starting at position 2317 of SEQ ID NO: 1561324
agaaguauuacuggagagu

SEQ ID NO: 1663088 - RNA, 19 nt, Artificial Sequence
  Description of Artificial Sequence: Synthetic oligonucleotide
  Antisense strand to SEQ ID NO: 1663087
acucuccaguaauacuucu

SEQ ID NO: 1663089 - RNA, 19 nt, Artificial Sequence
  Description of Artificial Sequence: Synthetic oligonucleotide
  Sense strand starting at position 2373 of SEQ ID NO: 1561324
agaaauuacugcuugagga

SEQ ID NO: 1663090 - RNA, 19 nt, Artificial Sequence
  Description of Artificial Sequence: Synthetic oligonucleotide
  Antisense strand to SEQ ID NO: 1663089
uccucaagcaguaauuucu

SEQ ID NO: 1663091 - RNA, 19 nt, Artificial Sequence
  Description of Artificial Sequence: Synthetic oligonucleotide
  Sense strand starting at position 2374 of SEQ ID NO: 1561324
gaaauuacugcuugaggau

SEQ ID NO: 1663092 - RNA, 19 nt, Artificial Sequence
  Description of Artificial Sequence: Synthetic oligonucleotide
  Antisense strand to SEQ ID NO: 1663091
auccucaagcaguaauuuc

SEQ ID NO: 1663093 - RNA, 19 nt, Artificial Sequence
  Description of Artificial Sequence: Synthetic oligonucleotide
  Sense strand starting at position 2381 of SEQ ID NO: 1561324
cugcuugaggaucaguaga

SEQ ID NO: 1663094 - RNA, 19 nt, Artificial Sequence
  Description of Artificial Sequence: Synthetic oligonucleotide
  Antisense strand to SEQ ID NO: 1663093
ucuacugauccucaagcag

SEQ ID NO: 1663095 - RNA, 19 nt, Artificial Sequence
  Description of Artificial Sequence: Synthetic oligonucleotide
  Sense strand starting at position 2383 of SEQ ID NO: 1561324
gcuugaggaucaguagaga

SEQ ID NO: 1663096 - RNA, 19 nt, Artificial Sequence
  Description of Artificial Sequence: Synthetic oligonucleotide
  Antisense strand to SEQ ID NO: 1663095
ucucuacugauccucaagc

SEQ ID NO: 1663097 - RNA, 19 nt, Artificial Sequence
  Description of Artificial Sequence: Synthetic oligonucleotide
  Sense strand starting at position 2528 of SEQ ID NO: 1561324
aggccaugauuauuauuau

SEQ ID NO: 1663098 - RNA, 19 nt, Artificial Sequence
  Description of Artificial Sequence: Synthetic oligonucleotide
  Antisense strand to SEQ ID NO: 1663097
auaauaauaaucauggccu

SEQ ID NO: 1663099 - RNA, 19 nt, Artificial Sequence
  Description of Artificial Sequence: Synthetic oligonucleotide
  Sense strand starting at position 3165 of SEQ ID NO: 1561324
uuaguuauccguaggugug

SEQ ID NO: 1663100 - RNA, 19 nt, Artificial Sequence
  Description of Artificial Sequence: Synthetic oligonucleotide
  Antisense strand to SEQ ID NO: 1663099
cacaccuacggauaacuaa

SEQ ID NO: 1663101 - RNA, 19 nt, Artificial Sequence
  Description of Artificial Sequence: Synthetic oligonucleotide
  Sense strand starting at position 3183 of SEQ ID NO: 1561324
guggauuuguuucuguucu

SEQ ID NO: 1663102 - RNA, 19 nt, Artificial Sequence
  Description of Artificial Sequence: Synthetic oligonucleotide
  Antisense strand to SEQ ID NO: 1663101
agaacagaaacaaauccac

SEQ ID NO: 1663103 - RNA, 19 nt, Artificial Sequence
  Description of Artificial Sequence: Synthetic oligonucleotide
  Sense strand starting at position 3307 of SEQ ID NO: 1561324
ucaggauagccucaauuau

SEQ ID NO: 1663104 - RNA, 19 nt, Artificial Sequence
  Description of Artificial Sequence: Synthetic oligonucleotide
  Antisense strand to SEQ ID NO: 1663103
auaauugaggcuauccuga

SEQ ID NO: 1663105 - RNA, 19 nt, Artificial Sequence
  Description of Artificial Sequence: Synthetic oligonucleotide
  Sense strand starting at position 3725 of SEQ ID NO: 1561324
acaggagaaacgugacagu

SEQ ID NO: 1663106 - RNA, 19 nt, Artificial Sequence
  Description of Artificial Sequence: Synthetic oligonucleotide
  Antisense strand to SEQ ID NO: 1663105
acugucacguuucuccugu

SEQ ID NO: 1663107 - RNA, 19 nt, Artificial Sequence
  Description of Artificial Sequence: Synthetic oligonucleotide
  Sense strand starting at position 3825 of SEQ ID NO: 1561324
uauggaguguagguuaaau

SEQ ID NO: 1663108 - RNA, 19 nt, Artificial Sequence
  Description of Artificial Sequence: Synthetic oligonucleotide
  Antisense strand to SEQ ID NO: 1663107
auuuaaccuacacuccaua

SEQ ID NO: 1663109 - RNA, 19 nt, Artificial Sequence
  Description of Artificial Sequence: Synthetic oligonucleotide
  Sense strand starting at position 3827 of SEQ ID NO: 1561324
uggaguguagguuaaauaa

SEQ ID NO: 1663110 - RNA, 19 nt, Artificial Sequence
  Description of Artificial Sequence: Synthetic oligonucleotide
  Antisense strand to SEQ ID NO: 1663109
uuauuuaaccuacacucca

SEQ ID NO: 1663111 - RNA, 19 nt, Artificial Sequence
  Description of Artificial Sequence: Synthetic oligonucleotide
  Sense strand starting at position 304 of SEQ ID NO: 1561325
ugguuacuaucuuuauauc

SEQ ID NO: 1663112 - RNA, 19 nt, Artificial Sequence
  Description of Artificial Sequence: Synthetic oligonucleotide
  Antisense strand to SEQ ID NO: 1663111
gauauaaagauaguaacca

SEQ ID NO: 1663113 - RNA, 19 nt, Artificial Sequence
  Description of Artificial Sequence: Synthetic oligonucleotide
  Sense strand starting at position 352 of SEQ ID NO: 1561325
cuugucguauuucugcaau

SEQ ID NO: 1663114 - RNA, 19 nt, Artificial Sequence
  Description of Artificial Sequence: Synthetic oligonucleotide
  Antisense strand to SEQ ID NO: 1663113
auugcagaaauacgacaag

SEQ ID NO: 1663115 - RNA, 19 nt, Artificial Sequence
  Description of Artificial Sequence: Synthetic oligonucleotide
  Sense strand starting at position 366 of SEQ ID NO: 1561325
gcaauuucugaaugcucca

SEQ ID NO: 1663116 - RNA, 19 nt, Artificial Sequence
  Description of Artificial Sequence: Synthetic oligonucleotide
  Antisense strand to SEQ ID NO: 1663115
uggagcauucagaaauugc

SEQ ID NO: 1663117 - RNA, 19 nt, Artificial Sequence
  Description of Artificial Sequence: Synthetic oligonucleotide
  Sense strand starting at position 371 of SEQ ID NO: 1561325
uucugaaugcuccauaaug

SEQ ID NO: 1663118 - RNA, 19 nt, Artificial Sequence
  Description of Artificial Sequence: Synthetic oligonucleotide
  Antisense strand to SEQ ID NO: 1663117
cauuauggagcauucagaa

SEQ ID NO: 1663119 - RNA, 19 nt, Artificial Sequence
  Description of Artificial Sequence: Synthetic oligonucleotide
  Sense strand starting at position 373 of SEQ ID NO: 1561325
cugaaugcuccauaaugau

SEQ ID NO: 1663120 - RNA, 19 nt, Artificial Sequence
  Description of Artificial Sequence: Synthetic oligonucleotide
  Antisense strand to SEQ ID NO: 1663119
aucauuauggagcauucag

SEQ ID NO: 1663121 - RNA, 19 nt, Artificial Sequence
  Description of Artificial Sequence: Synthetic oligonucleotide
  Sense strand starting at position 457 of SEQ ID NO: 1561325
gaguccuagagagguccaa

SEQ ID NO: 1663122 - RNA, 19 nt, Artificial Sequence
  Description of Artificial Sequence: Synthetic oligonucleotide
  Antisense strand to SEQ ID NO: 1663121
uuggaccucucuaggacuc

SEQ ID NO: 1663123 - RNA, 19 nt, Artificial Sequence
  Description of Artificial Sequence: Synthetic oligonucleotide
  Sense strand starting at position 548 of SEQ ID NO: 1561325
uccucugccucagugagaa

SEQ ID NO: 1663124 - RNA, 19 nt, Artificial Sequence
  Description of Artificial Sequence: Synthetic oligonucleotide
  Antisense strand to SEQ ID NO: 1663123
uucucacugaggcagagga

SEQ ID NO: 1663125 - RNA, 19 nt, Artificial Sequence
  Description of Artificial Sequence: Synthetic oligonucleotide
  Sense strand starting at position 634 of SEQ ID NO: 1561325
cuuauuacuugggcaacua

SEQ ID NO: 1663126 - RNA, 19 nt, Artificial Sequence
  Description of Artificial Sequence: Synthetic oligonucleotide
  Antisense strand to SEQ ID NO: 1663125
uaguugcccaaguaauaag

SEQ ID NO: 1663127 - RNA, 19 nt, Artificial Sequence
  Description of Artificial Sequence: Synthetic oligonucleotide
  Sense strand starting at position 635 of SEQ ID NO: 1561325
uuauuacuugggcaacuau

SEQ ID NO: 1663128 - RNA, 19 nt, Artificial Sequence
  Description of Artificial Sequence: Synthetic oligonucleotide
  Antisense strand to SEQ ID NO: 1663127
auaguugcccaaguaauaa

SEQ ID NO: 1663129 - RNA, 19 nt, Artificial Sequence
  Description of Artificial Sequence: Synthetic oligonucleotide
  Sense strand starting at position 644 of SEQ ID NO: 1561325
gggcaacuaugggcaaaua

SEQ ID NO: 1663130 - RNA, 19 nt, Artificial Sequence
  Description of Artificial Sequence: Synthetic oligonucleotide
  Antisense strand to SEQ ID NO: 1663129
uauuugcccauaguugccc

SEQ ID NO: 1663131 - RNA, 19 nt, Artificial Sequence
  Description of Artificial Sequence: Synthetic oligonucleotide
  Sense strand starting at position 707 of SEQ ID NO: 1561325
ggcaguaccucuccacaga

SEQ ID NO: 1663132 - RNA, 19 nt, Artificial Sequence
  Description of Artificial Sequence: Synthetic oligonucleotide
  Antisense strand to SEQ ID NO: 1663131
ucuguggagagguacugcc

SEQ ID NO: 1663133 - RNA, 19 nt, Artificial Sequence
  Description of Artificial Sequence: Synthetic oligonucleotide
  Sense strand starting at position 739 of SEQ ID NO: 1561325
guacgugaauuucuuugua

SEQ ID NO: 1663134 - RNA, 19 nt, Artificial Sequence
  Description of Artificial Sequence: Synthetic oligonucleotide
  Antisense strand to SEQ ID NO: 1663133
uacaaagaaauucacguac

SEQ ID NO: 1663135 - RNA, 19 nt, Artificial Sequence
  Description of Artificial Sequence: Synthetic oligonucleotide
  Sense strand starting at position 741 of SEQ ID NO: 1561325
acgugaauuucuuuguaua

SEQ ID NO: 1663136 - RNA, 19 nt, Artificial Sequence
  Description of Artificial Sequence: Synthetic oligonucleotide
  Antisense strand to SEQ ID NO: 1663135
uauacaaagaaauucacgu

SEQ ID NO: 1663137 - RNA, 19 nt, Artificial Sequence
  Description of Artificial Sequence: Synthetic oligonucleotide
  Sense strand starting at position 742 of SEQ ID NO: 1561325
cgugaauuucuuuguauaa

SEQ ID NO: 1663138 - RNA, 19 nt, Artificial Sequence
  Description of Artificial Sequence: Synthetic oligonucleotide
  Antisense strand to SEQ ID NO: 1663137
uuauacaaagaaauucacg

SEQ ID NO: 1663139 - RNA, 19 nt, Artificial Sequence
  Description of Artificial Sequence: Synthetic oligonucleotide
  Sense strand starting at position 755 of SEQ ID NO: 1561325
guauaaagcccuuagaauu

SEQ ID NO: 1663140 - RNA, 19 nt, Artificial Sequence
  Description of Artificial Sequence: Synthetic oligonucleotide
  Antisense strand to SEQ ID NO: 1663139
aauucuaagggcuuuauac

SEQ ID NO: 1663141 - RNA, 19 nt, Artificial Sequence
  Description of Artificial Sequence: Synthetic oligonucleotide
  Sense strand starting at position 810 of SEQ ID NO: 1561325
gcccgauuacagcauccua

SEQ ID NO: 1663142 - RNA, 19 nt, Artificial Sequence
  Description of Artificial Sequence: Synthetic oligonucleotide
  Antisense strand to SEQ ID NO: 1663141
uaggaugcuguaaucgggc

SEQ ID NO: 1663143 - RNA, 19 nt, Artificial Sequence
  Description of Artificial Sequence: Synthetic oligonucleotide
  Sense strand starting at position 826 of SEQ ID NO: 1561325
cuacaauagaugugaacgu

SEQ ID NO: 1663144 - RNA, 19 nt, Artificial Sequence
  Description of Artificial Sequence: Synthetic oligonucleotide
  Antisense strand to SEQ ID NO: 1663143
acguucacaucuauuguag

SEQ ID NO: 1663145 - RNA, 19 nt, Artificial Sequence
  Description of Artificial Sequence: Synthetic oligonucleotide
  Sense strand starting at position 830 of SEQ ID NO: 1561325
aauagaugugaacguuacu

SEQ ID NO: 1663146 - RNA, 19 nt, Artificial Sequence
  Description of Artificial Sequence: Synthetic oligonucleotide
  Antisense strand to SEQ ID NO: 1663145
aguaacguucacaucuauu

SEQ ID NO: 1663147 - RNA, 19 nt, Artificial Sequence
  Description of Artificial Sequence: Synthetic oligonucleotide
  Sense strand starting at position 833 of SEQ ID NO: 1561325
agaugugaacguuacugua

SEQ ID NO: 1663148 - RNA, 19 nt, Artificial Sequence
  Description of Artificial Sequence: Synthetic oligonucleotide
  Antisense strand to SEQ ID NO: 1663147
uacaguaacguucacaucu

SEQ ID NO: 1663149 - RNA, 19 nt, Artificial Sequence
  Description of Artificial Sequence: Synthetic oligonucleotide
  Sense strand starting at position 835 of SEQ ID NO: 1561325
augugaacguuacuguaaa

SEQ ID NO: 1663150 - RNA, 19 nt, Artificial Sequence
  Description of Artificial Sequence: Synthetic oligonucleotide
  Antisense strand to SEQ ID NO: 1663149
uuuacaguaacguucacau

SEQ ID NO: 1663151 - RNA, 19 nt, Artificial Sequence
  Description of Artificial Sequence: Synthetic oligonucleotide
  Sense strand starting at position 891 of SEQ ID NO: 1561325
gucaguagucaaggaguca

SEQ ID NO: 1663152 - RNA, 19 nt, Artificial Sequence
  Description of Artificial Sequence: Synthetic oligonucleotide
  Antisense strand to SEQ ID NO: 1663151
ugacuccuugacuacugac

SEQ ID NO: 1663153 - RNA, 19 nt, Artificial Sequence
  Description of Artificial Sequence: Synthetic oligonucleotide
  Sense strand starting at position 1400 of SEQ ID NO: 1561325
gucaaagacuguccagaau

SEQ ID NO: 1663154 - RNA, 19 nt, Artificial Sequence
  Description of Artificial Sequence: Synthetic oligonucleotide
  Antisense strand to SEQ ID NO: 1663153
auucuggacagucuuugac

SEQ ID NO: 1663155 - RNA, 19 nt, Artificial Sequence
  Description of Artificial Sequence: Synthetic oligonucleotide
  Sense strand starting at position 1494 of SEQ ID NO: 1561325
ucaggaaauuaacaagaga

SEQ ID NO: 1663156 - RNA, 19 nt, Artificial Sequence
  Description of Artificial Sequence: Synthetic oligonucleotide
  Antisense strand to SEQ ID NO: 1663155
ucucuuguuaauuuccuga

SEQ ID NO: 1663157 - RNA, 19 nt, Artificial Sequence
  Description of Artificial Sequence: Synthetic oligonucleotide
  Sense strand starting at position 1502 of SEQ ID NO: 1561325
uuaacaagagaucgccauu

SEQ ID NO: 1663158 - RNA, 19 nt, Artificial Sequence
  Description of Artificial Sequence: Synthetic oligonucleotide
  Antisense strand to SEQ ID NO: 1663157
aauggcgaucucuuguuaa

SEQ ID NO: 1663159 - RNA, 19 nt, Artificial Sequence
  Description of Artificial Sequence: Synthetic oligonucleotide
  Sense strand starting at position 1581 of SEQ ID NO: 1561325
uucuauuaggaaggucuua

SEQ ID NO: 1663160 - RNA, 19 nt, Artificial Sequence
  Description of Artificial Sequence: Synthetic oligonucleotide
  Antisense strand to SEQ ID NO: 1663159
uaagaccuuccuaauagaa

SEQ ID NO: 1663161 - RNA, 19 nt, Artificial Sequence
  Description of Artificial Sequence: Synthetic oligonucleotide
  Sense strand starting at position 2087 of SEQ ID NO: 1561325
uugggacacuucccagaau

SEQ ID NO: 1663162 - RNA, 19 nt, Artificial Sequence
  Description of Artificial Sequence: Synthetic oligonucleotide
  Antisense strand to SEQ ID NO: 1663161
auucugggaagugucccaa

SEQ ID NO: 1663163 - RNA, 19 nt, Artificial Sequence
  Description of Artificial Sequence: Synthetic oligonucleotide
  Sense strand starting at position 2100 of SEQ ID NO: 1561325
cagaaugcccaaggaguaa

SEQ ID NO: 1663164 - RNA, 19 nt, Artificial Sequence
  Description of Artificial Sequence: Synthetic oligonucleotide
  Antisense strand to SEQ ID NO: 1663163
uuacuccuugggcauucug

SEQ ID NO: 1663165 - RNA, 19 nt, Artificial Sequence
  Description of Artificial Sequence: Synthetic oligonucleotide
  Sense strand starting at position 2112 of SEQ ID NO: 1561325
ggaguaaacguucacaguu

SEQ ID NO: 1663166 - RNA, 19 nt, Artificial Sequence
  Description of Artificial Sequence: Synthetic oligonucleotide
  Antisense strand to SEQ ID NO: 1663165
aacugugaacguuuacucc

SEQ ID NO: 1663167 - RNA, 19 nt, Artificial Sequence
  Description of Artificial Sequence: Synthetic oligonucleotide
  Sense strand starting at position 2339 of SEQ ID NO: 1561325
agaaguauuacuggagagu

SEQ ID NO: 1663168 - RNA, 19 nt, Artificial Sequence
  Description of Artificial Sequence: Synthetic oligonucleotide
  Antisense strand to SEQ ID NO: 1663167
acucuccaguaauacuucu

SEQ ID NO: 1663169 - RNA, 19 nt, Artificial Sequence
  Description of Artificial Sequence: Synthetic oligonucleotide
  Sense strand starting at position 2395 of SEQ ID NO: 1561325
agaaauuacugcuugagga

SEQ ID NO: 1663170 - RNA, 19 nt, Artificial Sequence
  Description of Artificial Sequence: Synthetic oligonucleotide
  Antisense strand to SEQ ID NO: 1663169
uccucaagcaguaauuucu

SEQ ID NO: 1663171 - RNA, 19 nt, Artificial Sequence
  Description of Artificial Sequence: Synthetic oligonucleotide
  Sense strand starting at position 2396 of SEQ ID NO: 1561325
gaaauuacugcuugaggau

SEQ ID NO: 1663172 - RNA, 19 nt, Artificial Sequence
  Description of Artificial Sequence: Synthetic oligonucleotide
  Antisense strand to SEQ ID NO: 1663171
auccucaagcaguaauuuc

SEQ ID NO: 1663173 - RNA, 19 nt, Artificial Sequence
  Description of Artificial Sequence: Synthetic oligonucleotide
  Sense strand starting at position 2403 of SEQ ID NO: 1561325
cugcuugaggaucaguaga

SEQ ID NO: 1663174 - RNA, 19 nt, Artificial Sequence
  Description of Artificial Sequence: Synthetic oligonucleotide
  Antisense strand to SEQ ID NO: 1663173
ucuacugauccucaagcag

SEQ ID NO: 1663175 - RNA, 19 nt, Artificial Sequence
  Description of Artificial Sequence: Synthetic oligonucleotide
  Sense strand starting at position 2405 of SEQ ID NO: 1561325
gcuugaggaucaguagaga

SEQ ID NO: 1663176 - RNA, 19 nt, Artificial Sequence
  Description of Artificial Sequence: Synthetic oligonucleotide
  Antisense strand to SEQ ID NO: 1663175
ucucuacugauccucaagc

SEQ ID NO: 1663177 - RNA, 19 nt, Artificial Sequence
  Description of Artificial Sequence: Synthetic oligonucleotide
  Sense strand starting at position 2550 of SEQ ID NO: 1561325
aggccaugauuauuauuau

SEQ ID NO: 1663178 - RNA, 19 nt, Artificial Sequence
  Description of Artificial Sequence: Synthetic oligonucleotide
  Antisense strand to SEQ ID NO: 1663177
auaauaauaaucauggccu

SEQ ID NO: 1663179 - RNA, 19 nt, Artificial Sequence
  Description of Artificial Sequence: Synthetic oligonucleotide
  Sense strand starting at position 3187 of SEQ ID NO: 1561325
uuaguuauccguaggugug

SEQ ID NO: 1663180 - RNA, 19 nt, Artificial Sequence
  Description of Artificial Sequence: Synthetic oligonucleotide
  Antisense strand to SEQ ID NO: 1663179
cacaccuacggauaacuaa

SEQ ID NO: 1663181 - RNA, 19 nt, Artificial Sequence
  Description of Artificial Sequence: Synthetic oligonucleotide
  Sense strand starting at position 3205 of SEQ ID NO: 1561325
guggauuuguuucuguucu

SEQ ID NO: 1663182 - RNA, 19 nt, Artificial Sequence
  Description of Artificial Sequence: Synthetic oligonucleotide
  Antisense strand to SEQ ID NO: 1663181
agaacagaaacaaauccac

SEQ ID NO: 1663183 - RNA, 19 nt, Artificial Sequence
  Description of Artificial Sequence: Synthetic oligonucleotide
  Sense strand starting at position 3329 of SEQ ID NO: 1561325
ucaggauagccucaauuau

SEQ ID NO: 1663184 - RNA, 19 nt, Artificial Sequence
  Description of Artificial Sequence: Synthetic oligonucleotide
  Antisense strand to SEQ ID NO: 1663183
auaauugaggcuauccuga

SEQ ID NO: 1663185 - RNA, 19 nt, Artificial Sequence
  Description of Artificial Sequence: Synthetic oligonucleotide
  Sense strand starting at position 3747 of SEQ ID NO: 1561325
acaggagaaacgugacagu

SEQ ID NO: 1663186 - RNA, 19 nt, Artificial Sequence
  Description of Artificial Sequence: Synthetic oligonucleotide
  Antisense strand to SEQ ID NO: 1663185
acugucacguuucuccugu

SEQ ID NO: 1663187 - RNA, 19 nt, Artificial Sequence
  Description of Artificial Sequence: Synthetic oligonucleotide
  Sense strand starting at position 3847 of SEQ ID NO: 1561325
uauggaguguagguuaaau

SEQ ID NO: 1663188 - RNA, 19 nt, Artificial Sequence
  Description of Artificial Sequence: Synthetic oligonucleotide
  Antisense strand to SEQ ID NO: 1663187
auuuaaccuacacuccaua

SEQ ID NO: 1663189 - RNA, 19 nt, Artificial Sequence
  Description of Artificial Sequence: Synthetic oligonucleotide
  Sense strand starting at position 3849 of SEQ ID NO: 1561325
uggaguguagguuaaauaa

SEQ ID NO: 1663190 - RNA, 19 nt, Artificial Sequence
  Description of Artificial Sequence: Synthetic oligonucleotide
  Antisense strand to SEQ ID NO: 1663189
uuauuuaaccuacacucca

SEQ ID NO: 1663191 - RNA, 19 nt, Artificial Sequence
  Description of Artificial Sequence: Synthetic oligonucleotide
  Sense strand starting at position 91 of SEQ ID NO: 1561326
cuggaaauguagguucuca

SEQ ID NO: 1663192 - RNA, 19 nt, Artificial Sequence
  Description of Artificial Sequence: Synthetic oligonucleotide
  Antisense strand to SEQ ID NO: 1663191
ugagaaccuacauuuccag

SEQ ID NO: 1663193 - RNA, 19 nt, Artificial Sequence
  Description of Artificial Sequence: Synthetic oligonucleotide
  Sense strand starting at position 429 of SEQ ID NO: 1561326
agacauaggucagcuuaua

SEQ ID NO: 1663194 - RNA, 19 nt, Artificial Sequence
  Description of Artificial Sequence: Synthetic oligonucleotide
  Antisense strand to SEQ ID NO: 1663193
uauaagcugaccuaugucu

SEQ ID NO: 1663195 - RNA, 19 nt, Artificial Sequence
  Description of Artificial Sequence: Synthetic oligonucleotide
  Sense strand starting at position 469 of SEQ ID NO: 1561326
guguccugacaaugacuga

SEQ ID NO: 1663196 - RNA, 19 nt, Artificial Sequence
  Description of Artificial Sequence: Synthetic oligonucleotide
  Antisense strand to SEQ ID NO: 1663195
ucagucauugucaggacac

SEQ ID NO: 1663197 - RNA, 19 nt, Artificial Sequence
  Description of Artificial Sequence: Synthetic oligonucleotide
  Sense strand starting at position 476 of SEQ ID NO: 1561326
gacaaugacugauuaggca

SEQ ID NO: 1663198 - RNA, 19 nt, Artificial Sequence
  Description of Artificial Sequence: Synthetic oligonucleotide
  Antisense strand to SEQ ID NO: 1663197
ugccuaaucagucauuguc

SEQ ID NO: 1663199 - RNA, 19 nt, Artificial Sequence
  Description of Artificial Sequence: Synthetic oligonucleotide
  Sense strand starting at position 536 of SEQ ID NO: 1561326
guguguccugaauaaauag

SEQ ID NO: 1663200 - RNA, 19 nt, Artificial Sequence
  Description of Artificial Sequence: Synthetic oligonucleotide
  Antisense strand to SEQ ID NO: 1663199
cuauuuauucaggacacac

SEQ ID NO: 1663201 - RNA, 19 nt, Artificial Sequence
  Description of Artificial Sequence: Synthetic oligonucleotide
  Sense strand starting at position 561 of SEQ ID NO: 1561326
aaggacauuuacugagaug

SEQ ID NO: 1663202 - RNA, 19 nt, Artificial Sequence
  Description of Artificial Sequence: Synthetic oligonucleotide
  Antisense strand to SEQ ID NO: 1663201
caucucaguaaauguccuu

SEQ ID NO: 1663203 - RNA, 19 nt, Artificial Sequence
  Description of Artificial Sequence: Synthetic oligonucleotide
  Sense strand starting at position 572 of SEQ ID NO: 1561326
cugagaugcuaucucuaac

SEQ ID NO: 1663204 - RNA, 19 nt, Artificial Sequence
  Description of Artificial Sequence: Synthetic oligonucleotide
  Antisense strand to SEQ ID NO: 1663203
guuagagauagcaucucag

SEQ ID NO: 1663205 - RNA, 19 nt, Artificial Sequence
  Description of Artificial Sequence: Synthetic oligonucleotide
  Sense strand starting at position 617 of SEQ ID NO: 1561326
guuagagugauauagucca

SEQ ID NO: 1663206 - RNA, 19 nt, Artificial Sequence
  Description of Artificial Sequence: Synthetic oligonucleotide
  Antisense strand to SEQ ID NO: 1663205
uggacuauaucacucuaac

SEQ ID NO: 1663207 - RNA, 19 nt, Artificial Sequence
  Description of Artificial Sequence: Synthetic oligonucleotide
  Sense strand starting at position 1098 of SEQ ID NO: 1561326
cacugugaagaucauguau

SEQ ID NO: 1663208 - RNA, 19 nt, Artificial Sequence
  Description of Artificial Sequence: Synthetic oligonucleotide
  Antisense strand to SEQ ID NO: 1663207
auacaugaucuucacagug

SEQ ID NO: 1663209 - RNA, 19 nt, Artificial Sequence
  Description of Artificial Sequence: Synthetic oligonucleotide
  Sense strand starting at position 1122 of SEQ ID NO: 1561326
gguauaaaguacuuggaau

SEQ ID NO: 1663210 - RNA, 19 nt, Artificial Sequence
  Description of Artificial Sequence: Synthetic oligonucleotide
  Antisense strand to SEQ ID NO: 1663209
auuccaaguacuuuauacc

SEQ ID NO: 1663211 - RNA, 19 nt, Artificial Sequence
  Description of Artificial Sequence: Synthetic oligonucleotide
  Sense strand starting at position 1155 of SEQ ID NO: 1561326
aggcuuaaucauuaucgac

SEQ ID NO: 1663212 - RNA, 19 nt, Artificial Sequence
  Description of Artificial Sequence: Synthetic oligonucleotide
  Antisense strand to SEQ ID NO: 1663211
gucgauaaugauuaagccu

SEQ ID NO: 1663213 - RNA, 19 nt, Artificial Sequence
  Description of Artificial Sequence: Synthetic oligonucleotide
  Sense strand starting at position 1405 of SEQ ID NO: 1561326
gucagaaggcgucagggau

SEQ ID NO: 1663214 - RNA, 19 nt, Artificial Sequence
  Description of Artificial Sequence: Synthetic oligonucleotide
  Antisense strand to SEQ ID NO: 1663213
aucccugacgccuucugac

SEQ ID NO: 1663215 - RNA, 19 nt, Artificial Sequence
  Description of Artificial Sequence: Synthetic oligonucleotide
  Sense strand starting at position 1568 of SEQ ID NO: 1561326
ucauuuguguuaccucuuu

SEQ ID NO: 1663216 - RNA, 19 nt, Artificial Sequence
  Description of Artificial Sequence: Synthetic oligonucleotide
  Antisense strand to SEQ ID NO: 1663215
aaagagguaacacaaauga

SEQ ID NO: 1663217 - RNA, 19 nt, Artificial Sequence
  Description of Artificial Sequence: Synthetic oligonucleotide
  Sense strand starting at position 1604 of SEQ ID NO: 1561326
ccauuaggaugguccgaaa

SEQ ID NO: 1663218 - RNA, 19 nt, Artificial Sequence
  Description of Artificial Sequence: Synthetic oligonucleotide
  Antisense strand to SEQ ID NO: 1663217
uuucggaccauccuaaugg

SEQ ID NO: 1663219 - RNA, 19 nt, Artificial Sequence
  Description of Artificial Sequence: Synthetic oligonucleotide
  Sense strand starting at position 2099 of SEQ ID NO: 1561326
gcgacucaaacagagcauu

SEQ ID NO: 1663220 - RNA, 19 nt, Artificial Sequence
  Description of Artificial Sequence: Synthetic oligonucleotide
  Antisense strand to SEQ ID NO: 1663219
aaugcucuguuugagucgc

SEQ ID NO: 1663221 - RNA, 19 nt, Artificial Sequence
  Description of Artificial Sequence: Synthetic oligonucleotide
  Sense strand starting at position 2159 of SEQ ID NO: 1561326
uggaguuggagauagcauu

SEQ ID NO: 1663222 - RNA, 19 nt, Artificial Sequence
  Description of Artificial Sequence: Synthetic oligonucleotide
  Antisense strand to SEQ ID NO: 1663221
aaugcuaucuccaacucca

SEQ ID NO: 1663223 - RNA, 19 nt, Artificial Sequence
  Description of Artificial Sequence: Synthetic oligonucleotide
  Sense strand starting at position 2181 of SEQ ID NO: 1561326
guaaauguccuuuacccac

SEQ ID NO: 1663224 - RNA, 19 nt, Artificial Sequence
  Description of Artificial Sequence: Synthetic oligonucleotide
  Antisense strand to SEQ ID NO: 1663223
guggguaaaggacauuuac

SEQ ID NO: 1663225 - RNA, 19 nt, Artificial Sequence
  Description of Artificial Sequence: Synthetic oligonucleotide
  Sense strand starting at position 2378 of SEQ ID NO: 1561326
cuguccucuccugacaaga

SEQ ID NO: 1663226 - RNA, 19 nt, Artificial Sequence
  Description of Artificial Sequence: Synthetic oligonucleotide
  Antisense strand to SEQ ID NO: 1663225
ucuugucaggagaggacag

SEQ ID NO: 1663227 - RNA, 19 nt, Artificial Sequence
  Description of Artificial Sequence: Synthetic oligonucleotide
  Sense strand starting at position 2530 of SEQ ID NO: 1561326
aagucaaaguuguuggaga

SEQ ID NO: 1663228 - RNA, 19 nt, Artificial Sequence
  Description of Artificial Sequence: Synthetic oligonucleotide
  Antisense strand to SEQ ID NO: 1663227
ucuccaacaacuuugacuu

SEQ ID NO: 1663229 - RNA, 19 nt, Artificial Sequence
  Description of Artificial Sequence: Synthetic oligonucleotide
  Sense strand starting at position 2535 of SEQ ID NO: 1561326
aaaguuguuggagaguagu

SEQ ID NO: 1663230 - RNA, 19 nt, Artificial Sequence
  Description of Artificial Sequence: Synthetic oligonucleotide
  Antisense strand to SEQ ID NO: 1663229
acuacucuccaacaacuuu

SEQ ID NO: 1663231 - RNA, 19 nt, Artificial Sequence
  Description of Artificial Sequence: Synthetic oligonucleotide
  Sense strand starting at position 2616 of SEQ ID NO: 1561326
gagagagugucccuugaua

SEQ ID NO: 1663232 - RNA, 19 nt, Artificial Sequence
  Description of Artificial Sequence: Synthetic oligonucleotide
  Antisense strand to SEQ ID NO: 1663231
uaucaagggacacucucuc

SEQ ID NO: 1663233 - RNA, 19 nt, Artificial Sequence
  Description of Artificial Sequence: Synthetic oligonucleotide
  Sense strand starting at position 2677 of SEQ ID NO: 1561326
auguuacugugauuaagga

SEQ ID NO: 1663234 - RNA, 19 nt, Artificial Sequence
  Description of Artificial Sequence: Synthetic oligonucleotide
  Antisense strand to SEQ ID NO: 1663233
uccuuaaucacaguaacau

SEQ ID NO: 1663235 - RNA, 19 nt, Artificial Sequence
  Description of Artificial Sequence: Synthetic oligonucleotide
  Sense strand starting at position 2678 of SEQ ID NO: 1561326
uguuacugugauuaaggau

SEQ ID NO: 1663236 - RNA, 19 nt, Artificial Sequence
  Description of Artificial Sequence: Synthetic oligonucleotide
  Antisense strand to SEQ ID NO: 1663235
auccuuaaucacaguaaca

SEQ ID NO: 1663237 - RNA, 19 nt, Artificial Sequence
  Description of Artificial Sequence: Synthetic oligonucleotide
  Sense strand starting at position 3154 of SEQ ID NO: 1561326
cuugucauugguuaagaca

SEQ ID NO: 1663238 - RNA, 19 nt, Artificial Sequence
  Description of Artificial Sequence: Synthetic oligonucleotide
  Antisense strand to SEQ ID NO: 1663237
ugucuuaaccaaugacaag

SEQ ID NO: 1663239 - RNA, 19 nt, Artificial Sequence
  Description of Artificial Sequence: Synthetic oligonucleotide
  Sense strand starting at position 3165 of SEQ ID NO: 1561326
uuaagacaguuccuaagua

SEQ ID NO: 1663240 - RNA, 19 nt, Artificial Sequence
  Description of Artificial Sequence: Synthetic oligonucleotide
  Antisense strand to SEQ ID NO: 1663239
uacuuaggaacugucuuaa

SEQ ID NO: 1663241 - RNA, 19 nt, Artificial Sequence
  Description of Artificial Sequence: Synthetic oligonucleotide
  Sense strand starting at position 3295 of SEQ ID NO: 1561326
ugacuuuacuagcucuaag

SEQ ID NO: 1663242 - RNA, 19 nt, Artificial Sequence
  Description of Artificial Sequence: Synthetic oligonucleotide
  Antisense strand to SEQ ID NO: 1663241
cuuagagcuaguaaaguca

SEQ ID NO: 1663243 - RNA, 19 nt, Artificial Sequence
  Description of Artificial Sequence: Synthetic oligonucleotide
  Sense strand starting at position 3298 of SEQ ID NO: 1561326
cuuuacuagcucuaagagu

SEQ ID NO: 1663244 - RNA, 19 nt, Artificial Sequence
  Description of Artificial Sequence: Synthetic oligonucleotide
  Antisense strand to SEQ ID NO: 1663243
acucuuagagcuaguaaag

SEQ ID NO: 1663245 - RNA, 19 nt, Artificial Sequence
  Description of Artificial Sequence: Synthetic oligonucleotide
  Sense strand starting at position 3324 of SEQ ID NO: 1561326
ucuugugaauucuuuagaa

SEQ ID NO: 1663246 - RNA, 19 nt, Artificial Sequence
  Description of Artificial Sequence: Synthetic oligonucleotide
  Antisense strand to SEQ ID NO: 1663245
uucuaaagaauucacaaga

SEQ ID NO: 1663247 - RNA, 19 nt, Artificial Sequence
  Description of Artificial Sequence: Synthetic oligonucleotide
  Sense strand starting at position 3355 of SEQ ID NO: 1561326
agaacaugucauuagcaua

SEQ ID NO: 1663248 - RNA, 19 nt, Artificial Sequence
  Description of Artificial Sequence: Synthetic oligonucleotide
  Antisense strand to SEQ ID NO: 1663247
uaugcuaaugacauguucu

SEQ ID NO: 1663249 - RNA, 19 nt, Artificial Sequence
  Description of Artificial Sequence: Synthetic oligonucleotide
  Sense strand starting at position 3360 of SEQ ID NO: 1561326
augucauuagcauauagac

SEQ ID NO: 1663250 - RNA, 19 nt, Artificial Sequence
  Description of Artificial Sequence: Synthetic oligonucleotide
  Antisense strand to SEQ ID NO: 1663249
gucuauaugcuaaugacau

SEQ ID NO: 1663251 - RNA, 19 nt, Artificial Sequence
  Description of Artificial Sequence: Synthetic oligonucleotide
  Sense strand starting at position 3427 of SEQ ID NO: 1561326
cuaauuguucugcauagaa

SEQ ID NO: 1663252 - RNA, 19 nt, Artificial Sequence
  Description of Artificial Sequence: Synthetic oligonucleotide
  Antisense strand to SEQ ID NO: 1663251
uucuaugcagaacaauuag

SEQ ID NO: 1663253 - RNA, 19 nt, Artificial Sequence
  Description of Artificial Sequence: Synthetic oligonucleotide
  Sense strand starting at position 3602 of SEQ ID NO: 1561326
uccuucuaguuauuuggua

SEQ ID NO: 1663254 - RNA, 19 nt, Artificial Sequence
  Description of Artificial Sequence: Synthetic oligonucleotide
  Antisense strand to SEQ ID NO: 1663253
uaccaaauaacuagaagga

SEQ ID NO: 1663255 - RNA, 19 nt, Artificial Sequence
  Description of Artificial Sequence: Synthetic oligonucleotide
  Sense strand starting at position 3603 of SEQ ID NO: 1561326
ccuucuaguuauuugguau

SEQ ID NO: 1663256 - RNA, 19 nt, Artificial Sequence
  Description of Artificial Sequence: Synthetic oligonucleotide
  Antisense strand to SEQ ID NO: 1663255
auaccaaauaacuagaagg

SEQ ID NO: 1663257 - RNA, 19 nt, Artificial Sequence
  Description of Artificial Sequence: Synthetic oligonucleotide
  Sense strand starting at position 3711 of SEQ ID NO: 1561326
gcucauguggaguauuaca

SEQ ID NO: 1663258 - RNA, 19 nt, Artificial Sequence
  Description of Artificial Sequence: Synthetic oligonucleotide
  Antisense strand to SEQ ID NO: 1663257
uguaauacuccacaugagc

SEQ ID NO: 1663259 - RNA, 19 nt, Artificial Sequence
  Description of Artificial Sequence: Synthetic oligonucleotide
  Sense strand starting at position 3719 of SEQ ID NO: 1561326
ggaguauuacauugauauu

SEQ ID NO: 1663260 - RNA, 19 nt, Artificial Sequence
  Description of Artificial Sequence: Synthetic oligonucleotide
  Antisense strand to SEQ ID NO: 1663259
aauaucaauguaauacucc

SEQ ID NO: 1663261 - RNA, 19 nt, Artificial Sequence
  Description of Artificial Sequence: Synthetic oligonucleotide
  Sense strand starting at position 3760 of SEQ ID NO: 1561326
uucgccuuccaggaauaaa

SEQ ID NO: 1663262 - RNA, 19 nt, Artificial Sequence
  Description of Artificial Sequence: Synthetic oligonucleotide
  Antisense strand to SEQ ID NO: 1663261
uuuauuccuggaaggcgaa

SEQ ID NO: 1663263 - RNA, 19 nt, Artificial Sequence
  Description of Artificial Sequence: Synthetic oligonucleotide
  Sense strand starting at position 3817 of SEQ ID NO: 1561326
cuggaucuugcugguauuu

SEQ ID NO: 1663264 - RNA, 19 nt, Artificial Sequence
  Description of Artificial Sequence: Synthetic oligonucleotide
  Antisense strand to SEQ ID NO: 1663263
aaauaccagcaagauccag

SEQ ID NO: 1663265 - RNA, 19 nt, Artificial Sequence
  Description of Artificial Sequence: Synthetic oligonucleotide
  Sense strand starting at position 3918 of SEQ ID NO: 1561326
ggguaauacugaccugaca

SEQ ID NO: 1663266 - RNA, 19 nt, Artificial Sequence
  Description of Artificial Sequence: Synthetic oligonucleotide
  Antisense strand to SEQ ID NO: 1663265
ugucaggucaguauuaccc

SEQ ID NO: 1663267 - RNA, 19 nt, Artificial Sequence
  Description of Artificial Sequence: Synthetic oligonucleotide
  Sense strand starting at position 3940 of SEQ ID NO: 1561326
ggaucaaagaaguguucuc

SEQ ID NO: 1663268 - RNA, 19 nt, Artificial Sequence
  Description of Artificial Sequence: Synthetic oligonucleotide
  Antisense strand to SEQ ID NO: 1663267
gagaacacuucuuugaucc

SEQ ID NO: 1663269 - RNA, 19 nt, Artificial Sequence
  Description of Artificial Sequence: Synthetic oligonucleotide
  Sense strand starting at position 3951 of SEQ ID NO: 1561326
guguucucucuucuugcau

SEQ ID NO: 1663270 - RNA, 19 nt, Artificial Sequence
  Description of Artificial Sequence: Synthetic oligonucleotide
  Antisense strand to SEQ ID NO: 1663269
augcaagaagagagaacac

SEQ ID NO: 1663271 - RNA, 19 nt, Artificial Sequence
  Description of Artificial Sequence: Synthetic oligonucleotide
  Sense strand starting at position 1057 of SEQ ID NO: 1561327
acaugaugcuagguaauau

SEQ ID NO: 1663272 - RNA, 19 nt, Artificial Sequence
  Description of Artificial Sequence: Synthetic oligonucleotide
  Antisense strand to SEQ ID NO: 1663271
auauuaccuagcaucaugu

SEQ ID NO: 1663273 - RNA, 19 nt, Artificial Sequence
  Description of Artificial Sequence: Synthetic oligonucleotide
  Sense strand starting at position 1135 of SEQ ID NO: 1561327
ucugacauguaaucgguaa

SEQ ID NO: 1663274 - RNA, 19 nt, Artificial Sequence
  Description of Artificial Sequence: Synthetic oligonucleotide
  Antisense strand to SEQ ID NO: 1663273
uuaccgauuacaugucaga

SEQ ID NO: 1663275 - RNA, 19 nt, Artificial Sequence
  Description of Artificial Sequence: Synthetic oligonucleotide
  Sense strand starting at position 1136 of SEQ ID NO: 1561327
cugacauguaaucgguaac

SEQ ID NO: 1663276 - RNA, 19 nt, Artificial Sequence
  Description of Artificial Sequence: Synthetic oligonucleotide
  Antisense strand to SEQ ID NO: 1663275
guuaccgauuacaugucag

SEQ ID NO: 1663277 - RNA, 19 nt, Artificial Sequence
  Description of Artificial Sequence: Synthetic oligonucleotide
  Sense strand starting at position 1137 of SEQ ID NO: 1561327
ugacauguaaucgguaaca

SEQ ID NO: 1663278 - RNA, 19 nt, Artificial Sequence
  Description of Artificial Sequence: Synthetic oligonucleotide
  Antisense strand to SEQ ID NO: 1663277
uguuaccgauuacauguca

SEQ ID NO: 1663279 - RNA, 19 nt, Artificial Sequence
  Description of Artificial Sequence: Synthetic oligonucleotide
  Sense strand starting at position 1139 of SEQ ID NO: 1561327
acauguaaucgguaacagu

SEQ ID NO: 1663280 - RNA, 19 nt, Artificial Sequence
  Description of Artificial Sequence: Synthetic oligonucleotide
  Antisense strand to SEQ ID NO: 1663279
acuguuaccgauuacaugu

SEQ ID NO: 1663281 - RNA, 19 nt, Artificial Sequence
  Description of Artificial Sequence: Synthetic oligonucleotide
  Sense strand starting at position 1185 of SEQ ID NO: 1561327
cuaccauguuaugugaaac

SEQ ID NO: 1663282 - RNA, 19 nt, Artificial Sequence
  Description of Artificial Sequence: Synthetic oligonucleotide
  Antisense strand to SEQ ID NO: 1663281
guuucacauaacaugguag

SEQ ID NO: 1663283 - RNA, 19 nt, Artificial Sequence
  Description of Artificial Sequence: Synthetic oligonucleotide
  Sense strand starting at position 1324 of SEQ ID NO: 1561327
gugguauuugguugauggu

SEQ ID NO: 1663284 - RNA, 19 nt, Artificial Sequence
  Description of Artificial Sequence: Synthetic oligonucleotide
  Antisense strand to SEQ ID NO: 1663283
accaucaaccaaauaccac

SEQ ID NO: 1663285 - RNA, 19 nt, Artificial Sequence
  Description of Artificial Sequence: Synthetic oligonucleotide
  Sense strand starting at position 1330 of SEQ ID NO: 1561327
uuugguugauggucaucaa

SEQ ID NO: 1663286 - RNA, 19 nt, Artificial Sequence
  Description of Artificial Sequence: Synthetic oligonucleotide
  Antisense strand to SEQ ID NO: 1663285
uugaugaccaucaaccaaa

SEQ ID NO: 1663287 - RNA, 19 nt, Artificial Sequence
  Description of Artificial Sequence: Synthetic oligonucleotide
  Sense strand starting at position 1333 of SEQ ID NO: 1561327
gguugauggucaucaacaa

SEQ ID NO: 1663288 - RNA, 19 nt, Artificial Sequence
  Description of Artificial Sequence: Synthetic oligonucleotide
  Antisense strand to SEQ ID NO: 1663287
uuguugaugaccaucaacc

SEQ ID NO: 1663289 - RNA, 19 nt, Artificial Sequence
  Description of Artificial Sequence: Synthetic oligonucleotide
  Sense strand starting at position 1366 of SEQ ID NO: 1561327
auguaaacacuuggcaaau

SEQ ID NO: 1663290 - RNA, 19 nt, Artificial Sequence
  Description of Artificial Sequence: Synthetic oligonucleotide
  Antisense strand to SEQ ID NO: 1663289
auuugccaaguguuuacau

SEQ ID NO: 1663291 - RNA, 19 nt, Artificial Sequence
  Description of Artificial Sequence: Synthetic oligonucleotide
  Sense strand starting at position 1367 of SEQ ID NO: 1561327
uguaaacacuuggcaaauu

SEQ ID NO: 1663292 - RNA, 19 nt, Artificial Sequence
  Description of Artificial Sequence: Synthetic oligonucleotide
  Antisense strand to SEQ ID NO: 1663291
aauuugccaaguguuuaca

SEQ ID NO: 1663293 - RNA, 19 nt, Artificial Sequence
  Description of Artificial Sequence: Synthetic oligonucleotide
  Sense strand starting at position 1400 of SEQ ID NO: 1561327
augagaauuucuuauacug

SEQ ID NO: 1663294 - RNA, 19 nt, Artificial Sequence
  Description of Artificial Sequence: Synthetic oligonucleotide
  Antisense strand to SEQ ID NO: 1663293
caguauaagaaauucucau

SEQ ID NO: 1663295 - RNA, 19 nt, Artificial Sequence
  Description of Artificial Sequence: Synthetic oligonucleotide
  Sense strand starting at position 1430 of SEQ ID NO: 1561327
uuucuauagcuuugaaaug

SEQ ID NO: 1663296 - RNA, 19 nt, Artificial Sequence
  Description of Artificial Sequence: Synthetic oligonucleotide
  Antisense strand to SEQ ID NO: 1663295
cauuucaaagcuauagaaa

SEQ ID NO: 1663297 - RNA, 19 nt, Artificial Sequence
  Description of Artificial Sequence: Synthetic oligonucleotide
  Sense strand starting at position 2085 of SEQ ID NO: 1561327
ggacuaucguucccagaau

SEQ ID NO: 1663298 - RNA, 19 nt, Artificial Sequence
  Description of Artificial Sequence: Synthetic oligonucleotide
  Antisense strand to SEQ ID NO: 1663297
auucugggaacgauagucc

SEQ ID NO: 1663299 - RNA, 19 nt, Artificial Sequence
  Description of Artificial Sequence: Synthetic oligonucleotide
  Sense strand starting at position 2154 of SEQ ID NO: 1561327
ggacuacacuucccguaaa

SEQ ID NO: 1663300 - RNA, 19 nt, Artificial Sequence
  Description of Artificial Sequence: Synthetic oligonucleotide
  Antisense strand to SEQ ID NO: 1663299
uuuacgggaaguguagucc

SEQ ID NO: 1663301 - RNA, 19 nt, Artificial Sequence
  Description of Artificial Sequence: Synthetic oligonucleotide
  Sense strand starting at position 2173 of SEQ ID NO: 1561327
auggacuacucuucccaga

SEQ ID NO: 1663302 - RNA, 19 nt, Artificial Sequence
  Description of Artificial Sequence: Synthetic oligonucleotide
  Antisense strand to SEQ ID NO: 1663301
ucugggaagaguaguccau

SEQ ID NO: 1663303 - RNA, 19 nt, Artificial Sequence
  Description of Artificial Sequence: Synthetic oligonucleotide
  Sense strand starting at position 2175 of SEQ ID NO: 1561327
ggacuacucuucccagaau

SEQ ID NO: 1663304 - RNA, 19 nt, Artificial Sequence
  Description of Artificial Sequence: Synthetic oligonucleotide
  Antisense strand to SEQ ID NO: 1663303
auucugggaagaguagucc

SEQ ID NO: 1663305 - RNA, 19 nt, Artificial Sequence
  Description of Artificial Sequence: Synthetic oligonucleotide
  Sense strand starting at position 2184 of SEQ ID NO: 1561327
uucccagaauucuccggaa

SEQ ID NO: 1663306 - RNA, 19 nt, Artificial Sequence
  Description of Artificial Sequence: Synthetic oligonucleotide
  Antisense strand to SEQ ID NO: 1663305
uuccggagaauucugggaa

SEQ ID NO: 1663307 - RNA, 19 nt, Artificial Sequence
  Description of Artificial Sequence: Synthetic oligonucleotide
  Sense strand starting at position 2186 of SEQ ID NO: 1561327
cccagaauucuccggaaac

SEQ ID NO: 1663308 - RNA, 19 nt, Artificial Sequence
  Description of Artificial Sequence: Synthetic oligonucleotide
  Antisense strand to SEQ ID NO: 1663307
guuuccggagaauucuggg

SEQ ID NO: 1663309 - RNA, 19 nt, Artificial Sequence
  Description of Artificial Sequence: Synthetic oligonucleotide
  Sense strand starting at position 2394 of SEQ ID NO: 1561327
gcagacuguuacccugaca

SEQ ID NO: 1663310 - RNA, 19 nt, Artificial Sequence
  Description of Artificial Sequence: Synthetic oligonucleotide
  Antisense strand to SEQ ID NO: 1663309
ugucaggguaacagucugc

SEQ ID NO: 1663311 - RNA, 19 nt, Artificial Sequence
  Description of Artificial Sequence: Synthetic oligonucleotide
  Sense strand starting at position 2397 of SEQ ID NO: 1561327
gacuguuacccugacaguu

SEQ ID NO: 1663312 - RNA, 19 nt, Artificial Sequence
  Description of Artificial Sequence: Synthetic oligonucleotide
  Antisense strand to SEQ ID NO: 1663311
aacugucaggguaacaguc

SEQ ID NO: 1663313 - RNA, 19 nt, Artificial Sequence
  Description of Artificial Sequence: Synthetic oligonucleotide
  Sense strand starting at position 2422 of SEQ ID NO: 1561327
cccagaguccucgagcgaa

SEQ ID NO: 1663314 - RNA, 19 nt, Artificial Sequence
  Description of Artificial Sequence: Synthetic oligonucleotide
  Antisense strand to SEQ ID NO: 1663313
uucgcucgaggacucuggg

SEQ ID NO: 1663315 - RNA, 19 nt, Artificial Sequence
  Description of Artificial Sequence: Synthetic oligonucleotide
  Sense strand starting at position 2467 of SEQ ID NO: 1561327
gucuaaaugucucccauga

SEQ ID NO: 1663316 - RNA, 19 nt, Artificial Sequence
  Description of Artificial Sequence: Synthetic oligonucleotide
  Antisense strand to SEQ ID NO: 1663315
ucaugggagacauuuagac

SEQ ID NO: 1663317 - RNA, 19 nt, Artificial Sequence
  Description of Artificial Sequence: Synthetic oligonucleotide
  Sense strand starting at position 2480 of SEQ ID NO: 1561327
ccaugauugacaggagugu

SEQ ID NO: 1663318 - RNA, 19 nt, Artificial Sequence
  Description of Artificial Sequence: Synthetic oligonucleotide
  Antisense strand to SEQ ID NO: 1663317
acacuccugucaaucaugg

SEQ ID NO: 1663319 - RNA, 19 nt, Artificial Sequence
  Description of Artificial Sequence: Synthetic oligonucleotide
  Sense strand starting at position 2481 of SEQ ID NO: 1561327
caugauugacaggaguguu

SEQ ID NO: 1663320 - RNA, 19 nt, Artificial Sequence
  Description of Artificial Sequence: Synthetic oligonucleotide
  Antisense strand to SEQ ID NO: 1663319
aacacuccugucaaucaug

SEQ ID NO: 1663321 - RNA, 19 nt, Artificial Sequence
  Description of Artificial Sequence: Synthetic oligonucleotide
  Sense strand starting at position 2484 of SEQ ID NO: 1561327
gauugacaggaguguucuu

SEQ ID NO: 1663322 - RNA, 19 nt, Artificial Sequence
  Description of Artificial Sequence: Synthetic oligonucleotide
  Antisense strand to SEQ ID NO: 1663321
aagaacacuccugucaauc

SEQ ID NO: 1663323 - RNA, 19 nt, Artificial Sequence
  Description of Artificial Sequence: Synthetic oligonucleotide
  Sense strand starting at position 2489 of SEQ ID NO: 1561327
acaggaguguucuuggaca

SEQ ID NO: 1663324 - RNA, 19 nt, Artificial Sequence
  Description of Artificial Sequence: Synthetic oligonucleotide
  Antisense strand to SEQ ID NO: 1663323
uguccaagaacacuccugu

SEQ ID NO: 1663325 - RNA, 19 nt, Artificial Sequence
  Description of Artificial Sequence: Synthetic oligonucleotide
  Sense strand starting at position 2496 of SEQ ID NO: 1561327
uguucuuggacagggaaca

SEQ ID NO: 1663326 - RNA, 19 nt, Artificial Sequence
  Description of Artificial Sequence: Synthetic oligonucleotide
  Antisense strand to SEQ ID NO: 1663325
uguucccuguccaagaaca

SEQ ID NO: 1663327 - RNA, 19 nt, Artificial Sequence
  Description of Artificial Sequence: Synthetic oligonucleotide
  Sense strand starting at position 2540 of SEQ ID NO: 1561327
gcuagauagagugacuguu

SEQ ID NO: 1663328 - RNA, 19 nt, Artificial Sequence
  Description of Artificial Sequence: Synthetic oligonucleotide
  Antisense strand to SEQ ID NO: 1663327
aacagucacucuaucuagc

SEQ ID NO: 1663329 - RNA, 19 nt, Artificial Sequence
  Description of Artificial Sequence: Synthetic oligonucleotide
  Sense strand starting at position 2589 of SEQ ID NO: 1561327
gguuuaaagcaaggauauc

SEQ ID NO: 1663330 - RNA, 19 nt, Artificial Sequence
  Description of Artificial Sequence: Synthetic oligonucleotide
  Antisense strand to SEQ ID NO: 1663329
gauauccuugcuuuaaacc

SEQ ID NO: 1663331 - RNA, 19 nt, Artificial Sequence
  Description of Artificial Sequence: Synthetic oligonucleotide
  Sense strand starting at position 2718 of SEQ ID NO: 1561327
gugagaucagcccagcauu

SEQ ID NO: 1663332 - RNA, 19 nt, Artificial Sequence
  Description of Artificial Sequence: Synthetic oligonucleotide
  Antisense strand to SEQ ID NO: 1663331
aaugcugggcugaucucac

SEQ ID NO: 1663333 - RNA, 19 nt, Artificial Sequence
  Description of Artificial Sequence: Synthetic oligonucleotide
  Sense strand starting at position 2776 of SEQ ID NO: 1561327
gugcgaaggaucuagguca

SEQ ID NO: 1663334 - RNA, 19 nt, Artificial Sequence
  Description of Artificial Sequence: Synthetic oligonucleotide
  Antisense strand to SEQ ID NO: 1663333
ugaccuagauccuucgcac

SEQ ID NO: 1663335 - RNA, 19 nt, Artificial Sequence
  Description of Artificial Sequence: Synthetic oligonucleotide
  Sense strand starting at position 2792 of SEQ ID NO: 1561327
ucaggcgcuccuuaugaga

SEQ ID NO: 1663336 - RNA, 19 nt, Artificial Sequence
  Description of Artificial Sequence: Synthetic oligonucleotide
  Antisense strand to SEQ ID NO: 1663335
ucucauaaggagcgccuga

SEQ ID NO: 1663337 - RNA, 19 nt, Artificial Sequence
  Description of Artificial Sequence: Synthetic oligonucleotide
  Sense strand starting at position 2918 of SEQ ID NO: 1561327
ugguuuaaagaaugagcca

SEQ ID NO: 1663338 - RNA, 19 nt, Artificial Sequence
  Description of Artificial Sequence: Synthetic oligonucleotide
  Antisense strand to SEQ ID NO: 1663337
uggcucauucuuuaaacca

SEQ ID NO: 1663339 - RNA, 19 nt, Artificial Sequence
  Description of Artificial Sequence: Synthetic oligonucleotide
  Sense strand starting at position 3006 of SEQ ID NO: 1561327
aguggcuucccguuugcaa

SEQ ID NO: 1663340 - RNA, 19 nt, Artificial Sequence
  Description of Artificial Sequence: Synthetic oligonucleotide
  Antisense strand to SEQ ID NO: 1663339
uugcaaacgggaagccacu

SEQ ID NO: 1663341 - RNA, 19 nt, Artificial Sequence
  Description of Artificial Sequence: Synthetic oligonucleotide
  Sense strand starting at position 3361 of SEQ ID NO: 1561327
guuaauucuggaggagagu

SEQ ID NO: 1663342 - RNA, 19 nt, Artificial Sequence
  Description of Artificial Sequence: Synthetic oligonucleotide
  Antisense strand to SEQ ID NO: 1663341
acucuccuccagaauuaac

SEQ ID NO: 1663343 - RNA, 19 nt, Artificial Sequence
  Description of Artificial Sequence: Synthetic oligonucleotide
  Sense strand starting at position 3403 of SEQ ID NO: 1561327
augaacuuucccuguagga

SEQ ID NO: 1663344 - RNA, 19 nt, Artificial Sequence
  Description of Artificial Sequence: Synthetic oligonucleotide
  Antisense strand to SEQ ID NO: 1663343
uccuacagggaaaguucau

SEQ ID NO: 1663345 - RNA, 19 nt, Artificial Sequence
  Description of Artificial Sequence: Synthetic oligonucleotide
  Sense strand starting at position 3416 of SEQ ID NO: 1561327
guaggaagugucuggugaa

SEQ ID NO: 1663346 - RNA, 19 nt, Artificial Sequence
  Description of Artificial Sequence: Synthetic oligonucleotide
  Antisense strand to SEQ ID NO: 1663345
uucaccagacacuuccuac

SEQ ID NO: 1663347 - RNA, 19 nt, Artificial Sequence
  Description of Artificial Sequence: Synthetic oligonucleotide
  Sense strand starting at position 3820 of SEQ ID NO: 1561327
agauucuauaggugacgga

SEQ ID NO: 1663348 - RNA, 19 nt, Artificial Sequence
  Description of Artificial Sequence: Synthetic oligonucleotide
  Antisense strand to SEQ ID NO: 1663347
uccgucaccuauagaaucu

SEQ ID NO: 1663349 - RNA, 19 nt, Artificial Sequence
  Description of Artificial Sequence: Synthetic oligonucleotide
  Sense strand starting at position 3919 of SEQ ID NO: 1561327
gcauauguuaguugaaaga

SEQ ID NO: 1663350 - RNA, 19 nt, Artificial Sequence
  Description of Artificial Sequence: Synthetic oligonucleotide
  Antisense strand to SEQ ID NO: 1663349
ucuuucaacuaacauaugc

SEQ ID NO: 1663351 - RNA, 19 nt, Artificial Sequence
  Description of Artificial Sequence: Synthetic oligonucleotide
  Sense strand starting at position 53 of SEQ ID NO: 1561328
auaagaauuucuuaggcua

SEQ ID NO: 1663352 - RNA, 19 nt, Artificial Sequence
  Description of Artificial Sequence: Synthetic oligonucleotide
  Antisense strand to SEQ ID NO: 1663351
uagccuaagaaauucuuau

SEQ ID NO: 1663353 - RNA, 19 nt, Artificial Sequence
  Description of Artificial Sequence: Synthetic oligonucleotide
  Sense strand starting at position 217 of SEQ ID NO: 1561328
uuuggaaauuuccauaguu

SEQ ID NO: 1663354 - RNA, 19 nt, Artificial Sequence
  Description of Artificial Sequence: Synthetic oligonucleotide
  Antisense strand to SEQ ID NO: 1663353
aacuauggaaauuuccaaa

SEQ ID NO: 1663355 - RNA, 19 nt, Artificial Sequence
  Description of Artificial Sequence: Synthetic oligonucleotide
  Sense strand starting at position 326 of SEQ ID NO: 1561328
acauuacgagcuuaacagu

SEQ ID NO: 1663356 - RNA, 19 nt, Artificial Sequence
  Description of Artificial Sequence: Synthetic oligonucleotide
  Antisense strand to SEQ ID NO: 1663355
acuguuaagcucguaaugu

SEQ ID NO: 1663357 - RNA, 19 nt, Artificial Sequence
  Description of Artificial Sequence: Synthetic oligonucleotide
  Sense strand starting at position 356 of SEQ ID NO: 1561328
cuucauggauucguaggua

SEQ ID NO: 1663358 - RNA, 19 nt, Artificial Sequence
  Description of Artificial Sequence: Synthetic oligonucleotide
  Antisense strand to SEQ ID NO: 1663357
uaccuacgaauccaugaag

SEQ ID NO: 1663359 - RNA, 19 nt, Artificial Sequence
  Description of Artificial Sequence: Synthetic oligonucleotide
  Sense strand starting at position 359 of SEQ ID NO: 1561328
cauggauucguagguaaua

SEQ ID NO: 1663360 - RNA, 19 nt, Artificial Sequence
  Description of Artificial Sequence: Synthetic oligonucleotide
  Antisense strand to SEQ ID NO: 1663359
uauuaccuacgaauccaug

SEQ ID NO: 1663361 - RNA, 19 nt, Artificial Sequence
  Description of Artificial Sequence: Synthetic oligonucleotide
  Sense strand starting at position 360 of SEQ ID NO: 1561328
auggauucguagguaauaa

SEQ ID NO: 1663362 - RNA, 19 nt, Artificial Sequence
  Description of Artificial Sequence: Synthetic oligonucleotide
  Antisense strand to SEQ ID NO: 1663361
uuauuaccuacgaauccau

SEQ ID NO: 1663363 - RNA, 19 nt, Artificial Sequence
  Description of Artificial Sequence: Synthetic oligonucleotide
  Sense strand starting at position 361 of SEQ ID NO: 1561328
uggauucguagguaauaaa

SEQ ID NO: 1663364 - RNA, 19 nt, Artificial Sequence
  Description of Artificial Sequence: Synthetic oligonucleotide
  Antisense strand to SEQ ID NO: 1663363
uuuauuaccuacgaaucca

SEQ ID NO: 1663365 - RNA, 19 nt, Artificial Sequence
  Description of Artificial Sequence: Synthetic oligonucleotide
  Sense strand starting at position 725 of SEQ ID NO: 1561328
guacaaugacaugguucua

SEQ ID NO: 1663366 - RNA, 19 nt, Artificial Sequence
  Description of Artificial Sequence: Synthetic oligonucleotide
  Antisense strand to SEQ ID NO: 1663365
uagaaccaugucauuguac

SEQ ID NO: 1663367 - RNA, 19 nt, Artificial Sequence
  Description of Artificial Sequence: Synthetic oligonucleotide
  Sense strand starting at position 856 of SEQ ID NO: 1561328
uccucugccucagugacaa

SEQ ID NO: 1663368 - RNA, 19 nt, Artificial Sequence
  Description of Artificial Sequence: Synthetic oligonucleotide
  Antisense strand to SEQ ID NO: 1663367
uugucacugaggcagagga

SEQ ID NO: 1663369 - RNA, 19 nt, Artificial Sequence
  Description of Artificial Sequence: Synthetic oligonucleotide
  Sense strand starting at position 868 of SEQ ID NO: 1561328
gugacaacguaucccaaga

SEQ ID NO: 1663370 - RNA, 19 nt, Artificial Sequence
  Description of Artificial Sequence: Synthetic oligonucleotide
  Antisense strand to SEQ ID NO: 1663369
ucuugggauacguugucac

SEQ ID NO: 1663371 - RNA, 19 nt, Artificial Sequence
  Description of Artificial Sequence: Synthetic oligonucleotide
  Sense strand starting at position 906 of SEQ ID NO: 1561328
gacccagacugcuuagguu

SEQ ID NO: 1663372 - RNA, 19 nt, Artificial Sequence
  Description of Artificial Sequence: Synthetic oligonucleotide
  Antisense strand to SEQ ID NO: 1663371
aaccuaagcagucuggguc

SEQ ID NO: 1663373 - RNA, 19 nt, Artificial Sequence
  Description of Artificial Sequence: Synthetic oligonucleotide
  Sense strand starting at position 1022 of SEQ ID NO: 1561328
cacgguguggcguaaauuu

SEQ ID NO: 1663374 - RNA, 19 nt, Artificial Sequence
  Description of Artificial Sequence: Synthetic oligonucleotide
  Antisense strand to SEQ ID NO: 1663373
aaauuuacgccacaccgug

SEQ ID NO: 1663375 - RNA, 19 nt, Artificial Sequence
  Description of Artificial Sequence: Synthetic oligonucleotide
  Sense strand starting at position 1045 of SEQ ID NO: 1561328
guauaaagcccuuagaaug

SEQ ID NO: 1663376 - RNA, 19 nt, Artificial Sequence
  Description of Artificial Sequence: Synthetic oligonucleotide
  Antisense strand to SEQ ID NO: 1663375
cauucuaagggcuuuauac

SEQ ID NO: 1663377 - RNA, 19 nt, Artificial Sequence
  Description of Artificial Sequence: Synthetic oligonucleotide
  Sense strand starting at position 1210 of SEQ ID NO: 1561328
gcagcucuucuggaaaggu

SEQ ID NO: 1663378 - RNA, 19 nt, Artificial Sequence
  Description of Artificial Sequence: Synthetic oligonucleotide
  Antisense strand to SEQ ID NO: 1663377
accuuuccagaagagcugc

SEQ ID NO: 1663379 - RNA, 19 nt, Artificial Sequence
  Description of Artificial Sequence: Synthetic oligonucleotide
  Sense strand starting at position 1238 of SEQ ID NO: 1561328
gaacgagaaagcugugaaa

SEQ ID NO: 1663380 - RNA, 19 nt, Artificial Sequence
  Description of Artificial Sequence: Synthetic oligonucleotide
  Antisense strand to SEQ ID NO: 1663379
uuucacagcuuucucguuc

SEQ ID NO: 1663381 - RNA, 19 nt, Artificial Sequence
  Description of Artificial Sequence: Synthetic oligonucleotide
  Sense strand starting at position 1240 of SEQ ID NO: 1561328
acgagaaagcugugaaaca

SEQ ID NO: 1663382 - RNA, 19 nt, Artificial Sequence
  Description of Artificial Sequence: Synthetic oligonucleotide
  Antisense strand to SEQ ID NO: 1663381
uguuucacagcuuucucgu

SEQ ID NO: 1663383 - RNA, 19 nt, Artificial Sequence
  Description of Artificial Sequence: Synthetic oligonucleotide
  Sense strand starting at position 1350 of SEQ ID NO: 1561328
gaaggcuuccgggaucauc

SEQ ID NO: 1663384 - RNA, 19 nt, Artificial Sequence
  Description of Artificial Sequence: Synthetic oligonucleotide
  Antisense strand to SEQ ID NO: 1663383
gaugaucccggaagccuuc

SEQ ID NO: 1663385 - RNA, 19 nt, Artificial Sequence
  Description of Artificial Sequence: Synthetic oligonucleotide
  Sense strand starting at position 1837 of SEQ ID NO: 1561328
aucaccaguucuuugagga

SEQ ID NO: 1663386 - RNA, 19 nt, Artificial Sequence
  Description of Artificial Sequence: Synthetic oligonucleotide
  Antisense strand to SEQ ID NO: 1663385
uccucaaagaacuggugau

SEQ ID NO: 1663387 - RNA, 19 nt, Artificial Sequence
  Description of Artificial Sequence: Synthetic oligonucleotide
  Sense strand starting at position 2127 of SEQ ID NO: 1561328
acuguacuccugcagcauu

SEQ ID NO: 1663388 - RNA, 19 nt, Artificial Sequence
  Description of Artificial Sequence: Synthetic oligonucleotide
  Antisense strand to SEQ ID NO: 1663387
aaugcugcaggaguacagu

SEQ ID NO: 1663389 - RNA, 19 nt, Artificial Sequence
  Description of Artificial Sequence: Synthetic oligonucleotide
  Sense strand starting at position 2156 of SEQ ID NO: 1561328
ggaaguguugacgacuacu

SEQ ID NO: 1663390 - RNA, 19 nt, Artificial Sequence
  Description of Artificial Sequence: Synthetic oligonucleotide
  Antisense strand to SEQ ID NO: 1663389
aguagucgucaacacuucc

SEQ ID NO: 1663391 - RNA, 19 nt, Artificial Sequence
  Description of Artificial Sequence: Synthetic oligonucleotide
  Sense strand starting at position 2241 of SEQ ID NO: 1561328
guggacuucuacccugaga

SEQ ID NO: 1663392 - RNA, 19 nt, Artificial Sequence
  Description of Artificial Sequence: Synthetic oligonucleotide
  Antisense strand to SEQ ID NO: 1663391
ucucaggguagaaguccac

SEQ ID NO: 1663393 - RNA, 19 nt, Artificial Sequence
  Description of Artificial Sequence: Synthetic oligonucleotide
  Sense strand starting at position 2243 of SEQ ID NO: 1561328
ggacuucuacccugagagu

SEQ ID NO: 1663394 - RNA, 19 nt, Artificial Sequence
  Description of Artificial Sequence: Synthetic oligonucleotide
  Antisense strand to SEQ ID NO: 1663393
acucucaggguagaagucc

SEQ ID NO: 1663395 - RNA, 19 nt, Artificial Sequence
  Description of Artificial Sequence: Synthetic oligonucleotide
  Sense strand starting at position 2244 of SEQ ID NO: 1561328
gacuucuacccugagaguc

SEQ ID NO: 1663396 - RNA, 19 nt, Artificial Sequence
  Description of Artificial Sequence: Synthetic oligonucleotide
  Antisense strand to SEQ ID NO: 1663395
gacucucaggguagaaguc

SEQ ID NO: 1663397 - RNA, 19 nt, Artificial Sequence
  Description of Artificial Sequence: Synthetic oligonucleotide
  Sense strand starting at position 2342 of SEQ ID NO: 1561328
acaggaguguuacuggaaa

SEQ ID NO: 1663398 - RNA, 19 nt, Artificial Sequence
  Description of Artificial Sequence: Synthetic oligonucleotide
  Antisense strand to SEQ ID NO: 1663397
uuuccaguaacacuccugu

SEQ ID NO: 1663399 - RNA, 19 nt, Artificial Sequence
  Description of Artificial Sequence: Synthetic oligonucleotide
  Sense strand starting at position 2407 of SEQ ID NO: 1561328
uaagaaauggcauguaguu

SEQ ID NO: 1663400 - RNA, 19 nt, Artificial Sequence
  Description of Artificial Sequence: Synthetic oligonucleotide
  Antisense strand to SEQ ID NO: 1663399
aacuacaugccauuucuua

SEQ ID NO: 1663401 - RNA, 19 nt, Artificial Sequence
  Description of Artificial Sequence: Synthetic oligonucleotide
  Sense strand starting at position 2438 of SEQ ID NO: 1561328
ucuuguaaagauggcauau

SEQ ID NO: 1663402 - RNA, 19 nt, Artificial Sequence
  Description of Artificial Sequence: Synthetic oligonucleotide
  Antisense strand to SEQ ID NO: 1663401
auaugccaucuuuacaaga

SEQ ID NO: 1663403 - RNA, 19 nt, Artificial Sequence
  Description of Artificial Sequence: Synthetic oligonucleotide
  Sense strand starting at position 2447 of SEQ ID NO: 1561328
gauggcauauucuugcaua

SEQ ID NO: 1663404 - RNA, 19 nt, Artificial Sequence
  Description of Artificial Sequence: Synthetic oligonucleotide
  Antisense strand to SEQ ID NO: 1663403
uaugcaagaauaugccauc

SEQ ID NO: 1663405 - RNA, 19 nt, Artificial Sequence
  Description of Artificial Sequence: Synthetic oligonucleotide
  Sense strand starting at position 2471 of SEQ ID NO: 1561328
aggugucauuauuacauuu

SEQ ID NO: 1663406 - RNA, 19 nt, Artificial Sequence
  Description of Artificial Sequence: Synthetic oligonucleotide
  Antisense strand to SEQ ID NO: 1663405
aaauguaauaaugacaccu

SEQ ID NO: 1663407 - RNA, 19 nt, Artificial Sequence
  Description of Artificial Sequence: Synthetic oligonucleotide
  Sense strand starting at position 2493 of SEQ ID NO: 1561328
guaaauuguccagauguuu

SEQ ID NO: 1663408 - RNA, 19 nt, Artificial Sequence
  Description of Artificial Sequence: Synthetic oligonucleotide
  Antisense strand to SEQ ID NO: 1663407
aaacaucuggacaauuuac

SEQ ID NO: 1663409 - RNA, 19 nt, Artificial Sequence
  Description of Artificial Sequence: Synthetic oligonucleotide
  Sense strand starting at position 2514 of SEQ ID NO: 1561328
cccacuuucuuauugaguu

SEQ ID NO: 1663410 - RNA, 19 nt, Artificial Sequence
  Description of Artificial Sequence: Synthetic oligonucleotide
  Antisense strand to SEQ ID NO: 1663409
aacucaauaagaaaguggg

SEQ ID NO: 1663411 - RNA, 19 nt, Artificial Sequence
  Description of Artificial Sequence: Synthetic oligonucleotide
  Sense strand starting at position 2678 of SEQ ID NO: 1561328
ucucuauugagguguaaug

SEQ ID NO: 1663412 - RNA, 19 nt, Artificial Sequence
  Description of Artificial Sequence: Synthetic oligonucleotide
  Antisense strand to SEQ ID NO: 1663411
cauuacaccucaauagaga

SEQ ID NO: 1663413 - RNA, 19 nt, Artificial Sequence
  Description of Artificial Sequence: Synthetic oligonucleotide
  Sense strand starting at position 2680 of SEQ ID NO: 1561328
ucuauugagguguaaugca

SEQ ID NO: 1663414 - RNA, 19 nt, Artificial Sequence
  Description of Artificial Sequence: Synthetic oligonucleotide
  Antisense strand to SEQ ID NO: 1663413
ugcauuacaccucaauaga

SEQ ID NO: 1663415 - RNA, 19 nt, Artificial Sequence
  Description of Artificial Sequence: Synthetic oligonucleotide
  Sense strand starting at position 2787 of SEQ ID NO: 1561328
cuaagcagucacugucuaa

SEQ ID NO: 1663416 - RNA, 19 nt, Artificial Sequence
  Description of Artificial Sequence: Synthetic oligonucleotide
  Antisense strand to SEQ ID NO: 1663415
uuagacagugacugcuuag

SEQ ID NO: 1663417 - RNA, 19 nt, Artificial Sequence
  Description of Artificial Sequence: Synthetic oligonucleotide
  Sense strand starting at position 2791 of SEQ ID NO: 1561328
gcagucacugucuaacacu

SEQ ID NO: 1663418 - RNA, 19 nt, Artificial Sequence
  Description of Artificial Sequence: Synthetic oligonucleotide
  Antisense strand to SEQ ID NO: 1663417
aguguuagacagugacugc

SEQ ID NO: 1663419 - RNA, 19 nt, Artificial Sequence
  Description of Artificial Sequence: Synthetic oligonucleotide
  Sense strand starting at position 3654 of SEQ ID NO: 1561328
ucaauaguguugcuacaaa

SEQ ID NO: 1663420 - RNA, 19 nt, Artificial Sequence
  Description of Artificial Sequence: Synthetic oligonucleotide
  Antisense strand to SEQ ID NO: 1663419
uuuguagcaacacuauuga

SEQ ID NO: 1663421 - RNA, 19 nt, Artificial Sequence
  Description of Artificial Sequence: Synthetic oligonucleotide
  Sense strand starting at position 3671 of SEQ ID NO: 1561328
aacagugguguacaaguau

SEQ ID NO: 1663422 - RNA, 19 nt, Artificial Sequence
  Description of Artificial Sequence: Synthetic oligonucleotide
  Antisense strand to SEQ ID NO: 1663421
auacuuguacaccacuguu

SEQ ID NO: 1663423 - RNA, 19 nt, Artificial Sequence
  Description of Artificial Sequence: Synthetic oligonucleotide
  Sense strand starting at position 3755 of SEQ ID NO: 1561328
ugguaauucuauguuggga

SEQ ID NO: 1663424 - RNA, 19 nt, Artificial Sequence
  Description of Artificial Sequence: Synthetic oligonucleotide
  Antisense strand to SEQ ID NO: 1663423
ucccaacauagaauuacca

SEQ ID NO: 1663425 - RNA, 19 nt, Artificial Sequence
  Description of Artificial Sequence: Synthetic oligonucleotide
  Sense strand starting at position 3826 of SEQ ID NO: 1561328
agugugugaggguaguaau

SEQ ID NO: 1663426 - RNA, 19 nt, Artificial Sequence
  Description of Artificial Sequence: Synthetic oligonucleotide
  Antisense strand to SEQ ID NO: 1663425
auuacuacccucacacacu

SEQ ID NO: 1663427 - RNA, 19 nt, Artificial Sequence
  Description of Artificial Sequence: Synthetic oligonucleotide
  Sense strand starting at position 3827 of SEQ ID NO: 1561328
gugugugaggguaguaauu

SEQ ID NO: 1663428 - RNA, 19 nt, Artificial Sequence
  Description of Artificial Sequence: Synthetic oligonucleotide
  Antisense strand to SEQ ID NO: 1663427
aauuacuacccucacacac

SEQ ID NO: 1663429 - RNA, 19 nt, Artificial Sequence
  Description of Artificial Sequence: Synthetic oligonucleotide
  Sense strand starting at position 3946 of SEQ ID NO: 1561328
ugcguugugcaggcagaau

SEQ ID NO: 1663430 - RNA, 19 nt, Artificial Sequence
  Description of Artificial Sequence: Synthetic oligonucleotide
  Antisense strand to SEQ ID NO: 1663429
auucugccugcacaacgca

SEQ ID NO: 1663431 - RNA, 19 nt, Artificial Sequence
  Description of Artificial Sequence: Synthetic oligonucleotide
  Sense strand starting at position 96 of SEQ ID NO: 1561329
cugaauuauggugauguuu

SEQ ID NO: 1663432 - RNA, 19 nt, Artificial Sequence
  Description of Artificial Sequence: Synthetic oligonucleotide
  Antisense strand to SEQ ID NO: 1663431
aaacaucaccauaauucag

SEQ ID NO: 1663433 - RNA, 19 nt, Artificial Sequence
  Description of Artificial Sequence: Synthetic oligonucleotide
  Sense strand starting at position 102 of SEQ ID NO: 1561329
uauggugauguuuauucca

SEQ ID NO: 1663434 - RNA, 19 nt, Artificial Sequence
  Description of Artificial Sequence: Synthetic oligonucleotide
  Antisense strand to SEQ ID NO: 1663433
uggaauaaacaucaccaua

SEQ ID NO: 1663435 - RNA, 19 nt, Artificial Sequence
  Description of Artificial Sequence: Synthetic oligonucleotide
  Sense strand starting at position 104 of SEQ ID NO: 1561329
uggugauguuuauuccacu

SEQ ID NO: 1663436 - RNA, 19 nt, Artificial Sequence
  Description of Artificial Sequence: Synthetic oligonucleotide
  Antisense strand to SEQ ID NO: 1663435
aguggaauaaacaucacca

SEQ ID NO: 1663437 - RNA, 19 nt, Artificial Sequence
  Description of Artificial Sequence: Synthetic oligonucleotide
  Sense strand starting at position 158 of SEQ ID NO: 1561329
cgaaauggguaguuucuau

SEQ ID NO: 1663438 - RNA, 19 nt, Artificial Sequence
  Description of Artificial Sequence: Synthetic oligonucleotide
  Antisense strand to SEQ ID NO: 1663437
auagaaacuacccauuucg

SEQ ID NO: 1663439 - RNA, 19 nt, Artificial Sequence
  Description of Artificial Sequence: Synthetic oligonucleotide
  Sense strand starting at position 204 of SEQ ID NO: 1561329
uggacaaagcauugguaau

SEQ ID NO: 1663440 - RNA, 19 nt, Artificial Sequence
  Description of Artificial Sequence: Synthetic oligonucleotide
  Antisense strand to SEQ ID NO: 1663439
auuaccaaugcuuugucca

SEQ ID NO: 1663441 - RNA, 19 nt, Artificial Sequence
  Description of Artificial Sequence: Synthetic oligonucleotide
  Sense strand starting at position 205 of SEQ ID NO: 1561329
ggacaaagcauugguaauu

SEQ ID NO: 1663442 - RNA, 19 nt, Artificial Sequence
  Description of Artificial Sequence: Synthetic oligonucleotide
  Antisense strand to SEQ ID NO: 1663441
aauuaccaaugcuuugucc

SEQ ID NO: 1663443 - RNA, 19 nt, Artificial Sequence
  Description of Artificial Sequence: Synthetic oligonucleotide
  Sense strand starting at position 930 of SEQ ID NO: 1561329
uuugaaguuaaacgugaaa

SEQ ID NO: 1663444 - RNA, 19 nt, Artificial Sequence
  Description of Artificial Sequence: Synthetic oligonucleotide
  Antisense strand to SEQ ID NO: 1663443
uuucacguuuaacuucaaa

SEQ ID NO: 1663445 - RNA, 19 nt, Artificial Sequence
  Description of Artificial Sequence: Synthetic oligonucleotide
  Sense strand starting at position 932 of SEQ ID NO: 1561329
ugaaguuaaacgugaaaua

SEQ ID NO: 1663446 - RNA, 19 nt, Artificial Sequence
  Description of Artificial Sequence: Synthetic oligonucleotide
  Antisense strand to SEQ ID NO: 1663445
uauuucacguuuaacuuca

SEQ ID NO: 1663447 - RNA, 19 nt, Artificial Sequence
  Description of Artificial Sequence: Synthetic oligonucleotide
  Sense strand starting at position 1140 of SEQ ID NO: 1561329
gggugagcaucucugucaa

SEQ ID NO: 1663448 - RNA, 19 nt, Artificial Sequence
  Description of Artificial Sequence: Synthetic oligonucleotide
  Antisense strand to SEQ ID NO: 1663447
uugacagagaugcucaccc

SEQ ID NO: 1663449 - RNA, 19 nt, Artificial Sequence
  Description of Artificial Sequence: Synthetic oligonucleotide
  Sense strand starting at position 1142 of SEQ ID NO: 1561329
gugagcaucucugucaaag

SEQ ID NO: 1663450 - RNA, 19 nt, Artificial Sequence
  Description of Artificial Sequence: Synthetic oligonucleotide
  Antisense strand to SEQ ID NO: 1663449
cuuugacagagaugcucac

SEQ ID NO: 1663451 - RNA, 19 nt, Artificial Sequence
  Description of Artificial Sequence: Synthetic oligonucleotide
  Sense strand starting at position 1524 of SEQ ID NO: 1561329
uuguguuaccgcuuucagu

SEQ ID NO: 1663452 - RNA, 19 nt, Artificial Sequence
  Description of Artificial Sequence: Synthetic oligonucleotide
  Antisense strand to SEQ ID NO: 1663451
acugaaagcgguaacacaa

SEQ ID NO: 1663453 - RNA, 19 nt, Artificial Sequence
  Description of Artificial Sequence: Synthetic oligonucleotide
  Sense strand starting at position 1525 of SEQ ID NO: 1561329
uguguuaccgcuuucaguu

SEQ ID NO: 1663454 - RNA, 19 nt, Artificial Sequence
  Description of Artificial Sequence: Synthetic oligonucleotide
  Antisense strand to SEQ ID NO: 1663453
aacugaaagcgguaacaca

SEQ ID NO: 1663455 - RNA, 19 nt, Artificial Sequence
  Description of Artificial Sequence: Synthetic oligonucleotide
  Sense strand starting at position 1526 of SEQ ID NO: 1561329
guguuaccgcuuucaguuc

SEQ ID NO: 1663456 - RNA, 19 nt, Artificial Sequence
  Description of Artificial Sequence: Synthetic oligonucleotide
  Antisense strand to SEQ ID NO: 1663455
gaacugaaagcgguaacac

SEQ ID NO: 1663457 - RNA, 19 nt, Artificial Sequence
  Description of Artificial Sequence: Synthetic oligonucleotide
  Sense strand starting at position 1556 of SEQ ID NO: 1561329
cuauuaggaugguccuaaa

SEQ ID NO: 1663458 - RNA, 19 nt, Artificial Sequence
  Description of Artificial Sequence: Synthetic oligonucleotide
  Antisense strand to SEQ ID NO: 1663457
uuuaggaccauccuaauag

SEQ ID NO: 1663459 - RNA, 19 nt, Artificial Sequence
  Description of Artificial Sequence: Synthetic oligonucleotide
  Sense strand starting at position 2073 of SEQ ID NO: 1561329
cccagaauucccugggauc

SEQ ID NO: 1663460 - RNA, 19 nt, Artificial Sequence
  Description of Artificial Sequence: Synthetic oligonucleotide
  Antisense strand to SEQ ID NO: 1663459
gaucccagggaauucuggg

SEQ ID NO: 1663461 - RNA, 19 nt, Artificial Sequence
  Description of Artificial Sequence: Synthetic oligonucleotide
  Sense strand starting at position 2102 of SEQ ID NO: 1561329
agucaaauugaccgagacu

SEQ ID NO: 1663462 - RNA, 19 nt, Artificial Sequence
  Description of Artificial Sequence: Synthetic oligonucleotide
  Antisense strand to SEQ ID NO: 1663461
agucucggucaauuugacu

SEQ ID NO: 1663463 - RNA, 19 nt, Artificial Sequence
  Description of Artificial Sequence: Synthetic oligonucleotide
  Sense strand starting at position 2103 of SEQ ID NO: 1561329
gucaaauugaccgagacuc

SEQ ID NO: 1663464 - RNA, 19 nt, Artificial Sequence
  Description of Artificial Sequence: Synthetic oligonucleotide
  Antisense strand to SEQ ID NO: 1663463
gagucucggucaauuugac

SEQ ID NO: 1663465 - RNA, 19 nt, Artificial Sequence
  Description of Artificial Sequence: Synthetic oligonucleotide
  Sense strand starting at position 2226 of SEQ ID NO: 1561329
cuuguauccuccuucugga

SEQ ID NO: 1663466 - RNA, 19 nt, Artificial Sequence
  Description of Artificial Sequence: Synthetic oligonucleotide
  Antisense strand to SEQ ID NO: 1663465
uccagaaggaggauacaag

SEQ ID NO: 1663467 - RNA, 19 nt, Artificial Sequence
  Description of Artificial Sequence: Synthetic oligonucleotide
  Sense strand starting at position 2274 of SEQ ID NO: 1561329
ggauuacacuccuccgaau

SEQ ID NO: 1663468 - RNA, 19 nt, Artificial Sequence
  Description of Artificial Sequence: Synthetic oligonucleotide
  Antisense strand to SEQ ID NO: 1663467
auucggaggaguguaaucc

SEQ ID NO: 1663469 - RNA, 19 nt, Artificial Sequence
  Description of Artificial Sequence: Synthetic oligonucleotide
  Sense strand starting at position 2396 of SEQ ID NO: 1561329
gggaaugugaacuguuauc

SEQ ID NO: 1663470 - RNA, 19 nt, Artificial Sequence
  Description of Artificial Sequence: Synthetic oligonucleotide
  Antisense strand to SEQ ID NO: 1663469
gauaacaguucacauuccc

SEQ ID NO: 1663471 - RNA, 19 nt, Artificial Sequence
  Description of Artificial Sequence: Synthetic oligonucleotide
  Sense strand starting at position 2402 of SEQ ID NO: 1561329
gugaacuguuauccugaga

SEQ ID NO: 1663472 - RNA, 19 nt, Artificial Sequence
  Description of Artificial Sequence: Synthetic oligonucleotide
  Antisense strand to SEQ ID NO: 1663471
ucucaggauaacaguucac

SEQ ID NO: 1663473 - RNA, 19 nt, Artificial Sequence
  Description of Artificial Sequence: Synthetic oligonucleotide
  Sense strand starting at position 2405 of SEQ ID NO: 1561329
aacuguuauccugagaguc

SEQ ID NO: 1663474 - RNA, 19 nt, Artificial Sequence
  Description of Artificial Sequence: Synthetic oligonucleotide
  Antisense strand to SEQ ID NO: 1663473
gacucucaggauaacaguu

SEQ ID NO: 1663475 - RNA, 19 nt, Artificial Sequence
  Description of Artificial Sequence: Synthetic oligonucleotide
  Sense strand starting at position 2466 of SEQ ID NO: 1561329
acaggaauuucugaagucu

SEQ ID NO: 1663476 - RNA, 19 nt, Artificial Sequence
  Description of Artificial Sequence: Synthetic oligonucleotide
  Antisense strand to SEQ ID NO: 1663475
agacuucagaaauuccugu

SEQ ID NO: 1663477 - RNA, 19 nt, Artificial Sequence
  Description of Artificial Sequence: Synthetic oligonucleotide
  Sense strand starting at position 2497 of SEQ ID NO: 1561329
ugauaacaggaguguuauu

SEQ ID NO: 1663478 - RNA, 19 nt, Artificial Sequence
  Description of Artificial Sequence: Synthetic oligonucleotide
  Antisense strand to SEQ ID NO: 1663477
aauaacacuccuguuauca

SEQ ID NO: 1663479 - RNA, 19 nt, Artificial Sequence
  Description of Artificial Sequence: Synthetic oligonucleotide
  Sense strand starting at position 2502 of SEQ ID NO: 1561329
acaggaguguuauuggaaa

SEQ ID NO: 1663480 - RNA, 19 nt, Artificial Sequence
  Description of Artificial Sequence: Synthetic oligonucleotide
  Antisense strand to SEQ ID NO: 1663479
uuuccaauaacacuccugu

SEQ ID NO: 1663481 - RNA, 19 nt, Artificial Sequence
  Description of Artificial Sequence: Synthetic oligonucleotide
  Sense strand starting at position 2538 of SEQ ID NO: 1561329
cacagucuucgaggaguua

SEQ ID NO: 1663482 - RNA, 19 nt, Artificial Sequence
  Description of Artificial Sequence: Synthetic oligonucleotide
  Antisense strand to SEQ ID NO: 1663481
uaacuccucgaagacugug

SEQ ID NO: 1663483 - RNA, 19 nt, Artificial Sequence
  Description of Artificial Sequence: Synthetic oligonucleotide
  Sense strand starting at position 2539 of SEQ ID NO: 1561329
acagucuucgaggaguuaa

SEQ ID NO: 1663484 - RNA, 19 nt, Artificial Sequence
  Description of Artificial Sequence: Synthetic oligonucleotide
  Antisense strand to SEQ ID NO: 1663483
uuaacuccucgaagacugu

SEQ ID NO: 1663485 - RNA, 19 nt, Artificial Sequence
  Description of Artificial Sequence: Synthetic oligonucleotide
  Sense strand starting at position 2582 of SEQ ID NO: 1561329
augguuucuaaauguaguu

SEQ ID NO: 1663486 - RNA, 19 nt, Artificial Sequence
  Description of Artificial Sequence: Synthetic oligonucleotide
  Antisense strand to SEQ ID NO: 1663485
aacuacauuuagaaaccau

SEQ ID NO: 1663487 - RNA, 19 nt, Artificial Sequence
  Description of Artificial Sequence: Synthetic oligonucleotide
  Sense strand starting at position 2659 of SEQ ID NO: 1561329
ccacuauuauagucuuugu

SEQ ID NO: 1663488 - RNA, 19 nt, Artificial Sequence
  Description of Artificial Sequence: Synthetic oligonucleotide
  Antisense strand to SEQ ID NO: 1663487
acaaagacuauaauagugg

SEQ ID NO: 1663489 - RNA, 19 nt, Artificial Sequence
  Description of Artificial Sequence: Synthetic oligonucleotide
  Sense strand starting at position 2662 of SEQ ID NO: 1561329
cuauuauagucuuugugaa

SEQ ID NO: 1663490 - RNA, 19 nt, Artificial Sequence
  Description of Artificial Sequence: Synthetic oligonucleotide
  Antisense strand to SEQ ID NO: 1663489
uucacaaagacuauaauag

SEQ ID NO: 1663491 - RNA, 19 nt, Artificial Sequence
  Description of Artificial Sequence: Synthetic oligonucleotide
  Sense strand starting at position 2672 of SEQ ID NO: 1561329
cuuugugaauuggucaaau

SEQ ID NO: 1663492 - RNA, 19 nt, Artificial Sequence
  Description of Artificial Sequence: Synthetic oligonucleotide
  Antisense strand to SEQ ID NO: 1663491
auuugaccaauucacaaag

SEQ ID NO: 1663493 - RNA, 19 nt, Artificial Sequence
  Description of Artificial Sequence: Synthetic oligonucleotide
  Sense strand starting at position 2684 of SEQ ID NO: 1561329
gucaaauaguuugcccaca

SEQ ID NO: 1663494 - RNA, 19 nt, Artificial Sequence
  Description of Artificial Sequence: Synthetic oligonucleotide
  Antisense strand to SEQ ID NO: 1663493
ugugggcaaacuauuugac

SEQ ID NO: 1663495 - RNA, 19 nt, Artificial Sequence
  Description of Artificial Sequence: Synthetic oligonucleotide
  Sense strand starting at position 2943 of SEQ ID NO: 1561329
guuguuaauauauacgagu

SEQ ID NO: 1663496 - RNA, 19 nt, Artificial Sequence
  Description of Artificial Sequence: Synthetic oligonucleotide
  Antisense strand to SEQ ID NO: 1663495
acucguauauauuaacaac

SEQ ID NO: 1663497 - RNA, 19 nt, Artificial Sequence
  Description of Artificial Sequence: Synthetic oligonucleotide
  Sense strand starting at position 2968 of SEQ ID NO: 1561329
gccaucacuuaggcagaua

SEQ ID NO: 1663498 - RNA, 19 nt, Artificial Sequence
  Description of Artificial Sequence: Synthetic oligonucleotide
  Antisense strand to SEQ ID NO: 1663497
uaucugccuaagugauggc

SEQ ID NO: 1663499 - RNA, 19 nt, Artificial Sequence
  Description of Artificial Sequence: Synthetic oligonucleotide
  Sense strand starting at position 3254 of SEQ ID NO: 1561329
cuauguaaacgucauaacu

SEQ ID NO: 1663500 - RNA, 19 nt, Artificial Sequence
  Description of Artificial Sequence: Synthetic oligonucleotide
  Antisense strand to SEQ ID NO: 1663499
aguuaugacguuuacauag

SEQ ID NO: 1663501 - RNA, 19 nt, Artificial Sequence
  Description of Artificial Sequence: Synthetic oligonucleotide
  Sense strand starting at position 3264 of SEQ ID NO: 1561329
gucauaacugaucgaacca

SEQ ID NO: 1663502 - RNA, 19 nt, Artificial Sequence
  Description of Artificial Sequence: Synthetic oligonucleotide
  Antisense strand to SEQ ID NO: 1663501
ugguucgaucaguuaugac

SEQ ID NO: 1663503 - RNA, 19 nt, Artificial Sequence
  Description of Artificial Sequence: Synthetic oligonucleotide
  Sense strand starting at position 3315 of SEQ ID NO: 1561329
uccucaaacuggucuguaa

SEQ ID NO: 1663504 - RNA, 19 nt, Artificial Sequence
  Description of Artificial Sequence: Synthetic oligonucleotide
  Antisense strand to SEQ ID NO: 1663503
uuacagaccaguuugagga

SEQ ID NO: 1663505 - RNA, 19 nt, Artificial Sequence
  Description of Artificial Sequence: Synthetic oligonucleotide
  Sense strand starting at position 3453 of SEQ ID NO: 1561329
uuguguguccguguccuaa

SEQ ID NO: 1663506 - RNA, 19 nt, Artificial Sequence
  Description of Artificial Sequence: Synthetic oligonucleotide
  Antisense strand to SEQ ID NO: 1663505
uuaggacacggacacacaa

SEQ ID NO: 1663507 - RNA, 19 nt, Artificial Sequence
  Description of Artificial Sequence: Synthetic oligonucleotide
  Sense strand starting at position 3604 of SEQ ID NO: 1561329
ucacuacuguuguccauaa

SEQ ID NO: 1663508 - RNA, 19 nt, Artificial Sequence
  Description of Artificial Sequence: Synthetic oligonucleotide
  Antisense strand to SEQ ID NO: 1663507
uuauggacaacaguaguga

SEQ ID NO: 1663509 - RNA, 19 nt, Artificial Sequence
  Description of Artificial Sequence: Synthetic oligonucleotide
  Sense strand starting at position 3606 of SEQ ID NO: 1561329
acuacuguuguccauaauc

SEQ ID NO: 1663510 - RNA, 19 nt, Artificial Sequence
  Description of Artificial Sequence: Synthetic oligonucleotide
  Antisense strand to SEQ ID NO: 1663509
gauuauggacaacaguagu

SEQ ID NO: 1663511 - RNA, 19 nt, Artificial Sequence
  Description of Artificial Sequence: Synthetic oligonucleotide
  Sense strand starting at position 121 of SEQ ID NO: 1561330
guuaauauuuagugggaaa

SEQ ID NO: 1663512 - RNA, 19 nt, Artificial Sequence
  Description of Artificial Sequence: Synthetic oligonucleotide
  Antisense strand to SEQ ID NO: 1663511
uuucccacuaaauauuaac

SEQ ID NO: 1663513 - RNA, 19 nt, Artificial Sequence
  Description of Artificial Sequence: Synthetic oligonucleotide
  Sense strand starting at position 218 of SEQ ID NO: 1561330
aguccugaguuuccagaua

SEQ ID NO: 1663514 - RNA, 19 nt, Artificial Sequence
  Description of Artificial Sequence: Synthetic oligonucleotide
  Antisense strand to SEQ ID NO: 1663513
uaucuggaaacucaggacu

SEQ ID NO: 1663515 - RNA, 19 nt, Artificial Sequence
  Description of Artificial Sequence: Synthetic oligonucleotide
  Sense strand starting at position 367 of SEQ ID NO: 1561330
agccuuucuaccuggguga

SEQ ID NO: 1663516 - RNA, 19 nt, Artificial Sequence
  Description of Artificial Sequence: Synthetic oligonucleotide
  Antisense strand to SEQ ID NO: 1663515
ucacccagguagaaaggcu

SEQ ID NO: 1663517 - RNA, 19 nt, Artificial Sequence
  Description of Artificial Sequence: Synthetic oligonucleotide
  Sense strand starting at position 579 of SEQ ID NO: 1561330
ccaugauuauguguuaccu

SEQ ID NO: 1663518 - RNA, 19 nt, Artificial Sequence
  Description of Artificial Sequence: Synthetic oligonucleotide
  Antisense strand to SEQ ID NO: 1663517
agguaacacauaaucaugg

SEQ ID NO: 1663519 - RNA, 19 nt, Artificial Sequence
  Description of Artificial Sequence: Synthetic oligonucleotide
  Sense strand starting at position 587 of SEQ ID NO: 1561330
auguguuaccucuauauua

SEQ ID NO: 1663520 - RNA, 19 nt, Artificial Sequence
  Description of Artificial Sequence: Synthetic oligonucleotide
  Antisense strand to SEQ ID NO: 1663519
uaauauagagguaacacau

SEQ ID NO: 1663521 - RNA, 19 nt, Artificial Sequence
  Description of Artificial Sequence: Synthetic oligonucleotide
  Sense strand starting at position 589 of SEQ ID NO: 1561330
guguuaccucuauauuauu

SEQ ID NO: 1663522 - RNA, 19 nt, Artificial Sequence
  Description of Artificial Sequence: Synthetic oligonucleotide
  Antisense strand to SEQ ID NO: 1663521
aauaauauagagguaacac

SEQ ID NO: 1663523 - RNA, 19 nt, Artificial Sequence
  Description of Artificial Sequence: Synthetic oligonucleotide
  Sense strand starting at position 1042 of SEQ ID NO: 1561330
auggcucaugcagaacaua

SEQ ID NO: 1663524 - RNA, 19 nt, Artificial Sequence
  Description of Artificial Sequence: Synthetic oligonucleotide
  Antisense strand to SEQ ID NO: 1663523
uauguucugcaugagccau

SEQ ID NO: 1663525 - RNA, 19 nt, Artificial Sequence
  Description of Artificial Sequence: Synthetic oligonucleotide
  Sense strand starting at position 1201 of SEQ ID NO: 1561330
cacuguauaguggaaaggu

SEQ ID NO: 1663526 - RNA, 19 nt, Artificial Sequence
  Description of Artificial Sequence: Synthetic oligonucleotide
  Antisense strand to SEQ ID NO: 1663525
accuuuccacuauacagug

SEQ ID NO: 1663527 - RNA, 19 nt, Artificial Sequence
  Description of Artificial Sequence: Synthetic oligonucleotide
  Sense strand starting at position 1253 of SEQ ID NO: 1561330
agcaacuaacgcuaaauua

SEQ ID NO: 1663528 - RNA, 19 nt, Artificial Sequence
  Description of Artificial Sequence: Synthetic oligonucleotide
  Antisense strand to SEQ ID NO: 1663527
uaauuuagcguuaguugcu

SEQ ID NO: 1663529 - RNA, 19 nt, Artificial Sequence
  Description of Artificial Sequence: Synthetic oligonucleotide
  Sense strand starting at position 1993 of SEQ ID NO: 1561330
ggaaguuugaaagguuccu

SEQ ID NO: 1663530 - RNA, 19 nt, Artificial Sequence
  Description of Artificial Sequence: Synthetic oligonucleotide
  Antisense strand to SEQ ID NO: 1663529
aggaaccuuucaaacuucc

SEQ ID NO: 1663531 - RNA, 19 nt, Artificial Sequence
  Description of Artificial Sequence: Synthetic oligonucleotide
  Sense strand starting at position 2010 of SEQ ID NO: 1561330
cugagaagcugaccugaau

SEQ ID NO: 1663532 - RNA, 19 nt, Artificial Sequence
  Description of Artificial Sequence: Synthetic oligonucleotide
  Antisense strand to SEQ ID NO: 1663531
auucaggucagcuucucag

SEQ ID NO: 1663533 - RNA, 19 nt, Artificial Sequence
  Description of Artificial Sequence: Synthetic oligonucleotide
  Sense strand starting at position 2144 of SEQ ID NO: 1561330
gccggaagugccuacaacu

SEQ ID NO: 1663534 - RNA, 19 nt, Artificial Sequence
  Description of Artificial Sequence: Synthetic oligonucleotide
  Antisense strand to SEQ ID NO: 1663533
aguuguaggcacuuccggc

SEQ ID NO: 1663535 - RNA, 19 nt, Artificial Sequence
  Description of Artificial Sequence: Synthetic oligonucleotide
  Sense strand starting at position 2164 of SEQ ID NO: 1561330
ccuagaacgauuggaccua

SEQ ID NO: 1663536 - RNA, 19 nt, Artificial Sequence
  Description of Artificial Sequence: Synthetic oligonucleotide
  Antisense strand to SEQ ID NO: 1663535
uagguccaaucguucuagg

SEQ ID NO: 1663537 - RNA, 19 nt, Artificial Sequence
  Description of Artificial Sequence: Synthetic oligonucleotide
  Sense strand starting at position 2399 of SEQ ID NO: 1561330
ccucacuucucuuuaggua

SEQ ID NO: 1663538 - RNA, 19 nt, Artificial Sequence
  Description of Artificial Sequence: Synthetic oligonucleotide
  Antisense strand to SEQ ID NO: 1663537
uaccuaaagagaagugagg

SEQ ID NO: 1663539 - RNA, 19 nt, Artificial Sequence
  Description of Artificial Sequence: Synthetic oligonucleotide
  Sense strand starting at position 2400 of SEQ ID NO: 1561330
cucacuucucuuuagguau

SEQ ID NO: 1663540 - RNA, 19 nt, Artificial Sequence
  Description of Artificial Sequence: Synthetic oligonucleotide
  Antisense strand to SEQ ID NO: 1663539
auaccuaaagagaagugag

SEQ ID NO: 1663541 - RNA, 19 nt, Artificial Sequence
  Description of Artificial Sequence: Synthetic oligonucleotide
  Sense strand starting at position 2415 of SEQ ID NO: 1561330
guauuauuauggucugagu

SEQ ID NO: 1663542 - RNA, 19 nt, Artificial Sequence
  Description of Artificial Sequence: Synthetic oligonucleotide
  Antisense strand to SEQ ID NO: 1663541
acucagaccauaauaauac

SEQ ID NO: 1663543 - RNA, 19 nt, Artificial Sequence
  Description of Artificial Sequence: Synthetic oligonucleotide
  Sense strand starting at position 2447 of SEQ ID NO: 1561330
accaaauucguauguuuaa

SEQ ID NO: 1663544 - RNA, 19 nt, Artificial Sequence
  Description of Artificial Sequence: Synthetic oligonucleotide
  Antisense strand to SEQ ID NO: 1663543
uuaaacauacgaauuuggu

SEQ ID NO: 1663545 - RNA, 19 nt, Artificial Sequence
  Description of Artificial Sequence: Synthetic oligonucleotide
  Sense strand starting at position 2448 of SEQ ID NO: 1561330
ccaaauucguauguuuaaa

SEQ ID NO: 1663546 - RNA, 19 nt, Artificial Sequence
  Description of Artificial Sequence: Synthetic oligonucleotide
  Antisense strand to SEQ ID NO: 1663545
uuuaaacauacgaauuugg

SEQ ID NO: 1663547 - RNA, 19 nt, Artificial Sequence
  Description of Artificial Sequence: Synthetic oligonucleotide
  Sense strand starting at position 2559 of SEQ ID NO: 1561330
uuauaaguggccugaggga

SEQ ID NO: 1663548 - RNA, 19 nt, Artificial Sequence
  Description of Artificial Sequence: Synthetic oligonucleotide
  Antisense strand to SEQ ID NO: 1663547
ucccucaggccacuuauaa

SEQ ID NO: 1663549 - RNA, 19 nt, Artificial Sequence
  Description of Artificial Sequence: Synthetic oligonucleotide
  Sense strand starting at position 2578 of SEQ ID NO: 1561330
gcuccuuugccucuuuagu

SEQ ID NO: 1663550 - RNA, 19 nt, Artificial Sequence
  Description of Artificial Sequence: Synthetic oligonucleotide
  Antisense strand to SEQ ID NO: 1663549
acuaaagaggcaaaggagc

SEQ ID NO: 1663551 - RNA, 19 nt, Artificial Sequence
  Description of Artificial Sequence: Synthetic oligonucleotide
  Sense strand starting at position 2588 of SEQ ID NO: 1561330
cucuuuaguuaugugagga

SEQ ID NO: 1663552 - RNA, 19 nt, Artificial Sequence
  Description of Artificial Sequence: Synthetic oligonucleotide
  Antisense strand to SEQ ID NO: 1663551
uccucacauaacuaaagag

SEQ ID NO: 1663553 - RNA, 19 nt, Artificial Sequence
  Description of Artificial Sequence: Synthetic oligonucleotide
  Sense strand starting at position 2589 of SEQ ID NO: 1561330
ucuuuaguuaugugaggac

SEQ ID NO: 1663554 - RNA, 19 nt, Artificial Sequence
  Description of Artificial Sequence: Synthetic oligonucleotide
  Antisense strand to SEQ ID NO: 1663553
guccucacauaacuaaaga

SEQ ID NO: 1663555 - RNA, 19 nt, Artificial Sequence
  Description of Artificial Sequence: Synthetic oligonucleotide
  Sense strand starting at position 2619 of SEQ ID NO: 1561330
gaccauguaugacuuagaa

SEQ ID NO: 1663556 - RNA, 19 nt, Artificial Sequence
  Description of Artificial Sequence: Synthetic oligonucleotide
  Antisense strand to SEQ ID NO: 1663555
uucuaagucauacaugguc

SEQ ID NO: 1663557 - RNA, 19 nt, Artificial Sequence
  Description of Artificial Sequence: Synthetic oligonucleotide
  Sense strand starting at position 2873 of SEQ ID NO: 1561330
uaguaaugugaaugaacaa

SEQ ID NO: 1663558 - RNA, 19 nt, Artificial Sequence
  Description of Artificial Sequence: Synthetic oligonucleotide
  Antisense strand to SEQ ID NO: 1663557
uuguucauucacauuacua

SEQ ID NO: 1663559 - RNA, 19 nt, Artificial Sequence
  Description of Artificial Sequence: Synthetic oligonucleotide
  Sense strand starting at position 2925 of SEQ ID NO: 1561330
ugaagacauuauguccaau

SEQ ID NO: 1663560 - RNA, 19 nt, Artificial Sequence
  Description of Artificial Sequence: Synthetic oligonucleotide
  Antisense strand to SEQ ID NO: 1663559
auuggacauaaugucuuca

SEQ ID NO: 1663561 - RNA, 19 nt, Artificial Sequence
  Description of Artificial Sequence: Synthetic oligonucleotide
  Sense strand starting at position 3026 of SEQ ID NO: 1561330
gaaaguaaauuaguugucu

SEQ ID NO: 1663562 - RNA, 19 nt, Artificial Sequence
  Description of Artificial Sequence: Synthetic oligonucleotide
  Antisense strand to SEQ ID NO: 1663561
agacaacuaauuuacuuuc

SEQ ID NO: 1663563 - RNA, 19 nt, Artificial Sequence
  Description of Artificial Sequence: Synthetic oligonucleotide
  Sense strand starting at position 3030 of SEQ ID NO: 1561330
guaaauuaguugucuccaa

SEQ ID NO: 1663564 - RNA, 19 nt, Artificial Sequence
  Description of Artificial Sequence: Synthetic oligonucleotide
  Antisense strand to SEQ ID NO: 1663563
uuggagacaacuaauuuac

SEQ ID NO: 1663565 - RNA, 19 nt, Artificial Sequence
  Description of Artificial Sequence: Synthetic oligonucleotide
  Sense strand starting at position 3034 of SEQ ID NO: 1561330
auuaguugucuccaaggcu

SEQ ID NO: 1663566 - RNA, 19 nt, Artificial Sequence
  Description of Artificial Sequence: Synthetic oligonucleotide
  Antisense strand to SEQ ID NO: 1663565
agccuuggagacaacuaau

SEQ ID NO: 1663567 - RNA, 19 nt, Artificial Sequence
  Description of Artificial Sequence: Synthetic oligonucleotide
  Sense strand starting at position 3055 of SEQ ID NO: 1561330
ggagauguaguugggaaug

SEQ ID NO: 1663568 - RNA, 19 nt, Artificial Sequence
  Description of Artificial Sequence: Synthetic oligonucleotide
  Antisense strand to SEQ ID NO: 1663567
cauucccaacuacaucucc

SEQ ID NO: 1663569 - RNA, 19 nt, Artificial Sequence
  Description of Artificial Sequence: Synthetic oligonucleotide
  Sense strand starting at position 3130 of SEQ ID NO: 1561330
cuuguuauguuucccagaa

SEQ ID NO: 1663570 - RNA, 19 nt, Artificial Sequence
  Description of Artificial Sequence: Synthetic oligonucleotide
  Antisense strand to SEQ ID NO: 1663569
uucugggaaacauaacaag

SEQ ID NO: 1663571 - RNA, 19 nt, Artificial Sequence
  Description of Artificial Sequence: Synthetic oligonucleotide
  Sense strand starting at position 3131 of SEQ ID NO: 1561330
uuguuauguuucccagaau

SEQ ID NO: 1663572 - RNA, 19 nt, Artificial Sequence
  Description of Artificial Sequence: Synthetic oligonucleotide
  Antisense strand to SEQ ID NO: 1663571
auucugggaaacauaacaa

SEQ ID NO: 1663573 - RNA, 19 nt, Artificial Sequence
  Description of Artificial Sequence: Synthetic oligonucleotide
  Sense strand starting at position 3319 of SEQ ID NO: 1561330
ggauuagauagugguaauc

SEQ ID NO: 1663574 - RNA, 19 nt, Artificial Sequence
  Description of Artificial Sequence: Synthetic oligonucleotide
  Antisense strand to SEQ ID NO: 1663573
gauuaccacuaucuaaucc

SEQ ID NO: 1663575 - RNA, 19 nt, Artificial Sequence
  Description of Artificial Sequence: Synthetic oligonucleotide
  Sense strand starting at position 3463 of SEQ ID NO: 1561330
gcaaguuaggcccacagau

SEQ ID NO: 1663576 - RNA, 19 nt, Artificial Sequence
  Description of Artificial Sequence: Synthetic oligonucleotide
  Antisense strand to SEQ ID NO: 1663575
aucugugggccuaacuugc

SEQ ID NO: 1663577 - RNA, 19 nt, Artificial Sequence
  Description of Artificial Sequence: Synthetic oligonucleotide
  Sense strand starting at position 3621 of SEQ ID NO: 1561330
uccucuugacugugaacaa

SEQ ID NO: 1663578 - RNA, 19 nt, Artificial Sequence
  Description of Artificial Sequence: Synthetic oligonucleotide
  Antisense strand to SEQ ID NO: 1663577
uuguucacagucaagagga

SEQ ID NO: 1663579 - RNA, 19 nt, Artificial Sequence
  Description of Artificial Sequence: Synthetic oligonucleotide
  Sense strand starting at position 3690 of SEQ ID NO: 1561330
ucuugugacuaaccugaaa

SEQ ID NO: 1663580 - RNA, 19 nt, Artificial Sequence
  Description of Artificial Sequence: Synthetic oligonucleotide
  Antisense strand to SEQ ID NO: 1663579
uuucagguuagucacaaga

SEQ ID NO: 1663581 - RNA, 19 nt, Artificial Sequence
  Description of Artificial Sequence: Synthetic oligonucleotide
  Sense strand starting at position 3743 of SEQ ID NO: 1561330
ccuacagucuuaucaguua

SEQ ID NO: 1663582 - RNA, 19 nt, Artificial Sequence
  Description of Artificial Sequence: Synthetic oligonucleotide
  Antisense strand to SEQ ID NO: 1663581
uaacugauaagacuguagg

SEQ ID NO: 1663583 - RNA, 19 nt, Artificial Sequence
  Description of Artificial Sequence: Synthetic oligonucleotide
  Sense strand starting at position 3837 of SEQ ID NO: 1561330
uaaugugguaucuggugau

SEQ ID NO: 1663584 - RNA, 19 nt, Artificial Sequence
  Description of Artificial Sequence: Synthetic oligonucleotide
  Antisense strand to SEQ ID NO: 1663583
aucaccagauaccacauua

SEQ ID NO: 1663585 - RNA, 19 nt, Artificial Sequence
  Description of Artificial Sequence: Synthetic oligonucleotide
  Sense strand starting at position 3841 of SEQ ID NO: 1561330
gugguaucuggugauacaa

SEQ ID NO: 1663586 - RNA, 19 nt, Artificial Sequence
  Description of Artificial Sequence: Synthetic oligonucleotide
  Antisense strand to SEQ ID NO: 1663585
uuguaucaccagauaccac

SEQ ID NO: 1663587 - RNA, 19 nt, Artificial Sequence
  Description of Artificial Sequence: Synthetic oligonucleotide
  Sense strand starting at position 3880 of SEQ ID NO: 1561330
gaauauagguacuggauuu

SEQ ID NO: 1663588 - RNA, 19 nt, Artificial Sequence
  Description of Artificial Sequence: Synthetic oligonucleotide
  Antisense strand to SEQ ID NO: 1663587
aaauccaguaccuauauuc

SEQ ID NO: 1663589 - RNA, 19 nt, Artificial Sequence
  Description of Artificial Sequence: Synthetic oligonucleotide
  Sense strand starting at position 3924 of SEQ ID NO: 1561330
uuaacauaggccugagacu

SEQ ID NO: 1663590 - RNA, 19 nt, Artificial Sequence
  Description of Artificial Sequence: Synthetic oligonucleotide
  Antisense strand to SEQ ID NO: 1663589
agucucaggccuauguuaa

SEQ ID NO: 1663591 - RNA, 19 nt, Artificial Sequence
  Description of Artificial Sequence: Synthetic oligonucleotide
  Sense strand starting at position 53 of SEQ ID NO: 1561331
guuaauauuuagugggaaa

SEQ ID NO: 1663592 - RNA, 19 nt, Artificial Sequence
  Description of Artificial Sequence: Synthetic oligonucleotide
  Antisense strand to SEQ ID NO: 1663591
uuucccacuaaauauuaac

SEQ ID NO: 1663593 - RNA, 19 nt, Artificial Sequence
  Description of Artificial Sequence: Synthetic oligonucleotide
  Sense strand starting at position 150 of SEQ ID NO: 1561331
aguccugaguuuccagaua

SEQ ID NO: 1663594 - RNA, 19 nt, Artificial Sequence
  Description of Artificial Sequence: Synthetic oligonucleotide
  Antisense strand to SEQ ID NO: 1663593
uaucuggaaacucaggacu

SEQ ID NO: 1663595 - RNA, 19 nt, Artificial Sequence
  Description of Artificial Sequence: Synthetic oligonucleotide
  Sense strand starting at position 299 of SEQ ID NO: 1561331
agccuuucuaccuggguga

SEQ ID NO: 1663596 - RNA, 19 nt, Artificial Sequence
  Description of Artificial Sequence: Synthetic oligonucleotide
  Antisense strand to SEQ ID NO: 1663595
ucacccagguagaaaggcu

SEQ ID NO: 1663597 - RNA, 19 nt, Artificial Sequence
  Description of Artificial Sequence: Synthetic oligonucleotide
  Sense strand starting at position 511 of SEQ ID NO: 1561331
ccaugauuauguguuaccu

SEQ ID NO: 1663598 - RNA, 19 nt, Artificial Sequence
  Description of Artificial Sequence: Synthetic oligonucleotide
  Antisense strand to SEQ ID NO: 1663597
agguaacacauaaucaugg

SEQ ID NO: 1663599 - RNA, 19 nt, Artificial Sequence
  Description of Artificial Sequence: Synthetic oligonucleotide
  Sense strand starting at position 519 of SEQ ID NO: 1561331
auguguuaccucuauauua

SEQ ID NO: 1663600 - RNA, 19 nt, Artificial Sequence
  Description of Artificial Sequence: Synthetic oligonucleotide
  Antisense strand to SEQ ID NO: 1663599
uaauauagagguaacacau

SEQ ID NO: 1663601 - RNA, 19 nt, Artificial Sequence
  Description of Artificial Sequence: Synthetic oligonucleotide
  Sense strand starting at position 521 of SEQ ID NO: 1561331
guguuaccucuauauuauu

SEQ ID NO: 1663602 - RNA, 19 nt, Artificial Sequence
  Description of Artificial Sequence: Synthetic oligonucleotide
  Antisense strand to SEQ ID NO: 1663601
aauaauauagagguaacac

SEQ ID NO: 1663603 - RNA, 19 nt, Artificial Sequence
  Description of Artificial Sequence: Synthetic oligonucleotide
  Sense strand starting at position 974 of SEQ ID NO: 1561331
auggcucaugcagaacaua

SEQ ID NO: 1663604 - RNA, 19 nt, Artificial Sequence
  Description of Artificial Sequence: Synthetic oligonucleotide
  Antisense strand to SEQ ID NO: 1663603
uauguucugcaugagccau

SEQ ID NO: 1663605 - RNA, 19 nt, Artificial Sequence
  Description of Artificial Sequence: Synthetic oligonucleotide
  Sense strand starting at position 1133 of SEQ ID NO: 1561331
cacuguauaguggaaaggu

SEQ ID NO: 1663606 - RNA, 19 nt, Artificial Sequence
  Description of Artificial Sequence: Synthetic oligonucleotide
  Antisense strand to SEQ ID NO: 1663605
accuuuccacuauacagug

SEQ ID NO: 1663607 - RNA, 19 nt, Artificial Sequence
  Description of Artificial Sequence: Synthetic oligonucleotide
  Sense strand starting at position 1185 of SEQ ID NO: 1561331
agcaacuaacgcuaaauua

SEQ ID NO: 1663608 - RNA, 19 nt, Artificial Sequence
  Description of Artificial Sequence: Synthetic oligonucleotide
  Antisense strand to SEQ ID NO: 1663607
uaauuuagcguuaguugcu

SEQ ID NO: 1663609 - RNA, 19 nt, Artificial Sequence
  Description of Artificial Sequence: Synthetic oligonucleotide
  Sense strand starting at position 1925 of SEQ ID NO: 1561331
ggaaguuugaaagguuccu

SEQ ID NO: 1663610 - RNA, 19 nt, Artificial Sequence
  Description of Artificial Sequence: Synthetic oligonucleotide
  Antisense strand to SEQ ID NO: 1663609
aggaaccuuucaaacuucc

SEQ ID NO: 1663611 - RNA, 19 nt, Artificial Sequence
  Description of Artificial Sequence: Synthetic oligonucleotide
  Sense strand starting at position 1942 of SEQ ID NO: 1561331
cugagaagcugaccugaau

SEQ ID NO: 1663612 - RNA, 19 nt, Artificial Sequence
  Description of Artificial Sequence: Synthetic oligonucleotide
  Antisense strand to SEQ ID NO: 1663611
auucaggucagcuucucag

SEQ ID NO: 1663613 - RNA, 19 nt, Artificial Sequence
  Description of Artificial Sequence: Synthetic oligonucleotide
  Sense strand starting at position 2076 of SEQ ID NO: 1561331
gccggaagugccuacaacu

SEQ ID NO: 1663614 - RNA, 19 nt, Artificial Sequence
  Description of Artificial Sequence: Synthetic oligonucleotide
  Antisense strand to SEQ ID NO: 1663613
aguuguaggcacuuccggc

SEQ ID NO: 1663615 - RNA, 19 nt, Artificial Sequence
  Description of Artificial Sequence: Synthetic oligonucleotide
  Sense strand starting at position 2096 of SEQ ID NO: 1561331
ccuagaacgauuggaccua

SEQ ID NO: 1663616 - RNA, 19 nt, Artificial Sequence
  Description of Artificial Sequence: Synthetic oligonucleotide
  Antisense strand to SEQ ID NO: 1663615
uagguccaaucguucuagg

SEQ ID NO: 1663617 - RNA, 19 nt, Artificial Sequence
  Description of Artificial Sequence: Synthetic oligonucleotide
  Sense strand starting at position 2331 of SEQ ID NO: 1561331
ccucacuucucuuuaggua

SEQ ID NO: 1663618 - RNA, 19 nt, Artificial Sequence
  Description of Artificial Sequence: Synthetic oligonucleotide
  Antisense strand to SEQ ID NO: 1663617
uaccuaaagagaagugagg

SEQ ID NO: 1663619 - RNA, 19 nt, Artificial Sequence
  Description of Artificial Sequence: Synthetic oligonucleotide
  Sense strand starting at position 2332 of SEQ ID NO: 1561331
cucacuucucuuuagguau

SEQ ID NO: 1663620 - RNA, 19 nt, Artificial Sequence
  Description of Artificial Sequence: Synthetic oligonucleotide
  Antisense strand to SEQ ID NO: 1663619
auaccuaaagagaagugag

SEQ ID NO: 1663621 - RNA, 19 nt, Artificial Sequence
  Description of Artificial Sequence: Synthetic oligonucleotide
  Sense strand starting at position 2347 of SEQ ID NO: 1561331
guauuauuauggucugagu

SEQ ID NO: 1663622 - RNA, 19 nt, Artificial Sequence
  Description of Artificial Sequence: Synthetic oligonucleotide
  Antisense strand to SEQ ID NO: 1663621
acucagaccauaauaauac

SEQ ID NO: 1663623 - RNA, 19 nt, Artificial Sequence
  Description of Artificial Sequence: Synthetic oligonucleotide
  Sense strand starting at position 2379 of SEQ ID NO: 1561331
accaaauucguauguuuaa

SEQ ID NO: 1663624 - RNA, 19 nt, Artificial Sequence
  Description of Artificial Sequence: Synthetic oligonucleotide
  Antisense strand to SEQ ID NO: 1663623
uuaaacauacgaauuuggu

SEQ ID NO: 1663625 - RNA, 19 nt, Artificial Sequence
  Description of Artificial Sequence: Synthetic oligonucleotide
  Sense strand starting at position 2380 of SEQ ID NO: 1561331
ccaaauucguauguuuaaa

SEQ ID NO: 1663626 - RNA, 19 nt, Artificial Sequence
  Description of Artificial Sequence: Synthetic oligonucleotide
  Antisense strand to SEQ ID NO: 1663625
uuuaaacauacgaauuugg

SEQ ID NO: 1663627 - RNA, 19 nt, Artificial Sequence
  Description of Artificial Sequence: Synthetic oligonucleotide
  Sense strand starting at position 2491 of SEQ ID NO: 1561331
uuauaaguggccugaggga

SEQ ID NO: 1663628 - RNA, 19 nt, Artificial Sequence
  Description of Artificial Sequence: Synthetic oligonucleotide
  Antisense strand to SEQ ID NO: 1663627
ucccucaggccacuuauaa

SEQ ID NO: 1663629 - RNA, 19 nt, Artificial Sequence
  Description of Artificial Sequence: Synthetic oligonucleotide
  Sense strand starting at position 2510 of SEQ ID NO: 1561331
gcuccuuugccucuuuagu

SEQ ID NO: 1663630 - RNA, 19 nt, Artificial Sequence
  Description of Artificial Sequence: Synthetic oligonucleotide
  Antisense strand to SEQ ID NO: 1663629
acuaaagaggcaaaggagc

SEQ ID NO: 1663631 - RNA, 19 nt, Artificial Sequence
  Description of Artificial Sequence: Synthetic oligonucleotide
  Sense strand starting at position 2520 of SEQ ID NO: 1561331
cucuuuaguuaugugagga

SEQ ID NO: 1663632 - RNA, 19 nt, Artificial Sequence
  Description of Artificial Sequence: Synthetic oligonucleotide
  Antisense strand to SEQ ID NO: 1663631
uccucacauaacuaaagag

SEQ ID NO: 1663633 - RNA, 19 nt, Artificial Sequence
  Description of Artificial Sequence: Synthetic oligonucleotide
  Sense strand starting at position 2521 of SEQ ID NO: 1561331
ucuuuaguuaugugaggac

SEQ ID NO: 1663634 - RNA, 19 nt, Artificial Sequence
  Description of Artificial Sequence: Synthetic oligonucleotide
  Antisense strand to SEQ ID NO: 1663633
guccucacauaacuaaaga

SEQ ID NO: 1663635 - RNA, 19 nt, Artificial Sequence
  Description of Artificial Sequence: Synthetic oligonucleotide
  Sense strand starting at position 2551 of SEQ ID NO: 1561331
gaccauguaugacuuagaa

SEQ ID NO: 1663636 - RNA, 19 nt, Artificial Sequence
  Description of Artificial Sequence: Synthetic oligonucleotide
  Antisense strand to SEQ ID NO: 1663635
uucuaagucauacaugguc

SEQ ID NO: 1663637 - RNA, 19 nt, Artificial Sequence
  Description of Artificial Sequence: Synthetic oligonucleotide
  Sense strand starting at position 2805 of SEQ ID NO: 1561331
uaguaaugugaaugaacaa

SEQ ID NO: 1663638 - RNA, 19 nt, Artificial Sequence
  Description of Artificial Sequence: Synthetic oligonucleotide
  Antisense strand to SEQ ID NO: 1663637
uuguucauucacauuacua

SEQ ID NO: 1663639 - RNA, 19 nt, Artificial Sequence
  Description of Artificial Sequence: Synthetic oligonucleotide
  Sense strand starting at position 2857 of SEQ ID NO: 1561331
ugaagacauuauguccaau

SEQ ID NO: 1663640 - RNA, 19 nt, Artificial Sequence
  Description of Artificial Sequence: Synthetic oligonucleotide
  Antisense strand to SEQ ID NO: 1663639
auuggacauaaugucuuca

SEQ ID NO: 1663641 - RNA, 19 nt, Artificial Sequence
  Description of Artificial Sequence: Synthetic oligonucleotide
  Sense strand starting at position 2958 of SEQ ID NO: 1561331
gaaaguaaauuaguugucu

SEQ ID NO: 1663642 - RNA, 19 nt, Artificial Sequence
  Description of Artificial Sequence: Synthetic oligonucleotide
  Antisense strand to SEQ ID NO: 1663641
agacaacuaauuuacuuuc

SEQ ID NO: 1663643 - RNA, 19 nt, Artificial Sequence
  Description of Artificial Sequence: Synthetic oligonucleotide
  Sense strand starting at position 2962 of SEQ ID NO: 1561331
guaaauuaguugucuccaa

SEQ ID NO: 1663644 - RNA, 19 nt, Artificial Sequence
  Description of Artificial Sequence: Synthetic oligonucleotide
  Antisense strand to SEQ ID NO: 1663643
uuggagacaacuaauuuac

SEQ ID NO: 1663645 - RNA, 19 nt, Artificial Sequence
  Description of Artificial Sequence: Synthetic oligonucleotide
  Sense strand starting at position 2966 of SEQ ID NO: 1561331
auuaguugucuccaaggcu

SEQ ID NO: 1663646 - RNA, 19 nt, Artificial Sequence
  Description of Artificial Sequence: Synthetic oligonucleotide
  Antisense strand to SEQ ID NO: 1663645
agccuuggagacaacuaau

SEQ ID NO: 1663647 - RNA, 19 nt, Artificial Sequence
  Description of Artificial Sequence: Synthetic oligonucleotide
  Sense strand starting at position 2987 of SEQ ID NO: 1561331
ggagauguaguugggaaug

SEQ ID NO: 1663648 - RNA, 19 nt, Artificial Sequence
  Description of Artificial Sequence: Synthetic oligonucleotide
  Antisense strand to SEQ ID NO: 1663647
cauucccaacuacaucucc

SEQ ID NO: 1663649 - RNA, 19 nt, Artificial Sequence
  Description of Artificial Sequence: Synthetic oligonucleotide
  Sense strand starting at position 3062 of SEQ ID NO: 1561331
cuuguuauguuucccagaa

SEQ ID NO: 1663650 - RNA, 19 nt, Artificial Sequence
  Description of Artificial Sequence: Synthetic oligonucleotide
  Antisense strand to SEQ ID NO: 1663649
uucugggaaacauaacaag

SEQ ID NO: 1663651 - RNA, 19 nt, Artificial Sequence
  Description of Artificial Sequence: Synthetic oligonucleotide
  Sense strand starting at position 3063 of SEQ ID NO: 1561331
uuguuauguuucccagaau

SEQ ID NO: 1663652 - RNA, 19 nt, Artificial Sequence
  Description of Artificial Sequence: Synthetic oligonucleotide
  Antisense strand to SEQ ID NO: 1663651
auucugggaaacauaacaa

SEQ ID NO: 1663653 - RNA, 19 nt, Artificial Sequence
  Description of Artificial Sequence: Synthetic oligonucleotide
  Sense strand starting at position 3251 of SEQ ID NO: 1561331
ggauuagauagugguaauc

SEQ ID NO: 1663654 - RNA, 19 nt, Artificial Sequence
  Description of Artificial Sequence: Synthetic oligonucleotide
  Antisense strand to SEQ ID NO: 1663653
gauuaccacuaucuaaucc

SEQ ID NO: 1663655 - RNA, 19 nt, Artificial Sequence
  Description of Artificial Sequence: Synthetic oligonucleotide
  Sense strand starting at position 3395 of SEQ ID NO: 1561331
gcaaguuaggcccacagau

SEQ ID NO: 1663656 - RNA, 19 nt, Artificial Sequence
  Description of Artificial Sequence: Synthetic oligonucleotide
  Antisense strand to SEQ ID NO: 1663655
aucugugggccuaacuugc

SEQ ID NO: 1663657 - RNA, 19 nt, Artificial Sequence
  Description of Artificial Sequence: Synthetic oligonucleotide
  Sense strand starting at position 3553 of SEQ ID NO: 1561331
uccucuugacugugaacaa

SEQ ID NO: 1663658 - RNA, 19 nt, Artificial Sequence
  Description of Artificial Sequence: Synthetic oligonucleotide
  Antisense strand to SEQ ID NO: 1663657
uuguucacagucaagagga

SEQ ID NO: 1663659 - RNA, 19 nt, Artificial Sequence
  Description of Artificial Sequence: Synthetic oligonucleotide
  Sense strand starting at position 3622 of SEQ ID NO: 1561331
ucuugugacuaaccugaaa

SEQ ID NO: 1663660 - RNA, 19 nt, Artificial Sequence
  Description of Artificial Sequence: Synthetic oligonucleotide
  Antisense strand to SEQ ID NO: 1663659
uuucagguuagucacaaga

SEQ ID NO: 1663661 - RNA, 19 nt, Artificial Sequence
  Description of Artificial Sequence: Synthetic oligonucleotide
  Sense strand starting at position 3675 of SEQ ID NO: 1561331
ccuacagucuuaucaguua

SEQ ID NO: 1663662 - RNA, 19 nt, Artificial Sequence
  Description of Artificial Sequence: Synthetic oligonucleotide
  Antisense strand to SEQ ID NO: 1663661
uaacugauaagacuguagg

SEQ ID NO: 1663663 - RNA, 19 nt, Artificial Sequence
  Description of Artificial Sequence: Synthetic oligonucleotide
  Sense strand starting at position 3769 of SEQ ID NO: 1561331
uaaugugguaucuggugau

SEQ ID NO: 1663664 - RNA, 19 nt, Artificial Sequence
  Description of Artificial Sequence: Synthetic oligonucleotide
  Antisense strand to SEQ ID NO: 1663663
aucaccagauaccacauua

SEQ ID NO: 1663665 - RNA, 19 nt, Artificial Sequence
  Description of Artificial Sequence: Synthetic oligonucleotide
  Sense strand starting at position 3773 of SEQ ID NO: 1561331
gugguaucuggugauacaa

SEQ ID NO: 1663666 - RNA, 19 nt, Artificial Sequence
  Description of Artificial Sequence: Synthetic oligonucleotide
  Antisense strand to SEQ ID NO: 1663665
uuguaucaccagauaccac

SEQ ID NO: 1663667 - RNA, 19 nt, Artificial Sequence
  Description of Artificial Sequence: Synthetic oligonucleotide
  Sense strand starting at position 3812 of SEQ ID NO: 1561331
gaauauagguacuggauuu

SEQ ID NO: 1663668 - RNA, 19 nt, Artificial Sequence
  Description of Artificial Sequence: Synthetic oligonucleotide
  Antisense strand to SEQ ID NO: 1663667
aaauccaguaccuauauuc

SEQ ID NO: 1663669 - RNA, 19 nt, Artificial Sequence
  Description of Artificial Sequence: Synthetic oligonucleotide
  Sense strand starting at position 3856 of SEQ ID NO: 1561331
uuaacauaggccugagacu

SEQ ID NO: 1663670 - RNA, 19 nt, Artificial Sequence
  Description of Artificial Sequence: Synthetic oligonucleotide
  Antisense strand to SEQ ID NO: 1663669
agucucaggccuauguuaa

SEQ ID NO: 1663671 - RNA, 19 nt, Artificial Sequence
  Description of Artificial Sequence: Synthetic oligonucleotide
  Sense strand starting at position 116 of SEQ ID NO: 1561332
aguccugaguuuccagaua

SEQ ID NO: 1663672 - RNA, 19 nt, Artificial Sequence
  Description of Artificial Sequence: Synthetic oligonucleotide
  Antisense strand to SEQ ID NO: 1663671
uaucuggaaacucaggacu

SEQ ID NO: 1663673 - RNA, 19 nt, Artificial Sequence
  Description of Artificial Sequence: Synthetic oligonucleotide
  Sense strand starting at position 265 of SEQ ID NO: 1561332
agccuuucuaccuggguga

SEQ ID NO: 1663674 - RNA, 19 nt, Artificial Sequence
  Description of Artificial Sequence: Synthetic oligonucleotide
  Antisense strand to SEQ ID NO: 1663673
ucacccagguagaaaggcu

SEQ ID NO: 1663675 - RNA, 19 nt, Artificial Sequence
  Description of Artificial Sequence: Synthetic oligonucleotide
  Sense strand starting at position 477 of SEQ ID NO: 1561332
ccaugauuauguguuaccu

SEQ ID NO: 1663676 - RNA, 19 nt, Artificial Sequence
  Description of Artificial Sequence: Synthetic oligonucleotide
  Antisense strand to SEQ ID NO: 1663675
agguaacacauaaucaugg

SEQ ID NO: 1663677 - RNA, 19 nt, Artificial Sequence
  Description of Artificial Sequence: Synthetic oligonucleotide
  Sense strand starting at position 485 of SEQ ID NO: 1561332
auguguuaccucuauauua

SEQ ID NO: 1663678 - RNA, 19 nt, Artificial Sequence
  Description of Artificial Sequence: Synthetic oligonucleotide
  Antisense strand to SEQ ID NO: 1663677
uaauauagagguaacacau

SEQ ID NO: 1663679 - RNA, 19 nt, Artificial Sequence
  Description of Artificial Sequence: Synthetic oligonucleotide
  Sense strand starting at position 487 of SEQ ID NO: 1561332
guguuaccucuauauuauu

SEQ ID NO: 1663680 - RNA, 19 nt, Artificial Sequence
  Description of Artificial Sequence: Synthetic oligonucleotide
  Antisense strand to SEQ ID NO: 1663679
aauaauauagagguaacac

SEQ ID NO: 1663681 - RNA, 19 nt, Artificial Sequence
  Description of Artificial Sequence: Synthetic oligonucleotide
  Sense strand starting at position 940 of SEQ ID NO: 1561332
auggcucaugcagaacaua

SEQ ID NO: 1663682 - RNA, 19 nt, Artificial Sequence
  Description of Artificial Sequence: Synthetic oligonucleotide
  Antisense strand to SEQ ID NO: 1663681
uauguucugcaugagccau

SEQ ID NO: 1663683 - RNA, 19 nt, Artificial Sequence
  Description of Artificial Sequence: Synthetic oligonucleotide
  Sense strand starting at position 1099 of SEQ ID NO: 1561332
cacuguauaguggaaaggu

SEQ ID NO: 1663684 - RNA, 19 nt, Artificial Sequence
  Description of Artificial Sequence: Synthetic oligonucleotide
  Antisense strand to SEQ ID NO: 1663683
accuuuccacuauacagug

SEQ ID NO: 1663685 - RNA, 19 nt, Artificial Sequence
  Description of Artificial Sequence: Synthetic oligonucleotide
  Sense strand starting at position 1151 of SEQ ID NO: 1561332
agcaacuaacgcuaaauua

SEQ ID NO: 1663686 - RNA, 19 nt, Artificial Sequence
  Description of Artificial Sequence: Synthetic oligonucleotide
  Antisense strand to SEQ ID NO: 1663685
uaauuuagcguuaguugcu

SEQ ID NO: 1663687 - RNA, 19 nt, Artificial Sequence
  Description of Artificial Sequence: Synthetic oligonucleotide
  Sense strand starting at position 1891 of SEQ ID NO: 1561332
ggaaguuugaaagguuccu

SEQ ID NO: 1663688 - RNA, 19 nt, Artificial Sequence
  Description of Artificial Sequence: Synthetic oligonucleotide
  Antisense strand to SEQ ID NO: 1663687
aggaaccuuucaaacuucc

SEQ ID NO: 1663689 - RNA, 19 nt, Artificial Sequence
  Description of Artificial Sequence: Synthetic oligonucleotide
  Sense strand starting at position 1908 of SEQ ID NO: 1561332
cugagaagcugaccugaau

SEQ ID NO: 1663690 - RNA, 19 nt, Artificial Sequence
  Description of Artificial Sequence: Synthetic oligonucleotide
  Antisense strand to SEQ ID NO: 1663689
auucaggucagcuucucag

SEQ ID NO: 1663691 - RNA, 19 nt, Artificial Sequence
  Description of Artificial Sequence: Synthetic oligonucleotide
  Sense strand starting at position 2042 of SEQ ID NO: 1561332
gccggaagugccuacaacu

SEQ ID NO: 1663692 - RNA, 19 nt, Artificial Sequence
  Description of Artificial Sequence: Synthetic oligonucleotide
  Antisense strand to SEQ ID NO: 1663691
aguuguaggcacuuccggc

SEQ ID NO: 1663693 - RNA, 19 nt, Artificial Sequence
  Description of Artificial Sequence: Synthetic oligonucleotide
  Sense strand starting at position 2062 of SEQ ID NO: 1561332
ccuagaacgauuggaccua

SEQ ID NO: 1663694 - RNA, 19 nt, Artificial Sequence
  Description of Artificial Sequence: Synthetic oligonucleotide
  Antisense strand to SEQ ID NO: 1663693
uagguccaaucguucuagg

SEQ ID NO: 1663695 - RNA, 19 nt, Artificial Sequence
  Description of Artificial Sequence: Synthetic oligonucleotide
  Sense strand starting at position 2297 of SEQ ID NO: 1561332
ccucacuucucuuuaggua

SEQ ID NO: 1663696 - RNA, 19 nt, Artificial Sequence
  Description of Artificial Sequence: Synthetic oligonucleotide
  Antisense strand to SEQ ID NO: 1663695
uaccuaaagagaagugagg

SEQ ID NO: 1663697 - RNA, 19 nt, Artificial Sequence
  Description of Artificial Sequence: Synthetic oligonucleotide
  Sense strand starting at position 2298 of SEQ ID NO: 1561332
cucacuucucuuuagguau

SEQ ID NO: 1663698 - RNA, 19 nt, Artificial Sequence
  Description of Artificial Sequence: Synthetic oligonucleotide
  Antisense strand to SEQ ID NO: 1663697
auaccuaaagagaagugag

SEQ ID NO: 1663699 - RNA, 19 nt, Artificial Sequence
  Description of Artificial Sequence: Synthetic oligonucleotide
  Sense strand starting at position 2313 of SEQ ID NO: 1561332
guauuauuauggucugagu

SEQ ID NO: 1663700 - RNA, 19 nt, Artificial Sequence
  Description of Artificial Sequence: Synthetic oligonucleotide
  Antisense strand to SEQ ID NO: 1663699
acucagaccauaauaauac

SEQ ID NO: 1663701 - RNA, 19 nt, Artificial Sequence
  Description of Artificial Sequence: Synthetic oligonucleotide
  Sense strand starting at position 2345 of SEQ ID NO: 1561332
accaaauucguauguuuaa

SEQ ID NO: 1663702 - RNA, 19 nt, Artificial Sequence
  Description of Artificial Sequence: Synthetic oligonucleotide
  Antisense strand to SEQ ID NO: 1663701
uuaaacauacgaauuuggu

SEQ ID NO: 1663703 - RNA, 19 nt, Artificial Sequence
  Description of Artificial Sequence: Synthetic oligonucleotide
  Sense strand starting at position 2346 of SEQ ID NO: 1561332
ccaaauucguauguuuaaa

SEQ ID NO: 1663704 - RNA, 19 nt, Artificial Sequence
  Description of Artificial Sequence: Synthetic oligonucleotide
  Antisense strand to SEQ ID NO: 1663703
uuuaaacauacgaauuugg

SEQ ID NO: 1663705 - RNA, 19 nt, Artificial Sequence
  Description of Artificial Sequence: Synthetic oligonucleotide
  Sense strand starting at position 2457 of SEQ ID NO: 1561332
uuauaaguggccugaggga

SEQ ID NO: 1663706 - RNA, 19 nt, Artificial Sequence
  Description of Artificial Sequence: Synthetic oligonucleotide
  Antisense strand to SEQ ID NO: 1663705
ucccucaggccacuuauaa

SEQ ID NO: 1663707 - RNA, 19 nt, Artificial Sequence
  Description of Artificial Sequence: Synthetic oligonucleotide
  Sense strand starting at position 2476 of SEQ ID NO: 1561332
gcuccuuugccucuuuagu

SEQ ID NO: 1663708 - RNA, 19 nt, Artificial Sequence
  Description of Artificial Sequence: Synthetic oligonucleotide
  Antisense strand to SEQ ID NO: 1663707
acuaaagaggcaaaggagc

SEQ ID NO: 1663709 - RNA, 19 nt, Artificial Sequence
  Description of Artificial Sequence: Synthetic oligonucleotide
  Sense strand starting at position 2486 of SEQ ID NO: 1561332
cucuuuaguuaugugagga

SEQ ID NO: 1663710 - RNA, 19 nt, Artificial Sequence
  Description of Artificial Sequence: Synthetic oligonucleotide
  Antisense strand to SEQ ID NO: 1663709
uccucacauaacuaaagag

SEQ ID NO: 1663711 - RNA, 19 nt, Artificial Sequence
  Description of Artificial Sequence: Synthetic oligonucleotide
  Sense strand starting at position 2487 of SEQ ID NO: 1561332
ucuuuaguuaugugaggac

SEQ ID NO: 1663712 - RNA, 19 nt, Artificial Sequence
  Description of Artificial Sequence: Synthetic oligonucleotide
  Antisense strand to SEQ ID NO: 1663711
guccucacauaacuaaaga

SEQ ID NO: 1663713 - RNA, 19 nt, Artificial Sequence
  Description of Artificial Sequence: Synthetic oligonucleotide
  Sense strand starting at position 2517 of SEQ ID NO: 1561332
gaccauguaugacuuagaa

SEQ ID NO: 1663714 - RNA, 19 nt, Artificial Sequence
  Description of Artificial Sequence: Synthetic oligonucleotide
  Antisense strand to SEQ ID NO: 1663713
uucuaagucauacaugguc

SEQ ID NO: 1663715 - RNA, 19 nt, Artificial Sequence
  Description of Artificial Sequence: Synthetic oligonucleotide
  Sense strand starting at position 2771 of SEQ ID NO: 1561332
uaguaaugugaaugaacaa

SEQ ID NO: 1663716 - RNA, 19 nt, Artificial Sequence
  Description of Artificial Sequence: Synthetic oligonucleotide
  Antisense strand to SEQ ID NO: 1663715
uuguucauucacauuacua

SEQ ID NO: 1663717 - RNA, 19 nt, Artificial Sequence
  Description of Artificial Sequence: Synthetic oligonucleotide
  Sense strand starting at position 2823 of SEQ ID NO: 1561332
ugaagacauuauguccaau

SEQ ID NO: 1663718 - RNA, 19 nt, Artificial Sequence
  Description of Artificial Sequence: Synthetic oligonucleotide
  Antisense strand to SEQ ID NO: 1663717
auuggacauaaugucuuca

SEQ ID NO: 1663719 - RNA, 19 nt, Artificial Sequence
  Description of Artificial Sequence: Synthetic oligonucleotide
  Sense strand starting at position 2924 of SEQ ID NO: 1561332
gaaaguaaauuaguugucu

SEQ ID NO: 1663720 - RNA, 19 nt, Artificial Sequence
  Description of Artificial Sequence: Synthetic oligonucleotide
  Antisense strand to SEQ ID NO: 1663719
agacaacuaauuuacuuuc

SEQ ID NO: 1663721 - RNA, 19 nt, Artificial Sequence
  Description of Artificial Sequence: Synthetic oligonucleotide
  Sense strand starting at position 2928 of SEQ ID NO: 1561332
guaaauuaguugucuccaa

SEQ ID NO: 1663722 - RNA, 19 nt, Artificial Sequence
  Description of Artificial Sequence: Synthetic oligonucleotide
  Antisense strand to SEQ ID NO: 1663721
uuggagacaacuaauuuac

SEQ ID NO: 1663723 - RNA, 19 nt, Artificial Sequence
  Description of Artificial Sequence: Synthetic oligonucleotide
  Sense strand starting at position 2932 of SEQ ID NO: 1561332
auuaguugucuccaaggcu

SEQ ID NO: 1663724 - RNA, 19 nt, Artificial Sequence
  Description of Artificial Sequence: Synthetic oligonucleotide
  Antisense strand to SEQ ID NO: 1663723
agccuuggagacaacuaau

SEQ ID NO: 1663725 - RNA, 19 nt, Artificial Sequence
  Description of Artificial Sequence: Synthetic oligonucleotide
  Sense strand starting at position 2953 of SEQ ID NO: 1561332
ggagauguaguugggaaug

SEQ ID NO: 1663726 - RNA, 19 nt, Artificial Sequence
  Description of Artificial Sequence: Synthetic oligonucleotide
  Antisense strand to SEQ ID NO: 1663725
cauucccaacuacaucucc

SEQ ID NO: 1663727 - RNA, 19 nt, Artificial Sequence
  Description of Artificial Sequence: Synthetic oligonucleotide
  Sense strand starting at position 3028 of SEQ ID NO: 1561332
cuuguuauguuucccagaa

SEQ ID NO: 1663728 - RNA, 19 nt, Artificial Sequence
  Description of Artificial Sequence: Synthetic oligonucleotide
  Antisense strand to SEQ ID NO: 1663727
uucugggaaacauaacaag

SEQ ID NO: 1663729 - RNA, 19 nt, Artificial Sequence
  Description of Artificial Sequence: Synthetic oligonucleotide
  Sense strand starting at position 3029 of SEQ ID NO: 1561332
uuguuauguuucccagaau

SEQ ID NO: 1663730 - RNA, 19 nt, Artificial Sequence
  Description of Artificial Sequence: Synthetic oligonucleotide
  Antisense strand to SEQ ID NO: 1663729
auucugggaaacauaacaa

SEQ ID NO: 1663731 - RNA, 19 nt, Artificial Sequence
  Description of Artificial Sequence: Synthetic oligonucleotide
  Sense strand starting at position 3217 of SEQ ID NO: 1561332
ggauuagauagugguaauc

SEQ ID NO: 1663732 - RNA, 19 nt, Artificial Sequence
  Description of Artificial Sequence: Synthetic oligonucleotide
  Antisense strand to SEQ ID NO: 1663731
gauuaccacuaucuaaucc

SEQ ID NO: 1663733 - RNA, 19 nt, Artificial Sequence
  Description of Artificial Sequence: Synthetic oligonucleotide
  Sense strand starting at position 3361 of SEQ ID NO: 1561332
gcaaguuaggcccacagau

SEQ ID NO: 1663734 - RNA, 19 nt, Artificial Sequence
  Description of Artificial Sequence: Synthetic oligonucleotide
  Antisense strand to SEQ ID NO: 1663733
aucugugggccuaacuugc

SEQ ID NO: 1663735 - RNA, 19 nt, Artificial Sequence
  Description of Artificial Sequence: Synthetic oligonucleotide
  Sense strand starting at position 3519 of SEQ ID NO: 1561332
uccucuugacugugaacaa

SEQ ID NO: 1663736 - RNA, 19 nt, Artificial Sequence
  Description of Artificial Sequence: Synthetic oligonucleotide
  Antisense strand to SEQ ID NO: 1663735
uuguucacagucaagagga

SEQ ID NO: 1663737 - RNA, 19 nt, Artificial Sequence
  Description of Artificial Sequence: Synthetic oligonucleotide
  Sense strand starting at position 3588 of SEQ ID NO: 1561332
ucuugugacuaaccugaaa

SEQ ID NO: 1663738 - RNA, 19 nt, Artificial Sequence
  Description of Artificial Sequence: Synthetic oligonucleotide
  Antisense strand to SEQ ID NO: 1663737
uuucagguuagucacaaga

SEQ ID NO: 1663739 - RNA, 19 nt, Artificial Sequence
  Description of Artificial Sequence: Synthetic oligonucleotide
  Sense strand starting at position 3641 of SEQ ID NO: 1561332
ccuacagucuuaucaguua

SEQ ID NO: 1663740 - RNA, 19 nt, Artificial Sequence
  Description of Artificial Sequence: Synthetic oligonucleotide
  Antisense strand to SEQ ID NO: 1663739
uaacugauaagacuguagg

SEQ ID NO: 1663741 - RNA, 19 nt, Artificial Sequence
  Description of Artificial Sequence: Synthetic oligonucleotide
  Sense strand starting at position 3735 of SEQ ID NO: 1561332
uaaugugguaucuggugau

SEQ ID NO: 1663742 - RNA, 19 nt, Artificial Sequence
  Description of Artificial Sequence: Synthetic oligonucleotide
  Antisense strand to SEQ ID NO: 1663741
aucaccagauaccacauua

SEQ ID NO: 1663743 - RNA, 19 nt, Artificial Sequence
  Description of Artificial Sequence: Synthetic oligonucleotide
  Sense strand starting at position 3739 of SEQ ID NO: 1561332
gugguaucuggugauacaa

SEQ ID NO: 1663744 - RNA, 19 nt, Artificial Sequence
  Description of Artificial Sequence: Synthetic oligonucleotide
  Antisense strand to SEQ ID NO: 1663743
uuguaucaccagauaccac

SEQ ID NO: 1663745 - RNA, 19 nt, Artificial Sequence
  Description of Artificial Sequence: Synthetic oligonucleotide
  Sense strand starting at position 3778 of SEQ ID NO: 1561332
gaauauagguacuggauuu

SEQ ID NO: 1663746 - RNA, 19 nt, Artificial Sequence
  Description of Artificial Sequence: Synthetic oligonucleotide
  Antisense strand to SEQ ID NO: 1663745
aaauccaguaccuauauuc

SEQ ID NO: 1663747 - RNA, 19 nt, Artificial Sequence
  Description of Artificial Sequence: Synthetic oligonucleotide
  Sense strand starting at position 3822 of SEQ ID NO: 1561332
uuaacauaggccugagacu

SEQ ID NO: 1663748 - RNA, 19 nt, Artificial Sequence
  Description of Artificial Sequence: Synthetic oligonucleotide
  Antisense strand to SEQ ID NO: 1663747
agucucaggccuauguuaa

SEQ ID NO: 1663749 - RNA, 19 nt, Artificial Sequence
  Description of Artificial Sequence: Synthetic oligonucleotide
  Sense strand starting at position 3950 of SEQ ID NO: 1561332
aucugucuccuccagagga

SEQ ID NO: 1663750 - RNA, 19 nt, Artificial Sequence
  Description of Artificial Sequence: Synthetic oligonucleotide
  Antisense strand to SEQ ID NO: 1663749
uccucuggaggagacagau

SEQ ID NO: 1663751 - RNA, 19 nt, Artificial Sequence
  Description of Artificial Sequence: Synthetic oligonucleotide
  Sense strand starting at position 615 of SEQ ID NO: 1561333
agugcaucucuauaaugag

SEQ ID NO: 1663752 - RNA, 19 nt, Artificial Sequence
  Description of Artificial Sequence: Synthetic oligonucleotide
  Antisense strand to SEQ ID NO: 1663751
cucauuauagagaugcacu

SEQ ID NO: 1663753 - RNA, 19 nt, Artificial Sequence
  Description of Artificial Sequence: Synthetic oligonucleotide
  Sense strand starting at position 687 of SEQ ID NO: 1561333
aaguaagugagauguugca

SEQ ID NO: 1663754 - RNA, 19 nt, Artificial Sequence
  Description of Artificial Sequence: Synthetic oligonucleotide
  Antisense strand to SEQ ID NO: 1663753
ugcaacaucucacuuacuu

SEQ ID NO: 1663755 - RNA, 19 nt, Artificial Sequence
  Description of Artificial Sequence: Synthetic oligonucleotide
  Sense strand starting at position 805 of SEQ ID NO: 1561333
ccgguagccauauggauua

SEQ ID NO: 1663756 - RNA, 19 nt, Artificial Sequence
  Description of Artificial Sequence: Synthetic oligonucleotide
  Antisense strand to SEQ ID NO: 1663755
uaauccauauggcuaccgg

SEQ ID NO: 1663757 - RNA, 19 nt, Artificial Sequence
  Description of Artificial Sequence: Synthetic oligonucleotide
  Sense strand starting at position 810 of SEQ ID NO: 1561333
agccauauggauuacuauu

SEQ ID NO: 1663758 - RNA, 19 nt, Artificial Sequence
  Description of Artificial Sequence: Synthetic oligonucleotide
  Antisense strand to SEQ ID NO: 1663757
aauaguaauccauauggcu

SEQ ID NO: 1663759 - RNA, 19 nt, Artificial Sequence
  Description of Artificial Sequence: Synthetic oligonucleotide
  Sense strand starting at position 838 of SEQ ID NO: 1561333
ugaagacgacuguaucauu

SEQ ID NO: 1663760 - RNA, 19 nt, Artificial Sequence
  Description of Artificial Sequence: Synthetic oligonucleotide
  Antisense strand to SEQ ID NO: 1663759
aaugauacagucgucuuca

SEQ ID NO: 1663761 - RNA, 19 nt, Artificial Sequence
  Description of Artificial Sequence: Synthetic oligonucleotide
  Sense strand starting at position 843 of SEQ ID NO: 1561333
acgacuguaucauugagau

SEQ ID NO: 1663762 - RNA, 19 nt, Artificial Sequence
  Description of Artificial Sequence: Synthetic oligonucleotide
  Antisense strand to SEQ ID NO: 1663761
aucucaaugauacagucgu

SEQ ID NO: 1663763 - RNA, 19 nt, Artificial Sequence
  Description of Artificial Sequence: Synthetic oligonucleotide
  Sense strand starting at position 996 of SEQ ID NO: 1561333
guugaauaacuucgggaaa

SEQ ID NO: 1663764 - RNA, 19 nt, Artificial Sequence
  Description of Artificial Sequence: Synthetic oligonucleotide
  Antisense strand to SEQ ID NO: 1663763
uuucccgaaguuauucaac

SEQ ID NO: 1663765 - RNA, 19 nt, Artificial Sequence
  Description of Artificial Sequence: Synthetic oligonucleotide
  Sense strand starting at position 1207 of SEQ ID NO: 1561333
uaacuuacugagugacgga

SEQ ID NO: 1663766 - RNA, 19 nt, Artificial Sequence
  Description of Artificial Sequence: Synthetic oligonucleotide
  Antisense strand to SEQ ID NO: 1663765
uccgucacucaguaaguua

SEQ ID NO: 1663767 - RNA, 19 nt, Artificial Sequence
  Description of Artificial Sequence: Synthetic oligonucleotide
  Sense strand starting at position 1221 of SEQ ID NO: 1561333
acggaaacuugauuaacug

SEQ ID NO: 1663768 - RNA, 19 nt, Artificial Sequence
  Description of Artificial Sequence: Synthetic oligonucleotide
  Antisense strand to SEQ ID NO: 1663767
caguuaaucaaguuuccgu

SEQ ID NO: 1663769 - RNA, 19 nt, Artificial Sequence
  Description of Artificial Sequence: Synthetic oligonucleotide
  Sense strand starting at position 1502 of SEQ ID NO: 1561333
acagaaaggccauggcaua

SEQ ID NO: 1663770 - RNA, 19 nt, Artificial Sequence
  Description of Artificial Sequence: Synthetic oligonucleotide
  Antisense strand to SEQ ID NO: 1663769
uaugccauggccuuucugu

SEQ ID NO: 1663771 - RNA, 19 nt, Artificial Sequence
  Description of Artificial Sequence: Synthetic oligonucleotide
  Sense strand starting at position 1515 of SEQ ID NO: 1561333
ggcauaaagcccugacuuu

SEQ ID NO: 1663772 - RNA, 19 nt, Artificial Sequence
  Description of Artificial Sequence: Synthetic oligonucleotide
  Antisense strand to SEQ ID NO: 1663771
aaagucagggcuuuaugcc

SEQ ID NO: 1663773 - RNA, 19 nt, Artificial Sequence
  Description of Artificial Sequence: Synthetic oligonucleotide
  Sense strand starting at position 1636 of SEQ ID NO: 1561333
agguuugacccguauuauc

SEQ ID NO: 1663774 - RNA, 19 nt, Artificial Sequence
  Description of Artificial Sequence: Synthetic oligonucleotide
  Antisense strand to SEQ ID NO: 1663773
gauaauacgggucaaaccu

SEQ ID NO: 1663775 - RNA, 19 nt, Artificial Sequence
  Description of Artificial Sequence: Synthetic oligonucleotide
  Sense strand starting at position 1683 of SEQ ID NO: 1561333
aguaacgacuaucuuuauu

SEQ ID NO: 1663776 - RNA, 19 nt, Artificial Sequence
  Description of Artificial Sequence: Synthetic oligonucleotide
  Antisense strand to SEQ ID NO: 1663775
aauaaagauagucguuacu

SEQ ID NO: 1663777 - RNA, 19 nt, Artificial Sequence
  Description of Artificial Sequence: Synthetic oligonucleotide
  Sense strand starting at position 1688 of SEQ ID NO: 1561333
cgacuaucuuuauugcuau

SEQ ID NO: 1663778 - RNA, 19 nt, Artificial Sequence
  Description of Artificial Sequence: Synthetic oligonucleotide
  Antisense strand to SEQ ID NO: 1663777
auagcaauaaagauagucg

SEQ ID NO: 1663779 - RNA, 19 nt, Artificial Sequence
  Description of Artificial Sequence: Synthetic oligonucleotide
  Sense strand starting at position 1750 of SEQ ID NO: 1561333
uguuuauuauacccacaga

SEQ ID NO: 1663780 - RNA, 19 nt, Artificial Sequence
  Description of Artificial Sequence: Synthetic oligonucleotide
  Antisense strand to SEQ ID NO: 1663779
ucuguggguauaauaaaca

SEQ ID NO: 1663781 - RNA, 19 nt, Artificial Sequence
  Description of Artificial Sequence: Synthetic oligonucleotide
  Sense strand starting at position 2054 of SEQ ID NO: 1561333
auuguuuccggacagaguu

SEQ ID NO: 1663782 - RNA, 19 nt, Artificial Sequence
  Description of Artificial Sequence: Synthetic oligonucleotide
  Antisense strand to SEQ ID NO: 1663781
aacucuguccggaaacaau

SEQ ID NO: 1663783 - RNA, 19 nt, Artificial Sequence
  Description of Artificial Sequence: Synthetic oligonucleotide
  Sense strand starting at position 2067 of SEQ ID NO: 1561333
agaguucuggaauacguuu

SEQ ID NO: 1663784 - RNA, 19 nt, Artificial Sequence
  Description of Artificial Sequence: Synthetic oligonucleotide
  Antisense strand to SEQ ID NO: 1663783
aaacguauuccagaacucu

SEQ ID NO: 1663785 - RNA, 19 nt, Artificial Sequence
  Description of Artificial Sequence: Synthetic oligonucleotide
  Sense strand starting at position 2074 of SEQ ID NO: 1561333
uggaauacguuucccagaa

SEQ ID NO: 1663786 - RNA, 19 nt, Artificial Sequence
  Description of Artificial Sequence: Synthetic oligonucleotide
  Antisense strand to SEQ ID NO: 1663785
uucugggaaacguauucca

SEQ ID NO: 1663787 - RNA, 19 nt, Artificial Sequence
  Description of Artificial Sequence: Synthetic oligonucleotide
  Sense strand starting at position 2075 of SEQ ID NO: 1561333
ggaauacguuucccagaac

SEQ ID NO: 1663788 - RNA, 19 nt, Artificial Sequence
  Description of Artificial Sequence: Synthetic oligonucleotide
  Antisense strand to SEQ ID NO: 1663787
guucugggaaacguauucc

SEQ ID NO: 1663789 - RNA, 19 nt, Artificial Sequence
  Description of Artificial Sequence: Synthetic oligonucleotide
  Sense strand starting at position 2078 of SEQ ID NO: 1561333
auacguuucccagaacuuc

SEQ ID NO: 1663790 - RNA, 19 nt, Artificial Sequence
  Description of Artificial Sequence: Synthetic oligonucleotide
  Antisense strand to SEQ ID NO: 1663789
gaaguucugggaaacguau

SEQ ID NO: 1663791 - RNA, 19 nt, Artificial Sequence
  Description of Artificial Sequence: Synthetic oligonucleotide
  Sense strand starting at position 2122 of SEQ ID NO: 1561333
gcccucuucgcgcuugaaa

SEQ ID NO: 1663792 - RNA, 19 nt, Artificial Sequence
  Description of Artificial Sequence: Synthetic oligonucleotide
  Antisense strand to SEQ ID NO: 1663791
uuucaagcgcgaagagggc

SEQ ID NO: 1663793 - RNA, 19 nt, Artificial Sequence
  Description of Artificial Sequence: Synthetic oligonucleotide
  Sense strand starting at position 2271 of SEQ ID NO: 1561333
ugaagcaguucucugaugu

SEQ ID NO: 1663794 - RNA, 19 nt, Artificial Sequence
  Description of Artificial Sequence: Synthetic oligonucleotide
  Antisense strand to SEQ ID NO: 1663793
acaucagagaacugcuuca

SEQ ID NO: 1663795 - RNA, 19 nt, Artificial Sequence
  Description of Artificial Sequence: Synthetic oligonucleotide
  Sense strand starting at position 2281 of SEQ ID NO: 1561333
cucugaugucaguggaauu

SEQ ID NO: 1663796 - RNA, 19 nt, Artificial Sequence
  Description of Artificial Sequence: Synthetic oligonucleotide
  Antisense strand to SEQ ID NO: 1663795
aauuccacugacaucagag

SEQ ID NO: 1663797 - RNA, 19 nt, Artificial Sequence
  Description of Artificial Sequence: Synthetic oligonucleotide
  Sense strand starting at position 2654 of SEQ ID NO: 1561333
cagaucacgugauccugua

SEQ ID NO: 1663798 - RNA, 19 nt, Artificial Sequence
  Description of Artificial Sequence: Synthetic oligonucleotide
  Antisense strand to SEQ ID NO: 1663797
uacaggaucacgugaucug

SEQ ID NO: 1663799 - RNA, 19 nt, Artificial Sequence
  Description of Artificial Sequence: Synthetic oligonucleotide
  Sense strand starting at position 2875 of SEQ ID NO: 1561333
agaacaacuugcuuacuga

SEQ ID NO: 1663800 - RNA, 19 nt, Artificial Sequence
  Description of Artificial Sequence: Synthetic oligonucleotide
  Antisense strand to SEQ ID NO: 1663799
ucaguaagcaaguuguucu

SEQ ID NO: 1663801 - RNA, 19 nt, Artificial Sequence
  Description of Artificial Sequence: Synthetic oligonucleotide
  Sense strand starting at position 2916 of SEQ ID NO: 1561333
caagcuuuggcauauggua

SEQ ID NO: 1663802 - RNA, 19 nt, Artificial Sequence
  Description of Artificial Sequence: Synthetic oligonucleotide
  Antisense strand to SEQ ID NO: 1663801
uaccauaugccaaagcuug

SEQ ID NO: 1663803 - RNA, 19 nt, Artificial Sequence
  Description of Artificial Sequence: Synthetic oligonucleotide
  Sense strand starting at position 2918 of SEQ ID NO: 1561333
agcuuuggcauaugguaga

SEQ ID NO: 1663804 - RNA, 19 nt, Artificial Sequence
  Description of Artificial Sequence: Synthetic oligonucleotide
  Antisense strand to SEQ ID NO: 1663803
ucuaccauaugccaaagcu

SEQ ID NO: 1663805 - RNA, 19 nt, Artificial Sequence
  Description of Artificial Sequence: Synthetic oligonucleotide
  Sense strand starting at position 2964 of SEQ ID NO: 1561333
uguaaucauuccucaagga

SEQ ID NO: 1663806 - RNA, 19 nt, Artificial Sequence
  Description of Artificial Sequence: Synthetic oligonucleotide
  Antisense strand to SEQ ID NO: 1663805
uccuugaggaaugauuaca

SEQ ID NO: 1663807 - RNA, 19 nt, Artificial Sequence
  Description of Artificial Sequence: Synthetic oligonucleotide
  Sense strand starting at position 2977 of SEQ ID NO: 1561333
caaggaguuucugaauuug

SEQ ID NO: 1663808 - RNA, 19 nt, Artificial Sequence
  Description of Artificial Sequence: Synthetic oligonucleotide
  Antisense strand to SEQ ID NO: 1663807
caaauucagaaacuccuug

SEQ ID NO: 1663809 - RNA, 19 nt, Artificial Sequence
  Description of Artificial Sequence: Synthetic oligonucleotide
  Sense strand starting at position 2983 of SEQ ID NO: 1561333
guuucugaauuugaaagau

SEQ ID NO: 1663810 - RNA, 19 nt, Artificial Sequence
  Description of Artificial Sequence: Synthetic oligonucleotide
  Antisense strand to SEQ ID NO: 1663809
aucuuucaaauucagaaac

SEQ ID NO: 1663811 - RNA, 19 nt, Artificial Sequence
  Description of Artificial Sequence: Synthetic oligonucleotide
  Sense strand starting at position 3021 of SEQ ID NO: 1561333
guguuuaaaccuugaucuu

SEQ ID NO: 1663812 - RNA, 19 nt, Artificial Sequence
  Description of Artificial Sequence: Synthetic oligonucleotide
  Antisense strand to SEQ ID NO: 1663811
aagaucaagguuuaaacac

SEQ ID NO: 1663813 - RNA, 19 nt, Artificial Sequence
  Description of Artificial Sequence: Synthetic oligonucleotide
  Sense strand starting at position 3044 of SEQ ID NO: 1561333
ugcuuaaauguauaaugga

SEQ ID NO: 1663814 - RNA, 19 nt, Artificial Sequence
  Description of Artificial Sequence: Synthetic oligonucleotide
  Antisense strand to SEQ ID NO: 1663813
uccauuauacauuuaagca

SEQ ID NO: 1663815 - RNA, 19 nt, Artificial Sequence
  Description of Artificial Sequence: Synthetic oligonucleotide
  Sense strand starting at position 3053 of SEQ ID NO: 1561333
guauaauggaauugauguu

SEQ ID NO: 1663816 - RNA, 19 nt, Artificial Sequence
  Description of Artificial Sequence: Synthetic oligonucleotide
  Antisense strand to SEQ ID NO: 1663815
aacaucaauuccauuauac

SEQ ID NO: 1663817 - RNA, 19 nt, Artificial Sequence
  Description of Artificial Sequence: Synthetic oligonucleotide
  Sense strand starting at position 3059 of SEQ ID NO: 1561333
uggaauugauguuuccaag

SEQ ID NO: 1663818 - RNA, 19 nt, Artificial Sequence
  Description of Artificial Sequence: Synthetic oligonucleotide
  Antisense strand to SEQ ID NO: 1663817
cuuggaaacaucaauucca

SEQ ID NO: 1663819 - RNA, 19 nt, Artificial Sequence
  Description of Artificial Sequence: Synthetic oligonucleotide
  Sense strand starting at position 3209 of SEQ ID NO: 1561333
aaguaugugccaggaacua

SEQ ID NO: 1663820 - RNA, 19 nt, Artificial Sequence
  Description of Artificial Sequence: Synthetic oligonucleotide
  Antisense strand to SEQ ID NO: 1663819
uaguuccuggcacauacuu

SEQ ID NO: 1663821 - RNA, 19 nt, Artificial Sequence
  Description of Artificial Sequence: Synthetic oligonucleotide
  Sense strand starting at position 3246 of SEQ ID NO: 1561333
augggacccucacuacauu

SEQ ID NO: 1663822 - RNA, 19 nt, Artificial Sequence
  Description of Artificial Sequence: Synthetic oligonucleotide
  Antisense strand to SEQ ID NO: 1663821
aauguagugagggucccau

SEQ ID NO: 1663823 - RNA, 19 nt, Artificial Sequence
  Description of Artificial Sequence: Synthetic oligonucleotide
  Sense strand starting at position 3653 of SEQ ID NO: 1561333
cuaguuuacucuuugggau

SEQ ID NO: 1663824 - RNA, 19 nt, Artificial Sequence
  Description of Artificial Sequence: Synthetic oligonucleotide
  Antisense strand to SEQ ID NO: 1663823
aucccaaagaguaaacuag

SEQ ID NO: 1663825 - RNA, 19 nt, Artificial Sequence
  Description of Artificial Sequence: Synthetic oligonucleotide
  Sense strand starting at position 3654 of SEQ ID NO: 1561333
uaguuuacucuuugggauc

SEQ ID NO: 1663826 - RNA, 19 nt, Artificial Sequence
  Description of Artificial Sequence: Synthetic oligonucleotide
  Antisense strand to SEQ ID NO: 1663825
gaucccaaagaguaaacua

SEQ ID NO: 1663827 - RNA, 19 nt, Artificial Sequence
  Description of Artificial Sequence: Synthetic oligonucleotide
  Sense strand starting at position 3681 of SEQ ID NO: 1561333
gagagagguuaaguauauc

SEQ ID NO: 1663828 - RNA, 19 nt, Artificial Sequence
  Description of Artificial Sequence: Synthetic oligonucleotide
  Antisense strand to SEQ ID NO: 1663827
gauauacuuaaccucucuc

SEQ ID NO: 1663829 - RNA, 19 nt, Artificial Sequence
  Description of Artificial Sequence: Synthetic oligonucleotide
  Sense strand starting at position 3687 of SEQ ID NO: 1561333
gguuaaguauaucuccuaa

SEQ ID NO: 1663830 - RNA, 19 nt, Artificial Sequence
  Description of Artificial Sequence: Synthetic oligonucleotide
  Antisense strand to SEQ ID NO: 1663829
uuaggagauauacuuaacc

SEQ ID NO: 1663831 - RNA, 19 nt, Artificial Sequence
  Description of Artificial Sequence: Synthetic oligonucleotide
  Sense strand starting at position 30 of SEQ ID NO: 1561334
agcauuaaccuaggaauac

SEQ ID NO: 1663832 - RNA, 19 nt, Artificial Sequence
  Description of Artificial Sequence: Synthetic oligonucleotide
  Antisense strand to SEQ ID NO: 1663831
guauuccuagguuaaugcu

SEQ ID NO: 1663833 - RNA, 19 nt, Artificial Sequence
  Description of Artificial Sequence: Synthetic oligonucleotide
  Sense strand starting at position 140 of SEQ ID NO: 1561334
aaagguaauuguucucaug

SEQ ID NO: 1663834 - RNA, 19 nt, Artificial Sequence
  Description of Artificial Sequence: Synthetic oligonucleotide
  Antisense strand to SEQ ID NO: 1663833
caugagaacaauuaccuuu

SEQ ID NO: 1663835 - RNA, 19 nt, Artificial Sequence
  Description of Artificial Sequence: Synthetic oligonucleotide
  Sense strand starting at position 175 of SEQ ID NO: 1561334
ggguuaaucucucuacaaa

SEQ ID NO: 1663836 - RNA, 19 nt, Artificial Sequence
  Description of Artificial Sequence: Synthetic oligonucleotide
  Antisense strand to SEQ ID NO: 1663835
uuuguagagagauuaaccc

SEQ ID NO: 1663837 - RNA, 19 nt, Artificial Sequence
  Description of Artificial Sequence: Synthetic oligonucleotide
  Sense strand starting at position 264 of SEQ ID NO: 1561334
acaagaauguaggugcuau

SEQ ID NO: 1663838 - RNA, 19 nt, Artificial Sequence
  Description of Artificial Sequence: Synthetic oligonucleotide
  Antisense strand to SEQ ID NO: 1663837
auagcaccuacauucuugu

SEQ ID NO: 1663839 - RNA, 19 nt, Artificial Sequence
  Description of Artificial Sequence: Synthetic oligonucleotide
  Sense strand starting at position 276 of SEQ ID NO: 1561334
gugcuaucaggugaacaua

SEQ ID NO: 1663840 - RNA, 19 nt, Artificial Sequence
  Description of Artificial Sequence: Synthetic oligonucleotide
  Antisense strand to SEQ ID NO: 1663839
uauguucaccugauagcac

SEQ ID NO: 1663841 - RNA, 19 nt, Artificial Sequence
  Description of Artificial Sequence: Synthetic oligonucleotide
  Sense strand starting at position 718 of SEQ ID NO: 1561334
aguguaagccuuuacugac

SEQ ID NO: 1663842 - RNA, 19 nt, Artificial Sequence
  Description of Artificial Sequence: Synthetic oligonucleotide
  Antisense strand to SEQ ID NO: 1663841
gucaguaaaggcuuacacu

SEQ ID NO: 1663843 - RNA, 19 nt, Artificial Sequence
  Description of Artificial Sequence: Synthetic oligonucleotide
  Sense strand starting at position 849 of SEQ ID NO: 1561334
augaacauuugugauauca

SEQ ID NO: 1663844 - RNA, 19 nt, Artificial Sequence
  Description of Artificial Sequence: Synthetic oligonucleotide
  Antisense strand to SEQ ID NO: 1663843
ugauaucacaaauguucau

SEQ ID NO: 1663845 - RNA, 19 nt, Artificial Sequence
  Description of Artificial Sequence: Synthetic oligonucleotide
  Sense strand starting at position 857 of SEQ ID NO: 1561334
uugugauaucaaugggaug

SEQ ID NO: 1663846 - RNA, 19 nt, Artificial Sequence
  Description of Artificial Sequence: Synthetic oligonucleotide
  Antisense strand to SEQ ID NO: 1663845
caucccauugauaucacaa

SEQ ID NO: 1663847 - RNA, 19 nt, Artificial Sequence
  Description of Artificial Sequence: Synthetic oligonucleotide
  Sense strand starting at position 981 of SEQ ID NO: 1561334
auacaauuaucuccgagaa

SEQ ID NO: 1663848 - RNA, 19 nt, Artificial Sequence
  Description of Artificial Sequence: Synthetic oligonucleotide
  Antisense strand to SEQ ID NO: 1663847
uucucggagauaauuguau

SEQ ID NO: 1663849 - RNA, 19 nt, Artificial Sequence
  Description of Artificial Sequence: Synthetic oligonucleotide
  Sense strand starting at position 1464 of SEQ ID NO: 1561334
ggaaucaacuuccuguuua

SEQ ID NO: 1663850 - RNA, 19 nt, Artificial Sequence
  Description of Artificial Sequence: Synthetic oligonucleotide
  Antisense strand to SEQ ID NO: 1663849
uaaacaggaaguugauucc

SEQ ID NO: 1663851 - RNA, 19 nt, Artificial Sequence
  Description of Artificial Sequence: Synthetic oligonucleotide
  Sense strand starting at position 1483 of SEQ ID NO: 1561334
cagaaaugacuucgcagaa

SEQ ID NO: 1663852 - RNA, 19 nt, Artificial Sequence
  Description of Artificial Sequence: Synthetic oligonucleotide
  Antisense strand to SEQ ID NO: 1663851
uucugcgaagucauuucug

SEQ ID NO: 1663853 - RNA, 19 nt, Artificial Sequence
  Description of Artificial Sequence: Synthetic oligonucleotide
  Sense strand starting at position 1484 of SEQ ID NO: 1561334
agaaaugacuucgcagaaa

SEQ ID NO: 1663854 - RNA, 19 nt, Artificial Sequence
  Description of Artificial Sequence: Synthetic oligonucleotide
  Antisense strand to SEQ ID NO: 1663853
uuucugcgaagucauuucu

SEQ ID NO: 1663855 - RNA, 19 nt, Artificial Sequence
  Description of Artificial Sequence: Synthetic oligonucleotide
  Sense strand starting at position 1935 of SEQ ID NO: 1561334
gggacuaccuuucccagaa

SEQ ID NO: 1663856 - RNA, 19 nt, Artificial Sequence
  Description of Artificial Sequence: Synthetic oligonucleotide
  Antisense strand to SEQ ID NO: 1663855
uucugggaaagguaguccc

SEQ ID NO: 1663857 - RNA, 19 nt, Artificial Sequence
  Description of Artificial Sequence: Synthetic oligonucleotide
  Sense strand starting at position 2075 of SEQ ID NO: 1561334
gucuuuacucaguacuaac

SEQ ID NO: 1663858 - RNA, 19 nt, Artificial Sequence
  Description of Artificial Sequence: Synthetic oligonucleotide
  Antisense strand to SEQ ID NO: 1663857
guuaguacugaguaaagac

SEQ ID NO: 1663859 - RNA, 19 nt, Artificial Sequence
  Description of Artificial Sequence: Synthetic oligonucleotide
  Sense strand starting at position 2093 of SEQ ID NO: 1561334
cauauucgcguuguagcaa

SEQ ID NO: 1663860 - RNA, 19 nt, Artificial Sequence
  Description of Artificial Sequence: Synthetic oligonucleotide
  Antisense strand to SEQ ID NO: 1663859
uugcuacaacgcgaauaug

SEQ ID NO: 1663861 - RNA, 19 nt, Artificial Sequence
  Description of Artificial Sequence: Synthetic oligonucleotide
  Sense strand starting at position 2104 of SEQ ID NO: 1561334
uguagcaaaccugacuaua

SEQ ID NO: 1663862 - RNA, 19 nt, Artificial Sequence
  Description of Artificial Sequence: Synthetic oligonucleotide
  Antisense strand to SEQ ID NO: 1663861
uauagucagguuugcuaca

SEQ ID NO: 1663863 - RNA, 19 nt, Artificial Sequence
  Description of Artificial Sequence: Synthetic oligonucleotide
  Sense strand starting at position 2141 of SEQ ID NO: 1561334
aucccaucaccagggauau

SEQ ID NO: 1663864 - RNA, 19 nt, Artificial Sequence
  Description of Artificial Sequence: Synthetic oligonucleotide
  Antisense strand to SEQ ID NO: 1663863
auaucccuggugaugggau

SEQ ID NO: 1663865 - RNA, 19 nt, Artificial Sequence
  Description of Artificial Sequence: Synthetic oligonucleotide
  Sense strand starting at position 2142 of SEQ ID NO: 1561334
ucccaucaccagggauaua

SEQ ID NO: 1663866 - RNA, 19 nt, Artificial Sequence
  Description of Artificial Sequence: Synthetic oligonucleotide
  Antisense strand to SEQ ID NO: 1663865
uauaucccuggugauggga

SEQ ID NO: 1663867 - RNA, 19 nt, Artificial Sequence
  Description of Artificial Sequence: Synthetic oligonucleotide
  Sense strand starting at position 2224 of SEQ ID NO: 1561334
acauguaaagaaugguuua

SEQ ID NO: 1663868 - RNA, 19 nt, Artificial Sequence
  Description of Artificial Sequence: Synthetic oligonucleotide
  Antisense strand to SEQ ID NO: 1663867
uaaaccauucuuuacaugu

SEQ ID NO: 1663869 - RNA, 19 nt, Artificial Sequence
  Description of Artificial Sequence: Synthetic oligonucleotide
  Sense strand starting at position 2265 of SEQ ID NO: 1561334
ugguuuaugugaguaaaua

SEQ ID NO: 1663870 - RNA, 19 nt, Artificial Sequence
  Description of Artificial Sequence: Synthetic oligonucleotide
  Antisense strand to SEQ ID NO: 1663869
uauuuacucacauaaacca

SEQ ID NO: 1663871 - RNA, 19 nt, Artificial Sequence
  Description of Artificial Sequence: Synthetic oligonucleotide
  Sense strand starting at position 2266 of SEQ ID NO: 1561334
gguuuaugugaguaaauau

SEQ ID NO: 1663872 - RNA, 19 nt, Artificial Sequence
  Description of Artificial Sequence: Synthetic oligonucleotide
  Antisense strand to SEQ ID NO: 1663871
auauuuacucacauaaacc

SEQ ID NO: 1663873 - RNA, 19 nt, Artificial Sequence
  Description of Artificial Sequence: Synthetic oligonucleotide
  Sense strand starting at position 2350 of SEQ ID NO: 1561334
ucauauaucguggauaguu

SEQ ID NO: 1663874 - RNA, 19 nt, Artificial Sequence
  Description of Artificial Sequence: Synthetic oligonucleotide
  Antisense strand to SEQ ID NO: 1663873
aacuauccacgauauauga

SEQ ID NO: 1663875 - RNA, 19 nt, Artificial Sequence
  Description of Artificial Sequence: Synthetic oligonucleotide
  Sense strand starting at position 2578 of SEQ ID NO: 1561334
uucccaauuugacagagua

SEQ ID NO: 1663876 - RNA, 19 nt, Artificial Sequence
  Description of Artificial Sequence: Synthetic oligonucleotide
  Antisense strand to SEQ ID NO: 1663875
uacucugucaaauugggaa

SEQ ID NO: 1663877 - RNA, 19 nt, Artificial Sequence
  Description of Artificial Sequence: Synthetic oligonucleotide
  Sense strand starting at position 2603 of SEQ ID NO: 1561334
cuuauuaccgauugcauuu

SEQ ID NO: 1663878 - RNA, 19 nt, Artificial Sequence
  Description of Artificial Sequence: Synthetic oligonucleotide
  Antisense strand to SEQ ID NO: 1663877
aaaugcaaucgguaauaag

SEQ ID NO: 1663879 - RNA, 19 nt, Artificial Sequence
  Description of Artificial Sequence: Synthetic oligonucleotide
  Sense strand starting at position 2644 of SEQ ID NO: 1561334
acacucucuguguaugaau

SEQ ID NO: 1663880 - RNA, 19 nt, Artificial Sequence
  Description of Artificial Sequence: Synthetic oligonucleotide
  Antisense strand to SEQ ID NO: 1663879
auucauacacagagagugu

SEQ ID NO: 1663881 - RNA, 19 nt, Artificial Sequence
  Description of Artificial Sequence: Synthetic oligonucleotide
  Sense strand starting at position 2646 of SEQ ID NO: 1561334
acucucuguguaugaauga

SEQ ID NO: 1663882 - RNA, 19 nt, Artificial Sequence
  Description of Artificial Sequence: Synthetic oligonucleotide
  Antisense strand to SEQ ID NO: 1663881
ucauucauacacagagagu

SEQ ID NO: 1663883 - RNA, 19 nt, Artificial Sequence
  Description of Artificial Sequence: Synthetic oligonucleotide
  Sense strand starting at position 2667 of SEQ ID NO: 1561334
ucgcuucuaagugaugaau

SEQ ID NO: 1663884 - RNA, 19 nt, Artificial Sequence
  Description of Artificial Sequence: Synthetic oligonucleotide
  Antisense strand to SEQ ID NO: 1663883
auucaucacuuagaagcga

SEQ ID NO: 1663885 - RNA, 19 nt, Artificial Sequence
  Description of Artificial Sequence: Synthetic oligonucleotide
  Sense strand starting at position 2809 of SEQ ID NO: 1561334
agacauuccuuagccugau

SEQ ID NO: 1663886 - RNA, 19 nt, Artificial Sequence
  Description of Artificial Sequence: Synthetic oligonucleotide
  Antisense strand to SEQ ID NO: 1663885
aucaggcuaaggaaugucu

SEQ ID NO: 1663887 - RNA, 19 nt, Artificial Sequence
  Description of Artificial Sequence: Synthetic oligonucleotide
  Sense strand starting at position 2939 of SEQ ID NO: 1561334
accaaaggauugucuacuu

SEQ ID NO: 1663888 - RNA, 19 nt, Artificial Sequence
  Description of Artificial Sequence: Synthetic oligonucleotide
  Antisense strand to SEQ ID NO: 1663887
aaguagacaauccuuuggu

SEQ ID NO: 1663889 - RNA, 19 nt, Artificial Sequence
  Description of Artificial Sequence: Synthetic oligonucleotide
  Sense strand starting at position 3061 of SEQ ID NO: 1561334
auacaaguguguucugaag

SEQ ID NO: 1663890 - RNA, 19 nt, Artificial Sequence
  Description of Artificial Sequence: Synthetic oligonucleotide
  Antisense strand to SEQ ID NO: 1663889
cuucagaacacacuuguau

SEQ ID NO: 1663891 - RNA, 19 nt, Artificial Sequence
  Description of Artificial Sequence: Synthetic oligonucleotide
  Sense strand starting at position 3067 of SEQ ID NO: 1561334
guguguucugaagauagag

SEQ ID NO: 1663892 - RNA, 19 nt, Artificial Sequence
  Description of Artificial Sequence: Synthetic oligonucleotide
  Antisense strand to SEQ ID NO: 1663891
cucuaucuucagaacacac

SEQ ID NO: 1663893 - RNA, 19 nt, Artificial Sequence
  Description of Artificial Sequence: Synthetic oligonucleotide
  Sense strand starting at position 3245 of SEQ ID NO: 1561334
gccaauugacuccaaagca

SEQ ID NO: 1663894 - RNA, 19 nt, Artificial Sequence
  Description of Artificial Sequence: Synthetic oligonucleotide
  Antisense strand to SEQ ID NO: 1663893
ugcuuuggagucaauuggc

SEQ ID NO: 1663895 - RNA, 19 nt, Artificial Sequence
  Description of Artificial Sequence: Synthetic oligonucleotide
  Sense strand starting at position 3351 of SEQ ID NO: 1561334
uuacaaaugucugaauuug

SEQ ID NO: 1663896 - RNA, 19 nt, Artificial Sequence
  Description of Artificial Sequence: Synthetic oligonucleotide
  Antisense strand to SEQ ID NO: 1663895
caaauucagacauuuguaa

SEQ ID NO: 1663897 - RNA, 19 nt, Artificial Sequence
  Description of Artificial Sequence: Synthetic oligonucleotide
  Sense strand starting at position 3499 of SEQ ID NO: 1561334
aacagaucagucugugauu

SEQ ID NO: 1663898 - RNA, 19 nt, Artificial Sequence
  Description of Artificial Sequence: Synthetic oligonucleotide
  Antisense strand to SEQ ID NO: 1663897
aaucacagacugaucuguu

SEQ ID NO: 1663899 - RNA, 19 nt, Artificial Sequence
  Description of Artificial Sequence: Synthetic oligonucleotide
  Sense strand starting at position 3500 of SEQ ID NO: 1561334
acagaucagucugugauug

SEQ ID NO: 1663900 - RNA, 19 nt, Artificial Sequence
  Description of Artificial Sequence: Synthetic oligonucleotide
  Antisense strand to SEQ ID NO: 1663899
caaucacagacugaucugu

SEQ ID NO: 1663901 - RNA, 19 nt, Artificial Sequence
  Description of Artificial Sequence: Synthetic oligonucleotide
  Sense strand starting at position 3505 of SEQ ID NO: 1561334
ucagucugugauugggaga

SEQ ID NO: 1663902 - RNA, 19 nt, Artificial Sequence
  Description of Artificial Sequence: Synthetic oligonucleotide
  Antisense strand to SEQ ID NO: 1663901
ucucccaaucacagacuga

SEQ ID NO: 1663903 - RNA, 19 nt, Artificial Sequence
  Description of Artificial Sequence: Synthetic oligonucleotide
  Sense strand starting at position 3506 of SEQ ID NO: 1561334
cagucugugauugggagaa

SEQ ID NO: 1663904 - RNA, 19 nt, Artificial Sequence
  Description of Artificial Sequence: Synthetic oligonucleotide
  Antisense strand to SEQ ID NO: 1663903
uucucccaaucacagacug

SEQ ID NO: 1663905 - RNA, 19 nt, Artificial Sequence
  Description of Artificial Sequence: Synthetic oligonucleotide
  Sense strand starting at position 3594 of SEQ ID NO: 1561334
auuauauuacucugggauc

SEQ ID NO: 1663906 - RNA, 19 nt, Artificial Sequence
  Description of Artificial Sequence: Synthetic oligonucleotide
  Antisense strand to SEQ ID NO: 1663905
gaucccagaguaauauaau

SEQ ID NO: 1663907 - RNA, 19 nt, Artificial Sequence
  Description of Artificial Sequence: Synthetic oligonucleotide
  Sense strand starting at position 3614 of SEQ ID NO: 1561334
agcaacacaugguuuaaau

SEQ ID NO: 1663908 - RNA, 19 nt, Artificial Sequence
  Description of Artificial Sequence: Synthetic oligonucleotide
  Antisense strand to SEQ ID NO: 1663907
auuuaaaccauguguugcu

SEQ ID NO: 1663909 - RNA, 19 nt, Artificial Sequence
  Description of Artificial Sequence: Synthetic oligonucleotide
  Sense strand starting at position 3663 of SEQ ID NO: 1561334
uggucagaucucuaaguca

SEQ ID NO: 1663910 - RNA, 19 nt, Artificial Sequence
  Description of Artificial Sequence: Synthetic oligonucleotide
  Antisense strand to SEQ ID NO: 1663909
ugacuuagagaucugacca

SEQ ID NO: 1663911 - RNA, 19 nt, Artificial Sequence
  Description of Artificial Sequence: Synthetic oligonucleotide
  Sense strand starting at position 47 of SEQ ID NO: 1561335
acacaugccuaugugaaua

SEQ ID NO: 1663912 - RNA, 19 nt, Artificial Sequence
  Description of Artificial Sequence: Synthetic oligonucleotide
  Antisense strand to SEQ ID NO: 1663911
uauucacauaggcaugugu

SEQ ID NO: 1663913 - RNA, 19 nt, Artificial Sequence
  Description of Artificial Sequence: Synthetic oligonucleotide
  Sense strand starting at position 52 of SEQ ID NO: 1561335
ugccuaugugaauaaacuu

SEQ ID NO: 1663914 - RNA, 19 nt, Artificial Sequence
  Description of Artificial Sequence: Synthetic oligonucleotide
  Antisense strand to SEQ ID NO: 1663913
aaguuuauucacauaggca

SEQ ID NO: 1663915 - RNA, 19 nt, Artificial Sequence
  Description of Artificial Sequence: Synthetic oligonucleotide
  Sense strand starting at position 131 of SEQ ID NO: 1561335
agcauuaaccuaggaauac

SEQ ID NO: 1663916 - RNA, 19 nt, Artificial Sequence
  Description of Artificial Sequence: Synthetic oligonucleotide
  Antisense strand to SEQ ID NO: 1663915
guauuccuagguuaaugcu

SEQ ID NO: 1663917 - RNA, 19 nt, Artificial Sequence
  Description of Artificial Sequence: Synthetic oligonucleotide
  Sense strand starting at position 241 of SEQ ID NO: 1561335
aaagguaauuguucucaug

SEQ ID NO: 1663918 - RNA, 19 nt, Artificial Sequence
  Description of Artificial Sequence: Synthetic oligonucleotide
  Antisense strand to SEQ ID NO: 1663917
caugagaacaauuaccuuu

SEQ ID NO: 1663919 - RNA, 19 nt, Artificial Sequence
  Description of Artificial Sequence: Synthetic oligonucleotide
  Sense strand starting at position 276 of SEQ ID NO: 1561335
ggguuaaucucucuacaaa

SEQ ID NO: 1663920 - RNA, 19 nt, Artificial Sequence
  Description of Artificial Sequence: Synthetic oligonucleotide
  Antisense strand to SEQ ID NO: 1663919
uuuguagagagauuaaccc

SEQ ID NO: 1663921 - RNA, 19 nt, Artificial Sequence
  Description of Artificial Sequence: Synthetic oligonucleotide
  Sense strand starting at position 365 of SEQ ID NO: 1561335
acaagaauguaggugcuau

SEQ ID NO: 1663922 - RNA, 19 nt, Artificial Sequence
  Description of Artificial Sequence: Synthetic oligonucleotide
  Antisense strand to SEQ ID NO: 1663921
auagcaccuacauucuugu

SEQ ID NO: 1663923 - RNA, 19 nt, Artificial Sequence
  Description of Artificial Sequence: Synthetic oligonucleotide
  Sense strand starting at position 377 of SEQ ID NO: 1561335
gugcuaucaggugaacaua

SEQ ID NO: 1663924 - RNA, 19 nt, Artificial Sequence
  Description of Artificial Sequence: Synthetic oligonucleotide
  Antisense strand to SEQ ID NO: 1663923
uauguucaccugauagcac

SEQ ID NO: 1663925 - RNA, 19 nt, Artificial Sequence
  Description of Artificial Sequence: Synthetic oligonucleotide
  Sense strand starting at position 950 of SEQ ID NO: 1561335
augaacauuugugauauca

SEQ ID NO: 1663926 - RNA, 19 nt, Artificial Sequence
  Description of Artificial Sequence: Synthetic oligonucleotide
  Antisense strand to SEQ ID NO: 1663925
ugauaucacaaauguucau

SEQ ID NO: 1663927 - RNA, 19 nt, Artificial Sequence
  Description of Artificial Sequence: Synthetic oligonucleotide
  Sense strand starting at position 958 of SEQ ID NO: 1561335
uugugauaucaaugggaug

SEQ ID NO: 1663928 - RNA, 19 nt, Artificial Sequence
  Description of Artificial Sequence: Synthetic oligonucleotide
  Antisense strand to SEQ ID NO: 1663927
caucccauugauaucacaa

SEQ ID NO: 1663929 - RNA, 19 nt, Artificial Sequence
  Description of Artificial Sequence: Synthetic oligonucleotide
  Sense strand starting at position 1082 of SEQ ID NO: 1561335
auacaauuaucuccgagaa

SEQ ID NO: 1663930 - RNA, 19 nt, Artificial Sequence
  Description of Artificial Sequence: Synthetic oligonucleotide
  Antisense strand to SEQ ID NO: 1663929
uucucggagauaauuguau

SEQ ID NO: 1663931 - RNA, 19 nt, Artificial Sequence
  Description of Artificial Sequence: Synthetic oligonucleotide
  Sense strand starting at position 1565 of SEQ ID NO: 1561335
ggaaucaacuuccuguuua

SEQ ID NO: 1663932 - RNA, 19 nt, Artificial Sequence
  Description of Artificial Sequence: Synthetic oligonucleotide
  Antisense strand to SEQ ID NO: 1663931
uaaacaggaaguugauucc

SEQ ID NO: 1663933 - RNA, 19 nt, Artificial Sequence
  Description of Artificial Sequence: Synthetic oligonucleotide
  Sense strand starting at position 1584 of SEQ ID NO: 1561335
cagaaaugacuucgcagaa

SEQ ID NO: 1663934 - RNA, 19 nt, Artificial Sequence
  Description of Artificial Sequence: Synthetic oligonucleotide
  Antisense strand to SEQ ID NO: 1663933
uucugcgaagucauuucug

SEQ ID NO: 1663935 - RNA, 19 nt, Artificial Sequence
  Description of Artificial Sequence: Synthetic oligonucleotide
  Sense strand starting at position 1585 of SEQ ID NO: 1561335
agaaaugacuucgcagaaa

SEQ ID NO: 1663936 - RNA, 19 nt, Artificial Sequence
  Description of Artificial Sequence: Synthetic oligonucleotide
  Antisense strand to SEQ ID NO: 1663935
uuucugcgaagucauuucu

SEQ ID NO: 1663937 - RNA, 19 nt, Artificial Sequence
  Description of Artificial Sequence: Synthetic oligonucleotide
  Sense strand starting at position 2036 of SEQ ID NO: 1561335
gggacuaccuuucccagaa

SEQ ID NO: 1663938 - RNA, 19 nt, Artificial Sequence
  Description of Artificial Sequence: Synthetic oligonucleotide
  Antisense strand to SEQ ID NO: 1663937
uucugggaaagguaguccc

SEQ ID NO: 1663939 - RNA, 19 nt, Artificial Sequence
  Description of Artificial Sequence: Synthetic oligonucleotide
  Sense strand starting at position 2176 of SEQ ID NO: 1561335
gucuuuacucaguacuaac

SEQ ID NO: 1663940 - RNA, 19 nt, Artificial Sequence
  Description of Artificial Sequence: Synthetic oligonucleotide
  Antisense strand to SEQ ID NO: 1663939
guuaguacugaguaaagac

SEQ ID NO: 1663941 - RNA, 19 nt, Artificial Sequence
  Description of Artificial Sequence: Synthetic oligonucleotide
  Sense strand starting at position 2194 of SEQ ID NO: 1561335
cauauucgcguuguagcaa

SEQ ID NO: 1663942 - RNA, 19 nt, Artificial Sequence
  Description of Artificial Sequence: Synthetic oligonucleotide
  Antisense strand to SEQ ID NO: 1663941
uugcuacaacgcgaauaug

SEQ ID NO: 1663943 - RNA, 19 nt, Artificial Sequence
  Description of Artificial Sequence: Synthetic oligonucleotide
  Sense strand starting at position 2205 of SEQ ID NO: 1561335
uguagcaaaccugacuaua

SEQ ID NO: 1663944 - RNA, 19 nt, Artificial Sequence
  Description of Artificial Sequence: Synthetic oligonucleotide
  Antisense strand to SEQ ID NO: 1663943
uauagucagguuugcuaca

SEQ ID NO: 1663945 - RNA, 19 nt, Artificial Sequence
  Description of Artificial Sequence: Synthetic oligonucleotide
  Sense strand starting at position 2242 of SEQ ID NO: 1561335
aucccaucaccagggauau

SEQ ID NO: 1663946 - RNA, 19 nt, Artificial Sequence
  Description of Artificial Sequence: Synthetic oligonucleotide
  Antisense strand to SEQ ID NO: 1663945
auaucccuggugaugggau

SEQ ID NO: 1663947 - RNA, 19 nt, Artificial Sequence
  Description of Artificial Sequence: Synthetic oligonucleotide
  Sense strand starting at position 2243 of SEQ ID NO: 1561335
ucccaucaccagggauaua

SEQ ID NO: 1663948 - RNA, 19 nt, Artificial Sequence
  Description of Artificial Sequence: Synthetic oligonucleotide
  Antisense strand to SEQ ID NO: 1663947
uauaucccuggugauggga

SEQ ID NO: 1663949 - RNA, 19 nt, Artificial Sequence
  Description of Artificial Sequence: Synthetic oligonucleotide
  Sense strand starting at position 2325 of SEQ ID NO: 1561335
acauguaaagaaugguuua

SEQ ID NO: 1663950 - RNA, 19 nt, Artificial Sequence
  Description of Artificial Sequence: Synthetic oligonucleotide
  Antisense strand to SEQ ID NO: 1663949
uaaaccauucuuuacaugu

SEQ ID NO: 1663951 - RNA, 19 nt, Artificial Sequence
  Description of Artificial Sequence: Synthetic oligonucleotide
  Sense strand starting at position 2366 of SEQ ID NO: 1561335
ugguuuaugugaguaaaua

SEQ ID NO: 1663952 - RNA, 19 nt, Artificial Sequence
  Description of Artificial Sequence: Synthetic oligonucleotide
  Antisense strand to SEQ ID NO: 1663951
uauuuacucacauaaacca

SEQ ID NO: 1663953 - RNA, 19 nt, Artificial Sequence
  Description of Artificial Sequence: Synthetic oligonucleotide
  Sense strand starting at position 2367 of SEQ ID NO: 1561335
gguuuaugugaguaaauau

SEQ ID NO: 1663954 - RNA, 19 nt, Artificial Sequence
  Description of Artificial Sequence: Synthetic oligonucleotide
  Antisense strand to SEQ ID NO: 1663953
auauuuacucacauaaacc

SEQ ID NO: 1663955 - RNA, 19 nt, Artificial Sequence
  Description of Artificial Sequence: Synthetic oligonucleotide
  Sense strand starting at position 2451 of SEQ ID NO: 1561335
ucauauaucguggauaguu

SEQ ID NO: 1663956 - RNA, 19 nt, Artificial Sequence
  Description of Artificial Sequence: Synthetic oligonucleotide
  Antisense strand to SEQ ID NO: 1663955
aacuauccacgauauauga

SEQ ID NO: 1663957 - RNA, 19 nt, Artificial Sequence
  Description of Artificial Sequence: Synthetic oligonucleotide
  Sense strand starting at position 2679 of SEQ ID NO: 1561335
uucccaauuugacagagua

SEQ ID NO: 1663958 - RNA, 19 nt, Artificial Sequence
  Description of Artificial Sequence: Synthetic oligonucleotide
  Antisense strand to SEQ ID NO: 1663957
uacucugucaaauugggaa

SEQ ID NO: 1663959 - RNA, 19 nt, Artificial Sequence
  Description of Artificial Sequence: Synthetic oligonucleotide
  Sense strand starting at position 2704 of SEQ ID NO: 1561335
cuuauuaccgauugcauuu

SEQ ID NO: 1663960 - RNA, 19 nt, Artificial Sequence
  Description of Artificial Sequence: Synthetic oligonucleotide
  Antisense strand to SEQ ID NO: 1663959
aaaugcaaucgguaauaag

SEQ ID NO: 1663961 - RNA, 19 nt, Artificial Sequence
  Description of Artificial Sequence: Synthetic oligonucleotide
  Sense strand starting at position 2745 of SEQ ID NO: 1561335
acacucucuguguaugaau

SEQ ID NO: 1663962 - RNA, 19 nt, Artificial Sequence
  Description of Artificial Sequence: Synthetic oligonucleotide
  Antisense strand to SEQ ID NO: 1663961
auucauacacagagagugu

SEQ ID NO: 1663963 - RNA, 19 nt, Artificial Sequence
  Description of Artificial Sequence: Synthetic oligonucleotide
  Sense strand starting at position 2747 of SEQ ID NO: 1561335
acucucuguguaugaauga

SEQ ID NO: 1663964 - RNA, 19 nt, Artificial Sequence
  Description of Artificial Sequence: Synthetic oligonucleotide
  Antisense strand to SEQ ID NO: 1663963
ucauucauacacagagagu

SEQ ID NO: 1663965 - RNA, 19 nt, Artificial Sequence
  Description of Artificial Sequence: Synthetic oligonucleotide
  Sense strand starting at position 2910 of SEQ ID NO: 1561335
agacauuccuuagccugau

SEQ ID NO: 1663966 - RNA, 19 nt, Artificial Sequence
  Description of Artificial Sequence: Synthetic oligonucleotide
  Antisense strand to SEQ ID NO: 1663965
aucaggcuaaggaaugucu

SEQ ID NO: 1663967 - RNA, 19 nt, Artificial Sequence
  Description of Artificial Sequence: Synthetic oligonucleotide
  Sense strand starting at position 3040 of SEQ ID NO: 1561335
accaaaggauugucuacuu

SEQ ID NO: 1663968 - RNA, 19 nt, Artificial Sequence
  Description of Artificial Sequence: Synthetic oligonucleotide
  Antisense strand to SEQ ID NO: 1663967
aaguagacaauccuuuggu

SEQ ID NO: 1663969 - RNA, 19 nt, Artificial Sequence
  Description of Artificial Sequence: Synthetic oligonucleotide
  Sense strand starting at position 3162 of SEQ ID NO: 1561335
auacaaguguguucugaag

SEQ ID NO: 1663970 - RNA, 19 nt, Artificial Sequence
  Description of Artificial Sequence: Synthetic oligonucleotide
  Antisense strand to SEQ ID NO: 1663969
cuucagaacacacuuguau

SEQ ID NO: 1663971 - RNA, 19 nt, Artificial Sequence
  Description of Artificial Sequence: Synthetic oligonucleotide
  Sense strand starting at position 3168 of SEQ ID NO: 1561335
guguguucugaagauagag

SEQ ID NO: 1663972 - RNA, 19 nt, Artificial Sequence
  Description of Artificial Sequence: Synthetic oligonucleotide
  Antisense strand to SEQ ID NO: 1663971
cucuaucuucagaacacac

SEQ ID NO: 1663973 - RNA, 19 nt, Artificial Sequence
  Description of Artificial Sequence: Synthetic oligonucleotide
  Sense strand starting at position 3346 of SEQ ID NO: 1561335
gccaauugacuccaaagca

SEQ ID NO: 1663974 - RNA, 19 nt, Artificial Sequence
  Description of Artificial Sequence: Synthetic oligonucleotide
  Antisense strand to SEQ ID NO: 1663973
ugcuuuggagucaauuggc

SEQ ID NO: 1663975 - RNA, 19 nt, Artificial Sequence
  Description of Artificial Sequence: Synthetic oligonucleotide
  Sense strand starting at position 3452 of SEQ ID NO: 1561335
uuacaaaugucugaauuug

SEQ ID NO: 1663976 - RNA, 19 nt, Artificial Sequence
  Description of Artificial Sequence: Synthetic oligonucleotide
  Antisense strand to SEQ ID NO: 1663975
caaauucagacauuuguaa

SEQ ID NO: 1663977 - RNA, 19 nt, Artificial Sequence
  Description of Artificial Sequence: Synthetic oligonucleotide
  Sense strand starting at position 3600 of SEQ ID NO: 1561335
aacagaucagucugugauu

SEQ ID NO: 1663978 - RNA, 19 nt, Artificial Sequence
  Description of Artificial Sequence: Synthetic oligonucleotide
  Antisense strand to SEQ ID NO: 1663977
aaucacagacugaucuguu

SEQ ID NO: 1663979 - RNA, 19 nt, Artificial Sequence
  Description of Artificial Sequence: Synthetic oligonucleotide
  Sense strand starting at position 3601 of SEQ ID NO: 1561335
acagaucagucugugauug

SEQ ID NO: 1663980 - RNA, 19 nt, Artificial Sequence
  Description of Artificial Sequence: Synthetic oligonucleotide
  Antisense strand to SEQ ID NO: 1663979
caaucacagacugaucugu

SEQ ID NO: 1663981 - RNA, 19 nt, Artificial Sequence
  Description of Artificial Sequence: Synthetic oligonucleotide
  Sense strand starting at position 3606 of SEQ ID NO: 1561335
ucagucugugauugggaga

SEQ ID NO: 1663982 - RNA, 19 nt, Artificial Sequence
  Description of Artificial Sequence: Synthetic oligonucleotide
  Antisense strand to SEQ ID NO: 1663981
ucucccaaucacagacuga

SEQ ID NO: 1663983 - RNA, 19 nt, Artificial Sequence
  Description of Artificial Sequence: Synthetic oligonucleotide
  Sense strand starting at position 3607 of SEQ ID NO: 1561335
cagucugugauugggagaa

SEQ ID NO: 1663984 - RNA, 19 nt, Artificial Sequence
  Description of Artificial Sequence: Synthetic oligonucleotide
  Antisense strand to SEQ ID NO: 1663983
uucucccaaucacagacug

SEQ ID NO: 1663985 - RNA, 19 nt, Artificial Sequence
  Description of Artificial Sequence: Synthetic oligonucleotide
  Sense strand starting at position 3695 of SEQ ID NO: 1561335
auuauauuacucugggauc

SEQ ID NO: 1663986 - RNA, 19 nt, Artificial Sequence
  Description of Artificial Sequence: Synthetic oligonucleotide
  Antisense strand to SEQ ID NO: 1663985
gaucccagaguaauauaau

SEQ ID NO: 1663987 - RNA, 19 nt, Artificial Sequence
  Description of Artificial Sequence: Synthetic oligonucleotide
  Sense strand starting at position 3715 of SEQ ID NO: 1561335
agcaacacaugguuuaaau

SEQ ID NO: 1663988 - RNA, 19 nt, Artificial Sequence
  Description of Artificial Sequence: Synthetic oligonucleotide
  Antisense strand to SEQ ID NO: 1663987
auuuaaaccauguguugcu

SEQ ID NO: 1663989 - RNA, 19 nt, Artificial Sequence
  Description of Artificial Sequence: Synthetic oligonucleotide
  Sense strand starting at position 3764 of SEQ ID NO: 1561335
uggucagaucucuaaguca

SEQ ID NO: 1663990 - RNA, 19 nt, Artificial Sequence
  Description of Artificial Sequence: Synthetic oligonucleotide
  Antisense strand to SEQ ID NO: 1663989
ugacuuagagaucugacca

SEQ ID NO: 1663991 - RNA, 19 nt, Artificial Sequence
  Description of Artificial Sequence: Synthetic oligonucleotide
  Sense strand starting at position 120 of SEQ ID NO: 1561336
uaaggauaaugggaauaau

SEQ ID NO: 1663992 - RNA, 19 nt, Artificial Sequence
  Description of Artificial Sequence: Synthetic oligonucleotide
  Antisense strand to SEQ ID NO: 1663991
auuauucccauuauccuua

SEQ ID NO: 1663993 - RNA, 19 nt, Artificial Sequence
  Description of Artificial Sequence: Synthetic oligonucleotide
  Sense strand starting at position 480 of SEQ ID NO: 1561336
cuaguuuagucucuauuag

SEQ ID NO: 1663994 - RNA, 19 nt, Artificial Sequence
  Description of Artificial Sequence: Synthetic oligonucleotide
  Antisense strand to SEQ ID NO: 1663993
cuaauagagacuaaacuag

SEQ ID NO: 1663995 - RNA, 19 nt, Artificial Sequence
  Description of Artificial Sequence: Synthetic oligonucleotide
  Sense strand starting at position 652 of SEQ ID NO: 1561336
cuuggauacauggguaauu

SEQ ID NO: 1663996 - RNA, 19 nt, Artificial Sequence
  Description of Artificial Sequence: Synthetic oligonucleotide
  Antisense strand to SEQ ID NO: 1663995
aauuacccauguauccaag

SEQ ID NO: 1663997 - RNA, 19 nt, Artificial Sequence
  Description of Artificial Sequence: Synthetic oligonucleotide
  Sense strand starting at position 653 of SEQ ID NO: 1561336
uuggauacauggguaauua

SEQ ID NO: 1663998 - RNA, 19 nt, Artificial Sequence
  Description of Artificial Sequence: Synthetic oligonucleotide
  Antisense strand to SEQ ID NO: 1663997
uaauuacccauguauccaa

SEQ ID NO: 1663999 - RNA, 19 nt, Artificial Sequence
  Description of Artificial Sequence: Synthetic oligonucleotide
  Sense strand starting at position 728 of SEQ ID NO: 1561336
uccacaacaguacgaaaua

SEQ ID NO: 1664000 - RNA, 19 nt, Artificial Sequence
  Description of Artificial Sequence: Synthetic oligonucleotide
  Antisense strand to SEQ ID NO: 1663999
uauuucguacuguugugga

SEQ ID NO: 1664001 - RNA, 19 nt, Artificial Sequence
  Description of Artificial Sequence: Synthetic oligonucleotide
  Sense strand starting at position 894 of SEQ ID NO: 1561336
guauccaagaggugaucaa

SEQ ID NO: 1664002 - RNA, 19 nt, Artificial Sequence
  Description of Artificial Sequence: Synthetic oligonucleotide
  Antisense strand to SEQ ID NO: 1664001
uugaucaccucuuggauac

SEQ ID NO: 1664003 - RNA, 19 nt, Artificial Sequence
  Description of Artificial Sequence: Synthetic oligonucleotide
  Sense strand starting at position 1083 of SEQ ID NO: 1561336
ccaauuacggcuuaaugau

SEQ ID NO: 1664004 - RNA, 19 nt, Artificial Sequence
  Description of Artificial Sequence: Synthetic oligonucleotide
  Antisense strand to SEQ ID NO: 1664003
aucauuaagccguaauugg

SEQ ID NO: 1664005 - RNA, 19 nt, Artificial Sequence
  Description of Artificial Sequence: Synthetic oligonucleotide
  Sense strand starting at position 1089 of SEQ ID NO: 1561336
acggcuuaaugauuaucaa

SEQ ID NO: 1664006 - RNA, 19 nt, Artificial Sequence
  Description of Artificial Sequence: Synthetic oligonucleotide
  Antisense strand to SEQ ID NO: 1664005
uugauaaucauuaagccgu

SEQ ID NO: 1664007 - RNA, 19 nt, Artificial Sequence
  Description of Artificial Sequence: Synthetic oligonucleotide
  Sense strand starting at position 1090 of SEQ ID NO: 1561336
cggcuuaaugauuaucaac

SEQ ID NO: 1664008 - RNA, 19 nt, Artificial Sequence
  Description of Artificial Sequence: Synthetic oligonucleotide
  Antisense strand to SEQ ID NO: 1664007
guugauaaucauuaagccg

SEQ ID NO: 1664009 - RNA, 19 nt, Artificial Sequence
  Description of Artificial Sequence: Synthetic oligonucleotide
  Sense strand starting at position 1109 of SEQ ID NO: 1561336
acccauucccgaggacaca

SEQ ID NO: 1664010 - RNA, 19 nt, Artificial Sequence
  Description of Artificial Sequence: Synthetic oligonucleotide
  Antisense strand to SEQ ID NO: 1664009
uguguccucgggaaugggu

SEQ ID NO: 1664011 - RNA, 19 nt, Artificial Sequence
  Description of Artificial Sequence: Synthetic oligonucleotide
  Sense strand starting at position 1137 of SEQ ID NO: 1561336
gggugaacaucucuauaaa

SEQ ID NO: 1664012 - RNA, 19 nt, Artificial Sequence
  Description of Artificial Sequence: Synthetic oligonucleotide
  Antisense strand to SEQ ID NO: 1664011
uuuauagagauguucaccc

SEQ ID NO: 1664013 - RNA, 19 nt, Artificial Sequence
  Description of Artificial Sequence: Synthetic oligonucleotide
  Sense strand starting at position 1247 of SEQ ID NO: 1561336
gaaggcgaaaguugugaaa

SEQ ID NO: 1664014 - RNA, 19 nt, Artificial Sequence
  Description of Artificial Sequence: Synthetic oligonucleotide
  Antisense strand to SEQ ID NO: 1664013
uuucacaacuuucgccuuc

SEQ ID NO: 1664015 - RNA, 19 nt, Artificial Sequence
  Description of Artificial Sequence: Synthetic oligonucleotide
  Sense strand starting at position 1260 of SEQ ID NO: 1561336
gugaaauacccugacugca

SEQ ID NO: 1664016 - RNA, 19 nt, Artificial Sequence
  Description of Artificial Sequence: Synthetic oligonucleotide
  Antisense strand to SEQ ID NO: 1664015
ugcagucaggguauuucac

SEQ ID NO: 1664017 - RNA, 19 nt, Artificial Sequence
  Description of Artificial Sequence: Synthetic oligonucleotide
  Sense strand starting at position 1448 of SEQ ID NO: 1561336
ugaccucuucgggaaguua

SEQ ID NO: 1664018 - RNA, 19 nt, Artificial Sequence
  Description of Artificial Sequence: Synthetic oligonucleotide
  Antisense strand to SEQ ID NO: 1664017
uaacuucccgaagagguca

SEQ ID NO: 1664019 - RNA, 19 nt, Artificial Sequence
  Description of Artificial Sequence: Synthetic oligonucleotide
  Sense strand starting at position 1493 of SEQ ID NO: 1561336
cagggacugcuuuaagguu

SEQ ID NO: 1664020 - RNA, 19 nt, Artificial Sequence
  Description of Artificial Sequence: Synthetic oligonucleotide
  Antisense strand to SEQ ID NO: 1664019
aaccuuaaagcagucccug

SEQ ID NO: 1664021 - RNA, 19 nt, Artificial Sequence
  Description of Artificial Sequence: Synthetic oligonucleotide
  Sense strand starting at position 1501 of SEQ ID NO: 1561336
gcuuuaagguucucauuug

SEQ ID NO: 1664022 - RNA, 19 nt, Artificial Sequence
  Description of Artificial Sequence: Synthetic oligonucleotide
  Antisense strand to SEQ ID NO: 1664021
caaaugagaaccuuaaagc

SEQ ID NO: 1664023 - RNA, 19 nt, Artificial Sequence
  Description of Artificial Sequence: Synthetic oligonucleotide
  Sense strand starting at position 1511 of SEQ ID NO: 1561336
ucucauuugcguuaucucu

SEQ ID NO: 1664024 - RNA, 19 nt, Artificial Sequence
  Description of Artificial Sequence: Synthetic oligonucleotide
  Antisense strand to SEQ ID NO: 1664023
agagauaacgcaaaugaga

SEQ ID NO: 1664025 - RNA, 19 nt, Artificial Sequence
  Description of Artificial Sequence: Synthetic oligonucleotide
  Sense strand starting at position 1513 of SEQ ID NO: 1561336
ucauuugcguuaucucuuu

SEQ ID NO: 1664026 - RNA, 19 nt, Artificial Sequence
  Description of Artificial Sequence: Synthetic oligonucleotide
  Antisense strand to SEQ ID NO: 1664025
aaagagauaacgcaaauga

SEQ ID NO: 1664027 - RNA, 19 nt, Artificial Sequence
  Description of Artificial Sequence: Synthetic oligonucleotide
  Sense strand starting at position 1550 of SEQ ID NO: 1561336
cuacuaggaugguucuaau

SEQ ID NO: 1664028 - RNA, 19 nt, Artificial Sequence
  Description of Artificial Sequence: Synthetic oligonucleotide
  Antisense strand to SEQ ID NO: 1664027
auuagaaccauccuaguag

SEQ ID NO: 1664029 - RNA, 19 nt, Artificial Sequence
  Description of Artificial Sequence: Synthetic oligonucleotide
  Sense strand starting at position 1598 of SEQ ID NO: 1561336
guauaaggacauugaguaa

SEQ ID NO: 1664030 - RNA, 19 nt, Artificial Sequence
  Description of Artificial Sequence: Synthetic oligonucleotide
  Antisense strand to SEQ ID NO: 1664029
uuacucaauguccuuauac

SEQ ID NO: 1664031 - RNA, 19 nt, Artificial Sequence
  Description of Artificial Sequence: Synthetic oligonucleotide
  Sense strand starting at position 1633 of SEQ ID NO: 1561336
gcgagaaagcggucgcaca

SEQ ID NO: 1664032 - RNA, 19 nt, Artificial Sequence
  Description of Artificial Sequence: Synthetic oligonucleotide
  Antisense strand to SEQ ID NO: 1664031
ugugcgaccgcuuucucgc

SEQ ID NO: 1664033 - RNA, 19 nt, Artificial Sequence
  Description of Artificial Sequence: Synthetic oligonucleotide
  Sense strand starting at position 2303 of SEQ ID NO: 1561336
gugagucguccgucucucu

SEQ ID NO: 1664034 - RNA, 19 nt, Artificial Sequence
  Description of Artificial Sequence: Synthetic oligonucleotide
  Antisense strand to SEQ ID NO: 1664033
agagagacggacgacucac

SEQ ID NO: 1664035 - RNA, 19 nt, Artificial Sequence
  Description of Artificial Sequence: Synthetic oligonucleotide
  Sense strand starting at position 2381 of SEQ ID NO: 1561336
ccacgaugacaggaguguu

SEQ ID NO: 1664036 - RNA, 19 nt, Artificial Sequence
  Description of Artificial Sequence: Synthetic oligonucleotide
  Antisense strand to SEQ ID NO: 1664035
aacacuccugucaucgugg

SEQ ID NO: 1664037 - RNA, 19 nt, Artificial Sequence
  Description of Artificial Sequence: Synthetic oligonucleotide
  Sense strand starting at position 2384 of SEQ ID NO: 1561336
cgaugacaggaguguuauu

SEQ ID NO: 1664038 - RNA, 19 nt, Artificial Sequence
  Description of Artificial Sequence: Synthetic oligonucleotide
  Antisense strand to SEQ ID NO: 1664037
aauaacacuccugucaucg

SEQ ID NO: 1664039 - RNA, 19 nt, Artificial Sequence
  Description of Artificial Sequence: Synthetic oligonucleotide
  Sense strand starting at position 2391 of SEQ ID NO: 1561336
aggaguguuauugggaaga

SEQ ID NO: 1664040 - RNA, 19 nt, Artificial Sequence
  Description of Artificial Sequence: Synthetic oligonucleotide
  Antisense strand to SEQ ID NO: 1664039
ucuucccaauaacacuccu

SEQ ID NO: 1664041 - RNA, 19 nt, Artificial Sequence
  Description of Artificial Sequence: Synthetic oligonucleotide
  Sense strand starting at position 2623 of SEQ ID NO: 1561336
gucgucauggaauagcuau

SEQ ID NO: 1664042 - RNA, 19 nt, Artificial Sequence
  Description of Artificial Sequence: Synthetic oligonucleotide
  Antisense strand to SEQ ID NO: 1664041
auagcuauuccaugacgac

SEQ ID NO: 1664043 - RNA, 19 nt, Artificial Sequence
  Description of Artificial Sequence: Synthetic oligonucleotide
  Sense strand starting at position 2630 of SEQ ID NO: 1561336
uggaauagcuaucuuccca

SEQ ID NO: 1664044 - RNA, 19 nt, Artificial Sequence
  Description of Artificial Sequence: Synthetic oligonucleotide
  Antisense strand to SEQ ID NO: 1664043
ugggaagauagcuauucca

SEQ ID NO: 1664045 - RNA, 19 nt, Artificial Sequence
  Description of Artificial Sequence: Synthetic oligonucleotide
  Sense strand starting at position 2713 of SEQ ID NO: 1561336
ugaauugcucaguaccuca

SEQ ID NO: 1664046 - RNA, 19 nt, Artificial Sequence
  Description of Artificial Sequence: Synthetic oligonucleotide
  Antisense strand to SEQ ID NO: 1664045
ugagguacugagcaauuca

SEQ ID NO: 1664047 - RNA, 19 nt, Artificial Sequence
  Description of Artificial Sequence: Synthetic oligonucleotide
  Sense strand starting at position 2723 of SEQ ID NO: 1561336
aguaccucagagcaauaau

SEQ ID NO: 1664048 - RNA, 19 nt, Artificial Sequence
  Description of Artificial Sequence: Synthetic oligonucleotide
  Antisense strand to SEQ ID NO: 1664047
auuauugcucugagguacu

SEQ ID NO: 1664049 - RNA, 19 nt, Artificial Sequence
  Description of Artificial Sequence: Synthetic oligonucleotide
  Sense strand starting at position 2780 of SEQ ID NO: 1561336
ugagauuguaaaugcagua

SEQ ID NO: 1664050 - RNA, 19 nt, Artificial Sequence
  Description of Artificial Sequence: Synthetic oligonucleotide
  Antisense strand to SEQ ID NO: 1664049
uacugcauuuacaaucuca

SEQ ID NO: 1664051 - RNA, 19 nt, Artificial Sequence
  Description of Artificial Sequence: Synthetic oligonucleotide
  Sense strand starting at position 2820 of SEQ ID NO: 1561336
gaaggagcaugucuuauaa

SEQ ID NO: 1664052 - RNA, 19 nt, Artificial Sequence
  Description of Artificial Sequence: Synthetic oligonucleotide
  Antisense strand to SEQ ID NO: 1664051
uuauaagacaugcuccuuc

SEQ ID NO: 1664053 - RNA, 19 nt, Artificial Sequence
  Description of Artificial Sequence: Synthetic oligonucleotide
  Sense strand starting at position 2907 of SEQ ID NO: 1561336
ggacguucccuugagcuca

SEQ ID NO: 1664054 - RNA, 19 nt, Artificial Sequence
  Description of Artificial Sequence: Synthetic oligonucleotide
  Antisense strand to SEQ ID NO: 1664053
ugagcucaagggaacgucc

SEQ ID NO: 1664055 - RNA, 19 nt, Artificial Sequence
  Description of Artificial Sequence: Synthetic oligonucleotide
  Sense strand starting at position 2912 of SEQ ID NO: 1561336
uucccuugagcucaggaau

SEQ ID NO: 1664056 - RNA, 19 nt, Artificial Sequence
  Description of Artificial Sequence: Synthetic oligonucleotide
  Antisense strand to SEQ ID NO: 1664055
auuccugagcucaagggaa

SEQ ID NO: 1664057 - RNA, 19 nt, Artificial Sequence
  Description of Artificial Sequence: Synthetic oligonucleotide
  Sense strand starting at position 3002 of SEQ ID NO: 1561336
uggccugaucuugggacua

SEQ ID NO: 1664058 - RNA, 19 nt, Artificial Sequence
  Description of Artificial Sequence: Synthetic oligonucleotide
  Antisense strand to SEQ ID NO: 1664057
uagucccaagaucaggcca

SEQ ID NO: 1664059 - RNA, 19 nt, Artificial Sequence
  Description of Artificial Sequence: Synthetic oligonucleotide
  Sense strand starting at position 3064 of SEQ ID NO: 1561336
agcccaggaguuugauuga

SEQ ID NO: 1664060 - RNA, 19 nt, Artificial Sequence
  Description of Artificial Sequence: Synthetic oligonucleotide
  Antisense strand to SEQ ID NO: 1664059
ucaaucaaacuccugggcu

SEQ ID NO: 1664061 - RNA, 19 nt, Artificial Sequence
  Description of Artificial Sequence: Synthetic oligonucleotide
  Sense strand starting at position 3124 of SEQ ID NO: 1561336
ggcaacagauaccucaaua

SEQ ID NO: 1664062 - RNA, 19 nt, Artificial Sequence
  Description of Artificial Sequence: Synthetic oligonucleotide
  Antisense strand to SEQ ID NO: 1664061
uauugagguaucuguugcc

SEQ ID NO: 1664063 - RNA, 19 nt, Artificial Sequence
  Description of Artificial Sequence: Synthetic oligonucleotide
  Sense strand starting at position 3366 of SEQ ID NO: 1561336
ggagucuacuguuuaccua

SEQ ID NO: 1664064 - RNA, 19 nt, Artificial Sequence
  Description of Artificial Sequence: Synthetic oligonucleotide
  Antisense strand to SEQ ID NO: 1664063
uagguaaacaguagacucc

SEQ ID NO: 1664065 - RNA, 19 nt, Artificial Sequence
  Description of Artificial Sequence: Synthetic oligonucleotide
  Sense strand starting at position 3510 of SEQ ID NO: 1561336
agcuguauccuugaucuac

SEQ ID NO: 1664066 - RNA, 19 nt, Artificial Sequence
  Description of Artificial Sequence: Synthetic oligonucleotide
  Antisense strand to SEQ ID NO: 1664065
guagaucaaggauacagcu

SEQ ID NO: 1664067 - RNA, 19 nt, Artificial Sequence
  Description of Artificial Sequence: Synthetic oligonucleotide
  Sense strand starting at position 3528 of SEQ ID NO: 1561336
cucugccuucccgaaagau

SEQ ID NO: 1664068 - RNA, 19 nt, Artificial Sequence
  Description of Artificial Sequence: Synthetic oligonucleotide
  Antisense strand to SEQ ID NO: 1664067
aucuuucgggaaggcagag

SEQ ID NO: 1664069 - RNA, 19 nt, Artificial Sequence
  Description of Artificial Sequence: Synthetic oligonucleotide
  Sense strand starting at position 3739 of SEQ ID NO: 1561336
uucuguugacaugaccaau

SEQ ID NO: 1664070 - RNA, 19 nt, Artificial Sequence
  Description of Artificial Sequence: Synthetic oligonucleotide
  Antisense strand to SEQ ID NO: 1664069
auuggucaugucaacagaa

SEQ ID NO: 1664071 - RNA, 19 nt, Artificial Sequence
  Description of Artificial Sequence: Synthetic oligonucleotide
  Sense strand starting at position 257 of SEQ ID NO: 1561337
auccauagacuguggauaa

SEQ ID NO: 1664072 - RNA, 19 nt, Artificial Sequence
  Description of Artificial Sequence: Synthetic oligonucleotide
  Antisense strand to SEQ ID NO: 1664071
uuauccacagucuauggau

SEQ ID NO: 1664073 - RNA, 19 nt, Artificial Sequence
  Description of Artificial Sequence: Synthetic oligonucleotide
  Sense strand starting at position 329 of SEQ ID NO: 1561337
augucaucuccucagaguu

SEQ ID NO: 1664074 - RNA, 19 nt, Artificial Sequence
  Description of Artificial Sequence: Synthetic oligonucleotide
  Antisense strand to SEQ ID NO: 1664073
aacucugaggagaugacau

SEQ ID NO: 1664075 - RNA, 19 nt, Artificial Sequence
  Description of Artificial Sequence: Synthetic oligonucleotide
  Sense strand starting at position 342 of SEQ ID NO: 1561337
agaguucuucccugcaaau

SEQ ID NO: 1664076 - RNA, 19 nt, Artificial Sequence
  Description of Artificial Sequence: Synthetic oligonucleotide
  Antisense strand to SEQ ID NO: 1664075
auuugcagggaagaacucu

SEQ ID NO: 1664077 - RNA, 19 nt, Artificial Sequence
  Description of Artificial Sequence: Synthetic oligonucleotide
  Sense strand starting at position 401 of SEQ ID NO: 1561337
ccagucauugccuaaacug

SEQ ID NO: 1664078 - RNA, 19 nt, Artificial Sequence
  Description of Artificial Sequence: Synthetic oligonucleotide
  Antisense strand to SEQ ID NO: 1664077
caguuuaggcaaugacugg

SEQ ID NO: 1664079 - RNA, 19 nt, Artificial Sequence
  Description of Artificial Sequence: Synthetic oligonucleotide
  Sense strand starting at position 575 of SEQ ID NO: 1561337
acagguguguggcuaauuu

SEQ ID NO: 1664080 - RNA, 19 nt, Artificial Sequence
  Description of Artificial Sequence: Synthetic oligonucleotide
  Antisense strand to SEQ ID NO: 1664079
aaauuagccacacaccugu

SEQ ID NO: 1664081 - RNA, 19 nt, Artificial Sequence
  Description of Artificial Sequence: Synthetic oligonucleotide
  Sense strand starting at position 903 of SEQ ID NO: 1561337
uguucugaagauuaagcua

SEQ ID NO: 1664082 - RNA, 19 nt, Artificial Sequence
  Description of Artificial Sequence: Synthetic oligonucleotide
  Antisense strand to SEQ ID NO: 1664081
uagcuuaaucuucagaaca

SEQ ID NO: 1664083 - RNA, 19 nt, Artificial Sequence
  Description of Artificial Sequence: Synthetic oligonucleotide
  Sense strand starting at position 906 of SEQ ID NO: 1561337
ucugaagauuaagcuaauu

SEQ ID NO: 1664084 - RNA, 19 nt, Artificial Sequence
  Description of Artificial Sequence: Synthetic oligonucleotide
  Antisense strand to SEQ ID NO: 1664083
aauuagcuuaaucuucaga

SEQ ID NO: 1664085 - RNA, 19 nt, Artificial Sequence
  Description of Artificial Sequence: Synthetic oligonucleotide
  Sense strand starting at position 1069 of SEQ ID NO: 1561337
ugcuaaugagugugggaaa

SEQ ID NO: 1664086 - RNA, 19 nt, Artificial Sequence
  Description of Artificial Sequence: Synthetic oligonucleotide
  Antisense strand to SEQ ID NO: 1664085
uuucccacacucauuagca

SEQ ID NO: 1664087 - RNA, 19 nt, Artificial Sequence
  Description of Artificial Sequence: Synthetic oligonucleotide
  Sense strand starting at position 1083 of SEQ ID NO: 1561337
ggaaaucuguucuccaacu

SEQ ID NO: 1664088 - RNA, 19 nt, Artificial Sequence
  Description of Artificial Sequence: Synthetic oligonucleotide
  Antisense strand to SEQ ID NO: 1664087
aguuggagaacagauuucc

SEQ ID NO: 1664089 - RNA, 19 nt, Artificial Sequence
  Description of Artificial Sequence: Synthetic oligonucleotide
  Sense strand starting at position 1198 of SEQ ID NO: 1561337
guuagucaaggcugaggaa

SEQ ID NO: 1664090 - RNA, 19 nt, Artificial Sequence
  Description of Artificial Sequence: Synthetic oligonucleotide
  Antisense strand to SEQ ID NO: 1664089
uuccucagccuugacuaac

SEQ ID NO: 1664091 - RNA, 19 nt, Artificial Sequence
  Description of Artificial Sequence: Synthetic oligonucleotide
  Sense strand starting at position 1226 of SEQ ID NO: 1561337
guuggaagauaucuaaacu

SEQ ID NO: 1664092 - RNA, 19 nt, Artificial Sequence
  Description of Artificial Sequence: Synthetic oligonucleotide
  Antisense strand to SEQ ID NO: 1664091
aguuuagauaucuuccaac

SEQ ID NO: 1664093 - RNA, 19 nt, Artificial Sequence
  Description of Artificial Sequence: Synthetic oligonucleotide
  Sense strand starting at position 1243 of SEQ ID NO: 1561337
cucuguuucugguccagga

SEQ ID NO: 1664094 - RNA, 19 nt, Artificial Sequence
  Description of Artificial Sequence: Synthetic oligonucleotide
  Antisense strand to SEQ ID NO: 1664093
uccuggaccagaaacagag

SEQ ID NO: 1664095 - RNA, 19 nt, Artificial Sequence
  Description of Artificial Sequence: Synthetic oligonucleotide
  Sense strand starting at position 1247 of SEQ ID NO: 1561337
guuucugguccaggaugaa

SEQ ID NO: 1664096 - RNA, 19 nt, Artificial Sequence
  Description of Artificial Sequence: Synthetic oligonucleotide
  Antisense strand to SEQ ID NO: 1664095
uucauccuggaccagaaac

SEQ ID NO: 1664097 - RNA, 19 nt, Artificial Sequence
  Description of Artificial Sequence: Synthetic oligonucleotide
  Sense strand starting at position 1653 of SEQ ID NO: 1561337
cggagaaauuaagaaacua

SEQ ID NO: 1664098 - RNA, 19 nt, Artificial Sequence
  Description of Artificial Sequence: Synthetic oligonucleotide
  Antisense strand to SEQ ID NO: 1664097
uaguuucuuaauuucuccg

SEQ ID NO: 1664099 - RNA, 19 nt, Artificial Sequence
  Description of Artificial Sequence: Synthetic oligonucleotide
  Sense strand starting at position 2412 of SEQ ID NO: 1561337
uuuacaguucuguacggua

SEQ ID NO: 1664100 - RNA, 19 nt, Artificial Sequence
  Description of Artificial Sequence: Synthetic oligonucleotide
  Antisense strand to SEQ ID NO: 1664099
uaccguacagaacuguaaa

SEQ ID NO: 1664101 - RNA, 19 nt, Artificial Sequence
  Description of Artificial Sequence: Synthetic oligonucleotide
  Sense strand starting at position 2417 of SEQ ID NO: 1561337
aguucuguacgguauugau

SEQ ID NO: 1664102 - RNA, 19 nt, Artificial Sequence
  Description of Artificial Sequence: Synthetic oligonucleotide
  Antisense strand to SEQ ID NO: 1664101
aucaauaccguacagaacu

SEQ ID NO: 1664103 - RNA, 19 nt, Artificial Sequence
  Description of Artificial Sequence: Synthetic oligonucleotide
  Sense strand starting at position 2439 of SEQ ID NO: 1561337
guaaguuuacaccaucugu

SEQ ID NO: 1664104 - RNA, 19 nt, Artificial Sequence
  Description of Artificial Sequence: Synthetic oligonucleotide
  Antisense strand to SEQ ID NO: 1664103
acagaugguguaaacuuac

SEQ ID NO: 1664105 - RNA, 19 nt, Artificial Sequence
  Description of Artificial Sequence: Synthetic oligonucleotide
  Sense strand starting at position 2728 of SEQ ID NO: 1561337
cuuugagaugauuagcauu

SEQ ID NO: 1664106 - RNA, 19 nt, Artificial Sequence
  Description of Artificial Sequence: Synthetic oligonucleotide
  Antisense strand to SEQ ID NO: 1664105
aaugcuaaucaucucaaag

SEQ ID NO: 1664107 - RNA, 19 nt, Artificial Sequence
  Description of Artificial Sequence: Synthetic oligonucleotide
  Sense strand starting at position 2736 of SEQ ID NO: 1561337
ugauuagcauuacuuggaa

SEQ ID NO: 1664108 - RNA, 19 nt, Artificial Sequence
  Description of Artificial Sequence: Synthetic oligonucleotide
  Antisense strand to SEQ ID NO: 1664107
uuccaaguaaugcuaauca

SEQ ID NO: 1664109 - RNA, 19 nt, Artificial Sequence
  Description of Artificial Sequence: Synthetic oligonucleotide
  Sense strand starting at position 3055 of SEQ ID NO: 1561337
guuugauauuucuagacua

SEQ ID NO: 1664110 - RNA, 19 nt, Artificial Sequence
  Description of Artificial Sequence: Synthetic oligonucleotide
  Antisense strand to SEQ ID NO: 1664109
uagucuagaaauaucaaac

SEQ ID NO: 1664111 - RNA, 19 nt, Artificial Sequence
  Description of Artificial Sequence: Synthetic oligonucleotide
  Sense strand starting at position 3293 of SEQ ID NO: 1561337
cagcuugcucuugagauga

SEQ ID NO: 1664112 - RNA, 19 nt, Artificial Sequence
  Description of Artificial Sequence: Synthetic oligonucleotide
  Antisense strand to SEQ ID NO: 1664111
ucaucucaagagcaagcug

SEQ ID NO: 1664113 - RNA, 19 nt, Artificial Sequence
  Description of Artificial Sequence: Synthetic oligonucleotide
  Sense strand starting at position 3337 of SEQ ID NO: 1561337
agaucaagucaauguggua

SEQ ID NO: 1664114 - RNA, 19 nt, Artificial Sequence
  Description of Artificial Sequence: Synthetic oligonucleotide
  Antisense strand to SEQ ID NO: 1664113
uaccacauugacuugaucu

SEQ ID NO: 1664115 - RNA, 19 nt, Artificial Sequence
  Description of Artificial Sequence: Synthetic oligonucleotide
  Sense strand starting at position 3403 of SEQ ID NO: 1561337
ggacuucuugcagaggcuu

SEQ ID NO: 1664116 - RNA, 19 nt, Artificial Sequence
  Description of Artificial Sequence: Synthetic oligonucleotide
  Antisense strand to SEQ ID NO: 1664115
aagccucugcaagaagucc

SEQ ID NO: 1664117 - RNA, 19 nt, Artificial Sequence
  Description of Artificial Sequence: Synthetic oligonucleotide
  Sense strand starting at position 3419 of SEQ ID NO: 1561337
cuuuguuuccaaugugauu

SEQ ID NO: 1664118 - RNA, 19 nt, Artificial Sequence
  Description of Artificial Sequence: Synthetic oligonucleotide
  Antisense strand to SEQ ID NO: 1664117
aaucacauuggaaacaaag

SEQ ID NO: 1664119 - RNA, 19 nt, Artificial Sequence
  Description of Artificial Sequence: Synthetic oligonucleotide
  Sense strand starting at position 3479 of SEQ ID NO: 1561337
guggguauuguguauagag

SEQ ID NO: 1664120 - RNA, 19 nt, Artificial Sequence
  Description of Artificial Sequence: Synthetic oligonucleotide
  Antisense strand to SEQ ID NO: 1664119
cucuauacacaauacccac

SEQ ID NO: 1664121 - RNA, 19 nt, Artificial Sequence
  Description of Artificial Sequence: Synthetic oligonucleotide
  Sense strand starting at position 3481 of SEQ ID NO: 1561337
ggguauuguguauagagug

SEQ ID NO: 1664122 - RNA, 19 nt, Artificial Sequence
  Description of Artificial Sequence: Synthetic oligonucleotide
  Antisense strand to SEQ ID NO: 1664121
cacucuauacacaauaccc

SEQ ID NO: 1664123 - RNA, 19 nt, Artificial Sequence
  Description of Artificial Sequence: Synthetic oligonucleotide
  Sense strand starting at position 3500 of SEQ ID NO: 1561337
gggaacugccuuugauauu

SEQ ID NO: 1664124 - RNA, 19 nt, Artificial Sequence
  Description of Artificial Sequence: Synthetic oligonucleotide
  Antisense strand to SEQ ID NO: 1664123
aauaucaaaggcaguuccc

SEQ ID NO: 1664125 - RNA, 19 nt, Artificial Sequence
  Description of Artificial Sequence: Synthetic oligonucleotide
  Sense strand starting at position 3501 of SEQ ID NO: 1561337
ggaacugccuuugauauuu

SEQ ID NO: 1664126 - RNA, 19 nt, Artificial Sequence
  Description of Artificial Sequence: Synthetic oligonucleotide
  Antisense strand to SEQ ID NO: 1664125
aaauaucaaaggcaguucc

SEQ ID NO: 1664127 - RNA, 19 nt, Artificial Sequence
  Description of Artificial Sequence: Synthetic oligonucleotide
  Sense strand starting at position 3536 of SEQ ID NO: 1561337
uuagcucagucagcagaau

SEQ ID NO: 1664128 - RNA, 19 nt, Artificial Sequence
  Description of Artificial Sequence: Synthetic oligonucleotide
  Antisense strand to SEQ ID NO: 1664127
auucugcugacugagcuaa

SEQ ID NO: 1664129 - RNA, 19 nt, Artificial Sequence
  Description of Artificial Sequence: Synthetic oligonucleotide
  Sense strand starting at position 3537 of SEQ ID NO: 1561337
uagcucagucagcagaauu

SEQ ID NO: 1664130 - RNA, 19 nt, Artificial Sequence
  Description of Artificial Sequence: Synthetic oligonucleotide
  Antisense strand to SEQ ID NO: 1664129
aauucugcugacugagcua

SEQ ID NO: 1664131 - RNA, 19 nt, Artificial Sequence
  Description of Artificial Sequence: Synthetic oligonucleotide
  Sense strand starting at position 3755 of SEQ ID NO: 1561337
cuuuaucuuucuguugaua

SEQ ID NO: 1664132 - RNA, 19 nt, Artificial Sequence
  Description of Artificial Sequence: Synthetic oligonucleotide
  Antisense strand to SEQ ID NO: 1664131
uaucaacagaaagauaaag

SEQ ID NO: 1664133 - RNA, 19 nt, Artificial Sequence
  Description of Artificial Sequence: Synthetic oligonucleotide
  Sense strand starting at position 3763 of SEQ ID NO: 1561337
uucuguugauacgugagau

SEQ ID NO: 1664134 - RNA, 19 nt, Artificial Sequence
  Description of Artificial Sequence: Synthetic oligonucleotide
  Antisense strand to SEQ ID NO: 1664133
aucucacguaucaacagaa

SEQ ID NO: 1664135 - RNA, 19 nt, Artificial Sequence
  Description of Artificial Sequence: Synthetic oligonucleotide
  Sense strand starting at position 3764 of SEQ ID NO: 1561337
ucuguugauacgugagauu

SEQ ID NO: 1664136 - RNA, 19 nt, Artificial Sequence
  Description of Artificial Sequence: Synthetic oligonucleotide
  Antisense strand to SEQ ID NO: 1664135
aaucucacguaucaacaga

SEQ ID NO: 1664137 - RNA, 19 nt, Artificial Sequence
  Description of Artificial Sequence: Synthetic oligonucleotide
  Sense strand starting at position 3893 of SEQ ID NO: 1561337
uuguauauaucugcuagga

SEQ ID NO: 1664138 - RNA, 19 nt, Artificial Sequence
  Description of Artificial Sequence: Synthetic oligonucleotide
  Antisense strand to SEQ ID NO: 1664137
uccuagcagauauauacaa

SEQ ID NO: 1664139 - RNA, 19 nt, Artificial Sequence
  Description of Artificial Sequence: Synthetic oligonucleotide
  Sense strand starting at position 3897 of SEQ ID NO: 1561337
auauaucugcuaggaguuu

SEQ ID NO: 1664140 - RNA, 19 nt, Artificial Sequence
  Description of Artificial Sequence: Synthetic oligonucleotide
  Antisense strand to SEQ ID NO: 1664139
aaacuccuagcagauauau

SEQ ID NO: 1664141 - RNA, 19 nt, Artificial Sequence
  Description of Artificial Sequence: Synthetic oligonucleotide
  Sense strand starting at position 3903 of SEQ ID NO: 1561337
cugcuaggaguuugguuua

SEQ ID NO: 1664142 - RNA, 19 nt, Artificial Sequence
  Description of Artificial Sequence: Synthetic oligonucleotide
  Antisense strand to SEQ ID NO: 1664141
uaaaccaaacuccuagcag

SEQ ID NO: 1664143 - RNA, 19 nt, Artificial Sequence
  Description of Artificial Sequence: Synthetic oligonucleotide
  Sense strand starting at position 3906 of SEQ ID NO: 1561337
cuaggaguuugguuuaugu

SEQ ID NO: 1664144 - RNA, 19 nt, Artificial Sequence
  Description of Artificial Sequence: Synthetic oligonucleotide
  Antisense strand to SEQ ID NO: 1664143
acauaaaccaaacuccuag

SEQ ID NO: 1664145 - RNA, 19 nt, Artificial Sequence
  Description of Artificial Sequence: Synthetic oligonucleotide
  Sense strand starting at position 3908 of SEQ ID NO: 1561337
aggaguuugguuuauguuu

SEQ ID NO: 1664146 - RNA, 19 nt, Artificial Sequence
  Description of Artificial Sequence: Synthetic oligonucleotide
  Antisense strand to SEQ ID NO: 1664145
aaacauaaaccaaacuccu

SEQ ID NO: 1664147 - RNA, 19 nt, Artificial Sequence
  Description of Artificial Sequence: Synthetic oligonucleotide
  Sense strand starting at position 3913 of SEQ ID NO: 1561337
uuugguuuauguuuccaaa

SEQ ID NO: 1664148 - RNA, 19 nt, Artificial Sequence
  Description of Artificial Sequence: Synthetic oligonucleotide
  Antisense strand to SEQ ID NO: 1664147
uuuggaaacauaaaccaaa

SEQ ID NO: 1664149 - RNA, 19 nt, Artificial Sequence
  Description of Artificial Sequence: Synthetic oligonucleotide
  Sense strand starting at position 3915 of SEQ ID NO: 1561337
ugguuuauguuuccaaauc

SEQ ID NO: 1664150 - RNA, 19 nt, Artificial Sequence
  Description of Artificial Sequence: Synthetic oligonucleotide
  Antisense strand to SEQ ID NO: 1664149
gauuuggaaacauaaacca

SEQ ID NO: 1664151 - RNA, 19 nt, Artificial Sequence
  Description of Artificial Sequence: Synthetic oligonucleotide
  Sense strand starting at position 291 of SEQ ID NO: 1561338
auccauagacuguggauaa

SEQ ID NO: 1664152 - RNA, 19 nt, Artificial Sequence
  Description of Artificial Sequence: Synthetic oligonucleotide
  Antisense strand to SEQ ID NO: 1664151
uuauccacagucuauggau

SEQ ID NO: 1664153 - RNA, 19 nt, Artificial Sequence
  Description of Artificial Sequence: Synthetic oligonucleotide
  Sense strand starting at position 363 of SEQ ID NO: 1561338
augucaucuccucagaguu

SEQ ID NO: 1664154 - RNA, 19 nt, Artificial Sequence
  Description of Artificial Sequence: Synthetic oligonucleotide
  Antisense strand to SEQ ID NO: 1664153
aacucugaggagaugacau

SEQ ID NO: 1664155 - RNA, 19 nt, Artificial Sequence
  Description of Artificial Sequence: Synthetic oligonucleotide
  Sense strand starting at position 376 of SEQ ID NO: 1561338
agaguucuucccugcaaau

SEQ ID NO: 1664156 - RNA, 19 nt, Artificial Sequence
  Description of Artificial Sequence: Synthetic oligonucleotide
  Antisense strand to SEQ ID NO: 1664155
auuugcagggaagaacucu

SEQ ID NO: 1664157 - RNA, 19 nt, Artificial Sequence
  Description of Artificial Sequence: Synthetic oligonucleotide
  Sense strand starting at position 435 of SEQ ID NO: 1561338
ccagucauugccuaaacug

SEQ ID NO: 1664158 - RNA, 19 nt, Artificial Sequence
  Description of Artificial Sequence: Synthetic oligonucleotide
  Antisense strand to SEQ ID NO: 1664157
caguuuaggcaaugacugg

SEQ ID NO: 1664159 - RNA, 19 nt, Artificial Sequence
  Description of Artificial Sequence: Synthetic oligonucleotide
  Sense strand starting at position 609 of SEQ ID NO: 1561338
acagguguguggcuaauuu

SEQ ID NO: 1664160 - RNA, 19 nt, Artificial Sequence
  Description of Artificial Sequence: Synthetic oligonucleotide
  Antisense strand to SEQ ID NO: 1664159
aaauuagccacacaccugu

SEQ ID NO: 1664161 - RNA, 19 nt, Artificial Sequence
  Description of Artificial Sequence: Synthetic oligonucleotide
  Sense strand starting at position 937 of SEQ ID NO: 1561338
uguucugaagauuaagcua

SEQ ID NO: 1664162 - RNA, 19 nt, Artificial Sequence
  Description of Artificial Sequence: Synthetic oligonucleotide
  Antisense strand to SEQ ID NO: 1664161
uagcuuaaucuucagaaca

SEQ ID NO: 1664163 - RNA, 19 nt, Artificial Sequence
  Description of Artificial Sequence: Synthetic oligonucleotide
  Sense strand starting at position 940 of SEQ ID NO: 1561338
ucugaagauuaagcuaauu

SEQ ID NO: 1664164 - RNA, 19 nt, Artificial Sequence
  Description of Artificial Sequence: Synthetic oligonucleotide
  Antisense strand to SEQ ID NO: 1664163
aauuagcuuaaucuucaga

SEQ ID NO: 1664165 - RNA, 19 nt, Artificial Sequence
  Description of Artificial Sequence: Synthetic oligonucleotide
  Sense strand starting at position 1103 of SEQ ID NO: 1561338
ugcuaaugagugugggaaa

SEQ ID NO: 1664166 - RNA, 19 nt, Artificial Sequence
  Description of Artificial Sequence: Synthetic oligonucleotide
  Antisense strand to SEQ ID NO: 1664165
uuucccacacucauuagca

SEQ ID NO: 1664167 - RNA, 19 nt, Artificial Sequence
  Description of Artificial Sequence: Synthetic oligonucleotide
  Sense strand starting at position 1117 of SEQ ID NO: 1561338
ggaaaucuguucuccaacu

SEQ ID NO: 1664168 - RNA, 19 nt, Artificial Sequence
  Description of Artificial Sequence: Synthetic oligonucleotide
  Antisense strand to SEQ ID NO: 1664167
aguuggagaacagauuucc

SEQ ID NO: 1664169 - RNA, 19 nt, Artificial Sequence
  Description of Artificial Sequence: Synthetic oligonucleotide
  Sense strand starting at position 1232 of SEQ ID NO: 1561338
guuagucaaggcugaggaa

SEQ ID NO: 1664170 - RNA, 19 nt, Artificial Sequence
  Description of Artificial Sequence: Synthetic oligonucleotide
  Antisense strand to SEQ ID NO: 1664169
uuccucagccuugacuaac

SEQ ID NO: 1664171 - RNA, 19 nt, Artificial Sequence
  Description of Artificial Sequence: Synthetic oligonucleotide
  Sense strand starting at position 1260 of SEQ ID NO: 1561338
guuggaagauaucuaaacu

SEQ ID NO: 1664172 - RNA, 19 nt, Artificial Sequence
  Description of Artificial Sequence: Synthetic oligonucleotide
  Antisense strand to SEQ ID NO: 1664171
aguuuagauaucuuccaac

SEQ ID NO: 1664173 - RNA, 19 nt, Artificial Sequence
  Description of Artificial Sequence: Synthetic oligonucleotide
  Sense strand starting at position 1277 of SEQ ID NO: 1561338
cucuguuucugguccagga

SEQ ID NO: 1664174 - RNA, 19 nt, Artificial Sequence
  Description of Artificial Sequence: Synthetic oligonucleotide
  Antisense strand to SEQ ID NO: 1664173
uccuggaccagaaacagag

SEQ ID NO: 1664175 - RNA, 19 nt, Artificial Sequence
  Description of Artificial Sequence: Synthetic oligonucleotide
  Sense strand starting at position 1281 of SEQ ID NO: 1561338
guuucugguccaggaugaa

SEQ ID NO: 1664176 - RNA, 19 nt, Artificial Sequence
  Description of Artificial Sequence: Synthetic oligonucleotide
  Antisense strand to SEQ ID NO: 1664175
uucauccuggaccagaaac

SEQ ID NO: 1664177 - RNA, 19 nt, Artificial Sequence
  Description of Artificial Sequence: Synthetic oligonucleotide
  Sense strand starting at position 1687 of SEQ ID NO: 1561338
cggagaaauuaagaaacua

SEQ ID NO: 1664178 - RNA, 19 nt, Artificial Sequence
  Description of Artificial Sequence: Synthetic oligonucleotide
  Antisense strand to SEQ ID NO: 1664177
uaguuucuuaauuucuccg

SEQ ID NO: 1664179 - RNA, 19 nt, Artificial Sequence
  Description of Artificial Sequence: Synthetic oligonucleotide
  Sense strand starting at position 2446 of SEQ ID NO: 1561338
uuuacaguucuguacggua

SEQ ID NO: 1664180 - RNA, 19 nt, Artificial Sequence
  Description of Artificial Sequence: Synthetic oligonucleotide
  Antisense strand to SEQ ID NO: 1664179
uaccguacagaacuguaaa

SEQ ID NO: 1664181 - RNA, 19 nt, Artificial Sequence
  Description of Artificial Sequence: Synthetic oligonucleotide
  Sense strand starting at position 2451 of SEQ ID NO: 1561338
aguucuguacgguauugau

SEQ ID NO: 1664182 - RNA, 19 nt, Artificial Sequence
  Description of Artificial Sequence: Synthetic oligonucleotide
  Antisense strand to SEQ ID NO: 1664181
aucaauaccguacagaacu

SEQ ID NO: 1664183 - RNA, 19 nt, Artificial Sequence
  Description of Artificial Sequence: Synthetic oligonucleotide
  Sense strand starting at position 2473 of SEQ ID NO: 1561338
guaaguuuacaccaucugu

SEQ ID NO: 1664184 - RNA, 19 nt, Artificial Sequence
  Description of Artificial Sequence: Synthetic oligonucleotide
  Antisense strand to SEQ ID NO: 1664183
acagaugguguaaacuuac

SEQ ID NO: 1664185 - RNA, 19 nt, Artificial Sequence
  Description of Artificial Sequence: Synthetic oligonucleotide
  Sense strand starting at position 2762 of SEQ ID NO: 1561338
cuuugagaugauuagcauu

SEQ ID NO: 1664186 - RNA, 19 nt, Artificial Sequence
  Description of Artificial Sequence: Synthetic oligonucleotide
  Antisense strand to SEQ ID NO: 1664185
aaugcuaaucaucucaaag

SEQ ID NO: 1664187 - RNA, 19 nt, Artificial Sequence
  Description of Artificial Sequence: Synthetic oligonucleotide
  Sense strand starting at position 2770 of SEQ ID NO: 1561338
ugauuagcauuacuuggaa

SEQ ID NO: 1664188 - RNA, 19 nt, Artificial Sequence
  Description of Artificial Sequence: Synthetic oligonucleotide
  Antisense strand to SEQ ID NO: 1664187
uuccaaguaaugcuaauca

SEQ ID NO: 1664189 - RNA, 19 nt, Artificial Sequence
  Description of Artificial Sequence: Synthetic oligonucleotide
  Sense strand starting at position 3089 of SEQ ID NO: 1561338
guuugauauuucuagacua

SEQ ID NO: 1664190 - RNA, 19 nt, Artificial Sequence
  Description of Artificial Sequence: Synthetic oligonucleotide
  Antisense strand to SEQ ID NO: 1664189
uagucuagaaauaucaaac

SEQ ID NO: 1664191 - RNA, 19 nt, Artificial Sequence
  Description of Artificial Sequence: Synthetic oligonucleotide
  Sense strand starting at position 3327 of SEQ ID NO: 1561338
cagcuugcucuugagauga

SEQ ID NO: 1664192 - RNA, 19 nt, Artificial Sequence
  Description of Artificial Sequence: Synthetic oligonucleotide
  Antisense strand to SEQ ID NO: 1664191
ucaucucaagagcaagcug

SEQ ID NO: 1664193 - RNA, 19 nt, Artificial Sequence
  Description of Artificial Sequence: Synthetic oligonucleotide
  Sense strand starting at position 3371 of SEQ ID NO: 1561338
agaucaagucaauguggua

SEQ ID NO: 1664194 - RNA, 19 nt, Artificial Sequence
  Description of Artificial Sequence: Synthetic oligonucleotide
  Antisense strand to SEQ ID NO: 1664193
uaccacauugacuugaucu

SEQ ID NO: 1664195 - RNA, 19 nt, Artificial Sequence
  Description of Artificial Sequence: Synthetic oligonucleotide
  Sense strand starting at position 3437 of SEQ ID NO: 1561338
ggacuucuugcagaggcuu

SEQ ID NO: 1664196 - RNA, 19 nt, Artificial Sequence
  Description of Artificial Sequence: Synthetic oligonucleotide
  Antisense strand to SEQ ID NO: 1664195
aagccucugcaagaagucc

SEQ ID NO: 1664197 - RNA, 19 nt, Artificial Sequence
  Description of Artificial Sequence: Synthetic oligonucleotide
  Sense strand starting at position 3453 of SEQ ID NO: 1561338
cuuuguuuccaaugugauu

SEQ ID NO: 1664198 - RNA, 19 nt, Artificial Sequence
  Description of Artificial Sequence: Synthetic oligonucleotide
  Antisense strand to SEQ ID NO: 1664197
aaucacauuggaaacaaag

SEQ ID NO: 1664199 - RNA, 19 nt, Artificial Sequence
  Description of Artificial Sequence: Synthetic oligonucleotide
  Sense strand starting at position 3513 of SEQ ID NO: 1561338
guggguauuguguauagag

SEQ ID NO: 1664200 - RNA, 19 nt, Artificial Sequence
  Description of Artificial Sequence: Synthetic oligonucleotide
  Antisense strand to SEQ ID NO: 1664199
cucuauacacaauacccac

SEQ ID NO: 1664201 - RNA, 19 nt, Artificial Sequence
  Description of Artificial Sequence: Synthetic oligonucleotide
  Sense strand starting at position 3515 of SEQ ID NO: 1561338
ggguauuguguauagagug

SEQ ID NO: 1664202 - RNA, 19 nt, Artificial Sequence
  Description of Artificial Sequence: Synthetic oligonucleotide
  Antisense strand to SEQ ID NO: 1664201
cacucuauacacaauaccc

SEQ ID NO: 1664203 - RNA, 19 nt, Artificial Sequence
  Description of Artificial Sequence: Synthetic oligonucleotide
  Sense strand starting at position 3534 of SEQ ID NO: 1561338
gggaacugccuuugauauu

SEQ ID NO: 1664204 - RNA, 19 nt, Artificial Sequence
  Description of Artificial Sequence: Synthetic oligonucleotide
  Antisense strand to SEQ ID NO: 1664203
aauaucaaaggcaguuccc

SEQ ID NO: 1664205 - RNA, 19 nt, Artificial Sequence
  Description of Artificial Sequence: Synthetic oligonucleotide
  Sense strand starting at position 3535 of SEQ ID NO: 1561338
ggaacugccuuugauauuu

SEQ ID NO: 1664206 - RNA, 19 nt, Artificial Sequence
  Description of Artificial Sequence: Synthetic oligonucleotide
  Antisense strand to SEQ ID NO: 1664205
aaauaucaaaggcaguucc

SEQ ID NO: 1664207 - RNA, 19 nt, Artificial Sequence
  Description of Artificial Sequence: Synthetic oligonucleotide
  Sense strand starting at position 3570 of SEQ ID NO: 1561338
uuagcucagucagcagaau

SEQ ID NO: 1664208 - RNA, 19 nt, Artificial Sequence
  Description of Artificial Sequence: Synthetic oligonucleotide
  Antisense strand to SEQ ID NO: 1664207
auucugcugacugagcuaa

SEQ ID NO: 1664209 - RNA, 19 nt, Artificial Sequence
  Description of Artificial Sequence: Synthetic oligonucleotide
  Sense strand starting at position 3571 of SEQ ID NO: 1561338
uagcucagucagcagaauu

SEQ ID NO: 1664210 - RNA, 19 nt, Artificial Sequence
  Description of Artificial Sequence: Synthetic oligonucleotide
  Antisense strand to SEQ ID NO: 1664209
aauucugcugacugagcua

SEQ ID NO: 1664211 - RNA, 19 nt, Artificial Sequence
  Description of Artificial Sequence: Synthetic oligonucleotide
  Sense strand starting at position 3789 of SEQ ID NO: 1561338
cuuuaucuuucuguugaua

SEQ ID NO: 1664212 - RNA, 19 nt, Artificial Sequence
  Description of Artificial Sequence: Synthetic oligonucleotide
  Antisense strand to SEQ ID NO: 1664211
uaucaacagaaagauaaag

SEQ ID NO: 1664213 - RNA, 19 nt, Artificial Sequence
  Description of Artificial Sequence: Synthetic oligonucleotide
  Sense strand starting at position 3797 of SEQ ID NO: 1561338
uucuguugauacgugagau

SEQ ID NO: 1664214 - RNA, 19 nt, Artificial Sequence
  Description of Artificial Sequence: Synthetic oligonucleotide
  Antisense strand to SEQ ID NO: 1664213
aucucacguaucaacagaa

SEQ ID NO: 1664215 - RNA, 19 nt, Artificial Sequence
  Description of Artificial Sequence: Synthetic oligonucleotide
  Sense strand starting at position 3798 of SEQ ID NO: 1561338
ucuguugauacgugagauu

SEQ ID NO: 1664216 - RNA, 19 nt, Artificial Sequence
  Description of Artificial Sequence: Synthetic oligonucleotide
  Antisense strand to SEQ ID NO: 1664215
aaucucacguaucaacaga

SEQ ID NO: 1664217 - RNA, 19 nt, Artificial Sequence
  Description of Artificial Sequence: Synthetic oligonucleotide
  Sense strand starting at position 3927 of SEQ ID NO: 1561338
uuguauauaucugcuagga

SEQ ID NO: 1664218 - RNA, 19 nt, Artificial Sequence
  Description of Artificial Sequence: Synthetic oligonucleotide
  Antisense strand to SEQ ID NO: 1664217
uccuagcagauauauacaa

SEQ ID NO: 1664219 - RNA, 19 nt, Artificial Sequence
  Description of Artificial Sequence: Synthetic oligonucleotide
  Sense strand starting at position 3931 of SEQ ID NO: 1561338
auauaucugcuaggaguuu

SEQ ID NO: 1664220 - RNA, 19 nt, Artificial Sequence
  Description of Artificial Sequence: Synthetic oligonucleotide
  Antisense strand to SEQ ID NO: 1664219
aaacuccuagcagauauau

SEQ ID NO: 1664221 - RNA, 19 nt, Artificial Sequence
  Description of Artificial Sequence: Synthetic oligonucleotide
  Sense strand starting at position 3937 of SEQ ID NO: 1561338
cugcuaggaguuugguuua

SEQ ID NO: 1664222 - RNA, 19 nt, Artificial Sequence
  Description of Artificial Sequence: Synthetic oligonucleotide
  Antisense strand to SEQ ID NO: 1664221
uaaaccaaacuccuagcag

SEQ ID NO: 1664223 - RNA, 19 nt, Artificial Sequence
  Description of Artificial Sequence: Synthetic oligonucleotide
  Sense strand starting at position 3940 of SEQ ID NO: 1561338
cuaggaguuugguuuaugu

SEQ ID NO: 1664224 - RNA, 19 nt, Artificial Sequence
  Description of Artificial Sequence: Synthetic oligonucleotide
  Antisense strand to SEQ ID NO: 1664223
acauaaaccaaacuccuag

SEQ ID NO: 1664225 - RNA, 19 nt, Artificial Sequence
  Description of Artificial Sequence: Synthetic oligonucleotide
  Sense strand starting at position 3942 of SEQ ID NO: 1561338
aggaguuugguuuauguuu

SEQ ID NO: 1664226 - RNA, 19 nt, Artificial Sequence
  Description of Artificial Sequence: Synthetic oligonucleotide
  Antisense strand to SEQ ID NO: 1664225
aaacauaaaccaaacuccu

SEQ ID NO: 1664227 - RNA, 19 nt, Artificial Sequence
  Description of Artificial Sequence: Synthetic oligonucleotide
  Sense strand starting at position 3947 of SEQ ID NO: 1561338
uuugguuuauguuuccaaa

SEQ ID NO: 1664228 - RNA, 19 nt, Artificial Sequence
  Description of Artificial Sequence: Synthetic oligonucleotide
  Antisense strand to SEQ ID NO: 1664227
uuuggaaacauaaaccaaa

SEQ ID NO: 1664229 - RNA, 19 nt, Artificial Sequence
  Description of Artificial Sequence: Synthetic oligonucleotide
  Sense strand starting at position 3949 of SEQ ID NO: 1561338
ugguuuauguuuccaaauc

SEQ ID NO: 1664230 - RNA, 19 nt, Artificial Sequence
  Description of Artificial Sequence: Synthetic oligonucleotide
  Antisense strand to SEQ ID NO: 1664229
gauuuggaaacauaaacca

SEQ ID NO: 1664231 - RNA, 19 nt, Artificial Sequence
  Description of Artificial Sequence: Synthetic oligonucleotide
  Sense strand starting at position 468 of SEQ ID NO: 1561339
aggaaauagucauaggaga

SEQ ID NO: 1664232 - RNA, 19 nt, Artificial Sequence
  Description of Artificial Sequence: Synthetic oligonucleotide
  Antisense strand to SEQ ID NO: 1664231
ucuccuaugacuauuuccu

SEQ ID NO: 1664233 - RNA, 19 nt, Artificial Sequence
  Description of Artificial Sequence: Synthetic oligonucleotide
  Sense strand starting at position 483 of SEQ ID NO: 1561339
gagaaauaauaaugagaag

SEQ ID NO: 1664234 - RNA, 19 nt, Artificial Sequence
  Description of Artificial Sequence: Synthetic oligonucleotide
  Antisense strand to SEQ ID NO: 1664233
cuucucauuauuauuucuc

SEQ ID NO: 1664235 - RNA, 19 nt, Artificial Sequence
  Description of Artificial Sequence: Synthetic oligonucleotide
  Sense strand starting at position 507 of SEQ ID NO: 1561339
gaaugagcaugauagaaua

SEQ ID NO: 1664236 - RNA, 19 nt, Artificial Sequence
  Description of Artificial Sequence: Synthetic oligonucleotide
  Antisense strand to SEQ ID NO: 1664235
uauucuaucaugcucauuc

SEQ ID NO: 1664237 - RNA, 19 nt, Artificial Sequence
  Description of Artificial Sequence: Synthetic oligonucleotide
  Sense strand starting at position 519 of SEQ ID NO: 1561339
uagaauauggcaggucacu

SEQ ID NO: 1664238 - RNA, 19 nt, Artificial Sequence
  Description of Artificial Sequence: Synthetic oligonucleotide
  Antisense strand to SEQ ID NO: 1664237
agugaccugccauauucua

SEQ ID NO: 1664239 - RNA, 19 nt, Artificial Sequence
  Description of Artificial Sequence: Synthetic oligonucleotide
  Sense strand starting at position 525 of SEQ ID NO: 1561339
auggcaggucacuaguuua

SEQ ID NO: 1664240 - RNA, 19 nt, Artificial Sequence
  Description of Artificial Sequence: Synthetic oligonucleotide
  Antisense strand to SEQ ID NO: 1664239
uaaacuagugaccugccau

SEQ ID NO: 1664241 - RNA, 19 nt, Artificial Sequence
  Description of Artificial Sequence: Synthetic oligonucleotide
  Sense strand starting at position 528 of SEQ ID NO: 1561339
gcaggucacuaguuuauua

SEQ ID NO: 1664242 - RNA, 19 nt, Artificial Sequence
  Description of Artificial Sequence: Synthetic oligonucleotide
  Antisense strand to SEQ ID NO: 1664241
uaauaaacuagugaccugc

SEQ ID NO: 1664243 - RNA, 19 nt, Artificial Sequence
  Description of Artificial Sequence: Synthetic oligonucleotide
  Sense strand starting at position 555 of SEQ ID NO: 1561339
ucuggaaauuuccauggau

SEQ ID NO: 1664244 - RNA, 19 nt, Artificial Sequence
  Description of Artificial Sequence: Synthetic oligonucleotide
  Antisense strand to SEQ ID NO: 1664243
auccauggaaauuuccaga

SEQ ID NO: 1664245 - RNA, 19 nt, Artificial Sequence
  Description of Artificial Sequence: Synthetic oligonucleotide
  Sense strand starting at position 728 of SEQ ID NO: 1561339
guaucuucguauuucugua

SEQ ID NO: 1664246 - RNA, 19 nt, Artificial Sequence
  Description of Artificial Sequence: Synthetic oligonucleotide
  Antisense strand to SEQ ID NO: 1664245
uacagaaauacgaagauac

SEQ ID NO: 1664247 - RNA, 19 nt, Artificial Sequence
  Description of Artificial Sequence: Synthetic oligonucleotide
  Sense strand starting at position 730 of SEQ ID NO: 1561339
aucuucguauuucuguaau

SEQ ID NO: 1664248 - RNA, 19 nt, Artificial Sequence
  Description of Artificial Sequence: Synthetic oligonucleotide
  Antisense strand to SEQ ID NO: 1664247
auuacagaaauacgaagau

SEQ ID NO: 1664249 - RNA, 19 nt, Artificial Sequence
  Description of Artificial Sequence: Synthetic oligonucleotide
  Sense strand starting at position 773 of SEQ ID NO: 1561339
guucuauuagaaugugaaa

SEQ ID NO: 1664250 - RNA, 19 nt, Artificial Sequence
  Description of Artificial Sequence: Synthetic oligonucleotide
  Antisense strand to SEQ ID NO: 1664249
uuucacauucuaauagaac

SEQ ID NO: 1664251 - RNA, 19 nt, Artificial Sequence
  Description of Artificial Sequence: Synthetic oligonucleotide
  Sense strand starting at position 1040 of SEQ ID NO: 1561339
agucacguugcggcuuaaa

SEQ ID NO: 1664252 - RNA, 19 nt, Artificial Sequence
  Description of Artificial Sequence: Synthetic oligonucleotide
  Antisense strand to SEQ ID NO: 1664251
uuuaagccgcaacgugacu

SEQ ID NO: 1664253 - RNA, 19 nt, Artificial Sequence
  Description of Artificial Sequence: Synthetic oligonucleotide
  Sense strand starting at position 1049 of SEQ ID NO: 1561339
gcggcuuaaacguaucuaa

SEQ ID NO: 1664254 - RNA, 19 nt, Artificial Sequence
  Description of Artificial Sequence: Synthetic oligonucleotide
  Antisense strand to SEQ ID NO: 1664253
uuagauacguuuaagccgc

SEQ ID NO: 1664255 - RNA, 19 nt, Artificial Sequence
  Description of Artificial Sequence: Synthetic oligonucleotide
  Sense strand starting at position 1052 of SEQ ID NO: 1561339
gcuuaaacguaucuaauug

SEQ ID NO: 1664256 - RNA, 19 nt, Artificial Sequence
  Description of Artificial Sequence: Synthetic oligonucleotide
  Antisense strand to SEQ ID NO: 1664255
caauuagauacguuuaagc

SEQ ID NO: 1664257 - RNA, 19 nt, Artificial Sequence
  Description of Artificial Sequence: Synthetic oligonucleotide
  Sense strand starting at position 1096 of SEQ ID NO: 1561339
gcaauuaaggcuuaauuau

SEQ ID NO: 1664258 - RNA, 19 nt, Artificial Sequence
  Description of Artificial Sequence: Synthetic oligonucleotide
  Antisense strand to SEQ ID NO: 1664257
auaauuaagccuuaauugc

SEQ ID NO: 1664259 - RNA, 19 nt, Artificial Sequence
  Description of Artificial Sequence: Synthetic oligonucleotide
  Sense strand starting at position 1383 of SEQ ID NO: 1561339
gcguccugcagggaucaga

SEQ ID NO: 1664260 - RNA, 19 nt, Artificial Sequence
  Description of Artificial Sequence: Synthetic oligonucleotide
  Antisense strand to SEQ ID NO: 1664259
ucugaucccugcaggacgc

SEQ ID NO: 1664261 - RNA, 19 nt, Artificial Sequence
  Description of Artificial Sequence: Synthetic oligonucleotide
  Sense strand starting at position 1451 of SEQ ID NO: 1561339
cuaacagguuucgugggaa

SEQ ID NO: 1664262 - RNA, 19 nt, Artificial Sequence
  Description of Artificial Sequence: Synthetic oligonucleotide
  Antisense strand to SEQ ID NO: 1664261
uucccacgaaaccuguuag

SEQ ID NO: 1664263 - RNA, 19 nt, Artificial Sequence
  Description of Artificial Sequence: Synthetic oligonucleotide
  Sense strand starting at position 1454 of SEQ ID NO: 1561339
acagguuucgugggaaagu

SEQ ID NO: 1664264 - RNA, 19 nt, Artificial Sequence
  Description of Artificial Sequence: Synthetic oligonucleotide
  Antisense strand to SEQ ID NO: 1664263
acuuucccacgaaaccugu

SEQ ID NO: 1664265 - RNA, 19 nt, Artificial Sequence
  Description of Artificial Sequence: Synthetic oligonucleotide
  Sense strand starting at position 1463 of SEQ ID NO: 1561339
gugggaaaguaacaagaaa

SEQ ID NO: 1664266 - RNA, 19 nt, Artificial Sequence
  Description of Artificial Sequence: Synthetic oligonucleotide
  Antisense strand to SEQ ID NO: 1664265
uuucuuguuacuuucccac

SEQ ID NO: 1664267 - RNA, 19 nt, Artificial Sequence
  Description of Artificial Sequence: Synthetic oligonucleotide
  Sense strand starting at position 1516 of SEQ ID NO: 1561339
uguguaaccuauuccaguu

SEQ ID NO: 1664268 - RNA, 19 nt, Artificial Sequence
  Description of Artificial Sequence: Synthetic oligonucleotide
  Antisense strand to SEQ ID NO: 1664267
aacuggaauagguuacaca

SEQ ID NO: 1664269 - RNA, 19 nt, Artificial Sequence
  Description of Artificial Sequence: Synthetic oligonucleotide
  Sense strand starting at position 2193 of SEQ ID NO: 1561339
gaacgaauccuauaucgcu

SEQ ID NO: 1664270 - RNA, 19 nt, Artificial Sequence
  Description of Artificial Sequence: Synthetic oligonucleotide
  Antisense strand to SEQ ID NO: 1664269
agcgauauaggauucguuc

SEQ ID NO: 1664271 - RNA, 19 nt, Artificial Sequence
  Description of Artificial Sequence: Synthetic oligonucleotide
  Sense strand starting at position 2264 of SEQ ID NO: 1561339
gccugaguccuugagcgaa

SEQ ID NO: 1664272 - RNA, 19 nt, Artificial Sequence
  Description of Artificial Sequence: Synthetic oligonucleotide
  Antisense strand to SEQ ID NO: 1664271
uucgcucaaggacucaggc

SEQ ID NO: 1664273 - RNA, 19 nt, Artificial Sequence
  Description of Artificial Sequence: Synthetic oligonucleotide
  Sense strand starting at position 2295 of SEQ ID NO: 1561339
acagcaauuccugaagucu

SEQ ID NO: 1664274 - RNA, 19 nt, Artificial Sequence
  Description of Artificial Sequence: Synthetic oligonucleotide
  Antisense strand to SEQ ID NO: 1664273
agacuucaggaauugcugu

SEQ ID NO: 1664275 - RNA, 19 nt, Artificial Sequence
  Description of Artificial Sequence: Synthetic oligonucleotide
  Sense strand starting at position 2333 of SEQ ID NO: 1561339
ggaggauuauuggaaagag

SEQ ID NO: 1664276 - RNA, 19 nt, Artificial Sequence
  Description of Artificial Sequence: Synthetic oligonucleotide
  Antisense strand to SEQ ID NO: 1664275
cucuuuccaauaauccucc

SEQ ID NO: 1664277 - RNA, 19 nt, Artificial Sequence
  Description of Artificial Sequence: Synthetic oligonucleotide
  Sense strand starting at position 2406 of SEQ ID NO: 1561339
gucaguagaugauugauga

SEQ ID NO: 1664278 - RNA, 19 nt, Artificial Sequence
  Description of Artificial Sequence: Synthetic oligonucleotide
  Antisense strand to SEQ ID NO: 1664277
ucaucaaucaucuacugac

SEQ ID NO: 1664279 - RNA, 19 nt, Artificial Sequence
  Description of Artificial Sequence: Synthetic oligonucleotide
  Sense strand starting at position 2407 of SEQ ID NO: 1561339
ucaguagaugauugaugau

SEQ ID NO: 1664280 - RNA, 19 nt, Artificial Sequence
  Description of Artificial Sequence: Synthetic oligonucleotide
  Antisense strand to SEQ ID NO: 1664279
aucaucaaucaucuacuga

SEQ ID NO: 1664281 - RNA, 19 nt, Artificial Sequence
  Description of Artificial Sequence: Synthetic oligonucleotide
  Sense strand starting at position 2481 of SEQ ID NO: 1561339
aguacaaugguuugggaga

SEQ ID NO: 1664282 - RNA, 19 nt, Artificial Sequence
  Description of Artificial Sequence: Synthetic oligonucleotide
  Antisense strand to SEQ ID NO: 1664281
ucucccaaaccauuguacu

SEQ ID NO: 1664283 - RNA, 19 nt, Artificial Sequence
  Description of Artificial Sequence: Synthetic oligonucleotide
  Sense strand starting at position 2599 of SEQ ID NO: 1561339
aagcccuguccucauggaa

SEQ ID NO: 1664284 - RNA, 19 nt, Artificial Sequence
  Description of Artificial Sequence: Synthetic oligonucleotide
  Antisense strand to SEQ ID NO: 1664283
uuccaugaggacagggcuu

SEQ ID NO: 1664285 - RNA, 19 nt, Artificial Sequence
  Description of Artificial Sequence: Synthetic oligonucleotide
  Sense strand starting at position 2621 of SEQ ID NO: 1561339
cuaucuucuuucguuuaca

SEQ ID NO: 1664286 - RNA, 19 nt, Artificial Sequence
  Description of Artificial Sequence: Synthetic oligonucleotide
  Antisense strand to SEQ ID NO: 1664285
uguaaacgaaagaagauag

SEQ ID NO: 1664287 - RNA, 19 nt, Artificial Sequence
  Description of Artificial Sequence: Synthetic oligonucleotide
  Sense strand starting at position 2646 of SEQ ID NO: 1561339
augguauuaugucuacuga

SEQ ID NO: 1664288 - RNA, 19 nt, Artificial Sequence
  Description of Artificial Sequence: Synthetic oligonucleotide
  Antisense strand to SEQ ID NO: 1664287
ucaguagacauaauaccau

SEQ ID NO: 1664289 - RNA, 19 nt, Artificial Sequence
  Description of Artificial Sequence: Synthetic oligonucleotide
  Sense strand starting at position 2647 of SEQ ID NO: 1561339
ugguauuaugucuacugaa

SEQ ID NO: 1664290 - RNA, 19 nt, Artificial Sequence
  Description of Artificial Sequence: Synthetic oligonucleotide
  Antisense strand to SEQ ID NO: 1664289
uucaguagacauaauacca

SEQ ID NO: 1664291 - RNA, 19 nt, Artificial Sequence
  Description of Artificial Sequence: Synthetic oligonucleotide
  Sense strand starting at position 2719 of SEQ ID NO: 1561339
gcaaguauaacuggugaag

SEQ ID NO: 1664292 - RNA, 19 nt, Artificial Sequence
  Description of Artificial Sequence: Synthetic oligonucleotide
  Antisense strand to SEQ ID NO: 1664291
cuucaccaguuauacuugc

SEQ ID NO: 1664293 - RNA, 19 nt, Artificial Sequence
  Description of Artificial Sequence: Synthetic oligonucleotide
  Sense strand starting at position 2800 of SEQ ID NO: 1561339
ggauccuauacgugaagga

SEQ ID NO: 1664294 - RNA, 19 nt, Artificial Sequence
  Description of Artificial Sequence: Synthetic oligonucleotide
  Antisense strand to SEQ ID NO: 1664293
uccuucacguauaggaucc

SEQ ID NO: 1664295 - RNA, 19 nt, Artificial Sequence
  Description of Artificial Sequence: Synthetic oligonucleotide
  Sense strand starting at position 2804 of SEQ ID NO: 1561339
ccuauacgugaaggaacau

SEQ ID NO: 1664296 - RNA, 19 nt, Artificial Sequence
  Description of Artificial Sequence: Synthetic oligonucleotide
  Antisense strand to SEQ ID NO: 1664295
auguuccuucacguauagg

SEQ ID NO: 1664297 - RNA, 19 nt, Artificial Sequence
  Description of Artificial Sequence: Synthetic oligonucleotide
  Sense strand starting at position 2879 of SEQ ID NO: 1561339
uuuggaaucuggcuuacau

SEQ ID NO: 1664298 - RNA, 19 nt, Artificial Sequence
  Description of Artificial Sequence: Synthetic oligonucleotide
  Antisense strand to SEQ ID NO: 1664297
auguaagccagauuccaaa

SEQ ID NO: 1664299 - RNA, 19 nt, Artificial Sequence
  Description of Artificial Sequence: Synthetic oligonucleotide
  Sense strand starting at position 2888 of SEQ ID NO: 1561339
uggcuuacauugguugaua

SEQ ID NO: 1664300 - RNA, 19 nt, Artificial Sequence
  Description of Artificial Sequence: Synthetic oligonucleotide
  Antisense strand to SEQ ID NO: 1664299
uaucaaccaauguaagcca

SEQ ID NO: 1664301 - RNA, 19 nt, Artificial Sequence
  Description of Artificial Sequence: Synthetic oligonucleotide
  Sense strand starting at position 2889 of SEQ ID NO: 1561339
ggcuuacauugguugauac

SEQ ID NO: 1664302 - RNA, 19 nt, Artificial Sequence
  Description of Artificial Sequence: Synthetic oligonucleotide
  Antisense strand to SEQ ID NO: 1664301
guaucaaccaauguaagcc

SEQ ID NO: 1664303 - RNA, 19 nt, Artificial Sequence
  Description of Artificial Sequence: Synthetic oligonucleotide
  Sense strand starting at position 2890 of SEQ ID NO: 1561339
gcuuacauugguugauaca

SEQ ID NO: 1664304 - RNA, 19 nt, Artificial Sequence
  Description of Artificial Sequence: Synthetic oligonucleotide
  Antisense strand to SEQ ID NO: 1664303
uguaucaaccaauguaagc

SEQ ID NO: 1664305 - RNA, 19 nt, Artificial Sequence
  Description of Artificial Sequence: Synthetic oligonucleotide
  Sense strand starting at position 3621 of SEQ ID NO: 1561339
ugccauguuuccuuuacag

SEQ ID NO: 1664306 - RNA, 19 nt, Artificial Sequence
  Description of Artificial Sequence: Synthetic oligonucleotide
  Antisense strand to SEQ ID NO: 1664305
cuguaaaggaaacauggca

SEQ ID NO: 1664307 - RNA, 19 nt, Artificial Sequence
  Description of Artificial Sequence: Synthetic oligonucleotide
  Sense strand starting at position 3649 of SEQ ID NO: 1561339
cucugugugagccaaugaa

SEQ ID NO: 1664308 - RNA, 19 nt, Artificial Sequence
  Description of Artificial Sequence: Synthetic oligonucleotide
  Antisense strand to SEQ ID NO: 1664307
uucauuggcucacacagag

SEQ ID NO: 1664309 - RNA, 19 nt, Artificial Sequence
  Description of Artificial Sequence: Synthetic oligonucleotide
  Sense strand starting at position 3908 of SEQ ID NO: 1561339
uaguuacagcuguauuguu

SEQ ID NO: 1664310 - RNA, 19 nt, Artificial Sequence
  Description of Artificial Sequence: Synthetic oligonucleotide
  Antisense strand to SEQ ID NO: 1664309
aacaauacagcuguaacua

SEQ ID NO: 1664311 - RNA, 19 nt, Artificial Sequence
  Description of Artificial Sequence: Synthetic oligonucleotide
  Sense strand starting at position 311 of SEQ ID NO: 1561340
aucuuugugaaaugagaug

SEQ ID NO: 1664312 - RNA, 19 nt, Artificial Sequence
  Description of Artificial Sequence: Synthetic oligonucleotide
  Antisense strand to SEQ ID NO: 1664311
caucucauuucacaaagau

SEQ ID NO: 1664313 - RNA, 19 nt, Artificial Sequence
  Description of Artificial Sequence: Synthetic oligonucleotide
  Sense strand starting at position 316 of SEQ ID NO: 1561340
ugugaaaugagaugucauu

SEQ ID NO: 1664314 - RNA, 19 nt, Artificial Sequence
  Description of Artificial Sequence: Synthetic oligonucleotide
  Antisense strand to SEQ ID NO: 1664313
aaugacaucucauuucaca

SEQ ID NO: 1664315 - RNA, 19 nt, Artificial Sequence
  Description of Artificial Sequence: Synthetic oligonucleotide
  Sense strand starting at position 453 of SEQ ID NO: 1561340
auagguuagggauggcauu

SEQ ID NO: 1664316 - RNA, 19 nt, Artificial Sequence
  Description of Artificial Sequence: Synthetic oligonucleotide
  Antisense strand to SEQ ID NO: 1664315
aaugccaucccuaaccuau

SEQ ID NO: 1664317 - RNA, 19 nt, Artificial Sequence
  Description of Artificial Sequence: Synthetic oligonucleotide
  Sense strand starting at position 454 of SEQ ID NO: 1561340
uagguuagggauggcauua

SEQ ID NO: 1664318 - RNA, 19 nt, Artificial Sequence
  Description of Artificial Sequence: Synthetic oligonucleotide
  Antisense strand to SEQ ID NO: 1664317
uaaugccaucccuaaccua

SEQ ID NO: 1664319 - RNA, 19 nt, Artificial Sequence
  Description of Artificial Sequence: Synthetic oligonucleotide
  Sense strand starting at position 670 of SEQ ID NO: 1561340
gaacuuuaguuuccaagga

SEQ ID NO: 1664320 - RNA, 19 nt, Artificial Sequence
  Description of Artificial Sequence: Synthetic oligonucleotide
  Antisense strand to SEQ ID NO: 1664319
uccuuggaaacuaaaguuc

SEQ ID NO: 1664321 - RNA, 19 nt, Artificial Sequence
  Description of Artificial Sequence: Synthetic oligonucleotide
  Sense strand starting at position 674 of SEQ ID NO: 1561340
uuuaguuuccaaggaaaug

SEQ ID NO: 1664322 - RNA, 19 nt, Artificial Sequence
  Description of Artificial Sequence: Synthetic oligonucleotide
  Antisense strand to SEQ ID NO: 1664321
cauuuccuuggaaacuaaa

SEQ ID NO: 1664323 - RNA, 19 nt, Artificial Sequence
  Description of Artificial Sequence: Synthetic oligonucleotide
  Sense strand starting at position 765 of SEQ ID NO: 1561340
ucaacugaucagcaguaua

SEQ ID NO: 1664324 - RNA, 19 nt, Artificial Sequence
  Description of Artificial Sequence: Synthetic oligonucleotide
  Antisense strand to SEQ ID NO: 1664323
uauacugcugaucaguuga

SEQ ID NO: 1664325 - RNA, 19 nt, Artificial Sequence
  Description of Artificial Sequence: Synthetic oligonucleotide
  Sense strand starting at position 768 of SEQ ID NO: 1561340
acugaucagcaguauaaac

SEQ ID NO: 1664326 - RNA, 19 nt, Artificial Sequence
  Description of Artificial Sequence: Synthetic oligonucleotide
  Antisense strand to SEQ ID NO: 1664325
guuuauacugcugaucagu

SEQ ID NO: 1664327 - RNA, 19 nt, Artificial Sequence
  Description of Artificial Sequence: Synthetic oligonucleotide
  Sense strand starting at position 777 of SEQ ID NO: 1561340
caguauaaaccuuaagcga

SEQ ID NO: 1664328 - RNA, 19 nt, Artificial Sequence
  Description of Artificial Sequence: Synthetic oligonucleotide
  Antisense strand to SEQ ID NO: 1664327
ucgcuuaagguuuauacug

SEQ ID NO: 1664329 - RNA, 19 nt, Artificial Sequence
  Description of Artificial Sequence: Synthetic oligonucleotide
  Sense strand starting at position 920 of SEQ ID NO: 1561340
ugaguaugcuuucuagaaa

SEQ ID NO: 1664330 - RNA, 19 nt, Artificial Sequence
  Description of Artificial Sequence: Synthetic oligonucleotide
  Antisense strand to SEQ ID NO: 1664329
uuucuagaaagcauacuca

SEQ ID NO: 1664331 - RNA, 19 nt, Artificial Sequence
  Description of Artificial Sequence: Synthetic oligonucleotide
  Sense strand starting at position 974 of SEQ ID NO: 1561340
uugcucuguccugugaguu

SEQ ID NO: 1664332 - RNA, 19 nt, Artificial Sequence
  Description of Artificial Sequence: Synthetic oligonucleotide
  Antisense strand to SEQ ID NO: 1664331
aacucacaggacagagcaa

SEQ ID NO: 1664333 - RNA, 19 nt, Artificial Sequence
  Description of Artificial Sequence: Synthetic oligonucleotide
  Sense strand starting at position 1052 of SEQ ID NO: 1561340
ugguaaugauaguuaaacu

SEQ ID NO: 1664334 - RNA, 19 nt, Artificial Sequence
  Description of Artificial Sequence: Synthetic oligonucleotide
  Antisense strand to SEQ ID NO: 1664333
aguuuaacuaucauuacca

SEQ ID NO: 1664335 - RNA, 19 nt, Artificial Sequence
  Description of Artificial Sequence: Synthetic oligonucleotide
  Sense strand starting at position 1063 of SEQ ID NO: 1561340
guuaaacugccacagguuu

SEQ ID NO: 1664336 - RNA, 19 nt, Artificial Sequence
  Description of Artificial Sequence: Synthetic oligonucleotide
  Antisense strand to SEQ ID NO: 1664335
aaaccuguggcaguuuaac

SEQ ID NO: 1664337 - RNA, 19 nt, Artificial Sequence
  Description of Artificial Sequence: Synthetic oligonucleotide
  Sense strand starting at position 1096 of SEQ ID NO: 1561340
agauguaauuacuugcaaa

SEQ ID NO: 1664338 - RNA, 19 nt, Artificial Sequence
  Description of Artificial Sequence: Synthetic oligonucleotide
  Antisense strand to SEQ ID NO: 1664337
uuugcaaguaauuacaucu

SEQ ID NO: 1664339 - RNA, 19 nt, Artificial Sequence
  Description of Artificial Sequence: Synthetic oligonucleotide
  Sense strand starting at position 1160 of SEQ ID NO: 1561340
gcaugaaagcaaugacuaa

SEQ ID NO: 1664340 - RNA, 19 nt, Artificial Sequence
  Description of Artificial Sequence: Synthetic oligonucleotide
  Antisense strand to SEQ ID NO: 1664339
uuagucauugcuuucaugc

SEQ ID NO: 1664341 - RNA, 19 nt, Artificial Sequence
  Description of Artificial Sequence: Synthetic oligonucleotide
  Sense strand starting at position 1204 of SEQ ID NO: 1561340
ugguguuacacuuaaguua

SEQ ID NO: 1664342 - RNA, 19 nt, Artificial Sequence
  Description of Artificial Sequence: Synthetic oligonucleotide
  Antisense strand to SEQ ID NO: 1664341
uaacuuaaguguaacacca

SEQ ID NO: 1664343 - RNA, 19 nt, Artificial Sequence
  Description of Artificial Sequence: Synthetic oligonucleotide
  Sense strand starting at position 1228 of SEQ ID NO: 1561340
acgggauuauugguuauaa

SEQ ID NO: 1664344 - RNA, 19 nt, Artificial Sequence
  Description of Artificial Sequence: Synthetic oligonucleotide
  Antisense strand to SEQ ID NO: 1664343
uuauaaccaauaaucccgu

SEQ ID NO: 1664345 - RNA, 19 nt, Artificial Sequence
  Description of Artificial Sequence: Synthetic oligonucleotide
  Sense strand starting at position 1229 of SEQ ID NO: 1561340
cgggauuauugguuauaac

SEQ ID NO: 1664346 - RNA, 19 nt, Artificial Sequence
  Description of Artificial Sequence: Synthetic oligonucleotide
  Antisense strand to SEQ ID NO: 1664345
guuauaaccaauaaucccg

SEQ ID NO: 1664347 - RNA, 19 nt, Artificial Sequence
  Description of Artificial Sequence: Synthetic oligonucleotide
  Sense strand starting at position 1294 of SEQ ID NO: 1561340
ucugcaaauccguaaugac

SEQ ID NO: 1664348 - RNA, 19 nt, Artificial Sequence
  Description of Artificial Sequence: Synthetic oligonucleotide
  Antisense strand to SEQ ID NO: 1664347
gucauuacggauuugcaga

SEQ ID NO: 1664349 - RNA, 19 nt, Artificial Sequence
  Description of Artificial Sequence: Synthetic oligonucleotide
  Sense strand starting at position 1471 of SEQ ID NO: 1561340
ccuagacucagaggaguuu

SEQ ID NO: 1664350 - RNA, 19 nt, Artificial Sequence
  Description of Artificial Sequence: Synthetic oligonucleotide
  Antisense strand to SEQ ID NO: 1664349
aaacuccucugagucuagg

SEQ ID NO: 1664351 - RNA, 19 nt, Artificial Sequence
  Description of Artificial Sequence: Synthetic oligonucleotide
  Sense strand starting at position 1941 of SEQ ID NO: 1561340
cucaccucccugggagaua

SEQ ID NO: 1664352 - RNA, 19 nt, Artificial Sequence
  Description of Artificial Sequence: Synthetic oligonucleotide
  Antisense strand to SEQ ID NO: 1664351
uaucucccagggaggugag

SEQ ID NO: 1664353 - RNA, 19 nt, Artificial Sequence
  Description of Artificial Sequence: Synthetic oligonucleotide
  Sense strand starting at position 2018 of SEQ ID NO: 1561340
ggacuccacuucccagaau

SEQ ID NO: 1664354 - RNA, 19 nt, Artificial Sequence
  Description of Artificial Sequence: Synthetic oligonucleotide
  Antisense strand to SEQ ID NO: 1664353
auucugggaaguggagucc

SEQ ID NO: 1664355 - RNA, 19 nt, Artificial Sequence
  Description of Artificial Sequence: Synthetic oligonucleotide
  Sense strand starting at position 2371 of SEQ ID NO: 1561340
gacgcugaacguuaaggaa

SEQ ID NO: 1664356 - RNA, 19 nt, Artificial Sequence
  Description of Artificial Sequence: Synthetic oligonucleotide
  Antisense strand to SEQ ID NO: 1664355
uuccuuaacguucagcguc

SEQ ID NO: 1664357 - RNA, 19 nt, Artificial Sequence
  Description of Artificial Sequence: Synthetic oligonucleotide
  Sense strand starting at position 2397 of SEQ ID NO: 1561340
ucucaaacuugugucaaau

SEQ ID NO: 1664358 - RNA, 19 nt, Artificial Sequence
  Description of Artificial Sequence: Synthetic oligonucleotide
  Antisense strand to SEQ ID NO: 1664357
auuugacacaaguuugaga

SEQ ID NO: 1664359 - RNA, 19 nt, Artificial Sequence
  Description of Artificial Sequence: Synthetic oligonucleotide
  Sense strand starting at position 2474 of SEQ ID NO: 1561340
uguugauugcaguaaugga

SEQ ID NO: 1664360 - RNA, 19 nt, Artificial Sequence
  Description of Artificial Sequence: Synthetic oligonucleotide
  Antisense strand to SEQ ID NO: 1664359
uccauuacugcaaucaaca

SEQ ID NO: 1664361 - RNA, 19 nt, Artificial Sequence
  Description of Artificial Sequence: Synthetic oligonucleotide
  Sense strand starting at position 2555 of SEQ ID NO: 1561340
cugauugagaacuggaugu

SEQ ID NO: 1664362 - RNA, 19 nt, Artificial Sequence
  Description of Artificial Sequence: Synthetic oligonucleotide
  Antisense strand to SEQ ID NO: 1664361
acauccaguucucaaucag

SEQ ID NO: 1664363 - RNA, 19 nt, Artificial Sequence
  Description of Artificial Sequence: Synthetic oligonucleotide
  Sense strand starting at position 2559 of SEQ ID NO: 1561340
uugagaacuggauguuuaa

SEQ ID NO: 1664364 - RNA, 19 nt, Artificial Sequence
  Description of Artificial Sequence: Synthetic oligonucleotide
  Antisense strand to SEQ ID NO: 1664363
uuaaacauccaguucucaa

SEQ ID NO: 1664365 - RNA, 19 nt, Artificial Sequence
  Description of Artificial Sequence: Synthetic oligonucleotide
  Sense strand starting at position 2611 of SEQ ID NO: 1561340
auugcauaaugaucaugau

SEQ ID NO: 1664366 - RNA, 19 nt, Artificial Sequence
  Description of Artificial Sequence: Synthetic oligonucleotide
  Antisense strand to SEQ ID NO: 1664365
aucaugaucauuaugcaau

SEQ ID NO: 1664367 - RNA, 19 nt, Artificial Sequence
  Description of Artificial Sequence: Synthetic oligonucleotide
  Sense strand starting at position 2635 of SEQ ID NO: 1561340
aguccaggauugguggaua

SEQ ID NO: 1664368 - RNA, 19 nt, Artificial Sequence
  Description of Artificial Sequence: Synthetic oligonucleotide
  Antisense strand to SEQ ID NO: 1664367
uauccaccaauccuggacu

SEQ ID NO: 1664369 - RNA, 19 nt, Artificial Sequence
  Description of Artificial Sequence: Synthetic oligonucleotide
  Sense strand starting at position 2695 of SEQ ID NO: 1561340
auugacacuuucuuuggaa

SEQ ID NO: 1664370 - RNA, 19 nt, Artificial Sequence
  Description of Artificial Sequence: Synthetic oligonucleotide
  Antisense strand to SEQ ID NO: 1664369
uuccaaagaaagugucaau

SEQ ID NO: 1664371 - RNA, 19 nt, Artificial Sequence
  Description of Artificial Sequence: Synthetic oligonucleotide
  Sense strand starting at position 2697 of SEQ ID NO: 1561340
ugacacuuucuuuggaaga

SEQ ID NO: 1664372 - RNA, 19 nt, Artificial Sequence
  Description of Artificial Sequence: Synthetic oligonucleotide
  Antisense strand to SEQ ID NO: 1664371
ucuuccaaagaaaguguca

SEQ ID NO: 1664373 - RNA, 19 nt, Artificial Sequence
  Description of Artificial Sequence: Synthetic oligonucleotide
  Sense strand starting at position 2792 of SEQ ID NO: 1561340
ggaauaaaggccugcugau

SEQ ID NO: 1664374 - RNA, 19 nt, Artificial Sequence
  Description of Artificial Sequence: Synthetic oligonucleotide
  Antisense strand to SEQ ID NO: 1664373
aucagcaggccuuuauucc

SEQ ID NO: 1664375 - RNA, 19 nt, Artificial Sequence
  Description of Artificial Sequence: Synthetic oligonucleotide
  Sense strand starting at position 2838 of SEQ ID NO: 1561340
ccgaaaguaaauugugaug

SEQ ID NO: 1664376 - RNA, 19 nt, Artificial Sequence
  Description of Artificial Sequence: Synthetic oligonucleotide
  Antisense strand to SEQ ID NO: 1664375
caucacaauuuacuuucgg

SEQ ID NO: 1664377 - RNA, 19 nt, Artificial Sequence
  Description of Artificial Sequence: Synthetic oligonucleotide
  Sense strand starting at position 3032 of SEQ ID NO: 1561340
guguguuauagggugcuuu

SEQ ID NO: 1664378 - RNA, 19 nt, Artificial Sequence
  Description of Artificial Sequence: Synthetic oligonucleotide
  Antisense strand to SEQ ID NO: 1664377
aaagcacccuauaacacac

SEQ ID NO: 1664379 - RNA, 19 nt, Artificial Sequence
  Description of Artificial Sequence: Synthetic oligonucleotide
  Sense strand starting at position 3192 of SEQ ID NO: 1561340
gagugcaaggauuggagaa

SEQ ID NO: 1664380 - RNA, 19 nt, Artificial Sequence
  Description of Artificial Sequence: Synthetic oligonucleotide
  Antisense strand to SEQ ID NO: 1664379
uucuccaauccuugcacuc

SEQ ID NO: 1664381 - RNA, 19 nt, Artificial Sequence
  Description of Artificial Sequence: Synthetic oligonucleotide
  Sense strand starting at position 3330 of SEQ ID NO: 1561340
ugcguuauuccaccgguua

SEQ ID NO: 1664382 - RNA, 19 nt, Artificial Sequence
  Description of Artificial Sequence: Synthetic oligonucleotide
  Antisense strand to SEQ ID NO: 1664381
uaaccgguggaauaacgca

SEQ ID NO: 1664383 - RNA, 19 nt, Artificial Sequence
  Description of Artificial Sequence: Synthetic oligonucleotide
  Sense strand starting at position 3762 of SEQ ID NO: 1561340
aagggaguaaaguguuuga

SEQ ID NO: 1664384 - RNA, 19 nt, Artificial Sequence
  Description of Artificial Sequence: Synthetic oligonucleotide
  Antisense strand to SEQ ID NO: 1664383
ucaaacacuuuacucccuu

SEQ ID NO: 1664385 - RNA, 19 nt, Artificial Sequence
  Description of Artificial Sequence: Synthetic oligonucleotide
  Sense strand starting at position 3959 of SEQ ID NO: 1561340
uccauuggccgggaaucua

SEQ ID NO: 1664386 - RNA, 19 nt, Artificial Sequence
  Description of Artificial Sequence: Synthetic oligonucleotide
  Antisense strand to SEQ ID NO: 1664385
uagauucccggccaaugga

SEQ ID NO: 1664387 - RNA, 19 nt, Artificial Sequence
  Description of Artificial Sequence: Synthetic oligonucleotide
  Sense strand starting at position 3972 of SEQ ID NO: 1561340
aaucuaagacaacguugua

SEQ ID NO: 1664388 - RNA, 19 nt, Artificial Sequence
  Description of Artificial Sequence: Synthetic oligonucleotide
  Antisense strand to SEQ ID NO: 1664387
uacaacguugucuuagauu

SEQ ID NO: 1664389 - RNA, 19 nt, Artificial Sequence
  Description of Artificial Sequence: Synthetic oligonucleotide
  Sense strand starting at position 3975 of SEQ ID NO: 1561340
cuaagacaacguuguaaua

SEQ ID NO: 1664390 - RNA, 19 nt, Artificial Sequence
  Description of Artificial Sequence: Synthetic oligonucleotide
  Antisense strand to SEQ ID NO: 1664389
uauuacaacguugucuuag

SEQ ID NO: 1664391 - RNA, 19 nt, Artificial Sequence
  Description of Artificial Sequence: Synthetic oligonucleotide
  Sense strand starting at position 197 of SEQ ID NO: 1561341
aggcccuaucagugguaga

SEQ ID NO: 1664392 - RNA, 19 nt, Artificial Sequence
  Description of Artificial Sequence: Synthetic oligonucleotide
  Antisense strand to SEQ ID NO: 1664391
ucuaccacugauagggccu

SEQ ID NO: 1664393 - RNA, 19 nt, Artificial Sequence
  Description of Artificial Sequence: Synthetic oligonucleotide
  Sense strand starting at position 198 of SEQ ID NO: 1561341
ggcccuaucagugguagac

SEQ ID NO: 1664394 - RNA, 19 nt, Artificial Sequence
  Description of Artificial Sequence: Synthetic oligonucleotide
  Antisense strand to SEQ ID NO: 1664393
gucuaccacugauagggcc

SEQ ID NO: 1664395 - RNA, 19 nt, Artificial Sequence
  Description of Artificial Sequence: Synthetic oligonucleotide
  Sense strand starting at position 390 of SEQ ID NO: 1561341
guaacaccagcguguagau

SEQ ID NO: 1664396 - RNA, 19 nt, Artificial Sequence
  Description of Artificial Sequence: Synthetic oligonucleotide
  Antisense strand to SEQ ID NO: 1664395
aucuacacgcugguguuac

SEQ ID NO: 1664397 - RNA, 19 nt, Artificial Sequence
  Description of Artificial Sequence: Synthetic oligonucleotide
  Sense strand starting at position 404 of SEQ ID NO: 1561341
uagaucaagcuacgugaaa

SEQ ID NO: 1664398 - RNA, 19 nt, Artificial Sequence
  Description of Artificial Sequence: Synthetic oligonucleotide
  Antisense strand to SEQ ID NO: 1664397
uuucacguagcuugaucua

SEQ ID NO: 1664399 - RNA, 19 nt, Artificial Sequence
  Description of Artificial Sequence: Synthetic oligonucleotide
  Sense strand starting at position 464 of SEQ ID NO: 1561341
gcuaaauaaggcugcauca

SEQ ID NO: 1664400 - RNA, 19 nt, Artificial Sequence
  Description of Artificial Sequence: Synthetic oligonucleotide
  Antisense strand to SEQ ID NO: 1664399
ugaugcagccuuauuuagc

SEQ ID NO: 1664401 - RNA, 19 nt, Artificial Sequence
  Description of Artificial Sequence: Synthetic oligonucleotide
  Sense strand starting at position 569 of SEQ ID NO: 1561341
guacauaaauaucauggaa

SEQ ID NO: 1664402 - RNA, 19 nt, Artificial Sequence
  Description of Artificial Sequence: Synthetic oligonucleotide
  Antisense strand to SEQ ID NO: 1664401
uuccaugauauuuauguac

SEQ ID NO: 1664403 - RNA, 19 nt, Artificial Sequence
  Description of Artificial Sequence: Synthetic oligonucleotide
  Sense strand starting at position 583 of SEQ ID NO: 1561341
uggaauacucucuggccau

SEQ ID NO: 1664404 - RNA, 19 nt, Artificial Sequence
  Description of Artificial Sequence: Synthetic oligonucleotide
  Antisense strand to SEQ ID NO: 1664403
auggccagagaguauucca

SEQ ID NO: 1664405 - RNA, 19 nt, Artificial Sequence
  Description of Artificial Sequence: Synthetic oligonucleotide
  Sense strand starting at position 584 of SEQ ID NO: 1561341
ggaauacucucuggccauu

SEQ ID NO: 1664406 - RNA, 19 nt, Artificial Sequence
  Description of Artificial Sequence: Synthetic oligonucleotide
  Antisense strand to SEQ ID NO: 1664405
aauggccagagaguauucc

SEQ ID NO: 1664407 - RNA, 19 nt, Artificial Sequence
  Description of Artificial Sequence: Synthetic oligonucleotide
  Sense strand starting at position 687 of SEQ ID NO: 1561341
ccagacauucgccaucaca

SEQ ID NO: 1664408 - RNA, 19 nt, Artificial Sequence
  Description of Artificial Sequence: Synthetic oligonucleotide
  Antisense strand to SEQ ID NO: 1664407
ugugauggcgaaugucugg

SEQ ID NO: 1664409 - RNA, 19 nt, Artificial Sequence
  Description of Artificial Sequence: Synthetic oligonucleotide
  Sense strand starting at position 805 of SEQ ID NO: 1561341
ccugaaguguuguuauuac

SEQ ID NO: 1664410 - RNA, 19 nt, Artificial Sequence
  Description of Artificial Sequence: Synthetic oligonucleotide
  Antisense strand to SEQ ID NO: 1664409
guaauaacaacacuucagg

SEQ ID NO: 1664411 - RNA, 19 nt, Artificial Sequence
  Description of Artificial Sequence: Synthetic oligonucleotide
  Sense strand starting at position 876 of SEQ ID NO: 1561341
aacugugaacccugacaga

SEQ ID NO: 1664412 - RNA, 19 nt, Artificial Sequence
  Description of Artificial Sequence: Synthetic oligonucleotide
  Antisense strand to SEQ ID NO: 1664411
ucugucaggguucacaguu

SEQ ID NO: 1664413 - RNA, 19 nt, Artificial Sequence
  Description of Artificial Sequence: Synthetic oligonucleotide
  Sense strand starting at position 879 of SEQ ID NO: 1561341
ugugaacccugacagauau

SEQ ID NO: 1664414 - RNA, 19 nt, Artificial Sequence
  Description of Artificial Sequence: Synthetic oligonucleotide
  Antisense strand to SEQ ID NO: 1664413
auaucugucaggguucaca

SEQ ID NO: 1664415 - RNA, 19 nt, Artificial Sequence
  Description of Artificial Sequence: Synthetic oligonucleotide
  Sense strand starting at position 960 of SEQ ID NO: 1561341
accucuuuguaccuagaca

SEQ ID NO: 1664416 - RNA, 19 nt, Artificial Sequence
  Description of Artificial Sequence: Synthetic oligonucleotide
  Antisense strand to SEQ ID NO: 1664415
ugucuagguacaaagaggu

SEQ ID NO: 1664417 - RNA, 19 nt, Artificial Sequence
  Description of Artificial Sequence: Synthetic oligonucleotide
  Sense strand starting at position 1029 of SEQ ID NO: 1561341
ccuuccuuauuuggaaagu

SEQ ID NO: 1664418 - RNA, 19 nt, Artificial Sequence
  Description of Artificial Sequence: Synthetic oligonucleotide
  Antisense strand to SEQ ID NO: 1664417
acuuuccaaauaaggaagg

SEQ ID NO: 1664419 - RNA, 19 nt, Artificial Sequence
  Description of Artificial Sequence: Synthetic oligonucleotide
  Sense strand starting at position 1030 of SEQ ID NO: 1561341
cuuccuuauuuggaaagua

SEQ ID NO: 1664420 - RNA, 19 nt, Artificial Sequence
  Description of Artificial Sequence: Synthetic oligonucleotide
  Antisense strand to SEQ ID NO: 1664419
uacuuuccaaauaaggaag

SEQ ID NO: 1664421 - RNA, 19 nt, Artificial Sequence
  Description of Artificial Sequence: Synthetic oligonucleotide
  Sense strand starting at position 1063 of SEQ ID NO: 1561341
ccuagauugugaggucaga

SEQ ID NO: 1664422 - RNA, 19 nt, Artificial Sequence
  Description of Artificial Sequence: Synthetic oligonucleotide
  Antisense strand to SEQ ID NO: 1664421
ucugaccucacaaucuagg

SEQ ID NO: 1664423 - RNA, 19 nt, Artificial Sequence
  Description of Artificial Sequence: Synthetic oligonucleotide
  Sense strand starting at position 1209 of SEQ ID NO: 1561341
ggugaaacggcaugucuac

SEQ ID NO: 1664424 - RNA, 19 nt, Artificial Sequence
  Description of Artificial Sequence: Synthetic oligonucleotide
  Antisense strand to SEQ ID NO: 1664423
guagacaugccguuucacc

SEQ ID NO: 1664425 - RNA, 19 nt, Artificial Sequence
  Description of Artificial Sequence: Synthetic oligonucleotide
  Sense strand starting at position 1419 of SEQ ID NO: 1561341
uucugugugcucuugcgau

SEQ ID NO: 1664426 - RNA, 19 nt, Artificial Sequence
  Description of Artificial Sequence: Synthetic oligonucleotide
  Antisense strand to SEQ ID NO: 1664425
aucgcaagagcacacagaa

SEQ ID NO: 1664427 - RNA, 19 nt, Artificial Sequence
  Description of Artificial Sequence: Synthetic oligonucleotide
  Sense strand starting at position 1421 of SEQ ID NO: 1561341
cugugugcucuugcgauca

SEQ ID NO: 1664428 - RNA, 19 nt, Artificial Sequence
  Description of Artificial Sequence: Synthetic oligonucleotide
  Antisense strand to SEQ ID NO: 1664427
ugaucgcaagagcacacag

SEQ ID NO: 1664429 - RNA, 19 nt, Artificial Sequence
  Description of Artificial Sequence: Synthetic oligonucleotide
  Sense strand starting at position 1542 of SEQ ID NO: 1561341
agcgcuuguuucuaacaac

SEQ ID NO: 1664430 - RNA, 19 nt, Artificial Sequence
  Description of Artificial Sequence: Synthetic oligonucleotide
  Antisense strand to SEQ ID NO: 1664429
guuguuagaaacaagcgcu

SEQ ID NO: 1664431 - RNA, 19 nt, Artificial Sequence
  Description of Artificial Sequence: Synthetic oligonucleotide
  Sense strand starting at position 1640 of SEQ ID NO: 1561341
ccuugcaugaucugggaga

SEQ ID NO: 1664432 - RNA, 19 nt, Artificial Sequence
  Description of Artificial Sequence: Synthetic oligonucleotide
  Antisense strand to SEQ ID NO: 1664431
ucucccagaucaugcaagg

SEQ ID NO: 1664433 - RNA, 19 nt, Artificial Sequence
  Description of Artificial Sequence: Synthetic oligonucleotide
  Sense strand starting at position 1642 of SEQ ID NO: 1561341
uugcaugaucugggagaga

SEQ ID NO: 1664434 - RNA, 19 nt, Artificial Sequence
  Description of Artificial Sequence: Synthetic oligonucleotide
  Antisense strand to SEQ ID NO: 1664433
ucucucccagaucaugcaa

SEQ ID NO: 1664435 - RNA, 19 nt, Artificial Sequence
  Description of Artificial Sequence: Synthetic oligonucleotide
  Sense strand starting at position 2005 of SEQ ID NO: 1561341
acagaacacugaggauaaa

SEQ ID NO: 1664436 - RNA, 19 nt, Artificial Sequence
  Description of Artificial Sequence: Synthetic oligonucleotide
  Antisense strand to SEQ ID NO: 1664435
uuuauccucaguguucugu

SEQ ID NO: 1664437 - RNA, 19 nt, Artificial Sequence
  Description of Artificial Sequence: Synthetic oligonucleotide
  Sense strand starting at position 2113 of SEQ ID NO: 1561341
cagcgucccucauuggaua

SEQ ID NO: 1664438 - RNA, 19 nt, Artificial Sequence
  Description of Artificial Sequence: Synthetic oligonucleotide
  Antisense strand to SEQ ID NO: 1664437
uauccaaugagggacgcug

SEQ ID NO: 1664439 - RNA, 19 nt, Artificial Sequence
  Description of Artificial Sequence: Synthetic oligonucleotide
  Sense strand starting at position 2114 of SEQ ID NO: 1561341
agcgucccucauuggauaa

SEQ ID NO: 1664440 - RNA, 19 nt, Artificial Sequence
  Description of Artificial Sequence: Synthetic oligonucleotide
  Antisense strand to SEQ ID NO: 1664439
uuauccaaugagggacgcu

SEQ ID NO: 1664441 - RNA, 19 nt, Artificial Sequence
  Description of Artificial Sequence: Synthetic oligonucleotide
  Sense strand starting at position 2115 of SEQ ID NO: 1561341
gcgucccucauuggauaau

SEQ ID NO: 1664442 - RNA, 19 nt, Artificial Sequence
  Description of Artificial Sequence: Synthetic oligonucleotide
  Antisense strand to SEQ ID NO: 1664441
auuauccaaugagggacgc

SEQ ID NO: 1664443 - RNA, 19 nt, Artificial Sequence
  Description of Artificial Sequence: Synthetic oligonucleotide
  Sense strand starting at position 2157 of SEQ ID NO: 1561341
cgcugagugacagauguga

SEQ ID NO: 1664444 - RNA, 19 nt, Artificial Sequence
  Description of Artificial Sequence: Synthetic oligonucleotide
  Antisense strand to SEQ ID NO: 1664443
ucacaucugucacucagcg

SEQ ID NO: 1664445 - RNA, 19 nt, Artificial Sequence
  Description of Artificial Sequence: Synthetic oligonucleotide
  Sense strand starting at position 2800 of SEQ ID NO: 1561341
agaaguacuuugcugucau

SEQ ID NO: 1664446 - RNA, 19 nt, Artificial Sequence
  Description of Artificial Sequence: Synthetic oligonucleotide
  Antisense strand to SEQ ID NO: 1664445
augacagcaaaguacuucu

SEQ ID NO: 1664447 - RNA, 19 nt, Artificial Sequence
  Description of Artificial Sequence: Synthetic oligonucleotide
  Sense strand starting at position 2801 of SEQ ID NO: 1561341
gaaguacuuugcugucaua

SEQ ID NO: 1664448 - RNA, 19 nt, Artificial Sequence
  Description of Artificial Sequence: Synthetic oligonucleotide
  Antisense strand to SEQ ID NO: 1664447
uaugacagcaaaguacuuc

SEQ ID NO: 1664449 - RNA, 19 nt, Artificial Sequence
  Description of Artificial Sequence: Synthetic oligonucleotide
  Sense strand starting at position 2804 of SEQ ID NO: 1561341
guacuuugcugucauauua

SEQ ID NO: 1664450 - RNA, 19 nt, Artificial Sequence
  Description of Artificial Sequence: Synthetic oligonucleotide
  Antisense strand to SEQ ID NO: 1664449
uaauaugacagcaaaguac

SEQ ID NO: 1664451 - RNA, 19 nt, Artificial Sequence
  Description of Artificial Sequence: Synthetic oligonucleotide
  Sense strand starting at position 3260 of SEQ ID NO: 1561341
ucucgagauuuacauauau

SEQ ID NO: 1664452 - RNA, 19 nt, Artificial Sequence
  Description of Artificial Sequence: Synthetic oligonucleotide
  Antisense strand to SEQ ID NO: 1664451
auauauguaaaucucgaga

SEQ ID NO: 1664453 - RNA, 19 nt, Artificial Sequence
  Description of Artificial Sequence: Synthetic oligonucleotide
  Sense strand starting at position 3281 of SEQ ID NO: 1561341
uuuguaaucuccuguaauu

SEQ ID NO: 1664454 - RNA, 19 nt, Artificial Sequence
  Description of Artificial Sequence: Synthetic oligonucleotide
  Antisense strand to SEQ ID NO: 1664453
aauuacaggagauuacaaa

SEQ ID NO: 1664455 - RNA, 19 nt, Artificial Sequence
  Description of Artificial Sequence: Synthetic oligonucleotide
  Sense strand starting at position 3449 of SEQ ID NO: 1561341
agccaaggugaguggaaua

SEQ ID NO: 1664456 - RNA, 19 nt, Artificial Sequence
  Description of Artificial Sequence: Synthetic oligonucleotide
  Antisense strand to SEQ ID NO: 1664455
uauuccacucaccuuggcu

SEQ ID NO: 1664457 - RNA, 19 nt, Artificial Sequence
  Description of Artificial Sequence: Synthetic oligonucleotide
  Sense strand starting at position 3930 of SEQ ID NO: 1561341
aaacaauugucacgaaguc

SEQ ID NO: 1664458 - RNA, 19 nt, Artificial Sequence
  Description of Artificial Sequence: Synthetic oligonucleotide
  Antisense strand to SEQ ID NO: 1664457
gacuucgugacaauuguuu

SEQ ID NO: 1664459 - RNA, 19 nt, Artificial Sequence
  Description of Artificial Sequence: Synthetic oligonucleotide
  Sense strand starting at position 3961 of SEQ ID NO: 1561341
gugugagccuucugaguug

SEQ ID NO: 1664460 - RNA, 19 nt, Artificial Sequence
  Description of Artificial Sequence: Synthetic oligonucleotide
  Antisense strand to SEQ ID NO: 1664459
caacucagaaggcucacac

SEQ ID NO: 1664461 - RNA, 19 nt, Artificial Sequence
  Description of Artificial Sequence: Synthetic oligonucleotide
  Sense strand starting at position 129 of SEQ ID NO: 1561342
gugggagaauuguuccaac

SEQ ID NO: 1664462 - RNA, 19 nt, Artificial Sequence
  Description of Artificial Sequence: Synthetic oligonucleotide
  Antisense strand to SEQ ID NO: 1664461
guuggaacaauucucccac

SEQ ID NO: 1664463 - RNA, 19 nt, Artificial Sequence
  Description of Artificial Sequence: Synthetic oligonucleotide
  Sense strand starting at position 132 of SEQ ID NO: 1561342
ggagaauuguuccaaccug

SEQ ID NO: 1664464 - RNA, 19 nt, Artificial Sequence
  Description of Artificial Sequence: Synthetic oligonucleotide
  Antisense strand to SEQ ID NO: 1664463
cagguuggaacaauucucc

SEQ ID NO: 1664465 - RNA, 19 nt, Artificial Sequence
  Description of Artificial Sequence: Synthetic oligonucleotide
  Sense strand starting at position 252 of SEQ ID NO: 1561342
caggcugacuucuggguaa

SEQ ID NO: 1664466 - RNA, 19 nt, Artificial Sequence
  Description of Artificial Sequence: Synthetic oligonucleotide
  Antisense strand to SEQ ID NO: 1664465
uuacccagaagucagccug

SEQ ID NO: 1664467 - RNA, 19 nt, Artificial Sequence
  Description of Artificial Sequence: Synthetic oligonucleotide
  Sense strand starting at position 690 of SEQ ID NO: 1561342
uuaccucuuguccagaguu

SEQ ID NO: 1664468 - RNA, 19 nt, Artificial Sequence
  Description of Artificial Sequence: Synthetic oligonucleotide
  Antisense strand to SEQ ID NO: 1664467
aacucuggacaagagguaa

SEQ ID NO: 1664469 - RNA, 19 nt, Artificial Sequence
  Description of Artificial Sequence: Synthetic oligonucleotide
  Sense strand starting at position 696 of SEQ ID NO: 1561342
cuuguccagaguuggagaa

SEQ ID NO: 1664470 - RNA, 19 nt, Artificial Sequence
  Description of Artificial Sequence: Synthetic oligonucleotide
  Antisense strand to SEQ ID NO: 1664469
uucuccaacucuggacaag

SEQ ID NO: 1664471 - RNA, 19 nt, Artificial Sequence
  Description of Artificial Sequence: Synthetic oligonucleotide
  Sense strand starting at position 795 of SEQ ID NO: 1561342
ccuggaggaucgcuugaau

SEQ ID NO: 1664472 - RNA, 19 nt, Artificial Sequence
  Description of Artificial Sequence: Synthetic oligonucleotide
  Antisense strand to SEQ ID NO: 1664471
auucaagcgauccuccagg

SEQ ID NO: 1664473 - RNA, 19 nt, Artificial Sequence
  Description of Artificial Sequence: Synthetic oligonucleotide
  Sense strand starting at position 874 of SEQ ID NO: 1561342
gaaugagacucuggcacaa

SEQ ID NO: 1664474 - RNA, 19 nt, Artificial Sequence
  Description of Artificial Sequence: Synthetic oligonucleotide
  Antisense strand to SEQ ID NO: 1664473
uugugccagagucucauuc

SEQ ID NO: 1664475 - RNA, 19 nt, Artificial Sequence
  Description of Artificial Sequence: Synthetic oligonucleotide
  Sense strand starting at position 1082 of SEQ ID NO: 1561342
gcauaaagguucuguccau

SEQ ID NO: 1664476 - RNA, 19 nt, Artificial Sequence
  Description of Artificial Sequence: Synthetic oligonucleotide
  Antisense strand to SEQ ID NO: 1664475
auggacagaaccuuuaugc

SEQ ID NO: 1664477 - RNA, 19 nt, Artificial Sequence
  Description of Artificial Sequence: Synthetic oligonucleotide
  Sense strand starting at position 1088 of SEQ ID NO: 1561342
agguucuguccauggcuau

SEQ ID NO: 1664478 - RNA, 19 nt, Artificial Sequence
  Description of Artificial Sequence: Synthetic oligonucleotide
  Antisense strand to SEQ ID NO: 1664477
auagccauggacagaaccu

SEQ ID NO: 1664479 - RNA, 19 nt, Artificial Sequence
  Description of Artificial Sequence: Synthetic oligonucleotide
  Sense strand starting at position 1089 of SEQ ID NO: 1561342
gguucuguccauggcuauu

SEQ ID NO: 1664480 - RNA, 19 nt, Artificial Sequence
  Description of Artificial Sequence: Synthetic oligonucleotide
  Antisense strand to SEQ ID NO: 1664479
aauagccauggacagaacc

SEQ ID NO: 1664481 - RNA, 19 nt, Artificial Sequence
  Description of Artificial Sequence: Synthetic oligonucleotide
  Sense strand starting at position 1157 of SEQ ID NO: 1561342
cuauccuuagcuugaguca

SEQ ID NO: 1664482 - RNA, 19 nt, Artificial Sequence
  Description of Artificial Sequence: Synthetic oligonucleotide
  Antisense strand to SEQ ID NO: 1664481
ugacucaagcuaaggauag

SEQ ID NO: 1664483 - RNA, 19 nt, Artificial Sequence
  Description of Artificial Sequence: Synthetic oligonucleotide
  Sense strand starting at position 1164 of SEQ ID NO: 1561342
uagcuugagucacugaguu

SEQ ID NO: 1664484 - RNA, 19 nt, Artificial Sequence
  Description of Artificial Sequence: Synthetic oligonucleotide
  Antisense strand to SEQ ID NO: 1664483
aacucagugacucaagcua

SEQ ID NO: 1664485 - RNA, 19 nt, Artificial Sequence
  Description of Artificial Sequence: Synthetic oligonucleotide
  Sense strand starting at position 1338 of SEQ ID NO: 1561342
cgagaaucgcuugagucua

SEQ ID NO: 1664486 - RNA, 19 nt, Artificial Sequence
  Description of Artificial Sequence: Synthetic oligonucleotide
  Antisense strand to SEQ ID NO: 1664485
uagacucaagcgauucucg

SEQ ID NO: 1664487 - RNA, 19 nt, Artificial Sequence
  Description of Artificial Sequence: Synthetic oligonucleotide
  Sense strand starting at position 1362 of SEQ ID NO: 1561342
cgaagguugcagugaucgu

SEQ ID NO: 1664488 - RNA, 19 nt, Artificial Sequence
  Description of Artificial Sequence: Synthetic oligonucleotide
  Antisense strand to SEQ ID NO: 1664487
acgaucacugcaaccuucg

SEQ ID NO: 1664489 - RNA, 19 nt, Artificial Sequence
  Description of Artificial Sequence: Synthetic oligonucleotide
  Sense strand starting at position 1499 of SEQ ID NO: 1561342
aggauuccgcccugaugau

SEQ ID NO: 1664490 - RNA, 19 nt, Artificial Sequence
  Description of Artificial Sequence: Synthetic oligonucleotide
  Antisense strand to SEQ ID NO: 1664489
aucaucagggcggaauccu

SEQ ID NO: 1664491 - RNA, 19 nt, Artificial Sequence
  Description of Artificial Sequence: Synthetic oligonucleotide
  Sense strand starting at position 1521 of SEQ ID NO: 1561342
ccuggcaucccugaacaau

SEQ ID NO: 1664492 - RNA, 19 nt, Artificial Sequence
  Description of Artificial Sequence: Synthetic oligonucleotide
  Antisense strand to SEQ ID NO: 1664491
auuguucagggaugccagg

SEQ ID NO: 1664493 - RNA, 19 nt, Artificial Sequence
  Description of Artificial Sequence: Synthetic oligonucleotide
  Sense strand starting at position 2687 of SEQ ID NO: 1561342
ugaccauaucgugggaugu

SEQ ID NO: 1664494 - RNA, 19 nt, Artificial Sequence
  Description of Artificial Sequence: Synthetic oligonucleotide
  Antisense strand to SEQ ID NO: 1664493
acaucccacgauaugguca

SEQ ID NO: 1664495 - RNA, 19 nt, Artificial Sequence
  Description of Artificial Sequence: Synthetic oligonucleotide
  Sense strand starting at position 2738 of SEQ ID NO: 1561342
agaggcugagaaugguuaa

SEQ ID NO: 1664496 - RNA, 19 nt, Artificial Sequence
  Description of Artificial Sequence: Synthetic oligonucleotide
  Antisense strand to SEQ ID NO: 1664495
uuaaccauucucagccucu

SEQ ID NO: 1664497 - RNA, 19 nt, Artificial Sequence
  Description of Artificial Sequence: Synthetic oligonucleotide
  Sense strand starting at position 2741 of SEQ ID NO: 1561342
ggcugagaaugguuaagca

SEQ ID NO: 1664498 - RNA, 19 nt, Artificial Sequence
  Description of Artificial Sequence: Synthetic oligonucleotide
  Antisense strand to SEQ ID NO: 1664497
ugcuuaaccauucucagcc

SEQ ID NO: 1664499 - RNA, 19 nt, Artificial Sequence
  Description of Artificial Sequence: Synthetic oligonucleotide
  Sense strand starting at position 2799 of SEQ ID NO: 1561342
ccucuaucguuccguguga

SEQ ID NO: 1664500 - RNA, 19 nt, Artificial Sequence
  Description of Artificial Sequence: Synthetic oligonucleotide
  Antisense strand to SEQ ID NO: 1664499
ucacacggaacgauagagg

SEQ ID NO: 1664501 - RNA, 19 nt, Artificial Sequence
  Description of Artificial Sequence: Synthetic oligonucleotide
  Sense strand starting at position 2800 of SEQ ID NO: 1561342
cucuaucguuccgugugaa

SEQ ID NO: 1664502 - RNA, 19 nt, Artificial Sequence
  Description of Artificial Sequence: Synthetic oligonucleotide
  Antisense strand to SEQ ID NO: 1664501
uucacacggaacgauagag

SEQ ID NO: 1664503 - RNA, 19 nt, Artificial Sequence
  Description of Artificial Sequence: Synthetic oligonucleotide
  Sense strand starting at position 2801 of SEQ ID NO: 1561342
ucuaucguuccgugugaag

SEQ ID NO: 1664504 - RNA, 19 nt, Artificial Sequence
  Description of Artificial Sequence: Synthetic oligonucleotide
  Antisense strand to SEQ ID NO: 1664503
cuucacacggaacgauaga

SEQ ID NO: 1664505 - RNA, 19 nt, Artificial Sequence
  Description of Artificial Sequence: Synthetic oligonucleotide
  Sense strand starting at position 2803 of SEQ ID NO: 1561342
uaucguuccgugugaagug

SEQ ID NO: 1664506 - RNA, 19 nt, Artificial Sequence
  Description of Artificial Sequence: Synthetic oligonucleotide
  Antisense strand to SEQ ID NO: 1664505
cacuucacacggaacgaua

SEQ ID NO: 1664507 - RNA, 19 nt, Artificial Sequence
  Description of Artificial Sequence: Synthetic oligonucleotide
  Sense strand starting at position 2812 of SEQ ID NO: 1561342
gugugaaguggcuauucca

SEQ ID NO: 1664508 - RNA, 19 nt, Artificial Sequence
  Description of Artificial Sequence: Synthetic oligonucleotide
  Antisense strand to SEQ ID NO: 1664507
uggaauagccacuucacac

SEQ ID NO: 1664509 - RNA, 19 nt, Artificial Sequence
  Description of Artificial Sequence: Synthetic oligonucleotide
  Sense strand starting at position 2820 of SEQ ID NO: 1561342
uggcuauuccaggguaauc

SEQ ID NO: 1664510 - RNA, 19 nt, Artificial Sequence
  Description of Artificial Sequence: Synthetic oligonucleotide
  Antisense strand to SEQ ID NO: 1664509
gauuacccuggaauagcca

SEQ ID NO: 1664511 - RNA, 19 nt, Artificial Sequence
  Description of Artificial Sequence: Synthetic oligonucleotide
  Sense strand starting at position 2822 of SEQ ID NO: 1561342
gcuauuccaggguaaucau

SEQ ID NO: 1664512 - RNA, 19 nt, Artificial Sequence
  Description of Artificial Sequence: Synthetic oligonucleotide
  Antisense strand to SEQ ID NO: 1664511
augauuacccuggaauagc

SEQ ID NO: 1664513 - RNA, 19 nt, Artificial Sequence
  Description of Artificial Sequence: Synthetic oligonucleotide
  Sense strand starting at position 2831 of SEQ ID NO: 1561342
ggguaaucaugcccugacu

SEQ ID NO: 1664514 - RNA, 19 nt, Artificial Sequence
  Description of Artificial Sequence: Synthetic oligonucleotide
  Antisense strand to SEQ ID NO: 1664513
agucagggcaugauuaccc

SEQ ID NO: 1664515 - RNA, 19 nt, Artificial Sequence
  Description of Artificial Sequence: Synthetic oligonucleotide
  Sense strand starting at position 2949 of SEQ ID NO: 1561342
gucgguuguccugauuuga

SEQ ID NO: 1664516 - RNA, 19 nt, Artificial Sequence
  Description of Artificial Sequence: Synthetic oligonucleotide
  Antisense strand to SEQ ID NO: 1664515
ucaaaucaggacaaccgac

SEQ ID NO: 1664517 - RNA, 19 nt, Artificial Sequence
  Description of Artificial Sequence: Synthetic oligonucleotide
  Sense strand starting at position 2989 of SEQ ID NO: 1561342
gguagagguuaggaaauau

SEQ ID NO: 1664518 - RNA, 19 nt, Artificial Sequence
  Description of Artificial Sequence: Synthetic oligonucleotide
  Antisense strand to SEQ ID NO: 1664517
auauuuccuaaccucuacc

SEQ ID NO: 1664519 - RNA, 19 nt, Artificial Sequence
  Description of Artificial Sequence: Synthetic oligonucleotide
  Sense strand starting at position 2999 of SEQ ID NO: 1561342
aggaaauauugggccacau

SEQ ID NO: 1664520 - RNA, 19 nt, Artificial Sequence
  Description of Artificial Sequence: Synthetic oligonucleotide
  Antisense strand to SEQ ID NO: 1664519
auguggcccaauauuuccu

SEQ ID NO: 1664521 - RNA, 19 nt, Artificial Sequence
  Description of Artificial Sequence: Synthetic oligonucleotide
  Sense strand starting at position 3243 of SEQ ID NO: 1561342
agcucauaauucgguugua

SEQ ID NO: 1664522 - RNA, 19 nt, Artificial Sequence
  Description of Artificial Sequence: Synthetic oligonucleotide
  Antisense strand to SEQ ID NO: 1664521
uacaaccgaauuaugagcu

SEQ ID NO: 1664523 - RNA, 19 nt, Artificial Sequence
  Description of Artificial Sequence: Synthetic oligonucleotide
  Sense strand starting at position 3244 of SEQ ID NO: 1561342
gcucauaauucgguuguaa

SEQ ID NO: 1664524 - RNA, 19 nt, Artificial Sequence
  Description of Artificial Sequence: Synthetic oligonucleotide
  Antisense strand to SEQ ID NO: 1664523
uuacaaccgaauuaugagc

SEQ ID NO: 1664525 - RNA, 19 nt, Artificial Sequence
  Description of Artificial Sequence: Synthetic oligonucleotide
  Sense strand starting at position 3246 of SEQ ID NO: 1561342
ucauaauucgguuguaaug

SEQ ID NO: 1664526 - RNA, 19 nt, Artificial Sequence
  Description of Artificial Sequence: Synthetic oligonucleotide
  Antisense strand to SEQ ID NO: 1664525
cauuacaaccgaauuauga

SEQ ID NO: 1664527 - RNA, 19 nt, Artificial Sequence
  Description of Artificial Sequence: Synthetic oligonucleotide
  Sense strand starting at position 3388 of SEQ ID NO: 1561342
gaggcucaguuucuagaau

SEQ ID NO: 1664528 - RNA, 19 nt, Artificial Sequence
  Description of Artificial Sequence: Synthetic oligonucleotide
  Antisense strand to SEQ ID NO: 1664527
auucuagaaacugagccuc

SEQ ID NO: 1664529 - RNA, 19 nt, Artificial Sequence
  Description of Artificial Sequence: Synthetic oligonucleotide
  Sense strand starting at position 3389 of SEQ ID NO: 1561342
aggcucaguuucuagaaua

SEQ ID NO: 1664530 - RNA, 19 nt, Artificial Sequence
  Description of Artificial Sequence: Synthetic oligonucleotide
  Antisense strand to SEQ ID NO: 1664529
uauucuagaaacugagccu

SEQ ID NO: 1664531 - RNA, 19 nt, Artificial Sequence
  Description of Artificial Sequence: Synthetic oligonucleotide
  Sense strand starting at position 3420 of SEQ ID NO: 1561342
ggccuugugugauguugca

SEQ ID NO: 1664532 - RNA, 19 nt, Artificial Sequence
  Description of Artificial Sequence: Synthetic oligonucleotide
  Antisense strand to SEQ ID NO: 1664531
ugcaacaucacacaaggcc

SEQ ID NO: 1664533 - RNA, 19 nt, Artificial Sequence
  Description of Artificial Sequence: Synthetic oligonucleotide
  Sense strand starting at position 3544 of SEQ ID NO: 1561342
gugagaccuguauguguac

SEQ ID NO: 1664534 - RNA, 19 nt, Artificial Sequence
  Description of Artificial Sequence: Synthetic oligonucleotide
  Antisense strand to SEQ ID NO: 1664533
guacacauacaggucucac

SEQ ID NO: 1664535 - RNA, 19 nt, Artificial Sequence
  Description of Artificial Sequence: Synthetic oligonucleotide
  Sense strand starting at position 3870 of SEQ ID NO: 1561342
caucauuugugccauggaa

SEQ ID NO: 1664536 - RNA, 19 nt, Artificial Sequence
  Description of Artificial Sequence: Synthetic oligonucleotide
  Antisense strand to SEQ ID NO: 1664535
uuccauggcacaaaugaug

SEQ ID NO: 1664537 - RNA, 19 nt, Artificial Sequence
  Description of Artificial Sequence: Synthetic oligonucleotide
  Sense strand starting at position 3872 of SEQ ID NO: 1561342
ucauuugugccauggaagu

SEQ ID NO: 1664538 - RNA, 19 nt, Artificial Sequence
  Description of Artificial Sequence: Synthetic oligonucleotide
  Antisense strand to SEQ ID NO: 1664537
acuuccauggcacaaauga

SEQ ID NO: 1664539 - RNA, 19 nt, Artificial Sequence
  Description of Artificial Sequence: Synthetic oligonucleotide
  Sense strand starting at position 3976 of SEQ ID NO: 1561342
gccugaaaguacuauaaau

SEQ ID NO: 1664540 - RNA, 19 nt, Artificial Sequence
  Description of Artificial Sequence: Synthetic oligonucleotide
  Antisense strand to SEQ ID NO: 1664539
auuuauaguacuuucaggc

SEQ ID NO: 1664541 - RNA, 19 nt, Artificial Sequence
  Description of Artificial Sequence: Synthetic oligonucleotide
  Sense strand starting at position 196 of SEQ ID NO: 1561343
agauuaauuggccaggcga

SEQ ID NO: 1664542 - RNA, 19 nt, Artificial Sequence
  Description of Artificial Sequence: Synthetic oligonucleotide
  Antisense strand to SEQ ID NO: 1664541
ucgccuggccaauuaaucu

SEQ ID NO: 1664543 - RNA, 19 nt, Artificial Sequence
  Description of Artificial Sequence: Synthetic oligonucleotide
  Sense strand starting at position 198 of SEQ ID NO: 1561343
auuaauuggccaggcgaga

SEQ ID NO: 1664544 - RNA, 19 nt, Artificial Sequence
  Description of Artificial Sequence: Synthetic oligonucleotide
  Antisense strand to SEQ ID NO: 1664543
ucucgccuggccaauuaau

SEQ ID NO: 1664545 - RNA, 19 nt, Artificial Sequence
  Description of Artificial Sequence: Synthetic oligonucleotide
  Sense strand starting at position 394 of SEQ ID NO: 1561343
agagaaucauuugauccca

SEQ ID NO: 1664546 - RNA, 19 nt, Artificial Sequence
  Description of Artificial Sequence: Synthetic oligonucleotide
  Antisense strand to SEQ ID NO: 1664545
ugggaucaaaugauucucu

SEQ ID NO: 1664547 - RNA, 19 nt, Artificial Sequence
  Description of Artificial Sequence: Synthetic oligonucleotide
  Sense strand starting at position 685 of SEQ ID NO: 1561343
ggcccugcuugggauacau

SEQ ID NO: 1664548 - RNA, 19 nt, Artificial Sequence
  Description of Artificial Sequence: Synthetic oligonucleotide
  Antisense strand to SEQ ID NO: 1664547
auguaucccaagcagggcc

SEQ ID NO: 1664549 - RNA, 19 nt, Artificial Sequence
  Description of Artificial Sequence: Synthetic oligonucleotide
  Sense strand starting at position 880 of SEQ ID NO: 1561343
agaauaagcugacaauuaa

SEQ ID NO: 1664550 - RNA, 19 nt, Artificial Sequence
  Description of Artificial Sequence: Synthetic oligonucleotide
  Antisense strand to SEQ ID NO: 1664549
uuaauugucagcuuauucu

SEQ ID NO: 1664551 - RNA, 19 nt, Artificial Sequence
  Description of Artificial Sequence: Synthetic oligonucleotide
  Sense strand starting at position 1261 of SEQ ID NO: 1561343
ccuagauugcuguaccuag

SEQ ID NO: 1664552 - RNA, 19 nt, Artificial Sequence
  Description of Artificial Sequence: Synthetic oligonucleotide
  Antisense strand to SEQ ID NO: 1664551
cuagguacagcaaucuagg

SEQ ID NO: 1664553 - RNA, 19 nt, Artificial Sequence
  Description of Artificial Sequence: Synthetic oligonucleotide
  Sense strand starting at position 1268 of SEQ ID NO: 1561343
ugcuguaccuagccaauua

SEQ ID NO: 1664554 - RNA, 19 nt, Artificial Sequence
  Description of Artificial Sequence: Synthetic oligonucleotide
  Antisense strand to SEQ ID NO: 1664553
uaauuggcuagguacagca

SEQ ID NO: 1664555 - RNA, 19 nt, Artificial Sequence
  Description of Artificial Sequence: Synthetic oligonucleotide
  Sense strand starting at position 1552 of SEQ ID NO: 1561343
ugaacaaucugggagagac

SEQ ID NO: 1664556 - RNA, 19 nt, Artificial Sequence
  Description of Artificial Sequence: Synthetic oligonucleotide
  Antisense strand to SEQ ID NO: 1664555
gucucucccagauuguuca

SEQ ID NO: 1664557 - RNA, 19 nt, Artificial Sequence
  Description of Artificial Sequence: Synthetic oligonucleotide
  Sense strand starting at position 1673 of SEQ ID NO: 1561343
gccgccaucuuauuucuga

SEQ ID NO: 1664558 - RNA, 19 nt, Artificial Sequence
  Description of Artificial Sequence: Synthetic oligonucleotide
  Antisense strand to SEQ ID NO: 1664557
ucagaaauaagauggcggc

SEQ ID NO: 1664559 - RNA, 19 nt, Artificial Sequence
  Description of Artificial Sequence: Synthetic oligonucleotide
  Sense strand starting at position 1674 of SEQ ID NO: 1561343
ccgccaucuuauuucugaa

SEQ ID NO: 1664560 - RNA, 19 nt, Artificial Sequence
  Description of Artificial Sequence: Synthetic oligonucleotide
  Antisense strand to SEQ ID NO: 1664559
uucagaaauaagauggcgg

SEQ ID NO: 1664561 - RNA, 19 nt, Artificial Sequence
  Description of Artificial Sequence: Synthetic oligonucleotide
  Sense strand starting at position 2040 of SEQ ID NO: 1561343
caacgucccuaguuggaua

SEQ ID NO: 1664562 - RNA, 19 nt, Artificial Sequence
  Description of Artificial Sequence: Synthetic oligonucleotide
  Antisense strand to SEQ ID NO: 1664561
uauccaacuagggacguug

SEQ ID NO: 1664563 - RNA, 19 nt, Artificial Sequence
  Description of Artificial Sequence: Synthetic oligonucleotide
  Sense strand starting at position 2045 of SEQ ID NO: 1561343
ucccuaguuggauaacguu

SEQ ID NO: 1664564 - RNA, 19 nt, Artificial Sequence
  Description of Artificial Sequence: Synthetic oligonucleotide
  Antisense strand to SEQ ID NO: 1664563
aacguuauccaacuaggga

SEQ ID NO: 1664565 - RNA, 19 nt, Artificial Sequence
  Description of Artificial Sequence: Synthetic oligonucleotide
  Sense strand starting at position 2048 of SEQ ID NO: 1561343
cuaguuggauaacguuuaa

SEQ ID NO: 1664566 - RNA, 19 nt, Artificial Sequence
  Description of Artificial Sequence: Synthetic oligonucleotide
  Antisense strand to SEQ ID NO: 1664565
uuaaacguuauccaacuag

SEQ ID NO: 1664567 - RNA, 19 nt, Artificial Sequence
  Description of Artificial Sequence: Synthetic oligonucleotide
  Sense strand starting at position 2079 of SEQ ID NO: 1561343
ucagacccugagugauaga

SEQ ID NO: 1664568 - RNA, 19 nt, Artificial Sequence
  Description of Artificial Sequence: Synthetic oligonucleotide
  Antisense strand to SEQ ID NO: 1664567
ucuaucacucagggucuga

SEQ ID NO: 1664569 - RNA, 19 nt, Artificial Sequence
  Description of Artificial Sequence: Synthetic oligonucleotide
  Sense strand starting at position 2082 of SEQ ID NO: 1561343
gacccugagugauagaaga

SEQ ID NO: 1664570 - RNA, 19 nt, Artificial Sequence
  Description of Artificial Sequence: Synthetic oligonucleotide
  Antisense strand to SEQ ID NO: 1664569
ucuucuaucacucaggguc

SEQ ID NO: 1664571 - RNA, 19 nt, Artificial Sequence
  Description of Artificial Sequence: Synthetic oligonucleotide
  Sense strand starting at position 2089 of SEQ ID NO: 1561343
agugauagaagaugugauc

SEQ ID NO: 1664572 - RNA, 19 nt, Artificial Sequence
  Description of Artificial Sequence: Synthetic oligonucleotide
  Antisense strand to SEQ ID NO: 1664571
gaucacaucuucuaucacu

SEQ ID NO: 1664573 - RNA, 19 nt, Artificial Sequence
  Description of Artificial Sequence: Synthetic oligonucleotide
  Sense strand starting at position 2092 of SEQ ID NO: 1561343
gauagaagaugugaucaca

SEQ ID NO: 1664574 - RNA, 19 nt, Artificial Sequence
  Description of Artificial Sequence: Synthetic oligonucleotide
  Antisense strand to SEQ ID NO: 1664573
ugugaucacaucuucuauc

SEQ ID NO: 1664575 - RNA, 19 nt, Artificial Sequence
  Description of Artificial Sequence: Synthetic oligonucleotide
  Sense strand starting at position 2357 of SEQ ID NO: 1561343
uugauaaaccguuauaagu

SEQ ID NO: 1664576 - RNA, 19 nt, Artificial Sequence
  Description of Artificial Sequence: Synthetic oligonucleotide
  Antisense strand to SEQ ID NO: 1664575
acuuauaacgguuuaucaa

SEQ ID NO: 1664577 - RNA, 19 nt, Artificial Sequence
  Description of Artificial Sequence: Synthetic oligonucleotide
  Sense strand starting at position 2359 of SEQ ID NO: 1561343
gauaaaccguuauaaguaa

SEQ ID NO: 1664578 - RNA, 19 nt, Artificial Sequence
  Description of Artificial Sequence: Synthetic oligonucleotide
  Antisense strand to SEQ ID NO: 1664577
uuacuuauaacgguuuauc

SEQ ID NO: 1664579 - RNA, 19 nt, Artificial Sequence
  Description of Artificial Sequence: Synthetic oligonucleotide
  Sense strand starting at position 2610 of SEQ ID NO: 1561343
gagcguggaucgcgucauu

SEQ ID NO: 1664580 - RNA, 19 nt, Artificial Sequence
  Description of Artificial Sequence: Synthetic oligonucleotide
  Antisense strand to SEQ ID NO: 1664579
aaugacgcgauccacgcuc

SEQ ID NO: 1664581 - RNA, 19 nt, Artificial Sequence
  Description of Artificial Sequence: Synthetic oligonucleotide
  Sense strand starting at position 2611 of SEQ ID NO: 1561343
agcguggaucgcgucauua

SEQ ID NO: 1664582 - RNA, 19 nt, Artificial Sequence
  Description of Artificial Sequence: Synthetic oligonucleotide
  Antisense strand to SEQ ID NO: 1664581
uaaugacgcgauccacgcu

SEQ ID NO: 1664583 - RNA, 19 nt, Artificial Sequence
  Description of Artificial Sequence: Synthetic oligonucleotide
  Sense strand starting at position 2612 of SEQ ID NO: 1561343
gcguggaucgcgucauuac

SEQ ID NO: 1664584 - RNA, 19 nt, Artificial Sequence
  Description of Artificial Sequence: Synthetic oligonucleotide
  Antisense strand to SEQ ID NO: 1664583
guaaugacgcgauccacgc

SEQ ID NO: 1664585 - RNA, 19 nt, Artificial Sequence
  Description of Artificial Sequence: Synthetic oligonucleotide
  Sense strand starting at position 2613 of SEQ ID NO: 1561343
cguggaucgcgucauuaca

SEQ ID NO: 1664586 - RNA, 19 nt, Artificial Sequence
  Description of Artificial Sequence: Synthetic oligonucleotide
  Antisense strand to SEQ ID NO: 1664585
uguaaugacgcgauccacg

SEQ ID NO: 1664587 - RNA, 19 nt, Artificial Sequence
  Description of Artificial Sequence: Synthetic oligonucleotide
  Sense strand starting at position 3390 of SEQ ID NO: 1561343
ccaggagaggcuugcucuu

SEQ ID NO: 1664588 - RNA, 19 nt, Artificial Sequence
  Description of Artificial Sequence: Synthetic oligonucleotide
  Antisense strand to SEQ ID NO: 1664587
aagagcaagccucuccugg

SEQ ID NO: 1664589 - RNA, 19 nt, Artificial Sequence
  Description of Artificial Sequence: Synthetic oligonucleotide
  Sense strand starting at position 3520 of SEQ ID NO: 1561343
agccaucaugcccgguuua

SEQ ID NO: 1664590 - RNA, 19 nt, Artificial Sequence
  Description of Artificial Sequence: Synthetic oligonucleotide
  Antisense strand to SEQ ID NO: 1664589
uaaaccgggcaugauggcu

SEQ ID NO: 1664591 - RNA, 19 nt, Artificial Sequence
  Description of Artificial Sequence: Synthetic oligonucleotide
  Sense strand starting at position 3521 of SEQ ID NO: 1561343
gccaucaugcccgguuuau

SEQ ID NO: 1664592 - RNA, 19 nt, Artificial Sequence
  Description of Artificial Sequence: Synthetic oligonucleotide
  Antisense strand to SEQ ID NO: 1664591
auaaaccgggcaugauggc

SEQ ID NO: 1664593 - RNA, 19 nt, Artificial Sequence
  Description of Artificial Sequence: Synthetic oligonucleotide
  Sense strand starting at position 3530 of SEQ ID NO: 1561343
cccgguuuauuucuguauu

SEQ ID NO: 1664594 - RNA, 19 nt, Artificial Sequence
  Description of Artificial Sequence: Synthetic oligonucleotide
  Antisense strand to SEQ ID NO: 1664593
aauacagaaauaaaccggg

SEQ ID NO: 1664595 - RNA, 19 nt, Artificial Sequence
  Description of Artificial Sequence: Synthetic oligonucleotide
  Sense strand starting at position 3531 of SEQ ID NO: 1561343
ccgguuuauuucuguauuu

SEQ ID NO: 1664596 - RNA, 19 nt, Artificial Sequence
  Description of Artificial Sequence: Synthetic oligonucleotide
  Antisense strand to SEQ ID NO: 1664595
aaauacagaaauaaaccgg

SEQ ID NO: 1664597 - RNA, 19 nt, Artificial Sequence
  Description of Artificial Sequence: Synthetic oligonucleotide
  Sense strand starting at position 3561 of SEQ ID NO: 1561343
uggaauuugccuugcuguu

SEQ ID NO: 1664598 - RNA, 19 nt, Artificial Sequence
  Description of Artificial Sequence: Synthetic oligonucleotide
  Antisense strand to SEQ ID NO: 1664597
aacagcaaggcaaauucca

SEQ ID NO: 1664599 - RNA, 19 nt, Artificial Sequence
  Description of Artificial Sequence: Synthetic oligonucleotide
  Sense strand starting at position 3594 of SEQ ID NO: 1561343
acuccuaagcucgaaauga

SEQ ID NO: 1664600 - RNA, 19 nt, Artificial Sequence
  Description of Artificial Sequence: Synthetic oligonucleotide
  Antisense strand to SEQ ID NO: 1664599
ucauuucgagcuuaggagu

SEQ ID NO: 1664601 - RNA, 19 nt, Artificial Sequence
  Description of Artificial Sequence: Synthetic oligonucleotide
  Sense strand starting at position 53 of SEQ ID NO: 1561344
acaggugaaucacagauaa

SEQ ID NO: 1664602 - RNA, 19 nt, Artificial Sequence
  Description of Artificial Sequence: Synthetic oligonucleotide
  Antisense strand to SEQ ID NO: 1664601
uuaucugugauucaccugu

SEQ ID NO: 1664603 - RNA, 19 nt, Artificial Sequence
  Description of Artificial Sequence: Synthetic oligonucleotide
  Sense strand starting at position 116 of SEQ ID NO: 1561344
agagucauauauccaccua

SEQ ID NO: 1664604 - RNA, 19 nt, Artificial Sequence
  Description of Artificial Sequence: Synthetic oligonucleotide
  Antisense strand to SEQ ID NO: 1664603
uagguggauauaugacucu

SEQ ID NO: 1664605 - RNA, 19 nt, Artificial Sequence
  Description of Artificial Sequence: Synthetic oligonucleotide
  Sense strand starting at position 284 of SEQ ID NO: 1561344
ggugaauaagcacgaguuu

SEQ ID NO: 1664606 - RNA, 19 nt, Artificial Sequence
  Description of Artificial Sequence: Synthetic oligonucleotide
  Antisense strand to SEQ ID NO: 1664605
aaacucgugcuuauucacc

SEQ ID NO: 1664607 - RNA, 19 nt, Artificial Sequence
  Description of Artificial Sequence: Synthetic oligonucleotide
  Sense strand starting at position 311 of SEQ ID NO: 1561344
guguccuaugcguuugcau

SEQ ID NO: 1664608 - RNA, 19 nt, Artificial Sequence
  Description of Artificial Sequence: Synthetic oligonucleotide
  Antisense strand to SEQ ID NO: 1664607
augcaaacgcauaggacac

SEQ ID NO: 1664609 - RNA, 19 nt, Artificial Sequence
  Description of Artificial Sequence: Synthetic oligonucleotide
  Sense strand starting at position 339 of SEQ ID NO: 1561344
guccauucuucucuuggga

SEQ ID NO: 1664610 - RNA, 19 nt, Artificial Sequence
  Description of Artificial Sequence: Synthetic oligonucleotide
  Antisense strand to SEQ ID NO: 1664609
ucccaagagaagaauggac

SEQ ID NO: 1664611 - RNA, 19 nt, Artificial Sequence
  Description of Artificial Sequence: Synthetic oligonucleotide
  Sense strand starting at position 607 of SEQ ID NO: 1561344
uuuaguaggcucugaaaga

SEQ ID NO: 1664612 - RNA, 19 nt, Artificial Sequence
  Description of Artificial Sequence: Synthetic oligonucleotide
  Antisense strand to SEQ ID NO: 1664611
ucuuucagagccuacuaaa

SEQ ID NO: 1664613 - RNA, 19 nt, Artificial Sequence
  Description of Artificial Sequence: Synthetic oligonucleotide
  Sense strand starting at position 628 of SEQ ID NO: 1561344
ugacucuuagcauggcaua

SEQ ID NO: 1664614 - RNA, 19 nt, Artificial Sequence
  Description of Artificial Sequence: Synthetic oligonucleotide
  Antisense strand to SEQ ID NO: 1664613
uaugccaugcuaagaguca

SEQ ID NO: 1664615 - RNA, 19 nt, Artificial Sequence
  Description of Artificial Sequence: Synthetic oligonucleotide
  Sense strand starting at position 744 of SEQ ID NO: 1561344
ccuggagucuucucugaac

SEQ ID NO: 1664616 - RNA, 19 nt, Artificial Sequence
  Description of Artificial Sequence: Synthetic oligonucleotide
  Antisense strand to SEQ ID NO: 1664615
guucagagaagacuccagg

SEQ ID NO: 1664617 - RNA, 19 nt, Artificial Sequence
  Description of Artificial Sequence: Synthetic oligonucleotide
  Sense strand starting at position 795 of SEQ ID NO: 1561344
guaauuuaguugucccuuu

SEQ ID NO: 1664618 - RNA, 19 nt, Artificial Sequence
  Description of Artificial Sequence: Synthetic oligonucleotide
  Antisense strand to SEQ ID NO: 1664617
aaagggacaacuaaauuac

SEQ ID NO: 1664619 - RNA, 19 nt, Artificial Sequence
  Description of Artificial Sequence: Synthetic oligonucleotide
  Sense strand starting at position 881 of SEQ ID NO: 1561344
ggacuagucuacccugauu

SEQ ID NO: 1664620 - RNA, 19 nt, Artificial Sequence
  Description of Artificial Sequence: Synthetic oligonucleotide
  Antisense strand to SEQ ID NO: 1664619
aaucaggguagacuagucc

SEQ ID NO: 1664621 - RNA, 19 nt, Artificial Sequence
  Description of Artificial Sequence: Synthetic oligonucleotide
  Sense strand starting at position 957 of SEQ ID NO: 1561344
cugugaagaccuugguaaa

SEQ ID NO: 1664622 - RNA, 19 nt, Artificial Sequence
  Description of Artificial Sequence: Synthetic oligonucleotide
  Antisense strand to SEQ ID NO: 1664621
uuuaccaaggucuucacag

SEQ ID NO: 1664623 - RNA, 19 nt, Artificial Sequence
  Description of Artificial Sequence: Synthetic oligonucleotide
  Sense strand starting at position 958 of SEQ ID NO: 1561344
ugugaagaccuugguaaau

SEQ ID NO: 1664624 - RNA, 19 nt, Artificial Sequence
  Description of Artificial Sequence: Synthetic oligonucleotide
  Antisense strand to SEQ ID NO: 1664623
auuuaccaaggucuucaca

SEQ ID NO: 1664625 - RNA, 19 nt, Artificial Sequence
  Description of Artificial Sequence: Synthetic oligonucleotide
  Sense strand starting at position 1095 of SEQ ID NO: 1561344
ggagacuuguggcuucaua

SEQ ID NO: 1664626 - RNA, 19 nt, Artificial Sequence
  Description of Artificial Sequence: Synthetic oligonucleotide
  Antisense strand to SEQ ID NO: 1664625
uaugaagccacaagucucc

SEQ ID NO: 1664627 - RNA, 19 nt, Artificial Sequence
  Description of Artificial Sequence: Synthetic oligonucleotide
  Sense strand starting at position 1153 of SEQ ID NO: 1561344
ucuuguaccuuucuggaaa

SEQ ID NO: 1664628 - RNA, 19 nt, Artificial Sequence
  Description of Artificial Sequence: Synthetic oligonucleotide
  Antisense strand to SEQ ID NO: 1664627
uuuccagaaagguacaaga

SEQ ID NO: 1664629 - RNA, 19 nt, Artificial Sequence
  Description of Artificial Sequence: Synthetic oligonucleotide
  Sense strand starting at position 1434 of SEQ ID NO: 1561344
caucuauggcgguauuaga

SEQ ID NO: 1664630 - RNA, 19 nt, Artificial Sequence
  Description of Artificial Sequence: Synthetic oligonucleotide
  Antisense strand to SEQ ID NO: 1664629
ucuaauaccgccauagaug

SEQ ID NO: 1664631 - RNA, 19 nt, Artificial Sequence
  Description of Artificial Sequence: Synthetic oligonucleotide
  Sense strand starting at position 1443 of SEQ ID NO: 1561344
cgguauuagaugggcucaa

SEQ ID NO: 1664632 - RNA, 19 nt, Artificial Sequence
  Description of Artificial Sequence: Synthetic oligonucleotide
  Antisense strand to SEQ ID NO: 1664631
uugagcccaucuaauaccg

SEQ ID NO: 1664633 - RNA, 19 nt, Artificial Sequence
  Description of Artificial Sequence: Synthetic oligonucleotide
  Sense strand starting at position 1790 of SEQ ID NO: 1561344
cagagaggauguccuuauu

SEQ ID NO: 1664634 - RNA, 19 nt, Artificial Sequence
  Description of Artificial Sequence: Synthetic oligonucleotide
  Antisense strand to SEQ ID NO: 1664633
aauaaggacauccucucug

SEQ ID NO: 1664635 - RNA, 19 nt, Artificial Sequence
  Description of Artificial Sequence: Synthetic oligonucleotide
  Sense strand starting at position 1883 of SEQ ID NO: 1561344
gcgccuucucagucaguca

SEQ ID NO: 1664636 - RNA, 19 nt, Artificial Sequence
  Description of Artificial Sequence: Synthetic oligonucleotide
  Antisense strand to SEQ ID NO: 1664635
ugacugacugagaaggcgc

SEQ ID NO: 1664637 - RNA, 19 nt, Artificial Sequence
  Description of Artificial Sequence: Synthetic oligonucleotide
  Sense strand starting at position 1891 of SEQ ID NO: 1561344
ucagucagucacggaugau

SEQ ID NO: 1664638 - RNA, 19 nt, Artificial Sequence
  Description of Artificial Sequence: Synthetic oligonucleotide
  Antisense strand to SEQ ID NO: 1664637
aucauccgugacugacuga

SEQ ID NO: 1664639 - RNA, 19 nt, Artificial Sequence
  Description of Artificial Sequence: Synthetic oligonucleotide
  Sense strand starting at position 1892 of SEQ ID NO: 1561344
cagucagucacggaugaug

SEQ ID NO: 1664640 - RNA, 19 nt, Artificial Sequence
  Description of Artificial Sequence: Synthetic oligonucleotide
  Antisense strand to SEQ ID NO: 1664639
caucauccgugacugacug

SEQ ID NO: 1664641 - RNA, 19 nt, Artificial Sequence
  Description of Artificial Sequence: Synthetic oligonucleotide
  Sense strand starting at position 2007 of SEQ ID NO: 1561344
gcgcgugcgcuuacggaaa

SEQ ID NO: 1664642 - RNA, 19 nt, Artificial Sequence
  Description of Artificial Sequence: Synthetic oligonucleotide
  Antisense strand to SEQ ID NO: 1664641
uuuccguaagcgcacgcgc

SEQ ID NO: 1664643 - RNA, 19 nt, Artificial Sequence
  Description of Artificial Sequence: Synthetic oligonucleotide
  Sense strand starting at position 2075 of SEQ ID NO: 1561344
aggccauucuggguaaugu

SEQ ID NO: 1664644 - RNA, 19 nt, Artificial Sequence
  Description of Artificial Sequence: Synthetic oligonucleotide
  Antisense strand to SEQ ID NO: 1664643
acauuacccagaauggccu

SEQ ID NO: 1664645 - RNA, 19 nt, Artificial Sequence
  Description of Artificial Sequence: Synthetic oligonucleotide
  Sense strand starting at position 2076 of SEQ ID NO: 1561344
ggccauucuggguaauguu

SEQ ID NO: 1664646 - RNA, 19 nt, Artificial Sequence
  Description of Artificial Sequence: Synthetic oligonucleotide
  Antisense strand to SEQ ID NO: 1664645
aacauuacccagaauggcc

SEQ ID NO: 1664647 - RNA, 19 nt, Artificial Sequence
  Description of Artificial Sequence: Synthetic oligonucleotide
  Sense strand starting at position 2131 of SEQ ID NO: 1561344
caccuccuuccggaaguaa

SEQ ID NO: 1664648 - RNA, 19 nt, Artificial Sequence
  Description of Artificial Sequence: Synthetic oligonucleotide
  Antisense strand to SEQ ID NO: 1664647
uuacuuccggaaggaggug

SEQ ID NO: 1664649 - RNA, 19 nt, Artificial Sequence
  Description of Artificial Sequence: Synthetic oligonucleotide
  Sense strand starting at position 2247 of SEQ ID NO: 1561344
uaccgauugcugucugcca

SEQ ID NO: 1664650 - RNA, 19 nt, Artificial Sequence
  Description of Artificial Sequence: Synthetic oligonucleotide
  Antisense strand to SEQ ID NO: 1664649
uggcagacagcaaucggua

SEQ ID NO: 1664651 - RNA, 19 nt, Artificial Sequence
  Description of Artificial Sequence: Synthetic oligonucleotide
  Sense strand starting at position 2356 of SEQ ID NO: 1561344
uauauccacugguugagaa

SEQ ID NO: 1664652 - RNA, 19 nt, Artificial Sequence
  Description of Artificial Sequence: Synthetic oligonucleotide
  Antisense strand to SEQ ID NO: 1664651
uucucaaccaguggauaua

SEQ ID NO: 1664653 - RNA, 19 nt, Artificial Sequence
  Description of Artificial Sequence: Synthetic oligonucleotide
  Sense strand starting at position 2357 of SEQ ID NO: 1561344
auauccacugguugagaaa

SEQ ID NO: 1664654 - RNA, 19 nt, Artificial Sequence
  Description of Artificial Sequence: Synthetic oligonucleotide
  Antisense strand to SEQ ID NO: 1664653
uuucucaaccaguggauau

SEQ ID NO: 1664655 - RNA, 19 nt, Artificial Sequence
  Description of Artificial Sequence: Synthetic oligonucleotide
  Sense strand starting at position 2794 of SEQ ID NO: 1561344
cuguauguuugauuaggga

SEQ ID NO: 1664656 - RNA, 19 nt, Artificial Sequence
  Description of Artificial Sequence: Synthetic oligonucleotide
  Antisense strand to SEQ ID NO: 1664655
ucccuaaucaaacauacag

SEQ ID NO: 1664657 - RNA, 19 nt, Artificial Sequence
  Description of Artificial Sequence: Synthetic oligonucleotide
  Sense strand starting at position 2934 of SEQ ID NO: 1561344
gucaaacauuguguccaau

SEQ ID NO: 1664658 - RNA, 19 nt, Artificial Sequence
  Description of Artificial Sequence: Synthetic oligonucleotide
  Antisense strand to SEQ ID NO: 1664657
auuggacacaauguuugac

SEQ ID NO: 1664659 - RNA, 19 nt, Artificial Sequence
  Description of Artificial Sequence: Synthetic oligonucleotide
  Sense strand starting at position 2960 of SEQ ID NO: 1561344
gcaacacuugcaugaaucu

SEQ ID NO: 1664660 - RNA, 19 nt, Artificial Sequence
  Description of Artificial Sequence: Synthetic oligonucleotide
  Antisense strand to SEQ ID NO: 1664659
agauucaugcaaguguugc

SEQ ID NO: 1664661 - RNA, 19 nt, Artificial Sequence
  Description of Artificial Sequence: Synthetic oligonucleotide
  Sense strand starting at position 3079 of SEQ ID NO: 1561344
gauggcuagcuagagcauu

SEQ ID NO: 1664662 - RNA, 19 nt, Artificial Sequence
  Description of Artificial Sequence: Synthetic oligonucleotide
  Antisense strand to SEQ ID NO: 1664661
aaugcucuagcuagccauc

SEQ ID NO: 1664663 - RNA, 19 nt, Artificial Sequence
  Description of Artificial Sequence: Synthetic oligonucleotide
  Sense strand starting at position 3090 of SEQ ID NO: 1561344
agagcauuaacagguggaa

SEQ ID NO: 1664664 - RNA, 19 nt, Artificial Sequence
  Description of Artificial Sequence: Synthetic oligonucleotide
  Antisense strand to SEQ ID NO: 1664663
uuccaccuguuaaugcucu

SEQ ID NO: 1664665 - RNA, 19 nt, Artificial Sequence
  Description of Artificial Sequence: Synthetic oligonucleotide
  Sense strand starting at position 3092 of SEQ ID NO: 1561344
agcauuaacagguggaaca

SEQ ID NO: 1664666 - RNA, 19 nt, Artificial Sequence
  Description of Artificial Sequence: Synthetic oligonucleotide
  Antisense strand to SEQ ID NO: 1664665
uguuccaccuguuaaugcu

SEQ ID NO: 1664667 - RNA, 19 nt, Artificial Sequence
  Description of Artificial Sequence: Synthetic oligonucleotide
  Sense strand starting at position 3107 of SEQ ID NO: 1561344
aacaaagggugcucugaau

SEQ ID NO: 1664668 - RNA, 19 nt, Artificial Sequence
  Description of Artificial Sequence: Synthetic oligonucleotide
  Antisense strand to SEQ ID NO: 1664667
auucagagcacccuuuguu

SEQ ID NO: 1664669 - RNA, 19 nt, Artificial Sequence
  Description of Artificial Sequence: Synthetic oligonucleotide
  Sense strand starting at position 3129 of SEQ ID NO: 1561344
aaauguaggguguaucuua

SEQ ID NO: 1664670 - RNA, 19 nt, Artificial Sequence
  Description of Artificial Sequence: Synthetic oligonucleotide
  Antisense strand to SEQ ID NO: 1664669
uaagauacacccuacauuu

SEQ ID NO: 1664671 - RNA, 19 nt, Artificial Sequence
  Description of Artificial Sequence: Synthetic oligonucleotide
  Sense strand starting at position 3160 of SEQ ID NO: 1561344
cuucucaacgcugaaauga

SEQ ID NO: 1664672 - RNA, 19 nt, Artificial Sequence
  Description of Artificial Sequence: Synthetic oligonucleotide
  Antisense strand to SEQ ID NO: 1664671
ucauuucagcguugagaag

SEQ ID NO: 1664673 - RNA, 19 nt, Artificial Sequence
  Description of Artificial Sequence: Synthetic oligonucleotide
  Sense strand starting at position 3168 of SEQ ID NO: 1561344
cgcugaaaugauuaucuuu

SEQ ID NO: 1664674 - RNA, 19 nt, Artificial Sequence
  Description of Artificial Sequence: Synthetic oligonucleotide
  Antisense strand to SEQ ID NO: 1664673
aaagauaaucauuucagcg

SEQ ID NO: 1664675 - RNA, 19 nt, Artificial Sequence
  Description of Artificial Sequence: Synthetic oligonucleotide
  Sense strand starting at position 3514 of SEQ ID NO: 1561344
uagggcuguucugcauaaa

SEQ ID NO: 1664676 - RNA, 19 nt, Artificial Sequence
  Description of Artificial Sequence: Synthetic oligonucleotide
  Antisense strand to SEQ ID NO: 1664675
uuuaugcagaacagcccua

SEQ ID NO: 1664677 - RNA, 19 nt, Artificial Sequence
  Description of Artificial Sequence: Synthetic oligonucleotide
  Sense strand starting at position 3599 of SEQ ID NO: 1561344
ucgcuucgccagccagaaa

SEQ ID NO: 1664678 - RNA, 19 nt, Artificial Sequence
  Description of Artificial Sequence: Synthetic oligonucleotide
  Antisense strand to SEQ ID NO: 1664677
uuucuggcuggcgaagcga

SEQ ID NO: 1664679 - RNA, 19 nt, Artificial Sequence
  Description of Artificial Sequence: Synthetic oligonucleotide
  Sense strand starting at position 3933 of SEQ ID NO: 1561344
gccggaaagcucggagaca

SEQ ID NO: 1664680 - RNA, 19 nt, Artificial Sequence
  Description of Artificial Sequence: Synthetic oligonucleotide
  Antisense strand to SEQ ID NO: 1664679
ugucuccgagcuuuccggc

SEQ ID NO: 1664681 - RNA, 19 nt, Artificial Sequence
  Description of Artificial Sequence: Synthetic oligonucleotide
  Sense strand starting at position 57 of SEQ ID NO: 1561345
ugagacucugcuugggaca

SEQ ID NO: 1664682 - RNA, 19 nt, Artificial Sequence
  Description of Artificial Sequence: Synthetic oligonucleotide
  Antisense strand to SEQ ID NO: 1664681
ugucccaagcagagucuca

SEQ ID NO: 1664683 - RNA, 19 nt, Artificial Sequence
  Description of Artificial Sequence: Synthetic oligonucleotide
  Sense strand starting at position 60 of SEQ ID NO: 1561345
gacucugcuugggacacau

SEQ ID NO: 1664684 - RNA, 19 nt, Artificial Sequence
  Description of Artificial Sequence: Synthetic oligonucleotide
  Antisense strand to SEQ ID NO: 1664683
augugucccaagcagaguc

SEQ ID NO: 1664685 - RNA, 19 nt, Artificial Sequence
  Description of Artificial Sequence: Synthetic oligonucleotide
  Sense strand starting at position 64 of SEQ ID NO: 1561345
cugcuugggacacauguaa

SEQ ID NO: 1664686 - RNA, 19 nt, Artificial Sequence
  Description of Artificial Sequence: Synthetic oligonucleotide
  Antisense strand to SEQ ID NO: 1664685
uuacaugugucccaagcag

SEQ ID NO: 1664687 - RNA, 19 nt, Artificial Sequence
  Description of Artificial Sequence: Synthetic oligonucleotide
  Sense strand starting at position 312 of SEQ ID NO: 1561345
uugcaaugagcagaaaucu

SEQ ID NO: 1664688 - RNA, 19 nt, Artificial Sequence
  Description of Artificial Sequence: Synthetic oligonucleotide
  Antisense strand to SEQ ID NO: 1664687
agauuucugcucauugcaa

SEQ ID NO: 1664689 - RNA, 19 nt, Artificial Sequence
  Description of Artificial Sequence: Synthetic oligonucleotide
  Sense strand starting at position 1025 of SEQ ID NO: 1561345
ccugcuauggacgacaaau

SEQ ID NO: 1664690 - RNA, 19 nt, Artificial Sequence
  Description of Artificial Sequence: Synthetic oligonucleotide
  Antisense strand to SEQ ID NO: 1664689
auuugucguccauagcagg

SEQ ID NO: 1664691 - RNA, 19 nt, Artificial Sequence
  Description of Artificial Sequence: Synthetic oligonucleotide
  Sense strand starting at position 1414 of SEQ ID NO: 1561345
ugcggugacuucuguauau

SEQ ID NO: 1664692 - RNA, 19 nt, Artificial Sequence
  Description of Artificial Sequence: Synthetic oligonucleotide
  Antisense strand to SEQ ID NO: 1664691
auauacagaagucaccgca

SEQ ID NO: 1664693 - RNA, 19 nt, Artificial Sequence
  Description of Artificial Sequence: Synthetic oligonucleotide
  Sense strand starting at position 1531 of SEQ ID NO: 1561345
uccuguggucccugcacaa

SEQ ID NO: 1664694 - RNA, 19 nt, Artificial Sequence
  Description of Artificial Sequence: Synthetic oligonucleotide
  Antisense strand to SEQ ID NO: 1664693
uugugcagggaccacagga

SEQ ID NO: 1664695 - RNA, 19 nt, Artificial Sequence
  Description of Artificial Sequence: Synthetic oligonucleotide
  Sense strand starting at position 2013 of SEQ ID NO: 1561345
uccagcuucgugucugauu

SEQ ID NO: 1664696 - RNA, 19 nt, Artificial Sequence
  Description of Artificial Sequence: Synthetic oligonucleotide
  Antisense strand to SEQ ID NO: 1664695
aaucagacacgaagcugga

SEQ ID NO: 1664697 - RNA, 19 nt, Artificial Sequence
  Description of Artificial Sequence: Synthetic oligonucleotide
  Sense strand starting at position 2022 of SEQ ID NO: 1561345
gugucugauuggacgguuu

SEQ ID NO: 1664698 - RNA, 19 nt, Artificial Sequence
  Description of Artificial Sequence: Synthetic oligonucleotide
  Antisense strand to SEQ ID NO: 1664697
aaaccguccaaucagacac

SEQ ID NO: 1664699 - RNA, 19 nt, Artificial Sequence
  Description of Artificial Sequence: Synthetic oligonucleotide
  Sense strand starting at position 2047 of SEQ ID NO: 1561345
cagcgucccugacuggaua

SEQ ID NO: 1664700 - RNA, 19 nt, Artificial Sequence
  Description of Artificial Sequence: Synthetic oligonucleotide
  Antisense strand to SEQ ID NO: 1664699
uauccagucagggacgcug

SEQ ID NO: 1664701 - RNA, 19 nt, Artificial Sequence
  Description of Artificial Sequence: Synthetic oligonucleotide
  Sense strand starting at position 2112 of SEQ ID NO: 1561345
aucagaugcucggcugaau

SEQ ID NO: 1664702 - RNA, 19 nt, Artificial Sequence
  Description of Artificial Sequence: Synthetic oligonucleotide
  Antisense strand to SEQ ID NO: 1664701
auucagccgagcaucugau

SEQ ID NO: 1664703 - RNA, 19 nt, Artificial Sequence
  Description of Artificial Sequence: Synthetic oligonucleotide
  Sense strand starting at position 2115 of SEQ ID NO: 1561345
agaugcucggcugaaugaa

SEQ ID NO: 1664704 - RNA, 19 nt, Artificial Sequence
  Description of Artificial Sequence: Synthetic oligonucleotide
  Antisense strand to SEQ ID NO: 1664703
uucauucagccgagcaucu

SEQ ID NO: 1664705 - RNA, 19 nt, Artificial Sequence
  Description of Artificial Sequence: Synthetic oligonucleotide
  Sense strand starting at position 2233 of SEQ ID NO: 1561345
aaggucauaugcguuuaua

SEQ ID NO: 1664706 - RNA, 19 nt, Artificial Sequence
  Description of Artificial Sequence: Synthetic oligonucleotide
  Antisense strand to SEQ ID NO: 1664705
uauaaacgcauaugaccuu

SEQ ID NO: 1664707 - RNA, 19 nt, Artificial Sequence
  Description of Artificial Sequence: Synthetic oligonucleotide
  Sense strand starting at position 2236 of SEQ ID NO: 1561345
gucauaugcguuuauacau

SEQ ID NO: 1664708 - RNA, 19 nt, Artificial Sequence
  Description of Artificial Sequence: Synthetic oligonucleotide
  Antisense strand to SEQ ID NO: 1664707
auguauaaacgcauaugac

SEQ ID NO: 1664709 - RNA, 19 nt, Artificial Sequence
  Description of Artificial Sequence: Synthetic oligonucleotide
  Sense strand starting at position 2787 of SEQ ID NO: 1561345
ccgagaucgcuuugaacuc

SEQ ID NO: 1664710 - RNA, 19 nt, Artificial Sequence
  Description of Artificial Sequence: Synthetic oligonucleotide
  Antisense strand to SEQ ID NO: 1664709
gaguucaaagcgaucucgg

SEQ ID NO: 1664711 - RNA, 19 nt, Artificial Sequence
  Description of Artificial Sequence: Synthetic oligonucleotide
  Sense strand starting at position 2862 of SEQ ID NO: 1561345
aggcaaucuucugaaauag

SEQ ID NO: 1664712 - RNA, 19 nt, Artificial Sequence
  Description of Artificial Sequence: Synthetic oligonucleotide
  Antisense strand to SEQ ID NO: 1664711
cuauuucagaagauugccu

SEQ ID NO: 1664713 - RNA, 19 nt, Artificial Sequence
  Description of Artificial Sequence: Synthetic oligonucleotide
  Sense strand starting at position 2882 of SEQ ID NO: 1561345
augugagccaaaugugaau

SEQ ID NO: 1664714 - RNA, 19 nt, Artificial Sequence
  Description of Artificial Sequence: Synthetic oligonucleotide
  Antisense strand to SEQ ID NO: 1664713
auucacauuuggcucacau

SEQ ID NO: 1664715 - RNA, 19 nt, Artificial Sequence
  Description of Artificial Sequence: Synthetic oligonucleotide
  Sense strand starting at position 2944 of SEQ ID NO: 1561345
aggucaaacugauuguaac

SEQ ID NO: 1664716 - RNA, 19 nt, Artificial Sequence
  Description of Artificial Sequence: Synthetic oligonucleotide
  Antisense strand to SEQ ID NO: 1664715
guuacaaucaguuugaccu

SEQ ID NO: 1664717 - RNA, 19 nt, Artificial Sequence
  Description of Artificial Sequence: Synthetic oligonucleotide
  Sense strand starting at position 2945 of SEQ ID NO: 1561345
ggucaaacugauuguaaca

SEQ ID NO: 1664718 - RNA, 19 nt, Artificial Sequence
  Description of Artificial Sequence: Synthetic oligonucleotide
  Antisense strand to SEQ ID NO: 1664717
uguuacaaucaguuugacc

SEQ ID NO: 1664719 - RNA, 19 nt, Artificial Sequence
  Description of Artificial Sequence: Synthetic oligonucleotide
  Sense strand starting at position 2991 of SEQ ID NO: 1561345
auuacuauaugagcaaugu

SEQ ID NO: 1664720 - RNA, 19 nt, Artificial Sequence
  Description of Artificial Sequence: Synthetic oligonucleotide
  Antisense strand to SEQ ID NO: 1664719
acauugcucauauaguaau

SEQ ID NO: 1664721 - RNA, 19 nt, Artificial Sequence
  Description of Artificial Sequence: Synthetic oligonucleotide
  Sense strand starting at position 2995 of SEQ ID NO: 1561345
cuauaugagcaauguguaa

SEQ ID NO: 1664722 - RNA, 19 nt, Artificial Sequence
  Description of Artificial Sequence: Synthetic oligonucleotide
  Antisense strand to SEQ ID NO: 1664721
uuacacauugcucauauag

SEQ ID NO: 1664723 - RNA, 19 nt, Artificial Sequence
  Description of Artificial Sequence: Synthetic oligonucleotide
  Sense strand starting at position 2999 of SEQ ID NO: 1561345
augagcaauguguaauuau

SEQ ID NO: 1664724 - RNA, 19 nt, Artificial Sequence
  Description of Artificial Sequence: Synthetic oligonucleotide
  Antisense strand to SEQ ID NO: 1664723
auaauuacacauugcucau

SEQ ID NO: 1664725 - RNA, 19 nt, Artificial Sequence
  Description of Artificial Sequence: Synthetic oligonucleotide
  Sense strand starting at position 3025 of SEQ ID NO: 1561345
gcauguauauaguuagaac

SEQ ID NO: 1664726 - RNA, 19 nt, Artificial Sequence
  Description of Artificial Sequence: Synthetic oligonucleotide
  Antisense strand to SEQ ID NO: 1664725
guucuaacuauauacaugc

SEQ ID NO: 1664727 - RNA, 19 nt, Artificial Sequence
  Description of Artificial Sequence: Synthetic oligonucleotide
  Sense strand starting at position 3470 of SEQ ID NO: 1561345
ucugauguuggguggguaa

SEQ ID NO: 1664728 - RNA, 19 nt, Artificial Sequence
  Description of Artificial Sequence: Synthetic oligonucleotide
  Antisense strand to SEQ ID NO: 1664727
uuacccacccaacaucaga

SEQ ID NO: 1664729 - RNA, 19 nt, Artificial Sequence
  Description of Artificial Sequence: Synthetic oligonucleotide
  Sense strand starting at position 3483 of SEQ ID NO: 1561345
ggguaaagggccugaauaa

SEQ ID NO: 1664730 - RNA, 19 nt, Artificial Sequence
  Description of Artificial Sequence: Synthetic oligonucleotide
  Antisense strand to SEQ ID NO: 1664729
uuauucaggcccuuuaccc

SEQ ID NO: 1664731 - RNA, 19 nt, Artificial Sequence
  Description of Artificial Sequence: Synthetic oligonucleotide
  Sense strand starting at position 3501 of SEQ ID NO: 1561345
aauuuauucugccagugug

SEQ ID NO: 1664732 - RNA, 19 nt, Artificial Sequence
  Description of Artificial Sequence: Synthetic oligonucleotide
  Antisense strand to SEQ ID NO: 1664731
cacacuggcagaauaaauu

SEQ ID NO: 1664733 - RNA, 19 nt, Artificial Sequence
  Description of Artificial Sequence: Synthetic oligonucleotide
  Sense strand starting at position 3504 of SEQ ID NO: 1561345
uuauucugccagugugaag

SEQ ID NO: 1664734 - RNA, 19 nt, Artificial Sequence
  Description of Artificial Sequence: Synthetic oligonucleotide
  Antisense strand to SEQ ID NO: 1664733
cuucacacuggcagaauaa

SEQ ID NO: 1664735 - RNA, 19 nt, Artificial Sequence
  Description of Artificial Sequence: Synthetic oligonucleotide
  Sense strand starting at position 3569 of SEQ ID NO: 1561345
aaagauggcggccauagaa

SEQ ID NO: 1664736 - RNA, 19 nt, Artificial Sequence
  Description of Artificial Sequence: Synthetic oligonucleotide
  Antisense strand to SEQ ID NO: 1664735
uucuauggccgccaucuuu

SEQ ID NO: 1664737 - RNA, 19 nt, Artificial Sequence
  Description of Artificial Sequence: Synthetic oligonucleotide
  Sense strand starting at position 3682 of SEQ ID NO: 1561345
ggaugauagguccggagga

SEQ ID NO: 1664738 - RNA, 19 nt, Artificial Sequence
  Description of Artificial Sequence: Synthetic oligonucleotide
  Antisense strand to SEQ ID NO: 1664737
uccuccggaccuaucaucc

SEQ ID NO: 1664739 - RNA, 19 nt, Artificial Sequence
  Description of Artificial Sequence: Synthetic oligonucleotide
  Sense strand starting at position 3787 of SEQ ID NO: 1561345
uuugcuauuuggccuugaa

SEQ ID NO: 1664740 - RNA, 19 nt, Artificial Sequence
  Description of Artificial Sequence: Synthetic oligonucleotide
  Antisense strand to SEQ ID NO: 1664739
uucaaggccaaauagcaaa

SEQ ID NO: 1664741 - RNA, 19 nt, Artificial Sequence
  Description of Artificial Sequence: Synthetic oligonucleotide
  Sense strand starting at position 3790 of SEQ ID NO: 1561345
gcuauuuggccuugaaccu

SEQ ID NO: 1664742 - RNA, 19 nt, Artificial Sequence
  Description of Artificial Sequence: Synthetic oligonucleotide
  Antisense strand to SEQ ID NO: 1664741
agguucaaggccaaauagc

SEQ ID NO: 1664743 - RNA, 19 nt, Artificial Sequence
  Description of Artificial Sequence: Synthetic oligonucleotide
  Sense strand starting at position 273 of SEQ ID NO: 1561346
ccagauuacuuaucauacg

SEQ ID NO: 1664744 - RNA, 19 nt, Artificial Sequence
  Description of Artificial Sequence: Synthetic oligonucleotide
  Antisense strand to SEQ ID NO: 1664743
cguaugauaaguaaucugg

SEQ ID NO: 1664745 - RNA, 19 nt, Artificial Sequence
  Description of Artificial Sequence: Synthetic oligonucleotide
  Sense strand starting at position 290 of SEQ ID NO: 1561346
cguaauacaacguaaaugu

SEQ ID NO: 1664746 - RNA, 19 nt, Artificial Sequence
  Description of Artificial Sequence: Synthetic oligonucleotide
  Antisense strand to SEQ ID NO: 1664745
acauuuacguuguauuacg

SEQ ID NO: 1664747 - RNA, 19 nt, Artificial Sequence
  Description of Artificial Sequence: Synthetic oligonucleotide
  Sense strand starting at position 298 of SEQ ID NO: 1561346
aacguaaaugucugguaaa

SEQ ID NO: 1664748 - RNA, 19 nt, Artificial Sequence
  Description of Artificial Sequence: Synthetic oligonucleotide
  Antisense strand to SEQ ID NO: 1664747
uuuaccagacauuuacguu

SEQ ID NO: 1664749 - RNA, 19 nt, Artificial Sequence
  Description of Artificial Sequence: Synthetic oligonucleotide
  Sense strand starting at position 511 of SEQ ID NO: 1561346
cugagaaaccuugguuuac

SEQ ID NO: 1664750 - RNA, 19 nt, Artificial Sequence
  Description of Artificial Sequence: Synthetic oligonucleotide
  Antisense strand to SEQ ID NO: 1664749
guaaaccaagguuucucag

SEQ ID NO: 1664751 - RNA, 19 nt, Artificial Sequence
  Description of Artificial Sequence: Synthetic oligonucleotide
  Sense strand starting at position 512 of SEQ ID NO: 1561346
ugagaaaccuugguuuaca

SEQ ID NO: 1664752 - RNA, 19 nt, Artificial Sequence
  Description of Artificial Sequence: Synthetic oligonucleotide
  Antisense strand to SEQ ID NO: 1664751
uguaaaccaagguuucuca

SEQ ID NO: 1664753 - RNA, 19 nt, Artificial Sequence
  Description of Artificial Sequence: Synthetic oligonucleotide
  Sense strand starting at position 513 of SEQ ID NO: 1561346
gagaaaccuugguuuacaa

SEQ ID NO: 1664754 - RNA, 19 nt, Artificial Sequence
  Description of Artificial Sequence: Synthetic oligonucleotide
  Antisense strand to SEQ ID NO: 1664753
uuguaaaccaagguuucuc

SEQ ID NO: 1664755 - RNA, 19 nt, Artificial Sequence
  Description of Artificial Sequence: Synthetic oligonucleotide
  Sense strand starting at position 571 of SEQ ID NO: 1561346
uuagaagccuucucuaaga

SEQ ID NO: 1664756 - RNA, 19 nt, Artificial Sequence
  Description of Artificial Sequence: Synthetic oligonucleotide
  Antisense strand to SEQ ID NO: 1664755
ucuuagagaaggcuucuaa

SEQ ID NO: 1664757 - RNA, 19 nt, Artificial Sequence
  Description of Artificial Sequence: Synthetic oligonucleotide
  Sense strand starting at position 587 of SEQ ID NO: 1561346
agauguaagugccuuagaa

SEQ ID NO: 1664758 - RNA, 19 nt, Artificial Sequence
  Description of Artificial Sequence: Synthetic oligonucleotide
  Antisense strand to SEQ ID NO: 1664757
uucuaaggcacuuacaucu

SEQ ID NO: 1664759 - RNA, 19 nt, Artificial Sequence
  Description of Artificial Sequence: Synthetic oligonucleotide
  Sense strand starting at position 612 of SEQ ID NO: 1561346
uagacagugcuauaaauug

SEQ ID NO: 1664760 - RNA, 19 nt, Artificial Sequence
  Description of Artificial Sequence: Synthetic oligonucleotide
  Antisense strand to SEQ ID NO: 1664759
caauuuauagcacugucua

SEQ ID NO: 1664761 - RNA, 19 nt, Artificial Sequence
  Description of Artificial Sequence: Synthetic oligonucleotide
  Sense strand starting at position 692 of SEQ ID NO: 1561346
acauaaagagcuugaaguu

SEQ ID NO: 1664762 - RNA, 19 nt, Artificial Sequence
  Description of Artificial Sequence: Synthetic oligonucleotide
  Antisense strand to SEQ ID NO: 1664761
aacuucaagcucuuuaugu

SEQ ID NO: 1664763 - RNA, 19 nt, Artificial Sequence
  Description of Artificial Sequence: Synthetic oligonucleotide
  Sense strand starting at position 704 of SEQ ID NO: 1561346
ugaaguucccuguaacuuc

SEQ ID NO: 1664764 - RNA, 19 nt, Artificial Sequence
  Description of Artificial Sequence: Synthetic oligonucleotide
  Antisense strand to SEQ ID NO: 1664763
gaaguuacagggaacuuca

SEQ ID NO: 1664765 - RNA, 19 nt, Artificial Sequence
  Description of Artificial Sequence: Synthetic oligonucleotide
  Sense strand starting at position 790 of SEQ ID NO: 1561346
acagacauuuauuagucau

SEQ ID NO: 1664766 - RNA, 19 nt, Artificial Sequence
  Description of Artificial Sequence: Synthetic oligonucleotide
  Antisense strand to SEQ ID NO: 1664765
augacuaauaaaugucugu

SEQ ID NO: 1664767 - RNA, 19 nt, Artificial Sequence
  Description of Artificial Sequence: Synthetic oligonucleotide
  Sense strand starting at position 840 of SEQ ID NO: 1561346
aauguuguugcugauagga

SEQ ID NO: 1664768 - RNA, 19 nt, Artificial Sequence
  Description of Artificial Sequence: Synthetic oligonucleotide
  Antisense strand to SEQ ID NO: 1664767
uccuaucagcaacaacauu

SEQ ID NO: 1664769 - RNA, 19 nt, Artificial Sequence
  Description of Artificial Sequence: Synthetic oligonucleotide
  Sense strand starting at position 863 of SEQ ID NO: 1561346
uuagaugaucaaggccaga

SEQ ID NO: 1664770 - RNA, 19 nt, Artificial Sequence
  Description of Artificial Sequence: Synthetic oligonucleotide
  Antisense strand to SEQ ID NO: 1664769
ucuggccuugaucaucuaa

SEQ ID NO: 1664771 - RNA, 19 nt, Artificial Sequence
  Description of Artificial Sequence: Synthetic oligonucleotide
  Sense strand starting at position 1031 of SEQ ID NO: 1561346
cuugaauauguugauaugu

SEQ ID NO: 1664772 - RNA, 19 nt, Artificial Sequence
  Description of Artificial Sequence: Synthetic oligonucleotide
  Antisense strand to SEQ ID NO: 1664771
acauaucaacauauucaag

SEQ ID NO: 1664773 - RNA, 19 nt, Artificial Sequence
  Description of Artificial Sequence: Synthetic oligonucleotide
  Sense strand starting at position 1082 of SEQ ID NO: 1561346
ggauacuucuaucuuugua

SEQ ID NO: 1664774 - RNA, 19 nt, Artificial Sequence
  Description of Artificial Sequence: Synthetic oligonucleotide
  Antisense strand to SEQ ID NO: 1664773
uacaaagauagaaguaucc

SEQ ID NO: 1664775 - RNA, 19 nt, Artificial Sequence
  Description of Artificial Sequence: Synthetic oligonucleotide
  Sense strand starting at position 1248 of SEQ ID NO: 1561346
ccgucugcgcuauuggaaa

SEQ ID NO: 1664776 - RNA, 19 nt, Artificial Sequence
  Description of Artificial Sequence: Synthetic oligonucleotide
  Antisense strand to SEQ ID NO: 1664775
uuuccaauagcgcagacgg

SEQ ID NO: 1664777 - RNA, 19 nt, Artificial Sequence
  Description of Artificial Sequence: Synthetic oligonucleotide
  Sense strand starting at position 1315 of SEQ ID NO: 1561346
accaaaguuucuccaaagu

SEQ ID NO: 1664778 - RNA, 19 nt, Artificial Sequence
  Description of Artificial Sequence: Synthetic oligonucleotide
  Antisense strand to SEQ ID NO: 1664777
acuuuggagaaacuuuggu

SEQ ID NO: 1664779 - RNA, 19 nt, Artificial Sequence
  Description of Artificial Sequence: Synthetic oligonucleotide
  Sense strand starting at position 1578 of SEQ ID NO: 1561346
agagguuacuaccucacaa

SEQ ID NO: 1664780 - RNA, 19 nt, Artificial Sequence
  Description of Artificial Sequence: Synthetic oligonucleotide
  Antisense strand to SEQ ID NO: 1664779
uugugagguaguaaccucu

SEQ ID NO: 1664781 - RNA, 19 nt, Artificial Sequence
  Description of Artificial Sequence: Synthetic oligonucleotide
  Sense strand starting at position 1623 of SEQ ID NO: 1561346
ggaaccaguuucucacuaa

SEQ ID NO: 1664782 - RNA, 19 nt, Artificial Sequence
  Description of Artificial Sequence: Synthetic oligonucleotide
  Antisense strand to SEQ ID NO: 1664781
uuagugagaaacugguucc

SEQ ID NO: 1664783 - RNA, 19 nt, Artificial Sequence
  Description of Artificial Sequence: Synthetic oligonucleotide
  Sense strand starting at position 2154 of SEQ ID NO: 1561346
uuuacucuaucccugggau

SEQ ID NO: 1664784 - RNA, 19 nt, Artificial Sequence
  Description of Artificial Sequence: Synthetic oligonucleotide
  Antisense strand to SEQ ID NO: 1664783
aucccagggauagaguaaa

SEQ ID NO: 1664785 - RNA, 19 nt, Artificial Sequence
  Description of Artificial Sequence: Synthetic oligonucleotide
  Sense strand starting at position 2155 of SEQ ID NO: 1561346
uuacucuaucccugggauu

SEQ ID NO: 1664786 - RNA, 19 nt, Artificial Sequence
  Description of Artificial Sequence: Synthetic oligonucleotide
  Antisense strand to SEQ ID NO: 1664785
aaucccagggauagaguaa

SEQ ID NO: 1664787 - RNA, 19 nt, Artificial Sequence
  Description of Artificial Sequence: Synthetic oligonucleotide
  Sense strand starting at position 2173 of SEQ ID NO: 1561346
uggguagugguguaacauc

SEQ ID NO: 1664788 - RNA, 19 nt, Artificial Sequence
  Description of Artificial Sequence: Synthetic oligonucleotide
  Antisense strand to SEQ ID NO: 1664787
gauguuacaccacuaccca

SEQ ID NO: 1664789 - RNA, 19 nt, Artificial Sequence
  Description of Artificial Sequence: Synthetic oligonucleotide
  Sense strand starting at position 2181 of SEQ ID NO: 1561346
gguguaacaucagcuuaaa

SEQ ID NO: 1664790 - RNA, 19 nt, Artificial Sequence
  Description of Artificial Sequence: Synthetic oligonucleotide
  Antisense strand to SEQ ID NO: 1664789
uuuaagcugauguuacacc

SEQ ID NO: 1664791 - RNA, 19 nt, Artificial Sequence
  Description of Artificial Sequence: Synthetic oligonucleotide
  Sense strand starting at position 2279 of SEQ ID NO: 1561346
gaaugaggguaaucccuuu

SEQ ID NO: 1664792 - RNA, 19 nt, Artificial Sequence
  Description of Artificial Sequence: Synthetic oligonucleotide
  Antisense strand to SEQ ID NO: 1664791
aaagggauuacccucauuc

SEQ ID NO: 1664793 - RNA, 19 nt, Artificial Sequence
  Description of Artificial Sequence: Synthetic oligonucleotide
  Sense strand starting at position 2510 of SEQ ID NO: 1561346
ggagguugagacugaguau

SEQ ID NO: 1664794 - RNA, 19 nt, Artificial Sequence
  Description of Artificial Sequence: Synthetic oligonucleotide
  Antisense strand to SEQ ID NO: 1664793
auacucagucucaaccucc

SEQ ID NO: 1664795 - RNA, 19 nt, Artificial Sequence
  Description of Artificial Sequence: Synthetic oligonucleotide
  Sense strand starting at position 2513 of SEQ ID NO: 1561346
gguugagacugaguauuaa

SEQ ID NO: 1664796 - RNA, 19 nt, Artificial Sequence
  Description of Artificial Sequence: Synthetic oligonucleotide
  Antisense strand to SEQ ID NO: 1664795
uuaauacucagucucaacc

SEQ ID NO: 1664797 - RNA, 19 nt, Artificial Sequence
  Description of Artificial Sequence: Synthetic oligonucleotide
  Sense strand starting at position 2561 of SEQ ID NO: 1561346
gcgguugugaaauuguguu

SEQ ID NO: 1664798 - RNA, 19 nt, Artificial Sequence
  Description of Artificial Sequence: Synthetic oligonucleotide
  Antisense strand to SEQ ID NO: 1664797
aacacaauuucacaaccgc

SEQ ID NO: 1664799 - RNA, 19 nt, Artificial Sequence
  Description of Artificial Sequence: Synthetic oligonucleotide
  Sense strand starting at position 2671 of SEQ ID NO: 1561346
ccgugagucccuguguuag

SEQ ID NO: 1664800 - RNA, 19 nt, Artificial Sequence
  Description of Artificial Sequence: Synthetic oligonucleotide
  Antisense strand to SEQ ID NO: 1664799
cuaacacagggacucacgg

SEQ ID NO: 1664801 - RNA, 19 nt, Artificial Sequence
  Description of Artificial Sequence: Synthetic oligonucleotide
  Sense strand starting at position 2766 of SEQ ID NO: 1561346
gauuguaacucugugacca

SEQ ID NO: 1664802 - RNA, 19 nt, Artificial Sequence
  Description of Artificial Sequence: Synthetic oligonucleotide
  Antisense strand to SEQ ID NO: 1664801
uggucacagaguuacaauc

SEQ ID NO: 1664803 - RNA, 19 nt, Artificial Sequence
  Description of Artificial Sequence: Synthetic oligonucleotide
  Sense strand starting at position 2767 of SEQ ID NO: 1561346
auuguaacucugugaccau

SEQ ID NO: 1664804 - RNA, 19 nt, Artificial Sequence
  Description of Artificial Sequence: Synthetic oligonucleotide
  Antisense strand to SEQ ID NO: 1664803
auggucacagaguuacaau

SEQ ID NO: 1664805 - RNA, 19 nt, Artificial Sequence
  Description of Artificial Sequence: Synthetic oligonucleotide
  Sense strand starting at position 2770 of SEQ ID NO: 1561346
guaacucugugaccauaug

SEQ ID NO: 1664806 - RNA, 19 nt, Artificial Sequence
  Description of Artificial Sequence: Synthetic oligonucleotide
  Antisense strand to SEQ ID NO: 1664805
cauauggucacagaguuac

SEQ ID NO: 1664807 - RNA, 19 nt, Artificial Sequence
  Description of Artificial Sequence: Synthetic oligonucleotide
  Sense strand starting at position 2825 of SEQ ID NO: 1561346
uguaguugugacucugugu

SEQ ID NO: 1664808 - RNA, 19 nt, Artificial Sequence
  Description of Artificial Sequence: Synthetic oligonucleotide
  Antisense strand to SEQ ID NO: 1664807
acacagagucacaacuaca

SEQ ID NO: 1664809 - RNA, 19 nt, Artificial Sequence
  Description of Artificial Sequence: Synthetic oligonucleotide
  Sense strand starting at position 2869 of SEQ ID NO: 1561346
gugcuugugacuuugugua

SEQ ID NO: 1664810 - RNA, 19 nt, Artificial Sequence
  Description of Artificial Sequence: Synthetic oligonucleotide
  Antisense strand to SEQ ID NO: 1664809
uacacaaagucacaagcac

SEQ ID NO: 1664811 - RNA, 19 nt, Artificial Sequence
  Description of Artificial Sequence: Synthetic oligonucleotide
  Sense strand starting at position 2946 of SEQ ID NO: 1561346
ugugucuuugaccaaaugu

SEQ ID NO: 1664812 - RNA, 19 nt, Artificial Sequence
  Description of Artificial Sequence: Synthetic oligonucleotide
  Antisense strand to SEQ ID NO: 1664811
acauuuggucaaagacaca

SEQ ID NO: 1664813 - RNA, 19 nt, Artificial Sequence
  Description of Artificial Sequence: Synthetic oligonucleotide
  Sense strand starting at position 3024 of SEQ ID NO: 1561346
uuucuaugacacugaguuu

SEQ ID NO: 1664814 - RNA, 19 nt, Artificial Sequence
  Description of Artificial Sequence: Synthetic oligonucleotide
  Antisense strand to SEQ ID NO: 1664813
aaacucagugucauagaaa

SEQ ID NO: 1664815 - RNA, 19 nt, Artificial Sequence
  Description of Artificial Sequence: Synthetic oligonucleotide
  Sense strand starting at position 3193 of SEQ ID NO: 1561346
ggaaauaacgguugugaua

SEQ ID NO: 1664816 - RNA, 19 nt, Artificial Sequence
  Description of Artificial Sequence: Synthetic oligonucleotide
  Antisense strand to SEQ ID NO: 1664815
uaucacaaccguuauuucc

SEQ ID NO: 1664817 - RNA, 19 nt, Artificial Sequence
  Description of Artificial Sequence: Synthetic oligonucleotide
  Sense strand starting at position 3633 of SEQ ID NO: 1561346
cuggaaucuucuguuacuc

SEQ ID NO: 1664818 - RNA, 19 nt, Artificial Sequence
  Description of Artificial Sequence: Synthetic oligonucleotide
  Antisense strand to SEQ ID NO: 1664817
gaguaacagaagauuccag

SEQ ID NO: 1664819 - RNA, 19 nt, Artificial Sequence
  Description of Artificial Sequence: Synthetic oligonucleotide
  Sense strand starting at position 3641 of SEQ ID NO: 1561346
uucuguuacucuuuggaaa

SEQ ID NO: 1664820 - RNA, 19 nt, Artificial Sequence
  Description of Artificial Sequence: Synthetic oligonucleotide
  Antisense strand to SEQ ID NO: 1664819
uuuccaaagaguaacagaa

SEQ ID NO: 1664821 - RNA, 19 nt, Artificial Sequence
  Description of Artificial Sequence: Synthetic oligonucleotide
  Sense strand starting at position 3797 of SEQ ID NO: 1561346
auugaaauguaucucaugu

SEQ ID NO: 1664822 - RNA, 19 nt, Artificial Sequence
  Description of Artificial Sequence: Synthetic oligonucleotide
  Antisense strand to SEQ ID NO: 1664821
acaugagauacauuucaau

SEQ ID NO: 1664823 - RNA, 19 nt, Artificial Sequence
  Description of Artificial Sequence: Synthetic oligonucleotide
  Sense strand starting at position 33 of SEQ ID NO: 1561347
agaaguuccuagcuccaaa

SEQ ID NO: 1664824 - RNA, 19 nt, Artificial Sequence
  Description of Artificial Sequence: Synthetic oligonucleotide
  Antisense strand to SEQ ID NO: 1664823
uuuggagcuaggaacuucu

SEQ ID NO: 1664825 - RNA, 19 nt, Artificial Sequence
  Description of Artificial Sequence: Synthetic oligonucleotide
  Sense strand starting at position 387 of SEQ ID NO: 1561347
aaucuaaugcgaugaaguu

SEQ ID NO: 1664826 - RNA, 19 nt, Artificial Sequence
  Description of Artificial Sequence: Synthetic oligonucleotide
  Antisense strand to SEQ ID NO: 1664825
aacuucaucgcauuagauu

SEQ ID NO: 1664827 - RNA, 19 nt, Artificial Sequence
  Description of Artificial Sequence: Synthetic oligonucleotide
  Sense strand starting at position 388 of SEQ ID NO: 1561347
aucuaaugcgaugaaguua

SEQ ID NO: 1664828 - RNA, 19 nt, Artificial Sequence
  Description of Artificial Sequence: Synthetic oligonucleotide
  Antisense strand to SEQ ID NO: 1664827
uaacuucaucgcauuagau

SEQ ID NO: 1664829 - RNA, 19 nt, Artificial Sequence
  Description of Artificial Sequence: Synthetic oligonucleotide
  Sense strand starting at position 962 of SEQ ID NO: 1561347
gacagaacuugucucugac

SEQ ID NO: 1664830 - RNA, 19 nt, Artificial Sequence
  Description of Artificial Sequence: Synthetic oligonucleotide
  Antisense strand to SEQ ID NO: 1664829
gucagagacaaguucuguc

SEQ ID NO: 1664831 - RNA, 19 nt, Artificial Sequence
  Description of Artificial Sequence: Synthetic oligonucleotide
  Sense strand starting at position 1029 of SEQ ID NO: 1561347
ggcuguagcgaugagagua

SEQ ID NO: 1664832 - RNA, 19 nt, Artificial Sequence
  Description of Artificial Sequence: Synthetic oligonucleotide
  Antisense strand to SEQ ID NO: 1664831
uacucucaucgcuacagcc

SEQ ID NO: 1664833 - RNA, 19 nt, Artificial Sequence
  Description of Artificial Sequence: Synthetic oligonucleotide
  Sense strand starting at position 1051 of SEQ ID NO: 1561347
gcaucugacuggccacaau

SEQ ID NO: 1664834 - RNA, 19 nt, Artificial Sequence
  Description of Artificial Sequence: Synthetic oligonucleotide
  Antisense strand to SEQ ID NO: 1664833
auuguggccagucagaugc

SEQ ID NO: 1664835 - RNA, 19 nt, Artificial Sequence
  Description of Artificial Sequence: Synthetic oligonucleotide
  Sense strand starting at position 1063 of SEQ ID NO: 1561347
ccacaaugucugcaguagu

SEQ ID NO: 1664836 - RNA, 19 nt, Artificial Sequence
  Description of Artificial Sequence: Synthetic oligonucleotide
  Antisense strand to SEQ ID NO: 1664835
acuacugcagacauugugg

SEQ ID NO: 1664837 - RNA, 19 nt, Artificial Sequence
  Description of Artificial Sequence: Synthetic oligonucleotide
  Sense strand starting at position 1279 of SEQ ID NO: 1561347
uggaaugagaccuggucca

SEQ ID NO: 1664838 - RNA, 19 nt, Artificial Sequence
  Description of Artificial Sequence: Synthetic oligonucleotide
  Antisense strand to SEQ ID NO: 1664837
uggaccaggucucauucca

SEQ ID NO: 1664839 - RNA, 19 nt, Artificial Sequence
  Description of Artificial Sequence: Synthetic oligonucleotide
  Sense strand starting at position 1405 of SEQ ID NO: 1561347
gguauaaauuaaguggcaa

SEQ ID NO: 1664840 - RNA, 19 nt, Artificial Sequence
  Description of Artificial Sequence: Synthetic oligonucleotide
  Antisense strand to SEQ ID NO: 1664839
uugccacuuaauuuauacc

SEQ ID NO: 1664841 - RNA, 19 nt, Artificial Sequence
  Description of Artificial Sequence: Synthetic oligonucleotide
  Sense strand starting at position 1449 of SEQ ID NO: 1561347
gacgacugcgaagacaaau

SEQ ID NO: 1664842 - RNA, 19 nt, Artificial Sequence
  Description of Artificial Sequence: Synthetic oligonucleotide
  Antisense strand to SEQ ID NO: 1664841
auuugucuucgcagucguc

SEQ ID NO: 1664843 - RNA, 19 nt, Artificial Sequence
  Description of Artificial Sequence: Synthetic oligonucleotide
  Sense strand starting at position 2040 of SEQ ID NO: 1561347
cggcgugagccgucggaaa

SEQ ID NO: 1664844 - RNA, 19 nt, Artificial Sequence
  Description of Artificial Sequence: Synthetic oligonucleotide
  Antisense strand to SEQ ID NO: 1664843
uuuccgacggcucacgccg

SEQ ID NO: 1664845 - RNA, 19 nt, Artificial Sequence
  Description of Artificial Sequence: Synthetic oligonucleotide
  Sense strand starting at position 2455 of SEQ ID NO: 1561347
gccgaaugaucaucuggaa

SEQ ID NO: 1664846 - RNA, 19 nt, Artificial Sequence
  Description of Artificial Sequence: Synthetic oligonucleotide
  Antisense strand to SEQ ID NO: 1664845
uuccagaugaucauucggc

SEQ ID NO: 1664847 - RNA, 19 nt, Artificial Sequence
  Description of Artificial Sequence: Synthetic oligonucleotide
  Sense strand starting at position 2543 of SEQ ID NO: 1561347
acgugaugcagggagucau

SEQ ID NO: 1664848 - RNA, 19 nt, Artificial Sequence
  Description of Artificial Sequence: Synthetic oligonucleotide
  Antisense strand to SEQ ID NO: 1664847
augacucccugcaucacgu

SEQ ID NO: 1664849 - RNA, 19 nt, Artificial Sequence
  Description of Artificial Sequence: Synthetic oligonucleotide
  Sense strand starting at position 2547 of SEQ ID NO: 1561347
gaugcagggagucauguau

SEQ ID NO: 1664850 - RNA, 19 nt, Artificial Sequence
  Description of Artificial Sequence: Synthetic oligonucleotide
  Antisense strand to SEQ ID NO: 1664849
auacaugacucccugcauc

SEQ ID NO: 1664851 - RNA, 19 nt, Artificial Sequence
  Description of Artificial Sequence: Synthetic oligonucleotide
  Sense strand starting at position 2643 of SEQ ID NO: 1561347
caggaugguuaguuugaaa

SEQ ID NO: 1664852 - RNA, 19 nt, Artificial Sequence
  Description of Artificial Sequence: Synthetic oligonucleotide
  Antisense strand to SEQ ID NO: 1664851
uuucaaacuaaccauccug

SEQ ID NO: 1664853 - RNA, 19 nt, Artificial Sequence
  Description of Artificial Sequence: Synthetic oligonucleotide
  Sense strand starting at position 2650 of SEQ ID NO: 1561347
guuaguuugaaaugucuac

SEQ ID NO: 1664854 - RNA, 19 nt, Artificial Sequence
  Description of Artificial Sequence: Synthetic oligonucleotide
  Antisense strand to SEQ ID NO: 1664853
guagacauuucaaacuaac

SEQ ID NO: 1664855 - RNA, 19 nt, Artificial Sequence
  Description of Artificial Sequence: Synthetic oligonucleotide
  Sense strand starting at position 2694 of SEQ ID NO: 1561347
ggcaauucgacuuacgacu

SEQ ID NO: 1664856 - RNA, 19 nt, Artificial Sequence
  Description of Artificial Sequence: Synthetic oligonucleotide
  Antisense strand to SEQ ID NO: 1664855
agucguaagucgaauugcc

SEQ ID NO: 1664857 - RNA, 19 nt, Artificial Sequence
  Description of Artificial Sequence: Synthetic oligonucleotide
  Sense strand starting at position 2700 of SEQ ID NO: 1561347
ucgacuuacgacugaaugu

SEQ ID NO: 1664858 - RNA, 19 nt, Artificial Sequence
  Description of Artificial Sequence: Synthetic oligonucleotide
  Antisense strand to SEQ ID NO: 1664857
acauucagucguaagucga

SEQ ID NO: 1664859 - RNA, 19 nt, Artificial Sequence
  Description of Artificial Sequence: Synthetic oligonucleotide
  Sense strand starting at position 2701 of SEQ ID NO: 1561347
cgacuuacgacugaauguu

SEQ ID NO: 1664860 - RNA, 19 nt, Artificial Sequence
  Description of Artificial Sequence: Synthetic oligonucleotide
  Antisense strand to SEQ ID NO: 1664859
aacauucagucguaagucg

SEQ ID NO: 1664861 - RNA, 19 nt, Artificial Sequence
  Description of Artificial Sequence: Synthetic oligonucleotide
  Sense strand starting at position 2725 of SEQ ID NO: 1561347
aagguuugagcaugaauau

SEQ ID NO: 1664862 - RNA, 19 nt, Artificial Sequence
  Description of Artificial Sequence: Synthetic oligonucleotide
  Antisense strand to SEQ ID NO: 1664861
auauucaugcucaaaccuu

SEQ ID NO: 1664863 - RNA, 19 nt, Artificial Sequence
  Description of Artificial Sequence: Synthetic oligonucleotide
  Sense strand starting at position 2742 of SEQ ID NO: 1561347
auaugaauuuaggaguuac

SEQ ID NO: 1664864 - RNA, 19 nt, Artificial Sequence
  Description of Artificial Sequence: Synthetic oligonucleotide
  Antisense strand to SEQ ID NO: 1664863
guaacuccuaaauucauau

SEQ ID NO: 1664865 - RNA, 19 nt, Artificial Sequence
  Description of Artificial Sequence: Synthetic oligonucleotide
  Sense strand starting at position 2756 of SEQ ID NO: 1561347
guuaccuuacacuguuauu

SEQ ID NO: 1664866 - RNA, 19 nt, Artificial Sequence
  Description of Artificial Sequence: Synthetic oligonucleotide
  Antisense strand to SEQ ID NO: 1664865
aauaacaguguaagguaac

SEQ ID NO: 1664867 - RNA, 19 nt, Artificial Sequence
  Description of Artificial Sequence: Synthetic oligonucleotide
  Sense strand starting at position 2780 of SEQ ID NO: 1561347
ucaugauauugagugagac

SEQ ID NO: 1664868 - RNA, 19 nt, Artificial Sequence
  Description of Artificial Sequence: Synthetic oligonucleotide
  Antisense strand to SEQ ID NO: 1664867
gucucacucaauaucauga

SEQ ID NO: 1664869 - RNA, 19 nt, Artificial Sequence
  Description of Artificial Sequence: Synthetic oligonucleotide
  Sense strand starting at position 2802 of SEQ ID NO: 1561347
caaggcaaugcauguagau

SEQ ID NO: 1664870 - RNA, 19 nt, Artificial Sequence
  Description of Artificial Sequence: Synthetic oligonucleotide
  Antisense strand to SEQ ID NO: 1664869
aucuacaugcauugccuug

SEQ ID NO: 1664871 - RNA, 19 nt, Artificial Sequence
  Description of Artificial Sequence: Synthetic oligonucleotide
  Sense strand starting at position 2864 of SEQ ID NO: 1561347
aucauuaaaugguugauga

SEQ ID NO: 1664872 - RNA, 19 nt, Artificial Sequence
  Description of Artificial Sequence: Synthetic oligonucleotide
  Antisense strand to SEQ ID NO: 1664871
ucaucaaccauuuaaugau

SEQ ID NO: 1664873 - RNA, 19 nt, Artificial Sequence
  Description of Artificial Sequence: Synthetic oligonucleotide
  Sense strand starting at position 2880 of SEQ ID NO: 1561347
ugacaauauuaccagaaag

SEQ ID NO: 1664874 - RNA, 19 nt, Artificial Sequence
  Description of Artificial Sequence: Synthetic oligonucleotide
  Antisense strand to SEQ ID NO: 1664873
cuuucugguaauauuguca

SEQ ID NO: 1664875 - RNA, 19 nt, Artificial Sequence
  Description of Artificial Sequence: Synthetic oligonucleotide
  Sense strand starting at position 2947 of SEQ ID NO: 1561347
ucagcaagacaaugaguau

SEQ ID NO: 1664876 - RNA, 19 nt, Artificial Sequence
  Description of Artificial Sequence: Synthetic oligonucleotide
  Antisense strand to SEQ ID NO: 1664875
auacucauugucuugcuga

SEQ ID NO: 1664877 - RNA, 19 nt, Artificial Sequence
  Description of Artificial Sequence: Synthetic oligonucleotide
  Sense strand starting at position 2950 of SEQ ID NO: 1561347
gcaagacaaugaguauugu

SEQ ID NO: 1664878 - RNA, 19 nt, Artificial Sequence
  Description of Artificial Sequence: Synthetic oligonucleotide
  Antisense strand to SEQ ID NO: 1664877
acaauacucauugucuugc

SEQ ID NO: 1664879 - RNA, 19 nt, Artificial Sequence
  Description of Artificial Sequence: Synthetic oligonucleotide
  Sense strand starting at position 2960 of SEQ ID NO: 1561347
gaguauugucagggaugaa

SEQ ID NO: 1664880 - RNA, 19 nt, Artificial Sequence
  Description of Artificial Sequence: Synthetic oligonucleotide
  Antisense strand to SEQ ID NO: 1664879
uucaucccugacaauacuc

SEQ ID NO: 1664881 - RNA, 19 nt, Artificial Sequence
  Description of Artificial Sequence: Synthetic oligonucleotide
  Sense strand starting at position 3070 of SEQ ID NO: 1561347
gaagaaguguaacuauguu

SEQ ID NO: 1664882 - RNA, 19 nt, Artificial Sequence
  Description of Artificial Sequence: Synthetic oligonucleotide
  Antisense strand to SEQ ID NO: 1664881
aacauaguuacacuucuuc

SEQ ID NO: 1664883 - RNA, 19 nt, Artificial Sequence
  Description of Artificial Sequence: Synthetic oligonucleotide
  Sense strand starting at position 3077 of SEQ ID NO: 1561347
uguaacuauguuugagaaa

SEQ ID NO: 1664884 - RNA, 19 nt, Artificial Sequence
  Description of Artificial Sequence: Synthetic oligonucleotide
  Antisense strand to SEQ ID NO: 1664883
uuucucaaacauaguuaca

SEQ ID NO: 1664885 - RNA, 19 nt, Artificial Sequence
  Description of Artificial Sequence: Synthetic oligonucleotide
  Sense strand starting at position 3156 of SEQ ID NO: 1561347
ggcaaucaucauggguaag

SEQ ID NO: 1664886 - RNA, 19 nt, Artificial Sequence
  Description of Artificial Sequence: Synthetic oligonucleotide
  Antisense strand to SEQ ID NO: 1664885
cuuacccaugaugauugcc

SEQ ID NO: 1664887 - RNA, 19 nt, Artificial Sequence
  Description of Artificial Sequence: Synthetic oligonucleotide
  Sense strand starting at position 3201 of SEQ ID NO: 1561347
gugguaauccaguaaguuu

SEQ ID NO: 1664888 - RNA, 19 nt, Artificial Sequence
  Description of Artificial Sequence: Synthetic oligonucleotide
  Antisense strand to SEQ ID NO: 1664887
aaacuuacuggauuaccac

SEQ ID NO: 1664889 - RNA, 19 nt, Artificial Sequence
  Description of Artificial Sequence: Synthetic oligonucleotide
  Sense strand starting at position 3315 of SEQ ID NO: 1561347
gaggcucaaugucuauaau

SEQ ID NO: 1664890 - RNA, 19 nt, Artificial Sequence
  Description of Artificial Sequence: Synthetic oligonucleotide
  Antisense strand to SEQ ID NO: 1664889
auuauagacauugagccuc

SEQ ID NO: 1664891 - RNA, 19 nt, Artificial Sequence
  Description of Artificial Sequence: Synthetic oligonucleotide
  Sense strand starting at position 3318 of SEQ ID NO: 1561347
gcucaaugucuauaaugug

SEQ ID NO: 1664892 - RNA, 19 nt, Artificial Sequence
  Description of Artificial Sequence: Synthetic oligonucleotide
  Antisense strand to SEQ ID NO: 1664891
cacauuauagacauugagc

SEQ ID NO: 1664893 - RNA, 19 nt, Artificial Sequence
  Description of Artificial Sequence: Synthetic oligonucleotide
  Sense strand starting at position 3323 of SEQ ID NO: 1561347
augucuauaauguguugau

SEQ ID NO: 1664894 - RNA, 19 nt, Artificial Sequence
  Description of Artificial Sequence: Synthetic oligonucleotide
  Antisense strand to SEQ ID NO: 1664893
aucaacacauuauagacau

SEQ ID NO: 1664895 - RNA, 19 nt, Artificial Sequence
  Description of Artificial Sequence: Synthetic oligonucleotide
  Sense strand starting at position 3428 of SEQ ID NO: 1561347
ggaaucuggacgugaucuu

SEQ ID NO: 1664896 - RNA, 19 nt, Artificial Sequence
  Description of Artificial Sequence: Synthetic oligonucleotide
  Antisense strand to SEQ ID NO: 1664895
aagaucacguccagauucc

SEQ ID NO: 1664897 - RNA, 19 nt, Artificial Sequence
  Description of Artificial Sequence: Synthetic oligonucleotide
  Sense strand starting at position 3429 of SEQ ID NO: 1561347
gaaucuggacgugaucuuu

SEQ ID NO: 1664898 - RNA, 19 nt, Artificial Sequence
  Description of Artificial Sequence: Synthetic oligonucleotide
  Antisense strand to SEQ ID NO: 1664897
aaagaucacguccagauuc

SEQ ID NO: 1664899 - RNA, 19 nt, Artificial Sequence
  Description of Artificial Sequence: Synthetic oligonucleotide
  Sense strand starting at position 3483 of SEQ ID NO: 1561347
ggcugcauaccauagauga

SEQ ID NO: 1664900 - RNA, 19 nt, Artificial Sequence
  Description of Artificial Sequence: Synthetic oligonucleotide
  Antisense strand to SEQ ID NO: 1664899
ucaucuaugguaugcagcc

SEQ ID NO: 1664901 - RNA, 19 nt, Artificial Sequence
  Description of Artificial Sequence: Synthetic oligonucleotide
  Sense strand starting at position 3531 of SEQ ID NO: 1561347
uuaaucuaacgcuauaguu

SEQ ID NO: 1664902 - RNA, 19 nt, Artificial Sequence
  Description of Artificial Sequence: Synthetic oligonucleotide
  Antisense strand to SEQ ID NO: 1664901
aacuauagcguuagauuaa

SEQ ID NO: 1664903 - RNA, 19 nt, Artificial Sequence
  Description of Artificial Sequence: Synthetic oligonucleotide
  Sense strand starting at position 487 of SEQ ID NO: 1561348
ucugucaaaccugggagua

SEQ ID NO: 1664904 - RNA, 19 nt, Artificial Sequence
  Description of Artificial Sequence: Synthetic oligonucleotide
  Antisense strand to SEQ ID NO: 1664903
uacucccagguuugacaga

SEQ ID NO: 1664905 - RNA, 19 nt, Artificial Sequence
  Description of Artificial Sequence: Synthetic oligonucleotide
  Sense strand starting at position 488 of SEQ ID NO: 1561348
cugucaaaccugggaguaa

SEQ ID NO: 1664906 - RNA, 19 nt, Artificial Sequence
  Description of Artificial Sequence: Synthetic oligonucleotide
  Antisense strand to SEQ ID NO: 1664905
uuacucccagguuugacag

SEQ ID NO: 1664907 - RNA, 19 nt, Artificial Sequence
  Description of Artificial Sequence: Synthetic oligonucleotide
  Sense strand starting at position 499 of SEQ ID NO: 1561348
gggaguaaucuuugaugca

SEQ ID NO: 1664908 - RNA, 19 nt, Artificial Sequence
  Description of Artificial Sequence: Synthetic oligonucleotide
  Antisense strand to SEQ ID NO: 1664907
ugcaucaaagauuacuccc

SEQ ID NO: 1664909 - RNA, 19 nt, Artificial Sequence
  Description of Artificial Sequence: Synthetic oligonucleotide
  Sense strand starting at position 650 of SEQ ID NO: 1561348
agcauugccuauuccaaag

SEQ ID NO: 1664910 - RNA, 19 nt, Artificial Sequence
  Description of Artificial Sequence: Synthetic oligonucleotide
  Antisense strand to SEQ ID NO: 1664909
cuuuggaauaggcaaugcu

SEQ ID NO: 1664911 - RNA, 19 nt, Artificial Sequence
  Description of Artificial Sequence: Synthetic oligonucleotide
  Sense strand starting at position 729 of SEQ ID NO: 1561348
acacuuauuugcuugguua

SEQ ID NO: 1664912 - RNA, 19 nt, Artificial Sequence
  Description of Artificial Sequence: Synthetic oligonucleotide
  Antisense strand to SEQ ID NO: 1664911
uaaccaagcaaauaagugu

SEQ ID NO: 1664913 - RNA, 19 nt, Artificial Sequence
  Description of Artificial Sequence: Synthetic oligonucleotide
  Sense strand starting at position 731 of SEQ ID NO: 1561348
acuuauuugcuugguuaca

SEQ ID NO: 1664914 - RNA, 19 nt, Artificial Sequence
  Description of Artificial Sequence: Synthetic oligonucleotide
  Antisense strand to SEQ ID NO: 1664913
uguaaccaagcaaauaagu

SEQ ID NO: 1664915 - RNA, 19 nt, Artificial Sequence
  Description of Artificial Sequence: Synthetic oligonucleotide
  Sense strand starting at position 732 of SEQ ID NO: 1561348
cuuauuugcuugguuacau

SEQ ID NO: 1664916 - RNA, 19 nt, Artificial Sequence
  Description of Artificial Sequence: Synthetic oligonucleotide
  Antisense strand to SEQ ID NO: 1664915
auguaaccaagcaaauaag

SEQ ID NO: 1664917 - RNA, 19 nt, Artificial Sequence
  Description of Artificial Sequence: Synthetic oligonucleotide
  Sense strand starting at position 754 of SEQ ID NO: 1561348
agccuccuccacuaguuua

SEQ ID NO: 1664918 - RNA, 19 nt, Artificial Sequence
  Description of Artificial Sequence: Synthetic oligonucleotide
  Antisense strand to SEQ ID NO: 1664917
uaaacuaguggaggaggcu

SEQ ID NO: 1664919 - RNA, 19 nt, Artificial Sequence
  Description of Artificial Sequence: Synthetic oligonucleotide
  Sense strand starting at position 914 of SEQ ID NO: 1561348
auguauaacuuucugaaag

SEQ ID NO: 1664920 - RNA, 19 nt, Artificial Sequence
  Description of Artificial Sequence: Synthetic oligonucleotide
  Antisense strand to SEQ ID NO: 1664919
cuuucagaaaguuauacau

SEQ ID NO: 1664921 - RNA, 19 nt, Artificial Sequence
  Description of Artificial Sequence: Synthetic oligonucleotide
  Sense strand starting at position 1060 of SEQ ID NO: 1561348
aguggagaacuguaccuuu

SEQ ID NO: 1664922 - RNA, 19 nt, Artificial Sequence
  Description of Artificial Sequence: Synthetic oligonucleotide
  Antisense strand to SEQ ID NO: 1664921
aaagguacaguucuccacu

SEQ ID NO: 1664923 - RNA, 19 nt, Artificial Sequence
  Description of Artificial Sequence: Synthetic oligonucleotide
  Sense strand starting at position 1142 of SEQ ID NO: 1561348
aggacaugucuuuauccac

SEQ ID NO: 1664924 - RNA, 19 nt, Artificial Sequence
  Description of Artificial Sequence: Synthetic oligonucleotide
  Antisense strand to SEQ ID NO: 1664923
guggauaaagacauguccu

SEQ ID NO: 1664925 - RNA, 19 nt, Artificial Sequence
  Description of Artificial Sequence: Synthetic oligonucleotide
  Sense strand starting at position 1148 of SEQ ID NO: 1561348
ugucuuuauccacaggaca

SEQ ID NO: 1664926 - RNA, 19 nt, Artificial Sequence
  Description of Artificial Sequence: Synthetic oligonucleotide
  Antisense strand to SEQ ID NO: 1664925
uguccuguggauaaagaca

SEQ ID NO: 1664927 - RNA, 19 nt, Artificial Sequence
  Description of Artificial Sequence: Synthetic oligonucleotide
  Sense strand starting at position 1189 of SEQ ID NO: 1561348
uuaagugucacgccugcaa

SEQ ID NO: 1664928 - RNA, 19 nt, Artificial Sequence
  Description of Artificial Sequence: Synthetic oligonucleotide
  Antisense strand to SEQ ID NO: 1664927
uugcaggcgugacacuuaa

SEQ ID NO: 1664929 - RNA, 19 nt, Artificial Sequence
  Description of Artificial Sequence: Synthetic oligonucleotide
  Sense strand starting at position 1300 of SEQ ID NO: 1561348
aagaauagcugaguauucu

SEQ ID NO: 1664930 - RNA, 19 nt, Artificial Sequence
  Description of Artificial Sequence: Synthetic oligonucleotide
  Antisense strand to SEQ ID NO: 1664929
agaauacucagcuauucuu

SEQ ID NO: 1664931 - RNA, 19 nt, Artificial Sequence
  Description of Artificial Sequence: Synthetic oligonucleotide
  Sense strand starting at position 1301 of SEQ ID NO: 1561348
agaauagcugaguauucuu

SEQ ID NO: 1664932 - RNA, 19 nt, Artificial Sequence
  Description of Artificial Sequence: Synthetic oligonucleotide
  Antisense strand to SEQ ID NO: 1664931
aagaauacucagcuauucu

SEQ ID NO: 1664933 - RNA, 19 nt, Artificial Sequence
  Description of Artificial Sequence: Synthetic oligonucleotide
  Sense strand starting at position 1408 of SEQ ID NO: 1561348
uuauguuucuaccugaaug

SEQ ID NO: 1664934 - RNA, 19 nt, Artificial Sequence
  Description of Artificial Sequence: Synthetic oligonucleotide
  Antisense strand to SEQ ID NO: 1664933
cauucagguagaaacauaa

SEQ ID NO: 1664935 - RNA, 19 nt, Artificial Sequence
  Description of Artificial Sequence: Synthetic oligonucleotide
  Sense strand starting at position 1410 of SEQ ID NO: 1561348
auguuucuaccugaaugua

SEQ ID NO: 1664936 - RNA, 19 nt, Artificial Sequence
  Description of Artificial Sequence: Synthetic oligonucleotide
  Antisense strand to SEQ ID NO: 1664935
uacauucagguagaaacau

SEQ ID NO: 1664937 - RNA, 19 nt, Artificial Sequence
  Description of Artificial Sequence: Synthetic oligonucleotide
  Sense strand starting at position 1420 of SEQ ID NO: 1561348
cugaauguagagugucaaa

SEQ ID NO: 1664938 - RNA, 19 nt, Artificial Sequence
  Description of Artificial Sequence: Synthetic oligonucleotide
  Antisense strand to SEQ ID NO: 1664937
uuugacacucuacauucag

SEQ ID NO: 1664939 - RNA, 19 nt, Artificial Sequence
  Description of Artificial Sequence: Synthetic oligonucleotide
  Sense strand starting at position 1579 of SEQ ID NO: 1561348
cagucaaccugauucgaac

SEQ ID NO: 1664940 - RNA, 19 nt, Artificial Sequence
  Description of Artificial Sequence: Synthetic oligonucleotide
  Antisense strand to SEQ ID NO: 1664939
guucgaaucagguugacug

SEQ ID NO: 1664941 - RNA, 19 nt, Artificial Sequence
  Description of Artificial Sequence: Synthetic oligonucleotide
  Sense strand starting at position 1585 of SEQ ID NO: 1561348
accugauucgaacgacgaa

SEQ ID NO: 1664942 - RNA, 19 nt, Artificial Sequence
  Description of Artificial Sequence: Synthetic oligonucleotide
  Antisense strand to SEQ ID NO: 1664941
uucgucguucgaaucaggu

SEQ ID NO: 1664943 - RNA, 19 nt, Artificial Sequence
  Description of Artificial Sequence: Synthetic oligonucleotide
  Sense strand starting at position 1586 of SEQ ID NO: 1561348
ccugauucgaacgacgaaa

SEQ ID NO: 1664944 - RNA, 19 nt, Artificial Sequence
  Description of Artificial Sequence: Synthetic oligonucleotide
  Antisense strand to SEQ ID NO: 1664943
uuucgucguucgaaucagg

SEQ ID NO: 1664945 - RNA, 19 nt, Artificial Sequence
  Description of Artificial Sequence: Synthetic oligonucleotide
  Sense strand starting at position 1663 of SEQ ID NO: 1561348
ggcaaucaccguguuugca

SEQ ID NO: 1664946 - RNA, 19 nt, Artificial Sequence
  Description of Artificial Sequence: Synthetic oligonucleotide
  Antisense strand to SEQ ID NO: 1664945
ugcaaacacggugauugcc

SEQ ID NO: 1664947 - RNA, 19 nt, Artificial Sequence
  Description of Artificial Sequence: Synthetic oligonucleotide
  Sense strand starting at position 1664 of SEQ ID NO: 1561348
gcaaucaccguguuugcaa

SEQ ID NO: 1664948 - RNA, 19 nt, Artificial Sequence
  Description of Artificial Sequence: Synthetic oligonucleotide
  Antisense strand to SEQ ID NO: 1664947
uugcaaacacggugauugc

SEQ ID NO: 1664949 - RNA, 19 nt, Artificial Sequence
  Description of Artificial Sequence: Synthetic oligonucleotide
  Sense strand starting at position 2087 of SEQ ID NO: 1561348
gagagauucugguuuacuc

SEQ ID NO: 1664950 - RNA, 19 nt, Artificial Sequence
  Description of Artificial Sequence: Synthetic oligonucleotide
  Antisense strand to SEQ ID NO: 1664949
gaguaaaccagaaucucuc

SEQ ID NO: 1664951 - RNA, 19 nt, Artificial Sequence
  Description of Artificial Sequence: Synthetic oligonucleotide
  Sense strand starting at position 2344 of SEQ ID NO: 1561348
ugaugcuuccuuugauaau

SEQ ID NO: 1664952 - RNA, 19 nt, Artificial Sequence
  Description of Artificial Sequence: Synthetic oligonucleotide
  Antisense strand to SEQ ID NO: 1664951
auuaucaaaggaagcauca

SEQ ID NO: 1664953 - RNA, 19 nt, Artificial Sequence
  Description of Artificial Sequence: Synthetic oligonucleotide
  Sense strand starting at position 2693 of SEQ ID NO: 1561348
ucaacuugaggccaauauu

SEQ ID NO: 1664954 - RNA, 19 nt, Artificial Sequence
  Description of Artificial Sequence: Synthetic oligonucleotide
  Antisense strand to SEQ ID NO: 1664953
aauauuggccucaaguuga

SEQ ID NO: 1664955 - RNA, 19 nt, Artificial Sequence
  Description of Artificial Sequence: Synthetic oligonucleotide
  Sense strand starting at position 2836 of SEQ ID NO: 1561348
gagaucuuacagugaguuc

SEQ ID NO: 1664956 - RNA, 19 nt, Artificial Sequence
  Description of Artificial Sequence: Synthetic oligonucleotide
  Antisense strand to SEQ ID NO: 1664955
gaacucacuguaagaucuc

SEQ ID NO: 1664957 - RNA, 19 nt, Artificial Sequence
  Description of Artificial Sequence: Synthetic oligonucleotide
  Sense strand starting at position 2907 of SEQ ID NO: 1561348
ucacuucugcaggagugau

SEQ ID NO: 1664958 - RNA, 19 nt, Artificial Sequence
  Description of Artificial Sequence: Synthetic oligonucleotide
  Antisense strand to SEQ ID NO: 1664957
aucacuccugcagaaguga

SEQ ID NO: 1664959 - RNA, 19 nt, Artificial Sequence
  Description of Artificial Sequence: Synthetic oligonucleotide
  Sense strand starting at position 2922 of SEQ ID NO: 1561348
ugauucuaguuucuccaga

SEQ ID NO: 1664960 - RNA, 19 nt, Artificial Sequence
  Description of Artificial Sequence: Synthetic oligonucleotide
  Antisense strand to SEQ ID NO: 1664959
ucuggagaaacuagaauca

SEQ ID NO: 1664961 - RNA, 19 nt, Artificial Sequence
  Description of Artificial Sequence: Synthetic oligonucleotide
  Sense strand starting at position 2927 of SEQ ID NO: 1561348
cuaguuucuccagaaaucg

SEQ ID NO: 1664962 - RNA, 19 nt, Artificial Sequence
  Description of Artificial Sequence: Synthetic oligonucleotide
  Antisense strand to SEQ ID NO: 1664961
cgauuucuggagaaacuag

SEQ ID NO: 1664963 - RNA, 19 nt, Artificial Sequence
  Description of Artificial Sequence: Synthetic oligonucleotide
  Sense strand starting at position 2968 of SEQ ID NO: 1561348
guggccuuuauggaguuaa

SEQ ID NO: 1664964 - RNA, 19 nt, Artificial Sequence
  Description of Artificial Sequence: Synthetic oligonucleotide
  Antisense strand to SEQ ID NO: 1664963
uuaacuccauaaaggccac

SEQ ID NO: 1664965 - RNA, 19 nt, Artificial Sequence
  Description of Artificial Sequence: Synthetic oligonucleotide
  Sense strand starting at position 3123 of SEQ ID NO: 1561348
ccucucuugcauuaagaag

SEQ ID NO: 1664966 - RNA, 19 nt, Artificial Sequence
  Description of Artificial Sequence: Synthetic oligonucleotide
  Antisense strand to SEQ ID NO: 1664965
cuucuuaaugcaagagagg

SEQ ID NO: 1664967 - RNA, 19 nt, Artificial Sequence
  Description of Artificial Sequence: Synthetic oligonucleotide
  Sense strand starting at position 3221 of SEQ ID NO: 1561348
auacucauggaauguguuu

SEQ ID NO: 1664968 - RNA, 19 nt, Artificial Sequence
  Description of Artificial Sequence: Synthetic oligonucleotide
  Antisense strand to SEQ ID NO: 1664967
aaacacauuccaugaguau

SEQ ID NO: 1664969 - RNA, 19 nt, Artificial Sequence
  Description of Artificial Sequence: Synthetic oligonucleotide
  Sense strand starting at position 3315 of SEQ ID NO: 1561348
uugauaaacuguccuugau

SEQ ID NO: 1664970 - RNA, 19 nt, Artificial Sequence
  Description of Artificial Sequence: Synthetic oligonucleotide
  Antisense strand to SEQ ID NO: 1664969
aucaaggacaguuuaucaa

SEQ ID NO: 1664971 - RNA, 19 nt, Artificial Sequence
  Description of Artificial Sequence: Synthetic oligonucleotide
  Sense strand starting at position 3382 of SEQ ID NO: 1561348
accuguaucugauucuaga

SEQ ID NO: 1664972 - RNA, 19 nt, Artificial Sequence
  Description of Artificial Sequence: Synthetic oligonucleotide
  Antisense strand to SEQ ID NO: 1664971
ucuagaaucagauacaggu

SEQ ID NO: 1664973 - RNA, 19 nt, Artificial Sequence
  Description of Artificial Sequence: Synthetic oligonucleotide
  Sense strand starting at position 3476 of SEQ ID NO: 1561348
uaauaauauuccgugguaa

SEQ ID NO: 1664974 - RNA, 19 nt, Artificial Sequence
  Description of Artificial Sequence: Synthetic oligonucleotide
  Antisense strand to SEQ ID NO: 1664973
uuaccacggaauauuauua

SEQ ID NO: 1664975 - RNA, 19 nt, Artificial Sequence
  Description of Artificial Sequence: Synthetic oligonucleotide
  Sense strand starting at position 3477 of SEQ ID NO: 1561348
aauaauauuccgugguaau

SEQ ID NO: 1664976 - RNA, 19 nt, Artificial Sequence
  Description of Artificial Sequence: Synthetic oligonucleotide
  Antisense strand to SEQ ID NO: 1664975
auuaccacggaauauuauu

SEQ ID NO: 1664977 - RNA, 19 nt, Artificial Sequence
  Description of Artificial Sequence: Synthetic oligonucleotide
  Sense strand starting at position 3478 of SEQ ID NO: 1561348
auaauauuccgugguaaua

SEQ ID NO: 1664978 - RNA, 19 nt, Artificial Sequence
  Description of Artificial Sequence: Synthetic oligonucleotide
  Antisense strand to SEQ ID NO: 1664977
uauuaccacggaauauuau

SEQ ID NO: 1664979 - RNA, 19 nt, Artificial Sequence
  Description of Artificial Sequence: Synthetic oligonucleotide
  Sense strand starting at position 3603 of SEQ ID NO: 1561348
uccugaguucuagggauuc

SEQ ID NO: 1664980 - RNA, 19 nt, Artificial Sequence
  Description of Artificial Sequence: Synthetic oligonucleotide
  Antisense strand to SEQ ID NO: 1664979
gaaucccuagaacucagga

SEQ ID NO: 1664981 - RNA, 19 nt, Artificial Sequence
  Description of Artificial Sequence: Synthetic oligonucleotide
  Sense strand starting at position 3882 of SEQ ID NO: 1561348
caaugauguggcuauuauu

SEQ ID NO: 1664982 - RNA, 19 nt, Artificial Sequence
  Description of Artificial Sequence: Synthetic oligonucleotide
  Antisense strand to SEQ ID NO: 1664981
aauaauagccacaucauug

SEQ ID NO: 1664983 - RNA, 19 nt, Artificial Sequence
  Description of Artificial Sequence: Synthetic oligonucleotide
  Sense strand starting at position 176 of SEQ ID NO: 1561349
aaauucugacuuugggagu

SEQ ID NO: 1664984 - RNA, 19 nt, Artificial Sequence
  Description of Artificial Sequence: Synthetic oligonucleotide
  Antisense strand to SEQ ID NO: 1664983
acucccaaagucagaauuu

SEQ ID NO: 1664985 - RNA, 19 nt, Artificial Sequence
  Description of Artificial Sequence: Synthetic oligonucleotide
  Sense strand starting at position 200 of SEQ ID NO: 1561349
guaugccuccuagggaauu

SEQ ID NO: 1664986 - RNA, 19 nt, Artificial Sequence
  Description of Artificial Sequence: Synthetic oligonucleotide
  Antisense strand to SEQ ID NO: 1664985
aauucccuaggaggcauac

SEQ ID NO: 1664987 - RNA, 19 nt, Artificial Sequence
  Description of Artificial Sequence: Synthetic oligonucleotide
  Sense strand starting at position 210 of SEQ ID NO: 1561349
uagggaauucucugagcug

SEQ ID NO: 1664988 - RNA, 19 nt, Artificial Sequence
  Description of Artificial Sequence: Synthetic oligonucleotide
  Antisense strand to SEQ ID NO: 1664987
cagcucagagaauucccua

SEQ ID NO: 1664989 - RNA, 19 nt, Artificial Sequence
  Description of Artificial Sequence: Synthetic oligonucleotide
  Sense strand starting at position 213 of SEQ ID NO: 1561349
ggaauucucugagcugcac

SEQ ID NO: 1664990 - RNA, 19 nt, Artificial Sequence
  Description of Artificial Sequence: Synthetic oligonucleotide
  Antisense strand to SEQ ID NO: 1664989
gugcagcucagagaauucc

SEQ ID NO: 1664991 - RNA, 19 nt, Artificial Sequence
  Description of Artificial Sequence: Synthetic oligonucleotide
  Sense strand starting at position 355 of SEQ ID NO: 1561349
cuugcuugaugccaauuua

SEQ ID NO: 1664992 - RNA, 19 nt, Artificial Sequence
  Description of Artificial Sequence: Synthetic oligonucleotide
  Antisense strand to SEQ ID NO: 1664991
uaaauuggcaucaagcaag

SEQ ID NO: 1664993 - RNA, 19 nt, Artificial Sequence
  Description of Artificial Sequence: Synthetic oligonucleotide
  Sense strand starting at position 395 of SEQ ID NO: 1561349
gccugaucccugcauagac

SEQ ID NO: 1664994 - RNA, 19 nt, Artificial Sequence
  Description of Artificial Sequence: Synthetic oligonucleotide
  Antisense strand to SEQ ID NO: 1664993
gucuaugcagggaucaggc

SEQ ID NO: 1664995 - RNA, 19 nt, Artificial Sequence
  Description of Artificial Sequence: Synthetic oligonucleotide
  Sense strand starting at position 917 of SEQ ID NO: 1561349
ggugguaucucaccaccau

SEQ ID NO: 1664996 - RNA, 19 nt, Artificial Sequence
  Description of Artificial Sequence: Synthetic oligonucleotide
  Antisense strand to SEQ ID NO: 1664995
augguggugagauaccacc

SEQ ID NO: 1664997 - RNA, 19 nt, Artificial Sequence
  Description of Artificial Sequence: Synthetic oligonucleotide
  Sense strand starting at position 2266 of SEQ ID NO: 1561349
auggguccugccugaaagu

SEQ ID NO: 1664998 - RNA, 19 nt, Artificial Sequence
  Description of Artificial Sequence: Synthetic oligonucleotide
  Antisense strand to SEQ ID NO: 1664997
acuuucaggcaggacccau

SEQ ID NO: 1664999 - RNA, 19 nt, Artificial Sequence
  Description of Artificial Sequence: Synthetic oligonucleotide
  Sense strand starting at position 2296 of SEQ ID NO: 1561349
gggccaaguguccacucaa

SEQ ID NO: 1665000 - RNA, 19 nt, Artificial Sequence
  Description of Artificial Sequence: Synthetic oligonucleotide
  Antisense strand to SEQ ID NO: 1664999
uugaguggacacuuggccc

SEQ ID NO: 1665001 - RNA, 19 nt, Artificial Sequence
  Description of Artificial Sequence: Synthetic oligonucleotide
  Sense strand starting at position 2346 of SEQ ID NO: 1561349
ggaagugugaugggaacgu

SEQ ID NO: 1665002 - RNA, 19 nt, Artificial Sequence
  Description of Artificial Sequence: Synthetic oligonucleotide
  Antisense strand to SEQ ID NO: 1665001
acguucccaucacacuucc

SEQ ID NO: 1665003 - RNA, 19 nt, Artificial Sequence
  Description of Artificial Sequence: Synthetic oligonucleotide
  Sense strand starting at position 2456 of SEQ ID NO: 1561349
acaagugugaugggaauga

SEQ ID NO: 1665004 - RNA, 19 nt, Artificial Sequence
  Description of Artificial Sequence: Synthetic oligonucleotide
  Antisense strand to SEQ ID NO: 1665003
ucauucccaucacacuugu

SEQ ID NO: 1665005 - RNA, 19 nt, Artificial Sequence
  Description of Artificial Sequence: Synthetic oligonucleotide
  Sense strand starting at position 2545 of SEQ ID NO: 1561349
gcaggauccucugccuagu

SEQ ID NO: 1665006 - RNA, 19 nt, Artificial Sequence
  Description of Artificial Sequence: Synthetic oligonucleotide
  Antisense strand to SEQ ID NO: 1665005
acuaggcagaggauccugc

SEQ ID NO: 1665007 - RNA, 19 nt, Artificial Sequence
  Description of Artificial Sequence: Synthetic oligonucleotide
  Sense strand starting at position 2578 of SEQ ID NO: 1561349
caguuugcuccuggaagcu

SEQ ID NO: 1665008 - RNA, 19 nt, Artificial Sequence
  Description of Artificial Sequence: Synthetic oligonucleotide
  Antisense strand to SEQ ID NO: 1665007
agcuuccaggagcaaacug

SEQ ID NO: 1665009 - RNA, 19 nt, Artificial Sequence
  Description of Artificial Sequence: Synthetic oligonucleotide
  Sense strand starting at position 2617 of SEQ ID NO: 1561349
gaggaaaccuaagucugua

SEQ ID NO: 1665010 - RNA, 19 nt, Artificial Sequence
  Description of Artificial Sequence: Synthetic oligonucleotide
  Antisense strand to SEQ ID NO: 1665009
uacagacuuagguuuccuc

SEQ ID NO: 1665011 - RNA, 19 nt, Artificial Sequence
  Description of Artificial Sequence: Synthetic oligonucleotide
  Sense strand starting at position 2844 of SEQ ID NO: 1561349
uguguccucuuucuugaua

SEQ ID NO: 1665012 - RNA, 19 nt, Artificial Sequence
  Description of Artificial Sequence: Synthetic oligonucleotide
  Antisense strand to SEQ ID NO: 1665011
uaucaagaaagaggacaca

SEQ ID NO: 1665013 - RNA, 19 nt, Artificial Sequence
  Description of Artificial Sequence: Synthetic oligonucleotide
  Sense strand starting at position 2845 of SEQ ID NO: 1561349
guguccucuuucuugauau

SEQ ID NO: 1665014 - RNA, 19 nt, Artificial Sequence
  Description of Artificial Sequence: Synthetic oligonucleotide
  Antisense strand to SEQ ID NO: 1665013
auaucaagaaagaggacac

SEQ ID NO: 1665015 - RNA, 19 nt, Artificial Sequence
  Description of Artificial Sequence: Synthetic oligonucleotide
  Sense strand starting at position 2859 of SEQ ID NO: 1561349
gauauuuccuggcaggucu

SEQ ID NO: 1665016 - RNA, 19 nt, Artificial Sequence
  Description of Artificial Sequence: Synthetic oligonucleotide
  Antisense strand to SEQ ID NO: 1665015
agaccugccaggaaauauc

SEQ ID NO: 1665017 - RNA, 19 nt, Artificial Sequence
  Description of Artificial Sequence: Synthetic oligonucleotide
  Sense strand starting at position 2907 of SEQ ID NO: 1561349
guguacacugccugcuaaa

SEQ ID NO: 1665018 - RNA, 19 nt, Artificial Sequence
  Description of Artificial Sequence: Synthetic oligonucleotide
  Antisense strand to SEQ ID NO: 1665017
uuuagcaggcaguguacac

SEQ ID NO: 1665019 - RNA, 19 nt, Artificial Sequence
  Description of Artificial Sequence: Synthetic oligonucleotide
  Sense strand starting at position 2978 of SEQ ID NO: 1561349
ggcuacacauuguuuaauu

SEQ ID NO: 1665020 - RNA, 19 nt, Artificial Sequence
  Description of Artificial Sequence: Synthetic oligonucleotide
  Antisense strand to SEQ ID NO: 1665019
aauuaaacaauguguagcc

SEQ ID NO: 1665021 - RNA, 19 nt, Artificial Sequence
  Description of Artificial Sequence: Synthetic oligonucleotide
  Sense strand starting at position 2989 of SEQ ID NO: 1561349
guuuaauuguugcuguuag

SEQ ID NO: 1665022 - RNA, 19 nt, Artificial Sequence
  Description of Artificial Sequence: Synthetic oligonucleotide
  Antisense strand to SEQ ID NO: 1665021
cuaacagcaacaauuaaac

SEQ ID NO: 1665023 - RNA, 19 nt, Artificial Sequence
  Description of Artificial Sequence: Synthetic oligonucleotide
  Sense strand starting at position 3028 of SEQ ID NO: 1561349
aguauuuacucagagacug

SEQ ID NO: 1665024 - RNA, 19 nt, Artificial Sequence
  Description of Artificial Sequence: Synthetic oligonucleotide
  Antisense strand to SEQ ID NO: 1665023
cagucucugaguaaauacu

SEQ ID NO: 1665025 - RNA, 19 nt, Artificial Sequence
  Description of Artificial Sequence: Synthetic oligonucleotide
  Sense strand starting at position 3036 of SEQ ID NO: 1561349
cucagagacugugcagaua

SEQ ID NO: 1665026 - RNA, 19 nt, Artificial Sequence
  Description of Artificial Sequence: Synthetic oligonucleotide
  Antisense strand to SEQ ID NO: 1665025
uaucugcacagucucugag

SEQ ID NO: 1665027 - RNA, 19 nt, Artificial Sequence
  Description of Artificial Sequence: Synthetic oligonucleotide
  Sense strand starting at position 3188 of SEQ ID NO: 1561349
gcuaguaugacagagcuau

SEQ ID NO: 1665028 - RNA, 19 nt, Artificial Sequence
  Description of Artificial Sequence: Synthetic oligonucleotide
  Antisense strand to SEQ ID NO: 1665027
auagcucugucauacuagc

SEQ ID NO: 1665029 - RNA, 19 nt, Artificial Sequence
  Description of Artificial Sequence: Synthetic oligonucleotide
  Sense strand starting at position 3192 of SEQ ID NO: 1561349
guaugacagagcuauguua

SEQ ID NO: 1665030 - RNA, 19 nt, Artificial Sequence
  Description of Artificial Sequence: Synthetic oligonucleotide
  Antisense strand to SEQ ID NO: 1665029
uaacauagcucugucauac

SEQ ID NO: 1665031 - RNA, 19 nt, Artificial Sequence
  Description of Artificial Sequence: Synthetic oligonucleotide
  Sense strand starting at position 3194 of SEQ ID NO: 1561349
augacagagcuauguuaag

SEQ ID NO: 1665032 - RNA, 19 nt, Artificial Sequence
  Description of Artificial Sequence: Synthetic oligonucleotide
  Antisense strand to SEQ ID NO: 1665031
cuuaacauagcucugucau

SEQ ID NO: 1665033 - RNA, 19 nt, Artificial Sequence
  Description of Artificial Sequence: Synthetic oligonucleotide
  Sense strand starting at position 3200 of SEQ ID NO: 1561349
gagcuauguuaaguaguca

SEQ ID NO: 1665034 - RNA, 19 nt, Artificial Sequence
  Description of Artificial Sequence: Synthetic oligonucleotide
  Antisense strand to SEQ ID NO: 1665033
ugacuacuuaacauagcuc

SEQ ID NO: 1665035 - RNA, 19 nt, Artificial Sequence
  Description of Artificial Sequence: Synthetic oligonucleotide
  Sense strand starting at position 3201 of SEQ ID NO: 1561349
agcuauguuaaguagucau

SEQ ID NO: 1665036 - RNA, 19 nt, Artificial Sequence
  Description of Artificial Sequence: Synthetic oligonucleotide
  Antisense strand to SEQ ID NO: 1665035
augacuacuuaacauagcu

SEQ ID NO: 1665037 - RNA, 19 nt, Artificial Sequence
  Description of Artificial Sequence: Synthetic oligonucleotide
  Sense strand starting at position 3204 of SEQ ID NO: 1561349
uauguuaaguagucauguu

SEQ ID NO: 1665038 - RNA, 19 nt, Artificial Sequence
  Description of Artificial Sequence: Synthetic oligonucleotide
  Antisense strand to SEQ ID NO: 1665037
aacaugacuacuuaacaua

SEQ ID NO: 1665039 - RNA, 19 nt, Artificial Sequence
  Description of Artificial Sequence: Synthetic oligonucleotide
  Sense strand starting at position 3205 of SEQ ID NO: 1561349
auguuaaguagucauguuu

SEQ ID NO: 1665040 - RNA, 19 nt, Artificial Sequence
  Description of Artificial Sequence: Synthetic oligonucleotide
  Antisense strand to SEQ ID NO: 1665039
aaacaugacuacuuaacau

SEQ ID NO: 1665041 - RNA, 19 nt, Artificial Sequence
  Description of Artificial Sequence: Synthetic oligonucleotide
  Sense strand starting at position 3211 of SEQ ID NO: 1561349
aguagucauguuuacuaau

SEQ ID NO: 1665042 - RNA, 19 nt, Artificial Sequence
  Description of Artificial Sequence: Synthetic oligonucleotide
  Antisense strand to SEQ ID NO: 1665041
auuaguaaacaugacuacu

SEQ ID NO: 1665043 - RNA, 19 nt, Artificial Sequence
  Description of Artificial Sequence: Synthetic oligonucleotide
  Sense strand starting at position 3220 of SEQ ID NO: 1561349
guuuacuaauagucuuguu

SEQ ID NO: 1665044 - RNA, 19 nt, Artificial Sequence
  Description of Artificial Sequence: Synthetic oligonucleotide
  Antisense strand to SEQ ID NO: 1665043
aacaagacuauuaguaaac

SEQ ID NO: 1665045 - RNA, 19 nt, Artificial Sequence
  Description of Artificial Sequence: Synthetic oligonucleotide
  Sense strand starting at position 3246 of SEQ ID NO: 1561349
ggauuugaauaggauacgu

SEQ ID NO: 1665046 - RNA, 19 nt, Artificial Sequence
  Description of Artificial Sequence: Synthetic oligonucleotide
  Antisense strand to SEQ ID NO: 1665045
acguauccuauucaaaucc

SEQ ID NO: 1665047 - RNA, 19 nt, Artificial Sequence
  Description of Artificial Sequence: Synthetic oligonucleotide
  Sense strand starting at position 3824 of SEQ ID NO: 1561349
gguggaaauucuucuaaug

SEQ ID NO: 1665048 - RNA, 19 nt, Artificial Sequence
  Description of Artificial Sequence: Synthetic oligonucleotide
  Antisense strand to SEQ ID NO: 1665047
cauuagaagaauuuccacc

SEQ ID NO: 1665049 - RNA, 19 nt, Artificial Sequence
  Description of Artificial Sequence: Synthetic oligonucleotide
  Sense strand starting at position 3826 of SEQ ID NO: 1561349
uggaaauucuucuaaugau

SEQ ID NO: 1665050 - RNA, 19 nt, Artificial Sequence
  Description of Artificial Sequence: Synthetic oligonucleotide
  Antisense strand to SEQ ID NO: 1665049
aucauuagaagaauuucca

SEQ ID NO: 1665051 - RNA, 19 nt, Artificial Sequence
  Description of Artificial Sequence: Synthetic oligonucleotide
  Sense strand starting at position 3847 of SEQ ID NO: 1561349
cuuucuauuuaugugguau

SEQ ID NO: 1665052 - RNA, 19 nt, Artificial Sequence
  Description of Artificial Sequence: Synthetic oligonucleotide
  Antisense strand to SEQ ID NO: 1665051
auaccacauaaauagaaag

SEQ ID NO: 1665053 - RNA, 19 nt, Artificial Sequence
  Description of Artificial Sequence: Synthetic oligonucleotide
  Sense strand starting at position 3849 of SEQ ID NO: 1561349
uucuauuuaugugguauag

SEQ ID NO: 1665054 - RNA, 19 nt, Artificial Sequence
  Description of Artificial Sequence: Synthetic oligonucleotide
  Antisense strand to SEQ ID NO: 1665053
cuauaccacauaaauagaa

SEQ ID NO: 1665055 - RNA, 19 nt, Artificial Sequence
  Description of Artificial Sequence: Synthetic oligonucleotide
  Sense strand starting at position 3851 of SEQ ID NO: 1561349
cuauuuaugugguauagga

SEQ ID NO: 1665056 - RNA, 19 nt, Artificial Sequence
  Description of Artificial Sequence: Synthetic oligonucleotide
  Antisense strand to SEQ ID NO: 1665055
uccuauaccacauaaauag

SEQ ID NO: 1665057 - RNA, 19 nt, Artificial Sequence
  Description of Artificial Sequence: Synthetic oligonucleotide
  Sense strand starting at position 3855 of SEQ ID NO: 1561349
uuaugugguauaggauaaa

SEQ ID NO: 1665058 - RNA, 19 nt, Artificial Sequence
  Description of Artificial Sequence: Synthetic oligonucleotide
  Antisense strand to SEQ ID NO: 1665057
uuuauccuauaccacauaa

SEQ ID NO: 1665059 - RNA, 19 nt, Artificial Sequence
  Description of Artificial Sequence: Synthetic oligonucleotide
  Sense strand starting at position 3937 of SEQ ID NO: 1561349
agagcagugcugcagucau

SEQ ID NO: 1665060 - RNA, 19 nt, Artificial Sequence
  Description of Artificial Sequence: Synthetic oligonucleotide
  Antisense strand to SEQ ID NO: 1665059
augacugcagcacugcucu

SEQ ID NO: 1665061 - RNA, 19 nt, Artificial Sequence
  Description of Artificial Sequence: Synthetic oligonucleotide
  Sense strand starting at position 3945 of SEQ ID NO: 1561349
gcugcagucauggcuuacu

SEQ ID NO: 1665062 - RNA, 19 nt, Artificial Sequence
  Description of Artificial Sequence: Synthetic oligonucleotide
  Antisense strand to SEQ ID NO: 1665061
aguaagccaugacugcagc

SEQ ID NO: 1665063 - RNA, 19 nt, Artificial Sequence
  Description of Artificial Sequence: Synthetic oligonucleotide
  Sense strand starting at position 22 of SEQ ID NO: 1561350
augggauggacuggucuua

SEQ ID NO: 1665064 - RNA, 19 nt, Artificial Sequence
  Description of Artificial Sequence: Synthetic oligonucleotide
  Antisense strand to SEQ ID NO: 1665063
uaagaccaguccaucccau

SEQ ID NO: 1665065 - RNA, 19 nt, Artificial Sequence
  Description of Artificial Sequence: Synthetic oligonucleotide
  Sense strand starting at position 1273 of SEQ ID NO: 1561350
acacgaggguuuggaguaa

SEQ ID NO: 1665066 - RNA, 19 nt, Artificial Sequence
  Description of Artificial Sequence: Synthetic oligonucleotide
  Antisense strand to SEQ ID NO: 1665065
uuacuccaaacccucgugu

SEQ ID NO: 1665067 - RNA, 19 nt, Artificial Sequence
  Description of Artificial Sequence: Synthetic oligonucleotide
  Sense strand starting at position 1679 of SEQ ID NO: 1561350
cgagauaggaaguguauac

SEQ ID NO: 1665068 - RNA, 19 nt, Artificial Sequence
  Description of Artificial Sequence: Synthetic oligonucleotide
  Antisense strand to SEQ ID NO: 1665067
guauacacuuccuaucucg

SEQ ID NO: 1665069 - RNA, 19 nt, Artificial Sequence
  Description of Artificial Sequence: Synthetic oligonucleotide
  Sense strand starting at position 1695 of SEQ ID NO: 1561350
uacauugcccuguagcaga

SEQ ID NO: 1665070 - RNA, 19 nt, Artificial Sequence
  Description of Artificial Sequence: Synthetic oligonucleotide
  Antisense strand to SEQ ID NO: 1665069
ucugcuacagggcaaugua

SEQ ID NO: 1665071 - RNA, 19 nt, Artificial Sequence
  Description of Artificial Sequence: Synthetic oligonucleotide
  Sense strand starting at position 1795 of SEQ ID NO: 1561350
uuugcucugagugaacgaa

SEQ ID NO: 1665072 - RNA, 19 nt, Artificial Sequence
  Description of Artificial Sequence: Synthetic oligonucleotide
  Antisense strand to SEQ ID NO: 1665071
uucguucacucagagcaaa

SEQ ID NO: 1665073 - RNA, 19 nt, Artificial Sequence
  Description of Artificial Sequence: Synthetic oligonucleotide
  Sense strand starting at position 1820 of SEQ ID NO: 1561350
ggagaacuuccaggucuag

SEQ ID NO: 1665074 - RNA, 19 nt, Artificial Sequence
  Description of Artificial Sequence: Synthetic oligonucleotide
  Antisense strand to SEQ ID NO: 1665073
cuagaccuggaaguucucc

SEQ ID NO: 1665075 - RNA, 19 nt, Artificial Sequence
  Description of Artificial Sequence: Synthetic oligonucleotide
  Sense strand starting at position 2170 of SEQ ID NO: 1561350
cuugcauugggccgagauc

SEQ ID NO: 1665076 - RNA, 19 nt, Artificial Sequence
  Description of Artificial Sequence: Synthetic oligonucleotide
  Antisense strand to SEQ ID NO: 1665075
gaucucggcccaaugcaag

SEQ ID NO: 1665077 - RNA, 19 nt, Artificial Sequence
  Description of Artificial Sequence: Synthetic oligonucleotide
  Sense strand starting at position 2172 of SEQ ID NO: 1561350
ugcauugggccgagaucga

SEQ ID NO: 1665078 - RNA, 19 nt, Artificial Sequence
  Description of Artificial Sequence: Synthetic oligonucleotide
  Antisense strand to SEQ ID NO: 1665077
ucgaucucggcccaaugca

SEQ ID NO: 1665079 - RNA, 19 nt, Artificial Sequence
  Description of Artificial Sequence: Synthetic oligonucleotide
  Sense strand starting at position 2952 of SEQ ID NO: 1561350
aucaguccucagggaagau

SEQ ID NO: 1665080 - RNA, 19 nt, Artificial Sequence
  Description of Artificial Sequence: Synthetic oligonucleotide
  Antisense strand to SEQ ID NO: 1665079
aucuucccugaggacugau

SEQ ID NO: 1665081 - RNA, 19 nt, Artificial Sequence
  Description of Artificial Sequence: Synthetic oligonucleotide
  Sense strand starting at position 3005 of SEQ ID NO: 1561350
ccuggcuguacuugguaau

SEQ ID NO: 1665082 - RNA, 19 nt, Artificial Sequence
  Description of Artificial Sequence: Synthetic oligonucleotide
  Antisense strand to SEQ ID NO: 1665081
auuaccaaguacagccagg

SEQ ID NO: 1665083 - RNA, 19 nt, Artificial Sequence
  Description of Artificial Sequence: Synthetic oligonucleotide
  Sense strand starting at position 3008 of SEQ ID NO: 1561350
ggcuguacuugguaaugga

SEQ ID NO: 1665084 - RNA, 19 nt, Artificial Sequence
  Description of Artificial Sequence: Synthetic oligonucleotide
  Antisense strand to SEQ ID NO: 1665083
uccauuaccaaguacagcc

SEQ ID NO: 1665085 - RNA, 19 nt, Artificial Sequence
  Description of Artificial Sequence: Synthetic oligonucleotide
  Sense strand starting at position 3017 of SEQ ID NO: 1561350
ugguaauggaggugacuau

SEQ ID NO: 1665086 - RNA, 19 nt, Artificial Sequence
  Description of Artificial Sequence: Synthetic oligonucleotide
  Antisense strand to SEQ ID NO: 1665085
auagucaccuccauuacca

SEQ ID NO: 1665087 - RNA, 19 nt, Artificial Sequence
  Description of Artificial Sequence: Synthetic oligonucleotide
  Sense strand starting at position 3028 of SEQ ID NO: 1561350
gugacuaucugugucagcu

SEQ ID NO: 1665088 - RNA, 19 nt, Artificial Sequence
  Description of Artificial Sequence: Synthetic oligonucleotide
  Antisense strand to SEQ ID NO: 1665087
agcugacacagauagucac

SEQ ID NO: 1665089 - RNA, 19 nt, Artificial Sequence
  Description of Artificial Sequence: Synthetic oligonucleotide
  Sense strand starting at position 3032 of SEQ ID NO: 1561350
cuaucugugucagcuaguu

SEQ ID NO: 1665090 - RNA, 19 nt, Artificial Sequence
  Description of Artificial Sequence: Synthetic oligonucleotide
  Antisense strand to SEQ ID NO: 1665089
aacuagcugacacagauag

SEQ ID NO: 1665091 - RNA, 19 nt, Artificial Sequence
  Description of Artificial Sequence: Synthetic oligonucleotide
  Sense strand starting at position 3376 of SEQ ID NO: 1561350
gcagcaaauugauugguua

SEQ ID NO: 1665092 - RNA, 19 nt, Artificial Sequence
  Description of Artificial Sequence: Synthetic oligonucleotide
  Antisense strand to SEQ ID NO: 1665091
uaaccaaucaauuugcugc

SEQ ID NO: 1665093 - RNA, 19 nt, Artificial Sequence
  Description of Artificial Sequence: Synthetic oligonucleotide
  Sense strand starting at position 3377 of SEQ ID NO: 1561350
cagcaaauugauugguuau

SEQ ID NO: 1665094 - RNA, 19 nt, Artificial Sequence
  Description of Artificial Sequence: Synthetic oligonucleotide
  Antisense strand to SEQ ID NO: 1665093
auaaccaaucaauuugcug

SEQ ID NO: 1665095 - RNA, 19 nt, Artificial Sequence
  Description of Artificial Sequence: Synthetic oligonucleotide
  Sense strand starting at position 3378 of SEQ ID NO: 1561350
agcaaauugauugguuaug

SEQ ID NO: 1665096 - RNA, 19 nt, Artificial Sequence
  Description of Artificial Sequence: Synthetic oligonucleotide
  Antisense strand to SEQ ID NO: 1665095
cauaaccaaucaauuugcu

SEQ ID NO: 1665097 - RNA, 19 nt, Artificial Sequence
  Description of Artificial Sequence: Synthetic oligonucleotide
  Sense strand starting at position 3380 of SEQ ID NO: 1561350
caaauugauugguuaugga

SEQ ID NO: 1665098 - RNA, 19 nt, Artificial Sequence
  Description of Artificial Sequence: Synthetic oligonucleotide
  Antisense strand to SEQ ID NO: 1665097
uccauaaccaaucaauuug

SEQ ID NO: 1665099 - RNA, 19 nt, Artificial Sequence
  Description of Artificial Sequence: Synthetic oligonucleotide
  Sense strand starting at position 3445 of SEQ ID NO: 1561350
caaugaugccaacagguua

SEQ ID NO: 1665100 - RNA, 19 nt, Artificial Sequence
  Description of Artificial Sequence: Synthetic oligonucleotide
  Antisense strand to SEQ ID NO: 1665099
uaaccuguuggcaucauug

SEQ ID NO: 1665101 - RNA, 19 nt, Artificial Sequence
  Description of Artificial Sequence: Synthetic oligonucleotide
  Sense strand starting at position 3456 of SEQ ID NO: 1561350
acagguuagucuuccuaau

SEQ ID NO: 1665102 - RNA, 19 nt, Artificial Sequence
  Description of Artificial Sequence: Synthetic oligonucleotide
  Antisense strand to SEQ ID NO: 1665101
auuaggaagacuaaccugu

SEQ ID NO: 1665103 - RNA, 19 nt, Artificial Sequence
  Description of Artificial Sequence: Synthetic oligonucleotide
  Sense strand starting at position 3458 of SEQ ID NO: 1561350
agguuagucuuccuaauua

SEQ ID NO: 1665104 - RNA, 19 nt, Artificial Sequence
  Description of Artificial Sequence: Synthetic oligonucleotide
  Antisense strand to SEQ ID NO: 1665103
uaauuaggaagacuaaccu

SEQ ID NO: 1665105 - RNA, 19 nt, Artificial Sequence
  Description of Artificial Sequence: Synthetic oligonucleotide
  Sense strand starting at position 3896 of SEQ ID NO: 1561350
ugaccacguuccucucaaa

SEQ ID NO: 1665106 - RNA, 19 nt, Artificial Sequence
  Description of Artificial Sequence: Synthetic oligonucleotide
  Antisense strand to SEQ ID NO: 1665105
uuugagaggaacgugguca

SEQ ID NO: 1665107 - RNA, 19 nt, Artificial Sequence
  Description of Artificial Sequence: Synthetic oligonucleotide
  Sense strand starting at position 3899 of SEQ ID NO: 1561350
ccacguuccucucaaagcu

SEQ ID NO: 1665108 - RNA, 19 nt, Artificial Sequence
  Description of Artificial Sequence: Synthetic oligonucleotide
  Antisense strand to SEQ ID NO: 1665107
agcuuugagaggaacgugg

SEQ ID NO: 1665109 - RNA, 19 nt, Artificial Sequence
  Description of Artificial Sequence: Synthetic oligonucleotide
  Sense strand starting at position 3925 of SEQ ID NO: 1561350
auuuaaauguccguagcuu

SEQ ID NO: 1665110 - RNA, 19 nt, Artificial Sequence
  Description of Artificial Sequence: Synthetic oligonucleotide
  Antisense strand to SEQ ID NO: 1665109
aagcuacggacauuuaaau

SEQ ID NO: 1665111 - RNA, 19 nt, Artificial Sequence
  Description of Artificial Sequence: Synthetic oligonucleotide
  Sense strand starting at position 3926 of SEQ ID NO: 1561350
uuuaaauguccguagcuuu

SEQ ID NO: 1665112 - RNA, 19 nt, Artificial Sequence
  Description of Artificial Sequence: Synthetic oligonucleotide
  Antisense strand to SEQ ID NO: 1665111
aaagcuacggacauuuaaa

SEQ ID NO: 1665113 - RNA, 19 nt, Artificial Sequence
  Description of Artificial Sequence: Synthetic oligonucleotide
  Sense strand starting at position 3929 of SEQ ID NO: 1561350
aaauguccguagcuuuaaa

SEQ ID NO: 1665114 - RNA, 19 nt, Artificial Sequence
  Description of Artificial Sequence: Synthetic oligonucleotide
  Antisense strand to SEQ ID NO: 1665113
uuuaaagcuacggacauuu

SEQ ID NO: 1665115 - RNA, 19 nt, Artificial Sequence
  Description of Artificial Sequence: Synthetic oligonucleotide
  Sense strand starting at position 256 of SEQ ID NO: 1561351
acaagucaugcuuggaaau

SEQ ID NO: 1665116 - RNA, 19 nt, Artificial Sequence
  Description of Artificial Sequence: Synthetic oligonucleotide
  Antisense strand to SEQ ID NO: 1665115
auuuccaagcaugacuugu

SEQ ID NO: 1665117 - RNA, 19 nt, Artificial Sequence
  Description of Artificial Sequence: Synthetic oligonucleotide
  Sense strand starting at position 257 of SEQ ID NO: 1561351
caagucaugcuuggaaaug

SEQ ID NO: 1665118 - RNA, 19 nt, Artificial Sequence
  Description of Artificial Sequence: Synthetic oligonucleotide
  Antisense strand to SEQ ID NO: 1665117
cauuuccaagcaugacuug

SEQ ID NO: 1665119 - RNA, 19 nt, Artificial Sequence
  Description of Artificial Sequence: Synthetic oligonucleotide
  Sense strand starting at position 267 of SEQ ID NO: 1561351
uuggaaauguuacagauuu

SEQ ID NO: 1665120 - RNA, 19 nt, Artificial Sequence
  Description of Artificial Sequence: Synthetic oligonucleotide
  Antisense strand to SEQ ID NO: 1665119
aaaucuguaacauuuccaa

SEQ ID NO: 1665121 - RNA, 19 nt, Artificial Sequence
  Description of Artificial Sequence: Synthetic oligonucleotide
  Sense strand starting at position 386 of SEQ ID NO: 1561351
agcagacaacauugucauu

SEQ ID NO: 1665122 - RNA, 19 nt, Artificial Sequence
  Description of Artificial Sequence: Synthetic oligonucleotide
  Antisense strand to SEQ ID NO: 1665121
aaugacaauguugucugcu

SEQ ID NO: 1665123 - RNA, 19 nt, Artificial Sequence
  Description of Artificial Sequence: Synthetic oligonucleotide
  Sense strand starting at position 558 of SEQ ID NO: 1561351
ugcacugagcuaugacuau

SEQ ID NO: 1665124 - RNA, 19 nt, Artificial Sequence
  Description of Artificial Sequence: Synthetic oligonucleotide
  Antisense strand to SEQ ID NO: 1665123
auagucauagcucagugca

SEQ ID NO: 1665125 - RNA, 19 nt, Artificial Sequence
  Description of Artificial Sequence: Synthetic oligonucleotide
  Sense strand starting at position 562 of SEQ ID NO: 1561351
cugagcuaugacuauacua

SEQ ID NO: 1665126 - RNA, 19 nt, Artificial Sequence
  Description of Artificial Sequence: Synthetic oligonucleotide
  Antisense strand to SEQ ID NO: 1665125
uaguauagucauagcucag

SEQ ID NO: 1665127 - RNA, 19 nt, Artificial Sequence
  Description of Artificial Sequence: Synthetic oligonucleotide
  Sense strand starting at position 750 of SEQ ID NO: 1561351
agaggugccuuucuauaac

SEQ ID NO: 1665128 - RNA, 19 nt, Artificial Sequence
  Description of Artificial Sequence: Synthetic oligonucleotide
  Antisense strand to SEQ ID NO: 1665127
guuauagaaaggcaccucu

SEQ ID NO: 1665129 - RNA, 19 nt, Artificial Sequence
  Description of Artificial Sequence: Synthetic oligonucleotide
  Sense strand starting at position 753 of SEQ ID NO: 1561351
ggugccuuucuauaacucu

SEQ ID NO: 1665130 - RNA, 19 nt, Artificial Sequence
  Description of Artificial Sequence: Synthetic oligonucleotide
  Antisense strand to SEQ ID NO: 1665129
agaguuauagaaaggcacc

SEQ ID NO: 1665131 - RNA, 19 nt, Artificial Sequence
  Description of Artificial Sequence: Synthetic oligonucleotide
  Sense strand starting at position 779 of SEQ ID NO: 1561351
aucauaaugcacugaagua

SEQ ID NO: 1665132 - RNA, 19 nt, Artificial Sequence
  Description of Artificial Sequence: Synthetic oligonucleotide
  Antisense strand to SEQ ID NO: 1665131
uacuucagugcauuaugau

SEQ ID NO: 1665133 - RNA, 19 nt, Artificial Sequence
  Description of Artificial Sequence: Synthetic oligonucleotide
  Sense strand starting at position 789 of SEQ ID NO: 1561351
acugaaguauuugaacaau

SEQ ID NO: 1665134 - RNA, 19 nt, Artificial Sequence
  Description of Artificial Sequence: Synthetic oligonucleotide
  Antisense strand to SEQ ID NO: 1665133
auuguucaaauacuucagu

SEQ ID NO: 1665135 - RNA, 19 nt, Artificial Sequence
  Description of Artificial Sequence: Synthetic oligonucleotide
  Sense strand starting at position 800 of SEQ ID NO: 1561351
ugaacaauuugccauauga

SEQ ID NO: 1665136 - RNA, 19 nt, Artificial Sequence
  Description of Artificial Sequence: Synthetic oligonucleotide
  Antisense strand to SEQ ID NO: 1665135
ucauauggcaaauuguuca

SEQ ID NO: 1665137 - RNA, 19 nt, Artificial Sequence
  Description of Artificial Sequence: Synthetic oligonucleotide
  Sense strand starting at position 887 of SEQ ID NO: 1561351
gggucauguaacugggaaa

SEQ ID NO: 1665138 - RNA, 19 nt, Artificial Sequence
  Description of Artificial Sequence: Synthetic oligonucleotide
  Antisense strand to SEQ ID NO: 1665137
uuucccaguuacaugaccc

SEQ ID NO: 1665139 - RNA, 19 nt, Artificial Sequence
  Description of Artificial Sequence: Synthetic oligonucleotide
  Sense strand starting at position 940 of SEQ ID NO: 1561351
auguucucaugaccuagaa

SEQ ID NO: 1665140 - RNA, 19 nt, Artificial Sequence
  Description of Artificial Sequence: Synthetic oligonucleotide
  Antisense strand to SEQ ID NO: 1665139
uucuaggucaugagaacau

SEQ ID NO: 1665141 - RNA, 19 nt, Artificial Sequence
  Description of Artificial Sequence: Synthetic oligonucleotide
  Sense strand starting at position 962 of SEQ ID NO: 1561351
aagguaauuguauguguau

SEQ ID NO: 1665142 - RNA, 19 nt, Artificial Sequence
  Description of Artificial Sequence: Synthetic oligonucleotide
  Antisense strand to SEQ ID NO: 1665141
auacacauacaauuaccuu

SEQ ID NO: 1665143 - RNA, 19 nt, Artificial Sequence
  Description of Artificial Sequence: Synthetic oligonucleotide
  Sense strand starting at position 1132 of SEQ ID NO: 1561351
gcgcgucacagacuuaauu

SEQ ID NO: 1665144 - RNA, 19 nt, Artificial Sequence
  Description of Artificial Sequence: Synthetic oligonucleotide
  Antisense strand to SEQ ID NO: 1665143
aauuaagucugugacgcgc

SEQ ID NO: 1665145 - RNA, 19 nt, Artificial Sequence
  Description of Artificial Sequence: Synthetic oligonucleotide
  Sense strand starting at position 1283 of SEQ ID NO: 1561351
uugcaauggcucugaaaca

SEQ ID NO: 1665146 - RNA, 19 nt, Artificial Sequence
  Description of Artificial Sequence: Synthetic oligonucleotide
  Antisense strand to SEQ ID NO: 1665145
uguuucagagccauugcaa

SEQ ID NO: 1665147 - RNA, 19 nt, Artificial Sequence
  Description of Artificial Sequence: Synthetic oligonucleotide
  Sense strand starting at position 1814 of SEQ ID NO: 1561351
cgggcugauuacuucuaca

SEQ ID NO: 1665148 - RNA, 19 nt, Artificial Sequence
  Description of Artificial Sequence: Synthetic oligonucleotide
  Antisense strand to SEQ ID NO: 1665147
uguagaaguaaucagcccg

SEQ ID NO: 1665149 - RNA, 19 nt, Artificial Sequence
  Description of Artificial Sequence: Synthetic oligonucleotide
  Sense strand starting at position 2012 of SEQ ID NO: 1561351
cggagacuucugggaaaug

SEQ ID NO: 1665150 - RNA, 19 nt, Artificial Sequence
  Description of Artificial Sequence: Synthetic oligonucleotide
  Antisense strand to SEQ ID NO: 1665149
cauuucccagaagucuccg

SEQ ID NO: 1665151 - RNA, 19 nt, Artificial Sequence
  Description of Artificial Sequence: Synthetic oligonucleotide
  Sense strand starting at position 2170 of SEQ ID NO: 1561351
guugacugagagcgaauua

SEQ ID NO: 1665152 - RNA, 19 nt, Artificial Sequence
  Description of Artificial Sequence: Synthetic oligonucleotide
  Antisense strand to SEQ ID NO: 1665151
uaauucgcucucagucaac

SEQ ID NO: 1665153 - RNA, 19 nt, Artificial Sequence
  Description of Artificial Sequence: Synthetic oligonucleotide
  Sense strand starting at position 2192 of SEQ ID NO: 1561351
gguucucagcuuucgcuaa

SEQ ID NO: 1665154 - RNA, 19 nt, Artificial Sequence
  Description of Artificial Sequence: Synthetic oligonucleotide
  Antisense strand to SEQ ID NO: 1665153
uuagcgaaagcugagaacc

SEQ ID NO: 1665155 - RNA, 19 nt, Artificial Sequence
  Description of Artificial Sequence: Synthetic oligonucleotide
  Sense strand starting at position 2196 of SEQ ID NO: 1561351
cucagcuuucgcuaaggaa

SEQ ID NO: 1665156 - RNA, 19 nt, Artificial Sequence
  Description of Artificial Sequence: Synthetic oligonucleotide
  Antisense strand to SEQ ID NO: 1665155
uuccuuagcgaaagcugag

SEQ ID NO: 1665157 - RNA, 19 nt, Artificial Sequence
  Description of Artificial Sequence: Synthetic oligonucleotide
  Sense strand starting at position 2212 of SEQ ID NO: 1561351
gaacgcauucuggagucua

SEQ ID NO: 1665158 - RNA, 19 nt, Artificial Sequence
  Description of Artificial Sequence: Synthetic oligonucleotide
  Antisense strand to SEQ ID NO: 1665157
uagacuccagaaugcguuc

SEQ ID NO: 1665159 - RNA, 19 nt, Artificial Sequence
  Description of Artificial Sequence: Synthetic oligonucleotide
  Sense strand starting at position 2261 of SEQ ID NO: 1561351
gggacuuagacgugagcga

SEQ ID NO: 1665160 - RNA, 19 nt, Artificial Sequence
  Description of Artificial Sequence: Synthetic oligonucleotide
  Antisense strand to SEQ ID NO: 1665159
ucgcucacgucuaaguccc

SEQ ID NO: 1665161 - RNA, 19 nt, Artificial Sequence
  Description of Artificial Sequence: Synthetic oligonucleotide
  Sense strand starting at position 2295 of SEQ ID NO: 1561351
guaaguucgcuggaaauga

SEQ ID NO: 1665162 - RNA, 19 nt, Artificial Sequence
  Description of Artificial Sequence: Synthetic oligonucleotide
  Antisense strand to SEQ ID NO: 1665161
ucauuuccagcgaacuuac

SEQ ID NO: 1665163 - RNA, 19 nt, Artificial Sequence
  Description of Artificial Sequence: Synthetic oligonucleotide
  Sense strand starting at position 2328 of SEQ ID NO: 1561351
ccaguuuaccuggguauga

SEQ ID NO: 1665164 - RNA, 19 nt, Artificial Sequence
  Description of Artificial Sequence: Synthetic oligonucleotide
  Antisense strand to SEQ ID NO: 1665163
ucauacccagguaaacugg

SEQ ID NO: 1665165 - RNA, 19 nt, Artificial Sequence
  Description of Artificial Sequence: Synthetic oligonucleotide
  Sense strand starting at position 2352 of SEQ ID NO: 1561351
uggaacagugucuggcaau

SEQ ID NO: 1665166 - RNA, 19 nt, Artificial Sequence
  Description of Artificial Sequence: Synthetic oligonucleotide
  Antisense strand to SEQ ID NO: 1665165
auugccagacacuguucca

SEQ ID NO: 1665167 - RNA, 19 nt, Artificial Sequence
  Description of Artificial Sequence: Synthetic oligonucleotide
  Sense strand starting at position 2467 of SEQ ID NO: 1561351
uaaauuuaugccuguguga

SEQ ID NO: 1665168 - RNA, 19 nt, Artificial Sequence
  Description of Artificial Sequence: Synthetic oligonucleotide
  Antisense strand to SEQ ID NO: 1665167
ucacacaggcauaaauuua

SEQ ID NO: 1665169 - RNA, 19 nt, Artificial Sequence
  Description of Artificial Sequence: Synthetic oligonucleotide
  Sense strand starting at position 2469 of SEQ ID NO: 1561351
aauuuaugccugugugagu

SEQ ID NO: 1665170 - RNA, 19 nt, Artificial Sequence
  Description of Artificial Sequence: Synthetic oligonucleotide
  Antisense strand to SEQ ID NO: 1665169
acucacacaggcauaaauu

SEQ ID NO: 1665171 - RNA, 19 nt, Artificial Sequence
  Description of Artificial Sequence: Synthetic oligonucleotide
  Sense strand starting at position 2503 of SEQ ID NO: 1561351
ugagaugaacuguguuaca

SEQ ID NO: 1665172 - RNA, 19 nt, Artificial Sequence
  Description of Artificial Sequence: Synthetic oligonucleotide
  Antisense strand to SEQ ID NO: 1665171
uguaacacaguucaucuca

SEQ ID NO: 1665173 - RNA, 19 nt, Artificial Sequence
  Description of Artificial Sequence: Synthetic oligonucleotide
  Sense strand starting at position 2508 of SEQ ID NO: 1561351
ugaacuguguuacagauuu

SEQ ID NO: 1665174 - RNA, 19 nt, Artificial Sequence
  Description of Artificial Sequence: Synthetic oligonucleotide
  Antisense strand to SEQ ID NO: 1665173
aaaucuguaacacaguuca

SEQ ID NO: 1665175 - RNA, 19 nt, Artificial Sequence
  Description of Artificial Sequence: Synthetic oligonucleotide
  Sense strand starting at position 2555 of SEQ ID NO: 1561351
agugguagugaguggauau

SEQ ID NO: 1665176 - RNA, 19 nt, Artificial Sequence
  Description of Artificial Sequence: Synthetic oligonucleotide
  Antisense strand to SEQ ID NO: 1665175
auauccacucacuaccacu

SEQ ID NO: 1665177 - RNA, 19 nt, Artificial Sequence
  Description of Artificial Sequence: Synthetic oligonucleotide
  Sense strand starting at position 2556 of SEQ ID NO: 1561351
gugguagugaguggauauu

SEQ ID NO: 1665178 - RNA, 19 nt, Artificial Sequence
  Description of Artificial Sequence: Synthetic oligonucleotide
  Antisense strand to SEQ ID NO: 1665177
aauauccacucacuaccac

SEQ ID NO: 1665179 - RNA, 19 nt, Artificial Sequence
  Description of Artificial Sequence: Synthetic oligonucleotide
  Sense strand starting at position 2567 of SEQ ID NO: 1561351
uggauauugugaccgugga

SEQ ID NO: 1665180 - RNA, 19 nt, Artificial Sequence
  Description of Artificial Sequence: Synthetic oligonucleotide
  Antisense strand to SEQ ID NO: 1665179
uccacggucacaauaucca

SEQ ID NO: 1665181 - RNA, 19 nt, Artificial Sequence
  Description of Artificial Sequence: Synthetic oligonucleotide
  Sense strand starting at position 2571 of SEQ ID NO: 1561351
uauugugaccguggagacu

SEQ ID NO: 1665182 - RNA, 19 nt, Artificial Sequence
  Description of Artificial Sequence: Synthetic oligonucleotide
  Antisense strand to SEQ ID NO: 1665181
agucuccacggucacaaua

SEQ ID NO: 1665183 - RNA, 19 nt, Artificial Sequence
  Description of Artificial Sequence: Synthetic oligonucleotide
  Sense strand starting at position 2586 of SEQ ID NO: 1561351
gacuuauggcagugcaaag

SEQ ID NO: 1665184 - RNA, 19 nt, Artificial Sequence
  Description of Artificial Sequence: Synthetic oligonucleotide
  Antisense strand to SEQ ID NO: 1665183
cuuugcacugccauaaguc

SEQ ID NO: 1665185 - RNA, 19 nt, Artificial Sequence
  Description of Artificial Sequence: Synthetic oligonucleotide
  Sense strand starting at position 2990 of SEQ ID NO: 1561351
gcucuuucuggucacugau

SEQ ID NO: 1665186 - RNA, 19 nt, Artificial Sequence
  Description of Artificial Sequence: Synthetic oligonucleotide
  Antisense strand to SEQ ID NO: 1665185
aucagugaccagaaagagc

SEQ ID NO: 1665187 - RNA, 19 nt, Artificial Sequence
  Description of Artificial Sequence: Synthetic oligonucleotide
  Sense strand starting at position 2992 of SEQ ID NO: 1561351
ucuuucuggucacugauau

SEQ ID NO: 1665188 - RNA, 19 nt, Artificial Sequence
  Description of Artificial Sequence: Synthetic oligonucleotide
  Antisense strand to SEQ ID NO: 1665187
auaucagugaccagaaaga

SEQ ID NO: 1665189 - RNA, 19 nt, Artificial Sequence
  Description of Artificial Sequence: Synthetic oligonucleotide
  Sense strand starting at position 2993 of SEQ ID NO: 1561351
cuuucuggucacugauauc

SEQ ID NO: 1665190 - RNA, 19 nt, Artificial Sequence
  Description of Artificial Sequence: Synthetic oligonucleotide
  Antisense strand to SEQ ID NO: 1665189
gauaucagugaccagaaag

SEQ ID NO: 1665191 - RNA, 19 nt, Artificial Sequence
  Description of Artificial Sequence: Synthetic oligonucleotide
  Sense strand starting at position 3143 of SEQ ID NO: 1561351
auggaugccucauccagua

SEQ ID NO: 1665192 - RNA, 19 nt, Artificial Sequence
  Description of Artificial Sequence: Synthetic oligonucleotide
  Antisense strand to SEQ ID NO: 1665191
uacuggaugaggcauccau

SEQ ID NO: 1665193 - RNA, 19 nt, Artificial Sequence
  Description of Artificial Sequence: Synthetic oligonucleotide
  Sense strand starting at position 3299 of SEQ ID NO: 1561351
auguuacuugcucaaugac

SEQ ID NO: 1665194 - RNA, 19 nt, Artificial Sequence
  Description of Artificial Sequence: Synthetic oligonucleotide
  Antisense strand to SEQ ID NO: 1665193
gucauugagcaaguaacau

SEQ ID NO: 1665195 - RNA, 19 nt, Artificial Sequence
  Description of Artificial Sequence: Synthetic oligonucleotide
  Sense strand starting at position 285 of SEQ ID NO: 1561352
acaagucaugcuuggaaau

SEQ ID NO: 1665196 - RNA, 19 nt, Artificial Sequence
  Description of Artificial Sequence: Synthetic oligonucleotide
  Antisense strand to SEQ ID NO: 1665195
auuuccaagcaugacuugu

SEQ ID NO: 1665197 - RNA, 19 nt, Artificial Sequence
  Description of Artificial Sequence: Synthetic oligonucleotide
  Sense strand starting at position 286 of SEQ ID NO: 1561352
caagucaugcuuggaaaug

SEQ ID NO: 1665198 - RNA, 19 nt, Artificial Sequence
  Description of Artificial Sequence: Synthetic oligonucleotide
  Antisense strand to SEQ ID NO: 1665197
cauuuccaagcaugacuug

SEQ ID NO: 1665199 - RNA, 19 nt, Artificial Sequence
  Description of Artificial Sequence: Synthetic oligonucleotide
  Sense strand starting at position 296 of SEQ ID NO: 1561352
uuggaaauguuacagauuu

SEQ ID NO: 1665200 - RNA, 19 nt, Artificial Sequence
  Description of Artificial Sequence: Synthetic oligonucleotide
  Antisense strand to SEQ ID NO: 1665199
aaaucuguaacauuuccaa

SEQ ID NO: 1665201 - RNA, 19 nt, Artificial Sequence
  Description of Artificial Sequence: Synthetic oligonucleotide
  Sense strand starting at position 415 of SEQ ID NO: 1561352
agcagacaacauugucauu

SEQ ID NO: 1665202 - RNA, 19 nt, Artificial Sequence
  Description of Artificial Sequence: Synthetic oligonucleotide
  Antisense strand to SEQ ID NO: 1665201
aaugacaauguugucugcu

SEQ ID NO: 1665203 - RNA, 19 nt, Artificial Sequence
  Description of Artificial Sequence: Synthetic oligonucleotide
  Sense strand starting at position 587 of SEQ ID NO: 1561352
ugcacugagcuaugacuau

SEQ ID NO: 1665204 - RNA, 19 nt, Artificial Sequence
  Description of Artificial Sequence: Synthetic oligonucleotide
  Antisense strand to SEQ ID NO: 1665203
auagucauagcucagugca

SEQ ID NO: 1665205 - RNA, 19 nt, Artificial Sequence
  Description of Artificial Sequence: Synthetic oligonucleotide
  Sense strand starting at position 591 of SEQ ID NO: 1561352
cugagcuaugacuauacua

SEQ ID NO: 1665206 - RNA, 19 nt, Artificial Sequence
  Description of Artificial Sequence: Synthetic oligonucleotide
  Antisense strand to SEQ ID NO: 1665205
uaguauagucauagcucag

SEQ ID NO: 1665207 - RNA, 19 nt, Artificial Sequence
  Description of Artificial Sequence: Synthetic oligonucleotide
  Sense strand starting at position 779 of SEQ ID NO: 1561352
agaggugccuuucuauaac

SEQ ID NO: 1665208 - RNA, 19 nt, Artificial Sequence
  Description of Artificial Sequence: Synthetic oligonucleotide
  Antisense strand to SEQ ID NO: 1665207
guuauagaaaggcaccucu

SEQ ID NO: 1665209 - RNA, 19 nt, Artificial Sequence
  Description of Artificial Sequence: Synthetic oligonucleotide
  Sense strand starting at position 782 of SEQ ID NO: 1561352
ggugccuuucuauaacucu

SEQ ID NO: 1665210 - RNA, 19 nt, Artificial Sequence
  Description of Artificial Sequence: Synthetic oligonucleotide
  Antisense strand to SEQ ID NO: 1665209
agaguuauagaaaggcacc

SEQ ID NO: 1665211 - RNA, 19 nt, Artificial Sequence
  Description of Artificial Sequence: Synthetic oligonucleotide
  Sense strand starting at position 808 of SEQ ID NO: 1561352
aucauaaugcacugaagua

SEQ ID NO: 1665212 - RNA, 19 nt, Artificial Sequence
  Description of Artificial Sequence: Synthetic oligonucleotide
  Antisense strand to SEQ ID NO: 1665211
uacuucagugcauuaugau

SEQ ID NO: 1665213 - RNA, 19 nt, Artificial Sequence
  Description of Artificial Sequence: Synthetic oligonucleotide
  Sense strand starting at position 818 of SEQ ID NO: 1561352
acugaaguauuugaacaau

SEQ ID NO: 1665214 - RNA, 19 nt, Artificial Sequence
  Description of Artificial Sequence: Synthetic oligonucleotide
  Antisense strand to SEQ ID NO: 1665213
auuguucaaauacuucagu

SEQ ID NO: 1665215 - RNA, 19 nt, Artificial Sequence
  Description of Artificial Sequence: Synthetic oligonucleotide
  Sense strand starting at position 829 of SEQ ID NO: 1561352
ugaacaauuugccauauga

SEQ ID NO: 1665216 - RNA, 19 nt, Artificial Sequence
  Description of Artificial Sequence: Synthetic oligonucleotide
  Antisense strand to SEQ ID NO: 1665215
ucauauggcaaauuguuca

SEQ ID NO: 1665217 - RNA, 19 nt, Artificial Sequence
  Description of Artificial Sequence: Synthetic oligonucleotide
  Sense strand starting at position 916 of SEQ ID NO: 1561352
gggucauguaacugggaaa

SEQ ID NO: 1665218 - RNA, 19 nt, Artificial Sequence
  Description of Artificial Sequence: Synthetic oligonucleotide
  Antisense strand to SEQ ID NO: 1665217
uuucccaguuacaugaccc

SEQ ID NO: 1665219 - RNA, 19 nt, Artificial Sequence
  Description of Artificial Sequence: Synthetic oligonucleotide
  Sense strand starting at position 969 of SEQ ID NO: 1561352
auguucucaugaccuagaa

SEQ ID NO: 1665220 - RNA, 19 nt, Artificial Sequence
  Description of Artificial Sequence: Synthetic oligonucleotide
  Antisense strand to SEQ ID NO: 1665219
uucuaggucaugagaacau

SEQ ID NO: 1665221 - RNA, 19 nt, Artificial Sequence
  Description of Artificial Sequence: Synthetic oligonucleotide
  Sense strand starting at position 991 of SEQ ID NO: 1561352
aagguaauuguauguguau

SEQ ID NO: 1665222 - RNA, 19 nt, Artificial Sequence
  Description of Artificial Sequence: Synthetic oligonucleotide
  Antisense strand to SEQ ID NO: 1665221
auacacauacaauuaccuu

SEQ ID NO: 1665223 - RNA, 19 nt, Artificial Sequence
  Description of Artificial Sequence: Synthetic oligonucleotide
  Sense strand starting at position 1161 of SEQ ID NO: 1561352
gcgcgucacagacuuaauu

SEQ ID NO: 1665224 - RNA, 19 nt, Artificial Sequence
  Description of Artificial Sequence: Synthetic oligonucleotide
  Antisense strand to SEQ ID NO: 1665223
aauuaagucugugacgcgc

SEQ ID NO: 1665225 - RNA, 19 nt, Artificial Sequence
  Description of Artificial Sequence: Synthetic oligonucleotide
  Sense strand starting at position 1312 of SEQ ID NO: 1561352
uugcaauggcucugaaaca

SEQ ID NO: 1665226 - RNA, 19 nt, Artificial Sequence
  Description of Artificial Sequence: Synthetic oligonucleotide
  Antisense strand to SEQ ID NO: 1665225
uguuucagagccauugcaa

SEQ ID NO: 1665227 - RNA, 19 nt, Artificial Sequence
  Description of Artificial Sequence: Synthetic oligonucleotide
  Sense strand starting at position 1843 of SEQ ID NO: 1561352
cgggcugauuacuucuaca

SEQ ID NO: 1665228 - RNA, 19 nt, Artificial Sequence
  Description of Artificial Sequence: Synthetic oligonucleotide
  Antisense strand to SEQ ID NO: 1665227
uguagaaguaaucagcccg

SEQ ID NO: 1665229 - RNA, 19 nt, Artificial Sequence
  Description of Artificial Sequence: Synthetic oligonucleotide
  Sense strand starting at position 2041 of SEQ ID NO: 1561352
cggagacuucugggaaaug

SEQ ID NO: 1665230 - RNA, 19 nt, Artificial Sequence
  Description of Artificial Sequence: Synthetic oligonucleotide
  Antisense strand to SEQ ID NO: 1665229
cauuucccagaagucuccg

SEQ ID NO: 1665231 - RNA, 19 nt, Artificial Sequence
  Description of Artificial Sequence: Synthetic oligonucleotide
  Sense strand starting at position 2199 of SEQ ID NO: 1561352
guugacugagagcgaauua

SEQ ID NO: 1665232 - RNA, 19 nt, Artificial Sequence
  Description of Artificial Sequence: Synthetic oligonucleotide
  Antisense strand to SEQ ID NO: 1665231
uaauucgcucucagucaac

SEQ ID NO: 1665233 - RNA, 19 nt, Artificial Sequence
  Description of Artificial Sequence: Synthetic oligonucleotide
  Sense strand starting at position 2221 of SEQ ID NO: 1561352
gguucucagcuuucgcuaa

SEQ ID NO: 1665234 - RNA, 19 nt, Artificial Sequence
  Description of Artificial Sequence: Synthetic oligonucleotide
  Antisense strand to SEQ ID NO: 1665233
uuagcgaaagcugagaacc

SEQ ID NO: 1665235 - RNA, 19 nt, Artificial Sequence
  Description of Artificial Sequence: Synthetic oligonucleotide
  Sense strand starting at position 2225 of SEQ ID NO: 1561352
cucagcuuucgcuaaggaa

SEQ ID NO: 1665236 - RNA, 19 nt, Artificial Sequence
  Description of Artificial Sequence: Synthetic oligonucleotide
  Antisense strand to SEQ ID NO: 1665235
uuccuuagcgaaagcugag

SEQ ID NO: 1665237 - RNA, 19 nt, Artificial Sequence
  Description of Artificial Sequence: Synthetic oligonucleotide
  Sense strand starting at position 2241 of SEQ ID NO: 1561352
gaacgcauucuggagucua

SEQ ID NO: 1665238 - RNA, 19 nt, Artificial Sequence
  Description of Artificial Sequence: Synthetic oligonucleotide
  Antisense strand to SEQ ID NO: 1665237
uagacuccagaaugcguuc

SEQ ID NO: 1665239 - RNA, 19 nt, Artificial Sequence
  Description of Artificial Sequence: Synthetic oligonucleotide
  Sense strand starting at position 2290 of SEQ ID NO: 1561352
gggacuuagacgugagcga

SEQ ID NO: 1665240 - RNA, 19 nt, Artificial Sequence
  Description of Artificial Sequence: Synthetic oligonucleotide
  Antisense strand to SEQ ID NO: 1665239
ucgcucacgucuaaguccc

SEQ ID NO: 1665241 - RNA, 19 nt, Artificial Sequence
  Description of Artificial Sequence: Synthetic oligonucleotide
  Sense strand starting at position 2324 of SEQ ID NO: 1561352
guaaguucgcuggaaauga

SEQ ID NO: 1665242 - RNA, 19 nt, Artificial Sequence
  Description of Artificial Sequence: Synthetic oligonucleotide
  Antisense strand to SEQ ID NO: 1665241
ucauuuccagcgaacuuac

SEQ ID NO: 1665243 - RNA, 19 nt, Artificial Sequence
  Description of Artificial Sequence: Synthetic oligonucleotide
  Sense strand starting at position 2357 of SEQ ID NO: 1561352
ccaguuuaccuggguauga

SEQ ID NO: 1665244 - RNA, 19 nt, Artificial Sequence
  Description of Artificial Sequence: Synthetic oligonucleotide
  Antisense strand to SEQ ID NO: 1665243
ucauacccagguaaacugg

SEQ ID NO: 1665245 - RNA, 19 nt, Artificial Sequence
  Description of Artificial Sequence: Synthetic oligonucleotide
  Sense strand starting at position 2381 of SEQ ID NO: 1561352
uggaacagugucuggcaau

SEQ ID NO: 1665246 - RNA, 19 nt, Artificial Sequence
  Description of Artificial Sequence: Synthetic oligonucleotide
  Antisense strand to SEQ ID NO: 1665245
auugccagacacuguucca

SEQ ID NO: 1665247 - RNA, 19 nt, Artificial Sequence
  Description of Artificial Sequence: Synthetic oligonucleotide
  Sense strand starting at position 2496 of SEQ ID NO: 1561352
uaaauuuaugccuguguga

SEQ ID NO: 1665248 - RNA, 19 nt, Artificial Sequence
  Description of Artificial Sequence: Synthetic oligonucleotide
  Antisense strand to SEQ ID NO: 1665247
ucacacaggcauaaauuua

SEQ ID NO: 1665249 - RNA, 19 nt, Artificial Sequence
  Description of Artificial Sequence: Synthetic oligonucleotide
  Sense strand starting at position 2498 of SEQ ID NO: 1561352
aauuuaugccugugugagu

SEQ ID NO: 1665250 - RNA, 19 nt, Artificial Sequence
  Description of Artificial Sequence: Synthetic oligonucleotide
  Antisense strand to SEQ ID NO: 1665249
acucacacaggcauaaauu

SEQ ID NO: 1665251 - RNA, 19 nt, Artificial Sequence
  Description of Artificial Sequence: Synthetic oligonucleotide
  Sense strand starting at position 2532 of SEQ ID NO: 1561352
ugagaugaacuguguuaca

SEQ ID NO: 1665252 - RNA, 19 nt, Artificial Sequence
  Description of Artificial Sequence: Synthetic oligonucleotide
  Antisense strand to SEQ ID NO: 1665251
uguaacacaguucaucuca

SEQ ID NO: 1665253 - RNA, 19 nt, Artificial Sequence
  Description of Artificial Sequence: Synthetic oligonucleotide
  Sense strand starting at position 2537 of SEQ ID NO: 1561352
ugaacuguguuacagauuu

SEQ ID NO: 1665254 - RNA, 19 nt, Artificial Sequence
  Description of Artificial Sequence: Synthetic oligonucleotide
  Antisense strand to SEQ ID NO: 1665253
aaaucuguaacacaguuca

SEQ ID NO: 1665255 - RNA, 19 nt, Artificial Sequence
  Description of Artificial Sequence: Synthetic oligonucleotide
  Sense strand starting at position 2584 of SEQ ID NO: 1561352
agugguagugaguggauau

SEQ ID NO: 1665256 - RNA, 19 nt, Artificial Sequence
  Description of Artificial Sequence: Synthetic oligonucleotide
  Antisense strand to SEQ ID NO: 1665255
auauccacucacuaccacu

SEQ ID NO: 1665257 - RNA, 19 nt, Artificial Sequence
  Description of Artificial Sequence: Synthetic oligonucleotide
  Sense strand starting at position 2585 of SEQ ID NO: 1561352
gugguagugaguggauauu

SEQ ID NO: 1665258 - RNA, 19 nt, Artificial Sequence
  Description of Artificial Sequence: Synthetic oligonucleotide
  Antisense strand to SEQ ID NO: 1665257
aauauccacucacuaccac

SEQ ID NO: 1665259 - RNA, 19 nt, Artificial Sequence
  Description of Artificial Sequence: Synthetic oligonucleotide
  Sense strand starting at position 2596 of SEQ ID NO: 1561352
uggauauugugaccgugga

SEQ ID NO: 1665260 - RNA, 19 nt, Artificial Sequence
  Description of Artificial Sequence: Synthetic oligonucleotide
  Antisense strand to SEQ ID NO: 1665259
uccacggucacaauaucca

SEQ ID NO: 1665261 - RNA, 19 nt, Artificial Sequence
  Description of Artificial Sequence: Synthetic oligonucleotide
  Sense strand starting at position 2600 of SEQ ID NO: 1561352
uauugugaccguggagacu

SEQ ID NO: 1665262 - RNA, 19 nt, Artificial Sequence
  Description of Artificial Sequence: Synthetic oligonucleotide
  Antisense strand to SEQ ID NO: 1665261
agucuccacggucacaaua

SEQ ID NO: 1665263 - RNA, 19 nt, Artificial Sequence
  Description of Artificial Sequence: Synthetic oligonucleotide
  Sense strand starting at position 2615 of SEQ ID NO: 1561352
gacuuauggcagugcaaag

SEQ ID NO: 1665264 - RNA, 19 nt, Artificial Sequence
  Description of Artificial Sequence: Synthetic oligonucleotide
  Antisense strand to SEQ ID NO: 1665263
cuuugcacugccauaaguc

SEQ ID NO: 1665265 - RNA, 19 nt, Artificial Sequence
  Description of Artificial Sequence: Synthetic oligonucleotide
  Sense strand starting at position 3019 of SEQ ID NO: 1561352
gcucuuucuggucacugau

SEQ ID NO: 1665266 - RNA, 19 nt, Artificial Sequence
  Description of Artificial Sequence: Synthetic oligonucleotide
  Antisense strand to SEQ ID NO: 1665265
aucagugaccagaaagagc

SEQ ID NO: 1665267 - RNA, 19 nt, Artificial Sequence
  Description of Artificial Sequence: Synthetic oligonucleotide
  Sense strand starting at position 3021 of SEQ ID NO: 1561352
ucuuucuggucacugauau

SEQ ID NO: 1665268 - RNA, 19 nt, Artificial Sequence
  Description of Artificial Sequence: Synthetic oligonucleotide
  Antisense strand to SEQ ID NO: 1665267
auaucagugaccagaaaga

SEQ ID NO: 1665269 - RNA, 19 nt, Artificial Sequence
  Description of Artificial Sequence: Synthetic oligonucleotide
  Sense strand starting at position 3022 of SEQ ID NO: 1561352
cuuucuggucacugauauc

SEQ ID NO: 1665270 - RNA, 19 nt, Artificial Sequence
  Description of Artificial Sequence: Synthetic oligonucleotide
  Antisense strand to SEQ ID NO: 1665269
gauaucagugaccagaaag

SEQ ID NO: 1665271 - RNA, 19 nt, Artificial Sequence
  Description of Artificial Sequence: Synthetic oligonucleotide
  Sense strand starting at position 3172 of SEQ ID NO: 1561352
auggaugccucauccagua

SEQ ID NO: 1665272 - RNA, 19 nt, Artificial Sequence
  Description of Artificial Sequence: Synthetic oligonucleotide
  Antisense strand to SEQ ID NO: 1665271
uacuggaugaggcauccau

SEQ ID NO: 1665273 - RNA, 19 nt, Artificial Sequence
  Description of Artificial Sequence: Synthetic oligonucleotide
  Sense strand starting at position 3328 of SEQ ID NO: 1561352
auguuacuugcucaaugac

SEQ ID NO: 1665274 - RNA, 19 nt, Artificial Sequence
  Description of Artificial Sequence: Synthetic oligonucleotide
  Antisense strand to SEQ ID NO: 1665273
gucauugagcaaguaacau

SEQ ID NO: 1665275 - RNA, 19 nt, Artificial Sequence
  Description of Artificial Sequence: Synthetic oligonucleotide
  Sense strand starting at position 124 of SEQ ID NO: 1561353
uuaggaugagcaugauaua

SEQ ID NO: 1665276 - RNA, 19 nt, Artificial Sequence
  Description of Artificial Sequence: Synthetic oligonucleotide
  Antisense strand to SEQ ID NO: 1665275
uauaucaugcucauccuaa

SEQ ID NO: 1665277 - RNA, 19 nt, Artificial Sequence
  Description of Artificial Sequence: Synthetic oligonucleotide
  Sense strand starting at position 610 of SEQ ID NO: 1561353
guuuaacaguuacuaucuu

SEQ ID NO: 1665278 - RNA, 19 nt, Artificial Sequence
  Description of Artificial Sequence: Synthetic oligonucleotide
  Antisense strand to SEQ ID NO: 1665277
aagauaguaacuguuaaac

SEQ ID NO: 1665279 - RNA, 19 nt, Artificial Sequence
  Description of Artificial Sequence: Synthetic oligonucleotide
  Sense strand starting at position 945 of SEQ ID NO: 1561353
ccucuuacugcuuagguga

SEQ ID NO: 1665280 - RNA, 19 nt, Artificial Sequence
  Description of Artificial Sequence: Synthetic oligonucleotide
  Antisense strand to SEQ ID NO: 1665279
ucaccuaagcaguaagagg

SEQ ID NO: 1665281 - RNA, 19 nt, Artificial Sequence
  Description of Artificial Sequence: Synthetic oligonucleotide
  Sense strand starting at position 956 of SEQ ID NO: 1561353
uuaggugacuauucucaga

SEQ ID NO: 1665282 - RNA, 19 nt, Artificial Sequence
  Description of Artificial Sequence: Synthetic oligonucleotide
  Antisense strand to SEQ ID NO: 1665281
ucugagaauagucaccuaa

SEQ ID NO: 1665283 - RNA, 19 nt, Artificial Sequence
  Description of Artificial Sequence: Synthetic oligonucleotide
  Sense strand starting at position 958 of SEQ ID NO: 1561353
aggugacuauucucagaua

SEQ ID NO: 1665284 - RNA, 19 nt, Artificial Sequence
  Description of Artificial Sequence: Synthetic oligonucleotide
  Antisense strand to SEQ ID NO: 1665283
uaucugagaauagucaccu

SEQ ID NO: 1665285 - RNA, 19 nt, Artificial Sequence
  Description of Artificial Sequence: Synthetic oligonucleotide
  Sense strand starting at position 1020 of SEQ ID NO: 1561353
aguaguaccucuccacaga

SEQ ID NO: 1665286 - RNA, 19 nt, Artificial Sequence
  Description of Artificial Sequence: Synthetic oligonucleotide
  Antisense strand to SEQ ID NO: 1665285
ucuguggagagguacuacu

SEQ ID NO: 1665287 - RNA, 19 nt, Artificial Sequence
  Description of Artificial Sequence: Synthetic oligonucleotide
  Sense strand starting at position 1059 of SEQ ID NO: 1561353
ugacuacuuguauaaagcu

SEQ ID NO: 1665288 - RNA, 19 nt, Artificial Sequence
  Description of Artificial Sequence: Synthetic oligonucleotide
  Antisense strand to SEQ ID NO: 1665287
agcuuuauacaaguaguca

SEQ ID NO: 1665289 - RNA, 19 nt, Artificial Sequence
  Description of Artificial Sequence: Synthetic oligonucleotide
  Sense strand starting at position 1073 of SEQ ID NO: 1561353
aagcucuugggauaaaguu

SEQ ID NO: 1665290 - RNA, 19 nt, Artificial Sequence
  Description of Artificial Sequence: Synthetic oligonucleotide
  Antisense strand to SEQ ID NO: 1665289
aacuuuaucccaagagcuu

SEQ ID NO: 1665291 - RNA, 19 nt, Artificial Sequence
  Description of Artificial Sequence: Synthetic oligonucleotide
  Sense strand starting at position 1093 of SEQ ID NO: 1561353
ccaauugaggcuuaauuau

SEQ ID NO: 1665292 - RNA, 19 nt, Artificial Sequence
  Description of Artificial Sequence: Synthetic oligonucleotide
  Antisense strand to SEQ ID NO: 1665291
auaauuaagccucaauugg

SEQ ID NO: 1665293 - RNA, 19 nt, Artificial Sequence
  Description of Artificial Sequence: Synthetic oligonucleotide
  Sense strand starting at position 1467 of SEQ ID NO: 1561353
acaggcuucgugggaaaua

SEQ ID NO: 1665294 - RNA, 19 nt, Artificial Sequence
  Description of Artificial Sequence: Synthetic oligonucleotide
  Antisense strand to SEQ ID NO: 1665293
uauuucccacgaagccugu

SEQ ID NO: 1665295 - RNA, 19 nt, Artificial Sequence
  Description of Artificial Sequence: Synthetic oligonucleotide
  Sense strand starting at position 1573 of SEQ ID NO: 1561353
ucauuaggaugguccuaaa

SEQ ID NO: 1665296 - RNA, 19 nt, Artificial Sequence
  Description of Artificial Sequence: Synthetic oligonucleotide
  Antisense strand to SEQ ID NO: 1665295
uuuaggaccauccuaauga

SEQ ID NO: 1665297 - RNA, 19 nt, Artificial Sequence
  Description of Artificial Sequence: Synthetic oligonucleotide
  Sense strand starting at position 1656 of SEQ ID NO: 1561353
gugagaaaguagccucaca

SEQ ID NO: 1665298 - RNA, 19 nt, Artificial Sequence
  Description of Artificial Sequence: Synthetic oligonucleotide
  Antisense strand to SEQ ID NO: 1665297
ugugaggcuacuuucucac

SEQ ID NO: 1665299 - RNA, 19 nt, Artificial Sequence
  Description of Artificial Sequence: Synthetic oligonucleotide
  Sense strand starting at position 1805 of SEQ ID NO: 1561353
gaaggcuccgcugacaaga

SEQ ID NO: 1665300 - RNA, 19 nt, Artificial Sequence
  Description of Artificial Sequence: Synthetic oligonucleotide
  Antisense strand to SEQ ID NO: 1665299
ucuugucagcggagccuuc

SEQ ID NO: 1665301 - RNA, 19 nt, Artificial Sequence
  Description of Artificial Sequence: Synthetic oligonucleotide
  Sense strand starting at position 2126 of SEQ ID NO: 1561353
ucucaaaggagacguucua

SEQ ID NO: 1665302 - RNA, 19 nt, Artificial Sequence
  Description of Artificial Sequence: Synthetic oligonucleotide
  Antisense strand to SEQ ID NO: 1665301
uagaacgucuccuuugaga

SEQ ID NO: 1665303 - RNA, 19 nt, Artificial Sequence
  Description of Artificial Sequence: Synthetic oligonucleotide
  Sense strand starting at position 2133 of SEQ ID NO: 1561353
ggagacguucuauaguauc

SEQ ID NO: 1665304 - RNA, 19 nt, Artificial Sequence
  Description of Artificial Sequence: Synthetic oligonucleotide
  Antisense strand to SEQ ID NO: 1665303
gauacuauagaacgucucc

SEQ ID NO: 1665305 - RNA, 19 nt, Artificial Sequence
  Description of Artificial Sequence: Synthetic oligonucleotide
  Sense strand starting at position 2182 of SEQ ID NO: 1561353
gugcucuuugacuacacuu

SEQ ID NO: 1665306 - RNA, 19 nt, Artificial Sequence
  Description of Artificial Sequence: Synthetic oligonucleotide
  Antisense strand to SEQ ID NO: 1665305
aaguguagucaaagagcac

SEQ ID NO: 1665307 - RNA, 19 nt, Artificial Sequence
  Description of Artificial Sequence: Synthetic oligonucleotide
  Sense strand starting at position 2203 of SEQ ID NO: 1561353
ugcaaugcccacgaggaau

SEQ ID NO: 1665308 - RNA, 19 nt, Artificial Sequence
  Description of Artificial Sequence: Synthetic oligonucleotide
  Antisense strand to SEQ ID NO: 1665307
auuccucgugggcauugca

SEQ ID NO: 1665309 - RNA, 19 nt, Artificial Sequence
  Description of Artificial Sequence: Synthetic oligonucleotide
  Sense strand starting at position 2348 of SEQ ID NO: 1561353
ccaugaugacaggaguguu

SEQ ID NO: 1665310 - RNA, 19 nt, Artificial Sequence
  Description of Artificial Sequence: Synthetic oligonucleotide
  Antisense strand to SEQ ID NO: 1665309
aacacuccugucaucaugg

SEQ ID NO: 1665311 - RNA, 19 nt, Artificial Sequence
  Description of Artificial Sequence: Synthetic oligonucleotide
  Sense strand starting at position 2351 of SEQ ID NO: 1561353
ugaugacaggaguguuacu

SEQ ID NO: 1665312 - RNA, 19 nt, Artificial Sequence
  Description of Artificial Sequence: Synthetic oligonucleotide
  Antisense strand to SEQ ID NO: 1665311
aguaacacuccugucauca

SEQ ID NO: 1665313 - RNA, 19 nt, Artificial Sequence
  Description of Artificial Sequence: Synthetic oligonucleotide
  Sense strand starting at position 2356 of SEQ ID NO: 1561353
acaggaguguuacugaaag

SEQ ID NO: 1665314 - RNA, 19 nt, Artificial Sequence
  Description of Artificial Sequence: Synthetic oligonucleotide
  Antisense strand to SEQ ID NO: 1665313
cuuucaguaacacuccugu

SEQ ID NO: 1665315 - RNA, 19 nt, Artificial Sequence
  Description of Artificial Sequence: Synthetic oligonucleotide
  Sense strand starting at position 2451 of SEQ ID NO: 1561353
gcuaauauacuagacgcua

SEQ ID NO: 1665316 - RNA, 19 nt, Artificial Sequence
  Description of Artificial Sequence: Synthetic oligonucleotide
  Antisense strand to SEQ ID NO: 1665315
uagcgucuaguauauuagc

SEQ ID NO: 1665317 - RNA, 19 nt, Artificial Sequence
  Description of Artificial Sequence: Synthetic oligonucleotide
  Sense strand starting at position 2456 of SEQ ID NO: 1561353
uauacuagacgcuaauagu

SEQ ID NO: 1665318 - RNA, 19 nt, Artificial Sequence
  Description of Artificial Sequence: Synthetic oligonucleotide
  Antisense strand to SEQ ID NO: 1665317
acuauuagcgucuaguaua

SEQ ID NO: 1665319 - RNA, 19 nt, Artificial Sequence
  Description of Artificial Sequence: Synthetic oligonucleotide
  Sense strand starting at position 2470 of SEQ ID NO: 1561353
auaguaugaggcuaaaucu

SEQ ID NO: 1665320 - RNA, 19 nt, Artificial Sequence
  Description of Artificial Sequence: Synthetic oligonucleotide
  Antisense strand to SEQ ID NO: 1665319
agauuuagccucauacuau

SEQ ID NO: 1665321 - RNA, 19 nt, Artificial Sequence
  Description of Artificial Sequence: Synthetic oligonucleotide
  Sense strand starting at position 2575 of SEQ ID NO: 1561353
accacugguuuggcaagaa

SEQ ID NO: 1665322 - RNA, 19 nt, Artificial Sequence
  Description of Artificial Sequence: Synthetic oligonucleotide
  Antisense strand to SEQ ID NO: 1665321
uucuugccaaaccaguggu

SEQ ID NO: 1665323 - RNA, 19 nt, Artificial Sequence
  Description of Artificial Sequence: Synthetic oligonucleotide
  Sense strand starting at position 2603 of SEQ ID NO: 1561353
caguuuaaguguuuaagag

SEQ ID NO: 1665324 - RNA, 19 nt, Artificial Sequence
  Description of Artificial Sequence: Synthetic oligonucleotide
  Antisense strand to SEQ ID NO: 1665323
cucuuaaacacuuaaacug

SEQ ID NO: 1665325 - RNA, 19 nt, Artificial Sequence
  Description of Artificial Sequence: Synthetic oligonucleotide
  Sense strand starting at position 2604 of SEQ ID NO: 1561353
aguuuaaguguuuaagagg

SEQ ID NO: 1665326 - RNA, 19 nt, Artificial Sequence
  Description of Artificial Sequence: Synthetic oligonucleotide
  Antisense strand to SEQ ID NO: 1665325
ccucuuaaacacuuaaacu

SEQ ID NO: 1665327 - RNA, 19 nt, Artificial Sequence
  Description of Artificial Sequence: Synthetic oligonucleotide
  Sense strand starting at position 2613 of SEQ ID NO: 1561353
guuuaagagggcuguaaga

SEQ ID NO: 1665328 - RNA, 19 nt, Artificial Sequence
  Description of Artificial Sequence: Synthetic oligonucleotide
  Antisense strand to SEQ ID NO: 1665327
ucuuacagcccucuuaaac

SEQ ID NO: 1665329 - RNA, 19 nt, Artificial Sequence
  Description of Artificial Sequence: Synthetic oligonucleotide
  Sense strand starting at position 2615 of SEQ ID NO: 1561353
uuaagagggcuguaagagu

SEQ ID NO: 1665330 - RNA, 19 nt, Artificial Sequence
  Description of Artificial Sequence: Synthetic oligonucleotide
  Antisense strand to SEQ ID NO: 1665329
acucuuacagcccucuuaa

SEQ ID NO: 1665331 - RNA, 19 nt, Artificial Sequence
  Description of Artificial Sequence: Synthetic oligonucleotide
  Sense strand starting at position 2622 of SEQ ID NO: 1561353
ggcuguaagaguuaaagag

SEQ ID NO: 1665332 - RNA, 19 nt, Artificial Sequence
  Description of Artificial Sequence: Synthetic oligonucleotide
  Antisense strand to SEQ ID NO: 1665331
cucuuuaacucuuacagcc

SEQ ID NO: 1665333 - RNA, 19 nt, Artificial Sequence
  Description of Artificial Sequence: Synthetic oligonucleotide
  Sense strand starting at position 2749 of SEQ ID NO: 1561353
acggacuaagaguauguau

SEQ ID NO: 1665334 - RNA, 19 nt, Artificial Sequence
  Description of Artificial Sequence: Synthetic oligonucleotide
  Antisense strand to SEQ ID NO: 1665333
auacauacucuuaguccgu

SEQ ID NO: 1665335 - RNA, 19 nt, Artificial Sequence
  Description of Artificial Sequence: Synthetic oligonucleotide
  Sense strand starting at position 2751 of SEQ ID NO: 1561353
ggacuaagaguauguauug

SEQ ID NO: 1665336 - RNA, 19 nt, Artificial Sequence
  Description of Artificial Sequence: Synthetic oligonucleotide
  Antisense strand to SEQ ID NO: 1665335
caauacauacucuuagucc

SEQ ID NO: 1665337 - RNA, 19 nt, Artificial Sequence
  Description of Artificial Sequence: Synthetic oligonucleotide
  Sense strand starting at position 2961 of SEQ ID NO: 1561353
ucugauuggagaugucauu

SEQ ID NO: 1665338 - RNA, 19 nt, Artificial Sequence
  Description of Artificial Sequence: Synthetic oligonucleotide
  Antisense strand to SEQ ID NO: 1665337
aaugacaucuccaaucaga

SEQ ID NO: 1665339 - RNA, 19 nt, Artificial Sequence
  Description of Artificial Sequence: Synthetic oligonucleotide
  Sense strand starting at position 3041 of SEQ ID NO: 1561353
uuugaucaacgcgaacuuu

SEQ ID NO: 1665340 - RNA, 19 nt, Artificial Sequence
  Description of Artificial Sequence: Synthetic oligonucleotide
  Antisense strand to SEQ ID NO: 1665339
aaaguucgcguugaucaaa

SEQ ID NO: 1665341 - RNA, 19 nt, Artificial Sequence
  Description of Artificial Sequence: Synthetic oligonucleotide
  Sense strand starting at position 3174 of SEQ ID NO: 1561353
auauucuuuagacguggaa

SEQ ID NO: 1665342 - RNA, 19 nt, Artificial Sequence
  Description of Artificial Sequence: Synthetic oligonucleotide
  Antisense strand to SEQ ID NO: 1665341
uuccacgucuaaagaauau

SEQ ID NO: 1665343 - RNA, 19 nt, Artificial Sequence
  Description of Artificial Sequence: Synthetic oligonucleotide
  Sense strand starting at position 3176 of SEQ ID NO: 1561353
auucuuuagacguggaaau

SEQ ID NO: 1665344 - RNA, 19 nt, Artificial Sequence
  Description of Artificial Sequence: Synthetic oligonucleotide
  Antisense strand to SEQ ID NO: 1665343
auuuccacgucuaaagaau

SEQ ID NO: 1665345 - RNA, 19 nt, Artificial Sequence
  Description of Artificial Sequence: Synthetic oligonucleotide
  Sense strand starting at position 3177 of SEQ ID NO: 1561353
uucuuuagacguggaaaug

SEQ ID NO: 1665346 - RNA, 19 nt, Artificial Sequence
  Description of Artificial Sequence: Synthetic oligonucleotide
  Antisense strand to SEQ ID NO: 1665345
cauuuccacgucuaaagaa

SEQ ID NO: 1665347 - RNA, 19 nt, Artificial Sequence
  Description of Artificial Sequence: Synthetic oligonucleotide
  Sense strand starting at position 3194 of SEQ ID NO: 1561353
ugccacauuuaagagaaau

SEQ ID NO: 1665348 - RNA, 19 nt, Artificial Sequence
  Description of Artificial Sequence: Synthetic oligonucleotide
  Antisense strand to SEQ ID NO: 1665347
auuucucuuaaauguggca

SEQ ID NO: 1665349 - RNA, 19 nt, Artificial Sequence
  Description of Artificial Sequence: Synthetic oligonucleotide
  Sense strand starting at position 3278 of SEQ ID NO: 1561353
cuggaaaucgcuuagggca

SEQ ID NO: 1665350 - RNA, 19 nt, Artificial Sequence
  Description of Artificial Sequence: Synthetic oligonucleotide
  Antisense strand to SEQ ID NO: 1665349
ugcccuaagcgauuuccag

SEQ ID NO: 1665351 - RNA, 19 nt, Artificial Sequence
  Description of Artificial Sequence: Synthetic oligonucleotide
  Sense strand starting at position 3338 of SEQ ID NO: 1561353
ccuugcuaucacgagaaca

SEQ ID NO: 1665352 - RNA, 19 nt, Artificial Sequence
  Description of Artificial Sequence: Synthetic oligonucleotide
  Antisense strand to SEQ ID NO: 1665351
uguucucgugauagcaagg

SEQ ID NO: 1665353 - RNA, 19 nt, Artificial Sequence
  Description of Artificial Sequence: Synthetic oligonucleotide
  Sense strand starting at position 3408 of SEQ ID NO: 1561353
ucaugauaugugggaauua

SEQ ID NO: 1665354 - RNA, 19 nt, Artificial Sequence
  Description of Artificial Sequence: Synthetic oligonucleotide
  Antisense strand to SEQ ID NO: 1665353
uaauucccacauaucauga

SEQ ID NO: 1665355 - RNA, 19 nt, Artificial Sequence
  Description of Artificial Sequence: Synthetic oligonucleotide
  Sense strand starting at position 45 of SEQ ID NO: 1561354
ggguuugguuuccugaauu

SEQ ID NO: 1665356 - RNA, 19 nt, Artificial Sequence
  Description of Artificial Sequence: Synthetic oligonucleotide
  Antisense strand to SEQ ID NO: 1665355
aauucaggaaaccaaaccc

SEQ ID NO: 1665357 - RNA, 19 nt, Artificial Sequence
  Description of Artificial Sequence: Synthetic oligonucleotide
  Sense strand starting at position 125 of SEQ ID NO: 1561354
auugaaauuugaggagagu

SEQ ID NO: 1665358 - RNA, 19 nt, Artificial Sequence
  Description of Artificial Sequence: Synthetic oligonucleotide
  Antisense strand to SEQ ID NO: 1665357
acucuccucaaauuucaau

SEQ ID NO: 1665359 - RNA, 19 nt, Artificial Sequence
  Description of Artificial Sequence: Synthetic oligonucleotide
  Sense strand starting at position 236 of SEQ ID NO: 1561354
uuauaauaccugggccuua

SEQ ID NO: 1665360 - RNA, 19 nt, Artificial Sequence
  Description of Artificial Sequence: Synthetic oligonucleotide
  Antisense strand to SEQ ID NO: 1665359
uaaggcccagguauuauaa

SEQ ID NO: 1665361 - RNA, 19 nt, Artificial Sequence
  Description of Artificial Sequence: Synthetic oligonucleotide
  Sense strand starting at position 325 of SEQ ID NO: 1561354
uaugaccuguuguuuagaa

SEQ ID NO: 1665362 - RNA, 19 nt, Artificial Sequence
  Description of Artificial Sequence: Synthetic oligonucleotide
  Antisense strand to SEQ ID NO: 1665361
uucuaaacaacaggucaua

SEQ ID NO: 1665363 - RNA, 19 nt, Artificial Sequence
  Description of Artificial Sequence: Synthetic oligonucleotide
  Sense strand starting at position 345 of SEQ ID NO: 1561354
ggcagcuaaucugugacaa

SEQ ID NO: 1665364 - RNA, 19 nt, Artificial Sequence
  Description of Artificial Sequence: Synthetic oligonucleotide
  Antisense strand to SEQ ID NO: 1665363
uugucacagauuagcugcc

SEQ ID NO: 1665365 - RNA, 19 nt, Artificial Sequence
  Description of Artificial Sequence: Synthetic oligonucleotide
  Sense strand starting at position 584 of SEQ ID NO: 1561354
acagcucucgcacacaaau

SEQ ID NO: 1665366 - RNA, 19 nt, Artificial Sequence
  Description of Artificial Sequence: Synthetic oligonucleotide
  Antisense strand to SEQ ID NO: 1665365
auuugugugcgagagcugu

SEQ ID NO: 1665367 - RNA, 19 nt, Artificial Sequence
  Description of Artificial Sequence: Synthetic oligonucleotide
  Sense strand starting at position 635 of SEQ ID NO: 1561354
ugaucugaggaaugcauca

SEQ ID NO: 1665368 - RNA, 19 nt, Artificial Sequence
  Description of Artificial Sequence: Synthetic oligonucleotide
  Antisense strand to SEQ ID NO: 1665367
ugaugcauuccucagauca

SEQ ID NO: 1665369 - RNA, 19 nt, Artificial Sequence
  Description of Artificial Sequence: Synthetic oligonucleotide
  Sense strand starting at position 875 of SEQ ID NO: 1561354
gcuaaugugcuuuauaaua

SEQ ID NO: 1665370 - RNA, 19 nt, Artificial Sequence
  Description of Artificial Sequence: Synthetic oligonucleotide
  Antisense strand to SEQ ID NO: 1665369
uauuauaaagcacauuagc

SEQ ID NO: 1665371 - RNA, 19 nt, Artificial Sequence
  Description of Artificial Sequence: Synthetic oligonucleotide
  Sense strand starting at position 919 of SEQ ID NO: 1561354
cagcaugugaggugagaau

SEQ ID NO: 1665372 - RNA, 19 nt, Artificial Sequence
  Description of Artificial Sequence: Synthetic oligonucleotide
  Antisense strand to SEQ ID NO: 1665371
auucucaccucacaugcug

SEQ ID NO: 1665373 - RNA, 19 nt, Artificial Sequence
  Description of Artificial Sequence: Synthetic oligonucleotide
  Sense strand starting at position 926 of SEQ ID NO: 1561354
ugaggugagaauggaguua

SEQ ID NO: 1665374 - RNA, 19 nt, Artificial Sequence
  Description of Artificial Sequence: Synthetic oligonucleotide
  Antisense strand to SEQ ID NO: 1665373
uaacuccauucucaccuca

SEQ ID NO: 1665375 - RNA, 19 nt, Artificial Sequence
  Description of Artificial Sequence: Synthetic oligonucleotide
  Sense strand starting at position 1287 of SEQ ID NO: 1561354
aaauguauucggugacauu

SEQ ID NO: 1665376 - RNA, 19 nt, Artificial Sequence
  Description of Artificial Sequence: Synthetic oligonucleotide
  Antisense strand to SEQ ID NO: 1665375
aaugucaccgaauacauuu

SEQ ID NO: 1665377 - RNA, 19 nt, Artificial Sequence
  Description of Artificial Sequence: Synthetic oligonucleotide
  Sense strand starting at position 1288 of SEQ ID NO: 1561354
aauguauucggugacauua

SEQ ID NO: 1665378 - RNA, 19 nt, Artificial Sequence
  Description of Artificial Sequence: Synthetic oligonucleotide
  Antisense strand to SEQ ID NO: 1665377
uaaugucaccgaauacauu

SEQ ID NO: 1665379 - RNA, 19 nt, Artificial Sequence
  Description of Artificial Sequence: Synthetic oligonucleotide
  Sense strand starting at position 1300 of SEQ ID NO: 1561354
gacauuaaacucuggaguu

SEQ ID NO: 1665380 - RNA, 19 nt, Artificial Sequence
  Description of Artificial Sequence: Synthetic oligonucleotide
  Antisense strand to SEQ ID NO: 1665379
aacuccagaguuuaauguc

SEQ ID NO: 1665381 - RNA, 19 nt, Artificial Sequence
  Description of Artificial Sequence: Synthetic oligonucleotide
  Sense strand starting at position 1396 of SEQ ID NO: 1561354
uggagucagagcugccaaa

SEQ ID NO: 1665382 - RNA, 19 nt, Artificial Sequence
  Description of Artificial Sequence: Synthetic oligonucleotide
  Antisense strand to SEQ ID NO: 1665381
uuuggcagcucugacucca

SEQ ID NO: 1665383 - RNA, 19 nt, Artificial Sequence
  Description of Artificial Sequence: Synthetic oligonucleotide
  Sense strand starting at position 1526 of SEQ ID NO: 1561354
agacuagcugcuuaagcaa

SEQ ID NO: 1665384 - RNA, 19 nt, Artificial Sequence
  Description of Artificial Sequence: Synthetic oligonucleotide
  Antisense strand to SEQ ID NO: 1665383
uugcuuaagcagcuagucu

SEQ ID NO: 1665385 - RNA, 19 nt, Artificial Sequence
  Description of Artificial Sequence: Synthetic oligonucleotide
  Sense strand starting at position 1683 of SEQ ID NO: 1561354
ugucacgaaacgugaagau

SEQ ID NO: 1665386 - RNA, 19 nt, Artificial Sequence
  Description of Artificial Sequence: Synthetic oligonucleotide
  Antisense strand to SEQ ID NO: 1665385
aucuucacguuucgugaca

SEQ ID NO: 1665387 - RNA, 19 nt, Artificial Sequence
  Description of Artificial Sequence: Synthetic oligonucleotide
  Sense strand starting at position 1792 of SEQ ID NO: 1561354
gcugaacuucccuagucua

SEQ ID NO: 1665388 - RNA, 19 nt, Artificial Sequence
  Description of Artificial Sequence: Synthetic oligonucleotide
  Antisense strand to SEQ ID NO: 1665387
uagacuagggaaguucagc

SEQ ID NO: 1665389 - RNA, 19 nt, Artificial Sequence
  Description of Artificial Sequence: Synthetic oligonucleotide
  Sense strand starting at position 1821 of SEQ ID NO: 1561354
gaggccuuaucauugguua

SEQ ID NO: 1665390 - RNA, 19 nt, Artificial Sequence
  Description of Artificial Sequence: Synthetic oligonucleotide
  Antisense strand to SEQ ID NO: 1665389
uaaccaaugauaaggccuc

SEQ ID NO: 1665391 - RNA, 19 nt, Artificial Sequence
  Description of Artificial Sequence: Synthetic oligonucleotide
  Sense strand starting at position 2095 of SEQ ID NO: 1561354
cuuugacuuccgugcauuu

SEQ ID NO: 1665392 - RNA, 19 nt, Artificial Sequence
  Description of Artificial Sequence: Synthetic oligonucleotide
  Antisense strand to SEQ ID NO: 1665391
aaaugcacggaagucaaag

SEQ ID NO: 1665393 - RNA, 19 nt, Artificial Sequence
  Description of Artificial Sequence: Synthetic oligonucleotide
  Sense strand starting at position 2112 of SEQ ID NO: 1561354
uuggaaguccuuugacuuc

SEQ ID NO: 1665394 - RNA, 19 nt, Artificial Sequence
  Description of Artificial Sequence: Synthetic oligonucleotide
  Antisense strand to SEQ ID NO: 1665393
gaagucaaaggacuuccaa

SEQ ID NO: 1665395 - RNA, 19 nt, Artificial Sequence
  Description of Artificial Sequence: Synthetic oligonucleotide
  Sense strand starting at position 2401 of SEQ ID NO: 1561354
cuacacuugcgauauaaca

SEQ ID NO: 1665396 - RNA, 19 nt, Artificial Sequence
  Description of Artificial Sequence: Synthetic oligonucleotide
  Antisense strand to SEQ ID NO: 1665395
uguuauaucgcaaguguag

SEQ ID NO: 1665397 - RNA, 19 nt, Artificial Sequence
  Description of Artificial Sequence: Synthetic oligonucleotide
  Sense strand starting at position 2434 of SEQ ID NO: 1561354
auuuccuagucucagaaga

SEQ ID NO: 1665398 - RNA, 19 nt, Artificial Sequence
  Description of Artificial Sequence: Synthetic oligonucleotide
  Antisense strand to SEQ ID NO: 1665397
ucuucugagacuaggaaau

SEQ ID NO: 1665399 - RNA, 19 nt, Artificial Sequence
  Description of Artificial Sequence: Synthetic oligonucleotide
  Sense strand starting at position 2474 of SEQ ID NO: 1561354
uugucugaauccuuaacag

SEQ ID NO: 1665400 - RNA, 19 nt, Artificial Sequence
  Description of Artificial Sequence: Synthetic oligonucleotide
  Antisense strand to SEQ ID NO: 1665399
cuguuaaggauucagacaa

SEQ ID NO: 1665401 - RNA, 19 nt, Artificial Sequence
  Description of Artificial Sequence: Synthetic oligonucleotide
  Sense strand starting at position 2504 of SEQ ID NO: 1561354
gaguacugagaguguccua

SEQ ID NO: 1665402 - RNA, 19 nt, Artificial Sequence
  Description of Artificial Sequence: Synthetic oligonucleotide
  Antisense strand to SEQ ID NO: 1665401
uaggacacucucaguacuc

SEQ ID NO: 1665403 - RNA, 19 nt, Artificial Sequence
  Description of Artificial Sequence: Synthetic oligonucleotide
  Sense strand starting at position 2589 of SEQ ID NO: 1561354
cuuguugagacuuaggcuu

SEQ ID NO: 1665404 - RNA, 19 nt, Artificial Sequence
  Description of Artificial Sequence: Synthetic oligonucleotide
  Antisense strand to SEQ ID NO: 1665403
aagccuaagucucaacaag

SEQ ID NO: 1665405 - RNA, 19 nt, Artificial Sequence
  Description of Artificial Sequence: Synthetic oligonucleotide
  Sense strand starting at position 2738 of SEQ ID NO: 1561354
ccugauaacgugugagaac

SEQ ID NO: 1665406 - RNA, 19 nt, Artificial Sequence
  Description of Artificial Sequence: Synthetic oligonucleotide
  Antisense strand to SEQ ID NO: 1665405
guucucacacguuaucagg

SEQ ID NO: 1665407 - RNA, 19 nt, Artificial Sequence
  Description of Artificial Sequence: Synthetic oligonucleotide
  Sense strand starting at position 2795 of SEQ ID NO: 1561354
agagucucuguuuggaaua

SEQ ID NO: 1665408 - RNA, 19 nt, Artificial Sequence
  Description of Artificial Sequence: Synthetic oligonucleotide
  Antisense strand to SEQ ID NO: 1665407
uauuccaaacagagacucu

SEQ ID NO: 1665409 - RNA, 19 nt, Artificial Sequence
  Description of Artificial Sequence: Synthetic oligonucleotide
  Sense strand starting at position 2807 of SEQ ID NO: 1561354
uggaauaucuggcuggcau

SEQ ID NO: 1665410 - RNA, 19 nt, Artificial Sequence
  Description of Artificial Sequence: Synthetic oligonucleotide
  Antisense strand to SEQ ID NO: 1665409
augccagccagauauucca

SEQ ID NO: 1665411 - RNA, 19 nt, Artificial Sequence
  Description of Artificial Sequence: Synthetic oligonucleotide
  Sense strand starting at position 2808 of SEQ ID NO: 1561354
ggaauaucuggcuggcauu

SEQ ID NO: 1665412 - RNA, 19 nt, Artificial Sequence
  Description of Artificial Sequence: Synthetic oligonucleotide
  Antisense strand to SEQ ID NO: 1665411
aaugccagccagauauucc

SEQ ID NO: 1665413 - RNA, 19 nt, Artificial Sequence
  Description of Artificial Sequence: Synthetic oligonucleotide
  Sense strand starting at position 2868 of SEQ ID NO: 1561354
guuccaguccuagacuaga

SEQ ID NO: 1665414 - RNA, 19 nt, Artificial Sequence
  Description of Artificial Sequence: Synthetic oligonucleotide
  Antisense strand to SEQ ID NO: 1665413
ucuagucuaggacuggaac

SEQ ID NO: 1665415 - RNA, 19 nt, Artificial Sequence
  Description of Artificial Sequence: Synthetic oligonucleotide
  Sense strand starting at position 2921 of SEQ ID NO: 1561354
gcaggaaaugguugaauaa

SEQ ID NO: 1665416 - RNA, 19 nt, Artificial Sequence
  Description of Artificial Sequence: Synthetic oligonucleotide
  Antisense strand to SEQ ID NO: 1665415
uuauucaaccauuuccugc

SEQ ID NO: 1665417 - RNA, 19 nt, Artificial Sequence
  Description of Artificial Sequence: Synthetic oligonucleotide
  Sense strand starting at position 3056 of SEQ ID NO: 1561354
guugaaggauuacuugauu

SEQ ID NO: 1665418 - RNA, 19 nt, Artificial Sequence
  Description of Artificial Sequence: Synthetic oligonucleotide
  Antisense strand to SEQ ID NO: 1665417
aaucaaguaauccuucaac

SEQ ID NO: 1665419 - RNA, 19 nt, Artificial Sequence
  Description of Artificial Sequence: Synthetic oligonucleotide
  Sense strand starting at position 3177 of SEQ ID NO: 1561354
augugucuucucuaucaga

SEQ ID NO: 1665420 - RNA, 19 nt, Artificial Sequence
  Description of Artificial Sequence: Synthetic oligonucleotide
  Antisense strand to SEQ ID NO: 1665419
ucugauagagaagacacau

SEQ ID NO: 1665421 - RNA, 19 nt, Artificial Sequence
  Description of Artificial Sequence: Synthetic oligonucleotide
  Sense strand starting at position 3185 of SEQ ID NO: 1561354
ucucuaucagauggauaug

SEQ ID NO: 1665422 - RNA, 19 nt, Artificial Sequence
  Description of Artificial Sequence: Synthetic oligonucleotide
  Antisense strand to SEQ ID NO: 1665421
cauauccaucugauagaga

SEQ ID NO: 1665423 - RNA, 19 nt, Artificial Sequence
  Description of Artificial Sequence: Synthetic oligonucleotide
  Sense strand starting at position 3227 of SEQ ID NO: 1561354
cuugcuaacugugcuauuu

SEQ ID NO: 1665424 - RNA, 19 nt, Artificial Sequence
  Description of Artificial Sequence: Synthetic oligonucleotide
  Antisense strand to SEQ ID NO: 1665423
aaauagcacaguuagcaag

SEQ ID NO: 1665425 - RNA, 19 nt, Artificial Sequence
  Description of Artificial Sequence: Synthetic oligonucleotide
  Sense strand starting at position 3257 of SEQ ID NO: 1561354
augcuuauuugugcuuacu

SEQ ID NO: 1665426 - RNA, 19 nt, Artificial Sequence
  Description of Artificial Sequence: Synthetic oligonucleotide
  Antisense strand to SEQ ID NO: 1665425
aguaagcacaaauaagcau

SEQ ID NO: 1665427 - RNA, 19 nt, Artificial Sequence
  Description of Artificial Sequence: Synthetic oligonucleotide
  Sense strand starting at position 3259 of SEQ ID NO: 1561354
gcuuauuugugcuuacuua

SEQ ID NO: 1665428 - RNA, 19 nt, Artificial Sequence
  Description of Artificial Sequence: Synthetic oligonucleotide
  Antisense strand to SEQ ID NO: 1665427
uaaguaagcacaaauaagc

SEQ ID NO: 1665429 - RNA, 19 nt, Artificial Sequence
  Description of Artificial Sequence: Synthetic oligonucleotide
  Sense strand starting at position 3263 of SEQ ID NO: 1561354
auuugugcuuacuuagauu

SEQ ID NO: 1665430 - RNA, 19 nt, Artificial Sequence
  Description of Artificial Sequence: Synthetic oligonucleotide
  Antisense strand to SEQ ID NO: 1665429
aaucuaaguaagcacaaau

SEQ ID NO: 1665431 - RNA, 19 nt, Artificial Sequence
  Description of Artificial Sequence: Synthetic oligonucleotide
  Sense strand starting at position 3292 of SEQ ID NO: 1561354
gcaucugucaacgauugaa

SEQ ID NO: 1665432 - RNA, 19 nt, Artificial Sequence
  Description of Artificial Sequence: Synthetic oligonucleotide
  Antisense strand to SEQ ID NO: 1665431
uucaaucguugacagaugc

SEQ ID NO: 1665433 - RNA, 19 nt, Artificial Sequence
  Description of Artificial Sequence: Synthetic oligonucleotide
  Sense strand starting at position 3653 of SEQ ID NO: 1561354
agccuauaaugguaaauuu

SEQ ID NO: 1665434 - RNA, 19 nt, Artificial Sequence
  Description of Artificial Sequence: Synthetic oligonucleotide
  Antisense strand to SEQ ID NO: 1665433
aaauuuaccauuauaggcu

SEQ ID NO: 1665435 - RNA, 19 nt, Artificial Sequence
  Description of Artificial Sequence: Synthetic oligonucleotide
  Sense strand starting at position 46 of SEQ ID NO: 1561355
ggauuucuaucuggaccuu

SEQ ID NO: 1665436 - RNA, 19 nt, Artificial Sequence
  Description of Artificial Sequence: Synthetic oligonucleotide
  Antisense strand to SEQ ID NO: 1665435
aagguccagauagaaaucc

SEQ ID NO: 1665437 - RNA, 19 nt, Artificial Sequence
  Description of Artificial Sequence: Synthetic oligonucleotide
  Sense strand starting at position 80 of SEQ ID NO: 1561355
ggacacuuccuaggugaac

SEQ ID NO: 1665438 - RNA, 19 nt, Artificial Sequence
  Description of Artificial Sequence: Synthetic oligonucleotide
  Antisense strand to SEQ ID NO: 1665437
guucaccuaggaagugucc

SEQ ID NO: 1665439 - RNA, 19 nt, Artificial Sequence
  Description of Artificial Sequence: Synthetic oligonucleotide
  Sense strand starting at position 81 of SEQ ID NO: 1561355
gacacuuccuaggugaacu

SEQ ID NO: 1665440 - RNA, 19 nt, Artificial Sequence
  Description of Artificial Sequence: Synthetic oligonucleotide
  Antisense strand to SEQ ID NO: 1665439
aguucaccuaggaaguguc

SEQ ID NO: 1665441 - RNA, 19 nt, Artificial Sequence
  Description of Artificial Sequence: Synthetic oligonucleotide
  Sense strand starting at position 122 of SEQ ID NO: 1561355
uagagucuuggaugggaca

SEQ ID NO: 1665442 - RNA, 19 nt, Artificial Sequence
  Description of Artificial Sequence: Synthetic oligonucleotide
  Antisense strand to SEQ ID NO: 1665441
ugucccauccaagacucua

SEQ ID NO: 1665443 - RNA, 19 nt, Artificial Sequence
  Description of Artificial Sequence: Synthetic oligonucleotide
  Sense strand starting at position 134 of SEQ ID NO: 1561355
ugggacaaccuuugugaua

SEQ ID NO: 1665444 - RNA, 19 nt, Artificial Sequence
  Description of Artificial Sequence: Synthetic oligonucleotide
  Antisense strand to SEQ ID NO: 1665443
uaucacaaagguuguccca

SEQ ID NO: 1665445 - RNA, 19 nt, Artificial Sequence
  Description of Artificial Sequence: Synthetic oligonucleotide
  Sense strand starting at position 135 of SEQ ID NO: 1561355
gggacaaccuuugugauac

SEQ ID NO: 1665446 - RNA, 19 nt, Artificial Sequence
  Description of Artificial Sequence: Synthetic oligonucleotide
  Antisense strand to SEQ ID NO: 1665445
guaucacaaagguuguccc

SEQ ID NO: 1665447 - RNA, 19 nt, Artificial Sequence
  Description of Artificial Sequence: Synthetic oligonucleotide
  Sense strand starting at position 207 of SEQ ID NO: 1561355
ucccuaauugugugaccuu

SEQ ID NO: 1665448 - RNA, 19 nt, Artificial Sequence
  Description of Artificial Sequence: Synthetic oligonucleotide
  Antisense strand to SEQ ID NO: 1665447
aaggucacacaauuaggga

SEQ ID NO: 1665449 - RNA, 19 nt, Artificial Sequence
  Description of Artificial Sequence: Synthetic oligonucleotide
  Sense strand starting at position 230 of SEQ ID NO: 1561355
aagacauaguccucugugu

SEQ ID NO: 1665450 - RNA, 19 nt, Artificial Sequence
  Description of Artificial Sequence: Synthetic oligonucleotide
  Antisense strand to SEQ ID NO: 1665449
acacagaggacuaugucuu

SEQ ID NO: 1665451 - RNA, 19 nt, Artificial Sequence
  Description of Artificial Sequence: Synthetic oligonucleotide
  Sense strand starting at position 324 of SEQ ID NO: 1561355
gguugagagcuuuggucca

SEQ ID NO: 1665452 - RNA, 19 nt, Artificial Sequence
  Description of Artificial Sequence: Synthetic oligonucleotide
  Antisense strand to SEQ ID NO: 1665451
uggaccaaagcucucaacc

SEQ ID NO: 1665453 - RNA, 19 nt, Artificial Sequence
  Description of Artificial Sequence: Synthetic oligonucleotide
  Sense strand starting at position 326 of SEQ ID NO: 1561355
uugagagcuuugguccaca

SEQ ID NO: 1665454 - RNA, 19 nt, Artificial Sequence
  Description of Artificial Sequence: Synthetic oligonucleotide
  Antisense strand to SEQ ID NO: 1665453
uguggaccaaagcucucaa

SEQ ID NO: 1665455 - RNA, 19 nt, Artificial Sequence
  Description of Artificial Sequence: Synthetic oligonucleotide
  Sense strand starting at position 329 of SEQ ID NO: 1561355
agagcuuugguccacauaa

SEQ ID NO: 1665456 - RNA, 19 nt, Artificial Sequence
  Description of Artificial Sequence: Synthetic oligonucleotide
  Antisense strand to SEQ ID NO: 1665455
uuauguggaccaaagcucu

SEQ ID NO: 1665457 - RNA, 19 nt, Artificial Sequence
  Description of Artificial Sequence: Synthetic oligonucleotide
  Sense strand starting at position 372 of SEQ ID NO: 1561355
aaccaaggugcccaugauu

SEQ ID NO: 1665458 - RNA, 19 nt, Artificial Sequence
  Description of Artificial Sequence: Synthetic oligonucleotide
  Antisense strand to SEQ ID NO: 1665457
aaucaugggcaccuugguu

SEQ ID NO: 1665459 - RNA, 19 nt, Artificial Sequence
  Description of Artificial Sequence: Synthetic oligonucleotide
  Sense strand starting at position 589 of SEQ ID NO: 1561355
gcuggaaacuagguuugga

SEQ ID NO: 1665460 - RNA, 19 nt, Artificial Sequence
  Description of Artificial Sequence: Synthetic oligonucleotide
  Antisense strand to SEQ ID NO: 1665459
uccaaaccuaguuuccagc

SEQ ID NO: 1665461 - RNA, 19 nt, Artificial Sequence
  Description of Artificial Sequence: Synthetic oligonucleotide
  Sense strand starting at position 1394 of SEQ ID NO: 1561355
ucaacagaucuggguguuu

SEQ ID NO: 1665462 - RNA, 19 nt, Artificial Sequence
  Description of Artificial Sequence: Synthetic oligonucleotide
  Antisense strand to SEQ ID NO: 1665461
aaacacccagaucuguuga

SEQ ID NO: 1665463 - RNA, 19 nt, Artificial Sequence
  Description of Artificial Sequence: Synthetic oligonucleotide
  Sense strand starting at position 1396 of SEQ ID NO: 1561355
aacagaucuggguguuugu

SEQ ID NO: 1665464 - RNA, 19 nt, Artificial Sequence
  Description of Artificial Sequence: Synthetic oligonucleotide
  Antisense strand to SEQ ID NO: 1665463
acaaacacccagaucuguu

SEQ ID NO: 1665465 - RNA, 19 nt, Artificial Sequence
  Description of Artificial Sequence: Synthetic oligonucleotide
  Sense strand starting at position 1637 of SEQ ID NO: 1561355
ggugcucaccgggauaguu

SEQ ID NO: 1665466 - RNA, 19 nt, Artificial Sequence
  Description of Artificial Sequence: Synthetic oligonucleotide
  Antisense strand to SEQ ID NO: 1665465
aacuaucccggugagcacc

SEQ ID NO: 1665467 - RNA, 19 nt, Artificial Sequence
  Description of Artificial Sequence: Synthetic oligonucleotide
  Sense strand starting at position 1838 of SEQ ID NO: 1561355
gcuugaguucgaugacgag

SEQ ID NO: 1665468 - RNA, 19 nt, Artificial Sequence
  Description of Artificial Sequence: Synthetic oligonucleotide
  Antisense strand to SEQ ID NO: 1665467
cucgucaucgaacucaagc

SEQ ID NO: 1665469 - RNA, 19 nt, Artificial Sequence
  Description of Artificial Sequence: Synthetic oligonucleotide
  Sense strand starting at position 2184 of SEQ ID NO: 1561355
cgugcguuuggcuuaguga

SEQ ID NO: 1665470 - RNA, 19 nt, Artificial Sequence
  Description of Artificial Sequence: Synthetic oligonucleotide
  Antisense strand to SEQ ID NO: 1665469
ucacuaagccaaacgcacg

SEQ ID NO: 1665471 - RNA, 19 nt, Artificial Sequence
  Description of Artificial Sequence: Synthetic oligonucleotide
  Sense strand starting at position 2191 of SEQ ID NO: 1561355
uuggcuuagugaccaaauu

SEQ ID NO: 1665472 - RNA, 19 nt, Artificial Sequence
  Description of Artificial Sequence: Synthetic oligonucleotide
  Antisense strand to SEQ ID NO: 1665471
aauuuggucacuaagccaa

SEQ ID NO: 1665473 - RNA, 19 nt, Artificial Sequence
  Description of Artificial Sequence: Synthetic oligonucleotide
  Sense strand starting at position 2225 of SEQ ID NO: 1561355
cccacaaggcauugaaaca

SEQ ID NO: 1665474 - RNA, 19 nt, Artificial Sequence
  Description of Artificial Sequence: Synthetic oligonucleotide
  Antisense strand to SEQ ID NO: 1665473
uguuucaaugccuuguggg

SEQ ID NO: 1665475 - RNA, 19 nt, Artificial Sequence
  Description of Artificial Sequence: Synthetic oligonucleotide
  Sense strand starting at position 2321 of SEQ ID NO: 1561355
gucggucacguuucuuauu

SEQ ID NO: 1665476 - RNA, 19 nt, Artificial Sequence
  Description of Artificial Sequence: Synthetic oligonucleotide
  Antisense strand to SEQ ID NO: 1665475
aauaagaaacgugaccgac

SEQ ID NO: 1665477 - RNA, 19 nt, Artificial Sequence
  Description of Artificial Sequence: Synthetic oligonucleotide
  Sense strand starting at position 2335 of SEQ ID NO: 1561355
uuauuaggugccugauagu

SEQ ID NO: 1665478 - RNA, 19 nt, Artificial Sequence
  Description of Artificial Sequence: Synthetic oligonucleotide
  Antisense strand to SEQ ID NO: 1665477
acuaucaggcaccuaauaa

SEQ ID NO: 1665479 - RNA, 19 nt, Artificial Sequence
  Description of Artificial Sequence: Synthetic oligonucleotide
  Sense strand starting at position 2346 of SEQ ID NO: 1561355
cugauaguaaucugggcua

SEQ ID NO: 1665480 - RNA, 19 nt, Artificial Sequence
  Description of Artificial Sequence: Synthetic oligonucleotide
  Antisense strand to SEQ ID NO: 1665479
uagcccagauuacuaucag

SEQ ID NO: 1665481 - RNA, 19 nt, Artificial Sequence
  Description of Artificial Sequence: Synthetic oligonucleotide
  Sense strand starting at position 2348 of SEQ ID NO: 1561355
gauaguaaucugggcuauu

SEQ ID NO: 1665482 - RNA, 19 nt, Artificial Sequence
  Description of Artificial Sequence: Synthetic oligonucleotide
  Antisense strand to SEQ ID NO: 1665481
aauagcccagauuacuauc

SEQ ID NO: 1665483 - RNA, 19 nt, Artificial Sequence
  Description of Artificial Sequence: Synthetic oligonucleotide
  Sense strand starting at position 2437 of SEQ ID NO: 1561355
guuugaagcccugagaaua

SEQ ID NO: 1665484 - RNA, 19 nt, Artificial Sequence
  Description of Artificial Sequence: Synthetic oligonucleotide
  Antisense strand to SEQ ID NO: 1665483
uauucucagggcuucaaac

SEQ ID NO: 1665485 - RNA, 19 nt, Artificial Sequence
  Description of Artificial Sequence: Synthetic oligonucleotide
  Sense strand starting at position 2471 of SEQ ID NO: 1561355
agaagauaaucuuuguuug

SEQ ID NO: 1665486 - RNA, 19 nt, Artificial Sequence
  Description of Artificial Sequence: Synthetic oligonucleotide
  Antisense strand to SEQ ID NO: 1665485
caaacaaagauuaucuucu

SEQ ID NO: 1665487 - RNA, 19 nt, Artificial Sequence
  Description of Artificial Sequence: Synthetic oligonucleotide
  Sense strand starting at position 2474 of SEQ ID NO: 1561355
agauaaucuuuguuugcac

SEQ ID NO: 1665488 - RNA, 19 nt, Artificial Sequence
  Description of Artificial Sequence: Synthetic oligonucleotide
  Antisense strand to SEQ ID NO: 1665487
gugcaaacaaagauuaucu

SEQ ID NO: 1665489 - RNA, 19 nt, Artificial Sequence
  Description of Artificial Sequence: Synthetic oligonucleotide
  Sense strand starting at position 2868 of SEQ ID NO: 1561355
caucgacucuguuccuaga

SEQ ID NO: 1665490 - RNA, 19 nt, Artificial Sequence
  Description of Artificial Sequence: Synthetic oligonucleotide
  Antisense strand to SEQ ID NO: 1665489
ucuaggaacagagucgaug

SEQ ID NO: 1665491 - RNA, 19 nt, Artificial Sequence
  Description of Artificial Sequence: Synthetic oligonucleotide
  Sense strand starting at position 2886 of SEQ ID NO: 1561355
accagaagucgccauuaaa

SEQ ID NO: 1665492 - RNA, 19 nt, Artificial Sequence
  Description of Artificial Sequence: Synthetic oligonucleotide
  Antisense strand to SEQ ID NO: 1665491
uuuaauggcgacuucuggu

SEQ ID NO: 1665493 - RNA, 19 nt, Artificial Sequence
  Description of Artificial Sequence: Synthetic oligonucleotide
  Sense strand starting at position 3013 of SEQ ID NO: 1561355
cccucaaucccugaugagu

SEQ ID NO: 1665494 - RNA, 19 nt, Artificial Sequence
  Description of Artificial Sequence: Synthetic oligonucleotide
  Antisense strand to SEQ ID NO: 1665493
acucaucagggauugaggg

SEQ ID NO: 1665495 - RNA, 19 nt, Artificial Sequence
  Description of Artificial Sequence: Synthetic oligonucleotide
  Sense strand starting at position 3016 of SEQ ID NO: 1561355
ucaaucccugaugaguauu

SEQ ID NO: 1665496 - RNA, 19 nt, Artificial Sequence
  Description of Artificial Sequence: Synthetic oligonucleotide
  Antisense strand to SEQ ID NO: 1665495
aauacucaucagggauuga

SEQ ID NO: 1665497 - RNA, 19 nt, Artificial Sequence
  Description of Artificial Sequence: Synthetic oligonucleotide
  Sense strand starting at position 3019 of SEQ ID NO: 1561355
aucccugaugaguauucuu

SEQ ID NO: 1665498 - RNA, 19 nt, Artificial Sequence
  Description of Artificial Sequence: Synthetic oligonucleotide
  Antisense strand to SEQ ID NO: 1665497
aagaauacucaucagggau

SEQ ID NO: 1665499 - RNA, 19 nt, Artificial Sequence
  Description of Artificial Sequence: Synthetic oligonucleotide
  Sense strand starting at position 3175 of SEQ ID NO: 1561355
ugcugaucucuuggaguuc

SEQ ID NO: 1665500 - RNA, 19 nt, Artificial Sequence
  Description of Artificial Sequence: Synthetic oligonucleotide
  Antisense strand to SEQ ID NO: 1665499
gaacuccaagagaucagca

SEQ ID NO: 1665501 - RNA, 19 nt, Artificial Sequence
  Description of Artificial Sequence: Synthetic oligonucleotide
  Sense strand starting at position 3186 of SEQ ID NO: 1561355
uggaguucugcacauuguu

SEQ ID NO: 1665502 - RNA, 19 nt, Artificial Sequence
  Description of Artificial Sequence: Synthetic oligonucleotide
  Antisense strand to SEQ ID NO: 1665501
aacaaugugcagaacucca

SEQ ID NO: 1665503 - RNA, 19 nt, Artificial Sequence
  Description of Artificial Sequence: Synthetic oligonucleotide
  Sense strand starting at position 3221 of SEQ ID NO: 1561355
cauuguccuccugagagca

SEQ ID NO: 1665504 - RNA, 19 nt, Artificial Sequence
  Description of Artificial Sequence: Synthetic oligonucleotide
  Antisense strand to SEQ ID NO: 1665503
ugcucucaggaggacaaug

SEQ ID NO: 1665505 - RNA, 19 nt, Artificial Sequence
  Description of Artificial Sequence: Synthetic oligonucleotide
  Sense strand starting at position 3349 of SEQ ID NO: 1561355
ccaucugucaaaggaggua

SEQ ID NO: 1665506 - RNA, 19 nt, Artificial Sequence
  Description of Artificial Sequence: Synthetic oligonucleotide
  Antisense strand to SEQ ID NO: 1665505
uaccuccuuugacagaugg

SEQ ID NO: 1665507 - RNA, 19 nt, Artificial Sequence
  Description of Artificial Sequence: Synthetic oligonucleotide
  Sense strand starting at position 3374 of SEQ ID NO: 1561355
guuggaacuagaggguuau

SEQ ID NO: 1665508 - RNA, 19 nt, Artificial Sequence
  Description of Artificial Sequence: Synthetic oligonucleotide
  Antisense strand to SEQ ID NO: 1665507
auaacccucuaguuccaac

SEQ ID NO: 1665509 - RNA, 19 nt, Artificial Sequence
  Description of Artificial Sequence: Synthetic oligonucleotide
  Sense strand starting at position 3504 of SEQ ID NO: 1561355
ugcccugguuggucugaaa

SEQ ID NO: 1665510 - RNA, 19 nt, Artificial Sequence
  Description of Artificial Sequence: Synthetic oligonucleotide
  Antisense strand to SEQ ID NO: 1665509
uuucagaccaaccagggca

SEQ ID NO: 1665511 - RNA, 19 nt, Artificial Sequence
  Description of Artificial Sequence: Synthetic oligonucleotide
  Sense strand starting at position 3516 of SEQ ID NO: 1561355
ucugaaacucuuggcuuga

SEQ ID NO: 1665512 - RNA, 19 nt, Artificial Sequence
  Description of Artificial Sequence: Synthetic oligonucleotide
  Antisense strand to SEQ ID NO: 1665511
ucaagccaagaguuucaga

SEQ ID NO: 1665513 - RNA, 19 nt, Artificial Sequence
  Description of Artificial Sequence: Synthetic oligonucleotide
  Sense strand starting at position 3517 of SEQ ID NO: 1561355
cugaaacucuuggcuugaa

SEQ ID NO: 1665514 - RNA, 19 nt, Artificial Sequence
  Description of Artificial Sequence: Synthetic oligonucleotide
  Antisense strand to SEQ ID NO: 1665513
uucaagccaagaguuucag

SEQ ID NO: 1665515 - RNA, 19 nt, Artificial Sequence
  Description of Artificial Sequence: Synthetic oligonucleotide
  Sense strand starting at position 354 of SEQ ID NO: 1561356
accauaauugaguaauagc

SEQ ID NO: 1665516 - RNA, 19 nt, Artificial Sequence
  Description of Artificial Sequence: Synthetic oligonucleotide
  Antisense strand to SEQ ID NO: 1665515
gcuauuacucaauuauggu

SEQ ID NO: 1665517 - RNA, 19 nt, Artificial Sequence
  Description of Artificial Sequence: Synthetic oligonucleotide
  Sense strand starting at position 481 of SEQ ID NO: 1561356
ucagaucaugguugacuga

SEQ ID NO: 1665518 - RNA, 19 nt, Artificial Sequence
  Description of Artificial Sequence: Synthetic oligonucleotide
  Antisense strand to SEQ ID NO: 1665517
ucagucaaccaugaucuga

SEQ ID NO: 1665519 - RNA, 19 nt, Artificial Sequence
  Description of Artificial Sequence: Synthetic oligonucleotide
  Sense strand starting at position 518 of SEQ ID NO: 1561356
agugaaacugccgauuaag

SEQ ID NO: 1665520 - RNA, 19 nt, Artificial Sequence
  Description of Artificial Sequence: Synthetic oligonucleotide
  Antisense strand to SEQ ID NO: 1665519
cuuaaucggcaguuucacu

SEQ ID NO: 1665521 - RNA, 19 nt, Artificial Sequence
  Description of Artificial Sequence: Synthetic oligonucleotide
  Sense strand starting at position 540 of SEQ ID NO: 1561356
gcacuacugcauuggaguu

SEQ ID NO: 1665522 - RNA, 19 nt, Artificial Sequence
  Description of Artificial Sequence: Synthetic oligonucleotide
  Antisense strand to SEQ ID NO: 1665521
aacuccaaugcaguagugc

SEQ ID NO: 1665523 - RNA, 19 nt, Artificial Sequence
  Description of Artificial Sequence: Synthetic oligonucleotide
  Sense strand starting at position 552 of SEQ ID NO: 1561356
uggaguuauuacguaaaca

SEQ ID NO: 1665524 - RNA, 19 nt, Artificial Sequence
  Description of Artificial Sequence: Synthetic oligonucleotide
  Antisense strand to SEQ ID NO: 1665523
uguuuacguaauaacucca

SEQ ID NO: 1665525 - RNA, 19 nt, Artificial Sequence
  Description of Artificial Sequence: Synthetic oligonucleotide
  Sense strand starting at position 553 of SEQ ID NO: 1561356
ggaguuauuacguaaacau

SEQ ID NO: 1665526 - RNA, 19 nt, Artificial Sequence
  Description of Artificial Sequence: Synthetic oligonucleotide
  Antisense strand to SEQ ID NO: 1665525
auguuuacguaauaacucc

SEQ ID NO: 1665527 - RNA, 19 nt, Artificial Sequence
  Description of Artificial Sequence: Synthetic oligonucleotide
  Sense strand starting at position 888 of SEQ ID NO: 1561356
ccauguugguggucucgaa

SEQ ID NO: 1665528 - RNA, 19 nt, Artificial Sequence
  Description of Artificial Sequence: Synthetic oligonucleotide
  Antisense strand to SEQ ID NO: 1665527
uucgagaccaccaacaugg

SEQ ID NO: 1665529 - RNA, 19 nt, Artificial Sequence
  Description of Artificial Sequence: Synthetic oligonucleotide
  Sense strand starting at position 1004 of SEQ ID NO: 1561356
aacguaaguuucucuggca

SEQ ID NO: 1665530 - RNA, 19 nt, Artificial Sequence
  Description of Artificial Sequence: Synthetic oligonucleotide
  Antisense strand to SEQ ID NO: 1665529
ugccagagaaacuuacguu

SEQ ID NO: 1665531 - RNA, 19 nt, Artificial Sequence
  Description of Artificial Sequence: Synthetic oligonucleotide
  Sense strand starting at position 1005 of SEQ ID NO: 1561356
acguaaguuucucuggcau

SEQ ID NO: 1665532 - RNA, 19 nt, Artificial Sequence
  Description of Artificial Sequence: Synthetic oligonucleotide
  Antisense strand to SEQ ID NO: 1665531
augccagagaaacuuacgu

SEQ ID NO: 1665533 - RNA, 19 nt, Artificial Sequence
  Description of Artificial Sequence: Synthetic oligonucleotide
  Sense strand starting at position 1149 of SEQ ID NO: 1561356
gagcuacugcugugggaua

SEQ ID NO: 1665534 - RNA, 19 nt, Artificial Sequence
  Description of Artificial Sequence: Synthetic oligonucleotide
  Antisense strand to SEQ ID NO: 1665533
uaucccacagcaguagcuc

SEQ ID NO: 1665535 - RNA, 19 nt, Artificial Sequence
  Description of Artificial Sequence: Synthetic oligonucleotide
  Sense strand starting at position 1151 of SEQ ID NO: 1561356
gcuacugcugugggauaau

SEQ ID NO: 1665536 - RNA, 19 nt, Artificial Sequence
  Description of Artificial Sequence: Synthetic oligonucleotide
  Antisense strand to SEQ ID NO: 1665535
auuaucccacagcaguagc

SEQ ID NO: 1665537 - RNA, 19 nt, Artificial Sequence
  Description of Artificial Sequence: Synthetic oligonucleotide
  Sense strand starting at position 1200 of SEQ ID NO: 1561356
gguccuauuucugugcaau

SEQ ID NO: 1665538 - RNA, 19 nt, Artificial Sequence
  Description of Artificial Sequence: Synthetic oligonucleotide
  Antisense strand to SEQ ID NO: 1665537
auugcacagaaauaggacc

SEQ ID NO: 1665539 - RNA, 19 nt, Artificial Sequence
  Description of Artificial Sequence: Synthetic oligonucleotide
  Sense strand starting at position 1201 of SEQ ID NO: 1561356
guccuauuucugugcaaua

SEQ ID NO: 1665540 - RNA, 19 nt, Artificial Sequence
  Description of Artificial Sequence: Synthetic oligonucleotide
  Antisense strand to SEQ ID NO: 1665539
uauugcacagaaauaggac

SEQ ID NO: 1665541 - RNA, 19 nt, Artificial Sequence
  Description of Artificial Sequence: Synthetic oligonucleotide
  Sense strand starting at position 1218 of SEQ ID NO: 1561356
uauggagauugauggaaau

SEQ ID NO: 1665542 - RNA, 19 nt, Artificial Sequence
  Description of Artificial Sequence: Synthetic oligonucleotide
  Antisense strand to SEQ ID NO: 1665541
auuuccaucaaucuccaua

SEQ ID NO: 1665543 - RNA, 19 nt, Artificial Sequence
  Description of Artificial Sequence: Synthetic oligonucleotide
  Sense strand starting at position 1228 of SEQ ID NO: 1561356
gauggaaauguuuacagcu

SEQ ID NO: 1665544 - RNA, 19 nt, Artificial Sequence
  Description of Artificial Sequence: Synthetic oligonucleotide
  Antisense strand to SEQ ID NO: 1665543
agcuguaaacauuuccauc

SEQ ID NO: 1665545 - RNA, 19 nt, Artificial Sequence
  Description of Artificial Sequence: Synthetic oligonucleotide
  Sense strand starting at position 1278 of SEQ ID NO: 1561356
gucauuaguuaaguaaucu

SEQ ID NO: 1665546 - RNA, 19 nt, Artificial Sequence
  Description of Artificial Sequence: Synthetic oligonucleotide
  Antisense strand to SEQ ID NO: 1665545
agauuacuuaacuaaugac

SEQ ID NO: 1665547 - RNA, 19 nt, Artificial Sequence
  Description of Artificial Sequence: Synthetic oligonucleotide
  Sense strand starting at position 1343 of SEQ ID NO: 1561356
agaugacauugcucucauc

SEQ ID NO: 1665548 - RNA, 19 nt, Artificial Sequence
  Description of Artificial Sequence: Synthetic oligonucleotide
  Antisense strand to SEQ ID NO: 1665547
gaugagagcaaugucaucu

SEQ ID NO: 1665549 - RNA, 19 nt, Artificial Sequence
  Description of Artificial Sequence: Synthetic oligonucleotide
  Sense strand starting at position 1370 of SEQ ID NO: 1561356
guguaaauacuuuauacag

SEQ ID NO: 1665550 - RNA, 19 nt, Artificial Sequence
  Description of Artificial Sequence: Synthetic oligonucleotide
  Antisense strand to SEQ ID NO: 1665549
cuguauaaaguauuuacac

SEQ ID NO: 1665551 - RNA, 19 nt, Artificial Sequence
  Description of Artificial Sequence: Synthetic oligonucleotide
  Sense strand starting at position 1402 of SEQ ID NO: 1561356
agaagaggcuuccuggcaa

SEQ ID NO: 1665552 - RNA, 19 nt, Artificial Sequence
  Description of Artificial Sequence: Synthetic oligonucleotide
  Antisense strand to SEQ ID NO: 1665551
uugccaggaagccucuucu

SEQ ID NO: 1665553 - RNA, 19 nt, Artificial Sequence
  Description of Artificial Sequence: Synthetic oligonucleotide
  Sense strand starting at position 1477 of SEQ ID NO: 1561356
cugagaguugaagagucuu

SEQ ID NO: 1665554 - RNA, 19 nt, Artificial Sequence
  Description of Artificial Sequence: Synthetic oligonucleotide
  Antisense strand to SEQ ID NO: 1665553
aagacucuucaacucucag

SEQ ID NO: 1665555 - RNA, 19 nt, Artificial Sequence
  Description of Artificial Sequence: Synthetic oligonucleotide
  Sense strand starting at position 2070 of SEQ ID NO: 1561356
cgaguugcugggagccaua

SEQ ID NO: 1665556 - RNA, 19 nt, Artificial Sequence
  Description of Artificial Sequence: Synthetic oligonucleotide
  Antisense strand to SEQ ID NO: 1665555
uauggcucccagcaacucg

SEQ ID NO: 1665557 - RNA, 19 nt, Artificial Sequence
  Description of Artificial Sequence: Synthetic oligonucleotide
  Sense strand starting at position 2257 of SEQ ID NO: 1561356
aaacuagguguuugaaauu

SEQ ID NO: 1665558 - RNA, 19 nt, Artificial Sequence
  Description of Artificial Sequence: Synthetic oligonucleotide
  Antisense strand to SEQ ID NO: 1665557
aauuucaaacaccuaguuu

SEQ ID NO: 1665559 - RNA, 19 nt, Artificial Sequence
  Description of Artificial Sequence: Synthetic oligonucleotide
  Sense strand starting at position 2268 of SEQ ID NO: 1561356
uugaaauuaucuuuccgua

SEQ ID NO: 1665560 - RNA, 19 nt, Artificial Sequence
  Description of Artificial Sequence: Synthetic oligonucleotide
  Antisense strand to SEQ ID NO: 1665559
uacggaaagauaauuucaa

SEQ ID NO: 1665561 - RNA, 19 nt, Artificial Sequence
  Description of Artificial Sequence: Synthetic oligonucleotide
  Sense strand starting at position 2273 of SEQ ID NO: 1561356
auuaucuuuccguacuguu

SEQ ID NO: 1665562 - RNA, 19 nt, Artificial Sequence
  Description of Artificial Sequence: Synthetic oligonucleotide
  Antisense strand to SEQ ID NO: 1665561
aacaguacggaaagauaau

SEQ ID NO: 1665563 - RNA, 19 nt, Artificial Sequence
  Description of Artificial Sequence: Synthetic oligonucleotide
  Sense strand starting at position 2335 of SEQ ID NO: 1561356
aggauuaauaguggcaauu

SEQ ID NO: 1665564 - RNA, 19 nt, Artificial Sequence
  Description of Artificial Sequence: Synthetic oligonucleotide
  Antisense strand to SEQ ID NO: 1665563
aauugccacuauuaauccu

SEQ ID NO: 1665565 - RNA, 19 nt, Artificial Sequence
  Description of Artificial Sequence: Synthetic oligonucleotide
  Sense strand starting at position 2354 of SEQ ID NO: 1561356
agacuaaucacgugugaga

SEQ ID NO: 1665566 - RNA, 19 nt, Artificial Sequence
  Description of Artificial Sequence: Synthetic oligonucleotide
  Antisense strand to SEQ ID NO: 1665565
ucucacacgugauuagucu

SEQ ID NO: 1665567 - RNA, 19 nt, Artificial Sequence
  Description of Artificial Sequence: Synthetic oligonucleotide
  Sense strand starting at position 2356 of SEQ ID NO: 1561356
acuaaucacgugugagaaa

SEQ ID NO: 1665568 - RNA, 19 nt, Artificial Sequence
  Description of Artificial Sequence: Synthetic oligonucleotide
  Antisense strand to SEQ ID NO: 1665567
uuucucacacgugauuagu

SEQ ID NO: 1665569 - RNA, 19 nt, Artificial Sequence
  Description of Artificial Sequence: Synthetic oligonucleotide
  Sense strand starting at position 2433 of SEQ ID NO: 1561356
guggguucuaucuaagaug

SEQ ID NO: 1665570 - RNA, 19 nt, Artificial Sequence
  Description of Artificial Sequence: Synthetic oligonucleotide
  Antisense strand to SEQ ID NO: 1665569
caucuuagauagaacccac

SEQ ID NO: 1665571 - RNA, 19 nt, Artificial Sequence
  Description of Artificial Sequence: Synthetic oligonucleotide
  Sense strand starting at position 2540 of SEQ ID NO: 1561356
ccaucauacguuuaggaga

SEQ ID NO: 1665572 - RNA, 19 nt, Artificial Sequence
  Description of Artificial Sequence: Synthetic oligonucleotide
  Antisense strand to SEQ ID NO: 1665571
ucuccuaaacguaugaugg

SEQ ID NO: 1665573 - RNA, 19 nt, Artificial Sequence
  Description of Artificial Sequence: Synthetic oligonucleotide
  Sense strand starting at position 2585 of SEQ ID NO: 1561356
aguaacaccucucuguauu

SEQ ID NO: 1665574 - RNA, 19 nt, Artificial Sequence
  Description of Artificial Sequence: Synthetic oligonucleotide
  Antisense strand to SEQ ID NO: 1665573
aauacagagagguguuacu

SEQ ID NO: 1665575 - RNA, 19 nt, Artificial Sequence
  Description of Artificial Sequence: Synthetic oligonucleotide
  Sense strand starting at position 2586 of SEQ ID NO: 1561356
guaacaccucucuguauua

SEQ ID NO: 1665576 - RNA, 19 nt, Artificial Sequence
  Description of Artificial Sequence: Synthetic oligonucleotide
  Antisense strand to SEQ ID NO: 1665575
uaauacagagagguguuac

SEQ ID NO: 1665577 - RNA, 19 nt, Artificial Sequence
  Description of Artificial Sequence: Synthetic oligonucleotide
  Sense strand starting at position 2608 of SEQ ID NO: 1561356
gccuguagccuuuauggca

SEQ ID NO: 1665578 - RNA, 19 nt, Artificial Sequence
  Description of Artificial Sequence: Synthetic oligonucleotide
  Antisense strand to SEQ ID NO: 1665577
ugccauaaaggcuacaggc

SEQ ID NO: 1665579 - RNA, 19 nt, Artificial Sequence
  Description of Artificial Sequence: Synthetic oligonucleotide
  Sense strand starting at position 3013 of SEQ ID NO: 1561356
cgagcucuguucuuauuaa

SEQ ID NO: 1665580 - RNA, 19 nt, Artificial Sequence
  Description of Artificial Sequence: Synthetic oligonucleotide
  Antisense strand to SEQ ID NO: 1665579
uuaauaagaacagagcucg

SEQ ID NO: 1665581 - RNA, 19 nt, Artificial Sequence
  Description of Artificial Sequence: Synthetic oligonucleotide
  Sense strand starting at position 3053 of SEQ ID NO: 1561356
ggagucaguccagggugau

SEQ ID NO: 1665582 - RNA, 19 nt, Artificial Sequence
  Description of Artificial Sequence: Synthetic oligonucleotide
  Antisense strand to SEQ ID NO: 1665581
aucacccuggacugacucc

SEQ ID NO: 1665583 - RNA, 19 nt, Artificial Sequence
  Description of Artificial Sequence: Synthetic oligonucleotide
  Sense strand starting at position 3054 of SEQ ID NO: 1561356
gagucaguccagggugaug

SEQ ID NO: 1665584 - RNA, 19 nt, Artificial Sequence
  Description of Artificial Sequence: Synthetic oligonucleotide
  Antisense strand to SEQ ID NO: 1665583
caucacccuggacugacuc

SEQ ID NO: 1665585 - RNA, 19 nt, Artificial Sequence
  Description of Artificial Sequence: Synthetic oligonucleotide
  Sense strand starting at position 3379 of SEQ ID NO: 1561356
gaacauguuggcggaagaa

SEQ ID NO: 1665586 - RNA, 19 nt, Artificial Sequence
  Description of Artificial Sequence: Synthetic oligonucleotide
  Antisense strand to SEQ ID NO: 1665585
uucuuccgccaacauguuc

SEQ ID NO: 1665587 - RNA, 19 nt, Artificial Sequence
  Description of Artificial Sequence: Synthetic oligonucleotide
  Sense strand starting at position 3649 of SEQ ID NO: 1561356
gcgauaacgcagggaucua

SEQ ID NO: 1665588 - RNA, 19 nt, Artificial Sequence
  Description of Artificial Sequence: Synthetic oligonucleotide
  Antisense strand to SEQ ID NO: 1665587
uagaucccugcguuaucgc

SEQ ID NO: 1665589 - RNA, 19 nt, Artificial Sequence
  Description of Artificial Sequence: Synthetic oligonucleotide
  Sense strand starting at position 3650 of SEQ ID NO: 1561356
cgauaacgcagggaucuaa

SEQ ID NO: 1665590 - RNA, 19 nt, Artificial Sequence
  Description of Artificial Sequence: Synthetic oligonucleotide
  Antisense strand to SEQ ID NO: 1665589
uuagaucccugcguuaucg

SEQ ID NO: 1665591 - RNA, 19 nt, Artificial Sequence
  Description of Artificial Sequence: Synthetic oligonucleotide
  Sense strand starting at position 3928 of SEQ ID NO: 1561356
gcauuugacugucaauagu

SEQ ID NO: 1665592 - RNA, 19 nt, Artificial Sequence
  Description of Artificial Sequence: Synthetic oligonucleotide
  Antisense strand to SEQ ID NO: 1665591
acuauugacagucaaaugc

SEQ ID NO: 1665593 - RNA, 19 nt, Artificial Sequence
  Description of Artificial Sequence: Synthetic oligonucleotide
  Sense strand starting at position 3934 of SEQ ID NO: 1561356
gacugucaauaguuaggau

SEQ ID NO: 1665594 - RNA, 19 nt, Artificial Sequence
  Description of Artificial Sequence: Synthetic oligonucleotide
  Antisense strand to SEQ ID NO: 1665593
auccuaacuauugacaguc

SEQ ID NO: 1665595 - RNA, 19 nt, Artificial Sequence
  Description of Artificial Sequence: Synthetic oligonucleotide
  Sense strand starting at position 71 of SEQ ID NO: 1561357
aagaauauuccacguggau

SEQ ID NO: 1665596 - RNA, 19 nt, Artificial Sequence
  Description of Artificial Sequence: Synthetic oligonucleotide
  Antisense strand to SEQ ID NO: 1665595
auccacguggaauauucuu

SEQ ID NO: 1665597 - RNA, 19 nt, Artificial Sequence
  Description of Artificial Sequence: Synthetic oligonucleotide
  Sense strand starting at position 160 of SEQ ID NO: 1561357
gagguaauggccuaauugu

SEQ ID NO: 1665598 - RNA, 19 nt, Artificial Sequence
  Description of Artificial Sequence: Synthetic oligonucleotide
  Antisense strand to SEQ ID NO: 1665597
acaauuaggccauuaccuc

SEQ ID NO: 1665599 - RNA, 19 nt, Artificial Sequence
  Description of Artificial Sequence: Synthetic oligonucleotide
  Sense strand starting at position 195 of SEQ ID NO: 1561357
agaagugacucaguuagaa

SEQ ID NO: 1665600 - RNA, 19 nt, Artificial Sequence
  Description of Artificial Sequence: Synthetic oligonucleotide
  Antisense strand to SEQ ID NO: 1665599
uucuaacugagucacuucu

SEQ ID NO: 1665601 - RNA, 19 nt, Artificial Sequence
  Description of Artificial Sequence: Synthetic oligonucleotide
  Sense strand starting at position 392 of SEQ ID NO: 1561357
gggcuaacuaauggucaga

SEQ ID NO: 1665602 - RNA, 19 nt, Artificial Sequence
  Description of Artificial Sequence: Synthetic oligonucleotide
  Antisense strand to SEQ ID NO: 1665601
ucugaccauuaguuagccc

SEQ ID NO: 1665603 - RNA, 19 nt, Artificial Sequence
  Description of Artificial Sequence: Synthetic oligonucleotide
  Sense strand starting at position 394 of SEQ ID NO: 1561357
gcuaacuaauggucagaug

SEQ ID NO: 1665604 - RNA, 19 nt, Artificial Sequence
  Description of Artificial Sequence: Synthetic oligonucleotide
  Antisense strand to SEQ ID NO: 1665603
caucugaccauuaguuagc

SEQ ID NO: 1665605 - RNA, 19 nt, Artificial Sequence
  Description of Artificial Sequence: Synthetic oligonucleotide
  Sense strand starting at position 415 of SEQ ID NO: 1561357
guauacgguguaucguuua

SEQ ID NO: 1665606 - RNA, 19 nt, Artificial Sequence
  Description of Artificial Sequence: Synthetic oligonucleotide
  Antisense strand to SEQ ID NO: 1665605
uaaacgauacaccguauac

SEQ ID NO: 1665607 - RNA, 19 nt, Artificial Sequence
  Description of Artificial Sequence: Synthetic oligonucleotide
  Sense strand starting at position 603 of SEQ ID NO: 1561357
ucuagaaagucuucuagca

SEQ ID NO: 1665608 - RNA, 19 nt, Artificial Sequence
  Description of Artificial Sequence: Synthetic oligonucleotide
  Antisense strand to SEQ ID NO: 1665607
ugcuagaagacuuucuaga

SEQ ID NO: 1665609 - RNA, 19 nt, Artificial Sequence
  Description of Artificial Sequence: Synthetic oligonucleotide
  Sense strand starting at position 681 of SEQ ID NO: 1561357
gggcuccauucuuccuaua

SEQ ID NO: 1665610 - RNA, 19 nt, Artificial Sequence
  Description of Artificial Sequence: Synthetic oligonucleotide
  Antisense strand to SEQ ID NO: 1665609
uauaggaagaauggagccc

SEQ ID NO: 1665611 - RNA, 19 nt, Artificial Sequence
  Description of Artificial Sequence: Synthetic oligonucleotide
  Sense strand starting at position 683 of SEQ ID NO: 1561357
gcuccauucuuccuauagu

SEQ ID NO: 1665612 - RNA, 19 nt, Artificial Sequence
  Description of Artificial Sequence: Synthetic oligonucleotide
  Antisense strand to SEQ ID NO: 1665611
acuauaggaagaauggagc

SEQ ID NO: 1665613 - RNA, 19 nt, Artificial Sequence
  Description of Artificial Sequence: Synthetic oligonucleotide
  Sense strand starting at position 1055 of SEQ ID NO: 1561357
ggcuauuuaccaggugcca

SEQ ID NO: 1665614 - RNA, 19 nt, Artificial Sequence
  Description of Artificial Sequence: Synthetic oligonucleotide
  Antisense strand to SEQ ID NO: 1665613
uggcaccugguaaauagcc

SEQ ID NO: 1665615 - RNA, 19 nt, Artificial Sequence
  Description of Artificial Sequence: Synthetic oligonucleotide
  Sense strand starting at position 2199 of SEQ ID NO: 1561357
acagucguccucuggugaa

SEQ ID NO: 1665616 - RNA, 19 nt, Artificial Sequence
  Description of Artificial Sequence: Synthetic oligonucleotide
  Antisense strand to SEQ ID NO: 1665615
uucaccagaggacgacugu

SEQ ID NO: 1665617 - RNA, 19 nt, Artificial Sequence
  Description of Artificial Sequence: Synthetic oligonucleotide
  Sense strand starting at position 2311 of SEQ ID NO: 1561357
caaggucuuccgggucauu

SEQ ID NO: 1665618 - RNA, 19 nt, Artificial Sequence
  Description of Artificial Sequence: Synthetic oligonucleotide
  Antisense strand to SEQ ID NO: 1665617
aaugacccggaagaccuug

SEQ ID NO: 1665619 - RNA, 19 nt, Artificial Sequence
  Description of Artificial Sequence: Synthetic oligonucleotide
  Sense strand starting at position 2344 of SEQ ID NO: 1561357
aacguuucccuccgagaca

SEQ ID NO: 1665620 - RNA, 19 nt, Artificial Sequence
  Description of Artificial Sequence: Synthetic oligonucleotide
  Antisense strand to SEQ ID NO: 1665619
ugucucggagggaaacguu

SEQ ID NO: 1665621 - RNA, 19 nt, Artificial Sequence
  Description of Artificial Sequence: Synthetic oligonucleotide
  Sense strand starting at position 2412 of SEQ ID NO: 1561357
gggcuccucucaucccaaa

SEQ ID NO: 1665622 - RNA, 19 nt, Artificial Sequence
  Description of Artificial Sequence: Synthetic oligonucleotide
  Antisense strand to SEQ ID NO: 1665621
uuugggaugagaggagccc

SEQ ID NO: 1665623 - RNA, 19 nt, Artificial Sequence
  Description of Artificial Sequence: Synthetic oligonucleotide
  Sense strand starting at position 2527 of SEQ ID NO: 1561357
gacugucacgacuguaguu

SEQ ID NO: 1665624 - RNA, 19 nt, Artificial Sequence
  Description of Artificial Sequence: Synthetic oligonucleotide
  Antisense strand to SEQ ID NO: 1665623
aacuacagucgugacaguc

SEQ ID NO: 1665625 - RNA, 19 nt, Artificial Sequence
  Description of Artificial Sequence: Synthetic oligonucleotide
  Sense strand starting at position 2536 of SEQ ID NO: 1561357
gacuguaguucgccaacca

SEQ ID NO: 1665626 - RNA, 19 nt, Artificial Sequence
  Description of Artificial Sequence: Synthetic oligonucleotide
  Antisense strand to SEQ ID NO: 1665625
ugguuggcgaacuacaguc

SEQ ID NO: 1665627 - RNA, 19 nt, Artificial Sequence
  Description of Artificial Sequence: Synthetic oligonucleotide
  Sense strand starting at position 2537 of SEQ ID NO: 1561357
acuguaguucgccaaccaa

SEQ ID NO: 1665628 - RNA, 19 nt, Artificial Sequence
  Description of Artificial Sequence: Synthetic oligonucleotide
  Antisense strand to SEQ ID NO: 1665627
uugguuggcgaacuacagu

SEQ ID NO: 1665629 - RNA, 19 nt, Artificial Sequence
  Description of Artificial Sequence: Synthetic oligonucleotide
  Sense strand starting at position 2554 of SEQ ID NO: 1561357
aagggcauuuccuggaaau

SEQ ID NO: 1665630 - RNA, 19 nt, Artificial Sequence
  Description of Artificial Sequence: Synthetic oligonucleotide
  Antisense strand to SEQ ID NO: 1665629
auuuccaggaaaugcccuu

SEQ ID NO: 1665631 - RNA, 19 nt, Artificial Sequence
  Description of Artificial Sequence: Synthetic oligonucleotide
  Sense strand starting at position 2578 of SEQ ID NO: 1561357
gggacacguaucugugaca

SEQ ID NO: 1665632 - RNA, 19 nt, Artificial Sequence
  Description of Artificial Sequence: Synthetic oligonucleotide
  Antisense strand to SEQ ID NO: 1665631
ugucacagauacguguccc

SEQ ID NO: 1665633 - RNA, 19 nt, Artificial Sequence
  Description of Artificial Sequence: Synthetic oligonucleotide
  Sense strand starting at position 2772 of SEQ ID NO: 1561357
uggaccucucuguaugcaa

SEQ ID NO: 1665634 - RNA, 19 nt, Artificial Sequence
  Description of Artificial Sequence: Synthetic oligonucleotide
  Antisense strand to SEQ ID NO: 1665633
uugcauacagagaggucca

SEQ ID NO: 1665635 - RNA, 19 nt, Artificial Sequence
  Description of Artificial Sequence: Synthetic oligonucleotide
  Sense strand starting at position 2791 of SEQ ID NO: 1561357
gccagagcagucuacuguu

SEQ ID NO: 1665636 - RNA, 19 nt, Artificial Sequence
  Description of Artificial Sequence: Synthetic oligonucleotide
  Antisense strand to SEQ ID NO: 1665635
aacaguagacugcucuggc

SEQ ID NO: 1665637 - RNA, 19 nt, Artificial Sequence
  Description of Artificial Sequence: Synthetic oligonucleotide
  Sense strand starting at position 2799 of SEQ ID NO: 1561357
agucuacuguuuguguaua

SEQ ID NO: 1665638 - RNA, 19 nt, Artificial Sequence
  Description of Artificial Sequence: Synthetic oligonucleotide
  Antisense strand to SEQ ID NO: 1665637
uauacacaaacaguagacu

SEQ ID NO: 1665639 - RNA, 19 nt, Artificial Sequence
  Description of Artificial Sequence: Synthetic oligonucleotide
  Sense strand starting at position 2801 of SEQ ID NO: 1561357
ucuacuguuuguguauauu

SEQ ID NO: 1665640 - RNA, 19 nt, Artificial Sequence
  Description of Artificial Sequence: Synthetic oligonucleotide
  Antisense strand to SEQ ID NO: 1665639
aauauacacaaacaguaga

SEQ ID NO: 1665641 - RNA, 19 nt, Artificial Sequence
  Description of Artificial Sequence: Synthetic oligonucleotide
  Sense strand starting at position 2811 of SEQ ID NO: 1561357
guguauauuuggguuguuu

SEQ ID NO: 1665642 - RNA, 19 nt, Artificial Sequence
  Description of Artificial Sequence: Synthetic oligonucleotide
  Antisense strand to SEQ ID NO: 1665641
aaacaacccaaauauacac

SEQ ID NO: 1665643 - RNA, 19 nt, Artificial Sequence
  Description of Artificial Sequence: Synthetic oligonucleotide
  Sense strand starting at position 2813 of SEQ ID NO: 1561357
guauauuuggguuguuuac

SEQ ID NO: 1665644 - RNA, 19 nt, Artificial Sequence
  Description of Artificial Sequence: Synthetic oligonucleotide
  Antisense strand to SEQ ID NO: 1665643
guaaacaacccaaauauac

SEQ ID NO: 1665645 - RNA, 19 nt, Artificial Sequence
  Description of Artificial Sequence: Synthetic oligonucleotide
  Sense strand starting at position 2882 of SEQ ID NO: 1561357
uaaauagugucgcuauaga

SEQ ID NO: 1665646 - RNA, 19 nt, Artificial Sequence
  Description of Artificial Sequence: Synthetic oligonucleotide
  Antisense strand to SEQ ID NO: 1665645
ucuauagcgacacuauuua

SEQ ID NO: 1665647 - RNA, 19 nt, Artificial Sequence
  Description of Artificial Sequence: Synthetic oligonucleotide
  Sense strand starting at position 2907 of SEQ ID NO: 1561357
uguacuuauuaaguacuga

SEQ ID NO: 1665648 - RNA, 19 nt, Artificial Sequence
  Description of Artificial Sequence: Synthetic oligonucleotide
  Antisense strand to SEQ ID NO: 1665647
ucaguacuuaauaaguaca

SEQ ID NO: 1665649 - RNA, 19 nt, Artificial Sequence
  Description of Artificial Sequence: Synthetic oligonucleotide
  Sense strand starting at position 2926 of SEQ ID NO: 1561357
ccugcaugaucuucgugaa

SEQ ID NO: 1665650 - RNA, 19 nt, Artificial Sequence
  Description of Artificial Sequence: Synthetic oligonucleotide
  Antisense strand to SEQ ID NO: 1665649
uucacgaagaucaugcagg

SEQ ID NO: 1665651 - RNA, 19 nt, Artificial Sequence
  Description of Artificial Sequence: Synthetic oligonucleotide
  Sense strand starting at position 2927 of SEQ ID NO: 1561357
cugcaugaucuucgugaag

SEQ ID NO: 1665652 - RNA, 19 nt, Artificial Sequence
  Description of Artificial Sequence: Synthetic oligonucleotide
  Antisense strand to SEQ ID NO: 1665651
cuucacgaagaucaugcag

SEQ ID NO: 1665653 - RNA, 19 nt, Artificial Sequence
  Description of Artificial Sequence: Synthetic oligonucleotide
  Sense strand starting at position 2948 of SEQ ID NO: 1561357
gugcuucuguuaccagaaa

SEQ ID NO: 1665654 - RNA, 19 nt, Artificial Sequence
  Description of Artificial Sequence: Synthetic oligonucleotide
  Antisense strand to SEQ ID NO: 1665653
uuucugguaacagaagcac

SEQ ID NO: 1665655 - RNA, 19 nt, Artificial Sequence
  Description of Artificial Sequence: Synthetic oligonucleotide
  Sense strand starting at position 2994 of SEQ ID NO: 1561357
guucuuagagcucacgcaa

SEQ ID NO: 1665656 - RNA, 19 nt, Artificial Sequence
  Description of Artificial Sequence: Synthetic oligonucleotide
  Antisense strand to SEQ ID NO: 1665655
uugcgugagcucuaagaac

SEQ ID NO: 1665657 - RNA, 19 nt, Artificial Sequence
  Description of Artificial Sequence: Synthetic oligonucleotide
  Sense strand starting at position 3078 of SEQ ID NO: 1561357
uggguacuccauuguuaga

SEQ ID NO: 1665658 - RNA, 19 nt, Artificial Sequence
  Description of Artificial Sequence: Synthetic oligonucleotide
  Antisense strand to SEQ ID NO: 1665657
ucuaacaauggaguaccca

SEQ ID NO: 1665659 - RNA, 19 nt, Artificial Sequence
  Description of Artificial Sequence: Synthetic oligonucleotide
  Sense strand starting at position 3119 of SEQ ID NO: 1561357
uagggauacuuguauuuau

SEQ ID NO: 1665660 - RNA, 19 nt, Artificial Sequence
  Description of Artificial Sequence: Synthetic oligonucleotide
  Antisense strand to SEQ ID NO: 1665659
auaaauacaaguaucccua

SEQ ID NO: 1665661 - RNA, 19 nt, Artificial Sequence
  Description of Artificial Sequence: Synthetic oligonucleotide
  Sense strand starting at position 3139 of SEQ ID NO: 1561357
gcuugaugaugugcuaaac

SEQ ID NO: 1665662 - RNA, 19 nt, Artificial Sequence
  Description of Artificial Sequence: Synthetic oligonucleotide
  Antisense strand to SEQ ID NO: 1665661
guuuagcacaucaucaagc

SEQ ID NO: 1665663 - RNA, 19 nt, Artificial Sequence
  Description of Artificial Sequence: Synthetic oligonucleotide
  Sense strand starting at position 3303 of SEQ ID NO: 1561357
guuucucuuagcgugcuaa

SEQ ID NO: 1665664 - RNA, 19 nt, Artificial Sequence
  Description of Artificial Sequence: Synthetic oligonucleotide
  Antisense strand to SEQ ID NO: 1665663
uuagcacgcuaagagaaac

SEQ ID NO: 1665665 - RNA, 19 nt, Artificial Sequence
  Description of Artificial Sequence: Synthetic oligonucleotide
  Sense strand starting at position 3305 of SEQ ID NO: 1561357
uucucuuagcgugcuaaug

SEQ ID NO: 1665666 - RNA, 19 nt, Artificial Sequence
  Description of Artificial Sequence: Synthetic oligonucleotide
  Antisense strand to SEQ ID NO: 1665665
cauuagcacgcuaagagaa

SEQ ID NO: 1665667 - RNA, 19 nt, Artificial Sequence
  Description of Artificial Sequence: Synthetic oligonucleotide
  Sense strand starting at position 3314 of SEQ ID NO: 1561357
cgugcuaaugcauauaauu

SEQ ID NO: 1665668 - RNA, 19 nt, Artificial Sequence
  Description of Artificial Sequence: Synthetic oligonucleotide
  Antisense strand to SEQ ID NO: 1665667
aauuauaugcauuagcacg

SEQ ID NO: 1665669 - RNA, 19 nt, Artificial Sequence
  Description of Artificial Sequence: Synthetic oligonucleotide
  Sense strand starting at position 3334 of SEQ ID NO: 1561357
gcauauaaccgagagguga

SEQ ID NO: 1665670 - RNA, 19 nt, Artificial Sequence
  Description of Artificial Sequence: Synthetic oligonucleotide
  Antisense strand to SEQ ID NO: 1665669
ucaccucucgguuauaugc

SEQ ID NO: 1665671 - RNA, 19 nt, Artificial Sequence
  Description of Artificial Sequence: Synthetic oligonucleotide
  Sense strand starting at position 3395 of SEQ ID NO: 1561357
uucuguauagcugaaggau

SEQ ID NO: 1665672 - RNA, 19 nt, Artificial Sequence
  Description of Artificial Sequence: Synthetic oligonucleotide
  Antisense strand to SEQ ID NO: 1665671
auccuucagcuauacagaa

SEQ ID NO: 1665673 - RNA, 19 nt, Artificial Sequence
  Description of Artificial Sequence: Synthetic oligonucleotide
  Sense strand starting at position 3772 of SEQ ID NO: 1561357
gucuuuaggagcuguaaca

SEQ ID NO: 1665674 - RNA, 19 nt, Artificial Sequence
  Description of Artificial Sequence: Synthetic oligonucleotide
  Antisense strand to SEQ ID NO: 1665673
uguuacagcuccuaaagac

SEQ ID NO: 1665675 - RNA, 19 nt, Artificial Sequence
  Description of Artificial Sequence: Synthetic oligonucleotide
  Sense strand starting at position 178 of SEQ ID NO: 1561358
ccaccaugauuugaagaua

SEQ ID NO: 1665676 - RNA, 19 nt, Artificial Sequence
  Description of Artificial Sequence: Synthetic oligonucleotide
  Antisense strand to SEQ ID NO: 1665675
uaucuucaaaucauggugg

SEQ ID NO: 1665677 - RNA, 19 nt, Artificial Sequence
  Description of Artificial Sequence: Synthetic oligonucleotide
  Sense strand starting at position 750 of SEQ ID NO: 1561358
accuguuuccaacaaaggu

SEQ ID NO: 1665678 - RNA, 19 nt, Artificial Sequence
  Description of Artificial Sequence: Synthetic oligonucleotide
  Antisense strand to SEQ ID NO: 1665677
accuuuguuggaaacaggu

SEQ ID NO: 1665679 - RNA, 19 nt, Artificial Sequence
  Description of Artificial Sequence: Synthetic oligonucleotide
  Sense strand starting at position 778 of SEQ ID NO: 1561358
cugagauucccugagcgcu

SEQ ID NO: 1665680 - RNA, 19 nt, Artificial Sequence
  Description of Artificial Sequence: Synthetic oligonucleotide
  Antisense strand to SEQ ID NO: 1665679
agcgcucagggaaucucag

SEQ ID NO: 1665681 - RNA, 19 nt, Artificial Sequence
  Description of Artificial Sequence: Synthetic oligonucleotide
  Sense strand starting at position 827 of SEQ ID NO: 1561358
accuguuccuaggucugau

SEQ ID NO: 1665682 - RNA, 19 nt, Artificial Sequence
  Description of Artificial Sequence: Synthetic oligonucleotide
  Antisense strand to SEQ ID NO: 1665681
aucagaccuaggaacaggu

SEQ ID NO: 1665683 - RNA, 19 nt, Artificial Sequence
  Description of Artificial Sequence: Synthetic oligonucleotide
  Sense strand starting at position 830 of SEQ ID NO: 1561358
uguuccuaggucugauaua

SEQ ID NO: 1665684 - RNA, 19 nt, Artificial Sequence
  Description of Artificial Sequence: Synthetic oligonucleotide
  Antisense strand to SEQ ID NO: 1665683
uauaucagaccuaggaaca

SEQ ID NO: 1665685 - RNA, 19 nt, Artificial Sequence
  Description of Artificial Sequence: Synthetic oligonucleotide
  Sense strand starting at position 972 of SEQ ID NO: 1561358
agugaagacagucauguga

SEQ ID NO: 1665686 - RNA, 19 nt, Artificial Sequence
  Description of Artificial Sequence: Synthetic oligonucleotide
  Antisense strand to SEQ ID NO: 1665685
ucacaugacugucuucacu

SEQ ID NO: 1665687 - RNA, 19 nt, Artificial Sequence
  Description of Artificial Sequence: Synthetic oligonucleotide
  Sense strand starting at position 986 of SEQ ID NO: 1561358
ugugaagaaucccaggaua

SEQ ID NO: 1665688 - RNA, 19 nt, Artificial Sequence
  Description of Artificial Sequence: Synthetic oligonucleotide
  Antisense strand to SEQ ID NO: 1665687
uauccugggauucuucaca

SEQ ID NO: 1665689 - RNA, 19 nt, Artificial Sequence
  Description of Artificial Sequence: Synthetic oligonucleotide
  Sense strand starting at position 999 of SEQ ID NO: 1561358
aggauaucaucacuauguc

SEQ ID NO: 1665690 - RNA, 19 nt, Artificial Sequence
  Description of Artificial Sequence: Synthetic oligonucleotide
  Antisense strand to SEQ ID NO: 1665689
gacauagugaugauauccu

SEQ ID NO: 1665691 - RNA, 19 nt, Artificial Sequence
  Description of Artificial Sequence: Synthetic oligonucleotide
  Sense strand starting at position 1000 of SEQ ID NO: 1561358
ggauaucaucacuaugucu

SEQ ID NO: 1665692 - RNA, 19 nt, Artificial Sequence
  Description of Artificial Sequence: Synthetic oligonucleotide
  Antisense strand to SEQ ID NO: 1665691
agacauagugaugauaucc

SEQ ID NO: 1665693 - RNA, 19 nt, Artificial Sequence
  Description of Artificial Sequence: Synthetic oligonucleotide
  Sense strand starting at position 1022 of SEQ ID NO: 1561358
cagagaaucuggucagccu

SEQ ID NO: 1665694 - RNA, 19 nt, Artificial Sequence
  Description of Artificial Sequence: Synthetic oligonucleotide
  Antisense strand to SEQ ID NO: 1665693
aggcugaccagauucucug

SEQ ID NO: 1665695 - RNA, 19 nt, Artificial Sequence
  Description of Artificial Sequence: Synthetic oligonucleotide
  Sense strand starting at position 1023 of SEQ ID NO: 1561358
agagaaucuggucagccuu

SEQ ID NO: 1665696 - RNA, 19 nt, Artificial Sequence
  Description of Artificial Sequence: Synthetic oligonucleotide
  Antisense strand to SEQ ID NO: 1665695
aaggcugaccagauucucu

SEQ ID NO: 1665697 - RNA, 19 nt, Artificial Sequence
  Description of Artificial Sequence: Synthetic oligonucleotide
  Sense strand starting at position 1031 of SEQ ID NO: 1561358
uggucagccuuccuuauaa

SEQ ID NO: 1665698 - RNA, 19 nt, Artificial Sequence
  Description of Artificial Sequence: Synthetic oligonucleotide
  Antisense strand to SEQ ID NO: 1665697
uuauaaggaaggcugacca

SEQ ID NO: 1665699 - RNA, 19 nt, Artificial Sequence
  Description of Artificial Sequence: Synthetic oligonucleotide
  Sense strand starting at position 1352 of SEQ ID NO: 1561358
cagagaguucccggaacuc

SEQ ID NO: 1665700 - RNA, 19 nt, Artificial Sequence
  Description of Artificial Sequence: Synthetic oligonucleotide
  Antisense strand to SEQ ID NO: 1665699
gaguuccgggaacucucug

SEQ ID NO: 1665701 - RNA, 19 nt, Artificial Sequence
  Description of Artificial Sequence: Synthetic oligonucleotide
  Sense strand starting at position 1440 of SEQ ID NO: 1561358
accuuaugccacugaugag

SEQ ID NO: 1665702 - RNA, 19 nt, Artificial Sequence
  Description of Artificial Sequence: Synthetic oligonucleotide
  Antisense strand to SEQ ID NO: 1665701
cucaucaguggcauaaggu

SEQ ID NO: 1665703 - RNA, 19 nt, Artificial Sequence
  Description of Artificial Sequence: Synthetic oligonucleotide
  Sense strand starting at position 1476 of SEQ ID NO: 1561358
acauaaugcgacggaguga

SEQ ID NO: 1665704 - RNA, 19 nt, Artificial Sequence
  Description of Artificial Sequence: Synthetic oligonucleotide
  Antisense strand to SEQ ID NO: 1665703
ucacuccgucgcauuaugu

SEQ ID NO: 1665705 - RNA, 19 nt, Artificial Sequence
  Description of Artificial Sequence: Synthetic oligonucleotide
  Sense strand starting at position 1499 of SEQ ID NO: 1561358
ccugaagugcgcgaugaga

SEQ ID NO: 1665706 - RNA, 19 nt, Artificial Sequence
  Description of Artificial Sequence: Synthetic oligonucleotide
  Antisense strand to SEQ ID NO: 1665705
ucucaucgcgcacuucagg

SEQ ID NO: 1665707 - RNA, 19 nt, Artificial Sequence
  Description of Artificial Sequence: Synthetic oligonucleotide
  Sense strand starting at position 2062 of SEQ ID NO: 1561358
caguuucugggcugucauu

SEQ ID NO: 1665708 - RNA, 19 nt, Artificial Sequence
  Description of Artificial Sequence: Synthetic oligonucleotide
  Antisense strand to SEQ ID NO: 1665707
aaugacagcccagaaacug

SEQ ID NO: 1665709 - RNA, 19 nt, Artificial Sequence
  Description of Artificial Sequence: Synthetic oligonucleotide
  Sense strand starting at position 2108 of SEQ ID NO: 1561358
ggcacagauuucuggguaa

SEQ ID NO: 1665710 - RNA, 19 nt, Artificial Sequence
  Description of Artificial Sequence: Synthetic oligonucleotide
  Antisense strand to SEQ ID NO: 1665709
uuacccagaaaucugugcc

SEQ ID NO: 1665711 - RNA, 19 nt, Artificial Sequence
  Description of Artificial Sequence: Synthetic oligonucleotide
  Sense strand starting at position 2131 of SEQ ID NO: 1561358
guuuguacccugcauccaa

SEQ ID NO: 1665712 - RNA, 19 nt, Artificial Sequence
  Description of Artificial Sequence: Synthetic oligonucleotide
  Antisense strand to SEQ ID NO: 1665711
uuggaugcaggguacaaac

SEQ ID NO: 1665713 - RNA, 19 nt, Artificial Sequence
  Description of Artificial Sequence: Synthetic oligonucleotide
  Sense strand starting at position 2410 of SEQ ID NO: 1561358
aauugaacguugucuguau

SEQ ID NO: 1665714 - RNA, 19 nt, Artificial Sequence
  Description of Artificial Sequence: Synthetic oligonucleotide
  Antisense strand to SEQ ID NO: 1665713
auacagacaacguucaauu

SEQ ID NO: 1665715 - RNA, 19 nt, Artificial Sequence
  Description of Artificial Sequence: Synthetic oligonucleotide
  Sense strand starting at position 2411 of SEQ ID NO: 1561358
auugaacguugucuguauu

SEQ ID NO: 1665716 - RNA, 19 nt, Artificial Sequence
  Description of Artificial Sequence: Synthetic oligonucleotide
  Antisense strand to SEQ ID NO: 1665715
aauacagacaacguucaau

SEQ ID NO: 1665717 - RNA, 19 nt, Artificial Sequence
  Description of Artificial Sequence: Synthetic oligonucleotide
  Sense strand starting at position 2412 of SEQ ID NO: 1561358
uugaacguugucuguauuu

SEQ ID NO: 1665718 - RNA, 19 nt, Artificial Sequence
  Description of Artificial Sequence: Synthetic oligonucleotide
  Antisense strand to SEQ ID NO: 1665717
aaauacagacaacguucaa

SEQ ID NO: 1665719 - RNA, 19 nt, Artificial Sequence
  Description of Artificial Sequence: Synthetic oligonucleotide
  Sense strand starting at position 2495 of SEQ ID NO: 1561358
agauguaauuagcuaccuu

SEQ ID NO: 1665720 - RNA, 19 nt, Artificial Sequence
  Description of Artificial Sequence: Synthetic oligonucleotide
  Antisense strand to SEQ ID NO: 1665719
aagguagcuaauuacaucu

SEQ ID NO: 1665721 - RNA, 19 nt, Artificial Sequence
  Description of Artificial Sequence: Synthetic oligonucleotide
  Sense strand starting at position 2705 of SEQ ID NO: 1561358
cugugaauucuuggaccca

SEQ ID NO: 1665722 - RNA, 19 nt, Artificial Sequence
  Description of Artificial Sequence: Synthetic oligonucleotide
  Antisense strand to SEQ ID NO: 1665721
uggguccaagaauucacag

SEQ ID NO: 1665723 - RNA, 19 nt, Artificial Sequence
  Description of Artificial Sequence: Synthetic oligonucleotide
  Sense strand starting at position 2706 of SEQ ID NO: 1561358
ugugaauucuuggacccaa

SEQ ID NO: 1665724 - RNA, 19 nt, Artificial Sequence
  Description of Artificial Sequence: Synthetic oligonucleotide
  Antisense strand to SEQ ID NO: 1665723
uuggguccaagaauucaca

SEQ ID NO: 1665725 - RNA, 19 nt, Artificial Sequence
  Description of Artificial Sequence: Synthetic oligonucleotide
  Sense strand starting at position 2770 of SEQ ID NO: 1561358
ucaagaacuggaggucuuu

SEQ ID NO: 1665726 - RNA, 19 nt, Artificial Sequence
  Description of Artificial Sequence: Synthetic oligonucleotide
  Antisense strand to SEQ ID NO: 1665725
aaagaccuccaguucuuga

SEQ ID NO: 1665727 - RNA, 19 nt, Artificial Sequence
  Description of Artificial Sequence: Synthetic oligonucleotide
  Sense strand starting at position 2871 of SEQ ID NO: 1561358
uuaggaauaugggaaguga

SEQ ID NO: 1665728 - RNA, 19 nt, Artificial Sequence
  Description of Artificial Sequence: Synthetic oligonucleotide
  Antisense strand to SEQ ID NO: 1665727
ucacuucccauauuccuaa

SEQ ID NO: 1665729 - RNA, 19 nt, Artificial Sequence
  Description of Artificial Sequence: Synthetic oligonucleotide
  Sense strand starting at position 2943 of SEQ ID NO: 1561358
uguuaucagucuuccucaa

SEQ ID NO: 1665730 - RNA, 19 nt, Artificial Sequence
  Description of Artificial Sequence: Synthetic oligonucleotide
  Antisense strand to SEQ ID NO: 1665729
uugaggaagacugauaaca

SEQ ID NO: 1665731 - RNA, 19 nt, Artificial Sequence
  Description of Artificial Sequence: Synthetic oligonucleotide
  Sense strand starting at position 3476 of SEQ ID NO: 1561358
guaggucuaucguccagaa

SEQ ID NO: 1665732 - RNA, 19 nt, Artificial Sequence
  Description of Artificial Sequence: Synthetic oligonucleotide
  Antisense strand to SEQ ID NO: 1665731
uucuggacgauagaccuac

SEQ ID NO: 1665733 - RNA, 19 nt, Artificial Sequence
  Description of Artificial Sequence: Synthetic oligonucleotide
  Sense strand starting at position 3478 of SEQ ID NO: 1561358
aggucuaucguccagaaga

SEQ ID NO: 1665734 - RNA, 19 nt, Artificial Sequence
  Description of Artificial Sequence: Synthetic oligonucleotide
  Antisense strand to SEQ ID NO: 1665733
ucuucuggacgauagaccu

SEQ ID NO: 1665735 - RNA, 19 nt, Artificial Sequence
  Description of Artificial Sequence: Synthetic oligonucleotide
  Sense strand starting at position 3480 of SEQ ID NO: 1561358
gucuaucguccagaagaca

SEQ ID NO: 1665736 - RNA, 19 nt, Artificial Sequence
  Description of Artificial Sequence: Synthetic oligonucleotide
  Antisense strand to SEQ ID NO: 1665735
ugucuucuggacgauagac

SEQ ID NO: 1665737 - RNA, 19 nt, Artificial Sequence
  Description of Artificial Sequence: Synthetic oligonucleotide
  Sense strand starting at position 3500 of SEQ ID NO: 1561358
auucuuauaggcuguauga

SEQ ID NO: 1665738 - RNA, 19 nt, Artificial Sequence
  Description of Artificial Sequence: Synthetic oligonucleotide
  Antisense strand to SEQ ID NO: 1665737
ucauacagccuauaagaau

SEQ ID NO: 1665739 - RNA, 19 nt, Artificial Sequence
  Description of Artificial Sequence: Synthetic oligonucleotide
  Sense strand starting at position 3502 of SEQ ID NO: 1561358
ucuuauaggcuguaugauu

SEQ ID NO: 1665740 - RNA, 19 nt, Artificial Sequence
  Description of Artificial Sequence: Synthetic oligonucleotide
  Antisense strand to SEQ ID NO: 1665739
aaucauacagccuauaaga

SEQ ID NO: 1665741 - RNA, 19 nt, Artificial Sequence
  Description of Artificial Sequence: Synthetic oligonucleotide
  Sense strand starting at position 3577 of SEQ ID NO: 1561358
acuuaagagucacuguagu

SEQ ID NO: 1665742 - RNA, 19 nt, Artificial Sequence
  Description of Artificial Sequence: Synthetic oligonucleotide
  Antisense strand to SEQ ID NO: 1665741
acuacagugacucuuaagu

SEQ ID NO: 1665743 - RNA, 19 nt, Artificial Sequence
  Description of Artificial Sequence: Synthetic oligonucleotide
  Sense strand starting at position 3812 of SEQ ID NO: 1561358
uacggagucaguuacagau

SEQ ID NO: 1665744 - RNA, 19 nt, Artificial Sequence
  Description of Artificial Sequence: Synthetic oligonucleotide
  Antisense strand to SEQ ID NO: 1665743
aucuguaacugacuccgua

SEQ ID NO: 1665745 - RNA, 19 nt, Artificial Sequence
  Description of Artificial Sequence: Synthetic oligonucleotide
  Sense strand starting at position 3840 of SEQ ID NO: 1561358
agcagauuucuaugcacga

SEQ ID NO: 1665746 - RNA, 19 nt, Artificial Sequence
  Description of Artificial Sequence: Synthetic oligonucleotide
  Antisense strand to SEQ ID NO: 1665745
ucgugcauagaaaucugcu

SEQ ID NO: 1665747 - RNA, 19 nt, Artificial Sequence
  Description of Artificial Sequence: Synthetic oligonucleotide
  Sense strand starting at position 3841 of SEQ ID NO: 1561358
gcagauuucuaugcacgac

SEQ ID NO: 1665748 - RNA, 19 nt, Artificial Sequence
  Description of Artificial Sequence: Synthetic oligonucleotide
  Antisense strand to SEQ ID NO: 1665747
gucgugcauagaaaucugc

SEQ ID NO: 1665749 - RNA, 19 nt, Artificial Sequence
  Description of Artificial Sequence: Synthetic oligonucleotide
  Sense strand starting at position 3856 of SEQ ID NO: 1561358
cgacaaaugcacuggcuaa

SEQ ID NO: 1665750 - RNA, 19 nt, Artificial Sequence
  Description of Artificial Sequence: Synthetic oligonucleotide
  Antisense strand to SEQ ID NO: 1665749
uuagccagugcauuugucg

SEQ ID NO: 1665751 - RNA, 19 nt, Artificial Sequence
  Description of Artificial Sequence: Synthetic oligonucleotide
  Sense strand starting at position 3953 of SEQ ID NO: 1561358
uuaagauccuucuuaaggu

SEQ ID NO: 1665752 - RNA, 19 nt, Artificial Sequence
  Description of Artificial Sequence: Synthetic oligonucleotide
  Antisense strand to SEQ ID NO: 1665751
accuuaagaaggaucuuaa

SEQ ID NO: 1665753 - RNA, 19 nt, Artificial Sequence
  Description of Artificial Sequence: Synthetic oligonucleotide
  Sense strand starting at position 3960 of SEQ ID NO: 1561358
ccuucuuaagguugaagga

SEQ ID NO: 1665754 - RNA, 19 nt, Artificial Sequence
  Description of Artificial Sequence: Synthetic oligonucleotide
  Antisense strand to SEQ ID NO: 1665753
uccuucaaccuuaagaagg

SEQ ID NO: 1665755 - RNA, 19 nt, Artificial Sequence
  Description of Artificial Sequence: Synthetic oligonucleotide
  Sense strand starting at position 81 of SEQ ID NO: 1561359
gacaauuuaucgucuguau

SEQ ID NO: 1665756 - RNA, 19 nt, Artificial Sequence
  Description of Artificial Sequence: Synthetic oligonucleotide
  Antisense strand to SEQ ID NO: 1665755
auacagacgauaaauuguc

SEQ ID NO: 1665757 - RNA, 19 nt, Artificial Sequence
  Description of Artificial Sequence: Synthetic oligonucleotide
  Sense strand starting at position 139 of SEQ ID NO: 1561359
uuuccuugucuacgaagaa

SEQ ID NO: 1665758 - RNA, 19 nt, Artificial Sequence
  Description of Artificial Sequence: Synthetic oligonucleotide
  Antisense strand to SEQ ID NO: 1665757
uucuucguagacaaggaaa

SEQ ID NO: 1665759 - RNA, 19 nt, Artificial Sequence
  Description of Artificial Sequence: Synthetic oligonucleotide
  Sense strand starting at position 664 of SEQ ID NO: 1561359
acgacaauauucccaaagu

SEQ ID NO: 1665760 - RNA, 19 nt, Artificial Sequence
  Description of Artificial Sequence: Synthetic oligonucleotide
  Antisense strand to SEQ ID NO: 1665759
acuuugggaauauugucgu

SEQ ID NO: 1665761 - RNA, 19 nt, Artificial Sequence
  Description of Artificial Sequence: Synthetic oligonucleotide
  Sense strand starting at position 773 of SEQ ID NO: 1561359
aaagaauggcuagguguaa

SEQ ID NO: 1665762 - RNA, 19 nt, Artificial Sequence
  Description of Artificial Sequence: Synthetic oligonucleotide
  Antisense strand to SEQ ID NO: 1665761
uuacaccuagccauucuuu

SEQ ID NO: 1665763 - RNA, 19 nt, Artificial Sequence
  Description of Artificial Sequence: Synthetic oligonucleotide
  Sense strand starting at position 827 of SEQ ID NO: 1561359
uuacaaaggugugcuugaa

SEQ ID NO: 1665764 - RNA, 19 nt, Artificial Sequence
  Description of Artificial Sequence: Synthetic oligonucleotide
  Antisense strand to SEQ ID NO: 1665763
uucaagcacaccuuuguaa

SEQ ID NO: 1665765 - RNA, 19 nt, Artificial Sequence
  Description of Artificial Sequence: Synthetic oligonucleotide
  Sense strand starting at position 831 of SEQ ID NO: 1561359
aaaggugugcuugaaucaa

SEQ ID NO: 1665766 - RNA, 19 nt, Artificial Sequence
  Description of Artificial Sequence: Synthetic oligonucleotide
  Antisense strand to SEQ ID NO: 1665765
uugauucaagcacaccuuu

SEQ ID NO: 1665767 - RNA, 19 nt, Artificial Sequence
  Description of Artificial Sequence: Synthetic oligonucleotide
  Sense strand starting at position 1005 of SEQ ID NO: 1561359
gcacacagcuuucugagau

SEQ ID NO: 1665768 - RNA, 19 nt, Artificial Sequence
  Description of Artificial Sequence: Synthetic oligonucleotide
  Antisense strand to SEQ ID NO: 1665767
aucucagaaagcugugugc

SEQ ID NO: 1665769 - RNA, 19 nt, Artificial Sequence
  Description of Artificial Sequence: Synthetic oligonucleotide
  Sense strand starting at position 1009 of SEQ ID NO: 1561359
acagcuuucugagauuuaa

SEQ ID NO: 1665770 - RNA, 19 nt, Artificial Sequence
  Description of Artificial Sequence: Synthetic oligonucleotide
  Antisense strand to SEQ ID NO: 1665769
uuaaaucucagaaagcugu

SEQ ID NO: 1665771 - RNA, 19 nt, Artificial Sequence
  Description of Artificial Sequence: Synthetic oligonucleotide
  Sense strand starting at position 1119 of SEQ ID NO: 1561359
uugcauguauguccuauuu

SEQ ID NO: 1665772 - RNA, 19 nt, Artificial Sequence
  Description of Artificial Sequence: Synthetic oligonucleotide
  Antisense strand to SEQ ID NO: 1665771
aaauaggacauacaugcaa

SEQ ID NO: 1665773 - RNA, 19 nt, Artificial Sequence
  Description of Artificial Sequence: Synthetic oligonucleotide
  Sense strand starting at position 1218 of SEQ ID NO: 1561359
cgauaaguauaacuggacu

SEQ ID NO: 1665774 - RNA, 19 nt, Artificial Sequence
  Description of Artificial Sequence: Synthetic oligonucleotide
  Antisense strand to SEQ ID NO: 1665773
aguccaguuauacuuaucg

SEQ ID NO: 1665775 - RNA, 19 nt, Artificial Sequence
  Description of Artificial Sequence: Synthetic oligonucleotide
  Sense strand starting at position 1284 of SEQ ID NO: 1561359
auaggcuauuuacaagagu

SEQ ID NO: 1665776 - RNA, 19 nt, Artificial Sequence
  Description of Artificial Sequence: Synthetic oligonucleotide
  Antisense strand to SEQ ID NO: 1665775
acucuuguaaauagccuau

SEQ ID NO: 1665777 - RNA, 19 nt, Artificial Sequence
  Description of Artificial Sequence: Synthetic oligonucleotide
  Sense strand starting at position 1361 of SEQ ID NO: 1561359
aaagguacucaagguaagu

SEQ ID NO: 1665778 - RNA, 19 nt, Artificial Sequence
  Description of Artificial Sequence: Synthetic oligonucleotide
  Antisense strand to SEQ ID NO: 1665777
acuuaccuugaguaccuuu

SEQ ID NO: 1665779 - RNA, 19 nt, Artificial Sequence
  Description of Artificial Sequence: Synthetic oligonucleotide
  Sense strand starting at position 1442 of SEQ ID NO: 1561359
ggugauuucuccucgcgau

SEQ ID NO: 1665780 - RNA, 19 nt, Artificial Sequence
  Description of Artificial Sequence: Synthetic oligonucleotide
  Antisense strand to SEQ ID NO: 1665779
aucgcgaggagaaaucacc

SEQ ID NO: 1665781 - RNA, 19 nt, Artificial Sequence
  Description of Artificial Sequence: Synthetic oligonucleotide
  Sense strand starting at position 1443 of SEQ ID NO: 1561359
gugauuucuccucgcgaug

SEQ ID NO: 1665782 - RNA, 19 nt, Artificial Sequence
  Description of Artificial Sequence: Synthetic oligonucleotide
  Antisense strand to SEQ ID NO: 1665781
caucgcgaggagaaaucac

SEQ ID NO: 1665783 - RNA, 19 nt, Artificial Sequence
  Description of Artificial Sequence: Synthetic oligonucleotide
  Sense strand starting at position 1782 of SEQ ID NO: 1561359
ggcuuacacgacugggaau

SEQ ID NO: 1665784 - RNA, 19 nt, Artificial Sequence
  Description of Artificial Sequence: Synthetic oligonucleotide
  Antisense strand to SEQ ID NO: 1665783
auucccagucguguaagcc

SEQ ID NO: 1665785 - RNA, 19 nt, Artificial Sequence
  Description of Artificial Sequence: Synthetic oligonucleotide
  Sense strand starting at position 1783 of SEQ ID NO: 1561359
gcuuacacgacugggaaua

SEQ ID NO: 1665786 - RNA, 19 nt, Artificial Sequence
  Description of Artificial Sequence: Synthetic oligonucleotide
  Antisense strand to SEQ ID NO: 1665785
uauucccagucguguaagc

SEQ ID NO: 1665787 - RNA, 19 nt, Artificial Sequence
  Description of Artificial Sequence: Synthetic oligonucleotide
  Sense strand starting at position 2188 of SEQ ID NO: 1561359
agugguaaagguugaauca

SEQ ID NO: 1665788 - RNA, 19 nt, Artificial Sequence
  Description of Artificial Sequence: Synthetic oligonucleotide
  Antisense strand to SEQ ID NO: 1665787
ugauucaaccuuuaccacu

SEQ ID NO: 1665789 - RNA, 19 nt, Artificial Sequence
  Description of Artificial Sequence: Synthetic oligonucleotide
  Sense strand starting at position 2206 of SEQ ID NO: 1561359
aggcaagaauugucaucua

SEQ ID NO: 1665790 - RNA, 19 nt, Artificial Sequence
  Description of Artificial Sequence: Synthetic oligonucleotide
  Antisense strand to SEQ ID NO: 1665789
uagaugacaauucuugccu

SEQ ID NO: 1665791 - RNA, 19 nt, Artificial Sequence
  Description of Artificial Sequence: Synthetic oligonucleotide
  Sense strand starting at position 2246 of SEQ ID NO: 1561359
uugcaugacgagcagaaua

SEQ ID NO: 1665792 - RNA, 19 nt, Artificial Sequence
  Description of Artificial Sequence: Synthetic oligonucleotide
  Antisense strand to SEQ ID NO: 1665791
uauucugcucgucaugcaa

SEQ ID NO: 1665793 - RNA, 19 nt, Artificial Sequence
  Description of Artificial Sequence: Synthetic oligonucleotide
  Sense strand starting at position 2248 of SEQ ID NO: 1561359
gcaugacgagcagaauauu

SEQ ID NO: 1665794 - RNA, 19 nt, Artificial Sequence
  Description of Artificial Sequence: Synthetic oligonucleotide
  Antisense strand to SEQ ID NO: 1665793
aauauucugcucgucaugc

SEQ ID NO: 1665795 - RNA, 19 nt, Artificial Sequence
  Description of Artificial Sequence: Synthetic oligonucleotide
  Sense strand starting at position 2301 of SEQ ID NO: 1561359
guauguuggaauggagaaa

SEQ ID NO: 1665796 - RNA, 19 nt, Artificial Sequence
  Description of Artificial Sequence: Synthetic oligonucleotide
  Antisense strand to SEQ ID NO: 1665795
uuucuccauuccaacauac

SEQ ID NO: 1665797 - RNA, 19 nt, Artificial Sequence
  Description of Artificial Sequence: Synthetic oligonucleotide
  Sense strand starting at position 2325 of SEQ ID NO: 1561359
auagaaauuguacagcgaa

SEQ ID NO: 1665798 - RNA, 19 nt, Artificial Sequence
  Description of Artificial Sequence: Synthetic oligonucleotide
  Antisense strand to SEQ ID NO: 1665797
uucgcuguacaauuucuau

SEQ ID NO: 1665799 - RNA, 19 nt, Artificial Sequence
  Description of Artificial Sequence: Synthetic oligonucleotide
  Sense strand starting at position 2328 of SEQ ID NO: 1561359
gaaauuguacagcgaagaa

SEQ ID NO: 1665800 - RNA, 19 nt, Artificial Sequence
  Description of Artificial Sequence: Synthetic oligonucleotide
  Antisense strand to SEQ ID NO: 1665799
uucuucgcuguacaauuuc

SEQ ID NO: 1665801 - RNA, 19 nt, Artificial Sequence
  Description of Artificial Sequence: Synthetic oligonucleotide
  Sense strand starting at position 2378 of SEQ ID NO: 1561359
caauaucaccagugagggu

SEQ ID NO: 1665802 - RNA, 19 nt, Artificial Sequence
  Description of Artificial Sequence: Synthetic oligonucleotide
  Antisense strand to SEQ ID NO: 1665801
acccucacuggugauauug

SEQ ID NO: 1665803 - RNA, 19 nt, Artificial Sequence
  Description of Artificial Sequence: Synthetic oligonucleotide
  Sense strand starting at position 2546 of SEQ ID NO: 1561359
cuguguauuugagcugucu

SEQ ID NO: 1665804 - RNA, 19 nt, Artificial Sequence
  Description of Artificial Sequence: Synthetic oligonucleotide
  Antisense strand to SEQ ID NO: 1665803
agacagcucaaauacacag

SEQ ID NO: 1665805 - RNA, 19 nt, Artificial Sequence
  Description of Artificial Sequence: Synthetic oligonucleotide
  Sense strand starting at position 2548 of SEQ ID NO: 1561359
guguauuugagcugucucu

SEQ ID NO: 1665806 - RNA, 19 nt, Artificial Sequence
  Description of Artificial Sequence: Synthetic oligonucleotide
  Antisense strand to SEQ ID NO: 1665805
agagacagcucaaauacac

SEQ ID NO: 1665807 - RNA, 19 nt, Artificial Sequence
  Description of Artificial Sequence: Synthetic oligonucleotide
  Sense strand starting at position 2558 of SEQ ID NO: 1561359
gcugucucucuugauuaaa

SEQ ID NO: 1665808 - RNA, 19 nt, Artificial Sequence
  Description of Artificial Sequence: Synthetic oligonucleotide
  Antisense strand to SEQ ID NO: 1665807
uuuaaucaagagagacagc

SEQ ID NO: 1665809 - RNA, 19 nt, Artificial Sequence
  Description of Artificial Sequence: Synthetic oligonucleotide
  Sense strand starting at position 2593 of SEQ ID NO: 1561359
agugacgucaugcaauauu

SEQ ID NO: 1665810 - RNA, 19 nt, Artificial Sequence
  Description of Artificial Sequence: Synthetic oligonucleotide
  Antisense strand to SEQ ID NO: 1665809
aauauugcaugacgucacu

SEQ ID NO: 1665811 - RNA, 19 nt, Artificial Sequence
  Description of Artificial Sequence: Synthetic oligonucleotide
  Sense strand starting at position 2704 of SEQ ID NO: 1561359
guugaauaauauuccguua

SEQ ID NO: 1665812 - RNA, 19 nt, Artificial Sequence
  Description of Artificial Sequence: Synthetic oligonucleotide
  Antisense strand to SEQ ID NO: 1665811
uaacggaauauuauucaac

SEQ ID NO: 1665813 - RNA, 19 nt, Artificial Sequence
  Description of Artificial Sequence: Synthetic oligonucleotide
  Sense strand starting at position 3018 of SEQ ID NO: 1561359
agagacagaugguuaguau

SEQ ID NO: 1665814 - RNA, 19 nt, Artificial Sequence
  Description of Artificial Sequence: Synthetic oligonucleotide
  Antisense strand to SEQ ID NO: 1665813
auacuaaccaucugucucu

SEQ ID NO: 1665815 - RNA, 19 nt, Artificial Sequence
  Description of Artificial Sequence: Synthetic oligonucleotide
  Sense strand starting at position 3021 of SEQ ID NO: 1561359
gacagaugguuaguauuau

SEQ ID NO: 1665816 - RNA, 19 nt, Artificial Sequence
  Description of Artificial Sequence: Synthetic oligonucleotide
  Antisense strand to SEQ ID NO: 1665815
auaauacuaaccaucuguc

SEQ ID NO: 1665817 - RNA, 19 nt, Artificial Sequence
  Description of Artificial Sequence: Synthetic oligonucleotide
  Sense strand starting at position 3029 of SEQ ID NO: 1561359
guuaguauuauccagggca

SEQ ID NO: 1665818 - RNA, 19 nt, Artificial Sequence
  Description of Artificial Sequence: Synthetic oligonucleotide
  Antisense strand to SEQ ID NO: 1665817
ugcccuggauaauacuaac

SEQ ID NO: 1665819 - RNA, 19 nt, Artificial Sequence
  Description of Artificial Sequence: Synthetic oligonucleotide
  Sense strand starting at position 3111 of SEQ ID NO: 1561359
gaccauggugcguauauau

SEQ ID NO: 1665820 - RNA, 19 nt, Artificial Sequence
  Description of Artificial Sequence: Synthetic oligonucleotide
  Antisense strand to SEQ ID NO: 1665819
auauauacgcaccaugguc

SEQ ID NO: 1665821 - RNA, 19 nt, Artificial Sequence
  Description of Artificial Sequence: Synthetic oligonucleotide
  Sense strand starting at position 3538 of SEQ ID NO: 1561359
ucaugugagcaucaaugga

SEQ ID NO: 1665822 - RNA, 19 nt, Artificial Sequence
  Description of Artificial Sequence: Synthetic oligonucleotide
  Antisense strand to SEQ ID NO: 1665821
uccauugaugcucacauga

SEQ ID NO: 1665823 - RNA, 19 nt, Artificial Sequence
  Description of Artificial Sequence: Synthetic oligonucleotide
  Sense strand starting at position 3542 of SEQ ID NO: 1561359
gugagcaucaauggacauu

SEQ ID NO: 1665824 - RNA, 19 nt, Artificial Sequence
  Description of Artificial Sequence: Synthetic oligonucleotide
  Antisense strand to SEQ ID NO: 1665823
aauguccauugaugcucac

SEQ ID NO: 1665825 - RNA, 19 nt, Artificial Sequence
  Description of Artificial Sequence: Synthetic oligonucleotide
  Sense strand starting at position 3571 of SEQ ID NO: 1561359
ccguaacuuggauauugua

SEQ ID NO: 1665826 - RNA, 19 nt, Artificial Sequence
  Description of Artificial Sequence: Synthetic oligonucleotide
  Antisense strand to SEQ ID NO: 1665825
uacaauauccaaguuacgg

SEQ ID NO: 1665827 - RNA, 19 nt, Artificial Sequence
  Description of Artificial Sequence: Synthetic oligonucleotide
  Sense strand starting at position 3622 of SEQ ID NO: 1561359
aucguuaugaggugauuau

SEQ ID NO: 1665828 - RNA, 19 nt, Artificial Sequence
  Description of Artificial Sequence: Synthetic oligonucleotide
  Antisense strand to SEQ ID NO: 1665827
auaaucaccucauaacgau

SEQ ID NO: 1665829 - RNA, 19 nt, Artificial Sequence
  Description of Artificial Sequence: Synthetic oligonucleotide
  Sense strand starting at position 3623 of SEQ ID NO: 1561359
ucguuaugaggugauuauu

SEQ ID NO: 1665830 - RNA, 19 nt, Artificial Sequence
  Description of Artificial Sequence: Synthetic oligonucleotide
  Antisense strand to SEQ ID NO: 1665829
aauaaucaccucauaacga

SEQ ID NO: 1665831 - RNA, 19 nt, Artificial Sequence
  Description of Artificial Sequence: Synthetic oligonucleotide
  Sense strand starting at position 3708 of SEQ ID NO: 1561359
ucuuuaagagccugaauac

SEQ ID NO: 1665832 - RNA, 19 nt, Artificial Sequence
  Description of Artificial Sequence: Synthetic oligonucleotide
  Antisense strand to SEQ ID NO: 1665831
guauucaggcucuuaaaga

SEQ ID NO: 1665833 - RNA, 19 nt, Artificial Sequence
  Description of Artificial Sequence: Synthetic oligonucleotide
  Sense strand starting at position 3709 of SEQ ID NO: 1561359
cuuuaagagccugaauacu

SEQ ID NO: 1665834 - RNA, 19 nt, Artificial Sequence
  Description of Artificial Sequence: Synthetic oligonucleotide
  Antisense strand to SEQ ID NO: 1665833
aguauucaggcucuuaaag

SEQ ID NO: 1665835 - RNA, 19 nt, Artificial Sequence
  Description of Artificial Sequence: Synthetic oligonucleotide
  Sense strand starting at position 12 of SEQ ID NO: 1561360
cagagaauggcuugaauuc

SEQ ID NO: 1665836 - RNA, 19 nt, Artificial Sequence
  Description of Artificial Sequence: Synthetic oligonucleotide
  Antisense strand to SEQ ID NO: 1665835
gaauucaagccauucucug

SEQ ID NO: 1665837 - RNA, 19 nt, Artificial Sequence
  Description of Artificial Sequence: Synthetic oligonucleotide
  Sense strand starting at position 119 of SEQ ID NO: 1561360
auaauaguuauagguggaa

SEQ ID NO: 1665838 - RNA, 19 nt, Artificial Sequence
  Description of Artificial Sequence: Synthetic oligonucleotide
  Antisense strand to SEQ ID NO: 1665837
uuccaccuauaacuauuau

SEQ ID NO: 1665839 - RNA, 19 nt, Artificial Sequence
  Description of Artificial Sequence: Synthetic oligonucleotide
  Sense strand starting at position 122 of SEQ ID NO: 1561360
auaguuauagguggaauaa

SEQ ID NO: 1665840 - RNA, 19 nt, Artificial Sequence
  Description of Artificial Sequence: Synthetic oligonucleotide
  Antisense strand to SEQ ID NO: 1665839
uuauuccaccuauaacuau

SEQ ID NO: 1665841 - RNA, 19 nt, Artificial Sequence
  Description of Artificial Sequence: Synthetic oligonucleotide
  Sense strand starting at position 137 of SEQ ID NO: 1561360
auaagaauauggcuuuauc

SEQ ID NO: 1665842 - RNA, 19 nt, Artificial Sequence
  Description of Artificial Sequence: Synthetic oligonucleotide
  Antisense strand to SEQ ID NO: 1665841
gauaaagccauauucuuau

SEQ ID NO: 1665843 - RNA, 19 nt, Artificial Sequence
  Description of Artificial Sequence: Synthetic oligonucleotide
  Sense strand starting at position 145 of SEQ ID NO: 1561360
auggcuuuauccucuagga

SEQ ID NO: 1665844 - RNA, 19 nt, Artificial Sequence
  Description of Artificial Sequence: Synthetic oligonucleotide
  Antisense strand to SEQ ID NO: 1665843
uccuagaggauaaagccau

SEQ ID NO: 1665845 - RNA, 19 nt, Artificial Sequence
  Description of Artificial Sequence: Synthetic oligonucleotide
  Sense strand starting at position 147 of SEQ ID NO: 1561360
ggcuuuauccucuaggaua

SEQ ID NO: 1665846 - RNA, 19 nt, Artificial Sequence
  Description of Artificial Sequence: Synthetic oligonucleotide
  Antisense strand to SEQ ID NO: 1665845
uauccuagaggauaaagcc

SEQ ID NO: 1665847 - RNA, 19 nt, Artificial Sequence
  Description of Artificial Sequence: Synthetic oligonucleotide
  Sense strand starting at position 178 of SEQ ID NO: 1561360
cgcugccauauuugagaaa

SEQ ID NO: 1665848 - RNA, 19 nt, Artificial Sequence
  Description of Artificial Sequence: Synthetic oligonucleotide
  Antisense strand to SEQ ID NO: 1665847
uuucucaaauauggcagcg

SEQ ID NO: 1665849 - RNA, 19 nt, Artificial Sequence
  Description of Artificial Sequence: Synthetic oligonucleotide
  Sense strand starting at position 272 of SEQ ID NO: 1561360
augugcuaagaauggucua

SEQ ID NO: 1665850 - RNA, 19 nt, Artificial Sequence
  Description of Artificial Sequence: Synthetic oligonucleotide
  Antisense strand to SEQ ID NO: 1665849
uagaccauucuuagcacau

SEQ ID NO: 1665851 - RNA, 19 nt, Artificial Sequence
  Description of Artificial Sequence: Synthetic oligonucleotide
  Sense strand starting at position 273 of SEQ ID NO: 1561360
ugugcuaagaauggucuaa

SEQ ID NO: 1665852 - RNA, 19 nt, Artificial Sequence
  Description of Artificial Sequence: Synthetic oligonucleotide
  Antisense strand to SEQ ID NO: 1665851
uuagaccauucuuagcaca

SEQ ID NO: 1665853 - RNA, 19 nt, Artificial Sequence
  Description of Artificial Sequence: Synthetic oligonucleotide
  Sense strand starting at position 340 of SEQ ID NO: 1561360
auaggaucauucuuguauc

SEQ ID NO: 1665854 - RNA, 19 nt, Artificial Sequence
  Description of Artificial Sequence: Synthetic oligonucleotide
  Antisense strand to SEQ ID NO: 1665853
gauacaagaaugauccuau

SEQ ID NO: 1665855 - RNA, 19 nt, Artificial Sequence
  Description of Artificial Sequence: Synthetic oligonucleotide
  Sense strand starting at position 479 of SEQ ID NO: 1561360
auuggucucucuuucuaga

SEQ ID NO: 1665856 - RNA, 19 nt, Artificial Sequence
  Description of Artificial Sequence: Synthetic oligonucleotide
  Antisense strand to SEQ ID NO: 1665855
ucuagaaagagagaccaau

SEQ ID NO: 1665857 - RNA, 19 nt, Artificial Sequence
  Description of Artificial Sequence: Synthetic oligonucleotide
  Sense strand starting at position 481 of SEQ ID NO: 1561360
uggucucucuuucuagaau

SEQ ID NO: 1665858 - RNA, 19 nt, Artificial Sequence
  Description of Artificial Sequence: Synthetic oligonucleotide
  Antisense strand to SEQ ID NO: 1665857
auucuagaaagagagacca

SEQ ID NO: 1665859 - RNA, 19 nt, Artificial Sequence
  Description of Artificial Sequence: Synthetic oligonucleotide
  Sense strand starting at position 507 of SEQ ID NO: 1561360
gcacuuugugcacauuaau

SEQ ID NO: 1665860 - RNA, 19 nt, Artificial Sequence
  Description of Artificial Sequence: Synthetic oligonucleotide
  Antisense strand to SEQ ID NO: 1665859
auuaaugugcacaaagugc

SEQ ID NO: 1665861 - RNA, 19 nt, Artificial Sequence
  Description of Artificial Sequence: Synthetic oligonucleotide
  Sense strand starting at position 669 of SEQ ID NO: 1561360
gaguccuucccaggaccau

SEQ ID NO: 1665862 - RNA, 19 nt, Artificial Sequence
  Description of Artificial Sequence: Synthetic oligonucleotide
  Antisense strand to SEQ ID NO: 1665861
augguccugggaaggacuc

SEQ ID NO: 1665863 - RNA, 19 nt, Artificial Sequence
  Description of Artificial Sequence: Synthetic oligonucleotide
  Sense strand starting at position 763 of SEQ ID NO: 1561360
agggaaggcaugggugauu

SEQ ID NO: 1665864 - RNA, 19 nt, Artificial Sequence
  Description of Artificial Sequence: Synthetic oligonucleotide
  Antisense strand to SEQ ID NO: 1665863
aaucacccaugccuucccu

SEQ ID NO: 1665865 - RNA, 19 nt, Artificial Sequence
  Description of Artificial Sequence: Synthetic oligonucleotide
  Sense strand starting at position 775 of SEQ ID NO: 1561360
ggugauugugagcaaaccu

SEQ ID NO: 1665866 - RNA, 19 nt, Artificial Sequence
  Description of Artificial Sequence: Synthetic oligonucleotide
  Antisense strand to SEQ ID NO: 1665865
agguuugcucacaaucacc

SEQ ID NO: 1665867 - RNA, 19 nt, Artificial Sequence
  Description of Artificial Sequence: Synthetic oligonucleotide
  Sense strand starting at position 840 of SEQ ID NO: 1561360
gccagcauuucugaaagga

SEQ ID NO: 1665868 - RNA, 19 nt, Artificial Sequence
  Description of Artificial Sequence: Synthetic oligonucleotide
  Antisense strand to SEQ ID NO: 1665867
uccuuucagaaaugcuggc

SEQ ID NO: 1665869 - RNA, 19 nt, Artificial Sequence
  Description of Artificial Sequence: Synthetic oligonucleotide
  Sense strand starting at position 941 of SEQ ID NO: 1561360
uggguuucuuccucaggua

SEQ ID NO: 1665870 - RNA, 19 nt, Artificial Sequence
  Description of Artificial Sequence: Synthetic oligonucleotide
  Antisense strand to SEQ ID NO: 1665869
uaccugaggaagaaaccca

SEQ ID NO: 1665871 - RNA, 19 nt, Artificial Sequence
  Description of Artificial Sequence: Synthetic oligonucleotide
  Sense strand starting at position 958 of SEQ ID NO: 1561360
uaccaagagucuuuagaag

SEQ ID NO: 1665872 - RNA, 19 nt, Artificial Sequence
  Description of Artificial Sequence: Synthetic oligonucleotide
  Antisense strand to SEQ ID NO: 1665871
cuucuaaagacucuuggua

SEQ ID NO: 1665873 - RNA, 19 nt, Artificial Sequence
  Description of Artificial Sequence: Synthetic oligonucleotide
  Sense strand starting at position 999 of SEQ ID NO: 1561360
uguuguuuaucacugagaa

SEQ ID NO: 1665874 - RNA, 19 nt, Artificial Sequence
  Description of Artificial Sequence: Synthetic oligonucleotide
  Antisense strand to SEQ ID NO: 1665873
uucucagugauaaacaaca

SEQ ID NO: 1665875 - RNA, 19 nt, Artificial Sequence
  Description of Artificial Sequence: Synthetic oligonucleotide
  Sense strand starting at position 1000 of SEQ ID NO: 1561360
guuguuuaucacugagaau

SEQ ID NO: 1665876 - RNA, 19 nt, Artificial Sequence
  Description of Artificial Sequence: Synthetic oligonucleotide
  Antisense strand to SEQ ID NO: 1665875
auucucagugauaaacaac

SEQ ID NO: 1665877 - RNA, 19 nt, Artificial Sequence
  Description of Artificial Sequence: Synthetic oligonucleotide
  Sense strand starting at position 1059 of SEQ ID NO: 1561360
gaggccucacccugggaaa

SEQ ID NO: 1665878 - RNA, 19 nt, Artificial Sequence
  Description of Artificial Sequence: Synthetic oligonucleotide
  Antisense strand to SEQ ID NO: 1665877
uuucccagggugaggccuc

SEQ ID NO: 1665879 - RNA, 19 nt, Artificial Sequence
  Description of Artificial Sequence: Synthetic oligonucleotide
  Sense strand starting at position 1060 of SEQ ID NO: 1561360
aggccucacccugggaaau

SEQ ID NO: 1665880 - RNA, 19 nt, Artificial Sequence
  Description of Artificial Sequence: Synthetic oligonucleotide
  Antisense strand to SEQ ID NO: 1665879
auuucccagggugaggccu

SEQ ID NO: 1665881 - RNA, 19 nt, Artificial Sequence
  Description of Artificial Sequence: Synthetic oligonucleotide
  Sense strand starting at position 1061 of SEQ ID NO: 1561360
ggccucacccugggaaaua

SEQ ID NO: 1665882 - RNA, 19 nt, Artificial Sequence
  Description of Artificial Sequence: Synthetic oligonucleotide
  Antisense strand to SEQ ID NO: 1665881
uauuucccagggugaggcc

SEQ ID NO: 1665883 - RNA, 19 nt, Artificial Sequence
  Description of Artificial Sequence: Synthetic oligonucleotide
  Sense strand starting at position 1110 of SEQ ID NO: 1561360
augauaaacuccuacagga

SEQ ID NO: 1665884 - RNA, 19 nt, Artificial Sequence
  Description of Artificial Sequence: Synthetic oligonucleotide
  Antisense strand to SEQ ID NO: 1665883
uccuguaggaguuuaucau

SEQ ID NO: 1665885 - RNA, 19 nt, Artificial Sequence
  Description of Artificial Sequence: Synthetic oligonucleotide
  Sense strand starting at position 1991 of SEQ ID NO: 1561360
gagugagacucuguuugag

SEQ ID NO: 1665886 - RNA, 19 nt, Artificial Sequence
  Description of Artificial Sequence: Synthetic oligonucleotide
  Antisense strand to SEQ ID NO: 1665885
cucaaacagagucucacuc

SEQ ID NO: 1665887 - RNA, 19 nt, Artificial Sequence
  Description of Artificial Sequence: Synthetic oligonucleotide
  Sense strand starting at position 1993 of SEQ ID NO: 1561360
gugagacucuguuugagga

SEQ ID NO: 1665888 - RNA, 19 nt, Artificial Sequence
  Description of Artificial Sequence: Synthetic oligonucleotide
  Antisense strand to SEQ ID NO: 1665887
uccucaaacagagucucac

SEQ ID NO: 1665889 - RNA, 19 nt, Artificial Sequence
  Description of Artificial Sequence: Synthetic oligonucleotide
  Sense strand starting at position 2154 of SEQ ID NO: 1561360
gggagauggcugugaucau

SEQ ID NO: 1665890 - RNA, 19 nt, Artificial Sequence
  Description of Artificial Sequence: Synthetic oligonucleotide
  Antisense strand to SEQ ID NO: 1665889
augaucacagccaucuccc

SEQ ID NO: 1665891 - RNA, 19 nt, Artificial Sequence
  Description of Artificial Sequence: Synthetic oligonucleotide
  Sense strand starting at position 2164 of SEQ ID NO: 1561360
ugugaucauuuagggacau

SEQ ID NO: 1665892 - RNA, 19 nt, Artificial Sequence
  Description of Artificial Sequence: Synthetic oligonucleotide
  Antisense strand to SEQ ID NO: 1665891
augucccuaaaugaucaca

SEQ ID NO: 1665893 - RNA, 19 nt, Artificial Sequence
  Description of Artificial Sequence: Synthetic oligonucleotide
  Sense strand starting at position 2260 of SEQ ID NO: 1561360
ggcggagggagucauuaga

SEQ ID NO: 1665894 - RNA, 19 nt, Artificial Sequence
  Description of Artificial Sequence: Synthetic oligonucleotide
  Antisense strand to SEQ ID NO: 1665893
ucuaaugacucccuccgcc

SEQ ID NO: 1665895 - RNA, 19 nt, Artificial Sequence
  Description of Artificial Sequence: Synthetic oligonucleotide
  Sense strand starting at position 2422 of SEQ ID NO: 1561360
gcuuuacauuuagcuguga

SEQ ID NO: 1665896 - RNA, 19 nt, Artificial Sequence
  Description of Artificial Sequence: Synthetic oligonucleotide
  Antisense strand to SEQ ID NO: 1665895
ucacagcuaaauguaaagc

SEQ ID NO: 1665897 - RNA, 19 nt, Artificial Sequence
  Description of Artificial Sequence: Synthetic oligonucleotide
  Sense strand starting at position 2423 of SEQ ID NO: 1561360
cuuuacauuuagcugugau

SEQ ID NO: 1665898 - RNA, 19 nt, Artificial Sequence
  Description of Artificial Sequence: Synthetic oligonucleotide
  Antisense strand to SEQ ID NO: 1665897
aucacagcuaaauguaaag

SEQ ID NO: 1665899 - RNA, 19 nt, Artificial Sequence
  Description of Artificial Sequence: Synthetic oligonucleotide
  Sense strand starting at position 2435 of SEQ ID NO: 1561360
cugugauauccucagagug

SEQ ID NO: 1665900 - RNA, 19 nt, Artificial Sequence
  Description of Artificial Sequence: Synthetic oligonucleotide
  Antisense strand to SEQ ID NO: 1665899
cacucugaggauaucacag

SEQ ID NO: 1665901 - RNA, 19 nt, Artificial Sequence
  Description of Artificial Sequence: Synthetic oligonucleotide
  Sense strand starting at position 2454 of SEQ ID NO: 1561360
gggacauauucaccgaguu

SEQ ID NO: 1665902 - RNA, 19 nt, Artificial Sequence
  Description of Artificial Sequence: Synthetic oligonucleotide
  Antisense strand to SEQ ID NO: 1665901
aacucggugaauauguccc

SEQ ID NO: 1665903 - RNA, 19 nt, Artificial Sequence
  Description of Artificial Sequence: Synthetic oligonucleotide
  Sense strand starting at position 2540 of SEQ ID NO: 1561360
aauggaaaggguuggucuu

SEQ ID NO: 1665904 - RNA, 19 nt, Artificial Sequence
  Description of Artificial Sequence: Synthetic oligonucleotide
  Antisense strand to SEQ ID NO: 1665903
aagaccaacccuuuccauu

SEQ ID NO: 1665905 - RNA, 19 nt, Artificial Sequence
  Description of Artificial Sequence: Synthetic oligonucleotide
  Sense strand starting at position 2541 of SEQ ID NO: 1561360
auggaaaggguuggucuua

SEQ ID NO: 1665906 - RNA, 19 nt, Artificial Sequence
  Description of Artificial Sequence: Synthetic oligonucleotide
  Antisense strand to SEQ ID NO: 1665905
uaagaccaacccuuuccau

SEQ ID NO: 1665907 - RNA, 19 nt, Artificial Sequence
  Description of Artificial Sequence: Synthetic oligonucleotide
  Sense strand starting at position 2542 of SEQ ID NO: 1561360
uggaaaggguuggucuuau

SEQ ID NO: 1665908 - RNA, 19 nt, Artificial Sequence
  Description of Artificial Sequence: Synthetic oligonucleotide
  Antisense strand to SEQ ID NO: 1665907
auaagaccaacccuuucca

SEQ ID NO: 1665909 - RNA, 19 nt, Artificial Sequence
  Description of Artificial Sequence: Synthetic oligonucleotide
  Sense strand starting at position 3065 of SEQ ID NO: 1561360
gagggucagcuguagaacu

SEQ ID NO: 1665910 - RNA, 19 nt, Artificial Sequence
  Description of Artificial Sequence: Synthetic oligonucleotide
  Antisense strand to SEQ ID NO: 1665909
aguucuacagcugacccuc

SEQ ID NO: 1665911 - RNA, 19 nt, Artificial Sequence
  Description of Artificial Sequence: Synthetic oligonucleotide
  Sense strand starting at position 3113 of SEQ ID NO: 1561360
aaacauggguggccagaua

SEQ ID NO: 1665912 - RNA, 19 nt, Artificial Sequence
  Description of Artificial Sequence: Synthetic oligonucleotide
  Antisense strand to SEQ ID NO: 1665911
uaucuggccacccauguuu

SEQ ID NO: 1665913 - RNA, 19 nt, Artificial Sequence
  Description of Artificial Sequence: Synthetic oligonucleotide
  Sense strand starting at position 3870 of SEQ ID NO: 1561360
ggaagaacaccuuguguca

SEQ ID NO: 1665914 - RNA, 19 nt, Artificial Sequence
  Description of Artificial Sequence: Synthetic oligonucleotide
  Antisense strand to SEQ ID NO: 1665913
ugacacaagguguucuucc

SEQ ID NO: 1665915 - RNA, 19 nt, Artificial Sequence
  Description of Artificial Sequence: Synthetic oligonucleotide
  Sense strand starting at position 96 of SEQ ID NO: 1561361
guuggacaagcuuaguuua

SEQ ID NO: 1665916 - RNA, 19 nt, Artificial Sequence
  Description of Artificial Sequence: Synthetic oligonucleotide
  Antisense strand to SEQ ID NO: 1665915
uaaacuaagcuuguccaac

SEQ ID NO: 1665917 - RNA, 19 nt, Artificial Sequence
  Description of Artificial Sequence: Synthetic oligonucleotide
  Sense strand starting at position 101 of SEQ ID NO: 1561361
acaagcuuaguuuaaggua

SEQ ID NO: 1665918 - RNA, 19 nt, Artificial Sequence
  Description of Artificial Sequence: Synthetic oligonucleotide
  Antisense strand to SEQ ID NO: 1665917
uaccuuaaacuaagcuugu

SEQ ID NO: 1665919 - RNA, 19 nt, Artificial Sequence
  Description of Artificial Sequence: Synthetic oligonucleotide
  Sense strand starting at position 442 of SEQ ID NO: 1561361
guagcaagaaacugugagu

SEQ ID NO: 1665920 - RNA, 19 nt, Artificial Sequence
  Description of Artificial Sequence: Synthetic oligonucleotide
  Antisense strand to SEQ ID NO: 1665919
acucacaguuucuugcuac

SEQ ID NO: 1665921 - RNA, 19 nt, Artificial Sequence
  Description of Artificial Sequence: Synthetic oligonucleotide
  Sense strand starting at position 510 of SEQ ID NO: 1561361
gagccugcuugccugacau

SEQ ID NO: 1665922 - RNA, 19 nt, Artificial Sequence
  Description of Artificial Sequence: Synthetic oligonucleotide
  Antisense strand to SEQ ID NO: 1665921
augucaggcaagcaggcuc

SEQ ID NO: 1665923 - RNA, 19 nt, Artificial Sequence
  Description of Artificial Sequence: Synthetic oligonucleotide
  Sense strand starting at position 512 of SEQ ID NO: 1561361
gccugcuugccugacauuu

SEQ ID NO: 1665924 - RNA, 19 nt, Artificial Sequence
  Description of Artificial Sequence: Synthetic oligonucleotide
  Antisense strand to SEQ ID NO: 1665923
aaaugucaggcaagcaggc

SEQ ID NO: 1665925 - RNA, 19 nt, Artificial Sequence
  Description of Artificial Sequence: Synthetic oligonucleotide
  Sense strand starting at position 557 of SEQ ID NO: 1561361
cuggaugauucucaccagu

SEQ ID NO: 1665926 - RNA, 19 nt, Artificial Sequence
  Description of Artificial Sequence: Synthetic oligonucleotide
  Antisense strand to SEQ ID NO: 1665925
acuggugagaaucauccag

SEQ ID NO: 1665927 - RNA, 19 nt, Artificial Sequence
  Description of Artificial Sequence: Synthetic oligonucleotide
  Sense strand starting at position 559 of SEQ ID NO: 1561361
ggaugauucucaccagucg

SEQ ID NO: 1665928 - RNA, 19 nt, Artificial Sequence
  Description of Artificial Sequence: Synthetic oligonucleotide
  Antisense strand to SEQ ID NO: 1665927
cgacuggugagaaucaucc

SEQ ID NO: 1665929 - RNA, 19 nt, Artificial Sequence
  Description of Artificial Sequence: Synthetic oligonucleotide
  Sense strand starting at position 693 of SEQ ID NO: 1561361
gugcuaggcucuucccaau

SEQ ID NO: 1665930 - RNA, 19 nt, Artificial Sequence
  Description of Artificial Sequence: Synthetic oligonucleotide
  Antisense strand to SEQ ID NO: 1665929
auugggaagagccuagcac

SEQ ID NO: 1665931 - RNA, 19 nt, Artificial Sequence
  Description of Artificial Sequence: Synthetic oligonucleotide
  Sense strand starting at position 2192 of SEQ ID NO: 1561361
uggauucgcccggugugua

SEQ ID NO: 1665932 - RNA, 19 nt, Artificial Sequence
  Description of Artificial Sequence: Synthetic oligonucleotide
  Antisense strand to SEQ ID NO: 1665931
uacacaccgggcgaaucca

SEQ ID NO: 1665933 - RNA, 19 nt, Artificial Sequence
  Description of Artificial Sequence: Synthetic oligonucleotide
  Sense strand starting at position 2241 of SEQ ID NO: 1561361
caagcagucccggagacua

SEQ ID NO: 1665934 - RNA, 19 nt, Artificial Sequence
  Description of Artificial Sequence: Synthetic oligonucleotide
  Antisense strand to SEQ ID NO: 1665933
uagucuccgggacugcuug

SEQ ID NO: 1665935 - RNA, 19 nt, Artificial Sequence
  Description of Artificial Sequence: Synthetic oligonucleotide
  Sense strand starting at position 2433 of SEQ ID NO: 1561361
guuugaccucucuguguca

SEQ ID NO: 1665936 - RNA, 19 nt, Artificial Sequence
  Description of Artificial Sequence: Synthetic oligonucleotide
  Antisense strand to SEQ ID NO: 1665935
ugacacagagaggucaaac

SEQ ID NO: 1665937 - RNA, 19 nt, Artificial Sequence
  Description of Artificial Sequence: Synthetic oligonucleotide
  Sense strand starting at position 2435 of SEQ ID NO: 1561361
uugaccucucugugucaau

SEQ ID NO: 1665938 - RNA, 19 nt, Artificial Sequence
  Description of Artificial Sequence: Synthetic oligonucleotide
  Antisense strand to SEQ ID NO: 1665937
auugacacagagaggucaa

SEQ ID NO: 1665939 - RNA, 19 nt, Artificial Sequence
  Description of Artificial Sequence: Synthetic oligonucleotide
  Sense strand starting at position 2448 of SEQ ID NO: 1561361
gucaaugucccguaaaggu

SEQ ID NO: 1665940 - RNA, 19 nt, Artificial Sequence
  Description of Artificial Sequence: Synthetic oligonucleotide
  Antisense strand to SEQ ID NO: 1665939
accuuuacgggacauugac

SEQ ID NO: 1665941 - RNA, 19 nt, Artificial Sequence
  Description of Artificial Sequence: Synthetic oligonucleotide
  Sense strand starting at position 2493 of SEQ ID NO: 1561361
caagaauucucagcccgua

SEQ ID NO: 1665942 - RNA, 19 nt, Artificial Sequence
  Description of Artificial Sequence: Synthetic oligonucleotide
  Antisense strand to SEQ ID NO: 1665941
uacgggcugagaauucuug

SEQ ID NO: 1665943 - RNA, 19 nt, Artificial Sequence
  Description of Artificial Sequence: Synthetic oligonucleotide
  Sense strand starting at position 2513 of SEQ ID NO: 1561361
gccuacauuugucuuaagu

SEQ ID NO: 1665944 - RNA, 19 nt, Artificial Sequence
  Description of Artificial Sequence: Synthetic oligonucleotide
  Antisense strand to SEQ ID NO: 1665943
acuuaagacaaauguaggc

SEQ ID NO: 1665945 - RNA, 19 nt, Artificial Sequence
  Description of Artificial Sequence: Synthetic oligonucleotide
  Sense strand starting at position 2515 of SEQ ID NO: 1561361
cuacauuugucuuaaguau

SEQ ID NO: 1665946 - RNA, 19 nt, Artificial Sequence
  Description of Artificial Sequence: Synthetic oligonucleotide
  Antisense strand to SEQ ID NO: 1665945
auacuuaagacaaauguag

SEQ ID NO: 1665947 - RNA, 19 nt, Artificial Sequence
  Description of Artificial Sequence: Synthetic oligonucleotide
  Sense strand starting at position 2521 of SEQ ID NO: 1561361
uugucuuaaguaugagacu

SEQ ID NO: 1665948 - RNA, 19 nt, Artificial Sequence
  Description of Artificial Sequence: Synthetic oligonucleotide
  Antisense strand to SEQ ID NO: 1665947
agucucauacuuaagacaa

SEQ ID NO: 1665949 - RNA, 19 nt, Artificial Sequence
  Description of Artificial Sequence: Synthetic oligonucleotide
  Sense strand starting at position 2524 of SEQ ID NO: 1561361
ucuuaaguaugagacuguu

SEQ ID NO: 1665950 - RNA, 19 nt, Artificial Sequence
  Description of Artificial Sequence: Synthetic oligonucleotide
  Antisense strand to SEQ ID NO: 1665949
aacagucucauacuuaaga

SEQ ID NO: 1665951 - RNA, 19 nt, Artificial Sequence
  Description of Artificial Sequence: Synthetic oligonucleotide
  Sense strand starting at position 2530 of SEQ ID NO: 1561361
guaugagacuguuccucga

SEQ ID NO: 1665952 - RNA, 19 nt, Artificial Sequence
  Description of Artificial Sequence: Synthetic oligonucleotide
  Antisense strand to SEQ ID NO: 1665951
ucgaggaacagucucauac

SEQ ID NO: 1665953 - RNA, 19 nt, Artificial Sequence
  Description of Artificial Sequence: Synthetic oligonucleotide
  Sense strand starting at position 2532 of SEQ ID NO: 1561361
augagacuguuccucgaca

SEQ ID NO: 1665954 - RNA, 19 nt, Artificial Sequence
  Description of Artificial Sequence: Synthetic oligonucleotide
  Antisense strand to SEQ ID NO: 1665953
ugucgaggaacagucucau

SEQ ID NO: 1665955 - RNA, 19 nt, Artificial Sequence
  Description of Artificial Sequence: Synthetic oligonucleotide
  Sense strand starting at position 2534 of SEQ ID NO: 1561361
gagacuguuccucgacacu

SEQ ID NO: 1665956 - RNA, 19 nt, Artificial Sequence
  Description of Artificial Sequence: Synthetic oligonucleotide
  Antisense strand to SEQ ID NO: 1665955
agugucgaggaacagucuc

SEQ ID NO: 1665957 - RNA, 19 nt, Artificial Sequence
  Description of Artificial Sequence: Synthetic oligonucleotide
  Sense strand starting at position 2580 of SEQ ID NO: 1561361
uuuggaugggcagaaguua

SEQ ID NO: 1665958 - RNA, 19 nt, Artificial Sequence
  Description of Artificial Sequence: Synthetic oligonucleotide
  Antisense strand to SEQ ID NO: 1665957
uaacuucugcccauccaaa

SEQ ID NO: 1665959 - RNA, 19 nt, Artificial Sequence
  Description of Artificial Sequence: Synthetic oligonucleotide
  Sense strand starting at position 2603 of SEQ ID NO: 1561361
cccagauuugcuuguccuu

SEQ ID NO: 1665960 - RNA, 19 nt, Artificial Sequence
  Description of Artificial Sequence: Synthetic oligonucleotide
  Antisense strand to SEQ ID NO: 1665959
aaggacaagcaaaucuggg

SEQ ID NO: 1665961 - RNA, 19 nt, Artificial Sequence
  Description of Artificial Sequence: Synthetic oligonucleotide
  Sense strand starting at position 2609 of SEQ ID NO: 1561361
uuugcuuguccuuagacca

SEQ ID NO: 1665962 - RNA, 19 nt, Artificial Sequence
  Description of Artificial Sequence: Synthetic oligonucleotide
  Antisense strand to SEQ ID NO: 1665961
uggucuaaggacaagcaaa

SEQ ID NO: 1665963 - RNA, 19 nt, Artificial Sequence
  Description of Artificial Sequence: Synthetic oligonucleotide
  Sense strand starting at position 2982 of SEQ ID NO: 1561361
uuaagugucuuugacacau

SEQ ID NO: 1665964 - RNA, 19 nt, Artificial Sequence
  Description of Artificial Sequence: Synthetic oligonucleotide
  Antisense strand to SEQ ID NO: 1665963
augugucaaagacacuuaa

SEQ ID NO: 1665965 - RNA, 19 nt, Artificial Sequence
  Description of Artificial Sequence: Synthetic oligonucleotide
  Sense strand starting at position 3025 of SEQ ID NO: 1561361
aauguagacugucuuguuu

SEQ ID NO: 1665966 - RNA, 19 nt, Artificial Sequence
  Description of Artificial Sequence: Synthetic oligonucleotide
  Antisense strand to SEQ ID NO: 1665965
aaacaagacagucuacauu

SEQ ID NO: 1665967 - RNA, 19 nt, Artificial Sequence
  Description of Artificial Sequence: Synthetic oligonucleotide
  Sense strand starting at position 3031 of SEQ ID NO: 1561361
gacugucuuguuuggcaga

SEQ ID NO: 1665968 - RNA, 19 nt, Artificial Sequence
  Description of Artificial Sequence: Synthetic oligonucleotide
  Antisense strand to SEQ ID NO: 1665967
ucugccaaacaagacaguc

SEQ ID NO: 1665969 - RNA, 19 nt, Artificial Sequence
  Description of Artificial Sequence: Synthetic oligonucleotide
  Sense strand starting at position 3033 of SEQ ID NO: 1561361
cugucuuguuuggcagaua

SEQ ID NO: 1665970 - RNA, 19 nt, Artificial Sequence
  Description of Artificial Sequence: Synthetic oligonucleotide
  Antisense strand to SEQ ID NO: 1665969
uaucugccaaacaagacag

SEQ ID NO: 1665971 - RNA, 19 nt, Artificial Sequence
  Description of Artificial Sequence: Synthetic oligonucleotide
  Sense strand starting at position 3036 of SEQ ID NO: 1561361
ucuuguuuggcagauaaua

SEQ ID NO: 1665972 - RNA, 19 nt, Artificial Sequence
  Description of Artificial Sequence: Synthetic oligonucleotide
  Antisense strand to SEQ ID NO: 1665971
uauuaucugccaaacaaga

SEQ ID NO: 1665973 - RNA, 19 nt, Artificial Sequence
  Description of Artificial Sequence: Synthetic oligonucleotide
  Sense strand starting at position 3166 of SEQ ID NO: 1561361
ugucaacugucagcuauaa

SEQ ID NO: 1665974 - RNA, 19 nt, Artificial Sequence
  Description of Artificial Sequence: Synthetic oligonucleotide
  Antisense strand to SEQ ID NO: 1665973
uuauagcugacaguugaca

SEQ ID NO: 1665975 - RNA, 19 nt, Artificial Sequence
  Description of Artificial Sequence: Synthetic oligonucleotide
  Sense strand starting at position 3205 of SEQ ID NO: 1561361
acuuguaaauccuuguaga

SEQ ID NO: 1665976 - RNA, 19 nt, Artificial Sequence
  Description of Artificial Sequence: Synthetic oligonucleotide
  Antisense strand to SEQ ID NO: 1665975
ucuacaaggauuuacaagu

SEQ ID NO: 1665977 - RNA, 19 nt, Artificial Sequence
  Description of Artificial Sequence: Synthetic oligonucleotide
  Sense strand starting at position 3206 of SEQ ID NO: 1561361
cuuguaaauccuuguagag

SEQ ID NO: 1665978 - RNA, 19 nt, Artificial Sequence
  Description of Artificial Sequence: Synthetic oligonucleotide
  Antisense strand to SEQ ID NO: 1665977
cucuacaaggauuuacaag

SEQ ID NO: 1665979 - RNA, 19 nt, Artificial Sequence
  Description of Artificial Sequence: Synthetic oligonucleotide
  Sense strand starting at position 3208 of SEQ ID NO: 1561361
uguaaauccuuguagagca

SEQ ID NO: 1665980 - RNA, 19 nt, Artificial Sequence
  Description of Artificial Sequence: Synthetic oligonucleotide
  Antisense strand to SEQ ID NO: 1665979
ugcucuacaaggauuuaca

SEQ ID NO: 1665981 - RNA, 19 nt, Artificial Sequence
  Description of Artificial Sequence: Synthetic oligonucleotide
  Sense strand starting at position 3226 of SEQ ID NO: 1561361
aagggagcucaucauguuu

SEQ ID NO: 1665982 - RNA, 19 nt, Artificial Sequence
  Description of Artificial Sequence: Synthetic oligonucleotide
  Antisense strand to SEQ ID NO: 1665981
aaacaugaugagcucccuu

SEQ ID NO: 1665983 - RNA, 19 nt, Artificial Sequence
  Description of Artificial Sequence: Synthetic oligonucleotide
  Sense strand starting at position 3231 of SEQ ID NO: 1561361
agcucaucauguuuggaau

SEQ ID NO: 1665984 - RNA, 19 nt, Artificial Sequence
  Description of Artificial Sequence: Synthetic oligonucleotide
  Antisense strand to SEQ ID NO: 1665983
auuccaaacaugaugagcu

SEQ ID NO: 1665985 - RNA, 19 nt, Artificial Sequence
  Description of Artificial Sequence: Synthetic oligonucleotide
  Sense strand starting at position 3232 of SEQ ID NO: 1561361
gcucaucauguuuggaaug

SEQ ID NO: 1665986 - RNA, 19 nt, Artificial Sequence
  Description of Artificial Sequence: Synthetic oligonucleotide
  Antisense strand to SEQ ID NO: 1665985
cauuccaaacaugaugagc

SEQ ID NO: 1665987 - RNA, 19 nt, Artificial Sequence
  Description of Artificial Sequence: Synthetic oligonucleotide
  Sense strand starting at position 3234 of SEQ ID NO: 1561361
ucaucauguuuggaauguu

SEQ ID NO: 1665988 - RNA, 19 nt, Artificial Sequence
  Description of Artificial Sequence: Synthetic oligonucleotide
  Antisense strand to SEQ ID NO: 1665987
aacauuccaaacaugauga

SEQ ID NO: 1665989 - RNA, 19 nt, Artificial Sequence
  Description of Artificial Sequence: Synthetic oligonucleotide
  Sense strand starting at position 3351 of SEQ ID NO: 1561361
gagcgaucacuggagccua

SEQ ID NO: 1665990 - RNA, 19 nt, Artificial Sequence
  Description of Artificial Sequence: Synthetic oligonucleotide
  Antisense strand to SEQ ID NO: 1665989
uaggcuccagugaucgcuc

SEQ ID NO: 1665991 - RNA, 19 nt, Artificial Sequence
  Description of Artificial Sequence: Synthetic oligonucleotide
  Sense strand starting at position 3507 of SEQ ID NO: 1561361
uggagugugcagugagcua

SEQ ID NO: 1665992 - RNA, 19 nt, Artificial Sequence
  Description of Artificial Sequence: Synthetic oligonucleotide
  Antisense strand to SEQ ID NO: 1665991
uagcucacugcacacucca

SEQ ID NO: 1665993 - RNA, 19 nt, Artificial Sequence
  Description of Artificial Sequence: Synthetic oligonucleotide
  Sense strand starting at position 3512 of SEQ ID NO: 1561361
ugugcagugagcuaugaug

SEQ ID NO: 1665994 - RNA, 19 nt, Artificial Sequence
  Description of Artificial Sequence: Synthetic oligonucleotide
  Antisense strand to SEQ ID NO: 1665993
caucauagcucacugcaca

SEQ ID NO: 1665995 - RNA, 19 nt, Artificial Sequence
  Description of Artificial Sequence: Synthetic oligonucleotide
  Sense strand starting at position 26 of SEQ ID NO: 1561362
ccgagauuaucuucaggug

SEQ ID NO: 1665996 - RNA, 19 nt, Artificial Sequence
  Description of Artificial Sequence: Synthetic oligonucleotide
  Antisense strand to SEQ ID NO: 1665995
caccugaagauaaucucgg

SEQ ID NO: 1665997 - RNA, 19 nt, Artificial Sequence
  Description of Artificial Sequence: Synthetic oligonucleotide
  Sense strand starting at position 98 of SEQ ID NO: 1561362
ccagauggcuucuugacuu

SEQ ID NO: 1665998 - RNA, 19 nt, Artificial Sequence
  Description of Artificial Sequence: Synthetic oligonucleotide
  Antisense strand to SEQ ID NO: 1665997
aagucaagaagccaucugg

SEQ ID NO: 1665999 - RNA, 19 nt, Artificial Sequence
  Description of Artificial Sequence: Synthetic oligonucleotide
  Sense strand starting at position 207 of SEQ ID NO: 1561362
gugacucagcaugaccauu

SEQ ID NO: 1666000 - RNA, 19 nt, Artificial Sequence
  Description of Artificial Sequence: Synthetic oligonucleotide
  Antisense strand to SEQ ID NO: 1665999
aauggucaugcugagucac

SEQ ID NO: 1666001 - RNA, 19 nt, Artificial Sequence
  Description of Artificial Sequence: Synthetic oligonucleotide
  Sense strand starting at position 260 of SEQ ID NO: 1561362
guaauaagcaaggguguaa

SEQ ID NO: 1666002 - RNA, 19 nt, Artificial Sequence
  Description of Artificial Sequence: Synthetic oligonucleotide
  Antisense strand to SEQ ID NO: 1666001
uuacacccuugcuuauuac

SEQ ID NO: 1666003 - RNA, 19 nt, Artificial Sequence
  Description of Artificial Sequence: Synthetic oligonucleotide
  Sense strand starting at position 329 of SEQ ID NO: 1561362
cugcgcuugccugacauuu

SEQ ID NO: 1666004 - RNA, 19 nt, Artificial Sequence
  Description of Artificial Sequence: Synthetic oligonucleotide
  Antisense strand to SEQ ID NO: 1666003
aaaugucaggcaagcgcag

SEQ ID NO: 1666005 - RNA, 19 nt, Artificial Sequence
  Description of Artificial Sequence: Synthetic oligonucleotide
  Sense strand starting at position 411 of SEQ ID NO: 1561362
ccaagaaccugugaacaca

SEQ ID NO: 1666006 - RNA, 19 nt, Artificial Sequence
  Description of Artificial Sequence: Synthetic oligonucleotide
  Antisense strand to SEQ ID NO: 1666005
uguguucacagguucuugg

SEQ ID NO: 1666007 - RNA, 19 nt, Artificial Sequence
  Description of Artificial Sequence: Synthetic oligonucleotide
  Sense strand starting at position 1350 of SEQ ID NO: 1561362
cgcucagucccagaagcau

SEQ ID NO: 1666008 - RNA, 19 nt, Artificial Sequence
  Description of Artificial Sequence: Synthetic oligonucleotide
  Antisense strand to SEQ ID NO: 1666007
augcuucugggacugagcg

SEQ ID NO: 1666009 - RNA, 19 nt, Artificial Sequence
  Description of Artificial Sequence: Synthetic oligonucleotide
  Sense strand starting at position 1841 of SEQ ID NO: 1561362
ccacgucauacucgaagau

SEQ ID NO: 1666010 - RNA, 19 nt, Artificial Sequence
  Description of Artificial Sequence: Synthetic oligonucleotide
  Antisense strand to SEQ ID NO: 1666009
aucuucgaguaugacgugg

SEQ ID NO: 1666011 - RNA, 19 nt, Artificial Sequence
  Description of Artificial Sequence: Synthetic oligonucleotide
  Sense strand starting at position 1842 of SEQ ID NO: 1561362
cacgucauacucgaagaua

SEQ ID NO: 1666012 - RNA, 19 nt, Artificial Sequence
  Description of Artificial Sequence: Synthetic oligonucleotide
  Antisense strand to SEQ ID NO: 1666011
uaucuucgaguaugacgug

SEQ ID NO: 1666013 - RNA, 19 nt, Artificial Sequence
  Description of Artificial Sequence: Synthetic oligonucleotide
  Sense strand starting at position 2455 of SEQ ID NO: 1561362
uugaucucucuguguguca

SEQ ID NO: 1666014 - RNA, 19 nt, Artificial Sequence
  Description of Artificial Sequence: Synthetic oligonucleotide
  Antisense strand to SEQ ID NO: 1666013
ugacacacagagagaucaa

SEQ ID NO: 1666015 - RNA, 19 nt, Artificial Sequence
  Description of Artificial Sequence: Synthetic oligonucleotide
  Sense strand starting at position 2467 of SEQ ID NO: 1561362
ugugucagugucccguaaa

SEQ ID NO: 1666016 - RNA, 19 nt, Artificial Sequence
  Description of Artificial Sequence: Synthetic oligonucleotide
  Antisense strand to SEQ ID NO: 1666015
uuuacgggacacugacaca

SEQ ID NO: 1666017 - RNA, 19 nt, Artificial Sequence
  Description of Artificial Sequence: Synthetic oligonucleotide
  Sense strand starting at position 2470 of SEQ ID NO: 1561362
gucagugucccguaaaggu

SEQ ID NO: 1666018 - RNA, 19 nt, Artificial Sequence
  Description of Artificial Sequence: Synthetic oligonucleotide
  Antisense strand to SEQ ID NO: 1666017
accuuuacgggacacugac

SEQ ID NO: 1666019 - RNA, 19 nt, Artificial Sequence
  Description of Artificial Sequence: Synthetic oligonucleotide
  Sense strand starting at position 2519 of SEQ ID NO: 1561362
gaauucucagccuguaaug

SEQ ID NO: 1666020 - RNA, 19 nt, Artificial Sequence
  Description of Artificial Sequence: Synthetic oligonucleotide
  Antisense strand to SEQ ID NO: 1666019
cauuacaggcugagaauuc

SEQ ID NO: 1666021 - RNA, 19 nt, Artificial Sequence
  Description of Artificial Sequence: Synthetic oligonucleotide
  Sense strand starting at position 2547 of SEQ ID NO: 1561362
gcuugucauuugucuugau

SEQ ID NO: 1666022 - RNA, 19 nt, Artificial Sequence
  Description of Artificial Sequence: Synthetic oligonucleotide
  Antisense strand to SEQ ID NO: 1666021
aucaagacaaaugacaagc

SEQ ID NO: 1666023 - RNA, 19 nt, Artificial Sequence
  Description of Artificial Sequence: Synthetic oligonucleotide
  Sense strand starting at position 2548 of SEQ ID NO: 1561362
cuugucauuugucuugauu

SEQ ID NO: 1666024 - RNA, 19 nt, Artificial Sequence
  Description of Artificial Sequence: Synthetic oligonucleotide
  Antisense strand to SEQ ID NO: 1666023
aaucaagacaaaugacaag

SEQ ID NO: 1666025 - RNA, 19 nt, Artificial Sequence
  Description of Artificial Sequence: Synthetic oligonucleotide
  Sense strand starting at position 2562 of SEQ ID NO: 1561362
ugauucugugauuguucuu

SEQ ID NO: 1666026 - RNA, 19 nt, Artificial Sequence
  Description of Artificial Sequence: Synthetic oligonucleotide
  Antisense strand to SEQ ID NO: 1666025
aagaacaaucacagaauca

SEQ ID NO: 1666027 - RNA, 19 nt, Artificial Sequence
  Description of Artificial Sequence: Synthetic oligonucleotide
  Sense strand starting at position 2565 of SEQ ID NO: 1561362
uucugugauuguucuugga

SEQ ID NO: 1666028 - RNA, 19 nt, Artificial Sequence
  Description of Artificial Sequence: Synthetic oligonucleotide
  Antisense strand to SEQ ID NO: 1666027
uccaagaacaaucacagaa

SEQ ID NO: 1666029 - RNA, 19 nt, Artificial Sequence
  Description of Artificial Sequence: Synthetic oligonucleotide
  Sense strand starting at position 2642 of SEQ ID NO: 1561362
cuugcuuguccuuagacca

SEQ ID NO: 1666030 - RNA, 19 nt, Artificial Sequence
  Description of Artificial Sequence: Synthetic oligonucleotide
  Antisense strand to SEQ ID NO: 1666029
uggucuaaggacaagcaag

SEQ ID NO: 1666031 - RNA, 19 nt, Artificial Sequence
  Description of Artificial Sequence: Synthetic oligonucleotide
  Sense strand starting at position 2719 of SEQ ID NO: 1561362
ggaccaaucuaagugucuu

SEQ ID NO: 1666032 - RNA, 19 nt, Artificial Sequence
  Description of Artificial Sequence: Synthetic oligonucleotide
  Antisense strand to SEQ ID NO: 1666031
aagacacuuagauuggucc

SEQ ID NO: 1666033 - RNA, 19 nt, Artificial Sequence
  Description of Artificial Sequence: Synthetic oligonucleotide
  Sense strand starting at position 2725 of SEQ ID NO: 1561362
aucuaagugucuuugacac

SEQ ID NO: 1666034 - RNA, 19 nt, Artificial Sequence
  Description of Artificial Sequence: Synthetic oligonucleotide
  Antisense strand to SEQ ID NO: 1666033
gugucaaagacacuuagau

SEQ ID NO: 1666035 - RNA, 19 nt, Artificial Sequence
  Description of Artificial Sequence: Synthetic oligonucleotide
  Sense strand starting at position 2773 of SEQ ID NO: 1561362
guagacugaccauguuguu

SEQ ID NO: 1666036 - RNA, 19 nt, Artificial Sequence
  Description of Artificial Sequence: Synthetic oligonucleotide
  Antisense strand to SEQ ID NO: 1666035
aacaacauggucagucuac

SEQ ID NO: 1666037 - RNA, 19 nt, Artificial Sequence
  Description of Artificial Sequence: Synthetic oligonucleotide
  Sense strand starting at position 2786 of SEQ ID NO: 1561362
guuguuggcagagaauaaa

SEQ ID NO: 1666038 - RNA, 19 nt, Artificial Sequence
  Description of Artificial Sequence: Synthetic oligonucleotide
  Antisense strand to SEQ ID NO: 1666037
uuuauucucugccaacaac

SEQ ID NO: 1666039 - RNA, 19 nt, Artificial Sequence
  Description of Artificial Sequence: Synthetic oligonucleotide
  Sense strand starting at position 2852 of SEQ ID NO: 1561362
cuuagacaguucucagaug

SEQ ID NO: 1666040 - RNA, 19 nt, Artificial Sequence
  Description of Artificial Sequence: Synthetic oligonucleotide
  Antisense strand to SEQ ID NO: 1666039
caucugagaacugucuaag

SEQ ID NO: 1666041 - RNA, 19 nt, Artificial Sequence
  Description of Artificial Sequence: Synthetic oligonucleotide
  Sense strand starting at position 2864 of SEQ ID NO: 1561362
ucagaugucaaguacguua

SEQ ID NO: 1666042 - RNA, 19 nt, Artificial Sequence
  Description of Artificial Sequence: Synthetic oligonucleotide
  Antisense strand to SEQ ID NO: 1666041
uaacguacuugacaucuga

SEQ ID NO: 1666043 - RNA, 19 nt, Artificial Sequence
  Description of Artificial Sequence: Synthetic oligonucleotide
  Sense strand starting at position 2866 of SEQ ID NO: 1561362
agaugucaaguacguuaau

SEQ ID NO: 1666044 - RNA, 19 nt, Artificial Sequence
  Description of Artificial Sequence: Synthetic oligonucleotide
  Antisense strand to SEQ ID NO: 1666043
auuaacguacuugacaucu

SEQ ID NO: 1666045 - RNA, 19 nt, Artificial Sequence
  Description of Artificial Sequence: Synthetic oligonucleotide
  Sense strand starting at position 2867 of SEQ ID NO: 1561362
gaugucaaguacguuaauu

SEQ ID NO: 1666046 - RNA, 19 nt, Artificial Sequence
  Description of Artificial Sequence: Synthetic oligonucleotide
  Antisense strand to SEQ ID NO: 1666045
aauuaacguacuugacauc

SEQ ID NO: 1666047 - RNA, 19 nt, Artificial Sequence
  Description of Artificial Sequence: Synthetic oligonucleotide
  Sense strand starting at position 2918 of SEQ ID NO: 1561362
auaaauaucugucuacugu

SEQ ID NO: 1666048 - RNA, 19 nt, Artificial Sequence
  Description of Artificial Sequence: Synthetic oligonucleotide
  Antisense strand to SEQ ID NO: 1666047
acaguagacagauauuuau

SEQ ID NO: 1666049 - RNA, 19 nt, Artificial Sequence
  Description of Artificial Sequence: Synthetic oligonucleotide
  Sense strand starting at position 2927 of SEQ ID NO: 1561362
ugucuacugucagcuauaa

SEQ ID NO: 1666050 - RNA, 19 nt, Artificial Sequence
  Description of Artificial Sequence: Synthetic oligonucleotide
  Antisense strand to SEQ ID NO: 1666049
uuauagcugacaguagaca

SEQ ID NO: 1666051 - RNA, 19 nt, Artificial Sequence
  Description of Artificial Sequence: Synthetic oligonucleotide
  Sense strand starting at position 2938 of SEQ ID NO: 1561362
agcuauaacuguccacaga

SEQ ID NO: 1666052 - RNA, 19 nt, Artificial Sequence
  Description of Artificial Sequence: Synthetic oligonucleotide
  Antisense strand to SEQ ID NO: 1666051
ucuguggacaguuauagcu

SEQ ID NO: 1666053 - RNA, 19 nt, Artificial Sequence
  Description of Artificial Sequence: Synthetic oligonucleotide
  Sense strand starting at position 2939 of SEQ ID NO: 1561362
gcuauaacuguccacagaa

SEQ ID NO: 1666054 - RNA, 19 nt, Artificial Sequence
  Description of Artificial Sequence: Synthetic oligonucleotide
  Antisense strand to SEQ ID NO: 1666053
uucuguggacaguuauagc

SEQ ID NO: 1666055 - RNA, 19 nt, Artificial Sequence
  Description of Artificial Sequence: Synthetic oligonucleotide
  Sense strand starting at position 2966 of SEQ ID NO: 1561362
acuuguagaucccuauagu

SEQ ID NO: 1666056 - RNA, 19 nt, Artificial Sequence
  Description of Artificial Sequence: Synthetic oligonucleotide
  Antisense strand to SEQ ID NO: 1666055
acuauagggaucuacaagu

SEQ ID NO: 1666057 - RNA, 19 nt, Artificial Sequence
  Description of Artificial Sequence: Synthetic oligonucleotide
  Sense strand starting at position 2967 of SEQ ID NO: 1561362
cuuguagaucccuauagug

SEQ ID NO: 1666058 - RNA, 19 nt, Artificial Sequence
  Description of Artificial Sequence: Synthetic oligonucleotide
  Antisense strand to SEQ ID NO: 1666057
cacuauagggaucuacaag

SEQ ID NO: 1666059 - RNA, 19 nt, Artificial Sequence
  Description of Artificial Sequence: Synthetic oligonucleotide
  Sense strand starting at position 2969 of SEQ ID NO: 1561362
uguagaucccuauagugua

SEQ ID NO: 1666060 - RNA, 19 nt, Artificial Sequence
  Description of Artificial Sequence: Synthetic oligonucleotide
  Antisense strand to SEQ ID NO: 1666059
uacacuauagggaucuaca

SEQ ID NO: 1666061 - RNA, 19 nt, Artificial Sequence
  Description of Artificial Sequence: Synthetic oligonucleotide
  Sense strand starting at position 2974 of SEQ ID NO: 1561362
aucccuauaguguaagaua

SEQ ID NO: 1666062 - RNA, 19 nt, Artificial Sequence
  Description of Artificial Sequence: Synthetic oligonucleotide
  Antisense strand to SEQ ID NO: 1666061
uaucuuacacuauagggau

SEQ ID NO: 1666063 - RNA, 19 nt, Artificial Sequence
  Description of Artificial Sequence: Synthetic oligonucleotide
  Sense strand starting at position 2982 of SEQ ID NO: 1561362
aguguaagauagcucgaca

SEQ ID NO: 1666064 - RNA, 19 nt, Artificial Sequence
  Description of Artificial Sequence: Synthetic oligonucleotide
  Antisense strand to SEQ ID NO: 1666063
ugucgagcuaucuuacacu

SEQ ID NO: 1666065 - RNA, 19 nt, Artificial Sequence
  Description of Artificial Sequence: Synthetic oligonucleotide
  Sense strand starting at position 2985 of SEQ ID NO: 1561362
guaagauagcucgacaauu

SEQ ID NO: 1666066 - RNA, 19 nt, Artificial Sequence
  Description of Artificial Sequence: Synthetic oligonucleotide
  Antisense strand to SEQ ID NO: 1666065
aauugucgagcuaucuuac

SEQ ID NO: 1666067 - RNA, 19 nt, Artificial Sequence
  Description of Artificial Sequence: Synthetic oligonucleotide
  Sense strand starting at position 3276 of SEQ ID NO: 1561362
cgaugccugguguauuagu

SEQ ID NO: 1666068 - RNA, 19 nt, Artificial Sequence
  Description of Artificial Sequence: Synthetic oligonucleotide
  Antisense strand to SEQ ID NO: 1666067
acuaauacaccaggcaucg

SEQ ID NO: 1666069 - RNA, 19 nt, Artificial Sequence
  Description of Artificial Sequence: Synthetic oligonucleotide
  Sense strand starting at position 3445 of SEQ ID NO: 1561362
gcaaaugagagucaagcaa

SEQ ID NO: 1666070 - RNA, 19 nt, Artificial Sequence
  Description of Artificial Sequence: Synthetic oligonucleotide
  Antisense strand to SEQ ID NO: 1666069
uugcuugacucucauuugc

SEQ ID NO: 1666071 - RNA, 19 nt, Artificial Sequence
  Description of Artificial Sequence: Synthetic oligonucleotide
  Sense strand starting at position 3848 of SEQ ID NO: 1561362
ggguacagccguuggauaa

SEQ ID NO: 1666072 - RNA, 19 nt, Artificial Sequence
  Description of Artificial Sequence: Synthetic oligonucleotide
  Antisense strand to SEQ ID NO: 1666071
uuauccaacggcuguaccc

SEQ ID NO: 1666073 - RNA, 19 nt, Artificial Sequence
  Description of Artificial Sequence: Synthetic oligonucleotide
  Sense strand starting at position 3849 of SEQ ID NO: 1561362
gguacagccguuggauaaa

SEQ ID NO: 1666074 - RNA, 19 nt, Artificial Sequence
  Description of Artificial Sequence: Synthetic oligonucleotide
  Antisense strand to SEQ ID NO: 1666073
uuuauccaacggcuguacc

SEQ ID NO: 1666075 - RNA, 19 nt, Artificial Sequence
  Description of Artificial Sequence: Synthetic oligonucleotide
  Sense strand starting at position 34 of SEQ ID NO: 1561363
guaaauauaugucuguauc

SEQ ID NO: 1666076 - RNA, 19 nt, Artificial Sequence
  Description of Artificial Sequence: Synthetic oligonucleotide
  Antisense strand to SEQ ID NO: 1666075
gauacagacauauauuuac

SEQ ID NO: 1666077 - RNA, 19 nt, Artificial Sequence
  Description of Artificial Sequence: Synthetic oligonucleotide
  Sense strand starting at position 112 of SEQ ID NO: 1561363
cccuaugucagaggcguuu

SEQ ID NO: 1666078 - RNA, 19 nt, Artificial Sequence
  Description of Artificial Sequence: Synthetic oligonucleotide
  Antisense strand to SEQ ID NO: 1666077
aaacgccucugacauaggg

SEQ ID NO: 1666079 - RNA, 19 nt, Artificial Sequence
  Description of Artificial Sequence: Synthetic oligonucleotide
  Sense strand starting at position 114 of SEQ ID NO: 1561363
cuaugucagaggcguuuga

SEQ ID NO: 1666080 - RNA, 19 nt, Artificial Sequence
  Description of Artificial Sequence: Synthetic oligonucleotide
  Antisense strand to SEQ ID NO: 1666079
ucaaacgccucugacauag

SEQ ID NO: 1666081 - RNA, 19 nt, Artificial Sequence
  Description of Artificial Sequence: Synthetic oligonucleotide
  Sense strand starting at position 210 of SEQ ID NO: 1561363
uaaggcauucuaggucaua

SEQ ID NO: 1666082 - RNA, 19 nt, Artificial Sequence
  Description of Artificial Sequence: Synthetic oligonucleotide
  Antisense strand to SEQ ID NO: 1666081
uaugaccuagaaugccuua

SEQ ID NO: 1666083 - RNA, 19 nt, Artificial Sequence
  Description of Artificial Sequence: Synthetic oligonucleotide
  Sense strand starting at position 213 of SEQ ID NO: 1561363
ggcauucuaggucauagga

SEQ ID NO: 1666084 - RNA, 19 nt, Artificial Sequence
  Description of Artificial Sequence: Synthetic oligonucleotide
  Antisense strand to SEQ ID NO: 1666083
uccuaugaccuagaaugcc

SEQ ID NO: 1666085 - RNA, 19 nt, Artificial Sequence
  Description of Artificial Sequence: Synthetic oligonucleotide
  Sense strand starting at position 215 of SEQ ID NO: 1561363
cauucuaggucauaggaua

SEQ ID NO: 1666086 - RNA, 19 nt, Artificial Sequence
  Description of Artificial Sequence: Synthetic oligonucleotide
  Antisense strand to SEQ ID NO: 1666085
uauccuaugaccuagaaug

SEQ ID NO: 1666087 - RNA, 19 nt, Artificial Sequence
  Description of Artificial Sequence: Synthetic oligonucleotide
  Sense strand starting at position 236 of SEQ ID NO: 1561363
acaggagauuugcacaaga

SEQ ID NO: 1666088 - RNA, 19 nt, Artificial Sequence
  Description of Artificial Sequence: Synthetic oligonucleotide
  Antisense strand to SEQ ID NO: 1666087
ucuugugcaaaucuccugu

SEQ ID NO: 1666089 - RNA, 19 nt, Artificial Sequence
  Description of Artificial Sequence: Synthetic oligonucleotide
  Sense strand starting at position 748 of SEQ ID NO: 1561363
guguuaaacuauuccugca

SEQ ID NO: 1666090 - RNA, 19 nt, Artificial Sequence
  Description of Artificial Sequence: Synthetic oligonucleotide
  Antisense strand to SEQ ID NO: 1666089
ugcaggaauaguuuaacac

SEQ ID NO: 1666091 - RNA, 19 nt, Artificial Sequence
  Description of Artificial Sequence: Synthetic oligonucleotide
  Sense strand starting at position 845 of SEQ ID NO: 1561363
agucacuugcugugggaaa

SEQ ID NO: 1666092 - RNA, 19 nt, Artificial Sequence
  Description of Artificial Sequence: Synthetic oligonucleotide
  Antisense strand to SEQ ID NO: 1666091
uuucccacagcaagugacu

SEQ ID NO: 1666093 - RNA, 19 nt, Artificial Sequence
  Description of Artificial Sequence: Synthetic oligonucleotide
  Sense strand starting at position 1108 of SEQ ID NO: 1561363
agcauagugagguguuuga

SEQ ID NO: 1666094 - RNA, 19 nt, Artificial Sequence
  Description of Artificial Sequence: Synthetic oligonucleotide
  Antisense strand to SEQ ID NO: 1666093
ucaaacaccucacuaugcu

SEQ ID NO: 1666095 - RNA, 19 nt, Artificial Sequence
  Description of Artificial Sequence: Synthetic oligonucleotide
  Sense strand starting at position 1112 of SEQ ID NO: 1561363
uagugagguguuugaggga

SEQ ID NO: 1666096 - RNA, 19 nt, Artificial Sequence
  Description of Artificial Sequence: Synthetic oligonucleotide
  Antisense strand to SEQ ID NO: 1666095
ucccucaaacaccucacua

SEQ ID NO: 1666097 - RNA, 19 nt, Artificial Sequence
  Description of Artificial Sequence: Synthetic oligonucleotide
  Sense strand starting at position 1117 of SEQ ID NO: 1561363
agguguuugagggagaagu

SEQ ID NO: 1666098 - RNA, 19 nt, Artificial Sequence
  Description of Artificial Sequence: Synthetic oligonucleotide
  Antisense strand to SEQ ID NO: 1666097
acuucucccucaaacaccu

SEQ ID NO: 1666099 - RNA, 19 nt, Artificial Sequence
  Description of Artificial Sequence: Synthetic oligonucleotide
  Sense strand starting at position 1119 of SEQ ID NO: 1561363
guguuugagggagaagugu

SEQ ID NO: 1666100 - RNA, 19 nt, Artificial Sequence
  Description of Artificial Sequence: Synthetic oligonucleotide
  Antisense strand to SEQ ID NO: 1666099
acacuucucccucaaacac

SEQ ID NO: 1666101 - RNA, 19 nt, Artificial Sequence
  Description of Artificial Sequence: Synthetic oligonucleotide
  Sense strand starting at position 1137 of SEQ ID NO: 1561363
uugugauaucugcaacuua

SEQ ID NO: 1666102 - RNA, 19 nt, Artificial Sequence
  Description of Artificial Sequence: Synthetic oligonucleotide
  Antisense strand to SEQ ID NO: 1666101
uaaguugcagauaucacaa

SEQ ID NO: 1666103 - RNA, 19 nt, Artificial Sequence
  Description of Artificial Sequence: Synthetic oligonucleotide
  Sense strand starting at position 1180 of SEQ ID NO: 1561363
uggauuaaugaauggcuga

SEQ ID NO: 1666104 - RNA, 19 nt, Artificial Sequence
  Description of Artificial Sequence: Synthetic oligonucleotide
  Antisense strand to SEQ ID NO: 1666103
ucagccauucauuaaucca

SEQ ID NO: 1666105 - RNA, 19 nt, Artificial Sequence
  Description of Artificial Sequence: Synthetic oligonucleotide
  Sense strand starting at position 1231 of SEQ ID NO: 1561363
guaaguucagcagacguua

SEQ ID NO: 1666106 - RNA, 19 nt, Artificial Sequence
  Description of Artificial Sequence: Synthetic oligonucleotide
  Antisense strand to SEQ ID NO: 1666105
uaacgucugcugaacuuac

SEQ ID NO: 1666107 - RNA, 19 nt, Artificial Sequence
  Description of Artificial Sequence: Synthetic oligonucleotide
  Sense strand starting at position 1254 of SEQ ID NO: 1561363
ggucguucacugcacaagu

SEQ ID NO: 1666108 - RNA, 19 nt, Artificial Sequence
  Description of Artificial Sequence: Synthetic oligonucleotide
  Antisense strand to SEQ ID NO: 1666107
acuugugcagugaacgacc

SEQ ID NO: 1666109 - RNA, 19 nt, Artificial Sequence
  Description of Artificial Sequence: Synthetic oligonucleotide
  Sense strand starting at position 1402 of SEQ ID NO: 1561363
gcggcccucacugagaauu

SEQ ID NO: 1666110 - RNA, 19 nt, Artificial Sequence
  Description of Artificial Sequence: Synthetic oligonucleotide
  Antisense strand to SEQ ID NO: 1666109
aauucucagugagggccgc

SEQ ID NO: 1666111 - RNA, 19 nt, Artificial Sequence
  Description of Artificial Sequence: Synthetic oligonucleotide
  Sense strand starting at position 1410 of SEQ ID NO: 1561363
cacugagaauugcaguaaa

SEQ ID NO: 1666112 - RNA, 19 nt, Artificial Sequence
  Description of Artificial Sequence: Synthetic oligonucleotide
  Antisense strand to SEQ ID NO: 1666111
uuuacugcaauucucagug

SEQ ID NO: 1666113 - RNA, 19 nt, Artificial Sequence
  Description of Artificial Sequence: Synthetic oligonucleotide
  Sense strand starting at position 1469 of SEQ ID NO: 1561363
aucuaacaccuucgagacu

SEQ ID NO: 1666114 - RNA, 19 nt, Artificial Sequence
  Description of Artificial Sequence: Synthetic oligonucleotide
  Antisense strand to SEQ ID NO: 1666113
agucucgaagguguuagau

SEQ ID NO: 1666115 - RNA, 19 nt, Artificial Sequence
  Description of Artificial Sequence: Synthetic oligonucleotide
  Sense strand starting at position 1951 of SEQ ID NO: 1561363
agggaugcgucggcacuua

SEQ ID NO: 1666116 - RNA, 19 nt, Artificial Sequence
  Description of Artificial Sequence: Synthetic oligonucleotide
  Antisense strand to SEQ ID NO: 1666115
uaagugccgacgcaucccu

SEQ ID NO: 1666117 - RNA, 19 nt, Artificial Sequence
  Description of Artificial Sequence: Synthetic oligonucleotide
  Sense strand starting at position 2087 of SEQ ID NO: 1561363
cggguaccggguuauucau

SEQ ID NO: 1666118 - RNA, 19 nt, Artificial Sequence
  Description of Artificial Sequence: Synthetic oligonucleotide
  Antisense strand to SEQ ID NO: 1666117
augaauaacccgguacccg

SEQ ID NO: 1666119 - RNA, 19 nt, Artificial Sequence
  Description of Artificial Sequence: Synthetic oligonucleotide
  Sense strand starting at position 2089 of SEQ ID NO: 1561363
gguaccggguuauucauua

SEQ ID NO: 1666120 - RNA, 19 nt, Artificial Sequence
  Description of Artificial Sequence: Synthetic oligonucleotide
  Antisense strand to SEQ ID NO: 1666119
uaaugaauaacccgguacc

SEQ ID NO: 1666121 - RNA, 19 nt, Artificial Sequence
  Description of Artificial Sequence: Synthetic oligonucleotide
  Sense strand starting at position 2417 of SEQ ID NO: 1561363
ccaguaacuuuccucugua

SEQ ID NO: 1666122 - RNA, 19 nt, Artificial Sequence
  Description of Artificial Sequence: Synthetic oligonucleotide
  Antisense strand to SEQ ID NO: 1666121
uacagaggaaaguuacugg

SEQ ID NO: 1666123 - RNA, 19 nt, Artificial Sequence
  Description of Artificial Sequence: Synthetic oligonucleotide
  Sense strand starting at position 2420 of SEQ ID NO: 1561363
guaacuuuccucuguagua

SEQ ID NO: 1666124 - RNA, 19 nt, Artificial Sequence
  Description of Artificial Sequence: Synthetic oligonucleotide
  Antisense strand to SEQ ID NO: 1666123
uacuacagaggaaaguuac

SEQ ID NO: 1666125 - RNA, 19 nt, Artificial Sequence
  Description of Artificial Sequence: Synthetic oligonucleotide
  Sense strand starting at position 2436 of SEQ ID NO: 1561363
guaacaauagccgguugaa

SEQ ID NO: 1666126 - RNA, 19 nt, Artificial Sequence
  Description of Artificial Sequence: Synthetic oligonucleotide
  Antisense strand to SEQ ID NO: 1666125
uucaaccggcuauuguuac

SEQ ID NO: 1666127 - RNA, 19 nt, Artificial Sequence
  Description of Artificial Sequence: Synthetic oligonucleotide
  Sense strand starting at position 2541 of SEQ ID NO: 1561363
gaaacugugguaugugcaa

SEQ ID NO: 1666128 - RNA, 19 nt, Artificial Sequence
  Description of Artificial Sequence: Synthetic oligonucleotide
  Antisense strand to SEQ ID NO: 1666127
uugcacauaccacaguuuc

SEQ ID NO: 1666129 - RNA, 19 nt, Artificial Sequence
  Description of Artificial Sequence: Synthetic oligonucleotide
  Sense strand starting at position 2976 of SEQ ID NO: 1561363
guaguaaaguaacaauaac

SEQ ID NO: 1666130 - RNA, 19 nt, Artificial Sequence
  Description of Artificial Sequence: Synthetic oligonucleotide
  Antisense strand to SEQ ID NO: 1666129
guuauuguuacuuuacuac

SEQ ID NO: 1666131 - RNA, 19 nt, Artificial Sequence
  Description of Artificial Sequence: Synthetic oligonucleotide
  Sense strand starting at position 3072 of SEQ ID NO: 1561363
caguuacaccugugaugcu

SEQ ID NO: 1666132 - RNA, 19 nt, Artificial Sequence
  Description of Artificial Sequence: Synthetic oligonucleotide
  Antisense strand to SEQ ID NO: 1666131
agcaucacagguguaacug

SEQ ID NO: 1666133 - RNA, 19 nt, Artificial Sequence
  Description of Artificial Sequence: Synthetic oligonucleotide
  Sense strand starting at position 3152 of SEQ ID NO: 1561363
cgaugauacauggguguca

SEQ ID NO: 1666134 - RNA, 19 nt, Artificial Sequence
  Description of Artificial Sequence: Synthetic oligonucleotide
  Antisense strand to SEQ ID NO: 1666133
ugacacccauguaucaucg

SEQ ID NO: 1666135 - RNA, 19 nt, Artificial Sequence
  Description of Artificial Sequence: Synthetic oligonucleotide
  Sense strand starting at position 3153 of SEQ ID NO: 1561363
gaugauacaugggugucau

SEQ ID NO: 1666136 - RNA, 19 nt, Artificial Sequence
  Description of Artificial Sequence: Synthetic oligonucleotide
  Antisense strand to SEQ ID NO: 1666135
augacacccauguaucauc

SEQ ID NO: 1666137 - RNA, 19 nt, Artificial Sequence
  Description of Artificial Sequence: Synthetic oligonucleotide
  Sense strand starting at position 3154 of SEQ ID NO: 1561363
augauacaugggugucauc

SEQ ID NO: 1666138 - RNA, 19 nt, Artificial Sequence
  Description of Artificial Sequence: Synthetic oligonucleotide
  Antisense strand to SEQ ID NO: 1666137
gaugacacccauguaucau

SEQ ID NO: 1666139 - RNA, 19 nt, Artificial Sequence
  Description of Artificial Sequence: Synthetic oligonucleotide
  Sense strand starting at position 3163 of SEQ ID NO: 1561363
gggugucaucuuuauuauu

SEQ ID NO: 1666140 - RNA, 19 nt, Artificial Sequence
  Description of Artificial Sequence: Synthetic oligonucleotide
  Antisense strand to SEQ ID NO: 1666139
aauaauaaagaugacaccc

SEQ ID NO: 1666141 - RNA, 19 nt, Artificial Sequence
  Description of Artificial Sequence: Synthetic oligonucleotide
  Sense strand starting at position 3209 of SEQ ID NO: 1561363
cucuccgcagguugaaaua

SEQ ID NO: 1666142 - RNA, 19 nt, Artificial Sequence
  Description of Artificial Sequence: Synthetic oligonucleotide
  Antisense strand to SEQ ID NO: 1666141
uauuucaaccugcggagag

SEQ ID NO: 1666143 - RNA, 19 nt, Artificial Sequence
  Description of Artificial Sequence: Synthetic oligonucleotide
  Sense strand starting at position 3277 of SEQ ID NO: 1561363
gugauuaaauugucacuca

SEQ ID NO: 1666144 - RNA, 19 nt, Artificial Sequence
  Description of Artificial Sequence: Synthetic oligonucleotide
  Antisense strand to SEQ ID NO: 1666143
ugagugacaauuuaaucac

SEQ ID NO: 1666145 - RNA, 19 nt, Artificial Sequence
  Description of Artificial Sequence: Synthetic oligonucleotide
  Sense strand starting at position 3287 of SEQ ID NO: 1561363
ugucacucacaauagugau

SEQ ID NO: 1666146 - RNA, 19 nt, Artificial Sequence
  Description of Artificial Sequence: Synthetic oligonucleotide
  Antisense strand to SEQ ID NO: 1666145
aucacuauugugagugaca

SEQ ID NO: 1666147 - RNA, 19 nt, Artificial Sequence
  Description of Artificial Sequence: Synthetic oligonucleotide
  Sense strand starting at position 3297 of SEQ ID NO: 1561363
aauagugaugguuggagca

SEQ ID NO: 1666148 - RNA, 19 nt, Artificial Sequence
  Description of Artificial Sequence: Synthetic oligonucleotide
  Antisense strand to SEQ ID NO: 1666147
ugcuccaaccaucacuauu

SEQ ID NO: 1666149 - RNA, 19 nt, Artificial Sequence
  Description of Artificial Sequence: Synthetic oligonucleotide
  Sense strand starting at position 3307 of SEQ ID NO: 1561363
guuggagcaacuuggaaau

SEQ ID NO: 1666150 - RNA, 19 nt, Artificial Sequence
  Description of Artificial Sequence: Synthetic oligonucleotide
  Antisense strand to SEQ ID NO: 1666149
auuuccaaguugcuccaac

SEQ ID NO: 1666151 - RNA, 19 nt, Artificial Sequence
  Description of Artificial Sequence: Synthetic oligonucleotide
  Sense strand starting at position 3450 of SEQ ID NO: 1561363
ccaugaaggccguaucaga

SEQ ID NO: 1666152 - RNA, 19 nt, Artificial Sequence
  Description of Artificial Sequence: Synthetic oligonucleotide
  Antisense strand to SEQ ID NO: 1666151
ucugauacggccuucaugg

SEQ ID NO: 1666153 - RNA, 19 nt, Artificial Sequence
  Description of Artificial Sequence: Synthetic oligonucleotide
  Sense strand starting at position 3762 of SEQ ID NO: 1561363
guccaacaguaucugguua

SEQ ID NO: 1666154 - RNA, 19 nt, Artificial Sequence
  Description of Artificial Sequence: Synthetic oligonucleotide
  Antisense strand to SEQ ID NO: 1666153
uaaccagauacuguuggac

SEQ ID NO: 1666155 - RNA, 19 nt, Artificial Sequence
  Description of Artificial Sequence: Synthetic oligonucleotide
  Sense strand starting at position 13 of SEQ ID NO: 1561364
aaaugucauguuggauaag

SEQ ID NO: 1666156 - RNA, 19 nt, Artificial Sequence
  Description of Artificial Sequence: Synthetic oligonucleotide
  Antisense strand to SEQ ID NO: 1666155
cuuauccaacaugacauuu

SEQ ID NO: 1666157 - RNA, 19 nt, Artificial Sequence
  Description of Artificial Sequence: Synthetic oligonucleotide
  Sense strand starting at position 16 of SEQ ID NO: 1561364
ugucauguuggauaaggua

SEQ ID NO: 1666158 - RNA, 19 nt, Artificial Sequence
  Description of Artificial Sequence: Synthetic oligonucleotide
  Antisense strand to SEQ ID NO: 1666157
uaccuuauccaacaugaca

SEQ ID NO: 1666159 - RNA, 19 nt, Artificial Sequence
  Description of Artificial Sequence: Synthetic oligonucleotide
  Sense strand starting at position 116 of SEQ ID NO: 1561364
guuuaauauuaugucaggu

SEQ ID NO: 1666160 - RNA, 19 nt, Artificial Sequence
  Description of Artificial Sequence: Synthetic oligonucleotide
  Antisense strand to SEQ ID NO: 1666159
accugacauaauauuaaac

SEQ ID NO: 1666161 - RNA, 19 nt, Artificial Sequence
  Description of Artificial Sequence: Synthetic oligonucleotide
  Sense strand starting at position 143 of SEQ ID NO: 1561364
cuuucuuacgguuauaacu

SEQ ID NO: 1666162 - RNA, 19 nt, Artificial Sequence
  Description of Artificial Sequence: Synthetic oligonucleotide
  Antisense strand to SEQ ID NO: 1666161
aguuauaaccguaagaaag

SEQ ID NO: 1666163 - RNA, 19 nt, Artificial Sequence
  Description of Artificial Sequence: Synthetic oligonucleotide
  Sense strand starting at position 183 of SEQ ID NO: 1561364
cagaguauuccaugaaaug

SEQ ID NO: 1666164 - RNA, 19 nt, Artificial Sequence
  Description of Artificial Sequence: Synthetic oligonucleotide
  Antisense strand to SEQ ID NO: 1666163
cauuucauggaauacucug

SEQ ID NO: 1666165 - RNA, 19 nt, Artificial Sequence
  Description of Artificial Sequence: Synthetic oligonucleotide
  Sense strand starting at position 192 of SEQ ID NO: 1561364
ccaugaaaugaacguggua

SEQ ID NO: 1666166 - RNA, 19 nt, Artificial Sequence
  Description of Artificial Sequence: Synthetic oligonucleotide
  Antisense strand to SEQ ID NO: 1666165
uaccacguucauuucaugg

SEQ ID NO: 1666167 - RNA, 19 nt, Artificial Sequence
  Description of Artificial Sequence: Synthetic oligonucleotide
  Sense strand starting at position 194 of SEQ ID NO: 1561364
augaaaugaacgugguaua

SEQ ID NO: 1666168 - RNA, 19 nt, Artificial Sequence
  Description of Artificial Sequence: Synthetic oligonucleotide
  Antisense strand to SEQ ID NO: 1666167
uauaccacguucauuucau

SEQ ID NO: 1666169 - RNA, 19 nt, Artificial Sequence
  Description of Artificial Sequence: Synthetic oligonucleotide
  Sense strand starting at position 195 of SEQ ID NO: 1561364
ugaaaugaacgugguauaa

SEQ ID NO: 1666170 - RNA, 19 nt, Artificial Sequence
  Description of Artificial Sequence: Synthetic oligonucleotide
  Antisense strand to SEQ ID NO: 1666169
uuauaccacguucauuuca

SEQ ID NO: 1666171 - RNA, 19 nt, Artificial Sequence
  Description of Artificial Sequence: Synthetic oligonucleotide
  Sense strand starting at position 241 of SEQ ID NO: 1561364
caauaauuguggucaaggu

SEQ ID NO: 1666172 - RNA, 19 nt, Artificial Sequence
  Description of Artificial Sequence: Synthetic oligonucleotide
  Antisense strand to SEQ ID NO: 1666171
accuugaccacaauuauug

SEQ ID NO: 1666173 - RNA, 19 nt, Artificial Sequence
  Description of Artificial Sequence: Synthetic oligonucleotide
  Sense strand starting at position 242 of SEQ ID NO: 1561364
aauaauuguggucaaggua

SEQ ID NO: 1666174 - RNA, 19 nt, Artificial Sequence
  Description of Artificial Sequence: Synthetic oligonucleotide
  Antisense strand to SEQ ID NO: 1666173
uaccuugaccacaauuauu

SEQ ID NO: 1666175 - RNA, 19 nt, Artificial Sequence
  Description of Artificial Sequence: Synthetic oligonucleotide
  Sense strand starting at position 336 of SEQ ID NO: 1561364
cagaguaucuccuuagggu

SEQ ID NO: 1666176 - RNA, 19 nt, Artificial Sequence
  Description of Artificial Sequence: Synthetic oligonucleotide
  Antisense strand to SEQ ID NO: 1666175
acccuaaggagauacucug

SEQ ID NO: 1666177 - RNA, 19 nt, Artificial Sequence
  Description of Artificial Sequence: Synthetic oligonucleotide
  Sense strand starting at position 409 of SEQ ID NO: 1561364
cacagaaugucccuuggaa

SEQ ID NO: 1666178 - RNA, 19 nt, Artificial Sequence
  Description of Artificial Sequence: Synthetic oligonucleotide
  Antisense strand to SEQ ID NO: 1666177
uuccaagggacauucugug

SEQ ID NO: 1666179 - RNA, 19 nt, Artificial Sequence
  Description of Artificial Sequence: Synthetic oligonucleotide
  Sense strand starting at position 411 of SEQ ID NO: 1561364
cagaaugucccuuggaaag

SEQ ID NO: 1666180 - RNA, 19 nt, Artificial Sequence
  Description of Artificial Sequence: Synthetic oligonucleotide
  Antisense strand to SEQ ID NO: 1666179
cuuuccaagggacauucug

SEQ ID NO: 1666181 - RNA, 19 nt, Artificial Sequence
  Description of Artificial Sequence: Synthetic oligonucleotide
  Sense strand starting at position 425 of SEQ ID NO: 1561364
gaaaguuguaaguggaguu

SEQ ID NO: 1666182 - RNA, 19 nt, Artificial Sequence
  Description of Artificial Sequence: Synthetic oligonucleotide
  Antisense strand to SEQ ID NO: 1666181
aacuccacuuacaacuuuc

SEQ ID NO: 1666183 - RNA, 19 nt, Artificial Sequence
  Description of Artificial Sequence: Synthetic oligonucleotide
  Sense strand starting at position 426 of SEQ ID NO: 1561364
aaaguuguaaguggaguua

SEQ ID NO: 1666184 - RNA, 19 nt, Artificial Sequence
  Description of Artificial Sequence: Synthetic oligonucleotide
  Antisense strand to SEQ ID NO: 1666183
uaacuccacuuacaacuuu

SEQ ID NO: 1666185 - RNA, 19 nt, Artificial Sequence
  Description of Artificial Sequence: Synthetic oligonucleotide
  Sense strand starting at position 549 of SEQ ID NO: 1561364
gcuccugauguacagacau

SEQ ID NO: 1666186 - RNA, 19 nt, Artificial Sequence
  Description of Artificial Sequence: Synthetic oligonucleotide
  Antisense strand to SEQ ID NO: 1666185
augucuguacaucaggagc

SEQ ID NO: 1666187 - RNA, 19 nt, Artificial Sequence
  Description of Artificial Sequence: Synthetic oligonucleotide
  Sense strand starting at position 723 of SEQ ID NO: 1561364
gucaucuaccuuuaauguu

SEQ ID NO: 1666188 - RNA, 19 nt, Artificial Sequence
  Description of Artificial Sequence: Synthetic oligonucleotide
  Antisense strand to SEQ ID NO: 1666187
aacauuaaagguagaugac

SEQ ID NO: 1666189 - RNA, 19 nt, Artificial Sequence
  Description of Artificial Sequence: Synthetic oligonucleotide
  Sense strand starting at position 732 of SEQ ID NO: 1561364
cuuuaauguuuggucuuaa

SEQ ID NO: 1666190 - RNA, 19 nt, Artificial Sequence
  Description of Artificial Sequence: Synthetic oligonucleotide
  Antisense strand to SEQ ID NO: 1666189
uuaagaccaaacauuaaag

SEQ ID NO: 1666191 - RNA, 19 nt, Artificial Sequence
  Description of Artificial Sequence: Synthetic oligonucleotide
  Sense strand starting at position 733 of SEQ ID NO: 1561364
uuuaauguuuggucuuaag

SEQ ID NO: 1666192 - RNA, 19 nt, Artificial Sequence
  Description of Artificial Sequence: Synthetic oligonucleotide
  Antisense strand to SEQ ID NO: 1666191
cuuaagaccaaacauuaaa

SEQ ID NO: 1666193 - RNA, 19 nt, Artificial Sequence
  Description of Artificial Sequence: Synthetic oligonucleotide
  Sense strand starting at position 973 of SEQ ID NO: 1561364
uggcgauugagaugaugac

SEQ ID NO: 1666194 - RNA, 19 nt, Artificial Sequence
  Description of Artificial Sequence: Synthetic oligonucleotide
  Antisense strand to SEQ ID NO: 1666193
gucaucaucucaaucgcca

SEQ ID NO: 1666195 - RNA, 19 nt, Artificial Sequence
  Description of Artificial Sequence: Synthetic oligonucleotide
  Sense strand starting at position 1431 of SEQ ID NO: 1561364
agcucacucuguccugaga

SEQ ID NO: 1666196 - RNA, 19 nt, Artificial Sequence
  Description of Artificial Sequence: Synthetic oligonucleotide
  Antisense strand to SEQ ID NO: 1666195
ucucaggacagagugagcu

SEQ ID NO: 1666197 - RNA, 19 nt, Artificial Sequence
  Description of Artificial Sequence: Synthetic oligonucleotide
  Sense strand starting at position 2684 of SEQ ID NO: 1561364
gagcgucaccuggaauucu

SEQ ID NO: 1666198 - RNA, 19 nt, Artificial Sequence
  Description of Artificial Sequence: Synthetic oligonucleotide
  Antisense strand to SEQ ID NO: 1666197
agaauuccaggugacgcuc

SEQ ID NO: 1666199 - RNA, 19 nt, Artificial Sequence
  Description of Artificial Sequence: Synthetic oligonucleotide
  Sense strand starting at position 2792 of SEQ ID NO: 1561364
ccgugagucccgcucucau

SEQ ID NO: 1666200 - RNA, 19 nt, Artificial Sequence
  Description of Artificial Sequence: Synthetic oligonucleotide
  Antisense strand to SEQ ID NO: 1666199
augagagcgggacucacgg

SEQ ID NO: 1666201 - RNA, 19 nt, Artificial Sequence
  Description of Artificial Sequence: Synthetic oligonucleotide
  Sense strand starting at position 2839 of SEQ ID NO: 1561364
ggauguugcagguacuuaa

SEQ ID NO: 1666202 - RNA, 19 nt, Artificial Sequence
  Description of Artificial Sequence: Synthetic oligonucleotide
  Antisense strand to SEQ ID NO: 1666201
uuaaguaccugcaacaucc

SEQ ID NO: 1666203 - RNA, 19 nt, Artificial Sequence
  Description of Artificial Sequence: Synthetic oligonucleotide
  Sense strand starting at position 2892 of SEQ ID NO: 1561364
ugguauuuaugccaaggaa

SEQ ID NO: 1666204 - RNA, 19 nt, Artificial Sequence
  Description of Artificial Sequence: Synthetic oligonucleotide
  Antisense strand to SEQ ID NO: 1666203
uuccuuggcauaaauacca

SEQ ID NO: 1666205 - RNA, 19 nt, Artificial Sequence
  Description of Artificial Sequence: Synthetic oligonucleotide
  Sense strand starting at position 2914 of SEQ ID NO: 1561364
gcuauaguuguacacaaug

SEQ ID NO: 1666206 - RNA, 19 nt, Artificial Sequence
  Description of Artificial Sequence: Synthetic oligonucleotide
  Antisense strand to SEQ ID NO: 1666205
cauuguguacaacuauagc

SEQ ID NO: 1666207 - RNA, 19 nt, Artificial Sequence
  Description of Artificial Sequence: Synthetic oligonucleotide
  Sense strand starting at position 2919 of SEQ ID NO: 1561364
aguuguacacaauguugaa

SEQ ID NO: 1666208 - RNA, 19 nt, Artificial Sequence
  Description of Artificial Sequence: Synthetic oligonucleotide
  Antisense strand to SEQ ID NO: 1666207
uucaacauuguguacaacu

SEQ ID NO: 1666209 - RNA, 19 nt, Artificial Sequence
  Description of Artificial Sequence: Synthetic oligonucleotide
  Sense strand starting at position 2923 of SEQ ID NO: 1561364
guacacaauguugaaguau

SEQ ID NO: 1666210 - RNA, 19 nt, Artificial Sequence
  Description of Artificial Sequence: Synthetic oligonucleotide
  Antisense strand to SEQ ID NO: 1666209
auacuucaacauuguguac

SEQ ID NO: 1666211 - RNA, 19 nt, Artificial Sequence
  Description of Artificial Sequence: Synthetic oligonucleotide
  Sense strand starting at position 3109 of SEQ ID NO: 1561364
gauguaauccacugacguu

SEQ ID NO: 1666212 - RNA, 19 nt, Artificial Sequence
  Description of Artificial Sequence: Synthetic oligonucleotide
  Antisense strand to SEQ ID NO: 1666211
aacgucaguggauuacauc

SEQ ID NO: 1666213 - RNA, 19 nt, Artificial Sequence
  Description of Artificial Sequence: Synthetic oligonucleotide
  Sense strand starting at position 3118 of SEQ ID NO: 1561364
cacugacguuacccagaau

SEQ ID NO: 1666214 - RNA, 19 nt, Artificial Sequence
  Description of Artificial Sequence: Synthetic oligonucleotide
  Antisense strand to SEQ ID NO: 1666213
auucuggguaacgucagug

SEQ ID NO: 1666215 - RNA, 19 nt, Artificial Sequence
  Description of Artificial Sequence: Synthetic oligonucleotide
  Sense strand starting at position 3514 of SEQ ID NO: 1561364
agauuaaaccauggucugu

SEQ ID NO: 1666216 - RNA, 19 nt, Artificial Sequence
  Description of Artificial Sequence: Synthetic oligonucleotide
  Antisense strand to SEQ ID NO: 1666215
acagaccaugguuuaaucu

SEQ ID NO: 1666217 - RNA, 19 nt, Artificial Sequence
  Description of Artificial Sequence: Synthetic oligonucleotide
  Sense strand starting at position 3516 of SEQ ID NO: 1561364
auuaaaccauggucuguua

SEQ ID NO: 1666218 - RNA, 19 nt, Artificial Sequence
  Description of Artificial Sequence: Synthetic oligonucleotide
  Antisense strand to SEQ ID NO: 1666217
uaacagaccaugguuuaau

SEQ ID NO: 1666219 - RNA, 19 nt, Artificial Sequence
  Description of Artificial Sequence: Synthetic oligonucleotide
  Sense strand starting at position 3697 of SEQ ID NO: 1561364
uaaucugagcucugauagu

SEQ ID NO: 1666220 - RNA, 19 nt, Artificial Sequence
  Description of Artificial Sequence: Synthetic oligonucleotide
  Antisense strand to SEQ ID NO: 1666219
acuaucagagcucagauua

SEQ ID NO: 1666221 - RNA, 19 nt, Artificial Sequence
  Description of Artificial Sequence: Synthetic oligonucleotide
  Sense strand starting at position 3703 of SEQ ID NO: 1561364
gagcucugauaguuauuaa

SEQ ID NO: 1666222 - RNA, 19 nt, Artificial Sequence
  Description of Artificial Sequence: Synthetic oligonucleotide
  Antisense strand to SEQ ID NO: 1666221
uuaauaacuaucagagcuc

SEQ ID NO: 1666223 - RNA, 19 nt, Artificial Sequence
  Description of Artificial Sequence: Synthetic oligonucleotide
  Sense strand starting at position 3765 of SEQ ID NO: 1561364
aagauaguacaauguauga

SEQ ID NO: 1666224 - RNA, 19 nt, Artificial Sequence
  Description of Artificial Sequence: Synthetic oligonucleotide
  Antisense strand to SEQ ID NO: 1666223
ucauacauuguacuaucuu

SEQ ID NO: 1666225 - RNA, 19 nt, Artificial Sequence
  Description of Artificial Sequence: Synthetic oligonucleotide
  Sense strand starting at position 3776 of SEQ ID NO: 1561364
auguaugacuguuugaaca

SEQ ID NO: 1666226 - RNA, 19 nt, Artificial Sequence
  Description of Artificial Sequence: Synthetic oligonucleotide
  Antisense strand to SEQ ID NO: 1666225
uguucaaacagucauacau

SEQ ID NO: 1666227 - RNA, 19 nt, Artificial Sequence
  Description of Artificial Sequence: Synthetic oligonucleotide
  Sense strand starting at position 3834 of SEQ ID NO: 1561364
aagauaagguagcuguuau

SEQ ID NO: 1666228 - RNA, 19 nt, Artificial Sequence
  Description of Artificial Sequence: Synthetic oligonucleotide
  Antisense strand to SEQ ID NO: 1666227
auaacagcuaccuuaucuu

SEQ ID NO: 1666229 - RNA, 19 nt, Artificial Sequence
  Description of Artificial Sequence: Synthetic oligonucleotide
  Sense strand starting at position 3835 of SEQ ID NO: 1561364
agauaagguagcuguuauu

SEQ ID NO: 1666230 - RNA, 19 nt, Artificial Sequence
  Description of Artificial Sequence: Synthetic oligonucleotide
  Antisense strand to SEQ ID NO: 1666229
aauaacagcuaccuuaucu

SEQ ID NO: 1666231 - RNA, 19 nt, Artificial Sequence
  Description of Artificial Sequence: Synthetic oligonucleotide
  Sense strand starting at position 3932 of SEQ ID NO: 1561364
gagacaugauaguuccuua

SEQ ID NO: 1666232 - RNA, 19 nt, Artificial Sequence
  Description of Artificial Sequence: Synthetic oligonucleotide
  Antisense strand to SEQ ID NO: 1666231
uaaggaacuaucaugucuc

SEQ ID NO: 1666233 - RNA, 19 nt, Artificial Sequence
  Description of Artificial Sequence: Synthetic oligonucleotide
  Sense strand starting at position 3960 of SEQ ID NO: 1561364
guuuaaagauucuuaucag

SEQ ID NO: 1666234 - RNA, 19 nt, Artificial Sequence
  Description of Artificial Sequence: Synthetic oligonucleotide
  Antisense strand to SEQ ID NO: 1666233
cugauaagaaucuuuaaac

SEQ ID NO: 1666235 - RNA, 19 nt, Artificial Sequence
  Description of Artificial Sequence: Synthetic oligonucleotide
  Sense strand starting at position 33 of SEQ ID NO: 1561365
gaaauaaaugcuugcugug

SEQ ID NO: 1666236 - RNA, 19 nt, Artificial Sequence
  Description of Artificial Sequence: Synthetic oligonucleotide
  Antisense strand to SEQ ID NO: 1666235
cacagcaagcauuuauuuc

SEQ ID NO: 1666237 - RNA, 19 nt, Artificial Sequence
  Description of Artificial Sequence: Synthetic oligonucleotide
  Sense strand starting at position 622 of SEQ ID NO: 1561365
cagccuugaugacagagua

SEQ ID NO: 1666238 - RNA, 19 nt, Artificial Sequence
  Description of Artificial Sequence: Synthetic oligonucleotide
  Antisense strand to SEQ ID NO: 1666237
uacucugucaucaaggcug

SEQ ID NO: 1666239 - RNA, 19 nt, Artificial Sequence
  Description of Artificial Sequence: Synthetic oligonucleotide
  Sense strand starting at position 738 of SEQ ID NO: 1561365
ggaggaaagcuugagcuca

SEQ ID NO: 1666240 - RNA, 19 nt, Artificial Sequence
  Description of Artificial Sequence: Synthetic oligonucleotide
  Antisense strand to SEQ ID NO: 1666239
ugagcucaagcuuuccucc

SEQ ID NO: 1666241 - RNA, 19 nt, Artificial Sequence
  Description of Artificial Sequence: Synthetic oligonucleotide
  Sense strand starting at position 743 of SEQ ID NO: 1561365
aaagcuugagcucaugaga

SEQ ID NO: 1666242 - RNA, 19 nt, Artificial Sequence
  Description of Artificial Sequence: Synthetic oligonucleotide
  Antisense strand to SEQ ID NO: 1666241
ucucaugagcucaagcuuu

SEQ ID NO: 1666243 - RNA, 19 nt, Artificial Sequence
  Description of Artificial Sequence: Synthetic oligonucleotide
  Sense strand starting at position 746 of SEQ ID NO: 1561365
gcuugagcucaugagauca

SEQ ID NO: 1666244 - RNA, 19 nt, Artificial Sequence
  Description of Artificial Sequence: Synthetic oligonucleotide
  Antisense strand to SEQ ID NO: 1666243
ugaucucaugagcucaagc

SEQ ID NO: 1666245 - RNA, 19 nt, Artificial Sequence
  Description of Artificial Sequence: Synthetic oligonucleotide
  Sense strand starting at position 855 of SEQ ID NO: 1561365
gguacuuuguuaucacaga

SEQ ID NO: 1666246 - RNA, 19 nt, Artificial Sequence
  Description of Artificial Sequence: Synthetic oligonucleotide
  Antisense strand to SEQ ID NO: 1666245
ucugugauaacaaaguacc

SEQ ID NO: 1666247 - RNA, 19 nt, Artificial Sequence
  Description of Artificial Sequence: Synthetic oligonucleotide
  Sense strand starting at position 863 of SEQ ID NO: 1561365
guuaucacagacugaauca

SEQ ID NO: 1666248 - RNA, 19 nt, Artificial Sequence
  Description of Artificial Sequence: Synthetic oligonucleotide
  Antisense strand to SEQ ID NO: 1666247
ugauucagucugugauaac

SEQ ID NO: 1666249 - RNA, 19 nt, Artificial Sequence
  Description of Artificial Sequence: Synthetic oligonucleotide
  Sense strand starting at position 889 of SEQ ID NO: 1561365
caagaauuaagaggugugu

SEQ ID NO: 1666250 - RNA, 19 nt, Artificial Sequence
  Description of Artificial Sequence: Synthetic oligonucleotide
  Antisense strand to SEQ ID NO: 1666249
acacaccucuuaauucuug

SEQ ID NO: 1666251 - RNA, 19 nt, Artificial Sequence
  Description of Artificial Sequence: Synthetic oligonucleotide
  Sense strand starting at position 893 of SEQ ID NO: 1561365
aauuaagaggugugugcaa

SEQ ID NO: 1666252 - RNA, 19 nt, Artificial Sequence
  Description of Artificial Sequence: Synthetic oligonucleotide
  Antisense strand to SEQ ID NO: 1666251
uugcacacaccucuuaauu

SEQ ID NO: 1666253 - RNA, 19 nt, Artificial Sequence
  Description of Artificial Sequence: Synthetic oligonucleotide
  Sense strand starting at position 920 of SEQ ID NO: 1561365
agagacaguuuaguacaga

SEQ ID NO: 1666254 - RNA, 19 nt, Artificial Sequence
  Description of Artificial Sequence: Synthetic oligonucleotide
  Antisense strand to SEQ ID NO: 1666253
ucuguacuaaacugucucu

SEQ ID NO: 1666255 - RNA, 19 nt, Artificial Sequence
  Description of Artificial Sequence: Synthetic oligonucleotide
  Sense strand starting at position 933 of SEQ ID NO: 1561365
uacagagaauaugugcuua

SEQ ID NO: 1666256 - RNA, 19 nt, Artificial Sequence
  Description of Artificial Sequence: Synthetic oligonucleotide
  Antisense strand to SEQ ID NO: 1666255
uaagcacauauucucugua

SEQ ID NO: 1666257 - RNA, 19 nt, Artificial Sequence
  Description of Artificial Sequence: Synthetic oligonucleotide
  Sense strand starting at position 935 of SEQ ID NO: 1561365
cagagaauaugugcuuaau

SEQ ID NO: 1666258 - RNA, 19 nt, Artificial Sequence
  Description of Artificial Sequence: Synthetic oligonucleotide
  Antisense strand to SEQ ID NO: 1666257
auuaagcacauauucucug

SEQ ID NO: 1666259 - RNA, 19 nt, Artificial Sequence
  Description of Artificial Sequence: Synthetic oligonucleotide
  Sense strand starting at position 982 of SEQ ID NO: 1561365
acugaauaaucagucguca

SEQ ID NO: 1666260 - RNA, 19 nt, Artificial Sequence
  Description of Artificial Sequence: Synthetic oligonucleotide
  Antisense strand to SEQ ID NO: 1666259
ugacgacugauuauucagu

SEQ ID NO: 1666261 - RNA, 19 nt, Artificial Sequence
  Description of Artificial Sequence: Synthetic oligonucleotide
  Sense strand starting at position 996 of SEQ ID NO: 1561365
cgucaucuuggauaggaua

SEQ ID NO: 1666262 - RNA, 19 nt, Artificial Sequence
  Description of Artificial Sequence: Synthetic oligonucleotide
  Antisense strand to SEQ ID NO: 1666261
uauccuauccaagaugacg

SEQ ID NO: 1666263 - RNA, 19 nt, Artificial Sequence
  Description of Artificial Sequence: Synthetic oligonucleotide
  Sense strand starting at position 1343 of SEQ ID NO: 1561365
ccgacuaagucucauaaac

SEQ ID NO: 1666264 - RNA, 19 nt, Artificial Sequence
  Description of Artificial Sequence: Synthetic oligonucleotide
  Antisense strand to SEQ ID NO: 1666263
guuuaugagacuuagucgg

SEQ ID NO: 1666265 - RNA, 19 nt, Artificial Sequence
  Description of Artificial Sequence: Synthetic oligonucleotide
  Sense strand starting at position 2552 of SEQ ID NO: 1561365
aagugcgucaccgcuagaa

SEQ ID NO: 1666266 - RNA, 19 nt, Artificial Sequence
  Description of Artificial Sequence: Synthetic oligonucleotide
  Antisense strand to SEQ ID NO: 1666265
uucuagcggugacgcacuu

SEQ ID NO: 1666267 - RNA, 19 nt, Artificial Sequence
  Description of Artificial Sequence: Synthetic oligonucleotide
  Sense strand starting at position 2712 of SEQ ID NO: 1561365
gucacaguuacgggagaua

SEQ ID NO: 1666268 - RNA, 19 nt, Artificial Sequence
  Description of Artificial Sequence: Synthetic oligonucleotide
  Antisense strand to SEQ ID NO: 1666267
uaucucccguaacugugac

SEQ ID NO: 1666269 - RNA, 19 nt, Artificial Sequence
  Description of Artificial Sequence: Synthetic oligonucleotide
  Sense strand starting at position 3276 of SEQ ID NO: 1561365
gcaugcagcgccuuaaguu

SEQ ID NO: 1666270 - RNA, 19 nt, Artificial Sequence
  Description of Artificial Sequence: Synthetic oligonucleotide
  Antisense strand to SEQ ID NO: 1666269
aacuuaaggcgcugcaugc

SEQ ID NO: 1666271 - RNA, 19 nt, Artificial Sequence
  Description of Artificial Sequence: Synthetic oligonucleotide
  Sense strand starting at position 3382 of SEQ ID NO: 1561365
ccaucuugcucccugcaga

SEQ ID NO: 1666272 - RNA, 19 nt, Artificial Sequence
  Description of Artificial Sequence: Synthetic oligonucleotide
  Antisense strand to SEQ ID NO: 1666271
ucugcagggagcaagaugg

SEQ ID NO: 1666273 - RNA, 19 nt, Artificial Sequence
  Description of Artificial Sequence: Synthetic oligonucleotide
  Sense strand starting at position 3523 of SEQ ID NO: 1561365
uggagcaucaccuggaauu

SEQ ID NO: 1666274 - RNA, 19 nt, Artificial Sequence
  Description of Artificial Sequence: Synthetic oligonucleotide
  Antisense strand to SEQ ID NO: 1666273
aauuccaggugaugcucca

SEQ ID NO: 1666275 - RNA, 19 nt, Artificial Sequence
  Description of Artificial Sequence: Synthetic oligonucleotide
  Sense strand starting at position 3524 of SEQ ID NO: 1561365
ggagcaucaccuggaauuc

SEQ ID NO: 1666276 - RNA, 19 nt, Artificial Sequence
  Description of Artificial Sequence: Synthetic oligonucleotide
  Antisense strand to SEQ ID NO: 1666275
gaauuccaggugaugcucc

SEQ ID NO: 1666277 - RNA, 19 nt, Artificial Sequence
  Description of Artificial Sequence: Synthetic oligonucleotide
  Sense strand starting at position 3758 of SEQ ID NO: 1561365
gcuagaguaguacacacau

SEQ ID NO: 1666278 - RNA, 19 nt, Artificial Sequence
  Description of Artificial Sequence: Synthetic oligonucleotide
  Antisense strand to SEQ ID NO: 1666277
auguguguacuacucuagc

SEQ ID NO: 1666279 - RNA, 19 nt, Artificial Sequence
  Description of Artificial Sequence: Synthetic oligonucleotide
  Sense strand starting at position 3771 of SEQ ID NO: 1561365
acacauguaugcccaagau

SEQ ID NO: 1666280 - RNA, 19 nt, Artificial Sequence
  Description of Artificial Sequence: Synthetic oligonucleotide
  Antisense strand to SEQ ID NO: 1666279
aucuugggcauacaugugu

SEQ ID NO: 1666281 - RNA, 19 nt, Artificial Sequence
  Description of Artificial Sequence: Synthetic oligonucleotide
  Sense strand starting at position 3775 of SEQ ID NO: 1561365
auguaugcccaagauguuu

SEQ ID NO: 1666282 - RNA, 19 nt, Artificial Sequence
  Description of Artificial Sequence: Synthetic oligonucleotide
  Antisense strand to SEQ ID NO: 1666281
aaacaucuugggcauacau

SEQ ID NO: 1666283 - RNA, 19 nt, Artificial Sequence
  Description of Artificial Sequence: Synthetic oligonucleotide
  Sense strand starting at position 3780 of SEQ ID NO: 1561365
ugcccaagauguuuggaga

SEQ ID NO: 1666284 - RNA, 19 nt, Artificial Sequence
  Description of Artificial Sequence: Synthetic oligonucleotide
  Antisense strand to SEQ ID NO: 1666283
ucuccaaacaucuugggca

SEQ ID NO: 1666285 - RNA, 19 nt, Artificial Sequence
  Description of Artificial Sequence: Synthetic oligonucleotide
  Sense strand starting at position 3781 of SEQ ID NO: 1561365
gcccaagauguuuggagau

SEQ ID NO: 1666286 - RNA, 19 nt, Artificial Sequence
  Description of Artificial Sequence: Synthetic oligonucleotide
  Antisense strand to SEQ ID NO: 1666285
aucuccaaacaucuugggc

SEQ ID NO: 1666287 - RNA, 19 nt, Artificial Sequence
  Description of Artificial Sequence: Synthetic oligonucleotide
  Sense strand starting at position 3783 of SEQ ID NO: 1561365
ccaagauguuuggagauua

SEQ ID NO: 1666288 - RNA, 19 nt, Artificial Sequence
  Description of Artificial Sequence: Synthetic oligonucleotide
  Antisense strand to SEQ ID NO: 1666287
uaaucuccaaacaucuugg

SEQ ID NO: 1666289 - RNA, 19 nt, Artificial Sequence
  Description of Artificial Sequence: Synthetic oligonucleotide
  Sense strand starting at position 3796 of SEQ ID NO: 1561365
agauuaucuugugugggaa

SEQ ID NO: 1666290 - RNA, 19 nt, Artificial Sequence
  Description of Artificial Sequence: Synthetic oligonucleotide
  Antisense strand to SEQ ID NO: 1666289
uucccacacaagauaaucu

SEQ ID NO: 1666291 - RNA, 19 nt, Artificial Sequence
  Description of Artificial Sequence: Synthetic oligonucleotide
  Sense strand starting at position 3797 of SEQ ID NO: 1561365
gauuaucuugugugggaaa

SEQ ID NO: 1666292 - RNA, 19 nt, Artificial Sequence
  Description of Artificial Sequence: Synthetic oligonucleotide
  Antisense strand to SEQ ID NO: 1666291
uuucccacacaagauaauc

SEQ ID NO: 1666293 - RNA, 19 nt, Artificial Sequence
  Description of Artificial Sequence: Synthetic oligonucleotide
  Sense strand starting at position 3832 of SEQ ID NO: 1561365
gauacaaccguagauucuu

SEQ ID NO: 1666294 - RNA, 19 nt, Artificial Sequence
  Description of Artificial Sequence: Synthetic oligonucleotide
  Antisense strand to SEQ ID NO: 1666293
aagaaucuacgguuguauc

SEQ ID NO: 1666295 - RNA, 19 nt, Artificial Sequence
  Description of Artificial Sequence: Synthetic oligonucleotide
  Sense strand starting at position 3837 of SEQ ID NO: 1561365
aaccguagauucuuaggua

SEQ ID NO: 1666296 - RNA, 19 nt, Artificial Sequence
  Description of Artificial Sequence: Synthetic oligonucleotide
  Antisense strand to SEQ ID NO: 1666295
uaccuaagaaucuacgguu

SEQ ID NO: 1666297 - RNA, 19 nt, Artificial Sequence
  Description of Artificial Sequence: Synthetic oligonucleotide
  Sense strand starting at position 3845 of SEQ ID NO: 1561365
auucuuagguaguuguaca

SEQ ID NO: 1666298 - RNA, 19 nt, Artificial Sequence
  Description of Artificial Sequence: Synthetic oligonucleotide
  Antisense strand to SEQ ID NO: 1666297
uguacaacuaccuaagaau

SEQ ID NO: 1666299 - RNA, 19 nt, Artificial Sequence
  Description of Artificial Sequence: Synthetic oligonucleotide
  Sense strand starting at position 3850 of SEQ ID NO: 1561365
uagguaguuguacacauaa

SEQ ID NO: 1666300 - RNA, 19 nt, Artificial Sequence
  Description of Artificial Sequence: Synthetic oligonucleotide
  Antisense strand to SEQ ID NO: 1666299
uuauguguacaacuaccua

SEQ ID NO: 1666301 - RNA, 19 nt, Artificial Sequence
  Description of Artificial Sequence: Synthetic oligonucleotide
  Sense strand starting at position 3852 of SEQ ID NO: 1561365
gguaguuguacacauaaua

SEQ ID NO: 1666302 - RNA, 19 nt, Artificial Sequence
  Description of Artificial Sequence: Synthetic oligonucleotide
  Antisense strand to SEQ ID NO: 1666301
uauuauguguacaacuacc

SEQ ID NO: 1666303 - RNA, 19 nt, Artificial Sequence
  Description of Artificial Sequence: Synthetic oligonucleotide
  Sense strand starting at position 3872 of SEQ ID NO: 1561365
ugagaaagccuauguaucu

SEQ ID NO: 1666304 - RNA, 19 nt, Artificial Sequence
  Description of Artificial Sequence: Synthetic oligonucleotide
  Antisense strand to SEQ ID NO: 1666303
agauacauaggcuuucuca

SEQ ID NO: 1666305 - RNA, 19 nt, Artificial Sequence
  Description of Artificial Sequence: Synthetic oligonucleotide
  Sense strand starting at position 3873 of SEQ ID NO: 1561365
gagaaagccuauguaucuu

SEQ ID NO: 1666306 - RNA, 19 nt, Artificial Sequence
  Description of Artificial Sequence: Synthetic oligonucleotide
  Antisense strand to SEQ ID NO: 1666305
aagauacauaggcuuucuc

SEQ ID NO: 1666307 - RNA, 19 nt, Artificial Sequence
  Description of Artificial Sequence: Synthetic oligonucleotide
  Sense strand starting at position 3898 of SEQ ID NO: 1561365
gguuacaccaauuggugau

SEQ ID NO: 1666308 - RNA, 19 nt, Artificial Sequence
  Description of Artificial Sequence: Synthetic oligonucleotide
  Antisense strand to SEQ ID NO: 1666307
aucaccaauugguguaacc

SEQ ID NO: 1666309 - RNA, 19 nt, Artificial Sequence
  Description of Artificial Sequence: Synthetic oligonucleotide
  Sense strand starting at position 3904 of SEQ ID NO: 1561365
accaauuggugauuauagu

SEQ ID NO: 1666310 - RNA, 19 nt, Artificial Sequence
  Description of Artificial Sequence: Synthetic oligonucleotide
  Antisense strand to SEQ ID NO: 1666309
acuauaaucaccaauuggu

SEQ ID NO: 1666311 - RNA, 19 nt, Artificial Sequence
  Description of Artificial Sequence: Synthetic oligonucleotide
  Sense strand starting at position 3905 of SEQ ID NO: 1561365
ccaauuggugauuauagua

SEQ ID NO: 1666312 - RNA, 19 nt, Artificial Sequence
  Description of Artificial Sequence: Synthetic oligonucleotide
  Antisense strand to SEQ ID NO: 1666311
uacuauaaucaccaauugg

SEQ ID NO: 1666313 - RNA, 19 nt, Artificial Sequence
  Description of Artificial Sequence: Synthetic oligonucleotide
  Sense strand starting at position 3910 of SEQ ID NO: 1561365
uggugauuauaguauacag

SEQ ID NO: 1666314 - RNA, 19 nt, Artificial Sequence
  Description of Artificial Sequence: Synthetic oligonucleotide
  Antisense strand to SEQ ID NO: 1666313
cuguauacuauaaucacca

SEQ ID NO: 1666315 - RNA, 19 nt, Artificial Sequence
  Description of Artificial Sequence: Synthetic oligonucleotide
  Sense strand starting at position 1 of SEQ ID NO: 1561366
cugguacccucuucucaga

SEQ ID NO: 1666316 - RNA, 19 nt, Artificial Sequence
  Description of Artificial Sequence: Synthetic oligonucleotide
  Antisense strand to SEQ ID NO: 1666315
ucugagaagaggguaccag

SEQ ID NO: 1666317 - RNA, 19 nt, Artificial Sequence
  Description of Artificial Sequence: Synthetic oligonucleotide
  Sense strand starting at position 82 of SEQ ID NO: 1561366
uuuguuacagacuaaggua

SEQ ID NO: 1666318 - RNA, 19 nt, Artificial Sequence
  Description of Artificial Sequence: Synthetic oligonucleotide
  Antisense strand to SEQ ID NO: 1666317
uaccuuagucuguaacaaa

SEQ ID NO: 1666319 - RNA, 19 nt, Artificial Sequence
  Description of Artificial Sequence: Synthetic oligonucleotide
  Sense strand starting at position 90 of SEQ ID NO: 1561366
agacuaagguaagaauaaa

SEQ ID NO: 1666320 - RNA, 19 nt, Artificial Sequence
  Description of Artificial Sequence: Synthetic oligonucleotide
  Antisense strand to SEQ ID NO: 1666319
uuuauucuuaccuuagucu

SEQ ID NO: 1666321 - RNA, 19 nt, Artificial Sequence
  Description of Artificial Sequence: Synthetic oligonucleotide
  Sense strand starting at position 107 of SEQ ID NO: 1561366
aauuaaggagugugugcaa

SEQ ID NO: 1666322 - RNA, 19 nt, Artificial Sequence
  Description of Artificial Sequence: Synthetic oligonucleotide
  Antisense strand to SEQ ID NO: 1666321
uugcacacacuccuuaauu

SEQ ID NO: 1666323 - RNA, 19 nt, Artificial Sequence
  Description of Artificial Sequence: Synthetic oligonucleotide
  Sense strand starting at position 220 of SEQ ID NO: 1561366
aaaugucauguuggauaag

SEQ ID NO: 1666324 - RNA, 19 nt, Artificial Sequence
  Description of Artificial Sequence: Synthetic oligonucleotide
  Antisense strand to SEQ ID NO: 1666323
cuuauccaacaugacauuu

SEQ ID NO: 1666325 - RNA, 19 nt, Artificial Sequence
  Description of Artificial Sequence: Synthetic oligonucleotide
  Sense strand starting at position 223 of SEQ ID NO: 1561366
ugucauguuggauaaggua

SEQ ID NO: 1666326 - RNA, 19 nt, Artificial Sequence
  Description of Artificial Sequence: Synthetic oligonucleotide
  Antisense strand to SEQ ID NO: 1666325
uaccuuauccaacaugaca

SEQ ID NO: 1666327 - RNA, 19 nt, Artificial Sequence
  Description of Artificial Sequence: Synthetic oligonucleotide
  Sense strand starting at position 323 of SEQ ID NO: 1561366
guuuaauauuaugucaggu

SEQ ID NO: 1666328 - RNA, 19 nt, Artificial Sequence
  Description of Artificial Sequence: Synthetic oligonucleotide
  Antisense strand to SEQ ID NO: 1666327
accugacauaauauuaaac

SEQ ID NO: 1666329 - RNA, 19 nt, Artificial Sequence
  Description of Artificial Sequence: Synthetic oligonucleotide
  Sense strand starting at position 350 of SEQ ID NO: 1561366
cuuucuuacgguuauaacu

SEQ ID NO: 1666330 - RNA, 19 nt, Artificial Sequence
  Description of Artificial Sequence: Synthetic oligonucleotide
  Antisense strand to SEQ ID NO: 1666329
aguuauaaccguaagaaag

SEQ ID NO: 1666331 - RNA, 19 nt, Artificial Sequence
  Description of Artificial Sequence: Synthetic oligonucleotide
  Sense strand starting at position 390 of SEQ ID NO: 1561366
cagaguauuccaugaaaug

SEQ ID NO: 1666332 - RNA, 19 nt, Artificial Sequence
  Description of Artificial Sequence: Synthetic oligonucleotide
  Antisense strand to SEQ ID NO: 1666331
cauuucauggaauacucug

SEQ ID NO: 1666333 - RNA, 19 nt, Artificial Sequence
  Description of Artificial Sequence: Synthetic oligonucleotide
  Sense strand starting at position 399 of SEQ ID NO: 1561366
ccaugaaaugaacguggua

SEQ ID NO: 1666334 - RNA, 19 nt, Artificial Sequence
  Description of Artificial Sequence: Synthetic oligonucleotide
  Antisense strand to SEQ ID NO: 1666333
uaccacguucauuucaugg

SEQ ID NO: 1666335 - RNA, 19 nt, Artificial Sequence
  Description of Artificial Sequence: Synthetic oligonucleotide
  Sense strand starting at position 401 of SEQ ID NO: 1561366
augaaaugaacgugguaua

SEQ ID NO: 1666336 - RNA, 19 nt, Artificial Sequence
  Description of Artificial Sequence: Synthetic oligonucleotide
  Antisense strand to SEQ ID NO: 1666335
uauaccacguucauuucau

SEQ ID NO: 1666337 - RNA, 19 nt, Artificial Sequence
  Description of Artificial Sequence: Synthetic oligonucleotide
  Sense strand starting at position 402 of SEQ ID NO: 1561366
ugaaaugaacgugguauaa

SEQ ID NO: 1666338 - RNA, 19 nt, Artificial Sequence
  Description of Artificial Sequence: Synthetic oligonucleotide
  Antisense strand to SEQ ID NO: 1666337
uuauaccacguucauuuca

SEQ ID NO: 1666339 - RNA, 19 nt, Artificial Sequence
  Description of Artificial Sequence: Synthetic oligonucleotide
  Sense strand starting at position 448 of SEQ ID NO: 1561366
caauaauuguggucaaggu

SEQ ID NO: 1666340 - RNA, 19 nt, Artificial Sequence
  Description of Artificial Sequence: Synthetic oligonucleotide
  Antisense strand to SEQ ID NO: 1666339
accuugaccacaauuauug

SEQ ID NO: 1666341 - RNA, 19 nt, Artificial Sequence
  Description of Artificial Sequence: Synthetic oligonucleotide
  Sense strand starting at position 449 of SEQ ID NO: 1561366
aauaauuguggucaaggua

SEQ ID NO: 1666342 - RNA, 19 nt, Artificial Sequence
  Description of Artificial Sequence: Synthetic oligonucleotide
  Antisense strand to SEQ ID NO: 1666341
uaccuugaccacaauuauu

SEQ ID NO: 1666343 - RNA, 19 nt, Artificial Sequence
  Description of Artificial Sequence: Synthetic oligonucleotide
  Sense strand starting at position 543 of SEQ ID NO: 1561366
cagaguaucuccuuagggu

SEQ ID NO: 1666344 - RNA, 19 nt, Artificial Sequence
  Description of Artificial Sequence: Synthetic oligonucleotide
  Antisense strand to SEQ ID NO: 1666343
acccuaaggagauacucug

SEQ ID NO: 1666345 - RNA, 19 nt, Artificial Sequence
  Description of Artificial Sequence: Synthetic oligonucleotide
  Sense strand starting at position 616 of SEQ ID NO: 1561366
cacagaaugucccuuggaa

SEQ ID NO: 1666346 - RNA, 19 nt, Artificial Sequence
  Description of Artificial Sequence: Synthetic oligonucleotide
  Antisense strand to SEQ ID NO: 1666345
uuccaagggacauucugug

SEQ ID NO: 1666347 - RNA, 19 nt, Artificial Sequence
  Description of Artificial Sequence: Synthetic oligonucleotide
  Sense strand starting at position 618 of SEQ ID NO: 1561366
cagaaugucccuuggaaag

SEQ ID NO: 1666348 - RNA, 19 nt, Artificial Sequence
  Description of Artificial Sequence: Synthetic oligonucleotide
  Antisense strand to SEQ ID NO: 1666347
cuuuccaagggacauucug

SEQ ID NO: 1666349 - RNA, 19 nt, Artificial Sequence
  Description of Artificial Sequence: Synthetic oligonucleotide
  Sense strand starting at position 632 of SEQ ID NO: 1561366
gaaaguuguaaguggaguu

SEQ ID NO: 1666350 - RNA, 19 nt, Artificial Sequence
  Description of Artificial Sequence: Synthetic oligonucleotide
  Antisense strand to SEQ ID NO: 1666349
aacuccacuuacaacuuuc

SEQ ID NO: 1666351 - RNA, 19 nt, Artificial Sequence
  Description of Artificial Sequence: Synthetic oligonucleotide
  Sense strand starting at position 633 of SEQ ID NO: 1561366
aaaguuguaaguggaguua

SEQ ID NO: 1666352 - RNA, 19 nt, Artificial Sequence
  Description of Artificial Sequence: Synthetic oligonucleotide
  Antisense strand to SEQ ID NO: 1666351
uaacuccacuuacaacuuu

SEQ ID NO: 1666353 - RNA, 19 nt, Artificial Sequence
  Description of Artificial Sequence: Synthetic oligonucleotide
  Sense strand starting at position 756 of SEQ ID NO: 1561366
gcuccugauguacagacau

SEQ ID NO: 1666354 - RNA, 19 nt, Artificial Sequence
  Description of Artificial Sequence: Synthetic oligonucleotide
  Antisense strand to SEQ ID NO: 1666353
augucuguacaucaggagc

SEQ ID NO: 1666355 - RNA, 19 nt, Artificial Sequence
  Description of Artificial Sequence: Synthetic oligonucleotide
  Sense strand starting at position 930 of SEQ ID NO: 1561366
gucaucuaccuuuaauguu

SEQ ID NO: 1666356 - RNA, 19 nt, Artificial Sequence
  Description of Artificial Sequence: Synthetic oligonucleotide
  Antisense strand to SEQ ID NO: 1666355
aacauuaaagguagaugac

SEQ ID NO: 1666357 - RNA, 19 nt, Artificial Sequence
  Description of Artificial Sequence: Synthetic oligonucleotide
  Sense strand starting at position 939 of SEQ ID NO: 1561366
cuuuaauguuuggucuuaa

SEQ ID NO: 1666358 - RNA, 19 nt, Artificial Sequence
  Description of Artificial Sequence: Synthetic oligonucleotide
  Antisense strand to SEQ ID NO: 1666357
uuaagaccaaacauuaaag

SEQ ID NO: 1666359 - RNA, 19 nt, Artificial Sequence
  Description of Artificial Sequence: Synthetic oligonucleotide
  Sense strand starting at position 940 of SEQ ID NO: 1561366
uuuaauguuuggucuuaag

SEQ ID NO: 1666360 - RNA, 19 nt, Artificial Sequence
  Description of Artificial Sequence: Synthetic oligonucleotide
  Antisense strand to SEQ ID NO: 1666359
cuuaagaccaaacauuaaa

SEQ ID NO: 1666361 - RNA, 19 nt, Artificial Sequence
  Description of Artificial Sequence: Synthetic oligonucleotide
  Sense strand starting at position 1180 of SEQ ID NO: 1561366
uggcgauugagaugaugac

SEQ ID NO: 1666362 - RNA, 19 nt, Artificial Sequence
  Description of Artificial Sequence: Synthetic oligonucleotide
  Antisense strand to SEQ ID NO: 1666361
gucaucaucucaaucgcca

SEQ ID NO: 1666363 - RNA, 19 nt, Artificial Sequence
  Description of Artificial Sequence: Synthetic oligonucleotide
  Sense strand starting at position 1638 of SEQ ID NO: 1561366
agcucacucuguccugaga

SEQ ID NO: 1666364 - RNA, 19 nt, Artificial Sequence
  Description of Artificial Sequence: Synthetic oligonucleotide
  Antisense strand to SEQ ID NO: 1666363
ucucaggacagagugagcu

SEQ ID NO: 1666365 - RNA, 19 nt, Artificial Sequence
  Description of Artificial Sequence: Synthetic oligonucleotide
  Sense strand starting at position 2891 of SEQ ID NO: 1561366
gagcgucaccuggaauucu

SEQ ID NO: 1666366 - RNA, 19 nt, Artificial Sequence
  Description of Artificial Sequence: Synthetic oligonucleotide
  Antisense strand to SEQ ID NO: 1666365
agaauuccaggugacgcuc

SEQ ID NO: 1666367 - RNA, 19 nt, Artificial Sequence
  Description of Artificial Sequence: Synthetic oligonucleotide
  Sense strand starting at position 2999 of SEQ ID NO: 1561366
ccgugagucccgcucucau

SEQ ID NO: 1666368 - RNA, 19 nt, Artificial Sequence
  Description of Artificial Sequence: Synthetic oligonucleotide
  Antisense strand to SEQ ID NO: 1666367
augagagcgggacucacgg

SEQ ID NO: 1666369 - RNA, 19 nt, Artificial Sequence
  Description of Artificial Sequence: Synthetic oligonucleotide
  Sense strand starting at position 3046 of SEQ ID NO: 1561366
ggauguugcagguacuuaa

SEQ ID NO: 1666370 - RNA, 19 nt, Artificial Sequence
  Description of Artificial Sequence: Synthetic oligonucleotide
  Antisense strand to SEQ ID NO: 1666369
uuaaguaccugcaacaucc

SEQ ID NO: 1666371 - RNA, 19 nt, Artificial Sequence
  Description of Artificial Sequence: Synthetic oligonucleotide
  Sense strand starting at position 3099 of SEQ ID NO: 1561366
ugguauuuaugccaaggaa

SEQ ID NO: 1666372 - RNA, 19 nt, Artificial Sequence
  Description of Artificial Sequence: Synthetic oligonucleotide
  Antisense strand to SEQ ID NO: 1666371
uuccuuggcauaaauacca

SEQ ID NO: 1666373 - RNA, 19 nt, Artificial Sequence
  Description of Artificial Sequence: Synthetic oligonucleotide
  Sense strand starting at position 3121 of SEQ ID NO: 1561366
gcuauaguuguacacaaug

SEQ ID NO: 1666374 - RNA, 19 nt, Artificial Sequence
  Description of Artificial Sequence: Synthetic oligonucleotide
  Antisense strand to SEQ ID NO: 1666373
cauuguguacaacuauagc

SEQ ID NO: 1666375 - RNA, 19 nt, Artificial Sequence
  Description of Artificial Sequence: Synthetic oligonucleotide
  Sense strand starting at position 3126 of SEQ ID NO: 1561366
aguuguacacaauguugaa

SEQ ID NO: 1666376 - RNA, 19 nt, Artificial Sequence
  Description of Artificial Sequence: Synthetic oligonucleotide
  Antisense strand to SEQ ID NO: 1666375
uucaacauuguguacaacu

SEQ ID NO: 1666377 - RNA, 19 nt, Artificial Sequence
  Description of Artificial Sequence: Synthetic oligonucleotide
  Sense strand starting at position 3130 of SEQ ID NO: 1561366
guacacaauguugaaguau

SEQ ID NO: 1666378 - RNA, 19 nt, Artificial Sequence
  Description of Artificial Sequence: Synthetic oligonucleotide
  Antisense strand to SEQ ID NO: 1666377
auacuucaacauuguguac

SEQ ID NO: 1666379 - RNA, 19 nt, Artificial Sequence
  Description of Artificial Sequence: Synthetic oligonucleotide
  Sense strand starting at position 3316 of SEQ ID NO: 1561366
gauguaauccacugacguu

SEQ ID NO: 1666380 - RNA, 19 nt, Artificial Sequence
  Description of Artificial Sequence: Synthetic oligonucleotide
  Antisense strand to SEQ ID NO: 1666379
aacgucaguggauuacauc

SEQ ID NO: 1666381 - RNA, 19 nt, Artificial Sequence
  Description of Artificial Sequence: Synthetic oligonucleotide
  Sense strand starting at position 3325 of SEQ ID NO: 1561366
cacugacguuacccagaau

SEQ ID NO: 1666382 - RNA, 19 nt, Artificial Sequence
  Description of Artificial Sequence: Synthetic oligonucleotide
  Antisense strand to SEQ ID NO: 1666381
auucuggguaacgucagug

SEQ ID NO: 1666383 - RNA, 19 nt, Artificial Sequence
  Description of Artificial Sequence: Synthetic oligonucleotide
  Sense strand starting at position 3721 of SEQ ID NO: 1561366
agauuaaaccauggucugu

SEQ ID NO: 1666384 - RNA, 19 nt, Artificial Sequence
  Description of Artificial Sequence: Synthetic oligonucleotide
  Antisense strand to SEQ ID NO: 1666383
acagaccaugguuuaaucu

SEQ ID NO: 1666385 - RNA, 19 nt, Artificial Sequence
  Description of Artificial Sequence: Synthetic oligonucleotide
  Sense strand starting at position 3723 of SEQ ID NO: 1561366
auuaaaccauggucuguua

SEQ ID NO: 1666386 - RNA, 19 nt, Artificial Sequence
  Description of Artificial Sequence: Synthetic oligonucleotide
  Antisense strand to SEQ ID NO: 1666385
uaacagaccaugguuuaau

SEQ ID NO: 1666387 - RNA, 19 nt, Artificial Sequence
  Description of Artificial Sequence: Synthetic oligonucleotide
  Sense strand starting at position 3904 of SEQ ID NO: 1561366
uaaucugagcucugauagu

SEQ ID NO: 1666388 - RNA, 19 nt, Artificial Sequence
  Description of Artificial Sequence: Synthetic oligonucleotide
  Antisense strand to SEQ ID NO: 1666387
acuaucagagcucagauua

SEQ ID NO: 1666389 - RNA, 19 nt, Artificial Sequence
  Description of Artificial Sequence: Synthetic oligonucleotide
  Sense strand starting at position 3910 of SEQ ID NO: 1561366
gagcucugauaguuauuaa

SEQ ID NO: 1666390 - RNA, 19 nt, Artificial Sequence
  Description of Artificial Sequence: Synthetic oligonucleotide
  Antisense strand to SEQ ID NO: 1666389
uuaauaacuaucagagcuc

SEQ ID NO: 1666391 - RNA, 19 nt, Artificial Sequence
  Description of Artificial Sequence: Synthetic oligonucleotide
  Sense strand starting at position 3972 of SEQ ID NO: 1561366
aagauaguacaauguauga

SEQ ID NO: 1666392 - RNA, 19 nt, Artificial Sequence
  Description of Artificial Sequence: Synthetic oligonucleotide
  Antisense strand to SEQ ID NO: 1666391
ucauacauuguacuaucuu

SEQ ID NO: 1666393 - RNA, 19 nt, Artificial Sequence
  Description of Artificial Sequence: Synthetic oligonucleotide
  Sense strand starting at position 3983 of SEQ ID NO: 1561366
auguaugacuguuugaaca

SEQ ID NO: 1666394 - RNA, 19 nt, Artificial Sequence
  Description of Artificial Sequence: Synthetic oligonucleotide
  Antisense strand to SEQ ID NO: 1666393
uguucaaacagucauacau

SEQ ID NO: 1666395 - RNA, 19 nt, Artificial Sequence
  Description of Artificial Sequence: Synthetic oligonucleotide
  Sense strand starting at position 388 of SEQ ID NO: 1561367
cuccuagagcucugccaaa

SEQ ID NO: 1666396 - RNA, 19 nt, Artificial Sequence
  Description of Artificial Sequence: Synthetic oligonucleotide
  Antisense strand to SEQ ID NO: 1666395
uuuggcagagcucuaggag

SEQ ID NO: 1666397 - RNA, 19 nt, Artificial Sequence
  Description of Artificial Sequence: Synthetic oligonucleotide
  Sense strand starting at position 421 of SEQ ID NO: 1561367
acacauguccuccgugaga

SEQ ID NO: 1666398 - RNA, 19 nt, Artificial Sequence
  Description of Artificial Sequence: Synthetic oligonucleotide
  Antisense strand to SEQ ID NO: 1666397
ucucacggaggacaugugu

SEQ ID NO: 1666399 - RNA, 19 nt, Artificial Sequence
  Description of Artificial Sequence: Synthetic oligonucleotide
  Sense strand starting at position 503 of SEQ ID NO: 1561367
cugguacccucuucucaga

SEQ ID NO: 1666400 - RNA, 19 nt, Artificial Sequence
  Description of Artificial Sequence: Synthetic oligonucleotide
  Antisense strand to SEQ ID NO: 1666399
ucugagaagaggguaccag

SEQ ID NO: 1666401 - RNA, 19 nt, Artificial Sequence
  Description of Artificial Sequence: Synthetic oligonucleotide
  Sense strand starting at position 584 of SEQ ID NO: 1561367
uuuguuacagacuaaggua

SEQ ID NO: 1666402 - RNA, 19 nt, Artificial Sequence
  Description of Artificial Sequence: Synthetic oligonucleotide
  Antisense strand to SEQ ID NO: 1666401
uaccuuagucuguaacaaa

SEQ ID NO: 1666403 - RNA, 19 nt, Artificial Sequence
  Description of Artificial Sequence: Synthetic oligonucleotide
  Sense strand starting at position 592 of SEQ ID NO: 1561367
agacuaagguaagaauaaa

SEQ ID NO: 1666404 - RNA, 19 nt, Artificial Sequence
  Description of Artificial Sequence: Synthetic oligonucleotide
  Antisense strand to SEQ ID NO: 1666403
uuuauucuuaccuuagucu

SEQ ID NO: 1666405 - RNA, 19 nt, Artificial Sequence
  Description of Artificial Sequence: Synthetic oligonucleotide
  Sense strand starting at position 609 of SEQ ID NO: 1561367
aauuaaggagugugugcaa

SEQ ID NO: 1666406 - RNA, 19 nt, Artificial Sequence
  Description of Artificial Sequence: Synthetic oligonucleotide
  Antisense strand to SEQ ID NO: 1666405
uugcacacacuccuuaauu

SEQ ID NO: 1666407 - RNA, 19 nt, Artificial Sequence
  Description of Artificial Sequence: Synthetic oligonucleotide
  Sense strand starting at position 722 of SEQ ID NO: 1561367
aaaugucauguuggauaag

SEQ ID NO: 1666408 - RNA, 19 nt, Artificial Sequence
  Description of Artificial Sequence: Synthetic oligonucleotide
  Antisense strand to SEQ ID NO: 1666407
cuuauccaacaugacauuu

SEQ ID NO: 1666409 - RNA, 19 nt, Artificial Sequence
  Description of Artificial Sequence: Synthetic oligonucleotide
  Sense strand starting at position 725 of SEQ ID NO: 1561367
ugucauguuggauaaggua

SEQ ID NO: 1666410 - RNA, 19 nt, Artificial Sequence
  Description of Artificial Sequence: Synthetic oligonucleotide
  Antisense strand to SEQ ID NO: 1666409
uaccuuauccaacaugaca

SEQ ID NO: 1666411 - RNA, 19 nt, Artificial Sequence
  Description of Artificial Sequence: Synthetic oligonucleotide
  Sense strand starting at position 825 of SEQ ID NO: 1561367
guuuaauauuaugucaggu

SEQ ID NO: 1666412 - RNA, 19 nt, Artificial Sequence
  Description of Artificial Sequence: Synthetic oligonucleotide
  Antisense strand to SEQ ID NO: 1666411
accugacauaauauuaaac

SEQ ID NO: 1666413 - RNA, 19 nt, Artificial Sequence
  Description of Artificial Sequence: Synthetic oligonucleotide
  Sense strand starting at position 852 of SEQ ID NO: 1561367
cuuucuuacgguuauaacu

SEQ ID NO: 1666414 - RNA, 19 nt, Artificial Sequence
  Description of Artificial Sequence: Synthetic oligonucleotide
  Antisense strand to SEQ ID NO: 1666413
aguuauaaccguaagaaag

SEQ ID NO: 1666415 - RNA, 19 nt, Artificial Sequence
  Description of Artificial Sequence: Synthetic oligonucleotide
  Sense strand starting at position 882 of SEQ ID NO: 1561367
uuuguagcugcagaguauu

SEQ ID NO: 1666416 - RNA, 19 nt, Artificial Sequence
  Description of Artificial Sequence: Synthetic oligonucleotide
  Antisense strand to SEQ ID NO: 1666415
aauacucugcagcuacaaa

SEQ ID NO: 1666417 - RNA, 19 nt, Artificial Sequence
  Description of Artificial Sequence: Synthetic oligonucleotide
  Sense strand starting at position 892 of SEQ ID NO: 1561367
cagaguauuccaugaaaug

SEQ ID NO: 1666418 - RNA, 19 nt, Artificial Sequence
  Description of Artificial Sequence: Synthetic oligonucleotide
  Antisense strand to SEQ ID NO: 1666417
cauuucauggaauacucug

SEQ ID NO: 1666419 - RNA, 19 nt, Artificial Sequence
  Description of Artificial Sequence: Synthetic oligonucleotide
  Sense strand starting at position 901 of SEQ ID NO: 1561367
ccaugaaaugaacguggua

SEQ ID NO: 1666420 - RNA, 19 nt, Artificial Sequence
  Description of Artificial Sequence: Synthetic oligonucleotide
  Antisense strand to SEQ ID NO: 1666419
uaccacguucauuucaugg

SEQ ID NO: 1666421 - RNA, 19 nt, Artificial Sequence
  Description of Artificial Sequence: Synthetic oligonucleotide
  Sense strand starting at position 903 of SEQ ID NO: 1561367
augaaaugaacgugguaua

SEQ ID NO: 1666422 - RNA, 19 nt, Artificial Sequence
  Description of Artificial Sequence: Synthetic oligonucleotide
  Antisense strand to SEQ ID NO: 1666421
uauaccacguucauuucau

SEQ ID NO: 1666423 - RNA, 19 nt, Artificial Sequence
  Description of Artificial Sequence: Synthetic oligonucleotide
  Sense strand starting at position 904 of SEQ ID NO: 1561367
ugaaaugaacgugguauaa

SEQ ID NO: 1666424 - RNA, 19 nt, Artificial Sequence
  Description of Artificial Sequence: Synthetic oligonucleotide
  Antisense strand to SEQ ID NO: 1666423
uuauaccacguucauuuca

SEQ ID NO: 1666425 - RNA, 19 nt, Artificial Sequence
  Description of Artificial Sequence: Synthetic oligonucleotide
  Sense strand starting at position 950 of SEQ ID NO: 1561367
caauaauuguggucaaggu

SEQ ID NO: 1666426 - RNA, 19 nt, Artificial Sequence
  Description of Artificial Sequence: Synthetic oligonucleotide
  Antisense strand to SEQ ID NO: 1666425
accuugaccacaauuauug

SEQ ID NO: 1666427 - RNA, 19 nt, Artificial Sequence
  Description of Artificial Sequence: Synthetic oligonucleotide
  Sense strand starting at position 951 of SEQ ID NO: 1561367
aauaauuguggucaaggua

SEQ ID NO: 1666428 - RNA, 19 nt, Artificial Sequence
  Description of Artificial Sequence: Synthetic oligonucleotide
  Antisense strand to SEQ ID NO: 1666427
uaccuugaccacaauuauu

SEQ ID NO: 1666429 - RNA, 19 nt, Artificial Sequence
  Description of Artificial Sequence: Synthetic oligonucleotide
  Sense strand starting at position 1045 of SEQ ID NO: 1561367
cagaguaucuccuuagggu

SEQ ID NO: 1666430 - RNA, 19 nt, Artificial Sequence
  Description of Artificial Sequence: Synthetic oligonucleotide
  Antisense strand to SEQ ID NO: 1666429
acccuaaggagauacucug

SEQ ID NO: 1666431 - RNA, 19 nt, Artificial Sequence
  Description of Artificial Sequence: Synthetic oligonucleotide
  Sense strand starting at position 1118 of SEQ ID NO: 1561367
cacagaaugucccuuggaa

SEQ ID NO: 1666432 - RNA, 19 nt, Artificial Sequence
  Description of Artificial Sequence: Synthetic oligonucleotide
  Antisense strand to SEQ ID NO: 1666431
uuccaagggacauucugug

SEQ ID NO: 1666433 - RNA, 19 nt, Artificial Sequence
  Description of Artificial Sequence: Synthetic oligonucleotide
  Sense strand starting at position 1120 of SEQ ID NO: 1561367
cagaaugucccuuggaaag

SEQ ID NO: 1666434 - RNA, 19 nt, Artificial Sequence
  Description of Artificial Sequence: Synthetic oligonucleotide
  Antisense strand to SEQ ID NO: 1666433
cuuuccaagggacauucug

SEQ ID NO: 1666435 - RNA, 19 nt, Artificial Sequence
  Description of Artificial Sequence: Synthetic oligonucleotide
  Sense strand starting at position 1134 of SEQ ID NO: 1561367
gaaaguuguaaguggaguu

SEQ ID NO: 1666436 - RNA, 19 nt, Artificial Sequence
  Description of Artificial Sequence: Synthetic oligonucleotide
  Antisense strand to SEQ ID NO: 1666435
aacuccacuuacaacuuuc

SEQ ID NO: 1666437 - RNA, 19 nt, Artificial Sequence
  Description of Artificial Sequence: Synthetic oligonucleotide
  Sense strand starting at position 1135 of SEQ ID NO: 1561367
aaaguuguaaguggaguua

SEQ ID NO: 1666438 - RNA, 19 nt, Artificial Sequence
  Description of Artificial Sequence: Synthetic oligonucleotide
  Antisense strand to SEQ ID NO: 1666437
uaacuccacuuacaacuuu

SEQ ID NO: 1666439 - RNA, 19 nt, Artificial Sequence
  Description of Artificial Sequence: Synthetic oligonucleotide
  Sense strand starting at position 1258 of SEQ ID NO: 1561367
gcuccugauguacagacau

SEQ ID NO: 1666440 - RNA, 19 nt, Artificial Sequence
  Description of Artificial Sequence: Synthetic oligonucleotide
  Antisense strand to SEQ ID NO: 1666439
augucuguacaucaggagc

SEQ ID NO: 1666441 - RNA, 19 nt, Artificial Sequence
  Description of Artificial Sequence: Synthetic oligonucleotide
  Sense strand starting at position 1432 of SEQ ID NO: 1561367
gucaucuaccuuuaauguu

SEQ ID NO: 1666442 - RNA, 19 nt, Artificial Sequence
  Description of Artificial Sequence: Synthetic oligonucleotide
  Antisense strand to SEQ ID NO: 1666441
aacauuaaagguagaugac

SEQ ID NO: 1666443 - RNA, 19 nt, Artificial Sequence
  Description of Artificial Sequence: Synthetic oligonucleotide
  Sense strand starting at position 1441 of SEQ ID NO: 1561367
cuuuaauguuuggucuuaa

SEQ ID NO: 1666444 - RNA, 19 nt, Artificial Sequence
  Description of Artificial Sequence: Synthetic oligonucleotide
  Antisense strand to SEQ ID NO: 1666443
uuaagaccaaacauuaaag

SEQ ID NO: 1666445 - RNA, 19 nt, Artificial Sequence
  Description of Artificial Sequence: Synthetic oligonucleotide
  Sense strand starting at position 1442 of SEQ ID NO: 1561367
uuuaauguuuggucuuaag

SEQ ID NO: 1666446 - RNA, 19 nt, Artificial Sequence
  Description of Artificial Sequence: Synthetic oligonucleotide
  Antisense strand to SEQ ID NO: 1666445
cuuaagaccaaacauuaaa

SEQ ID NO: 1666447 - RNA, 19 nt, Artificial Sequence
  Description of Artificial Sequence: Synthetic oligonucleotide
  Sense strand starting at position 1656 of SEQ ID NO: 1561367
cugggagauuccugaagag

SEQ ID NO: 1666448 - RNA, 19 nt, Artificial Sequence
  Description of Artificial Sequence: Synthetic oligonucleotide
  Antisense strand to SEQ ID NO: 1666447
cucuucaggaaucucccag

SEQ ID NO: 1666449 - RNA, 19 nt, Artificial Sequence
  Description of Artificial Sequence: Synthetic oligonucleotide
  Sense strand starting at position 1682 of SEQ ID NO: 1561367
uggcgauugagaugaugac

SEQ ID NO: 1666450 - RNA, 19 nt, Artificial Sequence
  Description of Artificial Sequence: Synthetic oligonucleotide
  Antisense strand to SEQ ID NO: 1666449
gucaucaucucaaucgcca

SEQ ID NO: 1666451 - RNA, 19 nt, Artificial Sequence
  Description of Artificial Sequence: Synthetic oligonucleotide
  Sense strand starting at position 2140 of SEQ ID NO: 1561367
agcucacucuguccugaga

SEQ ID NO: 1666452 - RNA, 19 nt, Artificial Sequence
  Description of Artificial Sequence: Synthetic oligonucleotide
  Antisense strand to SEQ ID NO: 1666451
ucucaggacagagugagcu

SEQ ID NO: 1666453 - RNA, 19 nt, Artificial Sequence
  Description of Artificial Sequence: Synthetic oligonucleotide
  Sense strand starting at position 3391 of SEQ ID NO: 1561367
uggagcgucaccuggaauu

SEQ ID NO: 1666454 - RNA, 19 nt, Artificial Sequence
  Description of Artificial Sequence: Synthetic oligonucleotide
  Antisense strand to SEQ ID NO: 1666453
aauuccaggugacgcucca

SEQ ID NO: 1666455 - RNA, 19 nt, Artificial Sequence
  Description of Artificial Sequence: Synthetic oligonucleotide
  Sense strand starting at position 3393 of SEQ ID NO: 1561367
gagcgucaccuggaauucu

SEQ ID NO: 1666456 - RNA, 19 nt, Artificial Sequence
  Description of Artificial Sequence: Synthetic oligonucleotide
  Antisense strand to SEQ ID NO: 1666455
agaauuccaggugacgcuc

SEQ ID NO: 1666457 - RNA, 19 nt, Artificial Sequence
  Description of Artificial Sequence: Synthetic oligonucleotide
  Sense strand starting at position 3501 of SEQ ID NO: 1561367
ccgugagucccgcucucau

SEQ ID NO: 1666458 - RNA, 19 nt, Artificial Sequence
  Description of Artificial Sequence: Synthetic oligonucleotide
  Antisense strand to SEQ ID NO: 1666457
augagagcgggacucacgg

SEQ ID NO: 1666459 - RNA, 19 nt, Artificial Sequence
  Description of Artificial Sequence: Synthetic oligonucleotide
  Sense strand starting at position 3548 of SEQ ID NO: 1561367
ggauguugcagguacuuaa

SEQ ID NO: 1666460 - RNA, 19 nt, Artificial Sequence
  Description of Artificial Sequence: Synthetic oligonucleotide
  Antisense strand to SEQ ID NO: 1666459
uuaaguaccugcaacaucc

SEQ ID NO: 1666461 - RNA, 19 nt, Artificial Sequence
  Description of Artificial Sequence: Synthetic oligonucleotide
  Sense strand starting at position 3601 of SEQ ID NO: 1561367
ugguauuuaugccaaggaa

SEQ ID NO: 1666462 - RNA, 19 nt, Artificial Sequence
  Description of Artificial Sequence: Synthetic oligonucleotide
  Antisense strand to SEQ ID NO: 1666461
uuccuuggcauaaauacca

SEQ ID NO: 1666463 - RNA, 19 nt, Artificial Sequence
  Description of Artificial Sequence: Synthetic oligonucleotide
  Sense strand starting at position 3623 of SEQ ID NO: 1561367
gcuauaguuguacacaaug

SEQ ID NO: 1666464 - RNA, 19 nt, Artificial Sequence
  Description of Artificial Sequence: Synthetic oligonucleotide
  Antisense strand to SEQ ID NO: 1666463
cauuguguacaacuauagc

SEQ ID NO: 1666465 - RNA, 19 nt, Artificial Sequence
  Description of Artificial Sequence: Synthetic oligonucleotide
  Sense strand starting at position 3628 of SEQ ID NO: 1561367
aguuguacacaauguugaa

SEQ ID NO: 1666466 - RNA, 19 nt, Artificial Sequence
  Description of Artificial Sequence: Synthetic oligonucleotide
  Antisense strand to SEQ ID NO: 1666465
uucaacauuguguacaacu

SEQ ID NO: 1666467 - RNA, 19 nt, Artificial Sequence
  Description of Artificial Sequence: Synthetic oligonucleotide
  Sense strand starting at position 3632 of SEQ ID NO: 1561367
guacacaauguugaaguau

SEQ ID NO: 1666468 - RNA, 19 nt, Artificial Sequence
  Description of Artificial Sequence: Synthetic oligonucleotide
  Antisense strand to SEQ ID NO: 1666467
auacuucaacauuguguac

SEQ ID NO: 1666469 - RNA, 19 nt, Artificial Sequence
  Description of Artificial Sequence: Synthetic oligonucleotide
  Sense strand starting at position 3764 of SEQ ID NO: 1561367
guuaccucagcuggugauu

SEQ ID NO: 1666470 - RNA, 19 nt, Artificial Sequence
  Description of Artificial Sequence: Synthetic oligonucleotide
  Antisense strand to SEQ ID NO: 1666469
aaucaccagcugagguaac

SEQ ID NO: 1666471 - RNA, 19 nt, Artificial Sequence
  Description of Artificial Sequence: Synthetic oligonucleotide
  Sense strand starting at position 3818 of SEQ ID NO: 1561367
gauguaauccacugacguu

SEQ ID NO: 1666472 - RNA, 19 nt, Artificial Sequence
  Description of Artificial Sequence: Synthetic oligonucleotide
  Antisense strand to SEQ ID NO: 1666471
aacgucaguggauuacauc

SEQ ID NO: 1666473 - RNA, 19 nt, Artificial Sequence
  Description of Artificial Sequence: Synthetic oligonucleotide
  Sense strand starting at position 3827 of SEQ ID NO: 1561367
cacugacguuacccagaau

SEQ ID NO: 1666474 - RNA, 19 nt, Artificial Sequence
  Description of Artificial Sequence: Synthetic oligonucleotide
  Antisense strand to SEQ ID NO: 1666473
auucuggguaacgucagug

SEQ ID NO: 1666475 - RNA, 19 nt, Artificial Sequence
  Description of Artificial Sequence: Synthetic oligonucleotide
  Sense strand starting at position 76 of SEQ ID NO: 1561368
ggaggaaagcuugagcuca

SEQ ID NO: 1666476 - RNA, 19 nt, Artificial Sequence
  Description of Artificial Sequence: Synthetic oligonucleotide
  Antisense strand to SEQ ID NO: 1666475
ugagcucaagcuuuccucc

SEQ ID NO: 1666477 - RNA, 19 nt, Artificial Sequence
  Description of Artificial Sequence: Synthetic oligonucleotide
  Sense strand starting at position 81 of SEQ ID NO: 1561368
aaagcuugagcucaugaga

SEQ ID NO: 1666478 - RNA, 19 nt, Artificial Sequence
  Description of Artificial Sequence: Synthetic oligonucleotide
  Antisense strand to SEQ ID NO: 1666477
ucucaugagcucaagcuuu

SEQ ID NO: 1666479 - RNA, 19 nt, Artificial Sequence
  Description of Artificial Sequence: Synthetic oligonucleotide
  Sense strand starting at position 84 of SEQ ID NO: 1561368
gcuugagcucaugagauca

SEQ ID NO: 1666480 - RNA, 19 nt, Artificial Sequence
  Description of Artificial Sequence: Synthetic oligonucleotide
  Antisense strand to SEQ ID NO: 1666479
ugaucucaugagcucaagc

SEQ ID NO: 1666481 - RNA, 19 nt, Artificial Sequence
  Description of Artificial Sequence: Synthetic oligonucleotide
  Sense strand starting at position 193 of SEQ ID NO: 1561368
gguacuuuguuaucacaga

SEQ ID NO: 1666482 - RNA, 19 nt, Artificial Sequence
  Description of Artificial Sequence: Synthetic oligonucleotide
  Antisense strand to SEQ ID NO: 1666481
ucugugauaacaaaguacc

SEQ ID NO: 1666483 - RNA, 19 nt, Artificial Sequence
  Description of Artificial Sequence: Synthetic oligonucleotide
  Sense strand starting at position 201 of SEQ ID NO: 1561368
guuaucacagacugaauca

SEQ ID NO: 1666484 - RNA, 19 nt, Artificial Sequence
  Description of Artificial Sequence: Synthetic oligonucleotide
  Antisense strand to SEQ ID NO: 1666483
ugauucagucugugauaac

SEQ ID NO: 1666485 - RNA, 19 nt, Artificial Sequence
  Description of Artificial Sequence: Synthetic oligonucleotide
  Sense strand starting at position 227 of SEQ ID NO: 1561368
caagaauuaagaggugugu

SEQ ID NO: 1666486 - RNA, 19 nt, Artificial Sequence
  Description of Artificial Sequence: Synthetic oligonucleotide
  Antisense strand to SEQ ID NO: 1666485
acacaccucuuaauucuug

SEQ ID NO: 1666487 - RNA, 19 nt, Artificial Sequence
  Description of Artificial Sequence: Synthetic oligonucleotide
  Sense strand starting at position 258 of SEQ ID NO: 1561368
agagacaguuuaguacaga

SEQ ID NO: 1666488 - RNA, 19 nt, Artificial Sequence
  Description of Artificial Sequence: Synthetic oligonucleotide
  Antisense strand to SEQ ID NO: 1666487
ucuguacuaaacugucucu

SEQ ID NO: 1666489 - RNA, 19 nt, Artificial Sequence
  Description of Artificial Sequence: Synthetic oligonucleotide
  Sense strand starting at position 271 of SEQ ID NO: 1561368
uacagagaauaugugcuua

SEQ ID NO: 1666490 - RNA, 19 nt, Artificial Sequence
  Description of Artificial Sequence: Synthetic oligonucleotide
  Antisense strand to SEQ ID NO: 1666489
uaagcacauauucucugua

SEQ ID NO: 1666491 - RNA, 19 nt, Artificial Sequence
  Description of Artificial Sequence: Synthetic oligonucleotide
  Sense strand starting at position 273 of SEQ ID NO: 1561368
cagagaauaugugcuuaau

SEQ ID NO: 1666492 - RNA, 19 nt, Artificial Sequence
  Description of Artificial Sequence: Synthetic oligonucleotide
  Antisense strand to SEQ ID NO: 1666491
auuaagcacauauucucug

SEQ ID NO: 1666493 - RNA, 19 nt, Artificial Sequence
  Description of Artificial Sequence: Synthetic oligonucleotide
  Sense strand starting at position 334 of SEQ ID NO: 1561368
cgucaucuuggauaggaua

SEQ ID NO: 1666494 - RNA, 19 nt, Artificial Sequence
  Description of Artificial Sequence: Synthetic oligonucleotide
  Antisense strand to SEQ ID NO: 1666493
uauccuauccaagaugacg

SEQ ID NO: 1666495 - RNA, 19 nt, Artificial Sequence
  Description of Artificial Sequence: Synthetic oligonucleotide
  Sense strand starting at position 1890 of SEQ ID NO: 1561368
aagugcgucaccgcuagaa

SEQ ID NO: 1666496 - RNA, 19 nt, Artificial Sequence
  Description of Artificial Sequence: Synthetic oligonucleotide
  Antisense strand to SEQ ID NO: 1666495
uucuagcggugacgcacuu

SEQ ID NO: 1666497 - RNA, 19 nt, Artificial Sequence
  Description of Artificial Sequence: Synthetic oligonucleotide
  Sense strand starting at position 2050 of SEQ ID NO: 1561368
gucacaguuacgggagaua

SEQ ID NO: 1666498 - RNA, 19 nt, Artificial Sequence
  Description of Artificial Sequence: Synthetic oligonucleotide
  Antisense strand to SEQ ID NO: 1666497
uaucucccguaacugugac

SEQ ID NO: 1666499 - RNA, 19 nt, Artificial Sequence
  Description of Artificial Sequence: Synthetic oligonucleotide
  Sense strand starting at position 2614 of SEQ ID NO: 1561368
gcaugcagcgccuuaaguu

SEQ ID NO: 1666500 - RNA, 19 nt, Artificial Sequence
  Description of Artificial Sequence: Synthetic oligonucleotide
  Antisense strand to SEQ ID NO: 1666499
aacuuaaggcgcugcaugc

SEQ ID NO: 1666501 - RNA, 19 nt, Artificial Sequence
  Description of Artificial Sequence: Synthetic oligonucleotide
  Sense strand starting at position 2861 of SEQ ID NO: 1561368
uggagcaucaccuggaauu

SEQ ID NO: 1666502 - RNA, 19 nt, Artificial Sequence
  Description of Artificial Sequence: Synthetic oligonucleotide
  Antisense strand to SEQ ID NO: 1666501
aauuccaggugaugcucca

SEQ ID NO: 1666503 - RNA, 19 nt, Artificial Sequence
  Description of Artificial Sequence: Synthetic oligonucleotide
  Sense strand starting at position 2862 of SEQ ID NO: 1561368
ggagcaucaccuggaauuc

SEQ ID NO: 1666504 - RNA, 19 nt, Artificial Sequence
  Description of Artificial Sequence: Synthetic oligonucleotide
  Antisense strand to SEQ ID NO: 1666503
gaauuccaggugaugcucc

SEQ ID NO: 1666505 - RNA, 19 nt, Artificial Sequence
  Description of Artificial Sequence: Synthetic oligonucleotide
  Sense strand starting at position 3096 of SEQ ID NO: 1561368
gcuagaguaguacacacau

SEQ ID NO: 1666506 - RNA, 19 nt, Artificial Sequence
  Description of Artificial Sequence: Synthetic oligonucleotide
  Antisense strand to SEQ ID NO: 1666505
auguguguacuacucuagc

SEQ ID NO: 1666507 - RNA, 19 nt, Artificial Sequence
  Description of Artificial Sequence: Synthetic oligonucleotide
  Sense strand starting at position 3109 of SEQ ID NO: 1561368
acacauguaugcccaagau

SEQ ID NO: 1666508 - RNA, 19 nt, Artificial Sequence
  Description of Artificial Sequence: Synthetic oligonucleotide
  Antisense strand to SEQ ID NO: 1666507
aucuugggcauacaugugu

SEQ ID NO: 1666509 - RNA, 19 nt, Artificial Sequence
  Description of Artificial Sequence: Synthetic oligonucleotide
  Sense strand starting at position 3113 of SEQ ID NO: 1561368
auguaugcccaagauguuu

SEQ ID NO: 1666510 - RNA, 19 nt, Artificial Sequence
  Description of Artificial Sequence: Synthetic oligonucleotide
  Antisense strand to SEQ ID NO: 1666509
aaacaucuugggcauacau

SEQ ID NO: 1666511 - RNA, 19 nt, Artificial Sequence
  Description of Artificial Sequence: Synthetic oligonucleotide
  Sense strand starting at position 3118 of SEQ ID NO: 1561368
ugcccaagauguuuggaga

SEQ ID NO: 1666512 - RNA, 19 nt, Artificial Sequence
  Description of Artificial Sequence: Synthetic oligonucleotide
  Antisense strand to SEQ ID NO: 1666511
ucuccaaacaucuugggca

SEQ ID NO: 1666513 - RNA, 19 nt, Artificial Sequence
  Description of Artificial Sequence: Synthetic oligonucleotide
  Sense strand starting at position 3119 of SEQ ID NO: 1561368
gcccaagauguuuggagau

SEQ ID NO: 1666514 - RNA, 19 nt, Artificial Sequence
  Description of Artificial Sequence: Synthetic oligonucleotide
  Antisense strand to SEQ ID NO: 1666513
aucuccaaacaucuugggc

SEQ ID NO: 1666515 - RNA, 19 nt, Artificial Sequence
  Description of Artificial Sequence: Synthetic oligonucleotide
  Sense strand starting at position 3134 of SEQ ID NO: 1561368
agauuaucuugugugggaa

SEQ ID NO: 1666516 - RNA, 19 nt, Artificial Sequence
  Description of Artificial Sequence: Synthetic oligonucleotide
  Antisense strand to SEQ ID NO: 1666515
uucccacacaagauaaucu

SEQ ID NO: 1666517 - RNA, 19 nt, Artificial Sequence
  Description of Artificial Sequence: Synthetic oligonucleotide
  Sense strand starting at position 3135 of SEQ ID NO: 1561368
gauuaucuugugugggaaa

SEQ ID NO: 1666518 - RNA, 19 nt, Artificial Sequence
  Description of Artificial Sequence: Synthetic oligonucleotide
  Antisense strand to SEQ ID NO: 1666517
uuucccacacaagauaauc

SEQ ID NO: 1666519 - RNA, 19 nt, Artificial Sequence
  Description of Artificial Sequence: Synthetic oligonucleotide
  Sense strand starting at position 3170 of SEQ ID NO: 1561368
gauacaaccguagauucuu

SEQ ID NO: 1666520 - RNA, 19 nt, Artificial Sequence
  Description of Artificial Sequence: Synthetic oligonucleotide
  Antisense strand to SEQ ID NO: 1666519
aagaaucuacgguuguauc

SEQ ID NO: 1666521 - RNA, 19 nt, Artificial Sequence
  Description of Artificial Sequence: Synthetic oligonucleotide
  Sense strand starting at position 3188 of SEQ ID NO: 1561368
uagguaguuguacacauaa

SEQ ID NO: 1666522 - RNA, 19 nt, Artificial Sequence
  Description of Artificial Sequence: Synthetic oligonucleotide
  Antisense strand to SEQ ID NO: 1666521
uuauguguacaacuaccua

SEQ ID NO: 1666523 - RNA, 19 nt, Artificial Sequence
  Description of Artificial Sequence: Synthetic oligonucleotide
  Sense strand starting at position 3190 of SEQ ID NO: 1561368
gguaguuguacacauaaua

SEQ ID NO: 1666524 - RNA, 19 nt, Artificial Sequence
  Description of Artificial Sequence: Synthetic oligonucleotide
  Antisense strand to SEQ ID NO: 1666523
uauuauguguacaacuacc

SEQ ID NO: 1666525 - RNA, 19 nt, Artificial Sequence
  Description of Artificial Sequence: Synthetic oligonucleotide
  Sense strand starting at position 3210 of SEQ ID NO: 1561368
ugagaaagccuauguaucu

SEQ ID NO: 1666526 - RNA, 19 nt, Artificial Sequence
  Description of Artificial Sequence: Synthetic oligonucleotide
  Antisense strand to SEQ ID NO: 1666525
agauacauaggcuuucuca

SEQ ID NO: 1666527 - RNA, 19 nt, Artificial Sequence
  Description of Artificial Sequence: Synthetic oligonucleotide
  Sense strand starting at position 3211 of SEQ ID NO: 1561368
gagaaagccuauguaucuu

SEQ ID NO: 1666528 - RNA, 19 nt, Artificial Sequence
  Description of Artificial Sequence: Synthetic oligonucleotide
  Antisense strand to SEQ ID NO: 1666527
aagauacauaggcuuucuc

SEQ ID NO: 1666529 - RNA, 19 nt, Artificial Sequence
  Description of Artificial Sequence: Synthetic oligonucleotide
  Sense strand starting at position 3236 of SEQ ID NO: 1561368
gguuacaccaauuggugau

SEQ ID NO: 1666530 - RNA, 19 nt, Artificial Sequence
  Description of Artificial Sequence: Synthetic oligonucleotide
  Antisense strand to SEQ ID NO: 1666529
aucaccaauugguguaacc

SEQ ID NO: 1666531 - RNA, 19 nt, Artificial Sequence
  Description of Artificial Sequence: Synthetic oligonucleotide
  Sense strand starting at position 3242 of SEQ ID NO: 1561368
accaauuggugauuauagu

SEQ ID NO: 1666532 - RNA, 19 nt, Artificial Sequence
  Description of Artificial Sequence: Synthetic oligonucleotide
  Antisense strand to SEQ ID NO: 1666531
acuauaaucaccaauuggu

SEQ ID NO: 1666533 - RNA, 19 nt, Artificial Sequence
  Description of Artificial Sequence: Synthetic oligonucleotide
  Sense strand starting at position 3243 of SEQ ID NO: 1561368
ccaauuggugauuauagua

SEQ ID NO: 1666534 - RNA, 19 nt, Artificial Sequence
  Description of Artificial Sequence: Synthetic oligonucleotide
  Antisense strand to SEQ ID NO: 1666533
uacuauaaucaccaauugg

SEQ ID NO: 1666535 - RNA, 19 nt, Artificial Sequence
  Description of Artificial Sequence: Synthetic oligonucleotide
  Sense strand starting at position 3561 of SEQ ID NO: 1561368
cgguaucauuaauuacuaa

SEQ ID NO: 1666536 - RNA, 19 nt, Artificial Sequence
  Description of Artificial Sequence: Synthetic oligonucleotide
  Antisense strand to SEQ ID NO: 1666535
uuaguaauuaaugauaccg

SEQ ID NO: 1666537 - RNA, 19 nt, Artificial Sequence
  Description of Artificial Sequence: Synthetic oligonucleotide
  Sense strand starting at position 3589 of SEQ ID NO: 1561368
guagguuugaaaggguaug

SEQ ID NO: 1666538 - RNA, 19 nt, Artificial Sequence
  Description of Artificial Sequence: Synthetic oligonucleotide
  Antisense strand to SEQ ID NO: 1666537
cauacccuuucaaaccuac

SEQ ID NO: 1666539 - RNA, 19 nt, Artificial Sequence
  Description of Artificial Sequence: Synthetic oligonucleotide
  Sense strand starting at position 3594 of SEQ ID NO: 1561368
uuugaaaggguauguauaa

SEQ ID NO: 1666540 - RNA, 19 nt, Artificial Sequence
  Description of Artificial Sequence: Synthetic oligonucleotide
  Antisense strand to SEQ ID NO: 1666539
uuauacauacccuuucaaa

SEQ ID NO: 1666541 - RNA, 19 nt, Artificial Sequence
  Description of Artificial Sequence: Synthetic oligonucleotide
  Sense strand starting at position 3595 of SEQ ID NO: 1561368
uugaaaggguauguauaau

SEQ ID NO: 1666542 - RNA, 19 nt, Artificial Sequence
  Description of Artificial Sequence: Synthetic oligonucleotide
  Antisense strand to SEQ ID NO: 1666541
auuauacauacccuuucaa

SEQ ID NO: 1666543 - RNA, 19 nt, Artificial Sequence
  Description of Artificial Sequence: Synthetic oligonucleotide
  Sense strand starting at position 3649 of SEQ ID NO: 1561368
ggcucuauguucuuaauuu

SEQ ID NO: 1666544 - RNA, 19 nt, Artificial Sequence
  Description of Artificial Sequence: Synthetic oligonucleotide
  Antisense strand to SEQ ID NO: 1666543
aaauuaagaacauagagcc

SEQ ID NO: 1666545 - RNA, 19 nt, Artificial Sequence
  Description of Artificial Sequence: Synthetic oligonucleotide
  Sense strand starting at position 3682 of SEQ ID NO: 1561368
augugaaucugagcucuaa

SEQ ID NO: 1666546 - RNA, 19 nt, Artificial Sequence
  Description of Artificial Sequence: Synthetic oligonucleotide
  Antisense strand to SEQ ID NO: 1666545
uuagagcucagauucacau

SEQ ID NO: 1666547 - RNA, 19 nt, Artificial Sequence
  Description of Artificial Sequence: Synthetic oligonucleotide
  Sense strand starting at position 3715 of SEQ ID NO: 1561368
uuguuuccucacuaguaaa

SEQ ID NO: 1666548 - RNA, 19 nt, Artificial Sequence
  Description of Artificial Sequence: Synthetic oligonucleotide
  Antisense strand to SEQ ID NO: 1666547
uuuacuagugaggaaacaa

SEQ ID NO: 1666549 - RNA, 19 nt, Artificial Sequence
  Description of Artificial Sequence: Synthetic oligonucleotide
  Sense strand starting at position 3794 of SEQ ID NO: 1561368
uacauacggcaauauguaa

SEQ ID NO: 1666550 - RNA, 19 nt, Artificial Sequence
  Description of Artificial Sequence: Synthetic oligonucleotide
  Antisense strand to SEQ ID NO: 1666549
uuacauauugccguaugua

SEQ ID NO: 1666551 - RNA, 19 nt, Artificial Sequence
  Description of Artificial Sequence: Synthetic oligonucleotide
  Sense strand starting at position 3828 of SEQ ID NO: 1561368
gugguuacuauugaagauc

SEQ ID NO: 1666552 - RNA, 19 nt, Artificial Sequence
  Description of Artificial Sequence: Synthetic oligonucleotide
  Antisense strand to SEQ ID NO: 1666551
gaucuucaauaguaaccac

SEQ ID NO: 1666553 - RNA, 19 nt, Artificial Sequence
  Description of Artificial Sequence: Synthetic oligonucleotide
  Sense strand starting at position 3831 of SEQ ID NO: 1561368
guuacuauugaagaucagu

SEQ ID NO: 1666554 - RNA, 19 nt, Artificial Sequence
  Description of Artificial Sequence: Synthetic oligonucleotide
  Antisense strand to SEQ ID NO: 1666553
acugaucuucaauaguaac

SEQ ID NO: 1666555 - RNA, 19 nt, Artificial Sequence
  Description of Artificial Sequence: Synthetic oligonucleotide
  Sense strand starting at position 69 of SEQ ID NO: 1561369
aggguaggucaauggagua

SEQ ID NO: 1666556 - RNA, 19 nt, Artificial Sequence
  Description of Artificial Sequence: Synthetic oligonucleotide
  Antisense strand to SEQ ID NO: 1666555
uacuccauugaccuacccu

SEQ ID NO: 1666557 - RNA, 19 nt, Artificial Sequence
  Description of Artificial Sequence: Synthetic oligonucleotide
  Sense strand starting at position 81 of SEQ ID NO: 1561369
uggaguauacacggaggaa

SEQ ID NO: 1666558 - RNA, 19 nt, Artificial Sequence
  Description of Artificial Sequence: Synthetic oligonucleotide
  Antisense strand to SEQ ID NO: 1666557
uuccuccguguauacucca

SEQ ID NO: 1666559 - RNA, 19 nt, Artificial Sequence
  Description of Artificial Sequence: Synthetic oligonucleotide
  Sense strand starting at position 132 of SEQ ID NO: 1561369
aggaauuagugggauaaau

SEQ ID NO: 1666560 - RNA, 19 nt, Artificial Sequence
  Description of Artificial Sequence: Synthetic oligonucleotide
  Antisense strand to SEQ ID NO: 1666559
auuuaucccacuaauuccu

SEQ ID NO: 1666561 - RNA, 19 nt, Artificial Sequence
  Description of Artificial Sequence: Synthetic oligonucleotide
  Sense strand starting at position 147 of SEQ ID NO: 1561369
aaaugacuauuugggaaga

SEQ ID NO: 1666562 - RNA, 19 nt, Artificial Sequence
  Description of Artificial Sequence: Synthetic oligonucleotide
  Antisense strand to SEQ ID NO: 1666561
ucuucccaaauagucauuu

SEQ ID NO: 1666563 - RNA, 19 nt, Artificial Sequence
  Description of Artificial Sequence: Synthetic oligonucleotide
  Sense strand starting at position 148 of SEQ ID NO: 1561369
aaugacuauuugggaagaa

SEQ ID NO: 1666564 - RNA, 19 nt, Artificial Sequence
  Description of Artificial Sequence: Synthetic oligonucleotide
  Antisense strand to SEQ ID NO: 1666563
uucuucccaaauagucauu

SEQ ID NO: 1666565 - RNA, 19 nt, Artificial Sequence
  Description of Artificial Sequence: Synthetic oligonucleotide
  Sense strand starting at position 731 of SEQ ID NO: 1561369
ggcacaggcaugugaguuu

SEQ ID NO: 1666566 - RNA, 19 nt, Artificial Sequence
  Description of Artificial Sequence: Synthetic oligonucleotide
  Antisense strand to SEQ ID NO: 1666565
aaacucacaugccugugcc

SEQ ID NO: 1666567 - RNA, 19 nt, Artificial Sequence
  Description of Artificial Sequence: Synthetic oligonucleotide
  Sense strand starting at position 2024 of SEQ ID NO: 1561369
ugggaaauguaguccauaa

SEQ ID NO: 1666568 - RNA, 19 nt, Artificial Sequence
  Description of Artificial Sequence: Synthetic oligonucleotide
  Antisense strand to SEQ ID NO: 1666567
uuauggacuacauuuccca

SEQ ID NO: 1666569 - RNA, 19 nt, Artificial Sequence
  Description of Artificial Sequence: Synthetic oligonucleotide
  Sense strand starting at position 2186 of SEQ ID NO: 1561369
aguguuucccugcaggcaa

SEQ ID NO: 1666570 - RNA, 19 nt, Artificial Sequence
  Description of Artificial Sequence: Synthetic oligonucleotide
  Antisense strand to SEQ ID NO: 1666569
uugccugcagggaaacacu

SEQ ID NO: 1666571 - RNA, 19 nt, Artificial Sequence
  Description of Artificial Sequence: Synthetic oligonucleotide
  Sense strand starting at position 2312 of SEQ ID NO: 1561369
gucuccucccacuguuaga

SEQ ID NO: 1666572 - RNA, 19 nt, Artificial Sequence
  Description of Artificial Sequence: Synthetic oligonucleotide
  Antisense strand to SEQ ID NO: 1666571
ucuaacagugggaggagac

SEQ ID NO: 1666573 - RNA, 19 nt, Artificial Sequence
  Description of Artificial Sequence: Synthetic oligonucleotide
  Sense strand starting at position 2516 of SEQ ID NO: 1561369
gcauuugggauccguccau

SEQ ID NO: 1666574 - RNA, 19 nt, Artificial Sequence
  Description of Artificial Sequence: Synthetic oligonucleotide
  Antisense strand to SEQ ID NO: 1666573
auggacggaucccaaaugc

SEQ ID NO: 1666575 - RNA, 19 nt, Artificial Sequence
  Description of Artificial Sequence: Synthetic oligonucleotide
  Sense strand starting at position 2567 of SEQ ID NO: 1561369
ggaaauguagucugaaacg

SEQ ID NO: 1666576 - RNA, 19 nt, Artificial Sequence
  Description of Artificial Sequence: Synthetic oligonucleotide
  Antisense strand to SEQ ID NO: 1666575
cguuucagacuacauuucc

SEQ ID NO: 1666577 - RNA, 19 nt, Artificial Sequence
  Description of Artificial Sequence: Synthetic oligonucleotide
  Sense strand starting at position 2629 of SEQ ID NO: 1561369
gcggguauaucaccugaga

SEQ ID NO: 1666578 - RNA, 19 nt, Artificial Sequence
  Description of Artificial Sequence: Synthetic oligonucleotide
  Antisense strand to SEQ ID NO: 1666577
ucucaggugauauacccgc

SEQ ID NO: 1666579 - RNA, 19 nt, Artificial Sequence
  Description of Artificial Sequence: Synthetic oligonucleotide
  Sense strand starting at position 2834 of SEQ ID NO: 1561369
gggcgauaagagugaaaca

SEQ ID NO: 1666580 - RNA, 19 nt, Artificial Sequence
  Description of Artificial Sequence: Synthetic oligonucleotide
  Antisense strand to SEQ ID NO: 1666579
uguuucacucuuaucgccc

SEQ ID NO: 1666581 - RNA, 19 nt, Artificial Sequence
  Description of Artificial Sequence: Synthetic oligonucleotide
  Sense strand starting at position 2878 of SEQ ID NO: 1561369
auaauaagcccggaaagcu

SEQ ID NO: 1666582 - RNA, 19 nt, Artificial Sequence
  Description of Artificial Sequence: Synthetic oligonucleotide
  Antisense strand to SEQ ID NO: 1666581
agcuuuccgggcuuauuau

SEQ ID NO: 1666583 - RNA, 19 nt, Artificial Sequence
  Description of Artificial Sequence: Synthetic oligonucleotide
  Sense strand starting at position 2972 of SEQ ID NO: 1561369
uccagagcguucuuggaaa

SEQ ID NO: 1666584 - RNA, 19 nt, Artificial Sequence
  Description of Artificial Sequence: Synthetic oligonucleotide
  Antisense strand to SEQ ID NO: 1666583
uuuccaagaacgcucugga

SEQ ID NO: 1666585 - RNA, 19 nt, Artificial Sequence
  Description of Artificial Sequence: Synthetic oligonucleotide
  Sense strand starting at position 2974 of SEQ ID NO: 1561369
cagagcguucuuggaaaua

SEQ ID NO: 1666586 - RNA, 19 nt, Artificial Sequence
  Description of Artificial Sequence: Synthetic oligonucleotide
  Antisense strand to SEQ ID NO: 1666585
uauuuccaagaacgcucug

SEQ ID NO: 1666587 - RNA, 19 nt, Artificial Sequence
  Description of Artificial Sequence: Synthetic oligonucleotide
  Sense strand starting at position 3033 of SEQ ID NO: 1561369
gguguuuacaugugagauu

SEQ ID NO: 1666588 - RNA, 19 nt, Artificial Sequence
  Description of Artificial Sequence: Synthetic oligonucleotide
  Antisense strand to SEQ ID NO: 1666587
aaucucacauguaaacacc

SEQ ID NO: 1666589 - RNA, 19 nt, Artificial Sequence
  Description of Artificial Sequence: Synthetic oligonucleotide
  Sense strand starting at position 3034 of SEQ ID NO: 1561369
guguuuacaugugagauuu

SEQ ID NO: 1666590 - RNA, 19 nt, Artificial Sequence
  Description of Artificial Sequence: Synthetic oligonucleotide
  Antisense strand to SEQ ID NO: 1666589
aaaucucacauguaaacac

SEQ ID NO: 1666591 - RNA, 19 nt, Artificial Sequence
  Description of Artificial Sequence: Synthetic oligonucleotide
  Sense strand starting at position 3131 of SEQ ID NO: 1561369
guagguuccacgggaguga

SEQ ID NO: 1666592 - RNA, 19 nt, Artificial Sequence
  Description of Artificial Sequence: Synthetic oligonucleotide
  Antisense strand to SEQ ID NO: 1666591
ucacucccguggaaccuac

SEQ ID NO: 1666593 - RNA, 19 nt, Artificial Sequence
  Description of Artificial Sequence: Synthetic oligonucleotide
  Sense strand starting at position 3200 of SEQ ID NO: 1561369
uugcguuucguucucugau

SEQ ID NO: 1666594 - RNA, 19 nt, Artificial Sequence
  Description of Artificial Sequence: Synthetic oligonucleotide
  Antisense strand to SEQ ID NO: 1666593
aucagagaacgaaacgcaa

SEQ ID NO: 1666595 - RNA, 19 nt, Artificial Sequence
  Description of Artificial Sequence: Synthetic oligonucleotide
  Sense strand starting at position 3252 of SEQ ID NO: 1561369
ucagaugucucugugagug

SEQ ID NO: 1666596 - RNA, 19 nt, Artificial Sequence
  Description of Artificial Sequence: Synthetic oligonucleotide
  Antisense strand to SEQ ID NO: 1666595
cacucacagagacaucuga

SEQ ID NO: 1666597 - RNA, 19 nt, Artificial Sequence
  Description of Artificial Sequence: Synthetic oligonucleotide
  Sense strand starting at position 3266 of SEQ ID NO: 1561369
gaguguuaccuugguaugg

SEQ ID NO: 1666598 - RNA, 19 nt, Artificial Sequence
  Description of Artificial Sequence: Synthetic oligonucleotide
  Antisense strand to SEQ ID NO: 1666597
ccauaccaagguaacacuc

SEQ ID NO: 1666599 - RNA, 19 nt, Artificial Sequence
  Description of Artificial Sequence: Synthetic oligonucleotide
  Sense strand starting at position 3320 of SEQ ID NO: 1561369
gcaggauauugacaagaug

SEQ ID NO: 1666600 - RNA, 19 nt, Artificial Sequence
  Description of Artificial Sequence: Synthetic oligonucleotide
  Antisense strand to SEQ ID NO: 1666599
caucuugucaauauccugc

SEQ ID NO: 1666601 - RNA, 19 nt, Artificial Sequence
  Description of Artificial Sequence: Synthetic oligonucleotide
  Sense strand starting at position 3328 of SEQ ID NO: 1561369
uugacaagauguucuuaug

SEQ ID NO: 1666602 - RNA, 19 nt, Artificial Sequence
  Description of Artificial Sequence: Synthetic oligonucleotide
  Antisense strand to SEQ ID NO: 1666601
cauaagaacaucuugucaa

SEQ ID NO: 1666603 - RNA, 19 nt, Artificial Sequence
  Description of Artificial Sequence: Synthetic oligonucleotide
  Sense strand starting at position 3331 of SEQ ID NO: 1561369
acaagauguucuuaugauc

SEQ ID NO: 1666604 - RNA, 19 nt, Artificial Sequence
  Description of Artificial Sequence: Synthetic oligonucleotide
  Antisense strand to SEQ ID NO: 1666603
gaucauaagaacaucuugu

SEQ ID NO: 1666605 - RNA, 19 nt, Artificial Sequence
  Description of Artificial Sequence: Synthetic oligonucleotide
  Sense strand starting at position 3394 of SEQ ID NO: 1561369
cuuggaccuuugccaagaa

SEQ ID NO: 1666606 - RNA, 19 nt, Artificial Sequence
  Description of Artificial Sequence: Synthetic oligonucleotide
  Antisense strand to SEQ ID NO: 1666605
uucuuggcaaagguccaag

SEQ ID NO: 1666607 - RNA, 19 nt, Artificial Sequence
  Description of Artificial Sequence: Synthetic oligonucleotide
  Sense strand starting at position 3443 of SEQ ID NO: 1561369
gccuuugcccaguaggaca

SEQ ID NO: 1666608 - RNA, 19 nt, Artificial Sequence
  Description of Artificial Sequence: Synthetic oligonucleotide
  Antisense strand to SEQ ID NO: 1666607
uguccuacugggcaaaggc

SEQ ID NO: 1666609 - RNA, 19 nt, Artificial Sequence
  Description of Artificial Sequence: Synthetic oligonucleotide
  Sense strand starting at position 3456 of SEQ ID NO: 1561369
aggacaugaugagaauguu

SEQ ID NO: 1666610 - RNA, 19 nt, Artificial Sequence
  Description of Artificial Sequence: Synthetic oligonucleotide
  Antisense strand to SEQ ID NO: 1666609
aacauucucaucauguccu

SEQ ID NO: 1666611 - RNA, 19 nt, Artificial Sequence
  Description of Artificial Sequence: Synthetic oligonucleotide
  Sense strand starting at position 3459 of SEQ ID NO: 1561369
acaugaugagaauguuucu

SEQ ID NO: 1666612 - RNA, 19 nt, Artificial Sequence
  Description of Artificial Sequence: Synthetic oligonucleotide
  Antisense strand to SEQ ID NO: 1666611
agaaacauucucaucaugu

SEQ ID NO: 1666613 - RNA, 19 nt, Artificial Sequence
  Description of Artificial Sequence: Synthetic oligonucleotide
  Sense strand starting at position 3462 of SEQ ID NO: 1561369
ugaugagaauguuucuuua

SEQ ID NO: 1666614 - RNA, 19 nt, Artificial Sequence
  Description of Artificial Sequence: Synthetic oligonucleotide
  Antisense strand to SEQ ID NO: 1666613
uaaagaaacauucucauca

SEQ ID NO: 1666615 - RNA, 19 nt, Artificial Sequence
  Description of Artificial Sequence: Synthetic oligonucleotide
  Sense strand starting at position 3508 of SEQ ID NO: 1561369
ggugguuaggcaggauauu

SEQ ID NO: 1666616 - RNA, 19 nt, Artificial Sequence
  Description of Artificial Sequence: Synthetic oligonucleotide
  Antisense strand to SEQ ID NO: 1666615
aauauccugccuaaccacc

SEQ ID NO: 1666617 - RNA, 19 nt, Artificial Sequence
  Description of Artificial Sequence: Synthetic oligonucleotide
  Sense strand starting at position 3626 of SEQ ID NO: 1561369
gugagaugcuuugcccuaa

SEQ ID NO: 1666618 - RNA, 19 nt, Artificial Sequence
  Description of Artificial Sequence: Synthetic oligonucleotide
  Antisense strand to SEQ ID NO: 1666617
uuagggcaaagcaucucac

SEQ ID NO: 1666619 - RNA, 19 nt, Artificial Sequence
  Description of Artificial Sequence: Synthetic oligonucleotide
  Sense strand starting at position 3627 of SEQ ID NO: 1561369
ugagaugcuuugcccuaaa

SEQ ID NO: 1666620 - RNA, 19 nt, Artificial Sequence
  Description of Artificial Sequence: Synthetic oligonucleotide
  Antisense strand to SEQ ID NO: 1666619
uuuagggcaaagcaucuca

SEQ ID NO: 1666621 - RNA, 19 nt, Artificial Sequence
  Description of Artificial Sequence: Synthetic oligonucleotide
  Sense strand starting at position 3665 of SEQ ID NO: 1561369
gagagaaucauuggugggu

SEQ ID NO: 1666622 - RNA, 19 nt, Artificial Sequence
  Description of Artificial Sequence: Synthetic oligonucleotide
  Antisense strand to SEQ ID NO: 1666621
acccaccaaugauucucuc

SEQ ID NO: 1666623 - RNA, 19 nt, Artificial Sequence
  Description of Artificial Sequence: Synthetic oligonucleotide
  Sense strand starting at position 3669 of SEQ ID NO: 1561369
gaaucauugguggguguga

SEQ ID NO: 1666624 - RNA, 19 nt, Artificial Sequence
  Description of Artificial Sequence: Synthetic oligonucleotide
  Antisense strand to SEQ ID NO: 1666623
ucacacccaccaaugauuc

SEQ ID NO: 1666625 - RNA, 19 nt, Artificial Sequence
  Description of Artificial Sequence: Synthetic oligonucleotide
  Sense strand starting at position 3695 of SEQ ID NO: 1561369
ugugauuguguggacucau

SEQ ID NO: 1666626 - RNA, 19 nt, Artificial Sequence
  Description of Artificial Sequence: Synthetic oligonucleotide
  Antisense strand to SEQ ID NO: 1666625
augaguccacacaaucaca

SEQ ID NO: 1666627 - RNA, 19 nt, Artificial Sequence
  Description of Artificial Sequence: Synthetic oligonucleotide
  Sense strand starting at position 3774 of SEQ ID NO: 1561369
ugacauggaugagauugua

SEQ ID NO: 1666628 - RNA, 19 nt, Artificial Sequence
  Description of Artificial Sequence: Synthetic oligonucleotide
  Antisense strand to SEQ ID NO: 1666627
uacaaucucauccauguca

SEQ ID NO: 1666629 - RNA, 19 nt, Artificial Sequence
  Description of Artificial Sequence: Synthetic oligonucleotide
  Sense strand starting at position 3777 of SEQ ID NO: 1561369
cauggaugagauuguaugu

SEQ ID NO: 1666630 - RNA, 19 nt, Artificial Sequence
  Description of Artificial Sequence: Synthetic oligonucleotide
  Antisense strand to SEQ ID NO: 1666629
acauacaaucucauccaug

SEQ ID NO: 1666631 - RNA, 19 nt, Artificial Sequence
  Description of Artificial Sequence: Synthetic oligonucleotide
  Sense strand starting at position 3782 of SEQ ID NO: 1561369
augagauuguauguuucua

SEQ ID NO: 1666632 - RNA, 19 nt, Artificial Sequence
  Description of Artificial Sequence: Synthetic oligonucleotide
  Antisense strand to SEQ ID NO: 1666631
uagaaacauacaaucucau

SEQ ID NO: 1666633 - RNA, 19 nt, Artificial Sequence
  Description of Artificial Sequence: Synthetic oligonucleotide
  Sense strand starting at position 3784 of SEQ ID NO: 1561369
gagauuguauguuucuaug

SEQ ID NO: 1666634 - RNA, 19 nt, Artificial Sequence
  Description of Artificial Sequence: Synthetic oligonucleotide
  Antisense strand to SEQ ID NO: 1666633
cauagaaacauacaaucuc

SEQ ID NO: 1666635 - RNA, 19 nt, Artificial Sequence
  Description of Artificial Sequence: Synthetic oligonucleotide
  Sense strand starting at position 10 of SEQ ID NO: 1561370
caguauagcuagccuaaga

SEQ ID NO: 1666636 - RNA, 19 nt, Artificial Sequence
  Description of Artificial Sequence: Synthetic oligonucleotide
  Antisense strand to SEQ ID NO: 1666635
ucuuaggcuagcuauacug

SEQ ID NO: 1666637 - RNA, 19 nt, Artificial Sequence
  Description of Artificial Sequence: Synthetic oligonucleotide
  Sense strand starting at position 56 of SEQ ID NO: 1561370
acaguaugaggccagguau

SEQ ID NO: 1666638 - RNA, 19 nt, Artificial Sequence
  Description of Artificial Sequence: Synthetic oligonucleotide
  Antisense strand to SEQ ID NO: 1666637
auaccuggccucauacugu

SEQ ID NO: 1666639 - RNA, 19 nt, Artificial Sequence
  Description of Artificial Sequence: Synthetic oligonucleotide
  Sense strand starting at position 401 of SEQ ID NO: 1561370
acuuaaagugccugucuuu

SEQ ID NO: 1666640 - RNA, 19 nt, Artificial Sequence
  Description of Artificial Sequence: Synthetic oligonucleotide
  Antisense strand to SEQ ID NO: 1666639
aaagacaggcacuuuaagu

SEQ ID NO: 1666641 - RNA, 19 nt, Artificial Sequence
  Description of Artificial Sequence: Synthetic oligonucleotide
  Sense strand starting at position 494 of SEQ ID NO: 1561370
cgcauauauucuuugugga

SEQ ID NO: 1666642 - RNA, 19 nt, Artificial Sequence
  Description of Artificial Sequence: Synthetic oligonucleotide
  Antisense strand to SEQ ID NO: 1666641
uccacaaagaauauaugcg

SEQ ID NO: 1666643 - RNA, 19 nt, Artificial Sequence
  Description of Artificial Sequence: Synthetic oligonucleotide
  Sense strand starting at position 497 of SEQ ID NO: 1561370
auauauucuuuguggaaac

SEQ ID NO: 1666644 - RNA, 19 nt, Artificial Sequence
  Description of Artificial Sequence: Synthetic oligonucleotide
  Antisense strand to SEQ ID NO: 1666643
guuuccacaaagaauauau

SEQ ID NO: 1666645 - RNA, 19 nt, Artificial Sequence
  Description of Artificial Sequence: Synthetic oligonucleotide
  Sense strand starting at position 534 of SEQ ID NO: 1561370
acugaaaucugaugcauga

SEQ ID NO: 1666646 - RNA, 19 nt, Artificial Sequence
  Description of Artificial Sequence: Synthetic oligonucleotide
  Antisense strand to SEQ ID NO: 1666645
ucaugcaucagauuucagu

SEQ ID NO: 1666647 - RNA, 19 nt, Artificial Sequence
  Description of Artificial Sequence: Synthetic oligonucleotide
  Sense strand starting at position 762 of SEQ ID NO: 1561370
gaauaacagucuuagguuu

SEQ ID NO: 1666648 - RNA, 19 nt, Artificial Sequence
  Description of Artificial Sequence: Synthetic oligonucleotide
  Antisense strand to SEQ ID NO: 1666647
aaaccuaagacuguuauuc

SEQ ID NO: 1666649 - RNA, 19 nt, Artificial Sequence
  Description of Artificial Sequence: Synthetic oligonucleotide
  Sense strand starting at position 827 of SEQ ID NO: 1561370
accuaacagugagaaacuu

SEQ ID NO: 1666650 - RNA, 19 nt, Artificial Sequence
  Description of Artificial Sequence: Synthetic oligonucleotide
  Antisense strand to SEQ ID NO: 1666649
aaguuucucacuguuaggu

SEQ ID NO: 1666651 - RNA, 19 nt, Artificial Sequence
  Description of Artificial Sequence: Synthetic oligonucleotide
  Sense strand starting at position 1235 of SEQ ID NO: 1561370
gcuuucuuaugagaaagaa

SEQ ID NO: 1666652 - RNA, 19 nt, Artificial Sequence
  Description of Artificial Sequence: Synthetic oligonucleotide
  Antisense strand to SEQ ID NO: 1666651
uucuuucucauaagaaagc

SEQ ID NO: 1666653 - RNA, 19 nt, Artificial Sequence
  Description of Artificial Sequence: Synthetic oligonucleotide
  Sense strand starting at position 1303 of SEQ ID NO: 1561370
gcuaacagauauuaagcua

SEQ ID NO: 1666654 - RNA, 19 nt, Artificial Sequence
  Description of Artificial Sequence: Synthetic oligonucleotide
  Antisense strand to SEQ ID NO: 1666653
uagcuuaauaucuguuagc

SEQ ID NO: 1666655 - RNA, 19 nt, Artificial Sequence
  Description of Artificial Sequence: Synthetic oligonucleotide
  Sense strand starting at position 1349 of SEQ ID NO: 1561370
agaaaucucucgucaucua

SEQ ID NO: 1666656 - RNA, 19 nt, Artificial Sequence
  Description of Artificial Sequence: Synthetic oligonucleotide
  Antisense strand to SEQ ID NO: 1666655
uagaugacgagagauuucu

SEQ ID NO: 1666657 - RNA, 19 nt, Artificial Sequence
  Description of Artificial Sequence: Synthetic oligonucleotide
  Sense strand starting at position 1401 of SEQ ID NO: 1561370
uuaaguaaauuuggccaau

SEQ ID NO: 1666658 - RNA, 19 nt, Artificial Sequence
  Description of Artificial Sequence: Synthetic oligonucleotide
  Antisense strand to SEQ ID NO: 1666657
auuggccaaauuuacuuaa

SEQ ID NO: 1666659 - RNA, 19 nt, Artificial Sequence
  Description of Artificial Sequence: Synthetic oligonucleotide
  Sense strand starting at position 1464 of SEQ ID NO: 1561370
guugcaaagcuagauaaua

SEQ ID NO: 1666660 - RNA, 19 nt, Artificial Sequence
  Description of Artificial Sequence: Synthetic oligonucleotide
  Antisense strand to SEQ ID NO: 1666659
uauuaucuagcuuugcaac

SEQ ID NO: 1666661 - RNA, 19 nt, Artificial Sequence
  Description of Artificial Sequence: Synthetic oligonucleotide
  Sense strand starting at position 1523 of SEQ ID NO: 1561370
aguuaucuugcauacugua

SEQ ID NO: 1666662 - RNA, 19 nt, Artificial Sequence
  Description of Artificial Sequence: Synthetic oligonucleotide
  Antisense strand to SEQ ID NO: 1666661
uacaguaugcaagauaacu

SEQ ID NO: 1666663 - RNA, 19 nt, Artificial Sequence
  Description of Artificial Sequence: Synthetic oligonucleotide
  Sense strand starting at position 1636 of SEQ ID NO: 1561370
ccuggacuguuugggauuu

SEQ ID NO: 1666664 - RNA, 19 nt, Artificial Sequence
  Description of Artificial Sequence: Synthetic oligonucleotide
  Antisense strand to SEQ ID NO: 1666663
aaaucccaaacaguccagg

SEQ ID NO: 1666665 - RNA, 19 nt, Artificial Sequence
  Description of Artificial Sequence: Synthetic oligonucleotide
  Sense strand starting at position 2184 of SEQ ID NO: 1561370
ggagccuauguccgagaga

SEQ ID NO: 1666666 - RNA, 19 nt, Artificial Sequence
  Description of Artificial Sequence: Synthetic oligonucleotide
  Antisense strand to SEQ ID NO: 1666665
ucucucggacauaggcucc

SEQ ID NO: 1666667 - RNA, 19 nt, Artificial Sequence
  Description of Artificial Sequence: Synthetic oligonucleotide
  Sense strand starting at position 2187 of SEQ ID NO: 1561370
gccuauguccgagagacag

SEQ ID NO: 1666668 - RNA, 19 nt, Artificial Sequence
  Description of Artificial Sequence: Synthetic oligonucleotide
  Antisense strand to SEQ ID NO: 1666667
cugucucucggacauaggc

SEQ ID NO: 1666669 - RNA, 19 nt, Artificial Sequence
  Description of Artificial Sequence: Synthetic oligonucleotide
  Sense strand starting at position 2498 of SEQ ID NO: 1561370
ccgggucucuuuagggaug

SEQ ID NO: 1666670 - RNA, 19 nt, Artificial Sequence
  Description of Artificial Sequence: Synthetic oligonucleotide
  Antisense strand to SEQ ID NO: 1666669
caucccuaaagagacccgg

SEQ ID NO: 1666671 - RNA, 19 nt, Artificial Sequence
  Description of Artificial Sequence: Synthetic oligonucleotide
  Sense strand starting at position 2503 of SEQ ID NO: 1561370
ucucuuuagggaugcucaa

SEQ ID NO: 1666672 - RNA, 19 nt, Artificial Sequence
  Description of Artificial Sequence: Synthetic oligonucleotide
  Antisense strand to SEQ ID NO: 1666671
uugagcaucccuaaagaga

SEQ ID NO: 1666673 - RNA, 19 nt, Artificial Sequence
  Description of Artificial Sequence: Synthetic oligonucleotide
  Sense strand starting at position 2566 of SEQ ID NO: 1561370
accuuuauccaugggcuua

SEQ ID NO: 1666674 - RNA, 19 nt, Artificial Sequence
  Description of Artificial Sequence: Synthetic oligonucleotide
  Antisense strand to SEQ ID NO: 1666673
uaagcccauggauaaaggu

SEQ ID NO: 1666675 - RNA, 19 nt, Artificial Sequence
  Description of Artificial Sequence: Synthetic oligonucleotide
  Sense strand starting at position 2568 of SEQ ID NO: 1561370
cuuuauccaugggcuuaau

SEQ ID NO: 1666676 - RNA, 19 nt, Artificial Sequence
  Description of Artificial Sequence: Synthetic oligonucleotide
  Antisense strand to SEQ ID NO: 1666675
auuaagcccauggauaaag

SEQ ID NO: 1666677 - RNA, 19 nt, Artificial Sequence
  Description of Artificial Sequence: Synthetic oligonucleotide
  Sense strand starting at position 2881 of SEQ ID NO: 1561370
cuucguuacguggaaguga

SEQ ID NO: 1666678 - RNA, 19 nt, Artificial Sequence
  Description of Artificial Sequence: Synthetic oligonucleotide
  Antisense strand to SEQ ID NO: 1666677
ucacuuccacguaacgaag

SEQ ID NO: 1666679 - RNA, 19 nt, Artificial Sequence
  Description of Artificial Sequence: Synthetic oligonucleotide
  Sense strand starting at position 2882 of SEQ ID NO: 1561370
uucguuacguggaagugau

SEQ ID NO: 1666680 - RNA, 19 nt, Artificial Sequence
  Description of Artificial Sequence: Synthetic oligonucleotide
  Antisense strand to SEQ ID NO: 1666679
aucacuuccacguaacgaa

SEQ ID NO: 1666681 - RNA, 19 nt, Artificial Sequence
  Description of Artificial Sequence: Synthetic oligonucleotide
  Sense strand starting at position 2883 of SEQ ID NO: 1561370
ucguuacguggaagugauc

SEQ ID NO: 1666682 - RNA, 19 nt, Artificial Sequence
  Description of Artificial Sequence: Synthetic oligonucleotide
  Antisense strand to SEQ ID NO: 1666681
gaucacuuccacguaacga

SEQ ID NO: 1666683 - RNA, 19 nt, Artificial Sequence
  Description of Artificial Sequence: Synthetic oligonucleotide
  Sense strand starting at position 2886 of SEQ ID NO: 1561370
uuacguggaagugaucgua

SEQ ID NO: 1666684 - RNA, 19 nt, Artificial Sequence
  Description of Artificial Sequence: Synthetic oligonucleotide
  Antisense strand to SEQ ID NO: 1666683
uacgaucacuuccacguaa

SEQ ID NO: 1666685 - RNA, 19 nt, Artificial Sequence
  Description of Artificial Sequence: Synthetic oligonucleotide
  Sense strand starting at position 2889 of SEQ ID NO: 1561370
cguggaagugaucguaaag

SEQ ID NO: 1666686 - RNA, 19 nt, Artificial Sequence
  Description of Artificial Sequence: Synthetic oligonucleotide
  Antisense strand to SEQ ID NO: 1666685
cuuuacgaucacuuccacg

SEQ ID NO: 1666687 - RNA, 19 nt, Artificial Sequence
  Description of Artificial Sequence: Synthetic oligonucleotide
  Sense strand starting at position 2895 of SEQ ID NO: 1561370
agugaucguaaagaucaua

SEQ ID NO: 1666688 - RNA, 19 nt, Artificial Sequence
  Description of Artificial Sequence: Synthetic oligonucleotide
  Antisense strand to SEQ ID NO: 1666687
uaugaucuuuacgaucacu

SEQ ID NO: 1666689 - RNA, 19 nt, Artificial Sequence
  Description of Artificial Sequence: Synthetic oligonucleotide
  Sense strand starting at position 2967 of SEQ ID NO: 1561370
guuugucuugcugucccaa

SEQ ID NO: 1666690 - RNA, 19 nt, Artificial Sequence
  Description of Artificial Sequence: Synthetic oligonucleotide
  Antisense strand to SEQ ID NO: 1666689
uugggacagcaagacaaac

SEQ ID NO: 1666691 - RNA, 19 nt, Artificial Sequence
  Description of Artificial Sequence: Synthetic oligonucleotide
  Sense strand starting at position 3041 of SEQ ID NO: 1561370
cuugguguucacgggucaa

SEQ ID NO: 1666692 - RNA, 19 nt, Artificial Sequence
  Description of Artificial Sequence: Synthetic oligonucleotide
  Antisense strand to SEQ ID NO: 1666691
uugacccgugaacaccaag

SEQ ID NO: 1666693 - RNA, 19 nt, Artificial Sequence
  Description of Artificial Sequence: Synthetic oligonucleotide
  Sense strand starting at position 3045 of SEQ ID NO: 1561370
guguucacgggucaacuaa

SEQ ID NO: 1666694 - RNA, 19 nt, Artificial Sequence
  Description of Artificial Sequence: Synthetic oligonucleotide
  Antisense strand to SEQ ID NO: 1666693
uuaguugacccgugaacac

SEQ ID NO: 1666695 - RNA, 19 nt, Artificial Sequence
  Description of Artificial Sequence: Synthetic oligonucleotide
  Sense strand starting at position 3129 of SEQ ID NO: 1561370
aaauaagaugugugaaucu

SEQ ID NO: 1666696 - RNA, 19 nt, Artificial Sequence
  Description of Artificial Sequence: Synthetic oligonucleotide
  Antisense strand to SEQ ID NO: 1666695
agauucacacaucuuauuu

SEQ ID NO: 1666697 - RNA, 19 nt, Artificial Sequence
  Description of Artificial Sequence: Synthetic oligonucleotide
  Sense strand starting at position 3138 of SEQ ID NO: 1561370
gugugaaucuaagacauag

SEQ ID NO: 1666698 - RNA, 19 nt, Artificial Sequence
  Description of Artificial Sequence: Synthetic oligonucleotide
  Antisense strand to SEQ ID NO: 1666697
cuaugucuuagauucacac

SEQ ID NO: 1666699 - RNA, 19 nt, Artificial Sequence
  Description of Artificial Sequence: Synthetic oligonucleotide
  Sense strand starting at position 3222 of SEQ ID NO: 1561370
acgggaggcucacucuauu

SEQ ID NO: 1666700 - RNA, 19 nt, Artificial Sequence
  Description of Artificial Sequence: Synthetic oligonucleotide
  Antisense strand to SEQ ID NO: 1666699
aauagagugagccucccgu

SEQ ID NO: 1666701 - RNA, 19 nt, Artificial Sequence
  Description of Artificial Sequence: Synthetic oligonucleotide
  Sense strand starting at position 3271 of SEQ ID NO: 1561370
gucacuaguucccugguau

SEQ ID NO: 1666702 - RNA, 19 nt, Artificial Sequence
  Description of Artificial Sequence: Synthetic oligonucleotide
  Antisense strand to SEQ ID NO: 1666701
auaccagggaacuagugac

SEQ ID NO: 1666703 - RNA, 19 nt, Artificial Sequence
  Description of Artificial Sequence: Synthetic oligonucleotide
  Sense strand starting at position 3272 of SEQ ID NO: 1561370
ucacuaguucccugguauu

SEQ ID NO: 1666704 - RNA, 19 nt, Artificial Sequence
  Description of Artificial Sequence: Synthetic oligonucleotide
  Antisense strand to SEQ ID NO: 1666703
aauaccagggaacuaguga

SEQ ID NO: 1666705 - RNA, 19 nt, Artificial Sequence
  Description of Artificial Sequence: Synthetic oligonucleotide
  Sense strand starting at position 3282 of SEQ ID NO: 1561370
ccugguauucuuuauauau

SEQ ID NO: 1666706 - RNA, 19 nt, Artificial Sequence
  Description of Artificial Sequence: Synthetic oligonucleotide
  Antisense strand to SEQ ID NO: 1666705
auauauaaagaauaccagg

SEQ ID NO: 1666707 - RNA, 19 nt, Artificial Sequence
  Description of Artificial Sequence: Synthetic oligonucleotide
  Sense strand starting at position 3304 of SEQ ID NO: 1561370
gcacaugugcagucaugca

SEQ ID NO: 1666708 - RNA, 19 nt, Artificial Sequence
  Description of Artificial Sequence: Synthetic oligonucleotide
  Antisense strand to SEQ ID NO: 1666707
ugcaugacugcacaugugc

SEQ ID NO: 1666709 - RNA, 19 nt, Artificial Sequence
  Description of Artificial Sequence: Synthetic oligonucleotide
  Sense strand starting at position 3414 of SEQ ID NO: 1561370
ugauguuguaacugucaca

SEQ ID NO: 1666710 - RNA, 19 nt, Artificial Sequence
  Description of Artificial Sequence: Synthetic oligonucleotide
  Antisense strand to SEQ ID NO: 1666709
ugugacaguuacaacauca

SEQ ID NO: 1666711 - RNA, 19 nt, Artificial Sequence
  Description of Artificial Sequence: Synthetic oligonucleotide
  Sense strand starting at position 3833 of SEQ ID NO: 1561370
aguacaauuuaucuguguu

SEQ ID NO: 1666712 - RNA, 19 nt, Artificial Sequence
  Description of Artificial Sequence: Synthetic oligonucleotide
  Antisense strand to SEQ ID NO: 1666711
aacacagauaaauuguacu

SEQ ID NO: 1666713 - RNA, 19 nt, Artificial Sequence
  Description of Artificial Sequence: Synthetic oligonucleotide
  Sense strand starting at position 3856 of SEQ ID NO: 1561370
gcuaaauguucuuacaaag

SEQ ID NO: 1666714 - RNA, 19 nt, Artificial Sequence
  Description of Artificial Sequence: Synthetic oligonucleotide
  Antisense strand to SEQ ID NO: 1666713
cuuuguaagaacauuuagc

SEQ ID NO: 1666715 - RNA, 19 nt, Artificial Sequence
  Description of Artificial Sequence: Synthetic oligonucleotide
  Sense strand starting at position 14 of SEQ ID NO: 1561371
ccucaagaaugacucagua

SEQ ID NO: 1666716 - RNA, 19 nt, Artificial Sequence
  Description of Artificial Sequence: Synthetic oligonucleotide
  Antisense strand to SEQ ID NO: 1666715
uacugagucauucuugagg

SEQ ID NO: 1666717 - RNA, 19 nt, Artificial Sequence
  Description of Artificial Sequence: Synthetic oligonucleotide
  Sense strand starting at position 28 of SEQ ID NO: 1561371
caguauagcuagccuaaga

SEQ ID NO: 1666718 - RNA, 19 nt, Artificial Sequence
  Description of Artificial Sequence: Synthetic oligonucleotide
  Antisense strand to SEQ ID NO: 1666717
ucuuaggcuagcuauacug

SEQ ID NO: 1666719 - RNA, 19 nt, Artificial Sequence
  Description of Artificial Sequence: Synthetic oligonucleotide
  Sense strand starting at position 74 of SEQ ID NO: 1561371
acaguaugaggccagguau

SEQ ID NO: 1666720 - RNA, 19 nt, Artificial Sequence
  Description of Artificial Sequence: Synthetic oligonucleotide
  Antisense strand to SEQ ID NO: 1666719
auaccuggccucauacugu

SEQ ID NO: 1666721 - RNA, 19 nt, Artificial Sequence
  Description of Artificial Sequence: Synthetic oligonucleotide
  Sense strand starting at position 419 of SEQ ID NO: 1561371
acuuaaagugccugucuuu

SEQ ID NO: 1666722 - RNA, 19 nt, Artificial Sequence
  Description of Artificial Sequence: Synthetic oligonucleotide
  Antisense strand to SEQ ID NO: 1666721
aaagacaggcacuuuaagu

SEQ ID NO: 1666723 - RNA, 19 nt, Artificial Sequence
  Description of Artificial Sequence: Synthetic oligonucleotide
  Sense strand starting at position 512 of SEQ ID NO: 1561371
cgcauauauucuuugugga

SEQ ID NO: 1666724 - RNA, 19 nt, Artificial Sequence
  Description of Artificial Sequence: Synthetic oligonucleotide
  Antisense strand to SEQ ID NO: 1666723
uccacaaagaauauaugcg

SEQ ID NO: 1666725 - RNA, 19 nt, Artificial Sequence
  Description of Artificial Sequence: Synthetic oligonucleotide
  Sense strand starting at position 552 of SEQ ID NO: 1561371
acugaaaucugaugcauga

SEQ ID NO: 1666726 - RNA, 19 nt, Artificial Sequence
  Description of Artificial Sequence: Synthetic oligonucleotide
  Antisense strand to SEQ ID NO: 1666725
ucaugcaucagauuucagu

SEQ ID NO: 1666727 - RNA, 19 nt, Artificial Sequence
  Description of Artificial Sequence: Synthetic oligonucleotide
  Sense strand starting at position 780 of SEQ ID NO: 1561371
gaauaacagucuuagguuu

SEQ ID NO: 1666728 - RNA, 19 nt, Artificial Sequence
  Description of Artificial Sequence: Synthetic oligonucleotide
  Antisense strand to SEQ ID NO: 1666727
aaaccuaagacuguuauuc

SEQ ID NO: 1666729 - RNA, 19 nt, Artificial Sequence
  Description of Artificial Sequence: Synthetic oligonucleotide
  Sense strand starting at position 845 of SEQ ID NO: 1561371
accuaacagugagaaacuu

SEQ ID NO: 1666730 - RNA, 19 nt, Artificial Sequence
  Description of Artificial Sequence: Synthetic oligonucleotide
  Antisense strand to SEQ ID NO: 1666729
aaguuucucacuguuaggu

SEQ ID NO: 1666731 - RNA, 19 nt, Artificial Sequence
  Description of Artificial Sequence: Synthetic oligonucleotide
  Sense strand starting at position 1253 of SEQ ID NO: 1561371
gcuuucuuaugagaaagaa

SEQ ID NO: 1666732 - RNA, 19 nt, Artificial Sequence
  Description of Artificial Sequence: Synthetic oligonucleotide
  Antisense strand to SEQ ID NO: 1666731
uucuuucucauaagaaagc

SEQ ID NO: 1666733 - RNA, 19 nt, Artificial Sequence
  Description of Artificial Sequence: Synthetic oligonucleotide
  Sense strand starting at position 1321 of SEQ ID NO: 1561371
gcuaacagauauuaagcua

SEQ ID NO: 1666734 - RNA, 19 nt, Artificial Sequence
  Description of Artificial Sequence: Synthetic oligonucleotide
  Antisense strand to SEQ ID NO: 1666733
uagcuuaauaucuguuagc

SEQ ID NO: 1666735 - RNA, 19 nt, Artificial Sequence
  Description of Artificial Sequence: Synthetic oligonucleotide
  Sense strand starting at position 1367 of SEQ ID NO: 1561371
agaaaucucucgucaucua

SEQ ID NO: 1666736 - RNA, 19 nt, Artificial Sequence
  Description of Artificial Sequence: Synthetic oligonucleotide
  Antisense strand to SEQ ID NO: 1666735
uagaugacgagagauuucu

SEQ ID NO: 1666737 - RNA, 19 nt, Artificial Sequence
  Description of Artificial Sequence: Synthetic oligonucleotide
  Sense strand starting at position 1419 of SEQ ID NO: 1561371
uuaaguaaauuuggccaau

SEQ ID NO: 1666738 - RNA, 19 nt, Artificial Sequence
  Description of Artificial Sequence: Synthetic oligonucleotide
  Antisense strand to SEQ ID NO: 1666737
auuggccaaauuuacuuaa

SEQ ID NO: 1666739 - RNA, 19 nt, Artificial Sequence
  Description of Artificial Sequence: Synthetic oligonucleotide
  Sense strand starting at position 1482 of SEQ ID NO: 1561371
guugcaaagcuagauaaua

SEQ ID NO: 1666740 - RNA, 19 nt, Artificial Sequence
  Description of Artificial Sequence: Synthetic oligonucleotide
  Antisense strand to SEQ ID NO: 1666739
uauuaucuagcuuugcaac

SEQ ID NO: 1666741 - RNA, 19 nt, Artificial Sequence
  Description of Artificial Sequence: Synthetic oligonucleotide
  Sense strand starting at position 1541 of SEQ ID NO: 1561371
aguuaucuugcauacugua

SEQ ID NO: 1666742 - RNA, 19 nt, Artificial Sequence
  Description of Artificial Sequence: Synthetic oligonucleotide
  Antisense strand to SEQ ID NO: 1666741
uacaguaugcaagauaacu

SEQ ID NO: 1666743 - RNA, 19 nt, Artificial Sequence
  Description of Artificial Sequence: Synthetic oligonucleotide
  Sense strand starting at position 1654 of SEQ ID NO: 1561371
ccuggacuguuugggauuu

SEQ ID NO: 1666744 - RNA, 19 nt, Artificial Sequence
  Description of Artificial Sequence: Synthetic oligonucleotide
  Antisense strand to SEQ ID NO: 1666743
aaaucccaaacaguccagg

SEQ ID NO: 1666745 - RNA, 19 nt, Artificial Sequence
  Description of Artificial Sequence: Synthetic oligonucleotide
  Sense strand starting at position 2202 of SEQ ID NO: 1561371
ggagccuauguccgagaga

SEQ ID NO: 1666746 - RNA, 19 nt, Artificial Sequence
  Description of Artificial Sequence: Synthetic oligonucleotide
  Antisense strand to SEQ ID NO: 1666745
ucucucggacauaggcucc

SEQ ID NO: 1666747 - RNA, 19 nt, Artificial Sequence
  Description of Artificial Sequence: Synthetic oligonucleotide
  Sense strand starting at position 2205 of SEQ ID NO: 1561371
gccuauguccgagagacag

SEQ ID NO: 1666748 - RNA, 19 nt, Artificial Sequence
  Description of Artificial Sequence: Synthetic oligonucleotide
  Antisense strand to SEQ ID NO: 1666747
cugucucucggacauaggc

SEQ ID NO: 1666749 - RNA, 19 nt, Artificial Sequence
  Description of Artificial Sequence: Synthetic oligonucleotide
  Sense strand starting at position 2516 of SEQ ID NO: 1561371
ccgggucucuuuagggaug

SEQ ID NO: 1666750 - RNA, 19 nt, Artificial Sequence
  Description of Artificial Sequence: Synthetic oligonucleotide
  Antisense strand to SEQ ID NO: 1666749
caucccuaaagagacccgg

SEQ ID NO: 1666751 - RNA, 19 nt, Artificial Sequence
  Description of Artificial Sequence: Synthetic oligonucleotide
  Sense strand starting at position 2521 of SEQ ID NO: 1561371
ucucuuuagggaugcucaa

SEQ ID NO: 1666752 - RNA, 19 nt, Artificial Sequence
  Description of Artificial Sequence: Synthetic oligonucleotide
  Antisense strand to SEQ ID NO: 1666751
uugagcaucccuaaagaga

SEQ ID NO: 1666753 - RNA, 19 nt, Artificial Sequence
  Description of Artificial Sequence: Synthetic oligonucleotide
  Sense strand starting at position 2584 of SEQ ID NO: 1561371
accuuuauccaugggcuua

SEQ ID NO: 1666754 - RNA, 19 nt, Artificial Sequence
  Description of Artificial Sequence: Synthetic oligonucleotide
  Antisense strand to SEQ ID NO: 1666753
uaagcccauggauaaaggu

SEQ ID NO: 1666755 - RNA, 19 nt, Artificial Sequence
  Description of Artificial Sequence: Synthetic oligonucleotide
  Sense strand starting at position 2586 of SEQ ID NO: 1561371
cuuuauccaugggcuuaau

SEQ ID NO: 1666756 - RNA, 19 nt, Artificial Sequence
  Description of Artificial Sequence: Synthetic oligonucleotide
  Antisense strand to SEQ ID NO: 1666755
auuaagcccauggauaaag

SEQ ID NO: 1666757 - RNA, 19 nt, Artificial Sequence
  Description of Artificial Sequence: Synthetic oligonucleotide
  Sense strand starting at position 2899 of SEQ ID NO: 1561371
cuucguuacguggaaguga

SEQ ID NO: 1666758 - RNA, 19 nt, Artificial Sequence
  Description of Artificial Sequence: Synthetic oligonucleotide
  Antisense strand to SEQ ID NO: 1666757
ucacuuccacguaacgaag

SEQ ID NO: 1666759 - RNA, 19 nt, Artificial Sequence
  Description of Artificial Sequence: Synthetic oligonucleotide
  Sense strand starting at position 2900 of SEQ ID NO: 1561371
uucguuacguggaagugau

SEQ ID NO: 1666760 - RNA, 19 nt, Artificial Sequence
  Description of Artificial Sequence: Synthetic oligonucleotide
  Antisense strand to SEQ ID NO: 1666759
aucacuuccacguaacgaa

SEQ ID NO: 1666761 - RNA, 19 nt, Artificial Sequence
  Description of Artificial Sequence: Synthetic oligonucleotide
  Sense strand starting at position 2901 of SEQ ID NO: 1561371
ucguuacguggaagugauc

SEQ ID NO: 1666762 - RNA, 19 nt, Artificial Sequence
  Description of Artificial Sequence: Synthetic oligonucleotide
  Antisense strand to SEQ ID NO: 1666761
gaucacuuccacguaacga

SEQ ID NO: 1666763 - RNA, 19 nt, Artificial Sequence
  Description of Artificial Sequence: Synthetic oligonucleotide
  Sense strand starting at position 2904 of SEQ ID NO: 1561371
uuacguggaagugaucgua

SEQ ID NO: 1666764 - RNA, 19 nt, Artificial Sequence
  Description of Artificial Sequence: Synthetic oligonucleotide
  Antisense strand to SEQ ID NO: 1666763
uacgaucacuuccacguaa

SEQ ID NO: 1666765 - RNA, 19 nt, Artificial Sequence
  Description of Artificial Sequence: Synthetic oligonucleotide
  Sense strand starting at position 2907 of SEQ ID NO: 1561371
cguggaagugaucguaaag

SEQ ID NO: 1666766 - RNA, 19 nt, Artificial Sequence
  Description of Artificial Sequence: Synthetic oligonucleotide
  Antisense strand to SEQ ID NO: 1666765
cuuuacgaucacuuccacg

SEQ ID NO: 1666767 - RNA, 19 nt, Artificial Sequence
  Description of Artificial Sequence: Synthetic oligonucleotide
  Sense strand starting at position 2913 of SEQ ID NO: 1561371
agugaucguaaagaucaua

SEQ ID NO: 1666768 - RNA, 19 nt, Artificial Sequence
  Description of Artificial Sequence: Synthetic oligonucleotide
  Antisense strand to SEQ ID NO: 1666767
uaugaucuuuacgaucacu

SEQ ID NO: 1666769 - RNA, 19 nt, Artificial Sequence
  Description of Artificial Sequence: Synthetic oligonucleotide
  Sense strand starting at position 2985 of SEQ ID NO: 1561371
guuugucuugcugucccaa

SEQ ID NO: 1666770 - RNA, 19 nt, Artificial Sequence
  Description of Artificial Sequence: Synthetic oligonucleotide
  Antisense strand to SEQ ID NO: 1666769
uugggacagcaagacaaac

SEQ ID NO: 1666771 - RNA, 19 nt, Artificial Sequence
  Description of Artificial Sequence: Synthetic oligonucleotide
  Sense strand starting at position 3059 of SEQ ID NO: 1561371
cuugguguucacgggucaa

SEQ ID NO: 1666772 - RNA, 19 nt, Artificial Sequence
  Description of Artificial Sequence: Synthetic oligonucleotide
  Antisense strand to SEQ ID NO: 1666771
uugacccgugaacaccaag

SEQ ID NO: 1666773 - RNA, 19 nt, Artificial Sequence
  Description of Artificial Sequence: Synthetic oligonucleotide
  Sense strand starting at position 3063 of SEQ ID NO: 1561371
guguucacgggucaacuaa

SEQ ID NO: 1666774 - RNA, 19 nt, Artificial Sequence
  Description of Artificial Sequence: Synthetic oligonucleotide
  Antisense strand to SEQ ID NO: 1666773
uuaguugacccgugaacac

SEQ ID NO: 1666775 - RNA, 19 nt, Artificial Sequence
  Description of Artificial Sequence: Synthetic oligonucleotide
  Sense strand starting at position 3147 of SEQ ID NO: 1561371
aaauaagaugugugaaucu

SEQ ID NO: 1666776 - RNA, 19 nt, Artificial Sequence
  Description of Artificial Sequence: Synthetic oligonucleotide
  Antisense strand to SEQ ID NO: 1666775
agauucacacaucuuauuu

SEQ ID NO: 1666777 - RNA, 19 nt, Artificial Sequence
  Description of Artificial Sequence: Synthetic oligonucleotide
  Sense strand starting at position 3156 of SEQ ID NO: 1561371
gugugaaucuaagacauag

SEQ ID NO: 1666778 - RNA, 19 nt, Artificial Sequence
  Description of Artificial Sequence: Synthetic oligonucleotide
  Antisense strand to SEQ ID NO: 1666777
cuaugucuuagauucacac

SEQ ID NO: 1666779 - RNA, 19 nt, Artificial Sequence
  Description of Artificial Sequence: Synthetic oligonucleotide
  Sense strand starting at position 3240 of SEQ ID NO: 1561371
acgggaggcucacucuauu

SEQ ID NO: 1666780 - RNA, 19 nt, Artificial Sequence
  Description of Artificial Sequence: Synthetic oligonucleotide
  Antisense strand to SEQ ID NO: 1666779
aauagagugagccucccgu

SEQ ID NO: 1666781 - RNA, 19 nt, Artificial Sequence
  Description of Artificial Sequence: Synthetic oligonucleotide
  Sense strand starting at position 3289 of SEQ ID NO: 1561371
gucacuaguucccugguau

SEQ ID NO: 1666782 - RNA, 19 nt, Artificial Sequence
  Description of Artificial Sequence: Synthetic oligonucleotide
  Antisense strand to SEQ ID NO: 1666781
auaccagggaacuagugac

SEQ ID NO: 1666783 - RNA, 19 nt, Artificial Sequence
  Description of Artificial Sequence: Synthetic oligonucleotide
  Sense strand starting at position 3290 of SEQ ID NO: 1561371
ucacuaguucccugguauu

SEQ ID NO: 1666784 - RNA, 19 nt, Artificial Sequence
  Description of Artificial Sequence: Synthetic oligonucleotide
  Antisense strand to SEQ ID NO: 1666783
aauaccagggaacuaguga

SEQ ID NO: 1666785 - RNA, 19 nt, Artificial Sequence
  Description of Artificial Sequence: Synthetic oligonucleotide
  Sense strand starting at position 3300 of SEQ ID NO: 1561371
ccugguauucuuuauauau

SEQ ID NO: 1666786 - RNA, 19 nt, Artificial Sequence
  Description of Artificial Sequence: Synthetic oligonucleotide
  Antisense strand to SEQ ID NO: 1666785
auauauaaagaauaccagg

SEQ ID NO: 1666787 - RNA, 19 nt, Artificial Sequence
  Description of Artificial Sequence: Synthetic oligonucleotide
  Sense strand starting at position 3322 of SEQ ID NO: 1561371
gcacaugugcagucaugca

SEQ ID NO: 1666788 - RNA, 19 nt, Artificial Sequence
  Description of Artificial Sequence: Synthetic oligonucleotide
  Antisense strand to SEQ ID NO: 1666787
ugcaugacugcacaugugc

SEQ ID NO: 1666789 - RNA, 19 nt, Artificial Sequence
  Description of Artificial Sequence: Synthetic oligonucleotide
  Sense strand starting at position 3432 of SEQ ID NO: 1561371
ugauguuguaacugucaca

SEQ ID NO: 1666790 - RNA, 19 nt, Artificial Sequence
  Description of Artificial Sequence: Synthetic oligonucleotide
  Antisense strand to SEQ ID NO: 1666789
ugugacaguuacaacauca

SEQ ID NO: 1666791 - RNA, 19 nt, Artificial Sequence
  Description of Artificial Sequence: Synthetic oligonucleotide
  Sense strand starting at position 3851 of SEQ ID NO: 1561371
aguacaauuuaucuguguu

SEQ ID NO: 1666792 - RNA, 19 nt, Artificial Sequence
  Description of Artificial Sequence: Synthetic oligonucleotide
  Antisense strand to SEQ ID NO: 1666791
aacacagauaaauuguacu

SEQ ID NO: 1666793 - RNA, 19 nt, Artificial Sequence
  Description of Artificial Sequence: Synthetic oligonucleotide
  Sense strand starting at position 3874 of SEQ ID NO: 1561371
gcuaaauguucuuacaaag

SEQ ID NO: 1666794 - RNA, 19 nt, Artificial Sequence
  Description of Artificial Sequence: Synthetic oligonucleotide
  Antisense strand to SEQ ID NO: 1666793
cuuuguaagaacauuuagc

SEQ ID NO: 1666795 - RNA, 19 nt, Artificial Sequence
  Description of Artificial Sequence: Synthetic oligonucleotide
  Sense strand starting at position 163 of SEQ ID NO: 1561372
uuguaaacugcuggcauaa

SEQ ID NO: 1666796 - RNA, 19 nt, Artificial Sequence
  Description of Artificial Sequence: Synthetic oligonucleotide
  Antisense strand to SEQ ID NO: 1666795
uuaugccagcaguuuacaa

SEQ ID NO: 1666797 - RNA, 19 nt, Artificial Sequence
  Description of Artificial Sequence: Synthetic oligonucleotide
  Sense strand starting at position 176 of SEQ ID NO: 1561372
gcauaaguacaguaucuuu

SEQ ID NO: 1666798 - RNA, 19 nt, Artificial Sequence
  Description of Artificial Sequence: Synthetic oligonucleotide
  Antisense strand to SEQ ID NO: 1666797
aaagauacuguacuuaugc

SEQ ID NO: 1666799 - RNA, 19 nt, Artificial Sequence
  Description of Artificial Sequence: Synthetic oligonucleotide
  Sense strand starting at position 181 of SEQ ID NO: 1561372
aguacaguaucuuuagaga

SEQ ID NO: 1666800 - RNA, 19 nt, Artificial Sequence
  Description of Artificial Sequence: Synthetic oligonucleotide
  Antisense strand to SEQ ID NO: 1666799
ucucuaaagauacuguacu

SEQ ID NO: 1666801 - RNA, 19 nt, Artificial Sequence
  Description of Artificial Sequence: Synthetic oligonucleotide
  Sense strand starting at position 184 of SEQ ID NO: 1561372
acaguaucuuuagagaaca

SEQ ID NO: 1666802 - RNA, 19 nt, Artificial Sequence
  Description of Artificial Sequence: Synthetic oligonucleotide
  Antisense strand to SEQ ID NO: 1666801
uguucucuaaagauacugu

SEQ ID NO: 1666803 - RNA, 19 nt, Artificial Sequence
  Description of Artificial Sequence: Synthetic oligonucleotide
  Sense strand starting at position 204 of SEQ ID NO: 1561372
uuuggcaauguuugguaaa

SEQ ID NO: 1666804 - RNA, 19 nt, Artificial Sequence
  Description of Artificial Sequence: Synthetic oligonucleotide
  Antisense strand to SEQ ID NO: 1666803
uuuaccaaacauugccaaa

SEQ ID NO: 1666805 - RNA, 19 nt, Artificial Sequence
  Description of Artificial Sequence: Synthetic oligonucleotide
  Sense strand starting at position 566 of SEQ ID NO: 1561372
cuagguauauauucuaaag

SEQ ID NO: 1666806 - RNA, 19 nt, Artificial Sequence
  Description of Artificial Sequence: Synthetic oligonucleotide
  Antisense strand to SEQ ID NO: 1666805
cuuuagaauauauaccuag

SEQ ID NO: 1666807 - RNA, 19 nt, Artificial Sequence
  Description of Artificial Sequence: Synthetic oligonucleotide
  Sense strand starting at position 630 of SEQ ID NO: 1561372
agucacacugccuguagua

SEQ ID NO: 1666808 - RNA, 19 nt, Artificial Sequence
  Description of Artificial Sequence: Synthetic oligonucleotide
  Antisense strand to SEQ ID NO: 1666807
uacuacaggcagugugacu

SEQ ID NO: 1666809 - RNA, 19 nt, Artificial Sequence
  Description of Artificial Sequence: Synthetic oligonucleotide
  Sense strand starting at position 713 of SEQ ID NO: 1561372
gccuguaauucugucucaa

SEQ ID NO: 1666810 - RNA, 19 nt, Artificial Sequence
  Description of Artificial Sequence: Synthetic oligonucleotide
  Antisense strand to SEQ ID NO: 1666809
uugagacagaauuacaggc

SEQ ID NO: 1666811 - RNA, 19 nt, Artificial Sequence
  Description of Artificial Sequence: Synthetic oligonucleotide
  Sense strand starting at position 868 of SEQ ID NO: 1561372
gggaucaggucaucucaua

SEQ ID NO: 1666812 - RNA, 19 nt, Artificial Sequence
  Description of Artificial Sequence: Synthetic oligonucleotide
  Antisense strand to SEQ ID NO: 1666811
uaugagaugaccugauccc

SEQ ID NO: 1666813 - RNA, 19 nt, Artificial Sequence
  Description of Artificial Sequence: Synthetic oligonucleotide
  Sense strand starting at position 875 of SEQ ID NO: 1561372
ggucaucucauaggcaaga

SEQ ID NO: 1666814 - RNA, 19 nt, Artificial Sequence
  Description of Artificial Sequence: Synthetic oligonucleotide
  Antisense strand to SEQ ID NO: 1666813
ucuugccuaugagaugacc

SEQ ID NO: 1666815 - RNA, 19 nt, Artificial Sequence
  Description of Artificial Sequence: Synthetic oligonucleotide
  Sense strand starting at position 1903 of SEQ ID NO: 1561372
acuuacgccuguucggaua

SEQ ID NO: 1666816 - RNA, 19 nt, Artificial Sequence
  Description of Artificial Sequence: Synthetic oligonucleotide
  Antisense strand to SEQ ID NO: 1666815
uauccgaacaggcguaagu

SEQ ID NO: 1666817 - RNA, 19 nt, Artificial Sequence
  Description of Artificial Sequence: Synthetic oligonucleotide
  Sense strand starting at position 1992 of SEQ ID NO: 1561372
gcccaaauccgcgggaaga

SEQ ID NO: 1666818 - RNA, 19 nt, Artificial Sequence
  Description of Artificial Sequence: Synthetic oligonucleotide
  Antisense strand to SEQ ID NO: 1666817
ucuucccgcggauuugggc

SEQ ID NO: 1666819 - RNA, 19 nt, Artificial Sequence
  Description of Artificial Sequence: Synthetic oligonucleotide
  Sense strand starting at position 1993 of SEQ ID NO: 1561372
cccaaauccgcgggaagau

SEQ ID NO: 1666820 - RNA, 19 nt, Artificial Sequence
  Description of Artificial Sequence: Synthetic oligonucleotide
  Antisense strand to SEQ ID NO: 1666819
aucuucccgcggauuuggg

SEQ ID NO: 1666821 - RNA, 19 nt, Artificial Sequence
  Description of Artificial Sequence: Synthetic oligonucleotide
  Sense strand starting at position 2035 of SEQ ID NO: 1561372
ucuaguuaucgcgggagag

SEQ ID NO: 1666822 - RNA, 19 nt, Artificial Sequence
  Description of Artificial Sequence: Synthetic oligonucleotide
  Antisense strand to SEQ ID NO: 1666821
cucucccgcgauaacuaga

SEQ ID NO: 1666823 - RNA, 19 nt, Artificial Sequence
  Description of Artificial Sequence: Synthetic oligonucleotide
  Sense strand starting at position 2036 of SEQ ID NO: 1561372
cuaguuaucgcgggagagu

SEQ ID NO: 1666824 - RNA, 19 nt, Artificial Sequence
  Description of Artificial Sequence: Synthetic oligonucleotide
  Antisense strand to SEQ ID NO: 1666823
acucucccgcgauaacuag

SEQ ID NO: 1666825 - RNA, 19 nt, Artificial Sequence
  Description of Artificial Sequence: Synthetic oligonucleotide
  Sense strand starting at position 2037 of SEQ ID NO: 1561372
uaguuaucgcgggagagug

SEQ ID NO: 1666826 - RNA, 19 nt, Artificial Sequence
  Description of Artificial Sequence: Synthetic oligonucleotide
  Antisense strand to SEQ ID NO: 1666825
cacucucccgcgauaacua

SEQ ID NO: 1666827 - RNA, 19 nt, Artificial Sequence
  Description of Artificial Sequence: Synthetic oligonucleotide
  Sense strand starting at position 2075 of SEQ ID NO: 1561372
ugggaaguguaguccagaa

SEQ ID NO: 1666828 - RNA, 19 nt, Artificial Sequence
  Description of Artificial Sequence: Synthetic oligonucleotide
  Antisense strand to SEQ ID NO: 1666827
uucuggacuacacuuccca

SEQ ID NO: 1666829 - RNA, 19 nt, Artificial Sequence
  Description of Artificial Sequence: Synthetic oligonucleotide
  Sense strand starting at position 2162 of SEQ ID NO: 1561372
aaacuaucucuuugaggug

SEQ ID NO: 1666830 - RNA, 19 nt, Artificial Sequence
  Description of Artificial Sequence: Synthetic oligonucleotide
  Antisense strand to SEQ ID NO: 1666829
caccucaaagagauaguuu

SEQ ID NO: 1666831 - RNA, 19 nt, Artificial Sequence
  Description of Artificial Sequence: Synthetic oligonucleotide
  Sense strand starting at position 2200 of SEQ ID NO: 1561372
ccgggagucucaccugaca

SEQ ID NO: 1666832 - RNA, 19 nt, Artificial Sequence
  Description of Artificial Sequence: Synthetic oligonucleotide
  Antisense strand to SEQ ID NO: 1666831
ugucaggugagacucccgg

SEQ ID NO: 1666833 - RNA, 19 nt, Artificial Sequence
  Description of Artificial Sequence: Synthetic oligonucleotide
  Sense strand starting at position 2202 of SEQ ID NO: 1561372
gggagucucaccugacaag

SEQ ID NO: 1666834 - RNA, 19 nt, Artificial Sequence
  Description of Artificial Sequence: Synthetic oligonucleotide
  Antisense strand to SEQ ID NO: 1666833
cuugucaggugagacuccc

SEQ ID NO: 1666835 - RNA, 19 nt, Artificial Sequence
  Description of Artificial Sequence: Synthetic oligonucleotide
  Sense strand starting at position 2698 of SEQ ID NO: 1561372
cccggaggcugcuuggaau

SEQ ID NO: 1666836 - RNA, 19 nt, Artificial Sequence
  Description of Artificial Sequence: Synthetic oligonucleotide
  Antisense strand to SEQ ID NO: 1666835
auuccaagcagccuccggg

SEQ ID NO: 1666837 - RNA, 19 nt, Artificial Sequence
  Description of Artificial Sequence: Synthetic oligonucleotide
  Sense strand starting at position 2848 of SEQ ID NO: 1561372
ggacaaauccgcgauccca

SEQ ID NO: 1666838 - RNA, 19 nt, Artificial Sequence
  Description of Artificial Sequence: Synthetic oligonucleotide
  Antisense strand to SEQ ID NO: 1666837
ugggaucgcggauuugucc

SEQ ID NO: 1666839 - RNA, 19 nt, Artificial Sequence
  Description of Artificial Sequence: Synthetic oligonucleotide
  Sense strand starting at position 2856 of SEQ ID NO: 1561372
ccgcgaucccagucaugca

SEQ ID NO: 1666840 - RNA, 19 nt, Artificial Sequence
  Description of Artificial Sequence: Synthetic oligonucleotide
  Antisense strand to SEQ ID NO: 1666839
ugcaugacugggaucgcgg

SEQ ID NO: 1666841 - RNA, 19 nt, Artificial Sequence
  Description of Artificial Sequence: Synthetic oligonucleotide
  Sense strand starting at position 2857 of SEQ ID NO: 1561372
cgcgaucccagucaugcau

SEQ ID NO: 1666842 - RNA, 19 nt, Artificial Sequence
  Description of Artificial Sequence: Synthetic oligonucleotide
  Antisense strand to SEQ ID NO: 1666841
augcaugacugggaucgcg

SEQ ID NO: 1666843 - RNA, 19 nt, Artificial Sequence
  Description of Artificial Sequence: Synthetic oligonucleotide
  Sense strand starting at position 2863 of SEQ ID NO: 1561372
cccagucaugcaugugaga

SEQ ID NO: 1666844 - RNA, 19 nt, Artificial Sequence
  Description of Artificial Sequence: Synthetic oligonucleotide
  Antisense strand to SEQ ID NO: 1666843
ucucacaugcaugacuggg

SEQ ID NO: 1666845 - RNA, 19 nt, Artificial Sequence
  Description of Artificial Sequence: Synthetic oligonucleotide
  Sense strand starting at position 2954 of SEQ ID NO: 1561372
uggguaguugagugaaaga

SEQ ID NO: 1666846 - RNA, 19 nt, Artificial Sequence
  Description of Artificial Sequence: Synthetic oligonucleotide
  Antisense strand to SEQ ID NO: 1666845
ucuuucacucaacuaccca

SEQ ID NO: 1666847 - RNA, 19 nt, Artificial Sequence
  Description of Artificial Sequence: Synthetic oligonucleotide
  Sense strand starting at position 3009 of SEQ ID NO: 1561372
aagugaggucaagaugugu

SEQ ID NO: 1666848 - RNA, 19 nt, Artificial Sequence
  Description of Artificial Sequence: Synthetic oligonucleotide
  Antisense strand to SEQ ID NO: 1666847
acacaucuugaccucacuu

SEQ ID NO: 1666849 - RNA, 19 nt, Artificial Sequence
  Description of Artificial Sequence: Synthetic oligonucleotide
  Sense strand starting at position 3017 of SEQ ID NO: 1561372
ucaagaugugugcagcuuu

SEQ ID NO: 1666850 - RNA, 19 nt, Artificial Sequence
  Description of Artificial Sequence: Synthetic oligonucleotide
  Antisense strand to SEQ ID NO: 1666849
aaagcugcacacaucuuga

SEQ ID NO: 1666851 - RNA, 19 nt, Artificial Sequence
  Description of Artificial Sequence: Synthetic oligonucleotide
  Sense strand starting at position 3084 of SEQ ID NO: 1561372
cguguauggaucuguguau

SEQ ID NO: 1666852 - RNA, 19 nt, Artificial Sequence
  Description of Artificial Sequence: Synthetic oligonucleotide
  Antisense strand to SEQ ID NO: 1666851
auacacagauccauacacg

SEQ ID NO: 1666853 - RNA, 19 nt, Artificial Sequence
  Description of Artificial Sequence: Synthetic oligonucleotide
  Sense strand starting at position 3088 of SEQ ID NO: 1561372
uauggaucuguguaugagu

SEQ ID NO: 1666854 - RNA, 19 nt, Artificial Sequence
  Description of Artificial Sequence: Synthetic oligonucleotide
  Antisense strand to SEQ ID NO: 1666853
acucauacacagauccaua

SEQ ID NO: 1666855 - RNA, 19 nt, Artificial Sequence
  Description of Artificial Sequence: Synthetic oligonucleotide
  Sense strand starting at position 3109 of SEQ ID NO: 1561372
guguaaucaccugaaugug

SEQ ID NO: 1666856 - RNA, 19 nt, Artificial Sequence
  Description of Artificial Sequence: Synthetic oligonucleotide
  Antisense strand to SEQ ID NO: 1666855
cacauucaggugauuacac

SEQ ID NO: 1666857 - RNA, 19 nt, Artificial Sequence
  Description of Artificial Sequence: Synthetic oligonucleotide
  Sense strand starting at position 3200 of SEQ ID NO: 1561372
uugugauaacaagguugua

SEQ ID NO: 1666858 - RNA, 19 nt, Artificial Sequence
  Description of Artificial Sequence: Synthetic oligonucleotide
  Antisense strand to SEQ ID NO: 1666857
uacaaccuuguuaucacaa

SEQ ID NO: 1666859 - RNA, 19 nt, Artificial Sequence
  Description of Artificial Sequence: Synthetic oligonucleotide
  Sense strand starting at position 3332 of SEQ ID NO: 1561372
aucaguuaugaguacucca

SEQ ID NO: 1666860 - RNA, 19 nt, Artificial Sequence
  Description of Artificial Sequence: Synthetic oligonucleotide
  Antisense strand to SEQ ID NO: 1666859
uggaguacucauaacugau

SEQ ID NO: 1666861 - RNA, 19 nt, Artificial Sequence
  Description of Artificial Sequence: Synthetic oligonucleotide
  Sense strand starting at position 3335 of SEQ ID NO: 1561372
aguuaugaguacuccaagu

SEQ ID NO: 1666862 - RNA, 19 nt, Artificial Sequence
  Description of Artificial Sequence: Synthetic oligonucleotide
  Antisense strand to SEQ ID NO: 1666861
acuuggaguacucauaacu

SEQ ID NO: 1666863 - RNA, 19 nt, Artificial Sequence
  Description of Artificial Sequence: Synthetic oligonucleotide
  Sense strand starting at position 3337 of SEQ ID NO: 1561372
uuaugaguacuccaaguag

SEQ ID NO: 1666864 - RNA, 19 nt, Artificial Sequence
  Description of Artificial Sequence: Synthetic oligonucleotide
  Antisense strand to SEQ ID NO: 1666863
cuacuuggaguacucauaa

SEQ ID NO: 1666865 - RNA, 19 nt, Artificial Sequence
  Description of Artificial Sequence: Synthetic oligonucleotide
  Sense strand starting at position 3364 of SEQ ID NO: 1561372
agaaacccgucauaauaga

SEQ ID NO: 1666866 - RNA, 19 nt, Artificial Sequence
  Description of Artificial Sequence: Synthetic oligonucleotide
  Antisense strand to SEQ ID NO: 1666865
ucuauuaugacggguuucu

SEQ ID NO: 1666867 - RNA, 19 nt, Artificial Sequence
  Description of Artificial Sequence: Synthetic oligonucleotide
  Sense strand starting at position 3449 of SEQ ID NO: 1561372
aaaucaaugugaggacuca

SEQ ID NO: 1666868 - RNA, 19 nt, Artificial Sequence
  Description of Artificial Sequence: Synthetic oligonucleotide
  Antisense strand to SEQ ID NO: 1666867
ugaguccucacauugauuu

SEQ ID NO: 1666869 - RNA, 19 nt, Artificial Sequence
  Description of Artificial Sequence: Synthetic oligonucleotide
  Sense strand starting at position 3541 of SEQ ID NO: 1561372
gaaacuuugggagguggua

SEQ ID NO: 1666870 - RNA, 19 nt, Artificial Sequence
  Description of Artificial Sequence: Synthetic oligonucleotide
  Antisense strand to SEQ ID NO: 1666869
uaccaccucccaaaguuuc

SEQ ID NO: 1666871 - RNA, 19 nt, Artificial Sequence
  Description of Artificial Sequence: Synthetic oligonucleotide
  Sense strand starting at position 3569 of SEQ ID NO: 1561372
gaaauaugauggcaggaag

SEQ ID NO: 1666872 - RNA, 19 nt, Artificial Sequence
  Description of Artificial Sequence: Synthetic oligonucleotide
  Antisense strand to SEQ ID NO: 1666871
cuuccugccaucauauuuc

SEQ ID NO: 1666873 - RNA, 19 nt, Artificial Sequence
  Description of Artificial Sequence: Synthetic oligonucleotide
  Sense strand starting at position 3580 of SEQ ID NO: 1561372
gcaggaaguguaugacaac

SEQ ID NO: 1666874 - RNA, 19 nt, Artificial Sequence
  Description of Artificial Sequence: Synthetic oligonucleotide
  Antisense strand to SEQ ID NO: 1666873
guugucauacacuuccugc

SEQ ID NO: 1666875 - RNA, 19 nt, Artificial Sequence
  Description of Artificial Sequence: Synthetic oligonucleotide
  Sense strand starting at position 11 of SEQ ID NO: 1561373
gauacacacucgggagaaa

SEQ ID NO: 1666876 - RNA, 19 nt, Artificial Sequence
  Description of Artificial Sequence: Synthetic oligonucleotide
  Antisense strand to SEQ ID NO: 1666875
uuucucccgaguguguauc

SEQ ID NO: 1666877 - RNA, 19 nt, Artificial Sequence
  Description of Artificial Sequence: Synthetic oligonucleotide
  Sense strand starting at position 452 of SEQ ID NO: 1561373
ucauuaucuugagguagac

SEQ ID NO: 1666878 - RNA, 19 nt, Artificial Sequence
  Description of Artificial Sequence: Synthetic oligonucleotide
  Antisense strand to SEQ ID NO: 1666877
gucuaccucaagauaauga

SEQ ID NO: 1666879 - RNA, 19 nt, Artificial Sequence
  Description of Artificial Sequence: Synthetic oligonucleotide
  Sense strand starting at position 645 of SEQ ID NO: 1561373
guacaacugccguaaauca

SEQ ID NO: 1666880 - RNA, 19 nt, Artificial Sequence
  Description of Artificial Sequence: Synthetic oligonucleotide
  Antisense strand to SEQ ID NO: 1666879
ugauuuacggcaguuguac

SEQ ID NO: 1666881 - RNA, 19 nt, Artificial Sequence
  Description of Artificial Sequence: Synthetic oligonucleotide
  Sense strand starting at position 686 of SEQ ID NO: 1561373
ggucaaauauuugaacaac

SEQ ID NO: 1666882 - RNA, 19 nt, Artificial Sequence
  Description of Artificial Sequence: Synthetic oligonucleotide
  Antisense strand to SEQ ID NO: 1666881
guuguucaaauauuugacc

SEQ ID NO: 1666883 - RNA, 19 nt, Artificial Sequence
  Description of Artificial Sequence: Synthetic oligonucleotide
  Sense strand starting at position 901 of SEQ ID NO: 1561373
uaugaugucuagcauggau

SEQ ID NO: 1666884 - RNA, 19 nt, Artificial Sequence
  Description of Artificial Sequence: Synthetic oligonucleotide
  Antisense strand to SEQ ID NO: 1666883
auccaugcuagacaucaua

SEQ ID NO: 1666885 - RNA, 19 nt, Artificial Sequence
  Description of Artificial Sequence: Synthetic oligonucleotide
  Sense strand starting at position 938 of SEQ ID NO: 1561373
uuguaaacugcuggcauaa

SEQ ID NO: 1666886 - RNA, 19 nt, Artificial Sequence
  Description of Artificial Sequence: Synthetic oligonucleotide
  Antisense strand to SEQ ID NO: 1666885
uuaugccagcaguuuacaa

SEQ ID NO: 1666887 - RNA, 19 nt, Artificial Sequence
  Description of Artificial Sequence: Synthetic oligonucleotide
  Sense strand starting at position 951 of SEQ ID NO: 1561373
gcauaaguacaguaucuuu

SEQ ID NO: 1666888 - RNA, 19 nt, Artificial Sequence
  Description of Artificial Sequence: Synthetic oligonucleotide
  Antisense strand to SEQ ID NO: 1666887
aaagauacuguacuuaugc

SEQ ID NO: 1666889 - RNA, 19 nt, Artificial Sequence
  Description of Artificial Sequence: Synthetic oligonucleotide
  Sense strand starting at position 956 of SEQ ID NO: 1561373
aguacaguaucuuuagaga

SEQ ID NO: 1666890 - RNA, 19 nt, Artificial Sequence
  Description of Artificial Sequence: Synthetic oligonucleotide
  Antisense strand to SEQ ID NO: 1666889
ucucuaaagauacuguacu

SEQ ID NO: 1666891 - RNA, 19 nt, Artificial Sequence
  Description of Artificial Sequence: Synthetic oligonucleotide
  Sense strand starting at position 959 of SEQ ID NO: 1561373
acaguaucuuuagagaaca

SEQ ID NO: 1666892 - RNA, 19 nt, Artificial Sequence
  Description of Artificial Sequence: Synthetic oligonucleotide
  Antisense strand to SEQ ID NO: 1666891
uguucucuaaagauacugu

SEQ ID NO: 1666893 - RNA, 19 nt, Artificial Sequence
  Description of Artificial Sequence: Synthetic oligonucleotide
  Sense strand starting at position 979 of SEQ ID NO: 1561373
uuuggcaauguuugguaaa

SEQ ID NO: 1666894 - RNA, 19 nt, Artificial Sequence
  Description of Artificial Sequence: Synthetic oligonucleotide
  Antisense strand to SEQ ID NO: 1666893
uuuaccaaacauugccaaa

SEQ ID NO: 1666895 - RNA, 19 nt, Artificial Sequence
  Description of Artificial Sequence: Synthetic oligonucleotide
  Sense strand starting at position 1341 of SEQ ID NO: 1561373
cuagguauauauucuaaag

SEQ ID NO: 1666896 - RNA, 19 nt, Artificial Sequence
  Description of Artificial Sequence: Synthetic oligonucleotide
  Antisense strand to SEQ ID NO: 1666895
cuuuagaauauauaccuag

SEQ ID NO: 1666897 - RNA, 19 nt, Artificial Sequence
  Description of Artificial Sequence: Synthetic oligonucleotide
  Sense strand starting at position 1405 of SEQ ID NO: 1561373
agucacacugccuguagua

SEQ ID NO: 1666898 - RNA, 19 nt, Artificial Sequence
  Description of Artificial Sequence: Synthetic oligonucleotide
  Antisense strand to SEQ ID NO: 1666897
uacuacaggcagugugacu

SEQ ID NO: 1666899 - RNA, 19 nt, Artificial Sequence
  Description of Artificial Sequence: Synthetic oligonucleotide
  Sense strand starting at position 1488 of SEQ ID NO: 1561373
gccuguaauucugucucaa

SEQ ID NO: 1666900 - RNA, 19 nt, Artificial Sequence
  Description of Artificial Sequence: Synthetic oligonucleotide
  Antisense strand to SEQ ID NO: 1666899
uugagacagaauuacaggc

SEQ ID NO: 1666901 - RNA, 19 nt, Artificial Sequence
  Description of Artificial Sequence: Synthetic oligonucleotide
  Sense strand starting at position 1643 of SEQ ID NO: 1561373
gggaucaggucaucucaua

SEQ ID NO: 1666902 - RNA, 19 nt, Artificial Sequence
  Description of Artificial Sequence: Synthetic oligonucleotide
  Antisense strand to SEQ ID NO: 1666901
uaugagaugaccugauccc

SEQ ID NO: 1666903 - RNA, 19 nt, Artificial Sequence
  Description of Artificial Sequence: Synthetic oligonucleotide
  Sense strand starting at position 1648 of SEQ ID NO: 1561373
caggucaucucauaggcaa

SEQ ID NO: 1666904 - RNA, 19 nt, Artificial Sequence
  Description of Artificial Sequence: Synthetic oligonucleotide
  Antisense strand to SEQ ID NO: 1666903
uugccuaugagaugaccug

SEQ ID NO: 1666905 - RNA, 19 nt, Artificial Sequence
  Description of Artificial Sequence: Synthetic oligonucleotide
  Sense strand starting at position 1650 of SEQ ID NO: 1561373
ggucaucucauaggcaaga

SEQ ID NO: 1666906 - RNA, 19 nt, Artificial Sequence
  Description of Artificial Sequence: Synthetic oligonucleotide
  Antisense strand to SEQ ID NO: 1666905
ucuugccuaugagaugacc

SEQ ID NO: 1666907 - RNA, 19 nt, Artificial Sequence
  Description of Artificial Sequence: Synthetic oligonucleotide
  Sense strand starting at position 2678 of SEQ ID NO: 1561373
acuuacgccuguucggaua

SEQ ID NO: 1666908 - RNA, 19 nt, Artificial Sequence
  Description of Artificial Sequence: Synthetic oligonucleotide
  Antisense strand to SEQ ID NO: 1666907
uauccgaacaggcguaagu

SEQ ID NO: 1666909 - RNA, 19 nt, Artificial Sequence
  Description of Artificial Sequence: Synthetic oligonucleotide
  Sense strand starting at position 2767 of SEQ ID NO: 1561373
gcccaaauccgcgggaaga

SEQ ID NO: 1666910 - RNA, 19 nt, Artificial Sequence
  Description of Artificial Sequence: Synthetic oligonucleotide
  Antisense strand to SEQ ID NO: 1666909
ucuucccgcggauuugggc

SEQ ID NO: 1666911 - RNA, 19 nt, Artificial Sequence
  Description of Artificial Sequence: Synthetic oligonucleotide
  Sense strand starting at position 2768 of SEQ ID NO: 1561373
cccaaauccgcgggaagau

SEQ ID NO: 1666912 - RNA, 19 nt, Artificial Sequence
  Description of Artificial Sequence: Synthetic oligonucleotide
  Antisense strand to SEQ ID NO: 1666911
aucuucccgcggauuuggg

SEQ ID NO: 1666913 - RNA, 19 nt, Artificial Sequence
  Description of Artificial Sequence: Synthetic oligonucleotide
  Sense strand starting at position 2810 of SEQ ID NO: 1561373
ucuaguuaucgcgggagag

SEQ ID NO: 1666914 - RNA, 19 nt, Artificial Sequence
  Description of Artificial Sequence: Synthetic oligonucleotide
  Antisense strand to SEQ ID NO: 1666913
cucucccgcgauaacuaga

SEQ ID NO: 1666915 - RNA, 19 nt, Artificial Sequence
  Description of Artificial Sequence: Synthetic oligonucleotide
  Sense strand starting at position 2811 of SEQ ID NO: 1561373
cuaguuaucgcgggagagu

SEQ ID NO: 1666916 - RNA, 19 nt, Artificial Sequence
  Description of Artificial Sequence: Synthetic oligonucleotide
  Antisense strand to SEQ ID NO: 1666915
acucucccgcgauaacuag

SEQ ID NO: 1666917 - RNA, 19 nt, Artificial Sequence
  Description of Artificial Sequence: Synthetic oligonucleotide
  Sense strand starting at position 2812 of SEQ ID NO: 1561373
uaguuaucgcgggagagug

SEQ ID NO: 1666918 - RNA, 19 nt, Artificial Sequence
  Description of Artificial Sequence: Synthetic oligonucleotide
  Antisense strand to SEQ ID NO: 1666917
cacucucccgcgauaacua

SEQ ID NO: 1666919 - RNA, 19 nt, Artificial Sequence
  Description of Artificial Sequence: Synthetic oligonucleotide
  Sense strand starting at position 2850 of SEQ ID NO: 1561373
ugggaaguguaguccagaa

SEQ ID NO: 1666920 - RNA, 19 nt, Artificial Sequence
  Description of Artificial Sequence: Synthetic oligonucleotide
  Antisense strand to SEQ ID NO: 1666919
uucuggacuacacuuccca

SEQ ID NO: 1666921 - RNA, 19 nt, Artificial Sequence
  Description of Artificial Sequence: Synthetic oligonucleotide
  Sense strand starting at position 2937 of SEQ ID NO: 1561373
aaacuaucucuuugaggug

SEQ ID NO: 1666922 - RNA, 19 nt, Artificial Sequence
  Description of Artificial Sequence: Synthetic oligonucleotide
  Antisense strand to SEQ ID NO: 1666921
caccucaaagagauaguuu

SEQ ID NO: 1666923 - RNA, 19 nt, Artificial Sequence
  Description of Artificial Sequence: Synthetic oligonucleotide
  Sense strand starting at position 2938 of SEQ ID NO: 1561373
aacuaucucuuugagguga

SEQ ID NO: 1666924 - RNA, 19 nt, Artificial Sequence
  Description of Artificial Sequence: Synthetic oligonucleotide
  Antisense strand to SEQ ID NO: 1666923
ucaccucaaagagauaguu

SEQ ID NO: 1666925 - RNA, 19 nt, Artificial Sequence
  Description of Artificial Sequence: Synthetic oligonucleotide
  Sense strand starting at position 2975 of SEQ ID NO: 1561373
ccgggagucucaccugaca

SEQ ID NO: 1666926 - RNA, 19 nt, Artificial Sequence
  Description of Artificial Sequence: Synthetic oligonucleotide
  Antisense strand to SEQ ID NO: 1666925
ugucaggugagacucccgg

SEQ ID NO: 1666927 - RNA, 19 nt, Artificial Sequence
  Description of Artificial Sequence: Synthetic oligonucleotide
  Sense strand starting at position 2977 of SEQ ID NO: 1561373
gggagucucaccugacaag

SEQ ID NO: 1666928 - RNA, 19 nt, Artificial Sequence
  Description of Artificial Sequence: Synthetic oligonucleotide
  Antisense strand to SEQ ID NO: 1666927
cuugucaggugagacuccc

SEQ ID NO: 1666929 - RNA, 19 nt, Artificial Sequence
  Description of Artificial Sequence: Synthetic oligonucleotide
  Sense strand starting at position 3473 of SEQ ID NO: 1561373
cccggaggcugcuuggaau

SEQ ID NO: 1666930 - RNA, 19 nt, Artificial Sequence
  Description of Artificial Sequence: Synthetic oligonucleotide
  Antisense strand to SEQ ID NO: 1666929
auuccaagcagccuccggg

SEQ ID NO: 1666931 - RNA, 19 nt, Artificial Sequence
  Description of Artificial Sequence: Synthetic oligonucleotide
  Sense strand starting at position 3623 of SEQ ID NO: 1561373
ggacaaauccgcgauccca

SEQ ID NO: 1666932 - RNA, 19 nt, Artificial Sequence
  Description of Artificial Sequence: Synthetic oligonucleotide
  Antisense strand to SEQ ID NO: 1666931
ugggaucgcggauuugucc

SEQ ID NO: 1666933 - RNA, 19 nt, Artificial Sequence
  Description of Artificial Sequence: Synthetic oligonucleotide
  Sense strand starting at position 3631 of SEQ ID NO: 1561373
ccgcgaucccagucaugca

SEQ ID NO: 1666934 - RNA, 19 nt, Artificial Sequence
  Description of Artificial Sequence: Synthetic oligonucleotide
  Antisense strand to SEQ ID NO: 1666933
ugcaugacugggaucgcgg

SEQ ID NO: 1666935 - RNA, 19 nt, Artificial Sequence
  Description of Artificial Sequence: Synthetic oligonucleotide
  Sense strand starting at position 3632 of SEQ ID NO: 1561373
cgcgaucccagucaugcau

SEQ ID NO: 1666936 - RNA, 19 nt, Artificial Sequence
  Description of Artificial Sequence: Synthetic oligonucleotide
  Antisense strand to SEQ ID NO: 1666935
augcaugacugggaucgcg

SEQ ID NO: 1666937 - RNA, 19 nt, Artificial Sequence
  Description of Artificial Sequence: Synthetic oligonucleotide
  Sense strand starting at position 3638 of SEQ ID NO: 1561373
cccagucaugcaugugaga

SEQ ID NO: 1666938 - RNA, 19 nt, Artificial Sequence
  Description of Artificial Sequence: Synthetic oligonucleotide
  Antisense strand to SEQ ID NO: 1666937
ucucacaugcaugacuggg

SEQ ID NO: 1666939 - RNA, 19 nt, Artificial Sequence
  Description of Artificial Sequence: Synthetic oligonucleotide
  Sense strand starting at position 3729 of SEQ ID NO: 1561373
uggguaguugagugaaaga

SEQ ID NO: 1666940 - RNA, 19 nt, Artificial Sequence
  Description of Artificial Sequence: Synthetic oligonucleotide
  Antisense strand to SEQ ID NO: 1666939
ucuuucacucaacuaccca

SEQ ID NO: 1666941 - RNA, 19 nt, Artificial Sequence
  Description of Artificial Sequence: Synthetic oligonucleotide
  Sense strand starting at position 3784 of SEQ ID NO: 1561373
aagugaggucaagaugugu

SEQ ID NO: 1666942 - RNA, 19 nt, Artificial Sequence
  Description of Artificial Sequence: Synthetic oligonucleotide
  Antisense strand to SEQ ID NO: 1666941
acacaucuugaccucacuu

SEQ ID NO: 1666943 - RNA, 19 nt, Artificial Sequence
  Description of Artificial Sequence: Synthetic oligonucleotide
  Sense strand starting at position 3792 of SEQ ID NO: 1561373
ucaagaugugugcagcuuu

SEQ ID NO: 1666944 - RNA, 19 nt, Artificial Sequence
  Description of Artificial Sequence: Synthetic oligonucleotide
  Antisense strand to SEQ ID NO: 1666943
aaagcugcacacaucuuga

SEQ ID NO: 1666945 - RNA, 19 nt, Artificial Sequence
  Description of Artificial Sequence: Synthetic oligonucleotide
  Sense strand starting at position 3859 of SEQ ID NO: 1561373
cguguauggaucuguguau

SEQ ID NO: 1666946 - RNA, 19 nt, Artificial Sequence
  Description of Artificial Sequence: Synthetic oligonucleotide
  Antisense strand to SEQ ID NO: 1666945
auacacagauccauacacg

SEQ ID NO: 1666947 - RNA, 19 nt, Artificial Sequence
  Description of Artificial Sequence: Synthetic oligonucleotide
  Sense strand starting at position 3863 of SEQ ID NO: 1561373
uauggaucuguguaugagu

SEQ ID NO: 1666948 - RNA, 19 nt, Artificial Sequence
  Description of Artificial Sequence: Synthetic oligonucleotide
  Antisense strand to SEQ ID NO: 1666947
acucauacacagauccaua

SEQ ID NO: 1666949 - RNA, 19 nt, Artificial Sequence
  Description of Artificial Sequence: Synthetic oligonucleotide
  Sense strand starting at position 3884 of SEQ ID NO: 1561373
guguaaucaccugaaugug

SEQ ID NO: 1666950 - RNA, 19 nt, Artificial Sequence
  Description of Artificial Sequence: Synthetic oligonucleotide
  Antisense strand to SEQ ID NO: 1666949
cacauucaggugauuacac

SEQ ID NO: 1666951 - RNA, 19 nt, Artificial Sequence
  Description of Artificial Sequence: Synthetic oligonucleotide
  Sense strand starting at position 3924 of SEQ ID NO: 1561373
uacuaugacuguggaggaa

SEQ ID NO: 1666952 - RNA, 19 nt, Artificial Sequence
  Description of Artificial Sequence: Synthetic oligonucleotide
  Antisense strand to SEQ ID NO: 1666951
uuccuccacagucauagua

SEQ ID NO: 1666953 - RNA, 19 nt, Artificial Sequence
  Description of Artificial Sequence: Synthetic oligonucleotide
  Sense strand starting at position 3975 of SEQ ID NO: 1561373
uugugauaacaagguugua

SEQ ID NO: 1666954 - RNA, 19 nt, Artificial Sequence
  Description of Artificial Sequence: Synthetic oligonucleotide
  Antisense strand to SEQ ID NO: 1666953
uacaaccuuguuaucacaa

SEQ ID NO: 1666955 - RNA, 19 nt, Artificial Sequence
  Description of Artificial Sequence: Synthetic oligonucleotide
  Sense strand starting at position 48 of SEQ ID NO: 1561374
cuagguauauauucuaaag

SEQ ID NO: 1666956 - RNA, 19 nt, Artificial Sequence
  Description of Artificial Sequence: Synthetic oligonucleotide
  Antisense strand to SEQ ID NO: 1666955
cuuuagaauauauaccuag

SEQ ID NO: 1666957 - RNA, 19 nt, Artificial Sequence
  Description of Artificial Sequence: Synthetic oligonucleotide
  Sense strand starting at position 112 of SEQ ID NO: 1561374
agucacacugccuguagua

SEQ ID NO: 1666958 - RNA, 19 nt, Artificial Sequence
  Description of Artificial Sequence: Synthetic oligonucleotide
  Antisense strand to SEQ ID NO: 1666957
uacuacaggcagugugacu

SEQ ID NO: 1666959 - RNA, 19 nt, Artificial Sequence
  Description of Artificial Sequence: Synthetic oligonucleotide
  Sense strand starting at position 195 of SEQ ID NO: 1561374
gccuguaauucugucucaa

SEQ ID NO: 1666960 - RNA, 19 nt, Artificial Sequence
  Description of Artificial Sequence: Synthetic oligonucleotide
  Antisense strand to SEQ ID NO: 1666959
uugagacagaauuacaggc

SEQ ID NO: 1666961 - RNA, 19 nt, Artificial Sequence
  Description of Artificial Sequence: Synthetic oligonucleotide
  Sense strand starting at position 350 of SEQ ID NO: 1561374
gggaucaggucaucucaua

SEQ ID NO: 1666962 - RNA, 19 nt, Artificial Sequence
  Description of Artificial Sequence: Synthetic oligonucleotide
  Antisense strand to SEQ ID NO: 1666961
uaugagaugaccugauccc

SEQ ID NO: 1666963 - RNA, 19 nt, Artificial Sequence
  Description of Artificial Sequence: Synthetic oligonucleotide
  Sense strand starting at position 357 of SEQ ID NO: 1561374
ggucaucucauaggcaaga

SEQ ID NO: 1666964 - RNA, 19 nt, Artificial Sequence
  Description of Artificial Sequence: Synthetic oligonucleotide
  Antisense strand to SEQ ID NO: 1666963
ucuugccuaugagaugacc

SEQ ID NO: 1666965 - RNA, 19 nt, Artificial Sequence
  Description of Artificial Sequence: Synthetic oligonucleotide
  Sense strand starting at position 1385 of SEQ ID NO: 1561374
acuuacgccuguucggaua

SEQ ID NO: 1666966 - RNA, 19 nt, Artificial Sequence
  Description of Artificial Sequence: Synthetic oligonucleotide
  Antisense strand to SEQ ID NO: 1666965
uauccgaacaggcguaagu

SEQ ID NO: 1666967 - RNA, 19 nt, Artificial Sequence
  Description of Artificial Sequence: Synthetic oligonucleotide
  Sense strand starting at position 1474 of SEQ ID NO: 1561374
gcccaaauccgcgggaaga

SEQ ID NO: 1666968 - RNA, 19 nt, Artificial Sequence
  Description of Artificial Sequence: Synthetic oligonucleotide
  Antisense strand to SEQ ID NO: 1666967
ucuucccgcggauuugggc

SEQ ID NO: 1666969 - RNA, 19 nt, Artificial Sequence
  Description of Artificial Sequence: Synthetic oligonucleotide
  Sense strand starting at position 1475 of SEQ ID NO: 1561374
cccaaauccgcgggaagau

SEQ ID NO: 1666970 - RNA, 19 nt, Artificial Sequence
  Description of Artificial Sequence: Synthetic oligonucleotide
  Antisense strand to SEQ ID NO: 1666969
aucuucccgcggauuuggg

SEQ ID NO: 1666971 - RNA, 19 nt, Artificial Sequence
  Description of Artificial Sequence: Synthetic oligonucleotide
  Sense strand starting at position 1517 of SEQ ID NO: 1561374
ucuaguuaucgcgggagag

SEQ ID NO: 1666972 - RNA, 19 nt, Artificial Sequence
  Description of Artificial Sequence: Synthetic oligonucleotide
  Antisense strand to SEQ ID NO: 1666971
cucucccgcgauaacuaga

SEQ ID NO: 1666973 - RNA, 19 nt, Artificial Sequence
  Description of Artificial Sequence: Synthetic oligonucleotide
  Sense strand starting at position 1518 of SEQ ID NO: 1561374
cuaguuaucgcgggagagu

SEQ ID NO: 1666974 - RNA, 19 nt, Artificial Sequence
  Description of Artificial Sequence: Synthetic oligonucleotide
  Antisense strand to SEQ ID NO: 1666973
acucucccgcgauaacuag

SEQ ID NO: 1666975 - RNA, 19 nt, Artificial Sequence
  Description of Artificial Sequence: Synthetic oligonucleotide
  Sense strand starting at position 1519 of SEQ ID NO: 1561374
uaguuaucgcgggagagug

SEQ ID NO: 1666976 - RNA, 19 nt, Artificial Sequence
  Description of Artificial Sequence: Synthetic oligonucleotide
  Antisense strand to SEQ ID NO: 1666975
cacucucccgcgauaacua

SEQ ID NO: 1666977 - RNA, 19 nt, Artificial Sequence
  Description of Artificial Sequence: Synthetic oligonucleotide
  Sense strand starting at position 1557 of SEQ ID NO: 1561374
ugggaaguguaguccagaa

SEQ ID NO: 1666978 - RNA, 19 nt, Artificial Sequence
  Description of Artificial Sequence: Synthetic oligonucleotide
  Antisense strand to SEQ ID NO: 1666977
uucuggacuacacuuccca

SEQ ID NO: 1666979 - RNA, 19 nt, Artificial Sequence
  Description of Artificial Sequence: Synthetic oligonucleotide
  Sense strand starting at position 1644 of SEQ ID NO: 1561374
aaacuaucucuuugaggug

SEQ ID NO: 1666980 - RNA, 19 nt, Artificial Sequence
  Description of Artificial Sequence: Synthetic oligonucleotide
  Antisense strand to SEQ ID NO: 1666979
caccucaaagagauaguuu

SEQ ID NO: 1666981 - RNA, 19 nt, Artificial Sequence
  Description of Artificial Sequence: Synthetic oligonucleotide
  Sense strand starting at position 1682 of SEQ ID NO: 1561374
ccgggagucucaccugaca

SEQ ID NO: 1666982 - RNA, 19 nt, Artificial Sequence
  Description of Artificial Sequence: Synthetic oligonucleotide
  Antisense strand to SEQ ID NO: 1666981
ugucaggugagacucccgg

SEQ ID NO: 1666983 - RNA, 19 nt, Artificial Sequence
  Description of Artificial Sequence: Synthetic oligonucleotide
  Sense strand starting at position 1684 of SEQ ID NO: 1561374
gggagucucaccugacaag

SEQ ID NO: 1666984 - RNA, 19 nt, Artificial Sequence
  Description of Artificial Sequence: Synthetic oligonucleotide
  Antisense strand to SEQ ID NO: 1666983
cuugucaggugagacuccc

SEQ ID NO: 1666985 - RNA, 19 nt, Artificial Sequence
  Description of Artificial Sequence: Synthetic oligonucleotide
  Sense strand starting at position 2180 of SEQ ID NO: 1561374
cccggaggcugcuuggaau

SEQ ID NO: 1666986 - RNA, 19 nt, Artificial Sequence
  Description of Artificial Sequence: Synthetic oligonucleotide
  Antisense strand to SEQ ID NO: 1666985
auuccaagcagccuccggg

SEQ ID NO: 1666987 - RNA, 19 nt, Artificial Sequence
  Description of Artificial Sequence: Synthetic oligonucleotide
  Sense strand starting at position 2330 of SEQ ID NO: 1561374
ggacaaauccgcgauccca

SEQ ID NO: 1666988 - RNA, 19 nt, Artificial Sequence
  Description of Artificial Sequence: Synthetic oligonucleotide
  Antisense strand to SEQ ID NO: 1666987
ugggaucgcggauuugucc

SEQ ID NO: 1666989 - RNA, 19 nt, Artificial Sequence
  Description of Artificial Sequence: Synthetic oligonucleotide
  Sense strand starting at position 2338 of SEQ ID NO: 1561374
ccgcgaucccagucaugca

SEQ ID NO: 1666990 - RNA, 19 nt, Artificial Sequence
  Description of Artificial Sequence: Synthetic oligonucleotide
  Antisense strand to SEQ ID NO: 1666989
ugcaugacugggaucgcgg

SEQ ID NO: 1666991 - RNA, 19 nt, Artificial Sequence
  Description of Artificial Sequence: Synthetic oligonucleotide
  Sense strand starting at position 2339 of SEQ ID NO: 1561374
cgcgaucccagucaugcau

SEQ ID NO: 1666992 - RNA, 19 nt, Artificial Sequence
  Description of Artificial Sequence: Synthetic oligonucleotide
  Antisense strand to SEQ ID NO: 1666991
augcaugacugggaucgcg

SEQ ID NO: 1666993 - RNA, 19 nt, Artificial Sequence
  Description of Artificial Sequence: Synthetic oligonucleotide
  Sense strand starting at position 2345 of SEQ ID NO: 1561374
cccagucaugcaugugaga

SEQ ID NO: 1666994 - RNA, 19 nt, Artificial Sequence
  Description of Artificial Sequence: Synthetic oligonucleotide
  Antisense strand to SEQ ID NO: 1666993
ucucacaugcaugacuggg

SEQ ID NO: 1666995 - RNA, 19 nt, Artificial Sequence
  Description of Artificial Sequence: Synthetic oligonucleotide
  Sense strand starting at position 2436 of SEQ ID NO: 1561374
uggguaguugagugaaaga

SEQ ID NO: 1666996 - RNA, 19 nt, Artificial Sequence
  Description of Artificial Sequence: Synthetic oligonucleotide
  Antisense strand to SEQ ID NO: 1666995
ucuuucacucaacuaccca

SEQ ID NO: 1666997 - RNA, 19 nt, Artificial Sequence
  Description of Artificial Sequence: Synthetic oligonucleotide
  Sense strand starting at position 2491 of SEQ ID NO: 1561374
aagugaggucaagaugugu

SEQ ID NO: 1666998 - RNA, 19 nt, Artificial Sequence
  Description of Artificial Sequence: Synthetic oligonucleotide
  Antisense strand to SEQ ID NO: 1666997
acacaucuugaccucacuu

SEQ ID NO: 1666999 - RNA, 19 nt, Artificial Sequence
  Description of Artificial Sequence: Synthetic oligonucleotide
  Sense strand starting at position 2499 of SEQ ID NO: 1561374
ucaagaugugugcagcuuu

SEQ ID NO: 1667000 - RNA, 19 nt, Artificial Sequence
  Description of Artificial Sequence: Synthetic oligonucleotide
  Antisense strand to SEQ ID NO: 1666999
aaagcugcacacaucuuga

SEQ ID NO: 1667001 - RNA, 19 nt, Artificial Sequence
  Description of Artificial Sequence: Synthetic oligonucleotide
  Sense strand starting at position 2566 of SEQ ID NO: 1561374
cguguauggaucuguguau

SEQ ID NO: 1667002 - RNA, 19 nt, Artificial Sequence
  Description of Artificial Sequence: Synthetic oligonucleotide
  Antisense strand to SEQ ID NO: 1667001
auacacagauccauacacg

SEQ ID NO: 1667003 - RNA, 19 nt, Artificial Sequence
  Description of Artificial Sequence: Synthetic oligonucleotide
  Sense strand starting at position 2570 of SEQ ID NO: 1561374
uauggaucuguguaugagu

SEQ ID NO: 1667004 - RNA, 19 nt, Artificial Sequence
  Description of Artificial Sequence: Synthetic oligonucleotide
  Antisense strand to SEQ ID NO: 1667003
acucauacacagauccaua

SEQ ID NO: 1667005 - RNA, 19 nt, Artificial Sequence
  Description of Artificial Sequence: Synthetic oligonucleotide
  Sense strand starting at position 2591 of SEQ ID NO: 1561374
guguaaucaccugaaugug

SEQ ID NO: 1667006 - RNA, 19 nt, Artificial Sequence
  Description of Artificial Sequence: Synthetic oligonucleotide
  Antisense strand to SEQ ID NO: 1667005
cacauucaggugauuacac

SEQ ID NO: 1667007 - RNA, 19 nt, Artificial Sequence
  Description of Artificial Sequence: Synthetic oligonucleotide
  Sense strand starting at position 2682 of SEQ ID NO: 1561374
uugugauaacaagguugua

SEQ ID NO: 1667008 - RNA, 19 nt, Artificial Sequence
  Description of Artificial Sequence: Synthetic oligonucleotide
  Antisense strand to SEQ ID NO: 1667007
uacaaccuuguuaucacaa

SEQ ID NO: 1667009 - RNA, 19 nt, Artificial Sequence
  Description of Artificial Sequence: Synthetic oligonucleotide
  Sense strand starting at position 2814 of SEQ ID NO: 1561374
aucaguuaugaguacucca

SEQ ID NO: 1667010 - RNA, 19 nt, Artificial Sequence
  Description of Artificial Sequence: Synthetic oligonucleotide
  Antisense strand to SEQ ID NO: 1667009
uggaguacucauaacugau

SEQ ID NO: 1667011 - RNA, 19 nt, Artificial Sequence
  Description of Artificial Sequence: Synthetic oligonucleotide
  Sense strand starting at position 2817 of SEQ ID NO: 1561374
aguuaugaguacuccaagu

SEQ ID NO: 1667012 - RNA, 19 nt, Artificial Sequence
  Description of Artificial Sequence: Synthetic oligonucleotide
  Antisense strand to SEQ ID NO: 1667011
acuuggaguacucauaacu

SEQ ID NO: 1667013 - RNA, 19 nt, Artificial Sequence
  Description of Artificial Sequence: Synthetic oligonucleotide
  Sense strand starting at position 2819 of SEQ ID NO: 1561374
uuaugaguacuccaaguag

SEQ ID NO: 1667014 - RNA, 19 nt, Artificial Sequence
  Description of Artificial Sequence: Synthetic oligonucleotide
  Antisense strand to SEQ ID NO: 1667013
cuacuuggaguacucauaa

SEQ ID NO: 1667015 - RNA, 19 nt, Artificial Sequence
  Description of Artificial Sequence: Synthetic oligonucleotide
  Sense strand starting at position 2846 of SEQ ID NO: 1561374
agaaacccgucauaauaga

SEQ ID NO: 1667016 - RNA, 19 nt, Artificial Sequence
  Description of Artificial Sequence: Synthetic oligonucleotide
  Antisense strand to SEQ ID NO: 1667015
ucuauuaugacggguuucu

SEQ ID NO: 1667017 - RNA, 19 nt, Artificial Sequence
  Description of Artificial Sequence: Synthetic oligonucleotide
  Sense strand starting at position 2931 of SEQ ID NO: 1561374
aaaucaaugugaggacuca

SEQ ID NO: 1667018 - RNA, 19 nt, Artificial Sequence
  Description of Artificial Sequence: Synthetic oligonucleotide
  Antisense strand to SEQ ID NO: 1667017
ugaguccucacauugauuu

SEQ ID NO: 1667019 - RNA, 19 nt, Artificial Sequence
  Description of Artificial Sequence: Synthetic oligonucleotide
  Sense strand starting at position 3023 of SEQ ID NO: 1561374
gaaacuuugggagguggua

SEQ ID NO: 1667020 - RNA, 19 nt, Artificial Sequence
  Description of Artificial Sequence: Synthetic oligonucleotide
  Antisense strand to SEQ ID NO: 1667019
uaccaccucccaaaguuuc

SEQ ID NO: 1667021 - RNA, 19 nt, Artificial Sequence
  Description of Artificial Sequence: Synthetic oligonucleotide
  Sense strand starting at position 3051 of SEQ ID NO: 1561374
gaaauaugauggcaggaag

SEQ ID NO: 1667022 - RNA, 19 nt, Artificial Sequence
  Description of Artificial Sequence: Synthetic oligonucleotide
  Antisense strand to SEQ ID NO: 1667021
cuuccugccaucauauuuc

SEQ ID NO: 1667023 - RNA, 19 nt, Artificial Sequence
  Description of Artificial Sequence: Synthetic oligonucleotide
  Sense strand starting at position 3062 of SEQ ID NO: 1561374
gcaggaaguguaugacaac

SEQ ID NO: 1667024 - RNA, 19 nt, Artificial Sequence
  Description of Artificial Sequence: Synthetic oligonucleotide
  Antisense strand to SEQ ID NO: 1667023
guugucauacacuuccugc

SEQ ID NO: 1667025 - RNA, 19 nt, Artificial Sequence
  Description of Artificial Sequence: Synthetic oligonucleotide
  Sense strand starting at position 3761 of SEQ ID NO: 1561374
gcaagcgaucuauaccuaa

SEQ ID NO: 1667026 - RNA, 19 nt, Artificial Sequence
  Description of Artificial Sequence: Synthetic oligonucleotide
  Antisense strand to SEQ ID NO: 1667025
uuagguauagaucgcuugc

SEQ ID NO: 1667027 - RNA, 19 nt, Artificial Sequence
  Description of Artificial Sequence: Synthetic oligonucleotide
  Sense strand starting at position 3764 of SEQ ID NO: 1561374
agcgaucuauaccuaaugu

SEQ ID NO: 1667028 - RNA, 19 nt, Artificial Sequence
  Description of Artificial Sequence: Synthetic oligonucleotide
  Antisense strand to SEQ ID NO: 1667027
acauuagguauagaucgcu

SEQ ID NO: 1667029 - RNA, 19 nt, Artificial Sequence
  Description of Artificial Sequence: Synthetic oligonucleotide
  Sense strand starting at position 3854 of SEQ ID NO: 1561374
aaggcucuugguugaguga

SEQ ID NO: 1667030 - RNA, 19 nt, Artificial Sequence
  Description of Artificial Sequence: Synthetic oligonucleotide
  Antisense strand to SEQ ID NO: 1667029
ucacucaaccaagagccuu

SEQ ID NO: 1667031 - RNA, 19 nt, Artificial Sequence
  Description of Artificial Sequence: Synthetic oligonucleotide
  Sense strand starting at position 3950 of SEQ ID NO: 1561374
cgggaaauaagcuguuuga

SEQ ID NO: 1667032 - RNA, 19 nt, Artificial Sequence
  Description of Artificial Sequence: Synthetic oligonucleotide
  Antisense strand to SEQ ID NO: 1667031
ucaaacagcuuauuucccg

SEQ ID NO: 1667033 - RNA, 19 nt, Artificial Sequence
  Description of Artificial Sequence: Synthetic oligonucleotide
  Sense strand starting at position 3975 of SEQ ID NO: 1561374
cccuuuguguuucuaugaa

SEQ ID NO: 1667034 - RNA, 19 nt, Artificial Sequence
  Description of Artificial Sequence: Synthetic oligonucleotide
  Antisense strand to SEQ ID NO: 1667033
uucauagaaacacaaaggg

SEQ ID NO: 1667035 - RNA, 19 nt, Artificial Sequence
  Description of Artificial Sequence: Synthetic oligonucleotide
  Sense strand starting at position 55 of SEQ ID NO: 1561375
acugcccucugguuugaau

SEQ ID NO: 1667036 - RNA, 19 nt, Artificial Sequence
  Description of Artificial Sequence: Synthetic oligonucleotide
  Antisense strand to SEQ ID NO: 1667035
auucaaaccagagggcagu

SEQ ID NO: 1667037 - RNA, 19 nt, Artificial Sequence
  Description of Artificial Sequence: Synthetic oligonucleotide
  Sense strand starting at position 67 of SEQ ID NO: 1561375
uuugaauagugauugcaaa

SEQ ID NO: 1667038 - RNA, 19 nt, Artificial Sequence
  Description of Artificial Sequence: Synthetic oligonucleotide
  Antisense strand to SEQ ID NO: 1667037
uuugcaaucacuauucaaa

SEQ ID NO: 1667039 - RNA, 19 nt, Artificial Sequence
  Description of Artificial Sequence: Synthetic oligonucleotide
  Sense strand starting at position 68 of SEQ ID NO: 1561375
uugaauagugauugcaaau

SEQ ID NO: 1667040 - RNA, 19 nt, Artificial Sequence
  Description of Artificial Sequence: Synthetic oligonucleotide
  Antisense strand to SEQ ID NO: 1667039
auuugcaaucacuauucaa

SEQ ID NO: 1667041 - RNA, 19 nt, Artificial Sequence
  Description of Artificial Sequence: Synthetic oligonucleotide
  Sense strand starting at position 74 of SEQ ID NO: 1561375
agugauugcaaaugaagcu

SEQ ID NO: 1667042 - RNA, 19 nt, Artificial Sequence
  Description of Artificial Sequence: Synthetic oligonucleotide
  Antisense strand to SEQ ID NO: 1667041
agcuucauuugcaaucacu

SEQ ID NO: 1667043 - RNA, 19 nt, Artificial Sequence
  Description of Artificial Sequence: Synthetic oligonucleotide
  Sense strand starting at position 111 of SEQ ID NO: 1561375
uugucaaaugcacguguua

SEQ ID NO: 1667044 - RNA, 19 nt, Artificial Sequence
  Description of Artificial Sequence: Synthetic oligonucleotide
  Antisense strand to SEQ ID NO: 1667043
uaacacgugcauuugacaa

SEQ ID NO: 1667045 - RNA, 19 nt, Artificial Sequence
  Description of Artificial Sequence: Synthetic oligonucleotide
  Sense strand starting at position 232 of SEQ ID NO: 1561375
gucacaaugucaucaucac

SEQ ID NO: 1667046 - RNA, 19 nt, Artificial Sequence
  Description of Artificial Sequence: Synthetic oligonucleotide
  Antisense strand to SEQ ID NO: 1667045
gugaugaugacauugugac

SEQ ID NO: 1667047 - RNA, 19 nt, Artificial Sequence
  Description of Artificial Sequence: Synthetic oligonucleotide
  Sense strand starting at position 295 of SEQ ID NO: 1561375
gcuuccauacuguguguuu

SEQ ID NO: 1667048 - RNA, 19 nt, Artificial Sequence
  Description of Artificial Sequence: Synthetic oligonucleotide
  Antisense strand to SEQ ID NO: 1667047
aaacacacaguauggaagc

SEQ ID NO: 1667049 - RNA, 19 nt, Artificial Sequence
  Description of Artificial Sequence: Synthetic oligonucleotide
  Sense strand starting at position 560 of SEQ ID NO: 1561375
ucugcucccucuguugaau

SEQ ID NO: 1667050 - RNA, 19 nt, Artificial Sequence
  Description of Artificial Sequence: Synthetic oligonucleotide
  Antisense strand to SEQ ID NO: 1667049
auucaacagagggagcaga

SEQ ID NO: 1667051 - RNA, 19 nt, Artificial Sequence
  Description of Artificial Sequence: Synthetic oligonucleotide
  Sense strand starting at position 1018 of SEQ ID NO: 1561375
acaggaagguuuggacuaa

SEQ ID NO: 1667052 - RNA, 19 nt, Artificial Sequence
  Description of Artificial Sequence: Synthetic oligonucleotide
  Antisense strand to SEQ ID NO: 1667051
uuaguccaaaccuuccugu

SEQ ID NO: 1667053 - RNA, 19 nt, Artificial Sequence
  Description of Artificial Sequence: Synthetic oligonucleotide
  Sense strand starting at position 1538 of SEQ ID NO: 1561375
gaucuuaaggucuguagcu

SEQ ID NO: 1667054 - RNA, 19 nt, Artificial Sequence
  Description of Artificial Sequence: Synthetic oligonucleotide
  Antisense strand to SEQ ID NO: 1667053
agcuacagaccuuaagauc

SEQ ID NO: 1667055 - RNA, 19 nt, Artificial Sequence
  Description of Artificial Sequence: Synthetic oligonucleotide
  Sense strand starting at position 1910 of SEQ ID NO: 1561375
ggcgguucgcaaguuuaau

SEQ ID NO: 1667056 - RNA, 19 nt, Artificial Sequence
  Description of Artificial Sequence: Synthetic oligonucleotide
  Antisense strand to SEQ ID NO: 1667055
auuaaacuugcgaaccgcc

SEQ ID NO: 1667057 - RNA, 19 nt, Artificial Sequence
  Description of Artificial Sequence: Synthetic oligonucleotide
  Sense strand starting at position 1911 of SEQ ID NO: 1561375
gcgguucgcaaguuuaauc

SEQ ID NO: 1667058 - RNA, 19 nt, Artificial Sequence
  Description of Artificial Sequence: Synthetic oligonucleotide
  Antisense strand to SEQ ID NO: 1667057
gauuaaacuugcgaaccgc

SEQ ID NO: 1667059 - RNA, 19 nt, Artificial Sequence
  Description of Artificial Sequence: Synthetic oligonucleotide
  Sense strand starting at position 1916 of SEQ ID NO: 1561375
ucgcaaguuuaauccauac

SEQ ID NO: 1667060 - RNA, 19 nt, Artificial Sequence
  Description of Artificial Sequence: Synthetic oligonucleotide
  Antisense strand to SEQ ID NO: 1667059
guauggauuaaacuugcga

SEQ ID NO: 1667061 - RNA, 19 nt, Artificial Sequence
  Description of Artificial Sequence: Synthetic oligonucleotide
  Sense strand starting at position 2147 of SEQ ID NO: 1561375
uuagaaacgcuggaguguu

SEQ ID NO: 1667062 - RNA, 19 nt, Artificial Sequence
  Description of Artificial Sequence: Synthetic oligonucleotide
  Antisense strand to SEQ ID NO: 1667061
aacacuccagcguuucuaa

SEQ ID NO: 1667063 - RNA, 19 nt, Artificial Sequence
  Description of Artificial Sequence: Synthetic oligonucleotide
  Sense strand starting at position 2229 of SEQ ID NO: 1561375
guggaccacuuaugauaga

SEQ ID NO: 1667064 - RNA, 19 nt, Artificial Sequence
  Description of Artificial Sequence: Synthetic oligonucleotide
  Antisense strand to SEQ ID NO: 1667063
ucuaucauaagugguccac

SEQ ID NO: 1667065 - RNA, 19 nt, Artificial Sequence
  Description of Artificial Sequence: Synthetic oligonucleotide
  Sense strand starting at position 2230 of SEQ ID NO: 1561375
uggaccacuuaugauagaa

SEQ ID NO: 1667066 - RNA, 19 nt, Artificial Sequence
  Description of Artificial Sequence: Synthetic oligonucleotide
  Antisense strand to SEQ ID NO: 1667065
uucuaucauaaguggucca

SEQ ID NO: 1667067 - RNA, 19 nt, Artificial Sequence
  Description of Artificial Sequence: Synthetic oligonucleotide
  Sense strand starting at position 2387 of SEQ ID NO: 1561375
cugggaucuuaguggagga

SEQ ID NO: 1667068 - RNA, 19 nt, Artificial Sequence
  Description of Artificial Sequence: Synthetic oligonucleotide
  Antisense strand to SEQ ID NO: 1667067
uccuccacuaagaucccag

SEQ ID NO: 1667069 - RNA, 19 nt, Artificial Sequence
  Description of Artificial Sequence: Synthetic oligonucleotide
  Sense strand starting at position 2388 of SEQ ID NO: 1561375
ugggaucuuaguggaggau

SEQ ID NO: 1667070 - RNA, 19 nt, Artificial Sequence
  Description of Artificial Sequence: Synthetic oligonucleotide
  Antisense strand to SEQ ID NO: 1667069
auccuccacuaagauccca

SEQ ID NO: 1667071 - RNA, 19 nt, Artificial Sequence
  Description of Artificial Sequence: Synthetic oligonucleotide
  Sense strand starting at position 2418 of SEQ ID NO: 1561375
ggcgauuggauccagcaau

SEQ ID NO: 1667072 - RNA, 19 nt, Artificial Sequence
  Description of Artificial Sequence: Synthetic oligonucleotide
  Antisense strand to SEQ ID NO: 1667071
auugcuggauccaaucgcc

SEQ ID NO: 1667073 - RNA, 19 nt, Artificial Sequence
  Description of Artificial Sequence: Synthetic oligonucleotide
  Sense strand starting at position 2477 of SEQ ID NO: 1561375
gaaauuaucucugaggaug

SEQ ID NO: 1667074 - RNA, 19 nt, Artificial Sequence
  Description of Artificial Sequence: Synthetic oligonucleotide
  Antisense strand to SEQ ID NO: 1667073
cauccucagagauaauuuc

SEQ ID NO: 1667075 - RNA, 19 nt, Artificial Sequence
  Description of Artificial Sequence: Synthetic oligonucleotide
  Sense strand starting at position 2509 of SEQ ID NO: 1561375
ugggaaaugcagcauccua

SEQ ID NO: 1667076 - RNA, 19 nt, Artificial Sequence
  Description of Artificial Sequence: Synthetic oligonucleotide
  Antisense strand to SEQ ID NO: 1667075
uaggaugcugcauuuccca

SEQ ID NO: 1667077 - RNA, 19 nt, Artificial Sequence
  Description of Artificial Sequence: Synthetic oligonucleotide
  Sense strand starting at position 2607 of SEQ ID NO: 1561375
gagucaagccugugcucaa

SEQ ID NO: 1667078 - RNA, 19 nt, Artificial Sequence
  Description of Artificial Sequence: Synthetic oligonucleotide
  Antisense strand to SEQ ID NO: 1667077
uugagcacaggcuugacuc

SEQ ID NO: 1667079 - RNA, 19 nt, Artificial Sequence
  Description of Artificial Sequence: Synthetic oligonucleotide
  Sense strand starting at position 2608 of SEQ ID NO: 1561375
agucaagccugugcucaau

SEQ ID NO: 1667080 - RNA, 19 nt, Artificial Sequence
  Description of Artificial Sequence: Synthetic oligonucleotide
  Antisense strand to SEQ ID NO: 1667079
auugagcacaggcuugacu

SEQ ID NO: 1667081 - RNA, 19 nt, Artificial Sequence
  Description of Artificial Sequence: Synthetic oligonucleotide
  Sense strand starting at position 2634 of SEQ ID NO: 1561375
aagguuaaggccgauaagu

SEQ ID NO: 1667082 - RNA, 19 nt, Artificial Sequence
  Description of Artificial Sequence: Synthetic oligonucleotide
  Antisense strand to SEQ ID NO: 1667081
acuuaucggccuuaaccuu

SEQ ID NO: 1667083 - RNA, 19 nt, Artificial Sequence
  Description of Artificial Sequence: Synthetic oligonucleotide
  Sense strand starting at position 2636 of SEQ ID NO: 1561375
gguuaaggccgauaaguua

SEQ ID NO: 1667084 - RNA, 19 nt, Artificial Sequence
  Description of Artificial Sequence: Synthetic oligonucleotide
  Antisense strand to SEQ ID NO: 1667083
uaacuuaucggccuuaacc

SEQ ID NO: 1667085 - RNA, 19 nt, Artificial Sequence
  Description of Artificial Sequence: Synthetic oligonucleotide
  Sense strand starting at position 2887 of SEQ ID NO: 1561375
cguuccacacuugaaauga

SEQ ID NO: 1667086 - RNA, 19 nt, Artificial Sequence
  Description of Artificial Sequence: Synthetic oligonucleotide
  Antisense strand to SEQ ID NO: 1667085
ucauuucaaguguggaacg

SEQ ID NO: 1667087 - RNA, 19 nt, Artificial Sequence
  Description of Artificial Sequence: Synthetic oligonucleotide
  Sense strand starting at position 3002 of SEQ ID NO: 1561375
gggcauucugaagggaacu

SEQ ID NO: 1667088 - RNA, 19 nt, Artificial Sequence
  Description of Artificial Sequence: Synthetic oligonucleotide
  Antisense strand to SEQ ID NO: 1667087
aguucccuucagaaugccc

SEQ ID NO: 1667089 - RNA, 19 nt, Artificial Sequence
  Description of Artificial Sequence: Synthetic oligonucleotide
  Sense strand starting at position 3012 of SEQ ID NO: 1561375
aagggaacuugacacagua

SEQ ID NO: 1667090 - RNA, 19 nt, Artificial Sequence
  Description of Artificial Sequence: Synthetic oligonucleotide
  Antisense strand to SEQ ID NO: 1667089
uacugugucaaguucccuu

SEQ ID NO: 1667091 - RNA, 19 nt, Artificial Sequence
  Description of Artificial Sequence: Synthetic oligonucleotide
  Sense strand starting at position 3081 of SEQ ID NO: 1561375
guuucuuaauguucuauca

SEQ ID NO: 1667092 - RNA, 19 nt, Artificial Sequence
  Description of Artificial Sequence: Synthetic oligonucleotide
  Antisense strand to SEQ ID NO: 1667091
ugauagaacauuaagaaac

SEQ ID NO: 1667093 - RNA, 19 nt, Artificial Sequence
  Description of Artificial Sequence: Synthetic oligonucleotide
  Sense strand starting at position 3090 of SEQ ID NO: 1561375
uguucuaucagauguggau

SEQ ID NO: 1667094 - RNA, 19 nt, Artificial Sequence
  Description of Artificial Sequence: Synthetic oligonucleotide
  Antisense strand to SEQ ID NO: 1667093
auccacaucugauagaaca

SEQ ID NO: 1667095 - RNA, 19 nt, Artificial Sequence
  Description of Artificial Sequence: Synthetic oligonucleotide
  Sense strand starting at position 3133 of SEQ ID NO: 1561375
acaugacaauuggauuuau

SEQ ID NO: 1667096 - RNA, 19 nt, Artificial Sequence
  Description of Artificial Sequence: Synthetic oligonucleotide
  Antisense strand to SEQ ID NO: 1667095
auaaauccaauugucaugu

SEQ ID NO: 1667097 - RNA, 19 nt, Artificial Sequence
  Description of Artificial Sequence: Synthetic oligonucleotide
  Sense strand starting at position 3211 of SEQ ID NO: 1561375
acuaaagacucacagggau

SEQ ID NO: 1667098 - RNA, 19 nt, Artificial Sequence
  Description of Artificial Sequence: Synthetic oligonucleotide
  Antisense strand to SEQ ID NO: 1667097
aucccugugagucuuuagu

SEQ ID NO: 1667099 - RNA, 19 nt, Artificial Sequence
  Description of Artificial Sequence: Synthetic oligonucleotide
  Sense strand starting at position 3328 of SEQ ID NO: 1561375
uuauauacaccguauaguu

SEQ ID NO: 1667100 - RNA, 19 nt, Artificial Sequence
  Description of Artificial Sequence: Synthetic oligonucleotide
  Antisense strand to SEQ ID NO: 1667099
aacuauacgguguauauaa

SEQ ID NO: 1667101 - RNA, 19 nt, Artificial Sequence
  Description of Artificial Sequence: Synthetic oligonucleotide
  Sense strand starting at position 3373 of SEQ ID NO: 1561375
ucaucuggguuacaauaua

SEQ ID NO: 1667102 - RNA, 19 nt, Artificial Sequence
  Description of Artificial Sequence: Synthetic oligonucleotide
  Antisense strand to SEQ ID NO: 1667101
uauauuguaacccagauga

SEQ ID NO: 1667103 - RNA, 19 nt, Artificial Sequence
  Description of Artificial Sequence: Synthetic oligonucleotide
  Sense strand starting at position 3504 of SEQ ID NO: 1561375
uuccauagccuuuggagaa

SEQ ID NO: 1667104 - RNA, 19 nt, Artificial Sequence
  Description of Artificial Sequence: Synthetic oligonucleotide
  Antisense strand to SEQ ID NO: 1667103
uucuccaaaggcuauggaa

SEQ ID NO: 1667105 - RNA, 19 nt, Artificial Sequence
  Description of Artificial Sequence: Synthetic oligonucleotide
  Sense strand starting at position 3505 of SEQ ID NO: 1561375
uccauagccuuuggagaaa

SEQ ID NO: 1667106 - RNA, 19 nt, Artificial Sequence
  Description of Artificial Sequence: Synthetic oligonucleotide
  Antisense strand to SEQ ID NO: 1667105
uuucuccaaaggcuaugga

SEQ ID NO: 1667107 - RNA, 19 nt, Artificial Sequence
  Description of Artificial Sequence: Synthetic oligonucleotide
  Sense strand starting at position 3662 of SEQ ID NO: 1561375
uuuaaugaguccuaugggu

SEQ ID NO: 1667108 - RNA, 19 nt, Artificial Sequence
  Description of Artificial Sequence: Synthetic oligonucleotide
  Antisense strand to SEQ ID NO: 1667107
acccauaggacucauuaaa

SEQ ID NO: 1667109 - RNA, 19 nt, Artificial Sequence
  Description of Artificial Sequence: Synthetic oligonucleotide
  Sense strand starting at position 3664 of SEQ ID NO: 1561375
uaaugaguccuauggguac

SEQ ID NO: 1667110 - RNA, 19 nt, Artificial Sequence
  Description of Artificial Sequence: Synthetic oligonucleotide
  Antisense strand to SEQ ID NO: 1667109
guacccauaggacucauua

SEQ ID NO: 1667111 - RNA, 19 nt, Artificial Sequence
  Description of Artificial Sequence: Synthetic oligonucleotide
  Sense strand starting at position 3675 of SEQ ID NO: 1561375
auggguacagcggaagaau

SEQ ID NO: 1667112 - RNA, 19 nt, Artificial Sequence
  Description of Artificial Sequence: Synthetic oligonucleotide
  Antisense strand to SEQ ID NO: 1667111
auucuuccgcuguacccau

SEQ ID NO: 1667113 - RNA, 19 nt, Artificial Sequence
  Description of Artificial Sequence: Synthetic oligonucleotide
  Sense strand starting at position 3698 of SEQ ID NO: 1561375
guagaauauuacuaucaag

SEQ ID NO: 1667114 - RNA, 19 nt, Artificial Sequence
  Description of Artificial Sequence: Synthetic oligonucleotide
  Antisense strand to SEQ ID NO: 1667113
cuugauaguaauauucuac

SEQ ID NO: 1667115 - RNA, 19 nt, Artificial Sequence
  Description of Artificial Sequence: Synthetic oligonucleotide
  Sense strand starting at position 46 of SEQ ID NO: 1561376
acugcccucugguuugaau

SEQ ID NO: 1667116 - RNA, 19 nt, Artificial Sequence
  Description of Artificial Sequence: Synthetic oligonucleotide
  Antisense strand to SEQ ID NO: 1667115
auucaaaccagagggcagu

SEQ ID NO: 1667117 - RNA, 19 nt, Artificial Sequence
  Description of Artificial Sequence: Synthetic oligonucleotide
  Sense strand starting at position 58 of SEQ ID NO: 1561376
uuugaauagugauugcaaa

SEQ ID NO: 1667118 - RNA, 19 nt, Artificial Sequence
  Description of Artificial Sequence: Synthetic oligonucleotide
  Antisense strand to SEQ ID NO: 1667117
uuugcaaucacuauucaaa

SEQ ID NO: 1667119 - RNA, 19 nt, Artificial Sequence
  Description of Artificial Sequence: Synthetic oligonucleotide
  Sense strand starting at position 59 of SEQ ID NO: 1561376
uugaauagugauugcaaau

SEQ ID NO: 1667120 - RNA, 19 nt, Artificial Sequence
  Description of Artificial Sequence: Synthetic oligonucleotide
  Antisense strand to SEQ ID NO: 1667119
auuugcaaucacuauucaa

SEQ ID NO: 1667121 - RNA, 19 nt, Artificial Sequence
  Description of Artificial Sequence: Synthetic oligonucleotide
  Sense strand starting at position 65 of SEQ ID NO: 1561376
agugauugcaaaugaagcu

SEQ ID NO: 1667122 - RNA, 19 nt, Artificial Sequence
  Description of Artificial Sequence: Synthetic oligonucleotide
  Antisense strand to SEQ ID NO: 1667121
agcuucauuugcaaucacu

SEQ ID NO: 1667123 - RNA, 19 nt, Artificial Sequence
  Description of Artificial Sequence: Synthetic oligonucleotide
  Sense strand starting at position 102 of SEQ ID NO: 1561376
uugucaaaugcacguguua

SEQ ID NO: 1667124 - RNA, 19 nt, Artificial Sequence
  Description of Artificial Sequence: Synthetic oligonucleotide
  Antisense strand to SEQ ID NO: 1667123
uaacacgugcauuugacaa

SEQ ID NO: 1667125 - RNA, 19 nt, Artificial Sequence
  Description of Artificial Sequence: Synthetic oligonucleotide
  Sense strand starting at position 223 of SEQ ID NO: 1561376
gucacaaugucaucaucac

SEQ ID NO: 1667126 - RNA, 19 nt, Artificial Sequence
  Description of Artificial Sequence: Synthetic oligonucleotide
  Antisense strand to SEQ ID NO: 1667125
gugaugaugacauugugac

SEQ ID NO: 1667127 - RNA, 19 nt, Artificial Sequence
  Description of Artificial Sequence: Synthetic oligonucleotide
  Sense strand starting at position 286 of SEQ ID NO: 1561376
gcuuccauacuguguguuu

SEQ ID NO: 1667128 - RNA, 19 nt, Artificial Sequence
  Description of Artificial Sequence: Synthetic oligonucleotide
  Antisense strand to SEQ ID NO: 1667127
aaacacacaguauggaagc

SEQ ID NO: 1667129 - RNA, 19 nt, Artificial Sequence
  Description of Artificial Sequence: Synthetic oligonucleotide
  Sense strand starting at position 551 of SEQ ID NO: 1561376
ucugcucccucuguugaau

SEQ ID NO: 1667130 - RNA, 19 nt, Artificial Sequence
  Description of Artificial Sequence: Synthetic oligonucleotide
  Antisense strand to SEQ ID NO: 1667129
auucaacagagggagcaga

SEQ ID NO: 1667131 - RNA, 19 nt, Artificial Sequence
  Description of Artificial Sequence: Synthetic oligonucleotide
  Sense strand starting at position 1009 of SEQ ID NO: 1561376
acaggaagguuuggacuaa

SEQ ID NO: 1667132 - RNA, 19 nt, Artificial Sequence
  Description of Artificial Sequence: Synthetic oligonucleotide
  Antisense strand to SEQ ID NO: 1667131
uuaguccaaaccuuccugu

SEQ ID NO: 1667133 - RNA, 19 nt, Artificial Sequence
  Description of Artificial Sequence: Synthetic oligonucleotide
  Sense strand starting at position 1529 of SEQ ID NO: 1561376
gaucuuaaggucuguagcu

SEQ ID NO: 1667134 - RNA, 19 nt, Artificial Sequence
  Description of Artificial Sequence: Synthetic oligonucleotide
  Antisense strand to SEQ ID NO: 1667133
agcuacagaccuuaagauc

SEQ ID NO: 1667135 - RNA, 19 nt, Artificial Sequence
  Description of Artificial Sequence: Synthetic oligonucleotide
  Sense strand starting at position 1901 of SEQ ID NO: 1561376
ggcgguucgcaaguuuaau

SEQ ID NO: 1667136 - RNA, 19 nt, Artificial Sequence
  Description of Artificial Sequence: Synthetic oligonucleotide
  Antisense strand to SEQ ID NO: 1667135
auuaaacuugcgaaccgcc

SEQ ID NO: 1667137 - RNA, 19 nt, Artificial Sequence
  Description of Artificial Sequence: Synthetic oligonucleotide
  Sense strand starting at position 1902 of SEQ ID NO: 1561376
gcgguucgcaaguuuaauc

SEQ ID NO: 1667138 - RNA, 19 nt, Artificial Sequence
  Description of Artificial Sequence: Synthetic oligonucleotide
  Antisense strand to SEQ ID NO: 1667137
gauuaaacuugcgaaccgc

SEQ ID NO: 1667139 - RNA, 19 nt, Artificial Sequence
  Description of Artificial Sequence: Synthetic oligonucleotide
  Sense strand starting at position 1907 of SEQ ID NO: 1561376
ucgcaaguuuaauccauac

SEQ ID NO: 1667140 - RNA, 19 nt, Artificial Sequence
  Description of Artificial Sequence: Synthetic oligonucleotide
  Antisense strand to SEQ ID NO: 1667139
guauggauuaaacuugcga

SEQ ID NO: 1667141 - RNA, 19 nt, Artificial Sequence
  Description of Artificial Sequence: Synthetic oligonucleotide
  Sense strand starting at position 2138 of SEQ ID NO: 1561376
uuagaaacgcuggaguguu

SEQ ID NO: 1667142 - RNA, 19 nt, Artificial Sequence
  Description of Artificial Sequence: Synthetic oligonucleotide
  Antisense strand to SEQ ID NO: 1667141
aacacuccagcguuucuaa

SEQ ID NO: 1667143 - RNA, 19 nt, Artificial Sequence
  Description of Artificial Sequence: Synthetic oligonucleotide
  Sense strand starting at position 2220 of SEQ ID NO: 1561376
guggaccacuuaugauaga

SEQ ID NO: 1667144 - RNA, 19 nt, Artificial Sequence
  Description of Artificial Sequence: Synthetic oligonucleotide
  Antisense strand to SEQ ID NO: 1667143
ucuaucauaagugguccac

SEQ ID NO: 1667145 - RNA, 19 nt, Artificial Sequence
  Description of Artificial Sequence: Synthetic oligonucleotide
  Sense strand starting at position 2221 of SEQ ID NO: 1561376
uggaccacuuaugauagaa

SEQ ID NO: 1667146 - RNA, 19 nt, Artificial Sequence
  Description of Artificial Sequence: Synthetic oligonucleotide
  Antisense strand to SEQ ID NO: 1667145
uucuaucauaaguggucca

SEQ ID NO: 1667147 - RNA, 19 nt, Artificial Sequence
  Description of Artificial Sequence: Synthetic oligonucleotide
  Sense strand starting at position 2378 of SEQ ID NO: 1561376
cugggaucuuaguggagga

SEQ ID NO: 1667148 - RNA, 19 nt, Artificial Sequence
  Description of Artificial Sequence: Synthetic oligonucleotide
  Antisense strand to SEQ ID NO: 1667147
uccuccacuaagaucccag

SEQ ID NO: 1667149 - RNA, 19 nt, Artificial Sequence
  Description of Artificial Sequence: Synthetic oligonucleotide
  Sense strand starting at position 2379 of SEQ ID NO: 1561376
ugggaucuuaguggaggau

SEQ ID NO: 1667150 - RNA, 19 nt, Artificial Sequence
  Description of Artificial Sequence: Synthetic oligonucleotide
  Antisense strand to SEQ ID NO: 1667149
auccuccacuaagauccca

SEQ ID NO: 1667151 - RNA, 19 nt, Artificial Sequence
  Description of Artificial Sequence: Synthetic oligonucleotide
  Sense strand starting at position 2409 of SEQ ID NO: 1561376
ggcgauuggauccagcaau

SEQ ID NO: 1667152 - RNA, 19 nt, Artificial Sequence
  Description of Artificial Sequence: Synthetic oligonucleotide
  Antisense strand to SEQ ID NO: 1667151
auugcuggauccaaucgcc

SEQ ID NO: 1667153 - RNA, 19 nt, Artificial Sequence
  Description of Artificial Sequence: Synthetic oligonucleotide
  Sense strand starting at position 2468 of SEQ ID NO: 1561376
gaaauuaucucugaggaug

SEQ ID NO: 1667154 - RNA, 19 nt, Artificial Sequence
  Description of Artificial Sequence: Synthetic oligonucleotide
  Antisense strand to SEQ ID NO: 1667153
cauccucagagauaauuuc

SEQ ID NO: 1667155 - RNA, 19 nt, Artificial Sequence
  Description of Artificial Sequence: Synthetic oligonucleotide
  Sense strand starting at position 2500 of SEQ ID NO: 1561376
ugggaaaugcagcauccua

SEQ ID NO: 1667156 - RNA, 19 nt, Artificial Sequence
  Description of Artificial Sequence: Synthetic oligonucleotide
  Antisense strand to SEQ ID NO: 1667155
uaggaugcugcauuuccca

SEQ ID NO: 1667157 - RNA, 19 nt, Artificial Sequence
  Description of Artificial Sequence: Synthetic oligonucleotide
  Sense strand starting at position 2598 of SEQ ID NO: 1561376
gagucaagccugugcucaa

SEQ ID NO: 1667158 - RNA, 19 nt, Artificial Sequence
  Description of Artificial Sequence: Synthetic oligonucleotide
  Antisense strand to SEQ ID NO: 1667157
uugagcacaggcuugacuc

SEQ ID NO: 1667159 - RNA, 19 nt, Artificial Sequence
  Description of Artificial Sequence: Synthetic oligonucleotide
  Sense strand starting at position 2599 of SEQ ID NO: 1561376
agucaagccugugcucaau

SEQ ID NO: 1667160 - RNA, 19 nt, Artificial Sequence
  Description of Artificial Sequence: Synthetic oligonucleotide
  Antisense strand to SEQ ID NO: 1667159
auugagcacaggcuugacu

SEQ ID NO: 1667161 - RNA, 19 nt, Artificial Sequence
  Description of Artificial Sequence: Synthetic oligonucleotide
  Sense strand starting at position 2625 of SEQ ID NO: 1561376
aagguuaaggccgauaagu

SEQ ID NO: 1667162 - RNA, 19 nt, Artificial Sequence
  Description of Artificial Sequence: Synthetic oligonucleotide
  Antisense strand to SEQ ID NO: 1667161
acuuaucggccuuaaccuu

SEQ ID NO: 1667163 - RNA, 19 nt, Artificial Sequence
  Description of Artificial Sequence: Synthetic oligonucleotide
  Sense strand starting at position 2627 of SEQ ID NO: 1561376
gguuaaggccgauaaguua

SEQ ID NO: 1667164 - RNA, 19 nt, Artificial Sequence
  Description of Artificial Sequence: Synthetic oligonucleotide
  Antisense strand to SEQ ID NO: 1667163
uaacuuaucggccuuaacc

SEQ ID NO: 1667165 - RNA, 19 nt, Artificial Sequence
  Description of Artificial Sequence: Synthetic oligonucleotide
  Sense strand starting at position 2878 of SEQ ID NO: 1561376
cguuccacacuugaaauga

SEQ ID NO: 1667166 - RNA, 19 nt, Artificial Sequence
  Description of Artificial Sequence: Synthetic oligonucleotide
  Antisense strand to SEQ ID NO: 1667165
ucauuucaaguguggaacg

SEQ ID NO: 1667167 - RNA, 19 nt, Artificial Sequence
  Description of Artificial Sequence: Synthetic oligonucleotide
  Sense strand starting at position 2993 of SEQ ID NO: 1561376
gggcauucugaagggaacu

SEQ ID NO: 1667168 - RNA, 19 nt, Artificial Sequence
  Description of Artificial Sequence: Synthetic oligonucleotide
  Antisense strand to SEQ ID NO: 1667167
aguucccuucagaaugccc

SEQ ID NO: 1667169 - RNA, 19 nt, Artificial Sequence
  Description of Artificial Sequence: Synthetic oligonucleotide
  Sense strand starting at position 3003 of SEQ ID NO: 1561376
aagggaacuugacacagua

SEQ ID NO: 1667170 - RNA, 19 nt, Artificial Sequence
  Description of Artificial Sequence: Synthetic oligonucleotide
  Antisense strand to SEQ ID NO: 1667169
uacugugucaaguucccuu

SEQ ID NO: 1667171 - RNA, 19 nt, Artificial Sequence
  Description of Artificial Sequence: Synthetic oligonucleotide
  Sense strand starting at position 3072 of SEQ ID NO: 1561376
guuucuuaauguucuauca

SEQ ID NO: 1667172 - RNA, 19 nt, Artificial Sequence
  Description of Artificial Sequence: Synthetic oligonucleotide
  Antisense strand to SEQ ID NO: 1667171
ugauagaacauuaagaaac

SEQ ID NO: 1667173 - RNA, 19 nt, Artificial Sequence
  Description of Artificial Sequence: Synthetic oligonucleotide
  Sense strand starting at position 3081 of SEQ ID NO: 1561376
uguucuaucagauguggau

SEQ ID NO: 1667174 - RNA, 19 nt, Artificial Sequence
  Description of Artificial Sequence: Synthetic oligonucleotide
  Antisense strand to SEQ ID NO: 1667173
auccacaucugauagaaca

SEQ ID NO: 1667175 - RNA, 19 nt, Artificial Sequence
  Description of Artificial Sequence: Synthetic oligonucleotide
  Sense strand starting at position 3124 of SEQ ID NO: 1561376
acaugacaauuggauuuau

SEQ ID NO: 1667176 - RNA, 19 nt, Artificial Sequence
  Description of Artificial Sequence: Synthetic oligonucleotide
  Antisense strand to SEQ ID NO: 1667175
auaaauccaauugucaugu

SEQ ID NO: 1667177 - RNA, 19 nt, Artificial Sequence
  Description of Artificial Sequence: Synthetic oligonucleotide
  Sense strand starting at position 3202 of SEQ ID NO: 1561376
acuaaagacucacagggau

SEQ ID NO: 1667178 - RNA, 19 nt, Artificial Sequence
  Description of Artificial Sequence: Synthetic oligonucleotide
  Antisense strand to SEQ ID NO: 1667177
aucccugugagucuuuagu

SEQ ID NO: 1667179 - RNA, 19 nt, Artificial Sequence
  Description of Artificial Sequence: Synthetic oligonucleotide
  Sense strand starting at position 3319 of SEQ ID NO: 1561376
uuauauacaccguauaguu

SEQ ID NO: 1667180 - RNA, 19 nt, Artificial Sequence
  Description of Artificial Sequence: Synthetic oligonucleotide
  Antisense strand to SEQ ID NO: 1667179
aacuauacgguguauauaa

SEQ ID NO: 1667181 - RNA, 19 nt, Artificial Sequence
  Description of Artificial Sequence: Synthetic oligonucleotide
  Sense strand starting at position 3364 of SEQ ID NO: 1561376
ucaucuggguuacaauaua

SEQ ID NO: 1667182 - RNA, 19 nt, Artificial Sequence
  Description of Artificial Sequence: Synthetic oligonucleotide
  Antisense strand to SEQ ID NO: 1667181
uauauuguaacccagauga

SEQ ID NO: 1667183 - RNA, 19 nt, Artificial Sequence
  Description of Artificial Sequence: Synthetic oligonucleotide
  Sense strand starting at position 3495 of SEQ ID NO: 1561376
uuccauagccuuuggagaa

SEQ ID NO: 1667184 - RNA, 19 nt, Artificial Sequence
  Description of Artificial Sequence: Synthetic oligonucleotide
  Antisense strand to SEQ ID NO: 1667183
uucuccaaaggcuauggaa

SEQ ID NO: 1667185 - RNA, 19 nt, Artificial Sequence
  Description of Artificial Sequence: Synthetic oligonucleotide
  Sense strand starting at position 3496 of SEQ ID NO: 1561376
uccauagccuuuggagaaa

SEQ ID NO: 1667186 - RNA, 19 nt, Artificial Sequence
  Description of Artificial Sequence: Synthetic oligonucleotide
  Antisense strand to SEQ ID NO: 1667185
uuucuccaaaggcuaugga

SEQ ID NO: 1667187 - RNA, 19 nt, Artificial Sequence
  Description of Artificial Sequence: Synthetic oligonucleotide
  Sense strand starting at position 3653 of SEQ ID NO: 1561376
uuuaaugaguccuaugggu

SEQ ID NO: 1667188 - RNA, 19 nt, Artificial Sequence
  Description of Artificial Sequence: Synthetic oligonucleotide
  Antisense strand to SEQ ID NO: 1667187
acccauaggacucauuaaa

SEQ ID NO: 1667189 - RNA, 19 nt, Artificial Sequence
  Description of Artificial Sequence: Synthetic oligonucleotide
  Sense strand starting at position 3655 of SEQ ID NO: 1561376
uaaugaguccuauggguac

SEQ ID NO: 1667190 - RNA, 19 nt, Artificial Sequence
  Description of Artificial Sequence: Synthetic oligonucleotide
  Antisense strand to SEQ ID NO: 1667189
guacccauaggacucauua

SEQ ID NO: 1667191 - RNA, 19 nt, Artificial Sequence
  Description of Artificial Sequence: Synthetic oligonucleotide
  Sense strand starting at position 3666 of SEQ ID NO: 1561376
auggguacagcggaagaau

SEQ ID NO: 1667192 - RNA, 19 nt, Artificial Sequence
  Description of Artificial Sequence: Synthetic oligonucleotide
  Antisense strand to SEQ ID NO: 1667191
auucuuccgcuguacccau

SEQ ID NO: 1667193 - RNA, 19 nt, Artificial Sequence
  Description of Artificial Sequence: Synthetic oligonucleotide
  Sense strand starting at position 3689 of SEQ ID NO: 1561376
guagaauauuacuaucaag

SEQ ID NO: 1667194 - RNA, 19 nt, Artificial Sequence
  Description of Artificial Sequence: Synthetic oligonucleotide
  Antisense strand to SEQ ID NO: 1667193
cuugauaguaauauucuac

SEQ ID NO: 1667195 - RNA, 19 nt, Artificial Sequence
  Description of Artificial Sequence: Synthetic oligonucleotide
  Sense strand starting at position 1 of SEQ ID NO: 1561377
gccugauccuugucauuga

SEQ ID NO: 1667196 - RNA, 19 nt, Artificial Sequence
  Description of Artificial Sequence: Synthetic oligonucleotide
  Antisense strand to SEQ ID NO: 1667195
ucaaugacaaggaucaggc

SEQ ID NO: 1667197 - RNA, 19 nt, Artificial Sequence
  Description of Artificial Sequence: Synthetic oligonucleotide
  Sense strand starting at position 4 of SEQ ID NO: 1561377
ugauccuugucauugagca

SEQ ID NO: 1667198 - RNA, 19 nt, Artificial Sequence
  Description of Artificial Sequence: Synthetic oligonucleotide
  Antisense strand to SEQ ID NO: 1667197
ugcucaaugacaaggauca

SEQ ID NO: 1667199 - RNA, 19 nt, Artificial Sequence
  Description of Artificial Sequence: Synthetic oligonucleotide
  Sense strand starting at position 5 of SEQ ID NO: 1561377
gauccuugucauugagcaa

SEQ ID NO: 1667200 - RNA, 19 nt, Artificial Sequence
  Description of Artificial Sequence: Synthetic oligonucleotide
  Antisense strand to SEQ ID NO: 1667199
uugcucaaugacaaggauc

SEQ ID NO: 1667201 - RNA, 19 nt, Artificial Sequence
  Description of Artificial Sequence: Synthetic oligonucleotide
  Sense strand starting at position 8 of SEQ ID NO: 1561377
ccuugucauugagcaaaga

SEQ ID NO: 1667202 - RNA, 19 nt, Artificial Sequence
  Description of Artificial Sequence: Synthetic oligonucleotide
  Antisense strand to SEQ ID NO: 1667201
ucuuugcucaaugacaagg

SEQ ID NO: 1667203 - RNA, 19 nt, Artificial Sequence
  Description of Artificial Sequence: Synthetic oligonucleotide
  Sense strand starting at position 9 of SEQ ID NO: 1561377
cuugucauugagcaaagaa

SEQ ID NO: 1667204 - RNA, 19 nt, Artificial Sequence
  Description of Artificial Sequence: Synthetic oligonucleotide
  Antisense strand to SEQ ID NO: 1667203
uucuuugcucaaugacaag

SEQ ID NO: 1667205 - RNA, 19 nt, Artificial Sequence
  Description of Artificial Sequence: Synthetic oligonucleotide
  Sense strand starting at position 241 of SEQ ID NO: 1561377
gugugcugaccauauucua

SEQ ID NO: 1667206 - RNA, 19 nt, Artificial Sequence
  Description of Artificial Sequence: Synthetic oligonucleotide
  Antisense strand to SEQ ID NO: 1667205
uagaauauggucagcacac

SEQ ID NO: 1667207 - RNA, 19 nt, Artificial Sequence
  Description of Artificial Sequence: Synthetic oligonucleotide
  Sense strand starting at position 272 of SEQ ID NO: 1561377
ggcaaugacugcuuauaca

SEQ ID NO: 1667208 - RNA, 19 nt, Artificial Sequence
  Description of Artificial Sequence: Synthetic oligonucleotide
  Antisense strand to SEQ ID NO: 1667207
uguauaagcagucauugcc

SEQ ID NO: 1667209 - RNA, 19 nt, Artificial Sequence
  Description of Artificial Sequence: Synthetic oligonucleotide
  Sense strand starting at position 401 of SEQ ID NO: 1561377
guguuaacuccagacaaca

SEQ ID NO: 1667210 - RNA, 19 nt, Artificial Sequence
  Description of Artificial Sequence: Synthetic oligonucleotide
  Antisense strand to SEQ ID NO: 1667209
uguugucuggaguuaacac

SEQ ID NO: 1667211 - RNA, 19 nt, Artificial Sequence
  Description of Artificial Sequence: Synthetic oligonucleotide
  Sense strand starting at position 508 of SEQ ID NO: 1561377
gcauuaagauaagaaugaa

SEQ ID NO: 1667212 - RNA, 19 nt, Artificial Sequence
  Description of Artificial Sequence: Synthetic oligonucleotide
  Antisense strand to SEQ ID NO: 1667211
uucauucuuaucuuaaugc

SEQ ID NO: 1667213 - RNA, 19 nt, Artificial Sequence
  Description of Artificial Sequence: Synthetic oligonucleotide
  Sense strand starting at position 570 of SEQ ID NO: 1561377
aggcgauaucaucacgaac

SEQ ID NO: 1667214 - RNA, 19 nt, Artificial Sequence
  Description of Artificial Sequence: Synthetic oligonucleotide
  Antisense strand to SEQ ID NO: 1667213
guucgugaugauaucgccu

SEQ ID NO: 1667215 - RNA, 19 nt, Artificial Sequence
  Description of Artificial Sequence: Synthetic oligonucleotide
  Sense strand starting at position 573 of SEQ ID NO: 1561377
cgauaucaucacgaacaug

SEQ ID NO: 1667216 - RNA, 19 nt, Artificial Sequence
  Description of Artificial Sequence: Synthetic oligonucleotide
  Antisense strand to SEQ ID NO: 1667215
cauguucgugaugauaucg

SEQ ID NO: 1667217 - RNA, 19 nt, Artificial Sequence
  Description of Artificial Sequence: Synthetic oligonucleotide
  Sense strand starting at position 664 of SEQ ID NO: 1561377
cauacauaguuggcuagaa

SEQ ID NO: 1667218 - RNA, 19 nt, Artificial Sequence
  Description of Artificial Sequence: Synthetic oligonucleotide
  Antisense strand to SEQ ID NO: 1667217
uucuagccaacuauguaug

SEQ ID NO: 1667219 - RNA, 19 nt, Artificial Sequence
  Description of Artificial Sequence: Synthetic oligonucleotide
  Sense strand starting at position 665 of SEQ ID NO: 1561377
auacauaguuggcuagaau

SEQ ID NO: 1667220 - RNA, 19 nt, Artificial Sequence
  Description of Artificial Sequence: Synthetic oligonucleotide
  Antisense strand to SEQ ID NO: 1667219
auucuagccaacuauguau

SEQ ID NO: 1667221 - RNA, 19 nt, Artificial Sequence
  Description of Artificial Sequence: Synthetic oligonucleotide
  Sense strand starting at position 666 of SEQ ID NO: 1561377
uacauaguuggcuagaauu

SEQ ID NO: 1667222 - RNA, 19 nt, Artificial Sequence
  Description of Artificial Sequence: Synthetic oligonucleotide
  Antisense strand to SEQ ID NO: 1667221
aauucuagccaacuaugua

SEQ ID NO: 1667223 - RNA, 19 nt, Artificial Sequence
  Description of Artificial Sequence: Synthetic oligonucleotide
  Sense strand starting at position 693 of SEQ ID NO: 1561377
cgccuaagcucauuuccau

SEQ ID NO: 1667224 - RNA, 19 nt, Artificial Sequence
  Description of Artificial Sequence: Synthetic oligonucleotide
  Antisense strand to SEQ ID NO: 1667223
auggaaaugagcuuaggcg

SEQ ID NO: 1667225 - RNA, 19 nt, Artificial Sequence
  Description of Artificial Sequence: Synthetic oligonucleotide
  Sense strand starting at position 744 of SEQ ID NO: 1561377
ccagcaagauuggcuaaga

SEQ ID NO: 1667226 - RNA, 19 nt, Artificial Sequence
  Description of Artificial Sequence: Synthetic oligonucleotide
  Antisense strand to SEQ ID NO: 1667225
ucuuagccaaucuugcugg

SEQ ID NO: 1667227 - RNA, 19 nt, Artificial Sequence
  Description of Artificial Sequence: Synthetic oligonucleotide
  Sense strand starting at position 838 of SEQ ID NO: 1561377
cuguuaagaaagugugaau

SEQ ID NO: 1667228 - RNA, 19 nt, Artificial Sequence
  Description of Artificial Sequence: Synthetic oligonucleotide
  Antisense strand to SEQ ID NO: 1667227
auucacacuuucuuaacag

SEQ ID NO: 1667229 - RNA, 19 nt, Artificial Sequence
  Description of Artificial Sequence: Synthetic oligonucleotide
  Sense strand starting at position 1254 of SEQ ID NO: 1561377
ccacgaggucucugucaca

SEQ ID NO: 1667230 - RNA, 19 nt, Artificial Sequence
  Description of Artificial Sequence: Synthetic oligonucleotide
  Antisense strand to SEQ ID NO: 1667229
ugugacagagaccucgugg

SEQ ID NO: 1667231 - RNA, 19 nt, Artificial Sequence
  Description of Artificial Sequence: Synthetic oligonucleotide
  Sense strand starting at position 1307 of SEQ ID NO: 1561377
uauauaaucggaggguaug

SEQ ID NO: 1667232 - RNA, 19 nt, Artificial Sequence
  Description of Artificial Sequence: Synthetic oligonucleotide
  Antisense strand to SEQ ID NO: 1667231
cauacccuccgauuauaua

SEQ ID NO: 1667233 - RNA, 19 nt, Artificial Sequence
  Description of Artificial Sequence: Synthetic oligonucleotide
  Sense strand starting at position 1308 of SEQ ID NO: 1561377
auauaaucggaggguauga

SEQ ID NO: 1667234 - RNA, 19 nt, Artificial Sequence
  Description of Artificial Sequence: Synthetic oligonucleotide
  Antisense strand to SEQ ID NO: 1667233
ucauacccuccgauuauau

SEQ ID NO: 1667235 - RNA, 19 nt, Artificial Sequence
  Description of Artificial Sequence: Synthetic oligonucleotide
  Sense strand starting at position 1376 of SEQ ID NO: 1561377
guagauauaugguuucgaa

SEQ ID NO: 1667236 - RNA, 19 nt, Artificial Sequence
  Description of Artificial Sequence: Synthetic oligonucleotide
  Antisense strand to SEQ ID NO: 1667235
uucgaaaccauauaucuac

SEQ ID NO: 1667237 - RNA, 19 nt, Artificial Sequence
  Description of Artificial Sequence: Synthetic oligonucleotide
  Sense strand starting at position 1524 of SEQ ID NO: 1561377
gccucuuacucauccgaac

SEQ ID NO: 1667238 - RNA, 19 nt, Artificial Sequence
  Description of Artificial Sequence: Synthetic oligonucleotide
  Antisense strand to SEQ ID NO: 1667237
guucggaugaguaagaggc

SEQ ID NO: 1667239 - RNA, 19 nt, Artificial Sequence
  Description of Artificial Sequence: Synthetic oligonucleotide
  Sense strand starting at position 1659 of SEQ ID NO: 1561377
ccuuuacaagcagagugau

SEQ ID NO: 1667240 - RNA, 19 nt, Artificial Sequence
  Description of Artificial Sequence: Synthetic oligonucleotide
  Antisense strand to SEQ ID NO: 1667239
aucacucugcuuguaaagg

SEQ ID NO: 1667241 - RNA, 19 nt, Artificial Sequence
  Description of Artificial Sequence: Synthetic oligonucleotide
  Sense strand starting at position 1672 of SEQ ID NO: 1561377
agugauccauaccuugaca

SEQ ID NO: 1667242 - RNA, 19 nt, Artificial Sequence
  Description of Artificial Sequence: Synthetic oligonucleotide
  Antisense strand to SEQ ID NO: 1667241
ugucaagguauggaucacu

SEQ ID NO: 1667243 - RNA, 19 nt, Artificial Sequence
  Description of Artificial Sequence: Synthetic oligonucleotide
  Sense strand starting at position 1674 of SEQ ID NO: 1561377
ugauccauaccuugacagu

SEQ ID NO: 1667244 - RNA, 19 nt, Artificial Sequence
  Description of Artificial Sequence: Synthetic oligonucleotide
  Antisense strand to SEQ ID NO: 1667243
acugucaagguauggauca

SEQ ID NO: 1667245 - RNA, 19 nt, Artificial Sequence
  Description of Artificial Sequence: Synthetic oligonucleotide
  Sense strand starting at position 1701 of SEQ ID NO: 1561377
ggccguugaucacuacaga

SEQ ID NO: 1667246 - RNA, 19 nt, Artificial Sequence
  Description of Artificial Sequence: Synthetic oligonucleotide
  Antisense strand to SEQ ID NO: 1667245
ucuguagugaucaacggcc

SEQ ID NO: 1667247 - RNA, 19 nt, Artificial Sequence
  Description of Artificial Sequence: Synthetic oligonucleotide
  Sense strand starting at position 1837 of SEQ ID NO: 1561377
aacuaugugguccagggua

SEQ ID NO: 1667248 - RNA, 19 nt, Artificial Sequence
  Description of Artificial Sequence: Synthetic oligonucleotide
  Antisense strand to SEQ ID NO: 1667247
uacccuggaccacauaguu

SEQ ID NO: 1667249 - RNA, 19 nt, Artificial Sequence
  Description of Artificial Sequence: Synthetic oligonucleotide
  Sense strand starting at position 1839 of SEQ ID NO: 1561377
cuaugugguccaggguaca

SEQ ID NO: 1667250 - RNA, 19 nt, Artificial Sequence
  Description of Artificial Sequence: Synthetic oligonucleotide
  Antisense strand to SEQ ID NO: 1667249
uguacccuggaccacauag

SEQ ID NO: 1667251 - RNA, 19 nt, Artificial Sequence
  Description of Artificial Sequence: Synthetic oligonucleotide
  Sense strand starting at position 1980 of SEQ ID NO: 1561377
guuacacuuccguaaacug

SEQ ID NO: 1667252 - RNA, 19 nt, Artificial Sequence
  Description of Artificial Sequence: Synthetic oligonucleotide
  Antisense strand to SEQ ID NO: 1667251
caguuuacggaaguguaac

SEQ ID NO: 1667253 - RNA, 19 nt, Artificial Sequence
  Description of Artificial Sequence: Synthetic oligonucleotide
  Sense strand starting at position 2095 of SEQ ID NO: 1561377
ggcauuuccuacucuguaa

SEQ ID NO: 1667254 - RNA, 19 nt, Artificial Sequence
  Description of Artificial Sequence: Synthetic oligonucleotide
  Antisense strand to SEQ ID NO: 1667253
uuacagaguaggaaaugcc

SEQ ID NO: 1667255 - RNA, 19 nt, Artificial Sequence
  Description of Artificial Sequence: Synthetic oligonucleotide
  Sense strand starting at position 3009 of SEQ ID NO: 1561377
aaugaauuacgaugugagc

SEQ ID NO: 1667256 - RNA, 19 nt, Artificial Sequence
  Description of Artificial Sequence: Synthetic oligonucleotide
  Antisense strand to SEQ ID NO: 1667255
gcucacaucguaauucauu

SEQ ID NO: 1667257 - RNA, 19 nt, Artificial Sequence
  Description of Artificial Sequence: Synthetic oligonucleotide
  Sense strand starting at position 3278 of SEQ ID NO: 1561377
aucuaaguuuaagagaaag

SEQ ID NO: 1667258 - RNA, 19 nt, Artificial Sequence
  Description of Artificial Sequence: Synthetic oligonucleotide
  Antisense strand to SEQ ID NO: 1667257
cuuucucuuaaacuuagau

SEQ ID NO: 1667259 - RNA, 19 nt, Artificial Sequence
  Description of Artificial Sequence: Synthetic oligonucleotide
  Sense strand starting at position 3328 of SEQ ID NO: 1561377
uccucauggacgugaguua

SEQ ID NO: 1667260 - RNA, 19 nt, Artificial Sequence
  Description of Artificial Sequence: Synthetic oligonucleotide
  Antisense strand to SEQ ID NO: 1667259
uaacucacguccaugagga

SEQ ID NO: 1667261 - RNA, 19 nt, Artificial Sequence
  Description of Artificial Sequence: Synthetic oligonucleotide
  Sense strand starting at position 3329 of SEQ ID NO: 1561377
ccucauggacgugaguuaa

SEQ ID NO: 1667262 - RNA, 19 nt, Artificial Sequence
  Description of Artificial Sequence: Synthetic oligonucleotide
  Antisense strand to SEQ ID NO: 1667261
uuaacucacguccaugagg

SEQ ID NO: 1667263 - RNA, 19 nt, Artificial Sequence
  Description of Artificial Sequence: Synthetic oligonucleotide
  Sense strand starting at position 3342 of SEQ ID NO: 1561377
aguuaauucugagaggaga

SEQ ID NO: 1667264 - RNA, 19 nt, Artificial Sequence
  Description of Artificial Sequence: Synthetic oligonucleotide
  Antisense strand to SEQ ID NO: 1667263
ucuccucucagaauuaacu

SEQ ID NO: 1667265 - RNA, 19 nt, Artificial Sequence
  Description of Artificial Sequence: Synthetic oligonucleotide
  Sense strand starting at position 3719 of SEQ ID NO: 1561377
gagcaagacuccucgguaa

SEQ ID NO: 1667266 - RNA, 19 nt, Artificial Sequence
  Description of Artificial Sequence: Synthetic oligonucleotide
  Antisense strand to SEQ ID NO: 1667265
uuaccgaggagucuugcuc

SEQ ID NO: 1667267 - RNA, 19 nt, Artificial Sequence
  Description of Artificial Sequence: Synthetic oligonucleotide
  Sense strand starting at position 3721 of SEQ ID NO: 1561377
gcaagacuccucgguaaag

SEQ ID NO: 1667268 - RNA, 19 nt, Artificial Sequence
  Description of Artificial Sequence: Synthetic oligonucleotide
  Antisense strand to SEQ ID NO: 1667267
cuuuaccgaggagucuugc

SEQ ID NO: 1667269 - RNA, 19 nt, Artificial Sequence
  Description of Artificial Sequence: Synthetic oligonucleotide
  Sense strand starting at position 3722 of SEQ ID NO: 1561377
caagacuccucgguaaaga

SEQ ID NO: 1667270 - RNA, 19 nt, Artificial Sequence
  Description of Artificial Sequence: Synthetic oligonucleotide
  Antisense strand to SEQ ID NO: 1667269
ucuuuaccgaggagucuug

SEQ ID NO: 1667271 - RNA, 19 nt, Artificial Sequence
  Description of Artificial Sequence: Synthetic oligonucleotide
  Sense strand starting at position 3859 of SEQ ID NO: 1561377
caggaaguguuuccagcau

SEQ ID NO: 1667272 - RNA, 19 nt, Artificial Sequence
  Description of Artificial Sequence: Synthetic oligonucleotide
  Antisense strand to SEQ ID NO: 1667271
augcuggaaacacuuccug

SEQ ID NO: 1667273 - RNA, 19 nt, Artificial Sequence
  Description of Artificial Sequence: Synthetic oligonucleotide
  Sense strand starting at position 3874 of SEQ ID NO: 1561377
gcauccaguuagucucaaa

SEQ ID NO: 1667274 - RNA, 19 nt, Artificial Sequence
  Description of Artificial Sequence: Synthetic oligonucleotide
  Antisense strand to SEQ ID NO: 1667273
uuugagacuaacuggaugc

SEQ ID NO: 1667275 - RNA, 19 nt, Artificial Sequence
  Description of Artificial Sequence: Synthetic oligonucleotide
  Sense strand starting at position 112 of SEQ ID NO: 1561378
uucugugcuccugagcaca

SEQ ID NO: 1667276 - RNA, 19 nt, Artificial Sequence
  Description of Artificial Sequence: Synthetic oligonucleotide
  Antisense strand to SEQ ID NO: 1667275
ugugcucaggagcacagaa

SEQ ID NO: 1667277 - RNA, 19 nt, Artificial Sequence
  Description of Artificial Sequence: Synthetic oligonucleotide
  Sense strand starting at position 212 of SEQ ID NO: 1561378
gcagcauucugagcucuag

SEQ ID NO: 1667278 - RNA, 19 nt, Artificial Sequence
  Description of Artificial Sequence: Synthetic oligonucleotide
  Antisense strand to SEQ ID NO: 1667277
cuagagcucagaaugcugc

SEQ ID NO: 1667279 - RNA, 19 nt, Artificial Sequence
  Description of Artificial Sequence: Synthetic oligonucleotide
  Sense strand starting at position 245 of SEQ ID NO: 1561378
ggauaagaauauggaacaa

SEQ ID NO: 1667280 - RNA, 19 nt, Artificial Sequence
  Description of Artificial Sequence: Synthetic oligonucleotide
  Antisense strand to SEQ ID NO: 1667279
uuguuccauauucuuaucc

SEQ ID NO: 1667281 - RNA, 19 nt, Artificial Sequence
  Description of Artificial Sequence: Synthetic oligonucleotide
  Sense strand starting at position 338 of SEQ ID NO: 1561378
accugaauuccagagcuca

SEQ ID NO: 1667282 - RNA, 19 nt, Artificial Sequence
  Description of Artificial Sequence: Synthetic oligonucleotide
  Antisense strand to SEQ ID NO: 1667281
ugagcucuggaauucaggu

SEQ ID NO: 1667283 - RNA, 19 nt, Artificial Sequence
  Description of Artificial Sequence: Synthetic oligonucleotide
  Sense strand starting at position 717 of SEQ ID NO: 1561378
uuaacuucuagcuggagga

SEQ ID NO: 1667284 - RNA, 19 nt, Artificial Sequence
  Description of Artificial Sequence: Synthetic oligonucleotide
  Antisense strand to SEQ ID NO: 1667283
uccuccagcuagaaguuaa

SEQ ID NO: 1667285 - RNA, 19 nt, Artificial Sequence
  Description of Artificial Sequence: Synthetic oligonucleotide
  Sense strand starting at position 718 of SEQ ID NO: 1561378
uaacuucuagcuggaggau

SEQ ID NO: 1667286 - RNA, 19 nt, Artificial Sequence
  Description of Artificial Sequence: Synthetic oligonucleotide
  Antisense strand to SEQ ID NO: 1667285
auccuccagcuagaaguua

SEQ ID NO: 1667287 - RNA, 19 nt, Artificial Sequence
  Description of Artificial Sequence: Synthetic oligonucleotide
  Sense strand starting at position 1003 of SEQ ID NO: 1561378
aggugucaacaaugaauga

SEQ ID NO: 1667288 - RNA, 19 nt, Artificial Sequence
  Description of Artificial Sequence: Synthetic oligonucleotide
  Antisense strand to SEQ ID NO: 1667287
ucauucauuguugacaccu

SEQ ID NO: 1667289 - RNA, 19 nt, Artificial Sequence
  Description of Artificial Sequence: Synthetic oligonucleotide
  Sense strand starting at position 1292 of SEQ ID NO: 1561378
acuuaagucuuuccugagu

SEQ ID NO: 1667290 - RNA, 19 nt, Artificial Sequence
  Description of Artificial Sequence: Synthetic oligonucleotide
  Antisense strand to SEQ ID NO: 1667289
acucaggaaagacuuaagu

SEQ ID NO: 1667291 - RNA, 19 nt, Artificial Sequence
  Description of Artificial Sequence: Synthetic oligonucleotide
  Sense strand starting at position 1502 of SEQ ID NO: 1561378
ugggaacaauaccucgaau

SEQ ID NO: 1667292 - RNA, 19 nt, Artificial Sequence
  Description of Artificial Sequence: Synthetic oligonucleotide
  Antisense strand to SEQ ID NO: 1667291
auucgagguauuguuccca

SEQ ID NO: 1667293 - RNA, 19 nt, Artificial Sequence
  Description of Artificial Sequence: Synthetic oligonucleotide
  Sense strand starting at position 2372 of SEQ ID NO: 1561378
cucuuucucuguguuccaa

SEQ ID NO: 1667294 - RNA, 19 nt, Artificial Sequence
  Description of Artificial Sequence: Synthetic oligonucleotide
  Antisense strand to SEQ ID NO: 1667293
uuggaacacagagaaagag

SEQ ID NO: 1667295 - RNA, 19 nt, Artificial Sequence
  Description of Artificial Sequence: Synthetic oligonucleotide
  Sense strand starting at position 2481 of SEQ ID NO: 1561378
gacucuaucuuuguucgua

SEQ ID NO: 1667296 - RNA, 19 nt, Artificial Sequence
  Description of Artificial Sequence: Synthetic oligonucleotide
  Antisense strand to SEQ ID NO: 1667295
uacgaacaaagauagaguc

SEQ ID NO: 1667297 - RNA, 19 nt, Artificial Sequence
  Description of Artificial Sequence: Synthetic oligonucleotide
  Sense strand starting at position 2482 of SEQ ID NO: 1561378
acucuaucuuuguucguaa

SEQ ID NO: 1667298 - RNA, 19 nt, Artificial Sequence
  Description of Artificial Sequence: Synthetic oligonucleotide
  Antisense strand to SEQ ID NO: 1667297
uuacgaacaaagauagagu

SEQ ID NO: 1667299 - RNA, 19 nt, Artificial Sequence
  Description of Artificial Sequence: Synthetic oligonucleotide
  Sense strand starting at position 2483 of SEQ ID NO: 1561378
cucuaucuuuguucguaaa

SEQ ID NO: 1667300 - RNA, 19 nt, Artificial Sequence
  Description of Artificial Sequence: Synthetic oligonucleotide
  Antisense strand to SEQ ID NO: 1667299
uuuacgaacaaagauagag

SEQ ID NO: 1667301 - RNA, 19 nt, Artificial Sequence
  Description of Artificial Sequence: Synthetic oligonucleotide
  Sense strand starting at position 2510 of SEQ ID NO: 1561378
cauguuguucuuggagacu

SEQ ID NO: 1667302 - RNA, 19 nt, Artificial Sequence
  Description of Artificial Sequence: Synthetic oligonucleotide
  Antisense strand to SEQ ID NO: 1667301
agucuccaagaacaacaug

SEQ ID NO: 1667303 - RNA, 19 nt, Artificial Sequence
  Description of Artificial Sequence: Synthetic oligonucleotide
  Sense strand starting at position 2640 of SEQ ID NO: 1561378
ucacccuuucuggguaaca

SEQ ID NO: 1667304 - RNA, 19 nt, Artificial Sequence
  Description of Artificial Sequence: Synthetic oligonucleotide
  Antisense strand to SEQ ID NO: 1667303
uguuacccagaaaggguga

SEQ ID NO: 1667305 - RNA, 19 nt, Artificial Sequence
  Description of Artificial Sequence: Synthetic oligonucleotide
  Sense strand starting at position 2667 of SEQ ID NO: 1561378
ggcacagauuugggauauu

SEQ ID NO: 1667306 - RNA, 19 nt, Artificial Sequence
  Description of Artificial Sequence: Synthetic oligonucleotide
  Antisense strand to SEQ ID NO: 1667305
aauaucccaaaucugugcc

SEQ ID NO: 1667307 - RNA, 19 nt, Artificial Sequence
  Description of Artificial Sequence: Synthetic oligonucleotide
  Sense strand starting at position 2676 of SEQ ID NO: 1561378
uugggauauuccuccucua

SEQ ID NO: 1667308 - RNA, 19 nt, Artificial Sequence
  Description of Artificial Sequence: Synthetic oligonucleotide
  Antisense strand to SEQ ID NO: 1667307
uagaggaggaauaucccaa

SEQ ID NO: 1667309 - RNA, 19 nt, Artificial Sequence
  Description of Artificial Sequence: Synthetic oligonucleotide
  Sense strand starting at position 2679 of SEQ ID NO: 1561378
ggauauuccuccucuagug

SEQ ID NO: 1667310 - RNA, 19 nt, Artificial Sequence
  Description of Artificial Sequence: Synthetic oligonucleotide
  Antisense strand to SEQ ID NO: 1667309
cacuagaggaggaauaucc

SEQ ID NO: 1667311 - RNA, 19 nt, Artificial Sequence
  Description of Artificial Sequence: Synthetic oligonucleotide
  Sense strand starting at position 2747 of SEQ ID NO: 1561378
ccaagugcuagaugugagu

SEQ ID NO: 1667312 - RNA, 19 nt, Artificial Sequence
  Description of Artificial Sequence: Synthetic oligonucleotide
  Antisense strand to SEQ ID NO: 1667311
acucacaucuagcacuugg

SEQ ID NO: 1667313 - RNA, 19 nt, Artificial Sequence
  Description of Artificial Sequence: Synthetic oligonucleotide
  Sense strand starting at position 2749 of SEQ ID NO: 1561378
aagugcuagaugugaguga

SEQ ID NO: 1667314 - RNA, 19 nt, Artificial Sequence
  Description of Artificial Sequence: Synthetic oligonucleotide
  Antisense strand to SEQ ID NO: 1667313
ucacucacaucuagcacuu

SEQ ID NO: 1667315 - RNA, 19 nt, Artificial Sequence
  Description of Artificial Sequence: Synthetic oligonucleotide
  Sense strand starting at position 2753 of SEQ ID NO: 1561378
gcuagaugugagugauggu

SEQ ID NO: 1667316 - RNA, 19 nt, Artificial Sequence
  Description of Artificial Sequence: Synthetic oligonucleotide
  Antisense strand to SEQ ID NO: 1667315
accaucacucacaucuagc

SEQ ID NO: 1667317 - RNA, 19 nt, Artificial Sequence
  Description of Artificial Sequence: Synthetic oligonucleotide
  Sense strand starting at position 2754 of SEQ ID NO: 1561378
cuagaugugagugaugguu

SEQ ID NO: 1667318 - RNA, 19 nt, Artificial Sequence
  Description of Artificial Sequence: Synthetic oligonucleotide
  Antisense strand to SEQ ID NO: 1667317
aaccaucacucacaucuag

SEQ ID NO: 1667319 - RNA, 19 nt, Artificial Sequence
  Description of Artificial Sequence: Synthetic oligonucleotide
  Sense strand starting at position 2762 of SEQ ID NO: 1561378
gagugaugguuuccggaga

SEQ ID NO: 1667320 - RNA, 19 nt, Artificial Sequence
  Description of Artificial Sequence: Synthetic oligonucleotide
  Antisense strand to SEQ ID NO: 1667319
ucuccggaaaccaucacuc

SEQ ID NO: 1667321 - RNA, 19 nt, Artificial Sequence
  Description of Artificial Sequence: Synthetic oligonucleotide
  Sense strand starting at position 2809 of SEQ ID NO: 1561378
ggcaaacuuuccuuggaga

SEQ ID NO: 1667322 - RNA, 19 nt, Artificial Sequence
  Description of Artificial Sequence: Synthetic oligonucleotide
  Antisense strand to SEQ ID NO: 1667321
ucuccaaggaaaguuugcc

SEQ ID NO: 1667323 - RNA, 19 nt, Artificial Sequence
  Description of Artificial Sequence: Synthetic oligonucleotide
  Sense strand starting at position 2886 of SEQ ID NO: 1561378
cgcgauguucuccacuaaa

SEQ ID NO: 1667324 - RNA, 19 nt, Artificial Sequence
  Description of Artificial Sequence: Synthetic oligonucleotide
  Antisense strand to SEQ ID NO: 1667323
uuuaguggagaacaucgcg

SEQ ID NO: 1667325 - RNA, 19 nt, Artificial Sequence
  Description of Artificial Sequence: Synthetic oligonucleotide
  Sense strand starting at position 3048 of SEQ ID NO: 1561378
acuucuuaccgacgacaau

SEQ ID NO: 1667326 - RNA, 19 nt, Artificial Sequence
  Description of Artificial Sequence: Synthetic oligonucleotide
  Antisense strand to SEQ ID NO: 1667325
auugucgucgguaagaagu

SEQ ID NO: 1667327 - RNA, 19 nt, Artificial Sequence
  Description of Artificial Sequence: Synthetic oligonucleotide
  Sense strand starting at position 3049 of SEQ ID NO: 1561378
cuucuuaccgacgacaauu

SEQ ID NO: 1667328 - RNA, 19 nt, Artificial Sequence
  Description of Artificial Sequence: Synthetic oligonucleotide
  Antisense strand to SEQ ID NO: 1667327
aauugucgucgguaagaag

SEQ ID NO: 1667329 - RNA, 19 nt, Artificial Sequence
  Description of Artificial Sequence: Synthetic oligonucleotide
  Sense strand starting at position 3110 of SEQ ID NO: 1561378
ugaaauaccuagucagcaa

SEQ ID NO: 1667330 - RNA, 19 nt, Artificial Sequence
  Description of Artificial Sequence: Synthetic oligonucleotide
  Antisense strand to SEQ ID NO: 1667329
uugcugacuagguauuuca

SEQ ID NO: 1667331 - RNA, 19 nt, Artificial Sequence
  Description of Artificial Sequence: Synthetic oligonucleotide
  Sense strand starting at position 3157 of SEQ ID NO: 1561378
ccuaguaauucucuguaaa

SEQ ID NO: 1667332 - RNA, 19 nt, Artificial Sequence
  Description of Artificial Sequence: Synthetic oligonucleotide
  Antisense strand to SEQ ID NO: 1667331
uuuacagagaauuacuagg

SEQ ID NO: 1667333 - RNA, 19 nt, Artificial Sequence
  Description of Artificial Sequence: Synthetic oligonucleotide
  Sense strand starting at position 3541 of SEQ ID NO: 1561378
ccauguccuccuuauagag

SEQ ID NO: 1667334 - RNA, 19 nt, Artificial Sequence
  Description of Artificial Sequence: Synthetic oligonucleotide
  Antisense strand to SEQ ID NO: 1667333
cucuauaaggaggacaugg

SEQ ID NO: 1667335 - RNA, 19 nt, Artificial Sequence
  Description of Artificial Sequence: Synthetic oligonucleotide
  Sense strand starting at position 3589 of SEQ ID NO: 1561378
accuucuagauguguguua

SEQ ID NO: 1667336 - RNA, 19 nt, Artificial Sequence
  Description of Artificial Sequence: Synthetic oligonucleotide
  Antisense strand to SEQ ID NO: 1667335
uaacacacaucuagaaggu

SEQ ID NO: 1667337 - RNA, 19 nt, Artificial Sequence
  Description of Artificial Sequence: Synthetic oligonucleotide
  Sense strand starting at position 3591 of SEQ ID NO: 1561378
cuucuagauguguguuaga

SEQ ID NO: 1667338 - RNA, 19 nt, Artificial Sequence
  Description of Artificial Sequence: Synthetic oligonucleotide
  Antisense strand to SEQ ID NO: 1667337
ucuaacacacaucuagaag

SEQ ID NO: 1667339 - RNA, 19 nt, Artificial Sequence
  Description of Artificial Sequence: Synthetic oligonucleotide
  Sense strand starting at position 3698 of SEQ ID NO: 1561378
guuccuuauccugacacuu

SEQ ID NO: 1667340 - RNA, 19 nt, Artificial Sequence
  Description of Artificial Sequence: Synthetic oligonucleotide
  Antisense strand to SEQ ID NO: 1667339
aagugucaggauaaggaac

SEQ ID NO: 1667341 - RNA, 19 nt, Artificial Sequence
  Description of Artificial Sequence: Synthetic oligonucleotide
  Sense strand starting at position 3708 of SEQ ID NO: 1561378
cugacacuuccuggaugau

SEQ ID NO: 1667342 - RNA, 19 nt, Artificial Sequence
  Description of Artificial Sequence: Synthetic oligonucleotide
  Antisense strand to SEQ ID NO: 1667341
aucauccaggaagugucag

SEQ ID NO: 1667343 - RNA, 19 nt, Artificial Sequence
  Description of Artificial Sequence: Synthetic oligonucleotide
  Sense strand starting at position 3733 of SEQ ID NO: 1561378
acaaauacaugugaugaca

SEQ ID NO: 1667344 - RNA, 19 nt, Artificial Sequence
  Description of Artificial Sequence: Synthetic oligonucleotide
  Antisense strand to SEQ ID NO: 1667343
ugucaucacauguauuugu

SEQ ID NO: 1667345 - RNA, 19 nt, Artificial Sequence
  Description of Artificial Sequence: Synthetic oligonucleotide
  Sense strand starting at position 3742 of SEQ ID NO: 1561378
ugugaugacaucuguuguu

SEQ ID NO: 1667346 - RNA, 19 nt, Artificial Sequence
  Description of Artificial Sequence: Synthetic oligonucleotide
  Antisense strand to SEQ ID NO: 1667345
aacaacagaugucaucaca

SEQ ID NO: 1667347 - RNA, 19 nt, Artificial Sequence
  Description of Artificial Sequence: Synthetic oligonucleotide
  Sense strand starting at position 3756 of SEQ ID NO: 1561378
uuguuucuuuggcucagaa

SEQ ID NO: 1667348 - RNA, 19 nt, Artificial Sequence
  Description of Artificial Sequence: Synthetic oligonucleotide
  Antisense strand to SEQ ID NO: 1667347
uucugagccaaagaaacaa

SEQ ID NO: 1667349 - RNA, 19 nt, Artificial Sequence
  Description of Artificial Sequence: Synthetic oligonucleotide
  Sense strand starting at position 3758 of SEQ ID NO: 1561378
guuucuuuggcucagaauc

SEQ ID NO: 1667350 - RNA, 19 nt, Artificial Sequence
  Description of Artificial Sequence: Synthetic oligonucleotide
  Antisense strand to SEQ ID NO: 1667349
gauucugagccaaagaaac

SEQ ID NO: 1667351 - RNA, 19 nt, Artificial Sequence
  Description of Artificial Sequence: Synthetic oligonucleotide
  Sense strand starting at position 3905 of SEQ ID NO: 1561378
uuagguauggguugagaag

SEQ ID NO: 1667352 - RNA, 19 nt, Artificial Sequence
  Description of Artificial Sequence: Synthetic oligonucleotide
  Antisense strand to SEQ ID NO: 1667351
cuucucaacccauaccuaa

SEQ ID NO: 1667353 - RNA, 19 nt, Artificial Sequence
  Description of Artificial Sequence: Synthetic oligonucleotide
  Sense strand starting at position 3907 of SEQ ID NO: 1561378
agguauggguugagaaggu

SEQ ID NO: 1667354 - RNA, 19 nt, Artificial Sequence
  Description of Artificial Sequence: Synthetic oligonucleotide
  Antisense strand to SEQ ID NO: 1667353
accuucucaacccauaccu

SEQ ID NO: 1667355 - RNA, 19 nt, Artificial Sequence
  Description of Artificial Sequence: Synthetic oligonucleotide
  Sense strand starting at position 55 of SEQ ID NO: 1561379
acagguuuacuguguauuu

SEQ ID NO: 1667356 - RNA, 19 nt, Artificial Sequence
  Description of Artificial Sequence: Synthetic oligonucleotide
  Antisense strand to SEQ ID NO: 1667355
aaauacacaguaaaccugu

SEQ ID NO: 1667357 - RNA, 19 nt, Artificial Sequence
  Description of Artificial Sequence: Synthetic oligonucleotide
  Sense strand starting at position 112 of SEQ ID NO: 1561379
gauaguaguggaugagaau

SEQ ID NO: 1667358 - RNA, 19 nt, Artificial Sequence
  Description of Artificial Sequence: Synthetic oligonucleotide
  Antisense strand to SEQ ID NO: 1667357
auucucauccacuacuauc

SEQ ID NO: 1667359 - RNA, 19 nt, Artificial Sequence
  Description of Artificial Sequence: Synthetic oligonucleotide
  Sense strand starting at position 188 of SEQ ID NO: 1561379
cuauguuguaguugagaau

SEQ ID NO: 1667360 - RNA, 19 nt, Artificial Sequence
  Description of Artificial Sequence: Synthetic oligonucleotide
  Antisense strand to SEQ ID NO: 1667359
auucucaacuacaacauag

SEQ ID NO: 1667361 - RNA, 19 nt, Artificial Sequence
  Description of Artificial Sequence: Synthetic oligonucleotide
  Sense strand starting at position 189 of SEQ ID NO: 1561379
uauguuguaguugagaaua

SEQ ID NO: 1667362 - RNA, 19 nt, Artificial Sequence
  Description of Artificial Sequence: Synthetic oligonucleotide
  Antisense strand to SEQ ID NO: 1667361
uauucucaacuacaacaua

SEQ ID NO: 1667363 - RNA, 19 nt, Artificial Sequence
  Description of Artificial Sequence: Synthetic oligonucleotide
  Sense strand starting at position 194 of SEQ ID NO: 1561379
uguaguugagaauaaucuu

SEQ ID NO: 1667364 - RNA, 19 nt, Artificial Sequence
  Description of Artificial Sequence: Synthetic oligonucleotide
  Antisense strand to SEQ ID NO: 1667363
aagauuauucucaacuaca

SEQ ID NO: 1667365 - RNA, 19 nt, Artificial Sequence
  Description of Artificial Sequence: Synthetic oligonucleotide
  Sense strand starting at position 427 of SEQ ID NO: 1561379
ucucgaauucucgaucuca

SEQ ID NO: 1667366 - RNA, 19 nt, Artificial Sequence
  Description of Artificial Sequence: Synthetic oligonucleotide
  Antisense strand to SEQ ID NO: 1667365
ugagaucgagaauucgaga

SEQ ID NO: 1667367 - RNA, 19 nt, Artificial Sequence
  Description of Artificial Sequence: Synthetic oligonucleotide
  Sense strand starting at position 629 of SEQ ID NO: 1561379
gaaagugguaguuaugcca

SEQ ID NO: 1667368 - RNA, 19 nt, Artificial Sequence
  Description of Artificial Sequence: Synthetic oligonucleotide
  Antisense strand to SEQ ID NO: 1667367
uggcauaacuaccacuuuc

SEQ ID NO: 1667369 - RNA, 19 nt, Artificial Sequence
  Description of Artificial Sequence: Synthetic oligonucleotide
  Sense strand starting at position 1053 of SEQ ID NO: 1561379
ugguguuuccaggaaauga

SEQ ID NO: 1667370 - RNA, 19 nt, Artificial Sequence
  Description of Artificial Sequence: Synthetic oligonucleotide
  Antisense strand to SEQ ID NO: 1667369
ucauuuccuggaaacacca

SEQ ID NO: 1667371 - RNA, 19 nt, Artificial Sequence
  Description of Artificial Sequence: Synthetic oligonucleotide
  Sense strand starting at position 1104 of SEQ ID NO: 1561379
cugauacuguuaucucuau

SEQ ID NO: 1667372 - RNA, 19 nt, Artificial Sequence
  Description of Artificial Sequence: Synthetic oligonucleotide
  Antisense strand to SEQ ID NO: 1667371
auagagauaacaguaucag

SEQ ID NO: 1667373 - RNA, 19 nt, Artificial Sequence
  Description of Artificial Sequence: Synthetic oligonucleotide
  Sense strand starting at position 1105 of SEQ ID NO: 1561379
ugauacuguuaucucuauu

SEQ ID NO: 1667374 - RNA, 19 nt, Artificial Sequence
  Description of Artificial Sequence: Synthetic oligonucleotide
  Antisense strand to SEQ ID NO: 1667373
aauagagauaacaguauca

SEQ ID NO: 1667375 - RNA, 19 nt, Artificial Sequence
  Description of Artificial Sequence: Synthetic oligonucleotide
  Sense strand starting at position 1163 of SEQ ID NO: 1561379
aggcuuaauggcuacuauu

SEQ ID NO: 1667376 - RNA, 19 nt, Artificial Sequence
  Description of Artificial Sequence: Synthetic oligonucleotide
  Antisense strand to SEQ ID NO: 1667375
aauaguagccauuaagccu

SEQ ID NO: 1667377 - RNA, 19 nt, Artificial Sequence
  Description of Artificial Sequence: Synthetic oligonucleotide
  Sense strand starting at position 1204 of SEQ ID NO: 1561379
ccaacuagccauggucaua

SEQ ID NO: 1667378 - RNA, 19 nt, Artificial Sequence
  Description of Artificial Sequence: Synthetic oligonucleotide
  Antisense strand to SEQ ID NO: 1667377
uaugaccauggcuaguugg

SEQ ID NO: 1667379 - RNA, 19 nt, Artificial Sequence
  Description of Artificial Sequence: Synthetic oligonucleotide
  Sense strand starting at position 1813 of SEQ ID NO: 1561379
cgguuuccuccucagaauu

SEQ ID NO: 1667380 - RNA, 19 nt, Artificial Sequence
  Description of Artificial Sequence: Synthetic oligonucleotide
  Antisense strand to SEQ ID NO: 1667379
aauucugaggaggaaaccg

SEQ ID NO: 1667381 - RNA, 19 nt, Artificial Sequence
  Description of Artificial Sequence: Synthetic oligonucleotide
  Sense strand starting at position 2254 of SEQ ID NO: 1561379
aggguuuguggaggcagaa

SEQ ID NO: 1667382 - RNA, 19 nt, Artificial Sequence
  Description of Artificial Sequence: Synthetic oligonucleotide
  Antisense strand to SEQ ID NO: 1667381
uucugccuccacaaacccu

SEQ ID NO: 1667383 - RNA, 19 nt, Artificial Sequence
  Description of Artificial Sequence: Synthetic oligonucleotide
  Sense strand starting at position 2304 of SEQ ID NO: 1561379
ggagggagacugugugauu

SEQ ID NO: 1667384 - RNA, 19 nt, Artificial Sequence
  Description of Artificial Sequence: Synthetic oligonucleotide
  Antisense strand to SEQ ID NO: 1667383
aaucacacagucucccucc

SEQ ID NO: 1667385 - RNA, 19 nt, Artificial Sequence
  Description of Artificial Sequence: Synthetic oligonucleotide
  Sense strand starting at position 2521 of SEQ ID NO: 1561379
cugagcggugacuaugaau

SEQ ID NO: 1667386 - RNA, 19 nt, Artificial Sequence
  Description of Artificial Sequence: Synthetic oligonucleotide
  Antisense strand to SEQ ID NO: 1667385
auucauagucaccgcucag

SEQ ID NO: 1667387 - RNA, 19 nt, Artificial Sequence
  Description of Artificial Sequence: Synthetic oligonucleotide
  Sense strand starting at position 2527 of SEQ ID NO: 1561379
ggugacuaugaauguguca

SEQ ID NO: 1667388 - RNA, 19 nt, Artificial Sequence
  Description of Artificial Sequence: Synthetic oligonucleotide
  Antisense strand to SEQ ID NO: 1667387
ugacacauucauagucacc

SEQ ID NO: 1667389 - RNA, 19 nt, Artificial Sequence
  Description of Artificial Sequence: Synthetic oligonucleotide
  Sense strand starting at position 2529 of SEQ ID NO: 1561379
ugacuaugaaugugucaug

SEQ ID NO: 1667390 - RNA, 19 nt, Artificial Sequence
  Description of Artificial Sequence: Synthetic oligonucleotide
  Antisense strand to SEQ ID NO: 1667389
caugacacauucauaguca

SEQ ID NO: 1667391 - RNA, 19 nt, Artificial Sequence
  Description of Artificial Sequence: Synthetic oligonucleotide
  Sense strand starting at position 2627 of SEQ ID NO: 1561379
agaguuugauuucugcagu

SEQ ID NO: 1667392 - RNA, 19 nt, Artificial Sequence
  Description of Artificial Sequence: Synthetic oligonucleotide
  Antisense strand to SEQ ID NO: 1667391
acugcagaaaucaaacucu

SEQ ID NO: 1667393 - RNA, 19 nt, Artificial Sequence
  Description of Artificial Sequence: Synthetic oligonucleotide
  Sense strand starting at position 2630 of SEQ ID NO: 1561379
guuugauuucugcaguucu

SEQ ID NO: 1667394 - RNA, 19 nt, Artificial Sequence
  Description of Artificial Sequence: Synthetic oligonucleotide
  Antisense strand to SEQ ID NO: 1667393
agaacugcagaaaucaaac

SEQ ID NO: 1667395 - RNA, 19 nt, Artificial Sequence
  Description of Artificial Sequence: Synthetic oligonucleotide
  Sense strand starting at position 2684 of SEQ ID NO: 1561379
gcucgaucugugucuguga

SEQ ID NO: 1667396 - RNA, 19 nt, Artificial Sequence
  Description of Artificial Sequence: Synthetic oligonucleotide
  Antisense strand to SEQ ID NO: 1667395
ucacagacacagaucgagc

SEQ ID NO: 1667397 - RNA, 19 nt, Artificial Sequence
  Description of Artificial Sequence: Synthetic oligonucleotide
  Sense strand starting at position 2708 of SEQ ID NO: 1561379
cugagaccuucuguucuaa

SEQ ID NO: 1667398 - RNA, 19 nt, Artificial Sequence
  Description of Artificial Sequence: Synthetic oligonucleotide
  Antisense strand to SEQ ID NO: 1667397
uuagaacagaaggucucag

SEQ ID NO: 1667399 - RNA, 19 nt, Artificial Sequence
  Description of Artificial Sequence: Synthetic oligonucleotide
  Sense strand starting at position 2710 of SEQ ID NO: 1561379
gagaccuucuguucuaaag

SEQ ID NO: 1667400 - RNA, 19 nt, Artificial Sequence
  Description of Artificial Sequence: Synthetic oligonucleotide
  Antisense strand to SEQ ID NO: 1667399
cuuuagaacagaaggucuc

SEQ ID NO: 1667401 - RNA, 19 nt, Artificial Sequence
  Description of Artificial Sequence: Synthetic oligonucleotide
  Sense strand starting at position 2889 of SEQ ID NO: 1561379
cagucaaauggcuaucgaa

SEQ ID NO: 1667402 - RNA, 19 nt, Artificial Sequence
  Description of Artificial Sequence: Synthetic oligonucleotide
  Antisense strand to SEQ ID NO: 1667401
uucgauagccauuugacug

SEQ ID NO: 1667403 - RNA, 19 nt, Artificial Sequence
  Description of Artificial Sequence: Synthetic oligonucleotide
  Sense strand starting at position 3022 of SEQ ID NO: 1561379
agauguuagagcuggaauu

SEQ ID NO: 1667404 - RNA, 19 nt, Artificial Sequence
  Description of Artificial Sequence: Synthetic oligonucleotide
  Antisense strand to SEQ ID NO: 1667403
aauuccagcucuaacaucu

SEQ ID NO: 1667405 - RNA, 19 nt, Artificial Sequence
  Description of Artificial Sequence: Synthetic oligonucleotide
  Sense strand starting at position 3023 of SEQ ID NO: 1561379
gauguuagagcuggaauug

SEQ ID NO: 1667406 - RNA, 19 nt, Artificial Sequence
  Description of Artificial Sequence: Synthetic oligonucleotide
  Antisense strand to SEQ ID NO: 1667405
caauuccagcucuaacauc

SEQ ID NO: 1667407 - RNA, 19 nt, Artificial Sequence
  Description of Artificial Sequence: Synthetic oligonucleotide
  Sense strand starting at position 3089 of SEQ ID NO: 1561379
uaggauucguuucuccaaa

SEQ ID NO: 1667408 - RNA, 19 nt, Artificial Sequence
  Description of Artificial Sequence: Synthetic oligonucleotide
  Antisense strand to SEQ ID NO: 1667407
uuuggagaaacgaauccua

SEQ ID NO: 1667409 - RNA, 19 nt, Artificial Sequence
  Description of Artificial Sequence: Synthetic oligonucleotide
  Sense strand starting at position 3090 of SEQ ID NO: 1561379
aggauucguuucuccaaag

SEQ ID NO: 1667410 - RNA, 19 nt, Artificial Sequence
  Description of Artificial Sequence: Synthetic oligonucleotide
  Antisense strand to SEQ ID NO: 1667409
cuuuggagaaacgaauccu

SEQ ID NO: 1667411 - RNA, 19 nt, Artificial Sequence
  Description of Artificial Sequence: Synthetic oligonucleotide
  Sense strand starting at position 3091 of SEQ ID NO: 1561379
ggauucguuucuccaaaga

SEQ ID NO: 1667412 - RNA, 19 nt, Artificial Sequence
  Description of Artificial Sequence: Synthetic oligonucleotide
  Antisense strand to SEQ ID NO: 1667411
ucuuuggagaaacgaaucc

SEQ ID NO: 1667413 - RNA, 19 nt, Artificial Sequence
  Description of Artificial Sequence: Synthetic oligonucleotide
  Sense strand starting at position 3436 of SEQ ID NO: 1561379
gggcaaguugaauauugca

SEQ ID NO: 1667414 - RNA, 19 nt, Artificial Sequence
  Description of Artificial Sequence: Synthetic oligonucleotide
  Antisense strand to SEQ ID NO: 1667413
ugcaauauucaacuugccc

SEQ ID NO: 1667415 - RNA, 19 nt, Artificial Sequence
  Description of Artificial Sequence: Synthetic oligonucleotide
  Sense strand starting at position 3449 of SEQ ID NO: 1561379
auugcagauccacagcauu

SEQ ID NO: 1667416 - RNA, 19 nt, Artificial Sequence
  Description of Artificial Sequence: Synthetic oligonucleotide
  Antisense strand to SEQ ID NO: 1667415
aaugcuguggaucugcaau

SEQ ID NO: 1667417 - RNA, 19 nt, Artificial Sequence
  Description of Artificial Sequence: Synthetic oligonucleotide
  Sense strand starting at position 3584 of SEQ ID NO: 1561379
acuuccaucuggucauauu

SEQ ID NO: 1667418 - RNA, 19 nt, Artificial Sequence
  Description of Artificial Sequence: Synthetic oligonucleotide
  Antisense strand to SEQ ID NO: 1667417
aauaugaccagauggaagu

SEQ ID NO: 1667419 - RNA, 19 nt, Artificial Sequence
  Description of Artificial Sequence: Synthetic oligonucleotide
  Sense strand starting at position 3594 of SEQ ID NO: 1561379
ggucauauucagcaugggu

SEQ ID NO: 1667420 - RNA, 19 nt, Artificial Sequence
  Description of Artificial Sequence: Synthetic oligonucleotide
  Antisense strand to SEQ ID NO: 1667419
acccaugcugaauaugacc

SEQ ID NO: 1667421 - RNA, 19 nt, Artificial Sequence
  Description of Artificial Sequence: Synthetic oligonucleotide
  Sense strand starting at position 3601 of SEQ ID NO: 1561379
uucagcauggguuauggaa

SEQ ID NO: 1667422 - RNA, 19 nt, Artificial Sequence
  Description of Artificial Sequence: Synthetic oligonucleotide
  Antisense strand to SEQ ID NO: 1667421
uuccauaacccaugcugaa

SEQ ID NO: 1667423 - RNA, 19 nt, Artificial Sequence
  Description of Artificial Sequence: Synthetic oligonucleotide
  Sense strand starting at position 3630 of SEQ ID NO: 1561379
ggugaagaauguguucuua

SEQ ID NO: 1667424 - RNA, 19 nt, Artificial Sequence
  Description of Artificial Sequence: Synthetic oligonucleotide
  Antisense strand to SEQ ID NO: 1667423
uaagaacacauucuucacc

SEQ ID NO: 1667425 - RNA, 19 nt, Artificial Sequence
  Description of Artificial Sequence: Synthetic oligonucleotide
  Sense strand starting at position 3632 of SEQ ID NO: 1561379
ugaagaauguguucuuauu

SEQ ID NO: 1667426 - RNA, 19 nt, Artificial Sequence
  Description of Artificial Sequence: Synthetic oligonucleotide
  Antisense strand to SEQ ID NO: 1667425
aauaagaacacauucuuca

SEQ ID NO: 1667427 - RNA, 19 nt, Artificial Sequence
  Description of Artificial Sequence: Synthetic oligonucleotide
  Sense strand starting at position 3655 of SEQ ID NO: 1561379
cugucugggcuccaagaaa

SEQ ID NO: 1667428 - RNA, 19 nt, Artificial Sequence
  Description of Artificial Sequence: Synthetic oligonucleotide
  Antisense strand to SEQ ID NO: 1667427
uuucuuggagcccagacag

SEQ ID NO: 1667429 - RNA, 19 nt, Artificial Sequence
  Description of Artificial Sequence: Synthetic oligonucleotide
  Sense strand starting at position 3668 of SEQ ID NO: 1561379
aagaaaggcugaguauauu

SEQ ID NO: 1667430 - RNA, 19 nt, Artificial Sequence
  Description of Artificial Sequence: Synthetic oligonucleotide
  Antisense strand to SEQ ID NO: 1667429
aauauacucagccuuucuu

SEQ ID NO: 1667431 - RNA, 19 nt, Artificial Sequence
  Description of Artificial Sequence: Synthetic oligonucleotide
  Sense strand starting at position 3770 of SEQ ID NO: 1561379
agcaaagcuggaggucauu

SEQ ID NO: 1667432 - RNA, 19 nt, Artificial Sequence
  Description of Artificial Sequence: Synthetic oligonucleotide
  Antisense strand to SEQ ID NO: 1667431
aaugaccuccagcuuugcu

SEQ ID NO: 1667433 - RNA, 19 nt, Artificial Sequence
  Description of Artificial Sequence: Synthetic oligonucleotide
  Sense strand starting at position 3964 of SEQ ID NO: 1561379
augcccuuccuagaguuaa

SEQ ID NO: 1667434 - RNA, 19 nt, Artificial Sequence
  Description of Artificial Sequence: Synthetic oligonucleotide
  Antisense strand to SEQ ID NO: 1667433
uuaacucuaggaagggcau

SEQ ID NO: 1667435 - RNA, 19 nt, Artificial Sequence
  Description of Artificial Sequence: Synthetic oligonucleotide
  Sense strand starting at position 208 of SEQ ID NO: 1561380
augcgagcccucuguuaug

SEQ ID NO: 1667436 - RNA, 19 nt, Artificial Sequence
  Description of Artificial Sequence: Synthetic oligonucleotide
  Antisense strand to SEQ ID NO: 1667435
cauaacagagggcucgcau

SEQ ID NO: 1667437 - RNA, 19 nt, Artificial Sequence
  Description of Artificial Sequence: Synthetic oligonucleotide
  Sense strand starting at position 538 of SEQ ID NO: 1561380
ggcucugccuucuaaauaa

SEQ ID NO: 1667438 - RNA, 19 nt, Artificial Sequence
  Description of Artificial Sequence: Synthetic oligonucleotide
  Antisense strand to SEQ ID NO: 1667437
uuauuuagaaggcagagcc

SEQ ID NO: 1667439 - RNA, 19 nt, Artificial Sequence
  Description of Artificial Sequence: Synthetic oligonucleotide
  Sense strand starting at position 580 of SEQ ID NO: 1561380
uuuguuugacaguaacaaa

SEQ ID NO: 1667440 - RNA, 19 nt, Artificial Sequence
  Description of Artificial Sequence: Synthetic oligonucleotide
  Antisense strand to SEQ ID NO: 1667439
uuuguuacugucaaacaaa

SEQ ID NO: 1667441 - RNA, 19 nt, Artificial Sequence
  Description of Artificial Sequence: Synthetic oligonucleotide
  Sense strand starting at position 730 of SEQ ID NO: 1561380
ggagaugacucucacucca

SEQ ID NO: 1667442 - RNA, 19 nt, Artificial Sequence
  Description of Artificial Sequence: Synthetic oligonucleotide
  Antisense strand to SEQ ID NO: 1667441
uggagugagagucaucucc

SEQ ID NO: 1667443 - RNA, 19 nt, Artificial Sequence
  Description of Artificial Sequence: Synthetic oligonucleotide
  Sense strand starting at position 814 of SEQ ID NO: 1561380
gucucugugucuuggugau

SEQ ID NO: 1667444 - RNA, 19 nt, Artificial Sequence
  Description of Artificial Sequence: Synthetic oligonucleotide
  Antisense strand to SEQ ID NO: 1667443
aucaccaagacacagagac

SEQ ID NO: 1667445 - RNA, 19 nt, Artificial Sequence
  Description of Artificial Sequence: Synthetic oligonucleotide
  Sense strand starting at position 816 of SEQ ID NO: 1561380
cucugugucuuggugauag

SEQ ID NO: 1667446 - RNA, 19 nt, Artificial Sequence
  Description of Artificial Sequence: Synthetic oligonucleotide
  Antisense strand to SEQ ID NO: 1667445
cuaucaccaagacacagag

SEQ ID NO: 1667447 - RNA, 19 nt, Artificial Sequence
  Description of Artificial Sequence: Synthetic oligonucleotide
  Sense strand starting at position 826 of SEQ ID NO: 1561380
uggugauaguggucccuca

SEQ ID NO: 1667448 - RNA, 19 nt, Artificial Sequence
  Description of Artificial Sequence: Synthetic oligonucleotide
  Antisense strand to SEQ ID NO: 1667447
ugagggaccacuaucacca

SEQ ID NO: 1667449 - RNA, 19 nt, Artificial Sequence
  Description of Artificial Sequence: Synthetic oligonucleotide
  Sense strand starting at position 941 of SEQ ID NO: 1561380
gcugguaucgccuaggaag

SEQ ID NO: 1667450 - RNA, 19 nt, Artificial Sequence
  Description of Artificial Sequence: Synthetic oligonucleotide
  Antisense strand to SEQ ID NO: 1667449
cuuccuaggcgauaccagc

SEQ ID NO: 1667451 - RNA, 19 nt, Artificial Sequence
  Description of Artificial Sequence: Synthetic oligonucleotide
  Sense strand starting at position 943 of SEQ ID NO: 1561380
ugguaucgccuaggaagua

SEQ ID NO: 1667452 - RNA, 19 nt, Artificial Sequence
  Description of Artificial Sequence: Synthetic oligonucleotide
  Antisense strand to SEQ ID NO: 1667451
uacuuccuaggcgauacca

SEQ ID NO: 1667453 - RNA, 19 nt, Artificial Sequence
  Description of Artificial Sequence: Synthetic oligonucleotide
  Sense strand starting at position 944 of SEQ ID NO: 1561380
gguaucgccuaggaaguaa

SEQ ID NO: 1667454 - RNA, 19 nt, Artificial Sequence
  Description of Artificial Sequence: Synthetic oligonucleotide
  Antisense strand to SEQ ID NO: 1667453
uuacuuccuaggcgauacc

SEQ ID NO: 1667455 - RNA, 19 nt, Artificial Sequence
  Description of Artificial Sequence: Synthetic oligonucleotide
  Sense strand starting at position 1000 of SEQ ID NO: 1561380
uagugauauuaacaaggga

SEQ ID NO: 1667456 - RNA, 19 nt, Artificial Sequence
  Description of Artificial Sequence: Synthetic oligonucleotide
  Antisense strand to SEQ ID NO: 1667455
ucccuuguuaauaucacua

SEQ ID NO: 1667457 - RNA, 19 nt, Artificial Sequence
  Description of Artificial Sequence: Synthetic oligonucleotide
  Sense strand starting at position 1673 of SEQ ID NO: 1561380
gucaauauaucuuauagug

SEQ ID NO: 1667458 - RNA, 19 nt, Artificial Sequence
  Description of Artificial Sequence: Synthetic oligonucleotide
  Antisense strand to SEQ ID NO: 1667457
cacuauaagauauauugac

SEQ ID NO: 1667459 - RNA, 19 nt, Artificial Sequence
  Description of Artificial Sequence: Synthetic oligonucleotide
  Sense strand starting at position 1785 of SEQ ID NO: 1561380
uuacaugucuguugaagua

SEQ ID NO: 1667460 - RNA, 19 nt, Artificial Sequence
  Description of Artificial Sequence: Synthetic oligonucleotide
  Antisense strand to SEQ ID NO: 1667459
uacuucaacagacauguaa

SEQ ID NO: 1667461 - RNA, 19 nt, Artificial Sequence
  Description of Artificial Sequence: Synthetic oligonucleotide
  Sense strand starting at position 2004 of SEQ ID NO: 1561380
aauuaauguggaugacauc

SEQ ID NO: 1667462 - RNA, 19 nt, Artificial Sequence
  Description of Artificial Sequence: Synthetic oligonucleotide
  Antisense strand to SEQ ID NO: 1667461
gaugucauccacauuaauu

SEQ ID NO: 1667463 - RNA, 19 nt, Artificial Sequence
  Description of Artificial Sequence: Synthetic oligonucleotide
  Sense strand starting at position 2007 of SEQ ID NO: 1561380
uaauguggaugacaucaua

SEQ ID NO: 1667464 - RNA, 19 nt, Artificial Sequence
  Description of Artificial Sequence: Synthetic oligonucleotide
  Antisense strand to SEQ ID NO: 1667463
uaugaugucauccacauua

SEQ ID NO: 1667465 - RNA, 19 nt, Artificial Sequence
  Description of Artificial Sequence: Synthetic oligonucleotide
  Sense strand starting at position 2015 of SEQ ID NO: 1561380
augacaucauaauggagau

SEQ ID NO: 1667466 - RNA, 19 nt, Artificial Sequence
  Description of Artificial Sequence: Synthetic oligonucleotide
  Antisense strand to SEQ ID NO: 1667465
aucuccauuaugaugucau

SEQ ID NO: 1667467 - RNA, 19 nt, Artificial Sequence
  Description of Artificial Sequence: Synthetic oligonucleotide
  Sense strand starting at position 2028 of SEQ ID NO: 1561380
ggagauaaaugucauuaca

SEQ ID NO: 1667468 - RNA, 19 nt, Artificial Sequence
  Description of Artificial Sequence: Synthetic oligonucleotide
  Antisense strand to SEQ ID NO: 1667467
uguaaugacauuuaucucc

SEQ ID NO: 1667469 - RNA, 19 nt, Artificial Sequence
  Description of Artificial Sequence: Synthetic oligonucleotide
  Sense strand starting at position 2097 of SEQ ID NO: 1561380
aacuauagacucugagugu

SEQ ID NO: 1667470 - RNA, 19 nt, Artificial Sequence
  Description of Artificial Sequence: Synthetic oligonucleotide
  Antisense strand to SEQ ID NO: 1667469
acacucagagucuauaguu

SEQ ID NO: 1667471 - RNA, 19 nt, Artificial Sequence
  Description of Artificial Sequence: Synthetic oligonucleotide
  Sense strand starting at position 2120 of SEQ ID NO: 1561380
guggguucauuaguuguaa

SEQ ID NO: 1667472 - RNA, 19 nt, Artificial Sequence
  Description of Artificial Sequence: Synthetic oligonucleotide
  Antisense strand to SEQ ID NO: 1667471
uuacaacuaaugaacccac

SEQ ID NO: 1667473 - RNA, 19 nt, Artificial Sequence
  Description of Artificial Sequence: Synthetic oligonucleotide
  Sense strand starting at position 2196 of SEQ ID NO: 1561380
aaagacguguaugggaaau

SEQ ID NO: 1667474 - RNA, 19 nt, Artificial Sequence
  Description of Artificial Sequence: Synthetic oligonucleotide
  Antisense strand to SEQ ID NO: 1667473
auuucccauacacgucuuu

SEQ ID NO: 1667475 - RNA, 19 nt, Artificial Sequence
  Description of Artificial Sequence: Synthetic oligonucleotide
  Sense strand starting at position 2198 of SEQ ID NO: 1561380
agacguguaugggaaaucu

SEQ ID NO: 1667476 - RNA, 19 nt, Artificial Sequence
  Description of Artificial Sequence: Synthetic oligonucleotide
  Antisense strand to SEQ ID NO: 1667475
agauuucccauacacgucu

SEQ ID NO: 1667477 - RNA, 19 nt, Artificial Sequence
  Description of Artificial Sequence: Synthetic oligonucleotide
  Sense strand starting at position 2323 of SEQ ID NO: 1561380
auguuugaacccugaggac

SEQ ID NO: 1667478 - RNA, 19 nt, Artificial Sequence
  Description of Artificial Sequence: Synthetic oligonucleotide
  Antisense strand to SEQ ID NO: 1667477
guccucaggguucaaacau

SEQ ID NO: 1667479 - RNA, 19 nt, Artificial Sequence
  Description of Artificial Sequence: Synthetic oligonucleotide
  Sense strand starting at position 2326 of SEQ ID NO: 1561380
uuugaacccugaggacauu

SEQ ID NO: 1667480 - RNA, 19 nt, Artificial Sequence
  Description of Artificial Sequence: Synthetic oligonucleotide
  Antisense strand to SEQ ID NO: 1667479
aauguccucaggguucaaa

SEQ ID NO: 1667481 - RNA, 19 nt, Artificial Sequence
  Description of Artificial Sequence: Synthetic oligonucleotide
  Sense strand starting at position 2508 of SEQ ID NO: 1561380
guuaguuagacaugguggu

SEQ ID NO: 1667482 - RNA, 19 nt, Artificial Sequence
  Description of Artificial Sequence: Synthetic oligonucleotide
  Antisense strand to SEQ ID NO: 1667481
accaccaugucuaacuaac

SEQ ID NO: 1667483 - RNA, 19 nt, Artificial Sequence
  Description of Artificial Sequence: Synthetic oligonucleotide
  Sense strand starting at position 2741 of SEQ ID NO: 1561380
auuauauuguaucccguua

SEQ ID NO: 1667484 - RNA, 19 nt, Artificial Sequence
  Description of Artificial Sequence: Synthetic oligonucleotide
  Antisense strand to SEQ ID NO: 1667483
uaacgggauacaauauaau

SEQ ID NO: 1667485 - RNA, 19 nt, Artificial Sequence
  Description of Artificial Sequence: Synthetic oligonucleotide
  Sense strand starting at position 2746 of SEQ ID NO: 1561380
auuguaucccguuacuacu

SEQ ID NO: 1667486 - RNA, 19 nt, Artificial Sequence
  Description of Artificial Sequence: Synthetic oligonucleotide
  Antisense strand to SEQ ID NO: 1667485
aguaguaacgggauacaau

SEQ ID NO: 1667487 - RNA, 19 nt, Artificial Sequence
  Description of Artificial Sequence: Synthetic oligonucleotide
  Sense strand starting at position 2817 of SEQ ID NO: 1561380
ggguauugugacuggaaag

SEQ ID NO: 1667488 - RNA, 19 nt, Artificial Sequence
  Description of Artificial Sequence: Synthetic oligonucleotide
  Antisense strand to SEQ ID NO: 1667487
cuuuccagucacaauaccc

SEQ ID NO: 1667489 - RNA, 19 nt, Artificial Sequence
  Description of Artificial Sequence: Synthetic oligonucleotide
  Sense strand starting at position 2818 of SEQ ID NO: 1561380
gguauugugacuggaaaga

SEQ ID NO: 1667490 - RNA, 19 nt, Artificial Sequence
  Description of Artificial Sequence: Synthetic oligonucleotide
  Antisense strand to SEQ ID NO: 1667489
ucuuuccagucacaauacc

SEQ ID NO: 1667491 - RNA, 19 nt, Artificial Sequence
  Description of Artificial Sequence: Synthetic oligonucleotide
  Sense strand starting at position 2883 of SEQ ID NO: 1561380
agagguaucuaagguaguc

SEQ ID NO: 1667492 - RNA, 19 nt, Artificial Sequence
  Description of Artificial Sequence: Synthetic oligonucleotide
  Antisense strand to SEQ ID NO: 1667491
gacuaccuuagauaccucu

SEQ ID NO: 1667493 - RNA, 19 nt, Artificial Sequence
  Description of Artificial Sequence: Synthetic oligonucleotide
  Sense strand starting at position 2961 of SEQ ID NO: 1561380
gggacauuguagcuuaaua

SEQ ID NO: 1667494 - RNA, 19 nt, Artificial Sequence
  Description of Artificial Sequence: Synthetic oligonucleotide
  Antisense strand to SEQ ID NO: 1667493
uauuaagcuacaauguccc

SEQ ID NO: 1667495 - RNA, 19 nt, Artificial Sequence
  Description of Artificial Sequence: Synthetic oligonucleotide
  Sense strand starting at position 2963 of SEQ ID NO: 1561380
gacauuguagcuuaauagu

SEQ ID NO: 1667496 - RNA, 19 nt, Artificial Sequence
  Description of Artificial Sequence: Synthetic oligonucleotide
  Antisense strand to SEQ ID NO: 1667495
acuauuaagcuacaauguc

SEQ ID NO: 1667497 - RNA, 19 nt, Artificial Sequence
  Description of Artificial Sequence: Synthetic oligonucleotide
  Sense strand starting at position 3425 of SEQ ID NO: 1561380
aggugaucacgaggucaag

SEQ ID NO: 1667498 - RNA, 19 nt, Artificial Sequence
  Description of Artificial Sequence: Synthetic oligonucleotide
  Antisense strand to SEQ ID NO: 1667497
cuugaccucgugaucaccu

SEQ ID NO: 1667499 - RNA, 19 nt, Artificial Sequence
  Description of Artificial Sequence: Synthetic oligonucleotide
  Sense strand starting at position 3790 of SEQ ID NO: 1561380
gaggcugugaugggacaau

SEQ ID NO: 1667500 - RNA, 19 nt, Artificial Sequence
  Description of Artificial Sequence: Synthetic oligonucleotide
  Antisense strand to SEQ ID NO: 1667499
auugucccaucacagccuc

SEQ ID NO: 1667501 - RNA, 19 nt, Artificial Sequence
  Description of Artificial Sequence: Synthetic oligonucleotide
  Sense strand starting at position 3964 of SEQ ID NO: 1561380
uauaaugaucaguggcuca

SEQ ID NO: 1667502 - RNA, 19 nt, Artificial Sequence
  Description of Artificial Sequence: Synthetic oligonucleotide
  Antisense strand to SEQ ID NO: 1667501
ugagccacugaucauuaua

SEQ ID NO: 1667503 - RNA, 19 nt, Artificial Sequence
  Description of Artificial Sequence: Synthetic oligonucleotide
  Sense strand starting at position 3967 of SEQ ID NO: 1561380
aaugaucaguggcucagau

SEQ ID NO: 1667504 - RNA, 19 nt, Artificial Sequence
  Description of Artificial Sequence: Synthetic oligonucleotide
  Antisense strand to SEQ ID NO: 1667503
aucugagccacugaucauu

SEQ ID NO: 1667505 - RNA, 19 nt, Artificial Sequence
  Description of Artificial Sequence: Synthetic oligonucleotide
  Sense strand starting at position 3979 of SEQ ID NO: 1561380
cucagauuccaaugagcuu

SEQ ID NO: 1667506 - RNA, 19 nt, Artificial Sequence
  Description of Artificial Sequence: Synthetic oligonucleotide
  Antisense strand to SEQ ID NO: 1667505
aagcucauuggaaucugag

SEQ ID NO: 1667507 - RNA, 19 nt, Artificial Sequence
  Description of Artificial Sequence: Synthetic oligonucleotide
  Sense strand starting at position 449 of SEQ ID NO: 1561381
gaauuuacaugugagcaaa

SEQ ID NO: 1667508 - RNA, 19 nt, Artificial Sequence
  Description of Artificial Sequence: Synthetic oligonucleotide
  Antisense strand to SEQ ID NO: 1667507
uuugcucacauguaaauuc

SEQ ID NO: 1667509 - RNA, 19 nt, Artificial Sequence
  Description of Artificial Sequence: Synthetic oligonucleotide
  Sense strand starting at position 452 of SEQ ID NO: 1561381
uuuacaugugagcaaacua

SEQ ID NO: 1667510 - RNA, 19 nt, Artificial Sequence
  Description of Artificial Sequence: Synthetic oligonucleotide
  Antisense strand to SEQ ID NO: 1667509
uaguuugcucacauguaaa

SEQ ID NO: 1667511 - RNA, 19 nt, Artificial Sequence
  Description of Artificial Sequence: Synthetic oligonucleotide
  Sense strand starting at position 574 of SEQ ID NO: 1561381
guaaguuggcccuaaggcu

SEQ ID NO: 1667512 - RNA, 19 nt, Artificial Sequence
  Description of Artificial Sequence: Synthetic oligonucleotide
  Antisense strand to SEQ ID NO: 1667511
agccuuagggccaacuuac

SEQ ID NO: 1667513 - RNA, 19 nt, Artificial Sequence
  Description of Artificial Sequence: Synthetic oligonucleotide
  Sense strand starting at position 582 of SEQ ID NO: 1561381
gcccuaaggcucuacaacu

SEQ ID NO: 1667514 - RNA, 19 nt, Artificial Sequence
  Description of Artificial Sequence: Synthetic oligonucleotide
  Antisense strand to SEQ ID NO: 1667513
aguuguagagccuuagggc

SEQ ID NO: 1667515 - RNA, 19 nt, Artificial Sequence
  Description of Artificial Sequence: Synthetic oligonucleotide
  Sense strand starting at position 629 of SEQ ID NO: 1561381
cuaaguacagcaggaguua

SEQ ID NO: 1667516 - RNA, 19 nt, Artificial Sequence
  Description of Artificial Sequence: Synthetic oligonucleotide
  Antisense strand to SEQ ID NO: 1667515
uaacuccugcuguacuuag

SEQ ID NO: 1667517 - RNA, 19 nt, Artificial Sequence
  Description of Artificial Sequence: Synthetic oligonucleotide
  Sense strand starting at position 666 of SEQ ID NO: 1561381
agagguagcugagcauuau

SEQ ID NO: 1667518 - RNA, 19 nt, Artificial Sequence
  Description of Artificial Sequence: Synthetic oligonucleotide
  Antisense strand to SEQ ID NO: 1667517
auaaugcucagcuaccucu

SEQ ID NO: 1667519 - RNA, 19 nt, Artificial Sequence
  Description of Artificial Sequence: Synthetic oligonucleotide
  Sense strand starting at position 670 of SEQ ID NO: 1561381
guagcugagcauuaucaaa

SEQ ID NO: 1667520 - RNA, 19 nt, Artificial Sequence
  Description of Artificial Sequence: Synthetic oligonucleotide
  Antisense strand to SEQ ID NO: 1667519
uuugauaaugcucagcuac

SEQ ID NO: 1667521 - RNA, 19 nt, Artificial Sequence
  Description of Artificial Sequence: Synthetic oligonucleotide
  Sense strand starting at position 672 of SEQ ID NO: 1561381
agcugagcauuaucaaacu

SEQ ID NO: 1667522 - RNA, 19 nt, Artificial Sequence
  Description of Artificial Sequence: Synthetic oligonucleotide
  Antisense strand to SEQ ID NO: 1667521
aguuugauaaugcucagcu

SEQ ID NO: 1667523 - RNA, 19 nt, Artificial Sequence
  Description of Artificial Sequence: Synthetic oligonucleotide
  Sense strand starting at position 710 of SEQ ID NO: 1561381
uuuaauuccugguuguauu

SEQ ID NO: 1667524 - RNA, 19 nt, Artificial Sequence
  Description of Artificial Sequence: Synthetic oligonucleotide
  Antisense strand to SEQ ID NO: 1667523
aauacaaccaggaauuaaa

SEQ ID NO: 1667525 - RNA, 19 nt, Artificial Sequence
  Description of Artificial Sequence: Synthetic oligonucleotide
  Sense strand starting at position 711 of SEQ ID NO: 1561381
uuaauuccugguuguauua

SEQ ID NO: 1667526 - RNA, 19 nt, Artificial Sequence
  Description of Artificial Sequence: Synthetic oligonucleotide
  Antisense strand to SEQ ID NO: 1667525
uaauacaaccaggaauuaa

SEQ ID NO: 1667527 - RNA, 19 nt, Artificial Sequence
  Description of Artificial Sequence: Synthetic oligonucleotide
  Sense strand starting at position 718 of SEQ ID NO: 1561381
cugguuguauuacugucau

SEQ ID NO: 1667528 - RNA, 19 nt, Artificial Sequence
  Description of Artificial Sequence: Synthetic oligonucleotide
  Antisense strand to SEQ ID NO: 1667527
augacaguaauacaaccag

SEQ ID NO: 1667529 - RNA, 19 nt, Artificial Sequence
  Description of Artificial Sequence: Synthetic oligonucleotide
  Sense strand starting at position 732 of SEQ ID NO: 1561381
gucaucagccugcauucua

SEQ ID NO: 1667530 - RNA, 19 nt, Artificial Sequence
  Description of Artificial Sequence: Synthetic oligonucleotide
  Antisense strand to SEQ ID NO: 1667529
uagaaugcaggcugaugac

SEQ ID NO: 1667531 - RNA, 19 nt, Artificial Sequence
  Description of Artificial Sequence: Synthetic oligonucleotide
  Sense strand starting at position 856 of SEQ ID NO: 1561381
uaguaacuugaagaugcau

SEQ ID NO: 1667532 - RNA, 19 nt, Artificial Sequence
  Description of Artificial Sequence: Synthetic oligonucleotide
  Antisense strand to SEQ ID NO: 1667531
augcaucuucaaguuacua

SEQ ID NO: 1667533 - RNA, 19 nt, Artificial Sequence
  Description of Artificial Sequence: Synthetic oligonucleotide
  Sense strand starting at position 1141 of SEQ ID NO: 1561381
cagaauaagugagcuggaa

SEQ ID NO: 1667534 - RNA, 19 nt, Artificial Sequence
  Description of Artificial Sequence: Synthetic oligonucleotide
  Antisense strand to SEQ ID NO: 1667533
uuccagcucacuuauucug

SEQ ID NO: 1667535 - RNA, 19 nt, Artificial Sequence
  Description of Artificial Sequence: Synthetic oligonucleotide
  Sense strand starting at position 1264 of SEQ ID NO: 1561381
aggucuaacauagguguaa

SEQ ID NO: 1667536 - RNA, 19 nt, Artificial Sequence
  Description of Artificial Sequence: Synthetic oligonucleotide
  Antisense strand to SEQ ID NO: 1667535
uuacaccuauguuagaccu

SEQ ID NO: 1667537 - RNA, 19 nt, Artificial Sequence
  Description of Artificial Sequence: Synthetic oligonucleotide
  Sense strand starting at position 1265 of SEQ ID NO: 1561381
ggucuaacauagguguaau

SEQ ID NO: 1667538 - RNA, 19 nt, Artificial Sequence
  Description of Artificial Sequence: Synthetic oligonucleotide
  Antisense strand to SEQ ID NO: 1667537
auuacaccuauguuagacc

SEQ ID NO: 1667539 - RNA, 19 nt, Artificial Sequence
  Description of Artificial Sequence: Synthetic oligonucleotide
  Sense strand starting at position 1303 of SEQ ID NO: 1561381
agagaauggucaccuaucu

SEQ ID NO: 1667540 - RNA, 19 nt, Artificial Sequence
  Description of Artificial Sequence: Synthetic oligonucleotide
  Antisense strand to SEQ ID NO: 1667539
agauaggugaccauucucu

SEQ ID NO: 1667541 - RNA, 19 nt, Artificial Sequence
  Description of Artificial Sequence: Synthetic oligonucleotide
  Sense strand starting at position 1502 of SEQ ID NO: 1561381
guaggaagauuagcaauua

SEQ ID NO: 1667542 - RNA, 19 nt, Artificial Sequence
  Description of Artificial Sequence: Synthetic oligonucleotide
  Antisense strand to SEQ ID NO: 1667541
uaauugcuaaucuuccuac

SEQ ID NO: 1667543 - RNA, 19 nt, Artificial Sequence
  Description of Artificial Sequence: Synthetic oligonucleotide
  Sense strand starting at position 1571 of SEQ ID NO: 1561381
cugauagugucuuugcaga

SEQ ID NO: 1667544 - RNA, 19 nt, Artificial Sequence
  Description of Artificial Sequence: Synthetic oligonucleotide
  Antisense strand to SEQ ID NO: 1667543
ucugcaaagacacuaucag

SEQ ID NO: 1667545 - RNA, 19 nt, Artificial Sequence
  Description of Artificial Sequence: Synthetic oligonucleotide
  Sense strand starting at position 1770 of SEQ ID NO: 1561381
gcagaaauguagcugguuu

SEQ ID NO: 1667546 - RNA, 19 nt, Artificial Sequence
  Description of Artificial Sequence: Synthetic oligonucleotide
  Antisense strand to SEQ ID NO: 1667545
aaaccagcuacauuucugc

SEQ ID NO: 1667547 - RNA, 19 nt, Artificial Sequence
  Description of Artificial Sequence: Synthetic oligonucleotide
  Sense strand starting at position 1784 of SEQ ID NO: 1561381
gguuucuuggcauagacca

SEQ ID NO: 1667548 - RNA, 19 nt, Artificial Sequence
  Description of Artificial Sequence: Synthetic oligonucleotide
  Antisense strand to SEQ ID NO: 1667547
uggucuaugccaagaaacc

SEQ ID NO: 1667549 - RNA, 19 nt, Artificial Sequence
  Description of Artificial Sequence: Synthetic oligonucleotide
  Sense strand starting at position 1823 of SEQ ID NO: 1561381
gcugauauucuagagagca

SEQ ID NO: 1667550 - RNA, 19 nt, Artificial Sequence
  Description of Artificial Sequence: Synthetic oligonucleotide
  Antisense strand to SEQ ID NO: 1667549
ugcucucuagaauaucagc

SEQ ID NO: 1667551 - RNA, 19 nt, Artificial Sequence
  Description of Artificial Sequence: Synthetic oligonucleotide
  Sense strand starting at position 1879 of SEQ ID NO: 1561381
gagaccaaguuaguauaau

SEQ ID NO: 1667552 - RNA, 19 nt, Artificial Sequence
  Description of Artificial Sequence: Synthetic oligonucleotide
  Antisense strand to SEQ ID NO: 1667551
auuauacuaacuuggucuc

SEQ ID NO: 1667553 - RNA, 19 nt, Artificial Sequence
  Description of Artificial Sequence: Synthetic oligonucleotide
  Sense strand starting at position 1929 of SEQ ID NO: 1561381
cugauccgaguuuaaauau

SEQ ID NO: 1667554 - RNA, 19 nt, Artificial Sequence
  Description of Artificial Sequence: Synthetic oligonucleotide
  Antisense strand to SEQ ID NO: 1667553
auauuuaaacucggaucag

SEQ ID NO: 1667555 - RNA, 19 nt, Artificial Sequence
  Description of Artificial Sequence: Synthetic oligonucleotide
  Sense strand starting at position 1961 of SEQ ID NO: 1561381
gagagaagucuauggcaac

SEQ ID NO: 1667556 - RNA, 19 nt, Artificial Sequence
  Description of Artificial Sequence: Synthetic oligonucleotide
  Antisense strand to SEQ ID NO: 1667555
guugccauagacuucucuc

SEQ ID NO: 1667557 - RNA, 19 nt, Artificial Sequence
  Description of Artificial Sequence: Synthetic oligonucleotide
  Sense strand starting at position 1990 of SEQ ID NO: 1561381
gucaauggcaccugaaaug

SEQ ID NO: 1667558 - RNA, 19 nt, Artificial Sequence
  Description of Artificial Sequence: Synthetic oligonucleotide
  Antisense strand to SEQ ID NO: 1667557
cauuucaggugccauugac

SEQ ID NO: 1667559 - RNA, 19 nt, Artificial Sequence
  Description of Artificial Sequence: Synthetic oligonucleotide
  Sense strand starting at position 2006 of SEQ ID NO: 1561381
augacaaaccuguguauua

SEQ ID NO: 1667560 - RNA, 19 nt, Artificial Sequence
  Description of Artificial Sequence: Synthetic oligonucleotide
  Antisense strand to SEQ ID NO: 1667559
uaauacacagguuugucau

SEQ ID NO: 1667561 - RNA, 19 nt, Artificial Sequence
  Description of Artificial Sequence: Synthetic oligonucleotide
  Sense strand starting at position 2007 of SEQ ID NO: 1561381
ugacaaaccuguguauuau

SEQ ID NO: 1667562 - RNA, 19 nt, Artificial Sequence
  Description of Artificial Sequence: Synthetic oligonucleotide
  Antisense strand to SEQ ID NO: 1667561
auaauacacagguuuguca

SEQ ID NO: 1667563 - RNA, 19 nt, Artificial Sequence
  Description of Artificial Sequence: Synthetic oligonucleotide
  Sense strand starting at position 2013 of SEQ ID NO: 1561381
accuguguauuauuuguaa

SEQ ID NO: 1667564 - RNA, 19 nt, Artificial Sequence
  Description of Artificial Sequence: Synthetic oligonucleotide
  Antisense strand to SEQ ID NO: 1667563
uuacaaauaauacacaggu

SEQ ID NO: 1667565 - RNA, 19 nt, Artificial Sequence
  Description of Artificial Sequence: Synthetic oligonucleotide
  Sense strand starting at position 2092 of SEQ ID NO: 1561381
agaaguagucuagaguuac

SEQ ID NO: 1667566 - RNA, 19 nt, Artificial Sequence
  Description of Artificial Sequence: Synthetic oligonucleotide
  Antisense strand to SEQ ID NO: 1667565
guaacucuagacuacuucu

SEQ ID NO: 1667567 - RNA, 19 nt, Artificial Sequence
  Description of Artificial Sequence: Synthetic oligonucleotide
  Sense strand starting at position 2096 of SEQ ID NO: 1561381
guagucuagaguuacaaga

SEQ ID NO: 1667568 - RNA, 19 nt, Artificial Sequence
  Description of Artificial Sequence: Synthetic oligonucleotide
  Antisense strand to SEQ ID NO: 1667567
ucuuguaacucuagacuac

SEQ ID NO: 1667569 - RNA, 19 nt, Artificial Sequence
  Description of Artificial Sequence: Synthetic oligonucleotide
  Sense strand starting at position 2117 of SEQ ID NO: 1561381
augacaugguuagauaaga

SEQ ID NO: 1667570 - RNA, 19 nt, Artificial Sequence
  Description of Artificial Sequence: Synthetic oligonucleotide
  Antisense strand to SEQ ID NO: 1667569
ucuuaucuaaccaugucau

SEQ ID NO: 1667571 - RNA, 19 nt, Artificial Sequence
  Description of Artificial Sequence: Synthetic oligonucleotide
  Sense strand starting at position 2148 of SEQ ID NO: 1561381
gcaugucuuaaguagagug

SEQ ID NO: 1667572 - RNA, 19 nt, Artificial Sequence
  Description of Artificial Sequence: Synthetic oligonucleotide
  Antisense strand to SEQ ID NO: 1667571
cacucuacuuaagacaugc

SEQ ID NO: 1667573 - RNA, 19 nt, Artificial Sequence
  Description of Artificial Sequence: Synthetic oligonucleotide
  Sense strand starting at position 2350 of SEQ ID NO: 1561381
uuucucuucgaggaauaug

SEQ ID NO: 1667574 - RNA, 19 nt, Artificial Sequence
  Description of Artificial Sequence: Synthetic oligonucleotide
  Antisense strand to SEQ ID NO: 1667573
cauauuccucgaagagaaa

SEQ ID NO: 1667575 - RNA, 19 nt, Artificial Sequence
  Description of Artificial Sequence: Synthetic oligonucleotide
  Sense strand starting at position 2527 of SEQ ID NO: 1561381
gcgcaaugauaccugaaag

SEQ ID NO: 1667576 - RNA, 19 nt, Artificial Sequence
  Description of Artificial Sequence: Synthetic oligonucleotide
  Antisense strand to SEQ ID NO: 1667575
cuuucagguaucauugcgc

SEQ ID NO: 1667577 - RNA, 19 nt, Artificial Sequence
  Description of Artificial Sequence: Synthetic oligonucleotide
  Sense strand starting at position 2853 of SEQ ID NO: 1561381
guaugaacauaucaauaga

SEQ ID NO: 1667578 - RNA, 19 nt, Artificial Sequence
  Description of Artificial Sequence: Synthetic oligonucleotide
  Antisense strand to SEQ ID NO: 1667577
ucuauugauauguucauac

SEQ ID NO: 1667579 - RNA, 19 nt, Artificial Sequence
  Description of Artificial Sequence: Synthetic oligonucleotide
  Sense strand starting at position 2907 of SEQ ID NO: 1561381
ugcugauauccuuggugaa

SEQ ID NO: 1667580 - RNA, 19 nt, Artificial Sequence
  Description of Artificial Sequence: Synthetic oligonucleotide
  Antisense strand to SEQ ID NO: 1667579
uucaccaaggauaucagca

SEQ ID NO: 1667581 - RNA, 19 nt, Artificial Sequence
  Description of Artificial Sequence: Synthetic oligonucleotide
  Sense strand starting at position 2908 of SEQ ID NO: 1561381
gcugauauccuuggugaaa

SEQ ID NO: 1667582 - RNA, 19 nt, Artificial Sequence
  Description of Artificial Sequence: Synthetic oligonucleotide
  Antisense strand to SEQ ID NO: 1667581
uuucaccaaggauaucagc

SEQ ID NO: 1667583 - RNA, 19 nt, Artificial Sequence
  Description of Artificial Sequence: Synthetic oligonucleotide
  Sense strand starting at position 2909 of SEQ ID NO: 1561381
cugauauccuuggugaaac

SEQ ID NO: 1667584 - RNA, 19 nt, Artificial Sequence
  Description of Artificial Sequence: Synthetic oligonucleotide
  Antisense strand to SEQ ID NO: 1667583
guuucaccaaggauaucag

SEQ ID NO: 1667585 - RNA, 19 nt, Artificial Sequence
  Description of Artificial Sequence: Synthetic oligonucleotide
  Sense strand starting at position 3236 of SEQ ID NO: 1561381
gaguuagcaagcugagaag

SEQ ID NO: 1667586 - RNA, 19 nt, Artificial Sequence
  Description of Artificial Sequence: Synthetic oligonucleotide
  Antisense strand to SEQ ID NO: 1667585
cuucucagcuugcuaacuc

SEQ ID NO: 1667587 - RNA, 19 nt, Artificial Sequence
  Description of Artificial Sequence: Synthetic oligonucleotide
  Sense strand starting at position 224 of SEQ ID NO: 1561382
ugaaguagcgauuggguuu

SEQ ID NO: 1667588 - RNA, 19 nt, Artificial Sequence
  Description of Artificial Sequence: Synthetic oligonucleotide
  Antisense strand to SEQ ID NO: 1667587
aaacccaaucgcuacuuca

SEQ ID NO: 1667589 - RNA, 19 nt, Artificial Sequence
  Description of Artificial Sequence: Synthetic oligonucleotide
  Sense strand starting at position 247 of SEQ ID NO: 1561382
ugcaguuugcugugagcca

SEQ ID NO: 1667590 - RNA, 19 nt, Artificial Sequence
  Description of Artificial Sequence: Synthetic oligonucleotide
  Antisense strand to SEQ ID NO: 1667589
uggcucacagcaaacugca

SEQ ID NO: 1667591 - RNA, 19 nt, Artificial Sequence
  Description of Artificial Sequence: Synthetic oligonucleotide
  Sense strand starting at position 321 of SEQ ID NO: 1561382
gagcuugccugguagggau

SEQ ID NO: 1667592 - RNA, 19 nt, Artificial Sequence
  Description of Artificial Sequence: Synthetic oligonucleotide
  Antisense strand to SEQ ID NO: 1667591
aucccuaccaggcaagcuc

SEQ ID NO: 1667593 - RNA, 19 nt, Artificial Sequence
  Description of Artificial Sequence: Synthetic oligonucleotide
  Sense strand starting at position 646 of SEQ ID NO: 1561382
ggccuuuacucucugccua

SEQ ID NO: 1667594 - RNA, 19 nt, Artificial Sequence
  Description of Artificial Sequence: Synthetic oligonucleotide
  Antisense strand to SEQ ID NO: 1667593
uaggcagagaguaaaggcc

SEQ ID NO: 1667595 - RNA, 19 nt, Artificial Sequence
  Description of Artificial Sequence: Synthetic oligonucleotide
  Sense strand starting at position 764 of SEQ ID NO: 1561382
guggcaucccucuagaaag

SEQ ID NO: 1667596 - RNA, 19 nt, Artificial Sequence
  Description of Artificial Sequence: Synthetic oligonucleotide
  Antisense strand to SEQ ID NO: 1667595
cuuucuagagggaugccac

SEQ ID NO: 1667597 - RNA, 19 nt, Artificial Sequence
  Description of Artificial Sequence: Synthetic oligonucleotide
  Sense strand starting at position 775 of SEQ ID NO: 1561382
cuagaaaggcccugagguu

SEQ ID NO: 1667598 - RNA, 19 nt, Artificial Sequence
  Description of Artificial Sequence: Synthetic oligonucleotide
  Antisense strand to SEQ ID NO: 1667597
aaccucagggccuuucuag

SEQ ID NO: 1667599 - RNA, 19 nt, Artificial Sequence
  Description of Artificial Sequence: Synthetic oligonucleotide
  Sense strand starting at position 791 of SEQ ID NO: 1561382
guuagagauucucuacguc

SEQ ID NO: 1667600 - RNA, 19 nt, Artificial Sequence
  Description of Artificial Sequence: Synthetic oligonucleotide
  Antisense strand to SEQ ID NO: 1667599
gacguagagaaucucuaac

SEQ ID NO: 1667601 - RNA, 19 nt, Artificial Sequence
  Description of Artificial Sequence: Synthetic oligonucleotide
  Sense strand starting at position 1168 of SEQ ID NO: 1561382
guuucuccuccugguggaa

SEQ ID NO: 1667602 - RNA, 19 nt, Artificial Sequence
  Description of Artificial Sequence: Synthetic oligonucleotide
  Antisense strand to SEQ ID NO: 1667601
uuccaccaggaggagaaac

SEQ ID NO: 1667603 - RNA, 19 nt, Artificial Sequence
  Description of Artificial Sequence: Synthetic oligonucleotide
  Sense strand starting at position 1398 of SEQ ID NO: 1561382
ggauuagagucgucagcca

SEQ ID NO: 1667604 - RNA, 19 nt, Artificial Sequence
  Description of Artificial Sequence: Synthetic oligonucleotide
  Antisense strand to SEQ ID NO: 1667603
uggcugacgacucuaaucc

SEQ ID NO: 1667605 - RNA, 19 nt, Artificial Sequence
  Description of Artificial Sequence: Synthetic oligonucleotide
  Sense strand starting at position 1430 of SEQ ID NO: 1561382
gauugagcuccuuaugcau

SEQ ID NO: 1667606 - RNA, 19 nt, Artificial Sequence
  Description of Artificial Sequence: Synthetic oligonucleotide
  Antisense strand to SEQ ID NO: 1667605
augcauaaggagcucaauc

SEQ ID NO: 1667607 - RNA, 19 nt, Artificial Sequence
  Description of Artificial Sequence: Synthetic oligonucleotide
  Sense strand starting at position 1436 of SEQ ID NO: 1561382
gcuccuuaugcauacggga

SEQ ID NO: 1667608 - RNA, 19 nt, Artificial Sequence
  Description of Artificial Sequence: Synthetic oligonucleotide
  Antisense strand to SEQ ID NO: 1667607
ucccguaugcauaaggagc

SEQ ID NO: 1667609 - RNA, 19 nt, Artificial Sequence
  Description of Artificial Sequence: Synthetic oligonucleotide
  Sense strand starting at position 1438 of SEQ ID NO: 1561382
uccuuaugcauacgggaga

SEQ ID NO: 1667610 - RNA, 19 nt, Artificial Sequence
  Description of Artificial Sequence: Synthetic oligonucleotide
  Antisense strand to SEQ ID NO: 1667609
ucucccguaugcauaagga

SEQ ID NO: 1667611 - RNA, 19 nt, Artificial Sequence
  Description of Artificial Sequence: Synthetic oligonucleotide
  Sense strand starting at position 1591 of SEQ ID NO: 1561382
cuagacauggauugucuga

SEQ ID NO: 1667612 - RNA, 19 nt, Artificial Sequence
  Description of Artificial Sequence: Synthetic oligonucleotide
  Antisense strand to SEQ ID NO: 1667611
ucagacaauccaugucuag

SEQ ID NO: 1667613 - RNA, 19 nt, Artificial Sequence
  Description of Artificial Sequence: Synthetic oligonucleotide
  Sense strand starting at position 1598 of SEQ ID NO: 1561382
uggauugucugaggaccga

SEQ ID NO: 1667614 - RNA, 19 nt, Artificial Sequence
  Description of Artificial Sequence: Synthetic oligonucleotide
  Antisense strand to SEQ ID NO: 1667613
ucgguccucagacaaucca

SEQ ID NO: 1667615 - RNA, 19 nt, Artificial Sequence
  Description of Artificial Sequence: Synthetic oligonucleotide
  Sense strand starting at position 1738 of SEQ ID NO: 1561382
gggcgcucuccgagugaca

SEQ ID NO: 1667616 - RNA, 19 nt, Artificial Sequence
  Description of Artificial Sequence: Synthetic oligonucleotide
  Antisense strand to SEQ ID NO: 1667615
ugucacucggagagcgccc

SEQ ID NO: 1667617 - RNA, 19 nt, Artificial Sequence
  Description of Artificial Sequence: Synthetic oligonucleotide
  Sense strand starting at position 2089 of SEQ ID NO: 1561382
gcuggugcaaucuugcuau

SEQ ID NO: 1667618 - RNA, 19 nt, Artificial Sequence
  Description of Artificial Sequence: Synthetic oligonucleotide
  Antisense strand to SEQ ID NO: 1667617
auagcaagauugcaccagc

SEQ ID NO: 1667619 - RNA, 19 nt, Artificial Sequence
  Description of Artificial Sequence: Synthetic oligonucleotide
  Sense strand starting at position 2092 of SEQ ID NO: 1561382
ggugcaaucuugcuaucua

SEQ ID NO: 1667620 - RNA, 19 nt, Artificial Sequence
  Description of Artificial Sequence: Synthetic oligonucleotide
  Antisense strand to SEQ ID NO: 1667619
uagauagcaagauugcacc

SEQ ID NO: 1667621 - RNA, 19 nt, Artificial Sequence
  Description of Artificial Sequence: Synthetic oligonucleotide
  Sense strand starting at position 2093 of SEQ ID NO: 1561382
gugcaaucuugcuaucuau

SEQ ID NO: 1667622 - RNA, 19 nt, Artificial Sequence
  Description of Artificial Sequence: Synthetic oligonucleotide
  Antisense strand to SEQ ID NO: 1667621
auagauagcaagauugcac

SEQ ID NO: 1667623 - RNA, 19 nt, Artificial Sequence
  Description of Artificial Sequence: Synthetic oligonucleotide
  Sense strand starting at position 2161 of SEQ ID NO: 1561382
ggaugaccucgcuguccua

SEQ ID NO: 1667624 - RNA, 19 nt, Artificial Sequence
  Description of Artificial Sequence: Synthetic oligonucleotide
  Antisense strand to SEQ ID NO: 1667623
uaggacagcgaggucaucc

SEQ ID NO: 1667625 - RNA, 19 nt, Artificial Sequence
  Description of Artificial Sequence: Synthetic oligonucleotide
  Sense strand starting at position 2204 of SEQ ID NO: 1561382
ccucuagucuugucccaag

SEQ ID NO: 1667626 - RNA, 19 nt, Artificial Sequence
  Description of Artificial Sequence: Synthetic oligonucleotide
  Antisense strand to SEQ ID NO: 1667625
cuugggacaagacuagagg

SEQ ID NO: 1667627 - RNA, 19 nt, Artificial Sequence
  Description of Artificial Sequence: Synthetic oligonucleotide
  Sense strand starting at position 2207 of SEQ ID NO: 1561382
cuagucuugucccaagauc

SEQ ID NO: 1667628 - RNA, 19 nt, Artificial Sequence
  Description of Artificial Sequence: Synthetic oligonucleotide
  Antisense strand to SEQ ID NO: 1667627
gaucuugggacaagacuag

SEQ ID NO: 1667629 - RNA, 19 nt, Artificial Sequence
  Description of Artificial Sequence: Synthetic oligonucleotide
  Sense strand starting at position 2247 of SEQ ID NO: 1561382
agcaguucuuucuuuauau

SEQ ID NO: 1667630 - RNA, 19 nt, Artificial Sequence
  Description of Artificial Sequence: Synthetic oligonucleotide
  Antisense strand to SEQ ID NO: 1667629
auauaaagaaagaacugcu

SEQ ID NO: 1667631 - RNA, 19 nt, Artificial Sequence
  Description of Artificial Sequence: Synthetic oligonucleotide
  Sense strand starting at position 2248 of SEQ ID NO: 1561382
gcaguucuuucuuuauauu

SEQ ID NO: 1667632 - RNA, 19 nt, Artificial Sequence
  Description of Artificial Sequence: Synthetic oligonucleotide
  Antisense strand to SEQ ID NO: 1667631
aauauaaagaaagaacugc

SEQ ID NO: 1667633 - RNA, 19 nt, Artificial Sequence
  Description of Artificial Sequence: Synthetic oligonucleotide
  Sense strand starting at position 2314 of SEQ ID NO: 1561382
aguuuaauggcgcgaucuc

SEQ ID NO: 1667634 - RNA, 19 nt, Artificial Sequence
  Description of Artificial Sequence: Synthetic oligonucleotide
  Antisense strand to SEQ ID NO: 1667633
gagaucgcgccauuaaacu

SEQ ID NO: 1667635 - RNA, 19 nt, Artificial Sequence
  Description of Artificial Sequence: Synthetic oligonucleotide
  Sense strand starting at position 3353 of SEQ ID NO: 1561382
gagagaggagugugguuua

SEQ ID NO: 1667636 - RNA, 19 nt, Artificial Sequence
  Description of Artificial Sequence: Synthetic oligonucleotide
  Antisense strand to SEQ ID NO: 1667635
uaaaccacacuccucucuc

SEQ ID NO: 1667637 - RNA, 19 nt, Artificial Sequence
  Description of Artificial Sequence: Synthetic oligonucleotide
  Sense strand starting at position 3356 of SEQ ID NO: 1561382
agaggagugugguuuaugu

SEQ ID NO: 1667638 - RNA, 19 nt, Artificial Sequence
  Description of Artificial Sequence: Synthetic oligonucleotide
  Antisense strand to SEQ ID NO: 1667637
acauaaaccacacuccucu

SEQ ID NO: 1667639 - RNA, 19 nt, Artificial Sequence
  Description of Artificial Sequence: Synthetic oligonucleotide
  Sense strand starting at position 3372 of SEQ ID NO: 1561382
uguuguaaccacugaugaa

SEQ ID NO: 1667640 - RNA, 19 nt, Artificial Sequence
  Description of Artificial Sequence: Synthetic oligonucleotide
  Antisense strand to SEQ ID NO: 1667639
uucaucagugguuacaaca

SEQ ID NO: 1667641 - RNA, 19 nt, Artificial Sequence
  Description of Artificial Sequence: Synthetic oligonucleotide
  Sense strand starting at position 3375 of SEQ ID NO: 1561382
uguaaccacugaugaauuu

SEQ ID NO: 1667642 - RNA, 19 nt, Artificial Sequence
  Description of Artificial Sequence: Synthetic oligonucleotide
  Antisense strand to SEQ ID NO: 1667641
aaauucaucagugguuaca

SEQ ID NO: 1667643 - RNA, 19 nt, Artificial Sequence
  Description of Artificial Sequence: Synthetic oligonucleotide
  Sense strand starting at position 3403 of SEQ ID NO: 1561382
ggaggcgcaucaucugauu

SEQ ID NO: 1667644 - RNA, 19 nt, Artificial Sequence
  Description of Artificial Sequence: Synthetic oligonucleotide
  Antisense strand to SEQ ID NO: 1667643
aaucagaugaugcgccucc

SEQ ID NO: 1667645 - RNA, 19 nt, Artificial Sequence
  Description of Artificial Sequence: Synthetic oligonucleotide
  Sense strand starting at position 3412 of SEQ ID NO: 1561382
ucaucugauuccuggcagu

SEQ ID NO: 1667646 - RNA, 19 nt, Artificial Sequence
  Description of Artificial Sequence: Synthetic oligonucleotide
  Antisense strand to SEQ ID NO: 1667645
acugccaggaaucagauga

SEQ ID NO: 1667647 - RNA, 19 nt, Artificial Sequence
  Description of Artificial Sequence: Synthetic oligonucleotide
  Sense strand starting at position 3423 of SEQ ID NO: 1561382
cuggcagucacuuggagua

SEQ ID NO: 1667648 - RNA, 19 nt, Artificial Sequence
  Description of Artificial Sequence: Synthetic oligonucleotide
  Antisense strand to SEQ ID NO: 1667647
uacuccaagugacugccag

SEQ ID NO: 1667649 - RNA, 19 nt, Artificial Sequence
  Description of Artificial Sequence: Synthetic oligonucleotide
  Sense strand starting at position 3459 of SEQ ID NO: 1561382
ggcgguaagguagaucuaa

SEQ ID NO: 1667650 - RNA, 19 nt, Artificial Sequence
  Description of Artificial Sequence: Synthetic oligonucleotide
  Antisense strand to SEQ ID NO: 1667649
uuagaucuaccuuaccgcc

SEQ ID NO: 1667651 - RNA, 19 nt, Artificial Sequence
  Description of Artificial Sequence: Synthetic oligonucleotide
  Sense strand starting at position 3494 of SEQ ID NO: 1561382
gcugccauaucaucuaaga

SEQ ID NO: 1667652 - RNA, 19 nt, Artificial Sequence
  Description of Artificial Sequence: Synthetic oligonucleotide
  Antisense strand to SEQ ID NO: 1667651
ucuuagaugauauggcagc

SEQ ID NO: 1667653 - RNA, 19 nt, Artificial Sequence
  Description of Artificial Sequence: Synthetic oligonucleotide
  Sense strand starting at position 3512 of SEQ ID NO: 1561382
augagaucaucuuagaucu

SEQ ID NO: 1667654 - RNA, 19 nt, Artificial Sequence
  Description of Artificial Sequence: Synthetic oligonucleotide
  Antisense strand to SEQ ID NO: 1667653
agaucuaagaugaucucau

SEQ ID NO: 1667655 - RNA, 19 nt, Artificial Sequence
  Description of Artificial Sequence: Synthetic oligonucleotide
  Sense strand starting at position 3548 of SEQ ID NO: 1561382
agagguauucguugaguuc

SEQ ID NO: 1667656 - RNA, 19 nt, Artificial Sequence
  Description of Artificial Sequence: Synthetic oligonucleotide
  Antisense strand to SEQ ID NO: 1667655
gaacucaacgaauaccucu

SEQ ID NO: 1667657 - RNA, 19 nt, Artificial Sequence
  Description of Artificial Sequence: Synthetic oligonucleotide
  Sense strand starting at position 3549 of SEQ ID NO: 1561382
gagguauucguugaguucu

SEQ ID NO: 1667658 - RNA, 19 nt, Artificial Sequence
  Description of Artificial Sequence: Synthetic oligonucleotide
  Antisense strand to SEQ ID NO: 1667657
agaacucaacgaauaccuc

SEQ ID NO: 1667659 - RNA, 19 nt, Artificial Sequence
  Description of Artificial Sequence: Synthetic oligonucleotide
  Sense strand starting at position 3551 of SEQ ID NO: 1561382
gguauucguugaguucuag

SEQ ID NO: 1667660 - RNA, 19 nt, Artificial Sequence
  Description of Artificial Sequence: Synthetic oligonucleotide
  Antisense strand to SEQ ID NO: 1667659
cuagaacucaacgaauacc

SEQ ID NO: 1667661 - RNA, 19 nt, Artificial Sequence
  Description of Artificial Sequence: Synthetic oligonucleotide
  Sense strand starting at position 3555 of SEQ ID NO: 1561382
uucguugaguucuaggcaa

SEQ ID NO: 1667662 - RNA, 19 nt, Artificial Sequence
  Description of Artificial Sequence: Synthetic oligonucleotide
  Antisense strand to SEQ ID NO: 1667661
uugccuagaacucaacgaa

SEQ ID NO: 1667663 - RNA, 19 nt, Artificial Sequence
  Description of Artificial Sequence: Synthetic oligonucleotide
  Sense strand starting at position 3557 of SEQ ID NO: 1561382
cguugaguucuaggcaacu

SEQ ID NO: 1667664 - RNA, 19 nt, Artificial Sequence
  Description of Artificial Sequence: Synthetic oligonucleotide
  Antisense strand to SEQ ID NO: 1667663
aguugccuagaacucaacg

SEQ ID NO: 1667665 - RNA, 19 nt, Artificial Sequence
  Description of Artificial Sequence: Synthetic oligonucleotide
  Sense strand starting at position 3559 of SEQ ID NO: 1561382
uugaguucuaggcaacugu

SEQ ID NO: 1667666 - RNA, 19 nt, Artificial Sequence
  Description of Artificial Sequence: Synthetic oligonucleotide
  Antisense strand to SEQ ID NO: 1667665
acaguugccuagaacucaa

SEQ ID NO: 1667667 - RNA, 19 nt, Artificial Sequence
  Description of Artificial Sequence: Synthetic oligonucleotide
  Sense strand starting at position 388 of SEQ ID NO: 1561383
uggaauuaaugagucaagu

SEQ ID NO: 1667668 - RNA, 19 nt, Artificial Sequence
  Description of Artificial Sequence: Synthetic oligonucleotide
  Antisense strand to SEQ ID NO: 1667667
acuugacucauuaauucca

SEQ ID NO: 1667669 - RNA, 19 nt, Artificial Sequence
  Description of Artificial Sequence: Synthetic oligonucleotide
  Sense strand starting at position 417 of SEQ ID NO: 1561383
ugccuuaacagggauugca

SEQ ID NO: 1667670 - RNA, 19 nt, Artificial Sequence
  Description of Artificial Sequence: Synthetic oligonucleotide
  Antisense strand to SEQ ID NO: 1667669
ugcaaucccuguuaaggca

SEQ ID NO: 1667671 - RNA, 19 nt, Artificial Sequence
  Description of Artificial Sequence: Synthetic oligonucleotide
  Sense strand starting at position 470 of SEQ ID NO: 1561383
augcaccagccuuaauaga

SEQ ID NO: 1667672 - RNA, 19 nt, Artificial Sequence
  Description of Artificial Sequence: Synthetic oligonucleotide
  Antisense strand to SEQ ID NO: 1667671
ucuauuaaggcuggugcau

SEQ ID NO: 1667673 - RNA, 19 nt, Artificial Sequence
  Description of Artificial Sequence: Synthetic oligonucleotide
  Sense strand starting at position 503 of SEQ ID NO: 1561383
uucucaucaucugugcauu

SEQ ID NO: 1667674 - RNA, 19 nt, Artificial Sequence
  Description of Artificial Sequence: Synthetic oligonucleotide
  Antisense strand to SEQ ID NO: 1667673
aaugcacagaugaugagaa

SEQ ID NO: 1667675 - RNA, 19 nt, Artificial Sequence
  Description of Artificial Sequence: Synthetic oligonucleotide
  Sense strand starting at position 504 of SEQ ID NO: 1561383
ucucaucaucugugcauuu

SEQ ID NO: 1667676 - RNA, 19 nt, Artificial Sequence
  Description of Artificial Sequence: Synthetic oligonucleotide
  Antisense strand to SEQ ID NO: 1667675
aaaugcacagaugaugaga

SEQ ID NO: 1667677 - RNA, 19 nt, Artificial Sequence
  Description of Artificial Sequence: Synthetic oligonucleotide
  Sense strand starting at position 643 of SEQ ID NO: 1561383
uccguacaucgcucucauu

SEQ ID NO: 1667678 - RNA, 19 nt, Artificial Sequence
  Description of Artificial Sequence: Synthetic oligonucleotide
  Antisense strand to SEQ ID NO: 1667677
aaugagagcgauguacgga

SEQ ID NO: 1667679 - RNA, 19 nt, Artificial Sequence
  Description of Artificial Sequence: Synthetic oligonucleotide
  Sense strand starting at position 754 of SEQ ID NO: 1561383
ccgucuucccucuauucuu

SEQ ID NO: 1667680 - RNA, 19 nt, Artificial Sequence
  Description of Artificial Sequence: Synthetic oligonucleotide
  Antisense strand to SEQ ID NO: 1667679
aagaauagagggaagacgg

SEQ ID NO: 1667681 - RNA, 19 nt, Artificial Sequence
  Description of Artificial Sequence: Synthetic oligonucleotide
  Sense strand starting at position 1154 of SEQ ID NO: 1561383
cucgaaaugugucuaguua

SEQ ID NO: 1667682 - RNA, 19 nt, Artificial Sequence
  Description of Artificial Sequence: Synthetic oligonucleotide
  Antisense strand to SEQ ID NO: 1667681
uaacuagacacauuucgag

SEQ ID NO: 1667683 - RNA, 19 nt, Artificial Sequence
  Description of Artificial Sequence: Synthetic oligonucleotide
  Sense strand starting at position 1155 of SEQ ID NO: 1561383
ucgaaaugugucuaguuac

SEQ ID NO: 1667684 - RNA, 19 nt, Artificial Sequence
  Description of Artificial Sequence: Synthetic oligonucleotide
  Antisense strand to SEQ ID NO: 1667683
guaacuagacacauuucga

SEQ ID NO: 1667685 - RNA, 19 nt, Artificial Sequence
  Description of Artificial Sequence: Synthetic oligonucleotide
  Sense strand starting at position 1259 of SEQ ID NO: 1561383
uuuauugguuugccucauu

SEQ ID NO: 1667686 - RNA, 19 nt, Artificial Sequence
  Description of Artificial Sequence: Synthetic oligonucleotide
  Antisense strand to SEQ ID NO: 1667685
aaugaggcaaaccaauaaa

SEQ ID NO: 1667687 - RNA, 19 nt, Artificial Sequence
  Description of Artificial Sequence: Synthetic oligonucleotide
  Sense strand starting at position 1874 of SEQ ID NO: 1561383
ggacaucggcuguggaaau

SEQ ID NO: 1667688 - RNA, 19 nt, Artificial Sequence
  Description of Artificial Sequence: Synthetic oligonucleotide
  Antisense strand to SEQ ID NO: 1667687
auuuccacagccgaugucc

SEQ ID NO: 1667689 - RNA, 19 nt, Artificial Sequence
  Description of Artificial Sequence: Synthetic oligonucleotide
  Sense strand starting at position 2078 of SEQ ID NO: 1561383
agaguugugugggccacuu

SEQ ID NO: 1667690 - RNA, 19 nt, Artificial Sequence
  Description of Artificial Sequence: Synthetic oligonucleotide
  Antisense strand to SEQ ID NO: 1667689
aaguggcccacacaacucu

SEQ ID NO: 1667691 - RNA, 19 nt, Artificial Sequence
  Description of Artificial Sequence: Synthetic oligonucleotide
  Sense strand starting at position 2080 of SEQ ID NO: 1561383
aguugugugggccacuuau

SEQ ID NO: 1667692 - RNA, 19 nt, Artificial Sequence
  Description of Artificial Sequence: Synthetic oligonucleotide
  Antisense strand to SEQ ID NO: 1667691
auaaguggcccacacaacu

SEQ ID NO: 1667693 - RNA, 19 nt, Artificial Sequence
  Description of Artificial Sequence: Synthetic oligonucleotide
  Sense strand starting at position 2187 of SEQ ID NO: 1561383
gggagucuccugcagcuua

SEQ ID NO: 1667694 - RNA, 19 nt, Artificial Sequence
  Description of Artificial Sequence: Synthetic oligonucleotide
  Antisense strand to SEQ ID NO: 1667693
uaagcugcaggagacuccc

SEQ ID NO: 1667695 - RNA, 19 nt, Artificial Sequence
  Description of Artificial Sequence: Synthetic oligonucleotide
  Sense strand starting at position 2283 of SEQ ID NO: 1561383
aaaugaagugucuggaauc

SEQ ID NO: 1667696 - RNA, 19 nt, Artificial Sequence
  Description of Artificial Sequence: Synthetic oligonucleotide
  Antisense strand to SEQ ID NO: 1667695
gauuccagacacuucauuu

SEQ ID NO: 1667697 - RNA, 19 nt, Artificial Sequence
  Description of Artificial Sequence: Synthetic oligonucleotide
  Sense strand starting at position 2371 of SEQ ID NO: 1561383
agacauauggauugaugca

SEQ ID NO: 1667698 - RNA, 19 nt, Artificial Sequence
  Description of Artificial Sequence: Synthetic oligonucleotide
  Antisense strand to SEQ ID NO: 1667697
ugcaucaauccauaugucu

SEQ ID NO: 1667699 - RNA, 19 nt, Artificial Sequence
  Description of Artificial Sequence: Synthetic oligonucleotide
  Sense strand starting at position 2959 of SEQ ID NO: 1561383
cugugauaguuccuccuuu

SEQ ID NO: 1667700 - RNA, 19 nt, Artificial Sequence
  Description of Artificial Sequence: Synthetic oligonucleotide
  Antisense strand to SEQ ID NO: 1667699
aaaggaggaacuaucacag

SEQ ID NO: 1667701 - RNA, 19 nt, Artificial Sequence
  Description of Artificial Sequence: Synthetic oligonucleotide
  Sense strand starting at position 2960 of SEQ ID NO: 1561383
ugugauaguuccuccuuug

SEQ ID NO: 1667702 - RNA, 19 nt, Artificial Sequence
  Description of Artificial Sequence: Synthetic oligonucleotide
  Antisense strand to SEQ ID NO: 1667701
caaaggaggaacuaucaca

SEQ ID NO: 1667703 - RNA, 19 nt, Artificial Sequence
  Description of Artificial Sequence: Synthetic oligonucleotide
  Sense strand starting at position 3135 of SEQ ID NO: 1561383
ggguuuaggcagugugaaa

SEQ ID NO: 1667704 - RNA, 19 nt, Artificial Sequence
  Description of Artificial Sequence: Synthetic oligonucleotide
  Antisense strand to SEQ ID NO: 1667703
uuucacacugccuaaaccc

SEQ ID NO: 1667705 - RNA, 19 nt, Artificial Sequence
  Description of Artificial Sequence: Synthetic oligonucleotide
  Sense strand starting at position 3215 of SEQ ID NO: 1561383
ugguauguggaauguauaa

SEQ ID NO: 1667706 - RNA, 19 nt, Artificial Sequence
  Description of Artificial Sequence: Synthetic oligonucleotide
  Antisense strand to SEQ ID NO: 1667705
uuauacauuccacauacca

SEQ ID NO: 1667707 - RNA, 19 nt, Artificial Sequence
  Description of Artificial Sequence: Synthetic oligonucleotide
  Sense strand starting at position 3217 of SEQ ID NO: 1561383
guauguggaauguauaaag

SEQ ID NO: 1667708 - RNA, 19 nt, Artificial Sequence
  Description of Artificial Sequence: Synthetic oligonucleotide
  Antisense strand to SEQ ID NO: 1667707
cuuuauacauuccacauac

SEQ ID NO: 1667709 - RNA, 19 nt, Artificial Sequence
  Description of Artificial Sequence: Synthetic oligonucleotide
  Sense strand starting at position 3391 of SEQ ID NO: 1561383
uucugcuuucuccauguga

SEQ ID NO: 1667710 - RNA, 19 nt, Artificial Sequence
  Description of Artificial Sequence: Synthetic oligonucleotide
  Antisense strand to SEQ ID NO: 1667709
ucacauggagaaagcagaa

SEQ ID NO: 1667711 - RNA, 19 nt, Artificial Sequence
  Description of Artificial Sequence: Synthetic oligonucleotide
  Sense strand starting at position 3393 of SEQ ID NO: 1561383
cugcuuucuccaugugaac

SEQ ID NO: 1667712 - RNA, 19 nt, Artificial Sequence
  Description of Artificial Sequence: Synthetic oligonucleotide
  Antisense strand to SEQ ID NO: 1667711
guucacauggagaaagcag

SEQ ID NO: 1667713 - RNA, 19 nt, Artificial Sequence
  Description of Artificial Sequence: Synthetic oligonucleotide
  Sense strand starting at position 3445 of SEQ ID NO: 1561383
ggagcuucuacugaacagu

SEQ ID NO: 1667714 - RNA, 19 nt, Artificial Sequence
  Description of Artificial Sequence: Synthetic oligonucleotide
  Antisense strand to SEQ ID NO: 1667713
acuguucaguagaagcucc

SEQ ID NO: 1667715 - RNA, 19 nt, Artificial Sequence
  Description of Artificial Sequence: Synthetic oligonucleotide
  Sense strand starting at position 3549 of SEQ ID NO: 1561383
auaugcacuuugucauuau

SEQ ID NO: 1667716 - RNA, 19 nt, Artificial Sequence
  Description of Artificial Sequence: Synthetic oligonucleotide
  Antisense strand to SEQ ID NO: 1667715
auaaugacaaagugcauau

SEQ ID NO: 1667717 - RNA, 19 nt, Artificial Sequence
  Description of Artificial Sequence: Synthetic oligonucleotide
  Sense strand starting at position 3552 of SEQ ID NO: 1561383
ugcacuuugucauuauuag

SEQ ID NO: 1667718 - RNA, 19 nt, Artificial Sequence
  Description of Artificial Sequence: Synthetic oligonucleotide
  Antisense strand to SEQ ID NO: 1667717
cuaauaaugacaaagugca

SEQ ID NO: 1667719 - RNA, 19 nt, Artificial Sequence
  Description of Artificial Sequence: Synthetic oligonucleotide
  Sense strand starting at position 3553 of SEQ ID NO: 1561383
gcacuuugucauuauuagu

SEQ ID NO: 1667720 - RNA, 19 nt, Artificial Sequence
  Description of Artificial Sequence: Synthetic oligonucleotide
  Antisense strand to SEQ ID NO: 1667719
acuaauaaugacaaagugc

SEQ ID NO: 1667721 - RNA, 19 nt, Artificial Sequence
  Description of Artificial Sequence: Synthetic oligonucleotide
  Sense strand starting at position 3896 of SEQ ID NO: 1561383
cuggaugccuccuucgaaa

SEQ ID NO: 1667722 - RNA, 19 nt, Artificial Sequence
  Description of Artificial Sequence: Synthetic oligonucleotide
  Antisense strand to SEQ ID NO: 1667721
uuucgaaggaggcauccag

SEQ ID NO: 1667723 - RNA, 19 nt, Artificial Sequence
  Description of Artificial Sequence: Synthetic oligonucleotide
  Sense strand starting at position 3898 of SEQ ID NO: 1561383
ggaugccuccuucgaaaga

SEQ ID NO: 1667724 - RNA, 19 nt, Artificial Sequence
  Description of Artificial Sequence: Synthetic oligonucleotide
  Antisense strand to SEQ ID NO: 1667723
ucuuucgaaggaggcaucc

SEQ ID NO: 1667725 - RNA, 19 nt, Artificial Sequence
  Description of Artificial Sequence: Synthetic oligonucleotide
  Sense strand starting at position 3908 of SEQ ID NO: 1561383
uucgaaagauuggauaauc

SEQ ID NO: 1667726 - RNA, 19 nt, Artificial Sequence
  Description of Artificial Sequence: Synthetic oligonucleotide
  Antisense strand to SEQ ID NO: 1667725
gauuauccaaucuuucgaa

SEQ ID NO: 1667727 - RNA, 19 nt, Artificial Sequence
  Description of Artificial Sequence: Synthetic oligonucleotide
  Sense strand starting at position 3916 of SEQ ID NO: 1561383
auuggauaaucguucuuac

SEQ ID NO: 1667728 - RNA, 19 nt, Artificial Sequence
  Description of Artificial Sequence: Synthetic oligonucleotide
  Antisense strand to SEQ ID NO: 1667727
guaagaacgauuauccaau

SEQ ID NO: 1667729 - RNA, 19 nt, Artificial Sequence
  Description of Artificial Sequence: Synthetic oligonucleotide
  Sense strand starting at position 3919 of SEQ ID NO: 1561383
ggauaaucguucuuacagg

SEQ ID NO: 1667730 - RNA, 19 nt, Artificial Sequence
  Description of Artificial Sequence: Synthetic oligonucleotide
  Antisense strand to SEQ ID NO: 1667729
ccuguaagaacgauuaucc

SEQ ID NO: 1667731 - RNA, 19 nt, Artificial Sequence
  Description of Artificial Sequence: Synthetic oligonucleotide
  Sense strand starting at position 3935 of SEQ ID NO: 1561383
aggauuaugugguaaugag

SEQ ID NO: 1667732 - RNA, 19 nt, Artificial Sequence
  Description of Artificial Sequence: Synthetic oligonucleotide
  Antisense strand to SEQ ID NO: 1667731
cucauuaccacauaauccu

SEQ ID NO: 1667733 - RNA, 19 nt, Artificial Sequence
  Description of Artificial Sequence: Synthetic oligonucleotide
  Sense strand starting at position 3942 of SEQ ID NO: 1561383
ugugguaaugagugucucu

SEQ ID NO: 1667734 - RNA, 19 nt, Artificial Sequence
  Description of Artificial Sequence: Synthetic oligonucleotide
  Antisense strand to SEQ ID NO: 1667733
agagacacucauuaccaca

SEQ ID NO: 1667735 - RNA, 19 nt, Artificial Sequence
  Description of Artificial Sequence: Synthetic oligonucleotide
  Sense strand starting at position 3947 of SEQ ID NO: 1561383
uaaugagugucucugucau

SEQ ID NO: 1667736 - RNA, 19 nt, Artificial Sequence
  Description of Artificial Sequence: Synthetic oligonucleotide
  Antisense strand to SEQ ID NO: 1667735
augacagagacacucauua

SEQ ID NO: 1667737 - RNA, 19 nt, Artificial Sequence
  Description of Artificial Sequence: Synthetic oligonucleotide
  Sense strand starting at position 3949 of SEQ ID NO: 1561383
augagugucucugucauuc

SEQ ID NO: 1667738 - RNA, 19 nt, Artificial Sequence
  Description of Artificial Sequence: Synthetic oligonucleotide
  Antisense strand to SEQ ID NO: 1667737
gaaugacagagacacucau

SEQ ID NO: 1667739 - RNA, 19 nt, Artificial Sequence
  Description of Artificial Sequence: Synthetic oligonucleotide
  Sense strand starting at position 3966 of SEQ ID NO: 1561383
ucauuuagguaagaugcau

SEQ ID NO: 1667740 - RNA, 19 nt, Artificial Sequence
  Description of Artificial Sequence: Synthetic oligonucleotide
  Antisense strand to SEQ ID NO: 1667739
augcaucuuaccuaaauga

SEQ ID NO: 1667741 - RNA, 19 nt, Artificial Sequence
  Description of Artificial Sequence: Synthetic oligonucleotide
  Sense strand starting at position 3972 of SEQ ID NO: 1561383
agguaagaugcauacgcaa

SEQ ID NO: 1667742 - RNA, 19 nt, Artificial Sequence
  Description of Artificial Sequence: Synthetic oligonucleotide
  Antisense strand to SEQ ID NO: 1667741
uugcguaugcaucuuaccu

SEQ ID NO: 1667743 - RNA, 19 nt, Artificial Sequence
  Description of Artificial Sequence: Synthetic oligonucleotide
  Sense strand starting at position 3974 of SEQ ID NO: 1561383
guaagaugcauacgcaaua

SEQ ID NO: 1667744 - RNA, 19 nt, Artificial Sequence
  Description of Artificial Sequence: Synthetic oligonucleotide
  Antisense strand to SEQ ID NO: 1667743
uauugcguaugcaucuuac

SEQ ID NO: 1667745 - RNA, 19 nt, Artificial Sequence
  Description of Artificial Sequence: Synthetic oligonucleotide
  Sense strand starting at position 3979 of SEQ ID NO: 1561383
augcauacgcaauagugau

SEQ ID NO: 1667746 - RNA, 19 nt, Artificial Sequence
  Description of Artificial Sequence: Synthetic oligonucleotide
  Antisense strand to SEQ ID NO: 1667745
aucacuauugcguaugcau

SEQ ID NO: 1667747 - RNA, 19 nt, Artificial Sequence
  Description of Artificial Sequence: Synthetic oligonucleotide
  Sense strand starting at position 386 of SEQ ID NO: 1561384
uggaauuaaugagucaagu

SEQ ID NO: 1667748 - RNA, 19 nt, Artificial Sequence
  Description of Artificial Sequence: Synthetic oligonucleotide
  Antisense strand to SEQ ID NO: 1667747
acuugacucauuaauucca

SEQ ID NO: 1667749 - RNA, 19 nt, Artificial Sequence
  Description of Artificial Sequence: Synthetic oligonucleotide
  Sense strand starting at position 415 of SEQ ID NO: 1561384
ugccuuaacagggauugca

SEQ ID NO: 1667750 - RNA, 19 nt, Artificial Sequence
  Description of Artificial Sequence: Synthetic oligonucleotide
  Antisense strand to SEQ ID NO: 1667749
ugcaaucccuguuaaggca

SEQ ID NO: 1667751 - RNA, 19 nt, Artificial Sequence
  Description of Artificial Sequence: Synthetic oligonucleotide
  Sense strand starting at position 468 of SEQ ID NO: 1561384
augcaccagccuuaauaga

SEQ ID NO: 1667752 - RNA, 19 nt, Artificial Sequence
  Description of Artificial Sequence: Synthetic oligonucleotide
  Antisense strand to SEQ ID NO: 1667751
ucuauuaaggcuggugcau

SEQ ID NO: 1667753 - RNA, 19 nt, Artificial Sequence
  Description of Artificial Sequence: Synthetic oligonucleotide
  Sense strand starting at position 501 of SEQ ID NO: 1561384
uucucaucaucugugcauu

SEQ ID NO: 1667754 - RNA, 19 nt, Artificial Sequence
  Description of Artificial Sequence: Synthetic oligonucleotide
  Antisense strand to SEQ ID NO: 1667753
aaugcacagaugaugagaa

SEQ ID NO: 1667755 - RNA, 19 nt, Artificial Sequence
  Description of Artificial Sequence: Synthetic oligonucleotide
  Sense strand starting at position 502 of SEQ ID NO: 1561384
ucucaucaucugugcauuu

SEQ ID NO: 1667756 - RNA, 19 nt, Artificial Sequence
  Description of Artificial Sequence: Synthetic oligonucleotide
  Antisense strand to SEQ ID NO: 1667755
aaaugcacagaugaugaga

SEQ ID NO: 1667757 - RNA, 19 nt, Artificial Sequence
  Description of Artificial Sequence: Synthetic oligonucleotide
  Sense strand starting at position 641 of SEQ ID NO: 1561384
uccguacaucgcucucauu

SEQ ID NO: 1667758 - RNA, 19 nt, Artificial Sequence
  Description of Artificial Sequence: Synthetic oligonucleotide
  Antisense strand to SEQ ID NO: 1667757
aaugagagcgauguacgga

SEQ ID NO: 1667759 - RNA, 19 nt, Artificial Sequence
  Description of Artificial Sequence: Synthetic oligonucleotide
  Sense strand starting at position 752 of SEQ ID NO: 1561384
ccgucuucccucuauucuu

SEQ ID NO: 1667760 - RNA, 19 nt, Artificial Sequence
  Description of Artificial Sequence: Synthetic oligonucleotide
  Antisense strand to SEQ ID NO: 1667759
aagaauagagggaagacgg

SEQ ID NO: 1667761 - RNA, 19 nt, Artificial Sequence
  Description of Artificial Sequence: Synthetic oligonucleotide
  Sense strand starting at position 1152 of SEQ ID NO: 1561384
cucgaaaugugucuaguua

SEQ ID NO: 1667762 - RNA, 19 nt, Artificial Sequence
  Description of Artificial Sequence: Synthetic oligonucleotide
  Antisense strand to SEQ ID NO: 1667761
uaacuagacacauuucgag

SEQ ID NO: 1667763 - RNA, 19 nt, Artificial Sequence
  Description of Artificial Sequence: Synthetic oligonucleotide
  Sense strand starting at position 1153 of SEQ ID NO: 1561384
ucgaaaugugucuaguuac

SEQ ID NO: 1667764 - RNA, 19 nt, Artificial Sequence
  Description of Artificial Sequence: Synthetic oligonucleotide
  Antisense strand to SEQ ID NO: 1667763
guaacuagacacauuucga

SEQ ID NO: 1667765 - RNA, 19 nt, Artificial Sequence
  Description of Artificial Sequence: Synthetic oligonucleotide
  Sense strand starting at position 1257 of SEQ ID NO: 1561384
uuuauugguuugccucauu

SEQ ID NO: 1667766 - RNA, 19 nt, Artificial Sequence
  Description of Artificial Sequence: Synthetic oligonucleotide
  Antisense strand to SEQ ID NO: 1667765
aaugaggcaaaccaauaaa

SEQ ID NO: 1667767 - RNA, 19 nt, Artificial Sequence
  Description of Artificial Sequence: Synthetic oligonucleotide
  Sense strand starting at position 1872 of SEQ ID NO: 1561384
ggacaucggcuguggaaau

SEQ ID NO: 1667768 - RNA, 19 nt, Artificial Sequence
  Description of Artificial Sequence: Synthetic oligonucleotide
  Antisense strand to SEQ ID NO: 1667767
auuuccacagccgaugucc

SEQ ID NO: 1667769 - RNA, 19 nt, Artificial Sequence
  Description of Artificial Sequence: Synthetic oligonucleotide
  Sense strand starting at position 2076 of SEQ ID NO: 1561384
agaguugugugggccacuu

SEQ ID NO: 1667770 - RNA, 19 nt, Artificial Sequence
  Description of Artificial Sequence: Synthetic oligonucleotide
  Antisense strand to SEQ ID NO: 1667769
aaguggcccacacaacucu

SEQ ID NO: 1667771 - RNA, 19 nt, Artificial Sequence
  Description of Artificial Sequence: Synthetic oligonucleotide
  Sense strand starting at position 2078 of SEQ ID NO: 1561384
aguugugugggccacuuau

SEQ ID NO: 1667772 - RNA, 19 nt, Artificial Sequence
  Description of Artificial Sequence: Synthetic oligonucleotide
  Antisense strand to SEQ ID NO: 1667771
auaaguggcccacacaacu

SEQ ID NO: 1667773 - RNA, 19 nt, Artificial Sequence
  Description of Artificial Sequence: Synthetic oligonucleotide
  Sense strand starting at position 2185 of SEQ ID NO: 1561384
gggagucuccugcagcuua

SEQ ID NO: 1667774 - RNA, 19 nt, Artificial Sequence
  Description of Artificial Sequence: Synthetic oligonucleotide
  Antisense strand to SEQ ID NO: 1667773
uaagcugcaggagacuccc

SEQ ID NO: 1667775 - RNA, 19 nt, Artificial Sequence
  Description of Artificial Sequence: Synthetic oligonucleotide
  Sense strand starting at position 2281 of SEQ ID NO: 1561384
aaaugaagugucuggaauc

SEQ ID NO: 1667776 - RNA, 19 nt, Artificial Sequence
  Description of Artificial Sequence: Synthetic oligonucleotide
  Antisense strand to SEQ ID NO: 1667775
gauuccagacacuucauuu

SEQ ID NO: 1667777 - RNA, 19 nt, Artificial Sequence
  Description of Artificial Sequence: Synthetic oligonucleotide
  Sense strand starting at position 2369 of SEQ ID NO: 1561384
agacauauggauugaugca

SEQ ID NO: 1667778 - RNA, 19 nt, Artificial Sequence
  Description of Artificial Sequence: Synthetic oligonucleotide
  Antisense strand to SEQ ID NO: 1667777
ugcaucaauccauaugucu

SEQ ID NO: 1667779 - RNA, 19 nt, Artificial Sequence
  Description of Artificial Sequence: Synthetic oligonucleotide
  Sense strand starting at position 2957 of SEQ ID NO: 1561384
cugugauaguuccuccuuu

SEQ ID NO: 1667780 - RNA, 19 nt, Artificial Sequence
  Description of Artificial Sequence: Synthetic oligonucleotide
  Antisense strand to SEQ ID NO: 1667779
aaaggaggaacuaucacag

SEQ ID NO: 1667781 - RNA, 19 nt, Artificial Sequence
  Description of Artificial Sequence: Synthetic oligonucleotide
  Sense strand starting at position 2958 of SEQ ID NO: 1561384
ugugauaguuccuccuuug

SEQ ID NO: 1667782 - RNA, 19 nt, Artificial Sequence
  Description of Artificial Sequence: Synthetic oligonucleotide
  Antisense strand to SEQ ID NO: 1667781
caaaggaggaacuaucaca

SEQ ID NO: 1667783 - RNA, 19 nt, Artificial Sequence
  Description of Artificial Sequence: Synthetic oligonucleotide
  Sense strand starting at position 3133 of SEQ ID NO: 1561384
ggguuuaggcagugugaaa

SEQ ID NO: 1667784 - RNA, 19 nt, Artificial Sequence
  Description of Artificial Sequence: Synthetic oligonucleotide
  Antisense strand to SEQ ID NO: 1667783
uuucacacugccuaaaccc

SEQ ID NO: 1667785 - RNA, 19 nt, Artificial Sequence
  Description of Artificial Sequence: Synthetic oligonucleotide
  Sense strand starting at position 3213 of SEQ ID NO: 1561384
ugguauguggaauguauaa

SEQ ID NO: 1667786 - RNA, 19 nt, Artificial Sequence
  Description of Artificial Sequence: Synthetic oligonucleotide
  Antisense strand to SEQ ID NO: 1667785
uuauacauuccacauacca

SEQ ID NO: 1667787 - RNA, 19 nt, Artificial Sequence
  Description of Artificial Sequence: Synthetic oligonucleotide
  Sense strand starting at position 3215 of SEQ ID NO: 1561384
guauguggaauguauaaag

SEQ ID NO: 1667788 - RNA, 19 nt, Artificial Sequence
  Description of Artificial Sequence: Synthetic oligonucleotide
  Antisense strand to SEQ ID NO: 1667787
cuuuauacauuccacauac

SEQ ID NO: 1667789 - RNA, 19 nt, Artificial Sequence
  Description of Artificial Sequence: Synthetic oligonucleotide
  Sense strand starting at position 3389 of SEQ ID NO: 1561384
uucugcuuucuccauguga

SEQ ID NO: 1667790 - RNA, 19 nt, Artificial Sequence
  Description of Artificial Sequence: Synthetic oligonucleotide
  Antisense strand to SEQ ID NO: 1667789
ucacauggagaaagcagaa

SEQ ID NO: 1667791 - RNA, 19 nt, Artificial Sequence
  Description of Artificial Sequence: Synthetic oligonucleotide
  Sense strand starting at position 3391 of SEQ ID NO: 1561384
cugcuuucuccaugugaac

SEQ ID NO: 1667792 - RNA, 19 nt, Artificial Sequence
  Description of Artificial Sequence: Synthetic oligonucleotide
  Antisense strand to SEQ ID NO: 1667791
guucacauggagaaagcag

SEQ ID NO: 1667793 - RNA, 19 nt, Artificial Sequence
  Description of Artificial Sequence: Synthetic oligonucleotide
  Sense strand starting at position 3443 of SEQ ID NO: 1561384
ggagcuucuacugaacagu

SEQ ID NO: 1667794 - RNA, 19 nt, Artificial Sequence
  Description of Artificial Sequence: Synthetic oligonucleotide
  Antisense strand to SEQ ID NO: 1667793
acuguucaguagaagcucc

SEQ ID NO: 1667795 - RNA, 19 nt, Artificial Sequence
  Description of Artificial Sequence: Synthetic oligonucleotide
  Sense strand starting at position 3547 of SEQ ID NO: 1561384
auaugcacuuugucauuau

SEQ ID NO: 1667796 - RNA, 19 nt, Artificial Sequence
  Description of Artificial Sequence: Synthetic oligonucleotide
  Antisense strand to SEQ ID NO: 1667795
auaaugacaaagugcauau

SEQ ID NO: 1667797 - RNA, 19 nt, Artificial Sequence
  Description of Artificial Sequence: Synthetic oligonucleotide
  Sense strand starting at position 3550 of SEQ ID NO: 1561384
ugcacuuugucauuauuag

SEQ ID NO: 1667798 - RNA, 19 nt, Artificial Sequence
  Description of Artificial Sequence: Synthetic oligonucleotide
  Antisense strand to SEQ ID NO: 1667797
cuaauaaugacaaagugca

SEQ ID NO: 1667799 - RNA, 19 nt, Artificial Sequence
  Description of Artificial Sequence: Synthetic oligonucleotide
  Sense strand starting at position 3551 of SEQ ID NO: 1561384
gcacuuugucauuauuagu

SEQ ID NO: 1667800 - RNA, 19 nt, Artificial Sequence
  Description of Artificial Sequence: Synthetic oligonucleotide
  Antisense strand to SEQ ID NO: 1667799
acuaauaaugacaaagugc

SEQ ID NO: 1667801 - RNA, 19 nt, Artificial Sequence
  Description of Artificial Sequence: Synthetic oligonucleotide
  Sense strand starting at position 3894 of SEQ ID NO: 1561384
cuggaugccuccuucgaaa

SEQ ID NO: 1667802 - RNA, 19 nt, Artificial Sequence
  Description of Artificial Sequence: Synthetic oligonucleotide
  Antisense strand to SEQ ID NO: 1667801
uuucgaaggaggcauccag

SEQ ID NO: 1667803 - RNA, 19 nt, Artificial Sequence
  Description of Artificial Sequence: Synthetic oligonucleotide
  Sense strand starting at position 3896 of SEQ ID NO: 1561384
ggaugccuccuucgaaaga

SEQ ID NO: 1667804 - RNA, 19 nt, Artificial Sequence
  Description of Artificial Sequence: Synthetic oligonucleotide
  Antisense strand to SEQ ID NO: 1667803
ucuuucgaaggaggcaucc

SEQ ID NO: 1667805 - RNA, 19 nt, Artificial Sequence
  Description of Artificial Sequence: Synthetic oligonucleotide
  Sense strand starting at position 3906 of SEQ ID NO: 1561384
uucgaaagauuggauaauc

SEQ ID NO: 1667806 - RNA, 19 nt, Artificial Sequence
  Description of Artificial Sequence: Synthetic oligonucleotide
  Antisense strand to SEQ ID NO: 1667805
gauuauccaaucuuucgaa

SEQ ID NO: 1667807 - RNA, 19 nt, Artificial Sequence
  Description of Artificial Sequence: Synthetic oligonucleotide
  Sense strand starting at position 3914 of SEQ ID NO: 1561384
auuggauaaucguucuuac

SEQ ID NO: 1667808 - RNA, 19 nt, Artificial Sequence
  Description of Artificial Sequence: Synthetic oligonucleotide
  Antisense strand to SEQ ID NO: 1667807
guaagaacgauuauccaau

SEQ ID NO: 1667809 - RNA, 19 nt, Artificial Sequence
  Description of Artificial Sequence: Synthetic oligonucleotide
  Sense strand starting at position 3917 of SEQ ID NO: 1561384
ggauaaucguucuuacagg

SEQ ID NO: 1667810 - RNA, 19 nt, Artificial Sequence
  Description of Artificial Sequence: Synthetic oligonucleotide
  Antisense strand to SEQ ID NO: 1667809
ccuguaagaacgauuaucc

SEQ ID NO: 1667811 - RNA, 19 nt, Artificial Sequence
  Description of Artificial Sequence: Synthetic oligonucleotide
  Sense strand starting at position 3940 of SEQ ID NO: 1561384
ugugguaaugagugucucu

SEQ ID NO: 1667812 - RNA, 19 nt, Artificial Sequence
  Description of Artificial Sequence: Synthetic oligonucleotide
  Antisense strand to SEQ ID NO: 1667811
agagacacucauuaccaca

SEQ ID NO: 1667813 - RNA, 19 nt, Artificial Sequence
  Description of Artificial Sequence: Synthetic oligonucleotide
  Sense strand starting at position 3945 of SEQ ID NO: 1561384
uaaugagugucucugucau

SEQ ID NO: 1667814 - RNA, 19 nt, Artificial Sequence
  Description of Artificial Sequence: Synthetic oligonucleotide
  Antisense strand to SEQ ID NO: 1667813
augacagagacacucauua

SEQ ID NO: 1667815 - RNA, 19 nt, Artificial Sequence
  Description of Artificial Sequence: Synthetic oligonucleotide
  Sense strand starting at position 3947 of SEQ ID NO: 1561384
augagugucucugucauuc

SEQ ID NO: 1667816 - RNA, 19 nt, Artificial Sequence
  Description of Artificial Sequence: Synthetic oligonucleotide
  Antisense strand to SEQ ID NO: 1667815
gaaugacagagacacucau

SEQ ID NO: 1667817 - RNA, 19 nt, Artificial Sequence
  Description of Artificial Sequence: Synthetic oligonucleotide
  Sense strand starting at position 3964 of SEQ ID NO: 1561384
ucauuuagguaagaugcau

SEQ ID NO: 1667818 - RNA, 19 nt, Artificial Sequence
  Description of Artificial Sequence: Synthetic oligonucleotide
  Antisense strand to SEQ ID NO: 1667817
augcaucuuaccuaaauga

SEQ ID NO: 1667819 - RNA, 19 nt, Artificial Sequence
  Description of Artificial Sequence: Synthetic oligonucleotide
  Sense strand starting at position 3970 of SEQ ID NO: 1561384
agguaagaugcauacgcaa

SEQ ID NO: 1667820 - RNA, 19 nt, Artificial Sequence
  Description of Artificial Sequence: Synthetic oligonucleotide
  Antisense strand to SEQ ID NO: 1667819
uugcguaugcaucuuaccu

SEQ ID NO: 1667821 - RNA, 19 nt, Artificial Sequence
  Description of Artificial Sequence: Synthetic oligonucleotide
  Sense strand starting at position 3972 of SEQ ID NO: 1561384
guaagaugcauacgcaaua

SEQ ID NO: 1667822 - RNA, 19 nt, Artificial Sequence
  Description of Artificial Sequence: Synthetic oligonucleotide
  Antisense strand to SEQ ID NO: 1667821
uauugcguaugcaucuuac

SEQ ID NO: 1667823 - RNA, 19 nt, Artificial Sequence
  Description of Artificial Sequence: Synthetic oligonucleotide
  Sense strand starting at position 3977 of SEQ ID NO: 1561384
augcauacgcaauagugau

SEQ ID NO: 1667824 - RNA, 19 nt, Artificial Sequence
  Description of Artificial Sequence: Synthetic oligonucleotide
  Antisense strand to SEQ ID NO: 1667823
aucacuauugcguaugcau

SEQ ID NO: 1667825 - RNA, 19 nt, Artificial Sequence
  Description of Artificial Sequence: Synthetic oligonucleotide
  Sense strand starting at position 3983 of SEQ ID NO: 1561384
acgcaauagugaucuauaa

SEQ ID NO: 1667826 - RNA, 19 nt, Artificial Sequence
  Description of Artificial Sequence: Synthetic oligonucleotide
  Antisense strand to SEQ ID NO: 1667825
uuauagaucacuauugcgu

SEQ ID NO: 1667827 - RNA, 19 nt, Artificial Sequence
  Description of Artificial Sequence: Synthetic oligonucleotide
  Sense strand starting at position 44 of SEQ ID NO: 1561385
gccagaucauccuugcucu

SEQ ID NO: 1667828 - RNA, 19 nt, Artificial Sequence
  Description of Artificial Sequence: Synthetic oligonucleotide
  Antisense strand to SEQ ID NO: 1667827
agagcaaggaugaucuggc

SEQ ID NO: 1667829 - RNA, 19 nt, Artificial Sequence
  Description of Artificial Sequence: Synthetic oligonucleotide
  Sense strand starting at position 89 of SEQ ID NO: 1561385
ccauaccugucuuugugau

SEQ ID NO: 1667830 - RNA, 19 nt, Artificial Sequence
  Description of Artificial Sequence: Synthetic oligonucleotide
  Antisense strand to SEQ ID NO: 1667829
aucacaaagacagguaugg

SEQ ID NO: 1667831 - RNA, 19 nt, Artificial Sequence
  Description of Artificial Sequence: Synthetic oligonucleotide
  Sense strand starting at position 177 of SEQ ID NO: 1561385
ugguaauagcauuaccaaa

SEQ ID NO: 1667832 - RNA, 19 nt, Artificial Sequence
  Description of Artificial Sequence: Synthetic oligonucleotide
  Antisense strand to SEQ ID NO: 1667831
uuugguaaugcuauuacca

SEQ ID NO: 1667833 - RNA, 19 nt, Artificial Sequence
  Description of Artificial Sequence: Synthetic oligonucleotide
  Sense strand starting at position 179 of SEQ ID NO: 1561385
guaauagcauuaccaaagu

SEQ ID NO: 1667834 - RNA, 19 nt, Artificial Sequence
  Description of Artificial Sequence: Synthetic oligonucleotide
  Antisense strand to SEQ ID NO: 1667833
acuuugguaaugcuauuac

SEQ ID NO: 1667835 - RNA, 19 nt, Artificial Sequence
  Description of Artificial Sequence: Synthetic oligonucleotide
  Sense strand starting at position 188 of SEQ ID NO: 1561385
uuaccaaagugaucacgau

SEQ ID NO: 1667836 - RNA, 19 nt, Artificial Sequence
  Description of Artificial Sequence: Synthetic oligonucleotide
  Antisense strand to SEQ ID NO: 1667835
aucgugaucacuuugguaa

SEQ ID NO: 1667837 - RNA, 19 nt, Artificial Sequence
  Description of Artificial Sequence: Synthetic oligonucleotide
  Sense strand starting at position 189 of SEQ ID NO: 1561385
uaccaaagugaucacgauu

SEQ ID NO: 1667838 - RNA, 19 nt, Artificial Sequence
  Description of Artificial Sequence: Synthetic oligonucleotide
  Antisense strand to SEQ ID NO: 1667837
aaucgugaucacuuuggua

SEQ ID NO: 1667839 - RNA, 19 nt, Artificial Sequence
  Description of Artificial Sequence: Synthetic oligonucleotide
  Sense strand starting at position 192 of SEQ ID NO: 1561385
caaagugaucacgauucca

SEQ ID NO: 1667840 - RNA, 19 nt, Artificial Sequence
  Description of Artificial Sequence: Synthetic oligonucleotide
  Antisense strand to SEQ ID NO: 1667839
uggaaucgugaucacuuug

SEQ ID NO: 1667841 - RNA, 19 nt, Artificial Sequence
  Description of Artificial Sequence: Synthetic oligonucleotide
  Sense strand starting at position 211 of SEQ ID NO: 1561385
ccuccuaauugugucccaa

SEQ ID NO: 1667842 - RNA, 19 nt, Artificial Sequence
  Description of Artificial Sequence: Synthetic oligonucleotide
  Antisense strand to SEQ ID NO: 1667841
uugggacacaauuaggagg

SEQ ID NO: 1667843 - RNA, 19 nt, Artificial Sequence
  Description of Artificial Sequence: Synthetic oligonucleotide
  Sense strand starting at position 296 of SEQ ID NO: 1561385
guucuaguccuguaggaua

SEQ ID NO: 1667844 - RNA, 19 nt, Artificial Sequence
  Description of Artificial Sequence: Synthetic oligonucleotide
  Antisense strand to SEQ ID NO: 1667843
uauccuacaggacuagaac

SEQ ID NO: 1667845 - RNA, 19 nt, Artificial Sequence
  Description of Artificial Sequence: Synthetic oligonucleotide
  Sense strand starting at position 298 of SEQ ID NO: 1561385
ucuaguccuguaggauaaa

SEQ ID NO: 1667846 - RNA, 19 nt, Artificial Sequence
  Description of Artificial Sequence: Synthetic oligonucleotide
  Antisense strand to SEQ ID NO: 1667845
uuuauccuacaggacuaga

SEQ ID NO: 1667847 - RNA, 19 nt, Artificial Sequence
  Description of Artificial Sequence: Synthetic oligonucleotide
  Sense strand starting at position 444 of SEQ ID NO: 1561385
uucugauuaucucuagaga

SEQ ID NO: 1667848 - RNA, 19 nt, Artificial Sequence
  Description of Artificial Sequence: Synthetic oligonucleotide
  Antisense strand to SEQ ID NO: 1667847
ucucuagagauaaucagaa

SEQ ID NO: 1667849 - RNA, 19 nt, Artificial Sequence
  Description of Artificial Sequence: Synthetic oligonucleotide
  Sense strand starting at position 797 of SEQ ID NO: 1561385
acugucauugcucaucaca

SEQ ID NO: 1667850 - RNA, 19 nt, Artificial Sequence
  Description of Artificial Sequence: Synthetic oligonucleotide
  Antisense strand to SEQ ID NO: 1667849
ugugaugagcaaugacagu

SEQ ID NO: 1667851 - RNA, 19 nt, Artificial Sequence
  Description of Artificial Sequence: Synthetic oligonucleotide
  Sense strand starting at position 799 of SEQ ID NO: 1561385
ugucauugcucaucacaca

SEQ ID NO: 1667852 - RNA, 19 nt, Artificial Sequence
  Description of Artificial Sequence: Synthetic oligonucleotide
  Antisense strand to SEQ ID NO: 1667851
ugugugaugagcaaugaca

SEQ ID NO: 1667853 - RNA, 19 nt, Artificial Sequence
  Description of Artificial Sequence: Synthetic oligonucleotide
  Sense strand starting at position 856 of SEQ ID NO: 1561385
gucugauuccugcauccca

SEQ ID NO: 1667854 - RNA, 19 nt, Artificial Sequence
  Description of Artificial Sequence: Synthetic oligonucleotide
  Antisense strand to SEQ ID NO: 1667853
ugggaugcaggaaucagac

SEQ ID NO: 1667855 - RNA, 19 nt, Artificial Sequence
  Description of Artificial Sequence: Synthetic oligonucleotide
  Sense strand starting at position 954 of SEQ ID NO: 1561385
gguaucuaagccugagaca

SEQ ID NO: 1667856 - RNA, 19 nt, Artificial Sequence
  Description of Artificial Sequence: Synthetic oligonucleotide
  Antisense strand to SEQ ID NO: 1667855
ugucucaggcuuagauacc

SEQ ID NO: 1667857 - RNA, 19 nt, Artificial Sequence
  Description of Artificial Sequence: Synthetic oligonucleotide
  Sense strand starting at position 955 of SEQ ID NO: 1561385
guaucuaagccugagacaa

SEQ ID NO: 1667858 - RNA, 19 nt, Artificial Sequence
  Description of Artificial Sequence: Synthetic oligonucleotide
  Antisense strand to SEQ ID NO: 1667857
uugucucaggcuuagauac

SEQ ID NO: 1667859 - RNA, 19 nt, Artificial Sequence
  Description of Artificial Sequence: Synthetic oligonucleotide
  Sense strand starting at position 1038 of SEQ ID NO: 1561385
gauguaugacccugggacu

SEQ ID NO: 1667860 - RNA, 19 nt, Artificial Sequence
  Description of Artificial Sequence: Synthetic oligonucleotide
  Antisense strand to SEQ ID NO: 1667859
agucccagggucauacauc

SEQ ID NO: 1667861 - RNA, 19 nt, Artificial Sequence
  Description of Artificial Sequence: Synthetic oligonucleotide
  Sense strand starting at position 1102 of SEQ ID NO: 1561385
agagaagagucccagaaca

SEQ ID NO: 1667862 - RNA, 19 nt, Artificial Sequence
  Description of Artificial Sequence: Synthetic oligonucleotide
  Antisense strand to SEQ ID NO: 1667861
uguucugggacucuucucu

SEQ ID NO: 1667863 - RNA, 19 nt, Artificial Sequence
  Description of Artificial Sequence: Synthetic oligonucleotide
  Sense strand starting at position 1173 of SEQ ID NO: 1561385
uccacucaccuguguaaag

SEQ ID NO: 1667864 - RNA, 19 nt, Artificial Sequence
  Description of Artificial Sequence: Synthetic oligonucleotide
  Antisense strand to SEQ ID NO: 1667863
cuuuacacaggugagugga

SEQ ID NO: 1667865 - RNA, 19 nt, Artificial Sequence
  Description of Artificial Sequence: Synthetic oligonucleotide
  Sense strand starting at position 1182 of SEQ ID NO: 1561385
cuguguaaagcccauaagu

SEQ ID NO: 1667866 - RNA, 19 nt, Artificial Sequence
  Description of Artificial Sequence: Synthetic oligonucleotide
  Antisense strand to SEQ ID NO: 1667865
acuuaugggcuuuacacag

SEQ ID NO: 1667867 - RNA, 19 nt, Artificial Sequence
  Description of Artificial Sequence: Synthetic oligonucleotide
  Sense strand starting at position 1184 of SEQ ID NO: 1561385
guguaaagcccauaaguuu

SEQ ID NO: 1667868 - RNA, 19 nt, Artificial Sequence
  Description of Artificial Sequence: Synthetic oligonucleotide
  Antisense strand to SEQ ID NO: 1667867
aaacuuaugggcuuuacac

SEQ ID NO: 1667869 - RNA, 19 nt, Artificial Sequence
  Description of Artificial Sequence: Synthetic oligonucleotide
  Sense strand starting at position 1314 of SEQ ID NO: 1561385
ccaggugacuuggugauga

SEQ ID NO: 1667870 - RNA, 19 nt, Artificial Sequence
  Description of Artificial Sequence: Synthetic oligonucleotide
  Antisense strand to SEQ ID NO: 1667869
ucaucaccaagucaccugg

SEQ ID NO: 1667871 - RNA, 19 nt, Artificial Sequence
  Description of Artificial Sequence: Synthetic oligonucleotide
  Sense strand starting at position 1316 of SEQ ID NO: 1561385
aggugacuuggugaugacu

SEQ ID NO: 1667872 - RNA, 19 nt, Artificial Sequence
  Description of Artificial Sequence: Synthetic oligonucleotide
  Antisense strand to SEQ ID NO: 1667871
agucaucaccaagucaccu

SEQ ID NO: 1667873 - RNA, 19 nt, Artificial Sequence
  Description of Artificial Sequence: Synthetic oligonucleotide
  Sense strand starting at position 1435 of SEQ ID NO: 1561385
cuguuccaacucugaguaa

SEQ ID NO: 1667874 - RNA, 19 nt, Artificial Sequence
  Description of Artificial Sequence: Synthetic oligonucleotide
  Antisense strand to SEQ ID NO: 1667873
uuacucagaguuggaacag

SEQ ID NO: 1667875 - RNA, 19 nt, Artificial Sequence
  Description of Artificial Sequence: Synthetic oligonucleotide
  Sense strand starting at position 1566 of SEQ ID NO: 1561385
gaacguuacuggcucaauc

SEQ ID NO: 1667876 - RNA, 19 nt, Artificial Sequence
  Description of Artificial Sequence: Synthetic oligonucleotide
  Antisense strand to SEQ ID NO: 1667875
gauugagccaguaacguuc

SEQ ID NO: 1667877 - RNA, 19 nt, Artificial Sequence
  Description of Artificial Sequence: Synthetic oligonucleotide
  Sense strand starting at position 1642 of SEQ ID NO: 1561385
cgacaccaggcuuguaaau

SEQ ID NO: 1667878 - RNA, 19 nt, Artificial Sequence
  Description of Artificial Sequence: Synthetic oligonucleotide
  Antisense strand to SEQ ID NO: 1667877
auuuacaagccuggugucg

SEQ ID NO: 1667879 - RNA, 19 nt, Artificial Sequence
  Description of Artificial Sequence: Synthetic oligonucleotide
  Sense strand starting at position 1682 of SEQ ID NO: 1561385
cucauaguccuggacucua

SEQ ID NO: 1667880 - RNA, 19 nt, Artificial Sequence
  Description of Artificial Sequence: Synthetic oligonucleotide
  Antisense strand to SEQ ID NO: 1667879
uagaguccaggacuaugag

SEQ ID NO: 1667881 - RNA, 19 nt, Artificial Sequence
  Description of Artificial Sequence: Synthetic oligonucleotide
  Sense strand starting at position 2113 of SEQ ID NO: 1561385
ucggcauuauggguaaugu

SEQ ID NO: 1667882 - RNA, 19 nt, Artificial Sequence
  Description of Artificial Sequence: Synthetic oligonucleotide
  Antisense strand to SEQ ID NO: 1667881
acauuacccauaaugccga

SEQ ID NO: 1667883 - RNA, 19 nt, Artificial Sequence
  Description of Artificial Sequence: Synthetic oligonucleotide
  Sense strand starting at position 2114 of SEQ ID NO: 1561385
cggcauuauggguaaugua

SEQ ID NO: 1667884 - RNA, 19 nt, Artificial Sequence
  Description of Artificial Sequence: Synthetic oligonucleotide
  Antisense strand to SEQ ID NO: 1667883
uacauuacccauaaugccg

SEQ ID NO: 1667885 - RNA, 19 nt, Artificial Sequence
  Description of Artificial Sequence: Synthetic oligonucleotide
  Sense strand starting at position 2241 of SEQ ID NO: 1561385
gggacuugcugcuccuuaa

SEQ ID NO: 1667886 - RNA, 19 nt, Artificial Sequence
  Description of Artificial Sequence: Synthetic oligonucleotide
  Antisense strand to SEQ ID NO: 1667885
uuaaggagcagcaaguccc

SEQ ID NO: 1667887 - RNA, 19 nt, Artificial Sequence
  Description of Artificial Sequence: Synthetic oligonucleotide
  Sense strand starting at position 2616 of SEQ ID NO: 1561385
cuacaaucaggcuggaauu

SEQ ID NO: 1667888 - RNA, 19 nt, Artificial Sequence
  Description of Artificial Sequence: Synthetic oligonucleotide
  Antisense strand to SEQ ID NO: 1667887
aauuccagccugauuguag

SEQ ID NO: 1667889 - RNA, 19 nt, Artificial Sequence
  Description of Artificial Sequence: Synthetic oligonucleotide
  Sense strand starting at position 2639 of SEQ ID NO: 1561385
gucuuauugcuacaagaag

SEQ ID NO: 1667890 - RNA, 19 nt, Artificial Sequence
  Description of Artificial Sequence: Synthetic oligonucleotide
  Antisense strand to SEQ ID NO: 1667889
cuucuuguagcaauaagac

SEQ ID NO: 1667891 - RNA, 19 nt, Artificial Sequence
  Description of Artificial Sequence: Synthetic oligonucleotide
  Sense strand starting at position 2970 of SEQ ID NO: 1561385
ggcaauaagacugggcuuu

SEQ ID NO: 1667892 - RNA, 19 nt, Artificial Sequence
  Description of Artificial Sequence: Synthetic oligonucleotide
  Antisense strand to SEQ ID NO: 1667891
aaagcccagucuuauugcc

SEQ ID NO: 1667893 - RNA, 19 nt, Artificial Sequence
  Description of Artificial Sequence: Synthetic oligonucleotide
  Sense strand starting at position 3236 of SEQ ID NO: 1561385
aaugauaaaugcuugugua

SEQ ID NO: 1667894 - RNA, 19 nt, Artificial Sequence
  Description of Artificial Sequence: Synthetic oligonucleotide
  Antisense strand to SEQ ID NO: 1667893
uacacaagcauuuaucauu

SEQ ID NO: 1667895 - RNA, 19 nt, Artificial Sequence
  Description of Artificial Sequence: Synthetic oligonucleotide
  Sense strand starting at position 3237 of SEQ ID NO: 1561385
augauaaaugcuuguguac

SEQ ID NO: 1667896 - RNA, 19 nt, Artificial Sequence
  Description of Artificial Sequence: Synthetic oligonucleotide
  Antisense strand to SEQ ID NO: 1667895
guacacaagcauuuaucau

SEQ ID NO: 1667897 - RNA, 19 nt, Artificial Sequence
  Description of Artificial Sequence: Synthetic oligonucleotide
  Sense strand starting at position 3244 of SEQ ID NO: 1561385
augcuuguguacccugaua

SEQ ID NO: 1667898 - RNA, 19 nt, Artificial Sequence
  Description of Artificial Sequence: Synthetic oligonucleotide
  Antisense strand to SEQ ID NO: 1667897
uaucaggguacacaagcau

SEQ ID NO: 1667899 - RNA, 19 nt, Artificial Sequence
  Description of Artificial Sequence: Synthetic oligonucleotide
  Sense strand starting at position 3928 of SEQ ID NO: 1561385
aauugaacucccggagauu

SEQ ID NO: 1667900 - RNA, 19 nt, Artificial Sequence
  Description of Artificial Sequence: Synthetic oligonucleotide
  Antisense strand to SEQ ID NO: 1667899
aaucuccgggaguucaauu

SEQ ID NO: 1667901 - RNA, 19 nt, Artificial Sequence
  Description of Artificial Sequence: Synthetic oligonucleotide
  Sense strand starting at position 3937 of SEQ ID NO: 1561385
cccggagauuaagcuuaga

SEQ ID NO: 1667902 - RNA, 19 nt, Artificial Sequence
  Description of Artificial Sequence: Synthetic oligonucleotide
  Antisense strand to SEQ ID NO: 1667901
ucuaagcuuaaucuccggg

SEQ ID NO: 1667903 - RNA, 19 nt, Artificial Sequence
  Description of Artificial Sequence: Synthetic oligonucleotide
  Sense strand starting at position 3942 of SEQ ID NO: 1561385
agauuaagcuuagaaggau

SEQ ID NO: 1667904 - RNA, 19 nt, Artificial Sequence
  Description of Artificial Sequence: Synthetic oligonucleotide
  Antisense strand to SEQ ID NO: 1667903
auccuucuaagcuuaaucu

SEQ ID NO: 1667905 - RNA, 19 nt, Artificial Sequence
  Description of Artificial Sequence: Synthetic oligonucleotide
  Sense strand starting at position 3974 of SEQ ID NO: 1561385
ugagaaggauagcagaaau

SEQ ID NO: 1667906 - RNA, 19 nt, Artificial Sequence
  Description of Artificial Sequence: Synthetic oligonucleotide
  Antisense strand to SEQ ID NO: 1667905
auuucugcuauccuucuca

SEQ ID NO: 1667907 - RNA, 19 nt, Artificial Sequence
  Description of Artificial Sequence: Synthetic oligonucleotide
  Sense strand starting at position 1 of SEQ ID NO: 1561386
ggagccuuaucucugacau

SEQ ID NO: 1667908 - RNA, 19 nt, Artificial Sequence
  Description of Artificial Sequence: Synthetic oligonucleotide
  Antisense strand to SEQ ID NO: 1667907
augucagagauaaggcucc

SEQ ID NO: 1667909 - RNA, 19 nt, Artificial Sequence
  Description of Artificial Sequence: Synthetic oligonucleotide
  Sense strand starting at position 81 of SEQ ID NO: 1561386
ccaguagaacugugguaau

SEQ ID NO: 1667910 - RNA, 19 nt, Artificial Sequence
  Description of Artificial Sequence: Synthetic oligonucleotide
  Antisense strand to SEQ ID NO: 1667909
auuaccacaguucuacugg

SEQ ID NO: 1667911 - RNA, 19 nt, Artificial Sequence
  Description of Artificial Sequence: Synthetic oligonucleotide
  Sense strand starting at position 149 of SEQ ID NO: 1561386
guagcaaauccuggguuaa

SEQ ID NO: 1667912 - RNA, 19 nt, Artificial Sequence
  Description of Artificial Sequence: Synthetic oligonucleotide
  Antisense strand to SEQ ID NO: 1667911
uuaacccaggauuugcuac

SEQ ID NO: 1667913 - RNA, 19 nt, Artificial Sequence
  Description of Artificial Sequence: Synthetic oligonucleotide
  Sense strand starting at position 150 of SEQ ID NO: 1561386
uagcaaauccuggguuaau

SEQ ID NO: 1667914 - RNA, 19 nt, Artificial Sequence
  Description of Artificial Sequence: Synthetic oligonucleotide
  Antisense strand to SEQ ID NO: 1667913
auuaacccaggauuugcua

SEQ ID NO: 1667915 - RNA, 19 nt, Artificial Sequence
  Description of Artificial Sequence: Synthetic oligonucleotide
  Sense strand starting at position 151 of SEQ ID NO: 1561386
agcaaauccuggguuaauc

SEQ ID NO: 1667916 - RNA, 19 nt, Artificial Sequence
  Description of Artificial Sequence: Synthetic oligonucleotide
  Antisense strand to SEQ ID NO: 1667915
gauuaacccaggauuugcu

SEQ ID NO: 1667917 - RNA, 19 nt, Artificial Sequence
  Description of Artificial Sequence: Synthetic oligonucleotide
  Sense strand starting at position 164 of SEQ ID NO: 1561386
uuaaucuuacaagaguguu

SEQ ID NO: 1667918 - RNA, 19 nt, Artificial Sequence
  Description of Artificial Sequence: Synthetic oligonucleotide
  Antisense strand to SEQ ID NO: 1667917
aacacucuuguaagauuaa

SEQ ID NO: 1667919 - RNA, 19 nt, Artificial Sequence
  Description of Artificial Sequence: Synthetic oligonucleotide
  Sense strand starting at position 167 of SEQ ID NO: 1561386
aucuuacaagaguguuuac

SEQ ID NO: 1667920 - RNA, 19 nt, Artificial Sequence
  Description of Artificial Sequence: Synthetic oligonucleotide
  Antisense strand to SEQ ID NO: 1667919
guaaacacucuuguaagau

SEQ ID NO: 1667921 - RNA, 19 nt, Artificial Sequence
  Description of Artificial Sequence: Synthetic oligonucleotide
  Sense strand starting at position 170 of SEQ ID NO: 1561386
uuacaagaguguuuacacu

SEQ ID NO: 1667922 - RNA, 19 nt, Artificial Sequence
  Description of Artificial Sequence: Synthetic oligonucleotide
  Antisense strand to SEQ ID NO: 1667921
aguguaaacacucuuguaa

SEQ ID NO: 1667923 - RNA, 19 nt, Artificial Sequence
  Description of Artificial Sequence: Synthetic oligonucleotide
  Sense strand starting at position 232 of SEQ ID NO: 1561386
ucaguauccugucuuuaga

SEQ ID NO: 1667924 - RNA, 19 nt, Artificial Sequence
  Description of Artificial Sequence: Synthetic oligonucleotide
  Antisense strand to SEQ ID NO: 1667923
ucuaaagacaggauacuga

SEQ ID NO: 1667925 - RNA, 19 nt, Artificial Sequence
  Description of Artificial Sequence: Synthetic oligonucleotide
  Sense strand starting at position 234 of SEQ ID NO: 1561386
aguauccugucuuuagaga

SEQ ID NO: 1667926 - RNA, 19 nt, Artificial Sequence
  Description of Artificial Sequence: Synthetic oligonucleotide
  Antisense strand to SEQ ID NO: 1667925
ucucuaaagacaggauacu

SEQ ID NO: 1667927 - RNA, 19 nt, Artificial Sequence
  Description of Artificial Sequence: Synthetic oligonucleotide
  Sense strand starting at position 235 of SEQ ID NO: 1561386
guauccugucuuuagagau

SEQ ID NO: 1667928 - RNA, 19 nt, Artificial Sequence
  Description of Artificial Sequence: Synthetic oligonucleotide
  Antisense strand to SEQ ID NO: 1667927
aucucuaaagacaggauac

SEQ ID NO: 1667929 - RNA, 19 nt, Artificial Sequence
  Description of Artificial Sequence: Synthetic oligonucleotide
  Sense strand starting at position 245 of SEQ ID NO: 1561386
uuuagagauucuccagggu

SEQ ID NO: 1667930 - RNA, 19 nt, Artificial Sequence
  Description of Artificial Sequence: Synthetic oligonucleotide
  Antisense strand to SEQ ID NO: 1667929
acccuggagaaucucuaaa

SEQ ID NO: 1667931 - RNA, 19 nt, Artificial Sequence
  Description of Artificial Sequence: Synthetic oligonucleotide
  Sense strand starting at position 557 of SEQ ID NO: 1561386
ccaccuaugugagcuacaa

SEQ ID NO: 1667932 - RNA, 19 nt, Artificial Sequence
  Description of Artificial Sequence: Synthetic oligonucleotide
  Antisense strand to SEQ ID NO: 1667931
uuguagcucacauaggugg

SEQ ID NO: 1667933 - RNA, 19 nt, Artificial Sequence
  Description of Artificial Sequence: Synthetic oligonucleotide
  Sense strand starting at position 619 of SEQ ID NO: 1561386
acgauauucuuccuuugaa

SEQ ID NO: 1667934 - RNA, 19 nt, Artificial Sequence
  Description of Artificial Sequence: Synthetic oligonucleotide
  Antisense strand to SEQ ID NO: 1667933
uucaaaggaagaauaucgu

SEQ ID NO: 1667935 - RNA, 19 nt, Artificial Sequence
  Description of Artificial Sequence: Synthetic oligonucleotide
  Sense strand starting at position 620 of SEQ ID NO: 1561386
cgauauucuuccuuugaau

SEQ ID NO: 1667936 - RNA, 19 nt, Artificial Sequence
  Description of Artificial Sequence: Synthetic oligonucleotide
  Antisense strand to SEQ ID NO: 1667935
auucaaaggaagaauaucg

SEQ ID NO: 1667937 - RNA, 19 nt, Artificial Sequence
  Description of Artificial Sequence: Synthetic oligonucleotide
  Sense strand starting at position 633 of SEQ ID NO: 1561386
uugaauguccuuugggaaa

SEQ ID NO: 1667938 - RNA, 19 nt, Artificial Sequence
  Description of Artificial Sequence: Synthetic oligonucleotide
  Antisense strand to SEQ ID NO: 1667937
uuucccaaaggacauucaa

SEQ ID NO: 1667939 - RNA, 19 nt, Artificial Sequence
  Description of Artificial Sequence: Synthetic oligonucleotide
  Sense strand starting at position 775 of SEQ ID NO: 1561386
cacuuuguuccagacaggu

SEQ ID NO: 1667940 - RNA, 19 nt, Artificial Sequence
  Description of Artificial Sequence: Synthetic oligonucleotide
  Antisense strand to SEQ ID NO: 1667939
accugucuggaacaaagug

SEQ ID NO: 1667941 - RNA, 19 nt, Artificial Sequence
  Description of Artificial Sequence: Synthetic oligonucleotide
  Sense strand starting at position 1090 of SEQ ID NO: 1561386
ccuucuugccuggagaaca

SEQ ID NO: 1667942 - RNA, 19 nt, Artificial Sequence
  Description of Artificial Sequence: Synthetic oligonucleotide
  Antisense strand to SEQ ID NO: 1667941
uguucuccaggcaagaagg

SEQ ID NO: 1667943 - RNA, 19 nt, Artificial Sequence
  Description of Artificial Sequence: Synthetic oligonucleotide
  Sense strand starting at position 1128 of SEQ ID NO: 1561386
acgaauuagcuacaagguu

SEQ ID NO: 1667944 - RNA, 19 nt, Artificial Sequence
  Description of Artificial Sequence: Synthetic oligonucleotide
  Antisense strand to SEQ ID NO: 1667943
aaccuuguagcuaauucgu

SEQ ID NO: 1667945 - RNA, 19 nt, Artificial Sequence
  Description of Artificial Sequence: Synthetic oligonucleotide
  Sense strand starting at position 1172 of SEQ ID NO: 1561386
agcuucugacuccaagagu

SEQ ID NO: 1667946 - RNA, 19 nt, Artificial Sequence
  Description of Artificial Sequence: Synthetic oligonucleotide
  Antisense strand to SEQ ID NO: 1667945
acucuuggagucagaagcu

SEQ ID NO: 1667947 - RNA, 19 nt, Artificial Sequence
  Description of Artificial Sequence: Synthetic oligonucleotide
  Sense strand starting at position 1202 of SEQ ID NO: 1561386
caaguugcuccugaagaua

SEQ ID NO: 1667948 - RNA, 19 nt, Artificial Sequence
  Description of Artificial Sequence: Synthetic oligonucleotide
  Antisense strand to SEQ ID NO: 1667947
uaucuucaggagcaacuug

SEQ ID NO: 1667949 - RNA, 19 nt, Artificial Sequence
  Description of Artificial Sequence: Synthetic oligonucleotide
  Sense strand starting at position 1205 of SEQ ID NO: 1561386
guugcuccugaagauaaau

SEQ ID NO: 1667950 - RNA, 19 nt, Artificial Sequence
  Description of Artificial Sequence: Synthetic oligonucleotide
  Antisense strand to SEQ ID NO: 1667949
auuuaucuucaggagcaac

SEQ ID NO: 1667951 - RNA, 19 nt, Artificial Sequence
  Description of Artificial Sequence: Synthetic oligonucleotide
  Sense strand starting at position 1302 of SEQ ID NO: 1561386
accgguaaucugggucaau

SEQ ID NO: 1667952 - RNA, 19 nt, Artificial Sequence
  Description of Artificial Sequence: Synthetic oligonucleotide
  Antisense strand to SEQ ID NO: 1667951
auugacccagauuaccggu

SEQ ID NO: 1667953 - RNA, 19 nt, Artificial Sequence
  Description of Artificial Sequence: Synthetic oligonucleotide
  Sense strand starting at position 1496 of SEQ ID NO: 1561386
gacggcucugcgucaauua

SEQ ID NO: 1667954 - RNA, 19 nt, Artificial Sequence
  Description of Artificial Sequence: Synthetic oligonucleotide
  Antisense strand to SEQ ID NO: 1667953
uaauugacgcagagccguc

SEQ ID NO: 1667955 - RNA, 19 nt, Artificial Sequence
  Description of Artificial Sequence: Synthetic oligonucleotide
  Sense strand starting at position 1704 of SEQ ID NO: 1561386
ugguuuaggaccuggguga

SEQ ID NO: 1667956 - RNA, 19 nt, Artificial Sequence
  Description of Artificial Sequence: Synthetic oligonucleotide
  Antisense strand to SEQ ID NO: 1667955
ucacccagguccuaaacca

SEQ ID NO: 1667957 - RNA, 19 nt, Artificial Sequence
  Description of Artificial Sequence: Synthetic oligonucleotide
  Sense strand starting at position 2119 of SEQ ID NO: 1561386
gagcgauacccagagucca

SEQ ID NO: 1667958 - RNA, 19 nt, Artificial Sequence
  Description of Artificial Sequence: Synthetic oligonucleotide
  Antisense strand to SEQ ID NO: 1667957
uggacucuggguaucgcuc

SEQ ID NO: 1667959 - RNA, 19 nt, Artificial Sequence
  Description of Artificial Sequence: Synthetic oligonucleotide
  Sense strand starting at position 2587 of SEQ ID NO: 1561386
ggagacuagugucuguaac

SEQ ID NO: 1667960 - RNA, 19 nt, Artificial Sequence
  Description of Artificial Sequence: Synthetic oligonucleotide
  Antisense strand to SEQ ID NO: 1667959
guuacagacacuagucucc

SEQ ID NO: 1667961 - RNA, 19 nt, Artificial Sequence
  Description of Artificial Sequence: Synthetic oligonucleotide
  Sense strand starting at position 2588 of SEQ ID NO: 1561386
gagacuagugucuguaacu

SEQ ID NO: 1667962 - RNA, 19 nt, Artificial Sequence
  Description of Artificial Sequence: Synthetic oligonucleotide
  Antisense strand to SEQ ID NO: 1667961
aguuacagacacuagucuc

SEQ ID NO: 1667963 - RNA, 19 nt, Artificial Sequence
  Description of Artificial Sequence: Synthetic oligonucleotide
  Sense strand starting at position 2589 of SEQ ID NO: 1561386
agacuagugucuguaacua

SEQ ID NO: 1667964 - RNA, 19 nt, Artificial Sequence
  Description of Artificial Sequence: Synthetic oligonucleotide
  Antisense strand to SEQ ID NO: 1667963
uaguuacagacacuagucu

SEQ ID NO: 1667965 - RNA, 19 nt, Artificial Sequence
  Description of Artificial Sequence: Synthetic oligonucleotide
  Sense strand starting at position 2597 of SEQ ID NO: 1561386
gucuguaacuaaucacuca

SEQ ID NO: 1667966 - RNA, 19 nt, Artificial Sequence
  Description of Artificial Sequence: Synthetic oligonucleotide
  Antisense strand to SEQ ID NO: 1667965
ugagugauuaguuacagac

SEQ ID NO: 1667967 - RNA, 19 nt, Artificial Sequence
  Description of Artificial Sequence: Synthetic oligonucleotide
  Sense strand starting at position 2740 of SEQ ID NO: 1561386
acagucguucagucgcaaa

SEQ ID NO: 1667968 - RNA, 19 nt, Artificial Sequence
  Description of Artificial Sequence: Synthetic oligonucleotide
  Antisense strand to SEQ ID NO: 1667967
uuugcgacugaacgacugu

SEQ ID NO: 1667969 - RNA, 19 nt, Artificial Sequence
  Description of Artificial Sequence: Synthetic oligonucleotide
  Sense strand starting at position 2779 of SEQ ID NO: 1561386
ggcugauaagcguuguugu

SEQ ID NO: 1667970 - RNA, 19 nt, Artificial Sequence
  Description of Artificial Sequence: Synthetic oligonucleotide
  Antisense strand to SEQ ID NO: 1667969
acaacaacgcuuaucagcc

SEQ ID NO: 1667971 - RNA, 19 nt, Artificial Sequence
  Description of Artificial Sequence: Synthetic oligonucleotide
  Sense strand starting at position 2781 of SEQ ID NO: 1561386
cugauaagcguuguugugu

SEQ ID NO: 1667972 - RNA, 19 nt, Artificial Sequence
  Description of Artificial Sequence: Synthetic oligonucleotide
  Antisense strand to SEQ ID NO: 1667971
acacaacaacgcuuaucag

SEQ ID NO: 1667973 - RNA, 19 nt, Artificial Sequence
  Description of Artificial Sequence: Synthetic oligonucleotide
  Sense strand starting at position 2798 of SEQ ID NO: 1561386
guuauaaugugucugaagg

SEQ ID NO: 1667974 - RNA, 19 nt, Artificial Sequence
  Description of Artificial Sequence: Synthetic oligonucleotide
  Antisense strand to SEQ ID NO: 1667973
ccuucagacacauuauaac

SEQ ID NO: 1667975 - RNA, 19 nt, Artificial Sequence
  Description of Artificial Sequence: Synthetic oligonucleotide
  Sense strand starting at position 2888 of SEQ ID NO: 1561386
aaagcugaaucucugugau

SEQ ID NO: 1667976 - RNA, 19 nt, Artificial Sequence
  Description of Artificial Sequence: Synthetic oligonucleotide
  Antisense strand to SEQ ID NO: 1667975
aucacagagauucagcuuu

SEQ ID NO: 1667977 - RNA, 19 nt, Artificial Sequence
  Description of Artificial Sequence: Synthetic oligonucleotide
  Sense strand starting at position 2929 of SEQ ID NO: 1561386
gcugauagaaucugugaaa

SEQ ID NO: 1667978 - RNA, 19 nt, Artificial Sequence
  Description of Artificial Sequence: Synthetic oligonucleotide
  Antisense strand to SEQ ID NO: 1667977
uuucacagauucuaucagc

SEQ ID NO: 1667979 - RNA, 19 nt, Artificial Sequence
  Description of Artificial Sequence: Synthetic oligonucleotide
  Sense strand starting at position 3056 of SEQ ID NO: 1561386
ugagauagaugccuauucu

SEQ ID NO: 1667980 - RNA, 19 nt, Artificial Sequence
  Description of Artificial Sequence: Synthetic oligonucleotide
  Antisense strand to SEQ ID NO: 1667979
agaauaggcaucuaucuca

SEQ ID NO: 1667981 - RNA, 19 nt, Artificial Sequence
  Description of Artificial Sequence: Synthetic oligonucleotide
  Sense strand starting at position 3060 of SEQ ID NO: 1561386
auagaugccuauucugauu

SEQ ID NO: 1667982 - RNA, 19 nt, Artificial Sequence
  Description of Artificial Sequence: Synthetic oligonucleotide
  Antisense strand to SEQ ID NO: 1667981
aaucagaauaggcaucuau

SEQ ID NO: 1667983 - RNA, 19 nt, Artificial Sequence
  Description of Artificial Sequence: Synthetic oligonucleotide
  Sense strand starting at position 3728 of SEQ ID NO: 1561386
cuuaguauccuuuacuuga

SEQ ID NO: 1667984 - RNA, 19 nt, Artificial Sequence
  Description of Artificial Sequence: Synthetic oligonucleotide
  Antisense strand to SEQ ID NO: 1667983
ucaaguaaaggauacuaag

SEQ ID NO: 1667985 - RNA, 19 nt, Artificial Sequence
  Description of Artificial Sequence: Synthetic oligonucleotide
  Sense strand starting at position 3731 of SEQ ID NO: 1561386
aguauccuuuacuugauau

SEQ ID NO: 1667986 - RNA, 19 nt, Artificial Sequence
  Description of Artificial Sequence: Synthetic oligonucleotide
  Antisense strand to SEQ ID NO: 1667985
auaucaaguaaaggauacu

SEQ ID NO: 1667987 - RNA, 19 nt, Artificial Sequence
  Description of Artificial Sequence: Synthetic oligonucleotide
  Sense strand starting at position 7 of SEQ ID NO: 1561387
ggagccuuaucucugacau

SEQ ID NO: 1667988 - RNA, 19 nt, Artificial Sequence
  Description of Artificial Sequence: Synthetic oligonucleotide
  Antisense strand to SEQ ID NO: 1667987
augucagagauaaggcucc

SEQ ID NO: 1667989 - RNA, 19 nt, Artificial Sequence
  Description of Artificial Sequence: Synthetic oligonucleotide
  Sense strand starting at position 87 of SEQ ID NO: 1561387
ccaguagaacugugguaau

SEQ ID NO: 1667990 - RNA, 19 nt, Artificial Sequence
  Description of Artificial Sequence: Synthetic oligonucleotide
  Antisense strand to SEQ ID NO: 1667989
auuaccacaguucuacugg

SEQ ID NO: 1667991 - RNA, 19 nt, Artificial Sequence
  Description of Artificial Sequence: Synthetic oligonucleotide
  Sense strand starting at position 155 of SEQ ID NO: 1561387
guagcaaauccuggguuaa

SEQ ID NO: 1667992 - RNA, 19 nt, Artificial Sequence
  Description of Artificial Sequence: Synthetic oligonucleotide
  Antisense strand to SEQ ID NO: 1667991
uuaacccaggauuugcuac

SEQ ID NO: 1667993 - RNA, 19 nt, Artificial Sequence
  Description of Artificial Sequence: Synthetic oligonucleotide
  Sense strand starting at position 156 of SEQ ID NO: 1561387
uagcaaauccuggguuaau

SEQ ID NO: 1667994 - RNA, 19 nt, Artificial Sequence
  Description of Artificial Sequence: Synthetic oligonucleotide
  Antisense strand to SEQ ID NO: 1667993
auuaacccaggauuugcua

SEQ ID NO: 1667995 - RNA, 19 nt, Artificial Sequence
  Description of Artificial Sequence: Synthetic oligonucleotide
  Sense strand starting at position 157 of SEQ ID NO: 1561387
agcaaauccuggguuaauc

SEQ ID NO: 1667996 - RNA, 19 nt, Artificial Sequence
  Description of Artificial Sequence: Synthetic oligonucleotide
  Antisense strand to SEQ ID NO: 1667995
gauuaacccaggauuugcu

SEQ ID NO: 1667997 - RNA, 19 nt, Artificial Sequence
  Description of Artificial Sequence: Synthetic oligonucleotide
  Sense strand starting at position 170 of SEQ ID NO: 1561387
uuaaucuuacaagaguguu

SEQ ID NO: 1667998 - RNA, 19 nt, Artificial Sequence
  Description of Artificial Sequence: Synthetic oligonucleotide
  Antisense strand to SEQ ID NO: 1667997
aacacucuuguaagauuaa

SEQ ID NO: 1667999 - RNA, 19 nt, Artificial Sequence
  Description of Artificial Sequence: Synthetic oligonucleotide
  Sense strand starting at position 173 of SEQ ID NO: 1561387
aucuuacaagaguguuuac

SEQ ID NO: 1668000 - RNA, 19 nt, Artificial Sequence
  Description of Artificial Sequence: Synthetic oligonucleotide
  Antisense strand to SEQ ID NO: 1667999
guaaacacucuuguaagau

SEQ ID NO: 1668001 - RNA, 19 nt, Artificial Sequence
  Description of Artificial Sequence: Synthetic oligonucleotide
  Sense strand starting at position 176 of SEQ ID NO: 1561387
uuacaagaguguuuacacu

SEQ ID NO: 1668002 - RNA, 19 nt, Artificial Sequence
  Description of Artificial Sequence: Synthetic oligonucleotide
  Antisense strand to SEQ ID NO: 1668001
aguguaaacacucuuguaa

SEQ ID NO: 1668003 - RNA, 19 nt, Artificial Sequence
  Description of Artificial Sequence: Synthetic oligonucleotide
  Sense strand starting at position 238 of SEQ ID NO: 1561387
ucaguauccugucuuuaga

SEQ ID NO: 1668004 - RNA, 19 nt, Artificial Sequence
  Description of Artificial Sequence: Synthetic oligonucleotide
  Antisense strand to SEQ ID NO: 1668003
ucuaaagacaggauacuga

SEQ ID NO: 1668005 - RNA, 19 nt, Artificial Sequence
  Description of Artificial Sequence: Synthetic oligonucleotide
  Sense strand starting at position 240 of SEQ ID NO: 1561387
aguauccugucuuuagaga

SEQ ID NO: 1668006 - RNA, 19 nt, Artificial Sequence
  Description of Artificial Sequence: Synthetic oligonucleotide
  Antisense strand to SEQ ID NO: 1668005
ucucuaaagacaggauacu

SEQ ID NO: 1668007 - RNA, 19 nt, Artificial Sequence
  Description of Artificial Sequence: Synthetic oligonucleotide
  Sense strand starting at position 241 of SEQ ID NO: 1561387
guauccugucuuuagagau

SEQ ID NO: 1668008 - RNA, 19 nt, Artificial Sequence
  Description of Artificial Sequence: Synthetic oligonucleotide
  Antisense strand to SEQ ID NO: 1668007
aucucuaaagacaggauac

SEQ ID NO: 1668009 - RNA, 19 nt, Artificial Sequence
  Description of Artificial Sequence: Synthetic oligonucleotide
  Sense strand starting at position 251 of SEQ ID NO: 1561387
uuuagagauucuccagggu

SEQ ID NO: 1668010 - RNA, 19 nt, Artificial Sequence
  Description of Artificial Sequence: Synthetic oligonucleotide
  Antisense strand to SEQ ID NO: 1668009
acccuggagaaucucuaaa

SEQ ID NO: 1668011 - RNA, 19 nt, Artificial Sequence
  Description of Artificial Sequence: Synthetic oligonucleotide
  Sense strand starting at position 563 of SEQ ID NO: 1561387
ccaccuaugugagcuacaa

SEQ ID NO: 1668012 - RNA, 19 nt, Artificial Sequence
  Description of Artificial Sequence: Synthetic oligonucleotide
  Antisense strand to SEQ ID NO: 1668011
uuguagcucacauaggugg

SEQ ID NO: 1668013 - RNA, 19 nt, Artificial Sequence
  Description of Artificial Sequence: Synthetic oligonucleotide
  Sense strand starting at position 625 of SEQ ID NO: 1561387
acgauauucuuccuuugaa

SEQ ID NO: 1668014 - RNA, 19 nt, Artificial Sequence
  Description of Artificial Sequence: Synthetic oligonucleotide
  Antisense strand to SEQ ID NO: 1668013
uucaaaggaagaauaucgu

SEQ ID NO: 1668015 - RNA, 19 nt, Artificial Sequence
  Description of Artificial Sequence: Synthetic oligonucleotide
  Sense strand starting at position 626 of SEQ ID NO: 1561387
cgauauucuuccuuugaau

SEQ ID NO: 1668016 - RNA, 19 nt, Artificial Sequence
  Description of Artificial Sequence: Synthetic oligonucleotide
  Antisense strand to SEQ ID NO: 1668015
auucaaaggaagaauaucg

SEQ ID NO: 1668017 - RNA, 19 nt, Artificial Sequence
  Description of Artificial Sequence: Synthetic oligonucleotide
  Sense strand starting at position 639 of SEQ ID NO: 1561387
uugaauguccuuugggaaa

SEQ ID NO: 1668018 - RNA, 19 nt, Artificial Sequence
  Description of Artificial Sequence: Synthetic oligonucleotide
  Antisense strand to SEQ ID NO: 1668017
uuucccaaaggacauucaa

SEQ ID NO: 1668019 - RNA, 19 nt, Artificial Sequence
  Description of Artificial Sequence: Synthetic oligonucleotide
  Sense strand starting at position 781 of SEQ ID NO: 1561387
cacuuuguuccagacaggu

SEQ ID NO: 1668020 - RNA, 19 nt, Artificial Sequence
  Description of Artificial Sequence: Synthetic oligonucleotide
  Antisense strand to SEQ ID NO: 1668019
accugucuggaacaaagug

SEQ ID NO: 1668021 - RNA, 19 nt, Artificial Sequence
  Description of Artificial Sequence: Synthetic oligonucleotide
  Sense strand starting at position 1096 of SEQ ID NO: 1561387
ccuucuugccuggagaaca

SEQ ID NO: 1668022 - RNA, 19 nt, Artificial Sequence
  Description of Artificial Sequence: Synthetic oligonucleotide
  Antisense strand to SEQ ID NO: 1668021
uguucuccaggcaagaagg

SEQ ID NO: 1668023 - RNA, 19 nt, Artificial Sequence
  Description of Artificial Sequence: Synthetic oligonucleotide
  Sense strand starting at position 1134 of SEQ ID NO: 1561387
acgaauuagcuacaagguu

SEQ ID NO: 1668024 - RNA, 19 nt, Artificial Sequence
  Description of Artificial Sequence: Synthetic oligonucleotide
  Antisense strand to SEQ ID NO: 1668023
aaccuuguagcuaauucgu

SEQ ID NO: 1668025 - RNA, 19 nt, Artificial Sequence
  Description of Artificial Sequence: Synthetic oligonucleotide
  Sense strand starting at position 1178 of SEQ ID NO: 1561387
agcuucugacuccaagagu

SEQ ID NO: 1668026 - RNA, 19 nt, Artificial Sequence
  Description of Artificial Sequence: Synthetic oligonucleotide
  Antisense strand to SEQ ID NO: 1668025
acucuuggagucagaagcu

SEQ ID NO: 1668027 - RNA, 19 nt, Artificial Sequence
  Description of Artificial Sequence: Synthetic oligonucleotide
  Sense strand starting at position 1208 of SEQ ID NO: 1561387
caaguugcuccugaagaua

SEQ ID NO: 1668028 - RNA, 19 nt, Artificial Sequence
  Description of Artificial Sequence: Synthetic oligonucleotide
  Antisense strand to SEQ ID NO: 1668027
uaucuucaggagcaacuug

SEQ ID NO: 1668029 - RNA, 19 nt, Artificial Sequence
  Description of Artificial Sequence: Synthetic oligonucleotide
  Sense strand starting at position 1211 of SEQ ID NO: 1561387
guugcuccugaagauaaau

SEQ ID NO: 1668030 - RNA, 19 nt, Artificial Sequence
  Description of Artificial Sequence: Synthetic oligonucleotide
  Antisense strand to SEQ ID NO: 1668029
auuuaucuucaggagcaac

SEQ ID NO: 1668031 - RNA, 19 nt, Artificial Sequence
  Description of Artificial Sequence: Synthetic oligonucleotide
  Sense strand starting at position 1308 of SEQ ID NO: 1561387
accgguaaucugggucaau

SEQ ID NO: 1668032 - RNA, 19 nt, Artificial Sequence
  Description of Artificial Sequence: Synthetic oligonucleotide
  Antisense strand to SEQ ID NO: 1668031
auugacccagauuaccggu

SEQ ID NO: 1668033 - RNA, 19 nt, Artificial Sequence
  Description of Artificial Sequence: Synthetic oligonucleotide
  Sense strand starting at position 1502 of SEQ ID NO: 1561387
gacggcucugcgucaauua

SEQ ID NO: 1668034 - RNA, 19 nt, Artificial Sequence
  Description of Artificial Sequence: Synthetic oligonucleotide
  Antisense strand to SEQ ID NO: 1668033
uaauugacgcagagccguc

SEQ ID NO: 1668035 - RNA, 19 nt, Artificial Sequence
  Description of Artificial Sequence: Synthetic oligonucleotide
  Sense strand starting at position 1710 of SEQ ID NO: 1561387
ugguuuaggaccuggguga

SEQ ID NO: 1668036 - RNA, 19 nt, Artificial Sequence
  Description of Artificial Sequence: Synthetic oligonucleotide
  Antisense strand to SEQ ID NO: 1668035
ucacccagguccuaaacca

SEQ ID NO: 1668037 - RNA, 19 nt, Artificial Sequence
  Description of Artificial Sequence: Synthetic oligonucleotide
  Sense strand starting at position 2125 of SEQ ID NO: 1561387
gagcgauacccagagucca

SEQ ID NO: 1668038 - RNA, 19 nt, Artificial Sequence
  Description of Artificial Sequence: Synthetic oligonucleotide
  Antisense strand to SEQ ID NO: 1668037
uggacucuggguaucgcuc

SEQ ID NO: 1668039 - RNA, 19 nt, Artificial Sequence
  Description of Artificial Sequence: Synthetic oligonucleotide
  Sense strand starting at position 2593 of SEQ ID NO: 1561387
ggagacuagugucuguaac

SEQ ID NO: 1668040 - RNA, 19 nt, Artificial Sequence
  Description of Artificial Sequence: Synthetic oligonucleotide
  Antisense strand to SEQ ID NO: 1668039
guuacagacacuagucucc

SEQ ID NO: 1668041 - RNA, 19 nt, Artificial Sequence
  Description of Artificial Sequence: Synthetic oligonucleotide
  Sense strand starting at position 2594 of SEQ ID NO: 1561387
gagacuagugucuguaacu

SEQ ID NO: 1668042 - RNA, 19 nt, Artificial Sequence
  Description of Artificial Sequence: Synthetic oligonucleotide
  Antisense strand to SEQ ID NO: 1668041
aguuacagacacuagucuc

SEQ ID NO: 1668043 - RNA, 19 nt, Artificial Sequence
  Description of Artificial Sequence: Synthetic oligonucleotide
  Sense strand starting at position 2595 of SEQ ID NO: 1561387
agacuagugucuguaacua

SEQ ID NO: 1668044 - RNA, 19 nt, Artificial Sequence
  Description of Artificial Sequence: Synthetic oligonucleotide
  Antisense strand to SEQ ID NO: 1668043
uaguuacagacacuagucu

SEQ ID NO: 1668045 - RNA, 19 nt, Artificial Sequence
  Description of Artificial Sequence: Synthetic oligonucleotide
  Sense strand starting at position 2603 of SEQ ID NO: 1561387
gucuguaacuaaucacuca

SEQ ID NO: 1668046 - RNA, 19 nt, Artificial Sequence
  Description of Artificial Sequence: Synthetic oligonucleotide
  Antisense strand to SEQ ID NO: 1668045
ugagugauuaguuacagac

SEQ ID NO: 1668047 - RNA, 19 nt, Artificial Sequence
  Description of Artificial Sequence: Synthetic oligonucleotide
  Sense strand starting at position 2746 of SEQ ID NO: 1561387
acagucguucagucgcaaa

SEQ ID NO: 1668048 - RNA, 19 nt, Artificial Sequence
  Description of Artificial Sequence: Synthetic oligonucleotide
  Antisense strand to SEQ ID NO: 1668047
uuugcgacugaacgacugu

SEQ ID NO: 1668049 - RNA, 19 nt, Artificial Sequence
  Description of Artificial Sequence: Synthetic oligonucleotide
  Sense strand starting at position 2785 of SEQ ID NO: 1561387
ggcugauaagcguuguugu

SEQ ID NO: 1668050 - RNA, 19 nt, Artificial Sequence
  Description of Artificial Sequence: Synthetic oligonucleotide
  Antisense strand to SEQ ID NO: 1668049
acaacaacgcuuaucagcc

SEQ ID NO: 1668051 - RNA, 19 nt, Artificial Sequence
  Description of Artificial Sequence: Synthetic oligonucleotide
  Sense strand starting at position 2787 of SEQ ID NO: 1561387
cugauaagcguuguugugu

SEQ ID NO: 1668052 - RNA, 19 nt, Artificial Sequence
  Description of Artificial Sequence: Synthetic oligonucleotide
  Antisense strand to SEQ ID NO: 1668051
acacaacaacgcuuaucag

SEQ ID NO: 1668053 - RNA, 19 nt, Artificial Sequence
  Description of Artificial Sequence: Synthetic oligonucleotide
  Sense strand starting at position 2804 of SEQ ID NO: 1561387
guuauaaugugucugaagg

SEQ ID NO: 1668054 - RNA, 19 nt, Artificial Sequence
  Description of Artificial Sequence: Synthetic oligonucleotide
  Antisense strand to SEQ ID NO: 1668053
ccuucagacacauuauaac

SEQ ID NO: 1668055 - RNA, 19 nt, Artificial Sequence
  Description of Artificial Sequence: Synthetic oligonucleotide
  Sense strand starting at position 2894 of SEQ ID NO: 1561387
aaagcugaaucucugugau

SEQ ID NO: 1668056 - RNA, 19 nt, Artificial Sequence
  Description of Artificial Sequence: Synthetic oligonucleotide
  Antisense strand to SEQ ID NO: 1668055
aucacagagauucagcuuu

SEQ ID NO: 1668057 - RNA, 19 nt, Artificial Sequence
  Description of Artificial Sequence: Synthetic oligonucleotide
  Sense strand starting at position 2935 of SEQ ID NO: 1561387
gcugauagaaucugugaaa

SEQ ID NO: 1668058 - RNA, 19 nt, Artificial Sequence
  Description of Artificial Sequence: Synthetic oligonucleotide
  Antisense strand to SEQ ID NO: 1668057
uuucacagauucuaucagc

SEQ ID NO: 1668059 - RNA, 19 nt, Artificial Sequence
  Description of Artificial Sequence: Synthetic oligonucleotide
  Sense strand starting at position 3062 of SEQ ID NO: 1561387
ugagauagaugccuauucu

SEQ ID NO: 1668060 - RNA, 19 nt, Artificial Sequence
  Description of Artificial Sequence: Synthetic oligonucleotide
  Antisense strand to SEQ ID NO: 1668059
agaauaggcaucuaucuca

SEQ ID NO: 1668061 - RNA, 19 nt, Artificial Sequence
  Description of Artificial Sequence: Synthetic oligonucleotide
  Sense strand starting at position 3066 of SEQ ID NO: 1561387
auagaugccuauucugauu

SEQ ID NO: 1668062 - RNA, 19 nt, Artificial Sequence
  Description of Artificial Sequence: Synthetic oligonucleotide
  Antisense strand to SEQ ID NO: 1668061
aaucagaauaggcaucuau

SEQ ID NO: 1668063 - RNA, 19 nt, Artificial Sequence
  Description of Artificial Sequence: Synthetic oligonucleotide
  Sense strand starting at position 3734 of SEQ ID NO: 1561387
cuuaguauccuuuacuuga

SEQ ID NO: 1668064 - RNA, 19 nt, Artificial Sequence
  Description of Artificial Sequence: Synthetic oligonucleotide
  Antisense strand to SEQ ID NO: 1668063
ucaaguaaaggauacuaag

SEQ ID NO: 1668065 - RNA, 19 nt, Artificial Sequence
  Description of Artificial Sequence: Synthetic oligonucleotide
  Sense strand starting at position 3737 of SEQ ID NO: 1561387
aguauccuuuacuugauau

SEQ ID NO: 1668066 - RNA, 19 nt, Artificial Sequence
  Description of Artificial Sequence: Synthetic oligonucleotide
  Antisense strand to SEQ ID NO: 1668065
auaucaaguaaaggauacu

SEQ ID NO: 1668067 - RNA, 19 nt, Artificial Sequence
  Description of Artificial Sequence: Synthetic oligonucleotide
  Sense strand starting at position 418 of SEQ ID NO: 1561388
ucauuaauaugguccagua

SEQ ID NO: 1668068 - RNA, 19 nt, Artificial Sequence
  Description of Artificial Sequence: Synthetic oligonucleotide
  Antisense strand to SEQ ID NO: 1668067
uacuggaccauauuaauga

SEQ ID NO: 1668069 - RNA, 19 nt, Artificial Sequence
  Description of Artificial Sequence: Synthetic oligonucleotide
  Sense strand starting at position 420 of SEQ ID NO: 1561388
auuaauaugguccaguaac

SEQ ID NO: 1668070 - RNA, 19 nt, Artificial Sequence
  Description of Artificial Sequence: Synthetic oligonucleotide
  Antisense strand to SEQ ID NO: 1668069
guuacuggaccauauuaau

SEQ ID NO: 1668071 - RNA, 19 nt, Artificial Sequence
  Description of Artificial Sequence: Synthetic oligonucleotide
  Sense strand starting at position 447 of SEQ ID NO: 1561388
gcauuauggcaggaguuua

SEQ ID NO: 1668072 - RNA, 19 nt, Artificial Sequence
  Description of Artificial Sequence: Synthetic oligonucleotide
  Antisense strand to SEQ ID NO: 1668071
uaaacuccugccauaaugc

SEQ ID NO: 1668073 - RNA, 19 nt, Artificial Sequence
  Description of Artificial Sequence: Synthetic oligonucleotide
  Sense strand starting at position 500 of SEQ ID NO: 1561388
guguguucucuucuuugca

SEQ ID NO: 1668074 - RNA, 19 nt, Artificial Sequence
  Description of Artificial Sequence: Synthetic oligonucleotide
  Antisense strand to SEQ ID NO: 1668073
ugcaaagaagagaacacac

SEQ ID NO: 1668075 - RNA, 19 nt, Artificial Sequence
  Description of Artificial Sequence: Synthetic oligonucleotide
  Sense strand starting at position 522 of SEQ ID NO: 1561388
agaugaugccugcagacaa

SEQ ID NO: 1668076 - RNA, 19 nt, Artificial Sequence
  Description of Artificial Sequence: Synthetic oligonucleotide
  Antisense strand to SEQ ID NO: 1668075
uugucugcaggcaucaucu

SEQ ID NO: 1668077 - RNA, 19 nt, Artificial Sequence
  Description of Artificial Sequence: Synthetic oligonucleotide
  Sense strand starting at position 536 of SEQ ID NO: 1561388
gacaaaugggacuguggua

SEQ ID NO: 1668078 - RNA, 19 nt, Artificial Sequence
  Description of Artificial Sequence: Synthetic oligonucleotide
  Antisense strand to SEQ ID NO: 1668077
uaccacagucccauuuguc

SEQ ID NO: 1668079 - RNA, 19 nt, Artificial Sequence
  Description of Artificial Sequence: Synthetic oligonucleotide
  Sense strand starting at position 621 of SEQ ID NO: 1561388
guaccaacucuguaguuaa

SEQ ID NO: 1668080 - RNA, 19 nt, Artificial Sequence
  Description of Artificial Sequence: Synthetic oligonucleotide
  Antisense strand to SEQ ID NO: 1668079
uuaacuacagaguugguac

SEQ ID NO: 1668081 - RNA, 19 nt, Artificial Sequence
  Description of Artificial Sequence: Synthetic oligonucleotide
  Sense strand starting at position 650 of SEQ ID NO: 1561388
auguuuacauggguugaca

SEQ ID NO: 1668082 - RNA, 19 nt, Artificial Sequence
  Description of Artificial Sequence: Synthetic oligonucleotide
  Antisense strand to SEQ ID NO: 1668081
ugucaacccauguaaacau

SEQ ID NO: 1668083 - RNA, 19 nt, Artificial Sequence
  Description of Artificial Sequence: Synthetic oligonucleotide
  Sense strand starting at position 652 of SEQ ID NO: 1561388
guuuacauggguugacaga

SEQ ID NO: 1668084 - RNA, 19 nt, Artificial Sequence
  Description of Artificial Sequence: Synthetic oligonucleotide
  Antisense strand to SEQ ID NO: 1668083
ucugucaacccauguaaac

SEQ ID NO: 1668085 - RNA, 19 nt, Artificial Sequence
  Description of Artificial Sequence: Synthetic oligonucleotide
  Sense strand starting at position 695 of SEQ ID NO: 1561388
gugucauggacuuaggauu

SEQ ID NO: 1668086 - RNA, 19 nt, Artificial Sequence
  Description of Artificial Sequence: Synthetic oligonucleotide
  Antisense strand to SEQ ID NO: 1668085
aauccuaaguccaugacac

SEQ ID NO: 1668087 - RNA, 19 nt, Artificial Sequence
  Description of Artificial Sequence: Synthetic oligonucleotide
  Sense strand starting at position 768 of SEQ ID NO: 1561388
guaagagucccaggacauc

SEQ ID NO: 1668088 - RNA, 19 nt, Artificial Sequence
  Description of Artificial Sequence: Synthetic oligonucleotide
  Antisense strand to SEQ ID NO: 1668087
gauguccugggacucuuac

SEQ ID NO: 1668089 - RNA, 19 nt, Artificial Sequence
  Description of Artificial Sequence: Synthetic oligonucleotide
  Sense strand starting at position 1225 of SEQ ID NO: 1561388
ucaggucuccuugaaccuu

SEQ ID NO: 1668090 - RNA, 19 nt, Artificial Sequence
  Description of Artificial Sequence: Synthetic oligonucleotide
  Antisense strand to SEQ ID NO: 1668089
aagguucaaggagaccuga

SEQ ID NO: 1668091 - RNA, 19 nt, Artificial Sequence
  Description of Artificial Sequence: Synthetic oligonucleotide
  Sense strand starting at position 1314 of SEQ ID NO: 1561388
ccaccuaugugaucuauca

SEQ ID NO: 1668092 - RNA, 19 nt, Artificial Sequence
  Description of Artificial Sequence: Synthetic oligonucleotide
  Antisense strand to SEQ ID NO: 1668091
ugauagaucacauaggugg

SEQ ID NO: 1668093 - RNA, 19 nt, Artificial Sequence
  Description of Artificial Sequence: Synthetic oligonucleotide
  Sense strand starting at position 1388 of SEQ ID NO: 1561388
uccuuuggccuuugggaaa

SEQ ID NO: 1668094 - RNA, 19 nt, Artificial Sequence
  Description of Artificial Sequence: Synthetic oligonucleotide
  Antisense strand to SEQ ID NO: 1668093
uuucccaaaggccaaagga

SEQ ID NO: 1668095 - RNA, 19 nt, Artificial Sequence
  Description of Artificial Sequence: Synthetic oligonucleotide
  Sense strand starting at position 2009 of SEQ ID NO: 1561388
accagagaacgcugagaau

SEQ ID NO: 1668096 - RNA, 19 nt, Artificial Sequence
  Description of Artificial Sequence: Synthetic oligonucleotide
  Antisense strand to SEQ ID NO: 1668095
auucucagcguucucuggu

SEQ ID NO: 1668097 - RNA, 19 nt, Artificial Sequence
  Description of Artificial Sequence: Synthetic oligonucleotide
  Sense strand starting at position 2281 of SEQ ID NO: 1561388
gggaaucccuguuuguaac

SEQ ID NO: 1668098 - RNA, 19 nt, Artificial Sequence
  Description of Artificial Sequence: Synthetic oligonucleotide
  Antisense strand to SEQ ID NO: 1668097
guuacaaacagggauuccc

SEQ ID NO: 1668099 - RNA, 19 nt, Artificial Sequence
  Description of Artificial Sequence: Synthetic oligonucleotide
  Sense strand starting at position 2405 of SEQ ID NO: 1561388
cguguaucacuuuauacaa

SEQ ID NO: 1668100 - RNA, 19 nt, Artificial Sequence
  Description of Artificial Sequence: Synthetic oligonucleotide
  Antisense strand to SEQ ID NO: 1668099
uuguauaaagugauacacg

SEQ ID NO: 1668101 - RNA, 19 nt, Artificial Sequence
  Description of Artificial Sequence: Synthetic oligonucleotide
  Sense strand starting at position 2415 of SEQ ID NO: 1561388
uuuauacaaucguuuagac

SEQ ID NO: 1668102 - RNA, 19 nt, Artificial Sequence
  Description of Artificial Sequence: Synthetic oligonucleotide
  Antisense strand to SEQ ID NO: 1668101
gucuaaacgauuguauaaa

SEQ ID NO: 1668103 - RNA, 19 nt, Artificial Sequence
  Description of Artificial Sequence: Synthetic oligonucleotide
  Sense strand starting at position 2498 of SEQ ID NO: 1561388
acucuuguuaccggauaga

SEQ ID NO: 1668104 - RNA, 19 nt, Artificial Sequence
  Description of Artificial Sequence: Synthetic oligonucleotide
  Antisense strand to SEQ ID NO: 1668103
ucuauccgguaacaagagu

SEQ ID NO: 1668105 - RNA, 19 nt, Artificial Sequence
  Description of Artificial Sequence: Synthetic oligonucleotide
  Sense strand starting at position 2501 of SEQ ID NO: 1561388
cuuguuaccggauagaaug

SEQ ID NO: 1668106 - RNA, 19 nt, Artificial Sequence
  Description of Artificial Sequence: Synthetic oligonucleotide
  Antisense strand to SEQ ID NO: 1668105
cauucuauccgguaacaag

SEQ ID NO: 1668107 - RNA, 19 nt, Artificial Sequence
  Description of Artificial Sequence: Synthetic oligonucleotide
  Sense strand starting at position 2537 of SEQ ID NO: 1561388
ccaguuguuggcgcauuga

SEQ ID NO: 1668108 - RNA, 19 nt, Artificial Sequence
  Description of Artificial Sequence: Synthetic oligonucleotide
  Antisense strand to SEQ ID NO: 1668107
ucaaugcgccaacaacugg

SEQ ID NO: 1668109 - RNA, 19 nt, Artificial Sequence
  Description of Artificial Sequence: Synthetic oligonucleotide
  Sense strand starting at position 2750 of SEQ ID NO: 1561388
ugccaugaauaagcuagaa

SEQ ID NO: 1668110 - RNA, 19 nt, Artificial Sequence
  Description of Artificial Sequence: Synthetic oligonucleotide
  Antisense strand to SEQ ID NO: 1668109
uucuagcuuauucauggca

SEQ ID NO: 1668111 - RNA, 19 nt, Artificial Sequence
  Description of Artificial Sequence: Synthetic oligonucleotide
  Sense strand starting at position 2781 of SEQ ID NO: 1561388
ccaagaguucuuuaaaggc

SEQ ID NO: 1668112 - RNA, 19 nt, Artificial Sequence
  Description of Artificial Sequence: Synthetic oligonucleotide
  Antisense strand to SEQ ID NO: 1668111
gccuuuaaagaacucuugg

SEQ ID NO: 1668113 - RNA, 19 nt, Artificial Sequence
  Description of Artificial Sequence: Synthetic oligonucleotide
  Sense strand starting at position 2799 of SEQ ID NO: 1561388
ccuccaauccuaugaagga

SEQ ID NO: 1668114 - RNA, 19 nt, Artificial Sequence
  Description of Artificial Sequence: Synthetic oligonucleotide
  Antisense strand to SEQ ID NO: 1668113
uccuucauaggauuggagg

SEQ ID NO: 1668115 - RNA, 19 nt, Artificial Sequence
  Description of Artificial Sequence: Synthetic oligonucleotide
  Sense strand starting at position 2859 of SEQ ID NO: 1561388
cuuguuaccacaggaguga

SEQ ID NO: 1668116 - RNA, 19 nt, Artificial Sequence
  Description of Artificial Sequence: Synthetic oligonucleotide
  Antisense strand to SEQ ID NO: 1668115
ucacuccugugguaacaag

SEQ ID NO: 1668117 - RNA, 19 nt, Artificial Sequence
  Description of Artificial Sequence: Synthetic oligonucleotide
  Sense strand starting at position 3010 of SEQ ID NO: 1561388
ucagucugccagggacaaa

SEQ ID NO: 1668118 - RNA, 19 nt, Artificial Sequence
  Description of Artificial Sequence: Synthetic oligonucleotide
  Antisense strand to SEQ ID NO: 1668117
uuugucccuggcagacuga

SEQ ID NO: 1668119 - RNA, 19 nt, Artificial Sequence
  Description of Artificial Sequence: Synthetic oligonucleotide
  Sense strand starting at position 3241 of SEQ ID NO: 1561388
gucagucucagguaaagaa

SEQ ID NO: 1668120 - RNA, 19 nt, Artificial Sequence
  Description of Artificial Sequence: Synthetic oligonucleotide
  Antisense strand to SEQ ID NO: 1668119
uucuuuaccugagacugac

SEQ ID NO: 1668121 - RNA, 19 nt, Artificial Sequence
  Description of Artificial Sequence: Synthetic oligonucleotide
  Sense strand starting at position 3267 of SEQ ID NO: 1561388
agagaaaucucagcuuggu

SEQ ID NO: 1668122 - RNA, 19 nt, Artificial Sequence
  Description of Artificial Sequence: Synthetic oligonucleotide
  Antisense strand to SEQ ID NO: 1668121
accaagcugagauuucucu

SEQ ID NO: 1668123 - RNA, 19 nt, Artificial Sequence
  Description of Artificial Sequence: Synthetic oligonucleotide
  Sense strand starting at position 3286 of SEQ ID NO: 1561388
auugguaaugguggugaua

SEQ ID NO: 1668124 - RNA, 19 nt, Artificial Sequence
  Description of Artificial Sequence: Synthetic oligonucleotide
  Antisense strand to SEQ ID NO: 1668123
uaucaccaccauuaccaau

SEQ ID NO: 1668125 - RNA, 19 nt, Artificial Sequence
  Description of Artificial Sequence: Synthetic oligonucleotide
  Sense strand starting at position 3289 of SEQ ID NO: 1561388
gguaaugguggugauaauc

SEQ ID NO: 1668126 - RNA, 19 nt, Artificial Sequence
  Description of Artificial Sequence: Synthetic oligonucleotide
  Antisense strand to SEQ ID NO: 1668125
gauuaucaccaccauuacc

SEQ ID NO: 1668127 - RNA, 19 nt, Artificial Sequence
  Description of Artificial Sequence: Synthetic oligonucleotide
  Sense strand starting at position 3317 of SEQ ID NO: 1561388
agacacuaggcguauguua

SEQ ID NO: 1668128 - RNA, 19 nt, Artificial Sequence
  Description of Artificial Sequence: Synthetic oligonucleotide
  Antisense strand to SEQ ID NO: 1668127
uaacauacgccuagugucu

SEQ ID NO: 1668129 - RNA, 19 nt, Artificial Sequence
  Description of Artificial Sequence: Synthetic oligonucleotide
  Sense strand starting at position 3331 of SEQ ID NO: 1561388
uguuaaauuaucgagcuug

SEQ ID NO: 1668130 - RNA, 19 nt, Artificial Sequence
  Description of Artificial Sequence: Synthetic oligonucleotide
  Antisense strand to SEQ ID NO: 1668129
caagcucgauaauuuaaca

SEQ ID NO: 1668131 - RNA, 19 nt, Artificial Sequence
  Description of Artificial Sequence: Synthetic oligonucleotide
  Sense strand starting at position 3347 of SEQ ID NO: 1561388
uuguuaucuuuccugggaa

SEQ ID NO: 1668132 - RNA, 19 nt, Artificial Sequence
  Description of Artificial Sequence: Synthetic oligonucleotide
  Antisense strand to SEQ ID NO: 1668131
uucccaggaaagauaacaa

SEQ ID NO: 1668133 - RNA, 19 nt, Artificial Sequence
  Description of Artificial Sequence: Synthetic oligonucleotide
  Sense strand starting at position 3350 of SEQ ID NO: 1561388
uuaucuuuccugggaagug

SEQ ID NO: 1668134 - RNA, 19 nt, Artificial Sequence
  Description of Artificial Sequence: Synthetic oligonucleotide
  Antisense strand to SEQ ID NO: 1668133
cacuucccaggaaagauaa

SEQ ID NO: 1668135 - RNA, 19 nt, Artificial Sequence
  Description of Artificial Sequence: Synthetic oligonucleotide
  Sense strand starting at position 3355 of SEQ ID NO: 1561388
uuuccugggaagugauuau

SEQ ID NO: 1668136 - RNA, 19 nt, Artificial Sequence
  Description of Artificial Sequence: Synthetic oligonucleotide
  Antisense strand to SEQ ID NO: 1668135
auaaucacuucccaggaaa

SEQ ID NO: 1668137 - RNA, 19 nt, Artificial Sequence
  Description of Artificial Sequence: Synthetic oligonucleotide
  Sense strand starting at position 3373 of SEQ ID NO: 1561388
ucauuuguuucucuuguga

SEQ ID NO: 1668138 - RNA, 19 nt, Artificial Sequence
  Description of Artificial Sequence: Synthetic oligonucleotide
  Antisense strand to SEQ ID NO: 1668137
ucacaagagaaacaaauga

SEQ ID NO: 1668139 - RNA, 19 nt, Artificial Sequence
  Description of Artificial Sequence: Synthetic oligonucleotide
  Sense strand starting at position 3397 of SEQ ID NO: 1561388
gggaguguucugcaugagg

SEQ ID NO: 1668140 - RNA, 19 nt, Artificial Sequence
  Description of Artificial Sequence: Synthetic oligonucleotide
  Antisense strand to SEQ ID NO: 1668139
ccucaugcagaacacuccc

SEQ ID NO: 1668141 - RNA, 19 nt, Artificial Sequence
  Description of Artificial Sequence: Synthetic oligonucleotide
  Sense strand starting at position 3400 of SEQ ID NO: 1561388
aguguucugcaugaggaac

SEQ ID NO: 1668142 - RNA, 19 nt, Artificial Sequence
  Description of Artificial Sequence: Synthetic oligonucleotide
  Antisense strand to SEQ ID NO: 1668141
guuccucaugcagaacacu

SEQ ID NO: 1668143 - RNA, 19 nt, Artificial Sequence
  Description of Artificial Sequence: Synthetic oligonucleotide
  Sense strand starting at position 3481 of SEQ ID NO: 1561388
uaauaacugcgaugacaga

SEQ ID NO: 1668144 - RNA, 19 nt, Artificial Sequence
  Description of Artificial Sequence: Synthetic oligonucleotide
  Antisense strand to SEQ ID NO: 1668143
ucugucaucgcaguuauua

SEQ ID NO: 1668145 - RNA, 19 nt, Artificial Sequence
  Description of Artificial Sequence: Synthetic oligonucleotide
  Sense strand starting at position 3515 of SEQ ID NO: 1561388
acaugaguggauggugaaa

SEQ ID NO: 1668146 - RNA, 19 nt, Artificial Sequence
  Description of Artificial Sequence: Synthetic oligonucleotide
  Antisense strand to SEQ ID NO: 1668145
uuucaccauccacucaugu

SEQ ID NO: 1668147 - RNA, 19 nt, Artificial Sequence
  Description of Artificial Sequence: Synthetic oligonucleotide
  Sense strand starting at position 347 of SEQ ID NO: 1561389
uuaugaagugcuuacauca

SEQ ID NO: 1668148 - RNA, 19 nt, Artificial Sequence
  Description of Artificial Sequence: Synthetic oligonucleotide
  Antisense strand to SEQ ID NO: 1668147
ugauguaagcacuucauaa

SEQ ID NO: 1668149 - RNA, 19 nt, Artificial Sequence
  Description of Artificial Sequence: Synthetic oligonucleotide
  Sense strand starting at position 354 of SEQ ID NO: 1561389
gugcuuacaucaguuuaac

SEQ ID NO: 1668150 - RNA, 19 nt, Artificial Sequence
  Description of Artificial Sequence: Synthetic oligonucleotide
  Antisense strand to SEQ ID NO: 1668149
guuaaacugauguaagcac

SEQ ID NO: 1668151 - RNA, 19 nt, Artificial Sequence
  Description of Artificial Sequence: Synthetic oligonucleotide
  Sense strand starting at position 372 of SEQ ID NO: 1561389
cuuaauaaauccguguugu

SEQ ID NO: 1668152 - RNA, 19 nt, Artificial Sequence
  Description of Artificial Sequence: Synthetic oligonucleotide
  Antisense strand to SEQ ID NO: 1668151
acaacacggauuuauuaag

SEQ ID NO: 1668153 - RNA, 19 nt, Artificial Sequence
  Description of Artificial Sequence: Synthetic oligonucleotide
  Sense strand starting at position 373 of SEQ ID NO: 1561389
uuaauaaauccguguuguu

SEQ ID NO: 1668154 - RNA, 19 nt, Artificial Sequence
  Description of Artificial Sequence: Synthetic oligonucleotide
  Antisense strand to SEQ ID NO: 1668153
aacaacacggauuuauuaa

SEQ ID NO: 1668155 - RNA, 19 nt, Artificial Sequence
  Description of Artificial Sequence: Synthetic oligonucleotide
  Sense strand starting at position 1003 of SEQ ID NO: 1561389
uccagaugugagugggcaa

SEQ ID NO: 1668156 - RNA, 19 nt, Artificial Sequence
  Description of Artificial Sequence: Synthetic oligonucleotide
  Antisense strand to SEQ ID NO: 1668155
uugcccacucacaucugga

SEQ ID NO: 1668157 - RNA, 19 nt, Artificial Sequence
  Description of Artificial Sequence: Synthetic oligonucleotide
  Sense strand starting at position 1061 of SEQ ID NO: 1561389
ucaggauuaccauguccaa

SEQ ID NO: 1668158 - RNA, 19 nt, Artificial Sequence
  Description of Artificial Sequence: Synthetic oligonucleotide
  Antisense strand to SEQ ID NO: 1668157
uuggacaugguaauccuga

SEQ ID NO: 1668159 - RNA, 19 nt, Artificial Sequence
  Description of Artificial Sequence: Synthetic oligonucleotide
  Sense strand starting at position 2128 of SEQ ID NO: 1561389
gaugauagaugaugaugga

SEQ ID NO: 1668160 - RNA, 19 nt, Artificial Sequence
  Description of Artificial Sequence: Synthetic oligonucleotide
  Antisense strand to SEQ ID NO: 1668159
uccaucaucaucuaucauc

SEQ ID NO: 1668161 - RNA, 19 nt, Artificial Sequence
  Description of Artificial Sequence: Synthetic oligonucleotide
  Sense strand starting at position 2131 of SEQ ID NO: 1561389
gauagaugaugauggagau

SEQ ID NO: 1668162 - RNA, 19 nt, Artificial Sequence
  Description of Artificial Sequence: Synthetic oligonucleotide
  Antisense strand to SEQ ID NO: 1668161
aucuccaucaucaucuauc

SEQ ID NO: 1668163 - RNA, 19 nt, Artificial Sequence
  Description of Artificial Sequence: Synthetic oligonucleotide
  Sense strand starting at position 2217 of SEQ ID NO: 1561389
uugagaacuucucucggac

SEQ ID NO: 1668164 - RNA, 19 nt, Artificial Sequence
  Description of Artificial Sequence: Synthetic oligonucleotide
  Antisense strand to SEQ ID NO: 1668163
guccgagagaaguucucaa

SEQ ID NO: 1668165 - RNA, 19 nt, Artificial Sequence
  Description of Artificial Sequence: Synthetic oligonucleotide
  Sense strand starting at position 2220 of SEQ ID NO: 1561389
agaacuucucucggacuca

SEQ ID NO: 1668166 - RNA, 19 nt, Artificial Sequence
  Description of Artificial Sequence: Synthetic oligonucleotide
  Antisense strand to SEQ ID NO: 1668165
ugaguccgagagaaguucu

SEQ ID NO: 1668167 - RNA, 19 nt, Artificial Sequence
  Description of Artificial Sequence: Synthetic oligonucleotide
  Sense strand starting at position 2347 of SEQ ID NO: 1561389
uaaagagguuucucuggga

SEQ ID NO: 1668168 - RNA, 19 nt, Artificial Sequence
  Description of Artificial Sequence: Synthetic oligonucleotide
  Antisense strand to SEQ ID NO: 1668167
ucccagagaaaccucuuua

SEQ ID NO: 1668169 - RNA, 19 nt, Artificial Sequence
  Description of Artificial Sequence: Synthetic oligonucleotide
  Sense strand starting at position 2351 of SEQ ID NO: 1561389
gagguuucucugggaagag

SEQ ID NO: 1668170 - RNA, 19 nt, Artificial Sequence
  Description of Artificial Sequence: Synthetic oligonucleotide
  Antisense strand to SEQ ID NO: 1668169
cucuucccagagaaaccuc

SEQ ID NO: 1668171 - RNA, 19 nt, Artificial Sequence
  Description of Artificial Sequence: Synthetic oligonucleotide
  Sense strand starting at position 2363 of SEQ ID NO: 1561389
ggaagagccacguauagau

SEQ ID NO: 1668172 - RNA, 19 nt, Artificial Sequence
  Description of Artificial Sequence: Synthetic oligonucleotide
  Antisense strand to SEQ ID NO: 1668171
aucuauacguggcucuucc

SEQ ID NO: 1668173 - RNA, 19 nt, Artificial Sequence
  Description of Artificial Sequence: Synthetic oligonucleotide
  Sense strand starting at position 2432 of SEQ ID NO: 1561389
ccaagcaaugccugaugua

SEQ ID NO: 1668174 - RNA, 19 nt, Artificial Sequence
  Description of Artificial Sequence: Synthetic oligonucleotide
  Antisense strand to SEQ ID NO: 1668173
uacaucaggcauugcuugg

SEQ ID NO: 1668175 - RNA, 19 nt, Artificial Sequence
  Description of Artificial Sequence: Synthetic oligonucleotide
  Sense strand starting at position 2433 of SEQ ID NO: 1561389
caagcaaugccugauguau

SEQ ID NO: 1668176 - RNA, 19 nt, Artificial Sequence
  Description of Artificial Sequence: Synthetic oligonucleotide
  Antisense strand to SEQ ID NO: 1668175
auacaucaggcauugcuug

SEQ ID NO: 1668177 - RNA, 19 nt, Artificial Sequence
  Description of Artificial Sequence: Synthetic oligonucleotide
  Sense strand starting at position 2439 of SEQ ID NO: 1561389
augccugauguaugacaau

SEQ ID NO: 1668178 - RNA, 19 nt, Artificial Sequence
  Description of Artificial Sequence: Synthetic oligonucleotide
  Antisense strand to SEQ ID NO: 1668177
auugucauacaucaggcau

SEQ ID NO: 1668179 - RNA, 19 nt, Artificial Sequence
  Description of Artificial Sequence: Synthetic oligonucleotide
  Sense strand starting at position 2442 of SEQ ID NO: 1561389
ccugauguaugacaauaag

SEQ ID NO: 1668180 - RNA, 19 nt, Artificial Sequence
  Description of Artificial Sequence: Synthetic oligonucleotide
  Antisense strand to SEQ ID NO: 1668179
cuuauugucauacaucagg

SEQ ID NO: 1668181 - RNA, 19 nt, Artificial Sequence
  Description of Artificial Sequence: Synthetic oligonucleotide
  Sense strand starting at position 2707 of SEQ ID NO: 1561389
gguagaaugcuagacuguu

SEQ ID NO: 1668182 - RNA, 19 nt, Artificial Sequence
  Description of Artificial Sequence: Synthetic oligonucleotide
  Antisense strand to SEQ ID NO: 1668181
aacagucuagcauucuacc

SEQ ID NO: 1668183 - RNA, 19 nt, Artificial Sequence
  Description of Artificial Sequence: Synthetic oligonucleotide
  Sense strand starting at position 2715 of SEQ ID NO: 1561389
gcuagacuguuguuuacaa

SEQ ID NO: 1668184 - RNA, 19 nt, Artificial Sequence
  Description of Artificial Sequence: Synthetic oligonucleotide
  Antisense strand to SEQ ID NO: 1668183
uuguaaacaacagucuagc

SEQ ID NO: 1668185 - RNA, 19 nt, Artificial Sequence
  Description of Artificial Sequence: Synthetic oligonucleotide
  Sense strand starting at position 2722 of SEQ ID NO: 1561389
uguuguuuacaacacacaa

SEQ ID NO: 1668186 - RNA, 19 nt, Artificial Sequence
  Description of Artificial Sequence: Synthetic oligonucleotide
  Antisense strand to SEQ ID NO: 1668185
uuguguguuguaaacaaca

SEQ ID NO: 1668187 - RNA, 19 nt, Artificial Sequence
  Description of Artificial Sequence: Synthetic oligonucleotide
  Sense strand starting at position 2856 of SEQ ID NO: 1561389
uccaucuguuggcugaaua

SEQ ID NO: 1668188 - RNA, 19 nt, Artificial Sequence
  Description of Artificial Sequence: Synthetic oligonucleotide
  Antisense strand to SEQ ID NO: 1668187
uauucagccaacagaugga

SEQ ID NO: 1668189 - RNA, 19 nt, Artificial Sequence
  Description of Artificial Sequence: Synthetic oligonucleotide
  Sense strand starting at position 2857 of SEQ ID NO: 1561389
ccaucuguuggcugaauaa

SEQ ID NO: 1668190 - RNA, 19 nt, Artificial Sequence
  Description of Artificial Sequence: Synthetic oligonucleotide
  Antisense strand to SEQ ID NO: 1668189
uuauucagccaacagaugg

SEQ ID NO: 1668191 - RNA, 19 nt, Artificial Sequence
  Description of Artificial Sequence: Synthetic oligonucleotide
  Sense strand starting at position 2890 of SEQ ID NO: 1561389
acagcauuggagugacuua

SEQ ID NO: 1668192 - RNA, 19 nt, Artificial Sequence
  Description of Artificial Sequence: Synthetic oligonucleotide
  Antisense strand to SEQ ID NO: 1668191
uaagucacuccaaugcugu

SEQ ID NO: 1668193 - RNA, 19 nt, Artificial Sequence
  Description of Artificial Sequence: Synthetic oligonucleotide
  Sense strand starting at position 2969 of SEQ ID NO: 1561389
aguacuacuugacucugaa

SEQ ID NO: 1668194 - RNA, 19 nt, Artificial Sequence
  Description of Artificial Sequence: Synthetic oligonucleotide
  Antisense strand to SEQ ID NO: 1668193
uucagagucaaguaguacu

SEQ ID NO: 1668195 - RNA, 19 nt, Artificial Sequence
  Description of Artificial Sequence: Synthetic oligonucleotide
  Sense strand starting at position 2997 of SEQ ID NO: 1561389
gggagucaauauugggauu

SEQ ID NO: 1668196 - RNA, 19 nt, Artificial Sequence
  Description of Artificial Sequence: Synthetic oligonucleotide
  Antisense strand to SEQ ID NO: 1668195
aaucccaauauugacuccc

SEQ ID NO: 1668197 - RNA, 19 nt, Artificial Sequence
  Description of Artificial Sequence: Synthetic oligonucleotide
  Sense strand starting at position 2999 of SEQ ID NO: 1561389
gagucaauauugggauuga

SEQ ID NO: 1668198 - RNA, 19 nt, Artificial Sequence
  Description of Artificial Sequence: Synthetic oligonucleotide
  Antisense strand to SEQ ID NO: 1668197
ucaaucccaauauugacuc

SEQ ID NO: 1668199 - RNA, 19 nt, Artificial Sequence
  Description of Artificial Sequence: Synthetic oligonucleotide
  Sense strand starting at position 3000 of SEQ ID NO: 1561389
agucaauauugggauugag

SEQ ID NO: 1668200 - RNA, 19 nt, Artificial Sequence
  Description of Artificial Sequence: Synthetic oligonucleotide
  Antisense strand to SEQ ID NO: 1668199
cucaaucccaauauugacu

SEQ ID NO: 1668201 - RNA, 19 nt, Artificial Sequence
  Description of Artificial Sequence: Synthetic oligonucleotide
  Sense strand starting at position 3014 of SEQ ID NO: 1561389
uugagaacaugguagaaua

SEQ ID NO: 1668202 - RNA, 19 nt, Artificial Sequence
  Description of Artificial Sequence: Synthetic oligonucleotide
  Antisense strand to SEQ ID NO: 1668201
uauucuaccauguucucaa

SEQ ID NO: 1668203 - RNA, 19 nt, Artificial Sequence
  Description of Artificial Sequence: Synthetic oligonucleotide
  Sense strand starting at position 3066 of SEQ ID NO: 1561389
cagcuauggcauuaguuau

SEQ ID NO: 1668204 - RNA, 19 nt, Artificial Sequence
  Description of Artificial Sequence: Synthetic oligonucleotide
  Antisense strand to SEQ ID NO: 1668203
auaacuaaugccauagcug

SEQ ID NO: 1668205 - RNA, 19 nt, Artificial Sequence
  Description of Artificial Sequence: Synthetic oligonucleotide
  Sense strand starting at position 3096 of SEQ ID NO: 1561389
cauuauguggcauauggaa

SEQ ID NO: 1668206 - RNA, 19 nt, Artificial Sequence
  Description of Artificial Sequence: Synthetic oligonucleotide
  Antisense strand to SEQ ID NO: 1668205
uuccauaugccacauaaug

SEQ ID NO: 1668207 - RNA, 19 nt, Artificial Sequence
  Description of Artificial Sequence: Synthetic oligonucleotide
  Sense strand starting at position 3159 of SEQ ID NO: 1561389
gugggacaauauguaaaua

SEQ ID NO: 1668208 - RNA, 19 nt, Artificial Sequence
  Description of Artificial Sequence: Synthetic oligonucleotide
  Antisense strand to SEQ ID NO: 1668207
uauuuacauauugucccac

SEQ ID NO: 1668209 - RNA, 19 nt, Artificial Sequence
  Description of Artificial Sequence: Synthetic oligonucleotide
  Sense strand starting at position 3276 of SEQ ID NO: 1561389
uggaaauuagcuuaccauc

SEQ ID NO: 1668210 - RNA, 19 nt, Artificial Sequence
  Description of Artificial Sequence: Synthetic oligonucleotide
  Antisense strand to SEQ ID NO: 1668209
gaugguaagcuaauuucca

SEQ ID NO: 1668211 - RNA, 19 nt, Artificial Sequence
  Description of Artificial Sequence: Synthetic oligonucleotide
  Sense strand starting at position 3300 of SEQ ID NO: 1561389
aggaaccuuuguggacaaa

SEQ ID NO: 1668212 - RNA, 19 nt, Artificial Sequence
  Description of Artificial Sequence: Synthetic oligonucleotide
  Antisense strand to SEQ ID NO: 1668211
uuuguccacaaagguuccu

SEQ ID NO: 1668213 - RNA, 19 nt, Artificial Sequence
  Description of Artificial Sequence: Synthetic oligonucleotide
  Sense strand starting at position 3484 of SEQ ID NO: 1561389
augcaaauguuagcuuaau

SEQ ID NO: 1668214 - RNA, 19 nt, Artificial Sequence
  Description of Artificial Sequence: Synthetic oligonucleotide
  Antisense strand to SEQ ID NO: 1668213
auuaagcuaacauuugcau

SEQ ID NO: 1668215 - RNA, 19 nt, Artificial Sequence
  Description of Artificial Sequence: Synthetic oligonucleotide
  Sense strand starting at position 3485 of SEQ ID NO: 1561389
ugcaaauguuagcuuaaug

SEQ ID NO: 1668216 - RNA, 19 nt, Artificial Sequence
  Description of Artificial Sequence: Synthetic oligonucleotide
  Antisense strand to SEQ ID NO: 1668215
cauuaagcuaacauuugca

SEQ ID NO: 1668217 - RNA, 19 nt, Artificial Sequence
  Description of Artificial Sequence: Synthetic oligonucleotide
  Sense strand starting at position 3504 of SEQ ID NO: 1561389
ggguguaucaggcauguga

SEQ ID NO: 1668218 - RNA, 19 nt, Artificial Sequence
  Description of Artificial Sequence: Synthetic oligonucleotide
  Antisense strand to SEQ ID NO: 1668217
ucacaugccugauacaccc

SEQ ID NO: 1668219 - RNA, 19 nt, Artificial Sequence
  Description of Artificial Sequence: Synthetic oligonucleotide
  Sense strand starting at position 3810 of SEQ ID NO: 1561389
gaaaguuguagugaauugu

SEQ ID NO: 1668220 - RNA, 19 nt, Artificial Sequence
  Description of Artificial Sequence: Synthetic oligonucleotide
  Antisense strand to SEQ ID NO: 1668219
acaauucacuacaacuuuc

SEQ ID NO: 1668221 - RNA, 19 nt, Artificial Sequence
  Description of Artificial Sequence: Synthetic oligonucleotide
  Sense strand starting at position 3814 of SEQ ID NO: 1561389
guuguagugaauuguguga

SEQ ID NO: 1668222 - RNA, 19 nt, Artificial Sequence
  Description of Artificial Sequence: Synthetic oligonucleotide
  Antisense strand to SEQ ID NO: 1668221
ucacacaauucacuacaac

SEQ ID NO: 1668223 - RNA, 19 nt, Artificial Sequence
  Description of Artificial Sequence: Synthetic oligonucleotide
  Sense strand starting at position 3818 of SEQ ID NO: 1561389
uagugaauugugugauagu

SEQ ID NO: 1668224 - RNA, 19 nt, Artificial Sequence
  Description of Artificial Sequence: Synthetic oligonucleotide
  Antisense strand to SEQ ID NO: 1668223
acuaucacacaauucacua

SEQ ID NO: 1668225 - RNA, 19 nt, Artificial Sequence
  Description of Artificial Sequence: Synthetic oligonucleotide
  Sense strand starting at position 3899 of SEQ ID NO: 1561389
gcaggcucauauguagaau

SEQ ID NO: 1668226 - RNA, 19 nt, Artificial Sequence
  Description of Artificial Sequence: Synthetic oligonucleotide
  Antisense strand to SEQ ID NO: 1668225
auucuacauaugagccugc

SEQ ID NO: 1668227 - RNA, 19 nt, Artificial Sequence
  Description of Artificial Sequence: Synthetic oligonucleotide
  Sense strand starting at position 39 of SEQ ID NO: 1561390
gucuauguccuguaauaac

SEQ ID NO: 1668228 - RNA, 19 nt, Artificial Sequence
  Description of Artificial Sequence: Synthetic oligonucleotide
  Antisense strand to SEQ ID NO: 1668227
guuauuacaggacauagac

SEQ ID NO: 1668229 - RNA, 19 nt, Artificial Sequence
  Description of Artificial Sequence: Synthetic oligonucleotide
  Sense strand starting at position 275 of SEQ ID NO: 1561390
uucuaccuucuguaucaga

SEQ ID NO: 1668230 - RNA, 19 nt, Artificial Sequence
  Description of Artificial Sequence: Synthetic oligonucleotide
  Antisense strand to SEQ ID NO: 1668229
ucugauacagaagguagaa

SEQ ID NO: 1668231 - RNA, 19 nt, Artificial Sequence
  Description of Artificial Sequence: Synthetic oligonucleotide
  Sense strand starting at position 313 of SEQ ID NO: 1561390
cugucuugggcuugaauuu

SEQ ID NO: 1668232 - RNA, 19 nt, Artificial Sequence
  Description of Artificial Sequence: Synthetic oligonucleotide
  Antisense strand to SEQ ID NO: 1668231
aaauucaagcccaagacag

SEQ ID NO: 1668233 - RNA, 19 nt, Artificial Sequence
  Description of Artificial Sequence: Synthetic oligonucleotide
  Sense strand starting at position 452 of SEQ ID NO: 1561390
uuauauuuccaguggccua

SEQ ID NO: 1668234 - RNA, 19 nt, Artificial Sequence
  Description of Artificial Sequence: Synthetic oligonucleotide
  Antisense strand to SEQ ID NO: 1668233
uaggccacuggaaauauaa

SEQ ID NO: 1668235 - RNA, 19 nt, Artificial Sequence
  Description of Artificial Sequence: Synthetic oligonucleotide
  Sense strand starting at position 649 of SEQ ID NO: 1561390
aguagaggucauggugaaa

SEQ ID NO: 1668236 - RNA, 19 nt, Artificial Sequence
  Description of Artificial Sequence: Synthetic oligonucleotide
  Antisense strand to SEQ ID NO: 1668235
uuucaccaugaccucuacu

SEQ ID NO: 1668237 - RNA, 19 nt, Artificial Sequence
  Description of Artificial Sequence: Synthetic oligonucleotide
  Sense strand starting at position 846 of SEQ ID NO: 1561390
gucugacuuccuuacuucu

SEQ ID NO: 1668238 - RNA, 19 nt, Artificial Sequence
  Description of Artificial Sequence: Synthetic oligonucleotide
  Antisense strand to SEQ ID NO: 1668237
agaaguaaggaagucagac

SEQ ID NO: 1668239 - RNA, 19 nt, Artificial Sequence
  Description of Artificial Sequence: Synthetic oligonucleotide
  Sense strand starting at position 1323 of SEQ ID NO: 1561390
ccaagcaccuugucagaga

SEQ ID NO: 1668240 - RNA, 19 nt, Artificial Sequence
  Description of Artificial Sequence: Synthetic oligonucleotide
  Antisense strand to SEQ ID NO: 1668239
ucucugacaaggugcuugg

SEQ ID NO: 1668241 - RNA, 19 nt, Artificial Sequence
  Description of Artificial Sequence: Synthetic oligonucleotide
  Sense strand starting at position 1465 of SEQ ID NO: 1561390
agggaaacacgcgguaaua

SEQ ID NO: 1668242 - RNA, 19 nt, Artificial Sequence
  Description of Artificial Sequence: Synthetic oligonucleotide
  Antisense strand to SEQ ID NO: 1668241
uauuaccgcguguuucccu

SEQ ID NO: 1668243 - RNA, 19 nt, Artificial Sequence
  Description of Artificial Sequence: Synthetic oligonucleotide
  Sense strand starting at position 1467 of SEQ ID NO: 1561390
ggaaacacgcgguaauaaa

SEQ ID NO: 1668244 - RNA, 19 nt, Artificial Sequence
  Description of Artificial Sequence: Synthetic oligonucleotide
  Antisense strand to SEQ ID NO: 1668243
uuuauuaccgcguguuucc

SEQ ID NO: 1668245 - RNA, 19 nt, Artificial Sequence
  Description of Artificial Sequence: Synthetic oligonucleotide
  Sense strand starting at position 1899 of SEQ ID NO: 1561390
ggacacuccuaccuugaca

SEQ ID NO: 1668246 - RNA, 19 nt, Artificial Sequence
  Description of Artificial Sequence: Synthetic oligonucleotide
  Antisense strand to SEQ ID NO: 1668245
ugucaagguaggagugucc

SEQ ID NO: 1668247 - RNA, 19 nt, Artificial Sequence
  Description of Artificial Sequence: Synthetic oligonucleotide
  Sense strand starting at position 2475 of SEQ ID NO: 1561390
gugugugacaaugggagau

SEQ ID NO: 1668248 - RNA, 19 nt, Artificial Sequence
  Description of Artificial Sequence: Synthetic oligonucleotide
  Antisense strand to SEQ ID NO: 1668247
aucucccauugucacacac

SEQ ID NO: 1668249 - RNA, 19 nt, Artificial Sequence
  Description of Artificial Sequence: Synthetic oligonucleotide
  Sense strand starting at position 2580 of SEQ ID NO: 1561390
ggugauuuguacuuuaagc

SEQ ID NO: 1668250 - RNA, 19 nt, Artificial Sequence
  Description of Artificial Sequence: Synthetic oligonucleotide
  Antisense strand to SEQ ID NO: 1668249
gcuuaaaguacaaaucacc

SEQ ID NO: 1668251 - RNA, 19 nt, Artificial Sequence
  Description of Artificial Sequence: Synthetic oligonucleotide
  Sense strand starting at position 2598 of SEQ ID NO: 1561390
cugcguaguaaugggauuu

SEQ ID NO: 1668252 - RNA, 19 nt, Artificial Sequence
  Description of Artificial Sequence: Synthetic oligonucleotide
  Antisense strand to SEQ ID NO: 1668251
aaaucccauuacuacgcag

SEQ ID NO: 1668253 - RNA, 19 nt, Artificial Sequence
  Description of Artificial Sequence: Synthetic oligonucleotide
  Sense strand starting at position 2615 of SEQ ID NO: 1561390
uuuauaacuguguagaauc

SEQ ID NO: 1668254 - RNA, 19 nt, Artificial Sequence
  Description of Artificial Sequence: Synthetic oligonucleotide
  Antisense strand to SEQ ID NO: 1668253
gauucuacacaguuauaaa

SEQ ID NO: 1668255 - RNA, 19 nt, Artificial Sequence
  Description of Artificial Sequence: Synthetic oligonucleotide
  Sense strand starting at position 2625 of SEQ ID NO: 1561390
uguagaaucgucuaacaga

SEQ ID NO: 1668256 - RNA, 19 nt, Artificial Sequence
  Description of Artificial Sequence: Synthetic oligonucleotide
  Antisense strand to SEQ ID NO: 1668255
ucuguuagacgauucuaca

SEQ ID NO: 1668257 - RNA, 19 nt, Artificial Sequence
  Description of Artificial Sequence: Synthetic oligonucleotide
  Sense strand starting at position 2716 of SEQ ID NO: 1561390
guguguggccguaauugag

SEQ ID NO: 1668258 - RNA, 19 nt, Artificial Sequence
  Description of Artificial Sequence: Synthetic oligonucleotide
  Antisense strand to SEQ ID NO: 1668257
cucaauuacggccacacac

SEQ ID NO: 1668259 - RNA, 19 nt, Artificial Sequence
  Description of Artificial Sequence: Synthetic oligonucleotide
  Sense strand starting at position 2726 of SEQ ID NO: 1561390
guaauugaguaacugguga

SEQ ID NO: 1668260 - RNA, 19 nt, Artificial Sequence
  Description of Artificial Sequence: Synthetic oligonucleotide
  Antisense strand to SEQ ID NO: 1668259
ucaccaguuacucaauuac

SEQ ID NO: 1668261 - RNA, 19 nt, Artificial Sequence
  Description of Artificial Sequence: Synthetic oligonucleotide
  Sense strand starting at position 2731 of SEQ ID NO: 1561390
ugaguaacuggugaucugu

SEQ ID NO: 1668262 - RNA, 19 nt, Artificial Sequence
  Description of Artificial Sequence: Synthetic oligonucleotide
  Antisense strand to SEQ ID NO: 1668261
acagaucaccaguuacuca

SEQ ID NO: 1668263 - RNA, 19 nt, Artificial Sequence
  Description of Artificial Sequence: Synthetic oligonucleotide
  Sense strand starting at position 2763 of SEQ ID NO: 1561390
gcuuucuuugugcuuguau

SEQ ID NO: 1668264 - RNA, 19 nt, Artificial Sequence
  Description of Artificial Sequence: Synthetic oligonucleotide
  Antisense strand to SEQ ID NO: 1668263
auacaagcacaaagaaagc

SEQ ID NO: 1668265 - RNA, 19 nt, Artificial Sequence
  Description of Artificial Sequence: Synthetic oligonucleotide
  Sense strand starting at position 2778 of SEQ ID NO: 1561390
guauuucagugucuguaag

SEQ ID NO: 1668266 - RNA, 19 nt, Artificial Sequence
  Description of Artificial Sequence: Synthetic oligonucleotide
  Antisense strand to SEQ ID NO: 1668265
cuuacagacacugaaauac

SEQ ID NO: 1668267 - RNA, 19 nt, Artificial Sequence
  Description of Artificial Sequence: Synthetic oligonucleotide
  Sense strand starting at position 2950 of SEQ ID NO: 1561390
auauauguguuaucgggaa

SEQ ID NO: 1668268 - RNA, 19 nt, Artificial Sequence
  Description of Artificial Sequence: Synthetic oligonucleotide
  Antisense strand to SEQ ID NO: 1668267
uucccgauaacacauauau

SEQ ID NO: 1668269 - RNA, 19 nt, Artificial Sequence
  Description of Artificial Sequence: Synthetic oligonucleotide
  Sense strand starting at position 2952 of SEQ ID NO: 1561390
auauguguuaucgggaaga

SEQ ID NO: 1668270 - RNA, 19 nt, Artificial Sequence
  Description of Artificial Sequence: Synthetic oligonucleotide
  Antisense strand to SEQ ID NO: 1668269
ucuucccgauaacacauau

SEQ ID NO: 1668271 - RNA, 19 nt, Artificial Sequence
  Description of Artificial Sequence: Synthetic oligonucleotide
  Sense strand starting at position 2954 of SEQ ID NO: 1561390
auguguuaucgggaagaau

SEQ ID NO: 1668272 - RNA, 19 nt, Artificial Sequence
  Description of Artificial Sequence: Synthetic oligonucleotide
  Antisense strand to SEQ ID NO: 1668271
auucuucccgauaacacau

SEQ ID NO: 1668273 - RNA, 19 nt, Artificial Sequence
  Description of Artificial Sequence: Synthetic oligonucleotide
  Sense strand starting at position 3094 of SEQ ID NO: 1561390
aggguaaaguuucucuuau

SEQ ID NO: 1668274 - RNA, 19 nt, Artificial Sequence
  Description of Artificial Sequence: Synthetic oligonucleotide
  Antisense strand to SEQ ID NO: 1668273
auaagagaaacuuuacccu

SEQ ID NO: 1668275 - RNA, 19 nt, Artificial Sequence
  Description of Artificial Sequence: Synthetic oligonucleotide
  Sense strand starting at position 3096 of SEQ ID NO: 1561390
gguaaaguuucucuuauua

SEQ ID NO: 1668276 - RNA, 19 nt, Artificial Sequence
  Description of Artificial Sequence: Synthetic oligonucleotide
  Antisense strand to SEQ ID NO: 1668275
uaauaagagaaacuuuacc

SEQ ID NO: 1668277 - RNA, 19 nt, Artificial Sequence
  Description of Artificial Sequence: Synthetic oligonucleotide
  Sense strand starting at position 3276 of SEQ ID NO: 1561390
aacuuaaggcuguagaguu

SEQ ID NO: 1668278 - RNA, 19 nt, Artificial Sequence
  Description of Artificial Sequence: Synthetic oligonucleotide
  Antisense strand to SEQ ID NO: 1668277
aacucuacagccuuaaguu

SEQ ID NO: 1668279 - RNA, 19 nt, Artificial Sequence
  Description of Artificial Sequence: Synthetic oligonucleotide
  Sense strand starting at position 3296 of SEQ ID NO: 1561390
guugguaaaccugaacuua

SEQ ID NO: 1668280 - RNA, 19 nt, Artificial Sequence
  Description of Artificial Sequence: Synthetic oligonucleotide
  Antisense strand to SEQ ID NO: 1668279
uaaguucagguuuaccaac

SEQ ID NO: 1668281 - RNA, 19 nt, Artificial Sequence
  Description of Artificial Sequence: Synthetic oligonucleotide
  Sense strand starting at position 3443 of SEQ ID NO: 1561390
uuggucuugcaagaccaua

SEQ ID NO: 1668282 - RNA, 19 nt, Artificial Sequence
  Description of Artificial Sequence: Synthetic oligonucleotide
  Antisense strand to SEQ ID NO: 1668281
uauggucuugcaagaccaa

SEQ ID NO: 1668283 - RNA, 19 nt, Artificial Sequence
  Description of Artificial Sequence: Synthetic oligonucleotide
  Sense strand starting at position 3472 of SEQ ID NO: 1561390
auugaucucuuaccgguaa

SEQ ID NO: 1668284 - RNA, 19 nt, Artificial Sequence
  Description of Artificial Sequence: Synthetic oligonucleotide
  Antisense strand to SEQ ID NO: 1668283
uuaccgguaagagaucaau

SEQ ID NO: 1668285 - RNA, 19 nt, Artificial Sequence
  Description of Artificial Sequence: Synthetic oligonucleotide
  Sense strand starting at position 3476 of SEQ ID NO: 1561390
aucucuuaccgguaaugug

SEQ ID NO: 1668286 - RNA, 19 nt, Artificial Sequence
  Description of Artificial Sequence: Synthetic oligonucleotide
  Antisense strand to SEQ ID NO: 1668285
cacauuaccgguaagagau

SEQ ID NO: 1668287 - RNA, 19 nt, Artificial Sequence
  Description of Artificial Sequence: Synthetic oligonucleotide
  Sense strand starting at position 3484 of SEQ ID NO: 1561390
ccgguaaugugacuggaau

SEQ ID NO: 1668288 - RNA, 19 nt, Artificial Sequence
  Description of Artificial Sequence: Synthetic oligonucleotide
  Antisense strand to SEQ ID NO: 1668287
auuccagucacauuaccgg

SEQ ID NO: 1668289 - RNA, 19 nt, Artificial Sequence
  Description of Artificial Sequence: Synthetic oligonucleotide
  Sense strand starting at position 3485 of SEQ ID NO: 1561390
cgguaaugugacuggaaua

SEQ ID NO: 1668290 - RNA, 19 nt, Artificial Sequence
  Description of Artificial Sequence: Synthetic oligonucleotide
  Antisense strand to SEQ ID NO: 1668289
uauuccagucacauuaccg

SEQ ID NO: 1668291 - RNA, 19 nt, Artificial Sequence
  Description of Artificial Sequence: Synthetic oligonucleotide
  Sense strand starting at position 3486 of SEQ ID NO: 1561390
gguaaugugacuggaauag

SEQ ID NO: 1668292 - RNA, 19 nt, Artificial Sequence
  Description of Artificial Sequence: Synthetic oligonucleotide
  Antisense strand to SEQ ID NO: 1668291
cuauuccagucacauuacc

SEQ ID NO: 1668293 - RNA, 19 nt, Artificial Sequence
  Description of Artificial Sequence: Synthetic oligonucleotide
  Sense strand starting at position 3529 of SEQ ID NO: 1561390
agggaaugaaccugugugu

SEQ ID NO: 1668294 - RNA, 19 nt, Artificial Sequence
  Description of Artificial Sequence: Synthetic oligonucleotide
  Antisense strand to SEQ ID NO: 1668293
acacacagguucauucccu

SEQ ID NO: 1668295 - RNA, 19 nt, Artificial Sequence
  Description of Artificial Sequence: Synthetic oligonucleotide
  Sense strand starting at position 3547 of SEQ ID NO: 1561390
ugugaucaggcauagcuau

SEQ ID NO: 1668296 - RNA, 19 nt, Artificial Sequence
  Description of Artificial Sequence: Synthetic oligonucleotide
  Antisense strand to SEQ ID NO: 1668295
auagcuaugccugaucaca

SEQ ID NO: 1668297 - RNA, 19 nt, Artificial Sequence
  Description of Artificial Sequence: Synthetic oligonucleotide
  Sense strand starting at position 3580 of SEQ ID NO: 1561390
auuaaauugcacugaguua

SEQ ID NO: 1668298 - RNA, 19 nt, Artificial Sequence
  Description of Artificial Sequence: Synthetic oligonucleotide
  Antisense strand to SEQ ID NO: 1668297
uaacucagugcaauuuaau

SEQ ID NO: 1668299 - RNA, 19 nt, Artificial Sequence
  Description of Artificial Sequence: Synthetic oligonucleotide
  Sense strand starting at position 3591 of SEQ ID NO: 1561390
cugaguuagagugggucaa

SEQ ID NO: 1668300 - RNA, 19 nt, Artificial Sequence
  Description of Artificial Sequence: Synthetic oligonucleotide
  Antisense strand to SEQ ID NO: 1668299
uugacccacucuaacucag

SEQ ID NO: 1668301 - RNA, 19 nt, Artificial Sequence
  Description of Artificial Sequence: Synthetic oligonucleotide
  Sense strand starting at position 3592 of SEQ ID NO: 1561390
ugaguuagagugggucaaa

SEQ ID NO: 1668302 - RNA, 19 nt, Artificial Sequence
  Description of Artificial Sequence: Synthetic oligonucleotide
  Antisense strand to SEQ ID NO: 1668301
uuugacccacucuaacuca

SEQ ID NO: 1668303 - RNA, 19 nt, Artificial Sequence
  Description of Artificial Sequence: Synthetic oligonucleotide
  Sense strand starting at position 3593 of SEQ ID NO: 1561390
gaguuagagugggucaaag

SEQ ID NO: 1668304 - RNA, 19 nt, Artificial Sequence
  Description of Artificial Sequence: Synthetic oligonucleotide
  Antisense strand to SEQ ID NO: 1668303
cuuugacccacucuaacuc

SEQ ID NO: 1668305 - RNA, 19 nt, Artificial Sequence
  Description of Artificial Sequence: Synthetic oligonucleotide
  Sense strand starting at position 3605 of SEQ ID NO: 1561390
gucaaagucaggcaagaau

SEQ ID NO: 1668306 - RNA, 19 nt, Artificial Sequence
  Description of Artificial Sequence: Synthetic oligonucleotide
  Antisense strand to SEQ ID NO: 1668305
auucuugccugacuuugac

SEQ ID NO: 1668307 - RNA, 19 nt, Artificial Sequence
  Description of Artificial Sequence: Synthetic oligonucleotide
  Sense strand starting at position 348 of SEQ ID NO: 1561391
cguggugugcggcuguaau

SEQ ID NO: 1668308 - RNA, 19 nt, Artificial Sequence
  Description of Artificial Sequence: Synthetic oligonucleotide
  Antisense strand to SEQ ID NO: 1668307
auuacagccgcacaccacg

SEQ ID NO: 1668309 - RNA, 19 nt, Artificial Sequence
  Description of Artificial Sequence: Synthetic oligonucleotide
  Sense strand starting at position 398 of SEQ ID NO: 1561391
ucgcuugauccugggaaau

SEQ ID NO: 1668310 - RNA, 19 nt, Artificial Sequence
  Description of Artificial Sequence: Synthetic oligonucleotide
  Antisense strand to SEQ ID NO: 1668309
auuucccaggaucaagcga

SEQ ID NO: 1668311 - RNA, 19 nt, Artificial Sequence
  Description of Artificial Sequence: Synthetic oligonucleotide
  Sense strand starting at position 568 of SEQ ID NO: 1561391
ggagucaaaugaugauaaa

SEQ ID NO: 1668312 - RNA, 19 nt, Artificial Sequence
  Description of Artificial Sequence: Synthetic oligonucleotide
  Antisense strand to SEQ ID NO: 1668311
uuuaucaucauuugacucc

SEQ ID NO: 1668313 - RNA, 19 nt, Artificial Sequence
  Description of Artificial Sequence: Synthetic oligonucleotide
  Sense strand starting at position 589 of SEQ ID NO: 1561391
gugaaaguuccgcaguuca

SEQ ID NO: 1668314 - RNA, 19 nt, Artificial Sequence
  Description of Artificial Sequence: Synthetic oligonucleotide
  Antisense strand to SEQ ID NO: 1668313
ugaacugcggaacuuucac

SEQ ID NO: 1668315 - RNA, 19 nt, Artificial Sequence
  Description of Artificial Sequence: Synthetic oligonucleotide
  Sense strand starting at position 693 of SEQ ID NO: 1561391
cuggacuccugguauagau

SEQ ID NO: 1668316 - RNA, 19 nt, Artificial Sequence
  Description of Artificial Sequence: Synthetic oligonucleotide
  Antisense strand to SEQ ID NO: 1668315
aucuauaccaggaguccag

SEQ ID NO: 1668317 - RNA, 19 nt, Artificial Sequence
  Description of Artificial Sequence: Synthetic oligonucleotide
  Sense strand starting at position 751 of SEQ ID NO: 1561391
gcugacuaggcccacaaau

SEQ ID NO: 1668318 - RNA, 19 nt, Artificial Sequence
  Description of Artificial Sequence: Synthetic oligonucleotide
  Antisense strand to SEQ ID NO: 1668317
auuugugggccuagucagc

SEQ ID NO: 1668319 - RNA, 19 nt, Artificial Sequence
  Description of Artificial Sequence: Synthetic oligonucleotide
  Sense strand starting at position 780 of SEQ ID NO: 1561391
guggcaucuguauagaaua

SEQ ID NO: 1668320 - RNA, 19 nt, Artificial Sequence
  Description of Artificial Sequence: Synthetic oligonucleotide
  Antisense strand to SEQ ID NO: 1668319
uauucuauacagaugccac

SEQ ID NO: 1668321 - RNA, 19 nt, Artificial Sequence
  Description of Artificial Sequence: Synthetic oligonucleotide
  Sense strand starting at position 1266 of SEQ ID NO: 1561391
ugauuauugugauacuaga

SEQ ID NO: 1668322 - RNA, 19 nt, Artificial Sequence
  Description of Artificial Sequence: Synthetic oligonucleotide
  Antisense strand to SEQ ID NO: 1668321
ucuaguaucacaauaauca

SEQ ID NO: 1668323 - RNA, 19 nt, Artificial Sequence
  Description of Artificial Sequence: Synthetic oligonucleotide
  Sense strand starting at position 1322 of SEQ ID NO: 1561391
uuaagaagcucucuuggga

SEQ ID NO: 1668324 - RNA, 19 nt, Artificial Sequence
  Description of Artificial Sequence: Synthetic oligonucleotide
  Antisense strand to SEQ ID NO: 1668323
ucccaagagagcuucuuaa

SEQ ID NO: 1668325 - RNA, 19 nt, Artificial Sequence
  Description of Artificial Sequence: Synthetic oligonucleotide
  Sense strand starting at position 1353 of SEQ ID NO: 1561391
ggaacuccauucgaagaua

SEQ ID NO: 1668326 - RNA, 19 nt, Artificial Sequence
  Description of Artificial Sequence: Synthetic oligonucleotide
  Antisense strand to SEQ ID NO: 1668325
uaucuucgaauggaguucc

SEQ ID NO: 1668327 - RNA, 19 nt, Artificial Sequence
  Description of Artificial Sequence: Synthetic oligonucleotide
  Sense strand starting at position 1383 of SEQ ID NO: 1561391
uucuuaguauucuuuagca

SEQ ID NO: 1668328 - RNA, 19 nt, Artificial Sequence
  Description of Artificial Sequence: Synthetic oligonucleotide
  Antisense strand to SEQ ID NO: 1668327
ugcuaaagaauacuaagaa

SEQ ID NO: 1668329 - RNA, 19 nt, Artificial Sequence
  Description of Artificial Sequence: Synthetic oligonucleotide
  Sense strand starting at position 1385 of SEQ ID NO: 1561391
cuuaguauucuuuagcaga

SEQ ID NO: 1668330 - RNA, 19 nt, Artificial Sequence
  Description of Artificial Sequence: Synthetic oligonucleotide
  Antisense strand to SEQ ID NO: 1668329
ucugcuaaagaauacuaag

SEQ ID NO: 1668331 - RNA, 19 nt, Artificial Sequence
  Description of Artificial Sequence: Synthetic oligonucleotide
  Sense strand starting at position 1388 of SEQ ID NO: 1561391
aguauucuuuagcagaaag

SEQ ID NO: 1668332 - RNA, 19 nt, Artificial Sequence
  Description of Artificial Sequence: Synthetic oligonucleotide
  Antisense strand to SEQ ID NO: 1668331
cuuucugcuaaagaauacu

SEQ ID NO: 1668333 - RNA, 19 nt, Artificial Sequence
  Description of Artificial Sequence: Synthetic oligonucleotide
  Sense strand starting at position 1470 of SEQ ID NO: 1561391
gcaucuuuaucuuucgcca

SEQ ID NO: 1668334 - RNA, 19 nt, Artificial Sequence
  Description of Artificial Sequence: Synthetic oligonucleotide
  Antisense strand to SEQ ID NO: 1668333
uggcgaaagauaaagaugc

SEQ ID NO: 1668335 - RNA, 19 nt, Artificial Sequence
  Description of Artificial Sequence: Synthetic oligonucleotide
  Sense strand starting at position 1473 of SEQ ID NO: 1561391
ucuuuaucuuucgccauga

SEQ ID NO: 1668336 - RNA, 19 nt, Artificial Sequence
  Description of Artificial Sequence: Synthetic oligonucleotide
  Antisense strand to SEQ ID NO: 1668335
ucauggcgaaagauaaaga

SEQ ID NO: 1668337 - RNA, 19 nt, Artificial Sequence
  Description of Artificial Sequence: Synthetic oligonucleotide
  Sense strand starting at position 1474 of SEQ ID NO: 1561391
cuuuaucuuucgccaugaa

SEQ ID NO: 1668338 - RNA, 19 nt, Artificial Sequence
  Description of Artificial Sequence: Synthetic oligonucleotide
  Antisense strand to SEQ ID NO: 1668337
uucauggcgaaagauaaag

SEQ ID NO: 1668339 - RNA, 19 nt, Artificial Sequence
  Description of Artificial Sequence: Synthetic oligonucleotide
  Sense strand starting at position 1475 of SEQ ID NO: 1561391
uuuaucuuucgccaugaaa

SEQ ID NO: 1668340 - RNA, 19 nt, Artificial Sequence
  Description of Artificial Sequence: Synthetic oligonucleotide
  Antisense strand to SEQ ID NO: 1668339
uuucauggcgaaagauaaa

SEQ ID NO: 1668341 - RNA, 19 nt, Artificial Sequence
  Description of Artificial Sequence: Synthetic oligonucleotide
  Sense strand starting at position 1477 of SEQ ID NO: 1561391
uaucuuucgccaugaaagu

SEQ ID NO: 1668342 - RNA, 19 nt, Artificial Sequence
  Description of Artificial Sequence: Synthetic oligonucleotide
  Antisense strand to SEQ ID NO: 1668341
acuuucauggcgaaagaua

SEQ ID NO: 1668343 - RNA, 19 nt, Artificial Sequence
  Description of Artificial Sequence: Synthetic oligonucleotide
  Sense strand starting at position 1478 of SEQ ID NO: 1561391
aucuuucgccaugaaagua

SEQ ID NO: 1668344 - RNA, 19 nt, Artificial Sequence
  Description of Artificial Sequence: Synthetic oligonucleotide
  Antisense strand to SEQ ID NO: 1668343
uacuuucauggcgaaagau

SEQ ID NO: 1668345 - RNA, 19 nt, Artificial Sequence
  Description of Artificial Sequence: Synthetic oligonucleotide
  Sense strand starting at position 1486 of SEQ ID NO: 1561391
ccaugaaaguaauggucaa

SEQ ID NO: 1668346 - RNA, 19 nt, Artificial Sequence
  Description of Artificial Sequence: Synthetic oligonucleotide
  Antisense strand to SEQ ID NO: 1668345
uugaccauuacuuucaugg

SEQ ID NO: 1668347 - RNA, 19 nt, Artificial Sequence
  Description of Artificial Sequence: Synthetic oligonucleotide
  Sense strand starting at position 1544 of SEQ ID NO: 1561391
gaugaaacauucguuugca

SEQ ID NO: 1668348 - RNA, 19 nt, Artificial Sequence
  Description of Artificial Sequence: Synthetic oligonucleotide
  Antisense strand to SEQ ID NO: 1668347
ugcaaacgaauguuucauc

SEQ ID NO: 1668349 - RNA, 19 nt, Artificial Sequence
  Description of Artificial Sequence: Synthetic oligonucleotide
  Sense strand starting at position 1545 of SEQ ID NO: 1561391
augaaacauucguuugcau

SEQ ID NO: 1668350 - RNA, 19 nt, Artificial Sequence
  Description of Artificial Sequence: Synthetic oligonucleotide
  Antisense strand to SEQ ID NO: 1668349
augcaaacgaauguuucau

SEQ ID NO: 1668351 - RNA, 19 nt, Artificial Sequence
  Description of Artificial Sequence: Synthetic oligonucleotide
  Sense strand starting at position 1547 of SEQ ID NO: 1561391
gaaacauucguuugcauaa

SEQ ID NO: 1668352 - RNA, 19 nt, Artificial Sequence
  Description of Artificial Sequence: Synthetic oligonucleotide
  Antisense strand to SEQ ID NO: 1668351
uuaugcaaacgaauguuuc

SEQ ID NO: 1668353 - RNA, 19 nt, Artificial Sequence
  Description of Artificial Sequence: Synthetic oligonucleotide
  Sense strand starting at position 1548 of SEQ ID NO: 1561391
aaacauucguuugcauaag

SEQ ID NO: 1668354 - RNA, 19 nt, Artificial Sequence
  Description of Artificial Sequence: Synthetic oligonucleotide
  Antisense strand to SEQ ID NO: 1668353
cuuaugcaaacgaauguuu

SEQ ID NO: 1668355 - RNA, 19 nt, Artificial Sequence
  Description of Artificial Sequence: Synthetic oligonucleotide
  Sense strand starting at position 1549 of SEQ ID NO: 1561391
aacauucguuugcauaaga

SEQ ID NO: 1668356 - RNA, 19 nt, Artificial Sequence
  Description of Artificial Sequence: Synthetic oligonucleotide
  Antisense strand to SEQ ID NO: 1668355
ucuuaugcaaacgaauguu

SEQ ID NO: 1668357 - RNA, 19 nt, Artificial Sequence
  Description of Artificial Sequence: Synthetic oligonucleotide
  Sense strand starting at position 1554 of SEQ ID NO: 1561391
ucguuugcauaagagaaga

SEQ ID NO: 1668358 - RNA, 19 nt, Artificial Sequence
  Description of Artificial Sequence: Synthetic oligonucleotide
  Antisense strand to SEQ ID NO: 1668357
ucuucucuuaugcaaacga

SEQ ID NO: 1668359 - RNA, 19 nt, Artificial Sequence
  Description of Artificial Sequence: Synthetic oligonucleotide
  Sense strand starting at position 1602 of SEQ ID NO: 1561391
cccagugcucaccggaaca

SEQ ID NO: 1668360 - RNA, 19 nt, Artificial Sequence
  Description of Artificial Sequence: Synthetic oligonucleotide
  Antisense strand to SEQ ID NO: 1668359
uguuccggugagcacuggg

SEQ ID NO: 1668361 - RNA, 19 nt, Artificial Sequence
  Description of Artificial Sequence: Synthetic oligonucleotide
  Sense strand starting at position 2063 of SEQ ID NO: 1561391
ggguuucugccguguaaua

SEQ ID NO: 1668362 - RNA, 19 nt, Artificial Sequence
  Description of Artificial Sequence: Synthetic oligonucleotide
  Antisense strand to SEQ ID NO: 1668361
uauuacacggcagaaaccc

SEQ ID NO: 1668363 - RNA, 19 nt, Artificial Sequence
  Description of Artificial Sequence: Synthetic oligonucleotide
  Sense strand starting at position 2064 of SEQ ID NO: 1561391
gguuucugccguguaauac

SEQ ID NO: 1668364 - RNA, 19 nt, Artificial Sequence
  Description of Artificial Sequence: Synthetic oligonucleotide
  Antisense strand to SEQ ID NO: 1668363
guauuacacggcagaaacc

SEQ ID NO: 1668365 - RNA, 19 nt, Artificial Sequence
  Description of Artificial Sequence: Synthetic oligonucleotide
  Sense strand starting at position 2076 of SEQ ID NO: 1561391
guaauaccuccucgaggca

SEQ ID NO: 1668366 - RNA, 19 nt, Artificial Sequence
  Description of Artificial Sequence: Synthetic oligonucleotide
  Antisense strand to SEQ ID NO: 1668365
ugccucgaggagguauuac

SEQ ID NO: 1668367 - RNA, 19 nt, Artificial Sequence
  Description of Artificial Sequence: Synthetic oligonucleotide
  Sense strand starting at position 2330 of SEQ ID NO: 1561391
auguguuaugcauguagaa

SEQ ID NO: 1668368 - RNA, 19 nt, Artificial Sequence
  Description of Artificial Sequence: Synthetic oligonucleotide
  Antisense strand to SEQ ID NO: 1668367
uucuacaugcauaacacau

SEQ ID NO: 1668369 - RNA, 19 nt, Artificial Sequence
  Description of Artificial Sequence: Synthetic oligonucleotide
  Sense strand starting at position 2882 of SEQ ID NO: 1561391
acauucuucuucuggacga

SEQ ID NO: 1668370 - RNA, 19 nt, Artificial Sequence
  Description of Artificial Sequence: Synthetic oligonucleotide
  Antisense strand to SEQ ID NO: 1668369
ucguccagaagaagaaugu

SEQ ID NO: 1668371 - RNA, 19 nt, Artificial Sequence
  Description of Artificial Sequence: Synthetic oligonucleotide
  Sense strand starting at position 2884 of SEQ ID NO: 1561391
auucuucuucuggacgagu

SEQ ID NO: 1668372 - RNA, 19 nt, Artificial Sequence
  Description of Artificial Sequence: Synthetic oligonucleotide
  Antisense strand to SEQ ID NO: 1668371
acucguccagaagaagaau

SEQ ID NO: 1668373 - RNA, 19 nt, Artificial Sequence
  Description of Artificial Sequence: Synthetic oligonucleotide
  Sense strand starting at position 3110 of SEQ ID NO: 1561391
cauggauguguguaacauu

SEQ ID NO: 1668374 - RNA, 19 nt, Artificial Sequence
  Description of Artificial Sequence: Synthetic oligonucleotide
  Antisense strand to SEQ ID NO: 1668373
aauguuacacacauccaug

SEQ ID NO: 1668375 - RNA, 19 nt, Artificial Sequence
  Description of Artificial Sequence: Synthetic oligonucleotide
  Sense strand starting at position 3119 of SEQ ID NO: 1561391
guguaacauuugguuccga

SEQ ID NO: 1668376 - RNA, 19 nt, Artificial Sequence
  Description of Artificial Sequence: Synthetic oligonucleotide
  Antisense strand to SEQ ID NO: 1668375
ucggaaccaaauguuacac

SEQ ID NO: 1668377 - RNA, 19 nt, Artificial Sequence
  Description of Artificial Sequence: Synthetic oligonucleotide
  Sense strand starting at position 3124 of SEQ ID NO: 1561391
acauuugguuccgaaaccu

SEQ ID NO: 1668378 - RNA, 19 nt, Artificial Sequence
  Description of Artificial Sequence: Synthetic oligonucleotide
  Antisense strand to SEQ ID NO: 1668377
agguuucggaaccaaaugu

SEQ ID NO: 1668379 - RNA, 19 nt, Artificial Sequence
  Description of Artificial Sequence: Synthetic oligonucleotide
  Sense strand starting at position 3435 of SEQ ID NO: 1561391
ggcuaaucacuguagggau

SEQ ID NO: 1668380 - RNA, 19 nt, Artificial Sequence
  Description of Artificial Sequence: Synthetic oligonucleotide
  Antisense strand to SEQ ID NO: 1668379
aucccuacagugauuagcc

SEQ ID NO: 1668381 - RNA, 19 nt, Artificial Sequence
  Description of Artificial Sequence: Synthetic oligonucleotide
  Sense strand starting at position 3448 of SEQ ID NO: 1561391
agggauaccugccugauua

SEQ ID NO: 1668382 - RNA, 19 nt, Artificial Sequence
  Description of Artificial Sequence: Synthetic oligonucleotide
  Antisense strand to SEQ ID NO: 1668381
uaaucaggcagguaucccu

SEQ ID NO: 1668383 - RNA, 19 nt, Artificial Sequence
  Description of Artificial Sequence: Synthetic oligonucleotide
  Sense strand starting at position 3803 of SEQ ID NO: 1561391
guacaaacuugacaauggu

SEQ ID NO: 1668384 - RNA, 19 nt, Artificial Sequence
  Description of Artificial Sequence: Synthetic oligonucleotide
  Antisense strand to SEQ ID NO: 1668383
accauugucaaguuuguac

SEQ ID NO: 1668385 - RNA, 19 nt, Artificial Sequence
  Description of Artificial Sequence: Synthetic oligonucleotide
  Sense strand starting at position 3954 of SEQ ID NO: 1561391
cuuugcucccaaugugacu

SEQ ID NO: 1668386 - RNA, 19 nt, Artificial Sequence
  Description of Artificial Sequence: Synthetic oligonucleotide
  Antisense strand to SEQ ID NO: 1668385
agucacauugggagcaaag

SEQ ID NO: 1668387 - RNA, 19 nt, Artificial Sequence
  Description of Artificial Sequence: Synthetic oligonucleotide
  Sense strand starting at position 366 of SEQ ID NO: 1561392
cguggugugcggcuguaau

SEQ ID NO: 1668388 - RNA, 19 nt, Artificial Sequence
  Description of Artificial Sequence: Synthetic oligonucleotide
  Antisense strand to SEQ ID NO: 1668387
auuacagccgcacaccacg

SEQ ID NO: 1668389 - RNA, 19 nt, Artificial Sequence
  Description of Artificial Sequence: Synthetic oligonucleotide
  Sense strand starting at position 416 of SEQ ID NO: 1561392
ucgcuugauccugggaaau

SEQ ID NO: 1668390 - RNA, 19 nt, Artificial Sequence
  Description of Artificial Sequence: Synthetic oligonucleotide
  Antisense strand to SEQ ID NO: 1668389
auuucccaggaucaagcga

SEQ ID NO: 1668391 - RNA, 19 nt, Artificial Sequence
  Description of Artificial Sequence: Synthetic oligonucleotide
  Sense strand starting at position 586 of SEQ ID NO: 1561392
ggagucaaaugaugauaaa

SEQ ID NO: 1668392 - RNA, 19 nt, Artificial Sequence
  Description of Artificial Sequence: Synthetic oligonucleotide
  Antisense strand to SEQ ID NO: 1668391
uuuaucaucauuugacucc

SEQ ID NO: 1668393 - RNA, 19 nt, Artificial Sequence
  Description of Artificial Sequence: Synthetic oligonucleotide
  Sense strand starting at position 607 of SEQ ID NO: 1561392
gugaaaguuccgcaguuca

SEQ ID NO: 1668394 - RNA, 19 nt, Artificial Sequence
  Description of Artificial Sequence: Synthetic oligonucleotide
  Antisense strand to SEQ ID NO: 1668393
ugaacugcggaacuuucac

SEQ ID NO: 1668395 - RNA, 19 nt, Artificial Sequence
  Description of Artificial Sequence: Synthetic oligonucleotide
  Sense strand starting at position 711 of SEQ ID NO: 1561392
cuggacuccugguauagau

SEQ ID NO: 1668396 - RNA, 19 nt, Artificial Sequence
  Description of Artificial Sequence: Synthetic oligonucleotide
  Antisense strand to SEQ ID NO: 1668395
aucuauaccaggaguccag

SEQ ID NO: 1668397 - RNA, 19 nt, Artificial Sequence
  Description of Artificial Sequence: Synthetic oligonucleotide
  Sense strand starting at position 769 of SEQ ID NO: 1561392
gcugacuaggcccacaaau

SEQ ID NO: 1668398 - RNA, 19 nt, Artificial Sequence
  Description of Artificial Sequence: Synthetic oligonucleotide
  Antisense strand to SEQ ID NO: 1668397
auuugugggccuagucagc

SEQ ID NO: 1668399 - RNA, 19 nt, Artificial Sequence
  Description of Artificial Sequence: Synthetic oligonucleotide
  Sense strand starting at position 798 of SEQ ID NO: 1561392
guggcaucuguauagaaua

SEQ ID NO: 1668400 - RNA, 19 nt, Artificial Sequence
  Description of Artificial Sequence: Synthetic oligonucleotide
  Antisense strand to SEQ ID NO: 1668399
uauucuauacagaugccac

SEQ ID NO: 1668401 - RNA, 19 nt, Artificial Sequence
  Description of Artificial Sequence: Synthetic oligonucleotide
  Sense strand starting at position 1284 of SEQ ID NO: 1561392
ugauuauugugauacuaga

SEQ ID NO: 1668402 - RNA, 19 nt, Artificial Sequence
  Description of Artificial Sequence: Synthetic oligonucleotide
  Antisense strand to SEQ ID NO: 1668401
ucuaguaucacaauaauca

SEQ ID NO: 1668403 - RNA, 19 nt, Artificial Sequence
  Description of Artificial Sequence: Synthetic oligonucleotide
  Sense strand starting at position 1340 of SEQ ID NO: 1561392
uuaagaagcucucuuggga

SEQ ID NO: 1668404 - RNA, 19 nt, Artificial Sequence
  Description of Artificial Sequence: Synthetic oligonucleotide
  Antisense strand to SEQ ID NO: 1668403
ucccaagagagcuucuuaa

SEQ ID NO: 1668405 - RNA, 19 nt, Artificial Sequence
  Description of Artificial Sequence: Synthetic oligonucleotide
  Sense strand starting at position 1371 of SEQ ID NO: 1561392
ggaacuccauucgaagaua

SEQ ID NO: 1668406 - RNA, 19 nt, Artificial Sequence
  Description of Artificial Sequence: Synthetic oligonucleotide
  Antisense strand to SEQ ID NO: 1668405
uaucuucgaauggaguucc

SEQ ID NO: 1668407 - RNA, 19 nt, Artificial Sequence
  Description of Artificial Sequence: Synthetic oligonucleotide
  Sense strand starting at position 1401 of SEQ ID NO: 1561392
uucuuaguauucuuuagca

SEQ ID NO: 1668408 - RNA, 19 nt, Artificial Sequence
  Description of Artificial Sequence: Synthetic oligonucleotide
  Antisense strand to SEQ ID NO: 1668407
ugcuaaagaauacuaagaa

SEQ ID NO: 1668409 - RNA, 19 nt, Artificial Sequence
  Description of Artificial Sequence: Synthetic oligonucleotide
  Sense strand starting at position 1403 of SEQ ID NO: 1561392
cuuaguauucuuuagcaga

SEQ ID NO: 1668410 - RNA, 19 nt, Artificial Sequence
  Description of Artificial Sequence: Synthetic oligonucleotide
  Antisense strand to SEQ ID NO: 1668409
ucugcuaaagaauacuaag

SEQ ID NO: 1668411 - RNA, 19 nt, Artificial Sequence
  Description of Artificial Sequence: Synthetic oligonucleotide
  Sense strand starting at position 1406 of SEQ ID NO: 1561392
aguauucuuuagcagaaag

SEQ ID NO: 1668412 - RNA, 19 nt, Artificial Sequence
  Description of Artificial Sequence: Synthetic oligonucleotide
  Antisense strand to SEQ ID NO: 1668411
cuuucugcuaaagaauacu

SEQ ID NO: 1668413 - RNA, 19 nt, Artificial Sequence
  Description of Artificial Sequence: Synthetic oligonucleotide
  Sense strand starting at position 1488 of SEQ ID NO: 1561392
gcaucuuuaucuuucgcca

SEQ ID NO: 1668414 - RNA, 19 nt, Artificial Sequence
  Description of Artificial Sequence: Synthetic oligonucleotide
  Antisense strand to SEQ ID NO: 1668413
uggcgaaagauaaagaugc

SEQ ID NO: 1668415 - RNA, 19 nt, Artificial Sequence
  Description of Artificial Sequence: Synthetic oligonucleotide
  Sense strand starting at position 1491 of SEQ ID NO: 1561392
ucuuuaucuuucgccauga

SEQ ID NO: 1668416 - RNA, 19 nt, Artificial Sequence
  Description of Artificial Sequence: Synthetic oligonucleotide
  Antisense strand to SEQ ID NO: 1668415
ucauggcgaaagauaaaga

SEQ ID NO: 1668417 - RNA, 19 nt, Artificial Sequence
  Description of Artificial Sequence: Synthetic oligonucleotide
  Sense strand starting at position 1492 of SEQ ID NO: 1561392
cuuuaucuuucgccaugaa

SEQ ID NO: 1668418 - RNA, 19 nt, Artificial Sequence
  Description of Artificial Sequence: Synthetic oligonucleotide
  Antisense strand to SEQ ID NO: 1668417
uucauggcgaaagauaaag

SEQ ID NO: 1668419 - RNA, 19 nt, Artificial Sequence
  Description of Artificial Sequence: Synthetic oligonucleotide
  Sense strand starting at position 1493 of SEQ ID NO: 1561392
uuuaucuuucgccaugaaa

SEQ ID NO: 1668420 - RNA, 19 nt, Artificial Sequence
  Description of Artificial Sequence: Synthetic oligonucleotide
  Antisense strand to SEQ ID NO: 1668419
uuucauggcgaaagauaaa

SEQ ID NO: 1668421 - RNA, 19 nt, Artificial Sequence
  Description of Artificial Sequence: Synthetic oligonucleotide
  Sense strand starting at position 1495 of SEQ ID NO: 1561392
uaucuuucgccaugaaagu

SEQ ID NO: 1668422 - RNA, 19 nt, Artificial Sequence
  Description of Artificial Sequence: Synthetic oligonucleotide
  Antisense strand to SEQ ID NO: 1668421
acuuucauggcgaaagaua

SEQ ID NO: 1668423 - RNA, 19 nt, Artificial Sequence
  Description of Artificial Sequence: Synthetic oligonucleotide
  Sense strand starting at position 1496 of SEQ ID NO: 1561392
aucuuucgccaugaaagua

SEQ ID NO: 1668424 - RNA, 19 nt, Artificial Sequence
  Description of Artificial Sequence: Synthetic oligonucleotide
  Antisense strand to SEQ ID NO: 1668423
uacuuucauggcgaaagau

SEQ ID NO: 1668425 - RNA, 19 nt, Artificial Sequence
  Description of Artificial Sequence: Synthetic oligonucleotide
  Sense strand starting at position 1504 of SEQ ID NO: 1561392
ccaugaaaguaauggucaa

SEQ ID NO: 1668426 - RNA, 19 nt, Artificial Sequence
  Description of Artificial Sequence: Synthetic oligonucleotide
  Antisense strand to SEQ ID NO: 1668425
uugaccauuacuuucaugg

SEQ ID NO: 1668427 - RNA, 19 nt, Artificial Sequence
  Description of Artificial Sequence: Synthetic oligonucleotide
  Sense strand starting at position 1562 of SEQ ID NO: 1561392
gaugaaacauucguuugca

SEQ ID NO: 1668428 - RNA, 19 nt, Artificial Sequence
  Description of Artificial Sequence: Synthetic oligonucleotide
  Antisense strand to SEQ ID NO: 1668427
ugcaaacgaauguuucauc

SEQ ID NO: 1668429 - RNA, 19 nt, Artificial Sequence
  Description of Artificial Sequence: Synthetic oligonucleotide
  Sense strand starting at position 1563 of SEQ ID NO: 1561392
augaaacauucguuugcau

SEQ ID NO: 1668430 - RNA, 19 nt, Artificial Sequence
  Description of Artificial Sequence: Synthetic oligonucleotide
  Antisense strand to SEQ ID NO: 1668429
augcaaacgaauguuucau

SEQ ID NO: 1668431 - RNA, 19 nt, Artificial Sequence
  Description of Artificial Sequence: Synthetic oligonucleotide
  Sense strand starting at position 1565 of SEQ ID NO: 1561392
gaaacauucguuugcauaa

SEQ ID NO: 1668432 - RNA, 19 nt, Artificial Sequence
  Description of Artificial Sequence: Synthetic oligonucleotide
  Antisense strand to SEQ ID NO: 1668431
uuaugcaaacgaauguuuc

SEQ ID NO: 1668433 - RNA, 19 nt, Artificial Sequence
  Description of Artificial Sequence: Synthetic oligonucleotide
  Sense strand starting at position 1566 of SEQ ID NO: 1561392
aaacauucguuugcauaag

SEQ ID NO: 1668434 - RNA, 19 nt, Artificial Sequence
  Description of Artificial Sequence: Synthetic oligonucleotide
  Antisense strand to SEQ ID NO: 1668433
cuuaugcaaacgaauguuu

SEQ ID NO: 1668435 - RNA, 19 nt, Artificial Sequence
  Description of Artificial Sequence: Synthetic oligonucleotide
  Sense strand starting at position 1567 of SEQ ID NO: 1561392
aacauucguuugcauaaga

SEQ ID NO: 1668436 - RNA, 19 nt, Artificial Sequence
  Description of Artificial Sequence: Synthetic oligonucleotide
  Antisense strand to SEQ ID NO: 1668435
ucuuaugcaaacgaauguu

SEQ ID NO: 1668437 - RNA, 19 nt, Artificial Sequence
  Description of Artificial Sequence: Synthetic oligonucleotide
  Sense strand starting at position 1572 of SEQ ID NO: 1561392
ucguuugcauaagagaaga

SEQ ID NO: 1668438 - RNA, 19 nt, Artificial Sequence
  Description of Artificial Sequence: Synthetic oligonucleotide
  Antisense strand to SEQ ID NO: 1668437
ucuucucuuaugcaaacga

SEQ ID NO: 1668439 - RNA, 19 nt, Artificial Sequence
  Description of Artificial Sequence: Synthetic oligonucleotide
  Sense strand starting at position 1620 of SEQ ID NO: 1561392
cccagugcucaccggaaca

SEQ ID NO: 1668440 - RNA, 19 nt, Artificial Sequence
  Description of Artificial Sequence: Synthetic oligonucleotide
  Antisense strand to SEQ ID NO: 1668439
uguuccggugagcacuggg

SEQ ID NO: 1668441 - RNA, 19 nt, Artificial Sequence
  Description of Artificial Sequence: Synthetic oligonucleotide
  Sense strand starting at position 2081 of SEQ ID NO: 1561392
ggguuucugccguguaaua

SEQ ID NO: 1668442 - RNA, 19 nt, Artificial Sequence
  Description of Artificial Sequence: Synthetic oligonucleotide
  Antisense strand to SEQ ID NO: 1668441
uauuacacggcagaaaccc

SEQ ID NO: 1668443 - RNA, 19 nt, Artificial Sequence
  Description of Artificial Sequence: Synthetic oligonucleotide
  Sense strand starting at position 2082 of SEQ ID NO: 1561392
gguuucugccguguaauac

SEQ ID NO: 1668444 - RNA, 19 nt, Artificial Sequence
  Description of Artificial Sequence: Synthetic oligonucleotide
  Antisense strand to SEQ ID NO: 1668443
guauuacacggcagaaacc

SEQ ID NO: 1668445 - RNA, 19 nt, Artificial Sequence
  Description of Artificial Sequence: Synthetic oligonucleotide
  Sense strand starting at position 2094 of SEQ ID NO: 1561392
guaauaccuccucgaggca

SEQ ID NO: 1668446 - RNA, 19 nt, Artificial Sequence
  Description of Artificial Sequence: Synthetic oligonucleotide
  Antisense strand to SEQ ID NO: 1668445
ugccucgaggagguauuac

SEQ ID NO: 1668447 - RNA, 19 nt, Artificial Sequence
  Description of Artificial Sequence: Synthetic oligonucleotide
  Sense strand starting at position 2348 of SEQ ID NO: 1561392
auguguuaugcauguagaa

SEQ ID NO: 1668448 - RNA, 19 nt, Artificial Sequence
  Description of Artificial Sequence: Synthetic oligonucleotide
  Antisense strand to SEQ ID NO: 1668447
uucuacaugcauaacacau

SEQ ID NO: 1668449 - RNA, 19 nt, Artificial Sequence
  Description of Artificial Sequence: Synthetic oligonucleotide
  Sense strand starting at position 2900 of SEQ ID NO: 1561392
acauucuucuucuggacga

SEQ ID NO: 1668450 - RNA, 19 nt, Artificial Sequence
  Description of Artificial Sequence: Synthetic oligonucleotide
  Antisense strand to SEQ ID NO: 1668449
ucguccagaagaagaaugu

SEQ ID NO: 1668451 - RNA, 19 nt, Artificial Sequence
  Description of Artificial Sequence: Synthetic oligonucleotide
  Sense strand starting at position 2902 of SEQ ID NO: 1561392
auucuucuucuggacgagu

SEQ ID NO: 1668452 - RNA, 19 nt, Artificial Sequence
  Description of Artificial Sequence: Synthetic oligonucleotide
  Antisense strand to SEQ ID NO: 1668451
acucguccagaagaagaau

SEQ ID NO: 1668453 - RNA, 19 nt, Artificial Sequence
  Description of Artificial Sequence: Synthetic oligonucleotide
  Sense strand starting at position 3128 of SEQ ID NO: 1561392
cauggauguguguaacauu

SEQ ID NO: 1668454 - RNA, 19 nt, Artificial Sequence
  Description of Artificial Sequence: Synthetic oligonucleotide
  Antisense strand to SEQ ID NO: 1668453
aauguuacacacauccaug

SEQ ID NO: 1668455 - RNA, 19 nt, Artificial Sequence
  Description of Artificial Sequence: Synthetic oligonucleotide
  Sense strand starting at position 3137 of SEQ ID NO: 1561392
guguaacauuugguuccga

SEQ ID NO: 1668456 - RNA, 19 nt, Artificial Sequence
  Description of Artificial Sequence: Synthetic oligonucleotide
  Antisense strand to SEQ ID NO: 1668455
ucggaaccaaauguuacac

SEQ ID NO: 1668457 - RNA, 19 nt, Artificial Sequence
  Description of Artificial Sequence: Synthetic oligonucleotide
  Sense strand starting at position 3142 of SEQ ID NO: 1561392
acauuugguuccgaaaccu

SEQ ID NO: 1668458 - RNA, 19 nt, Artificial Sequence
  Description of Artificial Sequence: Synthetic oligonucleotide
  Antisense strand to SEQ ID NO: 1668457
agguuucggaaccaaaugu

SEQ ID NO: 1668459 - RNA, 19 nt, Artificial Sequence
  Description of Artificial Sequence: Synthetic oligonucleotide
  Sense strand starting at position 3453 of SEQ ID NO: 1561392
ggcuaaucacuguagggau

SEQ ID NO: 1668460 - RNA, 19 nt, Artificial Sequence
  Description of Artificial Sequence: Synthetic oligonucleotide
  Antisense strand to SEQ ID NO: 1668459
aucccuacagugauuagcc

SEQ ID NO: 1668461 - RNA, 19 nt, Artificial Sequence
  Description of Artificial Sequence: Synthetic oligonucleotide
  Sense strand starting at position 3466 of SEQ ID NO: 1561392
agggauaccugccugauua

SEQ ID NO: 1668462 - RNA, 19 nt, Artificial Sequence
  Description of Artificial Sequence: Synthetic oligonucleotide
  Antisense strand to SEQ ID NO: 1668461
uaaucaggcagguaucccu

SEQ ID NO: 1668463 - RNA, 19 nt, Artificial Sequence
  Description of Artificial Sequence: Synthetic oligonucleotide
  Sense strand starting at position 3821 of SEQ ID NO: 1561392
guacaaacuugacaauggu

SEQ ID NO: 1668464 - RNA, 19 nt, Artificial Sequence
  Description of Artificial Sequence: Synthetic oligonucleotide
  Antisense strand to SEQ ID NO: 1668463
accauugucaaguuuguac

SEQ ID NO: 1668465 - RNA, 19 nt, Artificial Sequence
  Description of Artificial Sequence: Synthetic oligonucleotide
  Sense strand starting at position 3972 of SEQ ID NO: 1561392
cuuugcucccaaugugacu

SEQ ID NO: 1668466 - RNA, 19 nt, Artificial Sequence
  Description of Artificial Sequence: Synthetic oligonucleotide
  Antisense strand to SEQ ID NO: 1668465
agucacauugggagcaaag

SEQ ID NO: 1668467 - RNA, 19 nt, Artificial Sequence
  Description of Artificial Sequence: Synthetic oligonucleotide
  Sense strand starting at position 526 of SEQ ID NO: 1561393
gcaguagggugaucuguag

SEQ ID NO: 1668468 - RNA, 19 nt, Artificial Sequence
  Description of Artificial Sequence: Synthetic oligonucleotide
  Antisense strand to SEQ ID NO: 1668467
cuacagaucacccuacugc

SEQ ID NO: 1668469 - RNA, 19 nt, Artificial Sequence
  Description of Artificial Sequence: Synthetic oligonucleotide
  Sense strand starting at position 532 of SEQ ID NO: 1561393
gggugaucuguaggaaagg

SEQ ID NO: 1668470 - RNA, 19 nt, Artificial Sequence
  Description of Artificial Sequence: Synthetic oligonucleotide
  Antisense strand to SEQ ID NO: 1668469
ccuuuccuacagaucaccc

SEQ ID NO: 1668471 - RNA, 19 nt, Artificial Sequence
  Description of Artificial Sequence: Synthetic oligonucleotide
  Sense strand starting at position 595 of SEQ ID NO: 1561393
gagguuagcucacuguaac

SEQ ID NO: 1668472 - RNA, 19 nt, Artificial Sequence
  Description of Artificial Sequence: Synthetic oligonucleotide
  Antisense strand to SEQ ID NO: 1668471
guuacagugagcuaaccuc

SEQ ID NO: 1668473 - RNA, 19 nt, Artificial Sequence
  Description of Artificial Sequence: Synthetic oligonucleotide
  Sense strand starting at position 618 of SEQ ID NO: 1561393
aacuccugugcucaaggua

SEQ ID NO: 1668474 - RNA, 19 nt, Artificial Sequence
  Description of Artificial Sequence: Synthetic oligonucleotide
  Antisense strand to SEQ ID NO: 1668473
uaccuugagcacaggaguu

SEQ ID NO: 1668475 - RNA, 19 nt, Artificial Sequence
  Description of Artificial Sequence: Synthetic oligonucleotide
  Sense strand starting at position 849 of SEQ ID NO: 1561393
agcuauguuccaugugaua

SEQ ID NO: 1668476 - RNA, 19 nt, Artificial Sequence
  Description of Artificial Sequence: Synthetic oligonucleotide
  Antisense strand to SEQ ID NO: 1668475
uaucacauggaacauagcu

SEQ ID NO: 1668477 - RNA, 19 nt, Artificial Sequence
  Description of Artificial Sequence: Synthetic oligonucleotide
  Sense strand starting at position 861 of SEQ ID NO: 1561393
ugugauauuugggacauac

SEQ ID NO: 1668478 - RNA, 19 nt, Artificial Sequence
  Description of Artificial Sequence: Synthetic oligonucleotide
  Antisense strand to SEQ ID NO: 1668477
guaugucccaaauaucaca

SEQ ID NO: 1668479 - RNA, 19 nt, Artificial Sequence
  Description of Artificial Sequence: Synthetic oligonucleotide
  Sense strand starting at position 903 of SEQ ID NO: 1561393
ggauauaauuguuuaucug

SEQ ID NO: 1668480 - RNA, 19 nt, Artificial Sequence
  Description of Artificial Sequence: Synthetic oligonucleotide
  Antisense strand to SEQ ID NO: 1668479
cagauaaacaauuauaucc

SEQ ID NO: 1668481 - RNA, 19 nt, Artificial Sequence
  Description of Artificial Sequence: Synthetic oligonucleotide
  Sense strand starting at position 980 of SEQ ID NO: 1561393
ucaagacauucccugaagu

SEQ ID NO: 1668482 - RNA, 19 nt, Artificial Sequence
  Description of Artificial Sequence: Synthetic oligonucleotide
  Antisense strand to SEQ ID NO: 1668481
acuucagggaaugucuuga

SEQ ID NO: 1668483 - RNA, 19 nt, Artificial Sequence
  Description of Artificial Sequence: Synthetic oligonucleotide
  Sense strand starting at position 1061 of SEQ ID NO: 1561393
cagaguauuccagacguca

SEQ ID NO: 1668484 - RNA, 19 nt, Artificial Sequence
  Description of Artificial Sequence: Synthetic oligonucleotide
  Antisense strand to SEQ ID NO: 1668483
ugacgucuggaauacucug

SEQ ID NO: 1668485 - RNA, 19 nt, Artificial Sequence
  Description of Artificial Sequence: Synthetic oligonucleotide
  Sense strand starting at position 1063 of SEQ ID NO: 1561393
gaguauuccagacgucagg

SEQ ID NO: 1668486 - RNA, 19 nt, Artificial Sequence
  Description of Artificial Sequence: Synthetic oligonucleotide
  Antisense strand to SEQ ID NO: 1668485
ccugacgucuggaauacuc

SEQ ID NO: 1668487 - RNA, 19 nt, Artificial Sequence
  Description of Artificial Sequence: Synthetic oligonucleotide
  Sense strand starting at position 1185 of SEQ ID NO: 1561393
agcagucaauucccaagau

SEQ ID NO: 1668488 - RNA, 19 nt, Artificial Sequence
  Description of Artificial Sequence: Synthetic oligonucleotide
  Antisense strand to SEQ ID NO: 1668487
aucuugggaauugacugcu

SEQ ID NO: 1668489 - RNA, 19 nt, Artificial Sequence
  Description of Artificial Sequence: Synthetic oligonucleotide
  Sense strand starting at position 1230 of SEQ ID NO: 1561393
guuccaaugcucgagcaaa

SEQ ID NO: 1668490 - RNA, 19 nt, Artificial Sequence
  Description of Artificial Sequence: Synthetic oligonucleotide
  Antisense strand to SEQ ID NO: 1668489
uuugcucgagcauuggaac

SEQ ID NO: 1668491 - RNA, 19 nt, Artificial Sequence
  Description of Artificial Sequence: Synthetic oligonucleotide
  Sense strand starting at position 1397 of SEQ ID NO: 1561393
gcggcaggugugggauaaa

SEQ ID NO: 1668492 - RNA, 19 nt, Artificial Sequence
  Description of Artificial Sequence: Synthetic oligonucleotide
  Antisense strand to SEQ ID NO: 1668491
uuuaucccacaccugccgc

SEQ ID NO: 1668493 - RNA, 19 nt, Artificial Sequence
  Description of Artificial Sequence: Synthetic oligonucleotide
  Sense strand starting at position 1441 of SEQ ID NO: 1561393
ggacacucuuucccaggau

SEQ ID NO: 1668494 - RNA, 19 nt, Artificial Sequence
  Description of Artificial Sequence: Synthetic oligonucleotide
  Antisense strand to SEQ ID NO: 1668493
auccugggaaagagugucc

SEQ ID NO: 1668495 - RNA, 19 nt, Artificial Sequence
  Description of Artificial Sequence: Synthetic oligonucleotide
  Sense strand starting at position 2064 of SEQ ID NO: 1561393
gccugcuuauuugcauaau

SEQ ID NO: 1668496 - RNA, 19 nt, Artificial Sequence
  Description of Artificial Sequence: Synthetic oligonucleotide
  Antisense strand to SEQ ID NO: 1668495
auuaugcaaauaagcaggc

SEQ ID NO: 1668497 - RNA, 19 nt, Artificial Sequence
  Description of Artificial Sequence: Synthetic oligonucleotide
  Sense strand starting at position 2119 of SEQ ID NO: 1561393
aggagugauuugcauauuc

SEQ ID NO: 1668498 - RNA, 19 nt, Artificial Sequence
  Description of Artificial Sequence: Synthetic oligonucleotide
  Antisense strand to SEQ ID NO: 1668497
gaauaugcaaaucacuccu

SEQ ID NO: 1668499 - RNA, 19 nt, Artificial Sequence
  Description of Artificial Sequence: Synthetic oligonucleotide
  Sense strand starting at position 2158 of SEQ ID NO: 1561393
gagcgcagugauuagcaua

SEQ ID NO: 1668500 - RNA, 19 nt, Artificial Sequence
  Description of Artificial Sequence: Synthetic oligonucleotide
  Antisense strand to SEQ ID NO: 1668499
uaugcuaaucacugcgcuc

SEQ ID NO: 1668501 - RNA, 19 nt, Artificial Sequence
  Description of Artificial Sequence: Synthetic oligonucleotide
  Sense strand starting at position 2310 of SEQ ID NO: 1561393
gauaaagguuuauugaucu

SEQ ID NO: 1668502 - RNA, 19 nt, Artificial Sequence
  Description of Artificial Sequence: Synthetic oligonucleotide
  Antisense strand to SEQ ID NO: 1668501
agaucaauaaaccuuuauc

SEQ ID NO: 1668503 - RNA, 19 nt, Artificial Sequence
  Description of Artificial Sequence: Synthetic oligonucleotide
  Sense strand starting at position 2317 of SEQ ID NO: 1561393
guuuauugaucuccuaggu

SEQ ID NO: 1668504 - RNA, 19 nt, Artificial Sequence
  Description of Artificial Sequence: Synthetic oligonucleotide
  Antisense strand to SEQ ID NO: 1668503
accuaggagaucaauaaac

SEQ ID NO: 1668505 - RNA, 19 nt, Artificial Sequence
  Description of Artificial Sequence: Synthetic oligonucleotide
  Sense strand starting at position 2321 of SEQ ID NO: 1561393
auugaucuccuagguguca

SEQ ID NO: 1668506 - RNA, 19 nt, Artificial Sequence
  Description of Artificial Sequence: Synthetic oligonucleotide
  Antisense strand to SEQ ID NO: 1668505
ugacaccuaggagaucaau

SEQ ID NO: 1668507 - RNA, 19 nt, Artificial Sequence
  Description of Artificial Sequence: Synthetic oligonucleotide
  Sense strand starting at position 2362 of SEQ ID NO: 1561393
ugguuucugcagugaacca

SEQ ID NO: 1668508 - RNA, 19 nt, Artificial Sequence
  Description of Artificial Sequence: Synthetic oligonucleotide
  Antisense strand to SEQ ID NO: 1668507
ugguucacugcagaaacca

SEQ ID NO: 1668509 - RNA, 19 nt, Artificial Sequence
  Description of Artificial Sequence: Synthetic oligonucleotide
  Sense strand starting at position 2363 of SEQ ID NO: 1561393
gguuucugcagugaaccau

SEQ ID NO: 1668510 - RNA, 19 nt, Artificial Sequence
  Description of Artificial Sequence: Synthetic oligonucleotide
  Antisense strand to SEQ ID NO: 1668509
augguucacugcagaaacc

SEQ ID NO: 1668511 - RNA, 19 nt, Artificial Sequence
  Description of Artificial Sequence: Synthetic oligonucleotide
  Sense strand starting at position 2535 of SEQ ID NO: 1561393
gguggugauccuuaagcca

SEQ ID NO: 1668512 - RNA, 19 nt, Artificial Sequence
  Description of Artificial Sequence: Synthetic oligonucleotide
  Antisense strand to SEQ ID NO: 1668511
uggcuuaaggaucaccacc

SEQ ID NO: 1668513 - RNA, 19 nt, Artificial Sequence
  Description of Artificial Sequence: Synthetic oligonucleotide
  Sense strand starting at position 2578 of SEQ ID NO: 1561393
ugggaaugggucuggcaga

SEQ ID NO: 1668514 - RNA, 19 nt, Artificial Sequence
  Description of Artificial Sequence: Synthetic oligonucleotide
  Antisense strand to SEQ ID NO: 1668513
ucugccagacccauuccca

SEQ ID NO: 1668515 - RNA, 19 nt, Artificial Sequence
  Description of Artificial Sequence: Synthetic oligonucleotide
  Sense strand starting at position 2680 of SEQ ID NO: 1561393
agcuuaguaugccuagaac

SEQ ID NO: 1668516 - RNA, 19 nt, Artificial Sequence
  Description of Artificial Sequence: Synthetic oligonucleotide
  Antisense strand to SEQ ID NO: 1668515
guucuaggcauacuaagcu

SEQ ID NO: 1668517 - RNA, 19 nt, Artificial Sequence
  Description of Artificial Sequence: Synthetic oligonucleotide
  Sense strand starting at position 2683 of SEQ ID NO: 1561393
uuaguaugccuagaaccua

SEQ ID NO: 1668518 - RNA, 19 nt, Artificial Sequence
  Description of Artificial Sequence: Synthetic oligonucleotide
  Antisense strand to SEQ ID NO: 1668517
uagguucuaggcauacuaa

SEQ ID NO: 1668519 - RNA, 19 nt, Artificial Sequence
  Description of Artificial Sequence: Synthetic oligonucleotide
  Sense strand starting at position 2711 of SEQ ID NO: 1561393
gggaaaugguucuauagac

SEQ ID NO: 1668520 - RNA, 19 nt, Artificial Sequence
  Description of Artificial Sequence: Synthetic oligonucleotide
  Antisense strand to SEQ ID NO: 1668519
gucuauagaaccauuuccc

SEQ ID NO: 1668521 - RNA, 19 nt, Artificial Sequence
  Description of Artificial Sequence: Synthetic oligonucleotide
  Sense strand starting at position 2718 of SEQ ID NO: 1561393
gguucuauagacgauguua

SEQ ID NO: 1668522 - RNA, 19 nt, Artificial Sequence
  Description of Artificial Sequence: Synthetic oligonucleotide
  Antisense strand to SEQ ID NO: 1668521
uaacaucgucuauagaacc

SEQ ID NO: 1668523 - RNA, 19 nt, Artificial Sequence
  Description of Artificial Sequence: Synthetic oligonucleotide
  Sense strand starting at position 2720 of SEQ ID NO: 1561393
uucuauagacgauguuaga

SEQ ID NO: 1668524 - RNA, 19 nt, Artificial Sequence
  Description of Artificial Sequence: Synthetic oligonucleotide
  Antisense strand to SEQ ID NO: 1668523
ucuaacaucgucuauagaa

SEQ ID NO: 1668525 - RNA, 19 nt, Artificial Sequence
  Description of Artificial Sequence: Synthetic oligonucleotide
  Sense strand starting at position 2755 of SEQ ID NO: 1561393
auuccagucuuccuguaag

SEQ ID NO: 1668526 - RNA, 19 nt, Artificial Sequence
  Description of Artificial Sequence: Synthetic oligonucleotide
  Antisense strand to SEQ ID NO: 1668525
cuuacaggaagacuggaau

SEQ ID NO: 1668527 - RNA, 19 nt, Artificial Sequence
  Description of Artificial Sequence: Synthetic oligonucleotide
  Sense strand starting at position 2758 of SEQ ID NO: 1561393
ccagucuuccuguaaguga

SEQ ID NO: 1668528 - RNA, 19 nt, Artificial Sequence
  Description of Artificial Sequence: Synthetic oligonucleotide
  Antisense strand to SEQ ID NO: 1668527
ucacuuacaggaagacugg

SEQ ID NO: 1668529 - RNA, 19 nt, Artificial Sequence
  Description of Artificial Sequence: Synthetic oligonucleotide
  Sense strand starting at position 2769 of SEQ ID NO: 1561393
guaagugacuuugucacau

SEQ ID NO: 1668530 - RNA, 19 nt, Artificial Sequence
  Description of Artificial Sequence: Synthetic oligonucleotide
  Antisense strand to SEQ ID NO: 1668529
augugacaaagucacuuac

SEQ ID NO: 1668531 - RNA, 19 nt, Artificial Sequence
  Description of Artificial Sequence: Synthetic oligonucleotide
  Sense strand starting at position 3144 of SEQ ID NO: 1561393
ccaugaguugguggugguu

SEQ ID NO: 1668532 - RNA, 19 nt, Artificial Sequence
  Description of Artificial Sequence: Synthetic oligonucleotide
  Antisense strand to SEQ ID NO: 1668531
aaccaccaccaacucaugg

SEQ ID NO: 1668533 - RNA, 19 nt, Artificial Sequence
  Description of Artificial Sequence: Synthetic oligonucleotide
  Sense strand starting at position 3505 of SEQ ID NO: 1561393
ggcggaucacgucagaaga

SEQ ID NO: 1668534 - RNA, 19 nt, Artificial Sequence
  Description of Artificial Sequence: Synthetic oligonucleotide
  Antisense strand to SEQ ID NO: 1668533
ucuucugacgugauccgcc

SEQ ID NO: 1668535 - RNA, 19 nt, Artificial Sequence
  Description of Artificial Sequence: Synthetic oligonucleotide
  Sense strand starting at position 3744 of SEQ ID NO: 1561393
gaguacaugggacguuauu

SEQ ID NO: 1668536 - RNA, 19 nt, Artificial Sequence
  Description of Artificial Sequence: Synthetic oligonucleotide
  Antisense strand to SEQ ID NO: 1668535
aauaacgucccauguacuc

SEQ ID NO: 1668537 - RNA, 19 nt, Artificial Sequence
  Description of Artificial Sequence: Synthetic oligonucleotide
  Sense strand starting at position 3756 of SEQ ID NO: 1561393
cguuauuguccugucuacu

SEQ ID NO: 1668538 - RNA, 19 nt, Artificial Sequence
  Description of Artificial Sequence: Synthetic oligonucleotide
  Antisense strand to SEQ ID NO: 1668537
aguagacaggacaauaacg

SEQ ID NO: 1668539 - RNA, 19 nt, Artificial Sequence
  Description of Artificial Sequence: Synthetic oligonucleotide
  Sense strand starting at position 3794 of SEQ ID NO: 1561393
ccauaaugacaauggcaua

SEQ ID NO: 1668540 - RNA, 19 nt, Artificial Sequence
  Description of Artificial Sequence: Synthetic oligonucleotide
  Antisense strand to SEQ ID NO: 1668539
uaugccauugucauuaugg

SEQ ID NO: 1668541 - RNA, 19 nt, Artificial Sequence
  Description of Artificial Sequence: Synthetic oligonucleotide
  Sense strand starting at position 3946 of SEQ ID NO: 1561393
guucucaaugcuuagagca

SEQ ID NO: 1668542 - RNA, 19 nt, Artificial Sequence
  Description of Artificial Sequence: Synthetic oligonucleotide
  Antisense strand to SEQ ID NO: 1668541
ugcucuaagcauugagaac

SEQ ID NO: 1668543 - RNA, 19 nt, Artificial Sequence
  Description of Artificial Sequence: Synthetic oligonucleotide
  Sense strand starting at position 3981 of SEQ ID NO: 1561393
uaguguagcgcugucuuua

SEQ ID NO: 1668544 - RNA, 19 nt, Artificial Sequence
  Description of Artificial Sequence: Synthetic oligonucleotide
  Antisense strand to SEQ ID NO: 1668543
uaaagacagcgcuacacua

SEQ ID NO: 1668545 - RNA, 19 nt, Artificial Sequence
  Description of Artificial Sequence: Synthetic oligonucleotide
  Sense strand starting at position 3982 of SEQ ID NO: 1561393
aguguagcgcugucuuuaa

SEQ ID NO: 1668546 - RNA, 19 nt, Artificial Sequence
  Description of Artificial Sequence: Synthetic oligonucleotide
  Antisense strand to SEQ ID NO: 1668545
uuaaagacagcgcuacacu

SEQ ID NO: 1668547 - RNA, 19 nt, Artificial Sequence
  Description of Artificial Sequence: Synthetic oligonucleotide
  Sense strand starting at position 108 of SEQ ID NO: 1561394
ucucuaugccuagggaaga

SEQ ID NO: 1668548 - RNA, 19 nt, Artificial Sequence
  Description of Artificial Sequence: Synthetic oligonucleotide
  Antisense strand to SEQ ID NO: 1668547
ucuucccuaggcauagaga

SEQ ID NO: 1668549 - RNA, 19 nt, Artificial Sequence
  Description of Artificial Sequence: Synthetic oligonucleotide
  Sense strand starting at position 155 of SEQ ID NO: 1561394
acaauacagugucagaaga

SEQ ID NO: 1668550 - RNA, 19 nt, Artificial Sequence
  Description of Artificial Sequence: Synthetic oligonucleotide
  Antisense strand to SEQ ID NO: 1668549
ucuucugacacuguauugu

SEQ ID NO: 1668551 - RNA, 19 nt, Artificial Sequence
  Description of Artificial Sequence: Synthetic oligonucleotide
  Sense strand starting at position 168 of SEQ ID NO: 1561394
agaagauuauuccuugcuu

SEQ ID NO: 1668552 - RNA, 19 nt, Artificial Sequence
  Description of Artificial Sequence: Synthetic oligonucleotide
  Antisense strand to SEQ ID NO: 1668551
aagcaaggaauaaucuucu

SEQ ID NO: 1668553 - RNA, 19 nt, Artificial Sequence
  Description of Artificial Sequence: Synthetic oligonucleotide
  Sense strand starting at position 180 of SEQ ID NO: 1561394
cuugcuuucuucuuaugga

SEQ ID NO: 1668554 - RNA, 19 nt, Artificial Sequence
  Description of Artificial Sequence: Synthetic oligonucleotide
  Antisense strand to SEQ ID NO: 1668553
uccauaagaagaaagcaag

SEQ ID NO: 1668555 - RNA, 19 nt, Artificial Sequence
  Description of Artificial Sequence: Synthetic oligonucleotide
  Sense strand starting at position 314 of SEQ ID NO: 1561394
gugugaauuagggaguagu

SEQ ID NO: 1668556 - RNA, 19 nt, Artificial Sequence
  Description of Artificial Sequence: Synthetic oligonucleotide
  Antisense strand to SEQ ID NO: 1668555
acuacucccuaauucacac

SEQ ID NO: 1668557 - RNA, 19 nt, Artificial Sequence
  Description of Artificial Sequence: Synthetic oligonucleotide
  Sense strand starting at position 498 of SEQ ID NO: 1561394
aguuaagugguaggcaauu

SEQ ID NO: 1668558 - RNA, 19 nt, Artificial Sequence
  Description of Artificial Sequence: Synthetic oligonucleotide
  Antisense strand to SEQ ID NO: 1668557
aauugccuaccacuuaacu

SEQ ID NO: 1668559 - RNA, 19 nt, Artificial Sequence
  Description of Artificial Sequence: Synthetic oligonucleotide
  Sense strand starting at position 509 of SEQ ID NO: 1561394
aggcaauucgacugaggug

SEQ ID NO: 1668560 - RNA, 19 nt, Artificial Sequence
  Description of Artificial Sequence: Synthetic oligonucleotide
  Antisense strand to SEQ ID NO: 1668559
caccucagucgaauugccu

SEQ ID NO: 1668561 - RNA, 19 nt, Artificial Sequence
  Description of Artificial Sequence: Synthetic oligonucleotide
  Sense strand starting at position 527 of SEQ ID NO: 1561394
ggcuguagucccugaauuc

SEQ ID NO: 1668562 - RNA, 19 nt, Artificial Sequence
  Description of Artificial Sequence: Synthetic oligonucleotide
  Antisense strand to SEQ ID NO: 1668561
gaauucagggacuacagcc

SEQ ID NO: 1668563 - RNA, 19 nt, Artificial Sequence
  Description of Artificial Sequence: Synthetic oligonucleotide
  Sense strand starting at position 946 of SEQ ID NO: 1561394
ggaauuaagcucugauuac

SEQ ID NO: 1668564 - RNA, 19 nt, Artificial Sequence
  Description of Artificial Sequence: Synthetic oligonucleotide
  Antisense strand to SEQ ID NO: 1668563
guaaucagagcuuaauucc

SEQ ID NO: 1668565 - RNA, 19 nt, Artificial Sequence
  Description of Artificial Sequence: Synthetic oligonucleotide
  Sense strand starting at position 1105 of SEQ ID NO: 1561394
acagcugggugcuuuacaa

SEQ ID NO: 1668566 - RNA, 19 nt, Artificial Sequence
  Description of Artificial Sequence: Synthetic oligonucleotide
  Antisense strand to SEQ ID NO: 1668565
uuguaaagcacccagcugu

SEQ ID NO: 1668567 - RNA, 19 nt, Artificial Sequence
  Description of Artificial Sequence: Synthetic oligonucleotide
  Sense strand starting at position 1197 of SEQ ID NO: 1561394
gagauagucucauuguguc

SEQ ID NO: 1668568 - RNA, 19 nt, Artificial Sequence
  Description of Artificial Sequence: Synthetic oligonucleotide
  Antisense strand to SEQ ID NO: 1668567
gacacaaugagacuaucuc

SEQ ID NO: 1668569 - RNA, 19 nt, Artificial Sequence
  Description of Artificial Sequence: Synthetic oligonucleotide
  Sense strand starting at position 1413 of SEQ ID NO: 1561394
cagcaaacugcugggauua

SEQ ID NO: 1668570 - RNA, 19 nt, Artificial Sequence
  Description of Artificial Sequence: Synthetic oligonucleotide
  Antisense strand to SEQ ID NO: 1668569
uaaucccagcaguuugcug

SEQ ID NO: 1668571 - RNA, 19 nt, Artificial Sequence
  Description of Artificial Sequence: Synthetic oligonucleotide
  Sense strand starting at position 1598 of SEQ ID NO: 1561394
gcggaauugcgcgugcaga

SEQ ID NO: 1668572 - RNA, 19 nt, Artificial Sequence
  Description of Artificial Sequence: Synthetic oligonucleotide
  Antisense strand to SEQ ID NO: 1668571
ucugcacgcgcaauuccgc

SEQ ID NO: 1668573 - RNA, 19 nt, Artificial Sequence
  Description of Artificial Sequence: Synthetic oligonucleotide
  Sense strand starting at position 2050 of SEQ ID NO: 1561394
gcgugccugauuggauaau

SEQ ID NO: 1668574 - RNA, 19 nt, Artificial Sequence
  Description of Artificial Sequence: Synthetic oligonucleotide
  Antisense strand to SEQ ID NO: 1668573
auuauccaaucaggcacgc

SEQ ID NO: 1668575 - RNA, 19 nt, Artificial Sequence
  Description of Artificial Sequence: Synthetic oligonucleotide
  Sense strand starting at position 2059 of SEQ ID NO: 1561394
auuggauaauguuuaagac

SEQ ID NO: 1668576 - RNA, 19 nt, Artificial Sequence
  Description of Artificial Sequence: Synthetic oligonucleotide
  Antisense strand to SEQ ID NO: 1668575
gucuuaaacauuauccaau

SEQ ID NO: 1668577 - RNA, 19 nt, Artificial Sequence
  Description of Artificial Sequence: Synthetic oligonucleotide
  Sense strand starting at position 2110 of SEQ ID NO: 1561394
aucaguugcugggcagaau

SEQ ID NO: 1668578 - RNA, 19 nt, Artificial Sequence
  Description of Artificial Sequence: Synthetic oligonucleotide
  Antisense strand to SEQ ID NO: 1668577
auucugcccagcaacugau

SEQ ID NO: 1668579 - RNA, 19 nt, Artificial Sequence
  Description of Artificial Sequence: Synthetic oligonucleotide
  Sense strand starting at position 2121 of SEQ ID NO: 1561394
ggcagaaugaagcgugaca

SEQ ID NO: 1668580 - RNA, 19 nt, Artificial Sequence
  Description of Artificial Sequence: Synthetic oligonucleotide
  Antisense strand to SEQ ID NO: 1668579
ugucacgcuucauucugcc

SEQ ID NO: 1668581 - RNA, 19 nt, Artificial Sequence
  Description of Artificial Sequence: Synthetic oligonucleotide
  Sense strand starting at position 2193 of SEQ ID NO: 1561394
ccuagaggguguuugcauu

SEQ ID NO: 1668582 - RNA, 19 nt, Artificial Sequence
  Description of Artificial Sequence: Synthetic oligonucleotide
  Antisense strand to SEQ ID NO: 1668581
aaugcaaacacccucuagg

SEQ ID NO: 1668583 - RNA, 19 nt, Artificial Sequence
  Description of Artificial Sequence: Synthetic oligonucleotide
  Sense strand starting at position 2199 of SEQ ID NO: 1561394
ggguguuugcauugaaccu

SEQ ID NO: 1668584 - RNA, 19 nt, Artificial Sequence
  Description of Artificial Sequence: Synthetic oligonucleotide
  Antisense strand to SEQ ID NO: 1668583
agguucaaugcaaacaccc

SEQ ID NO: 1668585 - RNA, 19 nt, Artificial Sequence
  Description of Artificial Sequence: Synthetic oligonucleotide
  Sense strand starting at position 2200 of SEQ ID NO: 1561394
gguguuugcauugaaccuu

SEQ ID NO: 1668586 - RNA, 19 nt, Artificial Sequence
  Description of Artificial Sequence: Synthetic oligonucleotide
  Antisense strand to SEQ ID NO: 1668585
aagguucaaugcaaacacc

SEQ ID NO: 1668587 - RNA, 19 nt, Artificial Sequence
  Description of Artificial Sequence: Synthetic oligonucleotide
  Sense strand starting at position 2250 of SEQ ID NO: 1561394
cuauauggcuagucacaaa

SEQ ID NO: 1668588 - RNA, 19 nt, Artificial Sequence
  Description of Artificial Sequence: Synthetic oligonucleotide
  Antisense strand to SEQ ID NO: 1668587
uuugugacuagccauauag

SEQ ID NO: 1668589 - RNA, 19 nt, Artificial Sequence
  Description of Artificial Sequence: Synthetic oligonucleotide
  Sense strand starting at position 2364 of SEQ ID NO: 1561394
gaggcaguccucugaaaua

SEQ ID NO: 1668590 - RNA, 19 nt, Artificial Sequence
  Description of Artificial Sequence: Synthetic oligonucleotide
  Antisense strand to SEQ ID NO: 1668589
uauuucagaggacugccuc

SEQ ID NO: 1668591 - RNA, 19 nt, Artificial Sequence
  Description of Artificial Sequence: Synthetic oligonucleotide
  Sense strand starting at position 2438 of SEQ ID NO: 1561394
acaugaaacacguggaauu

SEQ ID NO: 1668592 - RNA, 19 nt, Artificial Sequence
  Description of Artificial Sequence: Synthetic oligonucleotide
  Antisense strand to SEQ ID NO: 1668591
aauuccacguguuucaugu

SEQ ID NO: 1668593 - RNA, 19 nt, Artificial Sequence
  Description of Artificial Sequence: Synthetic oligonucleotide
  Sense strand starting at position 2445 of SEQ ID NO: 1561394
acacguggaauugauugua

SEQ ID NO: 1668594 - RNA, 19 nt, Artificial Sequence
  Description of Artificial Sequence: Synthetic oligonucleotide
  Antisense strand to SEQ ID NO: 1668593
uacaaucaauuccacgugu

SEQ ID NO: 1668595 - RNA, 19 nt, Artificial Sequence
  Description of Artificial Sequence: Synthetic oligonucleotide
  Sense strand starting at position 2448 of SEQ ID NO: 1561394
cguggaauugauuguaaua

SEQ ID NO: 1668596 - RNA, 19 nt, Artificial Sequence
  Description of Artificial Sequence: Synthetic oligonucleotide
  Antisense strand to SEQ ID NO: 1668595
uauuacaaucaauuccacg

SEQ ID NO: 1668597 - RNA, 19 nt, Artificial Sequence
  Description of Artificial Sequence: Synthetic oligonucleotide
  Sense strand starting at position 2502 of SEQ ID NO: 1561394
uuuaauaugugagcaaugu

SEQ ID NO: 1668598 - RNA, 19 nt, Artificial Sequence
  Description of Artificial Sequence: Synthetic oligonucleotide
  Antisense strand to SEQ ID NO: 1668597
acauugcucacauauuaaa

SEQ ID NO: 1668599 - RNA, 19 nt, Artificial Sequence
  Description of Artificial Sequence: Synthetic oligonucleotide
  Sense strand starting at position 2503 of SEQ ID NO: 1561394
uuaauaugugagcaaugug

SEQ ID NO: 1668600 - RNA, 19 nt, Artificial Sequence
  Description of Artificial Sequence: Synthetic oligonucleotide
  Antisense strand to SEQ ID NO: 1668599
cacauugcucacauauuaa

SEQ ID NO: 1668601 - RNA, 19 nt, Artificial Sequence
  Description of Artificial Sequence: Synthetic oligonucleotide
  Sense strand starting at position 2506 of SEQ ID NO: 1561394
auaugugagcaaugugaaa

SEQ ID NO: 1668602 - RNA, 19 nt, Artificial Sequence
  Description of Artificial Sequence: Synthetic oligonucleotide
  Antisense strand to SEQ ID NO: 1668601
uuucacauugcucacauau

SEQ ID NO: 1668603 - RNA, 19 nt, Artificial Sequence
  Description of Artificial Sequence: Synthetic oligonucleotide
  Sense strand starting at position 2794 of SEQ ID NO: 1561394
uccugaaacuaugucauag

SEQ ID NO: 1668604 - RNA, 19 nt, Artificial Sequence
  Description of Artificial Sequence: Synthetic oligonucleotide
  Antisense strand to SEQ ID NO: 1668603
cuaugacauaguuucagga

SEQ ID NO: 1668605 - RNA, 19 nt, Artificial Sequence
  Description of Artificial Sequence: Synthetic oligonucleotide
  Sense strand starting at position 2805 of SEQ ID NO: 1561394
ugucauaggcguguucuca

SEQ ID NO: 1668606 - RNA, 19 nt, Artificial Sequence
  Description of Artificial Sequence: Synthetic oligonucleotide
  Antisense strand to SEQ ID NO: 1668605
ugagaacacgccuaugaca

SEQ ID NO: 1668607 - RNA, 19 nt, Artificial Sequence
  Description of Artificial Sequence: Synthetic oligonucleotide
  Sense strand starting at position 2848 of SEQ ID NO: 1561394
auuaacugaugucucagau

SEQ ID NO: 1668608 - RNA, 19 nt, Artificial Sequence
  Description of Artificial Sequence: Synthetic oligonucleotide
  Antisense strand to SEQ ID NO: 1668607
aucugagacaucaguuaau

SEQ ID NO: 1668609 - RNA, 19 nt, Artificial Sequence
  Description of Artificial Sequence: Synthetic oligonucleotide
  Sense strand starting at position 2873 of SEQ ID NO: 1561394
gggucacagcaauauguaa

SEQ ID NO: 1668610 - RNA, 19 nt, Artificial Sequence
  Description of Artificial Sequence: Synthetic oligonucleotide
  Antisense strand to SEQ ID NO: 1668609
uuacauauugcugugaccc

SEQ ID NO: 1668611 - RNA, 19 nt, Artificial Sequence
  Description of Artificial Sequence: Synthetic oligonucleotide
  Sense strand starting at position 3113 of SEQ ID NO: 1561394
caucuaucuucgguucuga

SEQ ID NO: 1668612 - RNA, 19 nt, Artificial Sequence
  Description of Artificial Sequence: Synthetic oligonucleotide
  Antisense strand to SEQ ID NO: 1668611
ucagaaccgaagauagaug

SEQ ID NO: 1668613 - RNA, 19 nt, Artificial Sequence
  Description of Artificial Sequence: Synthetic oligonucleotide
  Sense strand starting at position 3136 of SEQ ID NO: 1561394
gcgauagauaguggccaua

SEQ ID NO: 1668614 - RNA, 19 nt, Artificial Sequence
  Description of Artificial Sequence: Synthetic oligonucleotide
  Antisense strand to SEQ ID NO: 1668613
uauggccacuaucuaucgc

SEQ ID NO: 1668615 - RNA, 19 nt, Artificial Sequence
  Description of Artificial Sequence: Synthetic oligonucleotide
  Sense strand starting at position 3324 of SEQ ID NO: 1561394
acuuuaagauaugaagaag

SEQ ID NO: 1668616 - RNA, 19 nt, Artificial Sequence
  Description of Artificial Sequence: Synthetic oligonucleotide
  Antisense strand to SEQ ID NO: 1668615
cuucuucauaucuuaaagu

SEQ ID NO: 1668617 - RNA, 19 nt, Artificial Sequence
  Description of Artificial Sequence: Synthetic oligonucleotide
  Sense strand starting at position 3751 of SEQ ID NO: 1561394
gguacugugugaguauaag

SEQ ID NO: 1668618 - RNA, 19 nt, Artificial Sequence
  Description of Artificial Sequence: Synthetic oligonucleotide
  Antisense strand to SEQ ID NO: 1668617
cuuauacucacacaguacc

SEQ ID NO: 1668619 - RNA, 19 nt, Artificial Sequence
  Description of Artificial Sequence: Synthetic oligonucleotide
  Sense strand starting at position 3811 of SEQ ID NO: 1561394
acucaacauugucuuagga

SEQ ID NO: 1668620 - RNA, 19 nt, Artificial Sequence
  Description of Artificial Sequence: Synthetic oligonucleotide
  Antisense strand to SEQ ID NO: 1668619
uccuaagacaauguugagu

SEQ ID NO: 1668621 - RNA, 19 nt, Artificial Sequence
  Description of Artificial Sequence: Synthetic oligonucleotide
  Sense strand starting at position 3866 of SEQ ID NO: 1561394
aagucaguaucuuuagggu

SEQ ID NO: 1668622 - RNA, 19 nt, Artificial Sequence
  Description of Artificial Sequence: Synthetic oligonucleotide
  Antisense strand to SEQ ID NO: 1668621
acccuaaagauacugacuu

SEQ ID NO: 1668623 - RNA, 19 nt, Artificial Sequence
  Description of Artificial Sequence: Synthetic oligonucleotide
  Sense strand starting at position 3879 of SEQ ID NO: 1561394
uaggguguccacugucaga

SEQ ID NO: 1668624 - RNA, 19 nt, Artificial Sequence
  Description of Artificial Sequence: Synthetic oligonucleotide
  Antisense strand to SEQ ID NO: 1668623
ucugacaguggacacccua

SEQ ID NO: 1668625 - RNA, 19 nt, Artificial Sequence
  Description of Artificial Sequence: Synthetic oligonucleotide
  Sense strand starting at position 3892 of SEQ ID NO: 1561394
gucagaagguaacuaguaa

SEQ ID NO: 1668626 - RNA, 19 nt, Artificial Sequence
  Description of Artificial Sequence: Synthetic oligonucleotide
  Antisense strand to SEQ ID NO: 1668625
uuacuaguuaccuucugac

SEQ ID NO: 1668627 - RNA, 19 nt, Artificial Sequence
  Description of Artificial Sequence: Synthetic oligonucleotide
  Sense strand starting at position 83 of SEQ ID NO: 1561395
auuaccugagucuagugau

SEQ ID NO: 1668628 - RNA, 19 nt, Artificial Sequence
  Description of Artificial Sequence: Synthetic oligonucleotide
  Antisense strand to SEQ ID NO: 1668627
aucacuagacucagguaau

SEQ ID NO: 1668629 - RNA, 19 nt, Artificial Sequence
  Description of Artificial Sequence: Synthetic oligonucleotide
  Sense strand starting at position 147 of SEQ ID NO: 1561395
gucacucuccuaggugauu

SEQ ID NO: 1668630 - RNA, 19 nt, Artificial Sequence
  Description of Artificial Sequence: Synthetic oligonucleotide
  Antisense strand to SEQ ID NO: 1668629
aaucaccuaggagagugac

SEQ ID NO: 1668631 - RNA, 19 nt, Artificial Sequence
  Description of Artificial Sequence: Synthetic oligonucleotide
  Sense strand starting at position 527 of SEQ ID NO: 1561395
aggagccucuuauuguaua

SEQ ID NO: 1668632 - RNA, 19 nt, Artificial Sequence
  Description of Artificial Sequence: Synthetic oligonucleotide
  Antisense strand to SEQ ID NO: 1668631
uauacaauaagaggcuccu

SEQ ID NO: 1668633 - RNA, 19 nt, Artificial Sequence
  Description of Artificial Sequence: Synthetic oligonucleotide
  Sense strand starting at position 545 of SEQ ID NO: 1561395
agguguuagaccuaguaac

SEQ ID NO: 1668634 - RNA, 19 nt, Artificial Sequence
  Description of Artificial Sequence: Synthetic oligonucleotide
  Antisense strand to SEQ ID NO: 1668633
guuacuaggucuaacaccu

SEQ ID NO: 1668635 - RNA, 19 nt, Artificial Sequence
  Description of Artificial Sequence: Synthetic oligonucleotide
  Sense strand starting at position 621 of SEQ ID NO: 1561395
gagagcagggcuuagcaau

SEQ ID NO: 1668636 - RNA, 19 nt, Artificial Sequence
  Description of Artificial Sequence: Synthetic oligonucleotide
  Antisense strand to SEQ ID NO: 1668635
auugcuaagcccugcucuc

SEQ ID NO: 1668637 - RNA, 19 nt, Artificial Sequence
  Description of Artificial Sequence: Synthetic oligonucleotide
  Sense strand starting at position 627 of SEQ ID NO: 1561395
agggcuuagcaauauguaa

SEQ ID NO: 1668638 - RNA, 19 nt, Artificial Sequence
  Description of Artificial Sequence: Synthetic oligonucleotide
  Antisense strand to SEQ ID NO: 1668637
uuacauauugcuaagcccu

SEQ ID NO: 1668639 - RNA, 19 nt, Artificial Sequence
  Description of Artificial Sequence: Synthetic oligonucleotide
  Sense strand starting at position 697 of SEQ ID NO: 1561395
cagugaaaggcccagcuau

SEQ ID NO: 1668640 - RNA, 19 nt, Artificial Sequence
  Description of Artificial Sequence: Synthetic oligonucleotide
  Antisense strand to SEQ ID NO: 1668639
auagcugggccuuucacug

SEQ ID NO: 1668641 - RNA, 19 nt, Artificial Sequence
  Description of Artificial Sequence: Synthetic oligonucleotide
  Sense strand starting at position 777 of SEQ ID NO: 1561395
aaagucaagcgauauguca

SEQ ID NO: 1668642 - RNA, 19 nt, Artificial Sequence
  Description of Artificial Sequence: Synthetic oligonucleotide
  Antisense strand to SEQ ID NO: 1668641
ugacauaucgcuugacuuu

SEQ ID NO: 1668643 - RNA, 19 nt, Artificial Sequence
  Description of Artificial Sequence: Synthetic oligonucleotide
  Sense strand starting at position 826 of SEQ ID NO: 1561395
ggagucaaaucacuaaggu

SEQ ID NO: 1668644 - RNA, 19 nt, Artificial Sequence
  Description of Artificial Sequence: Synthetic oligonucleotide
  Antisense strand to SEQ ID NO: 1668643
accuuagugauuugacucc

SEQ ID NO: 1668645 - RNA, 19 nt, Artificial Sequence
  Description of Artificial Sequence: Synthetic oligonucleotide
  Sense strand starting at position 836 of SEQ ID NO: 1561395
cacuaaggugcuuaguaga

SEQ ID NO: 1668646 - RNA, 19 nt, Artificial Sequence
  Description of Artificial Sequence: Synthetic oligonucleotide
  Antisense strand to SEQ ID NO: 1668645
ucuacuaagcaccuuagug

SEQ ID NO: 1668647 - RNA, 19 nt, Artificial Sequence
  Description of Artificial Sequence: Synthetic oligonucleotide
  Sense strand starting at position 960 of SEQ ID NO: 1561395
cuaaguacgugagucacaa

SEQ ID NO: 1668648 - RNA, 19 nt, Artificial Sequence
  Description of Artificial Sequence: Synthetic oligonucleotide
  Antisense strand to SEQ ID NO: 1668647
uugugacucacguacuuag

SEQ ID NO: 1668649 - RNA, 19 nt, Artificial Sequence
  Description of Artificial Sequence: Synthetic oligonucleotide
  Sense strand starting at position 973 of SEQ ID NO: 1561395
ucacaaucucaaugguuga

SEQ ID NO: 1668650 - RNA, 19 nt, Artificial Sequence
  Description of Artificial Sequence: Synthetic oligonucleotide
  Antisense strand to SEQ ID NO: 1668649
ucaaccauugagauuguga

SEQ ID NO: 1668651 - RNA, 19 nt, Artificial Sequence
  Description of Artificial Sequence: Synthetic oligonucleotide
  Sense strand starting at position 1050 of SEQ ID NO: 1561395
gccucacauguguacugaa

SEQ ID NO: 1668652 - RNA, 19 nt, Artificial Sequence
  Description of Artificial Sequence: Synthetic oligonucleotide
  Antisense strand to SEQ ID NO: 1668651
uucaguacacaugugaggc

SEQ ID NO: 1668653 - RNA, 19 nt, Artificial Sequence
  Description of Artificial Sequence: Synthetic oligonucleotide
  Sense strand starting at position 1063 of SEQ ID NO: 1561395
acugaaucuuggucugaga

SEQ ID NO: 1668654 - RNA, 19 nt, Artificial Sequence
  Description of Artificial Sequence: Synthetic oligonucleotide
  Antisense strand to SEQ ID NO: 1668653
ucucagaccaagauucagu

SEQ ID NO: 1668655 - RNA, 19 nt, Artificial Sequence
  Description of Artificial Sequence: Synthetic oligonucleotide
  Sense strand starting at position 1159 of SEQ ID NO: 1561395
ucagaaauguuccuaagag

SEQ ID NO: 1668656 - RNA, 19 nt, Artificial Sequence
  Description of Artificial Sequence: Synthetic oligonucleotide
  Antisense strand to SEQ ID NO: 1668655
cucuuaggaacauuucuga

SEQ ID NO: 1668657 - RNA, 19 nt, Artificial Sequence
  Description of Artificial Sequence: Synthetic oligonucleotide
  Sense strand starting at position 1576 of SEQ ID NO: 1561395
ccgggcaucccugaacaau

SEQ ID NO: 1668658 - RNA, 19 nt, Artificial Sequence
  Description of Artificial Sequence: Synthetic oligonucleotide
  Antisense strand to SEQ ID NO: 1668657
auuguucagggaugcccgg

SEQ ID NO: 1668659 - RNA, 19 nt, Artificial Sequence
  Description of Artificial Sequence: Synthetic oligonucleotide
  Sense strand starting at position 1932 of SEQ ID NO: 1561395
ggauucccgaguuggagaa

SEQ ID NO: 1668660 - RNA, 19 nt, Artificial Sequence
  Description of Artificial Sequence: Synthetic oligonucleotide
  Antisense strand to SEQ ID NO: 1668659
uucuccaacucgggaaucc

SEQ ID NO: 1668661 - RNA, 19 nt, Artificial Sequence
  Description of Artificial Sequence: Synthetic oligonucleotide
  Sense strand starting at position 2035 of SEQ ID NO: 1561395
uccaacugcgcgucugauu

SEQ ID NO: 1668662 - RNA, 19 nt, Artificial Sequence
  Description of Artificial Sequence: Synthetic oligonucleotide
  Antisense strand to SEQ ID NO: 1668661
aaucagacgcgcaguugga

SEQ ID NO: 1668663 - RNA, 19 nt, Artificial Sequence
  Description of Artificial Sequence: Synthetic oligonucleotide
  Sense strand starting at position 2157 of SEQ ID NO: 1561395
ggcacaugcccagggaauu

SEQ ID NO: 1668664 - RNA, 19 nt, Artificial Sequence
  Description of Artificial Sequence: Synthetic oligonucleotide
  Antisense strand to SEQ ID NO: 1668663
aauucccugggcaugugcc

SEQ ID NO: 1668665 - RNA, 19 nt, Artificial Sequence
  Description of Artificial Sequence: Synthetic oligonucleotide
  Sense strand starting at position 2158 of SEQ ID NO: 1561395
gcacaugcccagggaauua

SEQ ID NO: 1668666 - RNA, 19 nt, Artificial Sequence
  Description of Artificial Sequence: Synthetic oligonucleotide
  Antisense strand to SEQ ID NO: 1668665
uaauucccugggcaugugc

SEQ ID NO: 1668667 - RNA, 19 nt, Artificial Sequence
  Description of Artificial Sequence: Synthetic oligonucleotide
  Sense strand starting at position 2189 of SEQ ID NO: 1561395
ugagcugagccuugaaaug

SEQ ID NO: 1668668 - RNA, 19 nt, Artificial Sequence
  Description of Artificial Sequence: Synthetic oligonucleotide
  Antisense strand to SEQ ID NO: 1668667
cauuucaaggcucagcuca

SEQ ID NO: 1668669 - RNA, 19 nt, Artificial Sequence
  Description of Artificial Sequence: Synthetic oligonucleotide
  Sense strand starting at position 2383 of SEQ ID NO: 1561395
uguacacaucuugggauga

SEQ ID NO: 1668670 - RNA, 19 nt, Artificial Sequence
  Description of Artificial Sequence: Synthetic oligonucleotide
  Antisense strand to SEQ ID NO: 1668669
ucaucccaagauguguaca

SEQ ID NO: 1668671 - RNA, 19 nt, Artificial Sequence
  Description of Artificial Sequence: Synthetic oligonucleotide
  Sense strand starting at position 2446 of SEQ ID NO: 1561395
ugaauuauguugccuaaau

SEQ ID NO: 1668672 - RNA, 19 nt, Artificial Sequence
  Description of Artificial Sequence: Synthetic oligonucleotide
  Antisense strand to SEQ ID NO: 1668671
auuuaggcaacauaauuca

SEQ ID NO: 1668673 - RNA, 19 nt, Artificial Sequence
  Description of Artificial Sequence: Synthetic oligonucleotide
  Sense strand starting at position 2489 of SEQ ID NO: 1561395
aaccaaucucugugaagug

SEQ ID NO: 1668674 - RNA, 19 nt, Artificial Sequence
  Description of Artificial Sequence: Synthetic oligonucleotide
  Antisense strand to SEQ ID NO: 1668673
cacuucacagagauugguu

SEQ ID NO: 1668675 - RNA, 19 nt, Artificial Sequence
  Description of Artificial Sequence: Synthetic oligonucleotide
  Sense strand starting at position 2498 of SEQ ID NO: 1561395
cugugaaguggcuauuauc

SEQ ID NO: 1668676 - RNA, 19 nt, Artificial Sequence
  Description of Artificial Sequence: Synthetic oligonucleotide
  Antisense strand to SEQ ID NO: 1668675
gauaauagccacuucacag

SEQ ID NO: 1668677 - RNA, 19 nt, Artificial Sequence
  Description of Artificial Sequence: Synthetic oligonucleotide
  Sense strand starting at position 2507 of SEQ ID NO: 1561395
ggcuauuaucaggguaauu

SEQ ID NO: 1668678 - RNA, 19 nt, Artificial Sequence
  Description of Artificial Sequence: Synthetic oligonucleotide
  Antisense strand to SEQ ID NO: 1668677
aauuacccugauaauagcc

SEQ ID NO: 1668679 - RNA, 19 nt, Artificial Sequence
  Description of Artificial Sequence: Synthetic oligonucleotide
  Sense strand starting at position 2509 of SEQ ID NO: 1561395
cuauuaucaggguaauugu

SEQ ID NO: 1668680 - RNA, 19 nt, Artificial Sequence
  Description of Artificial Sequence: Synthetic oligonucleotide
  Antisense strand to SEQ ID NO: 1668679
acaauuacccugauaauag

SEQ ID NO: 1668681 - RNA, 19 nt, Artificial Sequence
  Description of Artificial Sequence: Synthetic oligonucleotide
  Sense strand starting at position 2648 of SEQ ID NO: 1561395
ugauguaauuugcuaguuu

SEQ ID NO: 1668682 - RNA, 19 nt, Artificial Sequence
  Description of Artificial Sequence: Synthetic oligonucleotide
  Antisense strand to SEQ ID NO: 1668681
aaacuagcaaauuacauca

SEQ ID NO: 1668683 - RNA, 19 nt, Artificial Sequence
  Description of Artificial Sequence: Synthetic oligonucleotide
  Sense strand starting at position 2652 of SEQ ID NO: 1561395
guaauuugcuaguuuagac

SEQ ID NO: 1668684 - RNA, 19 nt, Artificial Sequence
  Description of Artificial Sequence: Synthetic oligonucleotide
  Antisense strand to SEQ ID NO: 1668683
gucuaaacuagcaaauuac

SEQ ID NO: 1668685 - RNA, 19 nt, Artificial Sequence
  Description of Artificial Sequence: Synthetic oligonucleotide
  Sense strand starting at position 2662 of SEQ ID NO: 1561395
aguuuagacccuggaggua

SEQ ID NO: 1668686 - RNA, 19 nt, Artificial Sequence
  Description of Artificial Sequence: Synthetic oligonucleotide
  Antisense strand to SEQ ID NO: 1668685
uaccuccagggucuaaacu

SEQ ID NO: 1668687 - RNA, 19 nt, Artificial Sequence
  Description of Artificial Sequence: Synthetic oligonucleotide
  Sense strand starting at position 3241 of SEQ ID NO: 1561395
gccucuggauucucugaga

SEQ ID NO: 1668688 - RNA, 19 nt, Artificial Sequence
  Description of Artificial Sequence: Synthetic oligonucleotide
  Antisense strand to SEQ ID NO: 1668687
ucucagagaauccagaggc

SEQ ID NO: 1668689 - RNA, 19 nt, Artificial Sequence
  Description of Artificial Sequence: Synthetic oligonucleotide
  Sense strand starting at position 3380 of SEQ ID NO: 1561395
ugucuccugagaggucaua

SEQ ID NO: 1668690 - RNA, 19 nt, Artificial Sequence
  Description of Artificial Sequence: Synthetic oligonucleotide
  Antisense strand to SEQ ID NO: 1668689
uaugaccucucaggagaca

SEQ ID NO: 1668691 - RNA, 19 nt, Artificial Sequence
  Description of Artificial Sequence: Synthetic oligonucleotide
  Sense strand starting at position 3432 of SEQ ID NO: 1561395
cgcauuccauuuguuuaaa

SEQ ID NO: 1668692 - RNA, 19 nt, Artificial Sequence
  Description of Artificial Sequence: Synthetic oligonucleotide
  Antisense strand to SEQ ID NO: 1668691
uuuaaacaaauggaaugcg

SEQ ID NO: 1668693 - RNA, 19 nt, Artificial Sequence
  Description of Artificial Sequence: Synthetic oligonucleotide
  Sense strand starting at position 3516 of SEQ ID NO: 1561395
acagaauuccaaggcuuau

SEQ ID NO: 1668694 - RNA, 19 nt, Artificial Sequence
  Description of Artificial Sequence: Synthetic oligonucleotide
  Antisense strand to SEQ ID NO: 1668693
auaagccuuggaauucugu

SEQ ID NO: 1668695 - RNA, 19 nt, Artificial Sequence
  Description of Artificial Sequence: Synthetic oligonucleotide
  Sense strand starting at position 3619 of SEQ ID NO: 1561395
gguagauaaugggcaaguu

SEQ ID NO: 1668696 - RNA, 19 nt, Artificial Sequence
  Description of Artificial Sequence: Synthetic oligonucleotide
  Antisense strand to SEQ ID NO: 1668695
aacuugcccauuaucuacc

SEQ ID NO: 1668697 - RNA, 19 nt, Artificial Sequence
  Description of Artificial Sequence: Synthetic oligonucleotide
  Sense strand starting at position 3620 of SEQ ID NO: 1561395
guagauaaugggcaaguua

SEQ ID NO: 1668698 - RNA, 19 nt, Artificial Sequence
  Description of Artificial Sequence: Synthetic oligonucleotide
  Antisense strand to SEQ ID NO: 1668697
uaacuugcccauuaucuac

SEQ ID NO: 1668699 - RNA, 19 nt, Artificial Sequence
  Description of Artificial Sequence: Synthetic oligonucleotide
  Sense strand starting at position 3674 of SEQ ID NO: 1561395
ggguaaauuugugacauug

SEQ ID NO: 1668700 - RNA, 19 nt, Artificial Sequence
  Description of Artificial Sequence: Synthetic oligonucleotide
  Antisense strand to SEQ ID NO: 1668699
caaugucacaaauuuaccc

SEQ ID NO: 1668701 - RNA, 19 nt, Artificial Sequence
  Description of Artificial Sequence: Synthetic oligonucleotide
  Sense strand starting at position 3676 of SEQ ID NO: 1561395
guaaauuugugacauugac

SEQ ID NO: 1668702 - RNA, 19 nt, Artificial Sequence
  Description of Artificial Sequence: Synthetic oligonucleotide
  Antisense strand to SEQ ID NO: 1668701
gucaaugucacaaauuuac

SEQ ID NO: 1668703 - RNA, 19 nt, Artificial Sequence
  Description of Artificial Sequence: Synthetic oligonucleotide
  Sense strand starting at position 3751 of SEQ ID NO: 1561395
agaugaaacuuggaaccua

SEQ ID NO: 1668704 - RNA, 19 nt, Artificial Sequence
  Description of Artificial Sequence: Synthetic oligonucleotide
  Antisense strand to SEQ ID NO: 1668703
uagguuccaaguuucaucu

SEQ ID NO: 1668705 - RNA, 19 nt, Artificial Sequence
  Description of Artificial Sequence: Synthetic oligonucleotide
  Sense strand starting at position 3830 of SEQ ID NO: 1561395
acacuuauugucugaaagg

SEQ ID NO: 1668706 - RNA, 19 nt, Artificial Sequence
  Description of Artificial Sequence: Synthetic oligonucleotide
  Antisense strand to SEQ ID NO: 1668705
ccuuucagacaauaagugu

SEQ ID NO: 1668707 - RNA, 19 nt, Artificial Sequence
  Description of Artificial Sequence: Synthetic oligonucleotide
  Sense strand starting at position 1084 of SEQ ID NO: 1561396
acgugaauugcggagaaga

SEQ ID NO: 1668708 - RNA, 19 nt, Artificial Sequence
  Description of Artificial Sequence: Synthetic oligonucleotide
  Antisense strand to SEQ ID NO: 1668707
ucuucuccgcaauucacgu

SEQ ID NO: 1668709 - RNA, 19 nt, Artificial Sequence
  Description of Artificial Sequence: Synthetic oligonucleotide
  Sense strand starting at position 1112 of SEQ ID NO: 1561396
uugggaaugucagaaauaa

SEQ ID NO: 1668710 - RNA, 19 nt, Artificial Sequence
  Description of Artificial Sequence: Synthetic oligonucleotide
  Antisense strand to SEQ ID NO: 1668709
uuauuucugacauucccaa

SEQ ID NO: 1668711 - RNA, 19 nt, Artificial Sequence
  Description of Artificial Sequence: Synthetic oligonucleotide
  Sense strand starting at position 1446 of SEQ ID NO: 1561396
cgacucuccuguuucuaau

SEQ ID NO: 1668712 - RNA, 19 nt, Artificial Sequence
  Description of Artificial Sequence: Synthetic oligonucleotide
  Antisense strand to SEQ ID NO: 1668711
auuagaaacaggagagucg

SEQ ID NO: 1668713 - RNA, 19 nt, Artificial Sequence
  Description of Artificial Sequence: Synthetic oligonucleotide
  Sense strand starting at position 1521 of SEQ ID NO: 1561396
ugcaucacgagucaggauu

SEQ ID NO: 1668714 - RNA, 19 nt, Artificial Sequence
  Description of Artificial Sequence: Synthetic oligonucleotide
  Antisense strand to SEQ ID NO: 1668713
aauccugacucgugaugca

SEQ ID NO: 1668715 - RNA, 19 nt, Artificial Sequence
  Description of Artificial Sequence: Synthetic oligonucleotide
  Sense strand starting at position 2082 of SEQ ID NO: 1561396
cccgcaaacccugaaugaa

SEQ ID NO: 1668716 - RNA, 19 nt, Artificial Sequence
  Description of Artificial Sequence: Synthetic oligonucleotide
  Antisense strand to SEQ ID NO: 1668715
uucauucaggguuugcggg

SEQ ID NO: 1668717 - RNA, 19 nt, Artificial Sequence
  Description of Artificial Sequence: Synthetic oligonucleotide
  Sense strand starting at position 2095 of SEQ ID NO: 1561396
aaugaaagaugugaucaga

SEQ ID NO: 1668718 - RNA, 19 nt, Artificial Sequence
  Description of Artificial Sequence: Synthetic oligonucleotide
  Antisense strand to SEQ ID NO: 1668717
ucugaucacaucuuucauu

SEQ ID NO: 1668719 - RNA, 19 nt, Artificial Sequence
  Description of Artificial Sequence: Synthetic oligonucleotide
  Sense strand starting at position 2213 of SEQ ID NO: 1561396
cuuuaaccuuguguauaag

SEQ ID NO: 1668720 - RNA, 19 nt, Artificial Sequence
  Description of Artificial Sequence: Synthetic oligonucleotide
  Antisense strand to SEQ ID NO: 1668719
cuuauacacaagguuaaag

SEQ ID NO: 1668721 - RNA, 19 nt, Artificial Sequence
  Description of Artificial Sequence: Synthetic oligonucleotide
  Sense strand starting at position 2326 of SEQ ID NO: 1561396
gcccuuugaguaggaagua

SEQ ID NO: 1668722 - RNA, 19 nt, Artificial Sequence
  Description of Artificial Sequence: Synthetic oligonucleotide
  Antisense strand to SEQ ID NO: 1668721
uacuuccuacucaaagggc

SEQ ID NO: 1668723 - RNA, 19 nt, Artificial Sequence
  Description of Artificial Sequence: Synthetic oligonucleotide
  Sense strand starting at position 2389 of SEQ ID NO: 1561396
ucuuauucuugagagggag

SEQ ID NO: 1668724 - RNA, 19 nt, Artificial Sequence
  Description of Artificial Sequence: Synthetic oligonucleotide
  Antisense strand to SEQ ID NO: 1668723
cucccucucaagaauaaga

SEQ ID NO: 1668725 - RNA, 19 nt, Artificial Sequence
  Description of Artificial Sequence: Synthetic oligonucleotide
  Sense strand starting at position 2463 of SEQ ID NO: 1561396
gcaaucuaggcuugagcaa

SEQ ID NO: 1668726 - RNA, 19 nt, Artificial Sequence
  Description of Artificial Sequence: Synthetic oligonucleotide
  Antisense strand to SEQ ID NO: 1668725
uugcucaagccuagauugc

SEQ ID NO: 1668727 - RNA, 19 nt, Artificial Sequence
  Description of Artificial Sequence: Synthetic oligonucleotide
  Sense strand starting at position 2582 of SEQ ID NO: 1561396
cuagauagcccagaauggu

SEQ ID NO: 1668728 - RNA, 19 nt, Artificial Sequence
  Description of Artificial Sequence: Synthetic oligonucleotide
  Antisense strand to SEQ ID NO: 1668727
accauucugggcuaucuag

SEQ ID NO: 1668729 - RNA, 19 nt, Artificial Sequence
  Description of Artificial Sequence: Synthetic oligonucleotide
  Sense strand starting at position 2588 of SEQ ID NO: 1561396
agcccagaauggucucaaa

SEQ ID NO: 1668730 - RNA, 19 nt, Artificial Sequence
  Description of Artificial Sequence: Synthetic oligonucleotide
  Antisense strand to SEQ ID NO: 1668729
uuugagaccauucugggcu

SEQ ID NO: 1668731 - RNA, 19 nt, Artificial Sequence
  Description of Artificial Sequence: Synthetic oligonucleotide
  Sense strand starting at position 2713 of SEQ ID NO: 1561396
agcauugagguccauuaau

SEQ ID NO: 1668732 - RNA, 19 nt, Artificial Sequence
  Description of Artificial Sequence: Synthetic oligonucleotide
  Antisense strand to SEQ ID NO: 1668731
auuaauggaccucaaugcu

SEQ ID NO: 1668733 - RNA, 19 nt, Artificial Sequence
  Description of Artificial Sequence: Synthetic oligonucleotide
  Sense strand starting at position 2719 of SEQ ID NO: 1561396
gagguccauuaauagaauu

SEQ ID NO: 1668734 - RNA, 19 nt, Artificial Sequence
  Description of Artificial Sequence: Synthetic oligonucleotide
  Antisense strand to SEQ ID NO: 1668733
aauucuauuaauggaccuc

SEQ ID NO: 1668735 - RNA, 19 nt, Artificial Sequence
  Description of Artificial Sequence: Synthetic oligonucleotide
  Sense strand starting at position 2740 of SEQ ID NO: 1561396
aggaaauguuaugcacaug

SEQ ID NO: 1668736 - RNA, 19 nt, Artificial Sequence
  Description of Artificial Sequence: Synthetic oligonucleotide
  Antisense strand to SEQ ID NO: 1668735
caugugcauaacauuuccu

SEQ ID NO: 1668737 - RNA, 19 nt, Artificial Sequence
  Description of Artificial Sequence: Synthetic oligonucleotide
  Sense strand starting at position 2741 of SEQ ID NO: 1561396
ggaaauguuaugcacaugu

SEQ ID NO: 1668738 - RNA, 19 nt, Artificial Sequence
  Description of Artificial Sequence: Synthetic oligonucleotide
  Antisense strand to SEQ ID NO: 1668737
acaugugcauaacauuucc

SEQ ID NO: 1668739 - RNA, 19 nt, Artificial Sequence
  Description of Artificial Sequence: Synthetic oligonucleotide
  Sense strand starting at position 2818 of SEQ ID NO: 1561396
uagguaauguuaccagaaa

SEQ ID NO: 1668740 - RNA, 19 nt, Artificial Sequence
  Description of Artificial Sequence: Synthetic oligonucleotide
  Antisense strand to SEQ ID NO: 1668739
uuucugguaacauuaccua

SEQ ID NO: 1668741 - RNA, 19 nt, Artificial Sequence
  Description of Artificial Sequence: Synthetic oligonucleotide
  Sense strand starting at position 2857 of SEQ ID NO: 1561396
uaaguugcaguaugcuaau

SEQ ID NO: 1668742 - RNA, 19 nt, Artificial Sequence
  Description of Artificial Sequence: Synthetic oligonucleotide
  Antisense strand to SEQ ID NO: 1668741
auuagcauacugcaacuua

SEQ ID NO: 1668743 - RNA, 19 nt, Artificial Sequence
  Description of Artificial Sequence: Synthetic oligonucleotide
  Sense strand starting at position 2874 of SEQ ID NO: 1561396
auggaauauucuuagugga

SEQ ID NO: 1668744 - RNA, 19 nt, Artificial Sequence
  Description of Artificial Sequence: Synthetic oligonucleotide
  Antisense strand to SEQ ID NO: 1668743
uccacuaagaauauuccau

SEQ ID NO: 1668745 - RNA, 19 nt, Artificial Sequence
  Description of Artificial Sequence: Synthetic oligonucleotide
  Sense strand starting at position 2876 of SEQ ID NO: 1561396
ggaauauucuuaguggaua

SEQ ID NO: 1668746 - RNA, 19 nt, Artificial Sequence
  Description of Artificial Sequence: Synthetic oligonucleotide
  Antisense strand to SEQ ID NO: 1668745
uauccacuaagaauauucc

SEQ ID NO: 1668747 - RNA, 19 nt, Artificial Sequence
  Description of Artificial Sequence: Synthetic oligonucleotide
  Sense strand starting at position 2879 of SEQ ID NO: 1561396
auauucuuaguggauagua

SEQ ID NO: 1668748 - RNA, 19 nt, Artificial Sequence
  Description of Artificial Sequence: Synthetic oligonucleotide
  Antisense strand to SEQ ID NO: 1668747
uacuauccacuaagaauau

SEQ ID NO: 1668749 - RNA, 19 nt, Artificial Sequence
  Description of Artificial Sequence: Synthetic oligonucleotide
  Sense strand starting at position 2881 of SEQ ID NO: 1561396
auucuuaguggauaguauu

SEQ ID NO: 1668750 - RNA, 19 nt, Artificial Sequence
  Description of Artificial Sequence: Synthetic oligonucleotide
  Antisense strand to SEQ ID NO: 1668749
aauacuauccacuaagaau

SEQ ID NO: 1668751 - RNA, 19 nt, Artificial Sequence
  Description of Artificial Sequence: Synthetic oligonucleotide
  Sense strand starting at position 2976 of SEQ ID NO: 1561396
ucucuaauguguucccaug

SEQ ID NO: 1668752 - RNA, 19 nt, Artificial Sequence
  Description of Artificial Sequence: Synthetic oligonucleotide
  Antisense strand to SEQ ID NO: 1668751
caugggaacacauuagaga

SEQ ID NO: 1668753 - RNA, 19 nt, Artificial Sequence
  Description of Artificial Sequence: Synthetic oligonucleotide
  Sense strand starting at position 2978 of SEQ ID NO: 1561396
ucuaauguguucccaugau

SEQ ID NO: 1668754 - RNA, 19 nt, Artificial Sequence
  Description of Artificial Sequence: Synthetic oligonucleotide
  Antisense strand to SEQ ID NO: 1668753
aucaugggaacacauuaga

SEQ ID NO: 1668755 - RNA, 19 nt, Artificial Sequence
  Description of Artificial Sequence: Synthetic oligonucleotide
  Sense strand starting at position 2982 of SEQ ID NO: 1561396
auguguucccaugauauag

SEQ ID NO: 1668756 - RNA, 19 nt, Artificial Sequence
  Description of Artificial Sequence: Synthetic oligonucleotide
  Antisense strand to SEQ ID NO: 1668755
cuauaucaugggaacacau

SEQ ID NO: 1668757 - RNA, 19 nt, Artificial Sequence
  Description of Artificial Sequence: Synthetic oligonucleotide
  Sense strand starting at position 3127 of SEQ ID NO: 1561396
aagugaccauucucuguga

SEQ ID NO: 1668758 - RNA, 19 nt, Artificial Sequence
  Description of Artificial Sequence: Synthetic oligonucleotide
  Antisense strand to SEQ ID NO: 1668757
ucacagagaauggucacuu

SEQ ID NO: 1668759 - RNA, 19 nt, Artificial Sequence
  Description of Artificial Sequence: Synthetic oligonucleotide
  Sense strand starting at position 3129 of SEQ ID NO: 1561396
gugaccauucucugugauu

SEQ ID NO: 1668760 - RNA, 19 nt, Artificial Sequence
  Description of Artificial Sequence: Synthetic oligonucleotide
  Antisense strand to SEQ ID NO: 1668759
aaucacagagaauggucac

SEQ ID NO: 1668761 - RNA, 19 nt, Artificial Sequence
  Description of Artificial Sequence: Synthetic oligonucleotide
  Sense strand starting at position 3163 of SEQ ID NO: 1561396
uguguaaacagauguguau

SEQ ID NO: 1668762 - RNA, 19 nt, Artificial Sequence
  Description of Artificial Sequence: Synthetic oligonucleotide
  Antisense strand to SEQ ID NO: 1668761
auacacaucuguuuacaca

SEQ ID NO: 1668763 - RNA, 19 nt, Artificial Sequence
  Description of Artificial Sequence: Synthetic oligonucleotide
  Sense strand starting at position 3172 of SEQ ID NO: 1561396
agauguguauuugcaucua

SEQ ID NO: 1668764 - RNA, 19 nt, Artificial Sequence
  Description of Artificial Sequence: Synthetic oligonucleotide
  Antisense strand to SEQ ID NO: 1668763
uagaugcaaauacacaucu

SEQ ID NO: 1668765 - RNA, 19 nt, Artificial Sequence
  Description of Artificial Sequence: Synthetic oligonucleotide
  Sense strand starting at position 3676 of SEQ ID NO: 1561396
cucucuuucuugguuugau

SEQ ID NO: 1668766 - RNA, 19 nt, Artificial Sequence
  Description of Artificial Sequence: Synthetic oligonucleotide
  Antisense strand to SEQ ID NO: 1668765
aucaaaccaagaaagagag

SEQ ID NO: 1668767 - RNA, 19 nt, Artificial Sequence
  Description of Artificial Sequence: Synthetic oligonucleotide
  Sense strand starting at position 3677 of SEQ ID NO: 1561396
ucucuuucuugguuugauc

SEQ ID NO: 1668768 - RNA, 19 nt, Artificial Sequence
  Description of Artificial Sequence: Synthetic oligonucleotide
  Antisense strand to SEQ ID NO: 1668767
gaucaaaccaagaaagaga

SEQ ID NO: 1668769 - RNA, 19 nt, Artificial Sequence
  Description of Artificial Sequence: Synthetic oligonucleotide
  Sense strand starting at position 3695 of SEQ ID NO: 1561396
ccaguaaugcaggacaacu

SEQ ID NO: 1668770 - RNA, 19 nt, Artificial Sequence
  Description of Artificial Sequence: Synthetic oligonucleotide
  Antisense strand to SEQ ID NO: 1668769
aguuguccugcauuacugg

SEQ ID NO: 1668771 - RNA, 19 nt, Artificial Sequence
  Description of Artificial Sequence: Synthetic oligonucleotide
  Sense strand starting at position 3762 of SEQ ID NO: 1561396
auucuugaguccuugauaa

SEQ ID NO: 1668772 - RNA, 19 nt, Artificial Sequence
  Description of Artificial Sequence: Synthetic oligonucleotide
  Antisense strand to SEQ ID NO: 1668771
uuaucaaggacucaagaau

SEQ ID NO: 1668773 - RNA, 19 nt, Artificial Sequence
  Description of Artificial Sequence: Synthetic oligonucleotide
  Sense strand starting at position 3764 of SEQ ID NO: 1561396
ucuugaguccuugauaagc

SEQ ID NO: 1668774 - RNA, 19 nt, Artificial Sequence
  Description of Artificial Sequence: Synthetic oligonucleotide
  Antisense strand to SEQ ID NO: 1668773
gcuuaucaaggacucaaga

SEQ ID NO: 1668775 - RNA, 19 nt, Artificial Sequence
  Description of Artificial Sequence: Synthetic oligonucleotide
  Sense strand starting at position 3812 of SEQ ID NO: 1561396
agugaaccugcauaucuaa

SEQ ID NO: 1668776 - RNA, 19 nt, Artificial Sequence
  Description of Artificial Sequence: Synthetic oligonucleotide
  Antisense strand to SEQ ID NO: 1668775
uuagauaugcagguucacu

SEQ ID NO: 1668777 - RNA, 19 nt, Artificial Sequence
  Description of Artificial Sequence: Synthetic oligonucleotide
  Sense strand starting at position 3887 of SEQ ID NO: 1561396
gagaaaugacucugaguuc

SEQ ID NO: 1668778 - RNA, 19 nt, Artificial Sequence
  Description of Artificial Sequence: Synthetic oligonucleotide
  Antisense strand to SEQ ID NO: 1668777
gaacucagagucauuucuc

SEQ ID NO: 1668779 - RNA, 19 nt, Artificial Sequence
  Description of Artificial Sequence: Synthetic oligonucleotide
  Sense strand starting at position 3890 of SEQ ID NO: 1561396
aaaugacucugaguucugu

SEQ ID NO: 1668780 - RNA, 19 nt, Artificial Sequence
  Description of Artificial Sequence: Synthetic oligonucleotide
  Antisense strand to SEQ ID NO: 1668779
acagaacucagagucauuu

SEQ ID NO: 1668781 - RNA, 19 nt, Artificial Sequence
  Description of Artificial Sequence: Synthetic oligonucleotide
  Sense strand starting at position 3907 of SEQ ID NO: 1561396
gucugucuuugguucucaa

SEQ ID NO: 1668782 - RNA, 19 nt, Artificial Sequence
  Description of Artificial Sequence: Synthetic oligonucleotide
  Antisense strand to SEQ ID NO: 1668781
uugagaaccaaagacagac

SEQ ID NO: 1668783 - RNA, 19 nt, Artificial Sequence
  Description of Artificial Sequence: Synthetic oligonucleotide
  Sense strand starting at position 3910 of SEQ ID NO: 1561396
ugucuuugguucucaagga

SEQ ID NO: 1668784 - RNA, 19 nt, Artificial Sequence
  Description of Artificial Sequence: Synthetic oligonucleotide
  Antisense strand to SEQ ID NO: 1668783
uccuugagaaccaaagaca

SEQ ID NO: 1668785 - RNA, 19 nt, Artificial Sequence
  Description of Artificial Sequence: Synthetic oligonucleotide
  Sense strand starting at position 3934 of SEQ ID NO: 1561396
cuuguuggcuaauuguaaa

SEQ ID NO: 1668786 - RNA, 19 nt, Artificial Sequence
  Description of Artificial Sequence: Synthetic oligonucleotide
  Antisense strand to SEQ ID NO: 1668785
uuuacaauuagccaacaag

SEQ ID NO: 1668787 - RNA, 19 nt, Artificial Sequence
  Description of Artificial Sequence: Synthetic oligonucleotide
  Sense strand starting at position 21 of SEQ ID NO: 1561397
caagaucucugugcccaga

SEQ ID NO: 1668788 - RNA, 19 nt, Artificial Sequence
  Description of Artificial Sequence: Synthetic oligonucleotide
  Antisense strand to SEQ ID NO: 1668787
ucugggcacagagaucuug

SEQ ID NO: 1668789 - RNA, 19 nt, Artificial Sequence
  Description of Artificial Sequence: Synthetic oligonucleotide
  Sense strand starting at position 24 of SEQ ID NO: 1561397
gaucucugugcccagagaa

SEQ ID NO: 1668790 - RNA, 19 nt, Artificial Sequence
  Description of Artificial Sequence: Synthetic oligonucleotide
  Antisense strand to SEQ ID NO: 1668789
uucucugggcacagagauc

SEQ ID NO: 1668791 - RNA, 19 nt, Artificial Sequence
  Description of Artificial Sequence: Synthetic oligonucleotide
  Sense strand starting at position 225 of SEQ ID NO: 1561397
aggugauaaugugaauuag

SEQ ID NO: 1668792 - RNA, 19 nt, Artificial Sequence
  Description of Artificial Sequence: Synthetic oligonucleotide
  Antisense strand to SEQ ID NO: 1668791
cuaauucacauuaucaccu

SEQ ID NO: 1668793 - RNA, 19 nt, Artificial Sequence
  Description of Artificial Sequence: Synthetic oligonucleotide
  Sense strand starting at position 307 of SEQ ID NO: 1561397
cagagugaggcuggagaaa

SEQ ID NO: 1668794 - RNA, 19 nt, Artificial Sequence
  Description of Artificial Sequence: Synthetic oligonucleotide
  Antisense strand to SEQ ID NO: 1668793
uuucuccagccucacucug

SEQ ID NO: 1668795 - RNA, 19 nt, Artificial Sequence
  Description of Artificial Sequence: Synthetic oligonucleotide
  Sense strand starting at position 413 of SEQ ID NO: 1561397
aauugaguggcaggcaauu

SEQ ID NO: 1668796 - RNA, 19 nt, Artificial Sequence
  Description of Artificial Sequence: Synthetic oligonucleotide
  Antisense strand to SEQ ID NO: 1668795
aauugccugccacucaauu

SEQ ID NO: 1668797 - RNA, 19 nt, Artificial Sequence
  Description of Artificial Sequence: Synthetic oligonucleotide
  Sense strand starting at position 425 of SEQ ID NO: 1561397
ggcaauuagacugaggugu

SEQ ID NO: 1668798 - RNA, 19 nt, Artificial Sequence
  Description of Artificial Sequence: Synthetic oligonucleotide
  Antisense strand to SEQ ID NO: 1668797
acaccucagucuaauugcc

SEQ ID NO: 1668799 - RNA, 19 nt, Artificial Sequence
  Description of Artificial Sequence: Synthetic oligonucleotide
  Sense strand starting at position 873 of SEQ ID NO: 1561397
ccaauuaaggucugauuac

SEQ ID NO: 1668800 - RNA, 19 nt, Artificial Sequence
  Description of Artificial Sequence: Synthetic oligonucleotide
  Antisense strand to SEQ ID NO: 1668799
guaaucagaccuuaauugg

SEQ ID NO: 1668801 - RNA, 19 nt, Artificial Sequence
  Description of Artificial Sequence: Synthetic oligonucleotide
  Sense strand starting at position 1093 of SEQ ID NO: 1561397
uguggugacuucuguacau

SEQ ID NO: 1668802 - RNA, 19 nt, Artificial Sequence
  Description of Artificial Sequence: Synthetic oligonucleotide
  Antisense strand to SEQ ID NO: 1668801
auguacagaagucaccaca

SEQ ID NO: 1668803 - RNA, 19 nt, Artificial Sequence
  Description of Artificial Sequence: Synthetic oligonucleotide
  Sense strand starting at position 1445 of SEQ ID NO: 1561397
ggaccaaaguucuucccau

SEQ ID NO: 1668804 - RNA, 19 nt, Artificial Sequence
  Description of Artificial Sequence: Synthetic oligonucleotide
  Antisense strand to SEQ ID NO: 1668803
augggaagaacuuuggucc

SEQ ID NO: 1668805 - RNA, 19 nt, Artificial Sequence
  Description of Artificial Sequence: Synthetic oligonucleotide
  Sense strand starting at position 1486 of SEQ ID NO: 1561397
aggauucucccgugacgau

SEQ ID NO: 1668806 - RNA, 19 nt, Artificial Sequence
  Description of Artificial Sequence: Synthetic oligonucleotide
  Antisense strand to SEQ ID NO: 1668805
aucgucacgggagaauccu

SEQ ID NO: 1668807 - RNA, 19 nt, Artificial Sequence
  Description of Artificial Sequence: Synthetic oligonucleotide
  Sense strand starting at position 1487 of SEQ ID NO: 1561397
ggauucucccgugacgauu

SEQ ID NO: 1668808 - RNA, 19 nt, Artificial Sequence
  Description of Artificial Sequence: Synthetic oligonucleotide
  Antisense strand to SEQ ID NO: 1668807
aaucgucacgggagaaucc

SEQ ID NO: 1668809 - RNA, 19 nt, Artificial Sequence
  Description of Artificial Sequence: Synthetic oligonucleotide
  Sense strand starting at position 1500 of SEQ ID NO: 1561397
acgauucucccgugacgau

SEQ ID NO: 1668810 - RNA, 19 nt, Artificial Sequence
  Description of Artificial Sequence: Synthetic oligonucleotide
  Antisense strand to SEQ ID NO: 1668809
aucgucacgggagaaucgu

SEQ ID NO: 1668811 - RNA, 19 nt, Artificial Sequence
  Description of Artificial Sequence: Synthetic oligonucleotide
  Sense strand starting at position 2030 of SEQ ID NO: 1561397
cugccuagcgucucugauu

SEQ ID NO: 1668812 - RNA, 19 nt, Artificial Sequence
  Description of Artificial Sequence: Synthetic oligonucleotide
  Antisense strand to SEQ ID NO: 1668811
aaucagagacgcuaggcag

SEQ ID NO: 1668813 - RNA, 19 nt, Artificial Sequence
  Description of Artificial Sequence: Synthetic oligonucleotide
  Sense strand starting at position 2035 of SEQ ID NO: 1561397
uagcgucucugauuggaua

SEQ ID NO: 1668814 - RNA, 19 nt, Artificial Sequence
  Description of Artificial Sequence: Synthetic oligonucleotide
  Antisense strand to SEQ ID NO: 1668813
uauccaaucagagacgcua

SEQ ID NO: 1668815 - RNA, 19 nt, Artificial Sequence
  Description of Artificial Sequence: Synthetic oligonucleotide
  Sense strand starting at position 2038 of SEQ ID NO: 1561397
cgucucugauuggauaaca

SEQ ID NO: 1668816 - RNA, 19 nt, Artificial Sequence
  Description of Artificial Sequence: Synthetic oligonucleotide
  Antisense strand to SEQ ID NO: 1668815
uguuauccaaucagagacg

SEQ ID NO: 1668817 - RNA, 19 nt, Artificial Sequence
  Description of Artificial Sequence: Synthetic oligonucleotide
  Sense strand starting at position 2043 of SEQ ID NO: 1561397
cugauuggauaacauuuaa

SEQ ID NO: 1668818 - RNA, 19 nt, Artificial Sequence
  Description of Artificial Sequence: Synthetic oligonucleotide
  Antisense strand to SEQ ID NO: 1668817
uuaaauguuauccaaucag

SEQ ID NO: 1668819 - RNA, 19 nt, Artificial Sequence
  Description of Artificial Sequence: Synthetic oligonucleotide
  Sense strand starting at position 2077 of SEQ ID NO: 1561397
ggccaugauugacggaaga

SEQ ID NO: 1668820 - RNA, 19 nt, Artificial Sequence
  Description of Artificial Sequence: Synthetic oligonucleotide
  Antisense strand to SEQ ID NO: 1668819
ucuuccgucaaucauggcc

SEQ ID NO: 1668821 - RNA, 19 nt, Artificial Sequence
  Description of Artificial Sequence: Synthetic oligonucleotide
  Sense strand starting at position 2087 of SEQ ID NO: 1561397
gacggaagaugugaugaga

SEQ ID NO: 1668822 - RNA, 19 nt, Artificial Sequence
  Description of Artificial Sequence: Synthetic oligonucleotide
  Antisense strand to SEQ ID NO: 1668821
ucucaucacaucuuccguc

SEQ ID NO: 1668823 - RNA, 19 nt, Artificial Sequence
  Description of Artificial Sequence: Synthetic oligonucleotide
  Sense strand starting at position 2136 of SEQ ID NO: 1561397
gcugcauccuucucugaca

SEQ ID NO: 1668824 - RNA, 19 nt, Artificial Sequence
  Description of Artificial Sequence: Synthetic oligonucleotide
  Antisense strand to SEQ ID NO: 1668823
ugucagagaaggaugcagc

SEQ ID NO: 1668825 - RNA, 19 nt, Artificial Sequence
  Description of Artificial Sequence: Synthetic oligonucleotide
  Sense strand starting at position 2397 of SEQ ID NO: 1561397
gcccauguguguuauccca

SEQ ID NO: 1668826 - RNA, 19 nt, Artificial Sequence
  Description of Artificial Sequence: Synthetic oligonucleotide
  Antisense strand to SEQ ID NO: 1668825
ugggauaacacacaugggc

SEQ ID NO: 1668827 - RNA, 19 nt, Artificial Sequence
  Description of Artificial Sequence: Synthetic oligonucleotide
  Sense strand starting at position 2404 of SEQ ID NO: 1561397
uguguuaucccagguacuc

SEQ ID NO: 1668828 - RNA, 19 nt, Artificial Sequence
  Description of Artificial Sequence: Synthetic oligonucleotide
  Antisense strand to SEQ ID NO: 1668827
gaguaccugggauaacaca

SEQ ID NO: 1668829 - RNA, 19 nt, Artificial Sequence
  Description of Artificial Sequence: Synthetic oligonucleotide
  Sense strand starting at position 3389 of SEQ ID NO: 1561397
augguaaucuucugaaaua

SEQ ID NO: 1668830 - RNA, 19 nt, Artificial Sequence
  Description of Artificial Sequence: Synthetic oligonucleotide
  Antisense strand to SEQ ID NO: 1668829
uauuucagaagauuaccau

SEQ ID NO: 1668831 - RNA, 19 nt, Artificial Sequence
  Description of Artificial Sequence: Synthetic oligonucleotide
  Sense strand starting at position 3390 of SEQ ID NO: 1561397
ugguaaucuucugaaauaa

SEQ ID NO: 1668832 - RNA, 19 nt, Artificial Sequence
  Description of Artificial Sequence: Synthetic oligonucleotide
  Antisense strand to SEQ ID NO: 1668831
uuauuucagaagauuacca

SEQ ID NO: 1668833 - RNA, 19 nt, Artificial Sequence
  Description of Artificial Sequence: Synthetic oligonucleotide
  Sense strand starting at position 3523 of SEQ ID NO: 1561397
uuuaaugugugaggaaugu

SEQ ID NO: 1668834 - RNA, 19 nt, Artificial Sequence
  Description of Artificial Sequence: Synthetic oligonucleotide
  Antisense strand to SEQ ID NO: 1668833
acauuccucacacauuaaa

SEQ ID NO: 1668835 - RNA, 19 nt, Artificial Sequence
  Description of Artificial Sequence: Synthetic oligonucleotide
  Sense strand starting at position 3527 of SEQ ID NO: 1561397
augugugaggaauguguaa

SEQ ID NO: 1668836 - RNA, 19 nt, Artificial Sequence
  Description of Artificial Sequence: Synthetic oligonucleotide
  Antisense strand to SEQ ID NO: 1668835
uuacacauuccucacacau

SEQ ID NO: 1668837 - RNA, 19 nt, Artificial Sequence
  Description of Artificial Sequence: Synthetic oligonucleotide
  Sense strand starting at position 3529 of SEQ ID NO: 1561397
gugugaggaauguguaauu

SEQ ID NO: 1668838 - RNA, 19 nt, Artificial Sequence
  Description of Artificial Sequence: Synthetic oligonucleotide
  Antisense strand to SEQ ID NO: 1668837
aauuacacauuccucacac

SEQ ID NO: 1668839 - RNA, 19 nt, Artificial Sequence
  Description of Artificial Sequence: Synthetic oligonucleotide
  Sense strand starting at position 3792 of SEQ ID NO: 1561397
aacagauaguggccauaaa

SEQ ID NO: 1668840 - RNA, 19 nt, Artificial Sequence
  Description of Artificial Sequence: Synthetic oligonucleotide
  Antisense strand to SEQ ID NO: 1668839
uuuauggccacuaucuguu

SEQ ID NO: 1668841 - RNA, 19 nt, Artificial Sequence
  Description of Artificial Sequence: Synthetic oligonucleotide
  Sense strand starting at position 25 of SEQ ID NO: 1561398
ucacuuaugugcucaugaa

SEQ ID NO: 1668842 - RNA, 19 nt, Artificial Sequence
  Description of Artificial Sequence: Synthetic oligonucleotide
  Antisense strand to SEQ ID NO: 1668841
uucaugagcacauaaguga

SEQ ID NO: 1668843 - RNA, 19 nt, Artificial Sequence
  Description of Artificial Sequence: Synthetic oligonucleotide
  Sense strand starting at position 64 of SEQ ID NO: 1561398
gcaguauuucucggugacu

SEQ ID NO: 1668844 - RNA, 19 nt, Artificial Sequence
  Description of Artificial Sequence: Synthetic oligonucleotide
  Antisense strand to SEQ ID NO: 1668843
agucaccgagaaauacugc

SEQ ID NO: 1668845 - RNA, 19 nt, Artificial Sequence
  Description of Artificial Sequence: Synthetic oligonucleotide
  Sense strand starting at position 65 of SEQ ID NO: 1561398
caguauuucucggugacug

SEQ ID NO: 1668846 - RNA, 19 nt, Artificial Sequence
  Description of Artificial Sequence: Synthetic oligonucleotide
  Antisense strand to SEQ ID NO: 1668845
cagucaccgagaaauacug

SEQ ID NO: 1668847 - RNA, 19 nt, Artificial Sequence
  Description of Artificial Sequence: Synthetic oligonucleotide
  Sense strand starting at position 354 of SEQ ID NO: 1561398
cuggguugggcguagacaa

SEQ ID NO: 1668848 - RNA, 19 nt, Artificial Sequence
  Description of Artificial Sequence: Synthetic oligonucleotide
  Antisense strand to SEQ ID NO: 1668847
uugucuacgcccaacccag

SEQ ID NO: 1668849 - RNA, 19 nt, Artificial Sequence
  Description of Artificial Sequence: Synthetic oligonucleotide
  Sense strand starting at position 356 of SEQ ID NO: 1561398
ggguugggcguagacaauu

SEQ ID NO: 1668850 - RNA, 19 nt, Artificial Sequence
  Description of Artificial Sequence: Synthetic oligonucleotide
  Antisense strand to SEQ ID NO: 1668849
aauugucuacgcccaaccc

SEQ ID NO: 1668851 - RNA, 19 nt, Artificial Sequence
  Description of Artificial Sequence: Synthetic oligonucleotide
  Sense strand starting at position 380 of SEQ ID NO: 1561398
gucucaagagguuaccuuu

SEQ ID NO: 1668852 - RNA, 19 nt, Artificial Sequence
  Description of Artificial Sequence: Synthetic oligonucleotide
  Antisense strand to SEQ ID NO: 1668851
aaagguaaccucuugagac

SEQ ID NO: 1668853 - RNA, 19 nt, Artificial Sequence
  Description of Artificial Sequence: Synthetic oligonucleotide
  Sense strand starting at position 479 of SEQ ID NO: 1561398
caagucguccuauggaaga

SEQ ID NO: 1668854 - RNA, 19 nt, Artificial Sequence
  Description of Artificial Sequence: Synthetic oligonucleotide
  Antisense strand to SEQ ID NO: 1668853
ucuuccauaggacgacuug

SEQ ID NO: 1668855 - RNA, 19 nt, Artificial Sequence
  Description of Artificial Sequence: Synthetic oligonucleotide
  Sense strand starting at position 481 of SEQ ID NO: 1561398
agucguccuauggaagaaa

SEQ ID NO: 1668856 - RNA, 19 nt, Artificial Sequence
  Description of Artificial Sequence: Synthetic oligonucleotide
  Antisense strand to SEQ ID NO: 1668855
uuucuuccauaggacgacu

SEQ ID NO: 1668857 - RNA, 19 nt, Artificial Sequence
  Description of Artificial Sequence: Synthetic oligonucleotide
  Sense strand starting at position 674 of SEQ ID NO: 1561398
caagaucucugugccuaga

SEQ ID NO: 1668858 - RNA, 19 nt, Artificial Sequence
  Description of Artificial Sequence: Synthetic oligonucleotide
  Antisense strand to SEQ ID NO: 1668857
ucuaggcacagagaucuug

SEQ ID NO: 1668859 - RNA, 19 nt, Artificial Sequence
  Description of Artificial Sequence: Synthetic oligonucleotide
  Sense strand starting at position 676 of SEQ ID NO: 1561398
agaucucugugccuagaga

SEQ ID NO: 1668860 - RNA, 19 nt, Artificial Sequence
  Description of Artificial Sequence: Synthetic oligonucleotide
  Antisense strand to SEQ ID NO: 1668859
ucucuaggcacagagaucu

SEQ ID NO: 1668861 - RNA, 19 nt, Artificial Sequence
  Description of Artificial Sequence: Synthetic oligonucleotide
  Sense strand starting at position 677 of SEQ ID NO: 1561398
gaucucugugccuagagaa

SEQ ID NO: 1668862 - RNA, 19 nt, Artificial Sequence
  Description of Artificial Sequence: Synthetic oligonucleotide
  Antisense strand to SEQ ID NO: 1668861
uucucuaggcacagagauc

SEQ ID NO: 1668863 - RNA, 19 nt, Artificial Sequence
  Description of Artificial Sequence: Synthetic oligonucleotide
  Sense strand starting at position 825 of SEQ ID NO: 1561398
gucauuuaaugcuuuguca

SEQ ID NO: 1668864 - RNA, 19 nt, Artificial Sequence
  Description of Artificial Sequence: Synthetic oligonucleotide
  Antisense strand to SEQ ID NO: 1668863
ugacaaagcauuaaaugac

SEQ ID NO: 1668865 - RNA, 19 nt, Artificial Sequence
  Description of Artificial Sequence: Synthetic oligonucleotide
  Sense strand starting at position 890 of SEQ ID NO: 1561398
aggcgauaacgugaauuag

SEQ ID NO: 1668866 - RNA, 19 nt, Artificial Sequence
  Description of Artificial Sequence: Synthetic oligonucleotide
  Antisense strand to SEQ ID NO: 1668865
cuaauucacguuaucgccu

SEQ ID NO: 1668867 - RNA, 19 nt, Artificial Sequence
  Description of Artificial Sequence: Synthetic oligonucleotide
  Sense strand starting at position 1354 of SEQ ID NO: 1561398
gcccaugaagcacaaauua

SEQ ID NO: 1668868 - RNA, 19 nt, Artificial Sequence
  Description of Artificial Sequence: Synthetic oligonucleotide
  Antisense strand to SEQ ID NO: 1668867
uaauuugugcuucaugggc

SEQ ID NO: 1668869 - RNA, 19 nt, Artificial Sequence
  Description of Artificial Sequence: Synthetic oligonucleotide
  Sense strand starting at position 1563 of SEQ ID NO: 1561398
cugcacaaucugggaaaga

SEQ ID NO: 1668870 - RNA, 19 nt, Artificial Sequence
  Description of Artificial Sequence: Synthetic oligonucleotide
  Antisense strand to SEQ ID NO: 1668869
ucuuucccagauugugcag

SEQ ID NO: 1668871 - RNA, 19 nt, Artificial Sequence
  Description of Artificial Sequence: Synthetic oligonucleotide
  Sense strand starting at position 2195 of SEQ ID NO: 1561398
ggcuuccucccagagcuua

SEQ ID NO: 1668872 - RNA, 19 nt, Artificial Sequence
  Description of Artificial Sequence: Synthetic oligonucleotide
  Antisense strand to SEQ ID NO: 1668871
uaagcucugggaggaagcc

SEQ ID NO: 1668873 - RNA, 19 nt, Artificial Sequence
  Description of Artificial Sequence: Synthetic oligonucleotide
  Sense strand starting at position 2238 of SEQ ID NO: 1561398
uguauuuaaccuugugugu

SEQ ID NO: 1668874 - RNA, 19 nt, Artificial Sequence
  Description of Artificial Sequence: Synthetic oligonucleotide
  Antisense strand to SEQ ID NO: 1668873
acacacaagguuaaauaca

SEQ ID NO: 1668875 - RNA, 19 nt, Artificial Sequence
  Description of Artificial Sequence: Synthetic oligonucleotide
  Sense strand starting at position 2243 of SEQ ID NO: 1561398
uuaaccuuguguguaaagu

SEQ ID NO: 1668876 - RNA, 19 nt, Artificial Sequence
  Description of Artificial Sequence: Synthetic oligonucleotide
  Antisense strand to SEQ ID NO: 1668875
acuuuacacacaagguuaa

SEQ ID NO: 1668877 - RNA, 19 nt, Artificial Sequence
  Description of Artificial Sequence: Synthetic oligonucleotide
  Sense strand starting at position 2417 of SEQ ID NO: 1561398
aaaugugagccauauguaa

SEQ ID NO: 1668878 - RNA, 19 nt, Artificial Sequence
  Description of Artificial Sequence: Synthetic oligonucleotide
  Antisense strand to SEQ ID NO: 1668877
uuacauauggcucacauuu

SEQ ID NO: 1668879 - RNA, 19 nt, Artificial Sequence
  Description of Artificial Sequence: Synthetic oligonucleotide
  Sense strand starting at position 2537 of SEQ ID NO: 1561398
augugugagaaauauguga

SEQ ID NO: 1668880 - RNA, 19 nt, Artificial Sequence
  Description of Artificial Sequence: Synthetic oligonucleotide
  Antisense strand to SEQ ID NO: 1668879
ucacauauuucucacacau

SEQ ID NO: 1668881 - RNA, 19 nt, Artificial Sequence
  Description of Artificial Sequence: Synthetic oligonucleotide
  Sense strand starting at position 2539 of SEQ ID NO: 1561398
gugugagaaauaugugauu

SEQ ID NO: 1668882 - RNA, 19 nt, Artificial Sequence
  Description of Artificial Sequence: Synthetic oligonucleotide
  Antisense strand to SEQ ID NO: 1668881
aaucacauauuucucacac

SEQ ID NO: 1668883 - RNA, 19 nt, Artificial Sequence
  Description of Artificial Sequence: Synthetic oligonucleotide
  Sense strand starting at position 2541 of SEQ ID NO: 1561398
gugagaaauaugugauuau

SEQ ID NO: 1668884 - RNA, 19 nt, Artificial Sequence
  Description of Artificial Sequence: Synthetic oligonucleotide
  Antisense strand to SEQ ID NO: 1668883
auaaucacauauuucucac

SEQ ID NO: 1668885 - RNA, 19 nt, Artificial Sequence
  Description of Artificial Sequence: Synthetic oligonucleotide
  Sense strand starting at position 2701 of SEQ ID NO: 1561398
cucugaugucgggagguga

SEQ ID NO: 1668886 - RNA, 19 nt, Artificial Sequence
  Description of Artificial Sequence: Synthetic oligonucleotide
  Antisense strand to SEQ ID NO: 1668885
ucaccucccgacaucagag

SEQ ID NO: 1668887 - RNA, 19 nt, Artificial Sequence
  Description of Artificial Sequence: Synthetic oligonucleotide
  Sense strand starting at position 2783 of SEQ ID NO: 1561398
uucaguucugaggguggaa

SEQ ID NO: 1668888 - RNA, 19 nt, Artificial Sequence
  Description of Artificial Sequence: Synthetic oligonucleotide
  Antisense strand to SEQ ID NO: 1668887
uuccacccucagaacugaa

SEQ ID NO: 1668889 - RNA, 19 nt, Artificial Sequence
  Description of Artificial Sequence: Synthetic oligonucleotide
  Sense strand starting at position 2785 of SEQ ID NO: 1561398
caguucugaggguggaaca

SEQ ID NO: 1668890 - RNA, 19 nt, Artificial Sequence
  Description of Artificial Sequence: Synthetic oligonucleotide
  Antisense strand to SEQ ID NO: 1668889
uguuccacccucagaacug

SEQ ID NO: 1668891 - RNA, 19 nt, Artificial Sequence
  Description of Artificial Sequence: Synthetic oligonucleotide
  Sense strand starting at position 3041 of SEQ ID NO: 1561398
auggucaggccguaguuau

SEQ ID NO: 1668892 - RNA, 19 nt, Artificial Sequence
  Description of Artificial Sequence: Synthetic oligonucleotide
  Antisense strand to SEQ ID NO: 1668891
auaacuacggccugaccau

SEQ ID NO: 1668893 - RNA, 19 nt, Artificial Sequence
  Description of Artificial Sequence: Synthetic oligonucleotide
  Sense strand starting at position 3113 of SEQ ID NO: 1561398
cauacaugucuacguguau

SEQ ID NO: 1668894 - RNA, 19 nt, Artificial Sequence
  Description of Artificial Sequence: Synthetic oligonucleotide
  Antisense strand to SEQ ID NO: 1668893
auacacguagacauguaug

SEQ ID NO: 1668895 - RNA, 19 nt, Artificial Sequence
  Description of Artificial Sequence: Synthetic oligonucleotide
  Sense strand starting at position 3114 of SEQ ID NO: 1561398
auacaugucuacguguauu

SEQ ID NO: 1668896 - RNA, 19 nt, Artificial Sequence
  Description of Artificial Sequence: Synthetic oligonucleotide
  Antisense strand to SEQ ID NO: 1668895
aauacacguagacauguau

SEQ ID NO: 1668897 - RNA, 19 nt, Artificial Sequence
  Description of Artificial Sequence: Synthetic oligonucleotide
  Sense strand starting at position 3122 of SEQ ID NO: 1561398
cuacguguauuucugcauu

SEQ ID NO: 1668898 - RNA, 19 nt, Artificial Sequence
  Description of Artificial Sequence: Synthetic oligonucleotide
  Antisense strand to SEQ ID NO: 1668897
aaugcagaaauacacguag

SEQ ID NO: 1668899 - RNA, 19 nt, Artificial Sequence
  Description of Artificial Sequence: Synthetic oligonucleotide
  Sense strand starting at position 3124 of SEQ ID NO: 1561398
acguguauuucugcauuac

SEQ ID NO: 1668900 - RNA, 19 nt, Artificial Sequence
  Description of Artificial Sequence: Synthetic oligonucleotide
  Antisense strand to SEQ ID NO: 1668899
guaaugcagaaauacacgu

SEQ ID NO: 1668901 - RNA, 19 nt, Artificial Sequence
  Description of Artificial Sequence: Synthetic oligonucleotide
  Sense strand starting at position 3125 of SEQ ID NO: 1561398
cguguauuucugcauuacu

SEQ ID NO: 1668902 - RNA, 19 nt, Artificial Sequence
  Description of Artificial Sequence: Synthetic oligonucleotide
  Antisense strand to SEQ ID NO: 1668901
aguaaugcagaaauacacg

SEQ ID NO: 1668903 - RNA, 19 nt, Artificial Sequence
  Description of Artificial Sequence: Synthetic oligonucleotide
  Sense strand starting at position 3276 of SEQ ID NO: 1561398
guauuaguuagcuauugua

SEQ ID NO: 1668904 - RNA, 19 nt, Artificial Sequence
  Description of Artificial Sequence: Synthetic oligonucleotide
  Antisense strand to SEQ ID NO: 1668903
uacaauagcuaacuaauac

SEQ ID NO: 1668905 - RNA, 19 nt, Artificial Sequence
  Description of Artificial Sequence: Synthetic oligonucleotide
  Sense strand starting at position 3286 of SEQ ID NO: 1561398
gcuauuguagcauaacaaa

SEQ ID NO: 1668906 - RNA, 19 nt, Artificial Sequence
  Description of Artificial Sequence: Synthetic oligonucleotide
  Antisense strand to SEQ ID NO: 1668905
uuuguuaugcuacaauagc

SEQ ID NO: 1668907 - RNA, 19 nt, Artificial Sequence
  Description of Artificial Sequence: Synthetic oligonucleotide
  Sense strand starting at position 3324 of SEQ ID NO: 1561398
ucauaauugagauggucag

SEQ ID NO: 1668908 - RNA, 19 nt, Artificial Sequence
  Description of Artificial Sequence: Synthetic oligonucleotide
  Antisense strand to SEQ ID NO: 1668907
cugaccaucucaauuauga

SEQ ID NO: 1668909 - RNA, 19 nt, Artificial Sequence
  Description of Artificial Sequence: Synthetic oligonucleotide
  Sense strand starting at position 3383 of SEQ ID NO: 1561398
agcugagcucuuugagaca

SEQ ID NO: 1668910 - RNA, 19 nt, Artificial Sequence
  Description of Artificial Sequence: Synthetic oligonucleotide
  Antisense strand to SEQ ID NO: 1668909
ugucucaaagagcucagcu

SEQ ID NO: 1668911 - RNA, 19 nt, Artificial Sequence
  Description of Artificial Sequence: Synthetic oligonucleotide
  Sense strand starting at position 3388 of SEQ ID NO: 1561398
agcucuuugagacacguau

SEQ ID NO: 1668912 - RNA, 19 nt, Artificial Sequence
  Description of Artificial Sequence: Synthetic oligonucleotide
  Antisense strand to SEQ ID NO: 1668911
auacgugucucaaagagcu

SEQ ID NO: 1668913 - RNA, 19 nt, Artificial Sequence
  Description of Artificial Sequence: Synthetic oligonucleotide
  Sense strand starting at position 3517 of SEQ ID NO: 1561398
uggcuaacauggcuuuauu

SEQ ID NO: 1668914 - RNA, 19 nt, Artificial Sequence
  Description of Artificial Sequence: Synthetic oligonucleotide
  Antisense strand to SEQ ID NO: 1668913
aauaaagccauguuagcca

SEQ ID NO: 1668915 - RNA, 19 nt, Artificial Sequence
  Description of Artificial Sequence: Synthetic oligonucleotide
  Sense strand starting at position 3527 of SEQ ID NO: 1561398
ggcuuuauucagggagaug

SEQ ID NO: 1668916 - RNA, 19 nt, Artificial Sequence
  Description of Artificial Sequence: Synthetic oligonucleotide
  Antisense strand to SEQ ID NO: 1668915
caucucccugaauaaagcc

SEQ ID NO: 1668917 - RNA, 19 nt, Artificial Sequence
  Description of Artificial Sequence: Synthetic oligonucleotide
  Sense strand starting at position 3870 of SEQ ID NO: 1561398
aggauuaacucugucugac

SEQ ID NO: 1668918 - RNA, 19 nt, Artificial Sequence
  Description of Artificial Sequence: Synthetic oligonucleotide
  Antisense strand to SEQ ID NO: 1668917
gucagacagaguuaauccu

SEQ ID NO: 1668919 - RNA, 19 nt, Artificial Sequence
  Description of Artificial Sequence: Synthetic oligonucleotide
  Sense strand starting at position 3959 of SEQ ID NO: 1561398
gagagugacacuuguacag

SEQ ID NO: 1668920 - RNA, 19 nt, Artificial Sequence
  Description of Artificial Sequence: Synthetic oligonucleotide
  Antisense strand to SEQ ID NO: 1668919
cuguacaagugucacucuc

SEQ ID NO: 1668921 - RNA, 19 nt, Artificial Sequence
  Description of Artificial Sequence: Synthetic oligonucleotide
  Sense strand starting at position 51 of SEQ ID NO: 1561399
ucuucuguugugggaaaug

SEQ ID NO: 1668922 - RNA, 19 nt, Artificial Sequence
  Description of Artificial Sequence: Synthetic oligonucleotide
  Antisense strand to SEQ ID NO: 1668921
cauuucccacaacagaaga

SEQ ID NO: 1668923 - RNA, 19 nt, Artificial Sequence
  Description of Artificial Sequence: Synthetic oligonucleotide
  Sense strand starting at position 80 of SEQ ID NO: 1561399
gggauacucugucuuuguc

SEQ ID NO: 1668924 - RNA, 19 nt, Artificial Sequence
  Description of Artificial Sequence: Synthetic oligonucleotide
  Antisense strand to SEQ ID NO: 1668923
gacaaagacagaguauccc

SEQ ID NO: 1668925 - RNA, 19 nt, Artificial Sequence
  Description of Artificial Sequence: Synthetic oligonucleotide
  Sense strand starting at position 168 of SEQ ID NO: 1561399
uaucuagguccuggaaucu

SEQ ID NO: 1668926 - RNA, 19 nt, Artificial Sequence
  Description of Artificial Sequence: Synthetic oligonucleotide
  Antisense strand to SEQ ID NO: 1668925
agauuccaggaccuagaua

SEQ ID NO: 1668927 - RNA, 19 nt, Artificial Sequence
  Description of Artificial Sequence: Synthetic oligonucleotide
  Sense strand starting at position 280 of SEQ ID NO: 1561399
acacguggcccugaauauu

SEQ ID NO: 1668928 - RNA, 19 nt, Artificial Sequence
  Description of Artificial Sequence: Synthetic oligonucleotide
  Antisense strand to SEQ ID NO: 1668927
aauauucagggccacgugu

SEQ ID NO: 1668929 - RNA, 19 nt, Artificial Sequence
  Description of Artificial Sequence: Synthetic oligonucleotide
  Sense strand starting at position 368 of SEQ ID NO: 1561399
cggugaaguguggaaguaa

SEQ ID NO: 1668930 - RNA, 19 nt, Artificial Sequence
  Description of Artificial Sequence: Synthetic oligonucleotide
  Antisense strand to SEQ ID NO: 1668929
uuacuuccacacuucaccg

SEQ ID NO: 1668931 - RNA, 19 nt, Artificial Sequence
  Description of Artificial Sequence: Synthetic oligonucleotide
  Sense strand starting at position 369 of SEQ ID NO: 1561399
ggugaaguguggaaguaac

SEQ ID NO: 1668932 - RNA, 19 nt, Artificial Sequence
  Description of Artificial Sequence: Synthetic oligonucleotide
  Antisense strand to SEQ ID NO: 1668931
guuacuuccacacuucacc

SEQ ID NO: 1668933 - RNA, 19 nt, Artificial Sequence
  Description of Artificial Sequence: Synthetic oligonucleotide
  Sense strand starting at position 476 of SEQ ID NO: 1561399
ggccauauggauggugaga

SEQ ID NO: 1668934 - RNA, 19 nt, Artificial Sequence
  Description of Artificial Sequence: Synthetic oligonucleotide
  Antisense strand to SEQ ID NO: 1668933
ucucaccauccauauggcc

SEQ ID NO: 1668935 - RNA, 19 nt, Artificial Sequence
  Description of Artificial Sequence: Synthetic oligonucleotide
  Sense strand starting at position 1085 of SEQ ID NO: 1561399
guuaauuugugcgcaguaa

SEQ ID NO: 1668936 - RNA, 19 nt, Artificial Sequence
  Description of Artificial Sequence: Synthetic oligonucleotide
  Antisense strand to SEQ ID NO: 1668935
uuacugcgcacaaauuaac

SEQ ID NO: 1668937 - RNA, 19 nt, Artificial Sequence
  Description of Artificial Sequence: Synthetic oligonucleotide
  Sense strand starting at position 1086 of SEQ ID NO: 1561399
uuaauuugugcgcaguaau

SEQ ID NO: 1668938 - RNA, 19 nt, Artificial Sequence
  Description of Artificial Sequence: Synthetic oligonucleotide
  Antisense strand to SEQ ID NO: 1668937
auuacugcgcacaaauuaa

SEQ ID NO: 1668939 - RNA, 19 nt, Artificial Sequence
  Description of Artificial Sequence: Synthetic oligonucleotide
  Sense strand starting at position 1223 of SEQ ID NO: 1561399
acucauuguggaggaggua

SEQ ID NO: 1668940 - RNA, 19 nt, Artificial Sequence
  Description of Artificial Sequence: Synthetic oligonucleotide
  Antisense strand to SEQ ID NO: 1668939
uaccuccuccacaaugagu

SEQ ID NO: 1668941 - RNA, 19 nt, Artificial Sequence
  Description of Artificial Sequence: Synthetic oligonucleotide
  Sense strand starting at position 1238 of SEQ ID NO: 1561399
gguacucggaccugaaacu

SEQ ID NO: 1668942 - RNA, 19 nt, Artificial Sequence
  Description of Artificial Sequence: Synthetic oligonucleotide
  Antisense strand to SEQ ID NO: 1668941
aguuucagguccgaguacc

SEQ ID NO: 1668943 - RNA, 19 nt, Artificial Sequence
  Description of Artificial Sequence: Synthetic oligonucleotide
  Sense strand starting at position 1239 of SEQ ID NO: 1561399
guacucggaccugaaacuu

SEQ ID NO: 1668944 - RNA, 19 nt, Artificial Sequence
  Description of Artificial Sequence: Synthetic oligonucleotide
  Antisense strand to SEQ ID NO: 1668943
aaguuucagguccgaguac

SEQ ID NO: 1668945 - RNA, 19 nt, Artificial Sequence
  Description of Artificial Sequence: Synthetic oligonucleotide
  Sense strand starting at position 1292 of SEQ ID NO: 1561399
gccaaaguuugagcucaac

SEQ ID NO: 1668946 - RNA, 19 nt, Artificial Sequence
  Description of Artificial Sequence: Synthetic oligonucleotide
  Antisense strand to SEQ ID NO: 1668945
guugagcucaaacuuuggc

SEQ ID NO: 1668947 - RNA, 19 nt, Artificial Sequence
  Description of Artificial Sequence: Synthetic oligonucleotide
  Sense strand starting at position 1506 of SEQ ID NO: 1561399
gccucagauuaauccagaa

SEQ ID NO: 1668948 - RNA, 19 nt, Artificial Sequence
  Description of Artificial Sequence: Synthetic oligonucleotide
  Antisense strand to SEQ ID NO: 1668947
uucuggauuaaucugaggc

SEQ ID NO: 1668949 - RNA, 19 nt, Artificial Sequence
  Description of Artificial Sequence: Synthetic oligonucleotide
  Sense strand starting at position 1534 of SEQ ID NO: 1561399
gaagucacauucguugaca

SEQ ID NO: 1668950 - RNA, 19 nt, Artificial Sequence
  Description of Artificial Sequence: Synthetic oligonucleotide
  Antisense strand to SEQ ID NO: 1668949
ugucaacgaaugugacuuc

SEQ ID NO: 1668951 - RNA, 19 nt, Artificial Sequence
  Description of Artificial Sequence: Synthetic oligonucleotide
  Sense strand starting at position 1535 of SEQ ID NO: 1561399
aagucacauucguugacaa

SEQ ID NO: 1668952 - RNA, 19 nt, Artificial Sequence
  Description of Artificial Sequence: Synthetic oligonucleotide
  Antisense strand to SEQ ID NO: 1668951
uugucaacgaaugugacuu

SEQ ID NO: 1668953 - RNA, 19 nt, Artificial Sequence
  Description of Artificial Sequence: Synthetic oligonucleotide
  Sense strand starting at position 1536 of SEQ ID NO: 1561399
agucacauucguugacaaa

SEQ ID NO: 1668954 - RNA, 19 nt, Artificial Sequence
  Description of Artificial Sequence: Synthetic oligonucleotide
  Antisense strand to SEQ ID NO: 1668953
uuugucaacgaaugugacu

SEQ ID NO: 1668955 - RNA, 19 nt, Artificial Sequence
  Description of Artificial Sequence: Synthetic oligonucleotide
  Sense strand starting at position 1873 of SEQ ID NO: 1561399
accugacucuccuuggaau

SEQ ID NO: 1668956 - RNA, 19 nt, Artificial Sequence
  Description of Artificial Sequence: Synthetic oligonucleotide
  Antisense strand to SEQ ID NO: 1668955
auuccaaggagagucaggu

SEQ ID NO: 1668957 - RNA, 19 nt, Artificial Sequence
  Description of Artificial Sequence: Synthetic oligonucleotide
  Sense strand starting at position 2085 of SEQ ID NO: 1561399
gccaucuuugaguacguga

SEQ ID NO: 1668958 - RNA, 19 nt, Artificial Sequence
  Description of Artificial Sequence: Synthetic oligonucleotide
  Antisense strand to SEQ ID NO: 1668957
ucacguacucaaagauggc

SEQ ID NO: 1668959 - RNA, 19 nt, Artificial Sequence
  Description of Artificial Sequence: Synthetic oligonucleotide
  Sense strand starting at position 2094 of SEQ ID NO: 1561399
gaguacgugacguacagaa

SEQ ID NO: 1668960 - RNA, 19 nt, Artificial Sequence
  Description of Artificial Sequence: Synthetic oligonucleotide
  Antisense strand to SEQ ID NO: 1668959
uucuguacgucacguacuc

SEQ ID NO: 1668961 - RNA, 19 nt, Artificial Sequence
  Description of Artificial Sequence: Synthetic oligonucleotide
  Sense strand starting at position 2148 of SEQ ID NO: 1561399
ucuuaaacuguccgauuuc

SEQ ID NO: 1668962 - RNA, 19 nt, Artificial Sequence
  Description of Artificial Sequence: Synthetic oligonucleotide
  Antisense strand to SEQ ID NO: 1668961
gaaaucggacaguuuaaga

SEQ ID NO: 1668963 - RNA, 19 nt, Artificial Sequence
  Description of Artificial Sequence: Synthetic oligonucleotide
  Sense strand starting at position 2200 of SEQ ID NO: 1561399
uuaucagaggcuugaguuc

SEQ ID NO: 1668964 - RNA, 19 nt, Artificial Sequence
  Description of Artificial Sequence: Synthetic oligonucleotide
  Antisense strand to SEQ ID NO: 1668963
gaacucaagccucugauaa

SEQ ID NO: 1668965 - RNA, 19 nt, Artificial Sequence
  Description of Artificial Sequence: Synthetic oligonucleotide
  Sense strand starting at position 2241 of SEQ ID NO: 1561399
gguaaaguccucugaacag

SEQ ID NO: 1668966 - RNA, 19 nt, Artificial Sequence
  Description of Artificial Sequence: Synthetic oligonucleotide
  Antisense strand to SEQ ID NO: 1668965
cuguucagaggacuuuacc

SEQ ID NO: 1668967 - RNA, 19 nt, Artificial Sequence
  Description of Artificial Sequence: Synthetic oligonucleotide
  Sense strand starting at position 2362 of SEQ ID NO: 1561399
cuucuuagcgguuaugaug

SEQ ID NO: 1668968 - RNA, 19 nt, Artificial Sequence
  Description of Artificial Sequence: Synthetic oligonucleotide
  Antisense strand to SEQ ID NO: 1668967
caucauaaccgcuaagaag

SEQ ID NO: 1668969 - RNA, 19 nt, Artificial Sequence
  Description of Artificial Sequence: Synthetic oligonucleotide
  Sense strand starting at position 2588 of SEQ ID NO: 1561399
guccguacggcagaacaua

SEQ ID NO: 1668970 - RNA, 19 nt, Artificial Sequence
  Description of Artificial Sequence: Synthetic oligonucleotide
  Antisense strand to SEQ ID NO: 1668969
uauguucugccguacggac

SEQ ID NO: 1668971 - RNA, 19 nt, Artificial Sequence
  Description of Artificial Sequence: Synthetic oligonucleotide
  Sense strand starting at position 2629 of SEQ ID NO: 1561399
ggaacuggcccauggaaau

SEQ ID NO: 1668972 - RNA, 19 nt, Artificial Sequence
  Description of Artificial Sequence: Synthetic oligonucleotide
  Antisense strand to SEQ ID NO: 1668971
auuuccaugggccaguucc

SEQ ID NO: 1668973 - RNA, 19 nt, Artificial Sequence
  Description of Artificial Sequence: Synthetic oligonucleotide
  Sense strand starting at position 2635 of SEQ ID NO: 1561399
ggcccauggaaaugucuuu

SEQ ID NO: 1668974 - RNA, 19 nt, Artificial Sequence
  Description of Artificial Sequence: Synthetic oligonucleotide
  Antisense strand to SEQ ID NO: 1668973
aaagacauuuccaugggcc

SEQ ID NO: 1668975 - RNA, 19 nt, Artificial Sequence
  Description of Artificial Sequence: Synthetic oligonucleotide
  Sense strand starting at position 2783 of SEQ ID NO: 1561399
ccaacaauaguaugugaaa

SEQ ID NO: 1668976 - RNA, 19 nt, Artificial Sequence
  Description of Artificial Sequence: Synthetic oligonucleotide
  Antisense strand to SEQ ID NO: 1668975
uuucacauacuauuguugg

SEQ ID NO: 1668977 - RNA, 19 nt, Artificial Sequence
  Description of Artificial Sequence: Synthetic oligonucleotide
  Sense strand starting at position 2848 of SEQ ID NO: 1561399
gguuucuccuauucuuaag

SEQ ID NO: 1668978 - RNA, 19 nt, Artificial Sequence
  Description of Artificial Sequence: Synthetic oligonucleotide
  Antisense strand to SEQ ID NO: 1668977
cuuaagaauaggagaaacc

SEQ ID NO: 1668979 - RNA, 19 nt, Artificial Sequence
  Description of Artificial Sequence: Synthetic oligonucleotide
  Sense strand starting at position 2895 of SEQ ID NO: 1561399
augcuaaagucagcugauu

SEQ ID NO: 1668980 - RNA, 19 nt, Artificial Sequence
  Description of Artificial Sequence: Synthetic oligonucleotide
  Antisense strand to SEQ ID NO: 1668979
aaucagcugacuuuagcau

SEQ ID NO: 1668981 - RNA, 19 nt, Artificial Sequence
  Description of Artificial Sequence: Synthetic oligonucleotide
  Sense strand starting at position 2981 of SEQ ID NO: 1561399
uguagaucuggcuaugaua

SEQ ID NO: 1668982 - RNA, 19 nt, Artificial Sequence
  Description of Artificial Sequence: Synthetic oligonucleotide
  Antisense strand to SEQ ID NO: 1668981
uaucauagccagaucuaca

SEQ ID NO: 1668983 - RNA, 19 nt, Artificial Sequence
  Description of Artificial Sequence: Synthetic oligonucleotide
  Sense strand starting at position 2983 of SEQ ID NO: 1561399
uagaucuggcuaugauaug

SEQ ID NO: 1668984 - RNA, 19 nt, Artificial Sequence
  Description of Artificial Sequence: Synthetic oligonucleotide
  Antisense strand to SEQ ID NO: 1668983
cauaucauagccagaucua

SEQ ID NO: 1668985 - RNA, 19 nt, Artificial Sequence
  Description of Artificial Sequence: Synthetic oligonucleotide
  Sense strand starting at position 2994 of SEQ ID NO: 1561399
augauaugaugacacuaau

SEQ ID NO: 1668986 - RNA, 19 nt, Artificial Sequence
  Description of Artificial Sequence: Synthetic oligonucleotide
  Antisense strand to SEQ ID NO: 1668985
auuagugucaucauaucau

SEQ ID NO: 1668987 - RNA, 19 nt, Artificial Sequence
  Description of Artificial Sequence: Synthetic oligonucleotide
  Sense strand starting at position 3104 of SEQ ID NO: 1561399
gucuuaugaugguuucuua

SEQ ID NO: 1668988 - RNA, 19 nt, Artificial Sequence
  Description of Artificial Sequence: Synthetic oligonucleotide
  Antisense strand to SEQ ID NO: 1668987
uaagaaaccaucauaagac

SEQ ID NO: 1668989 - RNA, 19 nt, Artificial Sequence
  Description of Artificial Sequence: Synthetic oligonucleotide
  Sense strand starting at position 3108 of SEQ ID NO: 1561399
uaugaugguuucuuauaag

SEQ ID NO: 1668990 - RNA, 19 nt, Artificial Sequence
  Description of Artificial Sequence: Synthetic oligonucleotide
  Antisense strand to SEQ ID NO: 1668989
cuuauaagaaaccaucaua

SEQ ID NO: 1668991 - RNA, 19 nt, Artificial Sequence
  Description of Artificial Sequence: Synthetic oligonucleotide
  Sense strand starting at position 3231 of SEQ ID NO: 1561399
cagucuugaggcugaacaa

SEQ ID NO: 1668992 - RNA, 19 nt, Artificial Sequence
  Description of Artificial Sequence: Synthetic oligonucleotide
  Antisense strand to SEQ ID NO: 1668991
uuguucagccucaagacug

SEQ ID NO: 1668993 - RNA, 19 nt, Artificial Sequence
  Description of Artificial Sequence: Synthetic oligonucleotide
  Sense strand starting at position 3413 of SEQ ID NO: 1561399
cccuaaacacucuaguguu

SEQ ID NO: 1668994 - RNA, 19 nt, Artificial Sequence
  Description of Artificial Sequence: Synthetic oligonucleotide
  Antisense strand to SEQ ID NO: 1668993
aacacuagaguguuuaggg

SEQ ID NO: 1668995 - RNA, 19 nt, Artificial Sequence
  Description of Artificial Sequence: Synthetic oligonucleotide
  Sense strand starting at position 3456 of SEQ ID NO: 1561399
ugacaagugcccuaugggu

SEQ ID NO: 1668996 - RNA, 19 nt, Artificial Sequence
  Description of Artificial Sequence: Synthetic oligonucleotide
  Antisense strand to SEQ ID NO: 1668995
acccauagggcacuuguca

SEQ ID NO: 1668997 - RNA, 19 nt, Artificial Sequence
  Description of Artificial Sequence: Synthetic oligonucleotide
  Sense strand starting at position 3552 of SEQ ID NO: 1561399
aggcuuaguagugaacauu

SEQ ID NO: 1668998 - RNA, 19 nt, Artificial Sequence
  Description of Artificial Sequence: Synthetic oligonucleotide
  Antisense strand to SEQ ID NO: 1668997
aauguucacuacuaagccu

SEQ ID NO: 1668999 - RNA, 19 nt, Artificial Sequence
  Description of Artificial Sequence: Synthetic oligonucleotide
  Sense strand starting at position 3775 of SEQ ID NO: 1561399
gccggcauuguagacuuaa

SEQ ID NO: 1669000 - RNA, 19 nt, Artificial Sequence
  Description of Artificial Sequence: Synthetic oligonucleotide
  Antisense strand to SEQ ID NO: 1668999
uuaagucuacaaugccggc

SEQ ID NO: 1669001 - RNA, 19 nt, Artificial Sequence
  Description of Artificial Sequence: Synthetic oligonucleotide
  Sense strand starting at position 353 of SEQ ID NO: 1561400
ugccuauaguacucuaaga

SEQ ID NO: 1669002 - RNA, 19 nt, Artificial Sequence
  Description of Artificial Sequence: Synthetic oligonucleotide
  Antisense strand to SEQ ID NO: 1669001
ucuuagaguacuauaggca

SEQ ID NO: 1669003 - RNA, 19 nt, Artificial Sequence
  Description of Artificial Sequence: Synthetic oligonucleotide
  Sense strand starting at position 366 of SEQ ID NO: 1561400
cuaagaucuuggccaagaa

SEQ ID NO: 1669004 - RNA, 19 nt, Artificial Sequence
  Description of Artificial Sequence: Synthetic oligonucleotide
  Antisense strand to SEQ ID NO: 1669003
uucuuggccaagaucuuag

SEQ ID NO: 1669005 - RNA, 19 nt, Artificial Sequence
  Description of Artificial Sequence: Synthetic oligonucleotide
  Sense strand starting at position 467 of SEQ ID NO: 1561400
acuaauuuauugggaaaug

SEQ ID NO: 1669006 - RNA, 19 nt, Artificial Sequence
  Description of Artificial Sequence: Synthetic oligonucleotide
  Antisense strand to SEQ ID NO: 1669005
cauuucccaauaaauuagu

SEQ ID NO: 1669007 - RNA, 19 nt, Artificial Sequence
  Description of Artificial Sequence: Synthetic oligonucleotide
  Sense strand starting at position 468 of SEQ ID NO: 1561400
cuaauuuauugggaaauga

SEQ ID NO: 1669008 - RNA, 19 nt, Artificial Sequence
  Description of Artificial Sequence: Synthetic oligonucleotide
  Antisense strand to SEQ ID NO: 1669007
ucauuucccaauaaauuag

SEQ ID NO: 1669009 - RNA, 19 nt, Artificial Sequence
  Description of Artificial Sequence: Synthetic oligonucleotide
  Sense strand starting at position 491 of SEQ ID NO: 1561400
ugggcuuaaccagguacaa

SEQ ID NO: 1669010 - RNA, 19 nt, Artificial Sequence
  Description of Artificial Sequence: Synthetic oligonucleotide
  Antisense strand to SEQ ID NO: 1669009
uuguaccugguuaagccca

SEQ ID NO: 1669011 - RNA, 19 nt, Artificial Sequence
  Description of Artificial Sequence: Synthetic oligonucleotide
  Sense strand starting at position 502 of SEQ ID NO: 1561400
agguacaauuggucgagua

SEQ ID NO: 1669012 - RNA, 19 nt, Artificial Sequence
  Description of Artificial Sequence: Synthetic oligonucleotide
  Antisense strand to SEQ ID NO: 1669011
uacucgaccaauuguaccu

SEQ ID NO: 1669013 - RNA, 19 nt, Artificial Sequence
  Description of Artificial Sequence: Synthetic oligonucleotide
  Sense strand starting at position 503 of SEQ ID NO: 1561400
gguacaauuggucgaguaa

SEQ ID NO: 1669014 - RNA, 19 nt, Artificial Sequence
  Description of Artificial Sequence: Synthetic oligonucleotide
  Antisense strand to SEQ ID NO: 1669013
uuacucgaccaauuguacc

SEQ ID NO: 1669015 - RNA, 19 nt, Artificial Sequence
  Description of Artificial Sequence: Synthetic oligonucleotide
  Sense strand starting at position 504 of SEQ ID NO: 1561400
guacaauuggucgaguaac

SEQ ID NO: 1669016 - RNA, 19 nt, Artificial Sequence
  Description of Artificial Sequence: Synthetic oligonucleotide
  Antisense strand to SEQ ID NO: 1669015
guuacucgaccaauuguac

SEQ ID NO: 1669017 - RNA, 19 nt, Artificial Sequence
  Description of Artificial Sequence: Synthetic oligonucleotide
  Sense strand starting at position 514 of SEQ ID NO: 1561400
ucgaguaaccucugauuau

SEQ ID NO: 1669018 - RNA, 19 nt, Artificial Sequence
  Description of Artificial Sequence: Synthetic oligonucleotide
  Antisense strand to SEQ ID NO: 1669017
auaaucagagguuacucga

SEQ ID NO: 1669019 - RNA, 19 nt, Artificial Sequence
  Description of Artificial Sequence: Synthetic oligonucleotide
  Sense strand starting at position 549 of SEQ ID NO: 1561400
cacuguauggucugugaaa

SEQ ID NO: 1669020 - RNA, 19 nt, Artificial Sequence
  Description of Artificial Sequence: Synthetic oligonucleotide
  Antisense strand to SEQ ID NO: 1669019
uuucacagaccauacagug

SEQ ID NO: 1669021 - RNA, 19 nt, Artificial Sequence
  Description of Artificial Sequence: Synthetic oligonucleotide
  Sense strand starting at position 620 of SEQ ID NO: 1561400
aaaguaaugugacucugga

SEQ ID NO: 1669022 - RNA, 19 nt, Artificial Sequence
  Description of Artificial Sequence: Synthetic oligonucleotide
  Antisense strand to SEQ ID NO: 1669021
uccagagucacauuacuuu

SEQ ID NO: 1669023 - RNA, 19 nt, Artificial Sequence
  Description of Artificial Sequence: Synthetic oligonucleotide
  Sense strand starting at position 629 of SEQ ID NO: 1561400
ugacucuggaauugaguca

SEQ ID NO: 1669024 - RNA, 19 nt, Artificial Sequence
  Description of Artificial Sequence: Synthetic oligonucleotide
  Antisense strand to SEQ ID NO: 1669023
ugacucaauuccagaguca

SEQ ID NO: 1669025 - RNA, 19 nt, Artificial Sequence
  Description of Artificial Sequence: Synthetic oligonucleotide
  Sense strand starting at position 636 of SEQ ID NO: 1561400
ggaauugagucaccugaca

SEQ ID NO: 1669026 - RNA, 19 nt, Artificial Sequence
  Description of Artificial Sequence: Synthetic oligonucleotide
  Antisense strand to SEQ ID NO: 1669025
ugucaggugacucaauucc

SEQ ID NO: 1669027 - RNA, 19 nt, Artificial Sequence
  Description of Artificial Sequence: Synthetic oligonucleotide
  Sense strand starting at position 724 of SEQ ID NO: 1561400
cuggacaggccucauuaua

SEQ ID NO: 1669028 - RNA, 19 nt, Artificial Sequence
  Description of Artificial Sequence: Synthetic oligonucleotide
  Antisense strand to SEQ ID NO: 1669027
uauaaugaggccuguccag

SEQ ID NO: 1669029 - RNA, 19 nt, Artificial Sequence
  Description of Artificial Sequence: Synthetic oligonucleotide
  Sense strand starting at position 818 of SEQ ID NO: 1561400
acagacucucugugacaau

SEQ ID NO: 1669030 - RNA, 19 nt, Artificial Sequence
  Description of Artificial Sequence: Synthetic oligonucleotide
  Antisense strand to SEQ ID NO: 1669029
auugucacagagagucugu

SEQ ID NO: 1669031 - RNA, 19 nt, Artificial Sequence
  Description of Artificial Sequence: Synthetic oligonucleotide
  Sense strand starting at position 942 of SEQ ID NO: 1561400
augaaaucauaugacagau

SEQ ID NO: 1669032 - RNA, 19 nt, Artificial Sequence
  Description of Artificial Sequence: Synthetic oligonucleotide
  Antisense strand to SEQ ID NO: 1669031
aucugucauaugauuucau

SEQ ID NO: 1669033 - RNA, 19 nt, Artificial Sequence
  Description of Artificial Sequence: Synthetic oligonucleotide
  Sense strand starting at position 1127 of SEQ ID NO: 1561400
ggcauugaugcaugauucu

SEQ ID NO: 1669034 - RNA, 19 nt, Artificial Sequence
  Description of Artificial Sequence: Synthetic oligonucleotide
  Antisense strand to SEQ ID NO: 1669033
agaaucaugcaucaaugcc

SEQ ID NO: 1669035 - RNA, 19 nt, Artificial Sequence
  Description of Artificial Sequence: Synthetic oligonucleotide
  Sense strand starting at position 1252 of SEQ ID NO: 1561400
ccuauucggcucugaauaa

SEQ ID NO: 1669036 - RNA, 19 nt, Artificial Sequence
  Description of Artificial Sequence: Synthetic oligonucleotide
  Antisense strand to SEQ ID NO: 1669035
uuauucagagccgaauagg

SEQ ID NO: 1669037 - RNA, 19 nt, Artificial Sequence
  Description of Artificial Sequence: Synthetic oligonucleotide
  Sense strand starting at position 1326 of SEQ ID NO: 1561400
aggacuggguguuuaucau

SEQ ID NO: 1669038 - RNA, 19 nt, Artificial Sequence
  Description of Artificial Sequence: Synthetic oligonucleotide
  Antisense strand to SEQ ID NO: 1669037
augauaaacacccaguccu

SEQ ID NO: 1669039 - RNA, 19 nt, Artificial Sequence
  Description of Artificial Sequence: Synthetic oligonucleotide
  Sense strand starting at position 1332 of SEQ ID NO: 1561400
ggguguuuaucauucagga

SEQ ID NO: 1669040 - RNA, 19 nt, Artificial Sequence
  Description of Artificial Sequence: Synthetic oligonucleotide
  Antisense strand to SEQ ID NO: 1669039
uccugaaugauaaacaccc

SEQ ID NO: 1669041 - RNA, 19 nt, Artificial Sequence
  Description of Artificial Sequence: Synthetic oligonucleotide
  Sense strand starting at position 2112 of SEQ ID NO: 1561400
accggauccagcgauagau

SEQ ID NO: 1669042 - RNA, 19 nt, Artificial Sequence
  Description of Artificial Sequence: Synthetic oligonucleotide
  Antisense strand to SEQ ID NO: 1669041
aucuaucgcuggauccggu

SEQ ID NO: 1669043 - RNA, 19 nt, Artificial Sequence
  Description of Artificial Sequence: Synthetic oligonucleotide
  Sense strand starting at position 2130 of SEQ ID NO: 1561400
uucuuuaagccagaggucu

SEQ ID NO: 1669044 - RNA, 19 nt, Artificial Sequence
  Description of Artificial Sequence: Synthetic oligonucleotide
  Antisense strand to SEQ ID NO: 1669043
agaccucuggcuuaaagaa

SEQ ID NO: 1669045 - RNA, 19 nt, Artificial Sequence
  Description of Artificial Sequence: Synthetic oligonucleotide
  Sense strand starting at position 2138 of SEQ ID NO: 1561400
gccagaggucuguaaccuu

SEQ ID NO: 1669046 - RNA, 19 nt, Artificial Sequence
  Description of Artificial Sequence: Synthetic oligonucleotide
  Antisense strand to SEQ ID NO: 1669045
aagguuacagaccucuggc

SEQ ID NO: 1669047 - RNA, 19 nt, Artificial Sequence
  Description of Artificial Sequence: Synthetic oligonucleotide
  Sense strand starting at position 2349 of SEQ ID NO: 1561400
cauaucucuggcgauaaug

SEQ ID NO: 1669048 - RNA, 19 nt, Artificial Sequence
  Description of Artificial Sequence: Synthetic oligonucleotide
  Antisense strand to SEQ ID NO: 1669047
cauuaucgccagagauaug

SEQ ID NO: 1669049 - RNA, 19 nt, Artificial Sequence
  Description of Artificial Sequence: Synthetic oligonucleotide
  Sense strand starting at position 2800 of SEQ ID NO: 1561400
agggaauugcaguggaguu

SEQ ID NO: 1669050 - RNA, 19 nt, Artificial Sequence
  Description of Artificial Sequence: Synthetic oligonucleotide
  Antisense strand to SEQ ID NO: 1669049
aacuccacugcaauucccu

SEQ ID NO: 1669051 - RNA, 19 nt, Artificial Sequence
  Description of Artificial Sequence: Synthetic oligonucleotide
  Sense strand starting at position 2801 of SEQ ID NO: 1561400
gggaauugcaguggaguuu

SEQ ID NO: 1669052 - RNA, 19 nt, Artificial Sequence
  Description of Artificial Sequence: Synthetic oligonucleotide
  Antisense strand to SEQ ID NO: 1669051
aaacuccacugcaauuccc

SEQ ID NO: 1669053 - RNA, 19 nt, Artificial Sequence
  Description of Artificial Sequence: Synthetic oligonucleotide
  Sense strand starting at position 2802 of SEQ ID NO: 1561400
ggaauugcaguggaguuua

SEQ ID NO: 1669054 - RNA, 19 nt, Artificial Sequence
  Description of Artificial Sequence: Synthetic oligonucleotide
  Antisense strand to SEQ ID NO: 1669053
uaaacuccacugcaauucc

SEQ ID NO: 1669055 - RNA, 19 nt, Artificial Sequence
  Description of Artificial Sequence: Synthetic oligonucleotide
  Sense strand starting at position 2807 of SEQ ID NO: 1561400
ugcaguggaguuuaauaua

SEQ ID NO: 1669056 - RNA, 19 nt, Artificial Sequence
  Description of Artificial Sequence: Synthetic oligonucleotide
  Antisense strand to SEQ ID NO: 1669055
uauauuaaacuccacugca

SEQ ID NO: 1669057 - RNA, 19 nt, Artificial Sequence
  Description of Artificial Sequence: Synthetic oligonucleotide
  Sense strand starting at position 2823 of SEQ ID NO: 1561400
auacauagagccggcuaaa

SEQ ID NO: 1669058 - RNA, 19 nt, Artificial Sequence
  Description of Artificial Sequence: Synthetic oligonucleotide
  Antisense strand to SEQ ID NO: 1669057
uuuagccggcucuauguau

SEQ ID NO: 1669059 - RNA, 19 nt, Artificial Sequence
  Description of Artificial Sequence: Synthetic oligonucleotide
  Sense strand starting at position 2826 of SEQ ID NO: 1561400
cauagagccggcuaaauga

SEQ ID NO: 1669060 - RNA, 19 nt, Artificial Sequence
  Description of Artificial Sequence: Synthetic oligonucleotide
  Antisense strand to SEQ ID NO: 1669059
ucauuuagccggcucuaug

SEQ ID NO: 1669061 - RNA, 19 nt, Artificial Sequence
  Description of Artificial Sequence: Synthetic oligonucleotide
  Sense strand starting at position 3373 of SEQ ID NO: 1561400
gcaaauuuaucagaaugaa

SEQ ID NO: 1669062 - RNA, 19 nt, Artificial Sequence
  Description of Artificial Sequence: Synthetic oligonucleotide
  Antisense strand to SEQ ID NO: 1669061
uucauucugauaaauuugc

SEQ ID NO: 1669063 - RNA, 19 nt, Artificial Sequence
  Description of Artificial Sequence: Synthetic oligonucleotide
  Sense strand starting at position 3468 of SEQ ID NO: 1561400
ugggaaucuuguguacucu

SEQ ID NO: 1669064 - RNA, 19 nt, Artificial Sequence
  Description of Artificial Sequence: Synthetic oligonucleotide
  Antisense strand to SEQ ID NO: 1669063
agaguacacaagauuccca

SEQ ID NO: 1669065 - RNA, 19 nt, Artificial Sequence
  Description of Artificial Sequence: Synthetic oligonucleotide
  Sense strand starting at position 3479 of SEQ ID NO: 1561400
uguacucuggccgcauauu

SEQ ID NO: 1669066 - RNA, 19 nt, Artificial Sequence
  Description of Artificial Sequence: Synthetic oligonucleotide
  Antisense strand to SEQ ID NO: 1669065
aauaugcggccagaguaca

SEQ ID NO: 1669067 - RNA, 19 nt, Artificial Sequence
  Description of Artificial Sequence: Synthetic oligonucleotide
  Sense strand starting at position 3480 of SEQ ID NO: 1561400
guacucuggccgcauauuu

SEQ ID NO: 1669068 - RNA, 19 nt, Artificial Sequence
  Description of Artificial Sequence: Synthetic oligonucleotide
  Antisense strand to SEQ ID NO: 1669067
aaauaugcggccagaguac

SEQ ID NO: 1669069 - RNA, 19 nt, Artificial Sequence
  Description of Artificial Sequence: Synthetic oligonucleotide
  Sense strand starting at position 3522 of SEQ ID NO: 1561400
guggcuaauuucuuaguuu

SEQ ID NO: 1669070 - RNA, 19 nt, Artificial Sequence
  Description of Artificial Sequence: Synthetic oligonucleotide
  Antisense strand to SEQ ID NO: 1669069
aaacuaagaaauuagccac

SEQ ID NO: 1669071 - RNA, 19 nt, Artificial Sequence
  Description of Artificial Sequence: Synthetic oligonucleotide
  Sense strand starting at position 3645 of SEQ ID NO: 1561400
gaccuauacccgggaauga

SEQ ID NO: 1669072 - RNA, 19 nt, Artificial Sequence
  Description of Artificial Sequence: Synthetic oligonucleotide
  Antisense strand to SEQ ID NO: 1669071
ucauucccggguauagguc

SEQ ID NO: 1669073 - RNA, 19 nt, Artificial Sequence
  Description of Artificial Sequence: Synthetic oligonucleotide
  Sense strand starting at position 3799 of SEQ ID NO: 1561400
acauuuauguuggaacucu

SEQ ID NO: 1669074 - RNA, 19 nt, Artificial Sequence
  Description of Artificial Sequence: Synthetic oligonucleotide
  Antisense strand to SEQ ID NO: 1669073
agaguuccaacauaaaugu

SEQ ID NO: 1669075 - RNA, 19 nt, Artificial Sequence
  Description of Artificial Sequence: Synthetic oligonucleotide
  Sense strand starting at position 3846 of SEQ ID NO: 1561400
auaauugguugaggauuua

SEQ ID NO: 1669076 - RNA, 19 nt, Artificial Sequence
  Description of Artificial Sequence: Synthetic oligonucleotide
  Antisense strand to SEQ ID NO: 1669075
uaaauccucaaccaauuau

SEQ ID NO: 1669077 - RNA, 19 nt, Artificial Sequence
  Description of Artificial Sequence: Synthetic oligonucleotide
  Sense strand starting at position 3886 of SEQ ID NO: 1561400
aguggcacuccuuacuaau

SEQ ID NO: 1669078 - RNA, 19 nt, Artificial Sequence
  Description of Artificial Sequence: Synthetic oligonucleotide
  Antisense strand to SEQ ID NO: 1669077
auuaguaaggagugccacu

SEQ ID NO: 1669079 - RNA, 19 nt, Artificial Sequence
  Description of Artificial Sequence: Synthetic oligonucleotide
  Sense strand starting at position 3940 of SEQ ID NO: 1561400
ugaguauagcaaugauaug

SEQ ID NO: 1669080 - RNA, 19 nt, Artificial Sequence
  Description of Artificial Sequence: Synthetic oligonucleotide
  Antisense strand to SEQ ID NO: 1669079
cauaucauugcuauacuca

SEQ ID NO: 1669081 - RNA, 19 nt, Artificial Sequence
  Description of Artificial Sequence: Synthetic oligonucleotide
  Sense strand starting at position 714 of SEQ ID NO: 1561401
cugugacacuccugucaaa

SEQ ID NO: 1669082 - RNA, 19 nt, Artificial Sequence
  Description of Artificial Sequence: Synthetic oligonucleotide
  Antisense strand to SEQ ID NO: 1669081
uuugacaggagugucacag

SEQ ID NO: 1669083 - RNA, 19 nt, Artificial Sequence
  Description of Artificial Sequence: Synthetic oligonucleotide
  Sense strand starting at position 749 of SEQ ID NO: 1561401
ugaagaguuuguuuauaag

SEQ ID NO: 1669084 - RNA, 19 nt, Artificial Sequence
  Description of Artificial Sequence: Synthetic oligonucleotide
  Antisense strand to SEQ ID NO: 1669083
cuuauaaacaaacucuuca

SEQ ID NO: 1669085 - RNA, 19 nt, Artificial Sequence
  Description of Artificial Sequence: Synthetic oligonucleotide
  Sense strand starting at position 884 of SEQ ID NO: 1561401
gugaccuagccauaccuau

SEQ ID NO: 1669086 - RNA, 19 nt, Artificial Sequence
  Description of Artificial Sequence: Synthetic oligonucleotide
  Antisense strand to SEQ ID NO: 1669085
auagguauggcuaggucac

SEQ ID NO: 1669087 - RNA, 19 nt, Artificial Sequence
  Description of Artificial Sequence: Synthetic oligonucleotide
  Sense strand starting at position 1034 of SEQ ID NO: 1561401
guaucaucauagcuuacca

SEQ ID NO: 1669088 - RNA, 19 nt, Artificial Sequence
  Description of Artificial Sequence: Synthetic oligonucleotide
  Antisense strand to SEQ ID NO: 1669087
ugguaagcuaugaugauac

SEQ ID NO: 1669089 - RNA, 19 nt, Artificial Sequence
  Description of Artificial Sequence: Synthetic oligonucleotide
  Sense strand starting at position 1162 of SEQ ID NO: 1561401
guuguugauauguggucuu

SEQ ID NO: 1669090 - RNA, 19 nt, Artificial Sequence
  Description of Artificial Sequence: Synthetic oligonucleotide
  Antisense strand to SEQ ID NO: 1669089
aagaccacauaucaacaac

SEQ ID NO: 1669091 - RNA, 19 nt, Artificial Sequence
  Description of Artificial Sequence: Synthetic oligonucleotide
  Sense strand starting at position 1165 of SEQ ID NO: 1561401
guugauauguggucuuguu

SEQ ID NO: 1669092 - RNA, 19 nt, Artificial Sequence
  Description of Artificial Sequence: Synthetic oligonucleotide
  Antisense strand to SEQ ID NO: 1669091
aacaagaccacauaucaac

SEQ ID NO: 1669093 - RNA, 19 nt, Artificial Sequence
  Description of Artificial Sequence: Synthetic oligonucleotide
  Sense strand starting at position 1327 of SEQ ID NO: 1561401
ugaacuugauccuggacuu

SEQ ID NO: 1669094 - RNA, 19 nt, Artificial Sequence
  Description of Artificial Sequence: Synthetic oligonucleotide
  Antisense strand to SEQ ID NO: 1669093
aaguccaggaucaaguuca

SEQ ID NO: 1669095 - RNA, 19 nt, Artificial Sequence
  Description of Artificial Sequence: Synthetic oligonucleotide
  Sense strand starting at position 1382 of SEQ ID NO: 1561401
auucuaagaucguguagag

SEQ ID NO: 1669096 - RNA, 19 nt, Artificial Sequence
  Description of Artificial Sequence: Synthetic oligonucleotide
  Antisense strand to SEQ ID NO: 1669095
cucuacacgaucuuagaau

SEQ ID NO: 1669097 - RNA, 19 nt, Artificial Sequence
  Description of Artificial Sequence: Synthetic oligonucleotide
  Sense strand starting at position 1421 of SEQ ID NO: 1561401
agugcaaauuaccugaagu

SEQ ID NO: 1669098 - RNA, 19 nt, Artificial Sequence
  Description of Artificial Sequence: Synthetic oligonucleotide
  Antisense strand to SEQ ID NO: 1669097
acuucagguaauuugcacu

SEQ ID NO: 1669099 - RNA, 19 nt, Artificial Sequence
  Description of Artificial Sequence: Synthetic oligonucleotide
  Sense strand starting at position 1423 of SEQ ID NO: 1561401
ugcaaauuaccugaaguuu

SEQ ID NO: 1669100 - RNA, 19 nt, Artificial Sequence
  Description of Artificial Sequence: Synthetic oligonucleotide
  Antisense strand to SEQ ID NO: 1669099
aaacuucagguaauuugca

SEQ ID NO: 1669101 - RNA, 19 nt, Artificial Sequence
  Description of Artificial Sequence: Synthetic oligonucleotide
  Sense strand starting at position 1513 of SEQ ID NO: 1561401
aaauaauccugaggcagua

SEQ ID NO: 1669102 - RNA, 19 nt, Artificial Sequence
  Description of Artificial Sequence: Synthetic oligonucleotide
  Antisense strand to SEQ ID NO: 1669101
uacugccucaggauuauuu

SEQ ID NO: 1669103 - RNA, 19 nt, Artificial Sequence
  Description of Artificial Sequence: Synthetic oligonucleotide
  Sense strand starting at position 1601 of SEQ ID NO: 1561401
aguauuuccugucuguguu

SEQ ID NO: 1669104 - RNA, 19 nt, Artificial Sequence
  Description of Artificial Sequence: Synthetic oligonucleotide
  Antisense strand to SEQ ID NO: 1669103
aacacagacaggaaauacu

SEQ ID NO: 1669105 - RNA, 19 nt, Artificial Sequence
  Description of Artificial Sequence: Synthetic oligonucleotide
  Sense strand starting at position 1605 of SEQ ID NO: 1561401
uuuccugucuguguuccaa

SEQ ID NO: 1669106 - RNA, 19 nt, Artificial Sequence
  Description of Artificial Sequence: Synthetic oligonucleotide
  Antisense strand to SEQ ID NO: 1669105
uuggaacacagacaggaaa

SEQ ID NO: 1669107 - RNA, 19 nt, Artificial Sequence
  Description of Artificial Sequence: Synthetic oligonucleotide
  Sense strand starting at position 1607 of SEQ ID NO: 1561401
uccugucuguguuccaaau

SEQ ID NO: 1669108 - RNA, 19 nt, Artificial Sequence
  Description of Artificial Sequence: Synthetic oligonucleotide
  Antisense strand to SEQ ID NO: 1669107
auuuggaacacagacagga

SEQ ID NO: 1669109 - RNA, 19 nt, Artificial Sequence
  Description of Artificial Sequence: Synthetic oligonucleotide
  Sense strand starting at position 1609 of SEQ ID NO: 1561401
cugucuguguuccaaauca

SEQ ID NO: 1669110 - RNA, 19 nt, Artificial Sequence
  Description of Artificial Sequence: Synthetic oligonucleotide
  Antisense strand to SEQ ID NO: 1669109
ugauuuggaacacagacag

SEQ ID NO: 1669111 - RNA, 19 nt, Artificial Sequence
  Description of Artificial Sequence: Synthetic oligonucleotide
  Sense strand starting at position 1633 of SEQ ID NO: 1561401
cagcauuggugagcuagaa

SEQ ID NO: 1669112 - RNA, 19 nt, Artificial Sequence
  Description of Artificial Sequence: Synthetic oligonucleotide
  Antisense strand to SEQ ID NO: 1669111
uucuagcucaccaaugcug

SEQ ID NO: 1669113 - RNA, 19 nt, Artificial Sequence
  Description of Artificial Sequence: Synthetic oligonucleotide
  Sense strand starting at position 2353 of SEQ ID NO: 1561401
ucccuaaugucuccuugga

SEQ ID NO: 1669114 - RNA, 19 nt, Artificial Sequence
  Description of Artificial Sequence: Synthetic oligonucleotide
  Antisense strand to SEQ ID NO: 1669113
uccaaggagacauuaggga

SEQ ID NO: 1669115 - RNA, 19 nt, Artificial Sequence
  Description of Artificial Sequence: Synthetic oligonucleotide
  Sense strand starting at position 2355 of SEQ ID NO: 1561401
ccuaaugucuccuuggacu

SEQ ID NO: 1669116 - RNA, 19 nt, Artificial Sequence
  Description of Artificial Sequence: Synthetic oligonucleotide
  Antisense strand to SEQ ID NO: 1669115
aguccaaggagacauuagg

SEQ ID NO: 1669117 - RNA, 19 nt, Artificial Sequence
  Description of Artificial Sequence: Synthetic oligonucleotide
  Sense strand starting at position 2394 of SEQ ID NO: 1561401
auaacagaguacuaugaau

SEQ ID NO: 1669118 - RNA, 19 nt, Artificial Sequence
  Description of Artificial Sequence: Synthetic oligonucleotide
  Antisense strand to SEQ ID NO: 1669117
auucauaguacucuguuau

SEQ ID NO: 1669119 - RNA, 19 nt, Artificial Sequence
  Description of Artificial Sequence: Synthetic oligonucleotide
  Sense strand starting at position 2447 of SEQ ID NO: 1561401
gaagcuguguauccuugaa

SEQ ID NO: 1669120 - RNA, 19 nt, Artificial Sequence
  Description of Artificial Sequence: Synthetic oligonucleotide
  Antisense strand to SEQ ID NO: 1669119
uucaaggauacacagcuuc

SEQ ID NO: 1669121 - RNA, 19 nt, Artificial Sequence
  Description of Artificial Sequence: Synthetic oligonucleotide
  Sense strand starting at position 2512 of SEQ ID NO: 1561401
gcagauaucuagccaagag

SEQ ID NO: 1669122 - RNA, 19 nt, Artificial Sequence
  Description of Artificial Sequence: Synthetic oligonucleotide
  Antisense strand to SEQ ID NO: 1669121
cucuuggcuagauaucugc

SEQ ID NO: 1669123 - RNA, 19 nt, Artificial Sequence
  Description of Artificial Sequence: Synthetic oligonucleotide
  Sense strand starting at position 2690 of SEQ ID NO: 1561401
cuagauagaugcugauaag

SEQ ID NO: 1669124 - RNA, 19 nt, Artificial Sequence
  Description of Artificial Sequence: Synthetic oligonucleotide
  Antisense strand to SEQ ID NO: 1669123
cuuaucagcaucuaucuag

SEQ ID NO: 1669125 - RNA, 19 nt, Artificial Sequence
  Description of Artificial Sequence: Synthetic oligonucleotide
  Sense strand starting at position 2693 of SEQ ID NO: 1561401
gauagaugcugauaagaag

SEQ ID NO: 1669126 - RNA, 19 nt, Artificial Sequence
  Description of Artificial Sequence: Synthetic oligonucleotide
  Antisense strand to SEQ ID NO: 1669125
cuucuuaucagcaucuauc

SEQ ID NO: 1669127 - RNA, 19 nt, Artificial Sequence
  Description of Artificial Sequence: Synthetic oligonucleotide
  Sense strand starting at position 2778 of SEQ ID NO: 1561401
aagagauacccagguguaa

SEQ ID NO: 1669128 - RNA, 19 nt, Artificial Sequence
  Description of Artificial Sequence: Synthetic oligonucleotide
  Antisense strand to SEQ ID NO: 1669127
uuacaccuggguaucucuu

SEQ ID NO: 1669129 - RNA, 19 nt, Artificial Sequence
  Description of Artificial Sequence: Synthetic oligonucleotide
  Sense strand starting at position 2789 of SEQ ID NO: 1561401
agguguaaugagcacagau

SEQ ID NO: 1669130 - RNA, 19 nt, Artificial Sequence
  Description of Artificial Sequence: Synthetic oligonucleotide
  Antisense strand to SEQ ID NO: 1669129
aucugugcucauuacaccu

SEQ ID NO: 1669131 - RNA, 19 nt, Artificial Sequence
  Description of Artificial Sequence: Synthetic oligonucleotide
  Sense strand starting at position 3253 of SEQ ID NO: 1561401
ggcccauacuacgacauau

SEQ ID NO: 1669132 - RNA, 19 nt, Artificial Sequence
  Description of Artificial Sequence: Synthetic oligonucleotide
  Antisense strand to SEQ ID NO: 1669131
auaugucguaguaugggcc

SEQ ID NO: 1669133 - RNA, 19 nt, Artificial Sequence
  Description of Artificial Sequence: Synthetic oligonucleotide
  Sense strand starting at position 3349 of SEQ ID NO: 1561401
aucucaauuguacauguaa

SEQ ID NO: 1669134 - RNA, 19 nt, Artificial Sequence
  Description of Artificial Sequence: Synthetic oligonucleotide
  Antisense strand to SEQ ID NO: 1669133
uuacauguacaauugagau

SEQ ID NO: 1669135 - RNA, 19 nt, Artificial Sequence
  Description of Artificial Sequence: Synthetic oligonucleotide
  Sense strand starting at position 3580 of SEQ ID NO: 1561401
cagcgagugccuguauucu

SEQ ID NO: 1669136 - RNA, 19 nt, Artificial Sequence
  Description of Artificial Sequence: Synthetic oligonucleotide
  Antisense strand to SEQ ID NO: 1669135
agaauacaggcacucgcug

SEQ ID NO: 1669137 - RNA, 19 nt, Artificial Sequence
  Description of Artificial Sequence: Synthetic oligonucleotide
  Sense strand starting at position 3586 of SEQ ID NO: 1561401
gugccuguauucucuguua

SEQ ID NO: 1669138 - RNA, 19 nt, Artificial Sequence
  Description of Artificial Sequence: Synthetic oligonucleotide
  Antisense strand to SEQ ID NO: 1669137
uaacagagaauacaggcac

SEQ ID NO: 1669139 - RNA, 19 nt, Artificial Sequence
  Description of Artificial Sequence: Synthetic oligonucleotide
  Sense strand starting at position 3588 of SEQ ID NO: 1561401
gccuguauucucuguuacu

SEQ ID NO: 1669140 - RNA, 19 nt, Artificial Sequence
  Description of Artificial Sequence: Synthetic oligonucleotide
  Antisense strand to SEQ ID NO: 1669139
aguaacagagaauacaggc

SEQ ID NO: 1669141 - RNA, 19 nt, Artificial Sequence
  Description of Artificial Sequence: Synthetic oligonucleotide
  Sense strand starting at position 3589 of SEQ ID NO: 1561401
ccuguauucucuguuacuu

SEQ ID NO: 1669142 - RNA, 19 nt, Artificial Sequence
  Description of Artificial Sequence: Synthetic oligonucleotide
  Antisense strand to SEQ ID NO: 1669141
aaguaacagagaauacagg

SEQ ID NO: 1669143 - RNA, 19 nt, Artificial Sequence
  Description of Artificial Sequence: Synthetic oligonucleotide
  Sense strand starting at position 3732 of SEQ ID NO: 1561401
agaagaauguccuaauaga

SEQ ID NO: 1669144 - RNA, 19 nt, Artificial Sequence
  Description of Artificial Sequence: Synthetic oligonucleotide
  Antisense strand to SEQ ID NO: 1669143
ucuauuaggacauucuucu

SEQ ID NO: 1669145 - RNA, 19 nt, Artificial Sequence
  Description of Artificial Sequence: Synthetic oligonucleotide
  Sense strand starting at position 3843 of SEQ ID NO: 1561401
gcucaaggucauuaccaaa

SEQ ID NO: 1669146 - RNA, 19 nt, Artificial Sequence
  Description of Artificial Sequence: Synthetic oligonucleotide
  Antisense strand to SEQ ID NO: 1669145
uuugguaaugaccuugagc

SEQ ID NO: 1669147 - RNA, 19 nt, Artificial Sequence
  Description of Artificial Sequence: Synthetic oligonucleotide
  Sense strand starting at position 3904 of SEQ ID NO: 1561401
cuagcauaaauggguugau

SEQ ID NO: 1669148 - RNA, 19 nt, Artificial Sequence
  Description of Artificial Sequence: Synthetic oligonucleotide
  Antisense strand to SEQ ID NO: 1669147
aucaacccauuuaugcuag

SEQ ID NO: 1669149 - RNA, 19 nt, Artificial Sequence
  Description of Artificial Sequence: Synthetic oligonucleotide
  Sense strand starting at position 3905 of SEQ ID NO: 1561401
uagcauaaauggguugaua

SEQ ID NO: 1669150 - RNA, 19 nt, Artificial Sequence
  Description of Artificial Sequence: Synthetic oligonucleotide
  Antisense strand to SEQ ID NO: 1669149
uaucaacccauuuaugcua

SEQ ID NO: 1669151 - RNA, 19 nt, Artificial Sequence
  Description of Artificial Sequence: Synthetic oligonucleotide
  Sense strand starting at position 3907 of SEQ ID NO: 1561401
gcauaaauggguugauauc

SEQ ID NO: 1669152 - RNA, 19 nt, Artificial Sequence
  Description of Artificial Sequence: Synthetic oligonucleotide
  Antisense strand to SEQ ID NO: 1669151
gauaucaacccauuuaugc

SEQ ID NO: 1669153 - RNA, 19 nt, Artificial Sequence
  Description of Artificial Sequence: Synthetic oligonucleotide
  Sense strand starting at position 3917 of SEQ ID NO: 1561401
guugauaucuccucaugau

SEQ ID NO: 1669154 - RNA, 19 nt, Artificial Sequence
  Description of Artificial Sequence: Synthetic oligonucleotide
  Antisense strand to SEQ ID NO: 1669153
aucaugaggagauaucaac

SEQ ID NO: 1669155 - RNA, 19 nt, Artificial Sequence
  Description of Artificial Sequence: Synthetic oligonucleotide
  Sense strand starting at position 3971 of SEQ ID NO: 1561401
auuccauaugaucgcaaga

SEQ ID NO: 1669156 - RNA, 19 nt, Artificial Sequence
  Description of Artificial Sequence: Synthetic oligonucleotide
  Antisense strand to SEQ ID NO: 1669155
ucuugcgaucauauggaau

SEQ ID NO: 1669157 - RNA, 19 nt, Artificial Sequence
  Description of Artificial Sequence: Synthetic oligonucleotide
  Sense strand starting at position 3973 of SEQ ID NO: 1561401
uccauaugaucgcaagaga

SEQ ID NO: 1669158 - RNA, 19 nt, Artificial Sequence
  Description of Artificial Sequence: Synthetic oligonucleotide
  Antisense strand to SEQ ID NO: 1669157
ucucuugcgaucauaugga

SEQ ID NO: 1669159 - RNA, 19 nt, Artificial Sequence
  Description of Artificial Sequence: Synthetic oligonucleotide
  Sense strand starting at position 407 of SEQ ID NO: 1561402
cuaggcccuccaugagauu

SEQ ID NO: 1669160 - RNA, 19 nt, Artificial Sequence
  Description of Artificial Sequence: Synthetic oligonucleotide
  Antisense strand to SEQ ID NO: 1669159
aaucucauggagggccuag

SEQ ID NO: 1669161 - RNA, 19 nt, Artificial Sequence
  Description of Artificial Sequence: Synthetic oligonucleotide
  Sense strand starting at position 426 of SEQ ID NO: 1561402
ggcagcuuccagcaucuua

SEQ ID NO: 1669162 - RNA, 19 nt, Artificial Sequence
  Description of Artificial Sequence: Synthetic oligonucleotide
  Antisense strand to SEQ ID NO: 1669161
uaagaugcuggaagcugcc

SEQ ID NO: 1669163 - RNA, 19 nt, Artificial Sequence
  Description of Artificial Sequence: Synthetic oligonucleotide
  Sense strand starting at position 503 of SEQ ID NO: 1561402
gucacaucacccuguaaag

SEQ ID NO: 1669164 - RNA, 19 nt, Artificial Sequence
  Description of Artificial Sequence: Synthetic oligonucleotide
  Antisense strand to SEQ ID NO: 1669163
cuuuacagggugaugugac

SEQ ID NO: 1669165 - RNA, 19 nt, Artificial Sequence
  Description of Artificial Sequence: Synthetic oligonucleotide
  Sense strand starting at position 600 of SEQ ID NO: 1561402
ugguuauucucuucuuccu

SEQ ID NO: 1669166 - RNA, 19 nt, Artificial Sequence
  Description of Artificial Sequence: Synthetic oligonucleotide
  Antisense strand to SEQ ID NO: 1669165
aggaagaagagaauaacca

SEQ ID NO: 1669167 - RNA, 19 nt, Artificial Sequence
  Description of Artificial Sequence: Synthetic oligonucleotide
  Sense strand starting at position 710 of SEQ ID NO: 1561402
uuugaaauaucgucuugcu

SEQ ID NO: 1669168 - RNA, 19 nt, Artificial Sequence
  Description of Artificial Sequence: Synthetic oligonucleotide
  Antisense strand to SEQ ID NO: 1669167
agcaagacgauauuucaaa

SEQ ID NO: 1669169 - RNA, 19 nt, Artificial Sequence
  Description of Artificial Sequence: Synthetic oligonucleotide
  Sense strand starting at position 715 of SEQ ID NO: 1561402
aauaucgucuugcugacaa

SEQ ID NO: 1669170 - RNA, 19 nt, Artificial Sequence
  Description of Artificial Sequence: Synthetic oligonucleotide
  Antisense strand to SEQ ID NO: 1669169
uugucagcaagacgauauu

SEQ ID NO: 1669171 - RNA, 19 nt, Artificial Sequence
  Description of Artificial Sequence: Synthetic oligonucleotide
  Sense strand starting at position 753 of SEQ ID NO: 1561402
ggaauugaggagugaaguu

SEQ ID NO: 1669172 - RNA, 19 nt, Artificial Sequence
  Description of Artificial Sequence: Synthetic oligonucleotide
  Antisense strand to SEQ ID NO: 1669171
aacuucacuccucaauucc

SEQ ID NO: 1669173 - RNA, 19 nt, Artificial Sequence
  Description of Artificial Sequence: Synthetic oligonucleotide
  Sense strand starting at position 857 of SEQ ID NO: 1561402
augccaauaucuuugaaag

SEQ ID NO: 1669174 - RNA, 19 nt, Artificial Sequence
  Description of Artificial Sequence: Synthetic oligonucleotide
  Antisense strand to SEQ ID NO: 1669173
cuuucaaagauauuggcau

SEQ ID NO: 1669175 - RNA, 19 nt, Artificial Sequence
  Description of Artificial Sequence: Synthetic oligonucleotide
  Sense strand starting at position 867 of SEQ ID NO: 1561402
cuuugaaagccucggagga

SEQ ID NO: 1669176 - RNA, 19 nt, Artificial Sequence
  Description of Artificial Sequence: Synthetic oligonucleotide
  Antisense strand to SEQ ID NO: 1669175
uccuccgaggcuuucaaag

SEQ ID NO: 1669177 - RNA, 19 nt, Artificial Sequence
  Description of Artificial Sequence: Synthetic oligonucleotide
  Sense strand starting at position 882 of SEQ ID NO: 1561402
aggagaaauggucgcccuu

SEQ ID NO: 1669178 - RNA, 19 nt, Artificial Sequence
  Description of Artificial Sequence: Synthetic oligonucleotide
  Antisense strand to SEQ ID NO: 1669177
aagggcgaccauuucuccu

SEQ ID NO: 1669179 - RNA, 19 nt, Artificial Sequence
  Description of Artificial Sequence: Synthetic oligonucleotide
  Sense strand starting at position 1173 of SEQ ID NO: 1561402
cucugagaguugcucaaga

SEQ ID NO: 1669180 - RNA, 19 nt, Artificial Sequence
  Description of Artificial Sequence: Synthetic oligonucleotide
  Antisense strand to SEQ ID NO: 1669179
ucuugagcaacucucagag

SEQ ID NO: 1669181 - RNA, 19 nt, Artificial Sequence
  Description of Artificial Sequence: Synthetic oligonucleotide
  Sense strand starting at position 1175 of SEQ ID NO: 1561402
cugagaguugcucaagagu

SEQ ID NO: 1669182 - RNA, 19 nt, Artificial Sequence
  Description of Artificial Sequence: Synthetic oligonucleotide
  Antisense strand to SEQ ID NO: 1669181
acucuugagcaacucucag

SEQ ID NO: 1669183 - RNA, 19 nt, Artificial Sequence
  Description of Artificial Sequence: Synthetic oligonucleotide
  Sense strand starting at position 1186 of SEQ ID NO: 1561402
ucaagagucgucuaaguuc

SEQ ID NO: 1669184 - RNA, 19 nt, Artificial Sequence
  Description of Artificial Sequence: Synthetic oligonucleotide
  Antisense strand to SEQ ID NO: 1669183
gaacuuagacgacucuuga

SEQ ID NO: 1669185 - RNA, 19 nt, Artificial Sequence
  Description of Artificial Sequence: Synthetic oligonucleotide
  Sense strand starting at position 1215 of SEQ ID NO: 1561402
cuugaauuccagcggaaag

SEQ ID NO: 1669186 - RNA, 19 nt, Artificial Sequence
  Description of Artificial Sequence: Synthetic oligonucleotide
  Antisense strand to SEQ ID NO: 1669185
cuuuccgcuggaauucaag

SEQ ID NO: 1669187 - RNA, 19 nt, Artificial Sequence
  Description of Artificial Sequence: Synthetic oligonucleotide
  Sense strand starting at position 1883 of SEQ ID NO: 1561402
ggcgucucucagugacaga

SEQ ID NO: 1669188 - RNA, 19 nt, Artificial Sequence
  Description of Artificial Sequence: Synthetic oligonucleotide
  Antisense strand to SEQ ID NO: 1669187
ucugucacugagagacgcc

SEQ ID NO: 1669189 - RNA, 19 nt, Artificial Sequence
  Description of Artificial Sequence: Synthetic oligonucleotide
  Sense strand starting at position 1884 of SEQ ID NO: 1561402
gcgucucucagugacagaa

SEQ ID NO: 1669190 - RNA, 19 nt, Artificial Sequence
  Description of Artificial Sequence: Synthetic oligonucleotide
  Antisense strand to SEQ ID NO: 1669189
uucugucacugagagacgc

SEQ ID NO: 1669191 - RNA, 19 nt, Artificial Sequence
  Description of Artificial Sequence: Synthetic oligonucleotide
  Sense strand starting at position 2002 of SEQ ID NO: 1561402
ccacgacuuugauugggua

SEQ ID NO: 1669192 - RNA, 19 nt, Artificial Sequence
  Description of Artificial Sequence: Synthetic oligonucleotide
  Antisense strand to SEQ ID NO: 1669191
uacccaaucaaagucgugg

SEQ ID NO: 1669193 - RNA, 19 nt, Artificial Sequence
  Description of Artificial Sequence: Synthetic oligonucleotide
  Sense strand starting at position 2159 of SEQ ID NO: 1561402
cgggaaacguuugccuuaa

SEQ ID NO: 1669194 - RNA, 19 nt, Artificial Sequence
  Description of Artificial Sequence: Synthetic oligonucleotide
  Antisense strand to SEQ ID NO: 1669193
uuaaggcaaacguuucccg

SEQ ID NO: 1669195 - RNA, 19 nt, Artificial Sequence
  Description of Artificial Sequence: Synthetic oligonucleotide
  Sense strand starting at position 2160 of SEQ ID NO: 1561402
gggaaacguuugccuuaaa

SEQ ID NO: 1669196 - RNA, 19 nt, Artificial Sequence
  Description of Artificial Sequence: Synthetic oligonucleotide
  Antisense strand to SEQ ID NO: 1669195
uuuaaggcaaacguuuccc

SEQ ID NO: 1669197 - RNA, 19 nt, Artificial Sequence
  Description of Artificial Sequence: Synthetic oligonucleotide
  Sense strand starting at position 2161 of SEQ ID NO: 1561402
ggaaacguuugccuuaaag

SEQ ID NO: 1669198 - RNA, 19 nt, Artificial Sequence
  Description of Artificial Sequence: Synthetic oligonucleotide
  Antisense strand to SEQ ID NO: 1669197
cuuuaaggcaaacguuucc

SEQ ID NO: 1669199 - RNA, 19 nt, Artificial Sequence
  Description of Artificial Sequence: Synthetic oligonucleotide
  Sense strand starting at position 2228 of SEQ ID NO: 1561402
gaacaauugugugcaagga

SEQ ID NO: 1669200 - RNA, 19 nt, Artificial Sequence
  Description of Artificial Sequence: Synthetic oligonucleotide
  Antisense strand to SEQ ID NO: 1669199
uccuugcacacaauuguuc

SEQ ID NO: 1669201 - RNA, 19 nt, Artificial Sequence
  Description of Artificial Sequence: Synthetic oligonucleotide
  Sense strand starting at position 2229 of SEQ ID NO: 1561402
aacaauugugugcaaggaa

SEQ ID NO: 1669202 - RNA, 19 nt, Artificial Sequence
  Description of Artificial Sequence: Synthetic oligonucleotide
  Antisense strand to SEQ ID NO: 1669201
uuccuugcacacaauuguu

SEQ ID NO: 1669203 - RNA, 19 nt, Artificial Sequence
  Description of Artificial Sequence: Synthetic oligonucleotide
  Sense strand starting at position 2470 of SEQ ID NO: 1561402
aaauaaagaccacgguauu

SEQ ID NO: 1669204 - RNA, 19 nt, Artificial Sequence
  Description of Artificial Sequence: Synthetic oligonucleotide
  Antisense strand to SEQ ID NO: 1669203
aauaccguggucuuuauuu

SEQ ID NO: 1669205 - RNA, 19 nt, Artificial Sequence
  Description of Artificial Sequence: Synthetic oligonucleotide
  Sense strand starting at position 2523 of SEQ ID NO: 1561402
agcuacgauacgugagaga

SEQ ID NO: 1669206 - RNA, 19 nt, Artificial Sequence
  Description of Artificial Sequence: Synthetic oligonucleotide
  Antisense strand to SEQ ID NO: 1669205
ucucucacguaucguagcu

SEQ ID NO: 1669207 - RNA, 19 nt, Artificial Sequence
  Description of Artificial Sequence: Synthetic oligonucleotide
  Sense strand starting at position 2542 of SEQ ID NO: 1561402
cggaguuacuacucaaauu

SEQ ID NO: 1669208 - RNA, 19 nt, Artificial Sequence
  Description of Artificial Sequence: Synthetic oligonucleotide
  Antisense strand to SEQ ID NO: 1669207
aauuugaguaguaacuccg

SEQ ID NO: 1669209 - RNA, 19 nt, Artificial Sequence
  Description of Artificial Sequence: Synthetic oligonucleotide
  Sense strand starting at position 2671 of SEQ ID NO: 1561402
gauggaaucuguccucuug

SEQ ID NO: 1669210 - RNA, 19 nt, Artificial Sequence
  Description of Artificial Sequence: Synthetic oligonucleotide
  Antisense strand to SEQ ID NO: 1669209
caagaggacagauuccauc

SEQ ID NO: 1669211 - RNA, 19 nt, Artificial Sequence
  Description of Artificial Sequence: Synthetic oligonucleotide
  Sense strand starting at position 2952 of SEQ ID NO: 1561402
ugaccuaacuguguuaucu

SEQ ID NO: 1669212 - RNA, 19 nt, Artificial Sequence
  Description of Artificial Sequence: Synthetic oligonucleotide
  Antisense strand to SEQ ID NO: 1669211
agauaacacaguuagguca

SEQ ID NO: 1669213 - RNA, 19 nt, Artificial Sequence
  Description of Artificial Sequence: Synthetic oligonucleotide
  Sense strand starting at position 2956 of SEQ ID NO: 1561402
cuaacuguguuaucuauga

SEQ ID NO: 1669214 - RNA, 19 nt, Artificial Sequence
  Description of Artificial Sequence: Synthetic oligonucleotide
  Antisense strand to SEQ ID NO: 1669213
ucauagauaacacaguuag

SEQ ID NO: 1669215 - RNA, 19 nt, Artificial Sequence
  Description of Artificial Sequence: Synthetic oligonucleotide
  Sense strand starting at position 2960 of SEQ ID NO: 1561402
cuguguuaucuaugauucc

SEQ ID NO: 1669216 - RNA, 19 nt, Artificial Sequence
  Description of Artificial Sequence: Synthetic oligonucleotide
  Antisense strand to SEQ ID NO: 1669215
ggaaucauagauaacacag

SEQ ID NO: 1669217 - RNA, 19 nt, Artificial Sequence
  Description of Artificial Sequence: Synthetic oligonucleotide
  Sense strand starting at position 2963 of SEQ ID NO: 1561402
uguuaucuaugauuccaga

SEQ ID NO: 1669218 - RNA, 19 nt, Artificial Sequence
  Description of Artificial Sequence: Synthetic oligonucleotide
  Antisense strand to SEQ ID NO: 1669217
ucuggaaucauagauaaca

SEQ ID NO: 1669219 - RNA, 19 nt, Artificial Sequence
  Description of Artificial Sequence: Synthetic oligonucleotide
  Sense strand starting at position 3100 of SEQ ID NO: 1561402
gcggacuccuaguuguaag

SEQ ID NO: 1669220 - RNA, 19 nt, Artificial Sequence
  Description of Artificial Sequence: Synthetic oligonucleotide
  Antisense strand to SEQ ID NO: 1669219
cuuacaacuaggaguccgc

SEQ ID NO: 1669221 - RNA, 19 nt, Artificial Sequence
  Description of Artificial Sequence: Synthetic oligonucleotide
  Sense strand starting at position 3248 of SEQ ID NO: 1561402
gcggcuuguacugcuacau

SEQ ID NO: 1669222 - RNA, 19 nt, Artificial Sequence
  Description of Artificial Sequence: Synthetic oligonucleotide
  Antisense strand to SEQ ID NO: 1669221
auguagcaguacaagccgc

SEQ ID NO: 1669223 - RNA, 19 nt, Artificial Sequence
  Description of Artificial Sequence: Synthetic oligonucleotide
  Sense strand starting at position 3621 of SEQ ID NO: 1561402
cuauccuguuaugcugaau

SEQ ID NO: 1669224 - RNA, 19 nt, Artificial Sequence
  Description of Artificial Sequence: Synthetic oligonucleotide
  Antisense strand to SEQ ID NO: 1669223
auucagcauaacaggauag

SEQ ID NO: 1669225 - RNA, 19 nt, Artificial Sequence
  Description of Artificial Sequence: Synthetic oligonucleotide
  Sense strand starting at position 3681 of SEQ ID NO: 1561402
gguggugucagacaugcaa

SEQ ID NO: 1669226 - RNA, 19 nt, Artificial Sequence
  Description of Artificial Sequence: Synthetic oligonucleotide
  Antisense strand to SEQ ID NO: 1669225
uugcaugucugacaccacc

SEQ ID NO: 1669227 - RNA, 19 nt, Artificial Sequence
  Description of Artificial Sequence: Synthetic oligonucleotide
  Sense strand starting at position 3761 of SEQ ID NO: 1561402
ugguguuaucugcagaaau

SEQ ID NO: 1669228 - RNA, 19 nt, Artificial Sequence
  Description of Artificial Sequence: Synthetic oligonucleotide
  Antisense strand to SEQ ID NO: 1669227
auuucugcagauaacacca

SEQ ID NO: 1669229 - RNA, 19 nt, Artificial Sequence
  Description of Artificial Sequence: Synthetic oligonucleotide
  Sense strand starting at position 3763 of SEQ ID NO: 1561402
guguuaucugcagaaauag

SEQ ID NO: 1669230 - RNA, 19 nt, Artificial Sequence
  Description of Artificial Sequence: Synthetic oligonucleotide
  Antisense strand to SEQ ID NO: 1669229
cuauuucugcagauaacac

SEQ ID NO: 1669231 - RNA, 19 nt, Artificial Sequence
  Description of Artificial Sequence: Synthetic oligonucleotide
  Sense strand starting at position 3772 of SEQ ID NO: 1561402
gcagaaauagcuggcaauc

SEQ ID NO: 1669232 - RNA, 19 nt, Artificial Sequence
  Description of Artificial Sequence: Synthetic oligonucleotide
  Antisense strand to SEQ ID NO: 1669231
gauugccagcuauuucugc

SEQ ID NO: 1669233 - RNA, 19 nt, Artificial Sequence
  Description of Artificial Sequence: Synthetic oligonucleotide
  Sense strand starting at position 3782 of SEQ ID NO: 1561402
cuggcaaucuaugucuaca

SEQ ID NO: 1669234 - RNA, 19 nt, Artificial Sequence
  Description of Artificial Sequence: Synthetic oligonucleotide
  Antisense strand to SEQ ID NO: 1669233
uguagacauagauugccag

SEQ ID NO: 1669235 - RNA, 19 nt, Artificial Sequence
  Description of Artificial Sequence: Synthetic oligonucleotide
  Sense strand starting at position 3784 of SEQ ID NO: 1561402
ggcaaucuaugucuacacu

SEQ ID NO: 1669236 - RNA, 19 nt, Artificial Sequence
  Description of Artificial Sequence: Synthetic oligonucleotide
  Antisense strand to SEQ ID NO: 1669235
aguguagacauagauugcc

SEQ ID NO: 1669237 - RNA, 19 nt, Artificial Sequence
  Description of Artificial Sequence: Synthetic oligonucleotide
  Sense strand starting at position 3921 of SEQ ID NO: 1561402
ugccuaagagcccaggauu

SEQ ID NO: 1669238 - RNA, 19 nt, Artificial Sequence
  Description of Artificial Sequence: Synthetic oligonucleotide
  Antisense strand to SEQ ID NO: 1669237
aauccugggcucuuaggca

SEQ ID NO: 1669239 - RNA, 19 nt, Artificial Sequence
  Description of Artificial Sequence: Synthetic oligonucleotide
  Sense strand starting at position 366 of SEQ ID NO: 1561403
uuucucauucgugaaucgu

SEQ ID NO: 1669240 - RNA, 19 nt, Artificial Sequence
  Description of Artificial Sequence: Synthetic oligonucleotide
  Antisense strand to SEQ ID NO: 1669239
acgauucacgaaugagaaa

SEQ ID NO: 1669241 - RNA, 19 nt, Artificial Sequence
  Description of Artificial Sequence: Synthetic oligonucleotide
  Sense strand starting at position 374 of SEQ ID NO: 1561403
ucgugaaucguuguuguug

SEQ ID NO: 1669242 - RNA, 19 nt, Artificial Sequence
  Description of Artificial Sequence: Synthetic oligonucleotide
  Antisense strand to SEQ ID NO: 1669241
caacaacaacgauucacga

SEQ ID NO: 1669243 - RNA, 19 nt, Artificial Sequence
  Description of Artificial Sequence: Synthetic oligonucleotide
  Sense strand starting at position 810 of SEQ ID NO: 1561403
uguucuuuguuucuugaga

SEQ ID NO: 1669244 - RNA, 19 nt, Artificial Sequence
  Description of Artificial Sequence: Synthetic oligonucleotide
  Antisense strand to SEQ ID NO: 1669243
ucucaagaaacaaagaaca

SEQ ID NO: 1669245 - RNA, 19 nt, Artificial Sequence
  Description of Artificial Sequence: Synthetic oligonucleotide
  Sense strand starting at position 1010 of SEQ ID NO: 1561403
cggaguugcccaguugucu

SEQ ID NO: 1669246 - RNA, 19 nt, Artificial Sequence
  Description of Artificial Sequence: Synthetic oligonucleotide
  Antisense strand to SEQ ID NO: 1669245
agacaacugggcaacuccg

SEQ ID NO: 1669247 - RNA, 19 nt, Artificial Sequence
  Description of Artificial Sequence: Synthetic oligonucleotide
  Sense strand starting at position 1324 of SEQ ID NO: 1561403
agccuaucgaguuaguuua

SEQ ID NO: 1669248 - RNA, 19 nt, Artificial Sequence
  Description of Artificial Sequence: Synthetic oligonucleotide
  Antisense strand to SEQ ID NO: 1669247
uaaacuaacucgauaggcu

SEQ ID NO: 1669249 - RNA, 19 nt, Artificial Sequence
  Description of Artificial Sequence: Synthetic oligonucleotide
  Sense strand starting at position 1326 of SEQ ID NO: 1561403
ccuaucgaguuaguuuaga

SEQ ID NO: 1669250 - RNA, 19 nt, Artificial Sequence
  Description of Artificial Sequence: Synthetic oligonucleotide
  Antisense strand to SEQ ID NO: 1669249
ucuaaacuaacucgauagg

SEQ ID NO: 1669251 - RNA, 19 nt, Artificial Sequence
  Description of Artificial Sequence: Synthetic oligonucleotide
  Sense strand starting at position 1385 of SEQ ID NO: 1561403
agugcuagaaacugcguua

SEQ ID NO: 1669252 - RNA, 19 nt, Artificial Sequence
  Description of Artificial Sequence: Synthetic oligonucleotide
  Antisense strand to SEQ ID NO: 1669251
uaacgcaguuucuagcacu

SEQ ID NO: 1669253 - RNA, 19 nt, Artificial Sequence
  Description of Artificial Sequence: Synthetic oligonucleotide
  Sense strand starting at position 1429 of SEQ ID NO: 1561403
gcucgcugugcucuuguga

SEQ ID NO: 1669254 - RNA, 19 nt, Artificial Sequence
  Description of Artificial Sequence: Synthetic oligonucleotide
  Antisense strand to SEQ ID NO: 1669253
ucacaagagcacagcgagc

SEQ ID NO: 1669255 - RNA, 19 nt, Artificial Sequence
  Description of Artificial Sequence: Synthetic oligonucleotide
  Sense strand starting at position 1459 of SEQ ID NO: 1561403
ugcacccuuguguagaaau

SEQ ID NO: 1669256 - RNA, 19 nt, Artificial Sequence
  Description of Artificial Sequence: Synthetic oligonucleotide
  Antisense strand to SEQ ID NO: 1669255
auuucuacacaagggugca

SEQ ID NO: 1669257 - RNA, 19 nt, Artificial Sequence
  Description of Artificial Sequence: Synthetic oligonucleotide
  Sense strand starting at position 1533 of SEQ ID NO: 1561403
gggcacuuguuucuaacaa

SEQ ID NO: 1669258 - RNA, 19 nt, Artificial Sequence
  Description of Artificial Sequence: Synthetic oligonucleotide
  Antisense strand to SEQ ID NO: 1669257
uuguuagaaacaagugccc

SEQ ID NO: 1669259 - RNA, 19 nt, Artificial Sequence
  Description of Artificial Sequence: Synthetic oligonucleotide
  Sense strand starting at position 2150 of SEQ ID NO: 1561403
ugcagaucaugucugacuu

SEQ ID NO: 1669260 - RNA, 19 nt, Artificial Sequence
  Description of Artificial Sequence: Synthetic oligonucleotide
  Antisense strand to SEQ ID NO: 1669259
aagucagacaugaucugca

SEQ ID NO: 1669261 - RNA, 19 nt, Artificial Sequence
  Description of Artificial Sequence: Synthetic oligonucleotide
  Sense strand starting at position 2257 of SEQ ID NO: 1561403
gagcccuggucaucagaua

SEQ ID NO: 1669262 - RNA, 19 nt, Artificial Sequence
  Description of Artificial Sequence: Synthetic oligonucleotide
  Antisense strand to SEQ ID NO: 1669261
uaucugaugaccagggcuc

SEQ ID NO: 1669263 - RNA, 19 nt, Artificial Sequence
  Description of Artificial Sequence: Synthetic oligonucleotide
  Sense strand starting at position 2258 of SEQ ID NO: 1561403
agcccuggucaucagauau

SEQ ID NO: 1669264 - RNA, 19 nt, Artificial Sequence
  Description of Artificial Sequence: Synthetic oligonucleotide
  Antisense strand to SEQ ID NO: 1669263
auaucugaugaccagggcu

SEQ ID NO: 1669265 - RNA, 19 nt, Artificial Sequence
  Description of Artificial Sequence: Synthetic oligonucleotide
  Sense strand starting at position 2290 of SEQ ID NO: 1561403
cgacuugcuccuuauuguu

SEQ ID NO: 1669266 - RNA, 19 nt, Artificial Sequence
  Description of Artificial Sequence: Synthetic oligonucleotide
  Antisense strand to SEQ ID NO: 1669265
aacaauaaggagcaagucg

SEQ ID NO: 1669267 - RNA, 19 nt, Artificial Sequence
  Description of Artificial Sequence: Synthetic oligonucleotide
  Sense strand starting at position 2399 of SEQ ID NO: 1561403
cucaguguucaauggagag

SEQ ID NO: 1669268 - RNA, 19 nt, Artificial Sequence
  Description of Artificial Sequence: Synthetic oligonucleotide
  Antisense strand to SEQ ID NO: 1669267
cucuccauugaacacugag

SEQ ID NO: 1669269 - RNA, 19 nt, Artificial Sequence
  Description of Artificial Sequence: Synthetic oligonucleotide
  Sense strand starting at position 2413 of SEQ ID NO: 1561403
gagagauacgcuugccuca

SEQ ID NO: 1669270 - RNA, 19 nt, Artificial Sequence
  Description of Artificial Sequence: Synthetic oligonucleotide
  Antisense strand to SEQ ID NO: 1669269
ugaggcaagcguaucucuc

SEQ ID NO: 1669271 - RNA, 19 nt, Artificial Sequence
  Description of Artificial Sequence: Synthetic oligonucleotide
  Sense strand starting at position 2415 of SEQ ID NO: 1561403
gagauacgcuugccucaga

SEQ ID NO: 1669272 - RNA, 19 nt, Artificial Sequence
  Description of Artificial Sequence: Synthetic oligonucleotide
  Antisense strand to SEQ ID NO: 1669271
ucugaggcaagcguaucuc

SEQ ID NO: 1669273 - RNA, 19 nt, Artificial Sequence
  Description of Artificial Sequence: Synthetic oligonucleotide
  Sense strand starting at position 2484 of SEQ ID NO: 1561403
ggcagaugucuuccagcgu

SEQ ID NO: 1669274 - RNA, 19 nt, Artificial Sequence
  Description of Artificial Sequence: Synthetic oligonucleotide
  Antisense strand to SEQ ID NO: 1669273
acgcuggaagacaucugcc

SEQ ID NO: 1669275 - RNA, 19 nt, Artificial Sequence
  Description of Artificial Sequence: Synthetic oligonucleotide
  Sense strand starting at position 2588 of SEQ ID NO: 1561403
gccagaacuuauuaaagau

SEQ ID NO: 1669276 - RNA, 19 nt, Artificial Sequence
  Description of Artificial Sequence: Synthetic oligonucleotide
  Antisense strand to SEQ ID NO: 1669275
aucuuuaauaaguucuggc

SEQ ID NO: 1669277 - RNA, 19 nt, Artificial Sequence
  Description of Artificial Sequence: Synthetic oligonucleotide
  Sense strand starting at position 2614 of SEQ ID NO: 1561403
cucucaguacuauguauau

SEQ ID NO: 1669278 - RNA, 19 nt, Artificial Sequence
  Description of Artificial Sequence: Synthetic oligonucleotide
  Antisense strand to SEQ ID NO: 1669277
auauacauaguacugagag

SEQ ID NO: 1669279 - RNA, 19 nt, Artificial Sequence
  Description of Artificial Sequence: Synthetic oligonucleotide
  Sense strand starting at position 2629 of SEQ ID NO: 1561403
auaucuaucccuggugcau

SEQ ID NO: 1669280 - RNA, 19 nt, Artificial Sequence
  Description of Artificial Sequence: Synthetic oligonucleotide
  Antisense strand to SEQ ID NO: 1669279
augcaccagggauagauau

SEQ ID NO: 1669281 - RNA, 19 nt, Artificial Sequence
  Description of Artificial Sequence: Synthetic oligonucleotide
  Sense strand starting at position 2642 of SEQ ID NO: 1561403
gugcauugacagugacuga

SEQ ID NO: 1669282 - RNA, 19 nt, Artificial Sequence
  Description of Artificial Sequence: Synthetic oligonucleotide
  Antisense strand to SEQ ID NO: 1669281
ucagucacugucaaugcac

SEQ ID NO: 1669283 - RNA, 19 nt, Artificial Sequence
  Description of Artificial Sequence: Synthetic oligonucleotide
  Sense strand starting at position 2643 of SEQ ID NO: 1561403
ugcauugacagugacugaa

SEQ ID NO: 1669284 - RNA, 19 nt, Artificial Sequence
  Description of Artificial Sequence: Synthetic oligonucleotide
  Antisense strand to SEQ ID NO: 1669283
uucagucacugucaaugca

SEQ ID NO: 1669285 - RNA, 19 nt, Artificial Sequence
  Description of Artificial Sequence: Synthetic oligonucleotide
  Sense strand starting at position 2794 of SEQ ID NO: 1561403
augagaaauucugucauag

SEQ ID NO: 1669286 - RNA, 19 nt, Artificial Sequence
  Description of Artificial Sequence: Synthetic oligonucleotide
  Antisense strand to SEQ ID NO: 1669285
cuaugacagaauuucucau

SEQ ID NO: 1669287 - RNA, 19 nt, Artificial Sequence
  Description of Artificial Sequence: Synthetic oligonucleotide
  Sense strand starting at position 2796 of SEQ ID NO: 1561403
gagaaauucugucauagaa

SEQ ID NO: 1669288 - RNA, 19 nt, Artificial Sequence
  Description of Artificial Sequence: Synthetic oligonucleotide
  Antisense strand to SEQ ID NO: 1669287
uucuaugacagaauuucuc

SEQ ID NO: 1669289 - RNA, 19 nt, Artificial Sequence
  Description of Artificial Sequence: Synthetic oligonucleotide
  Sense strand starting at position 3352 of SEQ ID NO: 1561403
gagcuuaagugauccucca

SEQ ID NO: 1669290 - RNA, 19 nt, Artificial Sequence
  Description of Artificial Sequence: Synthetic oligonucleotide
  Antisense strand to SEQ ID NO: 1669289
uggaggaucacuuaagcuc

SEQ ID NO: 1669291 - RNA, 19 nt, Artificial Sequence
  Description of Artificial Sequence: Synthetic oligonucleotide
  Sense strand starting at position 3467 of SEQ ID NO: 1561403
gugaauauuuccuggagaa

SEQ ID NO: 1669292 - RNA, 19 nt, Artificial Sequence
  Description of Artificial Sequence: Synthetic oligonucleotide
  Antisense strand to SEQ ID NO: 1669291
uucuccaggaaauauucac

SEQ ID NO: 1669293 - RNA, 19 nt, Artificial Sequence
  Description of Artificial Sequence: Synthetic oligonucleotide
  Sense strand starting at position 3511 of SEQ ID NO: 1561403
agguaaaucagguguugaa

SEQ ID NO: 1669294 - RNA, 19 nt, Artificial Sequence
  Description of Artificial Sequence: Synthetic oligonucleotide
  Antisense strand to SEQ ID NO: 1669293
uucaacaccugauuuaccu

SEQ ID NO: 1669295 - RNA, 19 nt, Artificial Sequence
  Description of Artificial Sequence: Synthetic oligonucleotide
  Sense strand starting at position 3532 of SEQ ID NO: 1561403
uugaacauuccuggaaacu

SEQ ID NO: 1669296 - RNA, 19 nt, Artificial Sequence
  Description of Artificial Sequence: Synthetic oligonucleotide
  Antisense strand to SEQ ID NO: 1669295
aguuuccaggaauguucaa

SEQ ID NO: 1669297 - RNA, 19 nt, Artificial Sequence
  Description of Artificial Sequence: Synthetic oligonucleotide
  Sense strand starting at position 3569 of SEQ ID NO: 1561403
uuugcuuaugugugaaagu

SEQ ID NO: 1669298 - RNA, 19 nt, Artificial Sequence
  Description of Artificial Sequence: Synthetic oligonucleotide
  Antisense strand to SEQ ID NO: 1669297
acuuucacacauaagcaaa

SEQ ID NO: 1669299 - RNA, 19 nt, Artificial Sequence
  Description of Artificial Sequence: Synthetic oligonucleotide
  Sense strand starting at position 3646 of SEQ ID NO: 1561403
aaacuauguugggacaaca

SEQ ID NO: 1669300 - RNA, 19 nt, Artificial Sequence
  Description of Artificial Sequence: Synthetic oligonucleotide
  Antisense strand to SEQ ID NO: 1669299
uguugucccaacauaguuu

SEQ ID NO: 1669301 - RNA, 19 nt, Artificial Sequence
  Description of Artificial Sequence: Synthetic oligonucleotide
  Sense strand starting at position 3664 of SEQ ID NO: 1561403
agguacuaucaaggauuau

SEQ ID NO: 1669302 - RNA, 19 nt, Artificial Sequence
  Description of Artificial Sequence: Synthetic oligonucleotide
  Antisense strand to SEQ ID NO: 1669301
auaauccuugauaguaccu

SEQ ID NO: 1669303 - RNA, 19 nt, Artificial Sequence
  Description of Artificial Sequence: Synthetic oligonucleotide
  Sense strand starting at position 3706 of SEQ ID NO: 1561403
ucagaugauuucugaggca

SEQ ID NO: 1669304 - RNA, 19 nt, Artificial Sequence
  Description of Artificial Sequence: Synthetic oligonucleotide
  Antisense strand to SEQ ID NO: 1669303
ugccucagaaaucaucuga

SEQ ID NO: 1669305 - RNA, 19 nt, Artificial Sequence
  Description of Artificial Sequence: Synthetic oligonucleotide
  Sense strand starting at position 3709 of SEQ ID NO: 1561403
gaugauuucugaggcaguu

SEQ ID NO: 1669306 - RNA, 19 nt, Artificial Sequence
  Description of Artificial Sequence: Synthetic oligonucleotide
  Antisense strand to SEQ ID NO: 1669305
aacugccucagaaaucauc

SEQ ID NO: 1669307 - RNA, 19 nt, Artificial Sequence
  Description of Artificial Sequence: Synthetic oligonucleotide
  Sense strand starting at position 3745 of SEQ ID NO: 1561403
guagaaaguguuggaacua

SEQ ID NO: 1669308 - RNA, 19 nt, Artificial Sequence
  Description of Artificial Sequence: Synthetic oligonucleotide
  Antisense strand to SEQ ID NO: 1669307
uaguuccaacacuuucuac

SEQ ID NO: 1669309 - RNA, 19 nt, Artificial Sequence
  Description of Artificial Sequence: Synthetic oligonucleotide
  Sense strand starting at position 3775 of SEQ ID NO: 1561403
gcuggagucaguugcagaa

SEQ ID NO: 1669310 - RNA, 19 nt, Artificial Sequence
  Description of Artificial Sequence: Synthetic oligonucleotide
  Antisense strand to SEQ ID NO: 1669309
uucugcaacugacuccagc

SEQ ID NO: 1669311 - RNA, 19 nt, Artificial Sequence
  Description of Artificial Sequence: Synthetic oligonucleotide
  Sense strand starting at position 3779 of SEQ ID NO: 1561403
gagucaguugcagaauuga

SEQ ID NO: 1669312 - RNA, 19 nt, Artificial Sequence
  Description of Artificial Sequence: Synthetic oligonucleotide
  Antisense strand to SEQ ID NO: 1669311
ucaauucugcaacugacuc

SEQ ID NO: 1669313 - RNA, 19 nt, Artificial Sequence
  Description of Artificial Sequence: Synthetic oligonucleotide
  Sense strand starting at position 3849 of SEQ ID NO: 1561403
agaaguauuccguguugug

SEQ ID NO: 1669314 - RNA, 19 nt, Artificial Sequence
  Description of Artificial Sequence: Synthetic oligonucleotide
  Antisense strand to SEQ ID NO: 1669313
cacaacacggaauacuucu

SEQ ID NO: 1669315 - RNA, 19 nt, Artificial Sequence
  Description of Artificial Sequence: Synthetic oligonucleotide
  Sense strand starting at position 3850 of SEQ ID NO: 1561403
gaaguauuccguguugugu

SEQ ID NO: 1669316 - RNA, 19 nt, Artificial Sequence
  Description of Artificial Sequence: Synthetic oligonucleotide
  Antisense strand to SEQ ID NO: 1669315
acacaacacggaauacuuc

SEQ ID NO: 1669317 - RNA, 19 nt, Artificial Sequence
  Description of Artificial Sequence: Synthetic oligonucleotide
  Sense strand starting at position 3943 of SEQ ID NO: 1561403
acaggauguguggauguua

SEQ ID NO: 1669318 - RNA, 19 nt, Artificial Sequence
  Description of Artificial Sequence: Synthetic oligonucleotide
  Antisense strand to SEQ ID NO: 1669317
uaacauccacacauccugu

SEQ ID NO: 1669319 - RNA, 19 nt, Artificial Sequence
  Description of Artificial Sequence: Synthetic oligonucleotide
  Sense strand starting at position 13 of SEQ ID NO: 1561404
cgaagugcucaauaaccau

SEQ ID NO: 1669320 - RNA, 19 nt, Artificial Sequence
  Description of Artificial Sequence: Synthetic oligonucleotide
  Antisense strand to SEQ ID NO: 1669319
augguuauugagcacuucg

SEQ ID NO: 1669321 - RNA, 19 nt, Artificial Sequence
  Description of Artificial Sequence: Synthetic oligonucleotide
  Sense strand starting at position 97 of SEQ ID NO: 1561404
ccuguccuuagggauaguu

SEQ ID NO: 1669322 - RNA, 19 nt, Artificial Sequence
  Description of Artificial Sequence: Synthetic oligonucleotide
  Antisense strand to SEQ ID NO: 1669321
aacuaucccuaaggacagg

SEQ ID NO: 1669323 - RNA, 19 nt, Artificial Sequence
  Description of Artificial Sequence: Synthetic oligonucleotide
  Sense strand starting at position 241 of SEQ ID NO: 1561404
gaguguucuaaggaaguag

SEQ ID NO: 1669324 - RNA, 19 nt, Artificial Sequence
  Description of Artificial Sequence: Synthetic oligonucleotide
  Antisense strand to SEQ ID NO: 1669323
cuacuuccuuagaacacuc

SEQ ID NO: 1669325 - RNA, 19 nt, Artificial Sequence
  Description of Artificial Sequence: Synthetic oligonucleotide
  Sense strand starting at position 252 of SEQ ID NO: 1561404
ggaaguagcuuauugagga

SEQ ID NO: 1669326 - RNA, 19 nt, Artificial Sequence
  Description of Artificial Sequence: Synthetic oligonucleotide
  Antisense strand to SEQ ID NO: 1669325
uccucaauaagcuacuucc

SEQ ID NO: 1669327 - RNA, 19 nt, Artificial Sequence
  Description of Artificial Sequence: Synthetic oligonucleotide
  Sense strand starting at position 282 of SEQ ID NO: 1561404
ggagacuccucccacuaca

SEQ ID NO: 1669328 - RNA, 19 nt, Artificial Sequence
  Description of Artificial Sequence: Synthetic oligonucleotide
  Antisense strand to SEQ ID NO: 1669327
uguagugggaggagucucc

SEQ ID NO: 1669329 - RNA, 19 nt, Artificial Sequence
  Description of Artificial Sequence: Synthetic oligonucleotide
  Sense strand starting at position 485 of SEQ ID NO: 1561404
cucaucacucuguaacguu

SEQ ID NO: 1669330 - RNA, 19 nt, Artificial Sequence
  Description of Artificial Sequence: Synthetic oligonucleotide
  Antisense strand to SEQ ID NO: 1669329
aacguuacagagugaugag

SEQ ID NO: 1669331 - RNA, 19 nt, Artificial Sequence
  Description of Artificial Sequence: Synthetic oligonucleotide
  Sense strand starting at position 493 of SEQ ID NO: 1561404
ucuguaacguuuccaaaga

SEQ ID NO: 1669332 - RNA, 19 nt, Artificial Sequence
  Description of Artificial Sequence: Synthetic oligonucleotide
  Antisense strand to SEQ ID NO: 1669331
ucuuuggaaacguuacaga

SEQ ID NO: 1669333 - RNA, 19 nt, Artificial Sequence
  Description of Artificial Sequence: Synthetic oligonucleotide
  Sense strand starting at position 540 of SEQ ID NO: 1561404
aggugucucugucuaggga

SEQ ID NO: 1669334 - RNA, 19 nt, Artificial Sequence
  Description of Artificial Sequence: Synthetic oligonucleotide
  Antisense strand to SEQ ID NO: 1669333
ucccuagacagagacaccu

SEQ ID NO: 1669335 - RNA, 19 nt, Artificial Sequence
  Description of Artificial Sequence: Synthetic oligonucleotide
  Sense strand starting at position 541 of SEQ ID NO: 1561404
ggugucucugucuagggau

SEQ ID NO: 1669336 - RNA, 19 nt, Artificial Sequence
  Description of Artificial Sequence: Synthetic oligonucleotide
  Antisense strand to SEQ ID NO: 1669335
aucccuagacagagacacc

SEQ ID NO: 1669337 - RNA, 19 nt, Artificial Sequence
  Description of Artificial Sequence: Synthetic oligonucleotide
  Sense strand starting at position 543 of SEQ ID NO: 1561404
ugucucugucuagggauga

SEQ ID NO: 1669338 - RNA, 19 nt, Artificial Sequence
  Description of Artificial Sequence: Synthetic oligonucleotide
  Antisense strand to SEQ ID NO: 1669337
ucaucccuagacagagaca

SEQ ID NO: 1669339 - RNA, 19 nt, Artificial Sequence
  Description of Artificial Sequence: Synthetic oligonucleotide
  Sense strand starting at position 547 of SEQ ID NO: 1561404
ucugucuagggaugaugaa

SEQ ID NO: 1669340 - RNA, 19 nt, Artificial Sequence
  Description of Artificial Sequence: Synthetic oligonucleotide
  Antisense strand to SEQ ID NO: 1669339
uucaucaucccuagacaga

SEQ ID NO: 1669341 - RNA, 19 nt, Artificial Sequence
  Description of Artificial Sequence: Synthetic oligonucleotide
  Sense strand starting at position 567 of SEQ ID NO: 1561404
ggaggacaguaacaaagau

SEQ ID NO: 1669342 - RNA, 19 nt, Artificial Sequence
  Description of Artificial Sequence: Synthetic oligonucleotide
  Antisense strand to SEQ ID NO: 1669341
aucuuuguuacuguccucc

SEQ ID NO: 1669343 - RNA, 19 nt, Artificial Sequence
  Description of Artificial Sequence: Synthetic oligonucleotide
  Sense strand starting at position 613 of SEQ ID NO: 1561404
cagcgaaaugucugguggu

SEQ ID NO: 1669344 - RNA, 19 nt, Artificial Sequence
  Description of Artificial Sequence: Synthetic oligonucleotide
  Antisense strand to SEQ ID NO: 1669343
accaccagacauuucgcug

SEQ ID NO: 1669345 - RNA, 19 nt, Artificial Sequence
  Description of Artificial Sequence: Synthetic oligonucleotide
  Sense strand starting at position 687 of SEQ ID NO: 1561404
agccauauauugcuaugua

SEQ ID NO: 1669346 - RNA, 19 nt, Artificial Sequence
  Description of Artificial Sequence: Synthetic oligonucleotide
  Antisense strand to SEQ ID NO: 1669345
uacauagcaauauauggcu

SEQ ID NO: 1669347 - RNA, 19 nt, Artificial Sequence
  Description of Artificial Sequence: Synthetic oligonucleotide
  Sense strand starting at position 726 of SEQ ID NO: 1561404
auacuagccucuguuugaa

SEQ ID NO: 1669348 - RNA, 19 nt, Artificial Sequence
  Description of Artificial Sequence: Synthetic oligonucleotide
  Antisense strand to SEQ ID NO: 1669347
uucaaacagaggcuaguau

SEQ ID NO: 1669349 - RNA, 19 nt, Artificial Sequence
  Description of Artificial Sequence: Synthetic oligonucleotide
  Sense strand starting at position 890 of SEQ ID NO: 1561404
ugcccacaucuuuggaaga

SEQ ID NO: 1669350 - RNA, 19 nt, Artificial Sequence
  Description of Artificial Sequence: Synthetic oligonucleotide
  Antisense strand to SEQ ID NO: 1669349
ucuuccaaagaugugggca

SEQ ID NO: 1669351 - RNA, 19 nt, Artificial Sequence
  Description of Artificial Sequence: Synthetic oligonucleotide
  Sense strand starting at position 892 of SEQ ID NO: 1561404
cccacaucuuuggaagacu

SEQ ID NO: 1669352 - RNA, 19 nt, Artificial Sequence
  Description of Artificial Sequence: Synthetic oligonucleotide
  Antisense strand to SEQ ID NO: 1669351
agucuuccaaagauguggg

SEQ ID NO: 1669353 - RNA, 19 nt, Artificial Sequence
  Description of Artificial Sequence: Synthetic oligonucleotide
  Sense strand starting at position 1069 of SEQ ID NO: 1561404
aggcgagauugcaguuaga

SEQ ID NO: 1669354 - RNA, 19 nt, Artificial Sequence
  Description of Artificial Sequence: Synthetic oligonucleotide
  Antisense strand to SEQ ID NO: 1669353
ucuaacugcaaucucgccu

SEQ ID NO: 1669355 - RNA, 19 nt, Artificial Sequence
  Description of Artificial Sequence: Synthetic oligonucleotide
  Sense strand starting at position 1072 of SEQ ID NO: 1561404
cgagauugcaguuagauau

SEQ ID NO: 1669356 - RNA, 19 nt, Artificial Sequence
  Description of Artificial Sequence: Synthetic oligonucleotide
  Antisense strand to SEQ ID NO: 1669355
auaucuaacugcaaucucg

SEQ ID NO: 1669357 - RNA, 19 nt, Artificial Sequence
  Description of Artificial Sequence: Synthetic oligonucleotide
  Sense strand starting at position 1187 of SEQ ID NO: 1561404
ggaugagaucucugagagu

SEQ ID NO: 1669358 - RNA, 19 nt, Artificial Sequence
  Description of Artificial Sequence: Synthetic oligonucleotide
  Antisense strand to SEQ ID NO: 1669357
acucucagagaucucaucc

SEQ ID NO: 1669359 - RNA, 19 nt, Artificial Sequence
  Description of Artificial Sequence: Synthetic oligonucleotide
  Sense strand starting at position 1196 of SEQ ID NO: 1561404
cucugagaguugcucaaga

SEQ ID NO: 1669360 - RNA, 19 nt, Artificial Sequence
  Description of Artificial Sequence: Synthetic oligonucleotide
  Antisense strand to SEQ ID NO: 1669359
ucuugagcaacucucagag

SEQ ID NO: 1669361 - RNA, 19 nt, Artificial Sequence
  Description of Artificial Sequence: Synthetic oligonucleotide
  Sense strand starting at position 1198 of SEQ ID NO: 1561404
cugagaguugcucaagagu

SEQ ID NO: 1669362 - RNA, 19 nt, Artificial Sequence
  Description of Artificial Sequence: Synthetic oligonucleotide
  Antisense strand to SEQ ID NO: 1669361
acucuugagcaacucucag

SEQ ID NO: 1669363 - RNA, 19 nt, Artificial Sequence
  Description of Artificial Sequence: Synthetic oligonucleotide
  Sense strand starting at position 1209 of SEQ ID NO: 1561404
ucaagagucgccugaguuc

SEQ ID NO: 1669364 - RNA, 19 nt, Artificial Sequence
  Description of Artificial Sequence: Synthetic oligonucleotide
  Antisense strand to SEQ ID NO: 1669363
gaacucaggcgacucuuga

SEQ ID NO: 1669365 - RNA, 19 nt, Artificial Sequence
  Description of Artificial Sequence: Synthetic oligonucleotide
  Sense strand starting at position 1220 of SEQ ID NO: 1561404
cugaguucuuucucagauc

SEQ ID NO: 1669366 - RNA, 19 nt, Artificial Sequence
  Description of Artificial Sequence: Synthetic oligonucleotide
  Antisense strand to SEQ ID NO: 1669365
gaucugagaaagaacucag

SEQ ID NO: 1669367 - RNA, 19 nt, Artificial Sequence
  Description of Artificial Sequence: Synthetic oligonucleotide
  Sense strand starting at position 1238 of SEQ ID NO: 1561404
ccugaauuccagcggaaag

SEQ ID NO: 1669368 - RNA, 19 nt, Artificial Sequence
  Description of Artificial Sequence: Synthetic oligonucleotide
  Antisense strand to SEQ ID NO: 1669367
cuuuccgcuggaauucagg

SEQ ID NO: 1669369 - RNA, 19 nt, Artificial Sequence
  Description of Artificial Sequence: Synthetic oligonucleotide
  Sense strand starting at position 1995 of SEQ ID NO: 1561404
gauugacaguucucacgac

SEQ ID NO: 1669370 - RNA, 19 nt, Artificial Sequence
  Description of Artificial Sequence: Synthetic oligonucleotide
  Antisense strand to SEQ ID NO: 1669369
gucgugagaacugucaauc

SEQ ID NO: 1669371 - RNA, 19 nt, Artificial Sequence
  Description of Artificial Sequence: Synthetic oligonucleotide
  Sense strand starting at position 2094 of SEQ ID NO: 1561404
cggaguggaaccugauaaa

SEQ ID NO: 1669372 - RNA, 19 nt, Artificial Sequence
  Description of Artificial Sequence: Synthetic oligonucleotide
  Antisense strand to SEQ ID NO: 1669371
uuuaucagguuccacuccg

SEQ ID NO: 1669373 - RNA, 19 nt, Artificial Sequence
  Description of Artificial Sequence: Synthetic oligonucleotide
  Sense strand starting at position 2239 of SEQ ID NO: 1561404
ccacaagucugugcaggaa

SEQ ID NO: 1669374 - RNA, 19 nt, Artificial Sequence
  Description of Artificial Sequence: Synthetic oligonucleotide
  Antisense strand to SEQ ID NO: 1669373
uuccugcacagacuugugg

SEQ ID NO: 1669375 - RNA, 19 nt, Artificial Sequence
  Description of Artificial Sequence: Synthetic oligonucleotide
  Sense strand starting at position 2342 of SEQ ID NO: 1561404
gcugauguccuccaggaau

SEQ ID NO: 1669376 - RNA, 19 nt, Artificial Sequence
  Description of Artificial Sequence: Synthetic oligonucleotide
  Antisense strand to SEQ ID NO: 1669375
auuccuggaggacaucagc

SEQ ID NO: 1669377 - RNA, 19 nt, Artificial Sequence
  Description of Artificial Sequence: Synthetic oligonucleotide
  Sense strand starting at position 2344 of SEQ ID NO: 1561404
ugauguccuccaggaauca

SEQ ID NO: 1669378 - RNA, 19 nt, Artificial Sequence
  Description of Artificial Sequence: Synthetic oligonucleotide
  Antisense strand to SEQ ID NO: 1669377
ugauuccuggaggacauca

SEQ ID NO: 1669379 - RNA, 19 nt, Artificial Sequence
  Description of Artificial Sequence: Synthetic oligonucleotide
  Sense strand starting at position 2787 of SEQ ID NO: 1561404
gaauuauauggcggcaaua

SEQ ID NO: 1669380 - RNA, 19 nt, Artificial Sequence
  Description of Artificial Sequence: Synthetic oligonucleotide
  Antisense strand to SEQ ID NO: 1669379
uauugccgccauauaauuc

SEQ ID NO: 1669381 - RNA, 19 nt, Artificial Sequence
  Description of Artificial Sequence: Synthetic oligonucleotide
  Sense strand starting at position 2789 of SEQ ID NO: 1561404
auuauauggcggcaauauu

SEQ ID NO: 1669382 - RNA, 19 nt, Artificial Sequence
  Description of Artificial Sequence: Synthetic oligonucleotide
  Antisense strand to SEQ ID NO: 1669381
aauauugccgccauauaau

SEQ ID NO: 1669383 - RNA, 19 nt, Artificial Sequence
  Description of Artificial Sequence: Synthetic oligonucleotide
  Sense strand starting at position 2985 of SEQ ID NO: 1561404
ggauuuaacucugggaguu

SEQ ID NO: 1669384 - RNA, 19 nt, Artificial Sequence
  Description of Artificial Sequence: Synthetic oligonucleotide
  Antisense strand to SEQ ID NO: 1669383
aacucccagaguuaaaucc

SEQ ID NO: 1669385 - RNA, 19 nt, Artificial Sequence
  Description of Artificial Sequence: Synthetic oligonucleotide
  Sense strand starting at position 3035 of SEQ ID NO: 1561404
uggaaaugcuccuuccauc

SEQ ID NO: 1669386 - RNA, 19 nt, Artificial Sequence
  Description of Artificial Sequence: Synthetic oligonucleotide
  Antisense strand to SEQ ID NO: 1669385
gauggaaggagcauuucca

SEQ ID NO: 1669387 - RNA, 19 nt, Artificial Sequence
  Description of Artificial Sequence: Synthetic oligonucleotide
  Sense strand starting at position 3087 of SEQ ID NO: 1561404
aucaaaggcugagacauua

SEQ ID NO: 1669388 - RNA, 19 nt, Artificial Sequence
  Description of Artificial Sequence: Synthetic oligonucleotide
  Antisense strand to SEQ ID NO: 1669387
uaaugucucagccuuugau

SEQ ID NO: 1669389 - RNA, 19 nt, Artificial Sequence
  Description of Artificial Sequence: Synthetic oligonucleotide
  Sense strand starting at position 3100 of SEQ ID NO: 1561404
acauuagacuuugaauuug

SEQ ID NO: 1669390 - RNA, 19 nt, Artificial Sequence
  Description of Artificial Sequence: Synthetic oligonucleotide
  Antisense strand to SEQ ID NO: 1669389
caaauucaaagucuaaugu

SEQ ID NO: 1669391 - RNA, 19 nt, Artificial Sequence
  Description of Artificial Sequence: Synthetic oligonucleotide
  Sense strand starting at position 3314 of SEQ ID NO: 1561404
gcguuauuaacugggagcu

SEQ ID NO: 1669392 - RNA, 19 nt, Artificial Sequence
  Description of Artificial Sequence: Synthetic oligonucleotide
  Antisense strand to SEQ ID NO: 1669391
agcucccaguuaauaacgc

SEQ ID NO: 1669393 - RNA, 19 nt, Artificial Sequence
  Description of Artificial Sequence: Synthetic oligonucleotide
  Sense strand starting at position 3330 of SEQ ID NO: 1561404
gcuggcacccauggugaua

SEQ ID NO: 1669394 - RNA, 19 nt, Artificial Sequence
  Description of Artificial Sequence: Synthetic oligonucleotide
  Antisense strand to SEQ ID NO: 1669393
uaucaccaugggugccagc

SEQ ID NO: 1669395 - RNA, 19 nt, Artificial Sequence
  Description of Artificial Sequence: Synthetic oligonucleotide
  Sense strand starting at position 3560 of SEQ ID NO: 1561404
augucaugggagugaucca

SEQ ID NO: 1669396 - RNA, 19 nt, Artificial Sequence
  Description of Artificial Sequence: Synthetic oligonucleotide
  Antisense strand to SEQ ID NO: 1669395
uggaucacucccaugacau

SEQ ID NO: 1669397 - RNA, 19 nt, Artificial Sequence
  Description of Artificial Sequence: Synthetic oligonucleotide
  Sense strand starting at position 3569 of SEQ ID NO: 1561404
gagugauccagugggaggu

SEQ ID NO: 1669398 - RNA, 19 nt, Artificial Sequence
  Description of Artificial Sequence: Synthetic oligonucleotide
  Antisense strand to SEQ ID NO: 1669397
accucccacuggaucacuc

SEQ ID NO: 1669399 - RNA, 19 nt, Artificial Sequence
  Description of Artificial Sequence: Synthetic oligonucleotide
  Sense strand starting at position 21 of SEQ ID NO: 1561405
ggaagaacaaggugauugu

SEQ ID NO: 1669400 - RNA, 19 nt, Artificial Sequence
  Description of Artificial Sequence: Synthetic oligonucleotide
  Antisense strand to SEQ ID NO: 1669399
acaaucaccuuguucuucc

SEQ ID NO: 1669401 - RNA, 19 nt, Artificial Sequence
  Description of Artificial Sequence: Synthetic oligonucleotide
  Sense strand starting at position 30 of SEQ ID NO: 1561405
aggugauugucccaagggu

SEQ ID NO: 1669402 - RNA, 19 nt, Artificial Sequence
  Description of Artificial Sequence: Synthetic oligonucleotide
  Antisense strand to SEQ ID NO: 1669401
acccuugggacaaucaccu

SEQ ID NO: 1669403 - RNA, 19 nt, Artificial Sequence
  Description of Artificial Sequence: Synthetic oligonucleotide
  Sense strand starting at position 141 of SEQ ID NO: 1561405
ggcugcucacugggagaaa

SEQ ID NO: 1669404 - RNA, 19 nt, Artificial Sequence
  Description of Artificial Sequence: Synthetic oligonucleotide
  Antisense strand to SEQ ID NO: 1669403
uuucucccagugagcagcc

SEQ ID NO: 1669405 - RNA, 19 nt, Artificial Sequence
  Description of Artificial Sequence: Synthetic oligonucleotide
  Sense strand starting at position 142 of SEQ ID NO: 1561405
gcugcucacugggagaaau

SEQ ID NO: 1669406 - RNA, 19 nt, Artificial Sequence
  Description of Artificial Sequence: Synthetic oligonucleotide
  Antisense strand to SEQ ID NO: 1669405
auuucucccagugagcagc

SEQ ID NO: 1669407 - RNA, 19 nt, Artificial Sequence
  Description of Artificial Sequence: Synthetic oligonucleotide
  Sense strand starting at position 406 of SEQ ID NO: 1561405
guuauucucugcuuccuca

SEQ ID NO: 1669408 - RNA, 19 nt, Artificial Sequence
  Description of Artificial Sequence: Synthetic oligonucleotide
  Antisense strand to SEQ ID NO: 1669407
ugaggaagcagagaauaac

SEQ ID NO: 1669409 - RNA, 19 nt, Artificial Sequence
  Description of Artificial Sequence: Synthetic oligonucleotide
  Sense strand starting at position 413 of SEQ ID NO: 1561405
ucugcuuccucacauguga

SEQ ID NO: 1669410 - RNA, 19 nt, Artificial Sequence
  Description of Artificial Sequence: Synthetic oligonucleotide
  Antisense strand to SEQ ID NO: 1669409
ucacaugugaggaagcaga

SEQ ID NO: 1669411 - RNA, 19 nt, Artificial Sequence
  Description of Artificial Sequence: Synthetic oligonucleotide
  Sense strand starting at position 535 of SEQ ID NO: 1561405
augaguucgagaugagcuu

SEQ ID NO: 1669412 - RNA, 19 nt, Artificial Sequence
  Description of Artificial Sequence: Synthetic oligonucleotide
  Antisense strand to SEQ ID NO: 1669411
aagcucaucucgaacucau

SEQ ID NO: 1669413 - RNA, 19 nt, Artificial Sequence
  Description of Artificial Sequence: Synthetic oligonucleotide
  Sense strand starting at position 870 of SEQ ID NO: 1561405
ugauguugcugugaacuga

SEQ ID NO: 1669414 - RNA, 19 nt, Artificial Sequence
  Description of Artificial Sequence: Synthetic oligonucleotide
  Antisense strand to SEQ ID NO: 1669413
ucaguucacagcaacauca

SEQ ID NO: 1669415 - RNA, 19 nt, Artificial Sequence
  Description of Artificial Sequence: Synthetic oligonucleotide
  Sense strand starting at position 905 of SEQ ID NO: 1561405
ugcguaaggcucuggaaac

SEQ ID NO: 1669416 - RNA, 19 nt, Artificial Sequence
  Description of Artificial Sequence: Synthetic oligonucleotide
  Antisense strand to SEQ ID NO: 1669415
guuuccagagccuuacgca

SEQ ID NO: 1669417 - RNA, 19 nt, Artificial Sequence
  Description of Artificial Sequence: Synthetic oligonucleotide
  Sense strand starting at position 1024 of SEQ ID NO: 1561405
ucagucacccugggaagaa

SEQ ID NO: 1669418 - RNA, 19 nt, Artificial Sequence
  Description of Artificial Sequence: Synthetic oligonucleotide
  Antisense strand to SEQ ID NO: 1669417
uucuucccagggugacuga

SEQ ID NO: 1669419 - RNA, 19 nt, Artificial Sequence
  Description of Artificial Sequence: Synthetic oligonucleotide
  Sense strand starting at position 1095 of SEQ ID NO: 1561405
acgcaagaaucuggauucu

SEQ ID NO: 1669420 - RNA, 19 nt, Artificial Sequence
  Description of Artificial Sequence: Synthetic oligonucleotide
  Antisense strand to SEQ ID NO: 1669419
agaauccagauucuugcgu

SEQ ID NO: 1669421 - RNA, 19 nt, Artificial Sequence
  Description of Artificial Sequence: Synthetic oligonucleotide
  Sense strand starting at position 1121 of SEQ ID NO: 1561405
guuagauauuaaccaggua

SEQ ID NO: 1669422 - RNA, 19 nt, Artificial Sequence
  Description of Artificial Sequence: Synthetic oligonucleotide
  Antisense strand to SEQ ID NO: 1669421
uaccugguuaauaucuaac

SEQ ID NO: 1669423 - RNA, 19 nt, Artificial Sequence
  Description of Artificial Sequence: Synthetic oligonucleotide
  Sense strand starting at position 1226 of SEQ ID NO: 1561405
gggauaagaucucggagag

SEQ ID NO: 1669424 - RNA, 19 nt, Artificial Sequence
  Description of Artificial Sequence: Synthetic oligonucleotide
  Antisense strand to SEQ ID NO: 1669423
cucuccgagaucuuauccc

SEQ ID NO: 1669425 - RNA, 19 nt, Artificial Sequence
  Description of Artificial Sequence: Synthetic oligonucleotide
  Sense strand starting at position 1227 of SEQ ID NO: 1561405
ggauaagaucucggagagc

SEQ ID NO: 1669426 - RNA, 19 nt, Artificial Sequence
  Description of Artificial Sequence: Synthetic oligonucleotide
  Antisense strand to SEQ ID NO: 1669425
gcucuccgagaucuuaucc

SEQ ID NO: 1669427 - RNA, 19 nt, Artificial Sequence
  Description of Artificial Sequence: Synthetic oligonucleotide
  Sense strand starting at position 1273 of SEQ ID NO: 1561405
gaucuugaauuccaacgga

SEQ ID NO: 1669428 - RNA, 19 nt, Artificial Sequence
  Description of Artificial Sequence: Synthetic oligonucleotide
  Antisense strand to SEQ ID NO: 1669427
uccguuggaauucaagauc

SEQ ID NO: 1669429 - RNA, 19 nt, Artificial Sequence
  Description of Artificial Sequence: Synthetic oligonucleotide
  Sense strand starting at position 1276 of SEQ ID NO: 1561405
cuugaauuccaacggaaag

SEQ ID NO: 1669430 - RNA, 19 nt, Artificial Sequence
  Description of Artificial Sequence: Synthetic oligonucleotide
  Antisense strand to SEQ ID NO: 1669429
cuuuccguuggaauucaag

SEQ ID NO: 1669431 - RNA, 19 nt, Artificial Sequence
  Description of Artificial Sequence: Synthetic oligonucleotide
  Sense strand starting at position 1370 of SEQ ID NO: 1561405
ccaggauucgccugucacu

SEQ ID NO: 1669432 - RNA, 19 nt, Artificial Sequence
  Description of Artificial Sequence: Synthetic oligonucleotide
  Antisense strand to SEQ ID NO: 1669431
agugacaggcgaauccugg

SEQ ID NO: 1669433 - RNA, 19 nt, Artificial Sequence
  Description of Artificial Sequence: Synthetic oligonucleotide
  Sense strand starting at position 1643 of SEQ ID NO: 1561405
cgcaguugcugcgcagaaa

SEQ ID NO: 1669434 - RNA, 19 nt, Artificial Sequence
  Description of Artificial Sequence: Synthetic oligonucleotide
  Antisense strand to SEQ ID NO: 1669433
uuucugcgcagcaacugcg

SEQ ID NO: 1669435 - RNA, 19 nt, Artificial Sequence
  Description of Artificial Sequence: Synthetic oligonucleotide
  Sense strand starting at position 2083 of SEQ ID NO: 1561405
uggguagagcuccaaauuc

SEQ ID NO: 1669436 - RNA, 19 nt, Artificial Sequence
  Description of Artificial Sequence: Synthetic oligonucleotide
  Antisense strand to SEQ ID NO: 1669435
gaauuuggagcucuaccca

SEQ ID NO: 1669437 - RNA, 19 nt, Artificial Sequence
  Description of Artificial Sequence: Synthetic oligonucleotide
  Sense strand starting at position 2113 of SEQ ID NO: 1561405
ggaacugauugacagaaga

SEQ ID NO: 1669438 - RNA, 19 nt, Artificial Sequence
  Description of Artificial Sequence: Synthetic oligonucleotide
  Antisense strand to SEQ ID NO: 1669437
ucuucugucaaucaguucc

SEQ ID NO: 1669439 - RNA, 19 nt, Artificial Sequence
  Description of Artificial Sequence: Synthetic oligonucleotide
  Sense strand starting at position 2309 of SEQ ID NO: 1561405
acaagugugugcugggaau

SEQ ID NO: 1669440 - RNA, 19 nt, Artificial Sequence
  Description of Artificial Sequence: Synthetic oligonucleotide
  Antisense strand to SEQ ID NO: 1669439
auucccagcacacacuugu

SEQ ID NO: 1669441 - RNA, 19 nt, Artificial Sequence
  Description of Artificial Sequence: Synthetic oligonucleotide
  Sense strand starting at position 2311 of SEQ ID NO: 1561405
aagugugugcugggaauuc

SEQ ID NO: 1669442 - RNA, 19 nt, Artificial Sequence
  Description of Artificial Sequence: Synthetic oligonucleotide
  Antisense strand to SEQ ID NO: 1669441
gaauucccagcacacacuu

SEQ ID NO: 1669443 - RNA, 19 nt, Artificial Sequence
  Description of Artificial Sequence: Synthetic oligonucleotide
  Sense strand starting at position 2420 of SEQ ID NO: 1561405
ccugguguccuccagggau

SEQ ID NO: 1669444 - RNA, 19 nt, Artificial Sequence
  Description of Artificial Sequence: Synthetic oligonucleotide
  Antisense strand to SEQ ID NO: 1669443
aucccuggaggacaccagg

SEQ ID NO: 1669445 - RNA, 19 nt, Artificial Sequence
  Description of Artificial Sequence: Synthetic oligonucleotide
  Sense strand starting at position 2422 of SEQ ID NO: 1561405
ugguguccuccagggauca

SEQ ID NO: 1669446 - RNA, 19 nt, Artificial Sequence
  Description of Artificial Sequence: Synthetic oligonucleotide
  Antisense strand to SEQ ID NO: 1669445
ugaucccuggaggacacca

SEQ ID NO: 1669447 - RNA, 19 nt, Artificial Sequence
  Description of Artificial Sequence: Synthetic oligonucleotide
  Sense strand starting at position 2571 of SEQ ID NO: 1561405
ucuggaauuauauggcagu

SEQ ID NO: 1669448 - RNA, 19 nt, Artificial Sequence
  Description of Artificial Sequence: Synthetic oligonucleotide
  Antisense strand to SEQ ID NO: 1669447
acugccauauaauuccaga

SEQ ID NO: 1669449 - RNA, 19 nt, Artificial Sequence
  Description of Artificial Sequence: Synthetic oligonucleotide
  Sense strand starting at position 2572 of SEQ ID NO: 1561405
cuggaauuauauggcagua

SEQ ID NO: 1669450 - RNA, 19 nt, Artificial Sequence
  Description of Artificial Sequence: Synthetic oligonucleotide
  Antisense strand to SEQ ID NO: 1669449
uacugccauauaauuccag

SEQ ID NO: 1669451 - RNA, 19 nt, Artificial Sequence
  Description of Artificial Sequence: Synthetic oligonucleotide
  Sense strand starting at position 2574 of SEQ ID NO: 1561405
ggaauuauauggcaguaau

SEQ ID NO: 1669452 - RNA, 19 nt, Artificial Sequence
  Description of Artificial Sequence: Synthetic oligonucleotide
  Antisense strand to SEQ ID NO: 1669451
auuacugccauauaauucc

SEQ ID NO: 1669453 - RNA, 19 nt, Artificial Sequence
  Description of Artificial Sequence: Synthetic oligonucleotide
  Sense strand starting at position 2577 of SEQ ID NO: 1561405
auuauauggcaguaaucuu

SEQ ID NO: 1669454 - RNA, 19 nt, Artificial Sequence
  Description of Artificial Sequence: Synthetic oligonucleotide
  Antisense strand to SEQ ID NO: 1669453
aagauuacugccauauaau

SEQ ID NO: 1669455 - RNA, 19 nt, Artificial Sequence
  Description of Artificial Sequence: Synthetic oligonucleotide
  Sense strand starting at position 2585 of SEQ ID NO: 1561405
gcaguaaucuucuauaaag

SEQ ID NO: 1669456 - RNA, 19 nt, Artificial Sequence
  Description of Artificial Sequence: Synthetic oligonucleotide
  Antisense strand to SEQ ID NO: 1669455
cuuuauagaagauuacugc

SEQ ID NO: 1669457 - RNA, 19 nt, Artificial Sequence
  Description of Artificial Sequence: Synthetic oligonucleotide
  Sense strand starting at position 2713 of SEQ ID NO: 1561405
ggcagauucugacuccuga

SEQ ID NO: 1669458 - RNA, 19 nt, Artificial Sequence
  Description of Artificial Sequence: Synthetic oligonucleotide
  Antisense strand to SEQ ID NO: 1669457
ucaggagucagaaucugcc

SEQ ID NO: 1669459 - RNA, 19 nt, Artificial Sequence
  Description of Artificial Sequence: Synthetic oligonucleotide
  Sense strand starting at position 2717 of SEQ ID NO: 1561405
gauucugacuccugaaguu

SEQ ID NO: 1669460 - RNA, 19 nt, Artificial Sequence
  Description of Artificial Sequence: Synthetic oligonucleotide
  Antisense strand to SEQ ID NO: 1669459
aacuucaggagucagaauc

SEQ ID NO: 1669461 - RNA, 19 nt, Artificial Sequence
  Description of Artificial Sequence: Synthetic oligonucleotide
  Sense strand starting at position 2746 of SEQ ID NO: 1561405
guguguaaccagcagcuua

SEQ ID NO: 1669462 - RNA, 19 nt, Artificial Sequence
  Description of Artificial Sequence: Synthetic oligonucleotide
  Antisense strand to SEQ ID NO: 1669461
uaagcugcugguuacacac

SEQ ID NO: 1669463 - RNA, 19 nt, Artificial Sequence
  Description of Artificial Sequence: Synthetic oligonucleotide
  Sense strand starting at position 2900 of SEQ ID NO: 1561405
cagaaugugcugugaacuu

SEQ ID NO: 1669464 - RNA, 19 nt, Artificial Sequence
  Description of Artificial Sequence: Synthetic oligonucleotide
  Antisense strand to SEQ ID NO: 1669463
aaguucacagcacauucug

SEQ ID NO: 1669465 - RNA, 19 nt, Artificial Sequence
  Description of Artificial Sequence: Synthetic oligonucleotide
  Sense strand starting at position 3020 of SEQ ID NO: 1561405
acuguaguggcucaaucuu

SEQ ID NO: 1669466 - RNA, 19 nt, Artificial Sequence
  Description of Artificial Sequence: Synthetic oligonucleotide
  Antisense strand to SEQ ID NO: 1669465
aagauugagccacuacagu

SEQ ID NO: 1669467 - RNA, 19 nt, Artificial Sequence
  Description of Artificial Sequence: Synthetic oligonucleotide
  Sense strand starting at position 3317 of SEQ ID NO: 1561405
gcucucuuauuuggucaua

SEQ ID NO: 1669468 - RNA, 19 nt, Artificial Sequence
  Description of Artificial Sequence: Synthetic oligonucleotide
  Antisense strand to SEQ ID NO: 1669467
uaugaccaaauaagagagc

SEQ ID NO: 1669469 - RNA, 19 nt, Artificial Sequence
  Description of Artificial Sequence: Synthetic oligonucleotide
  Sense strand starting at position 3358 of SEQ ID NO: 1561405
guuggaucuuguuagguac

SEQ ID NO: 1669470 - RNA, 19 nt, Artificial Sequence
  Description of Artificial Sequence: Synthetic oligonucleotide
  Antisense strand to SEQ ID NO: 1669469
guaccuaacaagauccaac

SEQ ID NO: 1669471 - RNA, 19 nt, Artificial Sequence
  Description of Artificial Sequence: Synthetic oligonucleotide
  Sense strand starting at position 3438 of SEQ ID NO: 1561405
gcugaagagugacuacuau

SEQ ID NO: 1669472 - RNA, 19 nt, Artificial Sequence
  Description of Artificial Sequence: Synthetic oligonucleotide
  Antisense strand to SEQ ID NO: 1669471
auaguagucacucuucagc

SEQ ID NO: 1669473 - RNA, 19 nt, Artificial Sequence
  Description of Artificial Sequence: Synthetic oligonucleotide
  Sense strand starting at position 3509 of SEQ ID NO: 1561405
cggcccaucugagaaauua

SEQ ID NO: 1669474 - RNA, 19 nt, Artificial Sequence
  Description of Artificial Sequence: Synthetic oligonucleotide
  Antisense strand to SEQ ID NO: 1669473
uaauuucucagaugggccg

SEQ ID NO: 1669475 - RNA, 19 nt, Artificial Sequence
  Description of Artificial Sequence: Synthetic oligonucleotide
  Sense strand starting at position 3517 of SEQ ID NO: 1561405
cugagaaauuaagagaaag

SEQ ID NO: 1669476 - RNA, 19 nt, Artificial Sequence
  Description of Artificial Sequence: Synthetic oligonucleotide
  Antisense strand to SEQ ID NO: 1669475
cuuucucuuaauuucucag

SEQ ID NO: 1669477 - RNA, 19 nt, Artificial Sequence
  Description of Artificial Sequence: Synthetic oligonucleotide
  Sense strand starting at position 3930 of SEQ ID NO: 1561405
gacagauacucgcagagca

SEQ ID NO: 1669478 - RNA, 19 nt, Artificial Sequence
  Description of Artificial Sequence: Synthetic oligonucleotide
  Antisense strand to SEQ ID NO: 1669477
ugcucugcgaguaucuguc

SEQ ID NO: 1669479 - RNA, 19 nt, Artificial Sequence
  Description of Artificial Sequence: Synthetic oligonucleotide
  Sense strand starting at position 771 of SEQ ID NO: 1561406
ucauacuguugcugugaau

SEQ ID NO: 1669480 - RNA, 19 nt, Artificial Sequence
  Description of Artificial Sequence: Synthetic oligonucleotide
  Antisense strand to SEQ ID NO: 1669479
auucacagcaacaguauga

SEQ ID NO: 1669481 - RNA, 19 nt, Artificial Sequence
  Description of Artificial Sequence: Synthetic oligonucleotide
  Sense strand starting at position 897 of SEQ ID NO: 1561406
ugcccacgucuuuggaaga

SEQ ID NO: 1669482 - RNA, 19 nt, Artificial Sequence
  Description of Artificial Sequence: Synthetic oligonucleotide
  Antisense strand to SEQ ID NO: 1669481
ucuuccaaagacgugggca

SEQ ID NO: 1669483 - RNA, 19 nt, Artificial Sequence
  Description of Artificial Sequence: Synthetic oligonucleotide
  Sense strand starting at position 1094 of SEQ ID NO: 1561406
gcaguuagauauuaaacag

SEQ ID NO: 1669484 - RNA, 19 nt, Artificial Sequence
  Description of Artificial Sequence: Synthetic oligonucleotide
  Antisense strand to SEQ ID NO: 1669483
cuguuuaauaucuaacugc

SEQ ID NO: 1669485 - RNA, 19 nt, Artificial Sequence
  Description of Artificial Sequence: Synthetic oligonucleotide
  Sense strand starting at position 1201 of SEQ ID NO: 1561406
gggauaagaucuccgagug

SEQ ID NO: 1669486 - RNA, 19 nt, Artificial Sequence
  Description of Artificial Sequence: Synthetic oligonucleotide
  Antisense strand to SEQ ID NO: 1669485
cacucggagaucuuauccc

SEQ ID NO: 1669487 - RNA, 19 nt, Artificial Sequence
  Description of Artificial Sequence: Synthetic oligonucleotide
  Sense strand starting at position 1213 of SEQ ID NO: 1561406
ccgagugcugcucaagagu

SEQ ID NO: 1669488 - RNA, 19 nt, Artificial Sequence
  Description of Artificial Sequence: Synthetic oligonucleotide
  Antisense strand to SEQ ID NO: 1669487
acucuugagcagcacucgg

SEQ ID NO: 1669489 - RNA, 19 nt, Artificial Sequence
  Description of Artificial Sequence: Synthetic oligonucleotide
  Sense strand starting at position 1300 of SEQ ID NO: 1561406
ggagcccucucagcagaau

SEQ ID NO: 1669490 - RNA, 19 nt, Artificial Sequence
  Description of Artificial Sequence: Synthetic oligonucleotide
  Antisense strand to SEQ ID NO: 1669489
auucugcugagagggcucc

SEQ ID NO: 1669491 - RNA, 19 nt, Artificial Sequence
  Description of Artificial Sequence: Synthetic oligonucleotide
  Sense strand starting at position 1503 of SEQ ID NO: 1561406
ccgcgaaccuguguugguu

SEQ ID NO: 1669492 - RNA, 19 nt, Artificial Sequence
  Description of Artificial Sequence: Synthetic oligonucleotide
  Antisense strand to SEQ ID NO: 1669491
aaccaacacagguucgcgg

SEQ ID NO: 1669493 - RNA, 19 nt, Artificial Sequence
  Description of Artificial Sequence: Synthetic oligonucleotide
  Sense strand starting at position 1504 of SEQ ID NO: 1561406
cgcgaaccuguguugguua

SEQ ID NO: 1669494 - RNA, 19 nt, Artificial Sequence
  Description of Artificial Sequence: Synthetic oligonucleotide
  Antisense strand to SEQ ID NO: 1669493
uaaccaacacagguucgcg

SEQ ID NO: 1669495 - RNA, 19 nt, Artificial Sequence
  Description of Artificial Sequence: Synthetic oligonucleotide
  Sense strand starting at position 1854 of SEQ ID NO: 1561406
gcguguuccagccagacaa

SEQ ID NO: 1669496 - RNA, 19 nt, Artificial Sequence
  Description of Artificial Sequence: Synthetic oligonucleotide
  Antisense strand to SEQ ID NO: 1669495
uugucuggcuggaacacgc

SEQ ID NO: 1669497 - RNA, 19 nt, Artificial Sequence
  Description of Artificial Sequence: Synthetic oligonucleotide
  Sense strand starting at position 2056 of SEQ ID NO: 1561406
agggcugauugacagaaga

SEQ ID NO: 1669498 - RNA, 19 nt, Artificial Sequence
  Description of Artificial Sequence: Synthetic oligonucleotide
  Antisense strand to SEQ ID NO: 1669497
ucuucugucaaucagcccu

SEQ ID NO: 1669499 - RNA, 19 nt, Artificial Sequence
  Description of Artificial Sequence: Synthetic oligonucleotide
  Sense strand starting at position 2160 of SEQ ID NO: 1561406
ucugaauccucccggguua

SEQ ID NO: 1669500 - RNA, 19 nt, Artificial Sequence
  Description of Artificial Sequence: Synthetic oligonucleotide
  Antisense strand to SEQ ID NO: 1669499
uaacccgggaggauucaga

SEQ ID NO: 1669501 - RNA, 19 nt, Artificial Sequence
  Description of Artificial Sequence: Synthetic oligonucleotide
  Sense strand starting at position 2161 of SEQ ID NO: 1561406
cugaauccucccggguuau

SEQ ID NO: 1669502 - RNA, 19 nt, Artificial Sequence
  Description of Artificial Sequence: Synthetic oligonucleotide
  Antisense strand to SEQ ID NO: 1669501
auaacccgggaggauucag

SEQ ID NO: 1669503 - RNA, 19 nt, Artificial Sequence
  Description of Artificial Sequence: Synthetic oligonucleotide
  Sense strand starting at position 2162 of SEQ ID NO: 1561406
ugaauccucccggguuaua

SEQ ID NO: 1669504 - RNA, 19 nt, Artificial Sequence
  Description of Artificial Sequence: Synthetic oligonucleotide
  Antisense strand to SEQ ID NO: 1669503
uauaacccgggaggauuca

SEQ ID NO: 1669505 - RNA, 19 nt, Artificial Sequence
  Description of Artificial Sequence: Synthetic oligonucleotide
  Sense strand starting at position 2171 of SEQ ID NO: 1561406
ccggguuauauuugcacuu

SEQ ID NO: 1669506 - RNA, 19 nt, Artificial Sequence
  Description of Artificial Sequence: Synthetic oligonucleotide
  Antisense strand to SEQ ID NO: 1669505
aagugcaaauauaacccgg

SEQ ID NO: 1669507 - RNA, 19 nt, Artificial Sequence
  Description of Artificial Sequence: Synthetic oligonucleotide
  Sense strand starting at position 2172 of SEQ ID NO: 1561406
cggguuauauuugcacuua

SEQ ID NO: 1669508 - RNA, 19 nt, Artificial Sequence
  Description of Artificial Sequence: Synthetic oligonucleotide
  Antisense strand to SEQ ID NO: 1669507
uaagugcaaauauaacccg

SEQ ID NO: 1669509 - RNA, 19 nt, Artificial Sequence
  Description of Artificial Sequence: Synthetic oligonucleotide
  Sense strand starting at position 2173 of SEQ ID NO: 1561406
ggguuauauuugcacuuaa

SEQ ID NO: 1669510 - RNA, 19 nt, Artificial Sequence
  Description of Artificial Sequence: Synthetic oligonucleotide
  Antisense strand to SEQ ID NO: 1669509
uuaagugcaaauauaaccc

SEQ ID NO: 1669511 - RNA, 19 nt, Artificial Sequence
  Description of Artificial Sequence: Synthetic oligonucleotide
  Sense strand starting at position 2194 of SEQ ID NO: 1561406
ggaauuuccugcccguacu

SEQ ID NO: 1669512 - RNA, 19 nt, Artificial Sequence
  Description of Artificial Sequence: Synthetic oligonucleotide
  Antisense strand to SEQ ID NO: 1669511
aguacgggcaggaaauucc

SEQ ID NO: 1669513 - RNA, 19 nt, Artificial Sequence
  Description of Artificial Sequence: Synthetic oligonucleotide
  Sense strand starting at position 2947 of SEQ ID NO: 1561406
guguguugauauuguauac

SEQ ID NO: 1669514 - RNA, 19 nt, Artificial Sequence
  Description of Artificial Sequence: Synthetic oligonucleotide
  Antisense strand to SEQ ID NO: 1669513
guauacaauaucaacacac

SEQ ID NO: 1669515 - RNA, 19 nt, Artificial Sequence
  Description of Artificial Sequence: Synthetic oligonucleotide
  Sense strand starting at position 2951 of SEQ ID NO: 1561406
guugauauuguauacugca

SEQ ID NO: 1669516 - RNA, 19 nt, Artificial Sequence
  Description of Artificial Sequence: Synthetic oligonucleotide
  Antisense strand to SEQ ID NO: 1669515
ugcaguauacaauaucaac

SEQ ID NO: 1669517 - RNA, 19 nt, Artificial Sequence
  Description of Artificial Sequence: Synthetic oligonucleotide
  Sense strand starting at position 3152 of SEQ ID NO: 1561406
caaguacuguguugaacaa

SEQ ID NO: 1669518 - RNA, 19 nt, Artificial Sequence
  Description of Artificial Sequence: Synthetic oligonucleotide
  Antisense strand to SEQ ID NO: 1669517
uuguucaacacaguacuug

SEQ ID NO: 1669519 - RNA, 19 nt, Artificial Sequence
  Description of Artificial Sequence: Synthetic oligonucleotide
  Sense strand starting at position 55 of SEQ ID NO: 1561407
gcuguaacccugcugucua

SEQ ID NO: 1669520 - RNA, 19 nt, Artificial Sequence
  Description of Artificial Sequence: Synthetic oligonucleotide
  Antisense strand to SEQ ID NO: 1669519
uagacagcaggguuacagc

SEQ ID NO: 1669521 - RNA, 19 nt, Artificial Sequence
  Description of Artificial Sequence: Synthetic oligonucleotide
  Sense strand starting at position 317 of SEQ ID NO: 1561407
ccacauaugcuggguuaau

SEQ ID NO: 1669522 - RNA, 19 nt, Artificial Sequence
  Description of Artificial Sequence: Synthetic oligonucleotide
  Antisense strand to SEQ ID NO: 1669521
auuaacccagcauaugugg

SEQ ID NO: 1669523 - RNA, 19 nt, Artificial Sequence
  Description of Artificial Sequence: Synthetic oligonucleotide
  Sense strand starting at position 318 of SEQ ID NO: 1561407
cacauaugcuggguuaaua

SEQ ID NO: 1669524 - RNA, 19 nt, Artificial Sequence
  Description of Artificial Sequence: Synthetic oligonucleotide
  Antisense strand to SEQ ID NO: 1669523
uauuaacccagcauaugug

SEQ ID NO: 1669525 - RNA, 19 nt, Artificial Sequence
  Description of Artificial Sequence: Synthetic oligonucleotide
  Sense strand starting at position 329 of SEQ ID NO: 1561407
gguuaauaucauggcuaag

SEQ ID NO: 1669526 - RNA, 19 nt, Artificial Sequence
  Description of Artificial Sequence: Synthetic oligonucleotide
  Antisense strand to SEQ ID NO: 1669525
cuuagccaugauauuaacc

SEQ ID NO: 1669527 - RNA, 19 nt, Artificial Sequence
  Description of Artificial Sequence: Synthetic oligonucleotide
  Sense strand starting at position 331 of SEQ ID NO: 1561407
uuaauaucauggcuaagag

SEQ ID NO: 1669528 - RNA, 19 nt, Artificial Sequence
  Description of Artificial Sequence: Synthetic oligonucleotide
  Antisense strand to SEQ ID NO: 1669527
cucuuagccaugauauuaa

SEQ ID NO: 1669529 - RNA, 19 nt, Artificial Sequence
  Description of Artificial Sequence: Synthetic oligonucleotide
  Sense strand starting at position 525 of SEQ ID NO: 1561407
aaggcuaagugcucgacaa

SEQ ID NO: 1669530 - RNA, 19 nt, Artificial Sequence
  Description of Artificial Sequence: Synthetic oligonucleotide
  Antisense strand to SEQ ID NO: 1669529
uugucgagcacuuagccuu

SEQ ID NO: 1669531 - RNA, 19 nt, Artificial Sequence
  Description of Artificial Sequence: Synthetic oligonucleotide
  Sense strand starting at position 526 of SEQ ID NO: 1561407
aggcuaagugcucgacaaa

SEQ ID NO: 1669532 - RNA, 19 nt, Artificial Sequence
  Description of Artificial Sequence: Synthetic oligonucleotide
  Antisense strand to SEQ ID NO: 1669531
uuugucgagcacuuagccu

SEQ ID NO: 1669533 - RNA, 19 nt, Artificial Sequence
  Description of Artificial Sequence: Synthetic oligonucleotide
  Sense strand starting at position 527 of SEQ ID NO: 1561407
ggcuaagugcucgacaaag

SEQ ID NO: 1669534 - RNA, 19 nt, Artificial Sequence
  Description of Artificial Sequence: Synthetic oligonucleotide
  Antisense strand to SEQ ID NO: 1669533
cuuugucgagcacuuagcc

SEQ ID NO: 1669535 - RNA, 19 nt, Artificial Sequence
  Description of Artificial Sequence: Synthetic oligonucleotide
  Sense strand starting at position 529 of SEQ ID NO: 1561407
cuaagugcucgacaaagac

SEQ ID NO: 1669536 - RNA, 19 nt, Artificial Sequence
  Description of Artificial Sequence: Synthetic oligonucleotide
  Antisense strand to SEQ ID NO: 1669535
gucuuugucgagcacuuag

SEQ ID NO: 1669537 - RNA, 19 nt, Artificial Sequence
  Description of Artificial Sequence: Synthetic oligonucleotide
  Sense strand starting at position 603 of SEQ ID NO: 1561407
gggcuauccugugcaacau

SEQ ID NO: 1669538 - RNA, 19 nt, Artificial Sequence
  Description of Artificial Sequence: Synthetic oligonucleotide
  Antisense strand to SEQ ID NO: 1669537
auguugcacaggauagccc

SEQ ID NO: 1669539 - RNA, 19 nt, Artificial Sequence
  Description of Artificial Sequence: Synthetic oligonucleotide
  Sense strand starting at position 604 of SEQ ID NO: 1561407
ggcuauccugugcaacaua

SEQ ID NO: 1669540 - RNA, 19 nt, Artificial Sequence
  Description of Artificial Sequence: Synthetic oligonucleotide
  Antisense strand to SEQ ID NO: 1669539
uauguugcacaggauagcc

SEQ ID NO: 1669541 - RNA, 19 nt, Artificial Sequence
  Description of Artificial Sequence: Synthetic oligonucleotide
  Sense strand starting at position 653 of SEQ ID NO: 1561407
augagaugccaguagcacu

SEQ ID NO: 1669542 - RNA, 19 nt, Artificial Sequence
  Description of Artificial Sequence: Synthetic oligonucleotide
  Antisense strand to SEQ ID NO: 1669541
agugcuacuggcaucucau

SEQ ID NO: 1669543 - RNA, 19 nt, Artificial Sequence
  Description of Artificial Sequence: Synthetic oligonucleotide
  Sense strand starting at position 861 of SEQ ID NO: 1561407
uuuguaauacccuguaucu

SEQ ID NO: 1669544 - RNA, 19 nt, Artificial Sequence
  Description of Artificial Sequence: Synthetic oligonucleotide
  Antisense strand to SEQ ID NO: 1669543
agauacaggguauuacaaa

SEQ ID NO: 1669545 - RNA, 19 nt, Artificial Sequence
  Description of Artificial Sequence: Synthetic oligonucleotide
  Sense strand starting at position 877 of SEQ ID NO: 1561407
ucuccauuucguugacugu

SEQ ID NO: 1669546 - RNA, 19 nt, Artificial Sequence
  Description of Artificial Sequence: Synthetic oligonucleotide
  Antisense strand to SEQ ID NO: 1669545
acagucaacgaaauggaga

SEQ ID NO: 1669547 - RNA, 19 nt, Artificial Sequence
  Description of Artificial Sequence: Synthetic oligonucleotide
  Sense strand starting at position 880 of SEQ ID NO: 1561407
ccauuucguugacuguaaa

SEQ ID NO: 1669548 - RNA, 19 nt, Artificial Sequence
  Description of Artificial Sequence: Synthetic oligonucleotide
  Antisense strand to SEQ ID NO: 1669547
uuuacagucaacgaaaugg

SEQ ID NO: 1669549 - RNA, 19 nt, Artificial Sequence
  Description of Artificial Sequence: Synthetic oligonucleotide
  Sense strand starting at position 888 of SEQ ID NO: 1561407
uugacuguaaagugauaga

SEQ ID NO: 1669550 - RNA, 19 nt, Artificial Sequence
  Description of Artificial Sequence: Synthetic oligonucleotide
  Antisense strand to SEQ ID NO: 1669549
ucuaucacuuuacagucaa

SEQ ID NO: 1669551 - RNA, 19 nt, Artificial Sequence
  Description of Artificial Sequence: Synthetic oligonucleotide
  Sense strand starting at position 961 of SEQ ID NO: 1561407
uaggguuacuuugucgaag

SEQ ID NO: 1669552 - RNA, 19 nt, Artificial Sequence
  Description of Artificial Sequence: Synthetic oligonucleotide
  Antisense strand to SEQ ID NO: 1669551
cuucgacaaaguaacccua

SEQ ID NO: 1669553 - RNA, 19 nt, Artificial Sequence
  Description of Artificial Sequence: Synthetic oligonucleotide
  Sense strand starting at position 962 of SEQ ID NO: 1561407
aggguuacuuugucgaagu

SEQ ID NO: 1669554 - RNA, 19 nt, Artificial Sequence
  Description of Artificial Sequence: Synthetic oligonucleotide
  Antisense strand to SEQ ID NO: 1669553
acuucgacaaaguaacccu

SEQ ID NO: 1669555 - RNA, 19 nt, Artificial Sequence
  Description of Artificial Sequence: Synthetic oligonucleotide
  Sense strand starting at position 964 of SEQ ID NO: 1561407
gguuacuuugucgaaguuu

SEQ ID NO: 1669556 - RNA, 19 nt, Artificial Sequence
  Description of Artificial Sequence: Synthetic oligonucleotide
  Antisense strand to SEQ ID NO: 1669555
aaacuucgacaaaguaacc

SEQ ID NO: 1669557 - RNA, 19 nt, Artificial Sequence
  Description of Artificial Sequence: Synthetic oligonucleotide
  Sense strand starting at position 1160 of SEQ ID NO: 1561407
cauauuaccgaagguaaua

SEQ ID NO: 1669558 - RNA, 19 nt, Artificial Sequence
  Description of Artificial Sequence: Synthetic oligonucleotide
  Antisense strand to SEQ ID NO: 1669557
uauuaccuucgguaauaug

SEQ ID NO: 1669559 - RNA, 19 nt, Artificial Sequence
  Description of Artificial Sequence: Synthetic oligonucleotide
  Sense strand starting at position 1171 of SEQ ID NO: 1561407
agguaauaaugccuugcaa

SEQ ID NO: 1669560 - RNA, 19 nt, Artificial Sequence
  Description of Artificial Sequence: Synthetic oligonucleotide
  Antisense strand to SEQ ID NO: 1669559
uugcaaggcauuauuaccu

SEQ ID NO: 1669561 - RNA, 19 nt, Artificial Sequence
  Description of Artificial Sequence: Synthetic oligonucleotide
  Sense strand starting at position 1173 of SEQ ID NO: 1561407
guaauaaugccuugcaaca

SEQ ID NO: 1669562 - RNA, 19 nt, Artificial Sequence
  Description of Artificial Sequence: Synthetic oligonucleotide
  Antisense strand to SEQ ID NO: 1669561
uguugcaaggcauuauuac

SEQ ID NO: 1669563 - RNA, 19 nt, Artificial Sequence
  Description of Artificial Sequence: Synthetic oligonucleotide
  Sense strand starting at position 1205 of SEQ ID NO: 1561407
gaugcuccgcacugagaaa

SEQ ID NO: 1669564 - RNA, 19 nt, Artificial Sequence
  Description of Artificial Sequence: Synthetic oligonucleotide
  Antisense strand to SEQ ID NO: 1669563
uuucucagugcggagcauc

SEQ ID NO: 1669565 - RNA, 19 nt, Artificial Sequence
  Description of Artificial Sequence: Synthetic oligonucleotide
  Sense strand starting at position 1319 of SEQ ID NO: 1561407
ccguaucuacguuacaaca

SEQ ID NO: 1669566 - RNA, 19 nt, Artificial Sequence
  Description of Artificial Sequence: Synthetic oligonucleotide
  Antisense strand to SEQ ID NO: 1669565
uguuguaacguagauacgg

SEQ ID NO: 1669567 - RNA, 19 nt, Artificial Sequence
  Description of Artificial Sequence: Synthetic oligonucleotide
  Sense strand starting at position 2111 of SEQ ID NO: 1561407
ccaagauacgcgaaagcgu

SEQ ID NO: 1669568 - RNA, 19 nt, Artificial Sequence
  Description of Artificial Sequence: Synthetic oligonucleotide
  Antisense strand to SEQ ID NO: 1669567
acgcuuucgcguaucuugg

SEQ ID NO: 1669569 - RNA, 19 nt, Artificial Sequence
  Description of Artificial Sequence: Synthetic oligonucleotide
  Sense strand starting at position 2306 of SEQ ID NO: 1561407
ggcguuguuguggagauca

SEQ ID NO: 1669570 - RNA, 19 nt, Artificial Sequence
  Description of Artificial Sequence: Synthetic oligonucleotide
  Antisense strand to SEQ ID NO: 1669569
ugaucuccacaacaacgcc

SEQ ID NO: 1669571 - RNA, 19 nt, Artificial Sequence
  Description of Artificial Sequence: Synthetic oligonucleotide
  Sense strand starting at position 2419 of SEQ ID NO: 1561407
agaguucugcgccaaucag

SEQ ID NO: 1669572 - RNA, 19 nt, Artificial Sequence
  Description of Artificial Sequence: Synthetic oligonucleotide
  Antisense strand to SEQ ID NO: 1669571
cugauuggcgcagaacucu

SEQ ID NO: 1669573 - RNA, 19 nt, Artificial Sequence
  Description of Artificial Sequence: Synthetic oligonucleotide
  Sense strand starting at position 2857 of SEQ ID NO: 1561407
cugauuauggcucauacaa

SEQ ID NO: 1669574 - RNA, 19 nt, Artificial Sequence
  Description of Artificial Sequence: Synthetic oligonucleotide
  Antisense strand to SEQ ID NO: 1669573
uuguaugagccauaaucag

SEQ ID NO: 1669575 - RNA, 19 nt, Artificial Sequence
  Description of Artificial Sequence: Synthetic oligonucleotide
  Sense strand starting at position 2989 of SEQ ID NO: 1561407
gacaguggcuuacccauaa

SEQ ID NO: 1669576 - RNA, 19 nt, Artificial Sequence
  Description of Artificial Sequence: Synthetic oligonucleotide
  Antisense strand to SEQ ID NO: 1669575
uuauggguaagccacuguc

SEQ ID NO: 1669577 - RNA, 19 nt, Artificial Sequence
  Description of Artificial Sequence: Synthetic oligonucleotide
  Sense strand starting at position 2993 of SEQ ID NO: 1561407
guggcuuacccauaacaag

SEQ ID NO: 1669578 - RNA, 19 nt, Artificial Sequence
  Description of Artificial Sequence: Synthetic oligonucleotide
  Antisense strand to SEQ ID NO: 1669577
cuuguuauggguaagccac

SEQ ID NO: 1669579 - RNA, 19 nt, Artificial Sequence
  Description of Artificial Sequence: Synthetic oligonucleotide
  Sense strand starting at position 3024 of SEQ ID NO: 1561407
ggaaguuguucgucuuaua

SEQ ID NO: 1669580 - RNA, 19 nt, Artificial Sequence
  Description of Artificial Sequence: Synthetic oligonucleotide
  Antisense strand to SEQ ID NO: 1669579
uauaagacgaacaacuucc

SEQ ID NO: 1669581 - RNA, 19 nt, Artificial Sequence
  Description of Artificial Sequence: Synthetic oligonucleotide
  Sense strand starting at position 3080 of SEQ ID NO: 1561407
augaguggcugacucagaa

SEQ ID NO: 1669582 - RNA, 19 nt, Artificial Sequence
  Description of Artificial Sequence: Synthetic oligonucleotide
  Antisense strand to SEQ ID NO: 1669581
uucugagucagccacucau

SEQ ID NO: 1669583 - RNA, 19 nt, Artificial Sequence
  Description of Artificial Sequence: Synthetic oligonucleotide
  Sense strand starting at position 3095 of SEQ ID NO: 1561407
agaacuuugugaccaguuu

SEQ ID NO: 1669584 - RNA, 19 nt, Artificial Sequence
  Description of Artificial Sequence: Synthetic oligonucleotide
  Antisense strand to SEQ ID NO: 1669583
aaacuggucacaaaguucu

SEQ ID NO: 1669585 - RNA, 19 nt, Artificial Sequence
  Description of Artificial Sequence: Synthetic oligonucleotide
  Sense strand starting at position 3156 of SEQ ID NO: 1561407
ugucuucuccucguguuua

SEQ ID NO: 1669586 - RNA, 19 nt, Artificial Sequence
  Description of Artificial Sequence: Synthetic oligonucleotide
  Antisense strand to SEQ ID NO: 1669585
uaaacacgaggagaagaca

SEQ ID NO: 1669587 - RNA, 19 nt, Artificial Sequence
  Description of Artificial Sequence: Synthetic oligonucleotide
  Sense strand starting at position 3229 of SEQ ID NO: 1561407
acucauauccgauggccua

SEQ ID NO: 1669588 - RNA, 19 nt, Artificial Sequence
  Description of Artificial Sequence: Synthetic oligonucleotide
  Antisense strand to SEQ ID NO: 1669587
uaggccaucggauaugagu

SEQ ID NO: 1669589 - RNA, 19 nt, Artificial Sequence
  Description of Artificial Sequence: Synthetic oligonucleotide
  Sense strand starting at position 3263 of SEQ ID NO: 1561407
uggauuucuuaauaggcau

SEQ ID NO: 1669590 - RNA, 19 nt, Artificial Sequence
  Description of Artificial Sequence: Synthetic oligonucleotide
  Antisense strand to SEQ ID NO: 1669589
augccuauuaagaaaucca

SEQ ID NO: 1669591 - RNA, 19 nt, Artificial Sequence
  Description of Artificial Sequence: Synthetic oligonucleotide
  Sense strand starting at position 3557 of SEQ ID NO: 1561407
agucucaagugauucucau

SEQ ID NO: 1669592 - RNA, 19 nt, Artificial Sequence
  Description of Artificial Sequence: Synthetic oligonucleotide
  Antisense strand to SEQ ID NO: 1669591
augagaaucacuugagacu

SEQ ID NO: 1669593 - RNA, 19 nt, Artificial Sequence
  Description of Artificial Sequence: Synthetic oligonucleotide
  Sense strand starting at position 3834 of SEQ ID NO: 1561407
gcagaaucuguccacagcu

SEQ ID NO: 1669594 - RNA, 19 nt, Artificial Sequence
  Description of Artificial Sequence: Synthetic oligonucleotide
  Antisense strand to SEQ ID NO: 1669593
agcuguggacagauucugc

SEQ ID NO: 1669595 - RNA, 19 nt, Artificial Sequence
  Description of Artificial Sequence: Synthetic oligonucleotide
  Sense strand starting at position 3863 of SEQ ID NO: 1561407
uggcuaccaccugguuuaa

SEQ ID NO: 1669596 - RNA, 19 nt, Artificial Sequence
  Description of Artificial Sequence: Synthetic oligonucleotide
  Antisense strand to SEQ ID NO: 1669595
uuaaaccaggugguagcca

SEQ ID NO: 1669597 - RNA, 19 nt, Artificial Sequence
  Description of Artificial Sequence: Synthetic oligonucleotide
  Sense strand starting at position 3865 of SEQ ID NO: 1561407
gcuaccaccugguuuaagu

SEQ ID NO: 1669598 - RNA, 19 nt, Artificial Sequence
  Description of Artificial Sequence: Synthetic oligonucleotide
  Antisense strand to SEQ ID NO: 1669597
acuuaaaccaggugguagc

SEQ ID NO: 1669599 - RNA, 19 nt, Artificial Sequence
  Description of Artificial Sequence: Synthetic oligonucleotide
  Sense strand starting at position 124 of SEQ ID NO: 1561408
cuccacuucugggaagcaa

SEQ ID NO: 1669600 - RNA, 19 nt, Artificial Sequence
  Description of Artificial Sequence: Synthetic oligonucleotide
  Antisense strand to SEQ ID NO: 1669599
uugcuucccagaaguggag

SEQ ID NO: 1669601 - RNA, 19 nt, Artificial Sequence
  Description of Artificial Sequence: Synthetic oligonucleotide
  Sense strand starting at position 384 of SEQ ID NO: 1561408
ccacaugagccauggcaga

SEQ ID NO: 1669602 - RNA, 19 nt, Artificial Sequence
  Description of Artificial Sequence: Synthetic oligonucleotide
  Antisense strand to SEQ ID NO: 1669601
ucugccauggcucaugugg

SEQ ID NO: 1669603 - RNA, 19 nt, Artificial Sequence
  Description of Artificial Sequence: Synthetic oligonucleotide
  Sense strand starting at position 1267 of SEQ ID NO: 1561408
gucggaaugucagccaaga

SEQ ID NO: 1669604 - RNA, 19 nt, Artificial Sequence
  Description of Artificial Sequence: Synthetic oligonucleotide
  Antisense strand to SEQ ID NO: 1669603
ucuuggcugacauuccgac

SEQ ID NO: 1669605 - RNA, 19 nt, Artificial Sequence
  Description of Artificial Sequence: Synthetic oligonucleotide
  Sense strand starting at position 1269 of SEQ ID NO: 1561408
cggaaugucagccaagaga

SEQ ID NO: 1669606 - RNA, 19 nt, Artificial Sequence
  Description of Artificial Sequence: Synthetic oligonucleotide
  Antisense strand to SEQ ID NO: 1669605
ucucuuggcugacauuccg

SEQ ID NO: 1669607 - RNA, 19 nt, Artificial Sequence
  Description of Artificial Sequence: Synthetic oligonucleotide
  Sense strand starting at position 1452 of SEQ ID NO: 1561408
gacaaaugcuuggacgcaa

SEQ ID NO: 1669608 - RNA, 19 nt, Artificial Sequence
  Description of Artificial Sequence: Synthetic oligonucleotide
  Antisense strand to SEQ ID NO: 1669607
uugcguccaagcauuuguc

SEQ ID NO: 1669609 - RNA, 19 nt, Artificial Sequence
  Description of Artificial Sequence: Synthetic oligonucleotide
  Sense strand starting at position 1468 of SEQ ID NO: 1561408
caagguguccagggagcuu

SEQ ID NO: 1669610 - RNA, 19 nt, Artificial Sequence
  Description of Artificial Sequence: Synthetic oligonucleotide
  Antisense strand to SEQ ID NO: 1669609
aagcucccuggacaccuug

SEQ ID NO: 1669611 - RNA, 19 nt, Artificial Sequence
  Description of Artificial Sequence: Synthetic oligonucleotide
  Sense strand starting at position 1896 of SEQ ID NO: 1561408
ccugaaggucugcagugaa

SEQ ID NO: 1669612 - RNA, 19 nt, Artificial Sequence
  Description of Artificial Sequence: Synthetic oligonucleotide
  Antisense strand to SEQ ID NO: 1669611
uucacugcagaccuucagg

SEQ ID NO: 1669613 - RNA, 19 nt, Artificial Sequence
  Description of Artificial Sequence: Synthetic oligonucleotide
  Sense strand starting at position 1899 of SEQ ID NO: 1561408
gaaggucugcagugaaaga

SEQ ID NO: 1669614 - RNA, 19 nt, Artificial Sequence
  Description of Artificial Sequence: Synthetic oligonucleotide
  Antisense strand to SEQ ID NO: 1669613
ucuuucacugcagaccuuc

SEQ ID NO: 1669615 - RNA, 19 nt, Artificial Sequence
  Description of Artificial Sequence: Synthetic oligonucleotide
  Sense strand starting at position 2359 of SEQ ID NO: 1561408
gcccaugcccuuugaacua

SEQ ID NO: 1669616 - RNA, 19 nt, Artificial Sequence
  Description of Artificial Sequence: Synthetic oligonucleotide
  Antisense strand to SEQ ID NO: 1669615
uaguucaaagggcaugggc

SEQ ID NO: 1669617 - RNA, 19 nt, Artificial Sequence
  Description of Artificial Sequence: Synthetic oligonucleotide
  Sense strand starting at position 2458 of SEQ ID NO: 1561408
gcgcucuguuccucuagga

SEQ ID NO: 1669618 - RNA, 19 nt, Artificial Sequence
  Description of Artificial Sequence: Synthetic oligonucleotide
  Antisense strand to SEQ ID NO: 1669617
uccuagaggaacagagcgc

SEQ ID NO: 1669619 - RNA, 19 nt, Artificial Sequence
  Description of Artificial Sequence: Synthetic oligonucleotide
  Sense strand starting at position 2462 of SEQ ID NO: 1561408
ucuguuccucuaggaggua

SEQ ID NO: 1669620 - RNA, 19 nt, Artificial Sequence
  Description of Artificial Sequence: Synthetic oligonucleotide
  Antisense strand to SEQ ID NO: 1669619
uaccuccuagaggaacaga

SEQ ID NO: 1669621 - RNA, 19 nt, Artificial Sequence
  Description of Artificial Sequence: Synthetic oligonucleotide
  Sense strand starting at position 2482 of SEQ ID NO: 1561408
ggcagagucccaggguuau

SEQ ID NO: 1669622 - RNA, 19 nt, Artificial Sequence
  Description of Artificial Sequence: Synthetic oligonucleotide
  Antisense strand to SEQ ID NO: 1669621
auaacccugggacucugcc

SEQ ID NO: 1669623 - RNA, 19 nt, Artificial Sequence
  Description of Artificial Sequence: Synthetic oligonucleotide
  Sense strand starting at position 2523 of SEQ ID NO: 1561408
gcagcucuucccggguuau

SEQ ID NO: 1669624 - RNA, 19 nt, Artificial Sequence
  Description of Artificial Sequence: Synthetic oligonucleotide
  Antisense strand to SEQ ID NO: 1669623
auaacccgggaagagcugc

SEQ ID NO: 1669625 - RNA, 19 nt, Artificial Sequence
  Description of Artificial Sequence: Synthetic oligonucleotide
  Sense strand starting at position 2524 of SEQ ID NO: 1561408
cagcucuucccggguuaua

SEQ ID NO: 1669626 - RNA, 19 nt, Artificial Sequence
  Description of Artificial Sequence: Synthetic oligonucleotide
  Antisense strand to SEQ ID NO: 1669625
uauaacccgggaagagcug

SEQ ID NO: 1669627 - RNA, 19 nt, Artificial Sequence
  Description of Artificial Sequence: Synthetic oligonucleotide
  Sense strand starting at position 2568 of SEQ ID NO: 1561408
gguuucuauuggcagguga

SEQ ID NO: 1669628 - RNA, 19 nt, Artificial Sequence
  Description of Artificial Sequence: Synthetic oligonucleotide
  Antisense strand to SEQ ID NO: 1669627
ucaccugccaauagaaacc

SEQ ID NO: 1669629 - RNA, 19 nt, Artificial Sequence
  Description of Artificial Sequence: Synthetic oligonucleotide
  Sense strand starting at position 2664 of SEQ ID NO: 1561408
uagauaacgcuagggcaua

SEQ ID NO: 1669630 - RNA, 19 nt, Artificial Sequence
  Description of Artificial Sequence: Synthetic oligonucleotide
  Antisense strand to SEQ ID NO: 1669629
uaugcccuagcguuaucua

SEQ ID NO: 1669631 - RNA, 19 nt, Artificial Sequence
  Description of Artificial Sequence: Synthetic oligonucleotide
  Sense strand starting at position 2694 of SEQ ID NO: 1561408
ccagcuguucccguggcaa

SEQ ID NO: 1669632 - RNA, 19 nt, Artificial Sequence
  Description of Artificial Sequence: Synthetic oligonucleotide
  Antisense strand to SEQ ID NO: 1669631
uugccacgggaacagcugg

SEQ ID NO: 1669633 - RNA, 19 nt, Artificial Sequence
  Description of Artificial Sequence: Synthetic oligonucleotide
  Sense strand starting at position 2763 of SEQ ID NO: 1561408
gugguuuccuaggucgagu

SEQ ID NO: 1669634 - RNA, 19 nt, Artificial Sequence
  Description of Artificial Sequence: Synthetic oligonucleotide
  Antisense strand to SEQ ID NO: 1669633
acucgaccuaggaaaccac

SEQ ID NO: 1669635 - RNA, 19 nt, Artificial Sequence
  Description of Artificial Sequence: Synthetic oligonucleotide
  Sense strand starting at position 2777 of SEQ ID NO: 1561408
cgaguaguucgcugggacu

SEQ ID NO: 1669636 - RNA, 19 nt, Artificial Sequence
  Description of Artificial Sequence: Synthetic oligonucleotide
  Antisense strand to SEQ ID NO: 1669635
agucccagcgaacuacucg

SEQ ID NO: 1669637 - RNA, 19 nt, Artificial Sequence
  Description of Artificial Sequence: Synthetic oligonucleotide
  Sense strand starting at position 2881 of SEQ ID NO: 1561408
aucuuugaccucuguuaag

SEQ ID NO: 1669638 - RNA, 19 nt, Artificial Sequence
  Description of Artificial Sequence: Synthetic oligonucleotide
  Antisense strand to SEQ ID NO: 1669637
cuuaacagaggucaaagau

SEQ ID NO: 1669639 - RNA, 19 nt, Artificial Sequence
  Description of Artificial Sequence: Synthetic oligonucleotide
  Sense strand starting at position 2948 of SEQ ID NO: 1561408
agaugucaguccuacaaag

SEQ ID NO: 1669640 - RNA, 19 nt, Artificial Sequence
  Description of Artificial Sequence: Synthetic oligonucleotide
  Antisense strand to SEQ ID NO: 1669639
cuuuguaggacugacaucu

SEQ ID NO: 1669641 - RNA, 19 nt, Artificial Sequence
  Description of Artificial Sequence: Synthetic oligonucleotide
  Sense strand starting at position 3067 of SEQ ID NO: 1561408
cccaauaagcaguguuaca

SEQ ID NO: 1669642 - RNA, 19 nt, Artificial Sequence
  Description of Artificial Sequence: Synthetic oligonucleotide
  Antisense strand to SEQ ID NO: 1669641
uguaacacugcuuauuggg

SEQ ID NO: 1669643 - RNA, 19 nt, Artificial Sequence
  Description of Artificial Sequence: Synthetic oligonucleotide
  Sense strand starting at position 3140 of SEQ ID NO: 1561408
auuacuuagucaguccuaa

SEQ ID NO: 1669644 - RNA, 19 nt, Artificial Sequence
  Description of Artificial Sequence: Synthetic oligonucleotide
  Antisense strand to SEQ ID NO: 1669643
uuaggacugacuaaguaau

SEQ ID NO: 1669645 - RNA, 19 nt, Artificial Sequence
  Description of Artificial Sequence: Synthetic oligonucleotide
  Sense strand starting at position 3144 of SEQ ID NO: 1561408
cuuagucaguccuaaauua

SEQ ID NO: 1669646 - RNA, 19 nt, Artificial Sequence
  Description of Artificial Sequence: Synthetic oligonucleotide
  Antisense strand to SEQ ID NO: 1669645
uaauuuaggacugacuaag

SEQ ID NO: 1669647 - RNA, 19 nt, Artificial Sequence
  Description of Artificial Sequence: Synthetic oligonucleotide
  Sense strand starting at position 3216 of SEQ ID NO: 1561408
gaugaagagcaguggucuu

SEQ ID NO: 1669648 - RNA, 19 nt, Artificial Sequence
  Description of Artificial Sequence: Synthetic oligonucleotide
  Antisense strand to SEQ ID NO: 1669647
aagaccacugcucuucauc

SEQ ID NO: 1669649 - RNA, 19 nt, Artificial Sequence
  Description of Artificial Sequence: Synthetic oligonucleotide
  Sense strand starting at position 3226 of SEQ ID NO: 1561408
aguggucuugaucaccgau

SEQ ID NO: 1669650 - RNA, 19 nt, Artificial Sequence
  Description of Artificial Sequence: Synthetic oligonucleotide
  Antisense strand to SEQ ID NO: 1669649
aucggugaucaagaccacu

SEQ ID NO: 1669651 - RNA, 19 nt, Artificial Sequence
  Description of Artificial Sequence: Synthetic oligonucleotide
  Sense strand starting at position 3265 of SEQ ID NO: 1561408
guggaugagacuugucaac

SEQ ID NO: 1669652 - RNA, 19 nt, Artificial Sequence
  Description of Artificial Sequence: Synthetic oligonucleotide
  Antisense strand to SEQ ID NO: 1669651
guugacaagucucauccac

SEQ ID NO: 1669653 - RNA, 19 nt, Artificial Sequence
  Description of Artificial Sequence: Synthetic oligonucleotide
  Sense strand starting at position 3267 of SEQ ID NO: 1561408
ggaugagacuugucaacuc

SEQ ID NO: 1669654 - RNA, 19 nt, Artificial Sequence
  Description of Artificial Sequence: Synthetic oligonucleotide
  Antisense strand to SEQ ID NO: 1669653
gaguugacaagucucaucc

SEQ ID NO: 1669655 - RNA, 19 nt, Artificial Sequence
  Description of Artificial Sequence: Synthetic oligonucleotide
  Sense strand starting at position 3427 of SEQ ID NO: 1561408
gggcuucuucaguaguugu

SEQ ID NO: 1669656 - RNA, 19 nt, Artificial Sequence
  Description of Artificial Sequence: Synthetic oligonucleotide
  Antisense strand to SEQ ID NO: 1669655
acaacuacugaagaagccc

SEQ ID NO: 1669657 - RNA, 19 nt, Artificial Sequence
  Description of Artificial Sequence: Synthetic oligonucleotide
  Sense strand starting at position 3453 of SEQ ID NO: 1561408
gcagcuuugauauaggucu

SEQ ID NO: 1669658 - RNA, 19 nt, Artificial Sequence
  Description of Artificial Sequence: Synthetic oligonucleotide
  Antisense strand to SEQ ID NO: 1669657
agaccuauaucaaagcugc

SEQ ID NO: 1669659 - RNA, 19 nt, Artificial Sequence
  Description of Artificial Sequence: Synthetic oligonucleotide
  Sense strand starting at position 3546 of SEQ ID NO: 1561408
caagucgccacguaguauu

SEQ ID NO: 1669660 - RNA, 19 nt, Artificial Sequence
  Description of Artificial Sequence: Synthetic oligonucleotide
  Antisense strand to SEQ ID NO: 1669659
aauacuacguggcgacuug

SEQ ID NO: 1669661 - RNA, 19 nt, Artificial Sequence
  Description of Artificial Sequence: Synthetic oligonucleotide
  Sense strand starting at position 3596 of SEQ ID NO: 1561408
ccacuucuagcuuaggaau

SEQ ID NO: 1669662 - RNA, 19 nt, Artificial Sequence
  Description of Artificial Sequence: Synthetic oligonucleotide
  Antisense strand to SEQ ID NO: 1669661
auuccuaagcuagaagugg

SEQ ID NO: 1669663 - RNA, 19 nt, Artificial Sequence
  Description of Artificial Sequence: Synthetic oligonucleotide
  Sense strand starting at position 3621 of SEQ ID NO: 1561408
gcuccugacuccucuguca

SEQ ID NO: 1669664 - RNA, 19 nt, Artificial Sequence
  Description of Artificial Sequence: Synthetic oligonucleotide
  Antisense strand to SEQ ID NO: 1669663
ugacagaggagucaggagc

SEQ ID NO: 1669665 - RNA, 19 nt, Artificial Sequence
  Description of Artificial Sequence: Synthetic oligonucleotide
  Sense strand starting at position 3643 of SEQ ID NO: 1561408
uccucauacuuguggguua

SEQ ID NO: 1669666 - RNA, 19 nt, Artificial Sequence
  Description of Artificial Sequence: Synthetic oligonucleotide
  Antisense strand to SEQ ID NO: 1669665
uaacccacaaguaugagga

SEQ ID NO: 1669667 - RNA, 19 nt, Artificial Sequence
  Description of Artificial Sequence: Synthetic oligonucleotide
  Sense strand starting at position 3644 of SEQ ID NO: 1561408
ccucauacuuguggguuau

SEQ ID NO: 1669668 - RNA, 19 nt, Artificial Sequence
  Description of Artificial Sequence: Synthetic oligonucleotide
  Antisense strand to SEQ ID NO: 1669667
auaacccacaaguaugagg

SEQ ID NO: 1669669 - RNA, 19 nt, Artificial Sequence
  Description of Artificial Sequence: Synthetic oligonucleotide
  Sense strand starting at position 3693 of SEQ ID NO: 1561408
guggauuucugagcccagu

SEQ ID NO: 1669670 - RNA, 19 nt, Artificial Sequence
  Description of Artificial Sequence: Synthetic oligonucleotide
  Antisense strand to SEQ ID NO: 1669669
acugggcucagaaauccac

SEQ ID NO: 1669671 - RNA, 19 nt, Artificial Sequence
  Description of Artificial Sequence: Synthetic oligonucleotide
  Sense strand starting at position 3699 of SEQ ID NO: 1561408
uucugagcccagugagaug

SEQ ID NO: 1669672 - RNA, 19 nt, Artificial Sequence
  Description of Artificial Sequence: Synthetic oligonucleotide
  Antisense strand to SEQ ID NO: 1669671
caucucacugggcucagaa

SEQ ID NO: 1669673 - RNA, 19 nt, Artificial Sequence
  Description of Artificial Sequence: Synthetic oligonucleotide
  Sense strand starting at position 3708 of SEQ ID NO: 1561408
cagugagaugcauguguuc

SEQ ID NO: 1669674 - RNA, 19 nt, Artificial Sequence
  Description of Artificial Sequence: Synthetic oligonucleotide
  Antisense strand to SEQ ID NO: 1669673
gaacacaugcaucucacug

SEQ ID NO: 1669675 - RNA, 19 nt, Artificial Sequence
  Description of Artificial Sequence: Synthetic oligonucleotide
  Sense strand starting at position 3711 of SEQ ID NO: 1561408
ugagaugcauguguucagu

SEQ ID NO: 1669676 - RNA, 19 nt, Artificial Sequence
  Description of Artificial Sequence: Synthetic oligonucleotide
  Antisense strand to SEQ ID NO: 1669675
acugaacacaugcaucuca

SEQ ID NO: 1669677 - RNA, 19 nt, Artificial Sequence
  Description of Artificial Sequence: Synthetic oligonucleotide
  Sense strand starting at position 3867 of SEQ ID NO: 1561408
acugaucagucauggguuu

SEQ ID NO: 1669678 - RNA, 19 nt, Artificial Sequence
  Description of Artificial Sequence: Synthetic oligonucleotide
  Antisense strand to SEQ ID NO: 1669677
aaacccaugacugaucagu

SEQ ID NO: 1669679 - RNA, 19 nt, Artificial Sequence
  Description of Artificial Sequence: Synthetic oligonucleotide
  Sense strand starting at position 339 of SEQ ID NO: 1561409
ggugacuguacauaagagu

SEQ ID NO: 1669680 - RNA, 19 nt, Artificial Sequence
  Description of Artificial Sequence: Synthetic oligonucleotide
  Antisense strand to SEQ ID NO: 1669679
acucuuauguacagucacc

SEQ ID NO: 1669681 - RNA, 19 nt, Artificial Sequence
  Description of Artificial Sequence: Synthetic oligonucleotide
  Sense strand starting at position 376 of SEQ ID NO: 1561409
uuuggauauuuccauagua

SEQ ID NO: 1669682 - RNA, 19 nt, Artificial Sequence
  Description of Artificial Sequence: Synthetic oligonucleotide
  Antisense strand to SEQ ID NO: 1669681
uacuauggaaauauccaaa

SEQ ID NO: 1669683 - RNA, 19 nt, Artificial Sequence
  Description of Artificial Sequence: Synthetic oligonucleotide
  Sense strand starting at position 418 of SEQ ID NO: 1561409
cuaugaauagugugauaac

SEQ ID NO: 1669684 - RNA, 19 nt, Artificial Sequence
  Description of Artificial Sequence: Synthetic oligonucleotide
  Antisense strand to SEQ ID NO: 1669683
guuaucacacuauucauag

SEQ ID NO: 1669685 - RNA, 19 nt, Artificial Sequence
  Description of Artificial Sequence: Synthetic oligonucleotide
  Sense strand starting at position 812 of SEQ ID NO: 1561409
cugugagaccaaggguauu

SEQ ID NO: 1669686 - RNA, 19 nt, Artificial Sequence
  Description of Artificial Sequence: Synthetic oligonucleotide
  Antisense strand to SEQ ID NO: 1669685
aauacccuuggucucacag

SEQ ID NO: 1669687 - RNA, 19 nt, Artificial Sequence
  Description of Artificial Sequence: Synthetic oligonucleotide
  Sense strand starting at position 874 of SEQ ID NO: 1561409
uuacuagcacugugauaua

SEQ ID NO: 1669688 - RNA, 19 nt, Artificial Sequence
  Description of Artificial Sequence: Synthetic oligonucleotide
  Antisense strand to SEQ ID NO: 1669687
uauaucacagugcuaguaa

SEQ ID NO: 1669689 - RNA, 19 nt, Artificial Sequence
  Description of Artificial Sequence: Synthetic oligonucleotide
  Sense strand starting at position 928 of SEQ ID NO: 1561409
guauaauugguguaauaac

SEQ ID NO: 1669690 - RNA, 19 nt, Artificial Sequence
  Description of Artificial Sequence: Synthetic oligonucleotide
  Antisense strand to SEQ ID NO: 1669689
guuauuacaccaauuauac

SEQ ID NO: 1669691 - RNA, 19 nt, Artificial Sequence
  Description of Artificial Sequence: Synthetic oligonucleotide
  Sense strand starting at position 937 of SEQ ID NO: 1561409
guguaauaacaguacccau

SEQ ID NO: 1669692 - RNA, 19 nt, Artificial Sequence
  Description of Artificial Sequence: Synthetic oligonucleotide
  Antisense strand to SEQ ID NO: 1669691
auggguacuguuauuacac

SEQ ID NO: 1669693 - RNA, 19 nt, Artificial Sequence
  Description of Artificial Sequence: Synthetic oligonucleotide
  Sense strand starting at position 1041 of SEQ ID NO: 1561409
aagcccucagagugauacu

SEQ ID NO: 1669694 - RNA, 19 nt, Artificial Sequence
  Description of Artificial Sequence: Synthetic oligonucleotide
  Antisense strand to SEQ ID NO: 1669693
aguaucacucugagggcuu

SEQ ID NO: 1669695 - RNA, 19 nt, Artificial Sequence
  Description of Artificial Sequence: Synthetic oligonucleotide
  Sense strand starting at position 1050 of SEQ ID NO: 1561409
gagugauacucagcaccca

SEQ ID NO: 1669696 - RNA, 19 nt, Artificial Sequence
  Description of Artificial Sequence: Synthetic oligonucleotide
  Antisense strand to SEQ ID NO: 1669695
ugggugcugaguaucacuc

SEQ ID NO: 1669697 - RNA, 19 nt, Artificial Sequence
  Description of Artificial Sequence: Synthetic oligonucleotide
  Sense strand starting at position 1071 of SEQ ID NO: 1561409
guuuaacuagugugacuaa

SEQ ID NO: 1669698 - RNA, 19 nt, Artificial Sequence
  Description of Artificial Sequence: Synthetic oligonucleotide
  Antisense strand to SEQ ID NO: 1669697
uuagucacacuaguuaaac

SEQ ID NO: 1669699 - RNA, 19 nt, Artificial Sequence
  Description of Artificial Sequence: Synthetic oligonucleotide
  Sense strand starting at position 1125 of SEQ ID NO: 1561409
ggaacacuucuguagcaga

SEQ ID NO: 1669700 - RNA, 19 nt, Artificial Sequence
  Description of Artificial Sequence: Synthetic oligonucleotide
  Antisense strand to SEQ ID NO: 1669699
ucugcuacagaaguguucc

SEQ ID NO: 1669701 - RNA, 19 nt, Artificial Sequence
  Description of Artificial Sequence: Synthetic oligonucleotide
  Sense strand starting at position 1309 of SEQ ID NO: 1561409
gggagauugcacgaucuug

SEQ ID NO: 1669702 - RNA, 19 nt, Artificial Sequence
  Description of Artificial Sequence: Synthetic oligonucleotide
  Antisense strand to SEQ ID NO: 1669701
caagaucgugcaaucuccc

SEQ ID NO: 1669703 - RNA, 19 nt, Artificial Sequence
  Description of Artificial Sequence: Synthetic oligonucleotide
  Sense strand starting at position 1318 of SEQ ID NO: 1561409
cacgaucuugucugagauc

SEQ ID NO: 1669704 - RNA, 19 nt, Artificial Sequence
  Description of Artificial Sequence: Synthetic oligonucleotide
  Antisense strand to SEQ ID NO: 1669703
gaucucagacaagaucgug

SEQ ID NO: 1669705 - RNA, 19 nt, Artificial Sequence
  Description of Artificial Sequence: Synthetic oligonucleotide
  Sense strand starting at position 1373 of SEQ ID NO: 1561409
uguugagugaugcacucuu

SEQ ID NO: 1669706 - RNA, 19 nt, Artificial Sequence
  Description of Artificial Sequence: Synthetic oligonucleotide
  Antisense strand to SEQ ID NO: 1669705
aagagugcaucacucaaca

SEQ ID NO: 1669707 - RNA, 19 nt, Artificial Sequence
  Description of Artificial Sequence: Synthetic oligonucleotide
  Sense strand starting at position 1524 of SEQ ID NO: 1561409
gccacauuccuguacuauu

SEQ ID NO: 1669708 - RNA, 19 nt, Artificial Sequence
  Description of Artificial Sequence: Synthetic oligonucleotide
  Antisense strand to SEQ ID NO: 1669707
aauaguacaggaauguggc

SEQ ID NO: 1669709 - RNA, 19 nt, Artificial Sequence
  Description of Artificial Sequence: Synthetic oligonucleotide
  Sense strand starting at position 1645 of SEQ ID NO: 1561409
ccgaaagauuaaguucuca

SEQ ID NO: 1669710 - RNA, 19 nt, Artificial Sequence
  Description of Artificial Sequence: Synthetic oligonucleotide
  Antisense strand to SEQ ID NO: 1669709
ugagaacuuaaucuuucgg

SEQ ID NO: 1669711 - RNA, 19 nt, Artificial Sequence
  Description of Artificial Sequence: Synthetic oligonucleotide
  Sense strand starting at position 2125 of SEQ ID NO: 1561409
ggccgaaucuuauuucuca

SEQ ID NO: 1669712 - RNA, 19 nt, Artificial Sequence
  Description of Artificial Sequence: Synthetic oligonucleotide
  Antisense strand to SEQ ID NO: 1669711
ugagaaauaagauucggcc

SEQ ID NO: 1669713 - RNA, 19 nt, Artificial Sequence
  Description of Artificial Sequence: Synthetic oligonucleotide
  Sense strand starting at position 2166 of SEQ ID NO: 1561409
ucguguucucguccucaaa

SEQ ID NO: 1669714 - RNA, 19 nt, Artificial Sequence
  Description of Artificial Sequence: Synthetic oligonucleotide
  Antisense strand to SEQ ID NO: 1669713
uuugaggacgagaacacga

SEQ ID NO: 1669715 - RNA, 19 nt, Artificial Sequence
  Description of Artificial Sequence: Synthetic oligonucleotide
  Sense strand starting at position 2167 of SEQ ID NO: 1561409
cguguucucguccucaaau

SEQ ID NO: 1669716 - RNA, 19 nt, Artificial Sequence
  Description of Artificial Sequence: Synthetic oligonucleotide
  Antisense strand to SEQ ID NO: 1669715
auuugaggacgagaacacg

SEQ ID NO: 1669717 - RNA, 19 nt, Artificial Sequence
  Description of Artificial Sequence: Synthetic oligonucleotide
  Sense strand starting at position 2370 of SEQ ID NO: 1561409
gggagucuaagucauugcu

SEQ ID NO: 1669718 - RNA, 19 nt, Artificial Sequence
  Description of Artificial Sequence: Synthetic oligonucleotide
  Antisense strand to SEQ ID NO: 1669717
agcaaugacuuagacuccc

SEQ ID NO: 1669719 - RNA, 19 nt, Artificial Sequence
  Description of Artificial Sequence: Synthetic oligonucleotide
  Sense strand starting at position 2478 of SEQ ID NO: 1561409
aaaggaaugcuauguguga

SEQ ID NO: 1669720 - RNA, 19 nt, Artificial Sequence
  Description of Artificial Sequence: Synthetic oligonucleotide
  Antisense strand to SEQ ID NO: 1669719
ucacacauagcauuccuuu

SEQ ID NO: 1669721 - RNA, 19 nt, Artificial Sequence
  Description of Artificial Sequence: Synthetic oligonucleotide
  Sense strand starting at position 2552 of SEQ ID NO: 1561409
uuuauaauauggguaugga

SEQ ID NO: 1669722 - RNA, 19 nt, Artificial Sequence
  Description of Artificial Sequence: Synthetic oligonucleotide
  Antisense strand to SEQ ID NO: 1669721
uccauacccauauuauaaa

SEQ ID NO: 1669723 - RNA, 19 nt, Artificial Sequence
  Description of Artificial Sequence: Synthetic oligonucleotide
  Sense strand starting at position 2606 of SEQ ID NO: 1561409
gcaaucauccagcaggaca

SEQ ID NO: 1669724 - RNA, 19 nt, Artificial Sequence
  Description of Artificial Sequence: Synthetic oligonucleotide
  Antisense strand to SEQ ID NO: 1669723
uguccugcuggaugauugc

SEQ ID NO: 1669725 - RNA, 19 nt, Artificial Sequence
  Description of Artificial Sequence: Synthetic oligonucleotide
  Sense strand starting at position 2708 of SEQ ID NO: 1561409
uugaauaggcucuauccua

SEQ ID NO: 1669726 - RNA, 19 nt, Artificial Sequence
  Description of Artificial Sequence: Synthetic oligonucleotide
  Antisense strand to SEQ ID NO: 1669725
uaggauagagccuauucaa

SEQ ID NO: 1669727 - RNA, 19 nt, Artificial Sequence
  Description of Artificial Sequence: Synthetic oligonucleotide
  Sense strand starting at position 2796 of SEQ ID NO: 1561409
cuguaaaggugucuuauga

SEQ ID NO: 1669728 - RNA, 19 nt, Artificial Sequence
  Description of Artificial Sequence: Synthetic oligonucleotide
  Antisense strand to SEQ ID NO: 1669727
ucauaagacaccuuuacag

SEQ ID NO: 1669729 - RNA, 19 nt, Artificial Sequence
  Description of Artificial Sequence: Synthetic oligonucleotide
  Sense strand starting at position 2803 of SEQ ID NO: 1561409
ggugucuuaugauuugcca

SEQ ID NO: 1669730 - RNA, 19 nt, Artificial Sequence
  Description of Artificial Sequence: Synthetic oligonucleotide
  Antisense strand to SEQ ID NO: 1669729
uggcaaaucauaagacacc

SEQ ID NO: 1669731 - RNA, 19 nt, Artificial Sequence
  Description of Artificial Sequence: Synthetic oligonucleotide
  Sense strand starting at position 2816 of SEQ ID NO: 1561409
uugccaaagugucuaugaa

SEQ ID NO: 1669732 - RNA, 19 nt, Artificial Sequence
  Description of Artificial Sequence: Synthetic oligonucleotide
  Antisense strand to SEQ ID NO: 1669731
uucauagacacuuuggcaa

SEQ ID NO: 1669733 - RNA, 19 nt, Artificial Sequence
  Description of Artificial Sequence: Synthetic oligonucleotide
  Sense strand starting at position 2817 of SEQ ID NO: 1561409
ugccaaagugucuaugaau

SEQ ID NO: 1669734 - RNA, 19 nt, Artificial Sequence
  Description of Artificial Sequence: Synthetic oligonucleotide
  Antisense strand to SEQ ID NO: 1669733
auucauagacacuuuggca

SEQ ID NO: 1669735 - RNA, 19 nt, Artificial Sequence
  Description of Artificial Sequence: Synthetic oligonucleotide
  Sense strand starting at position 3052 of SEQ ID NO: 1561409
gcgugauuccaagaucaga

SEQ ID NO: 1669736 - RNA, 19 nt, Artificial Sequence
  Description of Artificial Sequence: Synthetic oligonucleotide
  Antisense strand to SEQ ID NO: 1669735
ucugaucuuggaaucacgc

SEQ ID NO: 1669737 - RNA, 19 nt, Artificial Sequence
  Description of Artificial Sequence: Synthetic oligonucleotide
  Sense strand starting at position 3057 of SEQ ID NO: 1561409
auuccaagaucagauaaga

SEQ ID NO: 1669738 - RNA, 19 nt, Artificial Sequence
  Description of Artificial Sequence: Synthetic oligonucleotide
  Antisense strand to SEQ ID NO: 1669737
ucuuaucugaucuuggaau

SEQ ID NO: 1669739 - RNA, 19 nt, Artificial Sequence
  Description of Artificial Sequence: Synthetic oligonucleotide
  Sense strand starting at position 3099 of SEQ ID NO: 1561409
uggaaagcaaccuguaagu

SEQ ID NO: 1669740 - RNA, 19 nt, Artificial Sequence
  Description of Artificial Sequence: Synthetic oligonucleotide
  Antisense strand to SEQ ID NO: 1669739
acuuacagguugcuuucca

SEQ ID NO: 1669741 - RNA, 19 nt, Artificial Sequence
  Description of Artificial Sequence: Synthetic oligonucleotide
  Sense strand starting at position 3125 of SEQ ID NO: 1561409
gcuaccuaucaguauaaga

SEQ ID NO: 1669742 - RNA, 19 nt, Artificial Sequence
  Description of Artificial Sequence: Synthetic oligonucleotide
  Antisense strand to SEQ ID NO: 1669741
ucuuauacugauagguagc

SEQ ID NO: 1669743 - RNA, 19 nt, Artificial Sequence
  Description of Artificial Sequence: Synthetic oligonucleotide
  Sense strand starting at position 3154 of SEQ ID NO: 1561409
agcgccgugacgguuuaua

SEQ ID NO: 1669744 - RNA, 19 nt, Artificial Sequence
  Description of Artificial Sequence: Synthetic oligonucleotide
  Antisense strand to SEQ ID NO: 1669743
uauaaaccgucacggcgcu

SEQ ID NO: 1669745 - RNA, 19 nt, Artificial Sequence
  Description of Artificial Sequence: Synthetic oligonucleotide
  Sense strand starting at position 3155 of SEQ ID NO: 1561409
gcgccgugacgguuuauaa

SEQ ID NO: 1669746 - RNA, 19 nt, Artificial Sequence
  Description of Artificial Sequence: Synthetic oligonucleotide
  Antisense strand to SEQ ID NO: 1669745
uuauaaaccgucacggcgc

SEQ ID NO: 1669747 - RNA, 19 nt, Artificial Sequence
  Description of Artificial Sequence: Synthetic oligonucleotide
  Sense strand starting at position 3156 of SEQ ID NO: 1561409
cgccgugacgguuuauaaa

SEQ ID NO: 1669748 - RNA, 19 nt, Artificial Sequence
  Description of Artificial Sequence: Synthetic oligonucleotide
  Antisense strand to SEQ ID NO: 1669747
uuuauaaaccgucacggcg

SEQ ID NO: 1669749 - RNA, 19 nt, Artificial Sequence
  Description of Artificial Sequence: Synthetic oligonucleotide
  Sense strand starting at position 3323 of SEQ ID NO: 1561409
agucuuggucugcaaggaa

SEQ ID NO: 1669750 - RNA, 19 nt, Artificial Sequence
  Description of Artificial Sequence: Synthetic oligonucleotide
  Antisense strand to SEQ ID NO: 1669749
uuccuugcagaccaagacu

SEQ ID NO: 1669751 - RNA, 19 nt, Artificial Sequence
  Description of Artificial Sequence: Synthetic oligonucleotide
  Sense strand starting at position 3338 of SEQ ID NO: 1561409
ggaacagucacugagcuuu

SEQ ID NO: 1669752 - RNA, 19 nt, Artificial Sequence
  Description of Artificial Sequence: Synthetic oligonucleotide
  Antisense strand to SEQ ID NO: 1669751
aaagcucagugacuguucc

SEQ ID NO: 1669753 - RNA, 19 nt, Artificial Sequence
  Description of Artificial Sequence: Synthetic oligonucleotide
  Sense strand starting at position 3357 of SEQ ID NO: 1561409
uaacacuguugauucgaua

SEQ ID NO: 1669754 - RNA, 19 nt, Artificial Sequence
  Description of Artificial Sequence: Synthetic oligonucleotide
  Antisense strand to SEQ ID NO: 1669753
uaucgaaucaacaguguua

SEQ ID NO: 1669755 - RNA, 19 nt, Artificial Sequence
  Description of Artificial Sequence: Synthetic oligonucleotide
  Sense strand starting at position 3394 of SEQ ID NO: 1561409
gcuggcuugcuguugaauu

SEQ ID NO: 1669756 - RNA, 19 nt, Artificial Sequence
  Description of Artificial Sequence: Synthetic oligonucleotide
  Antisense strand to SEQ ID NO: 1669755
aauucaacagcaagccagc

SEQ ID NO: 1669757 - RNA, 19 nt, Artificial Sequence
  Description of Artificial Sequence: Synthetic oligonucleotide
  Sense strand starting at position 3839 of SEQ ID NO: 1561409
augaaauagcccugcaaag

SEQ ID NO: 1669758 - RNA, 19 nt, Artificial Sequence
  Description of Artificial Sequence: Synthetic oligonucleotide
  Antisense strand to SEQ ID NO: 1669757
cuuugcagggcuauuucau

SEQ ID NO: 1669759 - RNA, 19 nt, Artificial Sequence
  Description of Artificial Sequence: Synthetic oligonucleotide
  Sense strand starting at position 19 of SEQ ID NO: 1561410
accugcuuccagggagaau

SEQ ID NO: 1669760 - RNA, 19 nt, Artificial Sequence
  Description of Artificial Sequence: Synthetic oligonucleotide
  Antisense strand to SEQ ID NO: 1669759
auucucccuggaagcaggu

SEQ ID NO: 1669761 - RNA, 19 nt, Artificial Sequence
  Description of Artificial Sequence: Synthetic oligonucleotide
  Sense strand starting at position 20 of SEQ ID NO: 1561410
ccugcuuccagggagaauu

SEQ ID NO: 1669762 - RNA, 19 nt, Artificial Sequence
  Description of Artificial Sequence: Synthetic oligonucleotide
  Antisense strand to SEQ ID NO: 1669761
aauucucccuggaagcagg

SEQ ID NO: 1669763 - RNA, 19 nt, Artificial Sequence
  Description of Artificial Sequence: Synthetic oligonucleotide
  Sense strand starting at position 140 of SEQ ID NO: 1561410
gcagguuguagccaagaca

SEQ ID NO: 1669764 - RNA, 19 nt, Artificial Sequence
  Description of Artificial Sequence: Synthetic oligonucleotide
  Antisense strand to SEQ ID NO: 1669763
ugucuuggcuacaaccugc

SEQ ID NO: 1669765 - RNA, 19 nt, Artificial Sequence
  Description of Artificial Sequence: Synthetic oligonucleotide
  Sense strand starting at position 143 of SEQ ID NO: 1561410
gguuguagccaagacaaua

SEQ ID NO: 1669766 - RNA, 19 nt, Artificial Sequence
  Description of Artificial Sequence: Synthetic oligonucleotide
  Antisense strand to SEQ ID NO: 1669765
uauugucuuggcuacaacc

SEQ ID NO: 1669767 - RNA, 19 nt, Artificial Sequence
  Description of Artificial Sequence: Synthetic oligonucleotide
  Sense strand starting at position 181 of SEQ ID NO: 1561410
caucuauccuggcugagua

SEQ ID NO: 1669768 - RNA, 19 nt, Artificial Sequence
  Description of Artificial Sequence: Synthetic oligonucleotide
  Antisense strand to SEQ ID NO: 1669767
uacucagccaggauagaug

SEQ ID NO: 1669769 - RNA, 19 nt, Artificial Sequence
  Description of Artificial Sequence: Synthetic oligonucleotide
  Sense strand starting at position 235 of SEQ ID NO: 1561410
gcccucucagaauauguca

SEQ ID NO: 1669770 - RNA, 19 nt, Artificial Sequence
  Description of Artificial Sequence: Synthetic oligonucleotide
  Antisense strand to SEQ ID NO: 1669769
ugacauauucugagagggc

SEQ ID NO: 1669771 - RNA, 19 nt, Artificial Sequence
  Description of Artificial Sequence: Synthetic oligonucleotide
  Sense strand starting at position 242 of SEQ ID NO: 1561410
cagaauaugucagcaggua

SEQ ID NO: 1669772 - RNA, 19 nt, Artificial Sequence
  Description of Artificial Sequence: Synthetic oligonucleotide
  Antisense strand to SEQ ID NO: 1669771
uaccugcugacauauucug

SEQ ID NO: 1669773 - RNA, 19 nt, Artificial Sequence
  Description of Artificial Sequence: Synthetic oligonucleotide
  Sense strand starting at position 243 of SEQ ID NO: 1561410
agaauaugucagcagguaa

SEQ ID NO: 1669774 - RNA, 19 nt, Artificial Sequence
  Description of Artificial Sequence: Synthetic oligonucleotide
  Antisense strand to SEQ ID NO: 1669773
uuaccugcugacauauucu

SEQ ID NO: 1669775 - RNA, 19 nt, Artificial Sequence
  Description of Artificial Sequence: Synthetic oligonucleotide
  Sense strand starting at position 524 of SEQ ID NO: 1561410
guuaguuucugacuuaaga

SEQ ID NO: 1669776 - RNA, 19 nt, Artificial Sequence
  Description of Artificial Sequence: Synthetic oligonucleotide
  Antisense strand to SEQ ID NO: 1669775
ucuuaagucagaaacuaac

SEQ ID NO: 1669777 - RNA, 19 nt, Artificial Sequence
  Description of Artificial Sequence: Synthetic oligonucleotide
  Sense strand starting at position 571 of SEQ ID NO: 1561410
gguaauuggacguauguga

SEQ ID NO: 1669778 - RNA, 19 nt, Artificial Sequence
  Description of Artificial Sequence: Synthetic oligonucleotide
  Antisense strand to SEQ ID NO: 1669777
ucacauacguccaauuacc

SEQ ID NO: 1669779 - RNA, 19 nt, Artificial Sequence
  Description of Artificial Sequence: Synthetic oligonucleotide
  Sense strand starting at position 578 of SEQ ID NO: 1561410
ggacguaugugacccucaa

SEQ ID NO: 1669780 - RNA, 19 nt, Artificial Sequence
  Description of Artificial Sequence: Synthetic oligonucleotide
  Antisense strand to SEQ ID NO: 1669779
uugagggucacauacgucc

SEQ ID NO: 1669781 - RNA, 19 nt, Artificial Sequence
  Description of Artificial Sequence: Synthetic oligonucleotide
  Sense strand starting at position 582 of SEQ ID NO: 1561410
guaugugacccucaaauug

SEQ ID NO: 1669782 - RNA, 19 nt, Artificial Sequence
  Description of Artificial Sequence: Synthetic oligonucleotide
  Antisense strand to SEQ ID NO: 1669781
caauuugagggucacauac

SEQ ID NO: 1669783 - RNA, 19 nt, Artificial Sequence
  Description of Artificial Sequence: Synthetic oligonucleotide
  Sense strand starting at position 953 of SEQ ID NO: 1561410
guuaaauaauacucaccga

SEQ ID NO: 1669784 - RNA, 19 nt, Artificial Sequence
  Description of Artificial Sequence: Synthetic oligonucleotide
  Antisense strand to SEQ ID NO: 1669783
ucggugaguauuauuuaac

SEQ ID NO: 1669785 - RNA, 19 nt, Artificial Sequence
  Description of Artificial Sequence: Synthetic oligonucleotide
  Sense strand starting at position 1593 of SEQ ID NO: 1561410
ccacgaggccucuagaaau

SEQ ID NO: 1669786 - RNA, 19 nt, Artificial Sequence
  Description of Artificial Sequence: Synthetic oligonucleotide
  Antisense strand to SEQ ID NO: 1669785
auuucuagaggccucgugg

SEQ ID NO: 1669787 - RNA, 19 nt, Artificial Sequence
  Description of Artificial Sequence: Synthetic oligonucleotide
  Sense strand starting at position 2023 of SEQ ID NO: 1561410
gaugacgucacacgaagaa

SEQ ID NO: 1669788 - RNA, 19 nt, Artificial Sequence
  Description of Artificial Sequence: Synthetic oligonucleotide
  Antisense strand to SEQ ID NO: 1669787
uucuucgugugacgucauc

SEQ ID NO: 1669789 - RNA, 19 nt, Artificial Sequence
  Description of Artificial Sequence: Synthetic oligonucleotide
  Sense strand starting at position 2275 of SEQ ID NO: 1561410
gucgaaaggucccuucuag

SEQ ID NO: 1669790 - RNA, 19 nt, Artificial Sequence
  Description of Artificial Sequence: Synthetic oligonucleotide
  Antisense strand to SEQ ID NO: 1669789
cuagaagggaccuuucgac

SEQ ID NO: 1669791 - RNA, 19 nt, Artificial Sequence
  Description of Artificial Sequence: Synthetic oligonucleotide
  Sense strand starting at position 2284 of SEQ ID NO: 1561410
ucccuucuagcucaggaaa

SEQ ID NO: 1669792 - RNA, 19 nt, Artificial Sequence
  Description of Artificial Sequence: Synthetic oligonucleotide
  Antisense strand to SEQ ID NO: 1669791
uuuccugagcuagaaggga

SEQ ID NO: 1669793 - RNA, 19 nt, Artificial Sequence
  Description of Artificial Sequence: Synthetic oligonucleotide
  Sense strand starting at position 2381 of SEQ ID NO: 1561410
gcgacuucucgcuugcuuu

SEQ ID NO: 1669794 - RNA, 19 nt, Artificial Sequence
  Description of Artificial Sequence: Synthetic oligonucleotide
  Antisense strand to SEQ ID NO: 1669793
aaagcaagcgagaagucgc

SEQ ID NO: 1669795 - RNA, 19 nt, Artificial Sequence
  Description of Artificial Sequence: Synthetic oligonucleotide
  Sense strand starting at position 2430 of SEQ ID NO: 1561410
aaggauaaaugagcaguua

SEQ ID NO: 1669796 - RNA, 19 nt, Artificial Sequence
  Description of Artificial Sequence: Synthetic oligonucleotide
  Antisense strand to SEQ ID NO: 1669795
uaacugcucauuuauccuu

SEQ ID NO: 1669797 - RNA, 19 nt, Artificial Sequence
  Description of Artificial Sequence: Synthetic oligonucleotide
  Sense strand starting at position 2558 of SEQ ID NO: 1561410
gggacuuccgggugaugua

SEQ ID NO: 1669798 - RNA, 19 nt, Artificial Sequence
  Description of Artificial Sequence: Synthetic oligonucleotide
  Antisense strand to SEQ ID NO: 1669797
uacaucacccggaaguccc

SEQ ID NO: 1669799 - RNA, 19 nt, Artificial Sequence
  Description of Artificial Sequence: Synthetic oligonucleotide
  Sense strand starting at position 2559 of SEQ ID NO: 1561410
ggacuuccgggugauguaa

SEQ ID NO: 1669800 - RNA, 19 nt, Artificial Sequence
  Description of Artificial Sequence: Synthetic oligonucleotide
  Antisense strand to SEQ ID NO: 1669799
uuacaucacccggaagucc

SEQ ID NO: 1669801 - RNA, 19 nt, Artificial Sequence
  Description of Artificial Sequence: Synthetic oligonucleotide
  Sense strand starting at position 2572 of SEQ ID NO: 1561410
auguaauaggcuucgcguu

SEQ ID NO: 1669802 - RNA, 19 nt, Artificial Sequence
  Description of Artificial Sequence: Synthetic oligonucleotide
  Antisense strand to SEQ ID NO: 1669801
aacgcgaagccuauuacau

SEQ ID NO: 1669803 - RNA, 19 nt, Artificial Sequence
  Description of Artificial Sequence: Synthetic oligonucleotide
  Sense strand starting at position 2673 of SEQ ID NO: 1561410
caagcaugaucaguuugaa

SEQ ID NO: 1669804 - RNA, 19 nt, Artificial Sequence
  Description of Artificial Sequence: Synthetic oligonucleotide
  Antisense strand to SEQ ID NO: 1669803
uucaaacugaucaugcuug

SEQ ID NO: 1669805 - RNA, 19 nt, Artificial Sequence
  Description of Artificial Sequence: Synthetic oligonucleotide
  Sense strand starting at position 2676 of SEQ ID NO: 1561410
gcaugaucaguuugaaacg

SEQ ID NO: 1669806 - RNA, 19 nt, Artificial Sequence
  Description of Artificial Sequence: Synthetic oligonucleotide
  Antisense strand to SEQ ID NO: 1669805
cguuucaaacugaucaugc

SEQ ID NO: 1669807 - RNA, 19 nt, Artificial Sequence
  Description of Artificial Sequence: Synthetic oligonucleotide
  Sense strand starting at position 2686 of SEQ ID NO: 1561410
uuugaaacgucaguaagac

SEQ ID NO: 1669808 - RNA, 19 nt, Artificial Sequence
  Description of Artificial Sequence: Synthetic oligonucleotide
  Antisense strand to SEQ ID NO: 1669807
gucuuacugacguuucaaa

SEQ ID NO: 1669809 - RNA, 19 nt, Artificial Sequence
  Description of Artificial Sequence: Synthetic oligonucleotide
  Sense strand starting at position 2755 of SEQ ID NO: 1561410
guucgagcguggauauaua

SEQ ID NO: 1669810 - RNA, 19 nt, Artificial Sequence
  Description of Artificial Sequence: Synthetic oligonucleotide
  Antisense strand to SEQ ID NO: 1669809
uauauauccacgcucgaac

SEQ ID NO: 1669811 - RNA, 19 nt, Artificial Sequence
  Description of Artificial Sequence: Synthetic oligonucleotide
  Sense strand starting at position 2781 of SEQ ID NO: 1561410
gaguuauuacuguaaacug

SEQ ID NO: 1669812 - RNA, 19 nt, Artificial Sequence
  Description of Artificial Sequence: Synthetic oligonucleotide
  Antisense strand to SEQ ID NO: 1669811
caguuuacaguaauaacuc

SEQ ID NO: 1669813 - RNA, 19 nt, Artificial Sequence
  Description of Artificial Sequence: Synthetic oligonucleotide
  Sense strand starting at position 2812 of SEQ ID NO: 1561410
augauauugggugaggcua

SEQ ID NO: 1669814 - RNA, 19 nt, Artificial Sequence
  Description of Artificial Sequence: Synthetic oligonucleotide
  Antisense strand to SEQ ID NO: 1669813
uagccucacccaauaucau

SEQ ID NO: 1669815 - RNA, 19 nt, Artificial Sequence
  Description of Artificial Sequence: Synthetic oligonucleotide
  Sense strand starting at position 2842 of SEQ ID NO: 1561410
agcguagauggauaaguga

SEQ ID NO: 1669816 - RNA, 19 nt, Artificial Sequence
  Description of Artificial Sequence: Synthetic oligonucleotide
  Antisense strand to SEQ ID NO: 1669815
ucacuuauccaucuacgcu

SEQ ID NO: 1669817 - RNA, 19 nt, Artificial Sequence
  Description of Artificial Sequence: Synthetic oligonucleotide
  Sense strand starting at position 2890 of SEQ ID NO: 1561410
agcauuaacugguugcaga

SEQ ID NO: 1669818 - RNA, 19 nt, Artificial Sequence
  Description of Artificial Sequence: Synthetic oligonucleotide
  Antisense strand to SEQ ID NO: 1669817
ucugcaaccaguuaaugcu

SEQ ID NO: 1669819 - RNA, 19 nt, Artificial Sequence
  Description of Artificial Sequence: Synthetic oligonucleotide
  Sense strand starting at position 2919 of SEQ ID NO: 1561410
uauaaagucuuguuaggaa

SEQ ID NO: 1669820 - RNA, 19 nt, Artificial Sequence
  Description of Artificial Sequence: Synthetic oligonucleotide
  Antisense strand to SEQ ID NO: 1669819
uuccuaacaagacuuuaua

SEQ ID NO: 1669821 - RNA, 19 nt, Artificial Sequence
  Description of Artificial Sequence: Synthetic oligonucleotide
  Sense strand starting at position 2962 of SEQ ID NO: 1561410
agauuauauuaugcgaagu

SEQ ID NO: 1669822 - RNA, 19 nt, Artificial Sequence
  Description of Artificial Sequence: Synthetic oligonucleotide
  Antisense strand to SEQ ID NO: 1669821
acuucgcauaauauaaucu

SEQ ID NO: 1669823 - RNA, 19 nt, Artificial Sequence
  Description of Artificial Sequence: Synthetic oligonucleotide
  Sense strand starting at position 3024 of SEQ ID NO: 1561410
cuaugaaagugagagaaua

SEQ ID NO: 1669824 - RNA, 19 nt, Artificial Sequence
  Description of Artificial Sequence: Synthetic oligonucleotide
  Antisense strand to SEQ ID NO: 1669823
uauucucucacuuucauag

SEQ ID NO: 1669825 - RNA, 19 nt, Artificial Sequence
  Description of Artificial Sequence: Synthetic oligonucleotide
  Sense strand starting at position 3036 of SEQ ID NO: 1561410
gagaauaaaguccagcuuu

SEQ ID NO: 1669826 - RNA, 19 nt, Artificial Sequence
  Description of Artificial Sequence: Synthetic oligonucleotide
  Antisense strand to SEQ ID NO: 1669825
aaagcuggacuuuauucuc

SEQ ID NO: 1669827 - RNA, 19 nt, Artificial Sequence
  Description of Artificial Sequence: Synthetic oligonucleotide
  Sense strand starting at position 3085 of SEQ ID NO: 1561410
aauagaaaggugugcagaa

SEQ ID NO: 1669828 - RNA, 19 nt, Artificial Sequence
  Description of Artificial Sequence: Synthetic oligonucleotide
  Antisense strand to SEQ ID NO: 1669827
uucugcacaccuuucuauu

SEQ ID NO: 1669829 - RNA, 19 nt, Artificial Sequence
  Description of Artificial Sequence: Synthetic oligonucleotide
  Sense strand starting at position 3086 of SEQ ID NO: 1561410
auagaaaggugugcagaaa

SEQ ID NO: 1669830 - RNA, 19 nt, Artificial Sequence
  Description of Artificial Sequence: Synthetic oligonucleotide
  Antisense strand to SEQ ID NO: 1669829
uuucugcacaccuuucuau

SEQ ID NO: 1669831 - RNA, 19 nt, Artificial Sequence
  Description of Artificial Sequence: Synthetic oligonucleotide
  Sense strand starting at position 3097 of SEQ ID NO: 1561410
ugcagaaaguacucuccaa

SEQ ID NO: 1669832 - RNA, 19 nt, Artificial Sequence
  Description of Artificial Sequence: Synthetic oligonucleotide
  Antisense strand to SEQ ID NO: 1669831
uuggagaguacuuucugca

SEQ ID NO: 1669833 - RNA, 19 nt, Artificial Sequence
  Description of Artificial Sequence: Synthetic oligonucleotide
  Sense strand starting at position 3159 of SEQ ID NO: 1561410
gagucaauuuccuacacga

SEQ ID NO: 1669834 - RNA, 19 nt, Artificial Sequence
  Description of Artificial Sequence: Synthetic oligonucleotide
  Antisense strand to SEQ ID NO: 1669833
ucguguaggaaauugacuc

SEQ ID NO: 1669835 - RNA, 19 nt, Artificial Sequence
  Description of Artificial Sequence: Synthetic oligonucleotide
  Sense strand starting at position 3206 of SEQ ID NO: 1561410
cuaaauuagugugcaagga

SEQ ID NO: 1669836 - RNA, 19 nt, Artificial Sequence
  Description of Artificial Sequence: Synthetic oligonucleotide
  Antisense strand to SEQ ID NO: 1669835
uccuugcacacuaauuuag

SEQ ID NO: 1669837 - RNA, 19 nt, Artificial Sequence
  Description of Artificial Sequence: Synthetic oligonucleotide
  Sense strand starting at position 3207 of SEQ ID NO: 1561410
uaaauuagugugcaaggaa

SEQ ID NO: 1669838 - RNA, 19 nt, Artificial Sequence
  Description of Artificial Sequence: Synthetic oligonucleotide
  Antisense strand to SEQ ID NO: 1669837
uuccuugcacacuaauuua

SEQ ID NO: 1669839 - RNA, 19 nt, Artificial Sequence
  Description of Artificial Sequence: Synthetic oligonucleotide
  Sense strand starting at position 63 of SEQ ID NO: 1561411
aauuauuagugggaauuug

SEQ ID NO: 1669840 - RNA, 19 nt, Artificial Sequence
  Description of Artificial Sequence: Synthetic oligonucleotide
  Antisense strand to SEQ ID NO: 1669839
caaauucccacuaauaauu

SEQ ID NO: 1669841 - RNA, 19 nt, Artificial Sequence
  Description of Artificial Sequence: Synthetic oligonucleotide
  Sense strand starting at position 194 of SEQ ID NO: 1561411
gucccaauacuaugaugaa

SEQ ID NO: 1669842 - RNA, 19 nt, Artificial Sequence
  Description of Artificial Sequence: Synthetic oligonucleotide
  Antisense strand to SEQ ID NO: 1669841
uucaucauaguauugggac

SEQ ID NO: 1669843 - RNA, 19 nt, Artificial Sequence
  Description of Artificial Sequence: Synthetic oligonucleotide
  Sense strand starting at position 435 of SEQ ID NO: 1561411
auucuugagucuuuaguuu

SEQ ID NO: 1669844 - RNA, 19 nt, Artificial Sequence
  Description of Artificial Sequence: Synthetic oligonucleotide
  Antisense strand to SEQ ID NO: 1669843
aaacuaaagacucaagaau

SEQ ID NO: 1669845 - RNA, 19 nt, Artificial Sequence
  Description of Artificial Sequence: Synthetic oligonucleotide
  Sense strand starting at position 439 of SEQ ID NO: 1561411
uugagucuuuaguuugaag

SEQ ID NO: 1669846 - RNA, 19 nt, Artificial Sequence
  Description of Artificial Sequence: Synthetic oligonucleotide
  Antisense strand to SEQ ID NO: 1669845
cuucaaacuaaagacucaa

SEQ ID NO: 1669847 - RNA, 19 nt, Artificial Sequence
  Description of Artificial Sequence: Synthetic oligonucleotide
  Sense strand starting at position 441 of SEQ ID NO: 1561411
gagucuuuaguuugaagua

SEQ ID NO: 1669848 - RNA, 19 nt, Artificial Sequence
  Description of Artificial Sequence: Synthetic oligonucleotide
  Antisense strand to SEQ ID NO: 1669847
uacuucaaacuaaagacuc

SEQ ID NO: 1669849 - RNA, 19 nt, Artificial Sequence
  Description of Artificial Sequence: Synthetic oligonucleotide
  Sense strand starting at position 456 of SEQ ID NO: 1561411
aguacagugcuguaagaau

SEQ ID NO: 1669850 - RNA, 19 nt, Artificial Sequence
  Description of Artificial Sequence: Synthetic oligonucleotide
  Antisense strand to SEQ ID NO: 1669849
auucuuacagcacuguacu

SEQ ID NO: 1669851 - RNA, 19 nt, Artificial Sequence
  Description of Artificial Sequence: Synthetic oligonucleotide
  Sense strand starting at position 512 of SEQ ID NO: 1561411
uucuuaaguuugucuuuga

SEQ ID NO: 1669852 - RNA, 19 nt, Artificial Sequence
  Description of Artificial Sequence: Synthetic oligonucleotide
  Antisense strand to SEQ ID NO: 1669851
ucaaagacaaacuuaagaa

SEQ ID NO: 1669853 - RNA, 19 nt, Artificial Sequence
  Description of Artificial Sequence: Synthetic oligonucleotide
  Sense strand starting at position 513 of SEQ ID NO: 1561411
ucuuaaguuugucuuugaa

SEQ ID NO: 1669854 - RNA, 19 nt, Artificial Sequence
  Description of Artificial Sequence: Synthetic oligonucleotide
  Antisense strand to SEQ ID NO: 1669853
uucaaagacaaacuuaaga

SEQ ID NO: 1669855 - RNA, 19 nt, Artificial Sequence
  Description of Artificial Sequence: Synthetic oligonucleotide
  Sense strand starting at position 891 of SEQ ID NO: 1561411
uguguauuguggccaaauc

SEQ ID NO: 1669856 - RNA, 19 nt, Artificial Sequence
  Description of Artificial Sequence: Synthetic oligonucleotide
  Antisense strand to SEQ ID NO: 1669855
gauuuggccacaauacaca

SEQ ID NO: 1669857 - RNA, 19 nt, Artificial Sequence
  Description of Artificial Sequence: Synthetic oligonucleotide
  Sense strand starting at position 892 of SEQ ID NO: 1561411
guguauuguggccaaaucu

SEQ ID NO: 1669858 - RNA, 19 nt, Artificial Sequence
  Description of Artificial Sequence: Synthetic oligonucleotide
  Antisense strand to SEQ ID NO: 1669857
agauuuggccacaauacac

SEQ ID NO: 1669859 - RNA, 19 nt, Artificial Sequence
  Description of Artificial Sequence: Synthetic oligonucleotide
  Sense strand starting at position 935 of SEQ ID NO: 1561411
gguacauaagcauacuaca

SEQ ID NO: 1669860 - RNA, 19 nt, Artificial Sequence
  Description of Artificial Sequence: Synthetic oligonucleotide
  Antisense strand to SEQ ID NO: 1669859
uguaguaugcuuauguacc

SEQ ID NO: 1669861 - RNA, 19 nt, Artificial Sequence
  Description of Artificial Sequence: Synthetic oligonucleotide
  Sense strand starting at position 1022 of SEQ ID NO: 1561411
uguguaaaucuacagcuaa

SEQ ID NO: 1669862 - RNA, 19 nt, Artificial Sequence
  Description of Artificial Sequence: Synthetic oligonucleotide
  Antisense strand to SEQ ID NO: 1669861
uuagcuguagauuuacaca

SEQ ID NO: 1669863 - RNA, 19 nt, Artificial Sequence
  Description of Artificial Sequence: Synthetic oligonucleotide
  Sense strand starting at position 1041 of SEQ ID NO: 1561411
cuccucaaguagucaggaa

SEQ ID NO: 1669864 - RNA, 19 nt, Artificial Sequence
  Description of Artificial Sequence: Synthetic oligonucleotide
  Antisense strand to SEQ ID NO: 1669863
uuccugacuacuugaggag

SEQ ID NO: 1669865 - RNA, 19 nt, Artificial Sequence
  Description of Artificial Sequence: Synthetic oligonucleotide
  Sense strand starting at position 1100 of SEQ ID NO: 1561411
cguccugagccuuagaugu

SEQ ID NO: 1669866 - RNA, 19 nt, Artificial Sequence
  Description of Artificial Sequence: Synthetic oligonucleotide
  Antisense strand to SEQ ID NO: 1669865
acaucuaaggcucaggacg

SEQ ID NO: 1669867 - RNA, 19 nt, Artificial Sequence
  Description of Artificial Sequence: Synthetic oligonucleotide
  Sense strand starting at position 1110 of SEQ ID NO: 1561411
cuuagaugugugcacagga

SEQ ID NO: 1669868 - RNA, 19 nt, Artificial Sequence
  Description of Artificial Sequence: Synthetic oligonucleotide
  Antisense strand to SEQ ID NO: 1669867
uccugugcacacaucuaag

SEQ ID NO: 1669869 - RNA, 19 nt, Artificial Sequence
  Description of Artificial Sequence: Synthetic oligonucleotide
  Sense strand starting at position 1207 of SEQ ID NO: 1561411
ucgugugagccugaggaua

SEQ ID NO: 1669870 - RNA, 19 nt, Artificial Sequence
  Description of Artificial Sequence: Synthetic oligonucleotide
  Antisense strand to SEQ ID NO: 1669869
uauccucaggcucacacga

SEQ ID NO: 1669871 - RNA, 19 nt, Artificial Sequence
  Description of Artificial Sequence: Synthetic oligonucleotide
  Sense strand starting at position 1218 of SEQ ID NO: 1561411
ugaggauaacgugaauguu

SEQ ID NO: 1669872 - RNA, 19 nt, Artificial Sequence
  Description of Artificial Sequence: Synthetic oligonucleotide
  Antisense strand to SEQ ID NO: 1669871
aacauucacguuauccuca

SEQ ID NO: 1669873 - RNA, 19 nt, Artificial Sequence
  Description of Artificial Sequence: Synthetic oligonucleotide
  Sense strand starting at position 1595 of SEQ ID NO: 1561411
ucacaaucauggucacagu

SEQ ID NO: 1669874 - RNA, 19 nt, Artificial Sequence
  Description of Artificial Sequence: Synthetic oligonucleotide
  Antisense strand to SEQ ID NO: 1669873
acugugaccaugauuguga

SEQ ID NO: 1669875 - RNA, 19 nt, Artificial Sequence
  Description of Artificial Sequence: Synthetic oligonucleotide
  Sense strand starting at position 1954 of SEQ ID NO: 1561411
agaccauuccugcgaggcu

SEQ ID NO: 1669876 - RNA, 19 nt, Artificial Sequence
  Description of Artificial Sequence: Synthetic oligonucleotide
  Antisense strand to SEQ ID NO: 1669875
agccucgcaggaauggucu

SEQ ID NO: 1669877 - RNA, 19 nt, Artificial Sequence
  Description of Artificial Sequence: Synthetic oligonucleotide
  Sense strand starting at position 1995 of SEQ ID NO: 1561411
agcaguguccucugggaaa

SEQ ID NO: 1669878 - RNA, 19 nt, Artificial Sequence
  Description of Artificial Sequence: Synthetic oligonucleotide
  Antisense strand to SEQ ID NO: 1669877
uuucccagaggacacugcu

SEQ ID NO: 1669879 - RNA, 19 nt, Artificial Sequence
  Description of Artificial Sequence: Synthetic oligonucleotide
  Sense strand starting at position 2155 of SEQ ID NO: 1561411
gaggacggauuucggaaua

SEQ ID NO: 1669880 - RNA, 19 nt, Artificial Sequence
  Description of Artificial Sequence: Synthetic oligonucleotide
  Antisense strand to SEQ ID NO: 1669879
uauuccgaaauccguccuc

SEQ ID NO: 1669881 - RNA, 19 nt, Artificial Sequence
  Description of Artificial Sequence: Synthetic oligonucleotide
  Sense strand starting at position 2213 of SEQ ID NO: 1561411
cgggcuguggcugaagaua

SEQ ID NO: 1669882 - RNA, 19 nt, Artificial Sequence
  Description of Artificial Sequence: Synthetic oligonucleotide
  Antisense strand to SEQ ID NO: 1669881
uaucuucagccacagcccg

SEQ ID NO: 1669883 - RNA, 19 nt, Artificial Sequence
  Description of Artificial Sequence: Synthetic oligonucleotide
  Sense strand starting at position 2269 of SEQ ID NO: 1561411
uggaguuguggugagaaag

SEQ ID NO: 1669884 - RNA, 19 nt, Artificial Sequence
  Description of Artificial Sequence: Synthetic oligonucleotide
  Antisense strand to SEQ ID NO: 1669883
cuuucucaccacaacucca

SEQ ID NO: 1669885 - RNA, 19 nt, Artificial Sequence
  Description of Artificial Sequence: Synthetic oligonucleotide
  Sense strand starting at position 2354 of SEQ ID NO: 1561411
gguguagcgcgugagauuu

SEQ ID NO: 1669886 - RNA, 19 nt, Artificial Sequence
  Description of Artificial Sequence: Synthetic oligonucleotide
  Antisense strand to SEQ ID NO: 1669885
aaaucucacgcgcuacacc

SEQ ID NO: 1669887 - RNA, 19 nt, Artificial Sequence
  Description of Artificial Sequence: Synthetic oligonucleotide
  Sense strand starting at position 2360 of SEQ ID NO: 1561411
gcgcgugagauuuguaugu

SEQ ID NO: 1669888 - RNA, 19 nt, Artificial Sequence
  Description of Artificial Sequence: Synthetic oligonucleotide
  Antisense strand to SEQ ID NO: 1669887
acauacaaaucucacgcgc

SEQ ID NO: 1669889 - RNA, 19 nt, Artificial Sequence
  Description of Artificial Sequence: Synthetic oligonucleotide
  Sense strand starting at position 2367 of SEQ ID NO: 1561411
agauuuguaugugaaacga

SEQ ID NO: 1669890 - RNA, 19 nt, Artificial Sequence
  Description of Artificial Sequence: Synthetic oligonucleotide
  Antisense strand to SEQ ID NO: 1669889
ucguuucacauacaaaucu

SEQ ID NO: 1669891 - RNA, 19 nt, Artificial Sequence
  Description of Artificial Sequence: Synthetic oligonucleotide
  Sense strand starting at position 3416 of SEQ ID NO: 1561411
gagaauggcuguucuauau

SEQ ID NO: 1669892 - RNA, 19 nt, Artificial Sequence
  Description of Artificial Sequence: Synthetic oligonucleotide
  Antisense strand to SEQ ID NO: 1669891
auauagaacagccauucuc

SEQ ID NO: 1669893 - RNA, 19 nt, Artificial Sequence
  Description of Artificial Sequence: Synthetic oligonucleotide
  Sense strand starting at position 3492 of SEQ ID NO: 1561411
ugauacgugauguggcuua

SEQ ID NO: 1669894 - RNA, 19 nt, Artificial Sequence
  Description of Artificial Sequence: Synthetic oligonucleotide
  Antisense strand to SEQ ID NO: 1669893
uaagccacaucacguauca

SEQ ID NO: 1669895 - RNA, 19 nt, Artificial Sequence
  Description of Artificial Sequence: Synthetic oligonucleotide
  Sense strand starting at position 3497 of SEQ ID NO: 1561411
cgugauguggcuuaaaugu

SEQ ID NO: 1669896 - RNA, 19 nt, Artificial Sequence
  Description of Artificial Sequence: Synthetic oligonucleotide
  Antisense strand to SEQ ID NO: 1669895
acauuuaagccacaucacg

SEQ ID NO: 1669897 - RNA, 19 nt, Artificial Sequence
  Description of Artificial Sequence: Synthetic oligonucleotide
  Sense strand starting at position 3535 of SEQ ID NO: 1561411
ugugauugccacguuugca

SEQ ID NO: 1669898 - RNA, 19 nt, Artificial Sequence
  Description of Artificial Sequence: Synthetic oligonucleotide
  Antisense strand to SEQ ID NO: 1669897
ugcaaacguggcaaucaca

SEQ ID NO: 1669899 - RNA, 19 nt, Artificial Sequence
  Description of Artificial Sequence: Synthetic oligonucleotide
  Sense strand starting at position 3627 of SEQ ID NO: 1561411
agaggacuagugugacugu

SEQ ID NO: 1669900 - RNA, 19 nt, Artificial Sequence
  Description of Artificial Sequence: Synthetic oligonucleotide
  Antisense strand to SEQ ID NO: 1669899
acagucacacuaguccucu

SEQ ID NO: 1669901 - RNA, 19 nt, Artificial Sequence
  Description of Artificial Sequence: Synthetic oligonucleotide
  Sense strand starting at position 3725 of SEQ ID NO: 1561411
cguccugaaccuuagaugu

SEQ ID NO: 1669902 - RNA, 19 nt, Artificial Sequence
  Description of Artificial Sequence: Synthetic oligonucleotide
  Antisense strand to SEQ ID NO: 1669901
acaucuaagguucaggacg

SEQ ID NO: 1669903 - RNA, 19 nt, Artificial Sequence
  Description of Artificial Sequence: Synthetic oligonucleotide
  Sense strand starting at position 3733 of SEQ ID NO: 1561411
accuuagauguaugcauag

SEQ ID NO: 1669904 - RNA, 19 nt, Artificial Sequence
  Description of Artificial Sequence: Synthetic oligonucleotide
  Antisense strand to SEQ ID NO: 1669903
cuaugcauacaucuaaggu

SEQ ID NO: 1669905 - RNA, 19 nt, Artificial Sequence
  Description of Artificial Sequence: Synthetic oligonucleotide
  Sense strand starting at position 3735 of SEQ ID NO: 1561411
cuuagauguaugcauagga

SEQ ID NO: 1669906 - RNA, 19 nt, Artificial Sequence
  Description of Artificial Sequence: Synthetic oligonucleotide
  Antisense strand to SEQ ID NO: 1669905
uccuaugcauacaucuaag

SEQ ID NO: 1669907 - RNA, 19 nt, Artificial Sequence
  Description of Artificial Sequence: Synthetic oligonucleotide
  Sense strand starting at position 3760 of SEQ ID NO: 1561411
ugaggugacuguguauguu

SEQ ID NO: 1669908 - RNA, 19 nt, Artificial Sequence
  Description of Artificial Sequence: Synthetic oligonucleotide
  Antisense strand to SEQ ID NO: 1669907
aacauacacagucaccuca

SEQ ID NO: 1669909 - RNA, 19 nt, Artificial Sequence
  Description of Artificial Sequence: Synthetic oligonucleotide
  Sense strand starting at position 3826 of SEQ ID NO: 1561411
uguuaucugccagaaggga

SEQ ID NO: 1669910 - RNA, 19 nt, Artificial Sequence
  Description of Artificial Sequence: Synthetic oligonucleotide
  Antisense strand to SEQ ID NO: 1669909
ucccuucuggcagauaaca

SEQ ID NO: 1669911 - RNA, 19 nt, Artificial Sequence
  Description of Artificial Sequence: Synthetic oligonucleotide
  Sense strand starting at position 3844 of SEQ ID NO: 1561411
acagauccaugguaaggau

SEQ ID NO: 1669912 - RNA, 19 nt, Artificial Sequence
  Description of Artificial Sequence: Synthetic oligonucleotide
  Antisense strand to SEQ ID NO: 1669911
auccuuaccauggaucugu

SEQ ID NO: 1669913 - RNA, 19 nt, Artificial Sequence
  Description of Artificial Sequence: Synthetic oligonucleotide
  Sense strand starting at position 3897 of SEQ ID NO: 1561411
ccaaguguaauaugaggaa

SEQ ID NO: 1669914 - RNA, 19 nt, Artificial Sequence
  Description of Artificial Sequence: Synthetic oligonucleotide
  Antisense strand to SEQ ID NO: 1669913
uuccucauauuacacuugg

SEQ ID NO: 1669915 - RNA, 19 nt, Artificial Sequence
  Description of Artificial Sequence: Synthetic oligonucleotide
  Sense strand starting at position 3915 of SEQ ID NO: 1561411
aauggugcuuguuugagaa

SEQ ID NO: 1669916 - RNA, 19 nt, Artificial Sequence
  Description of Artificial Sequence: Synthetic oligonucleotide
  Antisense strand to SEQ ID NO: 1669915
uucucaaacaagcaccauu

SEQ ID NO: 1669917 - RNA, 19 nt, Artificial Sequence
  Description of Artificial Sequence: Synthetic oligonucleotide
  Sense strand starting at position 3939 of SEQ ID NO: 1561411
gauucugcuugugucugau

SEQ ID NO: 1669918 - RNA, 19 nt, Artificial Sequence
  Description of Artificial Sequence: Synthetic oligonucleotide
  Antisense strand to SEQ ID NO: 1669917
aucagacacaagcagaauc

SEQ ID NO: 1669919 - RNA, 19 nt, Artificial Sequence
  Description of Artificial Sequence: Synthetic oligonucleotide
  Sense strand starting at position 197 of SEQ ID NO: 1561412
agcccuucgucgcaaagau

SEQ ID NO: 1669920 - RNA, 19 nt, Artificial Sequence
  Description of Artificial Sequence: Synthetic oligonucleotide
  Antisense strand to SEQ ID NO: 1669919
aucuuugcgacgaagggcu

SEQ ID NO: 1669921 - RNA, 19 nt, Artificial Sequence
  Description of Artificial Sequence: Synthetic oligonucleotide
  Sense strand starting at position 332 of SEQ ID NO: 1561412
augggauggguuggucuua

SEQ ID NO: 1669922 - RNA, 19 nt, Artificial Sequence
  Description of Artificial Sequence: Synthetic oligonucleotide
  Antisense strand to SEQ ID NO: 1669921
uaagaccaacccaucccau

SEQ ID NO: 1669923 - RNA, 19 nt, Artificial Sequence
  Description of Artificial Sequence: Synthetic oligonucleotide
  Sense strand starting at position 333 of SEQ ID NO: 1561412
ugggauggguuggucuuau

SEQ ID NO: 1669924 - RNA, 19 nt, Artificial Sequence
  Description of Artificial Sequence: Synthetic oligonucleotide
  Antisense strand to SEQ ID NO: 1669923
auaagaccaacccauccca

SEQ ID NO: 1669925 - RNA, 19 nt, Artificial Sequence
  Description of Artificial Sequence: Synthetic oligonucleotide
  Sense strand starting at position 337 of SEQ ID NO: 1561412
auggguuggucuuaucauc

SEQ ID NO: 1669926 - RNA, 19 nt, Artificial Sequence
  Description of Artificial Sequence: Synthetic oligonucleotide
  Antisense strand to SEQ ID NO: 1669925
gaugauaagaccaacccau

SEQ ID NO: 1669927 - RNA, 19 nt, Artificial Sequence
  Description of Artificial Sequence: Synthetic oligonucleotide
  Sense strand starting at position 342 of SEQ ID NO: 1561412
uuggucuuaucaucccauu

SEQ ID NO: 1669928 - RNA, 19 nt, Artificial Sequence
  Description of Artificial Sequence: Synthetic oligonucleotide
  Antisense strand to SEQ ID NO: 1669927
aaugggaugauaagaccaa

SEQ ID NO: 1669929 - RNA, 19 nt, Artificial Sequence
  Description of Artificial Sequence: Synthetic oligonucleotide
  Sense strand starting at position 1279 of SEQ ID NO: 1561412
acaagaggguuuggaguaa

SEQ ID NO: 1669930 - RNA, 19 nt, Artificial Sequence
  Description of Artificial Sequence: Synthetic oligonucleotide
  Antisense strand to SEQ ID NO: 1669929
uuacuccaaacccucuugu

SEQ ID NO: 1669931 - RNA, 19 nt, Artificial Sequence
  Description of Artificial Sequence: Synthetic oligonucleotide
  Sense strand starting at position 1292 of SEQ ID NO: 1561412
gaguaagacgccugcaucu

SEQ ID NO: 1669932 - RNA, 19 nt, Artificial Sequence
  Description of Artificial Sequence: Synthetic oligonucleotide
  Antisense strand to SEQ ID NO: 1669931
agaugcaggcgucuuacuc

SEQ ID NO: 1669933 - RNA, 19 nt, Artificial Sequence
  Description of Artificial Sequence: Synthetic oligonucleotide
  Sense strand starting at position 1801 of SEQ ID NO: 1561412
uuugcucugagugaaggaa

SEQ ID NO: 1669934 - RNA, 19 nt, Artificial Sequence
  Description of Artificial Sequence: Synthetic oligonucleotide
  Antisense strand to SEQ ID NO: 1669933
uuccuucacucagagcaaa

SEQ ID NO: 1669935 - RNA, 19 nt, Artificial Sequence
  Description of Artificial Sequence: Synthetic oligonucleotide
  Sense strand starting at position 1826 of SEQ ID NO: 1561412
cgagaacuuccaggucuau

SEQ ID NO: 1669936 - RNA, 19 nt, Artificial Sequence
  Description of Artificial Sequence: Synthetic oligonucleotide
  Antisense strand to SEQ ID NO: 1669935
auagaccuggaaguucucg

SEQ ID NO: 1669937 - RNA, 19 nt, Artificial Sequence
  Description of Artificial Sequence: Synthetic oligonucleotide
  Sense strand starting at position 1941 of SEQ ID NO: 1561412
cgucauuccacgggaucca

SEQ ID NO: 1669938 - RNA, 19 nt, Artificial Sequence
  Description of Artificial Sequence: Synthetic oligonucleotide
  Antisense strand to SEQ ID NO: 1669937
uggaucccguggaaugacg

SEQ ID NO: 1669939 - RNA, 19 nt, Artificial Sequence
  Description of Artificial Sequence: Synthetic oligonucleotide
  Sense strand starting at position 2203 of SEQ ID NO: 1561412
cuggaauagucuggaagga

SEQ ID NO: 1669940 - RNA, 19 nt, Artificial Sequence
  Description of Artificial Sequence: Synthetic oligonucleotide
  Antisense strand to SEQ ID NO: 1669939
uccuuccagacuauuccag

SEQ ID NO: 1669941 - RNA, 19 nt, Artificial Sequence
  Description of Artificial Sequence: Synthetic oligonucleotide
  Sense strand starting at position 2800 of SEQ ID NO: 1561412
aggagaaugcggugaacau

SEQ ID NO: 1669942 - RNA, 19 nt, Artificial Sequence
  Description of Artificial Sequence: Synthetic oligonucleotide
  Antisense strand to SEQ ID NO: 1669941
auguucaccgcauucuccu

SEQ ID NO: 1669943 - RNA, 19 nt, Artificial Sequence
  Description of Artificial Sequence: Synthetic oligonucleotide
  Sense strand starting at position 2911 of SEQ ID NO: 1561412
acuaaauuugcuuguguga

SEQ ID NO: 1669944 - RNA, 19 nt, Artificial Sequence
  Description of Artificial Sequence: Synthetic oligonucleotide
  Antisense strand to SEQ ID NO: 1669943
ucacacaagcaaauuuagu

SEQ ID NO: 1669945 - RNA, 19 nt, Artificial Sequence
  Description of Artificial Sequence: Synthetic oligonucleotide
  Sense strand starting at position 2913 of SEQ ID NO: 1561412
uaaauuugcuugugugaga

SEQ ID NO: 1669946 - RNA, 19 nt, Artificial Sequence
  Description of Artificial Sequence: Synthetic oligonucleotide
  Antisense strand to SEQ ID NO: 1669945
ucucacacaagcaaauuua

SEQ ID NO: 1669947 - RNA, 19 nt, Artificial Sequence
  Description of Artificial Sequence: Synthetic oligonucleotide
  Sense strand starting at position 2918 of SEQ ID NO: 1561412
uugcuugugugagauagga

SEQ ID NO: 1669948 - RNA, 19 nt, Artificial Sequence
  Description of Artificial Sequence: Synthetic oligonucleotide
  Antisense strand to SEQ ID NO: 1669947
uccuaucucacacaagcaa

SEQ ID NO: 1669949 - RNA, 19 nt, Artificial Sequence
  Description of Artificial Sequence: Synthetic oligonucleotide
  Sense strand starting at position 2920 of SEQ ID NO: 1561412
gcuugugugagauaggaau

SEQ ID NO: 1669950 - RNA, 19 nt, Artificial Sequence
  Description of Artificial Sequence: Synthetic oligonucleotide
  Antisense strand to SEQ ID NO: 1669949
auuccuaucucacacaagc

SEQ ID NO: 1669951 - RNA, 19 nt, Artificial Sequence
  Description of Artificial Sequence: Synthetic oligonucleotide
  Sense strand starting at position 3475 of SEQ ID NO: 1561412
guaaauaagccuuagacca

SEQ ID NO: 1669952 - RNA, 19 nt, Artificial Sequence
  Description of Artificial Sequence: Synthetic oligonucleotide
  Antisense strand to SEQ ID NO: 1669951
uggucuaaggcuuauuuac

SEQ ID NO: 1669953 - RNA, 19 nt, Artificial Sequence
  Description of Artificial Sequence: Synthetic oligonucleotide
  Sense strand starting at position 3621 of SEQ ID NO: 1561412
acaagucuuuggucgcaca

SEQ ID NO: 1669954 - RNA, 19 nt, Artificial Sequence
  Description of Artificial Sequence: Synthetic oligonucleotide
  Antisense strand to SEQ ID NO: 1669953
ugugcgaccaaagacuugu

SEQ ID NO: 1669955 - RNA, 19 nt, Artificial Sequence
  Description of Artificial Sequence: Synthetic oligonucleotide
  Sense strand starting at position 3622 of SEQ ID NO: 1561412
caagucuuuggucgcacau

SEQ ID NO: 1669956 - RNA, 19 nt, Artificial Sequence
  Description of Artificial Sequence: Synthetic oligonucleotide
  Antisense strand to SEQ ID NO: 1669955
augugcgaccaaagacuug

SEQ ID NO: 1669957 - RNA, 19 nt, Artificial Sequence
  Description of Artificial Sequence: Synthetic oligonucleotide
  Sense strand starting at position 3790 of SEQ ID NO: 1561412
ccuacaaucugacggaaac

SEQ ID NO: 1669958 - RNA, 19 nt, Artificial Sequence
  Description of Artificial Sequence: Synthetic oligonucleotide
  Antisense strand to SEQ ID NO: 1669957
guuuccgucagauuguagg

SEQ ID NO: 1669959 - RNA, 19 nt, Artificial Sequence
  Description of Artificial Sequence: Synthetic oligonucleotide
  Sense strand starting at position 3791 of SEQ ID NO: 1561412
cuacaaucugacggaaacu

SEQ ID NO: 1669960 - RNA, 19 nt, Artificial Sequence
  Description of Artificial Sequence: Synthetic oligonucleotide
  Antisense strand to SEQ ID NO: 1669959
aguuuccgucagauuguag

SEQ ID NO: 1669961 - RNA, 19 nt, Artificial Sequence
  Description of Artificial Sequence: Synthetic oligonucleotide
  Sense strand starting at position 3842 of SEQ ID NO: 1561412
cacgauuaauuauagaguu

SEQ ID NO: 1669962 - RNA, 19 nt, Artificial Sequence
  Description of Artificial Sequence: Synthetic oligonucleotide
  Antisense strand to SEQ ID NO: 1669961
aacucuauaauuaaucgug

SEQ ID NO: 1669963 - RNA, 19 nt, Artificial Sequence
  Description of Artificial Sequence: Synthetic oligonucleotide
  Sense strand starting at position 3867 of SEQ ID NO: 1561412
aacacaaaguuugaggaua

SEQ ID NO: 1669964 - RNA, 19 nt, Artificial Sequence
  Description of Artificial Sequence: Synthetic oligonucleotide
  Antisense strand to SEQ ID NO: 1669963
uauccucaaacuuuguguu

SEQ ID NO: 1669965 - RNA, 19 nt, Artificial Sequence
  Description of Artificial Sequence: Synthetic oligonucleotide
  Sense strand starting at position 3880 of SEQ ID NO: 1561412
aggauagccaucuggaaac

SEQ ID NO: 1669966 - RNA, 19 nt, Artificial Sequence
  Description of Artificial Sequence: Synthetic oligonucleotide
  Antisense strand to SEQ ID NO: 1669965
guuuccagauggcuauccu

SEQ ID NO: 1669967 - RNA, 19 nt, Artificial Sequence
  Description of Artificial Sequence: Synthetic oligonucleotide
  Sense strand starting at position 3922 of SEQ ID NO: 1561412
cguguucccauguagagau

SEQ ID NO: 1669968 - RNA, 19 nt, Artificial Sequence
  Description of Artificial Sequence: Synthetic oligonucleotide
  Antisense strand to SEQ ID NO: 1669967
aucucuacaugggaacacg

SEQ ID NO: 1669969 - RNA, 19 nt, Artificial Sequence
  Description of Artificial Sequence: Synthetic oligonucleotide
  Sense strand starting at position 242 of SEQ ID NO: 1561413
gacaaacuacaguguugaa

SEQ ID NO: 1669970 - RNA, 19 nt, Artificial Sequence
  Description of Artificial Sequence: Synthetic oligonucleotide
  Antisense strand to SEQ ID NO: 1669969
uucaacacuguaguuuguc

SEQ ID NO: 1669971 - RNA, 19 nt, Artificial Sequence
  Description of Artificial Sequence: Synthetic oligonucleotide
  Sense strand starting at position 285 of SEQ ID NO: 1561413
auguuuccuuaauuaggaa

SEQ ID NO: 1669972 - RNA, 19 nt, Artificial Sequence
  Description of Artificial Sequence: Synthetic oligonucleotide
  Antisense strand to SEQ ID NO: 1669971
uuccuaauuaaggaaacau

SEQ ID NO: 1669973 - RNA, 19 nt, Artificial Sequence
  Description of Artificial Sequence: Synthetic oligonucleotide
  Sense strand starting at position 424 of SEQ ID NO: 1561413
gugcuuuacauguaugagg

SEQ ID NO: 1669974 - RNA, 19 nt, Artificial Sequence
  Description of Artificial Sequence: Synthetic oligonucleotide
  Antisense strand to SEQ ID NO: 1669973
ccucauacauguaaagcac

SEQ ID NO: 1669975 - RNA, 19 nt, Artificial Sequence
  Description of Artificial Sequence: Synthetic oligonucleotide
  Sense strand starting at position 456 of SEQ ID NO: 1561413
augacaguacugugaggua

SEQ ID NO: 1669976 - RNA, 19 nt, Artificial Sequence
  Description of Artificial Sequence: Synthetic oligonucleotide
  Antisense strand to SEQ ID NO: 1669975
uaccucacaguacugucau

SEQ ID NO: 1669977 - RNA, 19 nt, Artificial Sequence
  Description of Artificial Sequence: Synthetic oligonucleotide
  Sense strand starting at position 461 of SEQ ID NO: 1561413
aguacugugagguauauaa

SEQ ID NO: 1669978 - RNA, 19 nt, Artificial Sequence
  Description of Artificial Sequence: Synthetic oligonucleotide
  Antisense strand to SEQ ID NO: 1669977
uuauauaccucacaguacu

SEQ ID NO: 1669979 - RNA, 19 nt, Artificial Sequence
  Description of Artificial Sequence: Synthetic oligonucleotide
  Sense strand starting at position 555 of SEQ ID NO: 1561413
gagguucuggcauaugaac

SEQ ID NO: 1669980 - RNA, 19 nt, Artificial Sequence
  Description of Artificial Sequence: Synthetic oligonucleotide
  Antisense strand to SEQ ID NO: 1669979
guucauaugccagaaccuc

SEQ ID NO: 1669981 - RNA, 19 nt, Artificial Sequence
  Description of Artificial Sequence: Synthetic oligonucleotide
  Sense strand starting at position 557 of SEQ ID NO: 1561413
gguucuggcauaugaacua

SEQ ID NO: 1669982 - RNA, 19 nt, Artificial Sequence
  Description of Artificial Sequence: Synthetic oligonucleotide
  Antisense strand to SEQ ID NO: 1669981
uaguucauaugccagaacc

SEQ ID NO: 1669983 - RNA, 19 nt, Artificial Sequence
  Description of Artificial Sequence: Synthetic oligonucleotide
  Sense strand starting at position 596 of SEQ ID NO: 1561413
agagucaguuucuuuaauu

SEQ ID NO: 1669984 - RNA, 19 nt, Artificial Sequence
  Description of Artificial Sequence: Synthetic oligonucleotide
  Antisense strand to SEQ ID NO: 1669983
aauuaaagaaacugacucu

SEQ ID NO: 1669985 - RNA, 19 nt, Artificial Sequence
  Description of Artificial Sequence: Synthetic oligonucleotide
  Sense strand starting at position 597 of SEQ ID NO: 1561413
gagucaguuucuuuaauug

SEQ ID NO: 1669986 - RNA, 19 nt, Artificial Sequence
  Description of Artificial Sequence: Synthetic oligonucleotide
  Antisense strand to SEQ ID NO: 1669985
caauuaaagaaacugacuc

SEQ ID NO: 1669987 - RNA, 19 nt, Artificial Sequence
  Description of Artificial Sequence: Synthetic oligonucleotide
  Sense strand starting at position 1006 of SEQ ID NO: 1561413
gauaucuuccguuauugac

SEQ ID NO: 1669988 - RNA, 19 nt, Artificial Sequence
  Description of Artificial Sequence: Synthetic oligonucleotide
  Antisense strand to SEQ ID NO: 1669987
gucaauaacggaagauauc

SEQ ID NO: 1669989 - RNA, 19 nt, Artificial Sequence
  Description of Artificial Sequence: Synthetic oligonucleotide
  Sense strand starting at position 1012 of SEQ ID NO: 1561413
uuccguuauugacuagaac

SEQ ID NO: 1669990 - RNA, 19 nt, Artificial Sequence
  Description of Artificial Sequence: Synthetic oligonucleotide
  Antisense strand to SEQ ID NO: 1669989
guucuagucaauaacggaa

SEQ ID NO: 1669991 - RNA, 19 nt, Artificial Sequence
  Description of Artificial Sequence: Synthetic oligonucleotide
  Sense strand starting at position 1018 of SEQ ID NO: 1561413
uauugacuagaacgugauu

SEQ ID NO: 1669992 - RNA, 19 nt, Artificial Sequence
  Description of Artificial Sequence: Synthetic oligonucleotide
  Antisense strand to SEQ ID NO: 1669991
aaucacguucuagucaaua

SEQ ID NO: 1669993 - RNA, 19 nt, Artificial Sequence
  Description of Artificial Sequence: Synthetic oligonucleotide
  Sense strand starting at position 1020 of SEQ ID NO: 1561413
uugacuagaacgugauuaa

SEQ ID NO: 1669994 - RNA, 19 nt, Artificial Sequence
  Description of Artificial Sequence: Synthetic oligonucleotide
  Antisense strand to SEQ ID NO: 1669993
uuaaucacguucuagucaa

SEQ ID NO: 1669995 - RNA, 19 nt, Artificial Sequence
  Description of Artificial Sequence: Synthetic oligonucleotide
  Sense strand starting at position 1029 of SEQ ID NO: 1561413
acgugauuaagccauagaa

SEQ ID NO: 1669996 - RNA, 19 nt, Artificial Sequence
  Description of Artificial Sequence: Synthetic oligonucleotide
  Antisense strand to SEQ ID NO: 1669995
uucuauggcuuaaucacgu

SEQ ID NO: 1669997 - RNA, 19 nt, Artificial Sequence
  Description of Artificial Sequence: Synthetic oligonucleotide
  Sense strand starting at position 1051 of SEQ ID NO: 1561413
cuggaaugccucggcauuu

SEQ ID NO: 1669998 - RNA, 19 nt, Artificial Sequence
  Description of Artificial Sequence: Synthetic oligonucleotide
  Antisense strand to SEQ ID NO: 1669997
aaaugccgaggcauuccag

SEQ ID NO: 1669999 - RNA, 19 nt, Artificial Sequence
  Description of Artificial Sequence: Synthetic oligonucleotide
  Sense strand starting at position 1061 of SEQ ID NO: 1561413
ucggcauuucugggugaag

SEQ ID NO: 1670000 - RNA, 19 nt, Artificial Sequence
  Description of Artificial Sequence: Synthetic oligonucleotide
  Antisense strand to SEQ ID NO: 1669999
cuucacccagaaaugccga

SEQ ID NO: 1670001 - RNA, 19 nt, Artificial Sequence
  Description of Artificial Sequence: Synthetic oligonucleotide
  Sense strand starting at position 1063 of SEQ ID NO: 1561413
ggcauuucugggugaagcu

SEQ ID NO: 1670002 - RNA, 19 nt, Artificial Sequence
  Description of Artificial Sequence: Synthetic oligonucleotide
  Antisense strand to SEQ ID NO: 1670001
agcuucacccagaaaugcc

SEQ ID NO: 1670003 - RNA, 19 nt, Artificial Sequence
  Description of Artificial Sequence: Synthetic oligonucleotide
  Sense strand starting at position 1125 of SEQ ID NO: 1561413
caaggcucugacggguaaa

SEQ ID NO: 1670004 - RNA, 19 nt, Artificial Sequence
  Description of Artificial Sequence: Synthetic oligonucleotide
  Antisense strand to SEQ ID NO: 1670003
uuuacccgucagagccuug

SEQ ID NO: 1670005 - RNA, 19 nt, Artificial Sequence
  Description of Artificial Sequence: Synthetic oligonucleotide
  Sense strand starting at position 1194 of SEQ ID NO: 1561413
augcuauaauggguaauau

SEQ ID NO: 1670006 - RNA, 19 nt, Artificial Sequence
  Description of Artificial Sequence: Synthetic oligonucleotide
  Antisense strand to SEQ ID NO: 1670005
auauuacccauuauagcau

SEQ ID NO: 1670007 - RNA, 19 nt, Artificial Sequence
  Description of Artificial Sequence: Synthetic oligonucleotide
  Sense strand starting at position 1195 of SEQ ID NO: 1561413
ugcuauaauggguaauauu

SEQ ID NO: 1670008 - RNA, 19 nt, Artificial Sequence
  Description of Artificial Sequence: Synthetic oligonucleotide
  Antisense strand to SEQ ID NO: 1670007
aauauuacccauuauagca

SEQ ID NO: 1670009 - RNA, 19 nt, Artificial Sequence
  Description of Artificial Sequence: Synthetic oligonucleotide
  Sense strand starting at position 1207 of SEQ ID NO: 1561413
uaauauuacggguaguguu

SEQ ID NO: 1670010 - RNA, 19 nt, Artificial Sequence
  Description of Artificial Sequence: Synthetic oligonucleotide
  Antisense strand to SEQ ID NO: 1670009
aacacuacccguaauauua

SEQ ID NO: 1670011 - RNA, 19 nt, Artificial Sequence
  Description of Artificial Sequence: Synthetic oligonucleotide
  Sense strand starting at position 1369 of SEQ ID NO: 1561413
guccacuagccuuagaaac

SEQ ID NO: 1670012 - RNA, 19 nt, Artificial Sequence
  Description of Artificial Sequence: Synthetic oligonucleotide
  Antisense strand to SEQ ID NO: 1670011
guuucuaaggcuaguggac

SEQ ID NO: 1670013 - RNA, 19 nt, Artificial Sequence
  Description of Artificial Sequence: Synthetic oligonucleotide
  Sense strand starting at position 2086 of SEQ ID NO: 1561413
aaguguaguccggaacgga

SEQ ID NO: 1670014 - RNA, 19 nt, Artificial Sequence
  Description of Artificial Sequence: Synthetic oligonucleotide
  Antisense strand to SEQ ID NO: 1670013
uccguuccggacuacacuu

SEQ ID NO: 1670015 - RNA, 19 nt, Artificial Sequence
  Description of Artificial Sequence: Synthetic oligonucleotide
  Sense strand starting at position 2535 of SEQ ID NO: 1561413
ugaggagauugggauuugu

SEQ ID NO: 1670016 - RNA, 19 nt, Artificial Sequence
  Description of Artificial Sequence: Synthetic oligonucleotide
  Antisense strand to SEQ ID NO: 1670015
acaaaucccaaucuccuca

SEQ ID NO: 1670017 - RNA, 19 nt, Artificial Sequence
  Description of Artificial Sequence: Synthetic oligonucleotide
  Sense strand starting at position 2543 of SEQ ID NO: 1561413
uugggauuugucugcuuug

SEQ ID NO: 1670018 - RNA, 19 nt, Artificial Sequence
  Description of Artificial Sequence: Synthetic oligonucleotide
  Antisense strand to SEQ ID NO: 1670017
caaagcagacaaaucccaa

SEQ ID NO: 1670019 - RNA, 19 nt, Artificial Sequence
  Description of Artificial Sequence: Synthetic oligonucleotide
  Sense strand starting at position 2546 of SEQ ID NO: 1561413
ggauuugucugcuuugcac

SEQ ID NO: 1670020 - RNA, 19 nt, Artificial Sequence
  Description of Artificial Sequence: Synthetic oligonucleotide
  Antisense strand to SEQ ID NO: 1670019
gugcaaagcagacaaaucc

SEQ ID NO: 1670021 - RNA, 19 nt, Artificial Sequence
  Description of Artificial Sequence: Synthetic oligonucleotide
  Sense strand starting at position 2727 of SEQ ID NO: 1561413
aggguuauauucucaguga

SEQ ID NO: 1670022 - RNA, 19 nt, Artificial Sequence
  Description of Artificial Sequence: Synthetic oligonucleotide
  Antisense strand to SEQ ID NO: 1670021
ucacugagaauauaacccu

SEQ ID NO: 1670023 - RNA, 19 nt, Artificial Sequence
  Description of Artificial Sequence: Synthetic oligonucleotide
  Sense strand starting at position 2821 of SEQ ID NO: 1561413
ccagucucaccaugacaca

SEQ ID NO: 1670024 - RNA, 19 nt, Artificial Sequence
  Description of Artificial Sequence: Synthetic oligonucleotide
  Antisense strand to SEQ ID NO: 1670023
ugugucauggugagacugg

SEQ ID NO: 1670025 - RNA, 19 nt, Artificial Sequence
  Description of Artificial Sequence: Synthetic oligonucleotide
  Sense strand starting at position 2842 of SEQ ID NO: 1561413
auguuauaggcugaauaug

SEQ ID NO: 1670026 - RNA, 19 nt, Artificial Sequence
  Description of Artificial Sequence: Synthetic oligonucleotide
  Antisense strand to SEQ ID NO: 1670025
cauauucagccuauaacau

SEQ ID NO: 1670027 - RNA, 19 nt, Artificial Sequence
  Description of Artificial Sequence: Synthetic oligonucleotide
  Sense strand starting at position 2947 of SEQ ID NO: 1561413
uuaggucauaagggugaua

SEQ ID NO: 1670028 - RNA, 19 nt, Artificial Sequence
  Description of Artificial Sequence: Synthetic oligonucleotide
  Antisense strand to SEQ ID NO: 1670027
uaucacccuuaugaccuaa

SEQ ID NO: 1670029 - RNA, 19 nt, Artificial Sequence
  Description of Artificial Sequence: Synthetic oligonucleotide
  Sense strand starting at position 3010 of SEQ ID NO: 1561413
gggucuccauguuuacaca

SEQ ID NO: 1670030 - RNA, 19 nt, Artificial Sequence
  Description of Artificial Sequence: Synthetic oligonucleotide
  Antisense strand to SEQ ID NO: 1670029
uguguaaacauggagaccc

SEQ ID NO: 1670031 - RNA, 19 nt, Artificial Sequence
  Description of Artificial Sequence: Synthetic oligonucleotide
  Sense strand starting at position 3011 of SEQ ID NO: 1561413
ggucuccauguuuacacaa

SEQ ID NO: 1670032 - RNA, 19 nt, Artificial Sequence
  Description of Artificial Sequence: Synthetic oligonucleotide
  Antisense strand to SEQ ID NO: 1670031
uuguguaaacauggagacc

SEQ ID NO: 1670033 - RNA, 19 nt, Artificial Sequence
  Description of Artificial Sequence: Synthetic oligonucleotide
  Sense strand starting at position 3168 of SEQ ID NO: 1561413
agucacuuagucuaugaua

SEQ ID NO: 1670034 - RNA, 19 nt, Artificial Sequence
  Description of Artificial Sequence: Synthetic oligonucleotide
  Antisense strand to SEQ ID NO: 1670033
uaucauagacuaagugacu

SEQ ID NO: 1670035 - RNA, 19 nt, Artificial Sequence
  Description of Artificial Sequence: Synthetic oligonucleotide
  Sense strand starting at position 3170 of SEQ ID NO: 1561413
ucacuuagucuaugauauu

SEQ ID NO: 1670036 - RNA, 19 nt, Artificial Sequence
  Description of Artificial Sequence: Synthetic oligonucleotide
  Antisense strand to SEQ ID NO: 1670035
aauaucauagacuaaguga

SEQ ID NO: 1670037 - RNA, 19 nt, Artificial Sequence
  Description of Artificial Sequence: Synthetic oligonucleotide
  Sense strand starting at position 3367 of SEQ ID NO: 1561413
cugugaagauacuuuaacu

SEQ ID NO: 1670038 - RNA, 19 nt, Artificial Sequence
  Description of Artificial Sequence: Synthetic oligonucleotide
  Antisense strand to SEQ ID NO: 1670037
aguuaaaguaucuucacag

SEQ ID NO: 1670039 - RNA, 19 nt, Artificial Sequence
  Description of Artificial Sequence: Synthetic oligonucleotide
  Sense strand starting at position 3420 of SEQ ID NO: 1561413
guuugugguuauuugaguu

SEQ ID NO: 1670040 - RNA, 19 nt, Artificial Sequence
  Description of Artificial Sequence: Synthetic oligonucleotide
  Antisense strand to SEQ ID NO: 1670039
aacucaaauaaccacaaac

SEQ ID NO: 1670041 - RNA, 19 nt, Artificial Sequence
  Description of Artificial Sequence: Synthetic oligonucleotide
  Sense strand starting at position 3428 of SEQ ID NO: 1561413
uuauuugaguuggaugaaa

SEQ ID NO: 1670042 - RNA, 19 nt, Artificial Sequence
  Description of Artificial Sequence: Synthetic oligonucleotide
  Antisense strand to SEQ ID NO: 1670041
uuucauccaacucaaauaa

SEQ ID NO: 1670043 - RNA, 19 nt, Artificial Sequence
  Description of Artificial Sequence: Synthetic oligonucleotide
  Sense strand starting at position 3464 of SEQ ID NO: 1561413
uuagcucuggcauauaaag

SEQ ID NO: 1670044 - RNA, 19 nt, Artificial Sequence
  Description of Artificial Sequence: Synthetic oligonucleotide
  Antisense strand to SEQ ID NO: 1670043
cuuuauaugccagagcuaa

SEQ ID NO: 1670045 - RNA, 19 nt, Artificial Sequence
  Description of Artificial Sequence: Synthetic oligonucleotide
  Sense strand starting at position 3631 of SEQ ID NO: 1561413
ccaagauuagcuuacuuga

SEQ ID NO: 1670046 - RNA, 19 nt, Artificial Sequence
  Description of Artificial Sequence: Synthetic oligonucleotide
  Antisense strand to SEQ ID NO: 1670045
ucaaguaagcuaaucuugg

SEQ ID NO: 1670047 - RNA, 19 nt, Artificial Sequence
  Description of Artificial Sequence: Synthetic oligonucleotide
  Sense strand starting at position 3663 of SEQ ID NO: 1561413
ggaguuauaaacugguaaa

SEQ ID NO: 1670048 - RNA, 19 nt, Artificial Sequence
  Description of Artificial Sequence: Synthetic oligonucleotide
  Antisense strand to SEQ ID NO: 1670047
uuuaccaguuuauaacucc

SEQ ID NO: 1670049 - RNA, 19 nt, Artificial Sequence
  Description of Artificial Sequence: Synthetic oligonucleotide
  Sense strand starting at position 63 of SEQ ID NO: 1561414
guucuaagaccagaugugu

SEQ ID NO: 1670050 - RNA, 19 nt, Artificial Sequence
  Description of Artificial Sequence: Synthetic oligonucleotide
  Antisense strand to SEQ ID NO: 1670049
acacaucuggucuuagaac

SEQ ID NO: 1670051 - RNA, 19 nt, Artificial Sequence
  Description of Artificial Sequence: Synthetic oligonucleotide
  Sense strand starting at position 337 of SEQ ID NO: 1561414
gcuucugacuagcuauaaa

SEQ ID NO: 1670052 - RNA, 19 nt, Artificial Sequence
  Description of Artificial Sequence: Synthetic oligonucleotide
  Antisense strand to SEQ ID NO: 1670051
uuuauagcuagucagaagc

SEQ ID NO: 1670053 - RNA, 19 nt, Artificial Sequence
  Description of Artificial Sequence: Synthetic oligonucleotide
  Sense strand starting at position 419 of SEQ ID NO: 1561414
gggaaacacguuuguagua

SEQ ID NO: 1670054 - RNA, 19 nt, Artificial Sequence
  Description of Artificial Sequence: Synthetic oligonucleotide
  Antisense strand to SEQ ID NO: 1670053
uacuacaaacguguuuccc

SEQ ID NO: 1670055 - RNA, 19 nt, Artificial Sequence
  Description of Artificial Sequence: Synthetic oligonucleotide
  Sense strand starting at position 420 of SEQ ID NO: 1561414
ggaaacacguuuguaguaa

SEQ ID NO: 1670056 - RNA, 19 nt, Artificial Sequence
  Description of Artificial Sequence: Synthetic oligonucleotide
  Antisense strand to SEQ ID NO: 1670055
uuacuacaaacguguuucc

SEQ ID NO: 1670057 - RNA, 19 nt, Artificial Sequence
  Description of Artificial Sequence: Synthetic oligonucleotide
  Sense strand starting at position 472 of SEQ ID NO: 1561414
ugcauaggacaagguuaua

SEQ ID NO: 1670058 - RNA, 19 nt, Artificial Sequence
  Description of Artificial Sequence: Synthetic oligonucleotide
  Antisense strand to SEQ ID NO: 1670057
uauaaccuuguccuaugca

SEQ ID NO: 1670059 - RNA, 19 nt, Artificial Sequence
  Description of Artificial Sequence: Synthetic oligonucleotide
  Sense strand starting at position 596 of SEQ ID NO: 1561414
cugguuaaaucacugacca

SEQ ID NO: 1670060 - RNA, 19 nt, Artificial Sequence
  Description of Artificial Sequence: Synthetic oligonucleotide
  Antisense strand to SEQ ID NO: 1670059
uggucagugauuuaaccag

SEQ ID NO: 1670061 - RNA, 19 nt, Artificial Sequence
  Description of Artificial Sequence: Synthetic oligonucleotide
  Sense strand starting at position 604 of SEQ ID NO: 1561414
aucacugaccacugaugau

SEQ ID NO: 1670062 - RNA, 19 nt, Artificial Sequence
  Description of Artificial Sequence: Synthetic oligonucleotide
  Antisense strand to SEQ ID NO: 1670061
aucaucaguggucagugau

SEQ ID NO: 1670063 - RNA, 19 nt, Artificial Sequence
  Description of Artificial Sequence: Synthetic oligonucleotide
  Sense strand starting at position 610 of SEQ ID NO: 1561414
gaccacugaugaucaguuu

SEQ ID NO: 1670064 - RNA, 19 nt, Artificial Sequence
  Description of Artificial Sequence: Synthetic oligonucleotide
  Antisense strand to SEQ ID NO: 1670063
aaacugaucaucagugguc

SEQ ID NO: 1670065 - RNA, 19 nt, Artificial Sequence
  Description of Artificial Sequence: Synthetic oligonucleotide
  Sense strand starting at position 642 of SEQ ID NO: 1561414
cuuuccuuucccuggagau

SEQ ID NO: 1670066 - RNA, 19 nt, Artificial Sequence
  Description of Artificial Sequence: Synthetic oligonucleotide
  Antisense strand to SEQ ID NO: 1670065
aucuccagggaaaggaaag

SEQ ID NO: 1670067 - RNA, 19 nt, Artificial Sequence
  Description of Artificial Sequence: Synthetic oligonucleotide
  Sense strand starting at position 643 of SEQ ID NO: 1561414
uuuccuuucccuggagauu

SEQ ID NO: 1670068 - RNA, 19 nt, Artificial Sequence
  Description of Artificial Sequence: Synthetic oligonucleotide
  Antisense strand to SEQ ID NO: 1670067
aaucuccagggaaaggaaa

SEQ ID NO: 1670069 - RNA, 19 nt, Artificial Sequence
  Description of Artificial Sequence: Synthetic oligonucleotide
  Sense strand starting at position 719 of SEQ ID NO: 1561414
aucccuuaccgugaucaac

SEQ ID NO: 1670070 - RNA, 19 nt, Artificial Sequence
  Description of Artificial Sequence: Synthetic oligonucleotide
  Antisense strand to SEQ ID NO: 1670069
guugaucacgguaagggau

SEQ ID NO: 1670071 - RNA, 19 nt, Artificial Sequence
  Description of Artificial Sequence: Synthetic oligonucleotide
  Sense strand starting at position 811 of SEQ ID NO: 1561414
gaagucguaagccaggaaa

SEQ ID NO: 1670072 - RNA, 19 nt, Artificial Sequence
  Description of Artificial Sequence: Synthetic oligonucleotide
  Antisense strand to SEQ ID NO: 1670071
uuuccuggcuuacgacuuc

SEQ ID NO: 1670073 - RNA, 19 nt, Artificial Sequence
  Description of Artificial Sequence: Synthetic oligonucleotide
  Sense strand starting at position 813 of SEQ ID NO: 1561414
agucguaagccaggaaaca

SEQ ID NO: 1670074 - RNA, 19 nt, Artificial Sequence
  Description of Artificial Sequence: Synthetic oligonucleotide
  Antisense strand to SEQ ID NO: 1670073
uguuuccuggcuuacgacu

SEQ ID NO: 1670075 - RNA, 19 nt, Artificial Sequence
  Description of Artificial Sequence: Synthetic oligonucleotide
  Sense strand starting at position 814 of SEQ ID NO: 1561414
gucguaagccaggaaacau

SEQ ID NO: 1670076 - RNA, 19 nt, Artificial Sequence
  Description of Artificial Sequence: Synthetic oligonucleotide
  Antisense strand to SEQ ID NO: 1670075
auguuuccuggcuuacgac

SEQ ID NO: 1670077 - RNA, 19 nt, Artificial Sequence
  Description of Artificial Sequence: Synthetic oligonucleotide
  Sense strand starting at position 1381 of SEQ ID NO: 1561414
cgaauacauccuggucuca

SEQ ID NO: 1670078 - RNA, 19 nt, Artificial Sequence
  Description of Artificial Sequence: Synthetic oligonucleotide
  Antisense strand to SEQ ID NO: 1670077
ugagaccaggauguauucg

SEQ ID NO: 1670079 - RNA, 19 nt, Artificial Sequence
  Description of Artificial Sequence: Synthetic oligonucleotide
  Sense strand starting at position 1404 of SEQ ID NO: 1561414
cuggacaccuggucuguua

SEQ ID NO: 1670080 - RNA, 19 nt, Artificial Sequence
  Description of Artificial Sequence: Synthetic oligonucleotide
  Antisense strand to SEQ ID NO: 1670079
uaacagaccagguguccag

SEQ ID NO: 1670081 - RNA, 19 nt, Artificial Sequence
  Description of Artificial Sequence: Synthetic oligonucleotide
  Sense strand starting at position 1406 of SEQ ID NO: 1561414
ggacaccuggucuguuaca

SEQ ID NO: 1670082 - RNA, 19 nt, Artificial Sequence
  Description of Artificial Sequence: Synthetic oligonucleotide
  Antisense strand to SEQ ID NO: 1670081
uguaacagaccaggugucc

SEQ ID NO: 1670083 - RNA, 19 nt, Artificial Sequence
  Description of Artificial Sequence: Synthetic oligonucleotide
  Sense strand starting at position 2187 of SEQ ID NO: 1561414
gugcgcaggcgcaaagauu

SEQ ID NO: 1670084 - RNA, 19 nt, Artificial Sequence
  Description of Artificial Sequence: Synthetic oligonucleotide
  Antisense strand to SEQ ID NO: 1670083
aaucuuugcgccugcgcac

SEQ ID NO: 1670085 - RNA, 19 nt, Artificial Sequence
  Description of Artificial Sequence: Synthetic oligonucleotide
  Sense strand starting at position 2328 of SEQ ID NO: 1561414
cugucugugccucugugau

SEQ ID NO: 1670086 - RNA, 19 nt, Artificial Sequence
  Description of Artificial Sequence: Synthetic oligonucleotide
  Antisense strand to SEQ ID NO: 1670085
aucacagaggcacagacag

SEQ ID NO: 1670087 - RNA, 19 nt, Artificial Sequence
  Description of Artificial Sequence: Synthetic oligonucleotide
  Sense strand starting at position 2457 of SEQ ID NO: 1561414
ugugacucuggcgaauuaa

SEQ ID NO: 1670088 - RNA, 19 nt, Artificial Sequence
  Description of Artificial Sequence: Synthetic oligonucleotide
  Antisense strand to SEQ ID NO: 1670087
uuaauucgccagagucaca

SEQ ID NO: 1670089 - RNA, 19 nt, Artificial Sequence
  Description of Artificial Sequence: Synthetic oligonucleotide
  Sense strand starting at position 2494 of SEQ ID NO: 1561414
augggaaugucacugauca

SEQ ID NO: 1670090 - RNA, 19 nt, Artificial Sequence
  Description of Artificial Sequence: Synthetic oligonucleotide
  Antisense strand to SEQ ID NO: 1670089
ugaucagugacauucccau

SEQ ID NO: 1670091 - RNA, 19 nt, Artificial Sequence
  Description of Artificial Sequence: Synthetic oligonucleotide
  Sense strand starting at position 2518 of SEQ ID NO: 1561414
agugaauaacacgacguuu

SEQ ID NO: 1670092 - RNA, 19 nt, Artificial Sequence
  Description of Artificial Sequence: Synthetic oligonucleotide
  Antisense strand to SEQ ID NO: 1670091
aaacgucguguuauucacu

SEQ ID NO: 1670093 - RNA, 19 nt, Artificial Sequence
  Description of Artificial Sequence: Synthetic oligonucleotide
  Sense strand starting at position 2543 of SEQ ID NO: 1561414
ccaaucugcuaggcuugaa

SEQ ID NO: 1670094 - RNA, 19 nt, Artificial Sequence
  Description of Artificial Sequence: Synthetic oligonucleotide
  Antisense strand to SEQ ID NO: 1670093
uucaagccuagcagauugg

SEQ ID NO: 1670095 - RNA, 19 nt, Artificial Sequence
  Description of Artificial Sequence: Synthetic oligonucleotide
  Sense strand starting at position 2633 of SEQ ID NO: 1561414
agaauuaguauuggaaggu

SEQ ID NO: 1670096 - RNA, 19 nt, Artificial Sequence
  Description of Artificial Sequence: Synthetic oligonucleotide
  Antisense strand to SEQ ID NO: 1670095
accuuccaauacuaauucu

SEQ ID NO: 1670097 - RNA, 19 nt, Artificial Sequence
  Description of Artificial Sequence: Synthetic oligonucleotide
  Sense strand starting at position 2639 of SEQ ID NO: 1561414
aguauuggaaggugagaca

SEQ ID NO: 1670098 - RNA, 19 nt, Artificial Sequence
  Description of Artificial Sequence: Synthetic oligonucleotide
  Antisense strand to SEQ ID NO: 1670097
ugucucaccuuccaauacu

SEQ ID NO: 1670099 - RNA, 19 nt, Artificial Sequence
  Description of Artificial Sequence: Synthetic oligonucleotide
  Sense strand starting at position 2725 of SEQ ID NO: 1561414
uuacuuugaagcggagaga

SEQ ID NO: 1670100 - RNA, 19 nt, Artificial Sequence
  Description of Artificial Sequence: Synthetic oligonucleotide
  Antisense strand to SEQ ID NO: 1670099
ucucuccgcuucaaaguaa

SEQ ID NO: 1670101 - RNA, 19 nt, Artificial Sequence
  Description of Artificial Sequence: Synthetic oligonucleotide
  Sense strand starting at position 3346 of SEQ ID NO: 1561414
uguagaugugauugauuaa

SEQ ID NO: 1670102 - RNA, 19 nt, Artificial Sequence
  Description of Artificial Sequence: Synthetic oligonucleotide
  Antisense strand to SEQ ID NO: 1670101
uuaaucaaucacaucuaca

SEQ ID NO: 1670103 - RNA, 19 nt, Artificial Sequence
  Description of Artificial Sequence: Synthetic oligonucleotide
  Sense strand starting at position 3349 of SEQ ID NO: 1561414
agaugugauugauuaaauc

SEQ ID NO: 1670104 - RNA, 19 nt, Artificial Sequence
  Description of Artificial Sequence: Synthetic oligonucleotide
  Antisense strand to SEQ ID NO: 1670103
gauuuaaucaaucacaucu

SEQ ID NO: 1670105 - RNA, 19 nt, Artificial Sequence
  Description of Artificial Sequence: Synthetic oligonucleotide
  Sense strand starting at position 3541 of SEQ ID NO: 1561414
uaaacucaugugugguuga

SEQ ID NO: 1670106 - RNA, 19 nt, Artificial Sequence
  Description of Artificial Sequence: Synthetic oligonucleotide
  Antisense strand to SEQ ID NO: 1670105
ucaaccacacaugaguuua

SEQ ID NO: 1670107 - RNA, 19 nt, Artificial Sequence
  Description of Artificial Sequence: Synthetic oligonucleotide
  Sense strand starting at position 3544 of SEQ ID NO: 1561414
acucaugugugguugaaau

SEQ ID NO: 1670108 - RNA, 19 nt, Artificial Sequence
  Description of Artificial Sequence: Synthetic oligonucleotide
  Antisense strand to SEQ ID NO: 1670107
auuucaaccacacaugagu

SEQ ID NO: 1670109 - RNA, 19 nt, Artificial Sequence
  Description of Artificial Sequence: Synthetic oligonucleotide
  Sense strand starting at position 3546 of SEQ ID NO: 1561414
ucaugugugguugaaauac

SEQ ID NO: 1670110 - RNA, 19 nt, Artificial Sequence
  Description of Artificial Sequence: Synthetic oligonucleotide
  Antisense strand to SEQ ID NO: 1670109
guauuucaaccacacauga

SEQ ID NO: 1670111 - RNA, 19 nt, Artificial Sequence
  Description of Artificial Sequence: Synthetic oligonucleotide
  Sense strand starting at position 3660 of SEQ ID NO: 1561414
gcagucauuuaggaaauua

SEQ ID NO: 1670112 - RNA, 19 nt, Artificial Sequence
  Description of Artificial Sequence: Synthetic oligonucleotide
  Antisense strand to SEQ ID NO: 1670111
uaauuuccuaaaugacugc

SEQ ID NO: 1670113 - RNA, 19 nt, Artificial Sequence
  Description of Artificial Sequence: Synthetic oligonucleotide
  Sense strand starting at position 3738 of SEQ ID NO: 1561414
ugaugucauauugguagau

SEQ ID NO: 1670114 - RNA, 19 nt, Artificial Sequence
  Description of Artificial Sequence: Synthetic oligonucleotide
  Antisense strand to SEQ ID NO: 1670113
aucuaccaauaugacauca

SEQ ID NO: 1670115 - RNA, 19 nt, Artificial Sequence
  Description of Artificial Sequence: Synthetic oligonucleotide
  Sense strand starting at position 3739 of SEQ ID NO: 1561414
gaugucauauugguagauu

SEQ ID NO: 1670116 - RNA, 19 nt, Artificial Sequence
  Description of Artificial Sequence: Synthetic oligonucleotide
  Antisense strand to SEQ ID NO: 1670115
aaucuaccaauaugacauc

SEQ ID NO: 1670117 - RNA, 19 nt, Artificial Sequence
  Description of Artificial Sequence: Synthetic oligonucleotide
  Sense strand starting at position 3798 of SEQ ID NO: 1561414
agucuacaucgcuaaagga

SEQ ID NO: 1670118 - RNA, 19 nt, Artificial Sequence
  Description of Artificial Sequence: Synthetic oligonucleotide
  Antisense strand to SEQ ID NO: 1670117
uccuuuagcgauguagacu

SEQ ID NO: 1670119 - RNA, 19 nt, Artificial Sequence
  Description of Artificial Sequence: Synthetic oligonucleotide
  Sense strand starting at position 3806 of SEQ ID NO: 1561414
ucgcuaaaggauggagaua

SEQ ID NO: 1670120 - RNA, 19 nt, Artificial Sequence
  Description of Artificial Sequence: Synthetic oligonucleotide
  Antisense strand to SEQ ID NO: 1670119
uaucuccauccuuuagcga

SEQ ID NO: 1670121 - RNA, 19 nt, Artificial Sequence
  Description of Artificial Sequence: Synthetic oligonucleotide
  Sense strand starting at position 3827 of SEQ ID NO: 1561414
uucugagaaauggguucuu

SEQ ID NO: 1670122 - RNA, 19 nt, Artificial Sequence
  Description of Artificial Sequence: Synthetic oligonucleotide
  Antisense strand to SEQ ID NO: 1670121
aagaacccauuucucagaa

SEQ ID NO: 1670123 - RNA, 19 nt, Artificial Sequence
  Description of Artificial Sequence: Synthetic oligonucleotide
  Sense strand starting at position 3832 of SEQ ID NO: 1561414
agaaauggguucuuaggca

SEQ ID NO: 1670124 - RNA, 19 nt, Artificial Sequence
  Description of Artificial Sequence: Synthetic oligonucleotide
  Antisense strand to SEQ ID NO: 1670123
ugccuaagaacccauuucu

SEQ ID NO: 1670125 - RNA, 19 nt, Artificial Sequence
  Description of Artificial Sequence: Synthetic oligonucleotide
  Sense strand starting at position 3860 of SEQ ID NO: 1561414
gaaccuuguugugcaaaca

SEQ ID NO: 1670126 - RNA, 19 nt, Artificial Sequence
  Description of Artificial Sequence: Synthetic oligonucleotide
  Antisense strand to SEQ ID NO: 1670125
uguuugcacaacaagguuc

SEQ ID NO: 1670127 - RNA, 19 nt, Artificial Sequence
  Description of Artificial Sequence: Synthetic oligonucleotide
  Sense strand starting at position 3905 of SEQ ID NO: 1561414
gauuguguagccuacuaca

SEQ ID NO: 1670128 - RNA, 19 nt, Artificial Sequence
  Description of Artificial Sequence: Synthetic oligonucleotide
  Antisense strand to SEQ ID NO: 1670127
uguaguaggcuacacaauc

SEQ ID NO: 1670129 - RNA, 19 nt, Artificial Sequence
  Description of Artificial Sequence: Synthetic oligonucleotide
  Sense strand starting at position 22 of SEQ ID NO: 1561415
ggcggaucaccugaaguuu

SEQ ID NO: 1670130 - RNA, 19 nt, Artificial Sequence
  Description of Artificial Sequence: Synthetic oligonucleotide
  Antisense strand to SEQ ID NO: 1670129
aaacuucaggugauccgcc

SEQ ID NO: 1670131 - RNA, 19 nt, Artificial Sequence
  Description of Artificial Sequence: Synthetic oligonucleotide
  Sense strand starting at position 315 of SEQ ID NO: 1561415
ucuucuuuccuguauguca

SEQ ID NO: 1670132 - RNA, 19 nt, Artificial Sequence
  Description of Artificial Sequence: Synthetic oligonucleotide
  Antisense strand to SEQ ID NO: 1670131
ugacauacaggaaagaaga

SEQ ID NO: 1670133 - RNA, 19 nt, Artificial Sequence
  Description of Artificial Sequence: Synthetic oligonucleotide
  Sense strand starting at position 493 of SEQ ID NO: 1561415
caauuaucaggcugagaga

SEQ ID NO: 1670134 - RNA, 19 nt, Artificial Sequence
  Description of Artificial Sequence: Synthetic oligonucleotide
  Antisense strand to SEQ ID NO: 1670133
ucucucagccugauaauug

SEQ ID NO: 1670135 - RNA, 19 nt, Artificial Sequence
  Description of Artificial Sequence: Synthetic oligonucleotide
  Sense strand starting at position 509 of SEQ ID NO: 1561415
agaccuugggcccaagagu

SEQ ID NO: 1670136 - RNA, 19 nt, Artificial Sequence
  Description of Artificial Sequence: Synthetic oligonucleotide
  Antisense strand to SEQ ID NO: 1670135
acucuugggcccaaggucu

SEQ ID NO: 1670137 - RNA, 19 nt, Artificial Sequence
  Description of Artificial Sequence: Synthetic oligonucleotide
  Sense strand starting at position 600 of SEQ ID NO: 1561415
acagaucuaugguccuuua

SEQ ID NO: 1670138 - RNA, 19 nt, Artificial Sequence
  Description of Artificial Sequence: Synthetic oligonucleotide
  Antisense strand to SEQ ID NO: 1670137
uaaaggaccauagaucugu

SEQ ID NO: 1670139 - RNA, 19 nt, Artificial Sequence
  Description of Artificial Sequence: Synthetic oligonucleotide
  Sense strand starting at position 691 of SEQ ID NO: 1561415
gggucuuaauguucucaua

SEQ ID NO: 1670140 - RNA, 19 nt, Artificial Sequence
  Description of Artificial Sequence: Synthetic oligonucleotide
  Antisense strand to SEQ ID NO: 1670139
uaugagaacauuaagaccc

SEQ ID NO: 1670141 - RNA, 19 nt, Artificial Sequence
  Description of Artificial Sequence: Synthetic oligonucleotide
  Sense strand starting at position 693 of SEQ ID NO: 1561415
gucuuaauguucucauaag

SEQ ID NO: 1670142 - RNA, 19 nt, Artificial Sequence
  Description of Artificial Sequence: Synthetic oligonucleotide
  Antisense strand to SEQ ID NO: 1670141
cuuaugagaacauuaagac

SEQ ID NO: 1670143 - RNA, 19 nt, Artificial Sequence
  Description of Artificial Sequence: Synthetic oligonucleotide
  Sense strand starting at position 699 of SEQ ID NO: 1561415
auguucucauaagugugaa

SEQ ID NO: 1670144 - RNA, 19 nt, Artificial Sequence
  Description of Artificial Sequence: Synthetic oligonucleotide
  Antisense strand to SEQ ID NO: 1670143
uucacacuuaugagaacau

SEQ ID NO: 1670145 - RNA, 19 nt, Artificial Sequence
  Description of Artificial Sequence: Synthetic oligonucleotide
  Sense strand starting at position 702 of SEQ ID NO: 1561415
uucucauaagugugaauau

SEQ ID NO: 1670146 - RNA, 19 nt, Artificial Sequence
  Description of Artificial Sequence: Synthetic oligonucleotide
  Antisense strand to SEQ ID NO: 1670145
auauucacacuuaugagaa

SEQ ID NO: 1670147 - RNA, 19 nt, Artificial Sequence
  Description of Artificial Sequence: Synthetic oligonucleotide
  Sense strand starting at position 787 of SEQ ID NO: 1561415
ggugcugccuaauuauaaa

SEQ ID NO: 1670148 - RNA, 19 nt, Artificial Sequence
  Description of Artificial Sequence: Synthetic oligonucleotide
  Antisense strand to SEQ ID NO: 1670147
uuuauaauuaggcagcacc

SEQ ID NO: 1670149 - RNA, 19 nt, Artificial Sequence
  Description of Artificial Sequence: Synthetic oligonucleotide
  Sense strand starting at position 1005 of SEQ ID NO: 1561415
uccaucguccagcaagauu

SEQ ID NO: 1670150 - RNA, 19 nt, Artificial Sequence
  Description of Artificial Sequence: Synthetic oligonucleotide
  Antisense strand to SEQ ID NO: 1670149
aaucuugcuggacgaugga

SEQ ID NO: 1670151 - RNA, 19 nt, Artificial Sequence
  Description of Artificial Sequence: Synthetic oligonucleotide
  Sense strand starting at position 1585 of SEQ ID NO: 1561415
cgaggaacuccuggcugua

SEQ ID NO: 1670152 - RNA, 19 nt, Artificial Sequence
  Description of Artificial Sequence: Synthetic oligonucleotide
  Antisense strand to SEQ ID NO: 1670151
uacagccaggaguuccucg

SEQ ID NO: 1670153 - RNA, 19 nt, Artificial Sequence
  Description of Artificial Sequence: Synthetic oligonucleotide
  Sense strand starting at position 1588 of SEQ ID NO: 1561415
ggaacuccuggcuguaagu

SEQ ID NO: 1670154 - RNA, 19 nt, Artificial Sequence
  Description of Artificial Sequence: Synthetic oligonucleotide
  Antisense strand to SEQ ID NO: 1670153
acuuacagccaggaguucc

SEQ ID NO: 1670155 - RNA, 19 nt, Artificial Sequence
  Description of Artificial Sequence: Synthetic oligonucleotide
  Sense strand starting at position 1648 of SEQ ID NO: 1561415
gcgugaucuaccgugccca

SEQ ID NO: 1670156 - RNA, 19 nt, Artificial Sequence
  Description of Artificial Sequence: Synthetic oligonucleotide
  Antisense strand to SEQ ID NO: 1670155
ugggcacgguagaucacgc

SEQ ID NO: 1670157 - RNA, 19 nt, Artificial Sequence
  Description of Artificial Sequence: Synthetic oligonucleotide
  Sense strand starting at position 2014 of SEQ ID NO: 1561415
gggcgacuucuuucgccuu

SEQ ID NO: 1670158 - RNA, 19 nt, Artificial Sequence
  Description of Artificial Sequence: Synthetic oligonucleotide
  Antisense strand to SEQ ID NO: 1670157
aaggcgaaagaagucgccc

SEQ ID NO: 1670159 - RNA, 19 nt, Artificial Sequence
  Description of Artificial Sequence: Synthetic oligonucleotide
  Sense strand starting at position 2152 of SEQ ID NO: 1561415
gcuucuugccuuuacuaga

SEQ ID NO: 1670160 - RNA, 19 nt, Artificial Sequence
  Description of Artificial Sequence: Synthetic oligonucleotide
  Antisense strand to SEQ ID NO: 1670159
ucuaguaaaggcaagaagc

SEQ ID NO: 1670161 - RNA, 19 nt, Artificial Sequence
  Description of Artificial Sequence: Synthetic oligonucleotide
  Sense strand starting at position 2157 of SEQ ID NO: 1561415
uugccuuuacuagaaguca

SEQ ID NO: 1670162 - RNA, 19 nt, Artificial Sequence
  Description of Artificial Sequence: Synthetic oligonucleotide
  Antisense strand to SEQ ID NO: 1670161
ugacuucuaguaaaggcaa

SEQ ID NO: 1670163 - RNA, 19 nt, Artificial Sequence
  Description of Artificial Sequence: Synthetic oligonucleotide
  Sense strand starting at position 2165 of SEQ ID NO: 1561415
acuagaagucagggagugu

SEQ ID NO: 1670164 - RNA, 19 nt, Artificial Sequence
  Description of Artificial Sequence: Synthetic oligonucleotide
  Antisense strand to SEQ ID NO: 1670163
acacucccugacuucuagu

SEQ ID NO: 1670165 - RNA, 19 nt, Artificial Sequence
  Description of Artificial Sequence: Synthetic oligonucleotide
  Sense strand starting at position 2166 of SEQ ID NO: 1561415
cuagaagucagggaguguu

SEQ ID NO: 1670166 - RNA, 19 nt, Artificial Sequence
  Description of Artificial Sequence: Synthetic oligonucleotide
  Antisense strand to SEQ ID NO: 1670165
aacacucccugacuucuag

SEQ ID NO: 1670167 - RNA, 19 nt, Artificial Sequence
  Description of Artificial Sequence: Synthetic oligonucleotide
  Sense strand starting at position 2229 of SEQ ID NO: 1561415
ugugacggguuucugagaa

SEQ ID NO: 1670168 - RNA, 19 nt, Artificial Sequence
  Description of Artificial Sequence: Synthetic oligonucleotide
  Antisense strand to SEQ ID NO: 1670167
uucucagaaacccgucaca

SEQ ID NO: 1670169 - RNA, 19 nt, Artificial Sequence
  Description of Artificial Sequence: Synthetic oligonucleotide
  Sense strand starting at position 2268 of SEQ ID NO: 1561415
ggaguugaggcagaaguuu

SEQ ID NO: 1670170 - RNA, 19 nt, Artificial Sequence
  Description of Artificial Sequence: Synthetic oligonucleotide
  Antisense strand to SEQ ID NO: 1670169
aaacuucugccucaacucc

SEQ ID NO: 1670171 - RNA, 19 nt, Artificial Sequence
  Description of Artificial Sequence: Synthetic oligonucleotide
  Sense strand starting at position 2274 of SEQ ID NO: 1561415
gaggcagaaguuuagguaa

SEQ ID NO: 1670172 - RNA, 19 nt, Artificial Sequence
  Description of Artificial Sequence: Synthetic oligonucleotide
  Antisense strand to SEQ ID NO: 1670171
uuaccuaaacuucugccuc

SEQ ID NO: 1670173 - RNA, 19 nt, Artificial Sequence
  Description of Artificial Sequence: Synthetic oligonucleotide
  Sense strand starting at position 2277 of SEQ ID NO: 1561415
gcagaaguuuagguaaugu

SEQ ID NO: 1670174 - RNA, 19 nt, Artificial Sequence
  Description of Artificial Sequence: Synthetic oligonucleotide
  Antisense strand to SEQ ID NO: 1670173
acauuaccuaaacuucugc

SEQ ID NO: 1670175 - RNA, 19 nt, Artificial Sequence
  Description of Artificial Sequence: Synthetic oligonucleotide
  Sense strand starting at position 2286 of SEQ ID NO: 1561415
uagguaaugugaccucuga

SEQ ID NO: 1670176 - RNA, 19 nt, Artificial Sequence
  Description of Artificial Sequence: Synthetic oligonucleotide
  Antisense strand to SEQ ID NO: 1670175
ucagaggucacauuaccua

SEQ ID NO: 1670177 - RNA, 19 nt, Artificial Sequence
  Description of Artificial Sequence: Synthetic oligonucleotide
  Sense strand starting at position 2296 of SEQ ID NO: 1561415
gaccucugauugguggaga

SEQ ID NO: 1670178 - RNA, 19 nt, Artificial Sequence
  Description of Artificial Sequence: Synthetic oligonucleotide
  Antisense strand to SEQ ID NO: 1670177
ucuccaccaaucagagguc

SEQ ID NO: 1670179 - RNA, 19 nt, Artificial Sequence
  Description of Artificial Sequence: Synthetic oligonucleotide
  Sense strand starting at position 2299 of SEQ ID NO: 1561415
cucugauugguggagaggu

SEQ ID NO: 1670180 - RNA, 19 nt, Artificial Sequence
  Description of Artificial Sequence: Synthetic oligonucleotide
  Antisense strand to SEQ ID NO: 1670179
accucuccaccaaucagag

SEQ ID NO: 1670181 - RNA, 19 nt, Artificial Sequence
  Description of Artificial Sequence: Synthetic oligonucleotide
  Sense strand starting at position 2300 of SEQ ID NO: 1561415
ucugauugguggagaggua

SEQ ID NO: 1670182 - RNA, 19 nt, Artificial Sequence
  Description of Artificial Sequence: Synthetic oligonucleotide
  Antisense strand to SEQ ID NO: 1670181
uaccucuccaccaaucaga

SEQ ID NO: 1670183 - RNA, 19 nt, Artificial Sequence
  Description of Artificial Sequence: Synthetic oligonucleotide
  Sense strand starting at position 2329 of SEQ ID NO: 1561415
cauuccgauuggucugaca

SEQ ID NO: 1670184 - RNA, 19 nt, Artificial Sequence
  Description of Artificial Sequence: Synthetic oligonucleotide
  Antisense strand to SEQ ID NO: 1670183
ugucagaccaaucggaaug

SEQ ID NO: 1670185 - RNA, 19 nt, Artificial Sequence
  Description of Artificial Sequence: Synthetic oligonucleotide
  Sense strand starting at position 2331 of SEQ ID NO: 1561415
uuccgauuggucugacacu

SEQ ID NO: 1670186 - RNA, 19 nt, Artificial Sequence
  Description of Artificial Sequence: Synthetic oligonucleotide
  Antisense strand to SEQ ID NO: 1670185
agugucagaccaaucggaa

SEQ ID NO: 1670187 - RNA, 19 nt, Artificial Sequence
  Description of Artificial Sequence: Synthetic oligonucleotide
  Sense strand starting at position 2948 of SEQ ID NO: 1561415
aaacuuggcgucuaaguca

SEQ ID NO: 1670188 - RNA, 19 nt, Artificial Sequence
  Description of Artificial Sequence: Synthetic oligonucleotide
  Antisense strand to SEQ ID NO: 1670187
ugacuuagacgccaaguuu

SEQ ID NO: 1670189 - RNA, 19 nt, Artificial Sequence
  Description of Artificial Sequence: Synthetic oligonucleotide
  Sense strand starting at position 3122 of SEQ ID NO: 1561415
gcagcuguucccuaaacau

SEQ ID NO: 1670190 - RNA, 19 nt, Artificial Sequence
  Description of Artificial Sequence: Synthetic oligonucleotide
  Antisense strand to SEQ ID NO: 1670189
auguuuagggaacagcugc

SEQ ID NO: 1670191 - RNA, 19 nt, Artificial Sequence
  Description of Artificial Sequence: Synthetic oligonucleotide
  Sense strand starting at position 3255 of SEQ ID NO: 1561415
gagcguuuacuauauggaa

SEQ ID NO: 1670192 - RNA, 19 nt, Artificial Sequence
  Description of Artificial Sequence: Synthetic oligonucleotide
  Antisense strand to SEQ ID NO: 1670191
uuccauauaguaaacgcuc

SEQ ID NO: 1670193 - RNA, 19 nt, Artificial Sequence
  Description of Artificial Sequence: Synthetic oligonucleotide
  Sense strand starting at position 3278 of SEQ ID NO: 1561415
ccgugcaaccgauauuaca

SEQ ID NO: 1670194 - RNA, 19 nt, Artificial Sequence
  Description of Artificial Sequence: Synthetic oligonucleotide
  Antisense strand to SEQ ID NO: 1670193
uguaauaucgguugcacgg

SEQ ID NO: 1670195 - RNA, 19 nt, Artificial Sequence
  Description of Artificial Sequence: Synthetic oligonucleotide
  Sense strand starting at position 3298 of SEQ ID NO: 1561415
uacuauaaccuggguuuga

SEQ ID NO: 1670196 - RNA, 19 nt, Artificial Sequence
  Description of Artificial Sequence: Synthetic oligonucleotide
  Antisense strand to SEQ ID NO: 1670195
ucaaacccagguuauagua

SEQ ID NO: 1670197 - RNA, 19 nt, Artificial Sequence
  Description of Artificial Sequence: Synthetic oligonucleotide
  Sense strand starting at position 3299 of SEQ ID NO: 1561415
acuauaaccuggguuugaa

SEQ ID NO: 1670198 - RNA, 19 nt, Artificial Sequence
  Description of Artificial Sequence: Synthetic oligonucleotide
  Antisense strand to SEQ ID NO: 1670197
uucaaacccagguuauagu

SEQ ID NO: 1670199 - RNA, 19 nt, Artificial Sequence
  Description of Artificial Sequence: Synthetic oligonucleotide
  Sense strand starting at position 3353 of SEQ ID NO: 1561415
uuauuauagcagugucuaa

SEQ ID NO: 1670200 - RNA, 19 nt, Artificial Sequence
  Description of Artificial Sequence: Synthetic oligonucleotide
  Antisense strand to SEQ ID NO: 1670199
uuagacacugcuauaauaa

SEQ ID NO: 1670201 - RNA, 19 nt, Artificial Sequence
  Description of Artificial Sequence: Synthetic oligonucleotide
  Sense strand starting at position 3460 of SEQ ID NO: 1561415
ucugcagucccuuaucuau

SEQ ID NO: 1670202 - RNA, 19 nt, Artificial Sequence
  Description of Artificial Sequence: Synthetic oligonucleotide
  Antisense strand to SEQ ID NO: 1670201
auagauaagggacugcaga

SEQ ID NO: 1670203 - RNA, 19 nt, Artificial Sequence
  Description of Artificial Sequence: Synthetic oligonucleotide
  Sense strand starting at position 3591 of SEQ ID NO: 1561415
ucugaacugaugugugacu

SEQ ID NO: 1670204 - RNA, 19 nt, Artificial Sequence
  Description of Artificial Sequence: Synthetic oligonucleotide
  Antisense strand to SEQ ID NO: 1670203
agucacacaucaguucaga

SEQ ID NO: 1670205 - RNA, 19 nt, Artificial Sequence
  Description of Artificial Sequence: Synthetic oligonucleotide
  Sense strand starting at position 3593 of SEQ ID NO: 1561415
ugaacugaugugugacuau

SEQ ID NO: 1670206 - RNA, 19 nt, Artificial Sequence
  Description of Artificial Sequence: Synthetic oligonucleotide
  Antisense strand to SEQ ID NO: 1670205
auagucacacaucaguuca

SEQ ID NO: 1670207 - RNA, 19 nt, Artificial Sequence
  Description of Artificial Sequence: Synthetic oligonucleotide
  Sense strand starting at position 3678 of SEQ ID NO: 1561415
gguguuguaauauguaaua

SEQ ID NO: 1670208 - RNA, 19 nt, Artificial Sequence
  Description of Artificial Sequence: Synthetic oligonucleotide
  Antisense strand to SEQ ID NO: 1670207
uauuacauauuacaacacc

SEQ ID NO: 1670209 - RNA, 19 nt, Artificial Sequence
  Description of Artificial Sequence: Synthetic oligonucleotide
  Sense strand starting at position 43 of SEQ ID NO: 1561416
acugaccugugccugaaua

SEQ ID NO: 1670210 - RNA, 19 nt, Artificial Sequence
  Description of Artificial Sequence: Synthetic oligonucleotide
  Antisense strand to SEQ ID NO: 1670209
uauucaggcacaggucagu

SEQ ID NO: 1670211 - RNA, 19 nt, Artificial Sequence
  Description of Artificial Sequence: Synthetic oligonucleotide
  Sense strand starting at position 76 of SEQ ID NO: 1561416
aagcuaaagucugaugcca

SEQ ID NO: 1670212 - RNA, 19 nt, Artificial Sequence
  Description of Artificial Sequence: Synthetic oligonucleotide
  Antisense strand to SEQ ID NO: 1670211
uggcaucagacuuuagcuu

SEQ ID NO: 1670213 - RNA, 19 nt, Artificial Sequence
  Description of Artificial Sequence: Synthetic oligonucleotide
  Sense strand starting at position 78 of SEQ ID NO: 1561416
gcuaaagucugaugccaag

SEQ ID NO: 1670214 - RNA, 19 nt, Artificial Sequence
  Description of Artificial Sequence: Synthetic oligonucleotide
  Antisense strand to SEQ ID NO: 1670213
cuuggcaucagacuuuagc

SEQ ID NO: 1670215 - RNA, 19 nt, Artificial Sequence
  Description of Artificial Sequence: Synthetic oligonucleotide
  Sense strand starting at position 84 of SEQ ID NO: 1561416
gucugaugccaagaauuau

SEQ ID NO: 1670216 - RNA, 19 nt, Artificial Sequence
  Description of Artificial Sequence: Synthetic oligonucleotide
  Antisense strand to SEQ ID NO: 1670215
auaauucuuggcaucagac

SEQ ID NO: 1670217 - RNA, 19 nt, Artificial Sequence
  Description of Artificial Sequence: Synthetic oligonucleotide
  Sense strand starting at position 114 of SEQ ID NO: 1561416
gccuuacagacaggaguuu

SEQ ID NO: 1670218 - RNA, 19 nt, Artificial Sequence
  Description of Artificial Sequence: Synthetic oligonucleotide
  Antisense strand to SEQ ID NO: 1670217
aaacuccugucuguaaggc

SEQ ID NO: 1670219 - RNA, 19 nt, Artificial Sequence
  Description of Artificial Sequence: Synthetic oligonucleotide
  Sense strand starting at position 285 of SEQ ID NO: 1561416
ucccucauucuguacguau

SEQ ID NO: 1670220 - RNA, 19 nt, Artificial Sequence
  Description of Artificial Sequence: Synthetic oligonucleotide
  Antisense strand to SEQ ID NO: 1670219
auacguacagaaugaggga

SEQ ID NO: 1670221 - RNA, 19 nt, Artificial Sequence
  Description of Artificial Sequence: Synthetic oligonucleotide
  Sense strand starting at position 378 of SEQ ID NO: 1561416
ccucucuucuccugauguu

SEQ ID NO: 1670222 - RNA, 19 nt, Artificial Sequence
  Description of Artificial Sequence: Synthetic oligonucleotide
  Antisense strand to SEQ ID NO: 1670221
aacaucaggagaagagagg

SEQ ID NO: 1670223 - RNA, 19 nt, Artificial Sequence
  Description of Artificial Sequence: Synthetic oligonucleotide
  Sense strand starting at position 1169 of SEQ ID NO: 1561416
auucgcugucucugcaaau

SEQ ID NO: 1670224 - RNA, 19 nt, Artificial Sequence
  Description of Artificial Sequence: Synthetic oligonucleotide
  Antisense strand to SEQ ID NO: 1670223
auuugcagagacagcgaau

SEQ ID NO: 1670225 - RNA, 19 nt, Artificial Sequence
  Description of Artificial Sequence: Synthetic oligonucleotide
  Sense strand starting at position 1356 of SEQ ID NO: 1561416
ggguguuauuuggcccgca

SEQ ID NO: 1670226 - RNA, 19 nt, Artificial Sequence
  Description of Artificial Sequence: Synthetic oligonucleotide
  Antisense strand to SEQ ID NO: 1670225
ugcgggccaaauaacaccc

SEQ ID NO: 1670227 - RNA, 19 nt, Artificial Sequence
  Description of Artificial Sequence: Synthetic oligonucleotide
  Sense strand starting at position 1357 of SEQ ID NO: 1561416
gguguuauuuggcccgcaa

SEQ ID NO: 1670228 - RNA, 19 nt, Artificial Sequence
  Description of Artificial Sequence: Synthetic oligonucleotide
  Antisense strand to SEQ ID NO: 1670227
uugcgggccaaauaacacc

SEQ ID NO: 1670229 - RNA, 19 nt, Artificial Sequence
  Description of Artificial Sequence: Synthetic oligonucleotide
  Sense strand starting at position 1359 of SEQ ID NO: 1561416
uguuauuuggcccgcaaga

SEQ ID NO: 1670230 - RNA, 19 nt, Artificial Sequence
  Description of Artificial Sequence: Synthetic oligonucleotide
  Antisense strand to SEQ ID NO: 1670229
ucuugcgggccaaauaaca

SEQ ID NO: 1670231 - RNA, 19 nt, Artificial Sequence
  Description of Artificial Sequence: Synthetic oligonucleotide
  Sense strand starting at position 1491 of SEQ ID NO: 1561416
aagguagggucuggaucaa

SEQ ID NO: 1670232 - RNA, 19 nt, Artificial Sequence
  Description of Artificial Sequence: Synthetic oligonucleotide
  Antisense strand to SEQ ID NO: 1670231
uugauccagacccuaccuu

SEQ ID NO: 1670233 - RNA, 19 nt, Artificial Sequence
  Description of Artificial Sequence: Synthetic oligonucleotide
  Sense strand starting at position 1497 of SEQ ID NO: 1561416
gggucuggaucaagagaug

SEQ ID NO: 1670234 - RNA, 19 nt, Artificial Sequence
  Description of Artificial Sequence: Synthetic oligonucleotide
  Antisense strand to SEQ ID NO: 1670233
caucucuugauccagaccc

SEQ ID NO: 1670235 - RNA, 19 nt, Artificial Sequence
  Description of Artificial Sequence: Synthetic oligonucleotide
  Sense strand starting at position 1514 of SEQ ID NO: 1561416
uggguggcgucugcagaau

SEQ ID NO: 1670236 - RNA, 19 nt, Artificial Sequence
  Description of Artificial Sequence: Synthetic oligonucleotide
  Antisense strand to SEQ ID NO: 1670235
auucugcagacgccaccca

SEQ ID NO: 1670237 - RNA, 19 nt, Artificial Sequence
  Description of Artificial Sequence: Synthetic oligonucleotide
  Sense strand starting at position 1553 of SEQ ID NO: 1561416
gcggcuucuccuggauuga

SEQ ID NO: 1670238 - RNA, 19 nt, Artificial Sequence
  Description of Artificial Sequence: Synthetic oligonucleotide
  Antisense strand to SEQ ID NO: 1670237
ucaauccaggagaagccgc

SEQ ID NO: 1670239 - RNA, 19 nt, Artificial Sequence
  Description of Artificial Sequence: Synthetic oligonucleotide
  Sense strand starting at position 1557 of SEQ ID NO: 1561416
cuucuccuggauugagauu

SEQ ID NO: 1670240 - RNA, 19 nt, Artificial Sequence
  Description of Artificial Sequence: Synthetic oligonucleotide
  Antisense strand to SEQ ID NO: 1670239
aaucucaauccaggagaag

SEQ ID NO: 1670241 - RNA, 19 nt, Artificial Sequence
  Description of Artificial Sequence: Synthetic oligonucleotide
  Sense strand starting at position 1908 of SEQ ID NO: 1561416
uugggaagcgcagauuaau

SEQ ID NO: 1670242 - RNA, 19 nt, Artificial Sequence
  Description of Artificial Sequence: Synthetic oligonucleotide
  Antisense strand to SEQ ID NO: 1670241
auuaaucugcgcuucccaa

SEQ ID NO: 1670243 - RNA, 19 nt, Artificial Sequence
  Description of Artificial Sequence: Synthetic oligonucleotide
  Sense strand starting at position 2229 of SEQ ID NO: 1561416
guacucuugccgggacuga

SEQ ID NO: 1670244 - RNA, 19 nt, Artificial Sequence
  Description of Artificial Sequence: Synthetic oligonucleotide
  Antisense strand to SEQ ID NO: 1670243
ucagucccggcaagaguac

SEQ ID NO: 1670245 - RNA, 19 nt, Artificial Sequence
  Description of Artificial Sequence: Synthetic oligonucleotide
  Sense strand starting at position 2247 of SEQ ID NO: 1561416
agcaaagucggcuaaugau

SEQ ID NO: 1670246 - RNA, 19 nt, Artificial Sequence
  Description of Artificial Sequence: Synthetic oligonucleotide
  Antisense strand to SEQ ID NO: 1670245
aucauuagccgacuuugcu

SEQ ID NO: 1670247 - RNA, 19 nt, Artificial Sequence
  Description of Artificial Sequence: Synthetic oligonucleotide
  Sense strand starting at position 2382 of SEQ ID NO: 1561416
ucgaguuuacacugaguua

SEQ ID NO: 1670248 - RNA, 19 nt, Artificial Sequence
  Description of Artificial Sequence: Synthetic oligonucleotide
  Antisense strand to SEQ ID NO: 1670247
uaacucaguguaaacucga

SEQ ID NO: 1670249 - RNA, 19 nt, Artificial Sequence
  Description of Artificial Sequence: Synthetic oligonucleotide
  Sense strand starting at position 2383 of SEQ ID NO: 1561416
cgaguuuacacugaguuau

SEQ ID NO: 1670250 - RNA, 19 nt, Artificial Sequence
  Description of Artificial Sequence: Synthetic oligonucleotide
  Antisense strand to SEQ ID NO: 1670249
auaacucaguguaaacucg

SEQ ID NO: 1670251 - RNA, 19 nt, Artificial Sequence
  Description of Artificial Sequence: Synthetic oligonucleotide
  Sense strand starting at position 2385 of SEQ ID NO: 1561416
aguuuacacugaguuauga

SEQ ID NO: 1670252 - RNA, 19 nt, Artificial Sequence
  Description of Artificial Sequence: Synthetic oligonucleotide
  Antisense strand to SEQ ID NO: 1670251
ucauaacucaguguaaacu

SEQ ID NO: 1670253 - RNA, 19 nt, Artificial Sequence
  Description of Artificial Sequence: Synthetic oligonucleotide
  Sense strand starting at position 2393 of SEQ ID NO: 1561416
cugaguuaugacggccacu

SEQ ID NO: 1670254 - RNA, 19 nt, Artificial Sequence
  Description of Artificial Sequence: Synthetic oligonucleotide
  Antisense strand to SEQ ID NO: 1670253
aguggccgucauaacucag

SEQ ID NO: 1670255 - RNA, 19 nt, Artificial Sequence
  Description of Artificial Sequence: Synthetic oligonucleotide
  Sense strand starting at position 2479 of SEQ ID NO: 1561416
uuaauuaagcccugggauu

SEQ ID NO: 1670256 - RNA, 19 nt, Artificial Sequence
  Description of Artificial Sequence: Synthetic oligonucleotide
  Antisense strand to SEQ ID NO: 1670255
aaucccagggcuuaauuaa

SEQ ID NO: 1670257 - RNA, 19 nt, Artificial Sequence
  Description of Artificial Sequence: Synthetic oligonucleotide
  Sense strand starting at position 2480 of SEQ ID NO: 1561416
uaauuaagcccugggauug

SEQ ID NO: 1670258 - RNA, 19 nt, Artificial Sequence
  Description of Artificial Sequence: Synthetic oligonucleotide
  Antisense strand to SEQ ID NO: 1670257
caaucccagggcuuaauua

SEQ ID NO: 1670259 - RNA, 19 nt, Artificial Sequence
  Description of Artificial Sequence: Synthetic oligonucleotide
  Sense strand starting at position 2481 of SEQ ID NO: 1561416
aauuaagcccugggauugu

SEQ ID NO: 1670260 - RNA, 19 nt, Artificial Sequence
  Description of Artificial Sequence: Synthetic oligonucleotide
  Antisense strand to SEQ ID NO: 1670259
acaaucccagggcuuaauu

SEQ ID NO: 1670261 - RNA, 19 nt, Artificial Sequence
  Description of Artificial Sequence: Synthetic oligonucleotide
  Sense strand starting at position 2490 of SEQ ID NO: 1561416
cugggauugucugugaaag

SEQ ID NO: 1670262 - RNA, 19 nt, Artificial Sequence
  Description of Artificial Sequence: Synthetic oligonucleotide
  Antisense strand to SEQ ID NO: 1670261
cuuucacagacaaucccag

SEQ ID NO: 1670263 - RNA, 19 nt, Artificial Sequence
  Description of Artificial Sequence: Synthetic oligonucleotide
  Sense strand starting at position 2491 of SEQ ID NO: 1561416
ugggauugucugugaaagc

SEQ ID NO: 1670264 - RNA, 19 nt, Artificial Sequence
  Description of Artificial Sequence: Synthetic oligonucleotide
  Antisense strand to SEQ ID NO: 1670263
gcuuucacagacaauccca

SEQ ID NO: 1670265 - RNA, 19 nt, Artificial Sequence
  Description of Artificial Sequence: Synthetic oligonucleotide
  Sense strand starting at position 2510 of SEQ ID NO: 1561416
gacgcaaguuaauacauga

SEQ ID NO: 1670266 - RNA, 19 nt, Artificial Sequence
  Description of Artificial Sequence: Synthetic oligonucleotide
  Antisense strand to SEQ ID NO: 1670265
ucauguauuaacuugcguc

SEQ ID NO: 1670267 - RNA, 19 nt, Artificial Sequence
  Description of Artificial Sequence: Synthetic oligonucleotide
  Sense strand starting at position 2613 of SEQ ID NO: 1561416
ccuguucuuucgggaggga

SEQ ID NO: 1670268 - RNA, 19 nt, Artificial Sequence
  Description of Artificial Sequence: Synthetic oligonucleotide
  Antisense strand to SEQ ID NO: 1670267
ucccucccgaaagaacagg

SEQ ID NO: 1670269 - RNA, 19 nt, Artificial Sequence
  Description of Artificial Sequence: Synthetic oligonucleotide
  Sense strand starting at position 2646 of SEQ ID NO: 1561416
ugcucagcuccagagaguu

SEQ ID NO: 1670270 - RNA, 19 nt, Artificial Sequence
  Description of Artificial Sequence: Synthetic oligonucleotide
  Antisense strand to SEQ ID NO: 1670269
aacucucuggagcugagca

SEQ ID NO: 1670271 - RNA, 19 nt, Artificial Sequence
  Description of Artificial Sequence: Synthetic oligonucleotide
  Sense strand starting at position 2693 of SEQ ID NO: 1561416
ggcuaaggccagugagaau

SEQ ID NO: 1670272 - RNA, 19 nt, Artificial Sequence
  Description of Artificial Sequence: Synthetic oligonucleotide
  Antisense strand to SEQ ID NO: 1670271
auucucacuggccuuagcc

SEQ ID NO: 1670273 - RNA, 19 nt, Artificial Sequence
  Description of Artificial Sequence: Synthetic oligonucleotide
  Sense strand starting at position 2696 of SEQ ID NO: 1561416
uaaggccagugagaauuua

SEQ ID NO: 1670274 - RNA, 19 nt, Artificial Sequence
  Description of Artificial Sequence: Synthetic oligonucleotide
  Antisense strand to SEQ ID NO: 1670273
uaaauucucacuggccuua

SEQ ID NO: 1670275 - RNA, 19 nt, Artificial Sequence
  Description of Artificial Sequence: Synthetic oligonucleotide
  Sense strand starting at position 3190 of SEQ ID NO: 1561416
auugauacacaggguuaau

SEQ ID NO: 1670276 - RNA, 19 nt, Artificial Sequence
  Description of Artificial Sequence: Synthetic oligonucleotide
  Antisense strand to SEQ ID NO: 1670275
auuaacccuguguaucaau

SEQ ID NO: 1670277 - RNA, 19 nt, Artificial Sequence
  Description of Artificial Sequence: Synthetic oligonucleotide
  Sense strand starting at position 3230 of SEQ ID NO: 1561416
cguagauacugacaagauu

SEQ ID NO: 1670278 - RNA, 19 nt, Artificial Sequence
  Description of Artificial Sequence: Synthetic oligonucleotide
  Antisense strand to SEQ ID NO: 1670277
aaucuugucaguaucuacg

SEQ ID NO: 1670279 - RNA, 19 nt, Artificial Sequence
  Description of Artificial Sequence: Synthetic oligonucleotide
  Sense strand starting at position 3563 of SEQ ID NO: 1561416
cugccauugucuugugcau

SEQ ID NO: 1670280 - RNA, 19 nt, Artificial Sequence
  Description of Artificial Sequence: Synthetic oligonucleotide
  Antisense strand to SEQ ID NO: 1670279
augcacaagacaauggcag

SEQ ID NO: 1670281 - RNA, 19 nt, Artificial Sequence
  Description of Artificial Sequence: Synthetic oligonucleotide
  Sense strand starting at position 3564 of SEQ ID NO: 1561416
ugccauugucuugugcaua

SEQ ID NO: 1670282 - RNA, 19 nt, Artificial Sequence
  Description of Artificial Sequence: Synthetic oligonucleotide
  Antisense strand to SEQ ID NO: 1670281
uaugcacaagacaauggca

SEQ ID NO: 1670283 - RNA, 19 nt, Artificial Sequence
  Description of Artificial Sequence: Synthetic oligonucleotide
  Sense strand starting at position 3565 of SEQ ID NO: 1561416
gccauugucuugugcauac

SEQ ID NO: 1670284 - RNA, 19 nt, Artificial Sequence
  Description of Artificial Sequence: Synthetic oligonucleotide
  Antisense strand to SEQ ID NO: 1670283
guaugcacaagacaauggc

SEQ ID NO: 1670285 - RNA, 19 nt, Artificial Sequence
  Description of Artificial Sequence: Synthetic oligonucleotide
  Sense strand starting at position 3575 of SEQ ID NO: 1561416
ugugcauacucuugucaaa

SEQ ID NO: 1670286 - RNA, 19 nt, Artificial Sequence
  Description of Artificial Sequence: Synthetic oligonucleotide
  Antisense strand to SEQ ID NO: 1670285
uuugacaagaguaugcaca

SEQ ID NO: 1670287 - RNA, 19 nt, Artificial Sequence
  Description of Artificial Sequence: Synthetic oligonucleotide
  Sense strand starting at position 401 of SEQ ID NO: 1561417
uuagccuuagcuuggaauu

SEQ ID NO: 1670288 - RNA, 19 nt, Artificial Sequence
  Description of Artificial Sequence: Synthetic oligonucleotide
  Antisense strand to SEQ ID NO: 1670287
aauuccaagcuaaggcuaa

SEQ ID NO: 1670289 - RNA, 19 nt, Artificial Sequence
  Description of Artificial Sequence: Synthetic oligonucleotide
  Sense strand starting at position 432 of SEQ ID NO: 1561417
cuuuaauuuccaugucagu

SEQ ID NO: 1670290 - RNA, 19 nt, Artificial Sequence
  Description of Artificial Sequence: Synthetic oligonucleotide
  Antisense strand to SEQ ID NO: 1670289
acugacauggaaauuaaag

SEQ ID NO: 1670291 - RNA, 19 nt, Artificial Sequence
  Description of Artificial Sequence: Synthetic oligonucleotide
  Sense strand starting at position 437 of SEQ ID NO: 1561417
auuuccaugucaguguuau

SEQ ID NO: 1670292 - RNA, 19 nt, Artificial Sequence
  Description of Artificial Sequence: Synthetic oligonucleotide
  Antisense strand to SEQ ID NO: 1670291
auaacacugacauggaaau

SEQ ID NO: 1670293 - RNA, 19 nt, Artificial Sequence
  Description of Artificial Sequence: Synthetic oligonucleotide
  Sense strand starting at position 438 of SEQ ID NO: 1561417
uuuccaugucaguguuauu

SEQ ID NO: 1670294 - RNA, 19 nt, Artificial Sequence
  Description of Artificial Sequence: Synthetic oligonucleotide
  Antisense strand to SEQ ID NO: 1670293
aauaacacugacauggaaa

SEQ ID NO: 1670295 - RNA, 19 nt, Artificial Sequence
  Description of Artificial Sequence: Synthetic oligonucleotide
  Sense strand starting at position 502 of SEQ ID NO: 1561417
cucaaacaguguuuacaua

SEQ ID NO: 1670296 - RNA, 19 nt, Artificial Sequence
  Description of Artificial Sequence: Synthetic oligonucleotide
  Antisense strand to SEQ ID NO: 1670295
uauguaaacacuguuugag

SEQ ID NO: 1670297 - RNA, 19 nt, Artificial Sequence
  Description of Artificial Sequence: Synthetic oligonucleotide
  Sense strand starting at position 1260 of SEQ ID NO: 1561417
aaacgagcgauuugcgaga

SEQ ID NO: 1670298 - RNA, 19 nt, Artificial Sequence
  Description of Artificial Sequence: Synthetic oligonucleotide
  Antisense strand to SEQ ID NO: 1670297
ucucgcaaaucgcucguuu

SEQ ID NO: 1670299 - RNA, 19 nt, Artificial Sequence
  Description of Artificial Sequence: Synthetic oligonucleotide
  Sense strand starting at position 1262 of SEQ ID NO: 1561417
acgagcgauuugcgagaaa

SEQ ID NO: 1670300 - RNA, 19 nt, Artificial Sequence
  Description of Artificial Sequence: Synthetic oligonucleotide
  Antisense strand to SEQ ID NO: 1670299
uuucucgcaaaucgcucgu

SEQ ID NO: 1670301 - RNA, 19 nt, Artificial Sequence
  Description of Artificial Sequence: Synthetic oligonucleotide
  Sense strand starting at position 1325 of SEQ ID NO: 1561417
aacuucugaucaggaaguu

SEQ ID NO: 1670302 - RNA, 19 nt, Artificial Sequence
  Description of Artificial Sequence: Synthetic oligonucleotide
  Antisense strand to SEQ ID NO: 1670301
aacuuccugaucagaaguu

SEQ ID NO: 1670303 - RNA, 19 nt, Artificial Sequence
  Description of Artificial Sequence: Synthetic oligonucleotide
  Sense strand starting at position 1358 of SEQ ID NO: 1561417
gaauuuaguuguccuagca

SEQ ID NO: 1670304 - RNA, 19 nt, Artificial Sequence
  Description of Artificial Sequence: Synthetic oligonucleotide
  Antisense strand to SEQ ID NO: 1670303
ugcuaggacaacuaaauuc

SEQ ID NO: 1670305 - RNA, 19 nt, Artificial Sequence
  Description of Artificial Sequence: Synthetic oligonucleotide
  Sense strand starting at position 1422 of SEQ ID NO: 1561417
ugggauuacagacgucaac

SEQ ID NO: 1670306 - RNA, 19 nt, Artificial Sequence
  Description of Artificial Sequence: Synthetic oligonucleotide
  Antisense strand to SEQ ID NO: 1670305
guugacgucuguaauccca

SEQ ID NO: 1670307 - RNA, 19 nt, Artificial Sequence
  Description of Artificial Sequence: Synthetic oligonucleotide
  Sense strand starting at position 1506 of SEQ ID NO: 1561417
gcucuuccgaaucgugaac

SEQ ID NO: 1670308 - RNA, 19 nt, Artificial Sequence
  Description of Artificial Sequence: Synthetic oligonucleotide
  Antisense strand to SEQ ID NO: 1670307
guucacgauucggaagagc

SEQ ID NO: 1670309 - RNA, 19 nt, Artificial Sequence
  Description of Artificial Sequence: Synthetic oligonucleotide
  Sense strand starting at position 1696 of SEQ ID NO: 1561417
ccaccaucuuauggcugaa

SEQ ID NO: 1670310 - RNA, 19 nt, Artificial Sequence
  Description of Artificial Sequence: Synthetic oligonucleotide
  Antisense strand to SEQ ID NO: 1670309
uucagccauaagauggugg

SEQ ID NO: 1670311 - RNA, 19 nt, Artificial Sequence
  Description of Artificial Sequence: Synthetic oligonucleotide
  Sense strand starting at position 2074 of SEQ ID NO: 1561417
gcgucucugauuggauaau

SEQ ID NO: 1670312 - RNA, 19 nt, Artificial Sequence
  Description of Artificial Sequence: Synthetic oligonucleotide
  Antisense strand to SEQ ID NO: 1670311
auuauccaaucagagacgc

SEQ ID NO: 1670313 - RNA, 19 nt, Artificial Sequence
  Description of Artificial Sequence: Synthetic oligonucleotide
  Sense strand starting at position 2146 of SEQ ID NO: 1561417
ugggcugagugaugaaaga

SEQ ID NO: 1670314 - RNA, 19 nt, Artificial Sequence
  Description of Artificial Sequence: Synthetic oligonucleotide
  Antisense strand to SEQ ID NO: 1670313
ucuuucaucacucagccca

SEQ ID NO: 1670315 - RNA, 19 nt, Artificial Sequence
  Description of Artificial Sequence: Synthetic oligonucleotide
  Sense strand starting at position 2435 of SEQ ID NO: 1561417
ucucgagauuuacacauau

SEQ ID NO: 1670316 - RNA, 19 nt, Artificial Sequence
  Description of Artificial Sequence: Synthetic oligonucleotide
  Antisense strand to SEQ ID NO: 1670315
auauguguaaaucucgaga

SEQ ID NO: 1670317 - RNA, 19 nt, Artificial Sequence
  Description of Artificial Sequence: Synthetic oligonucleotide
  Sense strand starting at position 2626 of SEQ ID NO: 1561417
cggauaacuugagucagga

SEQ ID NO: 1670318 - RNA, 19 nt, Artificial Sequence
  Description of Artificial Sequence: Synthetic oligonucleotide
  Antisense strand to SEQ ID NO: 1670317
uccugacucaaguuauccg

SEQ ID NO: 1670319 - RNA, 19 nt, Artificial Sequence
  Description of Artificial Sequence: Synthetic oligonucleotide
  Sense strand starting at position 2780 of SEQ ID NO: 1561417
aggcggagguuguguaaca

SEQ ID NO: 1670320 - RNA, 19 nt, Artificial Sequence
  Description of Artificial Sequence: Synthetic oligonucleotide
  Antisense strand to SEQ ID NO: 1670319
uguuacacaaccuccgccu

SEQ ID NO: 1670321 - RNA, 19 nt, Artificial Sequence
  Description of Artificial Sequence: Synthetic oligonucleotide
  Sense strand starting at position 2964 of SEQ ID NO: 1561417
cucagaaccgguuguguga

SEQ ID NO: 1670322 - RNA, 19 nt, Artificial Sequence
  Description of Artificial Sequence: Synthetic oligonucleotide
  Antisense strand to SEQ ID NO: 1670321
ucacacaaccgguucugag

SEQ ID NO: 1670323 - RNA, 19 nt, Artificial Sequence
  Description of Artificial Sequence: Synthetic oligonucleotide
  Sense strand starting at position 3235 of SEQ ID NO: 1561417
ucaaauuggguucgaacau

SEQ ID NO: 1670324 - RNA, 19 nt, Artificial Sequence
  Description of Artificial Sequence: Synthetic oligonucleotide
  Antisense strand to SEQ ID NO: 1670323
auguucgaacccaauuuga

SEQ ID NO: 1670325 - RNA, 19 nt, Artificial Sequence
  Description of Artificial Sequence: Synthetic oligonucleotide
  Sense strand starting at position 3244 of SEQ ID NO: 1561417
guucgaacauguuucuuua

SEQ ID NO: 1670326 - RNA, 19 nt, Artificial Sequence
  Description of Artificial Sequence: Synthetic oligonucleotide
  Antisense strand to SEQ ID NO: 1670325
uaaagaaacauguucgaac

SEQ ID NO: 1670327 - RNA, 19 nt, Artificial Sequence
  Description of Artificial Sequence: Synthetic oligonucleotide
  Sense strand starting at position 3247 of SEQ ID NO: 1561417
cgaacauguuucuuuagcu

SEQ ID NO: 1670328 - RNA, 19 nt, Artificial Sequence
  Description of Artificial Sequence: Synthetic oligonucleotide
  Antisense strand to SEQ ID NO: 1670327
agcuaaagaaacauguucg

SEQ ID NO: 1670329 - RNA, 19 nt, Artificial Sequence
  Description of Artificial Sequence: Synthetic oligonucleotide
  Sense strand starting at position 3254 of SEQ ID NO: 1561417
guuucuuuagcucagcaga

SEQ ID NO: 1670330 - RNA, 19 nt, Artificial Sequence
  Description of Artificial Sequence: Synthetic oligonucleotide
  Antisense strand to SEQ ID NO: 1670329
ucugcugagcuaaagaaac

SEQ ID NO: 1670331 - RNA, 19 nt, Artificial Sequence
  Description of Artificial Sequence: Synthetic oligonucleotide
  Sense strand starting at position 3267 of SEQ ID NO: 1561417
agcagaguuuguuauuaac

SEQ ID NO: 1670332 - RNA, 19 nt, Artificial Sequence
  Description of Artificial Sequence: Synthetic oligonucleotide
  Antisense strand to SEQ ID NO: 1670331
guuaauaacaaacucugcu

SEQ ID NO: 1670333 - RNA, 19 nt, Artificial Sequence
  Description of Artificial Sequence: Synthetic oligonucleotide
  Sense strand starting at position 3270 of SEQ ID NO: 1561417
agaguuuguuauuaaccau

SEQ ID NO: 1670334 - RNA, 19 nt, Artificial Sequence
  Description of Artificial Sequence: Synthetic oligonucleotide
  Antisense strand to SEQ ID NO: 1670333
augguuaauaacaaacucu

SEQ ID NO: 1670335 - RNA, 19 nt, Artificial Sequence
  Description of Artificial Sequence: Synthetic oligonucleotide
  Sense strand starting at position 3294 of SEQ ID NO: 1561417
gaggccuacuucugugaau

SEQ ID NO: 1670336 - RNA, 19 nt, Artificial Sequence
  Description of Artificial Sequence: Synthetic oligonucleotide
  Antisense strand to SEQ ID NO: 1670335
auucacagaaguaggccuc

SEQ ID NO: 1670337 - RNA, 19 nt, Artificial Sequence
  Description of Artificial Sequence: Synthetic oligonucleotide
  Sense strand starting at position 3295 of SEQ ID NO: 1561417
aggccuacuucugugaauu

SEQ ID NO: 1670338 - RNA, 19 nt, Artificial Sequence
  Description of Artificial Sequence: Synthetic oligonucleotide
  Antisense strand to SEQ ID NO: 1670337
aauucacagaaguaggccu

SEQ ID NO: 1670339 - RNA, 19 nt, Artificial Sequence
  Description of Artificial Sequence: Synthetic oligonucleotide
  Sense strand starting at position 3296 of SEQ ID NO: 1561417
ggccuacuucugugaauuc

SEQ ID NO: 1670340 - RNA, 19 nt, Artificial Sequence
  Description of Artificial Sequence: Synthetic oligonucleotide
  Antisense strand to SEQ ID NO: 1670339
gaauucacagaaguaggcc

SEQ ID NO: 1670341 - RNA, 19 nt, Artificial Sequence
  Description of Artificial Sequence: Synthetic oligonucleotide
  Sense strand starting at position 3436 of SEQ ID NO: 1561417
agaguuuguuauuaaccgu

SEQ ID NO: 1670342 - RNA, 19 nt, Artificial Sequence
  Description of Artificial Sequence: Synthetic oligonucleotide
  Antisense strand to SEQ ID NO: 1670341
acgguuaauaacaaacucu

SEQ ID NO: 1670343 - RNA, 19 nt, Artificial Sequence
  Description of Artificial Sequence: Synthetic oligonucleotide
  Sense strand starting at position 3439 of SEQ ID NO: 1561417
guuuguuauuaaccgucuu

SEQ ID NO: 1670344 - RNA, 19 nt, Artificial Sequence
  Description of Artificial Sequence: Synthetic oligonucleotide
  Antisense strand to SEQ ID NO: 1670343
aagacgguuaauaacaaac

SEQ ID NO: 1670345 - RNA, 19 nt, Artificial Sequence
  Description of Artificial Sequence: Synthetic oligonucleotide
  Sense strand starting at position 3445 of SEQ ID NO: 1561417
uauuaaccgucuucugaag

SEQ ID NO: 1670346 - RNA, 19 nt, Artificial Sequence
  Description of Artificial Sequence: Synthetic oligonucleotide
  Antisense strand to SEQ ID NO: 1670345
cuucagaagacgguuaaua

SEQ ID NO: 1670347 - RNA, 19 nt, Artificial Sequence
  Description of Artificial Sequence: Synthetic oligonucleotide
  Sense strand starting at position 3567 of SEQ ID NO: 1561417
ucaaauuggguuugaacau

SEQ ID NO: 1670348 - RNA, 19 nt, Artificial Sequence
  Description of Artificial Sequence: Synthetic oligonucleotide
  Antisense strand to SEQ ID NO: 1670347
auguucaaacccaauuuga

SEQ ID NO: 1670349 - RNA, 19 nt, Artificial Sequence
  Description of Artificial Sequence: Synthetic oligonucleotide
  Sense strand starting at position 3573 of SEQ ID NO: 1561417
uggguuugaacauguuucu

SEQ ID NO: 1670350 - RNA, 19 nt, Artificial Sequence
  Description of Artificial Sequence: Synthetic oligonucleotide
  Antisense strand to SEQ ID NO: 1670349
agaaacauguucaaaccca

SEQ ID NO: 1670351 - RNA, 19 nt, Artificial Sequence
  Description of Artificial Sequence: Synthetic oligonucleotide
  Sense strand starting at position 3693 of SEQ ID NO: 1561417
uuugaucauuuggaagaga

SEQ ID NO: 1670352 - RNA, 19 nt, Artificial Sequence
  Description of Artificial Sequence: Synthetic oligonucleotide
  Antisense strand to SEQ ID NO: 1670351
ucucuuccaaaugaucaaa

SEQ ID NO: 1670353 - RNA, 19 nt, Artificial Sequence
  Description of Artificial Sequence: Synthetic oligonucleotide
  Sense strand starting at position 3783 of SEQ ID NO: 1561417
cuuugaggcuucugacacu

SEQ ID NO: 1670354 - RNA, 19 nt, Artificial Sequence
  Description of Artificial Sequence: Synthetic oligonucleotide
  Antisense strand to SEQ ID NO: 1670353
agugucagaagccucaaag

SEQ ID NO: 1670355 - RNA, 19 nt, Artificial Sequence
  Description of Artificial Sequence: Synthetic oligonucleotide
  Sense strand starting at position 3902 of SEQ ID NO: 1561417
auucucaugucucagacua

SEQ ID NO: 1670356 - RNA, 19 nt, Artificial Sequence
  Description of Artificial Sequence: Synthetic oligonucleotide
  Antisense strand to SEQ ID NO: 1670355
uagucugagacaugagaau

SEQ ID NO: 1670357 - RNA, 19 nt, Artificial Sequence
  Description of Artificial Sequence: Synthetic oligonucleotide
  Sense strand starting at position 199 of SEQ ID NO: 1561418
accugagagccugguuauu

SEQ ID NO: 1670358 - RNA, 19 nt, Artificial Sequence
  Description of Artificial Sequence: Synthetic oligonucleotide
  Antisense strand to SEQ ID NO: 1670357
aauaaccaggcucucaggu

SEQ ID NO: 1670359 - RNA, 19 nt, Artificial Sequence
  Description of Artificial Sequence: Synthetic oligonucleotide
  Sense strand starting at position 211 of SEQ ID NO: 1561418
gguuauuggccuugacuau

SEQ ID NO: 1670360 - RNA, 19 nt, Artificial Sequence
  Description of Artificial Sequence: Synthetic oligonucleotide
  Antisense strand to SEQ ID NO: 1670359
auagucaaggccaauaacc

SEQ ID NO: 1670361 - RNA, 19 nt, Artificial Sequence
  Description of Artificial Sequence: Synthetic oligonucleotide
  Sense strand starting at position 286 of SEQ ID NO: 1561418
agacccaaauggucauuau

SEQ ID NO: 1670362 - RNA, 19 nt, Artificial Sequence
  Description of Artificial Sequence: Synthetic oligonucleotide
  Antisense strand to SEQ ID NO: 1670361
auaaugaccauuugggucu

SEQ ID NO: 1670363 - RNA, 19 nt, Artificial Sequence
  Description of Artificial Sequence: Synthetic oligonucleotide
  Sense strand starting at position 808 of SEQ ID NO: 1561418
uuuccaaguucuguaggga

SEQ ID NO: 1670364 - RNA, 19 nt, Artificial Sequence
  Description of Artificial Sequence: Synthetic oligonucleotide
  Antisense strand to SEQ ID NO: 1670363
ucccuacagaacuuggaaa

SEQ ID NO: 1670365 - RNA, 19 nt, Artificial Sequence
  Description of Artificial Sequence: Synthetic oligonucleotide
  Sense strand starting at position 893 of SEQ ID NO: 1561418
ccauuauccuaagugcgau

SEQ ID NO: 1670366 - RNA, 19 nt, Artificial Sequence
  Description of Artificial Sequence: Synthetic oligonucleotide
  Antisense strand to SEQ ID NO: 1670365
aucgcacuuaggauaaugg

SEQ ID NO: 1670367 - RNA, 19 nt, Artificial Sequence
  Description of Artificial Sequence: Synthetic oligonucleotide
  Sense strand starting at position 1106 of SEQ ID NO: 1561418
gccagacuucgccacuaug

SEQ ID NO: 1670368 - RNA, 19 nt, Artificial Sequence
  Description of Artificial Sequence: Synthetic oligonucleotide
  Antisense strand to SEQ ID NO: 1670367
cauaguggcgaagucuggc

SEQ ID NO: 1670369 - RNA, 19 nt, Artificial Sequence
  Description of Artificial Sequence: Synthetic oligonucleotide
  Sense strand starting at position 1109 of SEQ ID NO: 1561418
agacuucgccacuaugaaa

SEQ ID NO: 1670370 - RNA, 19 nt, Artificial Sequence
  Description of Artificial Sequence: Synthetic oligonucleotide
  Antisense strand to SEQ ID NO: 1670369
uuucauaguggcgaagucu

SEQ ID NO: 1670371 - RNA, 19 nt, Artificial Sequence
  Description of Artificial Sequence: Synthetic oligonucleotide
  Sense strand starting at position 1248 of SEQ ID NO: 1561418
accauuuccuuccagagua

SEQ ID NO: 1670372 - RNA, 19 nt, Artificial Sequence
  Description of Artificial Sequence: Synthetic oligonucleotide
  Antisense strand to SEQ ID NO: 1670371
uacucuggaaggaaauggu

SEQ ID NO: 1670373 - RNA, 19 nt, Artificial Sequence
  Description of Artificial Sequence: Synthetic oligonucleotide
  Sense strand starting at position 1289 of SEQ ID NO: 1561418
cucauagaucgugauuggu

SEQ ID NO: 1670374 - RNA, 19 nt, Artificial Sequence
  Description of Artificial Sequence: Synthetic oligonucleotide
  Antisense strand to SEQ ID NO: 1670373
accaaucacgaucuaugag

SEQ ID NO: 1670375 - RNA, 19 nt, Artificial Sequence
  Description of Artificial Sequence: Synthetic oligonucleotide
  Sense strand starting at position 1291 of SEQ ID NO: 1561418
cauagaucgugauuggucu

SEQ ID NO: 1670376 - RNA, 19 nt, Artificial Sequence
  Description of Artificial Sequence: Synthetic oligonucleotide
  Antisense strand to SEQ ID NO: 1670375
agaccaaucacgaucuaug

SEQ ID NO: 1670377 - RNA, 19 nt, Artificial Sequence
  Description of Artificial Sequence: Synthetic oligonucleotide
  Sense strand starting at position 1295 of SEQ ID NO: 1561418
gaucgugauuggucugaag

SEQ ID NO: 1670378 - RNA, 19 nt, Artificial Sequence
  Description of Artificial Sequence: Synthetic oligonucleotide
  Antisense strand to SEQ ID NO: 1670377
cuucagaccaaucacgauc

SEQ ID NO: 1670379 - RNA, 19 nt, Artificial Sequence
  Description of Artificial Sequence: Synthetic oligonucleotide
  Sense strand starting at position 1297 of SEQ ID NO: 1561418
ucgugauuggucugaagag

SEQ ID NO: 1670380 - RNA, 19 nt, Artificial Sequence
  Description of Artificial Sequence: Synthetic oligonucleotide
  Antisense strand to SEQ ID NO: 1670379
cucuucagaccaaucacga

SEQ ID NO: 1670381 - RNA, 19 nt, Artificial Sequence
  Description of Artificial Sequence: Synthetic oligonucleotide
  Sense strand starting at position 1325 of SEQ ID NO: 1561418
ccagguuaggguugcaauu

SEQ ID NO: 1670382 - RNA, 19 nt, Artificial Sequence
  Description of Artificial Sequence: Synthetic oligonucleotide
  Antisense strand to SEQ ID NO: 1670381
aauugcaacccuaaccugg

SEQ ID NO: 1670383 - RNA, 19 nt, Artificial Sequence
  Description of Artificial Sequence: Synthetic oligonucleotide
  Sense strand starting at position 1365 of SEQ ID NO: 1561418
ggguguccuacggauuguu

SEQ ID NO: 1670384 - RNA, 19 nt, Artificial Sequence
  Description of Artificial Sequence: Synthetic oligonucleotide
  Antisense strand to SEQ ID NO: 1670383
aacaauccguaggacaccc

SEQ ID NO: 1670385 - RNA, 19 nt, Artificial Sequence
  Description of Artificial Sequence: Synthetic oligonucleotide
  Sense strand starting at position 1620 of SEQ ID NO: 1561418
gccucaacgcuguuauggu

SEQ ID NO: 1670386 - RNA, 19 nt, Artificial Sequence
  Description of Artificial Sequence: Synthetic oligonucleotide
  Antisense strand to SEQ ID NO: 1670385
accauaacagcguugaggc

SEQ ID NO: 1670387 - RNA, 19 nt, Artificial Sequence
  Description of Artificial Sequence: Synthetic oligonucleotide
  Sense strand starting at position 1627 of SEQ ID NO: 1561418
cgcuguuauggucaaagau

SEQ ID NO: 1670388 - RNA, 19 nt, Artificial Sequence
  Description of Artificial Sequence: Synthetic oligonucleotide
  Antisense strand to SEQ ID NO: 1670387
aucuuugaccauaacagcg

SEQ ID NO: 1670389 - RNA, 19 nt, Artificial Sequence
  Description of Artificial Sequence: Synthetic oligonucleotide
  Sense strand starting at position 1682 of SEQ ID NO: 1561418
guaaccgucuguuuauaaa

SEQ ID NO: 1670390 - RNA, 19 nt, Artificial Sequence
  Description of Artificial Sequence: Synthetic oligonucleotide
  Antisense strand to SEQ ID NO: 1670389
uuuauaaacagacgguuac

SEQ ID NO: 1670391 - RNA, 19 nt, Artificial Sequence
  Description of Artificial Sequence: Synthetic oligonucleotide
  Sense strand starting at position 1900 of SEQ ID NO: 1561418
ggaagacuuccguguccga

SEQ ID NO: 1670392 - RNA, 19 nt, Artificial Sequence
  Description of Artificial Sequence: Synthetic oligonucleotide
  Antisense strand to SEQ ID NO: 1670391
ucggacacggaagucuucc

SEQ ID NO: 1670393 - RNA, 19 nt, Artificial Sequence
  Description of Artificial Sequence: Synthetic oligonucleotide
  Sense strand starting at position 2023 of SEQ ID NO: 1561418
cuagcugucauucggacaa

SEQ ID NO: 1670394 - RNA, 19 nt, Artificial Sequence
  Description of Artificial Sequence: Synthetic oligonucleotide
  Antisense strand to SEQ ID NO: 1670393
uuguccgaaugacagcuag

SEQ ID NO: 1670395 - RNA, 19 nt, Artificial Sequence
  Description of Artificial Sequence: Synthetic oligonucleotide
  Sense strand starting at position 2053 of SEQ ID NO: 1561418
gcuguauaauuguccaauc

SEQ ID NO: 1670396 - RNA, 19 nt, Artificial Sequence
  Description of Artificial Sequence: Synthetic oligonucleotide
  Antisense strand to SEQ ID NO: 1670395
gauuggacaauuauacagc

SEQ ID NO: 1670397 - RNA, 19 nt, Artificial Sequence
  Description of Artificial Sequence: Synthetic oligonucleotide
  Sense strand starting at position 2054 of SEQ ID NO: 1561418
cuguauaauuguccaauca

SEQ ID NO: 1670398 - RNA, 19 nt, Artificial Sequence
  Description of Artificial Sequence: Synthetic oligonucleotide
  Antisense strand to SEQ ID NO: 1670397
ugauuggacaauuauacag

SEQ ID NO: 1670399 - RNA, 19 nt, Artificial Sequence
  Description of Artificial Sequence: Synthetic oligonucleotide
  Sense strand starting at position 2055 of SEQ ID NO: 1561418
uguauaauuguccaaucag

SEQ ID NO: 1670400 - RNA, 19 nt, Artificial Sequence
  Description of Artificial Sequence: Synthetic oligonucleotide
  Antisense strand to SEQ ID NO: 1670399
cugauuggacaauuauaca

SEQ ID NO: 1670401 - RNA, 19 nt, Artificial Sequence
  Description of Artificial Sequence: Synthetic oligonucleotide
  Sense strand starting at position 2674 of SEQ ID NO: 1561418
ggccauuaaucccuagauu

SEQ ID NO: 1670402 - RNA, 19 nt, Artificial Sequence
  Description of Artificial Sequence: Synthetic oligonucleotide
  Antisense strand to SEQ ID NO: 1670401
aaucuagggauuaauggcc

SEQ ID NO: 1670403 - RNA, 19 nt, Artificial Sequence
  Description of Artificial Sequence: Synthetic oligonucleotide
  Sense strand starting at position 2839 of SEQ ID NO: 1561418
uuauuucuuguuuguggau

SEQ ID NO: 1670404 - RNA, 19 nt, Artificial Sequence
  Description of Artificial Sequence: Synthetic oligonucleotide
  Antisense strand to SEQ ID NO: 1670403
auccacaaacaagaaauaa

SEQ ID NO: 1670405 - RNA, 19 nt, Artificial Sequence
  Description of Artificial Sequence: Synthetic oligonucleotide
  Sense strand starting at position 2895 of SEQ ID NO: 1561418
uggaacuaaucugcauaaa

SEQ ID NO: 1670406 - RNA, 19 nt, Artificial Sequence
  Description of Artificial Sequence: Synthetic oligonucleotide
  Antisense strand to SEQ ID NO: 1670405
uuuaugcagauuaguucca

SEQ ID NO: 1670407 - RNA, 19 nt, Artificial Sequence
  Description of Artificial Sequence: Synthetic oligonucleotide
  Sense strand starting at position 2990 of SEQ ID NO: 1561418
uuguaaacuuuccugggua

SEQ ID NO: 1670408 - RNA, 19 nt, Artificial Sequence
  Description of Artificial Sequence: Synthetic oligonucleotide
  Antisense strand to SEQ ID NO: 1670407
uacccaggaaaguuuacaa

SEQ ID NO: 1670409 - RNA, 19 nt, Artificial Sequence
  Description of Artificial Sequence: Synthetic oligonucleotide
  Sense strand starting at position 2992 of SEQ ID NO: 1561418
guaaacuuuccuggguaau

SEQ ID NO: 1670410 - RNA, 19 nt, Artificial Sequence
  Description of Artificial Sequence: Synthetic oligonucleotide
  Antisense strand to SEQ ID NO: 1670409
auuacccaggaaaguuuac

SEQ ID NO: 1670411 - RNA, 19 nt, Artificial Sequence
  Description of Artificial Sequence: Synthetic oligonucleotide
  Sense strand starting at position 3051 of SEQ ID NO: 1561418
uuggguuuaugaccuugaa

SEQ ID NO: 1670412 - RNA, 19 nt, Artificial Sequence
  Description of Artificial Sequence: Synthetic oligonucleotide
  Antisense strand to SEQ ID NO: 1670411
uucaaggucauaaacccaa

SEQ ID NO: 1670413 - RNA, 19 nt, Artificial Sequence
  Description of Artificial Sequence: Synthetic oligonucleotide
  Sense strand starting at position 3226 of SEQ ID NO: 1561418
uguucuuucccugagcaca

SEQ ID NO: 1670414 - RNA, 19 nt, Artificial Sequence
  Description of Artificial Sequence: Synthetic oligonucleotide
  Antisense strand to SEQ ID NO: 1670413
ugugcucagggaaagaaca

SEQ ID NO: 1670415 - RNA, 19 nt, Artificial Sequence
  Description of Artificial Sequence: Synthetic oligonucleotide
  Sense strand starting at position 3234 of SEQ ID NO: 1561418
cccugagcacauggaauau

SEQ ID NO: 1670416 - RNA, 19 nt, Artificial Sequence
  Description of Artificial Sequence: Synthetic oligonucleotide
  Antisense strand to SEQ ID NO: 1670415
auauuccaugugcucaggg

SEQ ID NO: 1670417 - RNA, 19 nt, Artificial Sequence
  Description of Artificial Sequence: Synthetic oligonucleotide
  Sense strand starting at position 3245 of SEQ ID NO: 1561418
uggaauauguuucucaggu

SEQ ID NO: 1670418 - RNA, 19 nt, Artificial Sequence
  Description of Artificial Sequence: Synthetic oligonucleotide
  Antisense strand to SEQ ID NO: 1670417
accugagaaacauauucca

SEQ ID NO: 1670419 - RNA, 19 nt, Artificial Sequence
  Description of Artificial Sequence: Synthetic oligonucleotide
  Sense strand starting at position 3246 of SEQ ID NO: 1561418
ggaauauguuucucagguc

SEQ ID NO: 1670420 - RNA, 19 nt, Artificial Sequence
  Description of Artificial Sequence: Synthetic oligonucleotide
  Antisense strand to SEQ ID NO: 1670419
gaccugagaaacauauucc

SEQ ID NO: 1670421 - RNA, 19 nt, Artificial Sequence
  Description of Artificial Sequence: Synthetic oligonucleotide
  Sense strand starting at position 3288 of SEQ ID NO: 1561418
gaugguauuccaggacuua

SEQ ID NO: 1670422 - RNA, 19 nt, Artificial Sequence
  Description of Artificial Sequence: Synthetic oligonucleotide
  Antisense strand to SEQ ID NO: 1670421
uaaguccuggaauaccauc

SEQ ID NO: 1670423 - RNA, 19 nt, Artificial Sequence
  Description of Artificial Sequence: Synthetic oligonucleotide
  Sense strand starting at position 3310 of SEQ ID NO: 1561418
uugcaacaucuagaagcau

SEQ ID NO: 1670424 - RNA, 19 nt, Artificial Sequence
  Description of Artificial Sequence: Synthetic oligonucleotide
  Antisense strand to SEQ ID NO: 1670423
augcuucuagauguugcaa

SEQ ID NO: 1670425 - RNA, 19 nt, Artificial Sequence
  Description of Artificial Sequence: Synthetic oligonucleotide
  Sense strand starting at position 3354 of SEQ ID NO: 1561418
acuauuuauugccauggaa

SEQ ID NO: 1670426 - RNA, 19 nt, Artificial Sequence
  Description of Artificial Sequence: Synthetic oligonucleotide
  Antisense strand to SEQ ID NO: 1670425
uuccauggcaauaaauagu

SEQ ID NO: 1670427 - RNA, 19 nt, Artificial Sequence
  Description of Artificial Sequence: Synthetic oligonucleotide
  Sense strand starting at position 3518 of SEQ ID NO: 1561418
cuauuaccggcccaacauu

SEQ ID NO: 1670428 - RNA, 19 nt, Artificial Sequence
  Description of Artificial Sequence: Synthetic oligonucleotide
  Antisense strand to SEQ ID NO: 1670427
aauguugggccgguaauag

SEQ ID NO: 1670429 - RNA, 19 nt, Artificial Sequence
  Description of Artificial Sequence: Synthetic oligonucleotide
  Sense strand starting at position 3963 of SEQ ID NO: 1561418
auacguaaacacuguguuu

SEQ ID NO: 1670430 - RNA, 19 nt, Artificial Sequence
  Description of Artificial Sequence: Synthetic oligonucleotide
  Antisense strand to SEQ ID NO: 1670429
aaacacaguguuuacguau

SEQ ID NO: 1670431 - RNA, 19 nt, Artificial Sequence
  Description of Artificial Sequence: Synthetic oligonucleotide
  Sense strand starting at position 3965 of SEQ ID NO: 1561418
acguaaacacuguguuuaa

SEQ ID NO: 1670432 - RNA, 19 nt, Artificial Sequence
  Description of Artificial Sequence: Synthetic oligonucleotide
  Antisense strand to SEQ ID NO: 1670431
uuaaacacaguguuuacgu

SEQ ID NO: 1670433 - RNA, 19 nt, Artificial Sequence
  Description of Artificial Sequence: Synthetic oligonucleotide
  Sense strand starting at position 3966 of SEQ ID NO: 1561418
cguaaacacuguguuuaag

SEQ ID NO: 1670434 - RNA, 19 nt, Artificial Sequence
  Description of Artificial Sequence: Synthetic oligonucleotide
  Antisense strand to SEQ ID NO: 1670433
cuuaaacacaguguuuacg

SEQ ID NO: 1670435 - RNA, 19 nt, Artificial Sequence
  Description of Artificial Sequence: Synthetic oligonucleotide
  Sense strand starting at position 3980 of SEQ ID NO: 1561418
uuaaguaauucugcuggau

SEQ ID NO: 1670436 - RNA, 19 nt, Artificial Sequence
  Description of Artificial Sequence: Synthetic oligonucleotide
  Antisense strand to SEQ ID NO: 1670435
auccagcagaauuacuuaa

SEQ ID NO: 1670437 - RNA, 19 nt, Artificial Sequence
  Description of Artificial Sequence: Synthetic oligonucleotide
  Sense strand starting at position 150 of SEQ ID NO: 1561419
ucaaauguagcaugggaaa

SEQ ID NO: 1670438 - RNA, 19 nt, Artificial Sequence
  Description of Artificial Sequence: Synthetic oligonucleotide
  Antisense strand to SEQ ID NO: 1670437
uuucccaugcuacauuuga

SEQ ID NO: 1670439 - RNA, 19 nt, Artificial Sequence
  Description of Artificial Sequence: Synthetic oligonucleotide
  Sense strand starting at position 168 of SEQ ID NO: 1561419
acacauaauugauaaggau

SEQ ID NO: 1670440 - RNA, 19 nt, Artificial Sequence
  Description of Artificial Sequence: Synthetic oligonucleotide
  Antisense strand to SEQ ID NO: 1670439
auccuuaucaauuaugugu

SEQ ID NO: 1670441 - RNA, 19 nt, Artificial Sequence
  Description of Artificial Sequence: Synthetic oligonucleotide
  Sense strand starting at position 244 of SEQ ID NO: 1561419
gggauuuacugucauaccu

SEQ ID NO: 1670442 - RNA, 19 nt, Artificial Sequence
  Description of Artificial Sequence: Synthetic oligonucleotide
  Antisense strand to SEQ ID NO: 1670441
agguaugacaguaaauccc

SEQ ID NO: 1670443 - RNA, 19 nt, Artificial Sequence
  Description of Artificial Sequence: Synthetic oligonucleotide
  Sense strand starting at position 251 of SEQ ID NO: 1561419
acugucauaccugggaaga

SEQ ID NO: 1670444 - RNA, 19 nt, Artificial Sequence
  Description of Artificial Sequence: Synthetic oligonucleotide
  Antisense strand to SEQ ID NO: 1670443
ucuucccagguaugacagu

SEQ ID NO: 1670445 - RNA, 19 nt, Artificial Sequence
  Description of Artificial Sequence: Synthetic oligonucleotide
  Sense strand starting at position 252 of SEQ ID NO: 1561419
cugucauaccugggaagaa

SEQ ID NO: 1670446 - RNA, 19 nt, Artificial Sequence
  Description of Artificial Sequence: Synthetic oligonucleotide
  Antisense strand to SEQ ID NO: 1670445
uucuucccagguaugacag

SEQ ID NO: 1670447 - RNA, 19 nt, Artificial Sequence
  Description of Artificial Sequence: Synthetic oligonucleotide
  Sense strand starting at position 336 of SEQ ID NO: 1561419
cccucuucuugaguagacu

SEQ ID NO: 1670448 - RNA, 19 nt, Artificial Sequence
  Description of Artificial Sequence: Synthetic oligonucleotide
  Antisense strand to SEQ ID NO: 1670447
agucuacucaagaagaggg

SEQ ID NO: 1670449 - RNA, 19 nt, Artificial Sequence
  Description of Artificial Sequence: Synthetic oligonucleotide
  Sense strand starting at position 337 of SEQ ID NO: 1561419
ccucuucuugaguagacuu

SEQ ID NO: 1670450 - RNA, 19 nt, Artificial Sequence
  Description of Artificial Sequence: Synthetic oligonucleotide
  Antisense strand to SEQ ID NO: 1670449
aagucuacucaagaagagg

SEQ ID NO: 1670451 - RNA, 19 nt, Artificial Sequence
  Description of Artificial Sequence: Synthetic oligonucleotide
  Sense strand starting at position 448 of SEQ ID NO: 1561419
uuucccuacguuugacaau

SEQ ID NO: 1670452 - RNA, 19 nt, Artificial Sequence
  Description of Artificial Sequence: Synthetic oligonucleotide
  Antisense strand to SEQ ID NO: 1670451
auugucaaacguagggaaa

SEQ ID NO: 1670453 - RNA, 19 nt, Artificial Sequence
  Description of Artificial Sequence: Synthetic oligonucleotide
  Sense strand starting at position 518 of SEQ ID NO: 1561419
gccuauuagcuguaaauuc

SEQ ID NO: 1670454 - RNA, 19 nt, Artificial Sequence
  Description of Artificial Sequence: Synthetic oligonucleotide
  Antisense strand to SEQ ID NO: 1670453
gaauuuacagcuaauaggc

SEQ ID NO: 1670455 - RNA, 19 nt, Artificial Sequence
  Description of Artificial Sequence: Synthetic oligonucleotide
  Sense strand starting at position 607 of SEQ ID NO: 1561419
uacagaagcggccaucaua

SEQ ID NO: 1670456 - RNA, 19 nt, Artificial Sequence
  Description of Artificial Sequence: Synthetic oligonucleotide
  Antisense strand to SEQ ID NO: 1670455
uaugauggccgcuucugua

SEQ ID NO: 1670457 - RNA, 19 nt, Artificial Sequence
  Description of Artificial Sequence: Synthetic oligonucleotide
  Sense strand starting at position 1120 of SEQ ID NO: 1561419
auuguugugccucacaaac

SEQ ID NO: 1670458 - RNA, 19 nt, Artificial Sequence
  Description of Artificial Sequence: Synthetic oligonucleotide
  Antisense strand to SEQ ID NO: 1670457
guuugugaggcacaacaau

SEQ ID NO: 1670459 - RNA, 19 nt, Artificial Sequence
  Description of Artificial Sequence: Synthetic oligonucleotide
  Sense strand starting at position 1268 of SEQ ID NO: 1561419
agcuucuugcuugaguaaa

SEQ ID NO: 1670460 - RNA, 19 nt, Artificial Sequence
  Description of Artificial Sequence: Synthetic oligonucleotide
  Antisense strand to SEQ ID NO: 1670459
uuuacucaagcaagaagcu

SEQ ID NO: 1670461 - RNA, 19 nt, Artificial Sequence
  Description of Artificial Sequence: Synthetic oligonucleotide
  Sense strand starting at position 1270 of SEQ ID NO: 1561419
cuucuugcuugaguaaacu

SEQ ID NO: 1670462 - RNA, 19 nt, Artificial Sequence
  Description of Artificial Sequence: Synthetic oligonucleotide
  Antisense strand to SEQ ID NO: 1670461
aguuuacucaagcaagaag

SEQ ID NO: 1670463 - RNA, 19 nt, Artificial Sequence
  Description of Artificial Sequence: Synthetic oligonucleotide
  Sense strand starting at position 1434 of SEQ ID NO: 1561419
ggguguuucucacucggaa

SEQ ID NO: 1670464 - RNA, 19 nt, Artificial Sequence
  Description of Artificial Sequence: Synthetic oligonucleotide
  Antisense strand to SEQ ID NO: 1670463
uuccgagugagaaacaccc

SEQ ID NO: 1670465 - RNA, 19 nt, Artificial Sequence
  Description of Artificial Sequence: Synthetic oligonucleotide
  Sense strand starting at position 1483 of SEQ ID NO: 1561419
uuaacagagccucaguuua

SEQ ID NO: 1670466 - RNA, 19 nt, Artificial Sequence
  Description of Artificial Sequence: Synthetic oligonucleotide
  Antisense strand to SEQ ID NO: 1670465
uaaacugaggcucuguuaa

SEQ ID NO: 1670467 - RNA, 19 nt, Artificial Sequence
  Description of Artificial Sequence: Synthetic oligonucleotide
  Sense strand starting at position 2122 of SEQ ID NO: 1561419
caggguaagcccuggguaa

SEQ ID NO: 1670468 - RNA, 19 nt, Artificial Sequence
  Description of Artificial Sequence: Synthetic oligonucleotide
  Antisense strand to SEQ ID NO: 1670467
uuacccagggcuuacccug

SEQ ID NO: 1670469 - RNA, 19 nt, Artificial Sequence
  Description of Artificial Sequence: Synthetic oligonucleotide
  Sense strand starting at position 2245 of SEQ ID NO: 1561419
ugcuacuuauuguuagaag

SEQ ID NO: 1670470 - RNA, 19 nt, Artificial Sequence
  Description of Artificial Sequence: Synthetic oligonucleotide
  Antisense strand to SEQ ID NO: 1670469
cuucuaacaauaaguagca

SEQ ID NO: 1670471 - RNA, 19 nt, Artificial Sequence
  Description of Artificial Sequence: Synthetic oligonucleotide
  Sense strand starting at position 2271 of SEQ ID NO: 1561419
guuagcuuccucgaucuuu

SEQ ID NO: 1670472 - RNA, 19 nt, Artificial Sequence
  Description of Artificial Sequence: Synthetic oligonucleotide
  Antisense strand to SEQ ID NO: 1670471
aaagaucgaggaagcuaac

SEQ ID NO: 1670473 - RNA, 19 nt, Artificial Sequence
  Description of Artificial Sequence: Synthetic oligonucleotide
  Sense strand starting at position 2289 of SEQ ID NO: 1561419
ucagaaaugugugcuggga

SEQ ID NO: 1670474 - RNA, 19 nt, Artificial Sequence
  Description of Artificial Sequence: Synthetic oligonucleotide
  Antisense strand to SEQ ID NO: 1670473
ucccagcacacauuucuga

SEQ ID NO: 1670475 - RNA, 19 nt, Artificial Sequence
  Description of Artificial Sequence: Synthetic oligonucleotide
  Sense strand starting at position 2293 of SEQ ID NO: 1561419
aaaugugugcugggaauuc

SEQ ID NO: 1670476 - RNA, 19 nt, Artificial Sequence
  Description of Artificial Sequence: Synthetic oligonucleotide
  Antisense strand to SEQ ID NO: 1670475
gaauucccagcacacauuu

SEQ ID NO: 1670477 - RNA, 19 nt, Artificial Sequence
  Description of Artificial Sequence: Synthetic oligonucleotide
  Sense strand starting at position 2328 of SEQ ID NO: 1561419
uggagucauuccuuugccu

SEQ ID NO: 1670478 - RNA, 19 nt, Artificial Sequence
  Description of Artificial Sequence: Synthetic oligonucleotide
  Antisense strand to SEQ ID NO: 1670477
aggcaaaggaaugacucca

SEQ ID NO: 1670479 - RNA, 19 nt, Artificial Sequence
  Description of Artificial Sequence: Synthetic oligonucleotide
  Sense strand starting at position 2436 of SEQ ID NO: 1561419
ggaugagacuuccucacac

SEQ ID NO: 1670480 - RNA, 19 nt, Artificial Sequence
  Description of Artificial Sequence: Synthetic oligonucleotide
  Antisense strand to SEQ ID NO: 1670479
gugugaggaagucucaucc

SEQ ID NO: 1670481 - RNA, 19 nt, Artificial Sequence
  Description of Artificial Sequence: Synthetic oligonucleotide
  Sense strand starting at position 2532 of SEQ ID NO: 1561419
gggucaguuuaagcuucua

SEQ ID NO: 1670482 - RNA, 19 nt, Artificial Sequence
  Description of Artificial Sequence: Synthetic oligonucleotide
  Antisense strand to SEQ ID NO: 1670481
uagaagcuuaaacugaccc

SEQ ID NO: 1670483 - RNA, 19 nt, Artificial Sequence
  Description of Artificial Sequence: Synthetic oligonucleotide
  Sense strand starting at position 2577 of SEQ ID NO: 1561419
acccuuucuccaggugaca

SEQ ID NO: 1670484 - RNA, 19 nt, Artificial Sequence
  Description of Artificial Sequence: Synthetic oligonucleotide
  Antisense strand to SEQ ID NO: 1670483
ugucaccuggagaaagggu

SEQ ID NO: 1670485 - RNA, 19 nt, Artificial Sequence
  Description of Artificial Sequence: Synthetic oligonucleotide
  Sense strand starting at position 2607 of SEQ ID NO: 1561419
ucuuacugagccugaucuu

SEQ ID NO: 1670486 - RNA, 19 nt, Artificial Sequence
  Description of Artificial Sequence: Synthetic oligonucleotide
  Antisense strand to SEQ ID NO: 1670485
aagaucaggcucaguaaga

SEQ ID NO: 1670487 - RNA, 19 nt, Artificial Sequence
  Description of Artificial Sequence: Synthetic oligonucleotide
  Sense strand starting at position 2627 of SEQ ID NO: 1561419
acagauuaucuuuguaugu

SEQ ID NO: 1670488 - RNA, 19 nt, Artificial Sequence
  Description of Artificial Sequence: Synthetic oligonucleotide
  Antisense strand to SEQ ID NO: 1670487
acauacaaagauaaucugu

SEQ ID NO: 1670489 - RNA, 19 nt, Artificial Sequence
  Description of Artificial Sequence: Synthetic oligonucleotide
  Sense strand starting at position 2806 of SEQ ID NO: 1561419
cucuguagcuucucaggau

SEQ ID NO: 1670490 - RNA, 19 nt, Artificial Sequence
  Description of Artificial Sequence: Synthetic oligonucleotide
  Antisense strand to SEQ ID NO: 1670489
auccugagaagcuacagag

SEQ ID NO: 1670491 - RNA, 19 nt, Artificial Sequence
  Description of Artificial Sequence: Synthetic oligonucleotide
  Sense strand starting at position 2998 of SEQ ID NO: 1561419
auugaucgguuaccugaga

SEQ ID NO: 1670492 - RNA, 19 nt, Artificial Sequence
  Description of Artificial Sequence: Synthetic oligonucleotide
  Antisense strand to SEQ ID NO: 1670491
ucucagguaaccgaucaau

SEQ ID NO: 1670493 - RNA, 19 nt, Artificial Sequence
  Description of Artificial Sequence: Synthetic oligonucleotide
  Sense strand starting at position 3033 of SEQ ID NO: 1561419
cacuguacguauguauaaa

SEQ ID NO: 1670494 - RNA, 19 nt, Artificial Sequence
  Description of Artificial Sequence: Synthetic oligonucleotide
  Antisense strand to SEQ ID NO: 1670493
uuuauacauacguacagug

SEQ ID NO: 1670495 - RNA, 19 nt, Artificial Sequence
  Description of Artificial Sequence: Synthetic oligonucleotide
  Sense strand starting at position 3202 of SEQ ID NO: 1561419
acaccucgucuguacuaaa

SEQ ID NO: 1670496 - RNA, 19 nt, Artificial Sequence
  Description of Artificial Sequence: Synthetic oligonucleotide
  Antisense strand to SEQ ID NO: 1670495
uuuaguacagacgaggugu

SEQ ID NO: 1670497 - RNA, 19 nt, Artificial Sequence
  Description of Artificial Sequence: Synthetic oligonucleotide
  Sense strand starting at position 3354 of SEQ ID NO: 1561419
aguugugauaguuguauca

SEQ ID NO: 1670498 - RNA, 19 nt, Artificial Sequence
  Description of Artificial Sequence: Synthetic oligonucleotide
  Antisense strand to SEQ ID NO: 1670497
ugauacaacuaucacaacu

SEQ ID NO: 1670499 - RNA, 19 nt, Artificial Sequence
  Description of Artificial Sequence: Synthetic oligonucleotide
  Sense strand starting at position 3422 of SEQ ID NO: 1561419
augagauacugauaacaga

SEQ ID NO: 1670500 - RNA, 19 nt, Artificial Sequence
  Description of Artificial Sequence: Synthetic oligonucleotide
  Antisense strand to SEQ ID NO: 1670499
ucuguuaucaguaucucau

SEQ ID NO: 1670501 - RNA, 19 nt, Artificial Sequence
  Description of Artificial Sequence: Synthetic oligonucleotide
  Sense strand starting at position 3537 of SEQ ID NO: 1561419
agauauagauagcaauaca

SEQ ID NO: 1670502 - RNA, 19 nt, Artificial Sequence
  Description of Artificial Sequence: Synthetic oligonucleotide
  Antisense strand to SEQ ID NO: 1670501
uguauugcuaucuauaucu

SEQ ID NO: 1670503 - RNA, 19 nt, Artificial Sequence
  Description of Artificial Sequence: Synthetic oligonucleotide
  Sense strand starting at position 3706 of SEQ ID NO: 1561419
uucucaucaguacgugaaa

SEQ ID NO: 1670504 - RNA, 19 nt, Artificial Sequence
  Description of Artificial Sequence: Synthetic oligonucleotide
  Antisense strand to SEQ ID NO: 1670503
uuucacguacugaugagaa

SEQ ID NO: 1670505 - RNA, 19 nt, Artificial Sequence
  Description of Artificial Sequence: Synthetic oligonucleotide
  Sense strand starting at position 3709 of SEQ ID NO: 1561419
ucaucaguacgugaaacau

SEQ ID NO: 1670506 - RNA, 19 nt, Artificial Sequence
  Description of Artificial Sequence: Synthetic oligonucleotide
  Antisense strand to SEQ ID NO: 1670505
auguuucacguacugauga

SEQ ID NO: 1670507 - RNA, 19 nt, Artificial Sequence
  Description of Artificial Sequence: Synthetic oligonucleotide
  Sense strand starting at position 3719 of SEQ ID NO: 1561419
gugaaacauucuccaaggu

SEQ ID NO: 1670508 - RNA, 19 nt, Artificial Sequence
  Description of Artificial Sequence: Synthetic oligonucleotide
  Antisense strand to SEQ ID NO: 1670507
accuuggagaauguuucac

SEQ ID NO: 1670509 - RNA, 19 nt, Artificial Sequence
  Description of Artificial Sequence: Synthetic oligonucleotide
  Sense strand starting at position 3886 of SEQ ID NO: 1561419
gcuccugaaugaucucuga

SEQ ID NO: 1670510 - RNA, 19 nt, Artificial Sequence
  Description of Artificial Sequence: Synthetic oligonucleotide
  Antisense strand to SEQ ID NO: 1670509
ucagagaucauucaggagc

SEQ ID NO: 1670511 - RNA, 19 nt, Artificial Sequence
  Description of Artificial Sequence: Synthetic oligonucleotide
  Sense strand starting at position 3889 of SEQ ID NO: 1561419
ccugaaugaucucugaguc

SEQ ID NO: 1670512 - RNA, 19 nt, Artificial Sequence
  Description of Artificial Sequence: Synthetic oligonucleotide
  Antisense strand to SEQ ID NO: 1670511
gacucagagaucauucagg

SEQ ID NO: 1670513 - RNA, 19 nt, Artificial Sequence
  Description of Artificial Sequence: Synthetic oligonucleotide
  Sense strand starting at position 3890 of SEQ ID NO: 1561419
cugaaugaucucugaguca

SEQ ID NO: 1670514 - RNA, 19 nt, Artificial Sequence
  Description of Artificial Sequence: Synthetic oligonucleotide
  Antisense strand to SEQ ID NO: 1670513
ugacucagagaucauucag

SEQ ID NO: 1670515 - RNA, 19 nt, Artificial Sequence
  Description of Artificial Sequence: Synthetic oligonucleotide
  Sense strand starting at position 3893 of SEQ ID NO: 1561419
aaugaucucugagucaaag

SEQ ID NO: 1670516 - RNA, 19 nt, Artificial Sequence
  Description of Artificial Sequence: Synthetic oligonucleotide
  Antisense strand to SEQ ID NO: 1670515
cuuugacucagagaucauu

SEQ ID NO: 1670517 - RNA, 19 nt, Artificial Sequence
  Description of Artificial Sequence: Synthetic oligonucleotide
  Sense strand starting at position 221 of SEQ ID NO: 1561420
auauuuaaguaagagcuga

SEQ ID NO: 1670518 - RNA, 19 nt, Artificial Sequence
  Description of Artificial Sequence: Synthetic oligonucleotide
  Antisense strand to SEQ ID NO: 1670517
ucagcucuuacuuaaauau

SEQ ID NO: 1670519 - RNA, 19 nt, Artificial Sequence
  Description of Artificial Sequence: Synthetic oligonucleotide
  Sense strand starting at position 276 of SEQ ID NO: 1561420
gacagugaggccuaguuga

SEQ ID NO: 1670520 - RNA, 19 nt, Artificial Sequence
  Description of Artificial Sequence: Synthetic oligonucleotide
  Antisense strand to SEQ ID NO: 1670519
ucaacuaggccucacuguc

SEQ ID NO: 1670521 - RNA, 19 nt, Artificial Sequence
  Description of Artificial Sequence: Synthetic oligonucleotide
  Sense strand starting at position 286 of SEQ ID NO: 1561420
ccuaguugagguuggagaa

SEQ ID NO: 1670522 - RNA, 19 nt, Artificial Sequence
  Description of Artificial Sequence: Synthetic oligonucleotide
  Antisense strand to SEQ ID NO: 1670521
uucuccaaccucaacuagg

SEQ ID NO: 1670523 - RNA, 19 nt, Artificial Sequence
  Description of Artificial Sequence: Synthetic oligonucleotide
  Sense strand starting at position 287 of SEQ ID NO: 1561420
cuaguugagguuggagaau

SEQ ID NO: 1670524 - RNA, 19 nt, Artificial Sequence
  Description of Artificial Sequence: Synthetic oligonucleotide
  Antisense strand to SEQ ID NO: 1670523
auucuccaaccucaacuag

SEQ ID NO: 1670525 - RNA, 19 nt, Artificial Sequence
  Description of Artificial Sequence: Synthetic oligonucleotide
  Sense strand starting at position 476 of SEQ ID NO: 1561420
aggguauccacuugagagg

SEQ ID NO: 1670526 - RNA, 19 nt, Artificial Sequence
  Description of Artificial Sequence: Synthetic oligonucleotide
  Antisense strand to SEQ ID NO: 1670525
ccucucaaguggauacccu

SEQ ID NO: 1670527 - RNA, 19 nt, Artificial Sequence
  Description of Artificial Sequence: Synthetic oligonucleotide
  Sense strand starting at position 510 of SEQ ID NO: 1561420
cagguuguccuacgaaaga

SEQ ID NO: 1670528 - RNA, 19 nt, Artificial Sequence
  Description of Artificial Sequence: Synthetic oligonucleotide
  Antisense strand to SEQ ID NO: 1670527
ucuuucguaggacaaccug

SEQ ID NO: 1670529 - RNA, 19 nt, Artificial Sequence
  Description of Artificial Sequence: Synthetic oligonucleotide
  Sense strand starting at position 573 of SEQ ID NO: 1561420
ucgccauagcgguuaucuu

SEQ ID NO: 1670530 - RNA, 19 nt, Artificial Sequence
  Description of Artificial Sequence: Synthetic oligonucleotide
  Antisense strand to SEQ ID NO: 1670529
aagauaaccgcuauggcga

SEQ ID NO: 1670531 - RNA, 19 nt, Artificial Sequence
  Description of Artificial Sequence: Synthetic oligonucleotide
  Sense strand starting at position 639 of SEQ ID NO: 1561420
aggguugcuaagcacaaau

SEQ ID NO: 1670532 - RNA, 19 nt, Artificial Sequence
  Description of Artificial Sequence: Synthetic oligonucleotide
  Antisense strand to SEQ ID NO: 1670531
auuugugcuuagcaacccu

SEQ ID NO: 1670533 - RNA, 19 nt, Artificial Sequence
  Description of Artificial Sequence: Synthetic oligonucleotide
  Sense strand starting at position 711 of SEQ ID NO: 1561420
agaucuuuaugccuaggga

SEQ ID NO: 1670534 - RNA, 19 nt, Artificial Sequence
  Description of Artificial Sequence: Synthetic oligonucleotide
  Antisense strand to SEQ ID NO: 1670533
ucccuaggcauaaagaucu

SEQ ID NO: 1670535 - RNA, 19 nt, Artificial Sequence
  Description of Artificial Sequence: Synthetic oligonucleotide
  Sense strand starting at position 714 of SEQ ID NO: 1561420
ucuuuaugccuagggaaga

SEQ ID NO: 1670536 - RNA, 19 nt, Artificial Sequence
  Description of Artificial Sequence: Synthetic oligonucleotide
  Antisense strand to SEQ ID NO: 1670535
ucuucccuaggcauaaaga

SEQ ID NO: 1670537 - RNA, 19 nt, Artificial Sequence
  Description of Artificial Sequence: Synthetic oligonucleotide
  Sense strand starting at position 767 of SEQ ID NO: 1561420
ucacuaucgggauauuccu

SEQ ID NO: 1670538 - RNA, 19 nt, Artificial Sequence
  Description of Artificial Sequence: Synthetic oligonucleotide
  Antisense strand to SEQ ID NO: 1670537
aggaauaucccgauaguga

SEQ ID NO: 1670539 - RNA, 19 nt, Artificial Sequence
  Description of Artificial Sequence: Synthetic oligonucleotide
  Sense strand starting at position 773 of SEQ ID NO: 1561420
ucgggauauuccuugcuuu

SEQ ID NO: 1670540 - RNA, 19 nt, Artificial Sequence
  Description of Artificial Sequence: Synthetic oligonucleotide
  Antisense strand to SEQ ID NO: 1670539
aaagcaaggaauaucccga

SEQ ID NO: 1670541 - RNA, 19 nt, Artificial Sequence
  Description of Artificial Sequence: Synthetic oligonucleotide
  Sense strand starting at position 774 of SEQ ID NO: 1561420
cgggauauuccuugcuuuc

SEQ ID NO: 1670542 - RNA, 19 nt, Artificial Sequence
  Description of Artificial Sequence: Synthetic oligonucleotide
  Antisense strand to SEQ ID NO: 1670541
gaaagcaaggaauaucccg

SEQ ID NO: 1670543 - RNA, 19 nt, Artificial Sequence
  Description of Artificial Sequence: Synthetic oligonucleotide
  Sense strand starting at position 978 of SEQ ID NO: 1561420
uacugcaagccagaguuaa

SEQ ID NO: 1670544 - RNA, 19 nt, Artificial Sequence
  Description of Artificial Sequence: Synthetic oligonucleotide
  Antisense strand to SEQ ID NO: 1670543
uuaacucuggcuugcagua

SEQ ID NO: 1670545 - RNA, 19 nt, Artificial Sequence
  Description of Artificial Sequence: Synthetic oligonucleotide
  Sense strand starting at position 988 of SEQ ID NO: 1561420
cagaguuaagcuggagaaa

SEQ ID NO: 1670546 - RNA, 19 nt, Artificial Sequence
  Description of Artificial Sequence: Synthetic oligonucleotide
  Antisense strand to SEQ ID NO: 1670545
uuucuccagcuuaacucug

SEQ ID NO: 1670547 - RNA, 19 nt, Artificial Sequence
  Description of Artificial Sequence: Synthetic oligonucleotide
  Sense strand starting at position 1034 of SEQ ID NO: 1561420
cugcuugggaccuauguga

SEQ ID NO: 1670548 - RNA, 19 nt, Artificial Sequence
  Description of Artificial Sequence: Synthetic oligonucleotide
  Antisense strand to SEQ ID NO: 1670547
ucacauaggucccaagcag

SEQ ID NO: 1670549 - RNA, 19 nt, Artificial Sequence
  Description of Artificial Sequence: Synthetic oligonucleotide
  Sense strand starting at position 1101 of SEQ ID NO: 1561420
ggcucuaaucuuuggauuc

SEQ ID NO: 1670550 - RNA, 19 nt, Artificial Sequence
  Description of Artificial Sequence: Synthetic oligonucleotide
  Antisense strand to SEQ ID NO: 1670549
gaauccaaagauuagagcc

SEQ ID NO: 1670551 - RNA, 19 nt, Artificial Sequence
  Description of Artificial Sequence: Synthetic oligonucleotide
  Sense strand starting at position 1215 of SEQ ID NO: 1561420
ccaaguaagcucugauuac

SEQ ID NO: 1670552 - RNA, 19 nt, Artificial Sequence
  Description of Artificial Sequence: Synthetic oligonucleotide
  Antisense strand to SEQ ID NO: 1670551
guaaucagagcuuacuugg

SEQ ID NO: 1670553 - RNA, 19 nt, Artificial Sequence
  Description of Artificial Sequence: Synthetic oligonucleotide
  Sense strand starting at position 1219 of SEQ ID NO: 1561420
guaagcucugauuacacaa

SEQ ID NO: 1670554 - RNA, 19 nt, Artificial Sequence
  Description of Artificial Sequence: Synthetic oligonucleotide
  Antisense strand to SEQ ID NO: 1670553
uuguguaaucagagcuuac

SEQ ID NO: 1670555 - RNA, 19 nt, Artificial Sequence
  Description of Artificial Sequence: Synthetic oligonucleotide
  Sense strand starting at position 1289 of SEQ ID NO: 1561420
cuaaccgauuauugaauuu

SEQ ID NO: 1670556 - RNA, 19 nt, Artificial Sequence
  Description of Artificial Sequence: Synthetic oligonucleotide
  Antisense strand to SEQ ID NO: 1670555
aaauucaauaaucgguuag

SEQ ID NO: 1670557 - RNA, 19 nt, Artificial Sequence
  Description of Artificial Sequence: Synthetic oligonucleotide
  Sense strand starting at position 1375 of SEQ ID NO: 1561420
cugggugcucuauaacuuu

SEQ ID NO: 1670558 - RNA, 19 nt, Artificial Sequence
  Description of Artificial Sequence: Synthetic oligonucleotide
  Antisense strand to SEQ ID NO: 1670557
aaaguuauagagcacccag

SEQ ID NO: 1670559 - RNA, 19 nt, Artificial Sequence
  Description of Artificial Sequence: Synthetic oligonucleotide
  Sense strand starting at position 2234 of SEQ ID NO: 1561420
gaagguguuugccuuuaac

SEQ ID NO: 1670560 - RNA, 19 nt, Artificial Sequence
  Description of Artificial Sequence: Synthetic oligonucleotide
  Antisense strand to SEQ ID NO: 1670559
guuaaaggcaaacaccuuc

SEQ ID NO: 1670561 - RNA, 19 nt, Artificial Sequence
  Description of Artificial Sequence: Synthetic oligonucleotide
  Sense strand starting at position 2236 of SEQ ID NO: 1561420
agguguuugccuuuaacgu

SEQ ID NO: 1670562 - RNA, 19 nt, Artificial Sequence
  Description of Artificial Sequence: Synthetic oligonucleotide
  Antisense strand to SEQ ID NO: 1670561
acguuaaaggcaaacaccu

SEQ ID NO: 1670563 - RNA, 19 nt, Artificial Sequence
  Description of Artificial Sequence: Synthetic oligonucleotide
  Sense strand starting at position 2244 of SEQ ID NO: 1561420
gccuuuaacguugugugua

SEQ ID NO: 1670564 - RNA, 19 nt, Artificial Sequence
  Description of Artificial Sequence: Synthetic oligonucleotide
  Antisense strand to SEQ ID NO: 1670563
uacacacaacguuaaaggc

SEQ ID NO: 1670565 - RNA, 19 nt, Artificial Sequence
  Description of Artificial Sequence: Synthetic oligonucleotide
  Sense strand starting at position 2290 of SEQ ID NO: 1561420
cuauauggcugcucacaca

SEQ ID NO: 1670566 - RNA, 19 nt, Artificial Sequence
  Description of Artificial Sequence: Synthetic oligonucleotide
  Antisense strand to SEQ ID NO: 1670565
ugugugagcagccauauag

SEQ ID NO: 1670567 - RNA, 19 nt, Artificial Sequence
  Description of Artificial Sequence: Synthetic oligonucleotide
  Sense strand starting at position 3024 of SEQ ID NO: 1561420
agagcugcuguugaagauu

SEQ ID NO: 1670568 - RNA, 19 nt, Artificial Sequence
  Description of Artificial Sequence: Synthetic oligonucleotide
  Antisense strand to SEQ ID NO: 1670567
aaucuucaacagcagcucu

SEQ ID NO: 1670569 - RNA, 19 nt, Artificial Sequence
  Description of Artificial Sequence: Synthetic oligonucleotide
  Sense strand starting at position 3236 of SEQ ID NO: 1561420
ugggcaauaguguaaauau

SEQ ID NO: 1670570 - RNA, 19 nt, Artificial Sequence
  Description of Artificial Sequence: Synthetic oligonucleotide
  Antisense strand to SEQ ID NO: 1670569
auauuuacacuauugccca

SEQ ID NO: 1670571 - RNA, 19 nt, Artificial Sequence
  Description of Artificial Sequence: Synthetic oligonucleotide
  Sense strand starting at position 3245 of SEQ ID NO: 1561420
guguaaauaucucuaggug

SEQ ID NO: 1670572 - RNA, 19 nt, Artificial Sequence
  Description of Artificial Sequence: Synthetic oligonucleotide
  Antisense strand to SEQ ID NO: 1670571
caccuagagauauuuacac

SEQ ID NO: 1670573 - RNA, 19 nt, Artificial Sequence
  Description of Artificial Sequence: Synthetic oligonucleotide
  Sense strand starting at position 3246 of SEQ ID NO: 1561420
uguaaauaucucuagguga

SEQ ID NO: 1670574 - RNA, 19 nt, Artificial Sequence
  Description of Artificial Sequence: Synthetic oligonucleotide
  Antisense strand to SEQ ID NO: 1670573
ucaccuagagauauuuaca

SEQ ID NO: 1670575 - RNA, 19 nt, Artificial Sequence
  Description of Artificial Sequence: Synthetic oligonucleotide
  Sense strand starting at position 3248 of SEQ ID NO: 1561420
uaaauaucucuaggugaug

SEQ ID NO: 1670576 - RNA, 19 nt, Artificial Sequence
  Description of Artificial Sequence: Synthetic oligonucleotide
  Antisense strand to SEQ ID NO: 1670575
caucaccuagagauauuua

SEQ ID NO: 1670577 - RNA, 19 nt, Artificial Sequence
  Description of Artificial Sequence: Synthetic oligonucleotide
  Sense strand starting at position 3249 of SEQ ID NO: 1561420
aaauaucucuaggugauga

SEQ ID NO: 1670578 - RNA, 19 nt, Artificial Sequence
  Description of Artificial Sequence: Synthetic oligonucleotide
  Antisense strand to SEQ ID NO: 1670577
ucaucaccuagagauauuu

SEQ ID NO: 1670579 - RNA, 19 nt, Artificial Sequence
  Description of Artificial Sequence: Synthetic oligonucleotide
  Sense strand starting at position 3313 of SEQ ID NO: 1561420
uuaggugacuaguugcaaa

SEQ ID NO: 1670580 - RNA, 19 nt, Artificial Sequence
  Description of Artificial Sequence: Synthetic oligonucleotide
  Antisense strand to SEQ ID NO: 1670579
uuugcaacuagucaccuaa

SEQ ID NO: 1670581 - RNA, 19 nt, Artificial Sequence
  Description of Artificial Sequence: Synthetic oligonucleotide
  Sense strand starting at position 3316 of SEQ ID NO: 1561420
ggugacuaguugcaaauuu

SEQ ID NO: 1670582 - RNA, 19 nt, Artificial Sequence
  Description of Artificial Sequence: Synthetic oligonucleotide
  Antisense strand to SEQ ID NO: 1670581
aaauuugcaacuagucacc

SEQ ID NO: 1670583 - RNA, 19 nt, Artificial Sequence
  Description of Artificial Sequence: Synthetic oligonucleotide
  Sense strand starting at position 3353 of SEQ ID NO: 1561420
aaauguuugccgcuaaguc

SEQ ID NO: 1670584 - RNA, 19 nt, Artificial Sequence
  Description of Artificial Sequence: Synthetic oligonucleotide
  Antisense strand to SEQ ID NO: 1670583
gacuuagcggcaaacauuu

SEQ ID NO: 1670585 - RNA, 19 nt, Artificial Sequence
  Description of Artificial Sequence: Synthetic oligonucleotide
  Sense strand starting at position 3363 of SEQ ID NO: 1561420
cgcuaagucauggcuuugu

SEQ ID NO: 1670586 - RNA, 19 nt, Artificial Sequence
  Description of Artificial Sequence: Synthetic oligonucleotide
  Antisense strand to SEQ ID NO: 1670585
acaaagccaugacuuagcg

SEQ ID NO: 1670587 - RNA, 19 nt, Artificial Sequence
  Description of Artificial Sequence: Synthetic oligonucleotide
  Sense strand starting at position 3374 of SEQ ID NO: 1561420
ggcuuugucuuaccaauau

SEQ ID NO: 1670588 - RNA, 19 nt, Artificial Sequence
  Description of Artificial Sequence: Synthetic oligonucleotide
  Antisense strand to SEQ ID NO: 1670587
auauugguaagacaaagcc

SEQ ID NO: 1670589 - RNA, 19 nt, Artificial Sequence
  Description of Artificial Sequence: Synthetic oligonucleotide
  Sense strand starting at position 3484 of SEQ ID NO: 1561420
ccugacauuggccaaugua

SEQ ID NO: 1670590 - RNA, 19 nt, Artificial Sequence
  Description of Artificial Sequence: Synthetic oligonucleotide
  Antisense strand to SEQ ID NO: 1670589
uacauuggccaaugucagg

SEQ ID NO: 1670591 - RNA, 19 nt, Artificial Sequence
  Description of Artificial Sequence: Synthetic oligonucleotide
  Sense strand starting at position 3510 of SEQ ID NO: 1561420
ugacauuggugaucguuac

SEQ ID NO: 1670592 - RNA, 19 nt, Artificial Sequence
  Description of Artificial Sequence: Synthetic oligonucleotide
  Antisense strand to SEQ ID NO: 1670591
guaacgaucaccaauguca

SEQ ID NO: 1670593 - RNA, 19 nt, Artificial Sequence
  Description of Artificial Sequence: Synthetic oligonucleotide
  Sense strand starting at position 3511 of SEQ ID NO: 1561420
gacauuggugaucguuacu

SEQ ID NO: 1670594 - RNA, 19 nt, Artificial Sequence
  Description of Artificial Sequence: Synthetic oligonucleotide
  Antisense strand to SEQ ID NO: 1670593
aguaacgaucaccaauguc

SEQ ID NO: 1670595 - RNA, 19 nt, Artificial Sequence
  Description of Artificial Sequence: Synthetic oligonucleotide
  Sense strand starting at position 3612 of SEQ ID NO: 1561420
aaagacguauggucucauu

SEQ ID NO: 1670596 - RNA, 19 nt, Artificial Sequence
  Description of Artificial Sequence: Synthetic oligonucleotide
  Antisense strand to SEQ ID NO: 1670595
aaugagaccauacgucuuu

SEQ ID NO: 1670597 - RNA, 19 nt, Artificial Sequence
  Description of Artificial Sequence: Synthetic oligonucleotide
  Sense strand starting at position 15 of SEQ ID NO: 1561421
ucaauaacuugagagauuc

SEQ ID NO: 1670598 - RNA, 19 nt, Artificial Sequence
  Description of Artificial Sequence: Synthetic oligonucleotide
  Antisense strand to SEQ ID NO: 1670597
gaaucucucaaguuauuga

SEQ ID NO: 1670599 - RNA, 19 nt, Artificial Sequence
  Description of Artificial Sequence: Synthetic oligonucleotide
  Sense strand starting at position 50 of SEQ ID NO: 1561421
ucacuugugugcucaagaa

SEQ ID NO: 1670600 - RNA, 19 nt, Artificial Sequence
  Description of Artificial Sequence: Synthetic oligonucleotide
  Antisense strand to SEQ ID NO: 1670599
uucuugagcacacaaguga

SEQ ID NO: 1670601 - RNA, 19 nt, Artificial Sequence
  Description of Artificial Sequence: Synthetic oligonucleotide
  Sense strand starting at position 89 of SEQ ID NO: 1561421
gcaguauuucuuggugacu

SEQ ID NO: 1670602 - RNA, 19 nt, Artificial Sequence
  Description of Artificial Sequence: Synthetic oligonucleotide
  Antisense strand to SEQ ID NO: 1670601
agucaccaagaaauacugc

SEQ ID NO: 1670603 - RNA, 19 nt, Artificial Sequence
  Description of Artificial Sequence: Synthetic oligonucleotide
  Sense strand starting at position 502 of SEQ ID NO: 1561421
aggucaucuuaugggagaa

SEQ ID NO: 1670604 - RNA, 19 nt, Artificial Sequence
  Description of Artificial Sequence: Synthetic oligonucleotide
  Antisense strand to SEQ ID NO: 1670603
uucucccauaagaugaccu

SEQ ID NO: 1670605 - RNA, 19 nt, Artificial Sequence
  Description of Artificial Sequence: Synthetic oligonucleotide
  Sense strand starting at position 545 of SEQ ID NO: 1561421
uggacacucuagcuaacau

SEQ ID NO: 1670606 - RNA, 19 nt, Artificial Sequence
  Description of Artificial Sequence: Synthetic oligonucleotide
  Antisense strand to SEQ ID NO: 1670605
auguuagcuagagugucca

SEQ ID NO: 1670607 - RNA, 19 nt, Artificial Sequence
  Description of Artificial Sequence: Synthetic oligonucleotide
  Sense strand starting at position 570 of SEQ ID NO: 1561421
ggcaguuaucuugguuuau

SEQ ID NO: 1670608 - RNA, 19 nt, Artificial Sequence
  Description of Artificial Sequence: Synthetic oligonucleotide
  Antisense strand to SEQ ID NO: 1670607
auaaaccaagauaacugcc

SEQ ID NO: 1670609 - RNA, 19 nt, Artificial Sequence
  Description of Artificial Sequence: Synthetic oligonucleotide
  Sense strand starting at position 571 of SEQ ID NO: 1561421
gcaguuaucuugguuuauc

SEQ ID NO: 1670610 - RNA, 19 nt, Artificial Sequence
  Description of Artificial Sequence: Synthetic oligonucleotide
  Antisense strand to SEQ ID NO: 1670609
gauaaaccaagauaacugc

SEQ ID NO: 1670611 - RNA, 19 nt, Artificial Sequence
  Description of Artificial Sequence: Synthetic oligonucleotide
  Sense strand starting at position 695 of SEQ ID NO: 1561421
guaacaucucugugccuag

SEQ ID NO: 1670612 - RNA, 19 nt, Artificial Sequence
  Description of Artificial Sequence: Synthetic oligonucleotide
  Antisense strand to SEQ ID NO: 1670611
cuaggcacagagauguuac

SEQ ID NO: 1670613 - RNA, 19 nt, Artificial Sequence
  Description of Artificial Sequence: Synthetic oligonucleotide
  Sense strand starting at position 698 of SEQ ID NO: 1561421
acaucucugugccuagaca

SEQ ID NO: 1670614 - RNA, 19 nt, Artificial Sequence
  Description of Artificial Sequence: Synthetic oligonucleotide
  Antisense strand to SEQ ID NO: 1670613
ugucuaggcacagagaugu

SEQ ID NO: 1670615 - RNA, 19 nt, Artificial Sequence
  Description of Artificial Sequence: Synthetic oligonucleotide
  Sense strand starting at position 938 of SEQ ID NO: 1561421
uuaggaacgucagaggaaa

SEQ ID NO: 1670616 - RNA, 19 nt, Artificial Sequence
  Description of Artificial Sequence: Synthetic oligonucleotide
  Antisense strand to SEQ ID NO: 1670615
uuuccucugacguuccuaa

SEQ ID NO: 1670617 - RNA, 19 nt, Artificial Sequence
  Description of Artificial Sequence: Synthetic oligonucleotide
  Sense strand starting at position 980 of SEQ ID NO: 1561421
cagagugaggccggagaaa

SEQ ID NO: 1670618 - RNA, 19 nt, Artificial Sequence
  Description of Artificial Sequence: Synthetic oligonucleotide
  Antisense strand to SEQ ID NO: 1670617
uuucuccggccucacucug

SEQ ID NO: 1670619 - RNA, 19 nt, Artificial Sequence
  Description of Artificial Sequence: Synthetic oligonucleotide
  Sense strand starting at position 1013 of SEQ ID NO: 1561421
caagacucugcuugggaca

SEQ ID NO: 1670620 - RNA, 19 nt, Artificial Sequence
  Description of Artificial Sequence: Synthetic oligonucleotide
  Antisense strand to SEQ ID NO: 1670619
ugucccaagcagagucuug

SEQ ID NO: 1670621 - RNA, 19 nt, Artificial Sequence
  Description of Artificial Sequence: Synthetic oligonucleotide
  Sense strand starting at position 1094 of SEQ ID NO: 1561421
caauuagacugagguauuu

SEQ ID NO: 1670622 - RNA, 19 nt, Artificial Sequence
  Description of Artificial Sequence: Synthetic oligonucleotide
  Antisense strand to SEQ ID NO: 1670621
aaauaccucagucuaauug

SEQ ID NO: 1670623 - RNA, 19 nt, Artificial Sequence
  Description of Artificial Sequence: Synthetic oligonucleotide
  Sense strand starting at position 1566 of SEQ ID NO: 1561421
cgcacaaucugagaaagac

SEQ ID NO: 1670624 - RNA, 19 nt, Artificial Sequence
  Description of Artificial Sequence: Synthetic oligonucleotide
  Antisense strand to SEQ ID NO: 1670623
gucuuucucagauugugcg

SEQ ID NO: 1670625 - RNA, 19 nt, Artificial Sequence
  Description of Artificial Sequence: Synthetic oligonucleotide
  Sense strand starting at position 2020 of SEQ ID NO: 1561421
gcuccaaaugugugccuaa

SEQ ID NO: 1670626 - RNA, 19 nt, Artificial Sequence
  Description of Artificial Sequence: Synthetic oligonucleotide
  Antisense strand to SEQ ID NO: 1670625
uuaggcacacauuuggagc

SEQ ID NO: 1670627 - RNA, 19 nt, Artificial Sequence
  Description of Artificial Sequence: Synthetic oligonucleotide
  Sense strand starting at position 2021 of SEQ ID NO: 1561421
cuccaaaugugugccuaau

SEQ ID NO: 1670628 - RNA, 19 nt, Artificial Sequence
  Description of Artificial Sequence: Synthetic oligonucleotide
  Antisense strand to SEQ ID NO: 1670627
auuaggcacacauuuggag

SEQ ID NO: 1670629 - RNA, 19 nt, Artificial Sequence
  Description of Artificial Sequence: Synthetic oligonucleotide
  Sense strand starting at position 2023 of SEQ ID NO: 1561421
ccaaaugugugccuaauug

SEQ ID NO: 1670630 - RNA, 19 nt, Artificial Sequence
  Description of Artificial Sequence: Synthetic oligonucleotide
  Antisense strand to SEQ ID NO: 1670629
caauuaggcacacauuugg

SEQ ID NO: 1670631 - RNA, 19 nt, Artificial Sequence
  Description of Artificial Sequence: Synthetic oligonucleotide
  Sense strand starting at position 2050 of SEQ ID NO: 1561421
ccaguucugcgugucugau

SEQ ID NO: 1670632 - RNA, 19 nt, Artificial Sequence
  Description of Artificial Sequence: Synthetic oligonucleotide
  Antisense strand to SEQ ID NO: 1670631
aucagacacgcagaacugg

SEQ ID NO: 1670633 - RNA, 19 nt, Artificial Sequence
  Description of Artificial Sequence: Synthetic oligonucleotide
  Sense strand starting at position 2051 of SEQ ID NO: 1561421
caguucugcgugucugauu

SEQ ID NO: 1670634 - RNA, 19 nt, Artificial Sequence
  Description of Artificial Sequence: Synthetic oligonucleotide
  Antisense strand to SEQ ID NO: 1670633
aaucagacacgcagaacug

SEQ ID NO: 1670635 - RNA, 19 nt, Artificial Sequence
  Description of Artificial Sequence: Synthetic oligonucleotide
  Sense strand starting at position 2056 of SEQ ID NO: 1561421
cugcgugucugauuggaua

SEQ ID NO: 1670636 - RNA, 19 nt, Artificial Sequence
  Description of Artificial Sequence: Synthetic oligonucleotide
  Antisense strand to SEQ ID NO: 1670635
uauccaaucagacacgcag

SEQ ID NO: 1670637 - RNA, 19 nt, Artificial Sequence
  Description of Artificial Sequence: Synthetic oligonucleotide
  Sense strand starting at position 2141 of SEQ ID NO: 1561421
aagaaagagugauagccua

SEQ ID NO: 1670638 - RNA, 19 nt, Artificial Sequence
  Description of Artificial Sequence: Synthetic oligonucleotide
  Antisense strand to SEQ ID NO: 1670637
uaggcuaucacucuuucuu

SEQ ID NO: 1670639 - RNA, 19 nt, Artificial Sequence
  Description of Artificial Sequence: Synthetic oligonucleotide
  Sense strand starting at position 2224 of SEQ ID NO: 1561421
uucccuuaaccuuguguau

SEQ ID NO: 1670640 - RNA, 19 nt, Artificial Sequence
  Description of Artificial Sequence: Synthetic oligonucleotide
  Antisense strand to SEQ ID NO: 1670639
auacacaagguuaagggaa

SEQ ID NO: 1670641 - RNA, 19 nt, Artificial Sequence
  Description of Artificial Sequence: Synthetic oligonucleotide
  Sense strand starting at position 2227 of SEQ ID NO: 1561421
ccuuaaccuuguguauaag

SEQ ID NO: 1670642 - RNA, 19 nt, Artificial Sequence
  Description of Artificial Sequence: Synthetic oligonucleotide
  Antisense strand to SEQ ID NO: 1670641
cuuauacacaagguuaagg

SEQ ID NO: 1670643 - RNA, 19 nt, Artificial Sequence
  Description of Artificial Sequence: Synthetic oligonucleotide
  Sense strand starting at position 2346 of SEQ ID NO: 1561421
gaacuagcagccugagauu

SEQ ID NO: 1670644 - RNA, 19 nt, Artificial Sequence
  Description of Artificial Sequence: Synthetic oligonucleotide
  Antisense strand to SEQ ID NO: 1670643
aaucucaggcugcuaguuc

SEQ ID NO: 1670645 - RNA, 19 nt, Artificial Sequence
  Description of Artificial Sequence: Synthetic oligonucleotide
  Sense strand starting at position 2371 of SEQ ID NO: 1561421
aggagccaaucuuaugaaa

SEQ ID NO: 1670646 - RNA, 19 nt, Artificial Sequence
  Description of Artificial Sequence: Synthetic oligonucleotide
  Antisense strand to SEQ ID NO: 1670645
uuucauaagauuggcuccu

SEQ ID NO: 1670647 - RNA, 19 nt, Artificial Sequence
  Description of Artificial Sequence: Synthetic oligonucleotide
  Sense strand starting at position 2385 of SEQ ID NO: 1561421
ugaaauaagaugugagcca

SEQ ID NO: 1670648 - RNA, 19 nt, Artificial Sequence
  Description of Artificial Sequence: Synthetic oligonucleotide
  Antisense strand to SEQ ID NO: 1670647
uggcucacaucuuauuuca

SEQ ID NO: 1670649 - RNA, 19 nt, Artificial Sequence
  Description of Artificial Sequence: Synthetic oligonucleotide
  Sense strand starting at position 2392 of SEQ ID NO: 1561421
agaugugagccacauguga

SEQ ID NO: 1670650 - RNA, 19 nt, Artificial Sequence
  Description of Artificial Sequence: Synthetic oligonucleotide
  Antisense strand to SEQ ID NO: 1670649
ucacauguggcucacaucu

SEQ ID NO: 1670651 - RNA, 19 nt, Artificial Sequence
  Description of Artificial Sequence: Synthetic oligonucleotide
  Sense strand starting at position 3276 of SEQ ID NO: 1561421
uguaauaugugagcaauau

SEQ ID NO: 1670652 - RNA, 19 nt, Artificial Sequence
  Description of Artificial Sequence: Synthetic oligonucleotide
  Antisense strand to SEQ ID NO: 1670651
auauugcucacauauuaca

SEQ ID NO: 1670653 - RNA, 19 nt, Artificial Sequence
  Description of Artificial Sequence: Synthetic oligonucleotide
  Sense strand starting at position 3277 of SEQ ID NO: 1561421
guaauaugugagcaauaug

SEQ ID NO: 1670654 - RNA, 19 nt, Artificial Sequence
  Description of Artificial Sequence: Synthetic oligonucleotide
  Antisense strand to SEQ ID NO: 1670653
cauauugcucacauauuac

SEQ ID NO: 1670655 - RNA, 19 nt, Artificial Sequence
  Description of Artificial Sequence: Synthetic oligonucleotide
  Sense strand starting at position 3282 of SEQ ID NO: 1561421
augugagcaauauguaaag

SEQ ID NO: 1670656 - RNA, 19 nt, Artificial Sequence
  Description of Artificial Sequence: Synthetic oligonucleotide
  Antisense strand to SEQ ID NO: 1670655
cuuuacauauugcucacau

SEQ ID NO: 1670657 - RNA, 19 nt, Artificial Sequence
  Description of Artificial Sequence: Synthetic oligonucleotide
  Sense strand starting at position 3284 of SEQ ID NO: 1561421
gugagcaauauguaaagau

SEQ ID NO: 1670658 - RNA, 19 nt, Artificial Sequence
  Description of Artificial Sequence: Synthetic oligonucleotide
  Antisense strand to SEQ ID NO: 1670657
aucuuuacauauugcucac

SEQ ID NO: 1670659 - RNA, 19 nt, Artificial Sequence
  Description of Artificial Sequence: Synthetic oligonucleotide
  Sense strand starting at position 3322 of SEQ ID NO: 1561421
uuggaacuguaucuuugaa

SEQ ID NO: 1670660 - RNA, 19 nt, Artificial Sequence
  Description of Artificial Sequence: Synthetic oligonucleotide
  Antisense strand to SEQ ID NO: 1670659
uucaaagauacaguuccaa

SEQ ID NO: 1670661 - RNA, 19 nt, Artificial Sequence
  Description of Artificial Sequence: Synthetic oligonucleotide
  Sense strand starting at position 3324 of SEQ ID NO: 1561421
ggaacuguaucuuugaaac

SEQ ID NO: 1670662 - RNA, 19 nt, Artificial Sequence
  Description of Artificial Sequence: Synthetic oligonucleotide
  Antisense strand to SEQ ID NO: 1670661
guuucaaagauacaguucc

SEQ ID NO: 1670663 - RNA, 19 nt, Artificial Sequence
  Description of Artificial Sequence: Synthetic oligonucleotide
  Sense strand starting at position 3365 of SEQ ID NO: 1561421
agcaaauugcagcgacauu

SEQ ID NO: 1670664 - RNA, 19 nt, Artificial Sequence
  Description of Artificial Sequence: Synthetic oligonucleotide
  Antisense strand to SEQ ID NO: 1670663
aaugucgcugcaauuugcu

SEQ ID NO: 1670665 - RNA, 19 nt, Artificial Sequence
  Description of Artificial Sequence: Synthetic oligonucleotide
  Sense strand starting at position 3421 of SEQ ID NO: 1561421
uguuguauugaauguguca

SEQ ID NO: 1670666 - RNA, 19 nt, Artificial Sequence
  Description of Artificial Sequence: Synthetic oligonucleotide
  Antisense strand to SEQ ID NO: 1670665
ugacacauucaauacaaca

SEQ ID NO: 1670667 - RNA, 19 nt, Artificial Sequence
  Description of Artificial Sequence: Synthetic oligonucleotide
  Sense strand starting at position 3428 of SEQ ID NO: 1561421
uugaaugugucagcucuga

SEQ ID NO: 1670668 - RNA, 19 nt, Artificial Sequence
  Description of Artificial Sequence: Synthetic oligonucleotide
  Antisense strand to SEQ ID NO: 1670667
ucagagcugacacauucaa

SEQ ID NO: 1670669 - RNA, 19 nt, Artificial Sequence
  Description of Artificial Sequence: Synthetic oligonucleotide
  Sense strand starting at position 3455 of SEQ ID NO: 1561421
aggugaagggucugaacgu

SEQ ID NO: 1670670 - RNA, 19 nt, Artificial Sequence
  Description of Artificial Sequence: Synthetic oligonucleotide
  Antisense strand to SEQ ID NO: 1670669
acguucagacccuucaccu

SEQ ID NO: 1670671 - RNA, 19 nt, Artificial Sequence
  Description of Artificial Sequence: Synthetic oligonucleotide
  Sense strand starting at position 3550 of SEQ ID NO: 1561421
uggccauagaaaggucaga

SEQ ID NO: 1670672 - RNA, 19 nt, Artificial Sequence
  Description of Artificial Sequence: Synthetic oligonucleotide
  Antisense strand to SEQ ID NO: 1670671
ucugaccuuucuauggcca

SEQ ID NO: 1670673 - RNA, 19 nt, Artificial Sequence
  Description of Artificial Sequence: Synthetic oligonucleotide
  Sense strand starting at position 3555 of SEQ ID NO: 1561421
auagaaaggucagaagaua

SEQ ID NO: 1670674 - RNA, 19 nt, Artificial Sequence
  Description of Artificial Sequence: Synthetic oligonucleotide
  Antisense strand to SEQ ID NO: 1670673
uaucuucugaccuuucuau

SEQ ID NO: 1670675 - RNA, 19 nt, Artificial Sequence
  Description of Artificial Sequence: Synthetic oligonucleotide
  Sense strand starting at position 3563 of SEQ ID NO: 1561421
gucagaagauaucaagaau

SEQ ID NO: 1670676 - RNA, 19 nt, Artificial Sequence
  Description of Artificial Sequence: Synthetic oligonucleotide
  Antisense strand to SEQ ID NO: 1670675
auucuugauaucuucugac

SEQ ID NO: 1670677 - RNA, 19 nt, Artificial Sequence
  Description of Artificial Sequence: Synthetic oligonucleotide
  Sense strand starting at position 295 of SEQ ID NO: 1561422
uaguauuacaggcgcgaga

SEQ ID NO: 1670678 - RNA, 19 nt, Artificial Sequence
  Description of Artificial Sequence: Synthetic oligonucleotide
  Antisense strand to SEQ ID NO: 1670677
ucucgcgccuguaauacua

SEQ ID NO: 1670679 - RNA, 19 nt, Artificial Sequence
  Description of Artificial Sequence: Synthetic oligonucleotide
  Sense strand starting at position 365 of SEQ ID NO: 1561422
agaacagauuacuaguuga

SEQ ID NO: 1670680 - RNA, 19 nt, Artificial Sequence
  Description of Artificial Sequence: Synthetic oligonucleotide
  Antisense strand to SEQ ID NO: 1670679
ucaacuaguaaucuguucu

SEQ ID NO: 1670681 - RNA, 19 nt, Artificial Sequence
  Description of Artificial Sequence: Synthetic oligonucleotide
  Sense strand starting at position 449 of SEQ ID NO: 1561422
gggauccuucgugauggaa

SEQ ID NO: 1670682 - RNA, 19 nt, Artificial Sequence
  Description of Artificial Sequence: Synthetic oligonucleotide
  Antisense strand to SEQ ID NO: 1670681
uuccaucacgaaggauccc

SEQ ID NO: 1670683 - RNA, 19 nt, Artificial Sequence
  Description of Artificial Sequence: Synthetic oligonucleotide
  Sense strand starting at position 452 of SEQ ID NO: 1561422
auccuucgugauggaaaua

SEQ ID NO: 1670684 - RNA, 19 nt, Artificial Sequence
  Description of Artificial Sequence: Synthetic oligonucleotide
  Antisense strand to SEQ ID NO: 1670683
uauuuccaucacgaaggau

SEQ ID NO: 1670685 - RNA, 19 nt, Artificial Sequence
  Description of Artificial Sequence: Synthetic oligonucleotide
  Sense strand starting at position 453 of SEQ ID NO: 1561422
uccuucgugauggaaauau

SEQ ID NO: 1670686 - RNA, 19 nt, Artificial Sequence
  Description of Artificial Sequence: Synthetic oligonucleotide
  Antisense strand to SEQ ID NO: 1670685
auauuuccaucacgaagga

SEQ ID NO: 1670687 - RNA, 19 nt, Artificial Sequence
  Description of Artificial Sequence: Synthetic oligonucleotide
  Sense strand starting at position 463 of SEQ ID NO: 1561422
uggaaauauucugcaucuc

SEQ ID NO: 1670688 - RNA, 19 nt, Artificial Sequence
  Description of Artificial Sequence: Synthetic oligonucleotide
  Antisense strand to SEQ ID NO: 1670687
gagaugcagaauauuucca

SEQ ID NO: 1670689 - RNA, 19 nt, Artificial Sequence
  Description of Artificial Sequence: Synthetic oligonucleotide
  Sense strand starting at position 464 of SEQ ID NO: 1561422
ggaaauauucugcaucuca

SEQ ID NO: 1670690 - RNA, 19 nt, Artificial Sequence
  Description of Artificial Sequence: Synthetic oligonucleotide
  Antisense strand to SEQ ID NO: 1670689
ugagaugcagaauauuucc

SEQ ID NO: 1670691 - RNA, 19 nt, Artificial Sequence
  Description of Artificial Sequence: Synthetic oligonucleotide
  Sense strand starting at position 471 of SEQ ID NO: 1561422
uucugcaucucaguuguga

SEQ ID NO: 1670692 - RNA, 19 nt, Artificial Sequence
  Description of Artificial Sequence: Synthetic oligonucleotide
  Antisense strand to SEQ ID NO: 1670691
ucacaacugagaugcagaa

SEQ ID NO: 1670693 - RNA, 19 nt, Artificial Sequence
  Description of Artificial Sequence: Synthetic oligonucleotide
  Sense strand starting at position 852 of SEQ ID NO: 1561422
guacauaggguaugcauua

SEQ ID NO: 1670694 - RNA, 19 nt, Artificial Sequence
  Description of Artificial Sequence: Synthetic oligonucleotide
  Antisense strand to SEQ ID NO: 1670693
uaaugcauacccuauguac

SEQ ID NO: 1670695 - RNA, 19 nt, Artificial Sequence
  Description of Artificial Sequence: Synthetic oligonucleotide
  Sense strand starting at position 859 of SEQ ID NO: 1561422
ggguaugcauuacuuguua

SEQ ID NO: 1670696 - RNA, 19 nt, Artificial Sequence
  Description of Artificial Sequence: Synthetic oligonucleotide
  Antisense strand to SEQ ID NO: 1670695
uaacaaguaaugcauaccc

SEQ ID NO: 1670697 - RNA, 19 nt, Artificial Sequence
  Description of Artificial Sequence: Synthetic oligonucleotide
  Sense strand starting at position 871 of SEQ ID NO: 1561422
cuuguuacugcaugugaau

SEQ ID NO: 1670698 - RNA, 19 nt, Artificial Sequence
  Description of Artificial Sequence: Synthetic oligonucleotide
  Antisense strand to SEQ ID NO: 1670697
auucacaugcaguaacaag

SEQ ID NO: 1670699 - RNA, 19 nt, Artificial Sequence
  Description of Artificial Sequence: Synthetic oligonucleotide
  Sense strand starting at position 874 of SEQ ID NO: 1561422
guuacugcaugugaauuua

SEQ ID NO: 1670700 - RNA, 19 nt, Artificial Sequence
  Description of Artificial Sequence: Synthetic oligonucleotide
  Antisense strand to SEQ ID NO: 1670699
uaaauucacaugcaguaac

SEQ ID NO: 1670701 - RNA, 19 nt, Artificial Sequence
  Description of Artificial Sequence: Synthetic oligonucleotide
  Sense strand starting at position 1300 of SEQ ID NO: 1561422
cgaccagucacggguacuu

SEQ ID NO: 1670702 - RNA, 19 nt, Artificial Sequence
  Description of Artificial Sequence: Synthetic oligonucleotide
  Antisense strand to SEQ ID NO: 1670701
aaguacccgugacuggucg

SEQ ID NO: 1670703 - RNA, 19 nt, Artificial Sequence
  Description of Artificial Sequence: Synthetic oligonucleotide
  Sense strand starting at position 1447 of SEQ ID NO: 1561422
ccuggugagcuccgaaacu

SEQ ID NO: 1670704 - RNA, 19 nt, Artificial Sequence
  Description of Artificial Sequence: Synthetic oligonucleotide
  Antisense strand to SEQ ID NO: 1670703
aguuucggagcucaccagg

SEQ ID NO: 1670705 - RNA, 19 nt, Artificial Sequence
  Description of Artificial Sequence: Synthetic oligonucleotide
  Sense strand starting at position 1492 of SEQ ID NO: 1561422
auaaaugaaugugggaaga

SEQ ID NO: 1670706 - RNA, 19 nt, Artificial Sequence
  Description of Artificial Sequence: Synthetic oligonucleotide
  Antisense strand to SEQ ID NO: 1670705
ucuucccacauucauuuau

SEQ ID NO: 1670707 - RNA, 19 nt, Artificial Sequence
  Description of Artificial Sequence: Synthetic oligonucleotide
  Sense strand starting at position 1528 of SEQ ID NO: 1561422
gcaugagugaaugagugaa

SEQ ID NO: 1670708 - RNA, 19 nt, Artificial Sequence
  Description of Artificial Sequence: Synthetic oligonucleotide
  Antisense strand to SEQ ID NO: 1670707
uucacucauucacucaugc

SEQ ID NO: 1670709 - RNA, 19 nt, Artificial Sequence
  Description of Artificial Sequence: Synthetic oligonucleotide
  Sense strand starting at position 1579 of SEQ ID NO: 1561422
aacugaucgccauaaggcu

SEQ ID NO: 1670710 - RNA, 19 nt, Artificial Sequence
  Description of Artificial Sequence: Synthetic oligonucleotide
  Antisense strand to SEQ ID NO: 1670709
agccuuauggcgaucaguu

SEQ ID NO: 1670711 - RNA, 19 nt, Artificial Sequence
  Description of Artificial Sequence: Synthetic oligonucleotide
  Sense strand starting at position 1598 of SEQ ID NO: 1561422
cgcguucaccgagagaaca

SEQ ID NO: 1670712 - RNA, 19 nt, Artificial Sequence
  Description of Artificial Sequence: Synthetic oligonucleotide
  Antisense strand to SEQ ID NO: 1670711
uguucucucggugaacgcg

SEQ ID NO: 1670713 - RNA, 19 nt, Artificial Sequence
  Description of Artificial Sequence: Synthetic oligonucleotide
  Sense strand starting at position 2237 of SEQ ID NO: 1561422
ccuggaaccuugcugaguu

SEQ ID NO: 1670714 - RNA, 19 nt, Artificial Sequence
  Description of Artificial Sequence: Synthetic oligonucleotide
  Antisense strand to SEQ ID NO: 1670713
aacucagcaagguuccagg

SEQ ID NO: 1670715 - RNA, 19 nt, Artificial Sequence
  Description of Artificial Sequence: Synthetic oligonucleotide
  Sense strand starting at position 2306 of SEQ ID NO: 1561422
gcuggaauccacgcgguuu

SEQ ID NO: 1670716 - RNA, 19 nt, Artificial Sequence
  Description of Artificial Sequence: Synthetic oligonucleotide
  Antisense strand to SEQ ID NO: 1670715
aaaccgcguggauuccagc

SEQ ID NO: 1670717 - RNA, 19 nt, Artificial Sequence
  Description of Artificial Sequence: Synthetic oligonucleotide
  Sense strand starting at position 2677 of SEQ ID NO: 1561422
cugguuaguacuugggaga

SEQ ID NO: 1670718 - RNA, 19 nt, Artificial Sequence
  Description of Artificial Sequence: Synthetic oligonucleotide
  Antisense strand to SEQ ID NO: 1670717
ucucccaaguacuaaccag

SEQ ID NO: 1670719 - RNA, 19 nt, Artificial Sequence
  Description of Artificial Sequence: Synthetic oligonucleotide
  Sense strand starting at position 2707 of SEQ ID NO: 1561422
caccgagugcuguuggcua

SEQ ID NO: 1670720 - RNA, 19 nt, Artificial Sequence
  Description of Artificial Sequence: Synthetic oligonucleotide
  Antisense strand to SEQ ID NO: 1670719
uagccaacagcacucggug

SEQ ID NO: 1670721 - RNA, 19 nt, Artificial Sequence
  Description of Artificial Sequence: Synthetic oligonucleotide
  Sense strand starting at position 2709 of SEQ ID NO: 1561422
ccgagugcuguuggcuaaa

SEQ ID NO: 1670722 - RNA, 19 nt, Artificial Sequence
  Description of Artificial Sequence: Synthetic oligonucleotide
  Antisense strand to SEQ ID NO: 1670721
uuuagccaacagcacucgg

SEQ ID NO: 1670723 - RNA, 19 nt, Artificial Sequence
  Description of Artificial Sequence: Synthetic oligonucleotide
  Sense strand starting at position 3344 of SEQ ID NO: 1561422
ugggacuucucucugaacu

SEQ ID NO: 1670724 - RNA, 19 nt, Artificial Sequence
  Description of Artificial Sequence: Synthetic oligonucleotide
  Antisense strand to SEQ ID NO: 1670723
aguucagagagaaguccca

SEQ ID NO: 1670725 - RNA, 19 nt, Artificial Sequence
  Description of Artificial Sequence: Synthetic oligonucleotide
  Sense strand starting at position 3346 of SEQ ID NO: 1561422
ggacuucucucugaacugu

SEQ ID NO: 1670726 - RNA, 19 nt, Artificial Sequence
  Description of Artificial Sequence: Synthetic oligonucleotide
  Antisense strand to SEQ ID NO: 1670725
acaguucagagagaagucc

SEQ ID NO: 1670727 - RNA, 19 nt, Artificial Sequence
  Description of Artificial Sequence: Synthetic oligonucleotide
  Sense strand starting at position 3369 of SEQ ID NO: 1561422
gccucuaucugcuuugaac

SEQ ID NO: 1670728 - RNA, 19 nt, Artificial Sequence
  Description of Artificial Sequence: Synthetic oligonucleotide
  Antisense strand to SEQ ID NO: 1670727
guucaaagcagauagaggc

SEQ ID NO: 1670729 - RNA, 19 nt, Artificial Sequence
  Description of Artificial Sequence: Synthetic oligonucleotide
  Sense strand starting at position 3444 of SEQ ID NO: 1561422
ggaugaaucuguuaagaga

SEQ ID NO: 1670730 - RNA, 19 nt, Artificial Sequence
  Description of Artificial Sequence: Synthetic oligonucleotide
  Antisense strand to SEQ ID NO: 1670729
ucucuuaacagauucaucc

SEQ ID NO: 1670731 - RNA, 19 nt, Artificial Sequence
  Description of Artificial Sequence: Synthetic oligonucleotide
  Sense strand starting at position 3489 of SEQ ID NO: 1561422
ugagggaugguguguuagu

SEQ ID NO: 1670732 - RNA, 19 nt, Artificial Sequence
  Description of Artificial Sequence: Synthetic oligonucleotide
  Antisense strand to SEQ ID NO: 1670731
acuaacacaccaucccuca

SEQ ID NO: 1670733 - RNA, 19 nt, Artificial Sequence
  Description of Artificial Sequence: Synthetic oligonucleotide
  Sense strand starting at position 3490 of SEQ ID NO: 1561422
gagggaugguguguuaguu

SEQ ID NO: 1670734 - RNA, 19 nt, Artificial Sequence
  Description of Artificial Sequence: Synthetic oligonucleotide
  Antisense strand to SEQ ID NO: 1670733
aacuaacacaccaucccuc

SEQ ID NO: 1670735 - RNA, 19 nt, Artificial Sequence
  Description of Artificial Sequence: Synthetic oligonucleotide
  Sense strand starting at position 3502 of SEQ ID NO: 1561422
guuaguuuccugugguuau

SEQ ID NO: 1670736 - RNA, 19 nt, Artificial Sequence
  Description of Artificial Sequence: Synthetic oligonucleotide
  Antisense strand to SEQ ID NO: 1670735
auaaccacaggaaacuaac

SEQ ID NO: 1670737 - RNA, 19 nt, Artificial Sequence
  Description of Artificial Sequence: Synthetic oligonucleotide
  Sense strand starting at position 3513 of SEQ ID NO: 1561422
gugguuaugcagcaaauua

SEQ ID NO: 1670738 - RNA, 19 nt, Artificial Sequence
  Description of Artificial Sequence: Synthetic oligonucleotide
  Antisense strand to SEQ ID NO: 1670737
uaauuugcugcauaaccac

SEQ ID NO: 1670739 - RNA, 19 nt, Artificial Sequence
  Description of Artificial Sequence: Synthetic oligonucleotide
  Sense strand starting at position 3587 of SEQ ID NO: 1561422
ccagaagucuaacaucgau

SEQ ID NO: 1670740 - RNA, 19 nt, Artificial Sequence
  Description of Artificial Sequence: Synthetic oligonucleotide
  Antisense strand to SEQ ID NO: 1670739
aucgauguuagacuucugg

SEQ ID NO: 1670741 - RNA, 19 nt, Artificial Sequence
  Description of Artificial Sequence: Synthetic oligonucleotide
  Sense strand starting at position 3590 of SEQ ID NO: 1561422
gaagucuaacaucgauaug

SEQ ID NO: 1670742 - RNA, 19 nt, Artificial Sequence
  Description of Artificial Sequence: Synthetic oligonucleotide
  Antisense strand to SEQ ID NO: 1670741
cauaucgauguuagacuuc

SEQ ID NO: 1670743 - RNA, 19 nt, Artificial Sequence
  Description of Artificial Sequence: Synthetic oligonucleotide
  Sense strand starting at position 3593 of SEQ ID NO: 1561422
gucuaacaucgauaugacu

SEQ ID NO: 1670744 - RNA, 19 nt, Artificial Sequence
  Description of Artificial Sequence: Synthetic oligonucleotide
  Antisense strand to SEQ ID NO: 1670743
agucauaucgauguuagac

SEQ ID NO: 1670745 - RNA, 19 nt, Artificial Sequence
  Description of Artificial Sequence: Synthetic oligonucleotide
  Sense strand starting at position 3600 of SEQ ID NO: 1561422
aucgauaugacugagcuga

SEQ ID NO: 1670746 - RNA, 19 nt, Artificial Sequence
  Description of Artificial Sequence: Synthetic oligonucleotide
  Antisense strand to SEQ ID NO: 1670745
ucagcucagucauaucgau

SEQ ID NO: 1670747 - RNA, 19 nt, Artificial Sequence
  Description of Artificial Sequence: Synthetic oligonucleotide
  Sense strand starting at position 3602 of SEQ ID NO: 1561422
cgauaugacugagcugaaa

SEQ ID NO: 1670748 - RNA, 19 nt, Artificial Sequence
  Description of Artificial Sequence: Synthetic oligonucleotide
  Antisense strand to SEQ ID NO: 1670747
uuucagcucagucauaucg

SEQ ID NO: 1670749 - RNA, 19 nt, Artificial Sequence
  Description of Artificial Sequence: Synthetic oligonucleotide
  Sense strand starting at position 3704 of SEQ ID NO: 1561422
ccauguauuccuuggcuuu

SEQ ID NO: 1670750 - RNA, 19 nt, Artificial Sequence
  Description of Artificial Sequence: Synthetic oligonucleotide
  Antisense strand to SEQ ID NO: 1670749
aaagccaaggaauacaugg

SEQ ID NO: 1670751 - RNA, 19 nt, Artificial Sequence
  Description of Artificial Sequence: Synthetic oligonucleotide
  Sense strand starting at position 3741 of SEQ ID NO: 1561422
ucaaguaacugguaacauc

SEQ ID NO: 1670752 - RNA, 19 nt, Artificial Sequence
  Description of Artificial Sequence: Synthetic oligonucleotide
  Antisense strand to SEQ ID NO: 1670751
gauguuaccaguuacuuga

SEQ ID NO: 1670753 - RNA, 19 nt, Artificial Sequence
  Description of Artificial Sequence: Synthetic oligonucleotide
  Sense strand starting at position 3805 of SEQ ID NO: 1561422
uuaucuuauuugcaugaga

SEQ ID NO: 1670754 - RNA, 19 nt, Artificial Sequence
  Description of Artificial Sequence: Synthetic oligonucleotide
  Antisense strand to SEQ ID NO: 1670753
ucucaugcaaauaagauaa

SEQ ID NO: 1670755 - RNA, 19 nt, Artificial Sequence
  Description of Artificial Sequence: Synthetic oligonucleotide
  Sense strand starting at position 3810 of SEQ ID NO: 1561422
uuauuugcaugagagucaa

SEQ ID NO: 1670756 - RNA, 19 nt, Artificial Sequence
  Description of Artificial Sequence: Synthetic oligonucleotide
  Antisense strand to SEQ ID NO: 1670755
uugacucucaugcaaauaa

SEQ ID NO: 1670757 - RNA, 19 nt, Artificial Sequence
  Description of Artificial Sequence: Synthetic oligonucleotide
  Sense strand starting at position 27 of SEQ ID NO: 1561423
ucaauaguguuaugcaaua

SEQ ID NO: 1670758 - RNA, 19 nt, Artificial Sequence
  Description of Artificial Sequence: Synthetic oligonucleotide
  Antisense strand to SEQ ID NO: 1670757
uauugcauaacacuauuga

SEQ ID NO: 1670759 - RNA, 19 nt, Artificial Sequence
  Description of Artificial Sequence: Synthetic oligonucleotide
  Sense strand starting at position 523 of SEQ ID NO: 1561423
ucaaguguauucuuuggua

SEQ ID NO: 1670760 - RNA, 19 nt, Artificial Sequence
  Description of Artificial Sequence: Synthetic oligonucleotide
  Antisense strand to SEQ ID NO: 1670759
uaccaaagaauacacuuga

SEQ ID NO: 1670761 - RNA, 19 nt, Artificial Sequence
  Description of Artificial Sequence: Synthetic oligonucleotide
  Sense strand starting at position 525 of SEQ ID NO: 1561423
aaguguauucuuugguaaa

SEQ ID NO: 1670762 - RNA, 19 nt, Artificial Sequence
  Description of Artificial Sequence: Synthetic oligonucleotide
  Antisense strand to SEQ ID NO: 1670761
uuuaccaaagaauacacuu

SEQ ID NO: 1670763 - RNA, 19 nt, Artificial Sequence
  Description of Artificial Sequence: Synthetic oligonucleotide
  Sense strand starting at position 526 of SEQ ID NO: 1561423
aguguauucuuugguaaau

SEQ ID NO: 1670764 - RNA, 19 nt, Artificial Sequence
  Description of Artificial Sequence: Synthetic oligonucleotide
  Antisense strand to SEQ ID NO: 1670763
auuuaccaaagaauacacu

SEQ ID NO: 1670765 - RNA, 19 nt, Artificial Sequence
  Description of Artificial Sequence: Synthetic oligonucleotide
  Sense strand starting at position 527 of SEQ ID NO: 1561423
guguauucuuugguaaauu

SEQ ID NO: 1670766 - RNA, 19 nt, Artificial Sequence
  Description of Artificial Sequence: Synthetic oligonucleotide
  Antisense strand to SEQ ID NO: 1670765
aauuuaccaaagaauacac

SEQ ID NO: 1670767 - RNA, 19 nt, Artificial Sequence
  Description of Artificial Sequence: Synthetic oligonucleotide
  Sense strand starting at position 624 of SEQ ID NO: 1561423
uuccaucucgauuguacaa

SEQ ID NO: 1670768 - RNA, 19 nt, Artificial Sequence
  Description of Artificial Sequence: Synthetic oligonucleotide
  Antisense strand to SEQ ID NO: 1670767
uuguacaaucgagauggaa

SEQ ID NO: 1670769 - RNA, 19 nt, Artificial Sequence
  Description of Artificial Sequence: Synthetic oligonucleotide
  Sense strand starting at position 626 of SEQ ID NO: 1561423
ccaucucgauuguacaaau

SEQ ID NO: 1670770 - RNA, 19 nt, Artificial Sequence
  Description of Artificial Sequence: Synthetic oligonucleotide
  Antisense strand to SEQ ID NO: 1670769
auuuguacaaucgagaugg

SEQ ID NO: 1670771 - RNA, 19 nt, Artificial Sequence
  Description of Artificial Sequence: Synthetic oligonucleotide
  Sense strand starting at position 1075 of SEQ ID NO: 1561423
guagcugggugcucuacaa

SEQ ID NO: 1670772 - RNA, 19 nt, Artificial Sequence
  Description of Artificial Sequence: Synthetic oligonucleotide
  Antisense strand to SEQ ID NO: 1670771
uuguagagcacccagcuac

SEQ ID NO: 1670773 - RNA, 19 nt, Artificial Sequence
  Description of Artificial Sequence: Synthetic oligonucleotide
  Sense strand starting at position 1565 of SEQ ID NO: 1561423
ugaacaaucugggaaagac

SEQ ID NO: 1670774 - RNA, 19 nt, Artificial Sequence
  Description of Artificial Sequence: Synthetic oligonucleotide
  Antisense strand to SEQ ID NO: 1670773
gucuuucccagauuguuca

SEQ ID NO: 1670775 - RNA, 19 nt, Artificial Sequence
  Description of Artificial Sequence: Synthetic oligonucleotide
  Sense strand starting at position 1759 of SEQ ID NO: 1561423
gaguucugccacugccaca

SEQ ID NO: 1670776 - RNA, 19 nt, Artificial Sequence
  Description of Artificial Sequence: Synthetic oligonucleotide
  Antisense strand to SEQ ID NO: 1670775
uguggcaguggcagaacuc

SEQ ID NO: 1670777 - RNA, 19 nt, Artificial Sequence
  Description of Artificial Sequence: Synthetic oligonucleotide
  Sense strand starting at position 1981 of SEQ ID NO: 1561423
ggcgucagcgagagacaau

SEQ ID NO: 1670778 - RNA, 19 nt, Artificial Sequence
  Description of Artificial Sequence: Synthetic oligonucleotide
  Antisense strand to SEQ ID NO: 1670777
auugucucucgcugacgcc

SEQ ID NO: 1670779 - RNA, 19 nt, Artificial Sequence
  Description of Artificial Sequence: Synthetic oligonucleotide
  Sense strand starting at position 2116 of SEQ ID NO: 1561423
gguccugaguuacagaaga

SEQ ID NO: 1670780 - RNA, 19 nt, Artificial Sequence
  Description of Artificial Sequence: Synthetic oligonucleotide
  Antisense strand to SEQ ID NO: 1670779
ucuucuguaacucaggacc

SEQ ID NO: 1670781 - RNA, 19 nt, Artificial Sequence
  Description of Artificial Sequence: Synthetic oligonucleotide
  Sense strand starting at position 2333 of SEQ ID NO: 1561423
ccggguaucugagauuaca

SEQ ID NO: 1670782 - RNA, 19 nt, Artificial Sequence
  Description of Artificial Sequence: Synthetic oligonucleotide
  Antisense strand to SEQ ID NO: 1670781
uguaaucucagauacccgg

SEQ ID NO: 1670783 - RNA, 19 nt, Artificial Sequence
  Description of Artificial Sequence: Synthetic oligonucleotide
  Sense strand starting at position 2637 of SEQ ID NO: 1561423
guauucugcugucauauua

SEQ ID NO: 1670784 - RNA, 19 nt, Artificial Sequence
  Description of Artificial Sequence: Synthetic oligonucleotide
  Antisense strand to SEQ ID NO: 1670783
uaauaugacagcagaauac

SEQ ID NO: 1670785 - RNA, 19 nt, Artificial Sequence
  Description of Artificial Sequence: Synthetic oligonucleotide
  Sense strand starting at position 2790 of SEQ ID NO: 1561423
uuuguaaucucuuguaagu

SEQ ID NO: 1670786 - RNA, 19 nt, Artificial Sequence
  Description of Artificial Sequence: Synthetic oligonucleotide
  Antisense strand to SEQ ID NO: 1670785
acuuacaagagauuacaaa

SEQ ID NO: 1670787 - RNA, 19 nt, Artificial Sequence
  Description of Artificial Sequence: Synthetic oligonucleotide
  Sense strand starting at position 2792 of SEQ ID NO: 1561423
uguaaucucuuguaaguuu

SEQ ID NO: 1670788 - RNA, 19 nt, Artificial Sequence
  Description of Artificial Sequence: Synthetic oligonucleotide
  Antisense strand to SEQ ID NO: 1670787
aaacuuacaagagauuaca

SEQ ID NO: 1670789 - RNA, 19 nt, Artificial Sequence
  Description of Artificial Sequence: Synthetic oligonucleotide
  Sense strand starting at position 3127 of SEQ ID NO: 1561423
ggaaguggagguuguguaa

SEQ ID NO: 1670790 - RNA, 19 nt, Artificial Sequence
  Description of Artificial Sequence: Synthetic oligonucleotide
  Antisense strand to SEQ ID NO: 1670789
uuacacaaccuccacuucc

SEQ ID NO: 1670791 - RNA, 19 nt, Artificial Sequence
  Description of Artificial Sequence: Synthetic oligonucleotide
  Sense strand starting at position 3233 of SEQ ID NO: 1561423
auuugaacuuauugaacgu

SEQ ID NO: 1670792 - RNA, 19 nt, Artificial Sequence
  Description of Artificial Sequence: Synthetic oligonucleotide
  Antisense strand to SEQ ID NO: 1670791
acguucaauaaguucaaau

SEQ ID NO: 1670793 - RNA, 19 nt, Artificial Sequence
  Description of Artificial Sequence: Synthetic oligonucleotide
  Sense strand starting at position 3266 of SEQ ID NO: 1561423
gucaccaagucuuggaaca

SEQ ID NO: 1670794 - RNA, 19 nt, Artificial Sequence
  Description of Artificial Sequence: Synthetic oligonucleotide
  Antisense strand to SEQ ID NO: 1670793
uguuccaagacuuggugac

SEQ ID NO: 1670795 - RNA, 19 nt, Artificial Sequence
  Description of Artificial Sequence: Synthetic oligonucleotide
  Sense strand starting at position 3276 of SEQ ID NO: 1561423
cuuggaacagguuauguga

SEQ ID NO: 1670796 - RNA, 19 nt, Artificial Sequence
  Description of Artificial Sequence: Synthetic oligonucleotide
  Antisense strand to SEQ ID NO: 1670795
ucacauaaccuguuccaag

SEQ ID NO: 1670797 - RNA, 19 nt, Artificial Sequence
  Description of Artificial Sequence: Synthetic oligonucleotide
  Sense strand starting at position 3351 of SEQ ID NO: 1561423
ccaauacauugguuauuga

SEQ ID NO: 1670798 - RNA, 19 nt, Artificial Sequence
  Description of Artificial Sequence: Synthetic oligonucleotide
  Antisense strand to SEQ ID NO: 1670797
ucaauaaccaauguauugg

SEQ ID NO: 1670799 - RNA, 19 nt, Artificial Sequence
  Description of Artificial Sequence: Synthetic oligonucleotide
  Sense strand starting at position 3524 of SEQ ID NO: 1561423
cuccuugucugugcagaga

SEQ ID NO: 1670800 - RNA, 19 nt, Artificial Sequence
  Description of Artificial Sequence: Synthetic oligonucleotide
  Antisense strand to SEQ ID NO: 1670799
ucucugcacagacaaggag

SEQ ID NO: 1670801 - RNA, 19 nt, Artificial Sequence
  Description of Artificial Sequence: Synthetic oligonucleotide
  Sense strand starting at position 3585 of SEQ ID NO: 1561423
gguggugaauccuccuagu

SEQ ID NO: 1670802 - RNA, 19 nt, Artificial Sequence
  Description of Artificial Sequence: Synthetic oligonucleotide
  Antisense strand to SEQ ID NO: 1670801
acuaggaggauucaccacc

SEQ ID NO: 1670803 - RNA, 19 nt, Artificial Sequence
  Description of Artificial Sequence: Synthetic oligonucleotide
  Sense strand starting at position 3588 of SEQ ID NO: 1561423
ggugaauccuccuagucug

SEQ ID NO: 1670804 - RNA, 19 nt, Artificial Sequence
  Description of Artificial Sequence: Synthetic oligonucleotide
  Antisense strand to SEQ ID NO: 1670803
cagacuaggaggauucacc

SEQ ID NO: 1670805 - RNA, 19 nt, Artificial Sequence
  Description of Artificial Sequence: Synthetic oligonucleotide
  Sense strand starting at position 3594 of SEQ ID NO: 1561423
uccuccuagucugaugagu

SEQ ID NO: 1670806 - RNA, 19 nt, Artificial Sequence
  Description of Artificial Sequence: Synthetic oligonucleotide
  Antisense strand to SEQ ID NO: 1670805
acucaucagacuaggagga

SEQ ID NO: 1670807 - RNA, 19 nt, Artificial Sequence
  Description of Artificial Sequence: Synthetic oligonucleotide
  Sense strand starting at position 3600 of SEQ ID NO: 1561423
uagucugaugagugcggua

SEQ ID NO: 1670808 - RNA, 19 nt, Artificial Sequence
  Description of Artificial Sequence: Synthetic oligonucleotide
  Antisense strand to SEQ ID NO: 1670807
uaccgcacucaucagacua

SEQ ID NO: 1670809 - RNA, 19 nt, Artificial Sequence
  Description of Artificial Sequence: Synthetic oligonucleotide
  Sense strand starting at position 3602 of SEQ ID NO: 1561423
gucugaugagugcgguauc

SEQ ID NO: 1670810 - RNA, 19 nt, Artificial Sequence
  Description of Artificial Sequence: Synthetic oligonucleotide
  Antisense strand to SEQ ID NO: 1670809
gauaccgcacucaucagac

SEQ ID NO: 1670811 - RNA, 19 nt, Artificial Sequence
  Description of Artificial Sequence: Synthetic oligonucleotide
  Sense strand starting at position 3605 of SEQ ID NO: 1561423
ugaugagugcgguauccga

SEQ ID NO: 1670812 - RNA, 19 nt, Artificial Sequence
  Description of Artificial Sequence: Synthetic oligonucleotide
  Antisense strand to SEQ ID NO: 1670811
ucggauaccgcacucauca

SEQ ID NO: 1670813 - RNA, 19 nt, Artificial Sequence
  Description of Artificial Sequence: Synthetic oligonucleotide
  Sense strand starting at position 3750 of SEQ ID NO: 1561423
ggaacaaguugugugagcu

SEQ ID NO: 1670814 - RNA, 19 nt, Artificial Sequence
  Description of Artificial Sequence: Synthetic oligonucleotide
  Antisense strand to SEQ ID NO: 1670813
agcucacacaacuuguucc

SEQ ID NO: 1670815 - RNA, 19 nt, Artificial Sequence
  Description of Artificial Sequence: Synthetic oligonucleotide
  Sense strand starting at position 3751 of SEQ ID NO: 1561423
gaacaaguugugugagcug

SEQ ID NO: 1670816 - RNA, 19 nt, Artificial Sequence
  Description of Artificial Sequence: Synthetic oligonucleotide
  Antisense strand to SEQ ID NO: 1670815
cagcucacacaacuuguuc

SEQ ID NO: 1670817 - RNA, 19 nt, Artificial Sequence
  Description of Artificial Sequence: Synthetic oligonucleotide
  Sense strand starting at position 3756 of SEQ ID NO: 1561423
aguugugugagcugcuuga

SEQ ID NO: 1670818 - RNA, 19 nt, Artificial Sequence
  Description of Artificial Sequence: Synthetic oligonucleotide
  Antisense strand to SEQ ID NO: 1670817
ucaagcagcucacacaacu

SEQ ID NO: 1670819 - RNA, 19 nt, Artificial Sequence
  Description of Artificial Sequence: Synthetic oligonucleotide
  Sense strand starting at position 3822 of SEQ ID NO: 1561423
ccuauacauuaguuguuga

SEQ ID NO: 1670820 - RNA, 19 nt, Artificial Sequence
  Description of Artificial Sequence: Synthetic oligonucleotide
  Antisense strand to SEQ ID NO: 1670819
ucaacaacuaauguauagg

SEQ ID NO: 1670821 - RNA, 19 nt, Artificial Sequence
  Description of Artificial Sequence: Synthetic oligonucleotide
  Sense strand starting at position 3896 of SEQ ID NO: 1561423
acgaauggcccucaugaau

SEQ ID NO: 1670822 - RNA, 19 nt, Artificial Sequence
  Description of Artificial Sequence: Synthetic oligonucleotide
  Antisense strand to SEQ ID NO: 1670821
auucaugagggccauucgu

SEQ ID NO: 1670823 - RNA, 19 nt, Artificial Sequence
  Description of Artificial Sequence: Synthetic oligonucleotide
  Sense strand starting at position 3914 of SEQ ID NO: 1561423
ugggccuuaugccaaauaa

SEQ ID NO: 1670824 - RNA, 19 nt, Artificial Sequence
  Description of Artificial Sequence: Synthetic oligonucleotide
  Antisense strand to SEQ ID NO: 1670823
uuauuuggcauaaggccca

SEQ ID NO: 1670825 - RNA, 19 nt, Artificial Sequence
  Description of Artificial Sequence: Synthetic oligonucleotide
  Sense strand starting at position 3924 of SEQ ID NO: 1561423
gccaaauaauucguuacaa

SEQ ID NO: 1670826 - RNA, 19 nt, Artificial Sequence
  Description of Artificial Sequence: Synthetic oligonucleotide
  Antisense strand to SEQ ID NO: 1670825
uuguaacgaauuauuuggc

SEQ ID NO: 1670827 - RNA, 19 nt, Artificial Sequence
  Description of Artificial Sequence: Synthetic oligonucleotide
  Sense strand starting at position 3963 of SEQ ID NO: 1561423
gugccaaagcuccaugaga

SEQ ID NO: 1670828 - RNA, 19 nt, Artificial Sequence
  Description of Artificial Sequence: Synthetic oligonucleotide
  Antisense strand to SEQ ID NO: 1670827
ucucauggagcuuuggcac

SEQ ID NO: 1670829 - RNA, 19 nt, Artificial Sequence
  Description of Artificial Sequence: Synthetic oligonucleotide
  Sense strand starting at position 3965 of SEQ ID NO: 1561423
gccaaagcuccaugagaga

SEQ ID NO: 1670830 - RNA, 19 nt, Artificial Sequence
  Description of Artificial Sequence: Synthetic oligonucleotide
  Antisense strand to SEQ ID NO: 1670829
ucucucauggagcuuuggc

SEQ ID NO: 1670831 - RNA, 19 nt, Artificial Sequence
  Description of Artificial Sequence: Synthetic oligonucleotide
  Sense strand starting at position 7 of SEQ ID NO: 1561424
agugguaacugguuuaaga

SEQ ID NO: 1670832 - RNA, 19 nt, Artificial Sequence
  Description of Artificial Sequence: Synthetic oligonucleotide
  Antisense strand to SEQ ID NO: 1670831
ucuuaaaccaguuaccacu

SEQ ID NO: 1670833 - RNA, 19 nt, Artificial Sequence
  Description of Artificial Sequence: Synthetic oligonucleotide
  Sense strand starting at position 149 of SEQ ID NO: 1561424
acagcuaggcucuaucaaa

SEQ ID NO: 1670834 - RNA, 19 nt, Artificial Sequence
  Description of Artificial Sequence: Synthetic oligonucleotide
  Antisense strand to SEQ ID NO: 1670833
uuugauagagccuagcugu

SEQ ID NO: 1670835 - RNA, 19 nt, Artificial Sequence
  Description of Artificial Sequence: Synthetic oligonucleotide
  Sense strand starting at position 177 of SEQ ID NO: 1561424
gguaucugauccucauaac

SEQ ID NO: 1670836 - RNA, 19 nt, Artificial Sequence
  Description of Artificial Sequence: Synthetic oligonucleotide
  Antisense strand to SEQ ID NO: 1670835
guuaugaggaucagauacc

SEQ ID NO: 1670837 - RNA, 19 nt, Artificial Sequence
  Description of Artificial Sequence: Synthetic oligonucleotide
  Sense strand starting at position 404 of SEQ ID NO: 1561424
cucuuucuuggugaaacaa

SEQ ID NO: 1670838 - RNA, 19 nt, Artificial Sequence
  Description of Artificial Sequence: Synthetic oligonucleotide
  Antisense strand to SEQ ID NO: 1670837
uuguuucaccaagaaagag

SEQ ID NO: 1670839 - RNA, 19 nt, Artificial Sequence
  Description of Artificial Sequence: Synthetic oligonucleotide
  Sense strand starting at position 727 of SEQ ID NO: 1561424
caaucuaacgagugauucu

SEQ ID NO: 1670840 - RNA, 19 nt, Artificial Sequence
  Description of Artificial Sequence: Synthetic oligonucleotide
  Antisense strand to SEQ ID NO: 1670839
agaaucacucguuagauug

SEQ ID NO: 1670841 - RNA, 19 nt, Artificial Sequence
  Description of Artificial Sequence: Synthetic oligonucleotide
  Sense strand starting at position 793 of SEQ ID NO: 1561424
aguggugugaccuauauau

SEQ ID NO: 1670842 - RNA, 19 nt, Artificial Sequence
  Description of Artificial Sequence: Synthetic oligonucleotide
  Antisense strand to SEQ ID NO: 1670841
auauauaggucacaccacu

SEQ ID NO: 1670843 - RNA, 19 nt, Artificial Sequence
  Description of Artificial Sequence: Synthetic oligonucleotide
  Sense strand starting at position 795 of SEQ ID NO: 1561424
uggugugaccuauauaucu

SEQ ID NO: 1670844 - RNA, 19 nt, Artificial Sequence
  Description of Artificial Sequence: Synthetic oligonucleotide
  Antisense strand to SEQ ID NO: 1670843
agauauauaggucacacca

SEQ ID NO: 1670845 - RNA, 19 nt, Artificial Sequence
  Description of Artificial Sequence: Synthetic oligonucleotide
  Sense strand starting at position 859 of SEQ ID NO: 1561424
uucuuauacuggcuggaau

SEQ ID NO: 1670846 - RNA, 19 nt, Artificial Sequence
  Description of Artificial Sequence: Synthetic oligonucleotide
  Antisense strand to SEQ ID NO: 1670845
auuccagccaguauaagaa

SEQ ID NO: 1670847 - RNA, 19 nt, Artificial Sequence
  Description of Artificial Sequence: Synthetic oligonucleotide
  Sense strand starting at position 860 of SEQ ID NO: 1561424
ucuuauacuggcuggaaua

SEQ ID NO: 1670848 - RNA, 19 nt, Artificial Sequence
  Description of Artificial Sequence: Synthetic oligonucleotide
  Antisense strand to SEQ ID NO: 1670847
uauuccagccaguauaaga

SEQ ID NO: 1670849 - RNA, 19 nt, Artificial Sequence
  Description of Artificial Sequence: Synthetic oligonucleotide
  Sense strand starting at position 861 of SEQ ID NO: 1561424
cuuauacuggcuggaauaa

SEQ ID NO: 1670850 - RNA, 19 nt, Artificial Sequence
  Description of Artificial Sequence: Synthetic oligonucleotide
  Antisense strand to SEQ ID NO: 1670849
uuauuccagccaguauaag

SEQ ID NO: 1670851 - RNA, 19 nt, Artificial Sequence
  Description of Artificial Sequence: Synthetic oligonucleotide
  Sense strand starting at position 919 of SEQ ID NO: 1561424
augcaacuaccuuaucgau

SEQ ID NO: 1670852 - RNA, 19 nt, Artificial Sequence
  Description of Artificial Sequence: Synthetic oligonucleotide
  Antisense strand to SEQ ID NO: 1670851
aucgauaagguaguugcau

SEQ ID NO: 1670853 - RNA, 19 nt, Artificial Sequence
  Description of Artificial Sequence: Synthetic oligonucleotide
  Sense strand starting at position 932 of SEQ ID NO: 1561424
aucgauuacgguuaaguaa

SEQ ID NO: 1670854 - RNA, 19 nt, Artificial Sequence
  Description of Artificial Sequence: Synthetic oligonucleotide
  Antisense strand to SEQ ID NO: 1670853
uuacuuaaccguaaucgau

SEQ ID NO: 1670855 - RNA, 19 nt, Artificial Sequence
  Description of Artificial Sequence: Synthetic oligonucleotide
  Sense strand starting at position 1008 of SEQ ID NO: 1561424
caacgaguuagugagguaa

SEQ ID NO: 1670856 - RNA, 19 nt, Artificial Sequence
  Description of Artificial Sequence: Synthetic oligonucleotide
  Antisense strand to SEQ ID NO: 1670855
uuaccucacuaacucguug

SEQ ID NO: 1670857 - RNA, 19 nt, Artificial Sequence
  Description of Artificial Sequence: Synthetic oligonucleotide
  Sense strand starting at position 1067 of SEQ ID NO: 1561424
cccauacucugagugagag

SEQ ID NO: 1670858 - RNA, 19 nt, Artificial Sequence
  Description of Artificial Sequence: Synthetic oligonucleotide
  Antisense strand to SEQ ID NO: 1670857
cucucacucagaguauggg

SEQ ID NO: 1670859 - RNA, 19 nt, Artificial Sequence
  Description of Artificial Sequence: Synthetic oligonucleotide
  Sense strand starting at position 1119 of SEQ ID NO: 1561424
ugauaaauccaguaauugc

SEQ ID NO: 1670860 - RNA, 19 nt, Artificial Sequence
  Description of Artificial Sequence: Synthetic oligonucleotide
  Antisense strand to SEQ ID NO: 1670859
gcaauuacuggauuuauca

SEQ ID NO: 1670861 - RNA, 19 nt, Artificial Sequence
  Description of Artificial Sequence: Synthetic oligonucleotide
  Sense strand starting at position 1126 of SEQ ID NO: 1561424
uccaguaauugccugagaa

SEQ ID NO: 1670862 - RNA, 19 nt, Artificial Sequence
  Description of Artificial Sequence: Synthetic oligonucleotide
  Antisense strand to SEQ ID NO: 1670861
uucucaggcaauuacugga

SEQ ID NO: 1670863 - RNA, 19 nt, Artificial Sequence
  Description of Artificial Sequence: Synthetic oligonucleotide
  Sense strand starting at position 1127 of SEQ ID NO: 1561424
ccaguaauugccugagaag

SEQ ID NO: 1670864 - RNA, 19 nt, Artificial Sequence
  Description of Artificial Sequence: Synthetic oligonucleotide
  Antisense strand to SEQ ID NO: 1670863
cuucucaggcaauuacugg

SEQ ID NO: 1670865 - RNA, 19 nt, Artificial Sequence
  Description of Artificial Sequence: Synthetic oligonucleotide
  Sense strand starting at position 1289 of SEQ ID NO: 1561424
gugggaacuuucccugaug

SEQ ID NO: 1670866 - RNA, 19 nt, Artificial Sequence
  Description of Artificial Sequence: Synthetic oligonucleotide
  Antisense strand to SEQ ID NO: 1670865
caucagggaaaguucccac

SEQ ID NO: 1670867 - RNA, 19 nt, Artificial Sequence
  Description of Artificial Sequence: Synthetic oligonucleotide
  Sense strand starting at position 1291 of SEQ ID NO: 1561424
gggaacuuucccugauggu

SEQ ID NO: 1670868 - RNA, 19 nt, Artificial Sequence
  Description of Artificial Sequence: Synthetic oligonucleotide
  Antisense strand to SEQ ID NO: 1670867
accaucagggaaaguuccc

SEQ ID NO: 1670869 - RNA, 19 nt, Artificial Sequence
  Description of Artificial Sequence: Synthetic oligonucleotide
  Sense strand starting at position 1292 of SEQ ID NO: 1561424
ggaacuuucccugaugguc

SEQ ID NO: 1670870 - RNA, 19 nt, Artificial Sequence
  Description of Artificial Sequence: Synthetic oligonucleotide
  Antisense strand to SEQ ID NO: 1670869
gaccaucagggaaaguucc

SEQ ID NO: 1670871 - RNA, 19 nt, Artificial Sequence
  Description of Artificial Sequence: Synthetic oligonucleotide
  Sense strand starting at position 1338 of SEQ ID NO: 1561424
ucuccagaggaugguaaua

SEQ ID NO: 1670872 - RNA, 19 nt, Artificial Sequence
  Description of Artificial Sequence: Synthetic oligonucleotide
  Antisense strand to SEQ ID NO: 1670871
uauuaccauccucuggaga

SEQ ID NO: 1670873 - RNA, 19 nt, Artificial Sequence
  Description of Artificial Sequence: Synthetic oligonucleotide
  Sense strand starting at position 1423 of SEQ ID NO: 1561424
gaggugaugggucgggaau

SEQ ID NO: 1670874 - RNA, 19 nt, Artificial Sequence
  Description of Artificial Sequence: Synthetic oligonucleotide
  Antisense strand to SEQ ID NO: 1670873
auucccgacccaucaccuc

SEQ ID NO: 1670875 - RNA, 19 nt, Artificial Sequence
  Description of Artificial Sequence: Synthetic oligonucleotide
  Sense strand starting at position 1650 of SEQ ID NO: 1561424
ggccuugcugcacagaaga

SEQ ID NO: 1670876 - RNA, 19 nt, Artificial Sequence
  Description of Artificial Sequence: Synthetic oligonucleotide
  Antisense strand to SEQ ID NO: 1670875
ucuucugugcagcaaggcc

SEQ ID NO: 1670877 - RNA, 19 nt, Artificial Sequence
  Description of Artificial Sequence: Synthetic oligonucleotide
  Sense strand starting at position 2480 of SEQ ID NO: 1561424
gggaaucucuuugcuugag

SEQ ID NO: 1670878 - RNA, 19 nt, Artificial Sequence
  Description of Artificial Sequence: Synthetic oligonucleotide
  Antisense strand to SEQ ID NO: 1670877
cucaagcaaagagauuccc

SEQ ID NO: 1670879 - RNA, 19 nt, Artificial Sequence
  Description of Artificial Sequence: Synthetic oligonucleotide
  Sense strand starting at position 2481 of SEQ ID NO: 1561424
ggaaucucuuugcuugaga

SEQ ID NO: 1670880 - RNA, 19 nt, Artificial Sequence
  Description of Artificial Sequence: Synthetic oligonucleotide
  Antisense strand to SEQ ID NO: 1670879
ucucaagcaaagagauucc

SEQ ID NO: 1670881 - RNA, 19 nt, Artificial Sequence
  Description of Artificial Sequence: Synthetic oligonucleotide
  Sense strand starting at position 2482 of SEQ ID NO: 1561424
gaaucucuuugcuugagag

SEQ ID NO: 1670882 - RNA, 19 nt, Artificial Sequence
  Description of Artificial Sequence: Synthetic oligonucleotide
  Antisense strand to SEQ ID NO: 1670881
cucucaagcaaagagauuc

SEQ ID NO: 1670883 - RNA, 19 nt, Artificial Sequence
  Description of Artificial Sequence: Synthetic oligonucleotide
  Sense strand starting at position 2484 of SEQ ID NO: 1561424
aucucuuugcuugagagau

SEQ ID NO: 1670884 - RNA, 19 nt, Artificial Sequence
  Description of Artificial Sequence: Synthetic oligonucleotide
  Antisense strand to SEQ ID NO: 1670883
aucucucaagcaaagagau

SEQ ID NO: 1670885 - RNA, 19 nt, Artificial Sequence
  Description of Artificial Sequence: Synthetic oligonucleotide
  Sense strand starting at position 2765 of SEQ ID NO: 1561424
gaagauucuggccauugua

SEQ ID NO: 1670886 - RNA, 19 nt, Artificial Sequence
  Description of Artificial Sequence: Synthetic oligonucleotide
  Antisense strand to SEQ ID NO: 1670885
uacaauggccagaaucuuc

SEQ ID NO: 1670887 - RNA, 19 nt, Artificial Sequence
  Description of Artificial Sequence: Synthetic oligonucleotide
  Sense strand starting at position 2818 of SEQ ID NO: 1561424
ggaucuguuccagaucuuu

SEQ ID NO: 1670888 - RNA, 19 nt, Artificial Sequence
  Description of Artificial Sequence: Synthetic oligonucleotide
  Antisense strand to SEQ ID NO: 1670887
aaagaucuggaacagaucc

SEQ ID NO: 1670889 - RNA, 19 nt, Artificial Sequence
  Description of Artificial Sequence: Synthetic oligonucleotide
  Sense strand starting at position 3458 of SEQ ID NO: 1561424
agaaauacgaaguguugaa

SEQ ID NO: 1670890 - RNA, 19 nt, Artificial Sequence
  Description of Artificial Sequence: Synthetic oligonucleotide
  Antisense strand to SEQ ID NO: 1670889
uucaacacuucguauuucu

SEQ ID NO: 1670891 - RNA, 19 nt, Artificial Sequence
  Description of Artificial Sequence: Synthetic oligonucleotide
  Sense strand starting at position 3497 of SEQ ID NO: 1561424
augagaaauuccuugccuu

SEQ ID NO: 1670892 - RNA, 19 nt, Artificial Sequence
  Description of Artificial Sequence: Synthetic oligonucleotide
  Antisense strand to SEQ ID NO: 1670891
aaggcaaggaauuucucau

SEQ ID NO: 1670893 - RNA, 19 nt, Artificial Sequence
  Description of Artificial Sequence: Synthetic oligonucleotide
  Sense strand starting at position 3498 of SEQ ID NO: 1561424
ugagaaauuccuugccuug

SEQ ID NO: 1670894 - RNA, 19 nt, Artificial Sequence
  Description of Artificial Sequence: Synthetic oligonucleotide
  Antisense strand to SEQ ID NO: 1670893
caaggcaaggaauuucuca

SEQ ID NO: 1670895 - RNA, 19 nt, Artificial Sequence
  Description of Artificial Sequence: Synthetic oligonucleotide
  Sense strand starting at position 3516 of SEQ ID NO: 1561424
gggcuauuggcacaaacaa

SEQ ID NO: 1670896 - RNA, 19 nt, Artificial Sequence
  Description of Artificial Sequence: Synthetic oligonucleotide
  Antisense strand to SEQ ID NO: 1670895
uuguuugugccaauagccc

SEQ ID NO: 1670897 - RNA, 19 nt, Artificial Sequence
  Description of Artificial Sequence: Synthetic oligonucleotide
  Sense strand starting at position 3583 of SEQ ID NO: 1561424
aaguguaauguccaugaau

SEQ ID NO: 1670898 - RNA, 19 nt, Artificial Sequence
  Description of Artificial Sequence: Synthetic oligonucleotide
  Antisense strand to SEQ ID NO: 1670897
auucauggacauuacacuu

SEQ ID NO: 1670899 - RNA, 19 nt, Artificial Sequence
  Description of Artificial Sequence: Synthetic oligonucleotide
  Sense strand starting at position 3586 of SEQ ID NO: 1561424
uguaauguccaugaaucug

SEQ ID NO: 1670900 - RNA, 19 nt, Artificial Sequence
  Description of Artificial Sequence: Synthetic oligonucleotide
  Antisense strand to SEQ ID NO: 1670899
cagauucauggacauuaca

SEQ ID NO: 1670901 - RNA, 19 nt, Artificial Sequence
  Description of Artificial Sequence: Synthetic oligonucleotide
  Sense strand starting at position 3624 of SEQ ID NO: 1561424
acagaauuauuugaucaag

SEQ ID NO: 1670902 - RNA, 19 nt, Artificial Sequence
  Description of Artificial Sequence: Synthetic oligonucleotide
  Antisense strand to SEQ ID NO: 1670901
cuugaucaaauaauucugu

SEQ ID NO: 1670903 - RNA, 19 nt, Artificial Sequence
  Description of Artificial Sequence: Synthetic oligonucleotide
  Sense strand starting at position 3781 of SEQ ID NO: 1561424
ccucuucuggcauaagguu

SEQ ID NO: 1670904 - RNA, 19 nt, Artificial Sequence
  Description of Artificial Sequence: Synthetic oligonucleotide
  Antisense strand to SEQ ID NO: 1670903
aaccuuaugccagaagagg

SEQ ID NO: 1670905 - RNA, 19 nt, Artificial Sequence
  Description of Artificial Sequence: Synthetic oligonucleotide
  Sense strand starting at position 3793 of SEQ ID NO: 1561424
uaagguuaguuuccauuga

SEQ ID NO: 1670906 - RNA, 19 nt, Artificial Sequence
  Description of Artificial Sequence: Synthetic oligonucleotide
  Antisense strand to SEQ ID NO: 1670905
ucaauggaaacuaaccuua

SEQ ID NO: 1670907 - RNA, 19 nt, Artificial Sequence
  Description of Artificial Sequence: Synthetic oligonucleotide
  Sense strand starting at position 3838 of SEQ ID NO: 1561424
acugguguuggcuaaugga

SEQ ID NO: 1670908 - RNA, 19 nt, Artificial Sequence
  Description of Artificial Sequence: Synthetic oligonucleotide
  Antisense strand to SEQ ID NO: 1670907
uccauuagccaacaccagu

SEQ ID NO: 1670909 - RNA, 19 nt, Artificial Sequence
  Description of Artificial Sequence: Synthetic oligonucleotide
  Sense strand starting at position 3932 of SEQ ID NO: 1561424
ucccuuuggcuugaugacu

SEQ ID NO: 1670910 - RNA, 19 nt, Artificial Sequence
  Description of Artificial Sequence: Synthetic oligonucleotide
  Antisense strand to SEQ ID NO: 1670909
agucaucaagccaaaggga

SEQ ID NO: 1670911 - RNA, 19 nt, Artificial Sequence
  Description of Artificial Sequence: Synthetic oligonucleotide
  Sense strand starting at position 358 of SEQ ID NO: 1561425
uugacaaagguguguuuga

SEQ ID NO: 1670912 - RNA, 19 nt, Artificial Sequence
  Description of Artificial Sequence: Synthetic oligonucleotide
  Antisense strand to SEQ ID NO: 1670911
ucaaacacaccuuugucaa

SEQ ID NO: 1670913 - RNA, 19 nt, Artificial Sequence
  Description of Artificial Sequence: Synthetic oligonucleotide
  Sense strand starting at position 429 of SEQ ID NO: 1561425
gaucuuguaucagcugaua

SEQ ID NO: 1670914 - RNA, 19 nt, Artificial Sequence
  Description of Artificial Sequence: Synthetic oligonucleotide
  Antisense strand to SEQ ID NO: 1670913
uaucagcugauacaagauc

SEQ ID NO: 1670915 - RNA, 19 nt, Artificial Sequence
  Description of Artificial Sequence: Synthetic oligonucleotide
  Sense strand starting at position 432 of SEQ ID NO: 1561425
cuuguaucagcugauaaac

SEQ ID NO: 1670916 - RNA, 19 nt, Artificial Sequence
  Description of Artificial Sequence: Synthetic oligonucleotide
  Antisense strand to SEQ ID NO: 1670915
guuuaucagcugauacaag

SEQ ID NO: 1670917 - RNA, 19 nt, Artificial Sequence
  Description of Artificial Sequence: Synthetic oligonucleotide
  Sense strand starting at position 592 of SEQ ID NO: 1561425
gagagugcagaccaguauu

SEQ ID NO: 1670918 - RNA, 19 nt, Artificial Sequence
  Description of Artificial Sequence: Synthetic oligonucleotide
  Antisense strand to SEQ ID NO: 1670917
aauacuggucugcacucuc

SEQ ID NO: 1670919 - RNA, 19 nt, Artificial Sequence
  Description of Artificial Sequence: Synthetic oligonucleotide
  Sense strand starting at position 607 of SEQ ID NO: 1561425
uauugugauccuugaaacg

SEQ ID NO: 1670920 - RNA, 19 nt, Artificial Sequence
  Description of Artificial Sequence: Synthetic oligonucleotide
  Antisense strand to SEQ ID NO: 1670919
cguuucaaggaucacaaua

SEQ ID NO: 1670921 - RNA, 19 nt, Artificial Sequence
  Description of Artificial Sequence: Synthetic oligonucleotide
  Sense strand starting at position 729 of SEQ ID NO: 1561425
acuggucccaggugauauu

SEQ ID NO: 1670922 - RNA, 19 nt, Artificial Sequence
  Description of Artificial Sequence: Synthetic oligonucleotide
  Antisense strand to SEQ ID NO: 1670921
aauaucaccugggaccagu

SEQ ID NO: 1670923 - RNA, 19 nt, Artificial Sequence
  Description of Artificial Sequence: Synthetic oligonucleotide
  Sense strand starting at position 766 of SEQ ID NO: 1561425
gaggaaacauaucugcgau

SEQ ID NO: 1670924 - RNA, 19 nt, Artificial Sequence
  Description of Artificial Sequence: Synthetic oligonucleotide
  Antisense strand to SEQ ID NO: 1670923
aucgcagauauguuuccuc

SEQ ID NO: 1670925 - RNA, 19 nt, Artificial Sequence
  Description of Artificial Sequence: Synthetic oligonucleotide
  Sense strand starting at position 767 of SEQ ID NO: 1561425
aggaaacauaucugcgaug

SEQ ID NO: 1670926 - RNA, 19 nt, Artificial Sequence
  Description of Artificial Sequence: Synthetic oligonucleotide
  Antisense strand to SEQ ID NO: 1670925
caucgcagauauguuuccu

SEQ ID NO: 1670927 - RNA, 19 nt, Artificial Sequence
  Description of Artificial Sequence: Synthetic oligonucleotide
  Sense strand starting at position 804 of SEQ ID NO: 1561425
gagucaagacaucauucgu

SEQ ID NO: 1670928 - RNA, 19 nt, Artificial Sequence
  Description of Artificial Sequence: Synthetic oligonucleotide
  Antisense strand to SEQ ID NO: 1670927
acgaaugaugucuugacuc

SEQ ID NO: 1670929 - RNA, 19 nt, Artificial Sequence
  Description of Artificial Sequence: Synthetic oligonucleotide
  Sense strand starting at position 912 of SEQ ID NO: 1561425
uacguacuugcccagacau

SEQ ID NO: 1670930 - RNA, 19 nt, Artificial Sequence
  Description of Artificial Sequence: Synthetic oligonucleotide
  Antisense strand to SEQ ID NO: 1670929
augucugggcaaguacgua

SEQ ID NO: 1670931 - RNA, 19 nt, Artificial Sequence
  Description of Artificial Sequence: Synthetic oligonucleotide
  Sense strand starting at position 923 of SEQ ID NO: 1561425
ccagacaugccaugagcau

SEQ ID NO: 1670932 - RNA, 19 nt, Artificial Sequence
  Description of Artificial Sequence: Synthetic oligonucleotide
  Antisense strand to SEQ ID NO: 1670931
augcucauggcaugucugg

SEQ ID NO: 1670933 - RNA, 19 nt, Artificial Sequence
  Description of Artificial Sequence: Synthetic oligonucleotide
  Sense strand starting at position 924 of SEQ ID NO: 1561425
cagacaugccaugagcaua

SEQ ID NO: 1670934 - RNA, 19 nt, Artificial Sequence
  Description of Artificial Sequence: Synthetic oligonucleotide
  Antisense strand to SEQ ID NO: 1670933
uaugcucauggcaugucug

SEQ ID NO: 1670935 - RNA, 19 nt, Artificial Sequence
  Description of Artificial Sequence: Synthetic oligonucleotide
  Sense strand starting at position 927 of SEQ ID NO: 1561425
acaugccaugagcauaaua

SEQ ID NO: 1670936 - RNA, 19 nt, Artificial Sequence
  Description of Artificial Sequence: Synthetic oligonucleotide
  Antisense strand to SEQ ID NO: 1670935
uauuaugcucauggcaugu

SEQ ID NO: 1670937 - RNA, 19 nt, Artificial Sequence
  Description of Artificial Sequence: Synthetic oligonucleotide
  Sense strand starting at position 1034 of SEQ ID NO: 1561425
gggcauaucugucccauuu

SEQ ID NO: 1670938 - RNA, 19 nt, Artificial Sequence
  Description of Artificial Sequence: Synthetic oligonucleotide
  Antisense strand to SEQ ID NO: 1670937
aaaugggacagauaugccc

SEQ ID NO: 1670939 - RNA, 19 nt, Artificial Sequence
  Description of Artificial Sequence: Synthetic oligonucleotide
  Sense strand starting at position 1283 of SEQ ID NO: 1561425
gugaauaaaccaggguugu

SEQ ID NO: 1670940 - RNA, 19 nt, Artificial Sequence
  Description of Artificial Sequence: Synthetic oligonucleotide
  Antisense strand to SEQ ID NO: 1670939
acaacccugguuuauucac

SEQ ID NO: 1670941 - RNA, 19 nt, Artificial Sequence
  Description of Artificial Sequence: Synthetic oligonucleotide
  Sense strand starting at position 1295 of SEQ ID NO: 1561425
ggguugucaggagaaucga

SEQ ID NO: 1670942 - RNA, 19 nt, Artificial Sequence
  Description of Artificial Sequence: Synthetic oligonucleotide
  Antisense strand to SEQ ID NO: 1670941
ucgauucuccugacaaccc

SEQ ID NO: 1670943 - RNA, 19 nt, Artificial Sequence
  Description of Artificial Sequence: Synthetic oligonucleotide
  Sense strand starting at position 1531 of SEQ ID NO: 1561425
auagacugcuguccagaga

SEQ ID NO: 1670944 - RNA, 19 nt, Artificial Sequence
  Description of Artificial Sequence: Synthetic oligonucleotide
  Antisense strand to SEQ ID NO: 1670943
ucucuggacagcagucuau

SEQ ID NO: 1670945 - RNA, 19 nt, Artificial Sequence
  Description of Artificial Sequence: Synthetic oligonucleotide
  Sense strand starting at position 1534 of SEQ ID NO: 1561425
gacugcuguccagagagga

SEQ ID NO: 1670946 - RNA, 19 nt, Artificial Sequence
  Description of Artificial Sequence: Synthetic oligonucleotide
  Antisense strand to SEQ ID NO: 1670945
uccucucuggacagcaguc

SEQ ID NO: 1670947 - RNA, 19 nt, Artificial Sequence
  Description of Artificial Sequence: Synthetic oligonucleotide
  Sense strand starting at position 1600 of SEQ ID NO: 1561425
ggagucuggucuuuggaac

SEQ ID NO: 1670948 - RNA, 19 nt, Artificial Sequence
  Description of Artificial Sequence: Synthetic oligonucleotide
  Antisense strand to SEQ ID NO: 1670947
guuccaaagaccagacucc

SEQ ID NO: 1670949 - RNA, 19 nt, Artificial Sequence
  Description of Artificial Sequence: Synthetic oligonucleotide
  Sense strand starting at position 1607 of SEQ ID NO: 1561425
ggucuuuggaacgguggaa

SEQ ID NO: 1670950 - RNA, 19 nt, Artificial Sequence
  Description of Artificial Sequence: Synthetic oligonucleotide
  Antisense strand to SEQ ID NO: 1670949
uuccaccguuccaaagacc

SEQ ID NO: 1670951 - RNA, 19 nt, Artificial Sequence
  Description of Artificial Sequence: Synthetic oligonucleotide
  Sense strand starting at position 1925 of SEQ ID NO: 1561425
ucggguaccucauuugcau

SEQ ID NO: 1670952 - RNA, 19 nt, Artificial Sequence
  Description of Artificial Sequence: Synthetic oligonucleotide
  Antisense strand to SEQ ID NO: 1670951
augcaaaugagguacccga

SEQ ID NO: 1670953 - RNA, 19 nt, Artificial Sequence
  Description of Artificial Sequence: Synthetic oligonucleotide
  Sense strand starting at position 2342 of SEQ ID NO: 1561425
ugcccagugcccguaauua

SEQ ID NO: 1670954 - RNA, 19 nt, Artificial Sequence
  Description of Artificial Sequence: Synthetic oligonucleotide
  Antisense strand to SEQ ID NO: 1670953
uaauuacgggcacugggca

SEQ ID NO: 1670955 - RNA, 19 nt, Artificial Sequence
  Description of Artificial Sequence: Synthetic oligonucleotide
  Sense strand starting at position 2390 of SEQ ID NO: 1561425
uggagugcuaaguggauaa

SEQ ID NO: 1670956 - RNA, 19 nt, Artificial Sequence
  Description of Artificial Sequence: Synthetic oligonucleotide
  Antisense strand to SEQ ID NO: 1670955
uuauccacuuagcacucca

SEQ ID NO: 1670957 - RNA, 19 nt, Artificial Sequence
  Description of Artificial Sequence: Synthetic oligonucleotide
  Sense strand starting at position 2392 of SEQ ID NO: 1561425
gagugcuaaguggauaaga

SEQ ID NO: 1670958 - RNA, 19 nt, Artificial Sequence
  Description of Artificial Sequence: Synthetic oligonucleotide
  Antisense strand to SEQ ID NO: 1670957
ucuuauccacuuagcacuc

SEQ ID NO: 1670959 - RNA, 19 nt, Artificial Sequence
  Description of Artificial Sequence: Synthetic oligonucleotide
  Sense strand starting at position 2394 of SEQ ID NO: 1561425
gugcuaaguggauaagaug

SEQ ID NO: 1670960 - RNA, 19 nt, Artificial Sequence
  Description of Artificial Sequence: Synthetic oligonucleotide
  Antisense strand to SEQ ID NO: 1670959
caucuuauccacuuagcac

SEQ ID NO: 1670961 - RNA, 19 nt, Artificial Sequence
  Description of Artificial Sequence: Synthetic oligonucleotide
  Sense strand starting at position 2864 of SEQ ID NO: 1561425
agguguaaguaauuaaaga

SEQ ID NO: 1670962 - RNA, 19 nt, Artificial Sequence
  Description of Artificial Sequence: Synthetic oligonucleotide
  Antisense strand to SEQ ID NO: 1670961
ucuuuaauuacuuacaccu

SEQ ID NO: 1670963 - RNA, 19 nt, Artificial Sequence
  Description of Artificial Sequence: Synthetic oligonucleotide
  Sense strand starting at position 3327 of SEQ ID NO: 1561425
aaggaaacucauugaggcu

SEQ ID NO: 1670964 - RNA, 19 nt, Artificial Sequence
  Description of Artificial Sequence: Synthetic oligonucleotide
  Antisense strand to SEQ ID NO: 1670963
agccucaaugaguuuccuu

SEQ ID NO: 1670965 - RNA, 19 nt, Artificial Sequence
  Description of Artificial Sequence: Synthetic oligonucleotide
  Sense strand starting at position 3377 of SEQ ID NO: 1561425
ggaggaguuuagaguagaa

SEQ ID NO: 1670966 - RNA, 19 nt, Artificial Sequence
  Description of Artificial Sequence: Synthetic oligonucleotide
  Antisense strand to SEQ ID NO: 1670965
uucuacucuaaacuccucc

SEQ ID NO: 1670967 - RNA, 19 nt, Artificial Sequence
  Description of Artificial Sequence: Synthetic oligonucleotide
  Sense strand starting at position 3454 of SEQ ID NO: 1561425
ggaguuuaaggguguaauu

SEQ ID NO: 1670968 - RNA, 19 nt, Artificial Sequence
  Description of Artificial Sequence: Synthetic oligonucleotide
  Antisense strand to SEQ ID NO: 1670967
aauuacacccuuaaacucc

SEQ ID NO: 1670969 - RNA, 19 nt, Artificial Sequence
  Description of Artificial Sequence: Synthetic oligonucleotide
  Sense strand starting at position 3491 of SEQ ID NO: 1561425
cuaucaggucuuuauaaug

SEQ ID NO: 1670970 - RNA, 19 nt, Artificial Sequence
  Description of Artificial Sequence: Synthetic oligonucleotide
  Antisense strand to SEQ ID NO: 1670969
cauuauaaagaccugauag

SEQ ID NO: 1670971 - RNA, 19 nt, Artificial Sequence
  Description of Artificial Sequence: Synthetic oligonucleotide
  Sense strand starting at position 3500 of SEQ ID NO: 1561425
cuuuauaaugaauguggaa

SEQ ID NO: 1670972 - RNA, 19 nt, Artificial Sequence
  Description of Artificial Sequence: Synthetic oligonucleotide
  Antisense strand to SEQ ID NO: 1670971
uuccacauucauuauaaag

SEQ ID NO: 1670973 - RNA, 19 nt, Artificial Sequence
  Description of Artificial Sequence: Synthetic oligonucleotide
  Sense strand starting at position 3535 of SEQ ID NO: 1561425
gggaauagacuucguagag

SEQ ID NO: 1670974 - RNA, 19 nt, Artificial Sequence
  Description of Artificial Sequence: Synthetic oligonucleotide
  Antisense strand to SEQ ID NO: 1670973
cucuacgaagucuauuccc

SEQ ID NO: 1670975 - RNA, 19 nt, Artificial Sequence
  Description of Artificial Sequence: Synthetic oligonucleotide
  Sense strand starting at position 3536 of SEQ ID NO: 1561425
ggaauagacuucguagaga

SEQ ID NO: 1670976 - RNA, 19 nt, Artificial Sequence
  Description of Artificial Sequence: Synthetic oligonucleotide
  Antisense strand to SEQ ID NO: 1670975
ucucuacgaagucuauucc

SEQ ID NO: 1670977 - RNA, 19 nt, Artificial Sequence
  Description of Artificial Sequence: Synthetic oligonucleotide
  Sense strand starting at position 3598 of SEQ ID NO: 1561425
ggauguggcuucuuuaaag

SEQ ID NO: 1670978 - RNA, 19 nt, Artificial Sequence
  Description of Artificial Sequence: Synthetic oligonucleotide
  Antisense strand to SEQ ID NO: 1670977
cuuuaaagaagccacaucc

SEQ ID NO: 1670979 - RNA, 19 nt, Artificial Sequence
  Description of Artificial Sequence: Synthetic oligonucleotide
  Sense strand starting at position 3664 of SEQ ID NO: 1561425
gggcuuagauaagucaaau

SEQ ID NO: 1670980 - RNA, 19 nt, Artificial Sequence
  Description of Artificial Sequence: Synthetic oligonucleotide
  Antisense strand to SEQ ID NO: 1670979
auuugacuuaucuaagccc

SEQ ID NO: 1670981 - RNA, 19 nt, Artificial Sequence
  Description of Artificial Sequence: Synthetic oligonucleotide
  Sense strand starting at position 3685 of SEQ ID NO: 1561425
cuuagcaaucaugguagga

SEQ ID NO: 1670982 - RNA, 19 nt, Artificial Sequence
  Description of Artificial Sequence: Synthetic oligonucleotide
  Antisense strand to SEQ ID NO: 1670981
uccuaccaugauugcuaag

SEQ ID NO: 1670983 - RNA, 19 nt, Artificial Sequence
  Description of Artificial Sequence: Synthetic oligonucleotide
  Sense strand starting at position 3689 of SEQ ID NO: 1561425
gcaaucaugguaggacuua

SEQ ID NO: 1670984 - RNA, 19 nt, Artificial Sequence
  Description of Artificial Sequence: Synthetic oligonucleotide
  Antisense strand to SEQ ID NO: 1670983
uaaguccuaccaugauugc

SEQ ID NO: 1670985 - RNA, 19 nt, Artificial Sequence
  Description of Artificial Sequence: Synthetic oligonucleotide
  Sense strand starting at position 3730 of SEQ ID NO: 1561425
acgggauaauagucaucca

SEQ ID NO: 1670986 - RNA, 19 nt, Artificial Sequence
  Description of Artificial Sequence: Synthetic oligonucleotide
  Antisense strand to SEQ ID NO: 1670985
uggaugacuauuaucccgu

SEQ ID NO: 1670987 - RNA, 19 nt, Artificial Sequence
  Description of Artificial Sequence: Synthetic oligonucleotide
  Sense strand starting at position 3891 of SEQ ID NO: 1561425
ucugauguuacaggaguaa

SEQ ID NO: 1670988 - RNA, 19 nt, Artificial Sequence
  Description of Artificial Sequence: Synthetic oligonucleotide
  Antisense strand to SEQ ID NO: 1670987
uuacuccuguaacaucaga

SEQ ID NO: 1670989 - RNA, 19 nt, Artificial Sequence
  Description of Artificial Sequence: Synthetic oligonucleotide
  Sense strand starting at position 3912 of SEQ ID NO: 1561425
cuggucucccugcaaggau

SEQ ID NO: 1670990 - RNA, 19 nt, Artificial Sequence
  Description of Artificial Sequence: Synthetic oligonucleotide
  Antisense strand to SEQ ID NO: 1670989
auccuugcagggagaccag

SEQ ID NO: 1670991 - RNA, 19 nt, Artificial Sequence
  Description of Artificial Sequence: Synthetic oligonucleotide
  Sense strand starting at position 286 of SEQ ID NO: 1561426
agcaguuuagccugcacau

SEQ ID NO: 1670992 - RNA, 19 nt, Artificial Sequence
  Description of Artificial Sequence: Synthetic oligonucleotide
  Antisense strand to SEQ ID NO: 1670991
augugcaggcuaaacugcu

SEQ ID NO: 1670993 - RNA, 19 nt, Artificial Sequence
  Description of Artificial Sequence: Synthetic oligonucleotide
  Sense strand starting at position 347 of SEQ ID NO: 1561426
guacauauuuagugacuga

SEQ ID NO: 1670994 - RNA, 19 nt, Artificial Sequence
  Description of Artificial Sequence: Synthetic oligonucleotide
  Antisense strand to SEQ ID NO: 1670993
ucagucacuaaauauguac

SEQ ID NO: 1670995 - RNA, 19 nt, Artificial Sequence
  Description of Artificial Sequence: Synthetic oligonucleotide
  Sense strand starting at position 432 of SEQ ID NO: 1561426
guuugaucacuugagccca

SEQ ID NO: 1670996 - RNA, 19 nt, Artificial Sequence
  Description of Artificial Sequence: Synthetic oligonucleotide
  Antisense strand to SEQ ID NO: 1670995
ugggcucaagugaucaaac

SEQ ID NO: 1670997 - RNA, 19 nt, Artificial Sequence
  Description of Artificial Sequence: Synthetic oligonucleotide
  Sense strand starting at position 485 of SEQ ID NO: 1561426
gugagaccuugagagguuu

SEQ ID NO: 1670998 - RNA, 19 nt, Artificial Sequence
  Description of Artificial Sequence: Synthetic oligonucleotide
  Antisense strand to SEQ ID NO: 1670997
aaaccucucaaggucucac

SEQ ID NO: 1670999 - RNA, 19 nt, Artificial Sequence
  Description of Artificial Sequence: Synthetic oligonucleotide
  Sense strand starting at position 1134 of SEQ ID NO: 1561426
gaguuuaacugucccuaug

SEQ ID NO: 1671000 - RNA, 19 nt, Artificial Sequence
  Description of Artificial Sequence: Synthetic oligonucleotide
  Antisense strand to SEQ ID NO: 1670999
cauagggacaguuaaacuc

SEQ ID NO: 1671001 - RNA, 19 nt, Artificial Sequence
  Description of Artificial Sequence: Synthetic oligonucleotide
  Sense strand starting at position 1136 of SEQ ID NO: 1561426
guuuaacugucccuaugca

SEQ ID NO: 1671002 - RNA, 19 nt, Artificial Sequence
  Description of Artificial Sequence: Synthetic oligonucleotide
  Antisense strand to SEQ ID NO: 1671001
ugcauagggacaguuaaac

SEQ ID NO: 1671003 - RNA, 19 nt, Artificial Sequence
  Description of Artificial Sequence: Synthetic oligonucleotide
  Sense strand starting at position 1157 of SEQ ID NO: 1561426
guccauuucuaccagacca

SEQ ID NO: 1671004 - RNA, 19 nt, Artificial Sequence
  Description of Artificial Sequence: Synthetic oligonucleotide
  Antisense strand to SEQ ID NO: 1671003
uggucugguagaaauggac

SEQ ID NO: 1671005 - RNA, 19 nt, Artificial Sequence
  Description of Artificial Sequence: Synthetic oligonucleotide
  Sense strand starting at position 1505 of SEQ ID NO: 1561426
aauaaaugucuacgaggug

SEQ ID NO: 1671006 - RNA, 19 nt, Artificial Sequence
  Description of Artificial Sequence: Synthetic oligonucleotide
  Antisense strand to SEQ ID NO: 1671005
caccucguagacauuuauu

SEQ ID NO: 1671007 - RNA, 19 nt, Artificial Sequence
  Description of Artificial Sequence: Synthetic oligonucleotide
  Sense strand starting at position 1544 of SEQ ID NO: 1561426
gcccuuuccucgucuacga

SEQ ID NO: 1671008 - RNA, 19 nt, Artificial Sequence
  Description of Artificial Sequence: Synthetic oligonucleotide
  Antisense strand to SEQ ID NO: 1671007
ucguagacgaggaaagggc

SEQ ID NO: 1671009 - RNA, 19 nt, Artificial Sequence
  Description of Artificial Sequence: Synthetic oligonucleotide
  Sense strand starting at position 1546 of SEQ ID NO: 1561426
ccuuuccucgucuacgauu

SEQ ID NO: 1671010 - RNA, 19 nt, Artificial Sequence
  Description of Artificial Sequence: Synthetic oligonucleotide
  Antisense strand to SEQ ID NO: 1671009
aaucguagacgaggaaagg

SEQ ID NO: 1671011 - RNA, 19 nt, Artificial Sequence
  Description of Artificial Sequence: Synthetic oligonucleotide
  Sense strand starting at position 1586 of SEQ ID NO: 1561426
ugaacuacuuagggaaaga

SEQ ID NO: 1671012 - RNA, 19 nt, Artificial Sequence
  Description of Artificial Sequence: Synthetic oligonucleotide
  Antisense strand to SEQ ID NO: 1671011
ucuuucccuaaguaguuca

SEQ ID NO: 1671013 - RNA, 19 nt, Artificial Sequence
  Description of Artificial Sequence: Synthetic oligonucleotide
  Sense strand starting at position 1620 of SEQ ID NO: 1561426
acaguauaucaguaagucu

SEQ ID NO: 1671014 - RNA, 19 nt, Artificial Sequence
  Description of Artificial Sequence: Synthetic oligonucleotide
  Antisense strand to SEQ ID NO: 1671013
agacuuacugauauacugu

SEQ ID NO: 1671015 - RNA, 19 nt, Artificial Sequence
  Description of Artificial Sequence: Synthetic oligonucleotide
  Sense strand starting at position 1629 of SEQ ID NO: 1561426
caguaagucuuuccaggaa

SEQ ID NO: 1671016 - RNA, 19 nt, Artificial Sequence
  Description of Artificial Sequence: Synthetic oligonucleotide
  Antisense strand to SEQ ID NO: 1671015
uuccuggaaagacuuacug

SEQ ID NO: 1671017 - RNA, 19 nt, Artificial Sequence
  Description of Artificial Sequence: Synthetic oligonucleotide
  Sense strand starting at position 1632 of SEQ ID NO: 1561426
uaagucuuuccaggaagga

SEQ ID NO: 1671018 - RNA, 19 nt, Artificial Sequence
  Description of Artificial Sequence: Synthetic oligonucleotide
  Antisense strand to SEQ ID NO: 1671017
uccuuccuggaaagacuua

SEQ ID NO: 1671019 - RNA, 19 nt, Artificial Sequence
  Description of Artificial Sequence: Synthetic oligonucleotide
  Sense strand starting at position 1653 of SEQ ID NO: 1561426
ccacuagggcccuggaaau

SEQ ID NO: 1671020 - RNA, 19 nt, Artificial Sequence
  Description of Artificial Sequence: Synthetic oligonucleotide
  Antisense strand to SEQ ID NO: 1671019
auuuccagggcccuagugg

SEQ ID NO: 1671021 - RNA, 19 nt, Artificial Sequence
  Description of Artificial Sequence: Synthetic oligonucleotide
  Sense strand starting at position 1860 of SEQ ID NO: 1561426
gcucuucgaucccugcaga

SEQ ID NO: 1671022 - RNA, 19 nt, Artificial Sequence
  Description of Artificial Sequence: Synthetic oligonucleotide
  Antisense strand to SEQ ID NO: 1671021
ucugcagggaucgaagagc

SEQ ID NO: 1671023 - RNA, 19 nt, Artificial Sequence
  Description of Artificial Sequence: Synthetic oligonucleotide
  Sense strand starting at position 2137 of SEQ ID NO: 1561426
gggaguuauccacgcacac

SEQ ID NO: 1671024 - RNA, 19 nt, Artificial Sequence
  Description of Artificial Sequence: Synthetic oligonucleotide
  Antisense strand to SEQ ID NO: 1671023
gugugcguggauaacuccc

SEQ ID NO: 1671025 - RNA, 19 nt, Artificial Sequence
  Description of Artificial Sequence: Synthetic oligonucleotide
  Sense strand starting at position 2232 of SEQ ID NO: 1561426
ucggcaaguucuguagaga

SEQ ID NO: 1671026 - RNA, 19 nt, Artificial Sequence
  Description of Artificial Sequence: Synthetic oligonucleotide
  Antisense strand to SEQ ID NO: 1671025
ucucuacagaacuugccga

SEQ ID NO: 1671027 - RNA, 19 nt, Artificial Sequence
  Description of Artificial Sequence: Synthetic oligonucleotide
  Sense strand starting at position 2233 of SEQ ID NO: 1561426
cggcaaguucuguagagaa

SEQ ID NO: 1671028 - RNA, 19 nt, Artificial Sequence
  Description of Artificial Sequence: Synthetic oligonucleotide
  Antisense strand to SEQ ID NO: 1671027
uucucuacagaacuugccg

SEQ ID NO: 1671029 - RNA, 19 nt, Artificial Sequence
  Description of Artificial Sequence: Synthetic oligonucleotide
  Sense strand starting at position 2235 of SEQ ID NO: 1561426
gcaaguucuguagagaaac

SEQ ID NO: 1671030 - RNA, 19 nt, Artificial Sequence
  Description of Artificial Sequence: Synthetic oligonucleotide
  Antisense strand to SEQ ID NO: 1671029
guuucucuacagaacuugc

SEQ ID NO: 1671031 - RNA, 19 nt, Artificial Sequence
  Description of Artificial Sequence: Synthetic oligonucleotide
  Sense strand starting at position 2247 of SEQ ID NO: 1561426
gagaaacucgggcaaccuu

SEQ ID NO: 1671032 - RNA, 19 nt, Artificial Sequence
  Description of Artificial Sequence: Synthetic oligonucleotide
  Antisense strand to SEQ ID NO: 1671031
aagguugcccgaguuucuc

SEQ ID NO: 1671033 - RNA, 19 nt, Artificial Sequence
  Description of Artificial Sequence: Synthetic oligonucleotide
  Sense strand starting at position 2302 of SEQ ID NO: 1561426
gggagaccuugacagagau

SEQ ID NO: 1671034 - RNA, 19 nt, Artificial Sequence
  Description of Artificial Sequence: Synthetic oligonucleotide
  Antisense strand to SEQ ID NO: 1671033
aucucugucaaggucuccc

SEQ ID NO: 1671035 - RNA, 19 nt, Artificial Sequence
  Description of Artificial Sequence: Synthetic oligonucleotide
  Sense strand starting at position 2332 of SEQ ID NO: 1561426
gcugaagagacggagcauu

SEQ ID NO: 1671036 - RNA, 19 nt, Artificial Sequence
  Description of Artificial Sequence: Synthetic oligonucleotide
  Antisense strand to SEQ ID NO: 1671035
aaugcuccgucucuucagc

SEQ ID NO: 1671037 - RNA, 19 nt, Artificial Sequence
  Description of Artificial Sequence: Synthetic oligonucleotide
  Sense strand starting at position 2342 of SEQ ID NO: 1561426
cggagcauuucugagagua

SEQ ID NO: 1671038 - RNA, 19 nt, Artificial Sequence
  Description of Artificial Sequence: Synthetic oligonucleotide
  Antisense strand to SEQ ID NO: 1671037
uacucucagaaaugcuccg

SEQ ID NO: 1671039 - RNA, 19 nt, Artificial Sequence
  Description of Artificial Sequence: Synthetic oligonucleotide
  Sense strand starting at position 2344 of SEQ ID NO: 1561426
gagcauuucugagaguaca

SEQ ID NO: 1671040 - RNA, 19 nt, Artificial Sequence
  Description of Artificial Sequence: Synthetic oligonucleotide
  Antisense strand to SEQ ID NO: 1671039
uguacucucagaaaugcuc

SEQ ID NO: 1671041 - RNA, 19 nt, Artificial Sequence
  Description of Artificial Sequence: Synthetic oligonucleotide
  Sense strand starting at position 2463 of SEQ ID NO: 1561426
gggauuggaugauaucaca

SEQ ID NO: 1671042 - RNA, 19 nt, Artificial Sequence
  Description of Artificial Sequence: Synthetic oligonucleotide
  Antisense strand to SEQ ID NO: 1671041
ugugauaucauccaauccc

SEQ ID NO: 1671043 - RNA, 19 nt, Artificial Sequence
  Description of Artificial Sequence: Synthetic oligonucleotide
  Sense strand starting at position 2466 of SEQ ID NO: 1561426
auuggaugauaucacacau

SEQ ID NO: 1671044 - RNA, 19 nt, Artificial Sequence
  Description of Artificial Sequence: Synthetic oligonucleotide
  Antisense strand to SEQ ID NO: 1671043
augugugauaucauccaau

SEQ ID NO: 1671045 - RNA, 19 nt, Artificial Sequence
  Description of Artificial Sequence: Synthetic oligonucleotide
  Sense strand starting at position 2572 of SEQ ID NO: 1561426
ucccuacucuucguuugau

SEQ ID NO: 1671046 - RNA, 19 nt, Artificial Sequence
  Description of Artificial Sequence: Synthetic oligonucleotide
  Antisense strand to SEQ ID NO: 1671045
aucaaacgaagaguaggga

SEQ ID NO: 1671047 - RNA, 19 nt, Artificial Sequence
  Description of Artificial Sequence: Synthetic oligonucleotide
  Sense strand starting at position 2573 of SEQ ID NO: 1561426
cccuacucuucguuugauu

SEQ ID NO: 1671048 - RNA, 19 nt, Artificial Sequence
  Description of Artificial Sequence: Synthetic oligonucleotide
  Antisense strand to SEQ ID NO: 1671047
aaucaaacgaagaguaggg

SEQ ID NO: 1671049 - RNA, 19 nt, Artificial Sequence
  Description of Artificial Sequence: Synthetic oligonucleotide
  Sense strand starting at position 2575 of SEQ ID NO: 1561426
cuacucuucguuugauuua

SEQ ID NO: 1671050 - RNA, 19 nt, Artificial Sequence
  Description of Artificial Sequence: Synthetic oligonucleotide
  Antisense strand to SEQ ID NO: 1671049
uaaaucaaacgaagaguag

SEQ ID NO: 1671051 - RNA, 19 nt, Artificial Sequence
  Description of Artificial Sequence: Synthetic oligonucleotide
  Sense strand starting at position 2578 of SEQ ID NO: 1561426
cucuucguuugauuuaaug

SEQ ID NO: 1671052 - RNA, 19 nt, Artificial Sequence
  Description of Artificial Sequence: Synthetic oligonucleotide
  Antisense strand to SEQ ID NO: 1671051
cauuaaaucaaacgaagag

SEQ ID NO: 1671053 - RNA, 19 nt, Artificial Sequence
  Description of Artificial Sequence: Synthetic oligonucleotide
  Sense strand starting at position 2620 of SEQ ID NO: 1561426
gugaguuuagcccaggacu

SEQ ID NO: 1671054 - RNA, 19 nt, Artificial Sequence
  Description of Artificial Sequence: Synthetic oligonucleotide
  Antisense strand to SEQ ID NO: 1671053
aguccugggcuaaacucac

SEQ ID NO: 1671055 - RNA, 19 nt, Artificial Sequence
  Description of Artificial Sequence: Synthetic oligonucleotide
  Sense strand starting at position 2622 of SEQ ID NO: 1561426
gaguuuagcccaggacuau

SEQ ID NO: 1671056 - RNA, 19 nt, Artificial Sequence
  Description of Artificial Sequence: Synthetic oligonucleotide
  Antisense strand to SEQ ID NO: 1671055
auaguccugggcuaaacuc

SEQ ID NO: 1671057 - RNA, 19 nt, Artificial Sequence
  Description of Artificial Sequence: Synthetic oligonucleotide
  Sense strand starting at position 2631 of SEQ ID NO: 1561426
ccaggacuaugcuuccgua

SEQ ID NO: 1671058 - RNA, 19 nt, Artificial Sequence
  Description of Artificial Sequence: Synthetic oligonucleotide
  Antisense strand to SEQ ID NO: 1671057
uacggaagcauaguccugg

SEQ ID NO: 1671059 - RNA, 19 nt, Artificial Sequence
  Description of Artificial Sequence: Synthetic oligonucleotide
  Sense strand starting at position 2708 of SEQ ID NO: 1561426
agggauuucuuggaggguu

SEQ ID NO: 1671060 - RNA, 19 nt, Artificial Sequence
  Description of Artificial Sequence: Synthetic oligonucleotide
  Antisense strand to SEQ ID NO: 1671059
aacccuccaagaaaucccu

SEQ ID NO: 1671061 - RNA, 19 nt, Artificial Sequence
  Description of Artificial Sequence: Synthetic oligonucleotide
  Sense strand starting at position 3735 of SEQ ID NO: 1561426
agguccugaccuugaguca

SEQ ID NO: 1671062 - RNA, 19 nt, Artificial Sequence
  Description of Artificial Sequence: Synthetic oligonucleotide
  Antisense strand to SEQ ID NO: 1671061
ugacucaaggucaggaccu

SEQ ID NO: 1671063 - RNA, 19 nt, Artificial Sequence
  Description of Artificial Sequence: Synthetic oligonucleotide
  Sense strand starting at position 3742 of SEQ ID NO: 1561426
gaccuugagucaccuaagu

SEQ ID NO: 1671064 - RNA, 19 nt, Artificial Sequence
  Description of Artificial Sequence: Synthetic oligonucleotide
  Antisense strand to SEQ ID NO: 1671063
acuuaggugacucaagguc

SEQ ID NO: 1671065 - RNA, 19 nt, Artificial Sequence
  Description of Artificial Sequence: Synthetic oligonucleotide
  Sense strand starting at position 3934 of SEQ ID NO: 1561426
gguggagacaucugacugu

SEQ ID NO: 1671066 - RNA, 19 nt, Artificial Sequence
  Description of Artificial Sequence: Synthetic oligonucleotide
  Antisense strand to SEQ ID NO: 1671065
acagucagaugucuccacc

SEQ ID NO: 1671067 - RNA, 19 nt, Artificial Sequence
  Description of Artificial Sequence: Synthetic oligonucleotide
  Sense strand starting at position 3937 of SEQ ID NO: 1561426
ggagacaucugacugugau

SEQ ID NO: 1671068 - RNA, 19 nt, Artificial Sequence
  Description of Artificial Sequence: Synthetic oligonucleotide
  Antisense strand to SEQ ID NO: 1671067
aucacagucagaugucucc

SEQ ID NO: 1671069 - RNA, 19 nt, Artificial Sequence
  Description of Artificial Sequence: Synthetic oligonucleotide
  Sense strand starting at position 3938 of SEQ ID NO: 1561426
gagacaucugacugugaug

SEQ ID NO: 1671070 - RNA, 19 nt, Artificial Sequence
  Description of Artificial Sequence: Synthetic oligonucleotide
  Antisense strand to SEQ ID NO: 1671069
caucacagucagaugucuc

SEQ ID NO: 1671071 - RNA, 19 nt, Artificial Sequence
  Description of Artificial Sequence: Synthetic oligonucleotide
  Sense strand starting at position 159 of SEQ ID NO: 1561427
cgaugucugaaugggaaau

SEQ ID NO: 1671072 - RNA, 19 nt, Artificial Sequence
  Description of Artificial Sequence: Synthetic oligonucleotide
  Antisense strand to SEQ ID NO: 1671071
auuucccauucagacaucg

SEQ ID NO: 1671073 - RNA, 19 nt, Artificial Sequence
  Description of Artificial Sequence: Synthetic oligonucleotide
  Sense strand starting at position 203 of SEQ ID NO: 1561427
gccauauauuccuuagaga

SEQ ID NO: 1671074 - RNA, 19 nt, Artificial Sequence
  Description of Artificial Sequence: Synthetic oligonucleotide
  Antisense strand to SEQ ID NO: 1671073
ucucuaaggaauauauggc

SEQ ID NO: 1671075 - RNA, 19 nt, Artificial Sequence
  Description of Artificial Sequence: Synthetic oligonucleotide
  Sense strand starting at position 222 of SEQ ID NO: 1561427
ggcaucuuuagagauggca

SEQ ID NO: 1671076 - RNA, 19 nt, Artificial Sequence
  Description of Artificial Sequence: Synthetic oligonucleotide
  Antisense strand to SEQ ID NO: 1671075
ugccaucucuaaagaugcc

SEQ ID NO: 1671077 - RNA, 19 nt, Artificial Sequence
  Description of Artificial Sequence: Synthetic oligonucleotide
  Sense strand starting at position 277 of SEQ ID NO: 1561427
agggaaacaucgccaaauu

SEQ ID NO: 1671078 - RNA, 19 nt, Artificial Sequence
  Description of Artificial Sequence: Synthetic oligonucleotide
  Antisense strand to SEQ ID NO: 1671077
aauuuggcgauguuucccu

SEQ ID NO: 1671079 - RNA, 19 nt, Artificial Sequence
  Description of Artificial Sequence: Synthetic oligonucleotide
  Sense strand starting at position 439 of SEQ ID NO: 1561427
gggcaaaucacuugagacu

SEQ ID NO: 1671080 - RNA, 19 nt, Artificial Sequence
  Description of Artificial Sequence: Synthetic oligonucleotide
  Antisense strand to SEQ ID NO: 1671079
agucucaagugauuugccc

SEQ ID NO: 1671081 - RNA, 19 nt, Artificial Sequence
  Description of Artificial Sequence: Synthetic oligonucleotide
  Sense strand starting at position 717 of SEQ ID NO: 1561427
gacaacugugguugaccua

SEQ ID NO: 1671082 - RNA, 19 nt, Artificial Sequence
  Description of Artificial Sequence: Synthetic oligonucleotide
  Antisense strand to SEQ ID NO: 1671081
uaggucaaccacaguuguc

SEQ ID NO: 1671083 - RNA, 19 nt, Artificial Sequence
  Description of Artificial Sequence: Synthetic oligonucleotide
  Sense strand starting at position 720 of SEQ ID NO: 1561427
aacugugguugaccuagaa

SEQ ID NO: 1671084 - RNA, 19 nt, Artificial Sequence
  Description of Artificial Sequence: Synthetic oligonucleotide
  Antisense strand to SEQ ID NO: 1671083
uucuaggucaaccacaguu

SEQ ID NO: 1671085 - RNA, 19 nt, Artificial Sequence
  Description of Artificial Sequence: Synthetic oligonucleotide
  Sense strand starting at position 806 of SEQ ID NO: 1561427
ccuagcaguuauuuccuua

SEQ ID NO: 1671086 - RNA, 19 nt, Artificial Sequence
  Description of Artificial Sequence: Synthetic oligonucleotide
  Antisense strand to SEQ ID NO: 1671085
uaaggaaauaacugcuagg

SEQ ID NO: 1671087 - RNA, 19 nt, Artificial Sequence
  Description of Artificial Sequence: Synthetic oligonucleotide
  Sense strand starting at position 809 of SEQ ID NO: 1561427
agcaguuauuuccuuagug

SEQ ID NO: 1671088 - RNA, 19 nt, Artificial Sequence
  Description of Artificial Sequence: Synthetic oligonucleotide
  Antisense strand to SEQ ID NO: 1671087
cacuaaggaaauaacugcu

SEQ ID NO: 1671089 - RNA, 19 nt, Artificial Sequence
  Description of Artificial Sequence: Synthetic oligonucleotide
  Sense strand starting at position 810 of SEQ ID NO: 1561427
gcaguuauuuccuuagugu

SEQ ID NO: 1671090 - RNA, 19 nt, Artificial Sequence
  Description of Artificial Sequence: Synthetic oligonucleotide
  Antisense strand to SEQ ID NO: 1671089
acacuaaggaaauaacugc

SEQ ID NO: 1671091 - RNA, 19 nt, Artificial Sequence
  Description of Artificial Sequence: Synthetic oligonucleotide
  Sense strand starting at position 813 of SEQ ID NO: 1561427
guuauuuccuuaguguagu

SEQ ID NO: 1671092 - RNA, 19 nt, Artificial Sequence
  Description of Artificial Sequence: Synthetic oligonucleotide
  Antisense strand to SEQ ID NO: 1671091
acuacacuaaggaaauaac

SEQ ID NO: 1671093 - RNA, 19 nt, Artificial Sequence
  Description of Artificial Sequence: Synthetic oligonucleotide
  Sense strand starting at position 835 of SEQ ID NO: 1561427
gcuugaaauuguccauaaa

SEQ ID NO: 1671094 - RNA, 19 nt, Artificial Sequence
  Description of Artificial Sequence: Synthetic oligonucleotide
  Antisense strand to SEQ ID NO: 1671093
uuuauggacaauuucaagc

SEQ ID NO: 1671095 - RNA, 19 nt, Artificial Sequence
  Description of Artificial Sequence: Synthetic oligonucleotide
  Sense strand starting at position 1162 of SEQ ID NO: 1561427
gcgagaccucuagagcuaa

SEQ ID NO: 1671096 - RNA, 19 nt, Artificial Sequence
  Description of Artificial Sequence: Synthetic oligonucleotide
  Antisense strand to SEQ ID NO: 1671095
uuagcucuagaggucucgc

SEQ ID NO: 1671097 - RNA, 19 nt, Artificial Sequence
  Description of Artificial Sequence: Synthetic oligonucleotide
  Sense strand starting at position 1222 of SEQ ID NO: 1561427
ugugaacuuggguaauucu

SEQ ID NO: 1671098 - RNA, 19 nt, Artificial Sequence
  Description of Artificial Sequence: Synthetic oligonucleotide
  Antisense strand to SEQ ID NO: 1671097
agaauuacccaaguucaca

SEQ ID NO: 1671099 - RNA, 19 nt, Artificial Sequence
  Description of Artificial Sequence: Synthetic oligonucleotide
  Sense strand starting at position 1493 of SEQ ID NO: 1561427
ggagacagauggucauagu

SEQ ID NO: 1671100 - RNA, 19 nt, Artificial Sequence
  Description of Artificial Sequence: Synthetic oligonucleotide
  Antisense strand to SEQ ID NO: 1671099
acuaugaccaucugucucc

SEQ ID NO: 1671101 - RNA, 19 nt, Artificial Sequence
  Description of Artificial Sequence: Synthetic oligonucleotide
  Sense strand starting at position 1550 of SEQ ID NO: 1561427
auuguauccgcagaaacag

SEQ ID NO: 1671102 - RNA, 19 nt, Artificial Sequence
  Description of Artificial Sequence: Synthetic oligonucleotide
  Antisense strand to SEQ ID NO: 1671101
cuguuucugcggauacaau

SEQ ID NO: 1671103 - RNA, 19 nt, Artificial Sequence
  Description of Artificial Sequence: Synthetic oligonucleotide
  Sense strand starting at position 1561 of SEQ ID NO: 1561427
agaaacagguggucacaua

SEQ ID NO: 1671104 - RNA, 19 nt, Artificial Sequence
  Description of Artificial Sequence: Synthetic oligonucleotide
  Antisense strand to SEQ ID NO: 1671103
uaugugaccaccuguuucu

SEQ ID NO: 1671105 - RNA, 19 nt, Artificial Sequence
  Description of Artificial Sequence: Synthetic oligonucleotide
  Sense strand starting at position 1804 of SEQ ID NO: 1561427
uugguaauacagugaaaca

SEQ ID NO: 1671106 - RNA, 19 nt, Artificial Sequence
  Description of Artificial Sequence: Synthetic oligonucleotide
  Antisense strand to SEQ ID NO: 1671105
uguuucacuguauuaccaa

SEQ ID NO: 1671107 - RNA, 19 nt, Artificial Sequence
  Description of Artificial Sequence: Synthetic oligonucleotide
  Sense strand starting at position 2420 of SEQ ID NO: 1561427
uggguagcugaaugugaaa

SEQ ID NO: 1671108 - RNA, 19 nt, Artificial Sequence
  Description of Artificial Sequence: Synthetic oligonucleotide
  Antisense strand to SEQ ID NO: 1671107
uuucacauucagcuaccca

SEQ ID NO: 1671109 - RNA, 19 nt, Artificial Sequence
  Description of Artificial Sequence: Synthetic oligonucleotide
  Sense strand starting at position 2431 of SEQ ID NO: 1561427
augugaaagugauugugga

SEQ ID NO: 1671110 - RNA, 19 nt, Artificial Sequence
  Description of Artificial Sequence: Synthetic oligonucleotide
  Antisense strand to SEQ ID NO: 1671109
uccacaaucacuuucacau

SEQ ID NO: 1671111 - RNA, 19 nt, Artificial Sequence
  Description of Artificial Sequence: Synthetic oligonucleotide
  Sense strand starting at position 2432 of SEQ ID NO: 1561427
ugugaaagugauuguggau

SEQ ID NO: 1671112 - RNA, 19 nt, Artificial Sequence
  Description of Artificial Sequence: Synthetic oligonucleotide
  Antisense strand to SEQ ID NO: 1671111
auccacaaucacuuucaca

SEQ ID NO: 1671113 - RNA, 19 nt, Artificial Sequence
  Description of Artificial Sequence: Synthetic oligonucleotide
  Sense strand starting at position 2438 of SEQ ID NO: 1561427
agugauuguggaugaaaga

SEQ ID NO: 1671114 - RNA, 19 nt, Artificial Sequence
  Description of Artificial Sequence: Synthetic oligonucleotide
  Antisense strand to SEQ ID NO: 1671113
ucuuucauccacaaucacu

SEQ ID NO: 1671115 - RNA, 19 nt, Artificial Sequence
  Description of Artificial Sequence: Synthetic oligonucleotide
  Sense strand starting at position 3013 of SEQ ID NO: 1561427
ccaugcucuggguauccaa

SEQ ID NO: 1671116 - RNA, 19 nt, Artificial Sequence
  Description of Artificial Sequence: Synthetic oligonucleotide
  Antisense strand to SEQ ID NO: 1671115
uuggauacccagagcaugg

SEQ ID NO: 1671117 - RNA, 19 nt, Artificial Sequence
  Description of Artificial Sequence: Synthetic oligonucleotide
  Sense strand starting at position 3110 of SEQ ID NO: 1561427
cuugaucugucuuccaaag

SEQ ID NO: 1671118 - RNA, 19 nt, Artificial Sequence
  Description of Artificial Sequence: Synthetic oligonucleotide
  Antisense strand to SEQ ID NO: 1671117
cuuuggaagacagaucaag

SEQ ID NO: 1671119 - RNA, 19 nt, Artificial Sequence
  Description of Artificial Sequence: Synthetic oligonucleotide
  Sense strand starting at position 3116 of SEQ ID NO: 1561427
cugucuuccaaagguggaa

SEQ ID NO: 1671120 - RNA, 19 nt, Artificial Sequence
  Description of Artificial Sequence: Synthetic oligonucleotide
  Antisense strand to SEQ ID NO: 1671119
uuccaccuuuggaagacag

SEQ ID NO: 1671121 - RNA, 19 nt, Artificial Sequence
  Description of Artificial Sequence: Synthetic oligonucleotide
  Sense strand starting at position 3235 of SEQ ID NO: 1561427
gaccucuuacgauguggga

SEQ ID NO: 1671122 - RNA, 19 nt, Artificial Sequence
  Description of Artificial Sequence: Synthetic oligonucleotide
  Antisense strand to SEQ ID NO: 1671121
ucccacaucguaagagguc

SEQ ID NO: 1671123 - RNA, 19 nt, Artificial Sequence
  Description of Artificial Sequence: Synthetic oligonucleotide
  Sense strand starting at position 3359 of SEQ ID NO: 1561427
uuuggagaccaauggucuu

SEQ ID NO: 1671124 - RNA, 19 nt, Artificial Sequence
  Description of Artificial Sequence: Synthetic oligonucleotide
  Antisense strand to SEQ ID NO: 1671123
aagaccauuggucuccaaa

SEQ ID NO: 1671125 - RNA, 19 nt, Artificial Sequence
  Description of Artificial Sequence: Synthetic oligonucleotide
  Sense strand starting at position 3379 of SEQ ID NO: 1561427
ugaugauggugguuugaau

SEQ ID NO: 1671126 - RNA, 19 nt, Artificial Sequence
  Description of Artificial Sequence: Synthetic oligonucleotide
  Antisense strand to SEQ ID NO: 1671125
auucaaaccaccaucauca

SEQ ID NO: 1671127 - RNA, 19 nt, Artificial Sequence
  Description of Artificial Sequence: Synthetic oligonucleotide
  Sense strand starting at position 3431 of SEQ ID NO: 1561427
gucagauugggauacaguu

SEQ ID NO: 1671128 - RNA, 19 nt, Artificial Sequence
  Description of Artificial Sequence: Synthetic oligonucleotide
  Antisense strand to SEQ ID NO: 1671127
aacuguaucccaaucugac

SEQ ID NO: 1671129 - RNA, 19 nt, Artificial Sequence
  Description of Artificial Sequence: Synthetic oligonucleotide
  Sense strand starting at position 3441 of SEQ ID NO: 1561427
gauacaguuugaguguaga

SEQ ID NO: 1671130 - RNA, 19 nt, Artificial Sequence
  Description of Artificial Sequence: Synthetic oligonucleotide
  Antisense strand to SEQ ID NO: 1671129
ucuacacucaaacuguauc

SEQ ID NO: 1671131 - RNA, 19 nt, Artificial Sequence
  Description of Artificial Sequence: Synthetic oligonucleotide
  Sense strand starting at position 3444 of SEQ ID NO: 1561427
acaguuugaguguagaacu

SEQ ID NO: 1671132 - RNA, 19 nt, Artificial Sequence
  Description of Artificial Sequence: Synthetic oligonucleotide
  Antisense strand to SEQ ID NO: 1671131
aguucuacacucaaacugu

SEQ ID NO: 1671133 - RNA, 19 nt, Artificial Sequence
  Description of Artificial Sequence: Synthetic oligonucleotide
  Sense strand starting at position 3464 of SEQ ID NO: 1561427
acagaaguugcugaugcuu

SEQ ID NO: 1671134 - RNA, 19 nt, Artificial Sequence
  Description of Artificial Sequence: Synthetic oligonucleotide
  Antisense strand to SEQ ID NO: 1671133
aagcaucagcaacuucugu

SEQ ID NO: 1671135 - RNA, 19 nt, Artificial Sequence
  Description of Artificial Sequence: Synthetic oligonucleotide
  Sense strand starting at position 3587 of SEQ ID NO: 1561427
guggcaguuaucuaggaug

SEQ ID NO: 1671136 - RNA, 19 nt, Artificial Sequence
  Description of Artificial Sequence: Synthetic oligonucleotide
  Antisense strand to SEQ ID NO: 1671135
cauccuagauaacugccac

SEQ ID NO: 1671137 - RNA, 19 nt, Artificial Sequence
  Description of Artificial Sequence: Synthetic oligonucleotide
  Sense strand starting at position 3660 of SEQ ID NO: 1561427
agugauaucaaguaggcau

SEQ ID NO: 1671138 - RNA, 19 nt, Artificial Sequence
  Description of Artificial Sequence: Synthetic oligonucleotide
  Antisense strand to SEQ ID NO: 1671137
augccuacuugauaucacu

SEQ ID NO: 1671139 - RNA, 19 nt, Artificial Sequence
  Description of Artificial Sequence: Synthetic oligonucleotide
  Sense strand starting at position 3701 of SEQ ID NO: 1561427
cagugaaauguugguacua

SEQ ID NO: 1671140 - RNA, 19 nt, Artificial Sequence
  Description of Artificial Sequence: Synthetic oligonucleotide
  Antisense strand to SEQ ID NO: 1671139
uaguaccaacauuucacug

SEQ ID NO: 1671141 - RNA, 19 nt, Artificial Sequence
  Description of Artificial Sequence: Synthetic oligonucleotide
  Sense strand starting at position 3702 of SEQ ID NO: 1561427
agugaaauguugguacuag

SEQ ID NO: 1671142 - RNA, 19 nt, Artificial Sequence
  Description of Artificial Sequence: Synthetic oligonucleotide
  Antisense strand to SEQ ID NO: 1671141
cuaguaccaacauuucacu

SEQ ID NO: 1671143 - RNA, 19 nt, Artificial Sequence
  Description of Artificial Sequence: Synthetic oligonucleotide
  Sense strand starting at position 3710 of SEQ ID NO: 1561427
guugguacuagagauacga

SEQ ID NO: 1671144 - RNA, 19 nt, Artificial Sequence
  Description of Artificial Sequence: Synthetic oligonucleotide
  Antisense strand to SEQ ID NO: 1671143
ucguaucucuaguaccaac

SEQ ID NO: 1671145 - RNA, 19 nt, Artificial Sequence
  Description of Artificial Sequence: Synthetic oligonucleotide
  Sense strand starting at position 3770 of SEQ ID NO: 1561427
acaguuauaugcucaacug

SEQ ID NO: 1671146 - RNA, 19 nt, Artificial Sequence
  Description of Artificial Sequence: Synthetic oligonucleotide
  Antisense strand to SEQ ID NO: 1671145
caguugagcauauaacugu

SEQ ID NO: 1671147 - RNA, 19 nt, Artificial Sequence
  Description of Artificial Sequence: Synthetic oligonucleotide
  Sense strand starting at position 3907 of SEQ ID NO: 1561427
ggcaguguugcuuuaugug

SEQ ID NO: 1671148 - RNA, 19 nt, Artificial Sequence
  Description of Artificial Sequence: Synthetic oligonucleotide
  Antisense strand to SEQ ID NO: 1671147
cacauaaagcaacacugcc

SEQ ID NO: 1671149 - RNA, 19 nt, Artificial Sequence
  Description of Artificial Sequence: Synthetic oligonucleotide
  Sense strand starting at position 3977 of SEQ ID NO: 1561427
ugucuaguuccagaaugaa

SEQ ID NO: 1671150 - RNA, 19 nt, Artificial Sequence
  Description of Artificial Sequence: Synthetic oligonucleotide
  Antisense strand to SEQ ID NO: 1671149
uucauucuggaacuagaca

SEQ ID NO: 1671151 - RNA, 19 nt, Artificial Sequence
  Description of Artificial Sequence: Synthetic oligonucleotide
  Sense strand starting at position 32 of SEQ ID NO: 1561428
cgaagaacugcuuguuggu

SEQ ID NO: 1671152 - RNA, 19 nt, Artificial Sequence
  Description of Artificial Sequence: Synthetic oligonucleotide
  Antisense strand to SEQ ID NO: 1671151
accaacaagcaguucuucg

SEQ ID NO: 1671153 - RNA, 19 nt, Artificial Sequence
  Description of Artificial Sequence: Synthetic oligonucleotide
  Sense strand starting at position 48 of SEQ ID NO: 1561428
ggugacaaguaauucccau

SEQ ID NO: 1671154 - RNA, 19 nt, Artificial Sequence
  Description of Artificial Sequence: Synthetic oligonucleotide
  Antisense strand to SEQ ID NO: 1671153
augggaauuacuugucacc

SEQ ID NO: 1671155 - RNA, 19 nt, Artificial Sequence
  Description of Artificial Sequence: Synthetic oligonucleotide
  Sense strand starting at position 68 of SEQ ID NO: 1561428
uuacuuuggugaccagaga

SEQ ID NO: 1671156 - RNA, 19 nt, Artificial Sequence
  Description of Artificial Sequence: Synthetic oligonucleotide
  Antisense strand to SEQ ID NO: 1671155
ucucuggucaccaaaguaa

SEQ ID NO: 1671157 - RNA, 19 nt, Artificial Sequence
  Description of Artificial Sequence: Synthetic oligonucleotide
  Sense strand starting at position 96 of SEQ ID NO: 1561428
cuguguugagcgcucuuua

SEQ ID NO: 1671158 - RNA, 19 nt, Artificial Sequence
  Description of Artificial Sequence: Synthetic oligonucleotide
  Antisense strand to SEQ ID NO: 1671157
uaaagagcgcucaacacag

SEQ ID NO: 1671159 - RNA, 19 nt, Artificial Sequence
  Description of Artificial Sequence: Synthetic oligonucleotide
  Sense strand starting at position 97 of SEQ ID NO: 1561428
uguguugagcgcucuuuau

SEQ ID NO: 1671160 - RNA, 19 nt, Artificial Sequence
  Description of Artificial Sequence: Synthetic oligonucleotide
  Antisense strand to SEQ ID NO: 1671159
auaaagagcgcucaacaca

SEQ ID NO: 1671161 - RNA, 19 nt, Artificial Sequence
  Description of Artificial Sequence: Synthetic oligonucleotide
  Sense strand starting at position 99 of SEQ ID NO: 1561428
uguugagcgcucuuuauug

SEQ ID NO: 1671162 - RNA, 19 nt, Artificial Sequence
  Description of Artificial Sequence: Synthetic oligonucleotide
  Antisense strand to SEQ ID NO: 1671161
caauaaagagcgcucaaca

SEQ ID NO: 1671163 - RNA, 19 nt, Artificial Sequence
  Description of Artificial Sequence: Synthetic oligonucleotide
  Sense strand starting at position 191 of SEQ ID NO: 1561428
agagaagagugccuuauaa

SEQ ID NO: 1671164 - RNA, 19 nt, Artificial Sequence
  Description of Artificial Sequence: Synthetic oligonucleotide
  Antisense strand to SEQ ID NO: 1671163
uuauaaggcacucuucucu

SEQ ID NO: 1671165 - RNA, 19 nt, Artificial Sequence
  Description of Artificial Sequence: Synthetic oligonucleotide
  Sense strand starting at position 199 of SEQ ID NO: 1561428
gugccuuauaaauaguguu

SEQ ID NO: 1671166 - RNA, 19 nt, Artificial Sequence
  Description of Artificial Sequence: Synthetic oligonucleotide
  Antisense strand to SEQ ID NO: 1671165
aacacuauuuauaaggcac

SEQ ID NO: 1671167 - RNA, 19 nt, Artificial Sequence
  Description of Artificial Sequence: Synthetic oligonucleotide
  Sense strand starting at position 534 of SEQ ID NO: 1561428
cuagccucauguguucuaa

SEQ ID NO: 1671168 - RNA, 19 nt, Artificial Sequence
  Description of Artificial Sequence: Synthetic oligonucleotide
  Antisense strand to SEQ ID NO: 1671167
uuagaacacaugaggcuag

SEQ ID NO: 1671169 - RNA, 19 nt, Artificial Sequence
  Description of Artificial Sequence: Synthetic oligonucleotide
  Sense strand starting at position 536 of SEQ ID NO: 1561428
agccucauguguucuaaac

SEQ ID NO: 1671170 - RNA, 19 nt, Artificial Sequence
  Description of Artificial Sequence: Synthetic oligonucleotide
  Antisense strand to SEQ ID NO: 1671169
guuuagaacacaugaggcu

SEQ ID NO: 1671171 - RNA, 19 nt, Artificial Sequence
  Description of Artificial Sequence: Synthetic oligonucleotide
  Sense strand starting at position 663 of SEQ ID NO: 1561428
cugccucauucuguacaua

SEQ ID NO: 1671172 - RNA, 19 nt, Artificial Sequence
  Description of Artificial Sequence: Synthetic oligonucleotide
  Antisense strand to SEQ ID NO: 1671171
uauguacagaaugaggcag

SEQ ID NO: 1671173 - RNA, 19 nt, Artificial Sequence
  Description of Artificial Sequence: Synthetic oligonucleotide
  Sense strand starting at position 664 of SEQ ID NO: 1561428
ugccucauucuguacauau

SEQ ID NO: 1671174 - RNA, 19 nt, Artificial Sequence
  Description of Artificial Sequence: Synthetic oligonucleotide
  Antisense strand to SEQ ID NO: 1671173
auauguacagaaugaggca

SEQ ID NO: 1671175 - RNA, 19 nt, Artificial Sequence
  Description of Artificial Sequence: Synthetic oligonucleotide
  Sense strand starting at position 1115 of SEQ ID NO: 1561428
ugagaagccuucccuaucu

SEQ ID NO: 1671176 - RNA, 19 nt, Artificial Sequence
  Description of Artificial Sequence: Synthetic oligonucleotide
  Antisense strand to SEQ ID NO: 1671175
agauagggaaggcuucuca

SEQ ID NO: 1671177 - RNA, 19 nt, Artificial Sequence
  Description of Artificial Sequence: Synthetic oligonucleotide
  Sense strand starting at position 1134 of SEQ ID NO: 1561428
uguugaauuucgucuuucu

SEQ ID NO: 1671178 - RNA, 19 nt, Artificial Sequence
  Description of Artificial Sequence: Synthetic oligonucleotide
  Antisense strand to SEQ ID NO: 1671177
agaaagacgaaauucaaca

SEQ ID NO: 1671179 - RNA, 19 nt, Artificial Sequence
  Description of Artificial Sequence: Synthetic oligonucleotide
  Sense strand starting at position 1155 of SEQ ID NO: 1561428
agacccagguuugucuaua

SEQ ID NO: 1671180 - RNA, 19 nt, Artificial Sequence
  Description of Artificial Sequence: Synthetic oligonucleotide
  Antisense strand to SEQ ID NO: 1671179
uauagacaaaccugggucu

SEQ ID NO: 1671181 - RNA, 19 nt, Artificial Sequence
  Description of Artificial Sequence: Synthetic oligonucleotide
  Sense strand starting at position 1156 of SEQ ID NO: 1561428
gacccagguuugucuauau

SEQ ID NO: 1671182 - RNA, 19 nt, Artificial Sequence
  Description of Artificial Sequence: Synthetic oligonucleotide
  Antisense strand to SEQ ID NO: 1671181
auauagacaaaccuggguc

SEQ ID NO: 1671183 - RNA, 19 nt, Artificial Sequence
  Description of Artificial Sequence: Synthetic oligonucleotide
  Sense strand starting at position 1738 of SEQ ID NO: 1561428
ggaggugucuacgugggua

SEQ ID NO: 1671184 - RNA, 19 nt, Artificial Sequence
  Description of Artificial Sequence: Synthetic oligonucleotide
  Antisense strand to SEQ ID NO: 1671183
uacccacguagacaccucc

SEQ ID NO: 1671185 - RNA, 19 nt, Artificial Sequence
  Description of Artificial Sequence: Synthetic oligonucleotide
  Sense strand starting at position 1740 of SEQ ID NO: 1561428
aggugucuacguggguaaa

SEQ ID NO: 1671186 - RNA, 19 nt, Artificial Sequence
  Description of Artificial Sequence: Synthetic oligonucleotide
  Antisense strand to SEQ ID NO: 1671185
uuuacccacguagacaccu

SEQ ID NO: 1671187 - RNA, 19 nt, Artificial Sequence
  Description of Artificial Sequence: Synthetic oligonucleotide
  Sense strand starting at position 1743 of SEQ ID NO: 1561428
ugucuacguggguaaauga

SEQ ID NO: 1671188 - RNA, 19 nt, Artificial Sequence
  Description of Artificial Sequence: Synthetic oligonucleotide
  Antisense strand to SEQ ID NO: 1671187
ucauuuacccacguagaca

SEQ ID NO: 1671189 - RNA, 19 nt, Artificial Sequence
  Description of Artificial Sequence: Synthetic oligonucleotide
  Sense strand starting at position 1827 of SEQ ID NO: 1561428
cucaaaggaugucugaauu

SEQ ID NO: 1671190 - RNA, 19 nt, Artificial Sequence
  Description of Artificial Sequence: Synthetic oligonucleotide
  Antisense strand to SEQ ID NO: 1671189
aauucagacauccuuugag

SEQ ID NO: 1671191 - RNA, 19 nt, Artificial Sequence
  Description of Artificial Sequence: Synthetic oligonucleotide
  Sense strand starting at position 1895 of SEQ ID NO: 1561428
ucagcucccggguauagaa

SEQ ID NO: 1671192 - RNA, 19 nt, Artificial Sequence
  Description of Artificial Sequence: Synthetic oligonucleotide
  Antisense strand to SEQ ID NO: 1671191
uucuauacccgggagcuga

SEQ ID NO: 1671193 - RNA, 19 nt, Artificial Sequence
  Description of Artificial Sequence: Synthetic oligonucleotide
  Sense strand starting at position 1925 of SEQ ID NO: 1561428
cuggcuagccuagacuuaa

SEQ ID NO: 1671194 - RNA, 19 nt, Artificial Sequence
  Description of Artificial Sequence: Synthetic oligonucleotide
  Antisense strand to SEQ ID NO: 1671193
uuaagucuaggcuagccag

SEQ ID NO: 1671195 - RNA, 19 nt, Artificial Sequence
  Description of Artificial Sequence: Synthetic oligonucleotide
  Sense strand starting at position 2224 of SEQ ID NO: 1561428
uguagauuauauccacgaa

SEQ ID NO: 1671196 - RNA, 19 nt, Artificial Sequence
  Description of Artificial Sequence: Synthetic oligonucleotide
  Antisense strand to SEQ ID NO: 1671195
uucguggauauaaucuaca

SEQ ID NO: 1671197 - RNA, 19 nt, Artificial Sequence
  Description of Artificial Sequence: Synthetic oligonucleotide
  Sense strand starting at position 2468 of SEQ ID NO: 1561428
uuggaauugucugugaagg

SEQ ID NO: 1671198 - RNA, 19 nt, Artificial Sequence
  Description of Artificial Sequence: Synthetic oligonucleotide
  Antisense strand to SEQ ID NO: 1671197
ccuucacagacaauuccaa

SEQ ID NO: 1671199 - RNA, 19 nt, Artificial Sequence
  Description of Artificial Sequence: Synthetic oligonucleotide
  Sense strand starting at position 2469 of SEQ ID NO: 1561428
uggaauugucugugaaggg

SEQ ID NO: 1671200 - RNA, 19 nt, Artificial Sequence
  Description of Artificial Sequence: Synthetic oligonucleotide
  Antisense strand to SEQ ID NO: 1671199
cccuucacagacaauucca

SEQ ID NO: 1671201 - RNA, 19 nt, Artificial Sequence
  Description of Artificial Sequence: Synthetic oligonucleotide
  Sense strand starting at position 2621 of SEQ ID NO: 1561428
ugcucaauuccagagacuu

SEQ ID NO: 1671202 - RNA, 19 nt, Artificial Sequence
  Description of Artificial Sequence: Synthetic oligonucleotide
  Antisense strand to SEQ ID NO: 1671201
aagucucuggaauugagca

SEQ ID NO: 1671203 - RNA, 19 nt, Artificial Sequence
  Description of Artificial Sequence: Synthetic oligonucleotide
  Sense strand starting at position 2631 of SEQ ID NO: 1561428
cagagacuuuccuagggac

SEQ ID NO: 1671204 - RNA, 19 nt, Artificial Sequence
  Description of Artificial Sequence: Synthetic oligonucleotide
  Antisense strand to SEQ ID NO: 1671203
gucccuaggaaagucucug

SEQ ID NO: 1671205 - RNA, 19 nt, Artificial Sequence
  Description of Artificial Sequence: Synthetic oligonucleotide
  Sense strand starting at position 2668 of SEQ ID NO: 1561428
gacuaaggccagugugaag

SEQ ID NO: 1671206 - RNA, 19 nt, Artificial Sequence
  Description of Artificial Sequence: Synthetic oligonucleotide
  Antisense strand to SEQ ID NO: 1671205
cuucacacuggccuuaguc

SEQ ID NO: 1671207 - RNA, 19 nt, Artificial Sequence
  Description of Artificial Sequence: Synthetic oligonucleotide
  Sense strand starting at position 2683 of SEQ ID NO: 1561428
gaagauaagucaccgauuc

SEQ ID NO: 1671208 - RNA, 19 nt, Artificial Sequence
  Description of Artificial Sequence: Synthetic oligonucleotide
  Antisense strand to SEQ ID NO: 1671207
gaaucggugacuuaucuuc

SEQ ID NO: 1671209 - RNA, 19 nt, Artificial Sequence
  Description of Artificial Sequence: Synthetic oligonucleotide
  Sense strand starting at position 2684 of SEQ ID NO: 1561428
aagauaagucaccgauucu

SEQ ID NO: 1671210 - RNA, 19 nt, Artificial Sequence
  Description of Artificial Sequence: Synthetic oligonucleotide
  Antisense strand to SEQ ID NO: 1671209
agaaucggugacuuaucuu

SEQ ID NO: 1671211 - RNA, 19 nt, Artificial Sequence
  Description of Artificial Sequence: Synthetic oligonucleotide
  Sense strand starting at position 3039 of SEQ ID NO: 1561428
ugccgaguagcugugagua

SEQ ID NO: 1671212 - RNA, 19 nt, Artificial Sequence
  Description of Artificial Sequence: Synthetic oligonucleotide
  Antisense strand to SEQ ID NO: 1671211
uacucacagcuacucggca

SEQ ID NO: 1671213 - RNA, 19 nt, Artificial Sequence
  Description of Artificial Sequence: Synthetic oligonucleotide
  Sense strand starting at position 3199 of SEQ ID NO: 1561428
ucggauuauaggcaugaau

SEQ ID NO: 1671214 - RNA, 19 nt, Artificial Sequence
  Description of Artificial Sequence: Synthetic oligonucleotide
  Antisense strand to SEQ ID NO: 1671213
auucaugccuauaauccga

SEQ ID NO: 1671215 - RNA, 19 nt, Artificial Sequence
  Description of Artificial Sequence: Synthetic oligonucleotide
  Sense strand starting at position 3217 of SEQ ID NO: 1561428
ucaccuugcaugggagaua

SEQ ID NO: 1671216 - RNA, 19 nt, Artificial Sequence
  Description of Artificial Sequence: Synthetic oligonucleotide
  Antisense strand to SEQ ID NO: 1671215
uaucucccaugcaagguga

SEQ ID NO: 1671217 - RNA, 19 nt, Artificial Sequence
  Description of Artificial Sequence: Synthetic oligonucleotide
  Sense strand starting at position 3245 of SEQ ID NO: 1561428
acaucaagcccucagguua

SEQ ID NO: 1671218 - RNA, 19 nt, Artificial Sequence
  Description of Artificial Sequence: Synthetic oligonucleotide
  Antisense strand to SEQ ID NO: 1671217
uaaccugagggcuugaugu

SEQ ID NO: 1671219 - RNA, 19 nt, Artificial Sequence
  Description of Artificial Sequence: Synthetic oligonucleotide
  Sense strand starting at position 3340 of SEQ ID NO: 1561428
cuuugaucugaguaccaac

SEQ ID NO: 1671220 - RNA, 19 nt, Artificial Sequence
  Description of Artificial Sequence: Synthetic oligonucleotide
  Antisense strand to SEQ ID NO: 1671219
guugguacucagaucaaag

SEQ ID NO: 1671221 - RNA, 19 nt, Artificial Sequence
  Description of Artificial Sequence: Synthetic oligonucleotide
  Sense strand starting at position 3460 of SEQ ID NO: 1561428
cuggcuguaccucaaugau

SEQ ID NO: 1671222 - RNA, 19 nt, Artificial Sequence
  Description of Artificial Sequence: Synthetic oligonucleotide
  Antisense strand to SEQ ID NO: 1671221
aucauugagguacagccag

SEQ ID NO: 1671223 - RNA, 19 nt, Artificial Sequence
  Description of Artificial Sequence: Synthetic oligonucleotide
  Sense strand starting at position 3463 of SEQ ID NO: 1561428
gcuguaccucaaugauguu

SEQ ID NO: 1671224 - RNA, 19 nt, Artificial Sequence
  Description of Artificial Sequence: Synthetic oligonucleotide
  Antisense strand to SEQ ID NO: 1671223
aacaucauugagguacagc

SEQ ID NO: 1671225 - RNA, 19 nt, Artificial Sequence
  Description of Artificial Sequence: Synthetic oligonucleotide
  Sense strand starting at position 3475 of SEQ ID NO: 1561428
ugauguugcccugagauuc

SEQ ID NO: 1671226 - RNA, 19 nt, Artificial Sequence
  Description of Artificial Sequence: Synthetic oligonucleotide
  Antisense strand to SEQ ID NO: 1671225
gaaucucagggcaacauca

SEQ ID NO: 1671227 - RNA, 19 nt, Artificial Sequence
  Description of Artificial Sequence: Synthetic oligonucleotide
  Sense strand starting at position 3551 of SEQ ID NO: 1561428
gaggucagugcacauguaa

SEQ ID NO: 1671228 - RNA, 19 nt, Artificial Sequence
  Description of Artificial Sequence: Synthetic oligonucleotide
  Antisense strand to SEQ ID NO: 1671227
uuacaugugcacugaccuc

SEQ ID NO: 1671229 - RNA, 19 nt, Artificial Sequence
  Description of Artificial Sequence: Synthetic oligonucleotide
  Sense strand starting at position 3572 of SEQ ID NO: 1561428
ggacuagcuuuauuaaagg

SEQ ID NO: 1671230 - RNA, 19 nt, Artificial Sequence
  Description of Artificial Sequence: Synthetic oligonucleotide
  Antisense strand to SEQ ID NO: 1671229
ccuuuaauaaagcuagucc

SEQ ID NO: 1671231 - RNA, 19 nt, Artificial Sequence
  Description of Artificial Sequence: Synthetic oligonucleotide
  Sense strand starting at position 21 of SEQ ID NO: 1561429
acauacugucaagguguua

SEQ ID NO: 1671232 - RNA, 19 nt, Artificial Sequence
  Description of Artificial Sequence: Synthetic oligonucleotide
  Antisense strand to SEQ ID NO: 1671231
uaacaccuugacaguaugu

SEQ ID NO: 1671233 - RNA, 19 nt, Artificial Sequence
  Description of Artificial Sequence: Synthetic oligonucleotide
  Sense strand starting at position 100 of SEQ ID NO: 1561429
ucauaaugucaucaguaac

SEQ ID NO: 1671234 - RNA, 19 nt, Artificial Sequence
  Description of Artificial Sequence: Synthetic oligonucleotide
  Antisense strand to SEQ ID NO: 1671233
guuacugaugacauuauga

SEQ ID NO: 1671235 - RNA, 19 nt, Artificial Sequence
  Description of Artificial Sequence: Synthetic oligonucleotide
  Sense strand starting at position 110 of SEQ ID NO: 1561429
aucaguaacugggaagaga

SEQ ID NO: 1671236 - RNA, 19 nt, Artificial Sequence
  Description of Artificial Sequence: Synthetic oligonucleotide
  Antisense strand to SEQ ID NO: 1671235
ucucuucccaguuacugau

SEQ ID NO: 1671237 - RNA, 19 nt, Artificial Sequence
  Description of Artificial Sequence: Synthetic oligonucleotide
  Sense strand starting at position 144 of SEQ ID NO: 1561429
guaaauagauaagucacua

SEQ ID NO: 1671238 - RNA, 19 nt, Artificial Sequence
  Description of Artificial Sequence: Synthetic oligonucleotide
  Antisense strand to SEQ ID NO: 1671237
uagugacuuaucuauuuac

SEQ ID NO: 1671239 - RNA, 19 nt, Artificial Sequence
  Description of Artificial Sequence: Synthetic oligonucleotide
  Sense strand starting at position 297 of SEQ ID NO: 1561429
agcucuucucuuggaauac

SEQ ID NO: 1671240 - RNA, 19 nt, Artificial Sequence
  Description of Artificial Sequence: Synthetic oligonucleotide
  Antisense strand to SEQ ID NO: 1671239
guauuccaagagaagagcu

SEQ ID NO: 1671241 - RNA, 19 nt, Artificial Sequence
  Description of Artificial Sequence: Synthetic oligonucleotide
  Sense strand starting at position 458 of SEQ ID NO: 1561429
uggaauauuguugacucuu

SEQ ID NO: 1671242 - RNA, 19 nt, Artificial Sequence
  Description of Artificial Sequence: Synthetic oligonucleotide
  Antisense strand to SEQ ID NO: 1671241
aagagucaacaauauucca

SEQ ID NO: 1671243 - RNA, 19 nt, Artificial Sequence
  Description of Artificial Sequence: Synthetic oligonucleotide
  Sense strand starting at position 515 of SEQ ID NO: 1561429
acugaaauguuucuguauu

SEQ ID NO: 1671244 - RNA, 19 nt, Artificial Sequence
  Description of Artificial Sequence: Synthetic oligonucleotide
  Antisense strand to SEQ ID NO: 1671243
aauacagaaacauuucagu

SEQ ID NO: 1671245 - RNA, 19 nt, Artificial Sequence
  Description of Artificial Sequence: Synthetic oligonucleotide
  Sense strand starting at position 1021 of SEQ ID NO: 1561429
cgaggcugugcauaucaga

SEQ ID NO: 1671246 - RNA, 19 nt, Artificial Sequence
  Description of Artificial Sequence: Synthetic oligonucleotide
  Antisense strand to SEQ ID NO: 1671245
ucugauaugcacagccucg

SEQ ID NO: 1671247 - RNA, 19 nt, Artificial Sequence
  Description of Artificial Sequence: Synthetic oligonucleotide
  Sense strand starting at position 1155 of SEQ ID NO: 1561429
gugguuauaaggugaaaug

SEQ ID NO: 1671248 - RNA, 19 nt, Artificial Sequence
  Description of Artificial Sequence: Synthetic oligonucleotide
  Antisense strand to SEQ ID NO: 1671247
cauuucaccuuauaaccac

SEQ ID NO: 1671249 - RNA, 19 nt, Artificial Sequence
  Description of Artificial Sequence: Synthetic oligonucleotide
  Sense strand starting at position 1164 of SEQ ID NO: 1561429
aggugaaaugacugaggca

SEQ ID NO: 1671250 - RNA, 19 nt, Artificial Sequence
  Description of Artificial Sequence: Synthetic oligonucleotide
  Antisense strand to SEQ ID NO: 1671249
ugccucagucauuucaccu

SEQ ID NO: 1671251 - RNA, 19 nt, Artificial Sequence
  Description of Artificial Sequence: Synthetic oligonucleotide
  Sense strand starting at position 1461 of SEQ ID NO: 1561429
gucacaggaucacugauaa

SEQ ID NO: 1671252 - RNA, 19 nt, Artificial Sequence
  Description of Artificial Sequence: Synthetic oligonucleotide
  Antisense strand to SEQ ID NO: 1671251
uuaucagugauccugugac

SEQ ID NO: 1671253 - RNA, 19 nt, Artificial Sequence
  Description of Artificial Sequence: Synthetic oligonucleotide
  Sense strand starting at position 1806 of SEQ ID NO: 1561429
ccgugagcucuucucgcau

SEQ ID NO: 1671254 - RNA, 19 nt, Artificial Sequence
  Description of Artificial Sequence: Synthetic oligonucleotide
  Antisense strand to SEQ ID NO: 1671253
augcgagaagagcucacgg

SEQ ID NO: 1671255 - RNA, 19 nt, Artificial Sequence
  Description of Artificial Sequence: Synthetic oligonucleotide
  Sense strand starting at position 2555 of SEQ ID NO: 1561429
uuaggugugagucgcauuu

SEQ ID NO: 1671256 - RNA, 19 nt, Artificial Sequence
  Description of Artificial Sequence: Synthetic oligonucleotide
  Antisense strand to SEQ ID NO: 1671255
aaaugcgacucacaccuaa

SEQ ID NO: 1671257 - RNA, 19 nt, Artificial Sequence
  Description of Artificial Sequence: Synthetic oligonucleotide
  Sense strand starting at position 2561 of SEQ ID NO: 1561429
gugagucgcauuugagacu

SEQ ID NO: 1671258 - RNA, 19 nt, Artificial Sequence
  Description of Artificial Sequence: Synthetic oligonucleotide
  Antisense strand to SEQ ID NO: 1671257
agucucaaaugcgacucac

SEQ ID NO: 1671259 - RNA, 19 nt, Artificial Sequence
  Description of Artificial Sequence: Synthetic oligonucleotide
  Sense strand starting at position 2579 of SEQ ID NO: 1561429
ugccuuugaguguggagaa

SEQ ID NO: 1671260 - RNA, 19 nt, Artificial Sequence
  Description of Artificial Sequence: Synthetic oligonucleotide
  Antisense strand to SEQ ID NO: 1671259
uucuccacacucaaaggca

SEQ ID NO: 1671261 - RNA, 19 nt, Artificial Sequence
  Description of Artificial Sequence: Synthetic oligonucleotide
  Sense strand starting at position 2598 of SEQ ID NO: 1561429
uugcaagugauuuguaggu

SEQ ID NO: 1671262 - RNA, 19 nt, Artificial Sequence
  Description of Artificial Sequence: Synthetic oligonucleotide
  Antisense strand to SEQ ID NO: 1671261
accuacaaaucacuugcaa

SEQ ID NO: 1671263 - RNA, 19 nt, Artificial Sequence
  Description of Artificial Sequence: Synthetic oligonucleotide
  Sense strand starting at position 2604 of SEQ ID NO: 1561429
gugauuuguaggugugguu

SEQ ID NO: 1671264 - RNA, 19 nt, Artificial Sequence
  Description of Artificial Sequence: Synthetic oligonucleotide
  Antisense strand to SEQ ID NO: 1671263
aaccacaccuacaaaucac

SEQ ID NO: 1671265 - RNA, 19 nt, Artificial Sequence
  Description of Artificial Sequence: Synthetic oligonucleotide
  Sense strand starting at position 2630 of SEQ ID NO: 1561429
ccuggagucguguuagcug

SEQ ID NO: 1671266 - RNA, 19 nt, Artificial Sequence
  Description of Artificial Sequence: Synthetic oligonucleotide
  Antisense strand to SEQ ID NO: 1671265
cagcuaacacgacuccagg

SEQ ID NO: 1671267 - RNA, 19 nt, Artificial Sequence
  Description of Artificial Sequence: Synthetic oligonucleotide
  Sense strand starting at position 2654 of SEQ ID NO: 1561429
ugagguugugaaugacaag

SEQ ID NO: 1671268 - RNA, 19 nt, Artificial Sequence
  Description of Artificial Sequence: Synthetic oligonucleotide
  Antisense strand to SEQ ID NO: 1671267
cuugucauucacaaccuca

SEQ ID NO: 1671269 - RNA, 19 nt, Artificial Sequence
  Description of Artificial Sequence: Synthetic oligonucleotide
  Sense strand starting at position 2655 of SEQ ID NO: 1561429
gagguugugaaugacaagu

SEQ ID NO: 1671270 - RNA, 19 nt, Artificial Sequence
  Description of Artificial Sequence: Synthetic oligonucleotide
  Antisense strand to SEQ ID NO: 1671269
acuugucauucacaaccuc

SEQ ID NO: 1671271 - RNA, 19 nt, Artificial Sequence
  Description of Artificial Sequence: Synthetic oligonucleotide
  Sense strand starting at position 2690 of SEQ ID NO: 1561429
ugguucucugaaggauguu

SEQ ID NO: 1671272 - RNA, 19 nt, Artificial Sequence
  Description of Artificial Sequence: Synthetic oligonucleotide
  Antisense strand to SEQ ID NO: 1671271
aacauccuucagagaacca

SEQ ID NO: 1671273 - RNA, 19 nt, Artificial Sequence
  Description of Artificial Sequence: Synthetic oligonucleotide
  Sense strand starting at position 2691 of SEQ ID NO: 1561429
gguucucugaaggauguuu

SEQ ID NO: 1671274 - RNA, 19 nt, Artificial Sequence
  Description of Artificial Sequence: Synthetic oligonucleotide
  Antisense strand to SEQ ID NO: 1671273
aaacauccuucagagaacc

SEQ ID NO: 1671275 - RNA, 19 nt, Artificial Sequence
  Description of Artificial Sequence: Synthetic oligonucleotide
  Sense strand starting at position 2693 of SEQ ID NO: 1561429
uucucugaaggauguuuga

SEQ ID NO: 1671276 - RNA, 19 nt, Artificial Sequence
  Description of Artificial Sequence: Synthetic oligonucleotide
  Antisense strand to SEQ ID NO: 1671275
ucaaacauccuucagagaa

SEQ ID NO: 1671277 - RNA, 19 nt, Artificial Sequence
  Description of Artificial Sequence: Synthetic oligonucleotide
  Sense strand starting at position 2765 of SEQ ID NO: 1561429
uggccuuagugaccuaaau

SEQ ID NO: 1671278 - RNA, 19 nt, Artificial Sequence
  Description of Artificial Sequence: Synthetic oligonucleotide
  Antisense strand to SEQ ID NO: 1671277
auuuaggucacuaaggcca

SEQ ID NO: 1671279 - RNA, 19 nt, Artificial Sequence
  Description of Artificial Sequence: Synthetic oligonucleotide
  Sense strand starting at position 2804 of SEQ ID NO: 1561429
cuguuaugaccauggcuag

SEQ ID NO: 1671280 - RNA, 19 nt, Artificial Sequence
  Description of Artificial Sequence: Synthetic oligonucleotide
  Antisense strand to SEQ ID NO: 1671279
cuagccauggucauaacag

SEQ ID NO: 1671281 - RNA, 19 nt, Artificial Sequence
  Description of Artificial Sequence: Synthetic oligonucleotide
  Sense strand starting at position 2816 of SEQ ID NO: 1561429
uggcuaguugguuauguaa

SEQ ID NO: 1671282 - RNA, 19 nt, Artificial Sequence
  Description of Artificial Sequence: Synthetic oligonucleotide
  Antisense strand to SEQ ID NO: 1671281
uuacauaaccaacuagcca

SEQ ID NO: 1671283 - RNA, 19 nt, Artificial Sequence
  Description of Artificial Sequence: Synthetic oligonucleotide
  Sense strand starting at position 2845 of SEQ ID NO: 1561429
ucugaauaguagccauuaa

SEQ ID NO: 1671284 - RNA, 19 nt, Artificial Sequence
  Description of Artificial Sequence: Synthetic oligonucleotide
  Antisense strand to SEQ ID NO: 1671283
uuaauggcuacuauucaga

SEQ ID NO: 1671285 - RNA, 19 nt, Artificial Sequence
  Description of Artificial Sequence: Synthetic oligonucleotide
  Sense strand starting at position 2996 of SEQ ID NO: 1561429
uguugaaaugaauagcauu

SEQ ID NO: 1671286 - RNA, 19 nt, Artificial Sequence
  Description of Artificial Sequence: Synthetic oligonucleotide
  Antisense strand to SEQ ID NO: 1671285
aaugcuauucauuucaaca

SEQ ID NO: 1671287 - RNA, 19 nt, Artificial Sequence
  Description of Artificial Sequence: Synthetic oligonucleotide
  Sense strand starting at position 3400 of SEQ ID NO: 1561429
ucaacacuuguauaugagu

SEQ ID NO: 1671288 - RNA, 19 nt, Artificial Sequence
  Description of Artificial Sequence: Synthetic oligonucleotide
  Antisense strand to SEQ ID NO: 1671287
acucauauacaaguguuga

SEQ ID NO: 1671289 - RNA, 19 nt, Artificial Sequence
  Description of Artificial Sequence: Synthetic oligonucleotide
  Sense strand starting at position 3405 of SEQ ID NO: 1561429
acuuguauaugagugaggu

SEQ ID NO: 1671290 - RNA, 19 nt, Artificial Sequence
  Description of Artificial Sequence: Synthetic oligonucleotide
  Antisense strand to SEQ ID NO: 1671289
accucacucauauacaagu

SEQ ID NO: 1671291 - RNA, 19 nt, Artificial Sequence
  Description of Artificial Sequence: Synthetic oligonucleotide
  Sense strand starting at position 3406 of SEQ ID NO: 1561429
cuuguauaugagugagguu

SEQ ID NO: 1671292 - RNA, 19 nt, Artificial Sequence
  Description of Artificial Sequence: Synthetic oligonucleotide
  Antisense strand to SEQ ID NO: 1671291
aaccucacucauauacaag

SEQ ID NO: 1671293 - RNA, 19 nt, Artificial Sequence
  Description of Artificial Sequence: Synthetic oligonucleotide
  Sense strand starting at position 3407 of SEQ ID NO: 1561429
uuguauaugagugagguuu

SEQ ID NO: 1671294 - RNA, 19 nt, Artificial Sequence
  Description of Artificial Sequence: Synthetic oligonucleotide
  Antisense strand to SEQ ID NO: 1671293
aaaccucacucauauacaa

SEQ ID NO: 1671295 - RNA, 19 nt, Artificial Sequence
  Description of Artificial Sequence: Synthetic oligonucleotide
  Sense strand starting at position 3432 of SEQ ID NO: 1561429
cccuuaggcuugcuaagau

SEQ ID NO: 1671296 - RNA, 19 nt, Artificial Sequence
  Description of Artificial Sequence: Synthetic oligonucleotide
  Antisense strand to SEQ ID NO: 1671295
aucuuagcaagccuaaggg

SEQ ID NO: 1671297 - RNA, 19 nt, Artificial Sequence
  Description of Artificial Sequence: Synthetic oligonucleotide
  Sense strand starting at position 3483 of SEQ ID NO: 1561429
ccagucucacuguaguaau

SEQ ID NO: 1671298 - RNA, 19 nt, Artificial Sequence
  Description of Artificial Sequence: Synthetic oligonucleotide
  Antisense strand to SEQ ID NO: 1671297
auuacuacagugagacugg

SEQ ID NO: 1671299 - RNA, 19 nt, Artificial Sequence
  Description of Artificial Sequence: Synthetic oligonucleotide
  Sense strand starting at position 3733 of SEQ ID NO: 1561429
ggagguugcggucagucaa

SEQ ID NO: 1671300 - RNA, 19 nt, Artificial Sequence
  Description of Artificial Sequence: Synthetic oligonucleotide
  Antisense strand to SEQ ID NO: 1671299
uugacugaccgcaaccucc

SEQ ID NO: 1671301 - RNA, 19 nt, Artificial Sequence
  Description of Artificial Sequence: Synthetic oligonucleotide
  Sense strand starting at position 3890 of SEQ ID NO: 1561429
uugggaagguauucucauc

SEQ ID NO: 1671302 - RNA, 19 nt, Artificial Sequence
  Description of Artificial Sequence: Synthetic oligonucleotide
  Antisense strand to SEQ ID NO: 1671301
gaugagaauaccuucccaa

SEQ ID NO: 1671303 - RNA, 19 nt, Artificial Sequence
  Description of Artificial Sequence: Synthetic oligonucleotide
  Sense strand starting at position 3908 of SEQ ID NO: 1561429
ccacuacuaucaguguaaa

SEQ ID NO: 1671304 - RNA, 19 nt, Artificial Sequence
  Description of Artificial Sequence: Synthetic oligonucleotide
  Antisense strand to SEQ ID NO: 1671303
uuuacacugauaguagugg

SEQ ID NO: 1671305 - RNA, 19 nt, Artificial Sequence
  Description of Artificial Sequence: Synthetic oligonucleotide
  Sense strand starting at position 3911 of SEQ ID NO: 1561429
cuacuaucaguguaaauug

SEQ ID NO: 1671306 - RNA, 19 nt, Artificial Sequence
  Description of Artificial Sequence: Synthetic oligonucleotide
  Antisense strand to SEQ ID NO: 1671305
caauuuacacugauaguag

SEQ ID NO: 1671307 - RNA, 19 nt, Artificial Sequence
  Description of Artificial Sequence: Synthetic oligonucleotide
  Sense strand starting at position 3942 of SEQ ID NO: 1561429
agaagaaccguuuggaaau

SEQ ID NO: 1671308 - RNA, 19 nt, Artificial Sequence
  Description of Artificial Sequence: Synthetic oligonucleotide
  Antisense strand to SEQ ID NO: 1671307
auuuccaaacgguucuucu

SEQ ID NO: 1671309 - RNA, 19 nt, Artificial Sequence
  Description of Artificial Sequence: Synthetic oligonucleotide
  Sense strand starting at position 3963 of SEQ ID NO: 1561429
acaguaaaccugugguuag

SEQ ID NO: 1671310 - RNA, 19 nt, Artificial Sequence
  Description of Artificial Sequence: Synthetic oligonucleotide
  Antisense strand to SEQ ID NO: 1671309
cuaaccacagguuuacugu

SEQ ID NO: 1671311 - RNA, 19 nt, Artificial Sequence
  Description of Artificial Sequence: Synthetic oligonucleotide
  Sense strand starting at position 540 of SEQ ID NO: 1561430
uuugguugucaccacuuaa

SEQ ID NO: 1671312 - RNA, 19 nt, Artificial Sequence
  Description of Artificial Sequence: Synthetic oligonucleotide
  Antisense strand to SEQ ID NO: 1671311
uuaaguggugacaaccaaa

SEQ ID NO: 1671313 - RNA, 19 nt, Artificial Sequence
  Description of Artificial Sequence: Synthetic oligonucleotide
  Sense strand starting at position 563 of SEQ ID NO: 1561430
ccucaugaauguucuggaa

SEQ ID NO: 1671314 - RNA, 19 nt, Artificial Sequence
  Description of Artificial Sequence: Synthetic oligonucleotide
  Antisense strand to SEQ ID NO: 1671313
uuccagaacauucaugagg

SEQ ID NO: 1671315 - RNA, 19 nt, Artificial Sequence
  Description of Artificial Sequence: Synthetic oligonucleotide
  Sense strand starting at position 662 of SEQ ID NO: 1561430
cuuugucacuuacugauua

SEQ ID NO: 1671316 - RNA, 19 nt, Artificial Sequence
  Description of Artificial Sequence: Synthetic oligonucleotide
  Antisense strand to SEQ ID NO: 1671315
uaaucaguaagugacaaag

SEQ ID NO: 1671317 - RNA, 19 nt, Artificial Sequence
  Description of Artificial Sequence: Synthetic oligonucleotide
  Sense strand starting at position 732 of SEQ ID NO: 1561430
gaucaaagguaucuagugu

SEQ ID NO: 1671318 - RNA, 19 nt, Artificial Sequence
  Description of Artificial Sequence: Synthetic oligonucleotide
  Antisense strand to SEQ ID NO: 1671317
acacuagauaccuuugauc

SEQ ID NO: 1671319 - RNA, 19 nt, Artificial Sequence
  Description of Artificial Sequence: Synthetic oligonucleotide
  Sense strand starting at position 889 of SEQ ID NO: 1561430
uuaccuaaugcauauguga

SEQ ID NO: 1671320 - RNA, 19 nt, Artificial Sequence
  Description of Artificial Sequence: Synthetic oligonucleotide
  Antisense strand to SEQ ID NO: 1671319
ucacauaugcauuagguaa

SEQ ID NO: 1671321 - RNA, 19 nt, Artificial Sequence
  Description of Artificial Sequence: Synthetic oligonucleotide
  Sense strand starting at position 892 of SEQ ID NO: 1561430
ccuaaugcauaugugaaua

SEQ ID NO: 1671322 - RNA, 19 nt, Artificial Sequence
  Description of Artificial Sequence: Synthetic oligonucleotide
  Antisense strand to SEQ ID NO: 1671321
uauucacauaugcauuagg

SEQ ID NO: 1671323 - RNA, 19 nt, Artificial Sequence
  Description of Artificial Sequence: Synthetic oligonucleotide
  Sense strand starting at position 974 of SEQ ID NO: 1561430
uccuguuguuaauugggaa

SEQ ID NO: 1671324 - RNA, 19 nt, Artificial Sequence
  Description of Artificial Sequence: Synthetic oligonucleotide
  Antisense strand to SEQ ID NO: 1671323
uucccaauuaacaacagga

SEQ ID NO: 1671325 - RNA, 19 nt, Artificial Sequence
  Description of Artificial Sequence: Synthetic oligonucleotide
  Sense strand starting at position 1035 of SEQ ID NO: 1561430
aaccuugaguuggccauua

SEQ ID NO: 1671326 - RNA, 19 nt, Artificial Sequence
  Description of Artificial Sequence: Synthetic oligonucleotide
  Antisense strand to SEQ ID NO: 1671325
uaauggccaacucaagguu

SEQ ID NO: 1671327 - RNA, 19 nt, Artificial Sequence
  Description of Artificial Sequence: Synthetic oligonucleotide
  Sense strand starting at position 1128 of SEQ ID NO: 1561430
gacauccuggacugguuaa

SEQ ID NO: 1671328 - RNA, 19 nt, Artificial Sequence
  Description of Artificial Sequence: Synthetic oligonucleotide
  Antisense strand to SEQ ID NO: 1671327
uuaaccaguccaggauguc

SEQ ID NO: 1671329 - RNA, 19 nt, Artificial Sequence
  Description of Artificial Sequence: Synthetic oligonucleotide
  Sense strand starting at position 1273 of SEQ ID NO: 1561430
gcaguuucuagggaacaca

SEQ ID NO: 1671330 - RNA, 19 nt, Artificial Sequence
  Description of Artificial Sequence: Synthetic oligonucleotide
  Antisense strand to SEQ ID NO: 1671329
uguguucccuagaaacugc

SEQ ID NO: 1671331 - RNA, 19 nt, Artificial Sequence
  Description of Artificial Sequence: Synthetic oligonucleotide
  Sense strand starting at position 1295 of SEQ ID NO: 1561430
caggaaauacuguaguucu

SEQ ID NO: 1671332 - RNA, 19 nt, Artificial Sequence
  Description of Artificial Sequence: Synthetic oligonucleotide
  Antisense strand to SEQ ID NO: 1671331
agaacuacaguauuuccug

SEQ ID NO: 1671333 - RNA, 19 nt, Artificial Sequence
  Description of Artificial Sequence: Synthetic oligonucleotide
  Sense strand starting at position 1303 of SEQ ID NO: 1561430
acuguaguucuuuaaugua

SEQ ID NO: 1671334 - RNA, 19 nt, Artificial Sequence
  Description of Artificial Sequence: Synthetic oligonucleotide
  Antisense strand to SEQ ID NO: 1671333
uacauuaaagaacuacagu

SEQ ID NO: 1671335 - RNA, 19 nt, Artificial Sequence
  Description of Artificial Sequence: Synthetic oligonucleotide
  Sense strand starting at position 1317 of SEQ ID NO: 1561430
auguauaaauggccuccaa

SEQ ID NO: 1671336 - RNA, 19 nt, Artificial Sequence
  Description of Artificial Sequence: Synthetic oligonucleotide
  Antisense strand to SEQ ID NO: 1671335
uuggaggccauuuauacau

SEQ ID NO: 1671337 - RNA, 19 nt, Artificial Sequence
  Description of Artificial Sequence: Synthetic oligonucleotide
  Sense strand starting at position 1391 of SEQ ID NO: 1561430
cacgucuucccaggaaacu

SEQ ID NO: 1671338 - RNA, 19 nt, Artificial Sequence
  Description of Artificial Sequence: Synthetic oligonucleotide
  Antisense strand to SEQ ID NO: 1671337
aguuuccugggaagacgug

SEQ ID NO: 1671339 - RNA, 19 nt, Artificial Sequence
  Description of Artificial Sequence: Synthetic oligonucleotide
  Sense strand starting at position 1392 of SEQ ID NO: 1561430
acgucuucccaggaaacuu

SEQ ID NO: 1671340 - RNA, 19 nt, Artificial Sequence
  Description of Artificial Sequence: Synthetic oligonucleotide
  Antisense strand to SEQ ID NO: 1671339
aaguuuccugggaagacgu

SEQ ID NO: 1671341 - RNA, 19 nt, Artificial Sequence
  Description of Artificial Sequence: Synthetic oligonucleotide
  Sense strand starting at position 1663 of SEQ ID NO: 1561430
acacuuauaguuggucaca

SEQ ID NO: 1671342 - RNA, 19 nt, Artificial Sequence
  Description of Artificial Sequence: Synthetic oligonucleotide
  Antisense strand to SEQ ID NO: 1671341
ugugaccaacuauaagugu

SEQ ID NO: 1671343 - RNA, 19 nt, Artificial Sequence
  Description of Artificial Sequence: Synthetic oligonucleotide
  Sense strand starting at position 1665 of SEQ ID NO: 1561430
acuuauaguuggucacaac

SEQ ID NO: 1671344 - RNA, 19 nt, Artificial Sequence
  Description of Artificial Sequence: Synthetic oligonucleotide
  Antisense strand to SEQ ID NO: 1671343
guugugaccaacuauaagu

SEQ ID NO: 1671345 - RNA, 19 nt, Artificial Sequence
  Description of Artificial Sequence: Synthetic oligonucleotide
  Sense strand starting at position 1666 of SEQ ID NO: 1561430
cuuauaguuggucacaaca

SEQ ID NO: 1671346 - RNA, 19 nt, Artificial Sequence
  Description of Artificial Sequence: Synthetic oligonucleotide
  Antisense strand to SEQ ID NO: 1671345
uguugugaccaacuauaag

SEQ ID NO: 1671347 - RNA, 19 nt, Artificial Sequence
  Description of Artificial Sequence: Synthetic oligonucleotide
  Sense strand starting at position 2752 of SEQ ID NO: 1561430
ucuaaaguauuugaagaga

SEQ ID NO: 1671348 - RNA, 19 nt, Artificial Sequence
  Description of Artificial Sequence: Synthetic oligonucleotide
  Antisense strand to SEQ ID NO: 1671347
ucucuucaaauacuuuaga

SEQ ID NO: 1671349 - RNA, 19 nt, Artificial Sequence
  Description of Artificial Sequence: Synthetic oligonucleotide
  Sense strand starting at position 2920 of SEQ ID NO: 1561430
auugauucccuccggaaag

SEQ ID NO: 1671350 - RNA, 19 nt, Artificial Sequence
  Description of Artificial Sequence: Synthetic oligonucleotide
  Antisense strand to SEQ ID NO: 1671349
cuuuccggagggaaucaau

SEQ ID NO: 1671351 - RNA, 19 nt, Artificial Sequence
  Description of Artificial Sequence: Synthetic oligonucleotide
  Sense strand starting at position 3010 of SEQ ID NO: 1561430
uugaaagaguuauugacgu

SEQ ID NO: 1671352 - RNA, 19 nt, Artificial Sequence
  Description of Artificial Sequence: Synthetic oligonucleotide
  Antisense strand to SEQ ID NO: 1671351
acgucaauaacucuuucaa

SEQ ID NO: 1671353 - RNA, 19 nt, Artificial Sequence
  Description of Artificial Sequence: Synthetic oligonucleotide
  Sense strand starting at position 3016 of SEQ ID NO: 1561430
gaguuauugacguaagacu

SEQ ID NO: 1671354 - RNA, 19 nt, Artificial Sequence
  Description of Artificial Sequence: Synthetic oligonucleotide
  Antisense strand to SEQ ID NO: 1671353
agucuuacgucaauaacuc

SEQ ID NO: 1671355 - RNA, 19 nt, Artificial Sequence
  Description of Artificial Sequence: Synthetic oligonucleotide
  Sense strand starting at position 3034 of SEQ ID NO: 1561430
uuaggaaugucuccaggua

SEQ ID NO: 1671356 - RNA, 19 nt, Artificial Sequence
  Description of Artificial Sequence: Synthetic oligonucleotide
  Antisense strand to SEQ ID NO: 1671355
uaccuggagacauuccuaa

SEQ ID NO: 1671357 - RNA, 19 nt, Artificial Sequence
  Description of Artificial Sequence: Synthetic oligonucleotide
  Sense strand starting at position 3035 of SEQ ID NO: 1561430
uaggaaugucuccagguag

SEQ ID NO: 1671358 - RNA, 19 nt, Artificial Sequence
  Description of Artificial Sequence: Synthetic oligonucleotide
  Antisense strand to SEQ ID NO: 1671357
cuaccuggagacauuccua

SEQ ID NO: 1671359 - RNA, 19 nt, Artificial Sequence
  Description of Artificial Sequence: Synthetic oligonucleotide
  Sense strand starting at position 3174 of SEQ ID NO: 1561430
ccaucauggcuuuacuagu

SEQ ID NO: 1671360 - RNA, 19 nt, Artificial Sequence
  Description of Artificial Sequence: Synthetic oligonucleotide
  Antisense strand to SEQ ID NO: 1671359
acuaguaaagccaugaugg

SEQ ID NO: 1671361 - RNA, 19 nt, Artificial Sequence
  Description of Artificial Sequence: Synthetic oligonucleotide
  Sense strand starting at position 3339 of SEQ ID NO: 1561430
auaguucugauuuguguca

SEQ ID NO: 1671362 - RNA, 19 nt, Artificial Sequence
  Description of Artificial Sequence: Synthetic oligonucleotide
  Antisense strand to SEQ ID NO: 1671361
ugacacaaaucagaacuau

SEQ ID NO: 1671363 - RNA, 19 nt, Artificial Sequence
  Description of Artificial Sequence: Synthetic oligonucleotide
  Sense strand starting at position 3346 of SEQ ID NO: 1561430
ugauuugugucacuguaac

SEQ ID NO: 1671364 - RNA, 19 nt, Artificial Sequence
  Description of Artificial Sequence: Synthetic oligonucleotide
  Antisense strand to SEQ ID NO: 1671363
guuacagugacacaaauca

SEQ ID NO: 1671365 - RNA, 19 nt, Artificial Sequence
  Description of Artificial Sequence: Synthetic oligonucleotide
  Sense strand starting at position 3598 of SEQ ID NO: 1561430
gguaauugguaaguuuaca

SEQ ID NO: 1671366 - RNA, 19 nt, Artificial Sequence
  Description of Artificial Sequence: Synthetic oligonucleotide
  Antisense strand to SEQ ID NO: 1671365
uguaaacuuaccaauuacc

SEQ ID NO: 1671367 - RNA, 19 nt, Artificial Sequence
  Description of Artificial Sequence: Synthetic oligonucleotide
  Sense strand starting at position 3646 of SEQ ID NO: 1561430
uuagaaugauuaguuguga

SEQ ID NO: 1671368 - RNA, 19 nt, Artificial Sequence
  Description of Artificial Sequence: Synthetic oligonucleotide
  Antisense strand to SEQ ID NO: 1671367
ucacaacuaaucauucuaa

SEQ ID NO: 1671369 - RNA, 19 nt, Artificial Sequence
  Description of Artificial Sequence: Synthetic oligonucleotide
  Sense strand starting at position 3647 of SEQ ID NO: 1561430
uagaaugauuaguugugau

SEQ ID NO: 1671370 - RNA, 19 nt, Artificial Sequence
  Description of Artificial Sequence: Synthetic oligonucleotide
  Antisense strand to SEQ ID NO: 1671369
aucacaacuaaucauucua

SEQ ID NO: 1671371 - RNA, 19 nt, Artificial Sequence
  Description of Artificial Sequence: Synthetic oligonucleotide
  Sense strand starting at position 3678 of SEQ ID NO: 1561430
gauuguguaacuggaguaa

SEQ ID NO: 1671372 - RNA, 19 nt, Artificial Sequence
  Description of Artificial Sequence: Synthetic oligonucleotide
  Antisense strand to SEQ ID NO: 1671371
uuacuccaguuacacaauc

SEQ ID NO: 1671373 - RNA, 19 nt, Artificial Sequence
  Description of Artificial Sequence: Synthetic oligonucleotide
  Sense strand starting at position 3689 of SEQ ID NO: 1561430
uggaguaaguaguuucuga

SEQ ID NO: 1671374 - RNA, 19 nt, Artificial Sequence
  Description of Artificial Sequence: Synthetic oligonucleotide
  Antisense strand to SEQ ID NO: 1671373
ucagaaacuacuuacucca

SEQ ID NO: 1671375 - RNA, 19 nt, Artificial Sequence
  Description of Artificial Sequence: Synthetic oligonucleotide
  Sense strand starting at position 3731 of SEQ ID NO: 1561430
gaauuauaagaugggcuca

SEQ ID NO: 1671376 - RNA, 19 nt, Artificial Sequence
  Description of Artificial Sequence: Synthetic oligonucleotide
  Antisense strand to SEQ ID NO: 1671375
ugagcccaucuuauaauuc

SEQ ID NO: 1671377 - RNA, 19 nt, Artificial Sequence
  Description of Artificial Sequence: Synthetic oligonucleotide
  Sense strand starting at position 3758 of SEQ ID NO: 1561430
gugaaugucauguaggauc

SEQ ID NO: 1671378 - RNA, 19 nt, Artificial Sequence
  Description of Artificial Sequence: Synthetic oligonucleotide
  Antisense strand to SEQ ID NO: 1671377
gauccuacaugacauucac

SEQ ID NO: 1671379 - RNA, 19 nt, Artificial Sequence
  Description of Artificial Sequence: Synthetic oligonucleotide
  Sense strand starting at position 3760 of SEQ ID NO: 1561430
gaaugucauguaggaucca

SEQ ID NO: 1671380 - RNA, 19 nt, Artificial Sequence
  Description of Artificial Sequence: Synthetic oligonucleotide
  Antisense strand to SEQ ID NO: 1671379
uggauccuacaugacauuc

SEQ ID NO: 1671381 - RNA, 19 nt, Artificial Sequence
  Description of Artificial Sequence: Synthetic oligonucleotide
  Sense strand starting at position 3769 of SEQ ID NO: 1561430
guaggauccauaggauugu

SEQ ID NO: 1671382 - RNA, 19 nt, Artificial Sequence
  Description of Artificial Sequence: Synthetic oligonucleotide
  Antisense strand to SEQ ID NO: 1671381
acaauccuauggauccuac

SEQ ID NO: 1671383 - RNA, 19 nt, Artificial Sequence
  Description of Artificial Sequence: Synthetic oligonucleotide
  Sense strand starting at position 3788 of SEQ ID NO: 1561430
ggcuuuguggaguagguaa

SEQ ID NO: 1671384 - RNA, 19 nt, Artificial Sequence
  Description of Artificial Sequence: Synthetic oligonucleotide
  Antisense strand to SEQ ID NO: 1671383
uuaccuacuccacaaagcc

SEQ ID NO: 1671385 - RNA, 19 nt, Artificial Sequence
  Description of Artificial Sequence: Synthetic oligonucleotide
  Sense strand starting at position 3829 of SEQ ID NO: 1561430
cugugcuaauuguuauuua

SEQ ID NO: 1671386 - RNA, 19 nt, Artificial Sequence
  Description of Artificial Sequence: Synthetic oligonucleotide
  Antisense strand to SEQ ID NO: 1671385
uaaauaacaauuagcacag

SEQ ID NO: 1671387 - RNA, 19 nt, Artificial Sequence
  Description of Artificial Sequence: Synthetic oligonucleotide
  Sense strand starting at position 3860 of SEQ ID NO: 1561430
guguacauuccaugauaac

SEQ ID NO: 1671388 - RNA, 19 nt, Artificial Sequence
  Description of Artificial Sequence: Synthetic oligonucleotide
  Antisense strand to SEQ ID NO: 1671387
guuaucauggaauguacac

SEQ ID NO: 1671389 - RNA, 19 nt, Artificial Sequence
  Description of Artificial Sequence: Synthetic oligonucleotide
  Sense strand starting at position 3883 of SEQ ID NO: 1561430
aauggaucacuauguaagu

SEQ ID NO: 1671390 - RNA, 19 nt, Artificial Sequence
  Description of Artificial Sequence: Synthetic oligonucleotide
  Antisense strand to SEQ ID NO: 1671389
acuuacauagugauccauu

SEQ ID NO: 1671391 - RNA, 19 nt, Artificial Sequence
  Description of Artificial Sequence: Synthetic oligonucleotide
  Sense strand starting at position 100 of SEQ ID NO: 1561431
ggagacuagcgcuaagcuu

SEQ ID NO: 1671392 - RNA, 19 nt, Artificial Sequence
  Description of Artificial Sequence: Synthetic oligonucleotide
  Antisense strand to SEQ ID NO: 1671391
aagcuuagcgcuagucucc

SEQ ID NO: 1671393 - RNA, 19 nt, Artificial Sequence
  Description of Artificial Sequence: Synthetic oligonucleotide
  Sense strand starting at position 131 of SEQ ID NO: 1561431
gcagaacuauaagcuguaa

SEQ ID NO: 1671394 - RNA, 19 nt, Artificial Sequence
  Description of Artificial Sequence: Synthetic oligonucleotide
  Antisense strand to SEQ ID NO: 1671393
uuacagcuuauaguucugc

SEQ ID NO: 1671395 - RNA, 19 nt, Artificial Sequence
  Description of Artificial Sequence: Synthetic oligonucleotide
  Sense strand starting at position 145 of SEQ ID NO: 1561431
uguaauaaaccuuguuucu

SEQ ID NO: 1671396 - RNA, 19 nt, Artificial Sequence
  Description of Artificial Sequence: Synthetic oligonucleotide
  Antisense strand to SEQ ID NO: 1671395
agaaacaagguuuauuaca

SEQ ID NO: 1671397 - RNA, 19 nt, Artificial Sequence
  Description of Artificial Sequence: Synthetic oligonucleotide
  Sense strand starting at position 201 of SEQ ID NO: 1561431
augcaaauggccuaacaga

SEQ ID NO: 1671398 - RNA, 19 nt, Artificial Sequence
  Description of Artificial Sequence: Synthetic oligonucleotide
  Antisense strand to SEQ ID NO: 1671397
ucuguuaggccauuugcau

SEQ ID NO: 1671399 - RNA, 19 nt, Artificial Sequence
  Description of Artificial Sequence: Synthetic oligonucleotide
  Sense strand starting at position 218 of SEQ ID NO: 1561431
gacauagggcuccauccua

SEQ ID NO: 1671400 - RNA, 19 nt, Artificial Sequence
  Description of Artificial Sequence: Synthetic oligonucleotide
  Antisense strand to SEQ ID NO: 1671399
uaggauggagcccuauguc

SEQ ID NO: 1671401 - RNA, 19 nt, Artificial Sequence
  Description of Artificial Sequence: Synthetic oligonucleotide
  Sense strand starting at position 260 of SEQ ID NO: 1561431
uguagaagucucuauccug

SEQ ID NO: 1671402 - RNA, 19 nt, Artificial Sequence
  Description of Artificial Sequence: Synthetic oligonucleotide
  Antisense strand to SEQ ID NO: 1671401
caggauagagacuucuaca

SEQ ID NO: 1671403 - RNA, 19 nt, Artificial Sequence
  Description of Artificial Sequence: Synthetic oligonucleotide
  Sense strand starting at position 621 of SEQ ID NO: 1561431
ccucuuuccucuuugguau

SEQ ID NO: 1671404 - RNA, 19 nt, Artificial Sequence
  Description of Artificial Sequence: Synthetic oligonucleotide
  Antisense strand to SEQ ID NO: 1671403
auaccaaagaggaaagagg

SEQ ID NO: 1671405 - RNA, 19 nt, Artificial Sequence
  Description of Artificial Sequence: Synthetic oligonucleotide
  Sense strand starting at position 892 of SEQ ID NO: 1561431
uguacuuaucucugggaca

SEQ ID NO: 1671406 - RNA, 19 nt, Artificial Sequence
  Description of Artificial Sequence: Synthetic oligonucleotide
  Antisense strand to SEQ ID NO: 1671405
ugucccagagauaaguaca

SEQ ID NO: 1671407 - RNA, 19 nt, Artificial Sequence
  Description of Artificial Sequence: Synthetic oligonucleotide
  Sense strand starting at position 1057 of SEQ ID NO: 1561431
uagagaucccauugcugga

SEQ ID NO: 1671408 - RNA, 19 nt, Artificial Sequence
  Description of Artificial Sequence: Synthetic oligonucleotide
  Antisense strand to SEQ ID NO: 1671407
uccagcaaugggaucucua

SEQ ID NO: 1671409 - RNA, 19 nt, Artificial Sequence
  Description of Artificial Sequence: Synthetic oligonucleotide
  Sense strand starting at position 1062 of SEQ ID NO: 1561431
aucccauugcuggaaucaa

SEQ ID NO: 1671410 - RNA, 19 nt, Artificial Sequence
  Description of Artificial Sequence: Synthetic oligonucleotide
  Antisense strand to SEQ ID NO: 1671409
uugauuccagcaaugggau

SEQ ID NO: 1671411 - RNA, 19 nt, Artificial Sequence
  Description of Artificial Sequence: Synthetic oligonucleotide
  Sense strand starting at position 1128 of SEQ ID NO: 1561431
uucuuacggaccuguaagu

SEQ ID NO: 1671412 - RNA, 19 nt, Artificial Sequence
  Description of Artificial Sequence: Synthetic oligonucleotide
  Antisense strand to SEQ ID NO: 1671411
acuuacagguccguaagaa

SEQ ID NO: 1671413 - RNA, 19 nt, Artificial Sequence
  Description of Artificial Sequence: Synthetic oligonucleotide
  Sense strand starting at position 1152 of SEQ ID NO: 1561431
uggcaaucugugggaggaa

SEQ ID NO: 1671414 - RNA, 19 nt, Artificial Sequence
  Description of Artificial Sequence: Synthetic oligonucleotide
  Antisense strand to SEQ ID NO: 1671413
uuccucccacagauugcca

SEQ ID NO: 1671415 - RNA, 19 nt, Artificial Sequence
  Description of Artificial Sequence: Synthetic oligonucleotide
  Sense strand starting at position 1208 of SEQ ID NO: 1561431
auggacuucugguuccaau

SEQ ID NO: 1671416 - RNA, 19 nt, Artificial Sequence
  Description of Artificial Sequence: Synthetic oligonucleotide
  Antisense strand to SEQ ID NO: 1671415
auuggaaccagaaguccau

SEQ ID NO: 1671417 - RNA, 19 nt, Artificial Sequence
  Description of Artificial Sequence: Synthetic oligonucleotide
  Sense strand starting at position 1251 of SEQ ID NO: 1561431
agggaugacugcuuuguau

SEQ ID NO: 1671418 - RNA, 19 nt, Artificial Sequence
  Description of Artificial Sequence: Synthetic oligonucleotide
  Antisense strand to SEQ ID NO: 1671417
auacaaagcagucaucccu

SEQ ID NO: 1671419 - RNA, 19 nt, Artificial Sequence
  Description of Artificial Sequence: Synthetic oligonucleotide
  Sense strand starting at position 1253 of SEQ ID NO: 1561431
ggaugacugcuuuguaucu

SEQ ID NO: 1671420 - RNA, 19 nt, Artificial Sequence
  Description of Artificial Sequence: Synthetic oligonucleotide
  Antisense strand to SEQ ID NO: 1671419
agauacaaagcagucaucc

SEQ ID NO: 1671421 - RNA, 19 nt, Artificial Sequence
  Description of Artificial Sequence: Synthetic oligonucleotide
  Sense strand starting at position 2076 of SEQ ID NO: 1561431
cgggccucuggguaaugua

SEQ ID NO: 1671422 - RNA, 19 nt, Artificial Sequence
  Description of Artificial Sequence: Synthetic oligonucleotide
  Antisense strand to SEQ ID NO: 1671421
uacauuacccagaggcccg

SEQ ID NO: 1671423 - RNA, 19 nt, Artificial Sequence
  Description of Artificial Sequence: Synthetic oligonucleotide
  Sense strand starting at position 2159 of SEQ ID NO: 1561431
cguugcuauggagaaaggu

SEQ ID NO: 1671424 - RNA, 19 nt, Artificial Sequence
  Description of Artificial Sequence: Synthetic oligonucleotide
  Antisense strand to SEQ ID NO: 1671423
accuuucuccauagcaacg

SEQ ID NO: 1671425 - RNA, 19 nt, Artificial Sequence
  Description of Artificial Sequence: Synthetic oligonucleotide
  Sense strand starting at position 2268 of SEQ ID NO: 1561431
gaggguauuguguacaacu

SEQ ID NO: 1671426 - RNA, 19 nt, Artificial Sequence
  Description of Artificial Sequence: Synthetic oligonucleotide
  Antisense strand to SEQ ID NO: 1671425
aguuguacacaauacccuc

SEQ ID NO: 1671427 - RNA, 19 nt, Artificial Sequence
  Description of Artificial Sequence: Synthetic oligonucleotide
  Sense strand starting at position 2270 of SEQ ID NO: 1561431
ggguauuguguacaacuag

SEQ ID NO: 1671428 - RNA, 19 nt, Artificial Sequence
  Description of Artificial Sequence: Synthetic oligonucleotide
  Antisense strand to SEQ ID NO: 1671427
cuaguuguacacaauaccc

SEQ ID NO: 1671429 - RNA, 19 nt, Artificial Sequence
  Description of Artificial Sequence: Synthetic oligonucleotide
  Sense strand starting at position 2277 of SEQ ID NO: 1561431
guguacaacuagucaccua

SEQ ID NO: 1671430 - RNA, 19 nt, Artificial Sequence
  Description of Artificial Sequence: Synthetic oligonucleotide
  Antisense strand to SEQ ID NO: 1671429
uaggugacuaguuguacac

SEQ ID NO: 1671431 - RNA, 19 nt, Artificial Sequence
  Description of Artificial Sequence: Synthetic oligonucleotide
  Sense strand starting at position 2379 of SEQ ID NO: 1561431
uguaaaguagaacguuaga

SEQ ID NO: 1671432 - RNA, 19 nt, Artificial Sequence
  Description of Artificial Sequence: Synthetic oligonucleotide
  Antisense strand to SEQ ID NO: 1671431
ucuaacguucuacuuuaca

SEQ ID NO: 1671433 - RNA, 19 nt, Artificial Sequence
  Description of Artificial Sequence: Synthetic oligonucleotide
  Sense strand starting at position 2388 of SEQ ID NO: 1561431
gaacguuagagucagcuuu

SEQ ID NO: 1671434 - RNA, 19 nt, Artificial Sequence
  Description of Artificial Sequence: Synthetic oligonucleotide
  Antisense strand to SEQ ID NO: 1671433
aaagcugacucuaacguuc

SEQ ID NO: 1671435 - RNA, 19 nt, Artificial Sequence
  Description of Artificial Sequence: Synthetic oligonucleotide
  Sense strand starting at position 2414 of SEQ ID NO: 1561431
ucauuaugcucaguaagga

SEQ ID NO: 1671436 - RNA, 19 nt, Artificial Sequence
  Description of Artificial Sequence: Synthetic oligonucleotide
  Antisense strand to SEQ ID NO: 1671435
uccuuacugagcauaauga

SEQ ID NO: 1671437 - RNA, 19 nt, Artificial Sequence
  Description of Artificial Sequence: Synthetic oligonucleotide
  Sense strand starting at position 2415 of SEQ ID NO: 1561431
cauuaugcucaguaaggaa

SEQ ID NO: 1671438 - RNA, 19 nt, Artificial Sequence
  Description of Artificial Sequence: Synthetic oligonucleotide
  Antisense strand to SEQ ID NO: 1671437
uuccuuacugagcauaaug

SEQ ID NO: 1671439 - RNA, 19 nt, Artificial Sequence
  Description of Artificial Sequence: Synthetic oligonucleotide
  Sense strand starting at position 2456 of SEQ ID NO: 1561431
gcgccaugacaggaaugau

SEQ ID NO: 1671440 - RNA, 19 nt, Artificial Sequence
  Description of Artificial Sequence: Synthetic oligonucleotide
  Antisense strand to SEQ ID NO: 1671439
aucauuccugucauggcgc

SEQ ID NO: 1671441 - RNA, 19 nt, Artificial Sequence
  Description of Artificial Sequence: Synthetic oligonucleotide
  Sense strand starting at position 2551 of SEQ ID NO: 1561431
guguaaucggugagugugu

SEQ ID NO: 1671442 - RNA, 19 nt, Artificial Sequence
  Description of Artificial Sequence: Synthetic oligonucleotide
  Antisense strand to SEQ ID NO: 1671441
acacacucaccgauuacac

SEQ ID NO: 1671443 - RNA, 19 nt, Artificial Sequence
  Description of Artificial Sequence: Synthetic oligonucleotide
  Sense strand starting at position 2567 of SEQ ID NO: 1561431
ugucuagcccuguaaggaa

SEQ ID NO: 1671444 - RNA, 19 nt, Artificial Sequence
  Description of Artificial Sequence: Synthetic oligonucleotide
  Antisense strand to SEQ ID NO: 1671443
uuccuuacagggcuagaca

SEQ ID NO: 1671445 - RNA, 19 nt, Artificial Sequence
  Description of Artificial Sequence: Synthetic oligonucleotide
  Sense strand starting at position 2963 of SEQ ID NO: 1561431
gggauuuauuaugggacuu

SEQ ID NO: 1671446 - RNA, 19 nt, Artificial Sequence
  Description of Artificial Sequence: Synthetic oligonucleotide
  Antisense strand to SEQ ID NO: 1671445
aagucccauaauaaauccc

SEQ ID NO: 1671447 - RNA, 19 nt, Artificial Sequence
  Description of Artificial Sequence: Synthetic oligonucleotide
  Sense strand starting at position 2976 of SEQ ID NO: 1561431
ggacuuggcucauccaguu

SEQ ID NO: 1671448 - RNA, 19 nt, Artificial Sequence
  Description of Artificial Sequence: Synthetic oligonucleotide
  Antisense strand to SEQ ID NO: 1671447
aacuggaugagccaagucc

SEQ ID NO: 1671449 - RNA, 19 nt, Artificial Sequence
  Description of Artificial Sequence: Synthetic oligonucleotide
  Sense strand starting at position 3141 of SEQ ID NO: 1561431
gggugagggucauucuugu

SEQ ID NO: 1671450 - RNA, 19 nt, Artificial Sequence
  Description of Artificial Sequence: Synthetic oligonucleotide
  Antisense strand to SEQ ID NO: 1671449
acaagaaugacccucaccc

SEQ ID NO: 1671451 - RNA, 19 nt, Artificial Sequence
  Description of Artificial Sequence: Synthetic oligonucleotide
  Sense strand starting at position 3156 of SEQ ID NO: 1561431
uuguauguuccagagucca

SEQ ID NO: 1671452 - RNA, 19 nt, Artificial Sequence
  Description of Artificial Sequence: Synthetic oligonucleotide
  Antisense strand to SEQ ID NO: 1671451
uggacucuggaacauacaa

SEQ ID NO: 1671453 - RNA, 19 nt, Artificial Sequence
  Description of Artificial Sequence: Synthetic oligonucleotide
  Sense strand starting at position 3215 of SEQ ID NO: 1561431
gguggaugauccagggcaa

SEQ ID NO: 1671454 - RNA, 19 nt, Artificial Sequence
  Description of Artificial Sequence: Synthetic oligonucleotide
  Antisense strand to SEQ ID NO: 1671453
uugcccuggaucauccacc

SEQ ID NO: 1671455 - RNA, 19 nt, Artificial Sequence
  Description of Artificial Sequence: Synthetic oligonucleotide
  Sense strand starting at position 3238 of SEQ ID NO: 1561431
agaguaacuugcucuuucu

SEQ ID NO: 1671456 - RNA, 19 nt, Artificial Sequence
  Description of Artificial Sequence: Synthetic oligonucleotide
  Antisense strand to SEQ ID NO: 1671455
agaaagagcaaguuacucu

SEQ ID NO: 1671457 - RNA, 19 nt, Artificial Sequence
  Description of Artificial Sequence: Synthetic oligonucleotide
  Sense strand starting at position 3327 of SEQ ID NO: 1561431
ccuuuacauugucuacaga

SEQ ID NO: 1671458 - RNA, 19 nt, Artificial Sequence
  Description of Artificial Sequence: Synthetic oligonucleotide
  Antisense strand to SEQ ID NO: 1671457
ucuguagacaauguaaagg

SEQ ID NO: 1671459 - RNA, 19 nt, Artificial Sequence
  Description of Artificial Sequence: Synthetic oligonucleotide
  Sense strand starting at position 3413 of SEQ ID NO: 1561431
uuggguagcccuuaaugca

SEQ ID NO: 1671460 - RNA, 19 nt, Artificial Sequence
  Description of Artificial Sequence: Synthetic oligonucleotide
  Antisense strand to SEQ ID NO: 1671459
ugcauuaagggcuacccaa

SEQ ID NO: 1671461 - RNA, 19 nt, Artificial Sequence
  Description of Artificial Sequence: Synthetic oligonucleotide
  Sense strand starting at position 3753 of SEQ ID NO: 1561431
gacuccaucucaguagaga

SEQ ID NO: 1671462 - RNA, 19 nt, Artificial Sequence
  Description of Artificial Sequence: Synthetic oligonucleotide
  Antisense strand to SEQ ID NO: 1671461
ucucuacugagauggaguc

SEQ ID NO: 1671463 - RNA, 19 nt, Artificial Sequence
  Description of Artificial Sequence: Synthetic oligonucleotide
  Sense strand starting at position 3836 of SEQ ID NO: 1561431
agugcagucauauauaagu

SEQ ID NO: 1671464 - RNA, 19 nt, Artificial Sequence
  Description of Artificial Sequence: Synthetic oligonucleotide
  Antisense strand to SEQ ID NO: 1671463
acuuauauaugacugcacu

SEQ ID NO: 1671465 - RNA, 19 nt, Artificial Sequence
  Description of Artificial Sequence: Synthetic oligonucleotide
  Sense strand starting at position 3867 of SEQ ID NO: 1561431
uuggcuuggcucuggaaau

SEQ ID NO: 1671466 - RNA, 19 nt, Artificial Sequence
  Description of Artificial Sequence: Synthetic oligonucleotide
  Antisense strand to SEQ ID NO: 1671465
auuuccagagccaagccaa

SEQ ID NO: 1671467 - RNA, 19 nt, Artificial Sequence
  Description of Artificial Sequence: Synthetic oligonucleotide
  Sense strand starting at position 3879 of SEQ ID NO: 1561431
uggaaauguuuacccugaa

SEQ ID NO: 1671468 - RNA, 19 nt, Artificial Sequence
  Description of Artificial Sequence: Synthetic oligonucleotide
  Antisense strand to SEQ ID NO: 1671467
uucaggguaaacauuucca

SEQ ID NO: 1671469 - RNA, 19 nt, Artificial Sequence
  Description of Artificial Sequence: Synthetic oligonucleotide
  Sense strand starting at position 3880 of SEQ ID NO: 1561431
ggaaauguuuacccugaag

SEQ ID NO: 1671470 - RNA, 19 nt, Artificial Sequence
  Description of Artificial Sequence: Synthetic oligonucleotide
  Antisense strand to SEQ ID NO: 1671469
cuucaggguaaacauuucc

SEQ ID NO: 1671471 - RNA, 19 nt, Artificial Sequence
  Description of Artificial Sequence: Synthetic oligonucleotide
  Sense strand starting at position 90 of SEQ ID NO: 1561432
uuuaguaucuaccugagau

SEQ ID NO: 1671472 - RNA, 19 nt, Artificial Sequence
  Description of Artificial Sequence: Synthetic oligonucleotide
  Antisense strand to SEQ ID NO: 1671471
aucucagguagauacuaaa

SEQ ID NO: 1671473 - RNA, 19 nt, Artificial Sequence
  Description of Artificial Sequence: Synthetic oligonucleotide
  Sense strand starting at position 94 of SEQ ID NO: 1561432
guaucuaccugagauacaa

SEQ ID NO: 1671474 - RNA, 19 nt, Artificial Sequence
  Description of Artificial Sequence: Synthetic oligonucleotide
  Antisense strand to SEQ ID NO: 1671473
uuguaucucagguagauac

SEQ ID NO: 1671475 - RNA, 19 nt, Artificial Sequence
  Description of Artificial Sequence: Synthetic oligonucleotide
  Sense strand starting at position 179 of SEQ ID NO: 1561432
gagauaggaucuuacuguu

SEQ ID NO: 1671476 - RNA, 19 nt, Artificial Sequence
  Description of Artificial Sequence: Synthetic oligonucleotide
  Antisense strand to SEQ ID NO: 1671475
aacaguaagauccuaucuc

SEQ ID NO: 1671477 - RNA, 19 nt, Artificial Sequence
  Description of Artificial Sequence: Synthetic oligonucleotide
  Sense strand starting at position 191 of SEQ ID NO: 1561432
uacuguuucccagacugga

SEQ ID NO: 1671478 - RNA, 19 nt, Artificial Sequence
  Description of Artificial Sequence: Synthetic oligonucleotide
  Antisense strand to SEQ ID NO: 1671477
uccagucugggaaacagua

SEQ ID NO: 1671479 - RNA, 19 nt, Artificial Sequence
  Description of Artificial Sequence: Synthetic oligonucleotide
  Sense strand starting at position 867 of SEQ ID NO: 1561432
aggcacuauucucaaugau

SEQ ID NO: 1671480 - RNA, 19 nt, Artificial Sequence
  Description of Artificial Sequence: Synthetic oligonucleotide
  Antisense strand to SEQ ID NO: 1671479
aucauugagaauagugccu

SEQ ID NO: 1671481 - RNA, 19 nt, Artificial Sequence
  Description of Artificial Sequence: Synthetic oligonucleotide
  Sense strand starting at position 1018 of SEQ ID NO: 1561432
gcagaucacaggugucuga

SEQ ID NO: 1671482 - RNA, 19 nt, Artificial Sequence
  Description of Artificial Sequence: Synthetic oligonucleotide
  Antisense strand to SEQ ID NO: 1671481
ucagacaccugugaucugc

SEQ ID NO: 1671483 - RNA, 19 nt, Artificial Sequence
  Description of Artificial Sequence: Synthetic oligonucleotide
  Sense strand starting at position 1022 of SEQ ID NO: 1561432
aucacaggugucugagcau

SEQ ID NO: 1671484 - RNA, 19 nt, Artificial Sequence
  Description of Artificial Sequence: Synthetic oligonucleotide
  Antisense strand to SEQ ID NO: 1671483
augcucagacaccugugau

SEQ ID NO: 1671485 - RNA, 19 nt, Artificial Sequence
  Description of Artificial Sequence: Synthetic oligonucleotide
  Sense strand starting at position 1028 of SEQ ID NO: 1561432
ggugucugagcaugagaau

SEQ ID NO: 1671486 - RNA, 19 nt, Artificial Sequence
  Description of Artificial Sequence: Synthetic oligonucleotide
  Antisense strand to SEQ ID NO: 1671485
auucucaugcucagacacc

SEQ ID NO: 1671487 - RNA, 19 nt, Artificial Sequence
  Description of Artificial Sequence: Synthetic oligonucleotide
  Sense strand starting at position 1029 of SEQ ID NO: 1561432
gugucugagcaugagaauc

SEQ ID NO: 1671488 - RNA, 19 nt, Artificial Sequence
  Description of Artificial Sequence: Synthetic oligonucleotide
  Antisense strand to SEQ ID NO: 1671487
gauucucaugcucagacac

SEQ ID NO: 1671489 - RNA, 19 nt, Artificial Sequence
  Description of Artificial Sequence: Synthetic oligonucleotide
  Sense strand starting at position 1031 of SEQ ID NO: 1561432
gucugagcaugagaaucaa

SEQ ID NO: 1671490 - RNA, 19 nt, Artificial Sequence
  Description of Artificial Sequence: Synthetic oligonucleotide
  Antisense strand to SEQ ID NO: 1671489
uugauucucaugcucagac

SEQ ID NO: 1671491 - RNA, 19 nt, Artificial Sequence
  Description of Artificial Sequence: Synthetic oligonucleotide
  Sense strand starting at position 1051 of SEQ ID NO: 1561432
ccuaaagaaucagacaguu

SEQ ID NO: 1671492 - RNA, 19 nt, Artificial Sequence
  Description of Artificial Sequence: Synthetic oligonucleotide
  Antisense strand to SEQ ID NO: 1671491
aacugucugauucuuuagg

SEQ ID NO: 1671493 - RNA, 19 nt, Artificial Sequence
  Description of Artificial Sequence: Synthetic oligonucleotide
  Sense strand starting at position 1147 of SEQ ID NO: 1561432
cauggaauugccuaauagu

SEQ ID NO: 1671494 - RNA, 19 nt, Artificial Sequence
  Description of Artificial Sequence: Synthetic oligonucleotide
  Antisense strand to SEQ ID NO: 1671493
acuauuaggcaauuccaug

SEQ ID NO: 1671495 - RNA, 19 nt, Artificial Sequence
  Description of Artificial Sequence: Synthetic oligonucleotide
  Sense strand starting at position 1251 of SEQ ID NO: 1561432
gccacuaucagguaugaug

SEQ ID NO: 1671496 - RNA, 19 nt, Artificial Sequence
  Description of Artificial Sequence: Synthetic oligonucleotide
  Antisense strand to SEQ ID NO: 1671495
caucauaccugauaguggc

SEQ ID NO: 1671497 - RNA, 19 nt, Artificial Sequence
  Description of Artificial Sequence: Synthetic oligonucleotide
  Sense strand starting at position 1259 of SEQ ID NO: 1561432
cagguaugaugccucauau

SEQ ID NO: 1671498 - RNA, 19 nt, Artificial Sequence
  Description of Artificial Sequence: Synthetic oligonucleotide
  Antisense strand to SEQ ID NO: 1671497
auaugaggcaucauaccug

SEQ ID NO: 1671499 - RNA, 19 nt, Artificial Sequence
  Description of Artificial Sequence: Synthetic oligonucleotide
  Sense strand starting at position 1305 of SEQ ID NO: 1561432
ugaacauccugauaaauag

SEQ ID NO: 1671500 - RNA, 19 nt, Artificial Sequence
  Description of Artificial Sequence: Synthetic oligonucleotide
  Antisense strand to SEQ ID NO: 1671499
cuauuuaucaggauguuca

SEQ ID NO: 1671501 - RNA, 19 nt, Artificial Sequence
  Description of Artificial Sequence: Synthetic oligonucleotide
  Sense strand starting at position 1355 of SEQ ID NO: 1561432
auauaaugaugacaugcua

SEQ ID NO: 1671502 - RNA, 19 nt, Artificial Sequence
  Description of Artificial Sequence: Synthetic oligonucleotide
  Antisense strand to SEQ ID NO: 1671501
uagcaugucaucauuauau

SEQ ID NO: 1671503 - RNA, 19 nt, Artificial Sequence
  Description of Artificial Sequence: Synthetic oligonucleotide
  Sense strand starting at position 1483 of SEQ ID NO: 1561432
uuauauggccgagaucaca

SEQ ID NO: 1671504 - RNA, 19 nt, Artificial Sequence
  Description of Artificial Sequence: Synthetic oligonucleotide
  Antisense strand to SEQ ID NO: 1671503
ugugaucucggccauauaa

SEQ ID NO: 1671505 - RNA, 19 nt, Artificial Sequence
  Description of Artificial Sequence: Synthetic oligonucleotide
  Sense strand starting at position 1577 of SEQ ID NO: 1561432
ucucuagucuuaguccaca

SEQ ID NO: 1671506 - RNA, 19 nt, Artificial Sequence
  Description of Artificial Sequence: Synthetic oligonucleotide
  Antisense strand to SEQ ID NO: 1671505
uguggacuaagacuagaga

SEQ ID NO: 1671507 - RNA, 19 nt, Artificial Sequence
  Description of Artificial Sequence: Synthetic oligonucleotide
  Sense strand starting at position 1580 of SEQ ID NO: 1561432
cuagucuuaguccacagaa

SEQ ID NO: 1671508 - RNA, 19 nt, Artificial Sequence
  Description of Artificial Sequence: Synthetic oligonucleotide
  Antisense strand to SEQ ID NO: 1671507
uucuguggacuaagacuag

SEQ ID NO: 1671509 - RNA, 19 nt, Artificial Sequence
  Description of Artificial Sequence: Synthetic oligonucleotide
  Sense strand starting at position 1582 of SEQ ID NO: 1561432
agucuuaguccacagaaca

SEQ ID NO: 1671510 - RNA, 19 nt, Artificial Sequence
  Description of Artificial Sequence: Synthetic oligonucleotide
  Antisense strand to SEQ ID NO: 1671509
uguucuguggacuaagacu

SEQ ID NO: 1671511 - RNA, 19 nt, Artificial Sequence
  Description of Artificial Sequence: Synthetic oligonucleotide
  Sense strand starting at position 1746 of SEQ ID NO: 1561432
gucauugggucauagggaa

SEQ ID NO: 1671512 - RNA, 19 nt, Artificial Sequence
  Description of Artificial Sequence: Synthetic oligonucleotide
  Antisense strand to SEQ ID NO: 1671511
uucccuaugacccaaugac

SEQ ID NO: 1671513 - RNA, 19 nt, Artificial Sequence
  Description of Artificial Sequence: Synthetic oligonucleotide
  Sense strand starting at position 1766 of SEQ ID NO: 1561432
uggaaucuuaaguggaagu

SEQ ID NO: 1671514 - RNA, 19 nt, Artificial Sequence
  Description of Artificial Sequence: Synthetic oligonucleotide
  Antisense strand to SEQ ID NO: 1671513
acuuccacuuaagauucca

SEQ ID NO: 1671515 - RNA, 19 nt, Artificial Sequence
  Description of Artificial Sequence: Synthetic oligonucleotide
  Sense strand starting at position 1807 of SEQ ID NO: 1561432
ggguaagugcaaugaaaug

SEQ ID NO: 1671516 - RNA, 19 nt, Artificial Sequence
  Description of Artificial Sequence: Synthetic oligonucleotide
  Antisense strand to SEQ ID NO: 1671515
cauuucauugcacuuaccc

SEQ ID NO: 1671517 - RNA, 19 nt, Artificial Sequence
  Description of Artificial Sequence: Synthetic oligonucleotide
  Sense strand starting at position 1812 of SEQ ID NO: 1561432
agugcaaugaaaugaguca

SEQ ID NO: 1671518 - RNA, 19 nt, Artificial Sequence
  Description of Artificial Sequence: Synthetic oligonucleotide
  Antisense strand to SEQ ID NO: 1671517
ugacucauuucauugcacu

SEQ ID NO: 1671519 - RNA, 19 nt, Artificial Sequence
  Description of Artificial Sequence: Synthetic oligonucleotide
  Sense strand starting at position 1997 of SEQ ID NO: 1561432
gaaagugaauccuaguauc

SEQ ID NO: 1671520 - RNA, 19 nt, Artificial Sequence
  Description of Artificial Sequence: Synthetic oligonucleotide
  Antisense strand to SEQ ID NO: 1671519
gauacuaggauucacuuuc

SEQ ID NO: 1671521 - RNA, 19 nt, Artificial Sequence
  Description of Artificial Sequence: Synthetic oligonucleotide
  Sense strand starting at position 2000 of SEQ ID NO: 1561432
agugaauccuaguaucaaa

SEQ ID NO: 1671522 - RNA, 19 nt, Artificial Sequence
  Description of Artificial Sequence: Synthetic oligonucleotide
  Antisense strand to SEQ ID NO: 1671521
uuugauacuaggauucacu

SEQ ID NO: 1671523 - RNA, 19 nt, Artificial Sequence
  Description of Artificial Sequence: Synthetic oligonucleotide
  Sense strand starting at position 2223 of SEQ ID NO: 1561432
cagagcugggcuugacuaa

SEQ ID NO: 1671524 - RNA, 19 nt, Artificial Sequence
  Description of Artificial Sequence: Synthetic oligonucleotide
  Antisense strand to SEQ ID NO: 1671523
uuagucaagcccagcucug

SEQ ID NO: 1671525 - RNA, 19 nt, Artificial Sequence
  Description of Artificial Sequence: Synthetic oligonucleotide
  Sense strand starting at position 2920 of SEQ ID NO: 1561432
uguggaucacagugcucaa

SEQ ID NO: 1671526 - RNA, 19 nt, Artificial Sequence
  Description of Artificial Sequence: Synthetic oligonucleotide
  Antisense strand to SEQ ID NO: 1671525
uugagcacugugauccaca

SEQ ID NO: 1671527 - RNA, 19 nt, Artificial Sequence
  Description of Artificial Sequence: Synthetic oligonucleotide
  Sense strand starting at position 2923 of SEQ ID NO: 1561432
ggaucacagugcucaauuc

SEQ ID NO: 1671528 - RNA, 19 nt, Artificial Sequence
  Description of Artificial Sequence: Synthetic oligonucleotide
  Antisense strand to SEQ ID NO: 1671527
gaauugagcacugugaucc

SEQ ID NO: 1671529 - RNA, 19 nt, Artificial Sequence
  Description of Artificial Sequence: Synthetic oligonucleotide
  Sense strand starting at position 2930 of SEQ ID NO: 1561432
agugcucaauucuagauau

SEQ ID NO: 1671530 - RNA, 19 nt, Artificial Sequence
  Description of Artificial Sequence: Synthetic oligonucleotide
  Antisense strand to SEQ ID NO: 1671529
auaucuagaauugagcacu

SEQ ID NO: 1671531 - RNA, 19 nt, Artificial Sequence
  Description of Artificial Sequence: Synthetic oligonucleotide
  Sense strand starting at position 2932 of SEQ ID NO: 1561432
ugcucaauucuagauauag

SEQ ID NO: 1671532 - RNA, 19 nt, Artificial Sequence
  Description of Artificial Sequence: Synthetic oligonucleotide
  Antisense strand to SEQ ID NO: 1671531
cuauaucuagaauugagca

SEQ ID NO: 1671533 - RNA, 19 nt, Artificial Sequence
  Description of Artificial Sequence: Synthetic oligonucleotide
  Sense strand starting at position 3006 of SEQ ID NO: 1561432
gccugaaaccuccaucagu

SEQ ID NO: 1671534 - RNA, 19 nt, Artificial Sequence
  Description of Artificial Sequence: Synthetic oligonucleotide
  Antisense strand to SEQ ID NO: 1671533
acugauggagguuucaggc

SEQ ID NO: 1671535 - RNA, 19 nt, Artificial Sequence
  Description of Artificial Sequence: Synthetic oligonucleotide
  Sense strand starting at position 3062 of SEQ ID NO: 1561432
acagcuucucacuggcaua

SEQ ID NO: 1671536 - RNA, 19 nt, Artificial Sequence
  Description of Artificial Sequence: Synthetic oligonucleotide
  Antisense strand to SEQ ID NO: 1671535
uaugccagugagaagcugu

SEQ ID NO: 1671537 - RNA, 19 nt, Artificial Sequence
  Description of Artificial Sequence: Synthetic oligonucleotide
  Sense strand starting at position 3082 of SEQ ID NO: 1561432
ccaaauugucagcaucaag

SEQ ID NO: 1671538 - RNA, 19 nt, Artificial Sequence
  Description of Artificial Sequence: Synthetic oligonucleotide
  Antisense strand to SEQ ID NO: 1671537
cuugaugcugacaauuugg

SEQ ID NO: 1671539 - RNA, 19 nt, Artificial Sequence
  Description of Artificial Sequence: Synthetic oligonucleotide
  Sense strand starting at position 3511 of SEQ ID NO: 1561432
aaagacuauuggccaagua

SEQ ID NO: 1671540 - RNA, 19 nt, Artificial Sequence
  Description of Artificial Sequence: Synthetic oligonucleotide
  Antisense strand to SEQ ID NO: 1671539
uacuuggccaauagucuuu

SEQ ID NO: 1671541 - RNA, 19 nt, Artificial Sequence
  Description of Artificial Sequence: Synthetic oligonucleotide
  Sense strand starting at position 3824 of SEQ ID NO: 1561432
acuauuaagugacuaacga

SEQ ID NO: 1671542 - RNA, 19 nt, Artificial Sequence
  Description of Artificial Sequence: Synthetic oligonucleotide
  Antisense strand to SEQ ID NO: 1671541
ucguuagucacuuaauagu

SEQ ID NO: 1671543 - RNA, 19 nt, Artificial Sequence
  Description of Artificial Sequence: Synthetic oligonucleotide
  Sense strand starting at position 3938 of SEQ ID NO: 1561432
auagcaaagugccaggauu

SEQ ID NO: 1671544 - RNA, 19 nt, Artificial Sequence
  Description of Artificial Sequence: Synthetic oligonucleotide
  Antisense strand to SEQ ID NO: 1671543
aauccuggcacuuugcuau

SEQ ID NO: 1671545 - RNA, 19 nt, Artificial Sequence
  Description of Artificial Sequence: Synthetic oligonucleotide
  Sense strand starting at position 5 of SEQ ID NO: 1561433
gugcaauggcaguaaacaa

SEQ ID NO: 1671546 - RNA, 19 nt, Artificial Sequence
  Description of Artificial Sequence: Synthetic oligonucleotide
  Antisense strand to SEQ ID NO: 1671545
uuguuuacugccauugcac

SEQ ID NO: 1671547 - RNA, 19 nt, Artificial Sequence
  Description of Artificial Sequence: Synthetic oligonucleotide
  Sense strand starting at position 36 of SEQ ID NO: 1561433
uaagcugugggugauuaaa

SEQ ID NO: 1671548 - RNA, 19 nt, Artificial Sequence
  Description of Artificial Sequence: Synthetic oligonucleotide
  Antisense strand to SEQ ID NO: 1671547
uuuaaucacccacagcuua

SEQ ID NO: 1671549 - RNA, 19 nt, Artificial Sequence
  Description of Artificial Sequence: Synthetic oligonucleotide
  Sense strand starting at position 315 of SEQ ID NO: 1561433
uacggacucaggcgaaaua

SEQ ID NO: 1671550 - RNA, 19 nt, Artificial Sequence
  Description of Artificial Sequence: Synthetic oligonucleotide
  Antisense strand to SEQ ID NO: 1671549
uauuucgccugaguccgua

SEQ ID NO: 1671551 - RNA, 19 nt, Artificial Sequence
  Description of Artificial Sequence: Synthetic oligonucleotide
  Sense strand starting at position 316 of SEQ ID NO: 1561433
acggacucaggcgaaauaa

SEQ ID NO: 1671552 - RNA, 19 nt, Artificial Sequence
  Description of Artificial Sequence: Synthetic oligonucleotide
  Antisense strand to SEQ ID NO: 1671551
uuauuucgccugaguccgu

SEQ ID NO: 1671553 - RNA, 19 nt, Artificial Sequence
  Description of Artificial Sequence: Synthetic oligonucleotide
  Sense strand starting at position 327 of SEQ ID NO: 1561433
cgaaauaaugcccauaccu

SEQ ID NO: 1671554 - RNA, 19 nt, Artificial Sequence
  Description of Artificial Sequence: Synthetic oligonucleotide
  Antisense strand to SEQ ID NO: 1671553
agguaugggcauuauuucg

SEQ ID NO: 1671555 - RNA, 19 nt, Artificial Sequence
  Description of Artificial Sequence: Synthetic oligonucleotide
  Sense strand starting at position 433 of SEQ ID NO: 1561433
gcauuauguggugaauuga

SEQ ID NO: 1671556 - RNA, 19 nt, Artificial Sequence
  Description of Artificial Sequence: Synthetic oligonucleotide
  Antisense strand to SEQ ID NO: 1671555
ucaauucaccacauaaugc

SEQ ID NO: 1671557 - RNA, 19 nt, Artificial Sequence
  Description of Artificial Sequence: Synthetic oligonucleotide
  Sense strand starting at position 585 of SEQ ID NO: 1561433
guagaucauccuggaauuc

SEQ ID NO: 1671558 - RNA, 19 nt, Artificial Sequence
  Description of Artificial Sequence: Synthetic oligonucleotide
  Antisense strand to SEQ ID NO: 1671557
gaauuccaggaugaucuac

SEQ ID NO: 1671559 - RNA, 19 nt, Artificial Sequence
  Description of Artificial Sequence: Synthetic oligonucleotide
  Sense strand starting at position 597 of SEQ ID NO: 1561433
ggaauucuggcacaucuuu

SEQ ID NO: 1671560 - RNA, 19 nt, Artificial Sequence
  Description of Artificial Sequence: Synthetic oligonucleotide
  Antisense strand to SEQ ID NO: 1671559
aaagaugugccagaauucc

SEQ ID NO: 1671561 - RNA, 19 nt, Artificial Sequence
  Description of Artificial Sequence: Synthetic oligonucleotide
  Sense strand starting at position 618 of SEQ ID NO: 1561433
ucggcaucugauuaaguua

SEQ ID NO: 1671562 - RNA, 19 nt, Artificial Sequence
  Description of Artificial Sequence: Synthetic oligonucleotide
  Antisense strand to SEQ ID NO: 1671561
uaacuuaaucagaugccga

SEQ ID NO: 1671563 - RNA, 19 nt, Artificial Sequence
  Description of Artificial Sequence: Synthetic oligonucleotide
  Sense strand starting at position 621 of SEQ ID NO: 1561433
gcaucugauuaaguuaaca

SEQ ID NO: 1671564 - RNA, 19 nt, Artificial Sequence
  Description of Artificial Sequence: Synthetic oligonucleotide
  Antisense strand to SEQ ID NO: 1671563
uguuaacuuaaucagaugc

SEQ ID NO: 1671565 - RNA, 19 nt, Artificial Sequence
  Description of Artificial Sequence: Synthetic oligonucleotide
  Sense strand starting at position 703 of SEQ ID NO: 1561433
ucuuucucugcguugugau

SEQ ID NO: 1671566 - RNA, 19 nt, Artificial Sequence
  Description of Artificial Sequence: Synthetic oligonucleotide
  Antisense strand to SEQ ID NO: 1671565
aucacaacgcagagaaaga

SEQ ID NO: 1671567 - RNA, 19 nt, Artificial Sequence
  Description of Artificial Sequence: Synthetic oligonucleotide
  Sense strand starting at position 1292 of SEQ ID NO: 1561433
accaaaucgccagacaauu

SEQ ID NO: 1671568 - RNA, 19 nt, Artificial Sequence
  Description of Artificial Sequence: Synthetic oligonucleotide
  Antisense strand to SEQ ID NO: 1671567
aauugucuggcgauuuggu

SEQ ID NO: 1671569 - RNA, 19 nt, Artificial Sequence
  Description of Artificial Sequence: Synthetic oligonucleotide
  Sense strand starting at position 1342 of SEQ ID NO: 1561433
auuggaucagcauggugau

SEQ ID NO: 1671570 - RNA, 19 nt, Artificial Sequence
  Description of Artificial Sequence: Synthetic oligonucleotide
  Antisense strand to SEQ ID NO: 1671569
aucaccaugcugauccaau

SEQ ID NO: 1671571 - RNA, 19 nt, Artificial Sequence
  Description of Artificial Sequence: Synthetic oligonucleotide
  Sense strand starting at position 1467 of SEQ ID NO: 1561433
agacaagaaucuuugccca

SEQ ID NO: 1671572 - RNA, 19 nt, Artificial Sequence
  Description of Artificial Sequence: Synthetic oligonucleotide
  Antisense strand to SEQ ID NO: 1671571
ugggcaaagauucuugucu

SEQ ID NO: 1671573 - RNA, 19 nt, Artificial Sequence
  Description of Artificial Sequence: Synthetic oligonucleotide
  Sense strand starting at position 1471 of SEQ ID NO: 1561433
aagaaucuuugcccaggga

SEQ ID NO: 1671574 - RNA, 19 nt, Artificial Sequence
  Description of Artificial Sequence: Synthetic oligonucleotide
  Antisense strand to SEQ ID NO: 1671573
ucccugggcaaagauucuu

SEQ ID NO: 1671575 - RNA, 19 nt, Artificial Sequence
  Description of Artificial Sequence: Synthetic oligonucleotide
  Sense strand starting at position 1490 of SEQ ID NO: 1561433
gucugaaaguuacuuuaga

SEQ ID NO: 1671576 - RNA, 19 nt, Artificial Sequence
  Description of Artificial Sequence: Synthetic oligonucleotide
  Antisense strand to SEQ ID NO: 1671575
ucuaaaguaacuuucagac

SEQ ID NO: 1671577 - RNA, 19 nt, Artificial Sequence
  Description of Artificial Sequence: Synthetic oligonucleotide
  Sense strand starting at position 1491 of SEQ ID NO: 1561433
ucugaaaguuacuuuagaa

SEQ ID NO: 1671578 - RNA, 19 nt, Artificial Sequence
  Description of Artificial Sequence: Synthetic oligonucleotide
  Antisense strand to SEQ ID NO: 1671577
uucuaaaguaacuuucaga

SEQ ID NO: 1671579 - RNA, 19 nt, Artificial Sequence
  Description of Artificial Sequence: Synthetic oligonucleotide
  Sense strand starting at position 1592 of SEQ ID NO: 1561433
gcgggugauggagagaauu

SEQ ID NO: 1671580 - RNA, 19 nt, Artificial Sequence
  Description of Artificial Sequence: Synthetic oligonucleotide
  Antisense strand to SEQ ID NO: 1671579
aauucucuccaucacccgc

SEQ ID NO: 1671581 - RNA, 19 nt, Artificial Sequence
  Description of Artificial Sequence: Synthetic oligonucleotide
  Sense strand starting at position 1721 of SEQ ID NO: 1561433
guacuucgugaacaagaau

SEQ ID NO: 1671582 - RNA, 19 nt, Artificial Sequence
  Description of Artificial Sequence: Synthetic oligonucleotide
  Antisense strand to SEQ ID NO: 1671581
auucuuguucacgaaguac

SEQ ID NO: 1671583 - RNA, 19 nt, Artificial Sequence
  Description of Artificial Sequence: Synthetic oligonucleotide
  Sense strand starting at position 1735 of SEQ ID NO: 1561433
agaauccaugcaugaguau

SEQ ID NO: 1671584 - RNA, 19 nt, Artificial Sequence
  Description of Artificial Sequence: Synthetic oligonucleotide
  Antisense strand to SEQ ID NO: 1671583
auacucaugcauggauucu

SEQ ID NO: 1671585 - RNA, 19 nt, Artificial Sequence
  Description of Artificial Sequence: Synthetic oligonucleotide
  Sense strand starting at position 1778 of SEQ ID NO: 1561433
gcauguguggguguucuau

SEQ ID NO: 1671586 - RNA, 19 nt, Artificial Sequence
  Description of Artificial Sequence: Synthetic oligonucleotide
  Antisense strand to SEQ ID NO: 1671585
auagaacacccacacaugc

SEQ ID NO: 1671587 - RNA, 19 nt, Artificial Sequence
  Description of Artificial Sequence: Synthetic oligonucleotide
  Sense strand starting at position 1856 of SEQ ID NO: 1561433
gcugaauuaccuugagaac

SEQ ID NO: 1671588 - RNA, 19 nt, Artificial Sequence
  Description of Artificial Sequence: Synthetic oligonucleotide
  Antisense strand to SEQ ID NO: 1671587
guucucaagguaauucagc

SEQ ID NO: 1671589 - RNA, 19 nt, Artificial Sequence
  Description of Artificial Sequence: Synthetic oligonucleotide
  Sense strand starting at position 2251 of SEQ ID NO: 1561433
gcaauuagggcccaucuuu

SEQ ID NO: 1671590 - RNA, 19 nt, Artificial Sequence
  Description of Artificial Sequence: Synthetic oligonucleotide
  Antisense strand to SEQ ID NO: 1671589
aaagaugggcccuaauugc

SEQ ID NO: 1671591 - RNA, 19 nt, Artificial Sequence
  Description of Artificial Sequence: Synthetic oligonucleotide
  Sense strand starting at position 2328 of SEQ ID NO: 1561433
uaaguacaugcaugaaaga

SEQ ID NO: 1671592 - RNA, 19 nt, Artificial Sequence
  Description of Artificial Sequence: Synthetic oligonucleotide
  Antisense strand to SEQ ID NO: 1671591
ucuuucaugcauguacuua

SEQ ID NO: 1671593 - RNA, 19 nt, Artificial Sequence
  Description of Artificial Sequence: Synthetic oligonucleotide
  Sense strand starting at position 2782 of SEQ ID NO: 1561433
ggcagaugcagugauacua

SEQ ID NO: 1671594 - RNA, 19 nt, Artificial Sequence
  Description of Artificial Sequence: Synthetic oligonucleotide
  Antisense strand to SEQ ID NO: 1671593
uaguaucacugcaucugcc

SEQ ID NO: 1671595 - RNA, 19 nt, Artificial Sequence
  Description of Artificial Sequence: Synthetic oligonucleotide
  Sense strand starting at position 3028 of SEQ ID NO: 1561433
uucaguguugcggccacaa

SEQ ID NO: 1671596 - RNA, 19 nt, Artificial Sequence
  Description of Artificial Sequence: Synthetic oligonucleotide
  Antisense strand to SEQ ID NO: 1671595
uuguggccgcaacacugaa

SEQ ID NO: 1671597 - RNA, 19 nt, Artificial Sequence
  Description of Artificial Sequence: Synthetic oligonucleotide
  Sense strand starting at position 3040 of SEQ ID NO: 1561433
gccacaacagaaugcuaau

SEQ ID NO: 1671598 - RNA, 19 nt, Artificial Sequence
  Description of Artificial Sequence: Synthetic oligonucleotide
  Antisense strand to SEQ ID NO: 1671597
auuagcauucuguuguggc

SEQ ID NO: 1671599 - RNA, 19 nt, Artificial Sequence
  Description of Artificial Sequence: Synthetic oligonucleotide
  Sense strand starting at position 3185 of SEQ ID NO: 1561433
ccaauacagcguuaauauu

SEQ ID NO: 1671600 - RNA, 19 nt, Artificial Sequence
  Description of Artificial Sequence: Synthetic oligonucleotide
  Antisense strand to SEQ ID NO: 1671599
aauauuaacgcuguauugg

SEQ ID NO: 1671601 - RNA, 19 nt, Artificial Sequence
  Description of Artificial Sequence: Synthetic oligonucleotide
  Sense strand starting at position 3265 of SEQ ID NO: 1561433
agcuguucugguucgguau

SEQ ID NO: 1671602 - RNA, 19 nt, Artificial Sequence
  Description of Artificial Sequence: Synthetic oligonucleotide
  Antisense strand to SEQ ID NO: 1671601
auaccgaaccagaacagcu

SEQ ID NO: 1671603 - RNA, 19 nt, Artificial Sequence
  Description of Artificial Sequence: Synthetic oligonucleotide
  Sense strand starting at position 3268 of SEQ ID NO: 1561433
uguucugguucgguauuua

SEQ ID NO: 1671604 - RNA, 19 nt, Artificial Sequence
  Description of Artificial Sequence: Synthetic oligonucleotide
  Antisense strand to SEQ ID NO: 1671603
uaaauaccgaaccagaaca

SEQ ID NO: 1671605 - RNA, 19 nt, Artificial Sequence
  Description of Artificial Sequence: Synthetic oligonucleotide
  Sense strand starting at position 3326 of SEQ ID NO: 1561433
cuaacauaauggcugaaua

SEQ ID NO: 1671606 - RNA, 19 nt, Artificial Sequence
  Description of Artificial Sequence: Synthetic oligonucleotide
  Antisense strand to SEQ ID NO: 1671605
uauucagccauuauguuag

SEQ ID NO: 1671607 - RNA, 19 nt, Artificial Sequence
  Description of Artificial Sequence: Synthetic oligonucleotide
  Sense strand starting at position 3382 of SEQ ID NO: 1561433
uuaugagauuuagauuggu

SEQ ID NO: 1671608 - RNA, 19 nt, Artificial Sequence
  Description of Artificial Sequence: Synthetic oligonucleotide
  Antisense strand to SEQ ID NO: 1671607
accaaucuaaaucucauaa

SEQ ID NO: 1671609 - RNA, 19 nt, Artificial Sequence
  Description of Artificial Sequence: Synthetic oligonucleotide
  Sense strand starting at position 3391 of SEQ ID NO: 1561433
uuagauuggucaguuaaug

SEQ ID NO: 1671610 - RNA, 19 nt, Artificial Sequence
  Description of Artificial Sequence: Synthetic oligonucleotide
  Antisense strand to SEQ ID NO: 1671609
cauuaacugaccaaucuaa

SEQ ID NO: 1671611 - RNA, 19 nt, Artificial Sequence
  Description of Artificial Sequence: Synthetic oligonucleotide
  Sense strand starting at position 3443 of SEQ ID NO: 1561433
ucuugaaaugaacgugauu

SEQ ID NO: 1671612 - RNA, 19 nt, Artificial Sequence
  Description of Artificial Sequence: Synthetic oligonucleotide
  Antisense strand to SEQ ID NO: 1671611
aaucacguucauuucaaga

SEQ ID NO: 1671613 - RNA, 19 nt, Artificial Sequence
  Description of Artificial Sequence: Synthetic oligonucleotide
  Sense strand starting at position 3467 of SEQ ID NO: 1561433
cacggagugcugcaaacaa

SEQ ID NO: 1671614 - RNA, 19 nt, Artificial Sequence
  Description of Artificial Sequence: Synthetic oligonucleotide
  Antisense strand to SEQ ID NO: 1671613
uuguuugcagcacuccgug

SEQ ID NO: 1671615 - RNA, 19 nt, Artificial Sequence
  Description of Artificial Sequence: Synthetic oligonucleotide
  Sense strand starting at position 3623 of SEQ ID NO: 1561433
uuaauaauuggagggcauu

SEQ ID NO: 1671616 - RNA, 19 nt, Artificial Sequence
  Description of Artificial Sequence: Synthetic oligonucleotide
  Antisense strand to SEQ ID NO: 1671615
aaugcccuccaauuauuaa

SEQ ID NO: 1671617 - RNA, 19 nt, Artificial Sequence
  Description of Artificial Sequence: Synthetic oligonucleotide
  Sense strand starting at position 3624 of SEQ ID NO: 1561433
uaauaauuggagggcauua

SEQ ID NO: 1671618 - RNA, 19 nt, Artificial Sequence
  Description of Artificial Sequence: Synthetic oligonucleotide
  Antisense strand to SEQ ID NO: 1671617
uaaugcccuccaauuauua

SEQ ID NO: 1671619 - RNA, 19 nt, Artificial Sequence
  Description of Artificial Sequence: Synthetic oligonucleotide
  Sense strand starting at position 3649 of SEQ ID NO: 1561433
cccguaccugauuaaucau

SEQ ID NO: 1671620 - RNA, 19 nt, Artificial Sequence
  Description of Artificial Sequence: Synthetic oligonucleotide
  Antisense strand to SEQ ID NO: 1671619
augauuaaucagguacggg

SEQ ID NO: 1671621 - RNA, 19 nt, Artificial Sequence
  Description of Artificial Sequence: Synthetic oligonucleotide
  Sense strand starting at position 3731 of SEQ ID NO: 1561433
ugauauugaugauugaugu

SEQ ID NO: 1671622 - RNA, 19 nt, Artificial Sequence
  Description of Artificial Sequence: Synthetic oligonucleotide
  Antisense strand to SEQ ID NO: 1671621
acaucaaucaucaauauca

SEQ ID NO: 1671623 - RNA, 19 nt, Artificial Sequence
  Description of Artificial Sequence: Synthetic oligonucleotide
  Sense strand starting at position 3732 of SEQ ID NO: 1561433
gauauugaugauugaugua

SEQ ID NO: 1671624 - RNA, 19 nt, Artificial Sequence
  Description of Artificial Sequence: Synthetic oligonucleotide
  Antisense strand to SEQ ID NO: 1671623
uacaucaaucaucaauauc

SEQ ID NO: 1671625 - RNA, 19 nt, Artificial Sequence
  Description of Artificial Sequence: Synthetic oligonucleotide
  Sense strand starting at position 92 of SEQ ID NO: 1561434
gaggguaaauuagaaauuu

SEQ ID NO: 1671626 - RNA, 19 nt, Artificial Sequence
  Description of Artificial Sequence: Synthetic oligonucleotide
  Antisense strand to SEQ ID NO: 1671625
aaauuucuaauuuacccuc

SEQ ID NO: 1671627 - RNA, 19 nt, Artificial Sequence
  Description of Artificial Sequence: Synthetic oligonucleotide
  Sense strand starting at position 124 of SEQ ID NO: 1561434
uuaauaauaugagccagau

SEQ ID NO: 1671628 - RNA, 19 nt, Artificial Sequence
  Description of Artificial Sequence: Synthetic oligonucleotide
  Antisense strand to SEQ ID NO: 1671627
aucuggcucauauuauuaa

SEQ ID NO: 1671629 - RNA, 19 nt, Artificial Sequence
  Description of Artificial Sequence: Synthetic oligonucleotide
  Sense strand starting at position 128 of SEQ ID NO: 1561434
uaauaugagccagauguuu

SEQ ID NO: 1671630 - RNA, 19 nt, Artificial Sequence
  Description of Artificial Sequence: Synthetic oligonucleotide
  Antisense strand to SEQ ID NO: 1671629
aaacaucuggcucauauua

SEQ ID NO: 1671631 - RNA, 19 nt, Artificial Sequence
  Description of Artificial Sequence: Synthetic oligonucleotide
  Sense strand starting at position 297 of SEQ ID NO: 1561434
auucuaguguauccauaua

SEQ ID NO: 1671632 - RNA, 19 nt, Artificial Sequence
  Description of Artificial Sequence: Synthetic oligonucleotide
  Antisense strand to SEQ ID NO: 1671631
uauauggauacacuagaau

SEQ ID NO: 1671633 - RNA, 19 nt, Artificial Sequence
  Description of Artificial Sequence: Synthetic oligonucleotide
  Sense strand starting at position 568 of SEQ ID NO: 1561434
gagguaugccuacauuauc

SEQ ID NO: 1671634 - RNA, 19 nt, Artificial Sequence
  Description of Artificial Sequence: Synthetic oligonucleotide
  Antisense strand to SEQ ID NO: 1671633
gauaauguaggcauaccuc

SEQ ID NO: 1671635 - RNA, 19 nt, Artificial Sequence
  Description of Artificial Sequence: Synthetic oligonucleotide
  Sense strand starting at position 571 of SEQ ID NO: 1561434
guaugccuacauuaucauu

SEQ ID NO: 1671636 - RNA, 19 nt, Artificial Sequence
  Description of Artificial Sequence: Synthetic oligonucleotide
  Antisense strand to SEQ ID NO: 1671635
aaugauaauguaggcauac

SEQ ID NO: 1671637 - RNA, 19 nt, Artificial Sequence
  Description of Artificial Sequence: Synthetic oligonucleotide
  Sense strand starting at position 589 of SEQ ID NO: 1561434
uaauguugacgcgaauauc

SEQ ID NO: 1671638 - RNA, 19 nt, Artificial Sequence
  Description of Artificial Sequence: Synthetic oligonucleotide
  Antisense strand to SEQ ID NO: 1671637
gauauucgcgucaacauua

SEQ ID NO: 1671639 - RNA, 19 nt, Artificial Sequence
  Description of Artificial Sequence: Synthetic oligonucleotide
  Sense strand starting at position 704 of SEQ ID NO: 1561434
acauccugguugucauauu

SEQ ID NO: 1671640 - RNA, 19 nt, Artificial Sequence
  Description of Artificial Sequence: Synthetic oligonucleotide
  Antisense strand to SEQ ID NO: 1671639
aauaugacaaccaggaugu

SEQ ID NO: 1671641 - RNA, 19 nt, Artificial Sequence
  Description of Artificial Sequence: Synthetic oligonucleotide
  Sense strand starting at position 725 of SEQ ID NO: 1561434
acuacaguccugcaagaug

SEQ ID NO: 1671642 - RNA, 19 nt, Artificial Sequence
  Description of Artificial Sequence: Synthetic oligonucleotide
  Antisense strand to SEQ ID NO: 1671641
caucuugcaggacuguagu

SEQ ID NO: 1671643 - RNA, 19 nt, Artificial Sequence
  Description of Artificial Sequence: Synthetic oligonucleotide
  Sense strand starting at position 739 of SEQ ID NO: 1561434
agauguugucauuggagaa

SEQ ID NO: 1671644 - RNA, 19 nt, Artificial Sequence
  Description of Artificial Sequence: Synthetic oligonucleotide
  Antisense strand to SEQ ID NO: 1671643
uucuccaaugacaacaucu

SEQ ID NO: 1671645 - RNA, 19 nt, Artificial Sequence
  Description of Artificial Sequence: Synthetic oligonucleotide
  Sense strand starting at position 740 of SEQ ID NO: 1561434
gauguugucauuggagaag

SEQ ID NO: 1671646 - RNA, 19 nt, Artificial Sequence
  Description of Artificial Sequence: Synthetic oligonucleotide
  Antisense strand to SEQ ID NO: 1671645
cuucuccaaugacaacauc

SEQ ID NO: 1671647 - RNA, 19 nt, Artificial Sequence
  Description of Artificial Sequence: Synthetic oligonucleotide
  Sense strand starting at position 743 of SEQ ID NO: 1561434
guugucauuggagaagacu

SEQ ID NO: 1671648 - RNA, 19 nt, Artificial Sequence
  Description of Artificial Sequence: Synthetic oligonucleotide
  Antisense strand to SEQ ID NO: 1671647
agucuucuccaaugacaac

SEQ ID NO: 1671649 - RNA, 19 nt, Artificial Sequence
  Description of Artificial Sequence: Synthetic oligonucleotide
  Sense strand starting at position 870 of SEQ ID NO: 1561434
ucaaauauuugcuagauga

SEQ ID NO: 1671650 - RNA, 19 nt, Artificial Sequence
  Description of Artificial Sequence: Synthetic oligonucleotide
  Antisense strand to SEQ ID NO: 1671649
ucaucuagcaaauauuuga

SEQ ID NO: 1671651 - RNA, 19 nt, Artificial Sequence
  Description of Artificial Sequence: Synthetic oligonucleotide
  Sense strand starting at position 907 of SEQ ID NO: 1561434
ucaaaucuugaaggcaaau

SEQ ID NO: 1671652 - RNA, 19 nt, Artificial Sequence
  Description of Artificial Sequence: Synthetic oligonucleotide
  Antisense strand to SEQ ID NO: 1671651
auuugccuucaagauuuga

SEQ ID NO: 1671653 - RNA, 19 nt, Artificial Sequence
  Description of Artificial Sequence: Synthetic oligonucleotide
  Sense strand starting at position 953 of SEQ ID NO: 1561434
ggaagacuauuagccauau

SEQ ID NO: 1671654 - RNA, 19 nt, Artificial Sequence
  Description of Artificial Sequence: Synthetic oligonucleotide
  Antisense strand to SEQ ID NO: 1671653
auauggcuaauagucuucc

SEQ ID NO: 1671655 - RNA, 19 nt, Artificial Sequence
  Description of Artificial Sequence: Synthetic oligonucleotide
  Sense strand starting at position 1054 of SEQ ID NO: 1561434
ucucaauagccauauguag

SEQ ID NO: 1671656 - RNA, 19 nt, Artificial Sequence
  Description of Artificial Sequence: Synthetic oligonucleotide
  Antisense strand to SEQ ID NO: 1671655
cuacauauggcuauugaga

SEQ ID NO: 1671657 - RNA, 19 nt, Artificial Sequence
  Description of Artificial Sequence: Synthetic oligonucleotide
  Sense strand starting at position 1300 of SEQ ID NO: 1561434
gcgaacucucaaugaauca

SEQ ID NO: 1671658 - RNA, 19 nt, Artificial Sequence
  Description of Artificial Sequence: Synthetic oligonucleotide
  Antisense strand to SEQ ID NO: 1671657
ugauucauugagaguucgc

SEQ ID NO: 1671659 - RNA, 19 nt, Artificial Sequence
  Description of Artificial Sequence: Synthetic oligonucleotide
  Sense strand starting at position 1416 of SEQ ID NO: 1561434
ggcugaaucugauuaaaca

SEQ ID NO: 1671660 - RNA, 19 nt, Artificial Sequence
  Description of Artificial Sequence: Synthetic oligonucleotide
  Antisense strand to SEQ ID NO: 1671659
uguuuaaucagauucagcc

SEQ ID NO: 1671661 - RNA, 19 nt, Artificial Sequence
  Description of Artificial Sequence: Synthetic oligonucleotide
  Sense strand starting at position 1637 of SEQ ID NO: 1561434
caaagaaugcgucacacuu

SEQ ID NO: 1671662 - RNA, 19 nt, Artificial Sequence
  Description of Artificial Sequence: Synthetic oligonucleotide
  Antisense strand to SEQ ID NO: 1671661
aagugugacgcauucuuug

SEQ ID NO: 1671663 - RNA, 19 nt, Artificial Sequence
  Description of Artificial Sequence: Synthetic oligonucleotide
  Sense strand starting at position 2038 of SEQ ID NO: 1561434
cguacacuuacgcuguuau

SEQ ID NO: 1671664 - RNA, 19 nt, Artificial Sequence
  Description of Artificial Sequence: Synthetic oligonucleotide
  Antisense strand to SEQ ID NO: 1671663
auaacagcguaaguguacg

SEQ ID NO: 1671665 - RNA, 19 nt, Artificial Sequence
  Description of Artificial Sequence: Synthetic oligonucleotide
  Sense strand starting at position 2222 of SEQ ID NO: 1561434
cuggcuaauuacuuaugga

SEQ ID NO: 1671666 - RNA, 19 nt, Artificial Sequence
  Description of Artificial Sequence: Synthetic oligonucleotide
  Antisense strand to SEQ ID NO: 1671665
uccauaaguaauuagccag

SEQ ID NO: 1671667 - RNA, 19 nt, Artificial Sequence
  Description of Artificial Sequence: Synthetic oligonucleotide
  Sense strand starting at position 2380 of SEQ ID NO: 1561434
gcaccauaacuuugggaua

SEQ ID NO: 1671668 - RNA, 19 nt, Artificial Sequence
  Description of Artificial Sequence: Synthetic oligonucleotide
  Antisense strand to SEQ ID NO: 1671667
uaucccaaaguuauggugc

SEQ ID NO: 1671669 - RNA, 19 nt, Artificial Sequence
  Description of Artificial Sequence: Synthetic oligonucleotide
  Sense strand starting at position 2532 of SEQ ID NO: 1561434
gcaguacuccucgugugac

SEQ ID NO: 1671670 - RNA, 19 nt, Artificial Sequence
  Description of Artificial Sequence: Synthetic oligonucleotide
  Antisense strand to SEQ ID NO: 1671669
gucacacgaggaguacugc

SEQ ID NO: 1671671 - RNA, 19 nt, Artificial Sequence
  Description of Artificial Sequence: Synthetic oligonucleotide
  Sense strand starting at position 2544 of SEQ ID NO: 1561434
gugugacacggacaucauu

SEQ ID NO: 1671672 - RNA, 19 nt, Artificial Sequence
  Description of Artificial Sequence: Synthetic oligonucleotide
  Antisense strand to SEQ ID NO: 1671671
aaugauguccgugucacac

SEQ ID NO: 1671673 - RNA, 19 nt, Artificial Sequence
  Description of Artificial Sequence: Synthetic oligonucleotide
  Sense strand starting at position 2569 of SEQ ID NO: 1561434
gcugagaaucgugcgguua

SEQ ID NO: 1671674 - RNA, 19 nt, Artificial Sequence
  Description of Artificial Sequence: Synthetic oligonucleotide
  Antisense strand to SEQ ID NO: 1671673
uaaccgcacgauucucagc

SEQ ID NO: 1671675 - RNA, 19 nt, Artificial Sequence
  Description of Artificial Sequence: Synthetic oligonucleotide
  Sense strand starting at position 2598 of SEQ ID NO: 1561434
aguuucuuugcagaguaag

SEQ ID NO: 1671676 - RNA, 19 nt, Artificial Sequence
  Description of Artificial Sequence: Synthetic oligonucleotide
  Antisense strand to SEQ ID NO: 1671675
cuuacucugcaaagaaacu

SEQ ID NO: 1671677 - RNA, 19 nt, Artificial Sequence
  Description of Artificial Sequence: Synthetic oligonucleotide
  Sense strand starting at position 2627 of SEQ ID NO: 1561434
ugaaguuucccugauggug

SEQ ID NO: 1671678 - RNA, 19 nt, Artificial Sequence
  Description of Artificial Sequence: Synthetic oligonucleotide
  Antisense strand to SEQ ID NO: 1671677
caccaucagggaaacuuca

SEQ ID NO: 1671679 - RNA, 19 nt, Artificial Sequence
  Description of Artificial Sequence: Synthetic oligonucleotide
  Sense strand starting at position 2684 of SEQ ID NO: 1561434
uguuaaagauguccuauuc

SEQ ID NO: 1671680 - RNA, 19 nt, Artificial Sequence
  Description of Artificial Sequence: Synthetic oligonucleotide
  Antisense strand to SEQ ID NO: 1671679
gaauaggacaucuuuaaca

SEQ ID NO: 1671681 - RNA, 19 nt, Artificial Sequence
  Description of Artificial Sequence: Synthetic oligonucleotide
  Sense strand starting at position 2780 of SEQ ID NO: 1561434
gagcucugauguucuauga

SEQ ID NO: 1671682 - RNA, 19 nt, Artificial Sequence
  Description of Artificial Sequence: Synthetic oligonucleotide
  Antisense strand to SEQ ID NO: 1671681
ucauagaacaucagagcuc

SEQ ID NO: 1671683 - RNA, 19 nt, Artificial Sequence
  Description of Artificial Sequence: Synthetic oligonucleotide
  Sense strand starting at position 2790 of SEQ ID NO: 1561434
guucuaugaugcuuauuuc

SEQ ID NO: 1671684 - RNA, 19 nt, Artificial Sequence
  Description of Artificial Sequence: Synthetic oligonucleotide
  Antisense strand to SEQ ID NO: 1671683
gaaauaagcaucauagaac

SEQ ID NO: 1671685 - RNA, 19 nt, Artificial Sequence
  Description of Artificial Sequence: Synthetic oligonucleotide
  Sense strand starting at position 3084 of SEQ ID NO: 1561434
aguccuuucuggucuaaga

SEQ ID NO: 1671686 - RNA, 19 nt, Artificial Sequence
  Description of Artificial Sequence: Synthetic oligonucleotide
  Antisense strand to SEQ ID NO: 1671685
ucuuagaccagaaaggacu

SEQ ID NO: 1671687 - RNA, 19 nt, Artificial Sequence
  Description of Artificial Sequence: Synthetic oligonucleotide
  Sense strand starting at position 3086 of SEQ ID NO: 1561434
uccuuucuggucuaagauu

SEQ ID NO: 1671688 - RNA, 19 nt, Artificial Sequence
  Description of Artificial Sequence: Synthetic oligonucleotide
  Antisense strand to SEQ ID NO: 1671687
aaucuuagaccagaaagga

SEQ ID NO: 1671689 - RNA, 19 nt, Artificial Sequence
  Description of Artificial Sequence: Synthetic oligonucleotide
  Sense strand starting at position 3560 of SEQ ID NO: 1561434
uguaaauaccuuuguauca

SEQ ID NO: 1671690 - RNA, 19 nt, Artificial Sequence
  Description of Artificial Sequence: Synthetic oligonucleotide
  Antisense strand to SEQ ID NO: 1671689
ugauacaaagguauuuaca

SEQ ID NO: 1671691 - RNA, 19 nt, Artificial Sequence
  Description of Artificial Sequence: Synthetic oligonucleotide
  Sense strand starting at position 3561 of SEQ ID NO: 1561434
guaaauaccuuuguaucaa

SEQ ID NO: 1671692 - RNA, 19 nt, Artificial Sequence
  Description of Artificial Sequence: Synthetic oligonucleotide
  Antisense strand to SEQ ID NO: 1671691
uugauacaaagguauuuac

SEQ ID NO: 1671693 - RNA, 19 nt, Artificial Sequence
  Description of Artificial Sequence: Synthetic oligonucleotide
  Sense strand starting at position 3756 of SEQ ID NO: 1561434
cguggugguuauuucauaa

SEQ ID NO: 1671694 - RNA, 19 nt, Artificial Sequence
  Description of Artificial Sequence: Synthetic oligonucleotide
  Antisense strand to SEQ ID NO: 1671693
uuaugaaauaaccaccacg

SEQ ID NO: 1671695 - RNA, 19 nt, Artificial Sequence
  Description of Artificial Sequence: Synthetic oligonucleotide
  Sense strand starting at position 3870 of SEQ ID NO: 1561434
auugcauuugguggccaaa

SEQ ID NO: 1671696 - RNA, 19 nt, Artificial Sequence
  Description of Artificial Sequence: Synthetic oligonucleotide
  Antisense strand to SEQ ID NO: 1671695
uuuggccaccaaaugcaau

SEQ ID NO: 1671697 - RNA, 19 nt, Artificial Sequence
  Description of Artificial Sequence: Synthetic oligonucleotide
  Sense strand starting at position 3879 of SEQ ID NO: 1561434
gguggccaaaccuguuaaa

SEQ ID NO: 1671698 - RNA, 19 nt, Artificial Sequence
  Description of Artificial Sequence: Synthetic oligonucleotide
  Antisense strand to SEQ ID NO: 1671697
uuuaacagguuuggccacc

SEQ ID NO: 1671699 - RNA, 19 nt, Artificial Sequence
  Description of Artificial Sequence: Synthetic oligonucleotide
  Sense strand starting at position 3899 of SEQ ID NO: 1561434
uuacuuaaugcaugauagu

SEQ ID NO: 1671700 - RNA, 19 nt, Artificial Sequence
  Description of Artificial Sequence: Synthetic oligonucleotide
  Antisense strand to SEQ ID NO: 1671699
acuaucaugcauuaaguaa

SEQ ID NO: 1671701 - RNA, 19 nt, Artificial Sequence
  Description of Artificial Sequence: Synthetic oligonucleotide
  Sense strand starting at position 3976 of SEQ ID NO: 1561434
ucaucugucccguagaaua

SEQ ID NO: 1671702 - RNA, 19 nt, Artificial Sequence
  Description of Artificial Sequence: Synthetic oligonucleotide
  Antisense strand to SEQ ID NO: 1671701
uauucuacgggacagauga

SEQ ID NO: 1671703 - RNA, 19 nt, Artificial Sequence
  Description of Artificial Sequence: Synthetic oligonucleotide
  Sense strand starting at position 3978 of SEQ ID NO: 1561434
aucugucccguagaauauu

SEQ ID NO: 1671704 - RNA, 19 nt, Artificial Sequence
  Description of Artificial Sequence: Synthetic oligonucleotide
  Antisense strand to SEQ ID NO: 1671703
aauauucuacgggacagau

SEQ ID NO: 1671705 - RNA, 19 nt, Artificial Sequence
  Description of Artificial Sequence: Synthetic oligonucleotide
  Sense strand starting at position 289 of SEQ ID NO: 1561435
uaugaagacucggauuaaa

SEQ ID NO: 1671706 - RNA, 19 nt, Artificial Sequence
  Description of Artificial Sequence: Synthetic oligonucleotide
  Antisense strand to SEQ ID NO: 1671705
uuuaauccgagucuucaua

SEQ ID NO: 1671707 - RNA, 19 nt, Artificial Sequence
  Description of Artificial Sequence: Synthetic oligonucleotide
  Sense strand starting at position 780 of SEQ ID NO: 1561435
auagaaguguauugaccaa

SEQ ID NO: 1671708 - RNA, 19 nt, Artificial Sequence
  Description of Artificial Sequence: Synthetic oligonucleotide
  Antisense strand to SEQ ID NO: 1671707
uuggucaauacacuucuau

SEQ ID NO: 1671709 - RNA, 19 nt, Artificial Sequence
  Description of Artificial Sequence: Synthetic oligonucleotide
  Sense strand starting at position 827 of SEQ ID NO: 1561435
ugccuaguaccagaacuaa

SEQ ID NO: 1671710 - RNA, 19 nt, Artificial Sequence
  Description of Artificial Sequence: Synthetic oligonucleotide
  Antisense strand to SEQ ID NO: 1671709
uuaguucugguacuaggca

SEQ ID NO: 1671711 - RNA, 19 nt, Artificial Sequence
  Description of Artificial Sequence: Synthetic oligonucleotide
  Sense strand starting at position 965 of SEQ ID NO: 1561435
auaccugaacggugcuaau

SEQ ID NO: 1671712 - RNA, 19 nt, Artificial Sequence
  Description of Artificial Sequence: Synthetic oligonucleotide
  Antisense strand to SEQ ID NO: 1671711
auuagcaccguucagguau

SEQ ID NO: 1671713 - RNA, 19 nt, Artificial Sequence
  Description of Artificial Sequence: Synthetic oligonucleotide
  Sense strand starting at position 982 of SEQ ID NO: 1561435
auagccaacuuguuguaau

SEQ ID NO: 1671714 - RNA, 19 nt, Artificial Sequence
  Description of Artificial Sequence: Synthetic oligonucleotide
  Antisense strand to SEQ ID NO: 1671713
auuacaacaaguuggcuau

SEQ ID NO: 1671715 - RNA, 19 nt, Artificial Sequence
  Description of Artificial Sequence: Synthetic oligonucleotide
  Sense strand starting at position 1062 of SEQ ID NO: 1561435
uuagcaagcuuguuuauau

SEQ ID NO: 1671716 - RNA, 19 nt, Artificial Sequence
  Description of Artificial Sequence: Synthetic oligonucleotide
  Antisense strand to SEQ ID NO: 1671715
auauaaacaagcuugcuaa

SEQ ID NO: 1671717 - RNA, 19 nt, Artificial Sequence
  Description of Artificial Sequence: Synthetic oligonucleotide
  Sense strand starting at position 1156 of SEQ ID NO: 1561435
gccagaaauuaaugucaaa

SEQ ID NO: 1671718 - RNA, 19 nt, Artificial Sequence
  Description of Artificial Sequence: Synthetic oligonucleotide
  Antisense strand to SEQ ID NO: 1671717
uuugacauuaauuucuggc

SEQ ID NO: 1671719 - RNA, 19 nt, Artificial Sequence
  Description of Artificial Sequence: Synthetic oligonucleotide
  Sense strand starting at position 1326 of SEQ ID NO: 1561435
acauaucaaugguuuaagu

SEQ ID NO: 1671720 - RNA, 19 nt, Artificial Sequence
  Description of Artificial Sequence: Synthetic oligonucleotide
  Antisense strand to SEQ ID NO: 1671719
acuuaaaccauugauaugu

SEQ ID NO: 1671721 - RNA, 19 nt, Artificial Sequence
  Description of Artificial Sequence: Synthetic oligonucleotide
  Sense strand starting at position 1335 of SEQ ID NO: 1561435
ugguuuaaguucccacuua

SEQ ID NO: 1671722 - RNA, 19 nt, Artificial Sequence
  Description of Artificial Sequence: Synthetic oligonucleotide
  Antisense strand to SEQ ID NO: 1671721
uaagugggaacuuaaacca

SEQ ID NO: 1671723 - RNA, 19 nt, Artificial Sequence
  Description of Artificial Sequence: Synthetic oligonucleotide
  Sense strand starting at position 1377 of SEQ ID NO: 1561435
aggaauuaagcuuagagcu

SEQ ID NO: 1671724 - RNA, 19 nt, Artificial Sequence
  Description of Artificial Sequence: Synthetic oligonucleotide
  Antisense strand to SEQ ID NO: 1671723
agcucuaagcuuaauuccu

SEQ ID NO: 1671725 - RNA, 19 nt, Artificial Sequence
  Description of Artificial Sequence: Synthetic oligonucleotide
  Sense strand starting at position 1379 of SEQ ID NO: 1561435
gaauuaagcuuagagcuga

SEQ ID NO: 1671726 - RNA, 19 nt, Artificial Sequence
  Description of Artificial Sequence: Synthetic oligonucleotide
  Antisense strand to SEQ ID NO: 1671725
ucagcucuaagcuuaauuc

SEQ ID NO: 1671727 - RNA, 19 nt, Artificial Sequence
  Description of Artificial Sequence: Synthetic oligonucleotide
  Sense strand starting at position 1696 of SEQ ID NO: 1561435
gcgguaccuaccucgcaau

SEQ ID NO: 1671728 - RNA, 19 nt, Artificial Sequence
  Description of Artificial Sequence: Synthetic oligonucleotide
  Antisense strand to SEQ ID NO: 1671727
auugcgagguagguaccgc

SEQ ID NO: 1671729 - RNA, 19 nt, Artificial Sequence
  Description of Artificial Sequence: Synthetic oligonucleotide
  Sense strand starting at position 2138 of SEQ ID NO: 1561435
ggaagaaggcugcgugaga

SEQ ID NO: 1671730 - RNA, 19 nt, Artificial Sequence
  Description of Artificial Sequence: Synthetic oligonucleotide
  Antisense strand to SEQ ID NO: 1671729
ucucacgcagccuucuucc

SEQ ID NO: 1671731 - RNA, 19 nt, Artificial Sequence
  Description of Artificial Sequence: Synthetic oligonucleotide
  Sense strand starting at position 2264 of SEQ ID NO: 1561435
cgggacugcucucugauuu

SEQ ID NO: 1671732 - RNA, 19 nt, Artificial Sequence
  Description of Artificial Sequence: Synthetic oligonucleotide
  Antisense strand to SEQ ID NO: 1671731
aaaucagagagcagucccg

SEQ ID NO: 1671733 - RNA, 19 nt, Artificial Sequence
  Description of Artificial Sequence: Synthetic oligonucleotide
  Sense strand starting at position 2276 of SEQ ID NO: 1561435
cugauuugauucuagauug

SEQ ID NO: 1671734 - RNA, 19 nt, Artificial Sequence
  Description of Artificial Sequence: Synthetic oligonucleotide
  Antisense strand to SEQ ID NO: 1671733
caaucuagaaucaaaucag

SEQ ID NO: 1671735 - RNA, 19 nt, Artificial Sequence
  Description of Artificial Sequence: Synthetic oligonucleotide
  Sense strand starting at position 2332 of SEQ ID NO: 1561435
gauccaaucuggugaggag

SEQ ID NO: 1671736 - RNA, 19 nt, Artificial Sequence
  Description of Artificial Sequence: Synthetic oligonucleotide
  Antisense strand to SEQ ID NO: 1671735
cuccucaccagauuggauc

SEQ ID NO: 1671737 - RNA, 19 nt, Artificial Sequence
  Description of Artificial Sequence: Synthetic oligonucleotide
  Sense strand starting at position 2333 of SEQ ID NO: 1561435
auccaaucuggugaggagu

SEQ ID NO: 1671738 - RNA, 19 nt, Artificial Sequence
  Description of Artificial Sequence: Synthetic oligonucleotide
  Antisense strand to SEQ ID NO: 1671737
acuccucaccagauuggau

SEQ ID NO: 1671739 - RNA, 19 nt, Artificial Sequence
  Description of Artificial Sequence: Synthetic oligonucleotide
  Sense strand starting at position 2503 of SEQ ID NO: 1561435
cagcauugcuguccagaaa

SEQ ID NO: 1671740 - RNA, 19 nt, Artificial Sequence
  Description of Artificial Sequence: Synthetic oligonucleotide
  Antisense strand to SEQ ID NO: 1671739
uuucuggacagcaaugcug

SEQ ID NO: 1671741 - RNA, 19 nt, Artificial Sequence
  Description of Artificial Sequence: Synthetic oligonucleotide
  Sense strand starting at position 2540 of SEQ ID NO: 1561435
agucaagcccgaugugaag

SEQ ID NO: 1671742 - RNA, 19 nt, Artificial Sequence
  Description of Artificial Sequence: Synthetic oligonucleotide
  Antisense strand to SEQ ID NO: 1671741
cuucacaucgggcuugacu

SEQ ID NO: 1671743 - RNA, 19 nt, Artificial Sequence
  Description of Artificial Sequence: Synthetic oligonucleotide
  Sense strand starting at position 2767 of SEQ ID NO: 1561435
agggauuccugccagagga

SEQ ID NO: 1671744 - RNA, 19 nt, Artificial Sequence
  Description of Artificial Sequence: Synthetic oligonucleotide
  Antisense strand to SEQ ID NO: 1671743
uccucuggcaggaaucccu

SEQ ID NO: 1671745 - RNA, 19 nt, Artificial Sequence
  Description of Artificial Sequence: Synthetic oligonucleotide
  Sense strand starting at position 2879 of SEQ ID NO: 1561435
ccgugaaaucccuggcaac

SEQ ID NO: 1671746 - RNA, 19 nt, Artificial Sequence
  Description of Artificial Sequence: Synthetic oligonucleotide
  Antisense strand to SEQ ID NO: 1671745
guugccagggauuucacgg

SEQ ID NO: 1671747 - RNA, 19 nt, Artificial Sequence
  Description of Artificial Sequence: Synthetic oligonucleotide
  Sense strand starting at position 2882 of SEQ ID NO: 1561435
ugaaaucccuggcaacgaa

SEQ ID NO: 1671748 - RNA, 19 nt, Artificial Sequence
  Description of Artificial Sequence: Synthetic oligonucleotide
  Antisense strand to SEQ ID NO: 1671747
uucguugccagggauuuca

SEQ ID NO: 1671749 - RNA, 19 nt, Artificial Sequence
  Description of Artificial Sequence: Synthetic oligonucleotide
  Sense strand starting at position 3079 of SEQ ID NO: 1561435
ccaagaguuuccuuauugg

SEQ ID NO: 1671750 - RNA, 19 nt, Artificial Sequence
  Description of Artificial Sequence: Synthetic oligonucleotide
  Antisense strand to SEQ ID NO: 1671749
ccaauaaggaaacucuugg

SEQ ID NO: 1671751 - RNA, 19 nt, Artificial Sequence
  Description of Artificial Sequence: Synthetic oligonucleotide
  Sense strand starting at position 3136 of SEQ ID NO: 1561435
gcuacccagucauuaagaa

SEQ ID NO: 1671752 - RNA, 19 nt, Artificial Sequence
  Description of Artificial Sequence: Synthetic oligonucleotide
  Antisense strand to SEQ ID NO: 1671751
uucuuaaugacuggguagc

SEQ ID NO: 1671753 - RNA, 19 nt, Artificial Sequence
  Description of Artificial Sequence: Synthetic oligonucleotide
  Sense strand starting at position 3140 of SEQ ID NO: 1561435
cccagucauuaagaaaugu

SEQ ID NO: 1671754 - RNA, 19 nt, Artificial Sequence
  Description of Artificial Sequence: Synthetic oligonucleotide
  Antisense strand to SEQ ID NO: 1671753
acauuucuuaaugacuggg

SEQ ID NO: 1671755 - RNA, 19 nt, Artificial Sequence
  Description of Artificial Sequence: Synthetic oligonucleotide
  Sense strand starting at position 3144 of SEQ ID NO: 1561435
gucauuaagaaaugugagu

SEQ ID NO: 1671756 - RNA, 19 nt, Artificial Sequence
  Description of Artificial Sequence: Synthetic oligonucleotide
  Antisense strand to SEQ ID NO: 1671755
acucacauuucuuaaugac

SEQ ID NO: 1671757 - RNA, 19 nt, Artificial Sequence
  Description of Artificial Sequence: Synthetic oligonucleotide
  Sense strand starting at position 3149 of SEQ ID NO: 1561435
uaagaaaugugaguguuga

SEQ ID NO: 1671758 - RNA, 19 nt, Artificial Sequence
  Description of Artificial Sequence: Synthetic oligonucleotide
  Antisense strand to SEQ ID NO: 1671757
ucaacacucacauuucuua

SEQ ID NO: 1671759 - RNA, 19 nt, Artificial Sequence
  Description of Artificial Sequence: Synthetic oligonucleotide
  Sense strand starting at position 3150 of SEQ ID NO: 1561435
aagaaaugugaguguugag

SEQ ID NO: 1671760 - RNA, 19 nt, Artificial Sequence
  Description of Artificial Sequence: Synthetic oligonucleotide
  Antisense strand to SEQ ID NO: 1671759
cucaacacucacauuucuu

SEQ ID NO: 1671761 - RNA, 19 nt, Artificial Sequence
  Description of Artificial Sequence: Synthetic oligonucleotide
  Sense strand starting at position 3155 of SEQ ID NO: 1561435
augugaguguugagaagga

SEQ ID NO: 1671762 - RNA, 19 nt, Artificial Sequence
  Description of Artificial Sequence: Synthetic oligonucleotide
  Antisense strand to SEQ ID NO: 1671761
uccuucucaacacucacau

SEQ ID NO: 1671763 - RNA, 19 nt, Artificial Sequence
  Description of Artificial Sequence: Synthetic oligonucleotide
  Sense strand starting at position 3220 of SEQ ID NO: 1561435
ggaaacauuugcugugaag

SEQ ID NO: 1671764 - RNA, 19 nt, Artificial Sequence
  Description of Artificial Sequence: Synthetic oligonucleotide
  Antisense strand to SEQ ID NO: 1671763
cuucacagcaaauguuucc

SEQ ID NO: 1671765 - RNA, 19 nt, Artificial Sequence
  Description of Artificial Sequence: Synthetic oligonucleotide
  Sense strand starting at position 3414 of SEQ ID NO: 1561435
cagucuucgguccaaaggu

SEQ ID NO: 1671766 - RNA, 19 nt, Artificial Sequence
  Description of Artificial Sequence: Synthetic oligonucleotide
  Antisense strand to SEQ ID NO: 1671765
accuuuggaccgaagacug

SEQ ID NO: 1671767 - RNA, 19 nt, Artificial Sequence
  Description of Artificial Sequence: Synthetic oligonucleotide
  Sense strand starting at position 3424 of SEQ ID NO: 1561435
uccaaagguucuccgaaca

SEQ ID NO: 1671768 - RNA, 19 nt, Artificial Sequence
  Description of Artificial Sequence: Synthetic oligonucleotide
  Antisense strand to SEQ ID NO: 1671767
uguucggagaaccuuugga

SEQ ID NO: 1671769 - RNA, 19 nt, Artificial Sequence
  Description of Artificial Sequence: Synthetic oligonucleotide
  Sense strand starting at position 3438 of SEQ ID NO: 1561435
gaacacucgugucuucuau

SEQ ID NO: 1671770 - RNA, 19 nt, Artificial Sequence
  Description of Artificial Sequence: Synthetic oligonucleotide
  Antisense strand to SEQ ID NO: 1671769
auagaagacacgaguguuc

SEQ ID NO: 1671771 - RNA, 19 nt, Artificial Sequence
  Description of Artificial Sequence: Synthetic oligonucleotide
  Sense strand starting at position 3448 of SEQ ID NO: 1561435
gucuucuaucgccagcaca

SEQ ID NO: 1671772 - RNA, 19 nt, Artificial Sequence
  Description of Artificial Sequence: Synthetic oligonucleotide
  Antisense strand to SEQ ID NO: 1671771
ugugcuggcgauagaagac

SEQ ID NO: 1671773 - RNA, 19 nt, Artificial Sequence
  Description of Artificial Sequence: Synthetic oligonucleotide
  Sense strand starting at position 3518 of SEQ ID NO: 1561435
ggaaacaguuucuuugaca

SEQ ID NO: 1671774 - RNA, 19 nt, Artificial Sequence
  Description of Artificial Sequence: Synthetic oligonucleotide
  Antisense strand to SEQ ID NO: 1671773
ugucaaagaaacuguuucc

SEQ ID NO: 1671775 - RNA, 19 nt, Artificial Sequence
  Description of Artificial Sequence: Synthetic oligonucleotide
  Sense strand starting at position 3544 of SEQ ID NO: 1561435
gcaccuguucugcagguga

SEQ ID NO: 1671776 - RNA, 19 nt, Artificial Sequence
  Description of Artificial Sequence: Synthetic oligonucleotide
  Antisense strand to SEQ ID NO: 1671775
ucaccugcagaacaggugc

SEQ ID NO: 1671777 - RNA, 19 nt, Artificial Sequence
  Description of Artificial Sequence: Synthetic oligonucleotide
  Sense strand starting at position 3713 of SEQ ID NO: 1561435
gaauuagaagugggcucaa

SEQ ID NO: 1671778 - RNA, 19 nt, Artificial Sequence
  Description of Artificial Sequence: Synthetic oligonucleotide
  Antisense strand to SEQ ID NO: 1671777
uugagcccacuucuaauuc

SEQ ID NO: 1671779 - RNA, 19 nt, Artificial Sequence
  Description of Artificial Sequence: Synthetic oligonucleotide
  Sense strand starting at position 3803 of SEQ ID NO: 1561435
ggaauuuguucuugguugu

SEQ ID NO: 1671780 - RNA, 19 nt, Artificial Sequence
  Description of Artificial Sequence: Synthetic oligonucleotide
  Antisense strand to SEQ ID NO: 1671779
acaaccaagaacaaauucc

SEQ ID NO: 1671781 - RNA, 19 nt, Artificial Sequence
  Description of Artificial Sequence: Synthetic oligonucleotide
  Sense strand starting at position 3831 of SEQ ID NO: 1561435
gucuucuuucuggaagagu

SEQ ID NO: 1671782 - RNA, 19 nt, Artificial Sequence
  Description of Artificial Sequence: Synthetic oligonucleotide
  Antisense strand to SEQ ID NO: 1671781
acucuuccagaaagaagac

SEQ ID NO: 1671783 - RNA, 19 nt, Artificial Sequence
  Description of Artificial Sequence: Synthetic oligonucleotide
  Sense strand starting at position 3865 of SEQ ID NO: 1561435
ggaggugauuuggacguuu

SEQ ID NO: 1671784 - RNA, 19 nt, Artificial Sequence
  Description of Artificial Sequence: Synthetic oligonucleotide
  Antisense strand to SEQ ID NO: 1671783
aaacguccaaaucaccucc

SEQ ID NO: 1671785 - RNA, 19 nt, Artificial Sequence
  Description of Artificial Sequence: Synthetic oligonucleotide
  Sense strand starting at position 112 of SEQ ID NO: 1561436
gcaagaauauggucuaaca

SEQ ID NO: 1671786 - RNA, 19 nt, Artificial Sequence
  Description of Artificial Sequence: Synthetic oligonucleotide
  Antisense strand to SEQ ID NO: 1671785
uguuagaccauauucuugc

SEQ ID NO: 1671787 - RNA, 19 nt, Artificial Sequence
  Description of Artificial Sequence: Synthetic oligonucleotide
  Sense strand starting at position 151 of SEQ ID NO: 1561436
cagugacccucaguaugaa

SEQ ID NO: 1671788 - RNA, 19 nt, Artificial Sequence
  Description of Artificial Sequence: Synthetic oligonucleotide
  Antisense strand to SEQ ID NO: 1671787
uucauacugagggucacug

SEQ ID NO: 1671789 - RNA, 19 nt, Artificial Sequence
  Description of Artificial Sequence: Synthetic oligonucleotide
  Sense strand starting at position 246 of SEQ ID NO: 1561436
caagacuauguaugucuga

SEQ ID NO: 1671790 - RNA, 19 nt, Artificial Sequence
  Description of Artificial Sequence: Synthetic oligonucleotide
  Antisense strand to SEQ ID NO: 1671789
ucagacauacauagucuug

SEQ ID NO: 1671791 - RNA, 19 nt, Artificial Sequence
  Description of Artificial Sequence: Synthetic oligonucleotide
  Sense strand starting at position 249 of SEQ ID NO: 1561436
gacuauguaugucugacuu

SEQ ID NO: 1671792 - RNA, 19 nt, Artificial Sequence
  Description of Artificial Sequence: Synthetic oligonucleotide
  Antisense strand to SEQ ID NO: 1671791
aagucagacauacauaguc

SEQ ID NO: 1671793 - RNA, 19 nt, Artificial Sequence
  Description of Artificial Sequence: Synthetic oligonucleotide
  Sense strand starting at position 262 of SEQ ID NO: 1561436
ugacuuuacccacguuuaa

SEQ ID NO: 1671794 - RNA, 19 nt, Artificial Sequence
  Description of Artificial Sequence: Synthetic oligonucleotide
  Antisense strand to SEQ ID NO: 1671793
uuaaacguggguaaaguca

SEQ ID NO: 1671795 - RNA, 19 nt, Artificial Sequence
  Description of Artificial Sequence: Synthetic oligonucleotide
  Sense strand starting at position 624 of SEQ ID NO: 1561436
ugcuuuaaggucuaugaag

SEQ ID NO: 1671796 - RNA, 19 nt, Artificial Sequence
  Description of Artificial Sequence: Synthetic oligonucleotide
  Antisense strand to SEQ ID NO: 1671795
cuucauagaccuuaaagca

SEQ ID NO: 1671797 - RNA, 19 nt, Artificial Sequence
  Description of Artificial Sequence: Synthetic oligonucleotide
  Sense strand starting at position 626 of SEQ ID NO: 1561436
cuuuaaggucuaugaagug

SEQ ID NO: 1671798 - RNA, 19 nt, Artificial Sequence
  Description of Artificial Sequence: Synthetic oligonucleotide
  Antisense strand to SEQ ID NO: 1671797
cacuucauagaccuuaaag

SEQ ID NO: 1671799 - RNA, 19 nt, Artificial Sequence
  Description of Artificial Sequence: Synthetic oligonucleotide
  Sense strand starting at position 636 of SEQ ID NO: 1561436
uaugaaguguguuuacaau

SEQ ID NO: 1671800 - RNA, 19 nt, Artificial Sequence
  Description of Artificial Sequence: Synthetic oligonucleotide
  Antisense strand to SEQ ID NO: 1671799
auuguaaacacacuucaua

SEQ ID NO: 1671801 - RNA, 19 nt, Artificial Sequence
  Description of Artificial Sequence: Synthetic oligonucleotide
  Sense strand starting at position 692 of SEQ ID NO: 1561436
aggauauuauuguccaccu

SEQ ID NO: 1671802 - RNA, 19 nt, Artificial Sequence
  Description of Artificial Sequence: Synthetic oligonucleotide
  Antisense strand to SEQ ID NO: 1671801
agguggacaauaauauccu

SEQ ID NO: 1671803 - RNA, 19 nt, Artificial Sequence
  Description of Artificial Sequence: Synthetic oligonucleotide
  Sense strand starting at position 919 of SEQ ID NO: 1561436
uagaaugaguguucuguuu

SEQ ID NO: 1671804 - RNA, 19 nt, Artificial Sequence
  Description of Artificial Sequence: Synthetic oligonucleotide
  Antisense strand to SEQ ID NO: 1671803
aaacagaacacucauucua

SEQ ID NO: 1671805 - RNA, 19 nt, Artificial Sequence
  Description of Artificial Sequence: Synthetic oligonucleotide
  Sense strand starting at position 1560 of SEQ ID NO: 1561436
aaaggugacuguucccuaa

SEQ ID NO: 1671806 - RNA, 19 nt, Artificial Sequence
  Description of Artificial Sequence: Synthetic oligonucleotide
  Antisense strand to SEQ ID NO: 1671805
uuagggaacagucaccuuu

SEQ ID NO: 1671807 - RNA, 19 nt, Artificial Sequence
  Description of Artificial Sequence: Synthetic oligonucleotide
  Sense strand starting at position 1562 of SEQ ID NO: 1561436
aggugacuguucccuaagu

SEQ ID NO: 1671808 - RNA, 19 nt, Artificial Sequence
  Description of Artificial Sequence: Synthetic oligonucleotide
  Antisense strand to SEQ ID NO: 1671807
acuuagggaacagucaccu

SEQ ID NO: 1671809 - RNA, 19 nt, Artificial Sequence
  Description of Artificial Sequence: Synthetic oligonucleotide
  Sense strand starting at position 1563 of SEQ ID NO: 1561436
ggugacuguucccuaaguc

SEQ ID NO: 1671810 - RNA, 19 nt, Artificial Sequence
  Description of Artificial Sequence: Synthetic oligonucleotide
  Antisense strand to SEQ ID NO: 1671809
gacuuagggaacagucacc

SEQ ID NO: 1671811 - RNA, 19 nt, Artificial Sequence
  Description of Artificial Sequence: Synthetic oligonucleotide
  Sense strand starting at position 1564 of SEQ ID NO: 1561436
gugacuguucccuaaguca

SEQ ID NO: 1671812 - RNA, 19 nt, Artificial Sequence
  Description of Artificial Sequence: Synthetic oligonucleotide
  Antisense strand to SEQ ID NO: 1671811
ugacuuagggaacagucac

SEQ ID NO: 1671813 - RNA, 19 nt, Artificial Sequence
  Description of Artificial Sequence: Synthetic oligonucleotide
  Sense strand starting at position 1753 of SEQ ID NO: 1561436
cuguccuucccggaguaca

SEQ ID NO: 1671814 - RNA, 19 nt, Artificial Sequence
  Description of Artificial Sequence: Synthetic oligonucleotide
  Antisense strand to SEQ ID NO: 1671813
uguacuccgggaaggacag

SEQ ID NO: 1671815 - RNA, 19 nt, Artificial Sequence
  Description of Artificial Sequence: Synthetic oligonucleotide
  Sense strand starting at position 1772 of SEQ ID NO: 1561436
gggacaaggugucuaaguu

SEQ ID NO: 1671816 - RNA, 19 nt, Artificial Sequence
  Description of Artificial Sequence: Synthetic oligonucleotide
  Antisense strand to SEQ ID NO: 1671815
aacuuagacaccuuguccc

SEQ ID NO: 1671817 - RNA, 19 nt, Artificial Sequence
  Description of Artificial Sequence: Synthetic oligonucleotide
  Sense strand starting at position 1773 of SEQ ID NO: 1561436
ggacaaggugucuaaguug

SEQ ID NO: 1671818 - RNA, 19 nt, Artificial Sequence
  Description of Artificial Sequence: Synthetic oligonucleotide
  Antisense strand to SEQ ID NO: 1671817
caacuuagacaccuugucc

SEQ ID NO: 1671819 - RNA, 19 nt, Artificial Sequence
  Description of Artificial Sequence: Synthetic oligonucleotide
  Sense strand starting at position 1948 of SEQ ID NO: 1561436
aggugcauuucugauggga

SEQ ID NO: 1671820 - RNA, 19 nt, Artificial Sequence
  Description of Artificial Sequence: Synthetic oligonucleotide
  Antisense strand to SEQ ID NO: 1671819
ucccaucagaaaugcaccu

SEQ ID NO: 1671821 - RNA, 19 nt, Artificial Sequence
  Description of Artificial Sequence: Synthetic oligonucleotide
  Sense strand starting at position 2117 of SEQ ID NO: 1561436
gaaugaaaguuauuaggug

SEQ ID NO: 1671822 - RNA, 19 nt, Artificial Sequence
  Description of Artificial Sequence: Synthetic oligonucleotide
  Antisense strand to SEQ ID NO: 1671821
caccuaauaacuuucauuc

SEQ ID NO: 1671823 - RNA, 19 nt, Artificial Sequence
  Description of Artificial Sequence: Synthetic oligonucleotide
  Sense strand starting at position 2121 of SEQ ID NO: 1561436
gaaaguuauuagguggcaa

SEQ ID NO: 1671824 - RNA, 19 nt, Artificial Sequence
  Description of Artificial Sequence: Synthetic oligonucleotide
  Antisense strand to SEQ ID NO: 1671823
uugccaccuaauaacuuuc

SEQ ID NO: 1671825 - RNA, 19 nt, Artificial Sequence
  Description of Artificial Sequence: Synthetic oligonucleotide
  Sense strand starting at position 2255 of SEQ ID NO: 1561436
ccaggugccucaucuguaa

SEQ ID NO: 1671826 - RNA, 19 nt, Artificial Sequence
  Description of Artificial Sequence: Synthetic oligonucleotide
  Antisense strand to SEQ ID NO: 1671825
uuacagaugaggcaccugg

SEQ ID NO: 1671827 - RNA, 19 nt, Artificial Sequence
  Description of Artificial Sequence: Synthetic oligonucleotide
  Sense strand starting at position 2259 of SEQ ID NO: 1561436
gugccucaucuguaaacug

SEQ ID NO: 1671828 - RNA, 19 nt, Artificial Sequence
  Description of Artificial Sequence: Synthetic oligonucleotide
  Antisense strand to SEQ ID NO: 1671827
caguuuacagaugaggcac

SEQ ID NO: 1671829 - RNA, 19 nt, Artificial Sequence
  Description of Artificial Sequence: Synthetic oligonucleotide
  Sense strand starting at position 2270 of SEQ ID NO: 1561436
guaaacugggcauaagagu

SEQ ID NO: 1671830 - RNA, 19 nt, Artificial Sequence
  Description of Artificial Sequence: Synthetic oligonucleotide
  Antisense strand to SEQ ID NO: 1671829
acucuuaugcccaguuuac

SEQ ID NO: 1671831 - RNA, 19 nt, Artificial Sequence
  Description of Artificial Sequence: Synthetic oligonucleotide
  Sense strand starting at position 2405 of SEQ ID NO: 1561436
acacauagccuaggucaaa

SEQ ID NO: 1671832 - RNA, 19 nt, Artificial Sequence
  Description of Artificial Sequence: Synthetic oligonucleotide
  Antisense strand to SEQ ID NO: 1671831
uuugaccuaggcuaugugu

SEQ ID NO: 1671833 - RNA, 19 nt, Artificial Sequence
  Description of Artificial Sequence: Synthetic oligonucleotide
  Sense strand starting at position 2463 of SEQ ID NO: 1561436
cucaaugcuggagguguaa

SEQ ID NO: 1671834 - RNA, 19 nt, Artificial Sequence
  Description of Artificial Sequence: Synthetic oligonucleotide
  Antisense strand to SEQ ID NO: 1671833
uuacaccuccagcauugag

SEQ ID NO: 1671835 - RNA, 19 nt, Artificial Sequence
  Description of Artificial Sequence: Synthetic oligonucleotide
  Sense strand starting at position 2754 of SEQ ID NO: 1561436
cugugaagcacuugaaaug

SEQ ID NO: 1671836 - RNA, 19 nt, Artificial Sequence
  Description of Artificial Sequence: Synthetic oligonucleotide
  Antisense strand to SEQ ID NO: 1671835
cauuucaagugcuucacag

SEQ ID NO: 1671837 - RNA, 19 nt, Artificial Sequence
  Description of Artificial Sequence: Synthetic oligonucleotide
  Sense strand starting at position 2755 of SEQ ID NO: 1561436
ugugaagcacuugaaaugu

SEQ ID NO: 1671838 - RNA, 19 nt, Artificial Sequence
  Description of Artificial Sequence: Synthetic oligonucleotide
  Antisense strand to SEQ ID NO: 1671837
acauuucaagugcuucaca

SEQ ID NO: 1671839 - RNA, 19 nt, Artificial Sequence
  Description of Artificial Sequence: Synthetic oligonucleotide
  Sense strand starting at position 2766 of SEQ ID NO: 1561436
ugaaauguggcuggcuuga

SEQ ID NO: 1671840 - RNA, 19 nt, Artificial Sequence
  Description of Artificial Sequence: Synthetic oligonucleotide
  Antisense strand to SEQ ID NO: 1671839
ucaagccagccacauuuca

SEQ ID NO: 1671841 - RNA, 19 nt, Artificial Sequence
  Description of Artificial Sequence: Synthetic oligonucleotide
  Sense strand starting at position 3005 of SEQ ID NO: 1561436
gauucuacugccugagcau

SEQ ID NO: 1671842 - RNA, 19 nt, Artificial Sequence
  Description of Artificial Sequence: Synthetic oligonucleotide
  Antisense strand to SEQ ID NO: 1671841
augcucaggcaguagaauc

SEQ ID NO: 1671843 - RNA, 19 nt, Artificial Sequence
  Description of Artificial Sequence: Synthetic oligonucleotide
  Sense strand starting at position 3196 of SEQ ID NO: 1561436
ccagccuggaaugguaaua

SEQ ID NO: 1671844 - RNA, 19 nt, Artificial Sequence
  Description of Artificial Sequence: Synthetic oligonucleotide
  Antisense strand to SEQ ID NO: 1671843
uauuaccauuccaggcugg

SEQ ID NO: 1671845 - RNA, 19 nt, Artificial Sequence
  Description of Artificial Sequence: Synthetic oligonucleotide
  Sense strand starting at position 3218 of SEQ ID NO: 1561436
uccauauaaugggcuaaau

SEQ ID NO: 1671846 - RNA, 19 nt, Artificial Sequence
  Description of Artificial Sequence: Synthetic oligonucleotide
  Antisense strand to SEQ ID NO: 1671845
auuuagcccauuauaugga

SEQ ID NO: 1671847 - RNA, 19 nt, Artificial Sequence
  Description of Artificial Sequence: Synthetic oligonucleotide
  Sense strand starting at position 3229 of SEQ ID NO: 1561436
ggcuaaaugcaacauguua

SEQ ID NO: 1671848 - RNA, 19 nt, Artificial Sequence
  Description of Artificial Sequence: Synthetic oligonucleotide
  Antisense strand to SEQ ID NO: 1671847
uaacauguugcauuuagcc

SEQ ID NO: 1671849 - RNA, 19 nt, Artificial Sequence
  Description of Artificial Sequence: Synthetic oligonucleotide
  Sense strand starting at position 3280 of SEQ ID NO: 1561436
uguggcuccuaggaaauuu

SEQ ID NO: 1671850 - RNA, 19 nt, Artificial Sequence
  Description of Artificial Sequence: Synthetic oligonucleotide
  Antisense strand to SEQ ID NO: 1671849
aaauuuccuaggagccaca

SEQ ID NO: 1671851 - RNA, 19 nt, Artificial Sequence
  Description of Artificial Sequence: Synthetic oligonucleotide
  Sense strand starting at position 3300 of SEQ ID NO: 1561436
gauuauauauggcucguau

SEQ ID NO: 1671852 - RNA, 19 nt, Artificial Sequence
  Description of Artificial Sequence: Synthetic oligonucleotide
  Antisense strand to SEQ ID NO: 1671851
auacgagccauauauaauc

SEQ ID NO: 1671853 - RNA, 19 nt, Artificial Sequence
  Description of Artificial Sequence: Synthetic oligonucleotide
  Sense strand starting at position 3390 of SEQ ID NO: 1561436
ggccuugaguucccaggaa

SEQ ID NO: 1671854 - RNA, 19 nt, Artificial Sequence
  Description of Artificial Sequence: Synthetic oligonucleotide
  Antisense strand to SEQ ID NO: 1671853
uuccugggaacucaaggcc

SEQ ID NO: 1671855 - RNA, 19 nt, Artificial Sequence
  Description of Artificial Sequence: Synthetic oligonucleotide
  Sense strand starting at position 3521 of SEQ ID NO: 1561436
gccagugagagaugacaaa

SEQ ID NO: 1671856 - RNA, 19 nt, Artificial Sequence
  Description of Artificial Sequence: Synthetic oligonucleotide
  Antisense strand to SEQ ID NO: 1671855
uuugucaucucucacuggc

SEQ ID NO: 1671857 - RNA, 19 nt, Artificial Sequence
  Description of Artificial Sequence: Synthetic oligonucleotide
  Sense strand starting at position 3541 of SEQ ID NO: 1561436
cugagcauucuacaagucu

SEQ ID NO: 1671858 - RNA, 19 nt, Artificial Sequence
  Description of Artificial Sequence: Synthetic oligonucleotide
  Antisense strand to SEQ ID NO: 1671857
agacuuguagaaugcucag

SEQ ID NO: 1671859 - RNA, 19 nt, Artificial Sequence
  Description of Artificial Sequence: Synthetic oligonucleotide
  Sense strand starting at position 3600 of SEQ ID NO: 1561436
agaaacaagccucgaagau

SEQ ID NO: 1671860 - RNA, 19 nt, Artificial Sequence
  Description of Artificial Sequence: Synthetic oligonucleotide
  Antisense strand to SEQ ID NO: 1671859
aucuucgaggcuuguuucu

SEQ ID NO: 1671861 - RNA, 19 nt, Artificial Sequence
  Description of Artificial Sequence: Synthetic oligonucleotide
  Sense strand starting at position 3626 of SEQ ID NO: 1561436
agaauaucaucaguggacu

SEQ ID NO: 1671862 - RNA, 19 nt, Artificial Sequence
  Description of Artificial Sequence: Synthetic oligonucleotide
  Antisense strand to SEQ ID NO: 1671861
aguccacugaugauauucu

SEQ ID NO: 1671863 - RNA, 19 nt, Artificial Sequence
  Description of Artificial Sequence: Synthetic oligonucleotide
  Sense strand starting at position 3627 of SEQ ID NO: 1561436
gaauaucaucaguggacua

SEQ ID NO: 1671864 - RNA, 19 nt, Artificial Sequence
  Description of Artificial Sequence: Synthetic oligonucleotide
  Antisense strand to SEQ ID NO: 1671863
uaguccacugaugauauuc

SEQ ID NO: 1671865 - RNA, 19 nt, Artificial Sequence
  Description of Artificial Sequence: Synthetic oligonucleotide
  Sense strand starting at position 115 of SEQ ID NO: 1561437
ggguuagccacuugaaaua

SEQ ID NO: 1671866 - RNA, 19 nt, Artificial Sequence
  Description of Artificial Sequence: Synthetic oligonucleotide
  Antisense strand to SEQ ID NO: 1671865
uauuucaaguggcuaaccc

SEQ ID NO: 1671867 - RNA, 19 nt, Artificial Sequence
  Description of Artificial Sequence: Synthetic oligonucleotide
  Sense strand starting at position 148 of SEQ ID NO: 1561437
ggcagagcagcauagucau

SEQ ID NO: 1671868 - RNA, 19 nt, Artificial Sequence
  Description of Artificial Sequence: Synthetic oligonucleotide
  Antisense strand to SEQ ID NO: 1671867
augacuaugcugcucugcc

SEQ ID NO: 1671869 - RNA, 19 nt, Artificial Sequence
  Description of Artificial Sequence: Synthetic oligonucleotide
  Sense strand starting at position 151 of SEQ ID NO: 1561437
agagcagcauagucauaau

SEQ ID NO: 1671870 - RNA, 19 nt, Artificial Sequence
  Description of Artificial Sequence: Synthetic oligonucleotide
  Antisense strand to SEQ ID NO: 1671869
auuaugacuaugcugcucu

SEQ ID NO: 1671871 - RNA, 19 nt, Artificial Sequence
  Description of Artificial Sequence: Synthetic oligonucleotide
  Sense strand starting at position 182 of SEQ ID NO: 1561437
agaagagucaccugaggug

SEQ ID NO: 1671872 - RNA, 19 nt, Artificial Sequence
  Description of Artificial Sequence: Synthetic oligonucleotide
  Antisense strand to SEQ ID NO: 1671871
caccucaggugacucuucu

SEQ ID NO: 1671873 - RNA, 19 nt, Artificial Sequence
  Description of Artificial Sequence: Synthetic oligonucleotide
  Sense strand starting at position 255 of SEQ ID NO: 1561437
acuucugggccucacagau

SEQ ID NO: 1671874 - RNA, 19 nt, Artificial Sequence
  Description of Artificial Sequence: Synthetic oligonucleotide
  Antisense strand to SEQ ID NO: 1671873
aucugugaggcccagaagu

SEQ ID NO: 1671875 - RNA, 19 nt, Artificial Sequence
  Description of Artificial Sequence: Synthetic oligonucleotide
  Sense strand starting at position 300 of SEQ ID NO: 1561437
acgagcuaucacuaccuuu

SEQ ID NO: 1671876 - RNA, 19 nt, Artificial Sequence
  Description of Artificial Sequence: Synthetic oligonucleotide
  Antisense strand to SEQ ID NO: 1671875
aaagguagugauagcucgu

SEQ ID NO: 1671877 - RNA, 19 nt, Artificial Sequence
  Description of Artificial Sequence: Synthetic oligonucleotide
  Sense strand starting at position 336 of SEQ ID NO: 1561437
caacaaguaucccugaggu

SEQ ID NO: 1671878 - RNA, 19 nt, Artificial Sequence
  Description of Artificial Sequence: Synthetic oligonucleotide
  Antisense strand to SEQ ID NO: 1671877
accucagggauacuuguug

SEQ ID NO: 1671879 - RNA, 19 nt, Artificial Sequence
  Description of Artificial Sequence: Synthetic oligonucleotide
  Sense strand starting at position 338 of SEQ ID NO: 1561437
acaaguaucccugagguca

SEQ ID NO: 1671880 - RNA, 19 nt, Artificial Sequence
  Description of Artificial Sequence: Synthetic oligonucleotide
  Antisense strand to SEQ ID NO: 1671879
ugaccucagggauacuugu

SEQ ID NO: 1671881 - RNA, 19 nt, Artificial Sequence
  Description of Artificial Sequence: Synthetic oligonucleotide
  Sense strand starting at position 398 of SEQ ID NO: 1561437
gcagguuguagccaugaga

SEQ ID NO: 1671882 - RNA, 19 nt, Artificial Sequence
  Description of Artificial Sequence: Synthetic oligonucleotide
  Antisense strand to SEQ ID NO: 1671881
ucucauggcuacaaccugc

SEQ ID NO: 1671883 - RNA, 19 nt, Artificial Sequence
  Description of Artificial Sequence: Synthetic oligonucleotide
  Sense strand starting at position 401 of SEQ ID NO: 1561437
gguuguagccaugagaaca

SEQ ID NO: 1671884 - RNA, 19 nt, Artificial Sequence
  Description of Artificial Sequence: Synthetic oligonucleotide
  Antisense strand to SEQ ID NO: 1671883
uguucucauggcuacaacc

SEQ ID NO: 1671885 - RNA, 19 nt, Artificial Sequence
  Description of Artificial Sequence: Synthetic oligonucleotide
  Sense strand starting at position 492 of SEQ ID NO: 1561437
ugucccaagacauguguca

SEQ ID NO: 1671886 - RNA, 19 nt, Artificial Sequence
  Description of Artificial Sequence: Synthetic oligonucleotide
  Antisense strand to SEQ ID NO: 1671885
ugacacaugucuugggaca

SEQ ID NO: 1671887 - RNA, 19 nt, Artificial Sequence
  Description of Artificial Sequence: Synthetic oligonucleotide
  Sense strand starting at position 499 of SEQ ID NO: 1561437
agacaugugucagcuggua

SEQ ID NO: 1671888 - RNA, 19 nt, Artificial Sequence
  Description of Artificial Sequence: Synthetic oligonucleotide
  Antisense strand to SEQ ID NO: 1671887
uaccagcugacacaugucu

SEQ ID NO: 1671889 - RNA, 19 nt, Artificial Sequence
  Description of Artificial Sequence: Synthetic oligonucleotide
  Sense strand starting at position 501 of SEQ ID NO: 1561437
acaugugucagcugguaua

SEQ ID NO: 1671890 - RNA, 19 nt, Artificial Sequence
  Description of Artificial Sequence: Synthetic oligonucleotide
  Antisense strand to SEQ ID NO: 1671889
uauaccagcugacacaugu

SEQ ID NO: 1671891 - RNA, 19 nt, Artificial Sequence
  Description of Artificial Sequence: Synthetic oligonucleotide
  Sense strand starting at position 722 of SEQ ID NO: 1561437
aaccauugcgggcaaagaa

SEQ ID NO: 1671892 - RNA, 19 nt, Artificial Sequence
  Description of Artificial Sequence: Synthetic oligonucleotide
  Antisense strand to SEQ ID NO: 1671891
uucuuugcccgcaaugguu

SEQ ID NO: 1671893 - RNA, 19 nt, Artificial Sequence
  Description of Artificial Sequence: Synthetic oligonucleotide
  Sense strand starting at position 777 of SEQ ID NO: 1561437
aguuguuaguuucugauac

SEQ ID NO: 1671894 - RNA, 19 nt, Artificial Sequence
  Description of Artificial Sequence: Synthetic oligonucleotide
  Antisense strand to SEQ ID NO: 1671893
guaucagaaacuaacaacu

SEQ ID NO: 1671895 - RNA, 19 nt, Artificial Sequence
  Description of Artificial Sequence: Synthetic oligonucleotide
  Sense strand starting at position 918 of SEQ ID NO: 1561437
guuaaauaaugccugccaa

SEQ ID NO: 1671896 - RNA, 19 nt, Artificial Sequence
  Description of Artificial Sequence: Synthetic oligonucleotide
  Antisense strand to SEQ ID NO: 1671895
uuggcaggcauuauuuaac

SEQ ID NO: 1671897 - RNA, 19 nt, Artificial Sequence
  Description of Artificial Sequence: Synthetic oligonucleotide
  Sense strand starting at position 955 of SEQ ID NO: 1561437
ucuuuaugaucagcuguca

SEQ ID NO: 1671898 - RNA, 19 nt, Artificial Sequence
  Description of Artificial Sequence: Synthetic oligonucleotide
  Antisense strand to SEQ ID NO: 1671897
ugacagcugaucauaaaga

SEQ ID NO: 1671899 - RNA, 19 nt, Artificial Sequence
  Description of Artificial Sequence: Synthetic oligonucleotide
  Sense strand starting at position 966 of SEQ ID NO: 1561437
agcugucacucuuugcaau

SEQ ID NO: 1671900 - RNA, 19 nt, Artificial Sequence
  Description of Artificial Sequence: Synthetic oligonucleotide
  Antisense strand to SEQ ID NO: 1671899
auugcaaagagugacagcu

SEQ ID NO: 1671901 - RNA, 19 nt, Artificial Sequence
  Description of Artificial Sequence: Synthetic oligonucleotide
  Sense strand starting at position 967 of SEQ ID NO: 1561437
gcugucacucuuugcaauu

SEQ ID NO: 1671902 - RNA, 19 nt, Artificial Sequence
  Description of Artificial Sequence: Synthetic oligonucleotide
  Antisense strand to SEQ ID NO: 1671901
aauugcaaagagugacagc

SEQ ID NO: 1671903 - RNA, 19 nt, Artificial Sequence
  Description of Artificial Sequence: Synthetic oligonucleotide
  Sense strand starting at position 980 of SEQ ID NO: 1561437
gcaauuauuucguuucucu

SEQ ID NO: 1671904 - RNA, 19 nt, Artificial Sequence
  Description of Artificial Sequence: Synthetic oligonucleotide
  Antisense strand to SEQ ID NO: 1671903
agagaaacgaaauaauugc

SEQ ID NO: 1671905 - RNA, 19 nt, Artificial Sequence
  Description of Artificial Sequence: Synthetic oligonucleotide
  Sense strand starting at position 1029 of SEQ ID NO: 1561437
acggcaagcuucuuuaaua

SEQ ID NO: 1671906 - RNA, 19 nt, Artificial Sequence
  Description of Artificial Sequence: Synthetic oligonucleotide
  Antisense strand to SEQ ID NO: 1671905
uauuaaagaagcuugccgu

SEQ ID NO: 1671907 - RNA, 19 nt, Artificial Sequence
  Description of Artificial Sequence: Synthetic oligonucleotide
  Sense strand starting at position 1030 of SEQ ID NO: 1561437
cggcaagcuucuuuaauau

SEQ ID NO: 1671908 - RNA, 19 nt, Artificial Sequence
  Description of Artificial Sequence: Synthetic oligonucleotide
  Antisense strand to SEQ ID NO: 1671907
auauuaaagaagcuugccg

SEQ ID NO: 1671909 - RNA, 19 nt, Artificial Sequence
  Description of Artificial Sequence: Synthetic oligonucleotide
  Sense strand starting at position 1039 of SEQ ID NO: 1561437
ucuuuaauaucgucagauu

SEQ ID NO: 1671910 - RNA, 19 nt, Artificial Sequence
  Description of Artificial Sequence: Synthetic oligonucleotide
  Antisense strand to SEQ ID NO: 1671909
aaucugacgauauuaaaga

SEQ ID NO: 1671911 - RNA, 19 nt, Artificial Sequence
  Description of Artificial Sequence: Synthetic oligonucleotide
  Sense strand starting at position 1040 of SEQ ID NO: 1561437
cuuuaauaucgucagauuc

SEQ ID NO: 1671912 - RNA, 19 nt, Artificial Sequence
  Description of Artificial Sequence: Synthetic oligonucleotide
  Antisense strand to SEQ ID NO: 1671911
gaaucugacgauauuaaag

SEQ ID NO: 1671913 - RNA, 19 nt, Artificial Sequence
  Description of Artificial Sequence: Synthetic oligonucleotide
  Sense strand starting at position 1048 of SEQ ID NO: 1561437
ucgucagauucucuauaca

SEQ ID NO: 1671914 - RNA, 19 nt, Artificial Sequence
  Description of Artificial Sequence: Synthetic oligonucleotide
  Antisense strand to SEQ ID NO: 1671913
uguauagagaaucugacga

SEQ ID NO: 1671915 - RNA, 19 nt, Artificial Sequence
  Description of Artificial Sequence: Synthetic oligonucleotide
  Sense strand starting at position 1207 of SEQ ID NO: 1561437
ggcaguguucaaggcaaag

SEQ ID NO: 1671916 - RNA, 19 nt, Artificial Sequence
  Description of Artificial Sequence: Synthetic oligonucleotide
  Antisense strand to SEQ ID NO: 1671915
cuuugccuugaacacugcc

SEQ ID NO: 1671917 - RNA, 19 nt, Artificial Sequence
  Description of Artificial Sequence: Synthetic oligonucleotide
  Sense strand starting at position 1501 of SEQ ID NO: 1561437
acggccacuucucuuaaau

SEQ ID NO: 1671918 - RNA, 19 nt, Artificial Sequence
  Description of Artificial Sequence: Synthetic oligonucleotide
  Antisense strand to SEQ ID NO: 1671917
auuuaagagaaguggccgu

SEQ ID NO: 1671919 - RNA, 19 nt, Artificial Sequence
  Description of Artificial Sequence: Synthetic oligonucleotide
  Sense strand starting at position 2049 of SEQ ID NO: 1561437
cgcccuggcccgcagaaau

SEQ ID NO: 1671920 - RNA, 19 nt, Artificial Sequence
  Description of Artificial Sequence: Synthetic oligonucleotide
  Antisense strand to SEQ ID NO: 1671919
auuucugcgggccagggcg

SEQ ID NO: 1671921 - RNA, 19 nt, Artificial Sequence
  Description of Artificial Sequence: Synthetic oligonucleotide
  Sense strand starting at position 2083 of SEQ ID NO: 1561437
ccgucauuggccuagaguc

SEQ ID NO: 1671922 - RNA, 19 nt, Artificial Sequence
  Description of Artificial Sequence: Synthetic oligonucleotide
  Antisense strand to SEQ ID NO: 1671921
gacucuaggccaaugacgg

SEQ ID NO: 1671923 - RNA, 19 nt, Artificial Sequence
  Description of Artificial Sequence: Synthetic oligonucleotide
  Sense strand starting at position 2122 of SEQ ID NO: 1561437
gugccuucugaguaaggca

SEQ ID NO: 1671924 - RNA, 19 nt, Artificial Sequence
  Description of Artificial Sequence: Synthetic oligonucleotide
  Antisense strand to SEQ ID NO: 1671923
ugccuuacucagaaggcac

SEQ ID NO: 1671925 - RNA, 19 nt, Artificial Sequence
  Description of Artificial Sequence: Synthetic oligonucleotide
  Sense strand starting at position 2263 of SEQ ID NO: 1561437
gucgaaagguccuuucuag

SEQ ID NO: 1671926 - RNA, 19 nt, Artificial Sequence
  Description of Artificial Sequence: Synthetic oligonucleotide
  Antisense strand to SEQ ID NO: 1671925
cuagaaaggaccuuucgac

SEQ ID NO: 1671927 - RNA, 19 nt, Artificial Sequence
  Description of Artificial Sequence: Synthetic oligonucleotide
  Sense strand starting at position 2270 of SEQ ID NO: 1561437
gguccuuucuagcuuagga

SEQ ID NO: 1671928 - RNA, 19 nt, Artificial Sequence
  Description of Artificial Sequence: Synthetic oligonucleotide
  Antisense strand to SEQ ID NO: 1671927
uccuaagcuagaaaggacc

SEQ ID NO: 1671929 - RNA, 19 nt, Artificial Sequence
  Description of Artificial Sequence: Synthetic oligonucleotide
  Sense strand starting at position 2272 of SEQ ID NO: 1561437
uccuuucuagcuuaggaaa

SEQ ID NO: 1671930 - RNA, 19 nt, Artificial Sequence
  Description of Artificial Sequence: Synthetic oligonucleotide
  Antisense strand to SEQ ID NO: 1671929
uuuccuaagcuagaaagga

SEQ ID NO: 1671931 - RNA, 19 nt, Artificial Sequence
  Description of Artificial Sequence: Synthetic oligonucleotide
  Sense strand starting at position 2384 of SEQ ID NO: 1561437
ucauauauguaaucucagu

SEQ ID NO: 1671932 - RNA, 19 nt, Artificial Sequence
  Description of Artificial Sequence: Synthetic oligonucleotide
  Antisense strand to SEQ ID NO: 1671931
acugagauuacauauauga

SEQ ID NO: 1671933 - RNA, 19 nt, Artificial Sequence
  Description of Artificial Sequence: Synthetic oligonucleotide
  Sense strand starting at position 2582 of SEQ ID NO: 1561437
agguuauaaugagauauga

SEQ ID NO: 1671934 - RNA, 19 nt, Artificial Sequence
  Description of Artificial Sequence: Synthetic oligonucleotide
  Antisense strand to SEQ ID NO: 1671933
ucauaucucauuauaaccu

SEQ ID NO: 1671935 - RNA, 19 nt, Artificial Sequence
  Description of Artificial Sequence: Synthetic oligonucleotide
  Sense strand starting at position 2639 of SEQ ID NO: 1561437
aucuuauacuggucagagu

SEQ ID NO: 1671936 - RNA, 19 nt, Artificial Sequence
  Description of Artificial Sequence: Synthetic oligonucleotide
  Antisense strand to SEQ ID NO: 1671935
acucugaccaguauaagau

SEQ ID NO: 1671937 - RNA, 19 nt, Artificial Sequence
  Description of Artificial Sequence: Synthetic oligonucleotide
  Sense strand starting at position 2938 of SEQ ID NO: 1561437
uguccaucgacagaugauu

SEQ ID NO: 1671938 - RNA, 19 nt, Artificial Sequence
  Description of Artificial Sequence: Synthetic oligonucleotide
  Antisense strand to SEQ ID NO: 1671937
aaucaucugucgauggaca

SEQ ID NO: 1671939 - RNA, 19 nt, Artificial Sequence
  Description of Artificial Sequence: Synthetic oligonucleotide
  Sense strand starting at position 2946 of SEQ ID NO: 1561437
gacagaugauuggauaaag

SEQ ID NO: 1671940 - RNA, 19 nt, Artificial Sequence
  Description of Artificial Sequence: Synthetic oligonucleotide
  Antisense strand to SEQ ID NO: 1671939
cuuuauccaaucaucuguc

SEQ ID NO: 1671941 - RNA, 19 nt, Artificial Sequence
  Description of Artificial Sequence: Synthetic oligonucleotide
  Sense strand starting at position 3457 of SEQ ID NO: 1561437
gugguagcuaaaugaugua

SEQ ID NO: 1671942 - RNA, 19 nt, Artificial Sequence
  Description of Artificial Sequence: Synthetic oligonucleotide
  Antisense strand to SEQ ID NO: 1671941
uacaucauuuagcuaccac

SEQ ID NO: 1671943 - RNA, 19 nt, Artificial Sequence
  Description of Artificial Sequence: Synthetic oligonucleotide
  Sense strand starting at position 3846 of SEQ ID NO: 1561437
ugagccuuggccugugaaa

SEQ ID NO: 1671944 - RNA, 19 nt, Artificial Sequence
  Description of Artificial Sequence: Synthetic oligonucleotide
  Antisense strand to SEQ ID NO: 1671943
uuucacaggccaaggcuca

SEQ ID NO: 1671945 - RNA, 19 nt, Artificial Sequence
  Description of Artificial Sequence: Synthetic oligonucleotide
  Sense strand starting at position 58 of SEQ ID NO: 1561438
aggucugcccaauaucuua

SEQ ID NO: 1671946 - RNA, 19 nt, Artificial Sequence
  Description of Artificial Sequence: Synthetic oligonucleotide
  Antisense strand to SEQ ID NO: 1671945
uaagauauugggcagaccu

SEQ ID NO: 1671947 - RNA, 19 nt, Artificial Sequence
  Description of Artificial Sequence: Synthetic oligonucleotide
  Sense strand starting at position 66 of SEQ ID NO: 1561438
ccaauaucuuauguguuac

SEQ ID NO: 1671948 - RNA, 19 nt, Artificial Sequence
  Description of Artificial Sequence: Synthetic oligonucleotide
  Antisense strand to SEQ ID NO: 1671947
guaacacauaagauauugg

SEQ ID NO: 1671949 - RNA, 19 nt, Artificial Sequence
  Description of Artificial Sequence: Synthetic oligonucleotide
  Sense strand starting at position 81 of SEQ ID NO: 1561438
uuacuaucuuguccugaug

SEQ ID NO: 1671950 - RNA, 19 nt, Artificial Sequence
  Description of Artificial Sequence: Synthetic oligonucleotide
  Antisense strand to SEQ ID NO: 1671949
caucaggacaagauaguaa

SEQ ID NO: 1671951 - RNA, 19 nt, Artificial Sequence
  Description of Artificial Sequence: Synthetic oligonucleotide
  Sense strand starting at position 162 of SEQ ID NO: 1561438
cuuccuugucuggaggcau

SEQ ID NO: 1671952 - RNA, 19 nt, Artificial Sequence
  Description of Artificial Sequence: Synthetic oligonucleotide
  Antisense strand to SEQ ID NO: 1671951
augccuccagacaaggaag

SEQ ID NO: 1671953 - RNA, 19 nt, Artificial Sequence
  Description of Artificial Sequence: Synthetic oligonucleotide
  Sense strand starting at position 330 of SEQ ID NO: 1561438
cugccuugugaggaugcua

SEQ ID NO: 1671954 - RNA, 19 nt, Artificial Sequence
  Description of Artificial Sequence: Synthetic oligonucleotide
  Antisense strand to SEQ ID NO: 1671953
uagcauccucacaaggcag

SEQ ID NO: 1671955 - RNA, 19 nt, Artificial Sequence
  Description of Artificial Sequence: Synthetic oligonucleotide
  Sense strand starting at position 351 of SEQ ID NO: 1561438
agaauuaauugaguugcau

SEQ ID NO: 1671956 - RNA, 19 nt, Artificial Sequence
  Description of Artificial Sequence: Synthetic oligonucleotide
  Antisense strand to SEQ ID NO: 1671955
augcaacucaauuaauucu

SEQ ID NO: 1671957 - RNA, 19 nt, Artificial Sequence
  Description of Artificial Sequence: Synthetic oligonucleotide
  Sense strand starting at position 374 of SEQ ID NO: 1561438
agagcuuaacauuguguua

SEQ ID NO: 1671958 - RNA, 19 nt, Artificial Sequence
  Description of Artificial Sequence: Synthetic oligonucleotide
  Antisense strand to SEQ ID NO: 1671957
uaacacaauguuaagcucu

SEQ ID NO: 1671959 - RNA, 19 nt, Artificial Sequence
  Description of Artificial Sequence: Synthetic oligonucleotide
  Sense strand starting at position 424 of SEQ ID NO: 1561438
uagugauuauacuuggaca

SEQ ID NO: 1671960 - RNA, 19 nt, Artificial Sequence
  Description of Artificial Sequence: Synthetic oligonucleotide
  Antisense strand to SEQ ID NO: 1671959
uguccaaguauaaucacua

SEQ ID NO: 1671961 - RNA, 19 nt, Artificial Sequence
  Description of Artificial Sequence: Synthetic oligonucleotide
  Sense strand starting at position 426 of SEQ ID NO: 1561438
gugauuauacuuggacaua

SEQ ID NO: 1671962 - RNA, 19 nt, Artificial Sequence
  Description of Artificial Sequence: Synthetic oligonucleotide
  Antisense strand to SEQ ID NO: 1671961
uauguccaaguauaaucac

SEQ ID NO: 1671963 - RNA, 19 nt, Artificial Sequence
  Description of Artificial Sequence: Synthetic oligonucleotide
  Sense strand starting at position 583 of SEQ ID NO: 1561438
uccaaucugcuccagguua

SEQ ID NO: 1671964 - RNA, 19 nt, Artificial Sequence
  Description of Artificial Sequence: Synthetic oligonucleotide
  Antisense strand to SEQ ID NO: 1671963
uaaccuggagcagauugga

SEQ ID NO: 1671965 - RNA, 19 nt, Artificial Sequence
  Description of Artificial Sequence: Synthetic oligonucleotide
  Sense strand starting at position 1064 of SEQ ID NO: 1561438
guggacuggccuuaaucuu

SEQ ID NO: 1671966 - RNA, 19 nt, Artificial Sequence
  Description of Artificial Sequence: Synthetic oligonucleotide
  Antisense strand to SEQ ID NO: 1671965
aagauuaaggccaguccac

SEQ ID NO: 1671967 - RNA, 19 nt, Artificial Sequence
  Description of Artificial Sequence: Synthetic oligonucleotide
  Sense strand starting at position 1102 of SEQ ID NO: 1561438
acauguucucugcaagguu

SEQ ID NO: 1671968 - RNA, 19 nt, Artificial Sequence
  Description of Artificial Sequence: Synthetic oligonucleotide
  Antisense strand to SEQ ID NO: 1671967
aaccuugcagagaacaugu

SEQ ID NO: 1671969 - RNA, 19 nt, Artificial Sequence
  Description of Artificial Sequence: Synthetic oligonucleotide
  Sense strand starting at position 1127 of SEQ ID NO: 1561438
ucacguaccauuggaagaa

SEQ ID NO: 1671970 - RNA, 19 nt, Artificial Sequence
  Description of Artificial Sequence: Synthetic oligonucleotide
  Antisense strand to SEQ ID NO: 1671969
uucuuccaaugguacguga

SEQ ID NO: 1671971 - RNA, 19 nt, Artificial Sequence
  Description of Artificial Sequence: Synthetic oligonucleotide
  Sense strand starting at position 1240 of SEQ ID NO: 1561438
guggauaagccgcagaaga

SEQ ID NO: 1671972 - RNA, 19 nt, Artificial Sequence
  Description of Artificial Sequence: Synthetic oligonucleotide
  Antisense strand to SEQ ID NO: 1671971
ucuucugcggcuuauccac

SEQ ID NO: 1671973 - RNA, 19 nt, Artificial Sequence
  Description of Artificial Sequence: Synthetic oligonucleotide
  Sense strand starting at position 1445 of SEQ ID NO: 1561438
guaccugcgagguacuaua

SEQ ID NO: 1671974 - RNA, 19 nt, Artificial Sequence
  Description of Artificial Sequence: Synthetic oligonucleotide
  Antisense strand to SEQ ID NO: 1671973
uauaguaccucgcagguac

SEQ ID NO: 1671975 - RNA, 19 nt, Artificial Sequence
  Description of Artificial Sequence: Synthetic oligonucleotide
  Sense strand starting at position 1571 of SEQ ID NO: 1561438
cggagagaucccgauccca

SEQ ID NO: 1671976 - RNA, 19 nt, Artificial Sequence
  Description of Artificial Sequence: Synthetic oligonucleotide
  Antisense strand to SEQ ID NO: 1671975
ugggaucgggaucucuccg

SEQ ID NO: 1671977 - RNA, 19 nt, Artificial Sequence
  Description of Artificial Sequence: Synthetic oligonucleotide
  Sense strand starting at position 2309 of SEQ ID NO: 1561438
gagcauuccgaguggaagg

SEQ ID NO: 1671978 - RNA, 19 nt, Artificial Sequence
  Description of Artificial Sequence: Synthetic oligonucleotide
  Antisense strand to SEQ ID NO: 1671977
ccuuccacucggaaugcuc

SEQ ID NO: 1671979 - RNA, 19 nt, Artificial Sequence
  Description of Artificial Sequence: Synthetic oligonucleotide
  Sense strand starting at position 2348 of SEQ ID NO: 1561438
gcgauucguccuaggugau

SEQ ID NO: 1671980 - RNA, 19 nt, Artificial Sequence
  Description of Artificial Sequence: Synthetic oligonucleotide
  Antisense strand to SEQ ID NO: 1671979
aucaccuaggacgaaucgc

SEQ ID NO: 1671981 - RNA, 19 nt, Artificial Sequence
  Description of Artificial Sequence: Synthetic oligonucleotide
  Sense strand starting at position 2459 of SEQ ID NO: 1561438
uaccuauugcugcagaagu

SEQ ID NO: 1671982 - RNA, 19 nt, Artificial Sequence
  Description of Artificial Sequence: Synthetic oligonucleotide
  Antisense strand to SEQ ID NO: 1671981
acuucugcagcaauaggua

SEQ ID NO: 1671983 - RNA, 19 nt, Artificial Sequence
  Description of Artificial Sequence: Synthetic oligonucleotide
  Sense strand starting at position 2470 of SEQ ID NO: 1561438
gcagaaguugugggacaga

SEQ ID NO: 1671984 - RNA, 19 nt, Artificial Sequence
  Description of Artificial Sequence: Synthetic oligonucleotide
  Antisense strand to SEQ ID NO: 1671983
ucugucccacaacuucugc

SEQ ID NO: 1671985 - RNA, 19 nt, Artificial Sequence
  Description of Artificial Sequence: Synthetic oligonucleotide
  Sense strand starting at position 2473 of SEQ ID NO: 1561438
gaaguugugggacagaguu

SEQ ID NO: 1671986 - RNA, 19 nt, Artificial Sequence
  Description of Artificial Sequence: Synthetic oligonucleotide
  Antisense strand to SEQ ID NO: 1671985
aacucugucccacaacuuc

SEQ ID NO: 1671987 - RNA, 19 nt, Artificial Sequence
  Description of Artificial Sequence: Synthetic oligonucleotide
  Sense strand starting at position 2496 of SEQ ID NO: 1561438
uauuauaaauggucugaug

SEQ ID NO: 1671988 - RNA, 19 nt, Artificial Sequence
  Description of Artificial Sequence: Synthetic oligonucleotide
  Antisense strand to SEQ ID NO: 1671987
caucagaccauuuauaaua

SEQ ID NO: 1671989 - RNA, 19 nt, Artificial Sequence
  Description of Artificial Sequence: Synthetic oligonucleotide
  Sense strand starting at position 2498 of SEQ ID NO: 1561438
uuauaaauggucugauguu

SEQ ID NO: 1671990 - RNA, 19 nt, Artificial Sequence
  Description of Artificial Sequence: Synthetic oligonucleotide
  Antisense strand to SEQ ID NO: 1671989
aacaucagaccauuuauaa

SEQ ID NO: 1671991 - RNA, 19 nt, Artificial Sequence
  Description of Artificial Sequence: Synthetic oligonucleotide
  Sense strand starting at position 2596 of SEQ ID NO: 1561438
acaggaaacuuuccuacga

SEQ ID NO: 1671992 - RNA, 19 nt, Artificial Sequence
  Description of Artificial Sequence: Synthetic oligonucleotide
  Antisense strand to SEQ ID NO: 1671991
ucguaggaaaguuuccugu

SEQ ID NO: 1671993 - RNA, 19 nt, Artificial Sequence
  Description of Artificial Sequence: Synthetic oligonucleotide
  Sense strand starting at position 2733 of SEQ ID NO: 1561438
ugucgauagcuuuacccaa

SEQ ID NO: 1671994 - RNA, 19 nt, Artificial Sequence
  Description of Artificial Sequence: Synthetic oligonucleotide
  Antisense strand to SEQ ID NO: 1671993
uuggguaaagcuaucgaca

SEQ ID NO: 1671995 - RNA, 19 nt, Artificial Sequence
  Description of Artificial Sequence: Synthetic oligonucleotide
  Sense strand starting at position 2735 of SEQ ID NO: 1561438
ucgauagcuuuacccaaca

SEQ ID NO: 1671996 - RNA, 19 nt, Artificial Sequence
  Description of Artificial Sequence: Synthetic oligonucleotide
  Antisense strand to SEQ ID NO: 1671995
uguuggguaaagcuaucga

SEQ ID NO: 1671997 - RNA, 19 nt, Artificial Sequence
  Description of Artificial Sequence: Synthetic oligonucleotide
  Sense strand starting at position 2811 of SEQ ID NO: 1561438
uagauucuuccgggaaauc

SEQ ID NO: 1671998 - RNA, 19 nt, Artificial Sequence
  Description of Artificial Sequence: Synthetic oligonucleotide
  Antisense strand to SEQ ID NO: 1671997
gauuucccggaagaaucua

SEQ ID NO: 1671999 - RNA, 19 nt, Artificial Sequence
  Description of Artificial Sequence: Synthetic oligonucleotide
  Sense strand starting at position 2901 of SEQ ID NO: 1561438
gugugaauuaggcaaggau

SEQ ID NO: 1672000 - RNA, 19 nt, Artificial Sequence
  Description of Artificial Sequence: Synthetic oligonucleotide
  Antisense strand to SEQ ID NO: 1671999
auccuugccuaauucacac

SEQ ID NO: 1672001 - RNA, 19 nt, Artificial Sequence
  Description of Artificial Sequence: Synthetic oligonucleotide
  Sense strand starting at position 2904 of SEQ ID NO: 1561438
ugaauuaggcaaggauauu

SEQ ID NO: 1672002 - RNA, 19 nt, Artificial Sequence
  Description of Artificial Sequence: Synthetic oligonucleotide
  Antisense strand to SEQ ID NO: 1672001
aauauccuugccuaauuca

SEQ ID NO: 1672003 - RNA, 19 nt, Artificial Sequence
  Description of Artificial Sequence: Synthetic oligonucleotide
  Sense strand starting at position 2915 of SEQ ID NO: 1561438
aggauauucuggccaagga

SEQ ID NO: 1672004 - RNA, 19 nt, Artificial Sequence
  Description of Artificial Sequence: Synthetic oligonucleotide
  Antisense strand to SEQ ID NO: 1672003
uccuuggccagaauauccu

SEQ ID NO: 1672005 - RNA, 19 nt, Artificial Sequence
  Description of Artificial Sequence: Synthetic oligonucleotide
  Sense strand starting at position 2919 of SEQ ID NO: 1561438
uauucuggccaaggagaaa

SEQ ID NO: 1672006 - RNA, 19 nt, Artificial Sequence
  Description of Artificial Sequence: Synthetic oligonucleotide
  Antisense strand to SEQ ID NO: 1672005
uuucuccuuggccagaaua

SEQ ID NO: 1672007 - RNA, 19 nt, Artificial Sequence
  Description of Artificial Sequence: Synthetic oligonucleotide
  Sense strand starting at position 3324 of SEQ ID NO: 1561438
auaagauagcaaugugucu

SEQ ID NO: 1672008 - RNA, 19 nt, Artificial Sequence
  Description of Artificial Sequence: Synthetic oligonucleotide
  Antisense strand to SEQ ID NO: 1672007
agacacauugcuaucuuau

SEQ ID NO: 1672009 - RNA, 19 nt, Artificial Sequence
  Description of Artificial Sequence: Synthetic oligonucleotide
  Sense strand starting at position 3359 of SEQ ID NO: 1561438
cgugaugucuguaugugau

SEQ ID NO: 1672010 - RNA, 19 nt, Artificial Sequence
  Description of Artificial Sequence: Synthetic oligonucleotide
  Antisense strand to SEQ ID NO: 1672009
aucacauacagacaucacg

SEQ ID NO: 1672011 - RNA, 19 nt, Artificial Sequence
  Description of Artificial Sequence: Synthetic oligonucleotide
  Sense strand starting at position 3369 of SEQ ID NO: 1561438
guaugugauguguaggaca

SEQ ID NO: 1672012 - RNA, 19 nt, Artificial Sequence
  Description of Artificial Sequence: Synthetic oligonucleotide
  Antisense strand to SEQ ID NO: 1672011
uguccuacacaucacauac

SEQ ID NO: 1672013 - RNA, 19 nt, Artificial Sequence
  Description of Artificial Sequence: Synthetic oligonucleotide
  Sense strand starting at position 3371 of SEQ ID NO: 1561438
augugauguguaggacaau

SEQ ID NO: 1672014 - RNA, 19 nt, Artificial Sequence
  Description of Artificial Sequence: Synthetic oligonucleotide
  Antisense strand to SEQ ID NO: 1672013
auuguccuacacaucacau

SEQ ID NO: 1672015 - RNA, 19 nt, Artificial Sequence
  Description of Artificial Sequence: Synthetic oligonucleotide
  Sense strand starting at position 3488 of SEQ ID NO: 1561438
uggaaugaauccucuuugu

SEQ ID NO: 1672016 - RNA, 19 nt, Artificial Sequence
  Description of Artificial Sequence: Synthetic oligonucleotide
  Antisense strand to SEQ ID NO: 1672015
acaaagaggauucauucca

SEQ ID NO: 1672017 - RNA, 19 nt, Artificial Sequence
  Description of Artificial Sequence: Synthetic oligonucleotide
  Sense strand starting at position 3917 of SEQ ID NO: 1561438
uguuacauuucuguuuacu

SEQ ID NO: 1672018 - RNA, 19 nt, Artificial Sequence
  Description of Artificial Sequence: Synthetic oligonucleotide
  Antisense strand to SEQ ID NO: 1672017
aguaaacagaaauguaaca

SEQ ID NO: 1672019 - RNA, 19 nt, Artificial Sequence
  Description of Artificial Sequence: Synthetic oligonucleotide
  Sense strand starting at position 3919 of SEQ ID NO: 1561438
uuacauuucuguuuacugu

SEQ ID NO: 1672020 - RNA, 19 nt, Artificial Sequence
  Description of Artificial Sequence: Synthetic oligonucleotide
  Antisense strand to SEQ ID NO: 1672019
acaguaaacagaaauguaa

SEQ ID NO: 1672021 - RNA, 19 nt, Artificial Sequence
  Description of Artificial Sequence: Synthetic oligonucleotide
  Sense strand starting at position 3937 of SEQ ID NO: 1561438
uuuccaugucuguaucaau

SEQ ID NO: 1672022 - RNA, 19 nt, Artificial Sequence
  Description of Artificial Sequence: Synthetic oligonucleotide
  Antisense strand to SEQ ID NO: 1672021
auugauacagacauggaaa

SEQ ID NO: 1672023 - RNA, 19 nt, Artificial Sequence
  Description of Artificial Sequence: Synthetic oligonucleotide
  Sense strand starting at position 3956 of SEQ ID NO: 1561438
aauggagucgucugaggaa

SEQ ID NO: 1672024 - RNA, 19 nt, Artificial Sequence
  Description of Artificial Sequence: Synthetic oligonucleotide
  Antisense strand to SEQ ID NO: 1672023
uuccucagacgacuccauu

SEQ ID NO: 1672025 - RNA, 19 nt, Artificial Sequence
  Description of Artificial Sequence: Synthetic oligonucleotide
  Sense strand starting at position 353 of SEQ ID NO: 1561439
acucauggauuccuuggaa

SEQ ID NO: 1672026 - RNA, 19 nt, Artificial Sequence
  Description of Artificial Sequence: Synthetic oligonucleotide
  Antisense strand to SEQ ID NO: 1672025
uuccaaggaauccaugagu

SEQ ID NO: 1672027 - RNA, 19 nt, Artificial Sequence
  Description of Artificial Sequence: Synthetic oligonucleotide
  Sense strand starting at position 480 of SEQ ID NO: 1561439
cuagucaggucaucucuaa

SEQ ID NO: 1672028 - RNA, 19 nt, Artificial Sequence
  Description of Artificial Sequence: Synthetic oligonucleotide
  Antisense strand to SEQ ID NO: 1672027
uuagagaugaccugacuag

SEQ ID NO: 1672029 - RNA, 19 nt, Artificial Sequence
  Description of Artificial Sequence: Synthetic oligonucleotide
  Sense strand starting at position 843 of SEQ ID NO: 1561439
accagagaguugcaauuua

SEQ ID NO: 1672030 - RNA, 19 nt, Artificial Sequence
  Description of Artificial Sequence: Synthetic oligonucleotide
  Antisense strand to SEQ ID NO: 1672029
uaaauugcaacucucuggu

SEQ ID NO: 1672031 - RNA, 19 nt, Artificial Sequence
  Description of Artificial Sequence: Synthetic oligonucleotide
  Sense strand starting at position 853 of SEQ ID NO: 1561439
ugcaauuuaugugacaaau

SEQ ID NO: 1672032 - RNA, 19 nt, Artificial Sequence
  Description of Artificial Sequence: Synthetic oligonucleotide
  Antisense strand to SEQ ID NO: 1672031
auuugucacauaaauugca

SEQ ID NO: 1672033 - RNA, 19 nt, Artificial Sequence
  Description of Artificial Sequence: Synthetic oligonucleotide
  Sense strand starting at position 961 of SEQ ID NO: 1561439
uugugacugugagcaauga

SEQ ID NO: 1672034 - RNA, 19 nt, Artificial Sequence
  Description of Artificial Sequence: Synthetic oligonucleotide
  Antisense strand to SEQ ID NO: 1672033
ucauugcucacagucacaa

SEQ ID NO: 1672035 - RNA, 19 nt, Artificial Sequence
  Description of Artificial Sequence: Synthetic oligonucleotide
  Sense strand starting at position 1066 of SEQ ID NO: 1561439
ugaggauuagaauguguga

SEQ ID NO: 1672036 - RNA, 19 nt, Artificial Sequence
  Description of Artificial Sequence: Synthetic oligonucleotide
  Antisense strand to SEQ ID NO: 1672035
ucacacauucuaauccuca

SEQ ID NO: 1672037 - RNA, 19 nt, Artificial Sequence
  Description of Artificial Sequence: Synthetic oligonucleotide
  Sense strand starting at position 1068 of SEQ ID NO: 1561439
aggauuagaaugugugauu

SEQ ID NO: 1672038 - RNA, 19 nt, Artificial Sequence
  Description of Artificial Sequence: Synthetic oligonucleotide
  Antisense strand to SEQ ID NO: 1672037
aaucacacauucuaauccu

SEQ ID NO: 1672039 - RNA, 19 nt, Artificial Sequence
  Description of Artificial Sequence: Synthetic oligonucleotide
  Sense strand starting at position 1297 of SEQ ID NO: 1561439
acauaacagcugugugaga

SEQ ID NO: 1672040 - RNA, 19 nt, Artificial Sequence
  Description of Artificial Sequence: Synthetic oligonucleotide
  Antisense strand to SEQ ID NO: 1672039
ucucacacagcuguuaugu

SEQ ID NO: 1672041 - RNA, 19 nt, Artificial Sequence
  Description of Artificial Sequence: Synthetic oligonucleotide
  Sense strand starting at position 1323 of SEQ ID NO: 1561439
ugggaucugucucugaacu

SEQ ID NO: 1672042 - RNA, 19 nt, Artificial Sequence
  Description of Artificial Sequence: Synthetic oligonucleotide
  Antisense strand to SEQ ID NO: 1672041
aguucagagacagauccca

SEQ ID NO: 1672043 - RNA, 19 nt, Artificial Sequence
  Description of Artificial Sequence: Synthetic oligonucleotide
  Sense strand starting at position 1324 of SEQ ID NO: 1561439
gggaucugucucugaacuc

SEQ ID NO: 1672044 - RNA, 19 nt, Artificial Sequence
  Description of Artificial Sequence: Synthetic oligonucleotide
  Antisense strand to SEQ ID NO: 1672043
gaguucagagacagauccc

SEQ ID NO: 1672045 - RNA, 19 nt, Artificial Sequence
  Description of Artificial Sequence: Synthetic oligonucleotide
  Sense strand starting at position 1523 of SEQ ID NO: 1561439
caucccagagcucgauauu

SEQ ID NO: 1672046 - RNA, 19 nt, Artificial Sequence
  Description of Artificial Sequence: Synthetic oligonucleotide
  Antisense strand to SEQ ID NO: 1672045
aauaucgagcucugggaug

SEQ ID NO: 1672047 - RNA, 19 nt, Artificial Sequence
  Description of Artificial Sequence: Synthetic oligonucleotide
  Sense strand starting at position 2234 of SEQ ID NO: 1561439
gagguagucccggcgugua

SEQ ID NO: 1672048 - RNA, 19 nt, Artificial Sequence
  Description of Artificial Sequence: Synthetic oligonucleotide
  Antisense strand to SEQ ID NO: 1672047
uacacgccgggacuaccuc

SEQ ID NO: 1672049 - RNA, 19 nt, Artificial Sequence
  Description of Artificial Sequence: Synthetic oligonucleotide
  Sense strand starting at position 2257 of SEQ ID NO: 1561439
auaauaggcgcuuaauaug

SEQ ID NO: 1672050 - RNA, 19 nt, Artificial Sequence
  Description of Artificial Sequence: Synthetic oligonucleotide
  Antisense strand to SEQ ID NO: 1672049
cauauuaagcgccuauuau

SEQ ID NO: 1672051 - RNA, 19 nt, Artificial Sequence
  Description of Artificial Sequence: Synthetic oligonucleotide
  Sense strand starting at position 2266 of SEQ ID NO: 1561439
gcuuaauauguguauugua

SEQ ID NO: 1672052 - RNA, 19 nt, Artificial Sequence
  Description of Artificial Sequence: Synthetic oligonucleotide
  Antisense strand to SEQ ID NO: 1672051
uacaauacacauauuaagc

SEQ ID NO: 1672053 - RNA, 19 nt, Artificial Sequence
  Description of Artificial Sequence: Synthetic oligonucleotide
  Sense strand starting at position 2275 of SEQ ID NO: 1561439
guguauuguaaagaaugag

SEQ ID NO: 1672054 - RNA, 19 nt, Artificial Sequence
  Description of Artificial Sequence: Synthetic oligonucleotide
  Antisense strand to SEQ ID NO: 1672053
cucauucuuuacaauacac

SEQ ID NO: 1672055 - RNA, 19 nt, Artificial Sequence
  Description of Artificial Sequence: Synthetic oligonucleotide
  Sense strand starting at position 2397 of SEQ ID NO: 1561439
guguguaauuugaguguga

SEQ ID NO: 1672056 - RNA, 19 nt, Artificial Sequence
  Description of Artificial Sequence: Synthetic oligonucleotide
  Antisense strand to SEQ ID NO: 1672055
ucacacucaaauuacacac

SEQ ID NO: 1672057 - RNA, 19 nt, Artificial Sequence
  Description of Artificial Sequence: Synthetic oligonucleotide
  Sense strand starting at position 2398 of SEQ ID NO: 1561439
uguguaauuugagugugag

SEQ ID NO: 1672058 - RNA, 19 nt, Artificial Sequence
  Description of Artificial Sequence: Synthetic oligonucleotide
  Antisense strand to SEQ ID NO: 1672057
cucacacucaaauuacaca

SEQ ID NO: 1672059 - RNA, 19 nt, Artificial Sequence
  Description of Artificial Sequence: Synthetic oligonucleotide
  Sense strand starting at position 2399 of SEQ ID NO: 1561439
guguaauuugagugugagu

SEQ ID NO: 1672060 - RNA, 19 nt, Artificial Sequence
  Description of Artificial Sequence: Synthetic oligonucleotide
  Antisense strand to SEQ ID NO: 1672059
acucacacucaaauuacac

SEQ ID NO: 1672061 - RNA, 19 nt, Artificial Sequence
  Description of Artificial Sequence: Synthetic oligonucleotide
  Sense strand starting at position 2401 of SEQ ID NO: 1561439
guaauuugagugugaguca

SEQ ID NO: 1672062 - RNA, 19 nt, Artificial Sequence
  Description of Artificial Sequence: Synthetic oligonucleotide
  Antisense strand to SEQ ID NO: 1672061
ugacucacacucaaauuac

SEQ ID NO: 1672063 - RNA, 19 nt, Artificial Sequence
  Description of Artificial Sequence: Synthetic oligonucleotide
  Sense strand starting at position 2410 of SEQ ID NO: 1561439
gugugagucaguguguagu

SEQ ID NO: 1672064 - RNA, 19 nt, Artificial Sequence
  Description of Artificial Sequence: Synthetic oligonucleotide
  Antisense strand to SEQ ID NO: 1672063
acuacacacugacucacac

SEQ ID NO: 1672065 - RNA, 19 nt, Artificial Sequence
  Description of Artificial Sequence: Synthetic oligonucleotide
  Sense strand starting at position 2527 of SEQ ID NO: 1561439
cugugcuugacguaacaau

SEQ ID NO: 1672066 - RNA, 19 nt, Artificial Sequence
  Description of Artificial Sequence: Synthetic oligonucleotide
  Antisense strand to SEQ ID NO: 1672065
auuguuacgucaagcacag

SEQ ID NO: 1672067 - RNA, 19 nt, Artificial Sequence
  Description of Artificial Sequence: Synthetic oligonucleotide
  Sense strand starting at position 2582 of SEQ ID NO: 1561439
ugaagaugagaauguguga

SEQ ID NO: 1672068 - RNA, 19 nt, Artificial Sequence
  Description of Artificial Sequence: Synthetic oligonucleotide
  Antisense strand to SEQ ID NO: 1672067
ucacacauucucaucuuca

SEQ ID NO: 1672069 - RNA, 19 nt, Artificial Sequence
  Description of Artificial Sequence: Synthetic oligonucleotide
  Sense strand starting at position 2637 of SEQ ID NO: 1561439
guggaauugugacucugug

SEQ ID NO: 1672070 - RNA, 19 nt, Artificial Sequence
  Description of Artificial Sequence: Synthetic oligonucleotide
  Antisense strand to SEQ ID NO: 1672069
cacagagucacaauuccac

SEQ ID NO: 1672071 - RNA, 19 nt, Artificial Sequence
  Description of Artificial Sequence: Synthetic oligonucleotide
  Sense strand starting at position 2682 of SEQ ID NO: 1561439
ccuauaugucugugggaua

SEQ ID NO: 1672072 - RNA, 19 nt, Artificial Sequence
  Description of Artificial Sequence: Synthetic oligonucleotide
  Antisense strand to SEQ ID NO: 1672071
uaucccacagacauauagg

SEQ ID NO: 1672073 - RNA, 19 nt, Artificial Sequence
  Description of Artificial Sequence: Synthetic oligonucleotide
  Sense strand starting at position 2721 of SEQ ID NO: 1561439
cuuggaguaucagcuuuau

SEQ ID NO: 1672074 - RNA, 19 nt, Artificial Sequence
  Description of Artificial Sequence: Synthetic oligonucleotide
  Antisense strand to SEQ ID NO: 1672073
auaaagcugauacuccaag

SEQ ID NO: 1672075 - RNA, 19 nt, Artificial Sequence
  Description of Artificial Sequence: Synthetic oligonucleotide
  Sense strand starting at position 2744 of SEQ ID NO: 1561439
acauuugcaucagagaguu

SEQ ID NO: 1672076 - RNA, 19 nt, Artificial Sequence
  Description of Artificial Sequence: Synthetic oligonucleotide
  Antisense strand to SEQ ID NO: 1672075
aacucucugaugcaaaugu

SEQ ID NO: 1672077 - RNA, 19 nt, Artificial Sequence
  Description of Artificial Sequence: Synthetic oligonucleotide
  Sense strand starting at position 2761 of SEQ ID NO: 1561439
uugcgauuuaugugccaaa

SEQ ID NO: 1672078 - RNA, 19 nt, Artificial Sequence
  Description of Artificial Sequence: Synthetic oligonucleotide
  Antisense strand to SEQ ID NO: 1672077
uuuggcacauaaaucgcaa

SEQ ID NO: 1672079 - RNA, 19 nt, Artificial Sequence
  Description of Artificial Sequence: Synthetic oligonucleotide
  Sense strand starting at position 2762 of SEQ ID NO: 1561439
ugcgauuuaugugccaaag

SEQ ID NO: 1672080 - RNA, 19 nt, Artificial Sequence
  Description of Artificial Sequence: Synthetic oligonucleotide
  Antisense strand to SEQ ID NO: 1672079
cuuuggcacauaaaucgca

SEQ ID NO: 1672081 - RNA, 19 nt, Artificial Sequence
  Description of Artificial Sequence: Synthetic oligonucleotide
  Sense strand starting at position 2888 of SEQ ID NO: 1561439
ggcaauggaucuuuggcaa

SEQ ID NO: 1672082 - RNA, 19 nt, Artificial Sequence
  Description of Artificial Sequence: Synthetic oligonucleotide
  Antisense strand to SEQ ID NO: 1672081
uugccaaagauccauugcc

SEQ ID NO: 1672083 - RNA, 19 nt, Artificial Sequence
  Description of Artificial Sequence: Synthetic oligonucleotide
  Sense strand starting at position 2908 of SEQ ID NO: 1561439
gggucuuuggcagaucaau

SEQ ID NO: 1672084 - RNA, 19 nt, Artificial Sequence
  Description of Artificial Sequence: Synthetic oligonucleotide
  Antisense strand to SEQ ID NO: 1672083
auugaucugccaaagaccc

SEQ ID NO: 1672085 - RNA, 19 nt, Artificial Sequence
  Description of Artificial Sequence: Synthetic oligonucleotide
  Sense strand starting at position 2978 of SEQ ID NO: 1561439
agcccuugguuccuaaaua

SEQ ID NO: 1672086 - RNA, 19 nt, Artificial Sequence
  Description of Artificial Sequence: Synthetic oligonucleotide
  Antisense strand to SEQ ID NO: 1672085
uauuuaggaaccaagggcu

SEQ ID NO: 1672087 - RNA, 19 nt, Artificial Sequence
  Description of Artificial Sequence: Synthetic oligonucleotide
  Sense strand starting at position 3079 of SEQ ID NO: 1561439
ggaacaucuugugcuugaa

SEQ ID NO: 1672088 - RNA, 19 nt, Artificial Sequence
  Description of Artificial Sequence: Synthetic oligonucleotide
  Antisense strand to SEQ ID NO: 1672087
uucaagcacaagauguucc

SEQ ID NO: 1672089 - RNA, 19 nt, Artificial Sequence
  Description of Artificial Sequence: Synthetic oligonucleotide
  Sense strand starting at position 3081 of SEQ ID NO: 1561439
aacaucuugugcuugaaag

SEQ ID NO: 1672090 - RNA, 19 nt, Artificial Sequence
  Description of Artificial Sequence: Synthetic oligonucleotide
  Antisense strand to SEQ ID NO: 1672089
cuuucaagcacaagauguu

SEQ ID NO: 1672091 - RNA, 19 nt, Artificial Sequence
  Description of Artificial Sequence: Synthetic oligonucleotide
  Sense strand starting at position 3083 of SEQ ID NO: 1561439
caucuugugcuugaaagua

SEQ ID NO: 1672092 - RNA, 19 nt, Artificial Sequence
  Description of Artificial Sequence: Synthetic oligonucleotide
  Antisense strand to SEQ ID NO: 1672091
uacuuucaagcacaagaug

SEQ ID NO: 1672093 - RNA, 19 nt, Artificial Sequence
  Description of Artificial Sequence: Synthetic oligonucleotide
  Sense strand starting at position 3174 of SEQ ID NO: 1561439
caaacuugacaugguuuga

SEQ ID NO: 1672094 - RNA, 19 nt, Artificial Sequence
  Description of Artificial Sequence: Synthetic oligonucleotide
  Antisense strand to SEQ ID NO: 1672093
ucaaaccaugucaaguuug

SEQ ID NO: 1672095 - RNA, 19 nt, Artificial Sequence
  Description of Artificial Sequence: Synthetic oligonucleotide
  Sense strand starting at position 3305 of SEQ ID NO: 1561439
gggacuggauguuuacauu

SEQ ID NO: 1672096 - RNA, 19 nt, Artificial Sequence
  Description of Artificial Sequence: Synthetic oligonucleotide
  Antisense strand to SEQ ID NO: 1672095
aauguaaacauccaguccc

SEQ ID NO: 1672097 - RNA, 19 nt, Artificial Sequence
  Description of Artificial Sequence: Synthetic oligonucleotide
  Sense strand starting at position 3528 of SEQ ID NO: 1561439
gcgugguggguccuguaau

SEQ ID NO: 1672098 - RNA, 19 nt, Artificial Sequence
  Description of Artificial Sequence: Synthetic oligonucleotide
  Antisense strand to SEQ ID NO: 1672097
auuacaggacccaccacgc

SEQ ID NO: 1672099 - RNA, 19 nt, Artificial Sequence
  Description of Artificial Sequence: Synthetic oligonucleotide
  Sense strand starting at position 3752 of SEQ ID NO: 1561439
accaccucacaguguuaga

SEQ ID NO: 1672100 - RNA, 19 nt, Artificial Sequence
  Description of Artificial Sequence: Synthetic oligonucleotide
  Antisense strand to SEQ ID NO: 1672099
ucuaacacugugagguggu

SEQ ID NO: 1672101 - RNA, 19 nt, Artificial Sequence
  Description of Artificial Sequence: Synthetic oligonucleotide
  Sense strand starting at position 3838 of SEQ ID NO: 1561439
uacacuauuuguggaaaug

SEQ ID NO: 1672102 - RNA, 19 nt, Artificial Sequence
  Description of Artificial Sequence: Synthetic oligonucleotide
  Antisense strand to SEQ ID NO: 1672101
cauuuccacaaauagugua

SEQ ID NO: 1672103 - RNA, 19 nt, Artificial Sequence
  Description of Artificial Sequence: Synthetic oligonucleotide
  Sense strand starting at position 3956 of SEQ ID NO: 1561439
uguauauauccguaucagu

SEQ ID NO: 1672104 - RNA, 19 nt, Artificial Sequence
  Description of Artificial Sequence: Synthetic oligonucleotide
  Antisense strand to SEQ ID NO: 1672103
acugauacggauauauaca

SEQ ID NO: 1672105 - RNA, 19 nt, Artificial Sequence
  Description of Artificial Sequence: Synthetic oligonucleotide
  Sense strand starting at position 1149 of SEQ ID NO: 1561440
acuugagacgccugagaau

SEQ ID NO: 1672106 - RNA, 19 nt, Artificial Sequence
  Description of Artificial Sequence: Synthetic oligonucleotide
  Antisense strand to SEQ ID NO: 1672105
auucucaggcgucucaagu

SEQ ID NO: 1672107 - RNA, 19 nt, Artificial Sequence
  Description of Artificial Sequence: Synthetic oligonucleotide
  Sense strand starting at position 2253 of SEQ ID NO: 1561440
ugccuuagagcguugguca

SEQ ID NO: 1672108 - RNA, 19 nt, Artificial Sequence
  Description of Artificial Sequence: Synthetic oligonucleotide
  Antisense strand to SEQ ID NO: 1672107
ugaccaacgcucuaaggca

SEQ ID NO: 1672109 - RNA, 19 nt, Artificial Sequence
  Description of Artificial Sequence: Synthetic oligonucleotide
  Sense strand starting at position 2261 of SEQ ID NO: 1561440
agcguuggucaguccuuau

SEQ ID NO: 1672110 - RNA, 19 nt, Artificial Sequence
  Description of Artificial Sequence: Synthetic oligonucleotide
  Antisense strand to SEQ ID NO: 1672109
auaaggacugaccaacgcu

SEQ ID NO: 1672111 - RNA, 19 nt, Artificial Sequence
  Description of Artificial Sequence: Synthetic oligonucleotide
  Sense strand starting at position 2273 of SEQ ID NO: 1561440
uccuuauauggcggauaga

SEQ ID NO: 1672112 - RNA, 19 nt, Artificial Sequence
  Description of Artificial Sequence: Synthetic oligonucleotide
  Antisense strand to SEQ ID NO: 1672111
ucuauccgccauauaagga

SEQ ID NO: 1672113 - RNA, 19 nt, Artificial Sequence
  Description of Artificial Sequence: Synthetic oligonucleotide
  Sense strand starting at position 2363 of SEQ ID NO: 1561440
gcucuuaaaggcgacauaa

SEQ ID NO: 1672114 - RNA, 19 nt, Artificial Sequence
  Description of Artificial Sequence: Synthetic oligonucleotide
  Antisense strand to SEQ ID NO: 1672113
uuaugucgccuuuaagagc

SEQ ID NO: 1672115 - RNA, 19 nt, Artificial Sequence
  Description of Artificial Sequence: Synthetic oligonucleotide
  Sense strand starting at position 2395 of SEQ ID NO: 1561440
aaguaaggucuaggauacu

SEQ ID NO: 1672116 - RNA, 19 nt, Artificial Sequence
  Description of Artificial Sequence: Synthetic oligonucleotide
  Antisense strand to SEQ ID NO: 1672115
aguauccuagaccuuacuu

SEQ ID NO: 1672117 - RNA, 19 nt, Artificial Sequence
  Description of Artificial Sequence: Synthetic oligonucleotide
  Sense strand starting at position 2401 of SEQ ID NO: 1561440
ggucuaggauacucacaga

SEQ ID NO: 1672118 - RNA, 19 nt, Artificial Sequence
  Description of Artificial Sequence: Synthetic oligonucleotide
  Antisense strand to SEQ ID NO: 1672117
ucugugaguauccuagacc

SEQ ID NO: 1672119 - RNA, 19 nt, Artificial Sequence
  Description of Artificial Sequence: Synthetic oligonucleotide
  Sense strand starting at position 2430 of SEQ ID NO: 1561440
accuaugauaucggauugu

SEQ ID NO: 1672120 - RNA, 19 nt, Artificial Sequence
  Description of Artificial Sequence: Synthetic oligonucleotide
  Antisense strand to SEQ ID NO: 1672119
acaauccgauaucauaggu

SEQ ID NO: 1672121 - RNA, 19 nt, Artificial Sequence
  Description of Artificial Sequence: Synthetic oligonucleotide
  Sense strand starting at position 2434 of SEQ ID NO: 1561440
augauaucggauugugaag

SEQ ID NO: 1672122 - RNA, 19 nt, Artificial Sequence
  Description of Artificial Sequence: Synthetic oligonucleotide
  Antisense strand to SEQ ID NO: 1672121
cuucacaauccgauaucau

SEQ ID NO: 1672123 - RNA, 19 nt, Artificial Sequence
  Description of Artificial Sequence: Synthetic oligonucleotide
  Sense strand starting at position 2593 of SEQ ID NO: 1561440
caauaugguugguccaaga

SEQ ID NO: 1672124 - RNA, 19 nt, Artificial Sequence
  Description of Artificial Sequence: Synthetic oligonucleotide
  Antisense strand to SEQ ID NO: 1672123
ucuuggaccaaccauauug

SEQ ID NO: 1672125 - RNA, 19 nt, Artificial Sequence
  Description of Artificial Sequence: Synthetic oligonucleotide
  Sense strand starting at position 2622 of SEQ ID NO: 1561440
agacuacauggcugggaau

SEQ ID NO: 1672126 - RNA, 19 nt, Artificial Sequence
  Description of Artificial Sequence: Synthetic oligonucleotide
  Antisense strand to SEQ ID NO: 1672125
auucccagccauguagucu

SEQ ID NO: 1672127 - RNA, 19 nt, Artificial Sequence
  Description of Artificial Sequence: Synthetic oligonucleotide
  Sense strand starting at position 2623 of SEQ ID NO: 1561440
gacuacauggcugggaauu

SEQ ID NO: 1672128 - RNA, 19 nt, Artificial Sequence
  Description of Artificial Sequence: Synthetic oligonucleotide
  Antisense strand to SEQ ID NO: 1672127
aauucccagccauguaguc

SEQ ID NO: 1672129 - RNA, 19 nt, Artificial Sequence
  Description of Artificial Sequence: Synthetic oligonucleotide
  Sense strand starting at position 2657 of SEQ ID NO: 1561440
aggagauaccgacguagau

SEQ ID NO: 1672130 - RNA, 19 nt, Artificial Sequence
  Description of Artificial Sequence: Synthetic oligonucleotide
  Antisense strand to SEQ ID NO: 1672129
aucuacgucgguaucuccu

SEQ ID NO: 1672131 - RNA, 19 nt, Artificial Sequence
  Description of Artificial Sequence: Synthetic oligonucleotide
  Sense strand starting at position 2659 of SEQ ID NO: 1561440
gagauaccgacguagauug

SEQ ID NO: 1672132 - RNA, 19 nt, Artificial Sequence
  Description of Artificial Sequence: Synthetic oligonucleotide
  Antisense strand to SEQ ID NO: 1672131
caaucuacgucgguaucuc

SEQ ID NO: 1672133 - RNA, 19 nt, Artificial Sequence
  Description of Artificial Sequence: Synthetic oligonucleotide
  Sense strand starting at position 2715 of SEQ ID NO: 1561440
aucauuacugucuguagag

SEQ ID NO: 1672134 - RNA, 19 nt, Artificial Sequence
  Description of Artificial Sequence: Synthetic oligonucleotide
  Antisense strand to SEQ ID NO: 1672133
cucuacagacaguaaugau

SEQ ID NO: 1672135 - RNA, 19 nt, Artificial Sequence
  Description of Artificial Sequence: Synthetic oligonucleotide
  Sense strand starting at position 2727 of SEQ ID NO: 1561440
uguagagucagugauugug

SEQ ID NO: 1672136 - RNA, 19 nt, Artificial Sequence
  Description of Artificial Sequence: Synthetic oligonucleotide
  Antisense strand to SEQ ID NO: 1672135
cacaaucacugacucuaca

SEQ ID NO: 1672137 - RNA, 19 nt, Artificial Sequence
  Description of Artificial Sequence: Synthetic oligonucleotide
  Sense strand starting at position 2863 of SEQ ID NO: 1561440
gccauuuccugacaggaca

SEQ ID NO: 1672138 - RNA, 19 nt, Artificial Sequence
  Description of Artificial Sequence: Synthetic oligonucleotide
  Antisense strand to SEQ ID NO: 1672137
uguccugucaggaaauggc

SEQ ID NO: 1672139 - RNA, 19 nt, Artificial Sequence
  Description of Artificial Sequence: Synthetic oligonucleotide
  Sense strand starting at position 2890 of SEQ ID NO: 1561440
cauuccauaguuggaguau

SEQ ID NO: 1672140 - RNA, 19 nt, Artificial Sequence
  Description of Artificial Sequence: Synthetic oligonucleotide
  Antisense strand to SEQ ID NO: 1672139
auacuccaacuauggaaug

SEQ ID NO: 1672141 - RNA, 19 nt, Artificial Sequence
  Description of Artificial Sequence: Synthetic oligonucleotide
  Sense strand starting at position 2899 of SEQ ID NO: 1561440
guuggaguauauguacaca

SEQ ID NO: 1672142 - RNA, 19 nt, Artificial Sequence
  Description of Artificial Sequence: Synthetic oligonucleotide
  Antisense strand to SEQ ID NO: 1672141
uguguacauauacuccaac

SEQ ID NO: 1672143 - RNA, 19 nt, Artificial Sequence
  Description of Artificial Sequence: Synthetic oligonucleotide
  Sense strand starting at position 2968 of SEQ ID NO: 1561440
cuuccugagaagugaguua

SEQ ID NO: 1672144 - RNA, 19 nt, Artificial Sequence
  Description of Artificial Sequence: Synthetic oligonucleotide
  Antisense strand to SEQ ID NO: 1672143
uaacucacuucucaggaag

SEQ ID NO: 1672145 - RNA, 19 nt, Artificial Sequence
  Description of Artificial Sequence: Synthetic oligonucleotide
  Sense strand starting at position 2991 of SEQ ID NO: 1561440
uuuacagggaguugaaauu

SEQ ID NO: 1672146 - RNA, 19 nt, Artificial Sequence
  Description of Artificial Sequence: Synthetic oligonucleotide
  Antisense strand to SEQ ID NO: 1672145
aauuucaacucccuguaaa

SEQ ID NO: 1672147 - RNA, 19 nt, Artificial Sequence
  Description of Artificial Sequence: Synthetic oligonucleotide
  Sense strand starting at position 2997 of SEQ ID NO: 1561440
gggaguugaaauuaucugu

SEQ ID NO: 1672148 - RNA, 19 nt, Artificial Sequence
  Description of Artificial Sequence: Synthetic oligonucleotide
  Antisense strand to SEQ ID NO: 1672147
acagauaauuucaacuccc

SEQ ID NO: 1672149 - RNA, 19 nt, Artificial Sequence
  Description of Artificial Sequence: Synthetic oligonucleotide
  Sense strand starting at position 3000 of SEQ ID NO: 1561440
aguugaaauuaucugugaa

SEQ ID NO: 1672150 - RNA, 19 nt, Artificial Sequence
  Description of Artificial Sequence: Synthetic oligonucleotide
  Antisense strand to SEQ ID NO: 1672149
uucacagauaauuucaacu

SEQ ID NO: 1672151 - RNA, 19 nt, Artificial Sequence
  Description of Artificial Sequence: Synthetic oligonucleotide
  Sense strand starting at position 3205 of SEQ ID NO: 1561440
caauuauaggccuggauga

SEQ ID NO: 1672152 - RNA, 19 nt, Artificial Sequence
  Description of Artificial Sequence: Synthetic oligonucleotide
  Antisense strand to SEQ ID NO: 1672151
ucauccaggccuauaauug

SEQ ID NO: 1672153 - RNA, 19 nt, Artificial Sequence
  Description of Artificial Sequence: Synthetic oligonucleotide
  Sense strand starting at position 3591 of SEQ ID NO: 1561440
aaaggaugugcguaagaug

SEQ ID NO: 1672154 - RNA, 19 nt, Artificial Sequence
  Description of Artificial Sequence: Synthetic oligonucleotide
  Antisense strand to SEQ ID NO: 1672153
caucuuacgcacauccuuu

SEQ ID NO: 1672155 - RNA, 19 nt, Artificial Sequence
  Description of Artificial Sequence: Synthetic oligonucleotide
  Sense strand starting at position 3670 of SEQ ID NO: 1561440
uucccagaacgaugugaua

SEQ ID NO: 1672156 - RNA, 19 nt, Artificial Sequence
  Description of Artificial Sequence: Synthetic oligonucleotide
  Antisense strand to SEQ ID NO: 1672155
uaucacaucguucugggaa

SEQ ID NO: 1672157 - RNA, 19 nt, Artificial Sequence
  Description of Artificial Sequence: Synthetic oligonucleotide
  Sense strand starting at position 3672 of SEQ ID NO: 1561440
cccagaacgaugugauaag

SEQ ID NO: 1672158 - RNA, 19 nt, Artificial Sequence
  Description of Artificial Sequence: Synthetic oligonucleotide
  Antisense strand to SEQ ID NO: 1672157
cuuaucacaucguucuggg

SEQ ID NO: 1672159 - RNA, 19 nt, Artificial Sequence
  Description of Artificial Sequence: Synthetic oligonucleotide
  Sense strand starting at position 3750 of SEQ ID NO: 1561440
cugaccaaggucugugaga

SEQ ID NO: 1672160 - RNA, 19 nt, Artificial Sequence
  Description of Artificial Sequence: Synthetic oligonucleotide
  Antisense strand to SEQ ID NO: 1672159
ucucacagaccuuggucag

SEQ ID NO: 1672161 - RNA, 19 nt, Artificial Sequence
  Description of Artificial Sequence: Synthetic oligonucleotide
  Sense strand starting at position 3751 of SEQ ID NO: 1561440
ugaccaaggucugugagau

SEQ ID NO: 1672162 - RNA, 19 nt, Artificial Sequence
  Description of Artificial Sequence: Synthetic oligonucleotide
  Antisense strand to SEQ ID NO: 1672161
aucucacagaccuugguca

SEQ ID NO: 1672163 - RNA, 19 nt, Artificial Sequence
  Description of Artificial Sequence: Synthetic oligonucleotide
  Sense strand starting at position 3797 of SEQ ID NO: 1561440
uuggacuaacagugauuau

SEQ ID NO: 1672164 - RNA, 19 nt, Artificial Sequence
  Description of Artificial Sequence: Synthetic oligonucleotide
  Antisense strand to SEQ ID NO: 1672163
auaaucacuguuaguccaa

SEQ ID NO: 1672165 - RNA, 19 nt, Artificial Sequence
  Description of Artificial Sequence: Synthetic oligonucleotide
  Sense strand starting at position 3800 of SEQ ID NO: 1561440
gacuaacagugauuauguu

SEQ ID NO: 1672166 - RNA, 19 nt, Artificial Sequence
  Description of Artificial Sequence: Synthetic oligonucleotide
  Antisense strand to SEQ ID NO: 1672165
aacauaaucacuguuaguc

SEQ ID NO: 1672167 - RNA, 19 nt, Artificial Sequence
  Description of Artificial Sequence: Synthetic oligonucleotide
  Sense strand starting at position 3801 of SEQ ID NO: 1561440
acuaacagugauuauguua

SEQ ID NO: 1672168 - RNA, 19 nt, Artificial Sequence
  Description of Artificial Sequence: Synthetic oligonucleotide
  Antisense strand to SEQ ID NO: 1672167
uaacauaaucacuguuagu

SEQ ID NO: 1672169 - RNA, 19 nt, Artificial Sequence
  Description of Artificial Sequence: Synthetic oligonucleotide
  Sense strand starting at position 3848 of SEQ ID NO: 1561440
acagaaaucucucugugac

SEQ ID NO: 1672170 - RNA, 19 nt, Artificial Sequence
  Description of Artificial Sequence: Synthetic oligonucleotide
  Antisense strand to SEQ ID NO: 1672169
gucacagagagauuucugu

SEQ ID NO: 1672171 - RNA, 19 nt, Artificial Sequence
  Description of Artificial Sequence: Synthetic oligonucleotide
  Sense strand starting at position 3850 of SEQ ID NO: 1561440
agaaaucucucugugacau

SEQ ID NO: 1672172 - RNA, 19 nt, Artificial Sequence
  Description of Artificial Sequence: Synthetic oligonucleotide
  Antisense strand to SEQ ID NO: 1672171
augucacagagagauuucu

SEQ ID NO: 1672173 - RNA, 19 nt, Artificial Sequence
  Description of Artificial Sequence: Synthetic oligonucleotide
  Sense strand starting at position 3851 of SEQ ID NO: 1561440
gaaaucucucugugacaug

SEQ ID NO: 1672174 - RNA, 19 nt, Artificial Sequence
  Description of Artificial Sequence: Synthetic oligonucleotide
  Antisense strand to SEQ ID NO: 1672173
caugucacagagagauuuc

SEQ ID NO: 1672175 - RNA, 19 nt, Artificial Sequence
  Description of Artificial Sequence: Synthetic oligonucleotide
  Sense strand starting at position 3856 of SEQ ID NO: 1561440
cucucugugacaugugaag

SEQ ID NO: 1672176 - RNA, 19 nt, Artificial Sequence
  Description of Artificial Sequence: Synthetic oligonucleotide
  Antisense strand to SEQ ID NO: 1672175
cuucacaugucacagagag

SEQ ID NO: 1672177 - RNA, 19 nt, Artificial Sequence
  Description of Artificial Sequence: Synthetic oligonucleotide
  Sense strand starting at position 3892 of SEQ ID NO: 1561440
uacaguagaguuugagcaa

SEQ ID NO: 1672178 - RNA, 19 nt, Artificial Sequence
  Description of Artificial Sequence: Synthetic oligonucleotide
  Antisense strand to SEQ ID NO: 1672177
uugcucaaacucuacugua

SEQ ID NO: 1672179 - RNA, 19 nt, Artificial Sequence
  Description of Artificial Sequence: Synthetic oligonucleotide
  Sense strand starting at position 3895 of SEQ ID NO: 1561440
aguagaguuugagcaagag

SEQ ID NO: 1672180 - RNA, 19 nt, Artificial Sequence
  Description of Artificial Sequence: Synthetic oligonucleotide
  Antisense strand to SEQ ID NO: 1672179
cucuugcucaaacucuacu

SEQ ID NO: 1672181 - RNA, 19 nt, Artificial Sequence
  Description of Artificial Sequence: Synthetic oligonucleotide
  Sense strand starting at position 3904 of SEQ ID NO: 1561440
ugagcaagagucugagaag

SEQ ID NO: 1672182 - RNA, 19 nt, Artificial Sequence
  Description of Artificial Sequence: Synthetic oligonucleotide
  Antisense strand to SEQ ID NO: 1672181
cuucucagacucuugcuca

SEQ ID NO: 1672183 - RNA, 19 nt, Artificial Sequence
  Description of Artificial Sequence: Synthetic oligonucleotide
  Sense strand starting at position 3973 of SEQ ID NO: 1561440
uucugucuccuauauguau

SEQ ID NO: 1672184 - RNA, 19 nt, Artificial Sequence
  Description of Artificial Sequence: Synthetic oligonucleotide
  Antisense strand to SEQ ID NO: 1672183
auacauauaggagacagaa

SEQ ID NO: 1672185 - RNA, 19 nt, Artificial Sequence
  Description of Artificial Sequence: Synthetic oligonucleotide
  Sense strand starting at position 223 of SEQ ID NO: 1561441
aacugauguugcccaggau

SEQ ID NO: 1672186 - RNA, 19 nt, Artificial Sequence
  Description of Artificial Sequence: Synthetic oligonucleotide
  Antisense strand to SEQ ID NO: 1672185
auccugggcaacaucaguu

SEQ ID NO: 1672187 - RNA, 19 nt, Artificial Sequence
  Description of Artificial Sequence: Synthetic oligonucleotide
  Sense strand starting at position 224 of SEQ ID NO: 1561441
acugauguugcccaggaua

SEQ ID NO: 1672188 - RNA, 19 nt, Artificial Sequence
  Description of Artificial Sequence: Synthetic oligonucleotide
  Antisense strand to SEQ ID NO: 1672187
uauccugggcaacaucagu

SEQ ID NO: 1672189 - RNA, 19 nt, Artificial Sequence
  Description of Artificial Sequence: Synthetic oligonucleotide
  Sense strand starting at position 226 of SEQ ID NO: 1561441
ugauguugcccaggauaug

SEQ ID NO: 1672190 - RNA, 19 nt, Artificial Sequence
  Description of Artificial Sequence: Synthetic oligonucleotide
  Antisense strand to SEQ ID NO: 1672189
cauauccugggcaacauca

SEQ ID NO: 1672191 - RNA, 19 nt, Artificial Sequence
  Description of Artificial Sequence: Synthetic oligonucleotide
  Sense strand starting at position 478 of SEQ ID NO: 1561441
aauguaugacuggguaaag

SEQ ID NO: 1672192 - RNA, 19 nt, Artificial Sequence
  Description of Artificial Sequence: Synthetic oligonucleotide
  Antisense strand to SEQ ID NO: 1672191
cuuuacccagucauacauu

SEQ ID NO: 1672193 - RNA, 19 nt, Artificial Sequence
  Description of Artificial Sequence: Synthetic oligonucleotide
  Sense strand starting at position 479 of SEQ ID NO: 1561441
auguaugacuggguaaaga

SEQ ID NO: 1672194 - RNA, 19 nt, Artificial Sequence
  Description of Artificial Sequence: Synthetic oligonucleotide
  Antisense strand to SEQ ID NO: 1672193
ucuuuacccagucauacau

SEQ ID NO: 1672195 - RNA, 19 nt, Artificial Sequence
  Description of Artificial Sequence: Synthetic oligonucleotide
  Sense strand starting at position 1020 of SEQ ID NO: 1561441
gucugugugacauauccau

SEQ ID NO: 1672196 - RNA, 19 nt, Artificial Sequence
  Description of Artificial Sequence: Synthetic oligonucleotide
  Antisense strand to SEQ ID NO: 1672195
auggauaugucacacagac

SEQ ID NO: 1672197 - RNA, 19 nt, Artificial Sequence
  Description of Artificial Sequence: Synthetic oligonucleotide
  Sense strand starting at position 1050 of SEQ ID NO: 1561441
ugagaaucaccauguccaa

SEQ ID NO: 1672198 - RNA, 19 nt, Artificial Sequence
  Description of Artificial Sequence: Synthetic oligonucleotide
  Antisense strand to SEQ ID NO: 1672197
uuggacauggugauucuca

SEQ ID NO: 1672199 - RNA, 19 nt, Artificial Sequence
  Description of Artificial Sequence: Synthetic oligonucleotide
  Sense strand starting at position 1077 of SEQ ID NO: 1561441
cugugaucuucucccggaa

SEQ ID NO: 1672200 - RNA, 19 nt, Artificial Sequence
  Description of Artificial Sequence: Synthetic oligonucleotide
  Antisense strand to SEQ ID NO: 1672199
uuccgggagaagaucacag

SEQ ID NO: 1672201 - RNA, 19 nt, Artificial Sequence
  Description of Artificial Sequence: Synthetic oligonucleotide
  Sense strand starting at position 1080 of SEQ ID NO: 1561441
ugaucuucucccggaaauc

SEQ ID NO: 1672202 - RNA, 19 nt, Artificial Sequence
  Description of Artificial Sequence: Synthetic oligonucleotide
  Antisense strand to SEQ ID NO: 1672201
gauuuccgggagaagauca

SEQ ID NO: 1672203 - RNA, 19 nt, Artificial Sequence
  Description of Artificial Sequence: Synthetic oligonucleotide
  Sense strand starting at position 2110 of SEQ ID NO: 1561441
cggacuugucuuagagcgu

SEQ ID NO: 1672204 - RNA, 19 nt, Artificial Sequence
  Description of Artificial Sequence: Synthetic oligonucleotide
  Antisense strand to SEQ ID NO: 1672203
acgcucuaagacaaguccg

SEQ ID NO: 1672205 - RNA, 19 nt, Artificial Sequence
  Description of Artificial Sequence: Synthetic oligonucleotide
  Sense strand starting at position 2127 of SEQ ID NO: 1561441
guugaucaguccuuauaug

SEQ ID NO: 1672206 - RNA, 19 nt, Artificial Sequence
  Description of Artificial Sequence: Synthetic oligonucleotide
  Antisense strand to SEQ ID NO: 1672205
cauauaaggacugaucaac

SEQ ID NO: 1672207 - RNA, 19 nt, Artificial Sequence
  Description of Artificial Sequence: Synthetic oligonucleotide
  Sense strand starting at position 2277 of SEQ ID NO: 1561441
acagaaauguuagcaacuu

SEQ ID NO: 1672208 - RNA, 19 nt, Artificial Sequence
  Description of Artificial Sequence: Synthetic oligonucleotide
  Antisense strand to SEQ ID NO: 1672207
aaguugcuaacauuucugu

SEQ ID NO: 1672209 - RNA, 19 nt, Artificial Sequence
  Description of Artificial Sequence: Synthetic oligonucleotide
  Sense strand starting at position 2431 of SEQ ID NO: 1561441
acgcuuuggcgucuguuua

SEQ ID NO: 1672210 - RNA, 19 nt, Artificial Sequence
  Description of Artificial Sequence: Synthetic oligonucleotide
  Antisense strand to SEQ ID NO: 1672209
uaaacagacgccaaagcgu

SEQ ID NO: 1672211 - RNA, 19 nt, Artificial Sequence
  Description of Artificial Sequence: Synthetic oligonucleotide
  Sense strand starting at position 2457 of SEQ ID NO: 1561441
ucaauauguuugguccaga

SEQ ID NO: 1672212 - RNA, 19 nt, Artificial Sequence
  Description of Artificial Sequence: Synthetic oligonucleotide
  Antisense strand to SEQ ID NO: 1672211
ucuggaccaaacauauuga

SEQ ID NO: 1672213 - RNA, 19 nt, Artificial Sequence
  Description of Artificial Sequence: Synthetic oligonucleotide
  Sense strand starting at position 2458 of SEQ ID NO: 1561441
caauauguuugguccagaa

SEQ ID NO: 1672214 - RNA, 19 nt, Artificial Sequence
  Description of Artificial Sequence: Synthetic oligonucleotide
  Antisense strand to SEQ ID NO: 1672213
uucuggaccaaacauauug

SEQ ID NO: 1672215 - RNA, 19 nt, Artificial Sequence
  Description of Artificial Sequence: Synthetic oligonucleotide
  Sense strand starting at position 2512 of SEQ ID NO: 1561441
uggaauuuguaggaaggau

SEQ ID NO: 1672216 - RNA, 19 nt, Artificial Sequence
  Description of Artificial Sequence: Synthetic oligonucleotide
  Antisense strand to SEQ ID NO: 1672215
auccuuccuacaaauucca

SEQ ID NO: 1672217 - RNA, 19 nt, Artificial Sequence
  Description of Artificial Sequence: Synthetic oligonucleotide
  Sense strand starting at position 2550 of SEQ ID NO: 1561441
gguugaaagggugaagcua

SEQ ID NO: 1672218 - RNA, 19 nt, Artificial Sequence
  Description of Artificial Sequence: Synthetic oligonucleotide
  Antisense strand to SEQ ID NO: 1672217
uagcuucacccuuucaacc

SEQ ID NO: 1672219 - RNA, 19 nt, Artificial Sequence
  Description of Artificial Sequence: Synthetic oligonucleotide
  Sense strand starting at position 2743 of SEQ ID NO: 1561441
gugauugaggcauaaguca

SEQ ID NO: 1672220 - RNA, 19 nt, Artificial Sequence
  Description of Artificial Sequence: Synthetic oligonucleotide
  Antisense strand to SEQ ID NO: 1672219
ugacuuaugccucaaucac

SEQ ID NO: 1672221 - RNA, 19 nt, Artificial Sequence
  Description of Artificial Sequence: Synthetic oligonucleotide
  Sense strand starting at position 3058 of SEQ ID NO: 1561441
ucuguucuguaccuuggaa

SEQ ID NO: 1672222 - RNA, 19 nt, Artificial Sequence
  Description of Artificial Sequence: Synthetic oligonucleotide
  Antisense strand to SEQ ID NO: 1672221
uuccaagguacagaacaga

SEQ ID NO: 1672223 - RNA, 19 nt, Artificial Sequence
  Description of Artificial Sequence: Synthetic oligonucleotide
  Sense strand starting at position 3214 of SEQ ID NO: 1561441
aaaguuauucuaggguucu

SEQ ID NO: 1672224 - RNA, 19 nt, Artificial Sequence
  Description of Artificial Sequence: Synthetic oligonucleotide
  Antisense strand to SEQ ID NO: 1672223
agaacccuagaauaacuuu

SEQ ID NO: 1672225 - RNA, 19 nt, Artificial Sequence
  Description of Artificial Sequence: Synthetic oligonucleotide
  Sense strand starting at position 3224 of SEQ ID NO: 1561441
uaggguucucauggucaag

SEQ ID NO: 1672226 - RNA, 19 nt, Artificial Sequence
  Description of Artificial Sequence: Synthetic oligonucleotide
  Antisense strand to SEQ ID NO: 1672225
cuugaccaugagaacccua

SEQ ID NO: 1672227 - RNA, 19 nt, Artificial Sequence
  Description of Artificial Sequence: Synthetic oligonucleotide
  Sense strand starting at position 3294 of SEQ ID NO: 1561441
ucaagagcagcugauacau

SEQ ID NO: 1672228 - RNA, 19 nt, Artificial Sequence
  Description of Artificial Sequence: Synthetic oligonucleotide
  Antisense strand to SEQ ID NO: 1672227
auguaucagcugcucuuga

SEQ ID NO: 1672229 - RNA, 19 nt, Artificial Sequence
  Description of Artificial Sequence: Synthetic oligonucleotide
  Sense strand starting at position 3384 of SEQ ID NO: 1561441
guggaauuccaugauguua

SEQ ID NO: 1672230 - RNA, 19 nt, Artificial Sequence
  Description of Artificial Sequence: Synthetic oligonucleotide
  Antisense strand to SEQ ID NO: 1672229
uaacaucauggaauuccac

SEQ ID NO: 1672231 - RNA, 19 nt, Artificial Sequence
  Description of Artificial Sequence: Synthetic oligonucleotide
  Sense strand starting at position 3519 of SEQ ID NO: 1561441
uuauguagguuauuccaaa

SEQ ID NO: 1672232 - RNA, 19 nt, Artificial Sequence
  Description of Artificial Sequence: Synthetic oligonucleotide
  Antisense strand to SEQ ID NO: 1672231
uuuggaauaaccuacauaa

SEQ ID NO: 1672233 - RNA, 19 nt, Artificial Sequence
  Description of Artificial Sequence: Synthetic oligonucleotide
  Sense strand starting at position 3556 of SEQ ID NO: 1561441
ccuagagaaaucgaucugu

SEQ ID NO: 1672234 - RNA, 19 nt, Artificial Sequence
  Description of Artificial Sequence: Synthetic oligonucleotide
  Antisense strand to SEQ ID NO: 1672233
acagaucgauuucucuagg

SEQ ID NO: 1672235 - RNA, 19 nt, Artificial Sequence
  Description of Artificial Sequence: Synthetic oligonucleotide
  Sense strand starting at position 3561 of SEQ ID NO: 1561441
agaaaucgaucuguaaugu

SEQ ID NO: 1672236 - RNA, 19 nt, Artificial Sequence
  Description of Artificial Sequence: Synthetic oligonucleotide
  Antisense strand to SEQ ID NO: 1672235
acauuacagaucgauuucu

SEQ ID NO: 1672237 - RNA, 19 nt, Artificial Sequence
  Description of Artificial Sequence: Synthetic oligonucleotide
  Sense strand starting at position 3562 of SEQ ID NO: 1561441
gaaaucgaucuguaaugug

SEQ ID NO: 1672238 - RNA, 19 nt, Artificial Sequence
  Description of Artificial Sequence: Synthetic oligonucleotide
  Antisense strand to SEQ ID NO: 1672237
cacauuacagaucgauuuc

SEQ ID NO: 1672239 - RNA, 19 nt, Artificial Sequence
  Description of Artificial Sequence: Synthetic oligonucleotide
  Sense strand starting at position 3567 of SEQ ID NO: 1561441
cgaucuguaaugugagaaa

SEQ ID NO: 1672240 - RNA, 19 nt, Artificial Sequence
  Description of Artificial Sequence: Synthetic oligonucleotide
  Antisense strand to SEQ ID NO: 1672239
uuucucacauuacagaucg

SEQ ID NO: 1672241 - RNA, 19 nt, Artificial Sequence
  Description of Artificial Sequence: Synthetic oligonucleotide
  Sense strand starting at position 3589 of SEQ ID NO: 1561441
auaagaucucaauguuuga

SEQ ID NO: 1672242 - RNA, 19 nt, Artificial Sequence
  Description of Artificial Sequence: Synthetic oligonucleotide
  Antisense strand to SEQ ID NO: 1672241
ucaaacauugagaucuuau

SEQ ID NO: 1672243 - RNA, 19 nt, Artificial Sequence
  Description of Artificial Sequence: Synthetic oligonucleotide
  Sense strand starting at position 3593 of SEQ ID NO: 1561441
gaucucaauguuugaguga

SEQ ID NO: 1672244 - RNA, 19 nt, Artificial Sequence
  Description of Artificial Sequence: Synthetic oligonucleotide
  Antisense strand to SEQ ID NO: 1672243
ucacucaaacauugagauc

SEQ ID NO: 1672245 - RNA, 19 nt, Artificial Sequence
  Description of Artificial Sequence: Synthetic oligonucleotide
  Sense strand starting at position 3596 of SEQ ID NO: 1561441
cucaauguuugagugagag

SEQ ID NO: 1672246 - RNA, 19 nt, Artificial Sequence
  Description of Artificial Sequence: Synthetic oligonucleotide
  Antisense strand to SEQ ID NO: 1672245
cucucacucaaacauugag

SEQ ID NO: 1672247 - RNA, 19 nt, Artificial Sequence
  Description of Artificial Sequence: Synthetic oligonucleotide
  Sense strand starting at position 3768 of SEQ ID NO: 1561441
cugaaagacuugccacaga

SEQ ID NO: 1672248 - RNA, 19 nt, Artificial Sequence
  Description of Artificial Sequence: Synthetic oligonucleotide
  Antisense strand to SEQ ID NO: 1672247
ucuguggcaagucuuucag

SEQ ID NO: 1672249 - RNA, 19 nt, Artificial Sequence
  Description of Artificial Sequence: Synthetic oligonucleotide
  Sense strand starting at position 3797 of SEQ ID NO: 1561441
uagagaagcugugugauaa

SEQ ID NO: 1672250 - RNA, 19 nt, Artificial Sequence
  Description of Artificial Sequence: Synthetic oligonucleotide
  Antisense strand to SEQ ID NO: 1672249
uuaucacacagcuucucua

SEQ ID NO: 1672251 - RNA, 19 nt, Artificial Sequence
  Description of Artificial Sequence: Synthetic oligonucleotide
  Sense strand starting at position 3798 of SEQ ID NO: 1561441
agagaagcugugugauaau

SEQ ID NO: 1672252 - RNA, 19 nt, Artificial Sequence
  Description of Artificial Sequence: Synthetic oligonucleotide
  Antisense strand to SEQ ID NO: 1672251
auuaucacacagcuucucu

SEQ ID NO: 1672253 - RNA, 19 nt, Artificial Sequence
  Description of Artificial Sequence: Synthetic oligonucleotide
  Sense strand starting at position 3807 of SEQ ID NO: 1561441
gugugauaauguguauuua

SEQ ID NO: 1672254 - RNA, 19 nt, Artificial Sequence
  Description of Artificial Sequence: Synthetic oligonucleotide
  Antisense strand to SEQ ID NO: 1672253
uaaauacacauuaucacac

SEQ ID NO: 1672255 - RNA, 19 nt, Artificial Sequence
  Description of Artificial Sequence: Synthetic oligonucleotide
  Sense strand starting at position 3869 of SEQ ID NO: 1561441
agaucaaugauaggugcau

SEQ ID NO: 1672256 - RNA, 19 nt, Artificial Sequence
  Description of Artificial Sequence: Synthetic oligonucleotide
  Antisense strand to SEQ ID NO: 1672255
augcaccuaucauugaucu

SEQ ID NO: 1672257 - RNA, 19 nt, Artificial Sequence
  Description of Artificial Sequence: Synthetic oligonucleotide
  Sense strand starting at position 3915 of SEQ ID NO: 1561441
cugcuauguguauacagga

SEQ ID NO: 1672258 - RNA, 19 nt, Artificial Sequence
  Description of Artificial Sequence: Synthetic oligonucleotide
  Antisense strand to SEQ ID NO: 1672257
uccuguauacacauagcag

SEQ ID NO: 1672259 - RNA, 19 nt, Artificial Sequence
  Description of Artificial Sequence: Synthetic oligonucleotide
  Sense strand starting at position 3955 of SEQ ID NO: 1561441
ucuguauuugucuguuuga

SEQ ID NO: 1672260 - RNA, 19 nt, Artificial Sequence
  Description of Artificial Sequence: Synthetic oligonucleotide
  Antisense strand to SEQ ID NO: 1672259
ucaaacagacaaauacaga

SEQ ID NO: 1672261 - RNA, 19 nt, Artificial Sequence
  Description of Artificial Sequence: Synthetic oligonucleotide
  Sense strand starting at position 3956 of SEQ ID NO: 1561441
cuguauuugucuguuugau

SEQ ID NO: 1672262 - RNA, 19 nt, Artificial Sequence
  Description of Artificial Sequence: Synthetic oligonucleotide
  Antisense strand to SEQ ID NO: 1672261
aucaaacagacaaauacag

SEQ ID NO: 1672263 - RNA, 19 nt, Artificial Sequence
  Description of Artificial Sequence: Synthetic oligonucleotide
  Sense strand starting at position 3958 of SEQ ID NO: 1561441
guauuugucuguuugauau

SEQ ID NO: 1672264 - RNA, 19 nt, Artificial Sequence
  Description of Artificial Sequence: Synthetic oligonucleotide
  Antisense strand to SEQ ID NO: 1672263
auaucaaacagacaaauac

SEQ ID NO: 1672265 - RNA, 19 nt, Artificial Sequence
  Description of Artificial Sequence: Synthetic oligonucleotide
  Sense strand starting at position 60 of SEQ ID NO: 1561442
cuugaaagguauccucuga

SEQ ID NO: 1672266 - RNA, 19 nt, Artificial Sequence
  Description of Artificial Sequence: Synthetic oligonucleotide
  Antisense strand to SEQ ID NO: 1672265
ucagaggauaccuuucaag

SEQ ID NO: 1672267 - RNA, 19 nt, Artificial Sequence
  Description of Artificial Sequence: Synthetic oligonucleotide
  Sense strand starting at position 64 of SEQ ID NO: 1561442
aaagguauccucugaggau

SEQ ID NO: 1672268 - RNA, 19 nt, Artificial Sequence
  Description of Artificial Sequence: Synthetic oligonucleotide
  Antisense strand to SEQ ID NO: 1672267
auccucagaggauaccuuu

SEQ ID NO: 1672269 - RNA, 19 nt, Artificial Sequence
  Description of Artificial Sequence: Synthetic oligonucleotide
  Sense strand starting at position 193 of SEQ ID NO: 1561442
acuguaacacagugauaau

SEQ ID NO: 1672270 - RNA, 19 nt, Artificial Sequence
  Description of Artificial Sequence: Synthetic oligonucleotide
  Antisense strand to SEQ ID NO: 1672269
auuaucacuguguuacagu

SEQ ID NO: 1672271 - RNA, 19 nt, Artificial Sequence
  Description of Artificial Sequence: Synthetic oligonucleotide
  Sense strand starting at position 252 of SEQ ID NO: 1561442
uuugccuccugaucagaaa

SEQ ID NO: 1672272 - RNA, 19 nt, Artificial Sequence
  Description of Artificial Sequence: Synthetic oligonucleotide
  Antisense strand to SEQ ID NO: 1672271
uuucugaucaggaggcaaa

SEQ ID NO: 1672273 - RNA, 19 nt, Artificial Sequence
  Description of Artificial Sequence: Synthetic oligonucleotide
  Sense strand starting at position 329 of SEQ ID NO: 1561442
cacugauguggucaacacu

SEQ ID NO: 1672274 - RNA, 19 nt, Artificial Sequence
  Description of Artificial Sequence: Synthetic oligonucleotide
  Antisense strand to SEQ ID NO: 1672273
aguguugaccacaucagug

SEQ ID NO: 1672275 - RNA, 19 nt, Artificial Sequence
  Description of Artificial Sequence: Synthetic oligonucleotide
  Sense strand starting at position 350 of SEQ ID NO: 1561442
uguuaugcgguccaugacu

SEQ ID NO: 1672276 - RNA, 19 nt, Artificial Sequence
  Description of Artificial Sequence: Synthetic oligonucleotide
  Antisense strand to SEQ ID NO: 1672275
agucauggaccgcauaaca

SEQ ID NO: 1672277 - RNA, 19 nt, Artificial Sequence
  Description of Artificial Sequence: Synthetic oligonucleotide
  Sense strand starting at position 352 of SEQ ID NO: 1561442
uuaugcgguccaugacuua

SEQ ID NO: 1672278 - RNA, 19 nt, Artificial Sequence
  Description of Artificial Sequence: Synthetic oligonucleotide
  Antisense strand to SEQ ID NO: 1672277
uaagucauggaccgcauaa

SEQ ID NO: 1672279 - RNA, 19 nt, Artificial Sequence
  Description of Artificial Sequence: Synthetic oligonucleotide
  Sense strand starting at position 359 of SEQ ID NO: 1561442
guccaugacuuaucacaag

SEQ ID NO: 1672280 - RNA, 19 nt, Artificial Sequence
  Description of Artificial Sequence: Synthetic oligonucleotide
  Antisense strand to SEQ ID NO: 1672279
cuugugauaagucauggac

SEQ ID NO: 1672281 - RNA, 19 nt, Artificial Sequence
  Description of Artificial Sequence: Synthetic oligonucleotide
  Sense strand starting at position 456 of SEQ ID NO: 1561442
uuuauuagagcacagaguu

SEQ ID NO: 1672282 - RNA, 19 nt, Artificial Sequence
  Description of Artificial Sequence: Synthetic oligonucleotide
  Antisense strand to SEQ ID NO: 1672281
aacucugugcucuaauaaa

SEQ ID NO: 1672283 - RNA, 19 nt, Artificial Sequence
  Description of Artificial Sequence: Synthetic oligonucleotide
  Sense strand starting at position 521 of SEQ ID NO: 1561442
uuguuaaaucuauacaguc

SEQ ID NO: 1672284 - RNA, 19 nt, Artificial Sequence
  Description of Artificial Sequence: Synthetic oligonucleotide
  Antisense strand to SEQ ID NO: 1672283
gacuguauagauuuaacaa

SEQ ID NO: 1672285 - RNA, 19 nt, Artificial Sequence
  Description of Artificial Sequence: Synthetic oligonucleotide
  Sense strand starting at position 647 of SEQ ID NO: 1561442
ucugaauggugacucuaca

SEQ ID NO: 1672286 - RNA, 19 nt, Artificial Sequence
  Description of Artificial Sequence: Synthetic oligonucleotide
  Antisense strand to SEQ ID NO: 1672285
uguagagucaccauucaga

SEQ ID NO: 1672287 - RNA, 19 nt, Artificial Sequence
  Description of Artificial Sequence: Synthetic oligonucleotide
  Sense strand starting at position 697 of SEQ ID NO: 1561442
guguguauuccuuacacau

SEQ ID NO: 1672288 - RNA, 19 nt, Artificial Sequence
  Description of Artificial Sequence: Synthetic oligonucleotide
  Antisense strand to SEQ ID NO: 1672287
auguguaaggaauacacac

SEQ ID NO: 1672289 - RNA, 19 nt, Artificial Sequence
  Description of Artificial Sequence: Synthetic oligonucleotide
  Sense strand starting at position 710 of SEQ ID NO: 1561442
acacauucccuuuggaagu

SEQ ID NO: 1672290 - RNA, 19 nt, Artificial Sequence
  Description of Artificial Sequence: Synthetic oligonucleotide
  Antisense strand to SEQ ID NO: 1672289
acuuccaaagggaaugugu

SEQ ID NO: 1672291 - RNA, 19 nt, Artificial Sequence
  Description of Artificial Sequence: Synthetic oligonucleotide
  Sense strand starting at position 898 of SEQ ID NO: 1561442
uuuacacaucacugaguca

SEQ ID NO: 1672292 - RNA, 19 nt, Artificial Sequence
  Description of Artificial Sequence: Synthetic oligonucleotide
  Antisense strand to SEQ ID NO: 1672291
ugacucagugauguguaaa

SEQ ID NO: 1672293 - RNA, 19 nt, Artificial Sequence
  Description of Artificial Sequence: Synthetic oligonucleotide
  Sense strand starting at position 1115 of SEQ ID NO: 1561442
ugcucauaggcacaaauga

SEQ ID NO: 1672294 - RNA, 19 nt, Artificial Sequence
  Description of Artificial Sequence: Synthetic oligonucleotide
  Antisense strand to SEQ ID NO: 1672293
ucauuugugccuaugagca

SEQ ID NO: 1672295 - RNA, 19 nt, Artificial Sequence
  Description of Artificial Sequence: Synthetic oligonucleotide
  Sense strand starting at position 1152 of SEQ ID NO: 1561442
uggcuuuaccuuuaagauc

SEQ ID NO: 1672296 - RNA, 19 nt, Artificial Sequence
  Description of Artificial Sequence: Synthetic oligonucleotide
  Antisense strand to SEQ ID NO: 1672295
gaucuuaaagguaaagcca

SEQ ID NO: 1672297 - RNA, 19 nt, Artificial Sequence
  Description of Artificial Sequence: Synthetic oligonucleotide
  Sense strand starting at position 1207 of SEQ ID NO: 1561442
ccgucugguccagaaucca

SEQ ID NO: 1672298 - RNA, 19 nt, Artificial Sequence
  Description of Artificial Sequence: Synthetic oligonucleotide
  Antisense strand to SEQ ID NO: 1672297
uggauucuggaccagacgg

SEQ ID NO: 1672299 - RNA, 19 nt, Artificial Sequence
  Description of Artificial Sequence: Synthetic oligonucleotide
  Sense strand starting at position 1284 of SEQ ID NO: 1561442
cccaucacuccguaacagu

SEQ ID NO: 1672300 - RNA, 19 nt, Artificial Sequence
  Description of Artificial Sequence: Synthetic oligonucleotide
  Antisense strand to SEQ ID NO: 1672299
acuguuacggagugauggg

SEQ ID NO: 1672301 - RNA, 19 nt, Artificial Sequence
  Description of Artificial Sequence: Synthetic oligonucleotide
  Sense strand starting at position 1355 of SEQ ID NO: 1561442
ucguguucuccuuuaguuc

SEQ ID NO: 1672302 - RNA, 19 nt, Artificial Sequence
  Description of Artificial Sequence: Synthetic oligonucleotide
  Antisense strand to SEQ ID NO: 1672301
gaacuaaaggagaacacga

SEQ ID NO: 1672303 - RNA, 19 nt, Artificial Sequence
  Description of Artificial Sequence: Synthetic oligonucleotide
  Sense strand starting at position 2028 of SEQ ID NO: 1561442
cccuuuccugggcaaugau

SEQ ID NO: 1672304 - RNA, 19 nt, Artificial Sequence
  Description of Artificial Sequence: Synthetic oligonucleotide
  Antisense strand to SEQ ID NO: 1672303
aucauugcccaggaaaggg

SEQ ID NO: 1672305 - RNA, 19 nt, Artificial Sequence
  Description of Artificial Sequence: Synthetic oligonucleotide
  Sense strand starting at position 2035 of SEQ ID NO: 1561442
cugggcaaugauuggucua

SEQ ID NO: 1672306 - RNA, 19 nt, Artificial Sequence
  Description of Artificial Sequence: Synthetic oligonucleotide
  Antisense strand to SEQ ID NO: 1672305
uagaccaaucauugcccag

SEQ ID NO: 1672307 - RNA, 19 nt, Artificial Sequence
  Description of Artificial Sequence: Synthetic oligonucleotide
  Sense strand starting at position 2036 of SEQ ID NO: 1561442
ugggcaaugauuggucuaa

SEQ ID NO: 1672308 - RNA, 19 nt, Artificial Sequence
  Description of Artificial Sequence: Synthetic oligonucleotide
  Antisense strand to SEQ ID NO: 1672307
uuagaccaaucauugccca

SEQ ID NO: 1672309 - RNA, 19 nt, Artificial Sequence
  Description of Artificial Sequence: Synthetic oligonucleotide
  Sense strand starting at position 2037 of SEQ ID NO: 1561442
gggcaaugauuggucuaag

SEQ ID NO: 1672310 - RNA, 19 nt, Artificial Sequence
  Description of Artificial Sequence: Synthetic oligonucleotide
  Antisense strand to SEQ ID NO: 1672309
cuuagaccaaucauugccc

SEQ ID NO: 1672311 - RNA, 19 nt, Artificial Sequence
  Description of Artificial Sequence: Synthetic oligonucleotide
  Sense strand starting at position 2038 of SEQ ID NO: 1561442
ggcaaugauuggucuaagg

SEQ ID NO: 1672312 - RNA, 19 nt, Artificial Sequence
  Description of Artificial Sequence: Synthetic oligonucleotide
  Antisense strand to SEQ ID NO: 1672311
ccuuagaccaaucauugcc

SEQ ID NO: 1672313 - RNA, 19 nt, Artificial Sequence
  Description of Artificial Sequence: Synthetic oligonucleotide
  Sense strand starting at position 2075 of SEQ ID NO: 1561442
acaguauucuggguggugu

SEQ ID NO: 1672314 - RNA, 19 nt, Artificial Sequence
  Description of Artificial Sequence: Synthetic oligonucleotide
  Antisense strand to SEQ ID NO: 1672313
acaccacccagaauacugu

SEQ ID NO: 1672315 - RNA, 19 nt, Artificial Sequence
  Description of Artificial Sequence: Synthetic oligonucleotide
  Sense strand starting at position 2076 of SEQ ID NO: 1561442
caguauucuggguggugua

SEQ ID NO: 1672316 - RNA, 19 nt, Artificial Sequence
  Description of Artificial Sequence: Synthetic oligonucleotide
  Antisense strand to SEQ ID NO: 1672315
uacaccacccagaauacug

SEQ ID NO: 1672317 - RNA, 19 nt, Artificial Sequence
  Description of Artificial Sequence: Synthetic oligonucleotide
  Sense strand starting at position 2178 of SEQ ID NO: 1561442
gucagcaaagccuauuaca

SEQ ID NO: 1672318 - RNA, 19 nt, Artificial Sequence
  Description of Artificial Sequence: Synthetic oligonucleotide
  Antisense strand to SEQ ID NO: 1672317
uguaauaggcuuugcugac

SEQ ID NO: 1672319 - RNA, 19 nt, Artificial Sequence
  Description of Artificial Sequence: Synthetic oligonucleotide
  Sense strand starting at position 2287 of SEQ ID NO: 1561442
ugagaauugacgcgacccu

SEQ ID NO: 1672320 - RNA, 19 nt, Artificial Sequence
  Description of Artificial Sequence: Synthetic oligonucleotide
  Antisense strand to SEQ ID NO: 1672319
agggucgcgucaauucuca

SEQ ID NO: 1672321 - RNA, 19 nt, Artificial Sequence
  Description of Artificial Sequence: Synthetic oligonucleotide
  Sense strand starting at position 2474 of SEQ ID NO: 1561442
gcaauaacaucagcauaga

SEQ ID NO: 1672322 - RNA, 19 nt, Artificial Sequence
  Description of Artificial Sequence: Synthetic oligonucleotide
  Antisense strand to SEQ ID NO: 1672321
ucuaugcugauguuauugc

SEQ ID NO: 1672323 - RNA, 19 nt, Artificial Sequence
  Description of Artificial Sequence: Synthetic oligonucleotide
  Sense strand starting at position 2654 of SEQ ID NO: 1561442
ccucaaguguuagugacuu

SEQ ID NO: 1672324 - RNA, 19 nt, Artificial Sequence
  Description of Artificial Sequence: Synthetic oligonucleotide
  Antisense strand to SEQ ID NO: 1672323
aagucacuaacacuugagg

SEQ ID NO: 1672325 - RNA, 19 nt, Artificial Sequence
  Description of Artificial Sequence: Synthetic oligonucleotide
  Sense strand starting at position 2658 of SEQ ID NO: 1561442
aaguguuagugacuuaaau

SEQ ID NO: 1672326 - RNA, 19 nt, Artificial Sequence
  Description of Artificial Sequence: Synthetic oligonucleotide
  Antisense strand to SEQ ID NO: 1672325
auuuaagucacuaacacuu

SEQ ID NO: 1672327 - RNA, 19 nt, Artificial Sequence
  Description of Artificial Sequence: Synthetic oligonucleotide
  Sense strand starting at position 2660 of SEQ ID NO: 1561442
guguuagugacuuaaauua

SEQ ID NO: 1672328 - RNA, 19 nt, Artificial Sequence
  Description of Artificial Sequence: Synthetic oligonucleotide
  Antisense strand to SEQ ID NO: 1672327
uaauuuaagucacuaacac

SEQ ID NO: 1672329 - RNA, 19 nt, Artificial Sequence
  Description of Artificial Sequence: Synthetic oligonucleotide
  Sense strand starting at position 2689 of SEQ ID NO: 1561442
cuauuaucauaaguggaac

SEQ ID NO: 1672330 - RNA, 19 nt, Artificial Sequence
  Description of Artificial Sequence: Synthetic oligonucleotide
  Antisense strand to SEQ ID NO: 1672329
guuccacuuaugauaauag

SEQ ID NO: 1672331 - RNA, 19 nt, Artificial Sequence
  Description of Artificial Sequence: Synthetic oligonucleotide
  Sense strand starting at position 3160 of SEQ ID NO: 1561442
ccauuuagauuggagucau

SEQ ID NO: 1672332 - RNA, 19 nt, Artificial Sequence
  Description of Artificial Sequence: Synthetic oligonucleotide
  Antisense strand to SEQ ID NO: 1672331
augacuccaaucuaaaugg

SEQ ID NO: 1672333 - RNA, 19 nt, Artificial Sequence
  Description of Artificial Sequence: Synthetic oligonucleotide
  Sense strand starting at position 3216 of SEQ ID NO: 1561442
gaauguaaucuuuggcuau

SEQ ID NO: 1672334 - RNA, 19 nt, Artificial Sequence
  Description of Artificial Sequence: Synthetic oligonucleotide
  Antisense strand to SEQ ID NO: 1672333
auagccaaagauuacauuc

SEQ ID NO: 1672335 - RNA, 19 nt, Artificial Sequence
  Description of Artificial Sequence: Synthetic oligonucleotide
  Sense strand starting at position 3218 of SEQ ID NO: 1561442
auguaaucuuuggcuauag

SEQ ID NO: 1672336 - RNA, 19 nt, Artificial Sequence
  Description of Artificial Sequence: Synthetic oligonucleotide
  Antisense strand to SEQ ID NO: 1672335
cuauagccaaagauuacau

SEQ ID NO: 1672337 - RNA, 19 nt, Artificial Sequence
  Description of Artificial Sequence: Synthetic oligonucleotide
  Sense strand starting at position 3219 of SEQ ID NO: 1561442
uguaaucuuuggcuauagu

SEQ ID NO: 1672338 - RNA, 19 nt, Artificial Sequence
  Description of Artificial Sequence: Synthetic oligonucleotide
  Antisense strand to SEQ ID NO: 1672337
acuauagccaaagauuaca

SEQ ID NO: 1672339 - RNA, 19 nt, Artificial Sequence
  Description of Artificial Sequence: Synthetic oligonucleotide
  Sense strand starting at position 3272 of SEQ ID NO: 1561442
cucugagacuaauucugga

SEQ ID NO: 1672340 - RNA, 19 nt, Artificial Sequence
  Description of Artificial Sequence: Synthetic oligonucleotide
  Antisense strand to SEQ ID NO: 1672339
uccagaauuagucucagag

SEQ ID NO: 1672341 - RNA, 19 nt, Artificial Sequence
  Description of Artificial Sequence: Synthetic oligonucleotide
  Sense strand starting at position 3754 of SEQ ID NO: 1561442
aucguuugucuccacuauu

SEQ ID NO: 1672342 - RNA, 19 nt, Artificial Sequence
  Description of Artificial Sequence: Synthetic oligonucleotide
  Antisense strand to SEQ ID NO: 1672341
aauaguggagacaaacgau

SEQ ID NO: 1672343 - RNA, 19 nt, Artificial Sequence
  Description of Artificial Sequence: Synthetic oligonucleotide
  Sense strand starting at position 3757 of SEQ ID NO: 1561442
guuugucuccacuauuauu

SEQ ID NO: 1672344 - RNA, 19 nt, Artificial Sequence
  Description of Artificial Sequence: Synthetic oligonucleotide
  Antisense strand to SEQ ID NO: 1672343
aauaauaguggagacaaac

SEQ ID NO: 1672345 - RNA, 19 nt, Artificial Sequence
  Description of Artificial Sequence: Synthetic oligonucleotide
  Sense strand starting at position 235 of SEQ ID NO: 1561443
gcauuugagcaccgcuaaa

SEQ ID NO: 1672346 - RNA, 19 nt, Artificial Sequence
  Description of Artificial Sequence: Synthetic oligonucleotide
  Antisense strand to SEQ ID NO: 1672345
uuuagcggugcucaaaugc

SEQ ID NO: 1672347 - RNA, 19 nt, Artificial Sequence
  Description of Artificial Sequence: Synthetic oligonucleotide
  Sense strand starting at position 356 of SEQ ID NO: 1561443
accugagaacaaugucuca

SEQ ID NO: 1672348 - RNA, 19 nt, Artificial Sequence
  Description of Artificial Sequence: Synthetic oligonucleotide
  Antisense strand to SEQ ID NO: 1672347
ugagacauuguucucaggu

SEQ ID NO: 1672349 - RNA, 19 nt, Artificial Sequence
  Description of Artificial Sequence: Synthetic oligonucleotide
  Sense strand starting at position 670 of SEQ ID NO: 1561443
cucacauuccaggguugga

SEQ ID NO: 1672350 - RNA, 19 nt, Artificial Sequence
  Description of Artificial Sequence: Synthetic oligonucleotide
  Antisense strand to SEQ ID NO: 1672349
uccaacccuggaaugugag

SEQ ID NO: 1672351 - RNA, 19 nt, Artificial Sequence
  Description of Artificial Sequence: Synthetic oligonucleotide
  Sense strand starting at position 718 of SEQ ID NO: 1561443
ugaguaaggcaaugucaga

SEQ ID NO: 1672352 - RNA, 19 nt, Artificial Sequence
  Description of Artificial Sequence: Synthetic oligonucleotide
  Antisense strand to SEQ ID NO: 1672351
ucugacauugccuuacuca

SEQ ID NO: 1672353 - RNA, 19 nt, Artificial Sequence
  Description of Artificial Sequence: Synthetic oligonucleotide
  Sense strand starting at position 728 of SEQ ID NO: 1561443
aaugucagauggccuuaaa

SEQ ID NO: 1672354 - RNA, 19 nt, Artificial Sequence
  Description of Artificial Sequence: Synthetic oligonucleotide
  Antisense strand to SEQ ID NO: 1672353
uuuaaggccaucugacauu

SEQ ID NO: 1672355 - RNA, 19 nt, Artificial Sequence
  Description of Artificial Sequence: Synthetic oligonucleotide
  Sense strand starting at position 731 of SEQ ID NO: 1561443
gucagauggccuuaaagau

SEQ ID NO: 1672356 - RNA, 19 nt, Artificial Sequence
  Description of Artificial Sequence: Synthetic oligonucleotide
  Antisense strand to SEQ ID NO: 1672355
aucuuuaaggccaucugac

SEQ ID NO: 1672357 - RNA, 19 nt, Artificial Sequence
  Description of Artificial Sequence: Synthetic oligonucleotide
  Sense strand starting at position 782 of SEQ ID NO: 1561443
aagagacucuggucagcuu

SEQ ID NO: 1672358 - RNA, 19 nt, Artificial Sequence
  Description of Artificial Sequence: Synthetic oligonucleotide
  Antisense strand to SEQ ID NO: 1672357
aagcugaccagagucucuu

SEQ ID NO: 1672359 - RNA, 19 nt, Artificial Sequence
  Description of Artificial Sequence: Synthetic oligonucleotide
  Sense strand starting at position 785 of SEQ ID NO: 1561443
agacucuggucagcuuuaa

SEQ ID NO: 1672360 - RNA, 19 nt, Artificial Sequence
  Description of Artificial Sequence: Synthetic oligonucleotide
  Antisense strand to SEQ ID NO: 1672359
uuaaagcugaccagagucu

SEQ ID NO: 1672361 - RNA, 19 nt, Artificial Sequence
  Description of Artificial Sequence: Synthetic oligonucleotide
  Sense strand starting at position 908 of SEQ ID NO: 1561443
cugacaguaaucugggcua
